United States Patent Application Publication US 2018/0305689 A1 - sequence listing, part 69

SEQ ID NO: 946976 - RNA, 19 nt, Artificial Sequence
  Description of Artificial Sequence: Synthetic oligonucleotide
  Sense strand starting at position 1219 of SEQ ID NO: 913698
gauugauacucggugguca

SEQ ID NO: 946977 - RNA, 19 nt, Artificial Sequence
  Description of Artificial Sequence: Synthetic oligonucleotide
  Antisense strand to SEQ ID NO: 946976
ugaccaccgaguaucaauc

SEQ ID NO: 946978 - RNA, 19 nt, Artificial Sequence
  Description of Artificial Sequence: Synthetic oligonucleotide
  Sense strand starting at position 3554 of SEQ ID NO: 913698
augccaugucuuuacgauu

SEQ ID NO: 946979 - RNA, 19 nt, Artificial Sequence
  Description of Artificial Sequence: Synthetic oligonucleotide
  Antisense strand to SEQ ID NO: 946978
aaucguaaagacauggcau

SEQ ID NO: 946980 - RNA, 19 nt, Artificial Sequence
  Description of Artificial Sequence: Synthetic oligonucleotide
  Sense strand starting at position 1704 of SEQ ID NO: 913698
uccggauccucccugaagu

SEQ ID NO: 946981 - RNA, 19 nt, Artificial Sequence
  Description of Artificial Sequence: Synthetic oligonucleotide
  Antisense strand to SEQ ID NO: 946980
acuucagggaggauccgga

SEQ ID NO: 946982 - RNA, 19 nt, Artificial Sequence
  Description of Artificial Sequence: Synthetic oligonucleotide
  Sense strand starting at position 1368 of SEQ ID NO: 913698
ccucauuucuuaggaggau

SEQ ID NO: 946983 - RNA, 19 nt, Artificial Sequence
  Description of Artificial Sequence: Synthetic oligonucleotide
  Antisense strand to SEQ ID NO: 946982
auccuccuaagaaaugagg

SEQ ID NO: 946984 - RNA, 19 nt, Artificial Sequence
  Description of Artificial Sequence: Synthetic oligonucleotide
  Sense strand starting at position 1522 of SEQ ID NO: 913698
uuaggaagccuucguggau

SEQ ID NO: 946985 - RNA, 19 nt, Artificial Sequence
  Description of Artificial Sequence: Synthetic oligonucleotide
  Antisense strand to SEQ ID NO: 946984
auccacgaaggcuuccuaa

SEQ ID NO: 946986 - RNA, 19 nt, Artificial Sequence
  Description of Artificial Sequence: Synthetic oligonucleotide
  Sense strand starting at position 3189 of SEQ ID NO: 913698
auaaauugcuugucaugug

SEQ ID NO: 946987 - RNA, 19 nt, Artificial Sequence
  Description of Artificial Sequence: Synthetic oligonucleotide
  Antisense strand to SEQ ID NO: 946986
cacaugacaagcaauuuau

SEQ ID NO: 946988 - RNA, 19 nt, Artificial Sequence
  Description of Artificial Sequence: Synthetic oligonucleotide
  Sense strand starting at position 2963 of SEQ ID NO: 913698
aguuccugcucuguggaaa

SEQ ID NO: 946989 - RNA, 19 nt, Artificial Sequence
  Description of Artificial Sequence: Synthetic oligonucleotide
  Antisense strand to SEQ ID NO: 946988
uuuccacagagcaggaacu

SEQ ID NO: 946990 - RNA, 19 nt, Artificial Sequence
  Description of Artificial Sequence: Synthetic oligonucleotide
  Sense strand starting at position 1794 of SEQ ID NO: 913698
ucgagagacuaggaaucaa

SEQ ID NO: 946991 - RNA, 19 nt, Artificial Sequence
  Description of Artificial Sequence: Synthetic oligonucleotide
  Antisense strand to SEQ ID NO: 946990
uugauuccuagucucucga

SEQ ID NO: 946992 - RNA, 19 nt, Artificial Sequence
  Description of Artificial Sequence: Synthetic oligonucleotide
  Sense strand starting at position 3040 of SEQ ID NO: 913698
ugguuaguugcauguaaga

SEQ ID NO: 946993 - RNA, 19 nt, Artificial Sequence
  Description of Artificial Sequence: Synthetic oligonucleotide
  Antisense strand to SEQ ID NO: 946992
ucuuacaugcaacuaacca

SEQ ID NO: 946994 - RNA, 19 nt, Artificial Sequence
  Description of Artificial Sequence: Synthetic oligonucleotide
  Sense strand starting at position 3553 of SEQ ID NO: 913698
gaugccaugucuuuacgau

SEQ ID NO: 946995 - RNA, 19 nt, Artificial Sequence
  Description of Artificial Sequence: Synthetic oligonucleotide
  Antisense strand to SEQ ID NO: 946994
aucguaaagacauggcauc

SEQ ID NO: 946996 - RNA, 19 nt, Artificial Sequence
  Description of Artificial Sequence: Synthetic oligonucleotide
  Sense strand starting at position 1126 of SEQ ID NO: 913698
gucucaaagcauuguguaa

SEQ ID NO: 946997 - RNA, 19 nt, Artificial Sequence
  Description of Artificial Sequence: Synthetic oligonucleotide
  Antisense strand to SEQ ID NO: 946996
uuacacaaugcuuugagac

SEQ ID NO: 946998 - RNA, 19 nt, Artificial Sequence
  Description of Artificial Sequence: Synthetic oligonucleotide
  Sense strand starting at position 3948 of SEQ ID NO: 913698
cugugagucucccuagguu

SEQ ID NO: 946999 - RNA, 19 nt, Artificial Sequence
  Description of Artificial Sequence: Synthetic oligonucleotide
  Antisense strand to SEQ ID NO: 946998
aaccuagggagacucacag

SEQ ID NO: 947000 - RNA, 19 nt, Artificial Sequence
  Description of Artificial Sequence: Synthetic oligonucleotide
  Sense strand starting at position 2964 of SEQ ID NO: 913698
guuccugcucuguggaaau

SEQ ID NO: 947001 - RNA, 19 nt, Artificial Sequence
  Description of Artificial Sequence: Synthetic oligonucleotide
  Antisense strand to SEQ ID NO: 947000
auuuccacagagcaggaac

SEQ ID NO: 947002 - RNA, 19 nt, Artificial Sequence
  Description of Artificial Sequence: Synthetic oligonucleotide
  Sense strand starting at position 2350 of SEQ ID NO: 913698
cgggaguguucguccagga

SEQ ID NO: 947003 - RNA, 19 nt, Artificial Sequence
  Description of Artificial Sequence: Synthetic oligonucleotide
  Antisense strand to SEQ ID NO: 947002
uccuggacgaacacucccg

SEQ ID NO: 947004 - RNA, 19 nt, Artificial Sequence
  Description of Artificial Sequence: Synthetic oligonucleotide
  Sense strand starting at position 831 of SEQ ID NO: 913698
uccaaaugauagugagaag

SEQ ID NO: 947005 - RNA, 19 nt, Artificial Sequence
  Description of Artificial Sequence: Synthetic oligonucleotide
  Antisense strand to SEQ ID NO: 947004
cuucucacuaucauuugga

SEQ ID NO: 947006 - RNA, 19 nt, Artificial Sequence
  Description of Artificial Sequence: Synthetic oligonucleotide
  Sense strand starting at position 2124 of SEQ ID NO: 913698
gcuguuauuccuugggucu

SEQ ID NO: 947007 - RNA, 19 nt, Artificial Sequence
  Description of Artificial Sequence: Synthetic oligonucleotide
  Antisense strand to SEQ ID NO: 947006
agacccaaggaauaacagc

SEQ ID NO: 947008 - RNA, 19 nt, Artificial Sequence
  Description of Artificial Sequence: Synthetic oligonucleotide
  Sense strand starting at position 617 of SEQ ID NO: 913698
aacguuaucuaugagaaac

SEQ ID NO: 947009 - RNA, 19 nt, Artificial Sequence
  Description of Artificial Sequence: Synthetic oligonucleotide
  Antisense strand to SEQ ID NO: 947008
guuucucauagauaacguu

SEQ ID NO: 947010 - RNA, 19 nt, Artificial Sequence
  Description of Artificial Sequence: Synthetic oligonucleotide
  Sense strand starting at position 3647 of SEQ ID NO: 913698
acccaauacugggauuguu

SEQ ID NO: 947011 - RNA, 19 nt, Artificial Sequence
  Description of Artificial Sequence: Synthetic oligonucleotide
  Antisense strand to SEQ ID NO: 947010
aacaaucccaguauugggu

SEQ ID NO: 947012 - RNA, 19 nt, Artificial Sequence
  Description of Artificial Sequence: Synthetic oligonucleotide
  Sense strand starting at position 772 of SEQ ID NO: 913698
ggucuuugcacguggcaaa

SEQ ID NO: 947013 - RNA, 19 nt, Artificial Sequence
  Description of Artificial Sequence: Synthetic oligonucleotide
  Antisense strand to SEQ ID NO: 947012
uuugccacgugcaaagacc

SEQ ID NO: 947014 - RNA, 19 nt, Artificial Sequence
  Description of Artificial Sequence: Synthetic oligonucleotide
  Sense strand starting at position 1078 of SEQ ID NO: 913699
gcagaauguccauacaaca

SEQ ID NO: 947015 - RNA, 19 nt, Artificial Sequence
  Description of Artificial Sequence: Synthetic oligonucleotide
  Antisense strand to SEQ ID NO: 947014
uguuguauggacauucugc

SEQ ID NO: 947016 - RNA, 19 nt, Artificial Sequence
  Description of Artificial Sequence: Synthetic oligonucleotide
  Sense strand starting at position 3222 of SEQ ID NO: 913699
guagaaagauacccaguga

SEQ ID NO: 947017 - RNA, 19 nt, Artificial Sequence
  Description of Artificial Sequence: Synthetic oligonucleotide
  Antisense strand to SEQ ID NO: 947016
ucacuggguaucuuucuac

SEQ ID NO: 947018 - RNA, 19 nt, Artificial Sequence
  Description of Artificial Sequence: Synthetic oligonucleotide
  Sense strand starting at position 840 of SEQ ID NO: 913699
aggucaugucuagauuaac

SEQ ID NO: 947019 - RNA, 19 nt, Artificial Sequence
  Description of Artificial Sequence: Synthetic oligonucleotide
  Antisense strand to SEQ ID NO: 947018
guuaaucuagacaugaccu

SEQ ID NO: 947020 - RNA, 19 nt, Artificial Sequence
  Description of Artificial Sequence: Synthetic oligonucleotide
  Sense strand starting at position 1588 of SEQ ID NO: 913699
cucaauguucccuagggac

SEQ ID NO: 947021 - RNA, 19 nt, Artificial Sequence
  Description of Artificial Sequence: Synthetic oligonucleotide
  Antisense strand to SEQ ID NO: 947020
gucccuagggaacauugag

SEQ ID NO: 947022 - RNA, 19 nt, Artificial Sequence
  Description of Artificial Sequence: Synthetic oligonucleotide
  Sense strand starting at position 2377 of SEQ ID NO: 913699
ggccauguuguguaauuuc

SEQ ID NO: 947023 - RNA, 19 nt, Artificial Sequence
  Description of Artificial Sequence: Synthetic oligonucleotide
  Antisense strand to SEQ ID NO: 947022
gaaauuacacaacauggcc

SEQ ID NO: 947024 - RNA, 19 nt, Artificial Sequence
  Description of Artificial Sequence: Synthetic oligonucleotide
  Sense strand starting at position 843 of SEQ ID NO: 913699
ucaugucuagauuaacagu

SEQ ID NO: 947025 - RNA, 19 nt, Artificial Sequence
  Description of Artificial Sequence: Synthetic oligonucleotide
  Antisense strand to SEQ ID NO: 947024
acuguuaaucuagacauga

SEQ ID NO: 947026 - RNA, 19 nt, Artificial Sequence
  Description of Artificial Sequence: Synthetic oligonucleotide
  Sense strand starting at position 195 of SEQ ID NO: 913699
uguuuauaugaacacaguu

SEQ ID NO: 947027 - RNA, 19 nt, Artificial Sequence
  Description of Artificial Sequence: Synthetic oligonucleotide
  Antisense strand to SEQ ID NO: 947026
aacuguguucauauaaaca

SEQ ID NO: 947028 - RNA, 19 nt, Artificial Sequence
  Description of Artificial Sequence: Synthetic oligonucleotide
  Sense strand starting at position 3421 of SEQ ID NO: 913699
caaagugucccagagcaaa

SEQ ID NO: 947029 - RNA, 19 nt, Artificial Sequence
  Description of Artificial Sequence: Synthetic oligonucleotide
  Antisense strand to SEQ ID NO: 947028
uuugcucugggacacuuug

SEQ ID NO: 947030 - RNA, 19 nt, Artificial Sequence
  Description of Artificial Sequence: Synthetic oligonucleotide
  Sense strand starting at position 212 of SEQ ID NO: 913699
uuaggcuucccugacuaga

SEQ ID NO: 947031 - RNA, 19 nt, Artificial Sequence
  Description of Artificial Sequence: Synthetic oligonucleotide
  Antisense strand to SEQ ID NO: 947030
ucuagucagggaagccuaa

SEQ ID NO: 947032 - RNA, 19 nt, Artificial Sequence
  Description of Artificial Sequence: Synthetic oligonucleotide
  Sense strand starting at position 3254 of SEQ ID NO: 913699
gaaauagugccugauccug

SEQ ID NO: 947033 - RNA, 19 nt, Artificial Sequence
  Description of Artificial Sequence: Synthetic oligonucleotide
  Antisense strand to SEQ ID NO: 947032
caggaucaggcacuauuuc

SEQ ID NO: 947034 - RNA, 19 nt, Artificial Sequence
  Description of Artificial Sequence: Synthetic oligonucleotide
  Sense strand starting at position 214 of SEQ ID NO: 913699
aggcuucccugacuagaaa

SEQ ID NO: 947035 - RNA, 19 nt, Artificial Sequence
  Description of Artificial Sequence: Synthetic oligonucleotide
  Antisense strand to SEQ ID NO: 947034
uuucuagucagggaagccu

SEQ ID NO: 947036 - RNA, 19 nt, Artificial Sequence
  Description of Artificial Sequence: Synthetic oligonucleotide
  Sense strand starting at position 2325 of SEQ ID NO: 913699
cuguaagacuauguaggau

SEQ ID NO: 947037 - RNA, 19 nt, Artificial Sequence
  Description of Artificial Sequence: Synthetic oligonucleotide
  Antisense strand to SEQ ID NO: 947036
auccuacauagucuuacag

SEQ ID NO: 947038 - RNA, 19 nt, Artificial Sequence
  Description of Artificial Sequence: Synthetic oligonucleotide
  Sense strand starting at position 150 of SEQ ID NO: 913699
agacuucuaccauguugag

SEQ ID NO: 947039 - RNA, 19 nt, Artificial Sequence
  Description of Artificial Sequence: Synthetic oligonucleotide
  Antisense strand to SEQ ID NO: 947038
cucaacaugguagaagucu

SEQ ID NO: 947040 - RNA, 19 nt, Artificial Sequence
  Description of Artificial Sequence: Synthetic oligonucleotide
  Sense strand starting at position 2823 of SEQ ID NO: 913699
aggcauuuauaagacaaug

SEQ ID NO: 947041 - RNA, 19 nt, Artificial Sequence
  Description of Artificial Sequence: Synthetic oligonucleotide
  Antisense strand to SEQ ID NO: 947040
cauugucuuauaaaugccu

SEQ ID NO: 947042 - RNA, 19 nt, Artificial Sequence
  Description of Artificial Sequence: Synthetic oligonucleotide
  Sense strand starting at position 3516 of SEQ ID NO: 913699
agaauuaucaggcaugcga

SEQ ID NO: 947043 - RNA, 19 nt, Artificial Sequence
  Description of Artificial Sequence: Synthetic oligonucleotide
  Antisense strand to SEQ ID NO: 947042
ucgcaugccugauaauucu

SEQ ID NO: 947044 - RNA, 19 nt, Artificial Sequence
  Description of Artificial Sequence: Synthetic oligonucleotide
  Sense strand starting at position 2861 of SEQ ID NO: 913699
gacagugguccuugaggag

SEQ ID NO: 947045 - RNA, 19 nt, Artificial Sequence
  Description of Artificial Sequence: Synthetic oligonucleotide
  Antisense strand to SEQ ID NO: 947044
cuccucaaggaccacuguc

SEQ ID NO: 947046 - RNA, 19 nt, Artificial Sequence
  Description of Artificial Sequence: Synthetic oligonucleotide
  Sense strand starting at position 187 of SEQ ID NO: 913699
cuuugauguguuuauauga

SEQ ID NO: 947047 - RNA, 19 nt, Artificial Sequence
  Description of Artificial Sequence: Synthetic oligonucleotide
  Antisense strand to SEQ ID NO: 947046
ucauauaaacacaucaaag

SEQ ID NO: 947048 - RNA, 19 nt, Artificial Sequence
  Description of Artificial Sequence: Synthetic oligonucleotide
  Sense strand starting at position 2324 of SEQ ID NO: 913699
ucuguaagacuauguagga

SEQ ID NO: 947049 - RNA, 19 nt, Artificial Sequence
  Description of Artificial Sequence: Synthetic oligonucleotide
  Antisense strand to SEQ ID NO: 947048
uccuacauagucuuacaga

SEQ ID NO: 947050 - RNA, 19 nt, Artificial Sequence
  Description of Artificial Sequence: Synthetic oligonucleotide
  Sense strand starting at position 2626 of SEQ ID NO: 913699
ugagguggauaugucaauu

SEQ ID NO: 947051 - RNA, 19 nt, Artificial Sequence
  Description of Artificial Sequence: Synthetic oligonucleotide
  Antisense strand to SEQ ID NO: 947050
aauugacauauccaccuca

SEQ ID NO: 947052 - RNA, 19 nt, Artificial Sequence
  Description of Artificial Sequence: Synthetic oligonucleotide
  Sense strand starting at position 3011 of SEQ ID NO: 913699
cugugaguuguauaucaga

SEQ ID NO: 947053 - RNA, 19 nt, Artificial Sequence
  Description of Artificial Sequence: Synthetic oligonucleotide
  Antisense strand to SEQ ID NO: 947052
ucugauauacaacucacag

SEQ ID NO: 947054 - RNA, 19 nt, Artificial Sequence
  Description of Artificial Sequence: Synthetic oligonucleotide
  Sense strand starting at position 607 of SEQ ID NO: 913699
gcuacaaagcucugaaaga

SEQ ID NO: 947055 - RNA, 19 nt, Artificial Sequence
  Description of Artificial Sequence: Synthetic oligonucleotide
  Antisense strand to SEQ ID NO: 947054
ucuuucagagcuuuguagc

SEQ ID NO: 947056 - RNA, 19 nt, Artificial Sequence
  Description of Artificial Sequence: Synthetic oligonucleotide
  Sense strand starting at position 2653 of SEQ ID NO: 913699
ucaguuauuccacauugua

SEQ ID NO: 947057 - RNA, 19 nt, Artificial Sequence
  Description of Artificial Sequence: Synthetic oligonucleotide
  Antisense strand to SEQ ID NO: 947056
uacaauguggaauaacuga

SEQ ID NO: 947058 - RNA, 19 nt, Artificial Sequence
  Description of Artificial Sequence: Synthetic oligonucleotide
  Sense strand starting at position 1587 of SEQ ID NO: 913699
ccucaauguucccuaggga

SEQ ID NO: 947059 - RNA, 19 nt, Artificial Sequence
  Description of Artificial Sequence: Synthetic oligonucleotide
  Antisense strand to SEQ ID NO: 947058
ucccuagggaacauugagg

SEQ ID NO: 947060 - RNA, 19 nt, Artificial Sequence
  Description of Artificial Sequence: Synthetic oligonucleotide
  Sense strand starting at position 117 of SEQ ID NO: 913699
uuugcuccacaaugggaua

SEQ ID NO: 947061 - RNA, 19 nt, Artificial Sequence
  Description of Artificial Sequence: Synthetic oligonucleotide
  Antisense strand to SEQ ID NO: 947060
uaucccauuguggagcaaa

SEQ ID NO: 947062 - RNA, 19 nt, Artificial Sequence
  Description of Artificial Sequence: Synthetic oligonucleotide
  Sense strand starting at position 2509 of SEQ ID NO: 913699
cccuucggacuauauguua

SEQ ID NO: 947063 - RNA, 19 nt, Artificial Sequence
  Description of Artificial Sequence: Synthetic oligonucleotide
  Antisense strand to SEQ ID NO: 947062
uaacauauaguccgaaggg

SEQ ID NO: 947064 - RNA, 19 nt, Artificial Sequence
  Description of Artificial Sequence: Synthetic oligonucleotide
  Sense strand starting at position 461 of SEQ ID NO: 913699
ugaauaguuccuggcagaa

SEQ ID NO: 947065 - RNA, 19 nt, Artificial Sequence
  Description of Artificial Sequence: Synthetic oligonucleotide
  Antisense strand to SEQ ID NO: 947064
uucugccaggaacuauuca

SEQ ID NO: 947066 - RNA, 19 nt, Artificial Sequence
  Description of Artificial Sequence: Synthetic oligonucleotide
  Sense strand starting at position 2376 of SEQ ID NO: 913699
uggccauguuguguaauuu

SEQ ID NO: 947067 - RNA, 19 nt, Artificial Sequence
  Description of Artificial Sequence: Synthetic oligonucleotide
  Antisense strand to SEQ ID NO: 947066
aaauuacacaacauggcca

SEQ ID NO: 947068 - RNA, 19 nt, Artificial Sequence
  Description of Artificial Sequence: Synthetic oligonucleotide
  Sense strand starting at position 1422 of SEQ ID NO: 913699
gcagaaugauagcucuuaa

SEQ ID NO: 947069 - RNA, 19 nt, Artificial Sequence
  Description of Artificial Sequence: Synthetic oligonucleotide
  Antisense strand to SEQ ID NO: 947068
uuaagagcuaucauucugc

SEQ ID NO: 947070 - RNA, 19 nt, Artificial Sequence
  Description of Artificial Sequence: Synthetic oligonucleotide
  Sense strand starting at position 1321 of SEQ ID NO: 913699
agcugugagguuuaaaucu

SEQ ID NO: 947071 - RNA, 19 nt, Artificial Sequence
  Description of Artificial Sequence: Synthetic oligonucleotide
  Antisense strand to SEQ ID NO: 947070
agauuuaaaccucacagcu

SEQ ID NO: 947072 - RNA, 19 nt, Artificial Sequence
  Description of Artificial Sequence: Synthetic oligonucleotide
  Sense strand starting at position 156 of SEQ ID NO: 913699
cuaccauguugagucacaa

SEQ ID NO: 947073 - RNA, 19 nt, Artificial Sequence
  Description of Artificial Sequence: Synthetic oligonucleotide
  Antisense strand to SEQ ID NO: 947072
uugugacucaacaugguag

SEQ ID NO: 947074 - RNA, 19 nt, Artificial Sequence
  Description of Artificial Sequence: Synthetic oligonucleotide
  Sense strand starting at position 1372 of SEQ ID NO: 913699
accauaaguugguuaacuu

SEQ ID NO: 947075 - RNA, 19 nt, Artificial Sequence
  Description of Artificial Sequence: Synthetic oligonucleotide
  Antisense strand to SEQ ID NO: 947074
aaguuaaccaacuuauggu

SEQ ID NO: 947076 - RNA, 19 nt, Artificial Sequence
  Description of Artificial Sequence: Synthetic oligonucleotide
  Sense strand starting at position 3190 of SEQ ID NO: 913699
guaggaaauuaauucugcu

SEQ ID NO: 947077 - RNA, 19 nt, Artificial Sequence
  Description of Artificial Sequence: Synthetic oligonucleotide
  Antisense strand to SEQ ID NO: 947076
agcagaauuaauuuccuac

SEQ ID NO: 947078 - RNA, 19 nt, Artificial Sequence
  Description of Artificial Sequence: Synthetic oligonucleotide
  Sense strand starting at position 3628 of SEQ ID NO: 913699
aguaauuaugacuguauuc

SEQ ID NO: 947079 - RNA, 19 nt, Artificial Sequence
  Description of Artificial Sequence: Synthetic oligonucleotide
  Antisense strand to SEQ ID NO: 947078
gaauacagucauaauuacu

SEQ ID NO: 947080 - RNA, 19 nt, Artificial Sequence
  Description of Artificial Sequence: Synthetic oligonucleotide
  Sense strand starting at position 3253 of SEQ ID NO: 913699
agaaauagugccugauccu

SEQ ID NO: 947081 - RNA, 19 nt, Artificial Sequence
  Description of Artificial Sequence: Synthetic oligonucleotide
  Antisense strand to SEQ ID NO: 947080
aggaucaggcacuauuucu

SEQ ID NO: 947082 - RNA, 19 nt, Artificial Sequence
  Description of Artificial Sequence: Synthetic oligonucleotide
  Sense strand starting at position 1018 of SEQ ID NO: 913699
ggaugaaaguucuucuguu

SEQ ID NO: 947083 - RNA, 19 nt, Artificial Sequence
  Description of Artificial Sequence: Synthetic oligonucleotide
  Antisense strand to SEQ ID NO: 947082
aacagaagaacuuucaucc

SEQ ID NO: 947084 - RNA, 19 nt, Artificial Sequence
  Description of Artificial Sequence: Synthetic oligonucleotide
  Sense strand starting at position 1212 of SEQ ID NO: 913699
gcucuaggucaaggaguaa

SEQ ID NO: 947085 - RNA, 19 nt, Artificial Sequence
  Description of Artificial Sequence: Synthetic oligonucleotide
  Antisense strand to SEQ ID NO: 947084
uuacuccuugaccuagagc

SEQ ID NO: 947086 - RNA, 19 nt, Artificial Sequence
  Description of Artificial Sequence: Synthetic oligonucleotide
  Sense strand starting at position 3518 of SEQ ID NO: 913699
aauuaucaggcaugcgaaa

SEQ ID NO: 947087 - RNA, 19 nt, Artificial Sequence
  Description of Artificial Sequence: Synthetic oligonucleotide
  Antisense strand to SEQ ID NO: 947086
uuucgcaugccugauaauu

SEQ ID NO: 947088 - RNA, 19 nt, Artificial Sequence
  Description of Artificial Sequence: Synthetic oligonucleotide
  Sense strand starting at position 3007 of SEQ ID NO: 913699
ggaacugugaguuguauau

SEQ ID NO: 947089 - RNA, 19 nt, Artificial Sequence
  Description of Artificial Sequence: Synthetic oligonucleotide
  Antisense strand to SEQ ID NO: 947088
auauacaacucacaguucc

SEQ ID NO: 947090 - RNA, 19 nt, Artificial Sequence
  Description of Artificial Sequence: Synthetic oligonucleotide
  Sense strand starting at position 849 of SEQ ID NO: 913699
cuagauuaacaguguuccu

SEQ ID NO: 947091 - RNA, 19 nt, Artificial Sequence
  Description of Artificial Sequence: Synthetic oligonucleotide
  Antisense strand to SEQ ID NO: 947090
aggaacacuguuaaucuag

SEQ ID NO: 947092 - RNA, 19 nt, Artificial Sequence
  Description of Artificial Sequence: Synthetic oligonucleotide
  Sense strand starting at position 184 of SEQ ID NO: 913699
ugacuuugauguguuuaua

SEQ ID NO: 947093 - RNA, 19 nt, Artificial Sequence
  Description of Artificial Sequence: Synthetic oligonucleotide
  Antisense strand to SEQ ID NO: 947092
uauaaacacaucaaaguca

SEQ ID NO: 947094 - RNA, 19 nt, Artificial Sequence
  Description of Artificial Sequence: Synthetic oligonucleotide
  Sense strand starting at position 821 of SEQ ID NO: 913700
gccuccauugauuaaauga

SEQ ID NO: 947095 - RNA, 19 nt, Artificial Sequence
  Description of Artificial Sequence: Synthetic oligonucleotide
  Antisense strand to SEQ ID NO: 947094
ucauuuaaucaauggaggc

SEQ ID NO: 947096 - RNA, 19 nt, Artificial Sequence
  Description of Artificial Sequence: Synthetic oligonucleotide
  Sense strand starting at position 1501 of SEQ ID NO: 913700
cgucuccuucuccauauuu

SEQ ID NO: 947097 - RNA, 19 nt, Artificial Sequence
  Description of Artificial Sequence: Synthetic oligonucleotide
  Antisense strand to SEQ ID NO: 947096
aaauauggagaaggagacg

SEQ ID NO: 947098 - RNA, 19 nt, Artificial Sequence
  Description of Artificial Sequence: Synthetic oligonucleotide
  Sense strand starting at position 3831 of SEQ ID NO: 913700
aagguuguccaagggaaag

SEQ ID NO: 947099 - RNA, 19 nt, Artificial Sequence
  Description of Artificial Sequence: Synthetic oligonucleotide
  Antisense strand to SEQ ID NO: 947098
cuuucccuuggacaaccuu

SEQ ID NO: 947100 - RNA, 19 nt, Artificial Sequence
  Description of Artificial Sequence: Synthetic oligonucleotide
  Sense strand starting at position 2222 of SEQ ID NO: 913700
ugcagagcguauuuaaaga

SEQ ID NO: 947101 - RNA, 19 nt, Artificial Sequence
  Description of Artificial Sequence: Synthetic oligonucleotide
  Antisense strand to SEQ ID NO: 947100
ucuuuaaauacgcucugca

SEQ ID NO: 947102 - RNA, 19 nt, Artificial Sequence
  Description of Artificial Sequence: Synthetic oligonucleotide
  Sense strand starting at position 2427 of SEQ ID NO: 913700
ccagauaugccagaaccga

SEQ ID NO: 947103 - RNA, 19 nt, Artificial Sequence
  Description of Artificial Sequence: Synthetic oligonucleotide
  Antisense strand to SEQ ID NO: 947102
ucgguucuggcauaucugg

SEQ ID NO: 947104 - RNA, 19 nt, Artificial Sequence
  Description of Artificial Sequence: Synthetic oligonucleotide
  Sense strand starting at position 1984 of SEQ ID NO: 913700
ccgaguuaucaacagauug

SEQ ID NO: 947105 - RNA, 19 nt, Artificial Sequence
  Description of Artificial Sequence: Synthetic oligonucleotide
  Antisense strand to SEQ ID NO: 947104
caaucuguugauaacucgg

SEQ ID NO: 947106 - RNA, 19 nt, Artificial Sequence
  Description of Artificial Sequence: Synthetic oligonucleotide
  Sense strand starting at position 401 of SEQ ID NO: 913700
gccugucagcugucccuua

SEQ ID NO: 947107 - RNA, 19 nt, Artificial Sequence
  Description of Artificial Sequence: Synthetic oligonucleotide
  Antisense strand to SEQ ID NO: 947106
uaagggacagcugacaggc

SEQ ID NO: 947108 - RNA, 19 nt, Artificial Sequence
  Description of Artificial Sequence: Synthetic oligonucleotide
  Sense strand starting at position 3035 of SEQ ID NO: 913700
gccugaaggauguacuauu

SEQ ID NO: 947109 - RNA, 19 nt, Artificial Sequence
  Description of Artificial Sequence: Synthetic oligonucleotide
  Antisense strand to SEQ ID NO: 947108
aauaguacauccuucaggc

SEQ ID NO: 947110 - RNA, 19 nt, Artificial Sequence
  Description of Artificial Sequence: Synthetic oligonucleotide
  Sense strand starting at position 3862 of SEQ ID NO: 913700
cugguauccggguaggaca

SEQ ID NO: 947111 - RNA, 19 nt, Artificial Sequence
  Description of Artificial Sequence: Synthetic oligonucleotide
  Antisense strand to SEQ ID NO: 947110
uguccuacccggauaccag

SEQ ID NO: 947112 - RNA, 19 nt, Artificial Sequence
  Description of Artificial Sequence: Synthetic oligonucleotide
  Sense strand starting at position 3042 of SEQ ID NO: 913700
ggauguacuauugggaggu

SEQ ID NO: 947113 - RNA, 19 nt, Artificial Sequence
  Description of Artificial Sequence: Synthetic oligonucleotide
  Antisense strand to SEQ ID NO: 947112
accucccaauaguacaucc

SEQ ID NO: 947114 - RNA, 19 nt, Artificial Sequence
  Description of Artificial Sequence: Synthetic oligonucleotide
  Sense strand starting at position 3368 of SEQ ID NO: 913700
ggugaugguccuggacaag

SEQ ID NO: 947115 - RNA, 19 nt, Artificial Sequence
  Description of Artificial Sequence: Synthetic oligonucleotide
  Antisense strand to SEQ ID NO: 947114
cuuguccaggaccaucacc

SEQ ID NO: 947116 - RNA, 19 nt, Artificial Sequence
  Description of Artificial Sequence: Synthetic oligonucleotide
  Sense strand starting at position 3033 of SEQ ID NO: 913700
gggccugaaggauguacua

SEQ ID NO: 947117 - RNA, 19 nt, Artificial Sequence
  Description of Artificial Sequence: Synthetic oligonucleotide
  Antisense strand to SEQ ID NO: 947116
uaguacauccuucaggccc

SEQ ID NO: 947118 - RNA, 19 nt, Artificial Sequence
  Description of Artificial Sequence: Synthetic oligonucleotide
  Sense strand starting at position 2333 of SEQ ID NO: 913700
aaucuccauccguggagaa

SEQ ID NO: 947119 - RNA, 19 nt, Artificial Sequence
  Description of Artificial Sequence: Synthetic oligonucleotide
  Antisense strand to SEQ ID NO: 947118
uucuccacggauggagauu

SEQ ID NO: 947120 - RNA, 19 nt, Artificial Sequence
  Description of Artificial Sequence: Synthetic oligonucleotide
  Sense strand starting at position 859 of SEQ ID NO: 913700
ugcaacucauuaguaugau

SEQ ID NO: 947121 - RNA, 19 nt, Artificial Sequence
  Description of Artificial Sequence: Synthetic oligonucleotide
  Antisense strand to SEQ ID NO: 947120
aucauacuaaugaguugca

SEQ ID NO: 947122 - RNA, 19 nt, Artificial Sequence
  Description of Artificial Sequence: Synthetic oligonucleotide
  Sense strand starting at position 137 of SEQ ID NO: 913700
aggugucugaaagguaagu

SEQ ID NO: 947123 - RNA, 19 nt, Artificial Sequence
  Description of Artificial Sequence: Synthetic oligonucleotide
  Antisense strand to SEQ ID NO: 947122
acuuaccuuucagacaccu

SEQ ID NO: 947124 - RNA, 19 nt, Artificial Sequence
  Description of Artificial Sequence: Synthetic oligonucleotide
  Sense strand starting at position 849 of SEQ ID NO: 913700
gccauaugccugcaacuca

SEQ ID NO: 947125 - RNA, 19 nt, Artificial Sequence
  Description of Artificial Sequence: Synthetic oligonucleotide
  Antisense strand to SEQ ID NO: 947124
ugaguugcaggcauauggc

SEQ ID NO: 947126 - RNA, 19 nt, Artificial Sequence
  Description of Artificial Sequence: Synthetic oligonucleotide
  Sense strand starting at position 225 of SEQ ID NO: 913700
ucucucuugcuuggacauu

SEQ ID NO: 947127 - RNA, 19 nt, Artificial Sequence
  Description of Artificial Sequence: Synthetic oligonucleotide
  Antisense strand to SEQ ID NO: 947126
aauguccaagcaagagaga

SEQ ID NO: 947128 - RNA, 19 nt, Artificial Sequence
  Description of Artificial Sequence: Synthetic oligonucleotide
  Sense strand starting at position 814 of SEQ ID NO: 913700
ggacgucgccuccauugau

SEQ ID NO: 947129 - RNA, 19 nt, Artificial Sequence
  Description of Artificial Sequence: Synthetic oligonucleotide
  Antisense strand to SEQ ID NO: 947128
aucaauggaggcgacgucc

SEQ ID NO: 947130 - RNA, 19 nt, Artificial Sequence
  Description of Artificial Sequence: Synthetic oligonucleotide
  Sense strand starting at position 856 of SEQ ID NO: 913700
gccugcaacucauuaguau

SEQ ID NO: 947131 - RNA, 19 nt, Artificial Sequence
  Description of Artificial Sequence: Synthetic oligonucleotide
  Antisense strand to SEQ ID NO: 947130
auacuaaugaguugcaggc

SEQ ID NO: 947132 - RNA, 19 nt, Artificial Sequence
  Description of Artificial Sequence: Synthetic oligonucleotide
  Sense strand starting at position 3860 of SEQ ID NO: 913700
cgcugguauccggguagga

SEQ ID NO: 947133 - RNA, 19 nt, Artificial Sequence
  Description of Artificial Sequence: Synthetic oligonucleotide
  Antisense strand to SEQ ID NO: 947132
uccuacccggauaccagcg

SEQ ID NO: 947134 - RNA, 19 nt, Artificial Sequence
  Description of Artificial Sequence: Synthetic oligonucleotide
  Sense strand starting at position 847 of SEQ ID NO: 913700
uugccauaugccugcaacu

SEQ ID NO: 947135 - RNA, 19 nt, Artificial Sequence
  Description of Artificial Sequence: Synthetic oligonucleotide
  Antisense strand to SEQ ID NO: 947134
aguugcaggcauauggcaa

SEQ ID NO: 947136 - RNA, 19 nt, Artificial Sequence
  Description of Artificial Sequence: Synthetic oligonucleotide
  Sense strand starting at position 3937 of SEQ ID NO: 913700
gguccacuggcuugcgaau

SEQ ID NO: 947137 - RNA, 19 nt, Artificial Sequence
  Description of Artificial Sequence: Synthetic oligonucleotide
  Antisense strand to SEQ ID NO: 947136
auucgcaagccaguggacc

SEQ ID NO: 947138 - RNA, 19 nt, Artificial Sequence
  Description of Artificial Sequence: Synthetic oligonucleotide
  Sense strand starting at position 817 of SEQ ID NO: 913700
cgucgccuccauugauuaa

SEQ ID NO: 947139 - RNA, 19 nt, Artificial Sequence
  Description of Artificial Sequence: Synthetic oligonucleotide
  Antisense strand to SEQ ID NO: 947138
uuaaucaauggaggcgacg

SEQ ID NO: 947140 - RNA, 19 nt, Artificial Sequence
  Description of Artificial Sequence: Synthetic oligonucleotide
  Sense strand starting at position 675 of SEQ ID NO: 913700
ucaacuuucuaaugggaag

SEQ ID NO: 947141 - RNA, 19 nt, Artificial Sequence
  Description of Artificial Sequence: Synthetic oligonucleotide
  Antisense strand to SEQ ID NO: 947140
cuucccauuagaaaguuga

SEQ ID NO: 947142 - RNA, 19 nt, Artificial Sequence
  Description of Artificial Sequence: Synthetic oligonucleotide
  Sense strand starting at position 1500 of SEQ ID NO: 913700
gcgucuccuucuccauauu

SEQ ID NO: 947143 - RNA, 19 nt, Artificial Sequence
  Description of Artificial Sequence: Synthetic oligonucleotide
  Antisense strand to SEQ ID NO: 947142
aauauggagaaggagacgc

SEQ ID NO: 947144 - RNA, 19 nt, Artificial Sequence
  Description of Artificial Sequence: Synthetic oligonucleotide
  Sense strand starting at position 2515 of SEQ ID NO: 913700
gccuguggcugugcagaaa

SEQ ID NO: 947145 - RNA, 19 nt, Artificial Sequence
  Description of Artificial Sequence: Synthetic oligonucleotide
  Antisense strand to SEQ ID NO: 947144
uuucugcacagccacaggc

SEQ ID NO: 947146 - RNA, 19 nt, Artificial Sequence
  Description of Artificial Sequence: Synthetic oligonucleotide
  Sense strand starting at position 860 of SEQ ID NO: 913700
gcaacucauuaguaugauc

SEQ ID NO: 947147 - RNA, 19 nt, Artificial Sequence
  Description of Artificial Sequence: Synthetic oligonucleotide
  Antisense strand to SEQ ID NO: 947146
gaucauacuaaugaguugc

SEQ ID NO: 947148 - RNA, 19 nt, Artificial Sequence
  Description of Artificial Sequence: Synthetic oligonucleotide
  Sense strand starting at position 2314 of SEQ ID NO: 913700
cuguguuauucccaaagac

SEQ ID NO: 947149 - RNA, 19 nt, Artificial Sequence
  Description of Artificial Sequence: Synthetic oligonucleotide
  Antisense strand to SEQ ID NO: 947148
gucuuugggaauaacacag

SEQ ID NO: 947150 - RNA, 19 nt, Artificial Sequence
  Description of Artificial Sequence: Synthetic oligonucleotide
  Sense strand starting at position 1290 of SEQ ID NO: 913700
gcucccaucugugaagaca

SEQ ID NO: 947151 - RNA, 19 nt, Artificial Sequence
  Description of Artificial Sequence: Synthetic oligonucleotide
  Antisense strand to SEQ ID NO: 947150
ugucuucacagaugggagc

SEQ ID NO: 947152 - RNA, 19 nt, Artificial Sequence
  Description of Artificial Sequence: Synthetic oligonucleotide
  Sense strand starting at position 202 of SEQ ID NO: 913700
gauacugaauguuggcaaa

SEQ ID NO: 947153 - RNA, 19 nt, Artificial Sequence
  Description of Artificial Sequence: Synthetic oligonucleotide
  Antisense strand to SEQ ID NO: 947152
uuugccaacauucaguauc

SEQ ID NO: 947154 - RNA, 19 nt, Artificial Sequence
  Description of Artificial Sequence: Synthetic oligonucleotide
  Sense strand starting at position 3367 of SEQ ID NO: 913700
gggugaugguccuggacaa

SEQ ID NO: 947155 - RNA, 19 nt, Artificial Sequence
  Description of Artificial Sequence: Synthetic oligonucleotide
  Antisense strand to SEQ ID NO: 947154
uuguccaggaccaucaccc

SEQ ID NO: 947156 - RNA, 19 nt, Artificial Sequence
  Description of Artificial Sequence: Synthetic oligonucleotide
  Sense strand starting at position 268 of SEQ ID NO: 913700
gcaagugacucagaccgau

SEQ ID NO: 947157 - RNA, 19 nt, Artificial Sequence
  Description of Artificial Sequence: Synthetic oligonucleotide
  Antisense strand to SEQ ID NO: 947156
aucggucugagucacuugc

SEQ ID NO: 947158 - RNA, 19 nt, Artificial Sequence
  Description of Artificial Sequence: Synthetic oligonucleotide
  Sense strand starting at position 2799 of SEQ ID NO: 913700
gcaagagucucaggaacug

SEQ ID NO: 947159 - RNA, 19 nt, Artificial Sequence
  Description of Artificial Sequence: Synthetic oligonucleotide
  Antisense strand to SEQ ID NO: 947158
caguuccugagacucuugc

SEQ ID NO: 947160 - RNA, 19 nt, Artificial Sequence
  Description of Artificial Sequence: Synthetic oligonucleotide
  Sense strand starting at position 3043 of SEQ ID NO: 913700
gauguacuauugggagguu

SEQ ID NO: 947161 - RNA, 19 nt, Artificial Sequence
  Description of Artificial Sequence: Synthetic oligonucleotide
  Antisense strand to SEQ ID NO: 947160
aaccucccaauaguacauc

SEQ ID NO: 947162 - RNA, 19 nt, Artificial Sequence
  Description of Artificial Sequence: Synthetic oligonucleotide
  Sense strand starting at position 237 of SEQ ID NO: 913701
ggaugaauguccuccaaga

SEQ ID NO: 947163 - RNA, 19 nt, Artificial Sequence
  Description of Artificial Sequence: Synthetic oligonucleotide
  Antisense strand to SEQ ID NO: 947162
ucuuggaggacauucaucc

SEQ ID NO: 947164 - RNA, 19 nt, Artificial Sequence
  Description of Artificial Sequence: Synthetic oligonucleotide
  Sense strand starting at position 2337 of SEQ ID NO: 913701
ucugcaguaauugaugaga

SEQ ID NO: 947165 - RNA, 19 nt, Artificial Sequence
  Description of Artificial Sequence: Synthetic oligonucleotide
  Antisense strand to SEQ ID NO: 947164
ucucaucaauuacugcaga

SEQ ID NO: 947166 - RNA, 19 nt, Artificial Sequence
  Description of Artificial Sequence: Synthetic oligonucleotide
  Sense strand starting at position 2292 of SEQ ID NO: 913701
gaugauuuaucagauccag

SEQ ID NO: 947167 - RNA, 19 nt, Artificial Sequence
  Description of Artificial Sequence: Synthetic oligonucleotide
  Antisense strand to SEQ ID NO: 947166
cuggaucugauaaaucauc

SEQ ID NO: 947168 - RNA, 19 nt, Artificial Sequence
  Description of Artificial Sequence: Synthetic oligonucleotide
  Sense strand starting at position 122 of SEQ ID NO: 913701
uguaucugccuugaaauga

SEQ ID NO: 947169 - RNA, 19 nt, Artificial Sequence
  Description of Artificial Sequence: Synthetic oligonucleotide
  Antisense strand to SEQ ID NO: 947168
ucauuucaaggcagauaca

SEQ ID NO: 947170 - RNA, 19 nt, Artificial Sequence
  Description of Artificial Sequence: Synthetic oligonucleotide
  Sense strand starting at position 33 of SEQ ID NO: 913701
gugucugcguggaucugaa

SEQ ID NO: 947171 - RNA, 19 nt, Artificial Sequence
  Description of Artificial Sequence: Synthetic oligonucleotide
  Antisense strand to SEQ ID NO: 947170
uucagauccacgcagacac

SEQ ID NO: 947172 - RNA, 19 nt, Artificial Sequence
  Description of Artificial Sequence: Synthetic oligonucleotide
  Sense strand starting at position 1320 of SEQ ID NO: 913701
gugagaagguuugccaaga

SEQ ID NO: 947173 - RNA, 19 nt, Artificial Sequence
  Description of Artificial Sequence: Synthetic oligonucleotide
  Antisense strand to SEQ ID NO: 947172
ucuuggcaaaccuucucac

SEQ ID NO: 947174 - RNA, 19 nt, Artificial Sequence
  Description of Artificial Sequence: Synthetic oligonucleotide
  Sense strand starting at position 2332 of SEQ ID NO: 913701
gaggcucugcaguaauuga

SEQ ID NO: 947175 - RNA, 19 nt, Artificial Sequence
  Description of Artificial Sequence: Synthetic oligonucleotide
  Antisense strand to SEQ ID NO: 947174
ucaauuacugcagagccuc

SEQ ID NO: 947176 - RNA, 19 nt, Artificial Sequence
  Description of Artificial Sequence: Synthetic oligonucleotide
  Sense strand starting at position 2117 of SEQ ID NO: 913701
uccucauugcuauggaaac

SEQ ID NO: 947177 - RNA, 19 nt, Artificial Sequence
  Description of Artificial Sequence: Synthetic oligonucleotide
  Antisense strand to SEQ ID NO: 947176
guuuccauagcaaugagga

SEQ ID NO: 947178 - RNA, 19 nt, Artificial Sequence
  Description of Artificial Sequence: Synthetic oligonucleotide
  Sense strand starting at position 3198 of SEQ ID NO: 913701
gcguuagaucaaugagagg

SEQ ID NO: 947179 - RNA, 19 nt, Artificial Sequence
  Description of Artificial Sequence: Synthetic oligonucleotide
  Antisense strand to SEQ ID NO: 947178
ccucucauugaucuaacgc

SEQ ID NO: 947180 - RNA, 19 nt, Artificial Sequence
  Description of Artificial Sequence: Synthetic oligonucleotide
  Sense strand starting at position 235 of SEQ ID NO: 913701
ccggaugaauguccuccaa

SEQ ID NO: 947181 - RNA, 19 nt, Artificial Sequence
  Description of Artificial Sequence: Synthetic oligonucleotide
  Antisense strand to SEQ ID NO: 947180
uuggaggacauucauccgg

SEQ ID NO: 947182 - RNA, 19 nt, Artificial Sequence
  Description of Artificial Sequence: Synthetic oligonucleotide
  Sense strand starting at position 2255 of SEQ ID NO: 913701
agagauucgccgcauaaag

SEQ ID NO: 947183 - RNA, 19 nt, Artificial Sequence
  Description of Artificial Sequence: Synthetic oligonucleotide
  Antisense strand to SEQ ID NO: 947182
cuuuaugcggcgaaucucu

SEQ ID NO: 947184 - RNA, 19 nt, Artificial Sequence
  Description of Artificial Sequence: Synthetic oligonucleotide
  Sense strand starting at position 865 of SEQ ID NO: 913701
ccuugaaaugagugccuga

SEQ ID NO: 947185 - RNA, 19 nt, Artificial Sequence
  Description of Artificial Sequence: Synthetic oligonucleotide
  Antisense strand to SEQ ID NO: 947184
ucaggcacucauuucaagg

SEQ ID NO: 947186 - RNA, 19 nt, Artificial Sequence
  Description of Artificial Sequence: Synthetic oligonucleotide
  Sense strand starting at position 678 of SEQ ID NO: 913701
ggcccaugguucccacaaa

SEQ ID NO: 947187 - RNA, 19 nt, Artificial Sequence
  Description of Artificial Sequence: Synthetic oligonucleotide
  Antisense strand to SEQ ID NO: 947186
uuugugggaaccaugggcc

SEQ ID NO: 947188 - RNA, 19 nt, Artificial Sequence
  Description of Artificial Sequence: Synthetic oligonucleotide
  Sense strand starting at position 91 of SEQ ID NO: 913701
ugcuguuugcuggaacaau

SEQ ID NO: 947189 - RNA, 19 nt, Artificial Sequence
  Description of Artificial Sequence: Synthetic oligonucleotide
  Antisense strand to SEQ ID NO: 947188
auuguuccagcaaacagca

SEQ ID NO: 947190 - RNA, 19 nt, Artificial Sequence
  Description of Artificial Sequence: Synthetic oligonucleotide
  Sense strand starting at position 2328 of SEQ ID NO: 913701
ugaggaggcucugcaguaa

SEQ ID NO: 947191 - RNA, 19 nt, Artificial Sequence
  Description of Artificial Sequence: Synthetic oligonucleotide
  Antisense strand to SEQ ID NO: 947190
uuacugcagagccuccuca

SEQ ID NO: 947192 - RNA, 19 nt, Artificial Sequence
  Description of Artificial Sequence: Synthetic oligonucleotide
  Sense strand starting at position 2164 of SEQ ID NO: 913701
cacugcuaccuuuggagua

SEQ ID NO: 947193 - RNA, 19 nt, Artificial Sequence
  Description of Artificial Sequence: Synthetic oligonucleotide
  Antisense strand to SEQ ID NO: 947192
uacuccaaagguagcagug

SEQ ID NO: 947194 - RNA, 19 nt, Artificial Sequence
  Description of Artificial Sequence: Synthetic oligonucleotide
  Sense strand starting at position 121 of SEQ ID NO: 913701
cuguaucugccuugaaaug

SEQ ID NO: 947195 - RNA, 19 nt, Artificial Sequence
  Description of Artificial Sequence: Synthetic oligonucleotide
  Antisense strand to SEQ ID NO: 947194
cauuucaaggcagauacag

SEQ ID NO: 947196 - RNA, 19 nt, Artificial Sequence
  Description of Artificial Sequence: Synthetic oligonucleotide
  Sense strand starting at position 2867 of SEQ ID NO: 913701
uugaaugugucacuuagca

SEQ ID NO: 947197 - RNA, 19 nt, Artificial Sequence
  Description of Artificial Sequence: Synthetic oligonucleotide
  Antisense strand to SEQ ID NO: 947196
ugcuaagugacacauucaa

SEQ ID NO: 947198 - RNA, 19 nt, Artificial Sequence
  Description of Artificial Sequence: Synthetic oligonucleotide
  Sense strand starting at position 3551 of SEQ ID NO: 913701
gaucgugcucccugggaga

SEQ ID NO: 947199 - RNA, 19 nt, Artificial Sequence
  Description of Artificial Sequence: Synthetic oligonucleotide
  Antisense strand to SEQ ID NO: 947198
ucucccagggagcacgauc

SEQ ID NO: 947200 - RNA, 19 nt, Artificial Sequence
  Description of Artificial Sequence: Synthetic oligonucleotide
  Sense strand starting at position 2147 of SEQ ID NO: 913701
gcuuauuacgagggccaca

SEQ ID NO: 947201 - RNA, 19 nt, Artificial Sequence
  Description of Artificial Sequence: Synthetic oligonucleotide
  Antisense strand to SEQ ID NO: 947200
uguggcccucguaauaagc

SEQ ID NO: 947202 - RNA, 19 nt, Artificial Sequence
  Description of Artificial Sequence: Synthetic oligonucleotide
  Sense strand starting at position 3190 of SEQ ID NO: 913701
uggccucagcguuagauca

SEQ ID NO: 947203 - RNA, 19 nt, Artificial Sequence
  Description of Artificial Sequence: Synthetic oligonucleotide
  Antisense strand to SEQ ID NO: 947202
ugaucuaacgcugaggcca

SEQ ID NO: 947204 - RNA, 19 nt, Artificial Sequence
  Description of Artificial Sequence: Synthetic oligonucleotide
  Sense strand starting at position 2282 of SEQ ID NO: 913701
gcaccauuaugaugauuua

SEQ ID NO: 947205 - RNA, 19 nt, Artificial Sequence
  Description of Artificial Sequence: Synthetic oligonucleotide
  Antisense strand to SEQ ID NO: 947204
uaaaucaucauaauggugc

SEQ ID NO: 947206 - RNA, 19 nt, Artificial Sequence
  Description of Artificial Sequence: Synthetic oligonucleotide
  Sense strand starting at position 2127 of SEQ ID NO: 913701
uauggaaacuuccugcguu

SEQ ID NO: 947207 - RNA, 19 nt, Artificial Sequence
  Description of Artificial Sequence: Synthetic oligonucleotide
  Antisense strand to SEQ ID NO: 947206
aacgcaggaaguuuccaua

SEQ ID NO: 947208 - RNA, 19 nt, Artificial Sequence
  Description of Artificial Sequence: Synthetic oligonucleotide
  Sense strand starting at position 3621 of SEQ ID NO: 913701
gauggcuguugccuuaaca

SEQ ID NO: 947209 - RNA, 19 nt, Artificial Sequence
  Description of Artificial Sequence: Synthetic oligonucleotide
  Antisense strand to SEQ ID NO: 947208
uguuaaggcaacagccauc

SEQ ID NO: 947210 - RNA, 19 nt, Artificial Sequence
  Description of Artificial Sequence: Synthetic oligonucleotide
  Sense strand starting at position 69 of SEQ ID NO: 913701
aaaugcuccgggugcaaau

SEQ ID NO: 947211 - RNA, 19 nt, Artificial Sequence
  Description of Artificial Sequence: Synthetic oligonucleotide
  Antisense strand to SEQ ID NO: 947210
auuugcacccggagcauuu

SEQ ID NO: 947212 - RNA, 19 nt, Artificial Sequence
  Description of Artificial Sequence: Synthetic oligonucleotide
  Sense strand starting at position 2862 of SEQ ID NO: 913701
cucuguugaaugugucacu

SEQ ID NO: 947213 - RNA, 19 nt, Artificial Sequence
  Description of Artificial Sequence: Synthetic oligonucleotide
  Antisense strand to SEQ ID NO: 947212
agugacacauucaacagag

SEQ ID NO: 947214 - RNA, 19 nt, Artificial Sequence
  Description of Artificial Sequence: Synthetic oligonucleotide
  Sense strand starting at position 2252 of SEQ ID NO: 913701
uacagagauucgccgcaua

SEQ ID NO: 947215 - RNA, 19 nt, Artificial Sequence
  Description of Artificial Sequence: Synthetic oligonucleotide
  Antisense strand to SEQ ID NO: 947214
uaugcggcgaaucucugua

SEQ ID NO: 947216 - RNA, 19 nt, Artificial Sequence
  Description of Artificial Sequence: Synthetic oligonucleotide
  Sense strand starting at position 2216 of SEQ ID NO: 913701
cugcuauaauuggaaagga

SEQ ID NO: 947217 - RNA, 19 nt, Artificial Sequence
  Description of Artificial Sequence: Synthetic oligonucleotide
  Antisense strand to SEQ ID NO: 947216
uccuuuccaauuauagcag

SEQ ID NO: 947218 - RNA, 19 nt, Artificial Sequence
  Description of Artificial Sequence: Synthetic oligonucleotide
  Sense strand starting at position 2860 of SEQ ID NO: 913701
gucucuguugaauguguca

SEQ ID NO: 947219 - RNA, 19 nt, Artificial Sequence
  Description of Artificial Sequence: Synthetic oligonucleotide
  Antisense strand to SEQ ID NO: 947218
ugacacauucaacagagac

SEQ ID NO: 947220 - RNA, 19 nt, Artificial Sequence
  Description of Artificial Sequence: Synthetic oligonucleotide
  Sense strand starting at position 2874 of SEQ ID NO: 913701
ugucacuuagcaugcgaau

SEQ ID NO: 947221 - RNA, 19 nt, Artificial Sequence
  Description of Artificial Sequence: Synthetic oligonucleotide
  Antisense strand to SEQ ID NO: 947220
auucgcaugcuaagugaca

SEQ ID NO: 947222 - RNA, 19 nt, Artificial Sequence
  Description of Artificial Sequence: Synthetic oligonucleotide
  Sense strand starting at position 79 of SEQ ID NO: 913701
ggugcaaaugagugcuguu

SEQ ID NO: 947223 - RNA, 19 nt, Artificial Sequence
  Description of Artificial Sequence: Synthetic oligonucleotide
  Antisense strand to SEQ ID NO: 947222
aacagcacucauuugcacc

SEQ ID NO: 947224 - RNA, 19 nt, Artificial Sequence
  Description of Artificial Sequence: Synthetic oligonucleotide
  Sense strand starting at position 3461 of SEQ ID NO: 913701
uggguuugucucuggcagu

SEQ ID NO: 947225 - RNA, 19 nt, Artificial Sequence
  Description of Artificial Sequence: Synthetic oligonucleotide
  Antisense strand to SEQ ID NO: 947224
acugccagagacaaaccca

SEQ ID NO: 947226 - RNA, 19 nt, Artificial Sequence
  Description of Artificial Sequence: Synthetic oligonucleotide
  Sense strand starting at position 909 of SEQ ID NO: 913701
cagucagcugccugauguu

SEQ ID NO: 947227 - RNA, 19 nt, Artificial Sequence
  Description of Artificial Sequence: Synthetic oligonucleotide
  Antisense strand to SEQ ID NO: 947226
aacaucaggcagcugacug

SEQ ID NO: 947228 - RNA, 19 nt, Artificial Sequence
  Description of Artificial Sequence: Synthetic oligonucleotide
  Sense strand starting at position 3572 of SEQ ID NO: 913701
aggacagcaucuggagaua

SEQ ID NO: 947229 - RNA, 19 nt, Artificial Sequence
  Description of Artificial Sequence: Synthetic oligonucleotide
  Antisense strand to SEQ ID NO: 947228
uaucuccagaugcuguccu

SEQ ID NO: 947230 - RNA, 19 nt, Artificial Sequence
  Description of Artificial Sequence: Synthetic oligonucleotide
  Sense strand starting at position 3521 of SEQ ID NO: 913701
cagcacauuugcugaguga

SEQ ID NO: 947231 - RNA, 19 nt, Artificial Sequence
  Description of Artificial Sequence: Synthetic oligonucleotide
  Antisense strand to SEQ ID NO: 947230
ucacucagcaaaugugcug

SEQ ID NO: 947232 - RNA, 19 nt, Artificial Sequence
  Description of Artificial Sequence: Synthetic oligonucleotide
  Sense strand starting at position 2853 of SEQ ID NO: 913701
agcgccugucucuguugaa

SEQ ID NO: 947233 - RNA, 19 nt, Artificial Sequence
  Description of Artificial Sequence: Synthetic oligonucleotide
  Antisense strand to SEQ ID NO: 947232
uucaacagagacaggcgcu

SEQ ID NO: 947234 - RNA, 19 nt, Artificial Sequence
  Description of Artificial Sequence: Synthetic oligonucleotide
  Sense strand starting at position 2854 of SEQ ID NO: 913701
gcgccugucucuguugaau

SEQ ID NO: 947235 - RNA, 19 nt, Artificial Sequence
  Description of Artificial Sequence: Synthetic oligonucleotide
  Antisense strand to SEQ ID NO: 947234
auucaacagagacaggcgc

SEQ ID NO: 947236 - RNA, 19 nt, Artificial Sequence
  Description of Artificial Sequence: Synthetic oligonucleotide
  Sense strand starting at position 2339 of SEQ ID NO: 913701
ugcaguaauugaugagaau

SEQ ID NO: 947237 - RNA, 19 nt, Artificial Sequence
  Description of Artificial Sequence: Synthetic oligonucleotide
  Antisense strand to SEQ ID NO: 947236
auucucaucaauuacugca

SEQ ID NO: 947238 - RNA, 19 nt, Artificial Sequence
  Description of Artificial Sequence: Synthetic oligonucleotide
  Sense strand starting at position 2563 of SEQ ID NO: 913701
ggcaccgugucgaggagua

SEQ ID NO: 947239 - RNA, 19 nt, Artificial Sequence
  Description of Artificial Sequence: Synthetic oligonucleotide
  Antisense strand to SEQ ID NO: 947238
uacuccucgacacggugcc

SEQ ID NO: 947240 - RNA, 19 nt, Artificial Sequence
  Description of Artificial Sequence: Synthetic oligonucleotide
  Sense strand starting at position 2166 of SEQ ID NO: 913701
cugcuaccuuuggaguaau

SEQ ID NO: 947241 - RNA, 19 nt, Artificial Sequence
  Description of Artificial Sequence: Synthetic oligonucleotide
  Antisense strand to SEQ ID NO: 947240
auuacuccaaagguagcag

SEQ ID NO: 947242 - RNA, 19 nt, Artificial Sequence
  Description of Artificial Sequence: Synthetic oligonucleotide
  Sense strand starting at position 798 of SEQ ID NO: 913702
gggaaacugguccgagaga

SEQ ID NO: 947243 - RNA, 19 nt, Artificial Sequence
  Description of Artificial Sequence: Synthetic oligonucleotide
  Antisense strand to SEQ ID NO: 947242
ucucucggaccaguuuccc

SEQ ID NO: 947244 - RNA, 19 nt, Artificial Sequence
  Description of Artificial Sequence: Synthetic oligonucleotide
  Sense strand starting at position 180 of SEQ ID NO: 913702
uaguuugagacaggaagua

SEQ ID NO: 947245 - RNA, 19 nt, Artificial Sequence
  Description of Artificial Sequence: Synthetic oligonucleotide
  Antisense strand to SEQ ID NO: 947244
uacuuccugucucaaacua

SEQ ID NO: 947246 - RNA, 19 nt, Artificial Sequence
  Description of Artificial Sequence: Synthetic oligonucleotide
  Sense strand starting at position 3363 of SEQ ID NO: 913702
gggaguuccuggaauugag

SEQ ID NO: 947247 - RNA, 19 nt, Artificial Sequence
  Description of Artificial Sequence: Synthetic oligonucleotide
  Antisense strand to SEQ ID NO: 947246
cucaauuccaggaacuccc

SEQ ID NO: 947248 - RNA, 19 nt, Artificial Sequence
  Description of Artificial Sequence: Synthetic oligonucleotide
  Sense strand starting at position 3947 of SEQ ID NO: 913702
agaagagaagucugccuga

SEQ ID NO: 947249 - RNA, 19 nt, Artificial Sequence
  Description of Artificial Sequence: Synthetic oligonucleotide
  Antisense strand to SEQ ID NO: 947248
ucaggcagacuucucuucu

SEQ ID NO: 947250 - RNA, 19 nt, Artificial Sequence
  Description of Artificial Sequence: Synthetic oligonucleotide
  Sense strand starting at position 3301 of SEQ ID NO: 913702
ucaugagcucugggagaau

SEQ ID NO: 947251 - RNA, 19 nt, Artificial Sequence
  Description of Artificial Sequence: Synthetic oligonucleotide
  Antisense strand to SEQ ID NO: 947250
auucucccagagcucauga

SEQ ID NO: 947252 - RNA, 19 nt, Artificial Sequence
  Description of Artificial Sequence: Synthetic oligonucleotide
  Sense strand starting at position 3299 of SEQ ID NO: 913702
acucaugagcucugggaga

SEQ ID NO: 947253 - RNA, 19 nt, Artificial Sequence
  Description of Artificial Sequence: Synthetic oligonucleotide
  Antisense strand to SEQ ID NO: 947252
ucucccagagcucaugagu

SEQ ID NO: 947254 - RNA, 19 nt, Artificial Sequence
  Description of Artificial Sequence: Synthetic oligonucleotide
  Sense strand starting at position 3361 of SEQ ID NO: 913702
cugggaguuccuggaauug

SEQ ID NO: 947255 - RNA, 19 nt, Artificial Sequence
  Description of Artificial Sequence: Synthetic oligonucleotide
  Antisense strand to SEQ ID NO: 947254
caauuccaggaacucccag

SEQ ID NO: 947256 - RNA, 19 nt, Artificial Sequence
  Description of Artificial Sequence: Synthetic oligonucleotide
  Sense strand starting at position 3404 of SEQ ID NO: 913702
uuagcuaaagguugggaua

SEQ ID NO: 947257 - RNA, 19 nt, Artificial Sequence
  Description of Artificial Sequence: Synthetic oligonucleotide
  Antisense strand to SEQ ID NO: 947256
uaucccaaccuuuagcuaa

SEQ ID NO: 947258 - RNA, 19 nt, Artificial Sequence
  Description of Artificial Sequence: Synthetic oligonucleotide
  Sense strand starting at position 3405 of SEQ ID NO: 913702
uagcuaaagguugggauau

SEQ ID NO: 947259 - RNA, 19 nt, Artificial Sequence
  Description of Artificial Sequence: Synthetic oligonucleotide
  Antisense strand to SEQ ID NO: 947258
auaucccaaccuuuagcua

SEQ ID NO: 947260 - RNA, 19 nt, Artificial Sequence
  Description of Artificial Sequence: Synthetic oligonucleotide
  Sense strand starting at position 173 of SEQ ID NO: 913702
aaugcuauaguuugagaca

SEQ ID NO: 947261 - RNA, 19 nt, Artificial Sequence
  Description of Artificial Sequence: Synthetic oligonucleotide
  Antisense strand to SEQ ID NO: 947260
ugucucaaacuauagcauu

SEQ ID NO: 947262 - RNA, 19 nt, Artificial Sequence
  Description of Artificial Sequence: Synthetic oligonucleotide
  Sense strand starting at position 3950 of SEQ ID NO: 913702
agagaagucugccugacac

SEQ ID NO: 947263 - RNA, 19 nt, Artificial Sequence
  Description of Artificial Sequence: Synthetic oligonucleotide
  Antisense strand to SEQ ID NO: 947262
gugucaggcagacuucucu

SEQ ID NO: 947264 - RNA, 19 nt, Artificial Sequence
  Description of Artificial Sequence: Synthetic oligonucleotide
  Sense strand starting at position 2931 of SEQ ID NO: 913702
ggguguuggcgucuugcau

SEQ ID NO: 947265 - RNA, 19 nt, Artificial Sequence
  Description of Artificial Sequence: Synthetic oligonucleotide
  Antisense strand to SEQ ID NO: 947264
augcaagacgccaacaccc

SEQ ID NO: 947266 - RNA, 19 nt, Artificial Sequence
  Description of Artificial Sequence: Synthetic oligonucleotide
  Sense strand starting at position 195 of SEQ ID NO: 913702
aguacagacucccuuaagu

SEQ ID NO: 947267 - RNA, 19 nt, Artificial Sequence
  Description of Artificial Sequence: Synthetic oligonucleotide
  Antisense strand to SEQ ID NO: 947266
acuuaagggagucuguacu

SEQ ID NO: 947268 - RNA, 19 nt, Artificial Sequence
  Description of Artificial Sequence: Synthetic oligonucleotide
  Sense strand starting at position 263 of SEQ ID NO: 913702
cgaauauaacuagguccuu

SEQ ID NO: 947269 - RNA, 19 nt, Artificial Sequence
  Description of Artificial Sequence: Synthetic oligonucleotide
  Antisense strand to SEQ ID NO: 947268
aaggaccuaguuauauucg

SEQ ID NO: 947270 - RNA, 19 nt, Artificial Sequence
  Description of Artificial Sequence: Synthetic oligonucleotide
  Sense strand starting at position 3736 of SEQ ID NO: 913702
augucauccuuccuauuga

SEQ ID NO: 947271 - RNA, 19 nt, Artificial Sequence
  Description of Artificial Sequence: Synthetic oligonucleotide
  Antisense strand to SEQ ID NO: 947270
ucaauaggaaggaugacau

SEQ ID NO: 947272 - RNA, 19 nt, Artificial Sequence
  Description of Artificial Sequence: Synthetic oligonucleotide
  Sense strand starting at position 252 of SEQ ID NO: 913702
ugccucccucccgaauaua

SEQ ID NO: 947273 - RNA, 19 nt, Artificial Sequence
  Description of Artificial Sequence: Synthetic oligonucleotide
  Antisense strand to SEQ ID NO: 947272
uauauucgggagggaggca

SEQ ID NO: 947274 - RNA, 19 nt, Artificial Sequence
  Description of Artificial Sequence: Synthetic oligonucleotide
  Sense strand starting at position 711 of SEQ ID NO: 913702
cccugcucuccggacaauu

SEQ ID NO: 947275 - RNA, 19 nt, Artificial Sequence
  Description of Artificial Sequence: Synthetic oligonucleotide
  Antisense strand to SEQ ID NO: 947274
aauuguccggagagcaggg

SEQ ID NO: 947276 - RNA, 19 nt, Artificial Sequence
  Description of Artificial Sequence: Synthetic oligonucleotide
  Sense strand starting at position 2939 of SEQ ID NO: 913702
gcgucuugcaugcuuaguu

SEQ ID NO: 947277 - RNA, 19 nt, Artificial Sequence
  Description of Artificial Sequence: Synthetic oligonucleotide
  Antisense strand to SEQ ID NO: 947276
aacuaagcaugcaagacgc

SEQ ID NO: 947278 - RNA, 19 nt, Artificial Sequence
  Description of Artificial Sequence: Synthetic oligonucleotide
  Sense strand starting at position 3137 of SEQ ID NO: 913702
gcucaucuuagcugaggga

SEQ ID NO: 947279 - RNA, 19 nt, Artificial Sequence
  Description of Artificial Sequence: Synthetic oligonucleotide
  Antisense strand to SEQ ID NO: 947278
ucccucagcuaagaugagc

SEQ ID NO: 947280 - RNA, 19 nt, Artificial Sequence
  Description of Artificial Sequence: Synthetic oligonucleotide
  Sense strand starting at position 286 of SEQ ID NO: 913702
aaaucaugugaguguguga

SEQ ID NO: 947281 - RNA, 19 nt, Artificial Sequence
  Description of Artificial Sequence: Synthetic oligonucleotide
  Antisense strand to SEQ ID NO: 947280
ucacacacucacaugauuu

SEQ ID NO: 947282 - RNA, 19 nt, Artificial Sequence
  Description of Artificial Sequence: Synthetic oligonucleotide
  Sense strand starting at position 220 of SEQ ID NO: 913702
cagccuccuugagugaauu

SEQ ID NO: 947283 - RNA, 19 nt, Artificial Sequence
  Description of Artificial Sequence: Synthetic oligonucleotide
  Antisense strand to SEQ ID NO: 947282
aauucacucaaggaggcug

SEQ ID NO: 947284 - RNA, 19 nt, Artificial Sequence
  Description of Artificial Sequence: Synthetic oligonucleotide
  Sense strand starting at position 3200 of SEQ ID NO: 913702
agucauauuuaaggaaucu

SEQ ID NO: 947285 - RNA, 19 nt, Artificial Sequence
  Description of Artificial Sequence: Synthetic oligonucleotide
  Antisense strand to SEQ ID NO: 947284
agauuccuuaaauaugacu

SEQ ID NO: 947286 - RNA, 19 nt, Artificial Sequence
  Description of Artificial Sequence: Synthetic oligonucleotide
  Sense strand starting at position 3868 of SEQ ID NO: 913702
gcuaaauaguugcuaaauu

SEQ ID NO: 947287 - RNA, 19 nt, Artificial Sequence
  Description of Artificial Sequence: Synthetic oligonucleotide
  Antisense strand to SEQ ID NO: 947286
aauuuagcaacuauuuagc

SEQ ID NO: 947288 - RNA, 19 nt, Artificial Sequence
  Description of Artificial Sequence: Synthetic oligonucleotide
  Sense strand starting at position 2000 of SEQ ID NO: 913702
gaucgucaguuucucaaca

SEQ ID NO: 947289 - RNA, 19 nt, Artificial Sequence
  Description of Artificial Sequence: Synthetic oligonucleotide
  Antisense strand to SEQ ID NO: 947288
uguugagaaacugacgauc

SEQ ID NO: 947290 - RNA, 19 nt, Artificial Sequence
  Description of Artificial Sequence: Synthetic oligonucleotide
  Sense strand starting at position 3807 of SEQ ID NO: 913702
ugcauuggucacugaggua

SEQ ID NO: 947291 - RNA, 19 nt, Artificial Sequence
  Description of Artificial Sequence: Synthetic oligonucleotide
  Antisense strand to SEQ ID NO: 947290
uaccucagugaccaaugca

SEQ ID NO: 947292 - RNA, 19 nt, Artificial Sequence
  Description of Artificial Sequence: Synthetic oligonucleotide
  Sense strand starting at position 3322 of SEQ ID NO: 913702
gaaggagccuguguugagu

SEQ ID NO: 947293 - RNA, 19 nt, Artificial Sequence
  Description of Artificial Sequence: Synthetic oligonucleotide
  Antisense strand to SEQ ID NO: 947292
acucaacacaggcuccuuc

SEQ ID NO: 947294 - RNA, 19 nt, Artificial Sequence
  Description of Artificial Sequence: Synthetic oligonucleotide
  Sense strand starting at position 3854 of SEQ ID NO: 913702
cauaguaggcucuggcuaa

SEQ ID NO: 947295 - RNA, 19 nt, Artificial Sequence
  Description of Artificial Sequence: Synthetic oligonucleotide
  Antisense strand to SEQ ID NO: 947294
uuagccagagccuacuaug

SEQ ID NO: 947296 - RNA, 19 nt, Artificial Sequence
  Description of Artificial Sequence: Synthetic oligonucleotide
  Sense strand starting at position 3328 of SEQ ID NO: 913702
gccuguguugagugagaag

SEQ ID NO: 947297 - RNA, 19 nt, Artificial Sequence
  Description of Artificial Sequence: Synthetic oligonucleotide
  Antisense strand to SEQ ID NO: 947296
cuucucacucaacacaggc

SEQ ID NO: 947298 - RNA, 19 nt, Artificial Sequence
  Description of Artificial Sequence: Synthetic oligonucleotide
  Sense strand starting at position 2117 of SEQ ID NO: 913702
gcuaccgucgcagaaauca

SEQ ID NO: 947299 - RNA, 19 nt, Artificial Sequence
  Description of Artificial Sequence: Synthetic oligonucleotide
  Antisense strand to SEQ ID NO: 947298
ugauuucugcgacgguagc

SEQ ID NO: 947300 - RNA, 19 nt, Artificial Sequence
  Description of Artificial Sequence: Synthetic oligonucleotide
  Sense strand starting at position 2944 of SEQ ID NO: 913702
uugcaugcuuaguuaaauc

SEQ ID NO: 947301 - RNA, 19 nt, Artificial Sequence
  Description of Artificial Sequence: Synthetic oligonucleotide
  Antisense strand to SEQ ID NO: 947300
gauuuaacuaagcaugcaa

SEQ ID NO: 947302 - RNA, 19 nt, Artificial Sequence
  Description of Artificial Sequence: Synthetic oligonucleotide
  Sense strand starting at position 2943 of SEQ ID NO: 913702
cuugcaugcuuaguuaaau

SEQ ID NO: 947303 - RNA, 19 nt, Artificial Sequence
  Description of Artificial Sequence: Synthetic oligonucleotide
  Antisense strand to SEQ ID NO: 947302
auuuaacuaagcaugcaag

SEQ ID NO: 947304 - RNA, 19 nt, Artificial Sequence
  Description of Artificial Sequence: Synthetic oligonucleotide
  Sense strand starting at position 799 of SEQ ID NO: 913702
ggaaacugguccgagagaa

SEQ ID NO: 947305 - RNA, 19 nt, Artificial Sequence
  Description of Artificial Sequence: Synthetic oligonucleotide
  Antisense strand to SEQ ID NO: 947304
uucucucggaccaguuucc

SEQ ID NO: 947306 - RNA, 19 nt, Artificial Sequence
  Description of Artificial Sequence: Synthetic oligonucleotide
  Sense strand starting at position 3549 of SEQ ID NO: 913702
aaaguagacugguaccaga

SEQ ID NO: 947307 - RNA, 19 nt, Artificial Sequence
  Description of Artificial Sequence: Synthetic oligonucleotide
  Antisense strand to SEQ ID NO: 947306
ucugguaccagucuacuuu

SEQ ID NO: 947308 - RNA, 19 nt, Artificial Sequence
  Description of Artificial Sequence: Synthetic oligonucleotide
  Sense strand starting at position 3090 of SEQ ID NO: 913702
ucuuucuuguugucaguua

SEQ ID NO: 947309 - RNA, 19 nt, Artificial Sequence
  Description of Artificial Sequence: Synthetic oligonucleotide
  Antisense strand to SEQ ID NO: 947308
uaacugacaacaagaaaga

SEQ ID NO: 947310 - RNA, 19 nt, Artificial Sequence
  Description of Artificial Sequence: Synthetic oligonucleotide
  Sense strand starting at position 3346 of SEQ ID NO: 913702
gggaaaucauccugacugg

SEQ ID NO: 947311 - RNA, 19 nt, Artificial Sequence
  Description of Artificial Sequence: Synthetic oligonucleotide
  Antisense strand to SEQ ID NO: 947310
ccagucaggaugauuuccc

SEQ ID NO: 947312 - RNA, 19 nt, Artificial Sequence
  Description of Artificial Sequence: Synthetic oligonucleotide
  Sense strand starting at position 2083 of SEQ ID NO: 913702
uaagaauguuucgagauug

SEQ ID NO: 947313 - RNA, 19 nt, Artificial Sequence
  Description of Artificial Sequence: Synthetic oligonucleotide
  Antisense strand to SEQ ID NO: 947312
caaucucgaaacauucuua

SEQ ID NO: 947314 - RNA, 19 nt, Artificial Sequence
  Description of Artificial Sequence: Synthetic oligonucleotide
  Sense strand starting at position 176 of SEQ ID NO: 913702
gcuauaguuugagacagga

SEQ ID NO: 947315 - RNA, 19 nt, Artificial Sequence
  Description of Artificial Sequence: Synthetic oligonucleotide
  Antisense strand to SEQ ID NO: 947314
uccugucucaaacuauagc

SEQ ID NO: 947316 - RNA, 19 nt, Artificial Sequence
  Description of Artificial Sequence: Synthetic oligonucleotide
  Sense strand starting at position 79 of SEQ ID NO: 913702
aaagguugcuucuagaaau

SEQ ID NO: 947317 - RNA, 19 nt, Artificial Sequence
  Description of Artificial Sequence: Synthetic oligonucleotide
  Antisense strand to SEQ ID NO: 947316
auuucuagaagcaaccuuu

SEQ ID NO: 947318 - RNA, 19 nt, Artificial Sequence
  Description of Artificial Sequence: Synthetic oligonucleotide
  Sense strand starting at position 3161 of SEQ ID NO: 913702
ggagaaaucuaccagcugu

SEQ ID NO: 947319 - RNA, 19 nt, Artificial Sequence
  Description of Artificial Sequence: Synthetic oligonucleotide
  Antisense strand to SEQ ID NO: 947318
acagcugguagauuucucc

SEQ ID NO: 947320 - RNA, 19 nt, Artificial Sequence
  Description of Artificial Sequence: Synthetic oligonucleotide
  Sense strand starting at position 3507 of SEQ ID NO: 913702
uuugacgcuuauuagagaa

SEQ ID NO: 947321 - RNA, 19 nt, Artificial Sequence
  Description of Artificial Sequence: Synthetic oligonucleotide
  Antisense strand to SEQ ID NO: 947320
uucucuaauaagcgucaaa

SEQ ID NO: 947322 - RNA, 19 nt, Artificial Sequence
  Description of Artificial Sequence: Synthetic oligonucleotide
  Sense strand starting at position 397 of SEQ ID NO: 913703
gcuguuucccuccucgauu

SEQ ID NO: 947323 - RNA, 19 nt, Artificial Sequence
  Description of Artificial Sequence: Synthetic oligonucleotide
  Antisense strand to SEQ ID NO: 947322
aaucgaggagggaaacagc

SEQ ID NO: 947324 - RNA, 19 nt, Artificial Sequence
  Description of Artificial Sequence: Synthetic oligonucleotide
  Sense strand starting at position 1026 of SEQ ID NO: 913703
uucugacugucugugauuu

SEQ ID NO: 947325 - RNA, 19 nt, Artificial Sequence
  Description of Artificial Sequence: Synthetic oligonucleotide
  Antisense strand to SEQ ID NO: 947324
aaaucacagacagucagaa

SEQ ID NO: 947326 - RNA, 19 nt, Artificial Sequence
  Description of Artificial Sequence: Synthetic oligonucleotide
  Sense strand starting at position 222 of SEQ ID NO: 913703
aggguucucccacacggaa

SEQ ID NO: 947327 - RNA, 19 nt, Artificial Sequence
  Description of Artificial Sequence: Synthetic oligonucleotide
  Antisense strand to SEQ ID NO: 947326
uuccgugugggagaacccu

SEQ ID NO: 947328 - RNA, 19 nt, Artificial Sequence
  Description of Artificial Sequence: Synthetic oligonucleotide
  Sense strand starting at position 3855 of SEQ ID NO: 913703
gucacauggcaagagugaa

SEQ ID NO: 947329 - RNA, 19 nt, Artificial Sequence
  Description of Artificial Sequence: Synthetic oligonucleotide
  Antisense strand to SEQ ID NO: 947328
uucacucuugccaugugac

SEQ ID NO: 947330 - RNA, 19 nt, Artificial Sequence
  Description of Artificial Sequence: Synthetic oligonucleotide
  Sense strand starting at position 3198 of SEQ ID NO: 913703
gagggaccugccugauaua

SEQ ID NO: 947331 - RNA, 19 nt, Artificial Sequence
  Description of Artificial Sequence: Synthetic oligonucleotide
  Antisense strand to SEQ ID NO: 947330
uauaucaggcaggucccuc

SEQ ID NO: 947332 - RNA, 19 nt, Artificial Sequence
  Description of Artificial Sequence: Synthetic oligonucleotide
  Sense strand starting at position 3551 of SEQ ID NO: 913703
gccucaagccacuagauaa

SEQ ID NO: 947333 - RNA, 19 nt, Artificial Sequence
  Description of Artificial Sequence: Synthetic oligonucleotide
  Antisense strand to SEQ ID NO: 947332
uuaucuaguggcuugaggc

SEQ ID NO: 947334 - RNA, 19 nt, Artificial Sequence
  Description of Artificial Sequence: Synthetic oligonucleotide
  Sense strand starting at position 923 of SEQ ID NO: 913703
cuuugaaggucuuuaauag

SEQ ID NO: 947335 - RNA, 19 nt, Artificial Sequence
  Description of Artificial Sequence: Synthetic oligonucleotide
  Antisense strand to SEQ ID NO: 947334
cuauuaaagaccuucaaag

SEQ ID NO: 947336 - RNA, 19 nt, Artificial Sequence
  Description of Artificial Sequence: Synthetic oligonucleotide
  Sense strand starting at position 3737 of SEQ ID NO: 913703
guugaauuggcucaugauu

SEQ ID NO: 947337 - RNA, 19 nt, Artificial Sequence
  Description of Artificial Sequence: Synthetic oligonucleotide
  Antisense strand to SEQ ID NO: 947336
aaucaugagccaauucaac

SEQ ID NO: 947338 - RNA, 19 nt, Artificial Sequence
  Description of Artificial Sequence: Synthetic oligonucleotide
  Sense strand starting at position 398 of SEQ ID NO: 913703
cuguuucccuccucgauuu

SEQ ID NO: 947339 - RNA, 19 nt, Artificial Sequence
  Description of Artificial Sequence: Synthetic oligonucleotide
  Antisense strand to SEQ ID NO: 947338
aaaucgaggagggaaacag

SEQ ID NO: 947340 - RNA, 19 nt, Artificial Sequence
  Description of Artificial Sequence: Synthetic oligonucleotide
  Sense strand starting at position 3539 of SEQ ID NO: 913703
ggacauuccugggccucaa

SEQ ID NO: 947341 - RNA, 19 nt, Artificial Sequence
  Description of Artificial Sequence: Synthetic oligonucleotide
  Antisense strand to SEQ ID NO: 947340
uugaggcccaggaaugucc

SEQ ID NO: 947342 - RNA, 19 nt, Artificial Sequence
  Description of Artificial Sequence: Synthetic oligonucleotide
  Sense strand starting at position 3477 of SEQ ID NO: 913703
gaucccuguccuggacaua

SEQ ID NO: 947343 - RNA, 19 nt, Artificial Sequence
  Description of Artificial Sequence: Synthetic oligonucleotide
  Antisense strand to SEQ ID NO: 947342
uauguccaggacagggauc

SEQ ID NO: 947344 - RNA, 19 nt, Artificial Sequence
  Description of Artificial Sequence: Synthetic oligonucleotide
  Sense strand starting at position 3208 of SEQ ID NO: 913703
ccugauauaaggugccaga

SEQ ID NO: 947345 - RNA, 19 nt, Artificial Sequence
  Description of Artificial Sequence: Synthetic oligonucleotide
  Antisense strand to SEQ ID NO: 947344
ucuggcaccuuauaucagg

SEQ ID NO: 947346 - RNA, 19 nt, Artificial Sequence
  Description of Artificial Sequence: Synthetic oligonucleotide
  Sense strand starting at position 736 of SEQ ID NO: 913703
gcccgaguccaucagaauu

SEQ ID NO: 947347 - RNA, 19 nt, Artificial Sequence
  Description of Artificial Sequence: Synthetic oligonucleotide
  Antisense strand to SEQ ID NO: 947346
aauucugauggacucgggc

SEQ ID NO: 947348 - RNA, 19 nt, Artificial Sequence
  Description of Artificial Sequence: Synthetic oligonucleotide
  Sense strand starting at position 2880 of SEQ ID NO: 913703
gacugagguuacucgauuc

SEQ ID NO: 947349 - RNA, 19 nt, Artificial Sequence
  Description of Artificial Sequence: Synthetic oligonucleotide
  Antisense strand to SEQ ID NO: 947348
gaaucgaguaaccucaguc

SEQ ID NO: 947350 - RNA, 19 nt, Artificial Sequence
  Description of Artificial Sequence: Synthetic oligonucleotide
  Sense strand starting at position 3181 of SEQ ID NO: 913703
agcacauucuaguuuauga

SEQ ID NO: 947351 - RNA, 19 nt, Artificial Sequence
  Description of Artificial Sequence: Synthetic oligonucleotide
  Antisense strand to SEQ ID NO: 947350
ucauaaacuagaaugugcu

SEQ ID NO: 947352 - RNA, 19 nt, Artificial Sequence
  Description of Artificial Sequence: Synthetic oligonucleotide
  Sense strand starting at position 2872 of SEQ ID NO: 913703
ugcugcaugacugagguua

SEQ ID NO: 947353 - RNA, 19 nt, Artificial Sequence
  Description of Artificial Sequence: Synthetic oligonucleotide
  Antisense strand to SEQ ID NO: 947352
uaaccucagucaugcagca

SEQ ID NO: 947354 - RNA, 19 nt, Artificial Sequence
  Description of Artificial Sequence: Synthetic oligonucleotide
  Sense strand starting at position 1066 of SEQ ID NO: 913703
cgauguauagaugggcuca

SEQ ID NO: 947355 - RNA, 19 nt, Artificial Sequence
  Description of Artificial Sequence: Synthetic oligonucleotide
  Antisense strand to SEQ ID NO: 947354
ugagcccaucuauacaucg

SEQ ID NO: 947356 - RNA, 19 nt, Artificial Sequence
  Description of Artificial Sequence: Synthetic oligonucleotide
  Sense strand starting at position 3006 of SEQ ID NO: 913703
gggagaugccuuugcugac

SEQ ID NO: 947357 - RNA, 19 nt, Artificial Sequence
  Description of Artificial Sequence: Synthetic oligonucleotide
  Antisense strand to SEQ ID NO: 947356
gucagcaaaggcaucuccc

SEQ ID NO: 947358 - RNA, 19 nt, Artificial Sequence
  Description of Artificial Sequence: Synthetic oligonucleotide
  Sense strand starting at position 3526 of SEQ ID NO: 913703
gccaguggugacuggacau

SEQ ID NO: 947359 - RNA, 19 nt, Artificial Sequence
  Description of Artificial Sequence: Synthetic oligonucleotide
  Antisense strand to SEQ ID NO: 947358
auguccagucaccacuggc

SEQ ID NO: 947360 - RNA, 19 nt, Artificial Sequence
  Description of Artificial Sequence: Synthetic oligonucleotide
  Sense strand starting at position 93 of SEQ ID NO: 913703
acugcucucgugcaggaaa

SEQ ID NO: 947361 - RNA, 19 nt, Artificial Sequence
  Description of Artificial Sequence: Synthetic oligonucleotide
  Antisense strand to SEQ ID NO: 947360
uuuccugcacgagagcagu

SEQ ID NO: 947362 - RNA, 19 nt, Artificial Sequence
  Description of Artificial Sequence: Synthetic oligonucleotide
  Sense strand starting at position 459 of SEQ ID NO: 913703
agcuaagaguucccuccuu

SEQ ID NO: 947363 - RNA, 19 nt, Artificial Sequence
  Description of Artificial Sequence: Synthetic oligonucleotide
  Antisense strand to SEQ ID NO: 947362
aaggagggaacucuuagcu

SEQ ID NO: 947364 - RNA, 19 nt, Artificial Sequence
  Description of Artificial Sequence: Synthetic oligonucleotide
  Sense strand starting at position 1024 of SEQ ID NO: 913703
aguucugacugucugugau

SEQ ID NO: 947365 - RNA, 19 nt, Artificial Sequence
  Description of Artificial Sequence: Synthetic oligonucleotide
  Antisense strand to SEQ ID NO: 947364
aucacagacagucagaacu

SEQ ID NO: 947366 - RNA, 19 nt, Artificial Sequence
  Description of Artificial Sequence: Synthetic oligonucleotide
  Sense strand starting at position 1021 of SEQ ID NO: 913703
cagaguucugacugucugu

SEQ ID NO: 947367 - RNA, 19 nt, Artificial Sequence
  Description of Artificial Sequence: Synthetic oligonucleotide
  Antisense strand to SEQ ID NO: 947366
acagacagucagaacucug

SEQ ID NO: 947368 - RNA, 19 nt, Artificial Sequence
  Description of Artificial Sequence: Synthetic oligonucleotide
  Sense strand starting at position 927 of SEQ ID NO: 913703
gaaggucuuuaauagggaa

SEQ ID NO: 947369 - RNA, 19 nt, Artificial Sequence
  Description of Artificial Sequence: Synthetic oligonucleotide
  Antisense strand to SEQ ID NO: 947368
uucccuauuaaagaccuuc

SEQ ID NO: 947370 - RNA, 19 nt, Artificial Sequence
  Description of Artificial Sequence: Synthetic oligonucleotide
  Sense strand starting at position 3746 of SEQ ID NO: 913703
gcucaugauucugcaaggu

SEQ ID NO: 947371 - RNA, 19 nt, Artificial Sequence
  Description of Artificial Sequence: Synthetic oligonucleotide
  Antisense strand to SEQ ID NO: 947370
accuugcagaaucaugagc

SEQ ID NO: 947372 - RNA, 19 nt, Artificial Sequence
  Description of Artificial Sequence: Synthetic oligonucleotide
  Sense strand starting at position 106 of SEQ ID NO: 913703
aggaaauacucagaaugcu

SEQ ID NO: 947373 - RNA, 19 nt, Artificial Sequence
  Description of Artificial Sequence: Synthetic oligonucleotide
  Antisense strand to SEQ ID NO: 947372
agcauucugaguauuuccu

SEQ ID NO: 947374 - RNA, 19 nt, Artificial Sequence
  Description of Artificial Sequence: Synthetic oligonucleotide
  Sense strand starting at position 95 of SEQ ID NO: 913703
ugcucucgugcaggaaaua

SEQ ID NO: 947375 - RNA, 19 nt, Artificial Sequence
  Description of Artificial Sequence: Synthetic oligonucleotide
  Antisense strand to SEQ ID NO: 947374
uauuuccugcacgagagca

SEQ ID NO: 947376 - RNA, 19 nt, Artificial Sequence
  Description of Artificial Sequence: Synthetic oligonucleotide
  Sense strand starting at position 57 of SEQ ID NO: 913703
augugucggcauugugaag

SEQ ID NO: 947377 - RNA, 19 nt, Artificial Sequence
  Description of Artificial Sequence: Synthetic oligonucleotide
  Antisense strand to SEQ ID NO: 947376
cuucacaaugccgacacau

SEQ ID NO: 947378 - RNA, 19 nt, Artificial Sequence
  Description of Artificial Sequence: Synthetic oligonucleotide
  Sense strand starting at position 3713 of SEQ ID NO: 913703
uuggguaauugaugaagaa

SEQ ID NO: 947379 - RNA, 19 nt, Artificial Sequence
  Description of Artificial Sequence: Synthetic oligonucleotide
  Antisense strand to SEQ ID NO: 947378
uucuucaucaauuacccaa

SEQ ID NO: 947380 - RNA, 19 nt, Artificial Sequence
  Description of Artificial Sequence: Synthetic oligonucleotide
  Sense strand starting at position 930 of SEQ ID NO: 913703
ggucuuuaauagggaacaa

SEQ ID NO: 947381 - RNA, 19 nt, Artificial Sequence
  Description of Artificial Sequence: Synthetic oligonucleotide
  Antisense strand to SEQ ID NO: 947380
uuguucccuauuaaagacc

SEQ ID NO: 947382 - RNA, 19 nt, Artificial Sequence
  Description of Artificial Sequence: Synthetic oligonucleotide
  Sense strand starting at position 3211 of SEQ ID NO: 913703
gauauaaggugccagaacu

SEQ ID NO: 947383 - RNA, 19 nt, Artificial Sequence
  Description of Artificial Sequence: Synthetic oligonucleotide
  Antisense strand to SEQ ID NO: 947382
aguucuggcaccuuauauc

SEQ ID NO: 947384 - RNA, 19 nt, Artificial Sequence
  Description of Artificial Sequence: Synthetic oligonucleotide
  Sense strand starting at position 3185 of SEQ ID NO: 913703
cauucuaguuuaugaggga

SEQ ID NO: 947385 - RNA, 19 nt, Artificial Sequence
  Description of Artificial Sequence: Synthetic oligonucleotide
  Antisense strand to SEQ ID NO: 947384
ucccucauaaacuagaaug

SEQ ID NO: 947386 - RNA, 19 nt, Artificial Sequence
  Description of Artificial Sequence: Synthetic oligonucleotide
  Sense strand starting at position 3932 of SEQ ID NO: 913703
agaagucauucaggauggu

SEQ ID NO: 947387 - RNA, 19 nt, Artificial Sequence
  Description of Artificial Sequence: Synthetic oligonucleotide
  Antisense strand to SEQ ID NO: 947386
accauccugaaugacuucu

SEQ ID NO: 947388 - RNA, 19 nt, Artificial Sequence
  Description of Artificial Sequence: Synthetic oligonucleotide
  Sense strand starting at position 2559 of SEQ ID NO: 913703
ggcugcuucuaucacagaa

SEQ ID NO: 947389 - RNA, 19 nt, Artificial Sequence
  Description of Artificial Sequence: Synthetic oligonucleotide
  Antisense strand to SEQ ID NO: 947388
uucugugauagaagcagcc

SEQ ID NO: 947390 - RNA, 19 nt, Artificial Sequence
  Description of Artificial Sequence: Synthetic oligonucleotide
  Sense strand starting at position 3739 of SEQ ID NO: 913703
ugaauuggcucaugauucu

SEQ ID NO: 947391 - RNA, 19 nt, Artificial Sequence
  Description of Artificial Sequence: Synthetic oligonucleotide
  Antisense strand to SEQ ID NO: 947390
agaaucaugagccaauuca

SEQ ID NO: 947392 - RNA, 19 nt, Artificial Sequence
  Description of Artificial Sequence: Synthetic oligonucleotide
  Sense strand starting at position 1017 of SEQ ID NO: 913703
ccaacagaguucugacugu

SEQ ID NO: 947393 - RNA, 19 nt, Artificial Sequence
  Description of Artificial Sequence: Synthetic oligonucleotide
  Antisense strand to SEQ ID NO: 947392
acagucagaacucuguugg

SEQ ID NO: 947394 - RNA, 19 nt, Artificial Sequence
  Description of Artificial Sequence: Synthetic oligonucleotide
  Sense strand starting at position 3815 of SEQ ID NO: 913703
agcuucuaaucauggcaaa

SEQ ID NO: 947395 - RNA, 19 nt, Artificial Sequence
  Description of Artificial Sequence: Synthetic oligonucleotide
  Antisense strand to SEQ ID NO: 947394
uuugccaugauuagaagcu

SEQ ID NO: 947396 - RNA, 19 nt, Artificial Sequence
  Description of Artificial Sequence: Synthetic oligonucleotide
  Sense strand starting at position 3178 of SEQ ID NO: 913703
ggcagcacauucuaguuua

SEQ ID NO: 947397 - RNA, 19 nt, Artificial Sequence
  Description of Artificial Sequence: Synthetic oligonucleotide
  Antisense strand to SEQ ID NO: 947396
uaaacuagaaugugcugcc

SEQ ID NO: 947398 - RNA, 19 nt, Artificial Sequence
  Description of Artificial Sequence: Synthetic oligonucleotide
  Sense strand starting at position 2850 of SEQ ID NO: 913703
gccugucugucccaagaac

SEQ ID NO: 947399 - RNA, 19 nt, Artificial Sequence
  Description of Artificial Sequence: Synthetic oligonucleotide
  Antisense strand to SEQ ID NO: 947398
guucuugggacagacaggc

SEQ ID NO: 947400 - RNA, 19 nt, Artificial Sequence
  Description of Artificial Sequence: Synthetic oligonucleotide
  Sense strand starting at position 2556 of SEQ ID NO: 913703
ucuggcugcuucuaucaca

SEQ ID NO: 947401 - RNA, 19 nt, Artificial Sequence
  Description of Artificial Sequence: Synthetic oligonucleotide
  Antisense strand to SEQ ID NO: 947400
ugugauagaagcagccaga

SEQ ID NO: 947402 - RNA, 19 nt, Artificial Sequence
  Description of Artificial Sequence: Synthetic oligonucleotide
  Sense strand starting at position 308 of SEQ ID NO: 913704
uuuaaauguuaaccuagga

SEQ ID NO: 947403 - RNA, 19 nt, Artificial Sequence
  Description of Artificial Sequence: Synthetic oligonucleotide
  Antisense strand to SEQ ID NO: 947402
uccuagguuaacauuuaaa

SEQ ID NO: 947404 - RNA, 19 nt, Artificial Sequence
  Description of Artificial Sequence: Synthetic oligonucleotide
  Sense strand starting at position 499 of SEQ ID NO: 913704
uucuuugaacgauaccuua

SEQ ID NO: 947405 - RNA, 19 nt, Artificial Sequence
  Description of Artificial Sequence: Synthetic oligonucleotide
  Antisense strand to SEQ ID NO: 947404
uaagguaucguucaaagaa

SEQ ID NO: 947406 - RNA, 19 nt, Artificial Sequence
  Description of Artificial Sequence: Synthetic oligonucleotide
  Sense strand starting at position 27 of SEQ ID NO: 913704
gguuguugugaagaccaaa

SEQ ID NO: 947407 - RNA, 19 nt, Artificial Sequence
  Description of Artificial Sequence: Synthetic oligonucleotide
  Antisense strand to SEQ ID NO: 947406
uuuggucuucacaacaacc

SEQ ID NO: 947408 - RNA, 19 nt, Artificial Sequence
  Description of Artificial Sequence: Synthetic oligonucleotide
  Sense strand starting at position 713 of SEQ ID NO: 913704
cauagagaccuuugaguca

SEQ ID NO: 947409 - RNA, 19 nt, Artificial Sequence
  Description of Artificial Sequence: Synthetic oligonucleotide
  Antisense strand to SEQ ID NO: 947408
ugacucaaaggucucuaug

SEQ ID NO: 947410 - RNA, 19 nt, Artificial Sequence
  Description of Artificial Sequence: Synthetic oligonucleotide
  Sense strand starting at position 30 of SEQ ID NO: 913704
uguugugaagaccaaaugu

SEQ ID NO: 947411 - RNA, 19 nt, Artificial Sequence
  Description of Artificial Sequence: Synthetic oligonucleotide
  Antisense strand to SEQ ID NO: 947410
acauuuggucuucacaaca

SEQ ID NO: 947412 - RNA, 19 nt, Artificial Sequence
  Description of Artificial Sequence: Synthetic oligonucleotide
  Sense strand starting at position 718 of SEQ ID NO: 913704
agaccuuugagucaacgua

SEQ ID NO: 947413 - RNA, 19 nt, Artificial Sequence
  Description of Artificial Sequence: Synthetic oligonucleotide
  Antisense strand to SEQ ID NO: 947412
uacguugacucaaaggucu

SEQ ID NO: 947414 - RNA, 19 nt, Artificial Sequence
  Description of Artificial Sequence: Synthetic oligonucleotide
  Sense strand starting at position 2176 of SEQ ID NO: 913704
cccggacagacuugugaaa

SEQ ID NO: 947415 - RNA, 19 nt, Artificial Sequence
  Description of Artificial Sequence: Synthetic oligonucleotide
  Antisense strand to SEQ ID NO: 947414
uuucacaagucuguccggg

SEQ ID NO: 947416 - RNA, 19 nt, Artificial Sequence
  Description of Artificial Sequence: Synthetic oligonucleotide
  Sense strand starting at position 288 of SEQ ID NO: 913704
cuagguuucccagagccua

SEQ ID NO: 947417 - RNA, 19 nt, Artificial Sequence
  Description of Artificial Sequence: Synthetic oligonucleotide
  Antisense strand to SEQ ID NO: 947416
uaggcucugggaaaccuag

SEQ ID NO: 947418 - RNA, 19 nt, Artificial Sequence
  Description of Artificial Sequence: Synthetic oligonucleotide
  Sense strand starting at position 3307 of SEQ ID NO: 913704
cugguagacuccuucccua

SEQ ID NO: 947419 - RNA, 19 nt, Artificial Sequence
  Description of Artificial Sequence: Synthetic oligonucleotide
  Antisense strand to SEQ ID NO: 947418
uagggaaggagucuaccag

SEQ ID NO: 947420 - RNA, 19 nt, Artificial Sequence
  Description of Artificial Sequence: Synthetic oligonucleotide
  Sense strand starting at position 492 of SEQ ID NO: 913704
ucuaguauucuuugaacga

SEQ ID NO: 947421 - RNA, 19 nt, Artificial Sequence
  Description of Artificial Sequence: Synthetic oligonucleotide
  Antisense strand to SEQ ID NO: 947420
ucguucaaagaauacuaga

SEQ ID NO: 947422 - RNA, 19 nt, Artificial Sequence
  Description of Artificial Sequence: Synthetic oligonucleotide
  Sense strand starting at position 773 of SEQ ID NO: 913704
agcccaggccuuugggaua

SEQ ID NO: 947423 - RNA, 19 nt, Artificial Sequence
  Description of Artificial Sequence: Synthetic oligonucleotide
  Antisense strand to SEQ ID NO: 947422
uaucccaaaggccugggcu

SEQ ID NO: 947424 - RNA, 19 nt, Artificial Sequence
  Description of Artificial Sequence: Synthetic oligonucleotide
  Sense strand starting at position 3731 of SEQ ID NO: 913704
guaugaggcaccuguacua

SEQ ID NO: 947425 - RNA, 19 nt, Artificial Sequence
  Description of Artificial Sequence: Synthetic oligonucleotide
  Antisense strand to SEQ ID NO: 947424
uaguacaggugccucauac

SEQ ID NO: 947426 - RNA, 19 nt, Artificial Sequence
  Description of Artificial Sequence: Synthetic oligonucleotide
  Sense strand starting at position 60 of SEQ ID NO: 913704
cacugucugcaauaguguu

SEQ ID NO: 947427 - RNA, 19 nt, Artificial Sequence
  Description of Artificial Sequence: Synthetic oligonucleotide
  Antisense strand to SEQ ID NO: 947426
aacacuauugcagacagug

SEQ ID NO: 947428 - RNA, 19 nt, Artificial Sequence
  Description of Artificial Sequence: Synthetic oligonucleotide
  Sense strand starting at position 1201 of SEQ ID NO: 913704
gcauuuggaugaugacuua

SEQ ID NO: 947429 - RNA, 19 nt, Artificial Sequence
  Description of Artificial Sequence: Synthetic oligonucleotide
  Antisense strand to SEQ ID NO: 947428
uaagucaucauccaaaugc

SEQ ID NO: 947430 - RNA, 19 nt, Artificial Sequence
  Description of Artificial Sequence: Synthetic oligonucleotide
  Sense strand starting at position 68 of SEQ ID NO: 913704
gcaauaguguuuguuaaca

SEQ ID NO: 947431 - RNA, 19 nt, Artificial Sequence
  Description of Artificial Sequence: Synthetic oligonucleotide
  Antisense strand to SEQ ID NO: 947430
uguuaacaaacacuauugc

SEQ ID NO: 947432 - RNA, 19 nt, Artificial Sequence
  Description of Artificial Sequence: Synthetic oligonucleotide
  Sense strand starting at position 344 of SEQ ID NO: 913704
agucuagagucugcacuuu

SEQ ID NO: 947433 - RNA, 19 nt, Artificial Sequence
  Description of Artificial Sequence: Synthetic oligonucleotide
  Antisense strand to SEQ ID NO: 947432
aaagugcagacucuagacu

SEQ ID NO: 947434 - RNA, 19 nt, Artificial Sequence
  Description of Artificial Sequence: Synthetic oligonucleotide
  Sense strand starting at position 1214 of SEQ ID NO: 913704
gacuuauguguccggcaaa

SEQ ID NO: 947435 - RNA, 19 nt, Artificial Sequence
  Description of Artificial Sequence: Synthetic oligonucleotide
  Antisense strand to SEQ ID NO: 947434
uuugccggacacauaaguc

SEQ ID NO: 947436 - RNA, 19 nt, Artificial Sequence
  Description of Artificial Sequence: Synthetic oligonucleotide
  Sense strand starting at position 3608 of SEQ ID NO: 913704
gccuacgguucccucaaua

SEQ ID NO: 947437 - RNA, 19 nt, Artificial Sequence
  Description of Artificial Sequence: Synthetic oligonucleotide
  Antisense strand to SEQ ID NO: 947436
uauugagggaaccguaggc

SEQ ID NO: 947438 - RNA, 19 nt, Artificial Sequence
  Description of Artificial Sequence: Synthetic oligonucleotide
  Sense strand starting at position 3109 of SEQ ID NO: 913704
ggcccuuucgucugggaua

SEQ ID NO: 947439 - RNA, 19 nt, Artificial Sequence
  Description of Artificial Sequence: Synthetic oligonucleotide
  Antisense strand to SEQ ID NO: 947438
uaucccagacgaaagggcc

SEQ ID NO: 947440 - RNA, 19 nt, Artificial Sequence
  Description of Artificial Sequence: Synthetic oligonucleotide
  Sense strand starting at position 66 of SEQ ID NO: 913704
cugcaauaguguuuguuaa

SEQ ID NO: 947441 - RNA, 19 nt, Artificial Sequence
  Description of Artificial Sequence: Synthetic oligonucleotide
  Antisense strand to SEQ ID NO: 947440
uuaacaaacacuauugcag

SEQ ID NO: 947442 - RNA, 19 nt, Artificial Sequence
  Description of Artificial Sequence: Synthetic oligonucleotide
  Sense strand starting at position 3607 of SEQ ID NO: 913704
ggccuacgguucccucaau

SEQ ID NO: 947443 - RNA, 19 nt, Artificial Sequence
  Description of Artificial Sequence: Synthetic oligonucleotide
  Antisense strand to SEQ ID NO: 947442
auugagggaaccguaggcc

SEQ ID NO: 947444 - RNA, 19 nt, Artificial Sequence
  Description of Artificial Sequence: Synthetic oligonucleotide
  Sense strand starting at position 67 of SEQ ID NO: 913704
ugcaauaguguuuguuaac

SEQ ID NO: 947445 - RNA, 19 nt, Artificial Sequence
  Description of Artificial Sequence: Synthetic oligonucleotide
  Antisense strand to SEQ ID NO: 947444
guuaacaaacacuauugca

SEQ ID NO: 947446 - RNA, 19 nt, Artificial Sequence
  Description of Artificial Sequence: Synthetic oligonucleotide
  Sense strand starting at position 1213 of SEQ ID NO: 913704
ugacuuauguguccggcaa

SEQ ID NO: 947447 - RNA, 19 nt, Artificial Sequence
  Description of Artificial Sequence: Synthetic oligonucleotide
  Antisense strand to SEQ ID NO: 947446
uugccggacacauaaguca

SEQ ID NO: 947448 - RNA, 19 nt, Artificial Sequence
  Description of Artificial Sequence: Synthetic oligonucleotide
  Sense strand starting at position 57 of SEQ ID NO: 913704
gugcacugucugcaauagu

SEQ ID NO: 947449 - RNA, 19 nt, Artificial Sequence
  Description of Artificial Sequence: Synthetic oligonucleotide
  Antisense strand to SEQ ID NO: 947448
acuauugcagacagugcac

SEQ ID NO: 947450 - RNA, 19 nt, Artificial Sequence
  Description of Artificial Sequence: Synthetic oligonucleotide
  Sense strand starting at position 55 of SEQ ID NO: 913704
augugcacugucugcaaua

SEQ ID NO: 947451 - RNA, 19 nt, Artificial Sequence
  Description of Artificial Sequence: Synthetic oligonucleotide
  Antisense strand to SEQ ID NO: 947450
uauugcagacagugcacau

SEQ ID NO: 947452 - RNA, 19 nt, Artificial Sequence
  Description of Artificial Sequence: Synthetic oligonucleotide
  Sense strand starting at position 3348 of SEQ ID NO: 913704
ccugaagacugguaaucua

SEQ ID NO: 947453 - RNA, 19 nt, Artificial Sequence
  Description of Artificial Sequence: Synthetic oligonucleotide
  Antisense strand to SEQ ID NO: 947452
uagauuaccagucuucagg

SEQ ID NO: 947454 - RNA, 19 nt, Artificial Sequence
  Description of Artificial Sequence: Synthetic oligonucleotide
  Sense strand starting at position 880 of SEQ ID NO: 913704
guucguuuguuugugagac

SEQ ID NO: 947455 - RNA, 19 nt, Artificial Sequence
  Description of Artificial Sequence: Synthetic oligonucleotide
  Antisense strand to SEQ ID NO: 947454
gucucacaaacaaacgaac

SEQ ID NO: 947456 - RNA, 19 nt, Artificial Sequence
  Description of Artificial Sequence: Synthetic oligonucleotide
  Sense strand starting at position 824 of SEQ ID NO: 913704
ggcuccaucucagacaaca

SEQ ID NO: 947457 - RNA, 19 nt, Artificial Sequence
  Description of Artificial Sequence: Synthetic oligonucleotide
  Antisense strand to SEQ ID NO: 947456
uguugucugagauggagcc

SEQ ID NO: 947458 - RNA, 19 nt, Artificial Sequence
  Description of Artificial Sequence: Synthetic oligonucleotide
  Sense strand starting at position 1253 of SEQ ID NO: 913704
ccuauaugaucaggcagga

SEQ ID NO: 947459 - RNA, 19 nt, Artificial Sequence
  Description of Artificial Sequence: Synthetic oligonucleotide
  Antisense strand to SEQ ID NO: 947458
uccugccugaucauauagg

SEQ ID NO: 947460 - RNA, 19 nt, Artificial Sequence
  Description of Artificial Sequence: Synthetic oligonucleotide
  Sense strand starting at position 3770 of SEQ ID NO: 913704
auaauugggucccaauguu

SEQ ID NO: 947461 - RNA, 19 nt, Artificial Sequence
  Description of Artificial Sequence: Synthetic oligonucleotide
  Antisense strand to SEQ ID NO: 947460
aacauugggacccaauuau

SEQ ID NO: 947462 - RNA, 19 nt, Artificial Sequence
  Description of Artificial Sequence: Synthetic oligonucleotide
  Sense strand starting at position 534 of SEQ ID NO: 913704
cccauuugaugccgaaguu

SEQ ID NO: 947463 - RNA, 19 nt, Artificial Sequence
  Description of Artificial Sequence: Synthetic oligonucleotide
  Antisense strand to SEQ ID NO: 947462
aacuucggcaucaaauggg

SEQ ID NO: 947464 - RNA, 19 nt, Artificial Sequence
  Description of Artificial Sequence: Synthetic oligonucleotide
  Sense strand starting at position 493 of SEQ ID NO: 913704
cuaguauucuuugaacgau

SEQ ID NO: 947465 - RNA, 19 nt, Artificial Sequence
  Description of Artificial Sequence: Synthetic oligonucleotide
  Antisense strand to SEQ ID NO: 947464
aucguucaaagaauacuag

SEQ ID NO: 947466 - RNA, 19 nt, Artificial Sequence
  Description of Artificial Sequence: Synthetic oligonucleotide
  Sense strand starting at position 879 of SEQ ID NO: 913704
cguucguuuguuugugaga

SEQ ID NO: 947467 - RNA, 19 nt, Artificial Sequence
  Description of Artificial Sequence: Synthetic oligonucleotide
  Antisense strand to SEQ ID NO: 947466
ucucacaaacaaacgaacg

SEQ ID NO: 947468 - RNA, 19 nt, Artificial Sequence
  Description of Artificial Sequence: Synthetic oligonucleotide
  Sense strand starting at position 3491 of SEQ ID NO: 913704
ccgccuucuucuccgcaau

SEQ ID NO: 947469 - RNA, 19 nt, Artificial Sequence
  Description of Artificial Sequence: Synthetic oligonucleotide
  Antisense strand to SEQ ID NO: 947468
auugcggagaagaaggcgg

SEQ ID NO: 947470 - RNA, 19 nt, Artificial Sequence
  Description of Artificial Sequence: Synthetic oligonucleotide
  Sense strand starting at position 3492 of SEQ ID NO: 913704
cgccuucuucuccgcaauu

SEQ ID NO: 947471 - RNA, 19 nt, Artificial Sequence
  Description of Artificial Sequence: Synthetic oligonucleotide
  Antisense strand to SEQ ID NO: 947470
aauugcggagaagaaggcg

SEQ ID NO: 947472 - RNA, 19 nt, Artificial Sequence
  Description of Artificial Sequence: Synthetic oligonucleotide
  Sense strand starting at position 1186 of SEQ ID NO: 913704
cuaguuaaguggcaagcau

SEQ ID NO: 947473 - RNA, 19 nt, Artificial Sequence
  Description of Artificial Sequence: Synthetic oligonucleotide
  Antisense strand to SEQ ID NO: 947472
augcuugccacuuaacuag

SEQ ID NO: 947474 - RNA, 19 nt, Artificial Sequence
  Description of Artificial Sequence: Synthetic oligonucleotide
  Sense strand starting at position 3696 of SEQ ID NO: 913704
gcaauagauuccugcuguc

SEQ ID NO: 947475 - RNA, 19 nt, Artificial Sequence
  Description of Artificial Sequence: Synthetic oligonucleotide
  Antisense strand to SEQ ID NO: 947474
gacagcaggaaucuauugc

SEQ ID NO: 947476 - RNA, 19 nt, Artificial Sequence
  Description of Artificial Sequence: Synthetic oligonucleotide
  Sense strand starting at position 881 of SEQ ID NO: 913704
uucguuuguuugugagaca

SEQ ID NO: 947477 - RNA, 19 nt, Artificial Sequence
  Description of Artificial Sequence: Synthetic oligonucleotide
  Antisense strand to SEQ ID NO: 947476
ugucucacaaacaaacgaa

SEQ ID NO: 947478 - RNA, 19 nt, Artificial Sequence
  Description of Artificial Sequence: Synthetic oligonucleotide
  Sense strand starting at position 2787 of SEQ ID NO: 913705
gccgcaagcaucucagagu

SEQ ID NO: 947479 - RNA, 19 nt, Artificial Sequence
  Description of Artificial Sequence: Synthetic oligonucleotide
  Antisense strand to SEQ ID NO: 947478
acucugagaugcuugcggc

SEQ ID NO: 947480 - RNA, 19 nt, Artificial Sequence
  Description of Artificial Sequence: Synthetic oligonucleotide
  Sense strand starting at position 3502 of SEQ ID NO: 913705
ggagaugacaguuguaaag

SEQ ID NO: 947481 - RNA, 19 nt, Artificial Sequence
  Description of Artificial Sequence: Synthetic oligonucleotide
  Antisense strand to SEQ ID NO: 947480
cuuuacaacugucaucucc

SEQ ID NO: 947482 - RNA, 19 nt, Artificial Sequence
  Description of Artificial Sequence: Synthetic oligonucleotide
  Sense strand starting at position 3512 of SEQ ID NO: 913705
guuguaaagacugagugga

SEQ ID NO: 947483 - RNA, 19 nt, Artificial Sequence
  Description of Artificial Sequence: Synthetic oligonucleotide
  Antisense strand to SEQ ID NO: 947482
uccacucagucuuuacaac

SEQ ID NO: 947484 - RNA, 19 nt, Artificial Sequence
  Description of Artificial Sequence: Synthetic oligonucleotide
  Sense strand starting at position 3979 of SEQ ID NO: 913705
aggguccuugaguagugaa

SEQ ID NO: 947485 - RNA, 19 nt, Artificial Sequence
  Description of Artificial Sequence: Synthetic oligonucleotide
  Antisense strand to SEQ ID NO: 947484
uucacuacucaaggacccu

SEQ ID NO: 947486 - RNA, 19 nt, Artificial Sequence
  Description of Artificial Sequence: Synthetic oligonucleotide
  Sense strand starting at position 3564 of SEQ ID NO: 913705
uugaauaguggugagccaa

SEQ ID NO: 947487 - RNA, 19 nt, Artificial Sequence
  Description of Artificial Sequence: Synthetic oligonucleotide
  Antisense strand to SEQ ID NO: 947486
uuggcucaccacuauucaa

SEQ ID NO: 947488 - RNA, 19 nt, Artificial Sequence
  Description of Artificial Sequence: Synthetic oligonucleotide
  Sense strand starting at position 899 of SEQ ID NO: 913705
ccaacuucccgagauuccu

SEQ ID NO: 947489 - RNA, 19 nt, Artificial Sequence
  Description of Artificial Sequence: Synthetic oligonucleotide
  Antisense strand to SEQ ID NO: 947488
aggaaucucgggaaguugg

SEQ ID NO: 947490 - RNA, 19 nt, Artificial Sequence
  Description of Artificial Sequence: Synthetic oligonucleotide
  Sense strand starting at position 111 of SEQ ID NO: 913705
guuggcuuuccugcgcaga

SEQ ID NO: 947491 - RNA, 19 nt, Artificial Sequence
  Description of Artificial Sequence: Synthetic oligonucleotide
  Antisense strand to SEQ ID NO: 947490
ucugcgcaggaaagccaac

SEQ ID NO: 947492 - RNA, 19 nt, Artificial Sequence
  Description of Artificial Sequence: Synthetic oligonucleotide
  Sense strand starting at position 3642 of SEQ ID NO: 913705
aagaguaagcauugguaga

SEQ ID NO: 947493 - RNA, 19 nt, Artificial Sequence
  Description of Artificial Sequence: Synthetic oligonucleotide
  Antisense strand to SEQ ID NO: 947492
ucuaccaaugcuuacucuu

SEQ ID NO: 947494 - RNA, 19 nt, Artificial Sequence
  Description of Artificial Sequence: Synthetic oligonucleotide
  Sense strand starting at position 3884 of SEQ ID NO: 913705
gucauacuugcccauggga

SEQ ID NO: 947495 - RNA, 19 nt, Artificial Sequence
  Description of Artificial Sequence: Synthetic oligonucleotide
  Antisense strand to SEQ ID NO: 947494
ucccaugggcaaguaugac

SEQ ID NO: 947496 - RNA, 19 nt, Artificial Sequence
  Description of Artificial Sequence: Synthetic oligonucleotide
  Sense strand starting at position 3830 of SEQ ID NO: 913705
aggugacuucuagguuaag

SEQ ID NO: 947497 - RNA, 19 nt, Artificial Sequence
  Description of Artificial Sequence: Synthetic oligonucleotide
  Antisense strand to SEQ ID NO: 947496
cuuaaccuagaagucaccu

SEQ ID NO: 947498 - RNA, 19 nt, Artificial Sequence
  Description of Artificial Sequence: Synthetic oligonucleotide
  Sense strand starting at position 3643 of SEQ ID NO: 913705
agaguaagcauugguagau

SEQ ID NO: 947499 - RNA, 19 nt, Artificial Sequence
  Description of Artificial Sequence: Synthetic oligonucleotide
  Antisense strand to SEQ ID NO: 947498
aucuaccaaugcuuacucu

SEQ ID NO: 947500 - RNA, 19 nt, Artificial Sequence
  Description of Artificial Sequence: Synthetic oligonucleotide
  Sense strand starting at position 3644 of SEQ ID NO: 913705
gaguaagcauugguagauu

SEQ ID NO: 947501 - RNA, 19 nt, Artificial Sequence
  Description of Artificial Sequence: Synthetic oligonucleotide
  Antisense strand to SEQ ID NO: 947500
aaucuaccaaugcuuacuc

SEQ ID NO: 947502 - RNA, 19 nt, Artificial Sequence
  Description of Artificial Sequence: Synthetic oligonucleotide
  Sense strand starting at position 3978 of SEQ ID NO: 913705
uaggguccuugaguaguga

SEQ ID NO: 947503 - RNA, 19 nt, Artificial Sequence
  Description of Artificial Sequence: Synthetic oligonucleotide
  Antisense strand to SEQ ID NO: 947502
ucacuacucaaggacccua

SEQ ID NO: 947504 - RNA, 19 nt, Artificial Sequence
  Description of Artificial Sequence: Synthetic oligonucleotide
  Sense strand starting at position 3886 of SEQ ID NO: 913705
cauacuugcccaugggagu

SEQ ID NO: 947505 - RNA, 19 nt, Artificial Sequence
  Description of Artificial Sequence: Synthetic oligonucleotide
  Antisense strand to SEQ ID NO: 947504
acucccaugggcaaguaug

SEQ ID NO: 947506 - RNA, 19 nt, Artificial Sequence
  Description of Artificial Sequence: Synthetic oligonucleotide
  Sense strand starting at position 3425 of SEQ ID NO: 913705
cuaugaaugagcuguguau

SEQ ID NO: 947507 - RNA, 19 nt, Artificial Sequence
  Description of Artificial Sequence: Synthetic oligonucleotide
  Antisense strand to SEQ ID NO: 947506
auacacagcucauucauag

SEQ ID NO: 947508 - RNA, 19 nt, Artificial Sequence
  Description of Artificial Sequence: Synthetic oligonucleotide
  Sense strand starting at position 3905 of SEQ ID NO: 913705
ggcugaaugugguccuaca

SEQ ID NO: 947509 - RNA, 19 nt, Artificial Sequence
  Description of Artificial Sequence: Synthetic oligonucleotide
  Antisense strand to SEQ ID NO: 947508
uguaggaccacauucagcc

SEQ ID NO: 947510 - RNA, 19 nt, Artificial Sequence
  Description of Artificial Sequence: Synthetic oligonucleotide
  Sense strand starting at position 3974 of SEQ ID NO: 913705
gucuuaggguccuugagua

SEQ ID NO: 947511 - RNA, 19 nt, Artificial Sequence
  Description of Artificial Sequence: Synthetic oligonucleotide
  Antisense strand to SEQ ID NO: 947510
uacucaaggacccuaagac

SEQ ID NO: 947512 - RNA, 19 nt, Artificial Sequence
  Description of Artificial Sequence: Synthetic oligonucleotide
  Sense strand starting at position 3432 of SEQ ID NO: 913705
ugagcuguguaugcucaga

SEQ ID NO: 947513 - RNA, 19 nt, Artificial Sequence
  Description of Artificial Sequence: Synthetic oligonucleotide
  Antisense strand to SEQ ID NO: 947512
ucugagcauacacagcuca

SEQ ID NO: 947514 - RNA, 19 nt, Artificial Sequence
  Description of Artificial Sequence: Synthetic oligonucleotide
  Sense strand starting at position 3434 of SEQ ID NO: 913705
agcuguguaugcucagaug

SEQ ID NO: 947515 - RNA, 19 nt, Artificial Sequence
  Description of Artificial Sequence: Synthetic oligonucleotide
  Antisense strand to SEQ ID NO: 947514
caucugagcauacacagcu

SEQ ID NO: 947516 - RNA, 19 nt, Artificial Sequence
  Description of Artificial Sequence: Synthetic oligonucleotide
  Sense strand starting at position 3504 of SEQ ID NO: 913705
agaugacaguuguaaagac

SEQ ID NO: 947517 - RNA, 19 nt, Artificial Sequence
  Description of Artificial Sequence: Synthetic oligonucleotide
  Antisense strand to SEQ ID NO: 947516
gucuuuacaacugucaucu

SEQ ID NO: 947518 - RNA, 19 nt, Artificial Sequence
  Description of Artificial Sequence: Synthetic oligonucleotide
  Sense strand starting at position 3229 of SEQ ID NO: 913705
cuggcagagccucguucaa

SEQ ID NO: 947519 - RNA, 19 nt, Artificial Sequence
  Description of Artificial Sequence: Synthetic oligonucleotide
  Antisense strand to SEQ ID NO: 947518
uugaacgaggcucugccag

SEQ ID NO: 947520 - RNA, 19 nt, Artificial Sequence
  Description of Artificial Sequence: Synthetic oligonucleotide
  Sense strand starting at position 3828 of SEQ ID NO: 913705
caaggugacuucuagguua

SEQ ID NO: 947521 - RNA, 19 nt, Artificial Sequence
  Description of Artificial Sequence: Synthetic oligonucleotide
  Antisense strand to SEQ ID NO: 947520
uaaccuagaagucaccuug

SEQ ID NO: 947522 - RNA, 19 nt, Artificial Sequence
  Description of Artificial Sequence: Synthetic oligonucleotide
  Sense strand starting at position 828 of SEQ ID NO: 913705
uucccaacuuccggaaaga

SEQ ID NO: 947523 - RNA, 19 nt, Artificial Sequence
  Description of Artificial Sequence: Synthetic oligonucleotide
  Antisense strand to SEQ ID NO: 947522
ucuuuccggaaguugggaa

SEQ ID NO: 947524 - RNA, 19 nt, Artificial Sequence
  Description of Artificial Sequence: Synthetic oligonucleotide
  Sense strand starting at position 2790 of SEQ ID NO: 913705
gcaagcaucucagaguaga

SEQ ID NO: 947525 - RNA, 19 nt, Artificial Sequence
  Description of Artificial Sequence: Synthetic oligonucleotide
  Antisense strand to SEQ ID NO: 947524
ucuacucugagaugcuugc

SEQ ID NO: 947526 - RNA, 19 nt, Artificial Sequence
  Description of Artificial Sequence: Synthetic oligonucleotide
  Sense strand starting at position 1812 of SEQ ID NO: 913705
cgcgcuuaccgauguggau

SEQ ID NO: 947527 - RNA, 19 nt, Artificial Sequence
  Description of Artificial Sequence: Synthetic oligonucleotide
  Antisense strand to SEQ ID NO: 947526
auccacaucgguaagcgcg

SEQ ID NO: 947528 - RNA, 19 nt, Artificial Sequence
  Description of Artificial Sequence: Synthetic oligonucleotide
  Sense strand starting at position 3874 of SEQ ID NO: 913705
guggucauaugucauacuu

SEQ ID NO: 947529 - RNA, 19 nt, Artificial Sequence
  Description of Artificial Sequence: Synthetic oligonucleotide
  Antisense strand to SEQ ID NO: 947528
aaguaugacauaugaccac

SEQ ID NO: 947530 - RNA, 19 nt, Artificial Sequence
  Description of Artificial Sequence: Synthetic oligonucleotide
  Sense strand starting at position 3563 of SEQ ID NO: 913705
auugaauaguggugagcca

SEQ ID NO: 947531 - RNA, 19 nt, Artificial Sequence
  Description of Artificial Sequence: Synthetic oligonucleotide
  Antisense strand to SEQ ID NO: 947530
uggcucaccacuauucaau

SEQ ID NO: 947532 - RNA, 19 nt, Artificial Sequence
  Description of Artificial Sequence: Synthetic oligonucleotide
  Sense strand starting at position 2788 of SEQ ID NO: 913705
ccgcaagcaucucagagua

SEQ ID NO: 947533 - RNA, 19 nt, Artificial Sequence
  Description of Artificial Sequence: Synthetic oligonucleotide
  Antisense strand to SEQ ID NO: 947532
uacucugagaugcuugcgg

SEQ ID NO: 947534 - RNA, 19 nt, Artificial Sequence
  Description of Artificial Sequence: Synthetic oligonucleotide
  Sense strand starting at position 896 of SEQ ID NO: 913705
ggcccaacuucccgagauu

SEQ ID NO: 947535 - RNA, 19 nt, Artificial Sequence
  Description of Artificial Sequence: Synthetic oligonucleotide
  Antisense strand to SEQ ID NO: 947534
aaucucgggaaguugggcc

SEQ ID NO: 947536 - RNA, 19 nt, Artificial Sequence
  Description of Artificial Sequence: Synthetic oligonucleotide
  Sense strand starting at position 1572 of SEQ ID NO: 913705
ggcccuaagugucgguaga

SEQ ID NO: 947537 - RNA, 19 nt, Artificial Sequence
  Description of Artificial Sequence: Synthetic oligonucleotide
  Antisense strand to SEQ ID NO: 947536
ucuaccgacacuuagggcc

SEQ ID NO: 947538 - RNA, 19 nt, Artificial Sequence
  Description of Artificial Sequence: Synthetic oligonucleotide
  Sense strand starting at position 908 of SEQ ID NO: 913705
cgagauuccucccguguug

SEQ ID NO: 947539 - RNA, 19 nt, Artificial Sequence
  Description of Artificial Sequence: Synthetic oligonucleotide
  Antisense strand to SEQ ID NO: 947538
caacacgggaggaaucucg

SEQ ID NO: 947540 - RNA, 19 nt, Artificial Sequence
  Description of Artificial Sequence: Synthetic oligonucleotide
  Sense strand starting at position 973 of SEQ ID NO: 913706
agcuaaaugcaggaaaucu

SEQ ID NO: 947541 - RNA, 19 nt, Artificial Sequence
  Description of Artificial Sequence: Synthetic oligonucleotide
  Antisense strand to SEQ ID NO: 947540
agauuuccugcauuuagcu

SEQ ID NO: 947542 - RNA, 19 nt, Artificial Sequence
  Description of Artificial Sequence: Synthetic oligonucleotide
  Sense strand starting at position 400 of SEQ ID NO: 913706
acaagugacgacgaaagua

SEQ ID NO: 947543 - RNA, 19 nt, Artificial Sequence
  Description of Artificial Sequence: Synthetic oligonucleotide
  Antisense strand to SEQ ID NO: 947542
uacuuucgucgucacuugu

SEQ ID NO: 947544 - RNA, 19 nt, Artificial Sequence
  Description of Artificial Sequence: Synthetic oligonucleotide
  Sense strand starting at position 814 of SEQ ID NO: 913706
auauguuuacauggacaca

SEQ ID NO: 947545 - RNA, 19 nt, Artificial Sequence
  Description of Artificial Sequence: Synthetic oligonucleotide
  Antisense strand to SEQ ID NO: 947544
uguguccauguaaacauau

SEQ ID NO: 947546 - RNA, 19 nt, Artificial Sequence
  Description of Artificial Sequence: Synthetic oligonucleotide
  Sense strand starting at position 508 of SEQ ID NO: 913706
gauggaacgggcugaauaa

SEQ ID NO: 947547 - RNA, 19 nt, Artificial Sequence
  Description of Artificial Sequence: Synthetic oligonucleotide
  Antisense strand to SEQ ID NO: 947546
uuauucagcccguuccauc

SEQ ID NO: 947548 - RNA, 19 nt, Artificial Sequence
  Description of Artificial Sequence: Synthetic oligonucleotide
  Sense strand starting at position 1217 of SEQ ID NO: 913706
ggauuucccuaagaaacau

SEQ ID NO: 947549 - RNA, 19 nt, Artificial Sequence
  Description of Artificial Sequence: Synthetic oligonucleotide
  Antisense strand to SEQ ID NO: 947548
auguuucuuagggaaaucc

SEQ ID NO: 947550 - RNA, 19 nt, Artificial Sequence
  Description of Artificial Sequence: Synthetic oligonucleotide
  Sense strand starting at position 222 of SEQ ID NO: 913706
gccuuagaaccugaaguca

SEQ ID NO: 947551 - RNA, 19 nt, Artificial Sequence
  Description of Artificial Sequence: Synthetic oligonucleotide
  Antisense strand to SEQ ID NO: 947550
ugacuucagguucuaaggc

SEQ ID NO: 947552 - RNA, 19 nt, Artificial Sequence
  Description of Artificial Sequence: Synthetic oligonucleotide
  Sense strand starting at position 3405 of SEQ ID NO: 913706
agagaacaguuauuaugca

SEQ ID NO: 947553 - RNA, 19 nt, Artificial Sequence
  Description of Artificial Sequence: Synthetic oligonucleotide
  Antisense strand to SEQ ID NO: 947552
ugcauaauaacuguucucu

SEQ ID NO: 947554 - RNA, 19 nt, Artificial Sequence
  Description of Artificial Sequence: Synthetic oligonucleotide
  Sense strand starting at position 1481 of SEQ ID NO: 913706
ggagauauguuagcaucca

SEQ ID NO: 947555 - RNA, 19 nt, Artificial Sequence
  Description of Artificial Sequence: Synthetic oligonucleotide
  Antisense strand to SEQ ID NO: 947554
uggaugcuaacauaucucc

SEQ ID NO: 947556 - RNA, 19 nt, Artificial Sequence
  Description of Artificial Sequence: Synthetic oligonucleotide
  Sense strand starting at position 538 of SEQ ID NO: 913706
uuuauugcuggccagaaau

SEQ ID NO: 947557 - RNA, 19 nt, Artificial Sequence
  Description of Artificial Sequence: Synthetic oligonucleotide
  Antisense strand to SEQ ID NO: 947556
auuucuggccagcaauaaa

SEQ ID NO: 947558 - RNA, 19 nt, Artificial Sequence
  Description of Artificial Sequence: Synthetic oligonucleotide
  Sense strand starting at position 3103 of SEQ ID NO: 913706
caguguuaugcucagaaca

SEQ ID NO: 947559 - RNA, 19 nt, Artificial Sequence
  Description of Artificial Sequence: Synthetic oligonucleotide
  Antisense strand to SEQ ID NO: 947558
uguucugagcauaacacug

SEQ ID NO: 947560 - RNA, 19 nt, Artificial Sequence
  Description of Artificial Sequence: Synthetic oligonucleotide
  Sense strand starting at position 3413 of SEQ ID NO: 913706
guuauuaugcauuggagaa

SEQ ID NO: 947561 - RNA, 19 nt, Artificial Sequence
  Description of Artificial Sequence: Synthetic oligonucleotide
  Antisense strand to SEQ ID NO: 947560
uucuccaaugcauaauaac

SEQ ID NO: 947562 - RNA, 19 nt, Artificial Sequence
  Description of Artificial Sequence: Synthetic oligonucleotide
  Sense strand starting at position 3829 of SEQ ID NO: 913706
cagcauagggccugaugaa

SEQ ID NO: 947563 - RNA, 19 nt, Artificial Sequence
  Description of Artificial Sequence: Synthetic oligonucleotide
  Antisense strand to SEQ ID NO: 947562
uucaucaggcccuaugcug

SEQ ID NO: 947564 - RNA, 19 nt, Artificial Sequence
  Description of Artificial Sequence: Synthetic oligonucleotide
  Sense strand starting at position 387 of SEQ ID NO: 913706
cugcuuuagagugacaagu

SEQ ID NO: 947565 - RNA, 19 nt, Artificial Sequence
  Description of Artificial Sequence: Synthetic oligonucleotide
  Antisense strand to SEQ ID NO: 947564
acuugucacucuaaagcag

SEQ ID NO: 947566 - RNA, 19 nt, Artificial Sequence
  Description of Artificial Sequence: Synthetic oligonucleotide
  Sense strand starting at position 1243 of SEQ ID NO: 913706
gaugguuuccagcaauagu

SEQ ID NO: 947567 - RNA, 19 nt, Artificial Sequence
  Description of Artificial Sequence: Synthetic oligonucleotide
  Antisense strand to SEQ ID NO: 947566
acuauugcuggaaaccauc

SEQ ID NO: 947568 - RNA, 19 nt, Artificial Sequence
  Description of Artificial Sequence: Synthetic oligonucleotide
  Sense strand starting at position 3673 of SEQ ID NO: 913706
aggaauuacuguucuaagc

SEQ ID NO: 947569 - RNA, 19 nt, Artificial Sequence
  Description of Artificial Sequence: Synthetic oligonucleotide
  Antisense strand to SEQ ID NO: 947568
gcuuagaacaguaauuccu

SEQ ID NO: 947570 - RNA, 19 nt, Artificial Sequence
  Description of Artificial Sequence: Synthetic oligonucleotide
  Sense strand starting at position 989 of SEQ ID NO: 913706
ucuaaugauuugcauagaa

SEQ ID NO: 947571 - RNA, 19 nt, Artificial Sequence
  Description of Artificial Sequence: Synthetic oligonucleotide
  Antisense strand to SEQ ID NO: 947570
uucuaugcaaaucauuaga

SEQ ID NO: 947572 - RNA, 19 nt, Artificial Sequence
  Description of Artificial Sequence: Synthetic oligonucleotide
  Sense strand starting at position 3473 of SEQ ID NO: 913706
cuggucacugauuguaaca

SEQ ID NO: 947573 - RNA, 19 nt, Artificial Sequence
  Description of Artificial Sequence: Synthetic oligonucleotide
  Antisense strand to SEQ ID NO: 947572
uguuacaaucagugaccag

SEQ ID NO: 947574 - RNA, 19 nt, Artificial Sequence
  Description of Artificial Sequence: Synthetic oligonucleotide
  Sense strand starting at position 1246 of SEQ ID NO: 913706
gguuuccagcaauagucua

SEQ ID NO: 947575 - RNA, 19 nt, Artificial Sequence
  Description of Artificial Sequence: Synthetic oligonucleotide
  Antisense strand to SEQ ID NO: 947574
uagacuauugcuggaaacc

SEQ ID NO: 947576 - RNA, 19 nt, Artificial Sequence
  Description of Artificial Sequence: Synthetic oligonucleotide
  Sense strand starting at position 1582 of SEQ ID NO: 913706
cgaaguguccugcucgcga

SEQ ID NO: 947577 - RNA, 19 nt, Artificial Sequence
  Description of Artificial Sequence: Synthetic oligonucleotide
  Antisense strand to SEQ ID NO: 947576
ucgcgagcaggacacuucg

SEQ ID NO: 947578 - RNA, 19 nt, Artificial Sequence
  Description of Artificial Sequence: Synthetic oligonucleotide
  Sense strand starting at position 3858 of SEQ ID NO: 913706
uguuuauucggcuaacaua

SEQ ID NO: 947579 - RNA, 19 nt, Artificial Sequence
  Description of Artificial Sequence: Synthetic oligonucleotide
  Antisense strand to SEQ ID NO: 947578
uauguuagccgaauaaaca

SEQ ID NO: 947580 - RNA, 19 nt, Artificial Sequence
  Description of Artificial Sequence: Synthetic oligonucleotide
  Sense strand starting at position 917 of SEQ ID NO: 913706
guucuuaggguuugacuca

SEQ ID NO: 947581 - RNA, 19 nt, Artificial Sequence
  Description of Artificial Sequence: Synthetic oligonucleotide
  Antisense strand to SEQ ID NO: 947580
ugagucaaacccuaagaac

SEQ ID NO: 947582 - RNA, 19 nt, Artificial Sequence
  Description of Artificial Sequence: Synthetic oligonucleotide
  Sense strand starting at position 2877 of SEQ ID NO: 913706
cugcuuauucugugaauaa

SEQ ID NO: 947583 - RNA, 19 nt, Artificial Sequence
  Description of Artificial Sequence: Synthetic oligonucleotide
  Antisense strand to SEQ ID NO: 947582
uuauucacagaauaagcag

SEQ ID NO: 947584 - RNA, 19 nt, Artificial Sequence
  Description of Artificial Sequence: Synthetic oligonucleotide
  Sense strand starting at position 3328 of SEQ ID NO: 913706
ggccuucucuguccagaag

SEQ ID NO: 947585 - RNA, 19 nt, Artificial Sequence
  Description of Artificial Sequence: Synthetic oligonucleotide
  Antisense strand to SEQ ID NO: 947584
cuucuggacagagaaggcc

SEQ ID NO: 947586 - RNA, 19 nt, Artificial Sequence
  Description of Artificial Sequence: Synthetic oligonucleotide
  Sense strand starting at position 3544 of SEQ ID NO: 913706
ggugucuagacuuggguca

SEQ ID NO: 947587 - RNA, 19 nt, Artificial Sequence
  Description of Artificial Sequence: Synthetic oligonucleotide
  Antisense strand to SEQ ID NO: 947586
ugacccaagucuagacacc

SEQ ID NO: 947588 - RNA, 19 nt, Artificial Sequence
  Description of Artificial Sequence: Synthetic oligonucleotide
  Sense strand starting at position 386 of SEQ ID NO: 913706
gcugcuuuagagugacaag

SEQ ID NO: 947589 - RNA, 19 nt, Artificial Sequence
  Description of Artificial Sequence: Synthetic oligonucleotide
  Antisense strand to SEQ ID NO: 947588
cuugucacucuaaagcagc

SEQ ID NO: 947590 - RNA, 19 nt, Artificial Sequence
  Description of Artificial Sequence: Synthetic oligonucleotide
  Sense strand starting at position 3469 of SEQ ID NO: 913706
uggucuggucacugauugu

SEQ ID NO: 947591 - RNA, 19 nt, Artificial Sequence
  Description of Artificial Sequence: Synthetic oligonucleotide
  Antisense strand to SEQ ID NO: 947590
acaaucagugaccagacca

SEQ ID NO: 947592 - RNA, 19 nt, Artificial Sequence
  Description of Artificial Sequence: Synthetic oligonucleotide
  Sense strand starting at position 909 of SEQ ID NO: 913706
aaauaugcguucuuagggu

SEQ ID NO: 947593 - RNA, 19 nt, Artificial Sequence
  Description of Artificial Sequence: Synthetic oligonucleotide
  Antisense strand to SEQ ID NO: 947592
acccuaagaacgcauauuu

SEQ ID NO: 947594 - RNA, 19 nt, Artificial Sequence
  Description of Artificial Sequence: Synthetic oligonucleotide
  Sense strand starting at position 1239 of SEQ ID NO: 913706
agcggaugguuuccagcaa

SEQ ID NO: 947595 - RNA, 19 nt, Artificial Sequence
  Description of Artificial Sequence: Synthetic oligonucleotide
  Antisense strand to SEQ ID NO: 947594
uugcuggaaaccauccgcu

SEQ ID NO: 947596 - RNA, 19 nt, Artificial Sequence
  Description of Artificial Sequence: Synthetic oligonucleotide
  Sense strand starting at position 3856 of SEQ ID NO: 913706
uuuguuuauucggcuaaca

SEQ ID NO: 947597 - RNA, 19 nt, Artificial Sequence
  Description of Artificial Sequence: Synthetic oligonucleotide
  Antisense strand to SEQ ID NO: 947596
uguuagccgaauaaacaaa

SEQ ID NO: 947598 - RNA, 19 nt, Artificial Sequence
  Description of Artificial Sequence: Synthetic oligonucleotide
  Sense strand starting at position 1470 of SEQ ID NO: 913706
gcuggaaacuaggagauau

SEQ ID NO: 947599 - RNA, 19 nt, Artificial Sequence
  Description of Artificial Sequence: Synthetic oligonucleotide
  Antisense strand to SEQ ID NO: 947598
auaucuccuaguuuccagc

SEQ ID NO: 947600 - RNA, 19 nt, Artificial Sequence
  Description of Artificial Sequence: Synthetic oligonucleotide
  Sense strand starting at position 663 of SEQ ID NO: 913706
ugccuucuaccuuguauca

SEQ ID NO: 947601 - RNA, 19 nt, Artificial Sequence
  Description of Artificial Sequence: Synthetic oligonucleotide
  Antisense strand to SEQ ID NO: 947600
ugauacaagguagaaggca

SEQ ID NO: 947602 - RNA, 19 nt, Artificial Sequence
  Description of Artificial Sequence: Synthetic oligonucleotide
  Sense strand starting at position 2876 of SEQ ID NO: 913706
gcugcuuauucugugaaua

SEQ ID NO: 947603 - RNA, 19 nt, Artificial Sequence
  Description of Artificial Sequence: Synthetic oligonucleotide
  Antisense strand to SEQ ID NO: 947602
uauucacagaauaagcagc

SEQ ID NO: 947604 - RNA, 19 nt, Artificial Sequence
  Description of Artificial Sequence: Synthetic oligonucleotide
  Sense strand starting at position 3094 of SEQ ID NO: 913706
agcuccuuccaguguuaug

SEQ ID NO: 947605 - RNA, 19 nt, Artificial Sequence
  Description of Artificial Sequence: Synthetic oligonucleotide
  Antisense strand to SEQ ID NO: 947604
cauaacacuggaaggagcu

SEQ ID NO: 947606 - RNA, 19 nt, Artificial Sequence
  Description of Artificial Sequence: Synthetic oligonucleotide
  Sense strand starting at position 3697 of SEQ ID NO: 913706
aggcuuggucuuugcuaca

SEQ ID NO: 947607 - RNA, 19 nt, Artificial Sequence
  Description of Artificial Sequence: Synthetic oligonucleotide
  Antisense strand to SEQ ID NO: 947606
uguagcaaagaccaagccu

SEQ ID NO: 947608 - RNA, 19 nt, Artificial Sequence
  Description of Artificial Sequence: Synthetic oligonucleotide
  Sense strand starting at position 3853 of SEQ ID NO: 913706
aaguuuguuuauucggcua

SEQ ID NO: 947609 - RNA, 19 nt, Artificial Sequence
  Description of Artificial Sequence: Synthetic oligonucleotide
  Antisense strand to SEQ ID NO: 947608
uagccgaauaaacaaacuu

SEQ ID NO: 947610 - RNA, 19 nt, Artificial Sequence
  Description of Artificial Sequence: Synthetic oligonucleotide
  Sense strand starting at position 1359 of SEQ ID NO: 913706
gccgacuugaaacgcuauu

SEQ ID NO: 947611 - RNA, 19 nt, Artificial Sequence
  Description of Artificial Sequence: Synthetic oligonucleotide
  Antisense strand to SEQ ID NO: 947610
aauagcguuucaagucggc

SEQ ID NO: 947612 - RNA, 19 nt, Artificial Sequence
  Description of Artificial Sequence: Synthetic oligonucleotide
  Sense strand starting at position 687 of SEQ ID NO: 913706
agcguucucccgugaaagg

SEQ ID NO: 947613 - RNA, 19 nt, Artificial Sequence
  Description of Artificial Sequence: Synthetic oligonucleotide
  Antisense strand to SEQ ID NO: 947612
ccuuucacgggagaacgcu

SEQ ID NO: 947614 - RNA, 19 nt, Artificial Sequence
  Description of Artificial Sequence: Synthetic oligonucleotide
  Sense strand starting at position 3848 of SEQ ID NO: 913706
gcccgaaguuuguuuauuc

SEQ ID NO: 947615 - RNA, 19 nt, Artificial Sequence
  Description of Artificial Sequence: Synthetic oligonucleotide
  Antisense strand to SEQ ID NO: 947614
gaauaaacaaacuucgggc

SEQ ID NO: 947616 - RNA, 19 nt, Artificial Sequence
  Description of Artificial Sequence: Synthetic oligonucleotide
  Sense strand starting at position 2596 of SEQ ID NO: 913706
gucugagucccgggucagu

SEQ ID NO: 947617 - RNA, 19 nt, Artificial Sequence
  Description of Artificial Sequence: Synthetic oligonucleotide
  Antisense strand to SEQ ID NO: 947616
acugacccgggacucagac

SEQ ID NO: 947618 - RNA, 19 nt, Artificial Sequence
  Description of Artificial Sequence: Synthetic oligonucleotide
  Sense strand starting at position 785 of SEQ ID NO: 913706
cgacauaaauuccagguau

SEQ ID NO: 947619 - RNA, 19 nt, Artificial Sequence
  Description of Artificial Sequence: Synthetic oligonucleotide
  Antisense strand to SEQ ID NO: 947618
auaccuggaauuuaugucg

SEQ ID NO: 947620 - RNA, 19 nt, Artificial Sequence
  Description of Artificial Sequence: Synthetic oligonucleotide
  Sense strand starting at position 511 of SEQ ID NO: 913707
augcauuucuuagugaagu

SEQ ID NO: 947621 - RNA, 19 nt, Artificial Sequence
  Description of Artificial Sequence: Synthetic oligonucleotide
  Antisense strand to SEQ ID NO: 947620
acuucacuaagaaaugcau

SEQ ID NO: 947622 - RNA, 19 nt, Artificial Sequence
  Description of Artificial Sequence: Synthetic oligonucleotide
  Sense strand starting at position 938 of SEQ ID NO: 913707
caggaauaugugcaguaaa

SEQ ID NO: 947623 - RNA, 19 nt, Artificial Sequence
  Description of Artificial Sequence: Synthetic oligonucleotide
  Antisense strand to SEQ ID NO: 947622
uuuacugcacauauuccug

SEQ ID NO: 947624 - RNA, 19 nt, Artificial Sequence
  Description of Artificial Sequence: Synthetic oligonucleotide
  Sense strand starting at position 1005 of SEQ ID NO: 913707
guaaauuacuauucuagga

SEQ ID NO: 947625 - RNA, 19 nt, Artificial Sequence
  Description of Artificial Sequence: Synthetic oligonucleotide
  Antisense strand to SEQ ID NO: 947624
uccuagaauaguaauuuac

SEQ ID NO: 947626 - RNA, 19 nt, Artificial Sequence
  Description of Artificial Sequence: Synthetic oligonucleotide
  Sense strand starting at position 268 of SEQ ID NO: 913707
acuaaagguccagggugaa

SEQ ID NO: 947627 - RNA, 19 nt, Artificial Sequence
  Description of Artificial Sequence: Synthetic oligonucleotide
  Antisense strand to SEQ ID NO: 947626
uucacccuggaccuuuagu

SEQ ID NO: 947628 - RNA, 19 nt, Artificial Sequence
  Description of Artificial Sequence: Synthetic oligonucleotide
  Sense strand starting at position 2662 of SEQ ID NO: 913707
agugaaugcugaucaaagg

SEQ ID NO: 947629 - RNA, 19 nt, Artificial Sequence
  Description of Artificial Sequence: Synthetic oligonucleotide
  Antisense strand to SEQ ID NO: 947628
ccuuugaucagcauucacu

SEQ ID NO: 947630 - RNA, 19 nt, Artificial Sequence
  Description of Artificial Sequence: Synthetic oligonucleotide
  Sense strand starting at position 3463 of SEQ ID NO: 913707
augacuucugcccaugaug

SEQ ID NO: 947631 - RNA, 19 nt, Artificial Sequence
  Description of Artificial Sequence: Synthetic oligonucleotide
  Antisense strand to SEQ ID NO: 947630
caucaugggcagaagucau

SEQ ID NO: 947632 - RNA, 19 nt, Artificial Sequence
  Description of Artificial Sequence: Synthetic oligonucleotide
  Sense strand starting at position 2899 of SEQ ID NO: 913707
gucauuuccuuugauuuac

SEQ ID NO: 947633 - RNA, 19 nt, Artificial Sequence
  Description of Artificial Sequence: Synthetic oligonucleotide
  Antisense strand to SEQ ID NO: 947632
guaaaucaaaggaaaugac

SEQ ID NO: 947634 - RNA, 19 nt, Artificial Sequence
  Description of Artificial Sequence: Synthetic oligonucleotide
  Sense strand starting at position 1112 of SEQ ID NO: 913707
ccaggaauucgugaccuac

SEQ ID NO: 947635 - RNA, 19 nt, Artificial Sequence
  Description of Artificial Sequence: Synthetic oligonucleotide
  Antisense strand to SEQ ID NO: 947634
guaggucacgaauuccugg

SEQ ID NO: 947636 - RNA, 19 nt, Artificial Sequence
  Description of Artificial Sequence: Synthetic oligonucleotide
  Sense strand starting at position 1317 of SEQ ID NO: 913707
uuuaaugugcaguaaagga

SEQ ID NO: 947637 - RNA, 19 nt, Artificial Sequence
  Description of Artificial Sequence: Synthetic oligonucleotide
  Antisense strand to SEQ ID NO: 947636
uccuuuacugcacauuaaa

SEQ ID NO: 947638 - RNA, 19 nt, Artificial Sequence
  Description of Artificial Sequence: Synthetic oligonucleotide
  Sense strand starting at position 117 of SEQ ID NO: 913707
ggucuauuaauguaguaga

SEQ ID NO: 947639 - RNA, 19 nt, Artificial Sequence
  Description of Artificial Sequence: Synthetic oligonucleotide
  Antisense strand to SEQ ID NO: 947638
ucuacuacauuaauagacc

SEQ ID NO: 947640 - RNA, 19 nt, Artificial Sequence
  Description of Artificial Sequence: Synthetic oligonucleotide
  Sense strand starting at position 1307 of SEQ ID NO: 913707
ccgagaauaguuuaaugug

SEQ ID NO: 947641 - RNA, 19 nt, Artificial Sequence
  Description of Artificial Sequence: Synthetic oligonucleotide
  Antisense strand to SEQ ID NO: 947640
cacauuaaacuauucucgg

SEQ ID NO: 947642 - RNA, 19 nt, Artificial Sequence
  Description of Artificial Sequence: Synthetic oligonucleotide
  Sense strand starting at position 1217 of SEQ ID NO: 913707
gguuaaucuaaaugaggug

SEQ ID NO: 947643 - RNA, 19 nt, Artificial Sequence
  Description of Artificial Sequence: Synthetic oligonucleotide
  Antisense strand to SEQ ID NO: 947642
caccucauuuagauuaacc

SEQ ID NO: 947644 - RNA, 19 nt, Artificial Sequence
  Description of Artificial Sequence: Synthetic oligonucleotide
  Sense strand starting at position 3951 of SEQ ID NO: 913707
gguaacuccugugccauuu

SEQ ID NO: 947645 - RNA, 19 nt, Artificial Sequence
  Description of Artificial Sequence: Synthetic oligonucleotide
  Antisense strand to SEQ ID NO: 947644
aaauggcacaggaguuacc

SEQ ID NO: 947646 - RNA, 19 nt, Artificial Sequence
  Description of Artificial Sequence: Synthetic oligonucleotide
  Sense strand starting at position 941 of SEQ ID NO: 913707
gaauaugugcaguaaacuc

SEQ ID NO: 947647 - RNA, 19 nt, Artificial Sequence
  Description of Artificial Sequence: Synthetic oligonucleotide
  Antisense strand to SEQ ID NO: 947646
gaguuuacugcacauauuc

SEQ ID NO: 947648 - RNA, 19 nt, Artificial Sequence
  Description of Artificial Sequence: Synthetic oligonucleotide
  Sense strand starting at position 287 of SEQ ID NO: 913707
gcacauaacccaggacuuu

SEQ ID NO: 947649 - RNA, 19 nt, Artificial Sequence
  Description of Artificial Sequence: Synthetic oligonucleotide
  Antisense strand to SEQ ID NO: 947648
aaaguccuggguuaugugc

SEQ ID NO: 947650 - RNA, 19 nt, Artificial Sequence
  Description of Artificial Sequence: Synthetic oligonucleotide
  Sense strand starting at position 1211 of SEQ ID NO: 913707
augguugguuaaucuaaau

SEQ ID NO: 947651 - RNA, 19 nt, Artificial Sequence
  Description of Artificial Sequence: Synthetic oligonucleotide
  Antisense strand to SEQ ID NO: 947650
auuuagauuaaccaaccau

SEQ ID NO: 947652 - RNA, 19 nt, Artificial Sequence
  Description of Artificial Sequence: Synthetic oligonucleotide
  Sense strand starting at position 1206 of SEQ ID NO: 913707
auuaaaugguugguuaauc

SEQ ID NO: 947653 - RNA, 19 nt, Artificial Sequence
  Description of Artificial Sequence: Synthetic oligonucleotide
  Antisense strand to SEQ ID NO: 947652
gauuaaccaaccauuuaau

SEQ ID NO: 947654 - RNA, 19 nt, Artificial Sequence
  Description of Artificial Sequence: Synthetic oligonucleotide
  Sense strand starting at position 1114 of SEQ ID NO: 913707
aggaauucgugaccuacca

SEQ ID NO: 947655 - RNA, 19 nt, Artificial Sequence
  Description of Artificial Sequence: Synthetic oligonucleotide
  Antisense strand to SEQ ID NO: 947654
ugguaggucacgaauuccu

SEQ ID NO: 947656 - RNA, 19 nt, Artificial Sequence
  Description of Artificial Sequence: Synthetic oligonucleotide
  Sense strand starting at position 937 of SEQ ID NO: 913707
acaggaauaugugcaguaa

SEQ ID NO: 947657 - RNA, 19 nt, Artificial Sequence
  Description of Artificial Sequence: Synthetic oligonucleotide
  Antisense strand to SEQ ID NO: 947656
uuacugcacauauuccugu

SEQ ID NO: 947658 - RNA, 19 nt, Artificial Sequence
  Description of Artificial Sequence: Synthetic oligonucleotide
  Sense strand starting at position 1204 of SEQ ID NO: 913707
ccauuaaaugguugguuaa

SEQ ID NO: 947659 - RNA, 19 nt, Artificial Sequence
  Description of Artificial Sequence: Synthetic oligonucleotide
  Antisense strand to SEQ ID NO: 947658
uuaaccaaccauuuaaugg

SEQ ID NO: 947660 - RNA, 19 nt, Artificial Sequence
  Description of Artificial Sequence: Synthetic oligonucleotide
  Sense strand starting at position 1205 of SEQ ID NO: 913707
cauuaaaugguugguuaau

SEQ ID NO: 947661 - RNA, 19 nt, Artificial Sequence
  Description of Artificial Sequence: Synthetic oligonucleotide
  Antisense strand to SEQ ID NO: 947660
auuaaccaaccauuuaaug

SEQ ID NO: 947662 - RNA, 19 nt, Artificial Sequence
  Description of Artificial Sequence: Synthetic oligonucleotide
  Sense strand starting at position 1154 of SEQ ID NO: 913707
guuauuaccgggcaaauca

SEQ ID NO: 947663 - RNA, 19 nt, Artificial Sequence
  Description of Artificial Sequence: Synthetic oligonucleotide
  Antisense strand to SEQ ID NO: 947662
ugauuugcccgguaauaac

SEQ ID NO: 947664 - RNA, 19 nt, Artificial Sequence
  Description of Artificial Sequence: Synthetic oligonucleotide
  Sense strand starting at position 2886 of SEQ ID NO: 913707
gagacucaccuuggucauu

SEQ ID NO: 947665 - RNA, 19 nt, Artificial Sequence
  Description of Artificial Sequence: Synthetic oligonucleotide
  Antisense strand to SEQ ID NO: 947664
aaugaccaaggugagucuc

SEQ ID NO: 947666 - RNA, 19 nt, Artificial Sequence
  Description of Artificial Sequence: Synthetic oligonucleotide
  Sense strand starting at position 2885 of SEQ ID NO: 913707
ugagacucaccuuggucau

SEQ ID NO: 947667 - RNA, 19 nt, Artificial Sequence
  Description of Artificial Sequence: Synthetic oligonucleotide
  Antisense strand to SEQ ID NO: 947666
augaccaaggugagucuca

SEQ ID NO: 947668 - RNA, 19 nt, Artificial Sequence
  Description of Artificial Sequence: Synthetic oligonucleotide
  Sense strand starting at position 2613 of SEQ ID NO: 913707
acugacuauuccucuacga

SEQ ID NO: 947669 - RNA, 19 nt, Artificial Sequence
  Description of Artificial Sequence: Synthetic oligonucleotide
  Antisense strand to SEQ ID NO: 947668
ucguagaggaauagucagu

SEQ ID NO: 947670 - RNA, 19 nt, Artificial Sequence
  Description of Artificial Sequence: Synthetic oligonucleotide
  Sense strand starting at position 3022 of SEQ ID NO: 913707
uaccgucaccuguaggaua

SEQ ID NO: 947671 - RNA, 19 nt, Artificial Sequence
  Description of Artificial Sequence: Synthetic oligonucleotide
  Antisense strand to SEQ ID NO: 947670
uauccuacaggugacggua

SEQ ID NO: 947672 - RNA, 19 nt, Artificial Sequence
  Description of Artificial Sequence: Synthetic oligonucleotide
  Sense strand starting at position 771 of SEQ ID NO: 913707
agugguuccaauggauacu

SEQ ID NO: 947673 - RNA, 19 nt, Artificial Sequence
  Description of Artificial Sequence: Synthetic oligonucleotide
  Antisense strand to SEQ ID NO: 947672
aguauccauuggaaccacu

SEQ ID NO: 947674 - RNA, 19 nt, Artificial Sequence
  Description of Artificial Sequence: Synthetic oligonucleotide
  Sense strand starting at position 3827 of SEQ ID NO: 913707
gccagagaguccucucaaa

SEQ ID NO: 947675 - RNA, 19 nt, Artificial Sequence
  Description of Artificial Sequence: Synthetic oligonucleotide
  Antisense strand to SEQ ID NO: 947674
uuugagaggacucucuggc

SEQ ID NO: 947676 - RNA, 19 nt, Artificial Sequence
  Description of Artificial Sequence: Synthetic oligonucleotide
  Sense strand starting at position 2028 of SEQ ID NO: 913707
guuauaaaugcucagucau

SEQ ID NO: 947677 - RNA, 19 nt, Artificial Sequence
  Description of Artificial Sequence: Synthetic oligonucleotide
  Antisense strand to SEQ ID NO: 947676
augacugagcauuuauaac

SEQ ID NO: 947678 - RNA, 19 nt, Artificial Sequence
  Description of Artificial Sequence: Synthetic oligonucleotide
  Sense strand starting at position 1203 of SEQ ID NO: 913707
uccauuaaaugguugguua

SEQ ID NO: 947679 - RNA, 19 nt, Artificial Sequence
  Description of Artificial Sequence: Synthetic oligonucleotide
  Antisense strand to SEQ ID NO: 947678
uaaccaaccauuuaaugga

SEQ ID NO: 947680 - RNA, 19 nt, Artificial Sequence
  Description of Artificial Sequence: Synthetic oligonucleotide
  Sense strand starting at position 1314 of SEQ ID NO: 913707
uaguuuaaugugcaguaaa

SEQ ID NO: 947681 - RNA, 19 nt, Artificial Sequence
  Description of Artificial Sequence: Synthetic oligonucleotide
  Antisense strand to SEQ ID NO: 947680
uuuacugcacauuaaacua

SEQ ID NO: 947682 - RNA, 19 nt, Artificial Sequence
  Description of Artificial Sequence: Synthetic oligonucleotide
  Sense strand starting at position 1305 of SEQ ID NO: 913707
ggccgagaauaguuuaaug

SEQ ID NO: 947683 - RNA, 19 nt, Artificial Sequence
  Description of Artificial Sequence: Synthetic oligonucleotide
  Antisense strand to SEQ ID NO: 947682
cauuaaacuauucucggcc

SEQ ID NO: 947684 - RNA, 19 nt, Artificial Sequence
  Description of Artificial Sequence: Synthetic oligonucleotide
  Sense strand starting at position 819 of SEQ ID NO: 913707
gcacauauccuguggauag

SEQ ID NO: 947685 - RNA, 19 nt, Artificial Sequence
  Description of Artificial Sequence: Synthetic oligonucleotide
  Antisense strand to SEQ ID NO: 947684
cuauccacaggauaugugc

SEQ ID NO: 947686 - RNA, 19 nt, Artificial Sequence
  Description of Artificial Sequence: Synthetic oligonucleotide
  Sense strand starting at position 2595 of SEQ ID NO: 913707
gcacuagacgaaugcauaa

SEQ ID NO: 947687 - RNA, 19 nt, Artificial Sequence
  Description of Artificial Sequence: Synthetic oligonucleotide
  Antisense strand to SEQ ID NO: 947686
uuaugcauucgucuagugc

SEQ ID NO: 947688 - RNA, 19 nt, Artificial Sequence
  Description of Artificial Sequence: Synthetic oligonucleotide
  Sense strand starting at position 3341 of SEQ ID NO: 913707
uuaucuaacuggguguuua

SEQ ID NO: 947689 - RNA, 19 nt, Artificial Sequence
  Description of Artificial Sequence: Synthetic oligonucleotide
  Antisense strand to SEQ ID NO: 947688
uaaacacccaguuagauaa

SEQ ID NO: 947690 - RNA, 19 nt, Artificial Sequence
  Description of Artificial Sequence: Synthetic oligonucleotide
  Sense strand starting at position 3345 of SEQ ID NO: 913707
cuaacuggguguuuacuua

SEQ ID NO: 947691 - RNA, 19 nt, Artificial Sequence
  Description of Artificial Sequence: Synthetic oligonucleotide
  Antisense strand to SEQ ID NO: 947690
uaaguaaacacccaguuag

SEQ ID NO: 947692 - RNA, 19 nt, Artificial Sequence
  Description of Artificial Sequence: Synthetic oligonucleotide
  Sense strand starting at position 298 of SEQ ID NO: 913707
aggacuuugugccucugaa

SEQ ID NO: 947693 - RNA, 19 nt, Artificial Sequence
  Description of Artificial Sequence: Synthetic oligonucleotide
  Antisense strand to SEQ ID NO: 947692
uucagaggcacaaaguccu

SEQ ID NO: 947694 - RNA, 19 nt, Artificial Sequence
  Description of Artificial Sequence: Synthetic oligonucleotide
  Sense strand starting at position 49 of SEQ ID NO: 913707
agucauaucaugugguuaa

SEQ ID NO: 947695 - RNA, 19 nt, Artificial Sequence
  Description of Artificial Sequence: Synthetic oligonucleotide
  Antisense strand to SEQ ID NO: 947694
uuaaccacaugauaugacu

SEQ ID NO: 947696 - RNA, 19 nt, Artificial Sequence
  Description of Artificial Sequence: Synthetic oligonucleotide
  Sense strand starting at position 70 of SEQ ID NO: 913707
ucuaguacuuucccaguaa

SEQ ID NO: 947697 - RNA, 19 nt, Artificial Sequence
  Description of Artificial Sequence: Synthetic oligonucleotide
  Antisense strand to SEQ ID NO: 947696
uuacugggaaaguacuaga

SEQ ID NO: 947698 - RNA, 19 nt, Artificial Sequence
  Description of Artificial Sequence: Synthetic oligonucleotide
  Sense strand starting at position 2027 of SEQ ID NO: 913707
aguuauaaaugcucaguca

SEQ ID NO: 947699 - RNA, 19 nt, Artificial Sequence
  Description of Artificial Sequence: Synthetic oligonucleotide
  Antisense strand to SEQ ID NO: 947698
ugacugagcauuuauaacu

SEQ ID NO: 947700 - RNA, 19 nt, Artificial Sequence
  Description of Artificial Sequence: Synthetic oligonucleotide
  Sense strand starting at position 3758 of SEQ ID NO: 913708
agugguuugagggaaucuu

SEQ ID NO: 947701 - RNA, 19 nt, Artificial Sequence
  Description of Artificial Sequence: Synthetic oligonucleotide
  Antisense strand to SEQ ID NO: 947700
aagauucccucaaaccacu

SEQ ID NO: 947702 - RNA, 19 nt, Artificial Sequence
  Description of Artificial Sequence: Synthetic oligonucleotide
  Sense strand starting at position 422 of SEQ ID NO: 913708
caggaauaugugcaguaaa

SEQ ID NO: 947703 - RNA, 19 nt, Artificial Sequence
  Description of Artificial Sequence: Synthetic oligonucleotide
  Antisense strand to SEQ ID NO: 947702
uuuacugcacauauuccug

SEQ ID NO: 947704 - RNA, 19 nt, Artificial Sequence
  Description of Artificial Sequence: Synthetic oligonucleotide
  Sense strand starting at position 489 of SEQ ID NO: 913708
guaaauuacuauucuagga

SEQ ID NO: 947705 - RNA, 19 nt, Artificial Sequence
  Description of Artificial Sequence: Synthetic oligonucleotide
  Antisense strand to SEQ ID NO: 947704
uccuagaauaguaauuuac

SEQ ID NO: 947706 - RNA, 19 nt, Artificial Sequence
  Description of Artificial Sequence: Synthetic oligonucleotide
  Sense strand starting at position 2146 of SEQ ID NO: 913708
agugaaugcugaucaaagg

SEQ ID NO: 947707 - RNA, 19 nt, Artificial Sequence
  Description of Artificial Sequence: Synthetic oligonucleotide
  Antisense strand to SEQ ID NO: 947706
ccuuugaucagcauucacu

SEQ ID NO: 947708 - RNA, 19 nt, Artificial Sequence
  Description of Artificial Sequence: Synthetic oligonucleotide
  Sense strand starting at position 2947 of SEQ ID NO: 913708
augacuucugcccaugaug

SEQ ID NO: 947709 - RNA, 19 nt, Artificial Sequence
  Description of Artificial Sequence: Synthetic oligonucleotide
  Antisense strand to SEQ ID NO: 947708
caucaugggcagaagucau

SEQ ID NO: 947710 - RNA, 19 nt, Artificial Sequence
  Description of Artificial Sequence: Synthetic oligonucleotide
  Sense strand starting at position 2383 of SEQ ID NO: 913708
gucauuuccuuugauuuac

SEQ ID NO: 947711 - RNA, 19 nt, Artificial Sequence
  Description of Artificial Sequence: Synthetic oligonucleotide
  Antisense strand to SEQ ID NO: 947710
guaaaucaaaggaaaugac

SEQ ID NO: 947712 - RNA, 19 nt, Artificial Sequence
  Description of Artificial Sequence: Synthetic oligonucleotide
  Sense strand starting at position 596 of SEQ ID NO: 913708
ccaggaauucgugaccuac

SEQ ID NO: 947713 - RNA, 19 nt, Artificial Sequence
  Description of Artificial Sequence: Synthetic oligonucleotide
  Antisense strand to SEQ ID NO: 947712
guaggucacgaauuccugg

SEQ ID NO: 947714 - RNA, 19 nt, Artificial Sequence
  Description of Artificial Sequence: Synthetic oligonucleotide
  Sense strand starting at position 801 of SEQ ID NO: 913708
uuuaaugugcaguaaagga

SEQ ID NO: 947715 - RNA, 19 nt, Artificial Sequence
  Description of Artificial Sequence: Synthetic oligonucleotide
  Antisense strand to SEQ ID NO: 947714
uccuuuacugcacauuaaa

SEQ ID NO: 947716 - RNA, 19 nt, Artificial Sequence
  Description of Artificial Sequence: Synthetic oligonucleotide
  Sense strand starting at position 791 of SEQ ID NO: 913708
ccgagaauaguuuaaugug

SEQ ID NO: 947717 - RNA, 19 nt, Artificial Sequence
  Description of Artificial Sequence: Synthetic oligonucleotide
  Antisense strand to SEQ ID NO: 947716
cacauuaaacuauucucgg

SEQ ID NO: 947718 - RNA, 19 nt, Artificial Sequence
  Description of Artificial Sequence: Synthetic oligonucleotide
  Sense strand starting at position 701 of SEQ ID NO: 913708
gguuaaucuaaaugaggug

SEQ ID NO: 947719 - RNA, 19 nt, Artificial Sequence
  Description of Artificial Sequence: Synthetic oligonucleotide
  Antisense strand to SEQ ID NO: 947718
caccucauuuagauuaacc

SEQ ID NO: 947720 - RNA, 19 nt, Artificial Sequence
  Description of Artificial Sequence: Synthetic oligonucleotide
  Sense strand starting at position 3489 of SEQ ID NO: 913708
uuugauuagcccuauuaug

SEQ ID NO: 947721 - RNA, 19 nt, Artificial Sequence
  Description of Artificial Sequence: Synthetic oligonucleotide
  Antisense strand to SEQ ID NO: 947720
cauaauagggcuaaucaaa

SEQ ID NO: 947722 - RNA, 19 nt, Artificial Sequence
  Description of Artificial Sequence: Synthetic oligonucleotide
  Sense strand starting at position 3435 of SEQ ID NO: 913708
gguaacuccugugccauuu

SEQ ID NO: 947723 - RNA, 19 nt, Artificial Sequence
  Description of Artificial Sequence: Synthetic oligonucleotide
  Antisense strand to SEQ ID NO: 947722
aaauggcacaggaguuacc

SEQ ID NO: 947724 - RNA, 19 nt, Artificial Sequence
  Description of Artificial Sequence: Synthetic oligonucleotide
  Sense strand starting at position 425 of SEQ ID NO: 913708
gaauaugugcaguaaacuc

SEQ ID NO: 947725 - RNA, 19 nt, Artificial Sequence
  Description of Artificial Sequence: Synthetic oligonucleotide
  Antisense strand to SEQ ID NO: 947724
gaguuuacugcacauauuc

SEQ ID NO: 947726 - RNA, 19 nt, Artificial Sequence
  Description of Artificial Sequence: Synthetic oligonucleotide
  Sense strand starting at position 3616 of SEQ ID NO: 913708
ugcagaguggcuuaaauaa

SEQ ID NO: 947727 - RNA, 19 nt, Artificial Sequence
  Description of Artificial Sequence: Synthetic oligonucleotide
  Antisense strand to SEQ ID NO: 947726
uuauuuaagccacucugca

SEQ ID NO: 947728 - RNA, 19 nt, Artificial Sequence
  Description of Artificial Sequence: Synthetic oligonucleotide
  Sense strand starting at position 695 of SEQ ID NO: 913708
augguugguuaaucuaaau

SEQ ID NO: 947729 - RNA, 19 nt, Artificial Sequence
  Description of Artificial Sequence: Synthetic oligonucleotide
  Antisense strand to SEQ ID NO: 947728
auuuagauuaaccaaccau

SEQ ID NO: 947730 - RNA, 19 nt, Artificial Sequence
  Description of Artificial Sequence: Synthetic oligonucleotide
  Sense strand starting at position 690 of SEQ ID NO: 913708
auuaaaugguugguuaauc

SEQ ID NO: 947731 - RNA, 19 nt, Artificial Sequence
  Description of Artificial Sequence: Synthetic oligonucleotide
  Antisense strand to SEQ ID NO: 947730
gauuaaccaaccauuuaau

SEQ ID NO: 947732 - RNA, 19 nt, Artificial Sequence
  Description of Artificial Sequence: Synthetic oligonucleotide
  Sense strand starting at position 598 of SEQ ID NO: 913708
aggaauucgugaccuacca

SEQ ID NO: 947733 - RNA, 19 nt, Artificial Sequence
  Description of Artificial Sequence: Synthetic oligonucleotide
  Antisense strand to SEQ ID NO: 947732
ugguaggucacgaauuccu

SEQ ID NO: 947734 - RNA, 19 nt, Artificial Sequence
  Description of Artificial Sequence: Synthetic oligonucleotide
  Sense strand starting at position 421 of SEQ ID NO: 913708
acaggaauaugugcaguaa

SEQ ID NO: 947735 - RNA, 19 nt, Artificial Sequence
  Description of Artificial Sequence: Synthetic oligonucleotide
  Antisense strand to SEQ ID NO: 947734
uuacugcacauauuccugu

SEQ ID NO: 947736 - RNA, 19 nt, Artificial Sequence
  Description of Artificial Sequence: Synthetic oligonucleotide
  Sense strand starting at position 688 of SEQ ID NO: 913708
ccauuaaaugguugguuaa

SEQ ID NO: 947737 - RNA, 19 nt, Artificial Sequence
  Description of Artificial Sequence: Synthetic oligonucleotide
  Antisense strand to SEQ ID NO: 947736
uuaaccaaccauuuaaugg

SEQ ID NO: 947738 - RNA, 19 nt, Artificial Sequence
  Description of Artificial Sequence: Synthetic oligonucleotide
  Sense strand starting at position 689 of SEQ ID NO: 913708
cauuaaaugguugguuaau

SEQ ID NO: 947739 - RNA, 19 nt, Artificial Sequence
  Description of Artificial Sequence: Synthetic oligonucleotide
  Antisense strand to SEQ ID NO: 947738
auuaaccaaccauuuaaug

SEQ ID NO: 947740 - RNA, 19 nt, Artificial Sequence
  Description of Artificial Sequence: Synthetic oligonucleotide
  Sense strand starting at position 638 of SEQ ID NO: 913708
guuauuaccgggcaaauca

SEQ ID NO: 947741 - RNA, 19 nt, Artificial Sequence
  Description of Artificial Sequence: Synthetic oligonucleotide
  Antisense strand to SEQ ID NO: 947740
ugauuugcccgguaauaac

SEQ ID NO: 947742 - RNA, 19 nt, Artificial Sequence
  Description of Artificial Sequence: Synthetic oligonucleotide
  Sense strand starting at position 2370 of SEQ ID NO: 913708
gagacucaccuuggucauu

SEQ ID NO: 947743 - RNA, 19 nt, Artificial Sequence
  Description of Artificial Sequence: Synthetic oligonucleotide
  Antisense strand to SEQ ID NO: 947742
aaugaccaaggugagucuc

SEQ ID NO: 947744 - RNA, 19 nt, Artificial Sequence
  Description of Artificial Sequence: Synthetic oligonucleotide
  Sense strand starting at position 2369 of SEQ ID NO: 913708
ugagacucaccuuggucau

SEQ ID NO: 947745 - RNA, 19 nt, Artificial Sequence
  Description of Artificial Sequence: Synthetic oligonucleotide
  Antisense strand to SEQ ID NO: 947744
augaccaaggugagucuca

SEQ ID NO: 947746 - RNA, 19 nt, Artificial Sequence
  Description of Artificial Sequence: Synthetic oligonucleotide
  Sense strand starting at position 2097 of SEQ ID NO: 913708
acugacuauuccucuacga

SEQ ID NO: 947747 - RNA, 19 nt, Artificial Sequence
  Description of Artificial Sequence: Synthetic oligonucleotide
  Antisense strand to SEQ ID NO: 947746
ucguagaggaauagucagu

SEQ ID NO: 947748 - RNA, 19 nt, Artificial Sequence
  Description of Artificial Sequence: Synthetic oligonucleotide
  Sense strand starting at position 2506 of SEQ ID NO: 913708
uaccgucaccuguaggaua

SEQ ID NO: 947749 - RNA, 19 nt, Artificial Sequence
  Description of Artificial Sequence: Synthetic oligonucleotide
  Antisense strand to SEQ ID NO: 947748
uauccuacaggugacggua

SEQ ID NO: 947750 - RNA, 19 nt, Artificial Sequence
  Description of Artificial Sequence: Synthetic oligonucleotide
  Sense strand starting at position 255 of SEQ ID NO: 913708
agugguuccaauggauacu

SEQ ID NO: 947751 - RNA, 19 nt, Artificial Sequence
  Description of Artificial Sequence: Synthetic oligonucleotide
  Antisense strand to SEQ ID NO: 947750
aguauccauuggaaccacu

SEQ ID NO: 947752 - RNA, 19 nt, Artificial Sequence
  Description of Artificial Sequence: Synthetic oligonucleotide
  Sense strand starting at position 3311 of SEQ ID NO: 913708
gccagagaguccucucaaa

SEQ ID NO: 947753 - RNA, 19 nt, Artificial Sequence
  Description of Artificial Sequence: Synthetic oligonucleotide
  Antisense strand to SEQ ID NO: 947752
uuugagaggacucucuggc

SEQ ID NO: 947754 - RNA, 19 nt, Artificial Sequence
  Description of Artificial Sequence: Synthetic oligonucleotide
  Sense strand starting at position 1512 of SEQ ID NO: 913708
guuauaaaugcucagucau

SEQ ID NO: 947755 - RNA, 19 nt, Artificial Sequence
  Description of Artificial Sequence: Synthetic oligonucleotide
  Antisense strand to SEQ ID NO: 947754
augacugagcauuuauaac

SEQ ID NO: 947756 - RNA, 19 nt, Artificial Sequence
  Description of Artificial Sequence: Synthetic oligonucleotide
  Sense strand starting at position 687 of SEQ ID NO: 913708
uccauuaaaugguugguua

SEQ ID NO: 947757 - RNA, 19 nt, Artificial Sequence
  Description of Artificial Sequence: Synthetic oligonucleotide
  Antisense strand to SEQ ID NO: 947756
uaaccaaccauuuaaugga

SEQ ID NO: 947758 - RNA, 19 nt, Artificial Sequence
  Description of Artificial Sequence: Synthetic oligonucleotide
  Sense strand starting at position 3753 of SEQ ID NO: 913708
cuucuagugguuugaggga

SEQ ID NO: 947759 - RNA, 19 nt, Artificial Sequence
  Description of Artificial Sequence: Synthetic oligonucleotide
  Antisense strand to SEQ ID NO: 947758
ucccucaaaccacuagaag

SEQ ID NO: 947760 - RNA, 19 nt, Artificial Sequence
  Description of Artificial Sequence: Synthetic oligonucleotide
  Sense strand starting at position 798 of SEQ ID NO: 913708
uaguuuaaugugcaguaaa

SEQ ID NO: 947761 - RNA, 19 nt, Artificial Sequence
  Description of Artificial Sequence: Synthetic oligonucleotide
  Antisense strand to SEQ ID NO: 947760
uuuacugcacauuaaacua

SEQ ID NO: 947762 - RNA, 19 nt, Artificial Sequence
  Description of Artificial Sequence: Synthetic oligonucleotide
  Sense strand starting at position 789 of SEQ ID NO: 913708
ggccgagaauaguuuaaug

SEQ ID NO: 947763 - RNA, 19 nt, Artificial Sequence
  Description of Artificial Sequence: Synthetic oligonucleotide
  Antisense strand to SEQ ID NO: 947762
cauuaaacuauucucggcc

SEQ ID NO: 947764 - RNA, 19 nt, Artificial Sequence
  Description of Artificial Sequence: Synthetic oligonucleotide
  Sense strand starting at position 303 of SEQ ID NO: 913708
gcacauauccuguggauag

SEQ ID NO: 947765 - RNA, 19 nt, Artificial Sequence
  Description of Artificial Sequence: Synthetic oligonucleotide
  Antisense strand to SEQ ID NO: 947764
cuauccacaggauaugugc

SEQ ID NO: 947766 - RNA, 19 nt, Artificial Sequence
  Description of Artificial Sequence: Synthetic oligonucleotide
  Sense strand starting at position 2079 of SEQ ID NO: 913708
gcacuagacgaaugcauaa

SEQ ID NO: 947767 - RNA, 19 nt, Artificial Sequence
  Description of Artificial Sequence: Synthetic oligonucleotide
  Antisense strand to SEQ ID NO: 947766
uuaugcauucgucuagugc

SEQ ID NO: 947768 - RNA, 19 nt, Artificial Sequence
  Description of Artificial Sequence: Synthetic oligonucleotide
  Sense strand starting at position 2825 of SEQ ID NO: 913708
uuaucuaacuggguguuua

SEQ ID NO: 947769 - RNA, 19 nt, Artificial Sequence
  Description of Artificial Sequence: Synthetic oligonucleotide
  Antisense strand to SEQ ID NO: 947768
uaaacacccaguuagauaa

SEQ ID NO: 947770 - RNA, 19 nt, Artificial Sequence
  Description of Artificial Sequence: Synthetic oligonucleotide
  Sense strand starting at position 2829 of SEQ ID NO: 913708
cuaacuggguguuuacuua

SEQ ID NO: 947771 - RNA, 19 nt, Artificial Sequence
  Description of Artificial Sequence: Synthetic oligonucleotide
  Antisense strand to SEQ ID NO: 947770
uaaguaaacacccaguuag

SEQ ID NO: 947772 - RNA, 19 nt, Artificial Sequence
  Description of Artificial Sequence: Synthetic oligonucleotide
  Sense strand starting at position 1511 of SEQ ID NO: 913708
aguuauaaaugcucaguca

SEQ ID NO: 947773 - RNA, 19 nt, Artificial Sequence
  Description of Artificial Sequence: Synthetic oligonucleotide
  Antisense strand to SEQ ID NO: 947772
ugacugagcauuuauaacu

SEQ ID NO: 947774 - RNA, 19 nt, Artificial Sequence
  Description of Artificial Sequence: Synthetic oligonucleotide
  Sense strand starting at position 2325 of SEQ ID NO: 913708
ucagauguguccucaaccu

SEQ ID NO: 947775 - RNA, 19 nt, Artificial Sequence
  Description of Artificial Sequence: Synthetic oligonucleotide
  Antisense strand to SEQ ID NO: 947774
agguugaggacacaucuga

SEQ ID NO: 947776 - RNA, 19 nt, Artificial Sequence
  Description of Artificial Sequence: Synthetic oligonucleotide
  Sense strand starting at position 3614 of SEQ ID NO: 913708
acugcagaguggcuuaaau

SEQ ID NO: 947777 - RNA, 19 nt, Artificial Sequence
  Description of Artificial Sequence: Synthetic oligonucleotide
  Antisense strand to SEQ ID NO: 947776
auuuaagccacucugcagu

SEQ ID NO: 947778 - RNA, 19 nt, Artificial Sequence
  Description of Artificial Sequence: Synthetic oligonucleotide
  Sense strand starting at position 713 of SEQ ID NO: 913708
ugagguguccuagaccguu

SEQ ID NO: 947779 - RNA, 19 nt, Artificial Sequence
  Description of Artificial Sequence: Synthetic oligonucleotide
  Antisense strand to SEQ ID NO: 947778
aacggucuaggacaccuca

SEQ ID NO: 947780 - RNA, 19 nt, Artificial Sequence
  Description of Artificial Sequence: Synthetic oligonucleotide
  Sense strand starting at position 2392 of SEQ ID NO: 913709
uugcaucaucuauagaaug

SEQ ID NO: 947781 - RNA, 19 nt, Artificial Sequence
  Description of Artificial Sequence: Synthetic oligonucleotide
  Antisense strand to SEQ ID NO: 947780
cauucuauagaugaugcaa

SEQ ID NO: 947782 - RNA, 19 nt, Artificial Sequence
  Description of Artificial Sequence: Synthetic oligonucleotide
  Sense strand starting at position 1100 of SEQ ID NO: 913709
agaaauauugaaugcuuag

SEQ ID NO: 947783 - RNA, 19 nt, Artificial Sequence
  Description of Artificial Sequence: Synthetic oligonucleotide
  Antisense strand to SEQ ID NO: 947782
cuaagcauucaauauuucu

SEQ ID NO: 947784 - RNA, 19 nt, Artificial Sequence
  Description of Artificial Sequence: Synthetic oligonucleotide
  Sense strand starting at position 2488 of SEQ ID NO: 913709
uauggaaauguguggaaga

SEQ ID NO: 947785 - RNA, 19 nt, Artificial Sequence
  Description of Artificial Sequence: Synthetic oligonucleotide
  Antisense strand to SEQ ID NO: 947784
ucuuccacacauuuccaua

SEQ ID NO: 947786 - RNA, 19 nt, Artificial Sequence
  Description of Artificial Sequence: Synthetic oligonucleotide
  Sense strand starting at position 3235 of SEQ ID NO: 913709
cagcauggacuaugauaga

SEQ ID NO: 947787 - RNA, 19 nt, Artificial Sequence
  Description of Artificial Sequence: Synthetic oligonucleotide
  Antisense strand to SEQ ID NO: 947786
ucuaucauaguccaugcug

SEQ ID NO: 947788 - RNA, 19 nt, Artificial Sequence
  Description of Artificial Sequence: Synthetic oligonucleotide
  Sense strand starting at position 2868 of SEQ ID NO: 913709
ggguauuuccugugagcag

SEQ ID NO: 947789 - RNA, 19 nt, Artificial Sequence
  Description of Artificial Sequence: Synthetic oligonucleotide
  Antisense strand to SEQ ID NO: 947788
cugcucacaggaaauaccc

SEQ ID NO: 947790 - RNA, 19 nt, Artificial Sequence
  Description of Artificial Sequence: Synthetic oligonucleotide
  Sense strand starting at position 2560 of SEQ ID NO: 913709
gcagaauugacugaugcag

SEQ ID NO: 947791 - RNA, 19 nt, Artificial Sequence
  Description of Artificial Sequence: Synthetic oligonucleotide
  Antisense strand to SEQ ID NO: 947790
cugcaucagucaauucugc

SEQ ID NO: 947792 - RNA, 19 nt, Artificial Sequence
  Description of Artificial Sequence: Synthetic oligonucleotide
  Sense strand starting at position 2871 of SEQ ID NO: 913709
uauuuccugugagcaguua

SEQ ID NO: 947793 - RNA, 19 nt, Artificial Sequence
  Description of Artificial Sequence: Synthetic oligonucleotide
  Antisense strand to SEQ ID NO: 947792
uaacugcucacaggaaaua

SEQ ID NO: 947794 - RNA, 19 nt, Artificial Sequence
  Description of Artificial Sequence: Synthetic oligonucleotide
  Sense strand starting at position 2747 of SEQ ID NO: 913709
augugaaauuaaguugaug

SEQ ID NO: 947795 - RNA, 19 nt, Artificial Sequence
  Description of Artificial Sequence: Synthetic oligonucleotide
  Antisense strand to SEQ ID NO: 947794
caucaacuuaauuucacau

SEQ ID NO: 947796 - RNA, 19 nt, Artificial Sequence
  Description of Artificial Sequence: Synthetic oligonucleotide
  Sense strand starting at position 2225 of SEQ ID NO: 913709
aagaauuagucauucggag

SEQ ID NO: 947797 - RNA, 19 nt, Artificial Sequence
  Description of Artificial Sequence: Synthetic oligonucleotide
  Antisense strand to SEQ ID NO: 947796
cuccgaaugacuaauucuu

SEQ ID NO: 947798 - RNA, 19 nt, Artificial Sequence
  Description of Artificial Sequence: Synthetic oligonucleotide
  Sense strand starting at position 2706 of SEQ ID NO: 913709
ggguaaugugcgucugguc

SEQ ID NO: 947799 - RNA, 19 nt, Artificial Sequence
  Description of Artificial Sequence: Synthetic oligonucleotide
  Antisense strand to SEQ ID NO: 947798
gaccagacgcacauuaccc

SEQ ID NO: 947800 - RNA, 19 nt, Artificial Sequence
  Description of Artificial Sequence: Synthetic oligonucleotide
  Sense strand starting at position 2749 of SEQ ID NO: 913709
gugaaauuaaguugaugau

SEQ ID NO: 947801 - RNA, 19 nt, Artificial Sequence
  Description of Artificial Sequence: Synthetic oligonucleotide
  Antisense strand to SEQ ID NO: 947800
aucaucaacuuaauuucac

SEQ ID NO: 947802 - RNA, 19 nt, Artificial Sequence
  Description of Artificial Sequence: Synthetic oligonucleotide
  Sense strand starting at position 2193 of SEQ ID NO: 913709
gccauaggugauuauuaug

SEQ ID NO: 947803 - RNA, 19 nt, Artificial Sequence
  Description of Artificial Sequence: Synthetic oligonucleotide
  Antisense strand to SEQ ID NO: 947802
cauaauaaucaccuauggc

SEQ ID NO: 947804 - RNA, 19 nt, Artificial Sequence
  Description of Artificial Sequence: Synthetic oligonucleotide
  Sense strand starting at position 2190 of SEQ ID NO: 913709
ugagccauaggugauuauu

SEQ ID NO: 947805 - RNA, 19 nt, Artificial Sequence
  Description of Artificial Sequence: Synthetic oligonucleotide
  Antisense strand to SEQ ID NO: 947804
aauaaucaccuauggcuca

SEQ ID NO: 947806 - RNA, 19 nt, Artificial Sequence
  Description of Artificial Sequence: Synthetic oligonucleotide
  Sense strand starting at position 1122 of SEQ ID NO: 913709
gugucugauacauaguaag

SEQ ID NO: 947807 - RNA, 19 nt, Artificial Sequence
  Description of Artificial Sequence: Synthetic oligonucleotide
  Antisense strand to SEQ ID NO: 947806
cuuacuauguaucagacac

SEQ ID NO: 947808 - RNA, 19 nt, Artificial Sequence
  Description of Artificial Sequence: Synthetic oligonucleotide
  Sense strand starting at position 3851 of SEQ ID NO: 913709
gugagaacuugcccaaaga

SEQ ID NO: 947809 - RNA, 19 nt, Artificial Sequence
  Description of Artificial Sequence: Synthetic oligonucleotide
  Antisense strand to SEQ ID NO: 947808
ucuuugggcaaguucucac

SEQ ID NO: 947810 - RNA, 19 nt, Artificial Sequence
  Description of Artificial Sequence: Synthetic oligonucleotide
  Sense strand starting at position 2308 of SEQ ID NO: 913709
cccugauuccaaugguaag

SEQ ID NO: 947811 - RNA, 19 nt, Artificial Sequence
  Description of Artificial Sequence: Synthetic oligonucleotide
  Antisense strand to SEQ ID NO: 947810
cuuaccauuggaaucaggg

SEQ ID NO: 947812 - RNA, 19 nt, Artificial Sequence
  Description of Artificial Sequence: Synthetic oligonucleotide
  Sense strand starting at position 288 of SEQ ID NO: 913709
gucaaaugaggcuaucuuu

SEQ ID NO: 947813 - RNA, 19 nt, Artificial Sequence
  Description of Artificial Sequence: Synthetic oligonucleotide
  Antisense strand to SEQ ID NO: 947812
aaagauagccucauuugac

SEQ ID NO: 947814 - RNA, 19 nt, Artificial Sequence
  Description of Artificial Sequence: Synthetic oligonucleotide
  Sense strand starting at position 3674 of SEQ ID NO: 913709
aucacagagucucccauau

SEQ ID NO: 947815 - RNA, 19 nt, Artificial Sequence
  Description of Artificial Sequence: Synthetic oligonucleotide
  Antisense strand to SEQ ID NO: 947814
auaugggagacucugugau

SEQ ID NO: 947816 - RNA, 19 nt, Artificial Sequence
  Description of Artificial Sequence: Synthetic oligonucleotide
  Sense strand starting at position 1120 of SEQ ID NO: 913709
augugucugauacauagua

SEQ ID NO: 947817 - RNA, 19 nt, Artificial Sequence
  Description of Artificial Sequence: Synthetic oligonucleotide
  Antisense strand to SEQ ID NO: 947816
uacuauguaucagacacau

SEQ ID NO: 947818 - RNA, 19 nt, Artificial Sequence
  Description of Artificial Sequence: Synthetic oligonucleotide
  Sense strand starting at position 3639 of SEQ ID NO: 913709
aaaugaaaggugugagcua

SEQ ID NO: 947819 - RNA, 19 nt, Artificial Sequence
  Description of Artificial Sequence: Synthetic oligonucleotide
  Antisense strand to SEQ ID NO: 947818
uagcucacaccuuucauuu

SEQ ID NO: 947820 - RNA, 19 nt, Artificial Sequence
  Description of Artificial Sequence: Synthetic oligonucleotide
  Sense strand starting at position 518 of SEQ ID NO: 913709
uguuaaaucccacgaauaa

SEQ ID NO: 947821 - RNA, 19 nt, Artificial Sequence
  Description of Artificial Sequence: Synthetic oligonucleotide
  Antisense strand to SEQ ID NO: 947820
uuauucgugggauuuaaca

SEQ ID NO: 947822 - RNA, 19 nt, Artificial Sequence
  Description of Artificial Sequence: Synthetic oligonucleotide
  Sense strand starting at position 115 of SEQ ID NO: 913709
ggaguacauuccucuuaau

SEQ ID NO: 947823 - RNA, 19 nt, Artificial Sequence
  Description of Artificial Sequence: Synthetic oligonucleotide
  Antisense strand to SEQ ID NO: 947822
auuaagaggaauguacucc

SEQ ID NO: 947824 - RNA, 19 nt, Artificial Sequence
  Description of Artificial Sequence: Synthetic oligonucleotide
  Sense strand starting at position 114 of SEQ ID NO: 913709
uggaguacauuccucuuaa

SEQ ID NO: 947825 - RNA, 19 nt, Artificial Sequence
  Description of Artificial Sequence: Synthetic oligonucleotide
  Antisense strand to SEQ ID NO: 947824
uuaagaggaauguacucca

SEQ ID NO: 947826 - RNA, 19 nt, Artificial Sequence
  Description of Artificial Sequence: Synthetic oligonucleotide
  Sense strand starting at position 864 of SEQ ID NO: 913709
auacuauccucugucagag

SEQ ID NO: 947827 - RNA, 19 nt, Artificial Sequence
  Description of Artificial Sequence: Synthetic oligonucleotide
  Antisense strand to SEQ ID NO: 947826
cucugacagaggauaguau

SEQ ID NO: 947828 - RNA, 19 nt, Artificial Sequence
  Description of Artificial Sequence: Synthetic oligonucleotide
  Sense strand starting at position 3913 of SEQ ID NO: 913709
aggaauguucuauguuaau

SEQ ID NO: 947829 - RNA, 19 nt, Artificial Sequence
  Description of Artificial Sequence: Synthetic oligonucleotide
  Antisense strand to SEQ ID NO: 947828
auuaacauagaacauuccu

SEQ ID NO: 947830 - RNA, 19 nt, Artificial Sequence
  Description of Artificial Sequence: Synthetic oligonucleotide
  Sense strand starting at position 3971 of SEQ ID NO: 913709
agcucuaucguccaagaag

SEQ ID NO: 947831 - RNA, 19 nt, Artificial Sequence
  Description of Artificial Sequence: Synthetic oligonucleotide
  Antisense strand to SEQ ID NO: 947830
cuucuuggacgauagagcu

SEQ ID NO: 947832 - RNA, 19 nt, Artificial Sequence
  Description of Artificial Sequence: Synthetic oligonucleotide
  Sense strand starting at position 2559 of SEQ ID NO: 913709
ggcagaauugacugaugca

SEQ ID NO: 947833 - RNA, 19 nt, Artificial Sequence
  Description of Artificial Sequence: Synthetic oligonucleotide
  Antisense strand to SEQ ID NO: 947832
ugcaucagucaauucugcc

SEQ ID NO: 947834 - RNA, 19 nt, Artificial Sequence
  Description of Artificial Sequence: Synthetic oligonucleotide
  Sense strand starting at position 1415 of SEQ ID NO: 913709
cacuuuguuggaugugaaa

SEQ ID NO: 947835 - RNA, 19 nt, Artificial Sequence
  Description of Artificial Sequence: Synthetic oligonucleotide
  Antisense strand to SEQ ID NO: 947834
uuucacauccaacaaagug

SEQ ID NO: 947836 - RNA, 19 nt, Artificial Sequence
  Description of Artificial Sequence: Synthetic oligonucleotide
  Sense strand starting at position 2478 of SEQ ID NO: 913709
cccagugggcuauggaaau

SEQ ID NO: 947837 - RNA, 19 nt, Artificial Sequence
  Description of Artificial Sequence: Synthetic oligonucleotide
  Antisense strand to SEQ ID NO: 947836
auuuccauagcccacuggg

SEQ ID NO: 947838 - RNA, 19 nt, Artificial Sequence
  Description of Artificial Sequence: Synthetic oligonucleotide
  Sense strand starting at position 2192 of SEQ ID NO: 913709
agccauaggugauuauuau

SEQ ID NO: 947839 - RNA, 19 nt, Artificial Sequence
  Description of Artificial Sequence: Synthetic oligonucleotide
  Antisense strand to SEQ ID NO: 947838
auaauaaucaccuauggcu

SEQ ID NO: 947840 - RNA, 19 nt, Artificial Sequence
  Description of Artificial Sequence: Synthetic oligonucleotide
  Sense strand starting at position 2548 of SEQ ID NO: 913709
ucaaccuuguaggcagaau

SEQ ID NO: 947841 - RNA, 19 nt, Artificial Sequence
  Description of Artificial Sequence: Synthetic oligonucleotide
  Antisense strand to SEQ ID NO: 947840
auucugccuacaagguuga

SEQ ID NO: 947842 - RNA, 19 nt, Artificial Sequence
  Description of Artificial Sequence: Synthetic oligonucleotide
  Sense strand starting at position 3681 of SEQ ID NO: 913709
agucucccauauguaauua

SEQ ID NO: 947843 - RNA, 19 nt, Artificial Sequence
  Description of Artificial Sequence: Synthetic oligonucleotide
  Antisense strand to SEQ ID NO: 947842
uaauuacauaugggagacu

SEQ ID NO: 947844 - RNA, 19 nt, Artificial Sequence
  Description of Artificial Sequence: Synthetic oligonucleotide
  Sense strand starting at position 1089 of SEQ ID NO: 913709
gaaacuggaugagaaauau

SEQ ID NO: 947845 - RNA, 19 nt, Artificial Sequence
  Description of Artificial Sequence: Synthetic oligonucleotide
  Antisense strand to SEQ ID NO: 947844
auauuucucauccaguuuc

SEQ ID NO: 947846 - RNA, 19 nt, Artificial Sequence
  Description of Artificial Sequence: Synthetic oligonucleotide
  Sense strand starting at position 2856 of SEQ ID NO: 913709
ggguaacugaguggguauu

SEQ ID NO: 947847 - RNA, 19 nt, Artificial Sequence
  Description of Artificial Sequence: Synthetic oligonucleotide
  Antisense strand to SEQ ID NO: 947846
aauacccacucaguuaccc

SEQ ID NO: 947848 - RNA, 19 nt, Artificial Sequence
  Description of Artificial Sequence: Synthetic oligonucleotide
  Sense strand starting at position 1417 of SEQ ID NO: 913709
cuuuguuggaugugaaauu

SEQ ID NO: 947849 - RNA, 19 nt, Artificial Sequence
  Description of Artificial Sequence: Synthetic oligonucleotide
  Antisense strand to SEQ ID NO: 947848
aauuucacauccaacaaag

SEQ ID NO: 947850 - RNA, 19 nt, Artificial Sequence
  Description of Artificial Sequence: Synthetic oligonucleotide
  Sense strand starting at position 876 of SEQ ID NO: 913709
gucagagcuguuggauaaa

SEQ ID NO: 947851 - RNA, 19 nt, Artificial Sequence
  Description of Artificial Sequence: Synthetic oligonucleotide
  Antisense strand to SEQ ID NO: 947850
uuuauccaacagcucugac

SEQ ID NO: 947852 - RNA, 19 nt, Artificial Sequence
  Description of Artificial Sequence: Synthetic oligonucleotide
  Sense strand starting at position 933 of SEQ ID NO: 913709
acggucuuacuguaagagu

SEQ ID NO: 947853 - RNA, 19 nt, Artificial Sequence
  Description of Artificial Sequence: Synthetic oligonucleotide
  Antisense strand to SEQ ID NO: 947852
acucuuacaguaagaccgu

SEQ ID NO: 947854 - RNA, 19 nt, Artificial Sequence
  Description of Artificial Sequence: Synthetic oligonucleotide
  Sense strand starting at position 2409 of SEQ ID NO: 913709
ugaaaugauugcucuccga

SEQ ID NO: 947855 - RNA, 19 nt, Artificial Sequence
  Description of Artificial Sequence: Synthetic oligonucleotide
  Antisense strand to SEQ ID NO: 947854
ucggagagcaaucauuuca

SEQ ID NO: 947856 - RNA, 19 nt, Artificial Sequence
  Description of Artificial Sequence: Synthetic oligonucleotide
  Sense strand starting at position 2227 of SEQ ID NO: 913709
gaauuagucauucggaggu

SEQ ID NO: 947857 - RNA, 19 nt, Artificial Sequence
  Description of Artificial Sequence: Synthetic oligonucleotide
  Antisense strand to SEQ ID NO: 947856
accuccgaaugacuaauuc

SEQ ID NO: 947858 - RNA, 19 nt, Artificial Sequence
  Description of Artificial Sequence: Synthetic oligonucleotide
  Sense strand starting at position 82 of SEQ ID NO: 913709
acgccaucucuugauagua

SEQ ID NO: 947859 - RNA, 19 nt, Artificial Sequence
  Description of Artificial Sequence: Synthetic oligonucleotide
  Antisense strand to SEQ ID NO: 947858
uacuaucaagagauggcgu

SEQ ID NO: 947860 - RNA, 19 nt, Artificial Sequence
  Description of Artificial Sequence: Synthetic oligonucleotide
  Sense strand starting at position 3819 of SEQ ID NO: 913710
auaugucagcaagaaaucu

SEQ ID NO: 947861 - RNA, 19 nt, Artificial Sequence
  Description of Artificial Sequence: Synthetic oligonucleotide
  Antisense strand to SEQ ID NO: 947860
agauuucuugcugacauau

SEQ ID NO: 947862 - RNA, 19 nt, Artificial Sequence
  Description of Artificial Sequence: Synthetic oligonucleotide
  Sense strand starting at position 643 of SEQ ID NO: 913710
cuaaacauccagugaugga

SEQ ID NO: 947863 - RNA, 19 nt, Artificial Sequence
  Description of Artificial Sequence: Synthetic oligonucleotide
  Antisense strand to SEQ ID NO: 947862
uccaucacuggauguuuag

SEQ ID NO: 947864 - RNA, 19 nt, Artificial Sequence
  Description of Artificial Sequence: Synthetic oligonucleotide
  Sense strand starting at position 3637 of SEQ ID NO: 913710
uuugcuagugaauaagaau

SEQ ID NO: 947865 - RNA, 19 nt, Artificial Sequence
  Description of Artificial Sequence: Synthetic oligonucleotide
  Antisense strand to SEQ ID NO: 947864
auucuuauucacuagcaaa

SEQ ID NO: 947866 - RNA, 19 nt, Artificial Sequence
  Description of Artificial Sequence: Synthetic oligonucleotide
  Sense strand starting at position 729 of SEQ ID NO: 913710
uugagaaacgcugaccuaa

SEQ ID NO: 947867 - RNA, 19 nt, Artificial Sequence
  Description of Artificial Sequence: Synthetic oligonucleotide
  Antisense strand to SEQ ID NO: 947866
uuaggucagcguuucucaa

SEQ ID NO: 947868 - RNA, 19 nt, Artificial Sequence
  Description of Artificial Sequence: Synthetic oligonucleotide
  Sense strand starting at position 3935 of SEQ ID NO: 913710
agcuaauucugaucaagaa

SEQ ID NO: 947869 - RNA, 19 nt, Artificial Sequence
  Description of Artificial Sequence: Synthetic oligonucleotide
  Antisense strand to SEQ ID NO: 947868
uucuugaucagaauuagcu

SEQ ID NO: 947870 - RNA, 19 nt, Artificial Sequence
  Description of Artificial Sequence: Synthetic oligonucleotide
  Sense strand starting at position 2802 of SEQ ID NO: 913710
aacuuuggugucuagacaa

SEQ ID NO: 947871 - RNA, 19 nt, Artificial Sequence
  Description of Artificial Sequence: Synthetic oligonucleotide
  Antisense strand to SEQ ID NO: 947870
uugucuagacaccaaaguu

SEQ ID NO: 947872 - RNA, 19 nt, Artificial Sequence
  Description of Artificial Sequence: Synthetic oligonucleotide
  Sense strand starting at position 3668 of SEQ ID NO: 913710
ucagaauagugacucaacu

SEQ ID NO: 947873 - RNA, 19 nt, Artificial Sequence
  Description of Artificial Sequence: Synthetic oligonucleotide
  Antisense strand to SEQ ID NO: 947872
aguugagucacuauucuga

SEQ ID NO: 947874 - RNA, 19 nt, Artificial Sequence
  Description of Artificial Sequence: Synthetic oligonucleotide
  Sense strand starting at position 3491 of SEQ ID NO: 913710
auggcugcucaacaaauaa

SEQ ID NO: 947875 - RNA, 19 nt, Artificial Sequence
  Description of Artificial Sequence: Synthetic oligonucleotide
  Antisense strand to SEQ ID NO: 947874
uuauuuguugagcagccau

SEQ ID NO: 947876 - RNA, 19 nt, Artificial Sequence
  Description of Artificial Sequence: Synthetic oligonucleotide
  Sense strand starting at position 612 of SEQ ID NO: 913710
gucauugaauggguagaga

SEQ ID NO: 947877 - RNA, 19 nt, Artificial Sequence
  Description of Artificial Sequence: Synthetic oligonucleotide
  Antisense strand to SEQ ID NO: 947876
ucucuacccauucaaugac

SEQ ID NO: 947878 - RNA, 19 nt, Artificial Sequence
  Description of Artificial Sequence: Synthetic oligonucleotide
  Sense strand starting at position 340 of SEQ ID NO: 913710
gucuuaaaccuacagcaga

SEQ ID NO: 947879 - RNA, 19 nt, Artificial Sequence
  Description of Artificial Sequence: Synthetic oligonucleotide
  Antisense strand to SEQ ID NO: 947878
ucugcuguagguuuaagac

SEQ ID NO: 947880 - RNA, 19 nt, Artificial Sequence
  Description of Artificial Sequence: Synthetic oligonucleotide
  Sense strand starting at position 330 of SEQ ID NO: 913710
cuaggagauugucuuaaac

SEQ ID NO: 947881 - RNA, 19 nt, Artificial Sequence
  Description of Artificial Sequence: Synthetic oligonucleotide
  Antisense strand to SEQ ID NO: 947880
guuuaagacaaucuccuag

SEQ ID NO: 947882 - RNA, 19 nt, Artificial Sequence
  Description of Artificial Sequence: Synthetic oligonucleotide
  Sense strand starting at position 540 of SEQ ID NO: 913710
auaucacuaugucuggaga

SEQ ID NO: 947883 - RNA, 19 nt, Artificial Sequence
  Description of Artificial Sequence: Synthetic oligonucleotide
  Antisense strand to SEQ ID NO: 947882
ucuccagacauagugauau

SEQ ID NO: 947884 - RNA, 19 nt, Artificial Sequence
  Description of Artificial Sequence: Synthetic oligonucleotide
  Sense strand starting at position 3864 of SEQ ID NO: 913710
cggcuugcuacgcugacaa

SEQ ID NO: 947885 - RNA, 19 nt, Artificial Sequence
  Description of Artificial Sequence: Synthetic oligonucleotide
  Antisense strand to SEQ ID NO: 947884
uugucagcguagcaagccg

SEQ ID NO: 947886 - RNA, 19 nt, Artificial Sequence
  Description of Artificial Sequence: Synthetic oligonucleotide
  Sense strand starting at position 955 of SEQ ID NO: 913710
cugacaugagucugaaacu

SEQ ID NO: 947887 - RNA, 19 nt, Artificial Sequence
  Description of Artificial Sequence: Synthetic oligonucleotide
  Antisense strand to SEQ ID NO: 947886
aguuucagacucaugucag

SEQ ID NO: 947888 - RNA, 19 nt, Artificial Sequence
  Description of Artificial Sequence: Synthetic oligonucleotide
  Sense strand starting at position 497 of SEQ ID NO: 913710
gggucucgacuagaaguga

SEQ ID NO: 947889 - RNA, 19 nt, Artificial Sequence
  Description of Artificial Sequence: Synthetic oligonucleotide
  Antisense strand to SEQ ID NO: 947888
ucacuucuagucgagaccc

SEQ ID NO: 947890 - RNA, 19 nt, Artificial Sequence
  Description of Artificial Sequence: Synthetic oligonucleotide
  Sense strand starting at position 748 of SEQ ID NO: 913710
ggaaauacaucagcuccua

SEQ ID NO: 947891 - RNA, 19 nt, Artificial Sequence
  Description of Artificial Sequence: Synthetic oligonucleotide
  Antisense strand to SEQ ID NO: 947890
uaggagcugauguauuucc

SEQ ID NO: 947892 - RNA, 19 nt, Artificial Sequence
  Description of Artificial Sequence: Synthetic oligonucleotide
  Sense strand starting at position 319 of SEQ ID NO: 913710
cauugcuuagucuaggaga

SEQ ID NO: 947893 - RNA, 19 nt, Artificial Sequence
  Description of Artificial Sequence: Synthetic oligonucleotide
  Antisense strand to SEQ ID NO: 947892
ucuccuagacuaagcaaug

SEQ ID NO: 947894 - RNA, 19 nt, Artificial Sequence
  Description of Artificial Sequence: Synthetic oligonucleotide
  Sense strand starting at position 3787 of SEQ ID NO: 913710
uugaauaaauguucucuga

SEQ ID NO: 947895 - RNA, 19 nt, Artificial Sequence
  Description of Artificial Sequence: Synthetic oligonucleotide
  Antisense strand to SEQ ID NO: 947894
ucagagaacauuuauucaa

SEQ ID NO: 947896 - RNA, 19 nt, Artificial Sequence
  Description of Artificial Sequence: Synthetic oligonucleotide
  Sense strand starting at position 495 of SEQ ID NO: 913710
augggucucgacuagaagu

SEQ ID NO: 947897 - RNA, 19 nt, Artificial Sequence
  Description of Artificial Sequence: Synthetic oligonucleotide
  Antisense strand to SEQ ID NO: 947896
acuucuagucgagacccau

SEQ ID NO: 947898 - RNA, 19 nt, Artificial Sequence
  Description of Artificial Sequence: Synthetic oligonucleotide
  Sense strand starting at position 2703 of SEQ ID NO: 913710
ggccaaacauucucaugau

SEQ ID NO: 947899 - RNA, 19 nt, Artificial Sequence
  Description of Artificial Sequence: Synthetic oligonucleotide
  Antisense strand to SEQ ID NO: 947898
aucaugagaauguuuggcc

SEQ ID NO: 947900 - RNA, 19 nt, Artificial Sequence
  Description of Artificial Sequence: Synthetic oligonucleotide
  Sense strand starting at position 604 of SEQ ID NO: 913710
acucuacugucauugaaug

SEQ ID NO: 947901 - RNA, 19 nt, Artificial Sequence
  Description of Artificial Sequence: Synthetic oligonucleotide
  Antisense strand to SEQ ID NO: 947900
cauucaaugacaguagagu

SEQ ID NO: 947902 - RNA, 19 nt, Artificial Sequence
  Description of Artificial Sequence: Synthetic oligonucleotide
  Sense strand starting at position 3540 of SEQ ID NO: 913710
gacagagccuaauuaugua

SEQ ID NO: 947903 - RNA, 19 nt, Artificial Sequence
  Description of Artificial Sequence: Synthetic oligonucleotide
  Antisense strand to SEQ ID NO: 947902
uacauaauuaggcucuguc

SEQ ID NO: 947904 - RNA, 19 nt, Artificial Sequence
  Description of Artificial Sequence: Synthetic oligonucleotide
  Sense strand starting at position 759 of SEQ ID NO: 913710
agcuccuaagcugauaauu

SEQ ID NO: 947905 - RNA, 19 nt, Artificial Sequence
  Description of Artificial Sequence: Synthetic oligonucleotide
  Antisense strand to SEQ ID NO: 947904
aauuaucagcuuaggagcu

SEQ ID NO: 947906 - RNA, 19 nt, Artificial Sequence
  Description of Artificial Sequence: Synthetic oligonucleotide
  Sense strand starting at position 610 of SEQ ID NO: 913710
cugucauugaauggguaga

SEQ ID NO: 947907 - RNA, 19 nt, Artificial Sequence
  Description of Artificial Sequence: Synthetic oligonucleotide
  Antisense strand to SEQ ID NO: 947906
ucuacccauucaaugacag

SEQ ID NO: 947908 - RNA, 19 nt, Artificial Sequence
  Description of Artificial Sequence: Synthetic oligonucleotide
  Sense strand starting at position 3475 of SEQ ID NO: 913710
aaagauauagcacguaaug

SEQ ID NO: 947909 - RNA, 19 nt, Artificial Sequence
  Description of Artificial Sequence: Synthetic oligonucleotide
  Antisense strand to SEQ ID NO: 947908
cauuacgugcuauaucuuu

SEQ ID NO: 947910 - RNA, 19 nt, Artificial Sequence
  Description of Artificial Sequence: Synthetic oligonucleotide
  Sense strand starting at position 3602 of SEQ ID NO: 913710
ccagaacuucuugguuaau

SEQ ID NO: 947911 - RNA, 19 nt, Artificial Sequence
  Description of Artificial Sequence: Synthetic oligonucleotide
  Antisense strand to SEQ ID NO: 947910
auuaaccaagaaguucugg

SEQ ID NO: 947912 - RNA, 19 nt, Artificial Sequence
  Description of Artificial Sequence: Synthetic oligonucleotide
  Sense strand starting at position 2994 of SEQ ID NO: 913710
acuaguugccaaggauaca

SEQ ID NO: 947913 - RNA, 19 nt, Artificial Sequence
  Description of Artificial Sequence: Synthetic oligonucleotide
  Antisense strand to SEQ ID NO: 947912
uguauccuuggcaacuagu

SEQ ID NO: 947914 - RNA, 19 nt, Artificial Sequence
  Description of Artificial Sequence: Synthetic oligonucleotide
  Sense strand starting at position 2435 of SEQ ID NO: 913710
gagaguaggagcuggcaaa

SEQ ID NO: 947915 - RNA, 19 nt, Artificial Sequence
  Description of Artificial Sequence: Synthetic oligonucleotide
  Antisense strand to SEQ ID NO: 947914
uuugccagcuccuacucuc

SEQ ID NO: 947916 - RNA, 19 nt, Artificial Sequence
  Description of Artificial Sequence: Synthetic oligonucleotide
  Sense strand starting at position 3054 of SEQ ID NO: 913710
uucuguuuacgugagauaa

SEQ ID NO: 947917 - RNA, 19 nt, Artificial Sequence
  Description of Artificial Sequence: Synthetic oligonucleotide
  Antisense strand to SEQ ID NO: 947916
uuaucucacguaaacagaa

SEQ ID NO: 947918 - RNA, 19 nt, Artificial Sequence
  Description of Artificial Sequence: Synthetic oligonucleotide
  Sense strand starting at position 327 of SEQ ID NO: 913710
agucuaggagauugucuua

SEQ ID NO: 947919 - RNA, 19 nt, Artificial Sequence
  Description of Artificial Sequence: Synthetic oligonucleotide
  Antisense strand to SEQ ID NO: 947918
uaagacaaucuccuagacu

SEQ ID NO: 947920 - RNA, 19 nt, Artificial Sequence
  Description of Artificial Sequence: Synthetic oligonucleotide
  Sense strand starting at position 2743 of SEQ ID NO: 913710
gucauugguguugaaaucu

SEQ ID NO: 947921 - RNA, 19 nt, Artificial Sequence
  Description of Artificial Sequence: Synthetic oligonucleotide
  Antisense strand to SEQ ID NO: 947920
agauuucaacaccaaugac

SEQ ID NO: 947922 - RNA, 19 nt, Artificial Sequence
  Description of Artificial Sequence: Synthetic oligonucleotide
  Sense strand starting at position 2801 of SEQ ID NO: 913710
caacuuuggugucuagaca

SEQ ID NO: 947923 - RNA, 19 nt, Artificial Sequence
  Description of Artificial Sequence: Synthetic oligonucleotide
  Antisense strand to SEQ ID NO: 947922
ugucuagacaccaaaguug

SEQ ID NO: 947924 - RNA, 19 nt, Artificial Sequence
  Description of Artificial Sequence: Synthetic oligonucleotide
  Sense strand starting at position 1649 of SEQ ID NO: 913710
gcccuuugcuauuuguuga

SEQ ID NO: 947925 - RNA, 19 nt, Artificial Sequence
  Description of Artificial Sequence: Synthetic oligonucleotide
  Antisense strand to SEQ ID NO: 947924
ucaacaaauagcaaagggc

SEQ ID NO: 947926 - RNA, 19 nt, Artificial Sequence
  Description of Artificial Sequence: Synthetic oligonucleotide
  Sense strand starting at position 2499 of SEQ ID NO: 913710
uggacaugugcuuaaagcu

SEQ ID NO: 947927 - RNA, 19 nt, Artificial Sequence
  Description of Artificial Sequence: Synthetic oligonucleotide
  Antisense strand to SEQ ID NO: 947926
agcuuuaagcacaugucca

SEQ ID NO: 947928 - RNA, 19 nt, Artificial Sequence
  Description of Artificial Sequence: Synthetic oligonucleotide
  Sense strand starting at position 833 of SEQ ID NO: 913710
accuuaaggucagcuuaau

SEQ ID NO: 947929 - RNA, 19 nt, Artificial Sequence
  Description of Artificial Sequence: Synthetic oligonucleotide
  Antisense strand to SEQ ID NO: 947928
auuaagcugaccuuaaggu

SEQ ID NO: 947930 - RNA, 19 nt, Artificial Sequence
  Description of Artificial Sequence: Synthetic oligonucleotide
  Sense strand starting at position 3815 of SEQ ID NO: 913710
gcauauaugucagcaagaa

SEQ ID NO: 947931 - RNA, 19 nt, Artificial Sequence
  Description of Artificial Sequence: Synthetic oligonucleotide
  Antisense strand to SEQ ID NO: 947930
uucuugcugacauauaugc

SEQ ID NO: 947932 - RNA, 19 nt, Artificial Sequence
  Description of Artificial Sequence: Synthetic oligonucleotide
  Sense strand starting at position 1483 of SEQ ID NO: 913710
cagguaaggccucaguagu

SEQ ID NO: 947933 - RNA, 19 nt, Artificial Sequence
  Description of Artificial Sequence: Synthetic oligonucleotide
  Antisense strand to SEQ ID NO: 947932
acuacugaggccuuaccug

SEQ ID NO: 947934 - RNA, 19 nt, Artificial Sequence
  Description of Artificial Sequence: Synthetic oligonucleotide
  Sense strand starting at position 2665 of SEQ ID NO: 913710
acucuuugguaaguaagua

SEQ ID NO: 947935 - RNA, 19 nt, Artificial Sequence
  Description of Artificial Sequence: Synthetic oligonucleotide
  Antisense strand to SEQ ID NO: 947934
uacuuacuuaccaaagagu

SEQ ID NO: 947936 - RNA, 19 nt, Artificial Sequence
  Description of Artificial Sequence: Synthetic oligonucleotide
  Sense strand starting at position 944 of SEQ ID NO: 913710
uuuguaucucucugacaug

SEQ ID NO: 947937 - RNA, 19 nt, Artificial Sequence
  Description of Artificial Sequence: Synthetic oligonucleotide
  Antisense strand to SEQ ID NO: 947936
caugucagagagauacaaa

SEQ ID NO: 947938 - RNA, 19 nt, Artificial Sequence
  Description of Artificial Sequence: Synthetic oligonucleotide
  Sense strand starting at position 3067 of SEQ ID NO: 913710
agauaauagacguggcuuu

SEQ ID NO: 947939 - RNA, 19 nt, Artificial Sequence
  Description of Artificial Sequence: Synthetic oligonucleotide
  Antisense strand to SEQ ID NO: 947938
aaagccacgucuauuaucu

SEQ ID NO: 947940 - RNA, 19 nt, Artificial Sequence
  Description of Artificial Sequence: Synthetic oligonucleotide
  Sense strand starting at position 3217 of SEQ ID NO: 913711
uuaggauuugcuggcuaug

SEQ ID NO: 947941 - RNA, 19 nt, Artificial Sequence
  Description of Artificial Sequence: Synthetic oligonucleotide
  Antisense strand to SEQ ID NO: 947940
cauagccagcaaauccuaa

SEQ ID NO: 947942 - RNA, 19 nt, Artificial Sequence
  Description of Artificial Sequence: Synthetic oligonucleotide
  Sense strand starting at position 3228 of SEQ ID NO: 913711
uggcuaugaucauuugcua

SEQ ID NO: 947943 - RNA, 19 nt, Artificial Sequence
  Description of Artificial Sequence: Synthetic oligonucleotide
  Antisense strand to SEQ ID NO: 947942
uagcaaaugaucauagcca

SEQ ID NO: 947944 - RNA, 19 nt, Artificial Sequence
  Description of Artificial Sequence: Synthetic oligonucleotide
  Sense strand starting at position 1437 of SEQ ID NO: 913711
acguuaaaucacgagaaca

SEQ ID NO: 947945 - RNA, 19 nt, Artificial Sequence
  Description of Artificial Sequence: Synthetic oligonucleotide
  Antisense strand to SEQ ID NO: 947944
uguucucgugauuuaacgu

SEQ ID NO: 947946 - RNA, 19 nt, Artificial Sequence
  Description of Artificial Sequence: Synthetic oligonucleotide
  Sense strand starting at position 3400 of SEQ ID NO: 913711
uuuagauaaguccagucaa

SEQ ID NO: 947947 - RNA, 19 nt, Artificial Sequence
  Description of Artificial Sequence: Synthetic oligonucleotide
  Antisense strand to SEQ ID NO: 947946
uugacuggacuuaucuaaa

SEQ ID NO: 947948 - RNA, 19 nt, Artificial Sequence
  Description of Artificial Sequence: Synthetic oligonucleotide
  Sense strand starting at position 1050 of SEQ ID NO: 913711
ggaggaucacccgggauca

SEQ ID NO: 947949 - RNA, 19 nt, Artificial Sequence
  Description of Artificial Sequence: Synthetic oligonucleotide
  Antisense strand to SEQ ID NO: 947948
ugaucccgggugauccucc

SEQ ID NO: 947950 - RNA, 19 nt, Artificial Sequence
  Description of Artificial Sequence: Synthetic oligonucleotide
  Sense strand starting at position 3222 of SEQ ID NO: 913711
auuugcuggcuaugaucau

SEQ ID NO: 947951 - RNA, 19 nt, Artificial Sequence
  Description of Artificial Sequence: Synthetic oligonucleotide
  Antisense strand to SEQ ID NO: 947950
augaucauagccagcaaau

SEQ ID NO: 947952 - RNA, 19 nt, Artificial Sequence
  Description of Artificial Sequence: Synthetic oligonucleotide
  Sense strand starting at position 3851 of SEQ ID NO: 913711
augugcguguugaugagaa

SEQ ID NO: 947953 - RNA, 19 nt, Artificial Sequence
  Description of Artificial Sequence: Synthetic oligonucleotide
  Antisense strand to SEQ ID NO: 947952
uucucaucaacacgcacau

SEQ ID NO: 947954 - RNA, 19 nt, Artificial Sequence
  Description of Artificial Sequence: Synthetic oligonucleotide
  Sense strand starting at position 808 of SEQ ID NO: 913711
guccuugagaccugaagaa

SEQ ID NO: 947955 - RNA, 19 nt, Artificial Sequence
  Description of Artificial Sequence: Synthetic oligonucleotide
  Antisense strand to SEQ ID NO: 947954
uucuucaggucucaaggac

SEQ ID NO: 947956 - RNA, 19 nt, Artificial Sequence
  Description of Artificial Sequence: Synthetic oligonucleotide
  Sense strand starting at position 215 of SEQ ID NO: 913711
acggaugguguauaauaua

SEQ ID NO: 947957 - RNA, 19 nt, Artificial Sequence
  Description of Artificial Sequence: Synthetic oligonucleotide
  Antisense strand to SEQ ID NO: 947956
uauauuauacaccauccgu

SEQ ID NO: 947958 - RNA, 19 nt, Artificial Sequence
  Description of Artificial Sequence: Synthetic oligonucleotide
  Sense strand starting at position 2825 of SEQ ID NO: 913711
cguuuaauuucugcaacag

SEQ ID NO: 947959 - RNA, 19 nt, Artificial Sequence
  Description of Artificial Sequence: Synthetic oligonucleotide
  Antisense strand to SEQ ID NO: 947958
cuguugcagaaauuaaacg

SEQ ID NO: 947960 - RNA, 19 nt, Artificial Sequence
  Description of Artificial Sequence: Synthetic oligonucleotide
  Sense strand starting at position 1724 of SEQ ID NO: 913711
ggaaaugaucccgaguacg

SEQ ID NO: 947961 - RNA, 19 nt, Artificial Sequence
  Description of Artificial Sequence: Synthetic oligonucleotide
  Antisense strand to SEQ ID NO: 947960
cguacucgggaucauuucc

SEQ ID NO: 947962 - RNA, 19 nt, Artificial Sequence
  Description of Artificial Sequence: Synthetic oligonucleotide
  Sense strand starting at position 3807 of SEQ ID NO: 913711
ggcccagagcuauaacaau

SEQ ID NO: 947963 - RNA, 19 nt, Artificial Sequence
  Description of Artificial Sequence: Synthetic oligonucleotide
  Antisense strand to SEQ ID NO: 947962
auuguuauagcucugggcc

SEQ ID NO: 947964 - RNA, 19 nt, Artificial Sequence
  Description of Artificial Sequence: Synthetic oligonucleotide
  Sense strand starting at position 907 of SEQ ID NO: 913711
uccaguugcccgucaaugu

SEQ ID NO: 947965 - RNA, 19 nt, Artificial Sequence
  Description of Artificial Sequence: Synthetic oligonucleotide
  Antisense strand to SEQ ID NO: 947964
acauugacgggcaacugga

SEQ ID NO: 947966 - RNA, 19 nt, Artificial Sequence
  Description of Artificial Sequence: Synthetic oligonucleotide
  Sense strand starting at position 3205 of SEQ ID NO: 913711
cuucuaggguaauuaggau

SEQ ID NO: 947967 - RNA, 19 nt, Artificial Sequence
  Description of Artificial Sequence: Synthetic oligonucleotide
  Antisense strand to SEQ ID NO: 947966
auccuaauuacccuagaag

SEQ ID NO: 947968 - RNA, 19 nt, Artificial Sequence
  Description of Artificial Sequence: Synthetic oligonucleotide
  Sense strand starting at position 2705 of SEQ ID NO: 913711
uauguuugugaauagagug

SEQ ID NO: 947969 - RNA, 19 nt, Artificial Sequence
  Description of Artificial Sequence: Synthetic oligonucleotide
  Antisense strand to SEQ ID NO: 947968
cacucuauucacaaacaua

SEQ ID NO: 947970 - RNA, 19 nt, Artificial Sequence
  Description of Artificial Sequence: Synthetic oligonucleotide
  Sense strand starting at position 2801 of SEQ ID NO: 913711
agagcugcugacuauauau

SEQ ID NO: 947971 - RNA, 19 nt, Artificial Sequence
  Description of Artificial Sequence: Synthetic oligonucleotide
  Antisense strand to SEQ ID NO: 947970
auauauagucagcagcucu

SEQ ID NO: 947972 - RNA, 19 nt, Artificial Sequence
  Description of Artificial Sequence: Synthetic oligonucleotide
  Sense strand starting at position 1838 of SEQ ID NO: 913711
ugaggagaacgcgaaaguu

SEQ ID NO: 947973 - RNA, 19 nt, Artificial Sequence
  Description of Artificial Sequence: Synthetic oligonucleotide
  Antisense strand to SEQ ID NO: 947972
aacuuucgcguucuccuca

SEQ ID NO: 947974 - RNA, 19 nt, Artificial Sequence
  Description of Artificial Sequence: Synthetic oligonucleotide
  Sense strand starting at position 2744 of SEQ ID NO: 913711
agggccacaucccuuaaau

SEQ ID NO: 947975 - RNA, 19 nt, Artificial Sequence
  Description of Artificial Sequence: Synthetic oligonucleotide
  Antisense strand to SEQ ID NO: 947974
auuuaagggauguggcccu

SEQ ID NO: 947976 - RNA, 19 nt, Artificial Sequence
  Description of Artificial Sequence: Synthetic oligonucleotide
  Sense strand starting at position 2803 of SEQ ID NO: 913711
agcugcugacuauauauua

SEQ ID NO: 947977 - RNA, 19 nt, Artificial Sequence
  Description of Artificial Sequence: Synthetic oligonucleotide
  Antisense strand to SEQ ID NO: 947976
uaauauauagucagcagcu

SEQ ID NO: 947978 - RNA, 19 nt, Artificial Sequence
  Description of Artificial Sequence: Synthetic oligonucleotide
  Sense strand starting at position 3927 of SEQ ID NO: 913711
guauguauucuacaccacu

SEQ ID NO: 947979 - RNA, 19 nt, Artificial Sequence
  Description of Artificial Sequence: Synthetic oligonucleotide
  Antisense strand to SEQ ID NO: 947978
agugguguagaauacauac

SEQ ID NO: 947980 - RNA, 19 nt, Artificial Sequence
  Description of Artificial Sequence: Synthetic oligonucleotide
  Sense strand starting at position 94 of SEQ ID NO: 913711
ccacacuuucccgauguga

SEQ ID NO: 947981 - RNA, 19 nt, Artificial Sequence
  Description of Artificial Sequence: Synthetic oligonucleotide
  Antisense strand to SEQ ID NO: 947980
ucacaucgggaaagugugg

SEQ ID NO: 947982 - RNA, 19 nt, Artificial Sequence
  Description of Artificial Sequence: Synthetic oligonucleotide
  Sense strand starting at position 3255 of SEQ ID NO: 913711
gacaguucuggccaccauu

SEQ ID NO: 947983 - RNA, 19 nt, Artificial Sequence
  Description of Artificial Sequence: Synthetic oligonucleotide
  Antisense strand to SEQ ID NO: 947982
aaugguggccagaacuguc

SEQ ID NO: 947984 - RNA, 19 nt, Artificial Sequence
  Description of Artificial Sequence: Synthetic oligonucleotide
  Sense strand starting at position 2525 of SEQ ID NO: 913711
ugcuuucucgugcuuguua

SEQ ID NO: 947985 - RNA, 19 nt, Artificial Sequence
  Description of Artificial Sequence: Synthetic oligonucleotide
  Antisense strand to SEQ ID NO: 947984
uaacaagcacgagaaagca

SEQ ID NO: 947986 - RNA, 19 nt, Artificial Sequence
  Description of Artificial Sequence: Synthetic oligonucleotide
  Sense strand starting at position 1363 of SEQ ID NO: 913711
ggccuacuauggucugaaa

SEQ ID NO: 947987 - RNA, 19 nt, Artificial Sequence
  Description of Artificial Sequence: Synthetic oligonucleotide
  Antisense strand to SEQ ID NO: 947986
uuucagaccauaguaggcc

SEQ ID NO: 947988 - RNA, 19 nt, Artificial Sequence
  Description of Artificial Sequence: Synthetic oligonucleotide
  Sense strand starting at position 3765 of SEQ ID NO: 913711
aaaggcaugucugugaaug

SEQ ID NO: 947989 - RNA, 19 nt, Artificial Sequence
  Description of Artificial Sequence: Synthetic oligonucleotide
  Antisense strand to SEQ ID NO: 947988
cauucacagacaugccuuu

SEQ ID NO: 947990 - RNA, 19 nt, Artificial Sequence
  Description of Artificial Sequence: Synthetic oligonucleotide
  Sense strand starting at position 3434 of SEQ ID NO: 913711
gggcaaacauccuuucuuu

SEQ ID NO: 947991 - RNA, 19 nt, Artificial Sequence
  Description of Artificial Sequence: Synthetic oligonucleotide
  Antisense strand to SEQ ID NO: 947990
aaagaaaggauguuugccc

SEQ ID NO: 947992 - RNA, 19 nt, Artificial Sequence
  Description of Artificial Sequence: Synthetic oligonucleotide
  Sense strand starting at position 2800 of SEQ ID NO: 913711
cagagcugcugacuauaua

SEQ ID NO: 947993 - RNA, 19 nt, Artificial Sequence
  Description of Artificial Sequence: Synthetic oligonucleotide
  Antisense strand to SEQ ID NO: 947992
uauauagucagcagcucug

SEQ ID NO: 947994 - RNA, 19 nt, Artificial Sequence
  Description of Artificial Sequence: Synthetic oligonucleotide
  Sense strand starting at position 161 of SEQ ID NO: 913711
uuagauaagucaucuguuc

SEQ ID NO: 947995 - RNA, 19 nt, Artificial Sequence
  Description of Artificial Sequence: Synthetic oligonucleotide
  Antisense strand to SEQ ID NO: 947994
gaacagaugacuuaucuaa

SEQ ID NO: 947996 - RNA, 19 nt, Artificial Sequence
  Description of Artificial Sequence: Synthetic oligonucleotide
  Sense strand starting at position 3947 of SEQ ID NO: 913711
ggagcaagcuucuuuauca

SEQ ID NO: 947997 - RNA, 19 nt, Artificial Sequence
  Description of Artificial Sequence: Synthetic oligonucleotide
  Antisense strand to SEQ ID NO: 947996
ugauaaagaagcuugcucc

SEQ ID NO: 947998 - RNA, 19 nt, Artificial Sequence
  Description of Artificial Sequence: Synthetic oligonucleotide
  Sense strand starting at position 96 of SEQ ID NO: 913711
acacuuucccgaugugauu

SEQ ID NO: 947999 - RNA, 19 nt, Artificial Sequence
  Description of Artificial Sequence: Synthetic oligonucleotide
  Antisense strand to SEQ ID NO: 947998
aaucacaucgggaaagugu

SEQ ID NO: 948000 - RNA, 19 nt, Artificial Sequence
  Description of Artificial Sequence: Synthetic oligonucleotide
  Sense strand starting at position 3770 of SEQ ID NO: 913711
caugucugugaaugcacaa

SEQ ID NO: 948001 - RNA, 19 nt, Artificial Sequence
  Description of Artificial Sequence: Synthetic oligonucleotide
  Antisense strand to SEQ ID NO: 948000
uugugcauucacagacaug

SEQ ID NO: 948002 - RNA, 19 nt, Artificial Sequence
  Description of Artificial Sequence: Synthetic oligonucleotide
  Sense strand starting at position 3853 of SEQ ID NO: 913711
gugcguguugaugagaauc

SEQ ID NO: 948003 - RNA, 19 nt, Artificial Sequence
  Description of Artificial Sequence: Synthetic oligonucleotide
  Antisense strand to SEQ ID NO: 948002
gauucucaucaacacgcac

SEQ ID NO: 948004 - RNA, 19 nt, Artificial Sequence
  Description of Artificial Sequence: Synthetic oligonucleotide
  Sense strand starting at position 3325 of SEQ ID NO: 913711
uuguauguuuccucaaccu

SEQ ID NO: 948005 - RNA, 19 nt, Artificial Sequence
  Description of Artificial Sequence: Synthetic oligonucleotide
  Antisense strand to SEQ ID NO: 948004
agguugaggaaacauacaa

SEQ ID NO: 948006 - RNA, 19 nt, Artificial Sequence
  Description of Artificial Sequence: Synthetic oligonucleotide
  Sense strand starting at position 3323 of SEQ ID NO: 913711
ucuuguauguuuccucaac

SEQ ID NO: 948007 - RNA, 19 nt, Artificial Sequence
  Description of Artificial Sequence: Synthetic oligonucleotide
  Antisense strand to SEQ ID NO: 948006
guugaggaaacauacaaga

SEQ ID NO: 948008 - RNA, 19 nt, Artificial Sequence
  Description of Artificial Sequence: Synthetic oligonucleotide
  Sense strand starting at position 3816 of SEQ ID NO: 913711
cuauaacaaugauaaggua

SEQ ID NO: 948009 - RNA, 19 nt, Artificial Sequence
  Description of Artificial Sequence: Synthetic oligonucleotide
  Antisense strand to SEQ ID NO: 948008
uaccuuaucauuguuauag

SEQ ID NO: 948010 - RNA, 19 nt, Artificial Sequence
  Description of Artificial Sequence: Synthetic oligonucleotide
  Sense strand starting at position 3265 of SEQ ID NO: 913711
gccaccauuuccgagauua

SEQ ID NO: 948011 - RNA, 19 nt, Artificial Sequence
  Description of Artificial Sequence: Synthetic oligonucleotide
  Antisense strand to SEQ ID NO: 948010
uaaucucggaaaugguggc

SEQ ID NO: 948012 - RNA, 19 nt, Artificial Sequence
  Description of Artificial Sequence: Synthetic oligonucleotide
  Sense strand starting at position 918 of SEQ ID NO: 913711
gucaaugucuguguaauug

SEQ ID NO: 948013 - RNA, 19 nt, Artificial Sequence
  Description of Artificial Sequence: Synthetic oligonucleotide
  Antisense strand to SEQ ID NO: 948012
caauuacacagacauugac

SEQ ID NO: 948014 - RNA, 19 nt, Artificial Sequence
  Description of Artificial Sequence: Synthetic oligonucleotide
  Sense strand starting at position 3281 of SEQ ID NO: 913711
uuagcaaagcuaugcucau

SEQ ID NO: 948015 - RNA, 19 nt, Artificial Sequence
  Description of Artificial Sequence: Synthetic oligonucleotide
  Antisense strand to SEQ ID NO: 948014
augagcauagcuuugcuaa

SEQ ID NO: 948016 - RNA, 19 nt, Artificial Sequence
  Description of Artificial Sequence: Synthetic oligonucleotide
  Sense strand starting at position 697 of SEQ ID NO: 913711
gaacaacugucaggaagaa

SEQ ID NO: 948017 - RNA, 19 nt, Artificial Sequence
  Description of Artificial Sequence: Synthetic oligonucleotide
  Antisense strand to SEQ ID NO: 948016
uucuuccugacaguuguuc

SEQ ID NO: 948018 - RNA, 19 nt, Artificial Sequence
  Description of Artificial Sequence: Synthetic oligonucleotide
  Sense strand starting at position 2669 of SEQ ID NO: 913711
ggagaagguugaugaggau

SEQ ID NO: 948019 - RNA, 19 nt, Artificial Sequence
  Description of Artificial Sequence: Synthetic oligonucleotide
  Antisense strand to SEQ ID NO: 948018
auccucaucaaccuucucc

SEQ ID NO: 948020 - RNA, 19 nt, Artificial Sequence
  Description of Artificial Sequence: Synthetic oligonucleotide
  Sense strand starting at position 2552 of SEQ ID NO: 913712
ccagucucggcuuuguauu

SEQ ID NO: 948021 - RNA, 19 nt, Artificial Sequence
  Description of Artificial Sequence: Synthetic oligonucleotide
  Antisense strand to SEQ ID NO: 948020
aauacaaagccgagacugg

SEQ ID NO: 948022 - RNA, 19 nt, Artificial Sequence
  Description of Artificial Sequence: Synthetic oligonucleotide
  Sense strand starting at position 2846 of SEQ ID NO: 913712
gggacuuuggagugacuga

SEQ ID NO: 948023 - RNA, 19 nt, Artificial Sequence
  Description of Artificial Sequence: Synthetic oligonucleotide
  Antisense strand to SEQ ID NO: 948022
ucagucacuccaaaguccc

SEQ ID NO: 948024 - RNA, 19 nt, Artificial Sequence
  Description of Artificial Sequence: Synthetic oligonucleotide
  Sense strand starting at position 3458 of SEQ ID NO: 913712
ggcugacugaaauauaguu

SEQ ID NO: 948025 - RNA, 19 nt, Artificial Sequence
  Description of Artificial Sequence: Synthetic oligonucleotide
  Antisense strand to SEQ ID NO: 948024
aacuauauuucagucagcc

SEQ ID NO: 948026 - RNA, 19 nt, Artificial Sequence
  Description of Artificial Sequence: Synthetic oligonucleotide
  Sense strand starting at position 3724 of SEQ ID NO: 913712
auacucugauucuuaggau

SEQ ID NO: 948027 - RNA, 19 nt, Artificial Sequence
  Description of Artificial Sequence: Synthetic oligonucleotide
  Antisense strand to SEQ ID NO: 948026
auccuaagaaucagaguau

SEQ ID NO: 948028 - RNA, 19 nt, Artificial Sequence
  Description of Artificial Sequence: Synthetic oligonucleotide
  Sense strand starting at position 2559 of SEQ ID NO: 913712
cggcuuuguauugugaguu

SEQ ID NO: 948029 - RNA, 19 nt, Artificial Sequence
  Description of Artificial Sequence: Synthetic oligonucleotide
  Antisense strand to SEQ ID NO: 948028
aacucacaauacaaagccg

SEQ ID NO: 948030 - RNA, 19 nt, Artificial Sequence
  Description of Artificial Sequence: Synthetic oligonucleotide
  Sense strand starting at position 2683 of SEQ ID NO: 913712
cagucaaaggacugugaga

SEQ ID NO: 948031 - RNA, 19 nt, Artificial Sequence
  Description of Artificial Sequence: Synthetic oligonucleotide
  Antisense strand to SEQ ID NO: 948030
ucucacaguccuuugacug

SEQ ID NO: 948032 - RNA, 19 nt, Artificial Sequence
  Description of Artificial Sequence: Synthetic oligonucleotide
  Sense strand starting at position 3603 of SEQ ID NO: 913712
cugagagaggcuggaucua

SEQ ID NO: 948033 - RNA, 19 nt, Artificial Sequence
  Description of Artificial Sequence: Synthetic oligonucleotide
  Antisense strand to SEQ ID NO: 948032
uagauccagccucucucag

SEQ ID NO: 948034 - RNA, 19 nt, Artificial Sequence
  Description of Artificial Sequence: Synthetic oligonucleotide
  Sense strand starting at position 2912 of SEQ ID NO: 913712
gcgucucuacuaguuaguu

SEQ ID NO: 948035 - RNA, 19 nt, Artificial Sequence
  Description of Artificial Sequence: Synthetic oligonucleotide
  Antisense strand to SEQ ID NO: 948034
aacuaacuaguagagacgc

SEQ ID NO: 948036 - RNA, 19 nt, Artificial Sequence
  Description of Artificial Sequence: Synthetic oligonucleotide
  Sense strand starting at position 3945 of SEQ ID NO: 913712
gcagaucuaguugaauuau

SEQ ID NO: 948037 - RNA, 19 nt, Artificial Sequence
  Description of Artificial Sequence: Synthetic oligonucleotide
  Antisense strand to SEQ ID NO: 948036
auaauucaacuagaucugc

SEQ ID NO: 948038 - RNA, 19 nt, Artificial Sequence
  Description of Artificial Sequence: Synthetic oligonucleotide
  Sense strand starting at position 2802 of SEQ ID NO: 913712
uuguguauauuugcuacua

SEQ ID NO: 948039 - RNA, 19 nt, Artificial Sequence
  Description of Artificial Sequence: Synthetic oligonucleotide
  Antisense strand to SEQ ID NO: 948038
uaguagcaaauauacacaa

SEQ ID NO: 948040 - RNA, 19 nt, Artificial Sequence
  Description of Artificial Sequence: Synthetic oligonucleotide
  Sense strand starting at position 3786 of SEQ ID NO: 913712
gaagaaaucugguauuugg

SEQ ID NO: 948041 - RNA, 19 nt, Artificial Sequence
  Description of Artificial Sequence: Synthetic oligonucleotide
  Antisense strand to SEQ ID NO: 948040
ccaaauaccagauuucuuc

SEQ ID NO: 948042 - RNA, 19 nt, Artificial Sequence
  Description of Artificial Sequence: Synthetic oligonucleotide
  Sense strand starting at position 2938 of SEQ ID NO: 913712
gcuauugcuggcguuuaua

SEQ ID NO: 948043 - RNA, 19 nt, Artificial Sequence
  Description of Artificial Sequence: Synthetic oligonucleotide
  Antisense strand to SEQ ID NO: 948042
uauaaacgccagcaauagc

SEQ ID NO: 948044 - RNA, 19 nt, Artificial Sequence
  Description of Artificial Sequence: Synthetic oligonucleotide
  Sense strand starting at position 2551 of SEQ ID NO: 913712
gccagucucggcuuuguau

SEQ ID NO: 948045 - RNA, 19 nt, Artificial Sequence
  Description of Artificial Sequence: Synthetic oligonucleotide
  Antisense strand to SEQ ID NO: 948044
auacaaagccgagacuggc

SEQ ID NO: 948046 - RNA, 19 nt, Artificial Sequence
  Description of Artificial Sequence: Synthetic oligonucleotide
  Sense strand starting at position 2936 of SEQ ID NO: 913712
uggcuauugcuggcguuua

SEQ ID NO: 948047 - RNA, 19 nt, Artificial Sequence
  Description of Artificial Sequence: Synthetic oligonucleotide
  Antisense strand to SEQ ID NO: 948046
uaaacgccagcaauagcca

SEQ ID NO: 948048 - RNA, 19 nt, Artificial Sequence
  Description of Artificial Sequence: Synthetic oligonucleotide
  Sense strand starting at position 1393 of SEQ ID NO: 913712
cccuuuaucgcccaaggaa

SEQ ID NO: 948049 - RNA, 19 nt, Artificial Sequence
  Description of Artificial Sequence: Synthetic oligonucleotide
  Antisense strand to SEQ ID NO: 948048
uuccuugggcgauaaaggg

SEQ ID NO: 948050 - RNA, 19 nt, Artificial Sequence
  Description of Artificial Sequence: Synthetic oligonucleotide
  Sense strand starting at position 826 of SEQ ID NO: 913712
ccgccauuucccggugaaa

SEQ ID NO: 948051 - RNA, 19 nt, Artificial Sequence
  Description of Artificial Sequence: Synthetic oligonucleotide
  Antisense strand to SEQ ID NO: 948050
uuucaccgggaaauggcgg

SEQ ID NO: 948052 - RNA, 19 nt, Artificial Sequence
  Description of Artificial Sequence: Synthetic oligonucleotide
  Sense strand starting at position 828 of SEQ ID NO: 913712
gccauuucccggugaaagc

SEQ ID NO: 948053 - RNA, 19 nt, Artificial Sequence
  Description of Artificial Sequence: Synthetic oligonucleotide
  Antisense strand to SEQ ID NO: 948052
gcuuucaccgggaaauggc

SEQ ID NO: 948054 - RNA, 19 nt, Artificial Sequence
  Description of Artificial Sequence: Synthetic oligonucleotide
  Sense strand starting at position 190 of SEQ ID NO: 913712
uuugaauuccucugaggug

SEQ ID NO: 948055 - RNA, 19 nt, Artificial Sequence
  Description of Artificial Sequence: Synthetic oligonucleotide
  Antisense strand to SEQ ID NO: 948054
caccucagaggaauucaaa

SEQ ID NO: 948056 - RNA, 19 nt, Artificial Sequence
  Description of Artificial Sequence: Synthetic oligonucleotide
  Sense strand starting at position 251 of SEQ ID NO: 913712
caggguaacugcccuuaaa

SEQ ID NO: 948057 - RNA, 19 nt, Artificial Sequence
  Description of Artificial Sequence: Synthetic oligonucleotide
  Antisense strand to SEQ ID NO: 948056
uuuaagggcaguuacccug

SEQ ID NO: 948058 - RNA, 19 nt, Artificial Sequence
  Description of Artificial Sequence: Synthetic oligonucleotide
  Sense strand starting at position 3452 of SEQ ID NO: 913712
cagccaggcugacugaaau

SEQ ID NO: 948059 - RNA, 19 nt, Artificial Sequence
  Description of Artificial Sequence: Synthetic oligonucleotide
  Antisense strand to SEQ ID NO: 948058
auuucagucagccuggcug

SEQ ID NO: 948060 - RNA, 19 nt, Artificial Sequence
  Description of Artificial Sequence: Synthetic oligonucleotide
  Sense strand starting at position 3632 of SEQ ID NO: 913712
ugguuaggauucucccauu

SEQ ID NO: 948061 - RNA, 19 nt, Artificial Sequence
  Description of Artificial Sequence: Synthetic oligonucleotide
  Antisense strand to SEQ ID NO: 948060
aaugggagaauccuaacca

SEQ ID NO: 948062 - RNA, 19 nt, Artificial Sequence
  Description of Artificial Sequence: Synthetic oligonucleotide
  Sense strand starting at position 3766 of SEQ ID NO: 913712
aguggaaaccuuugcuaua

SEQ ID NO: 948063 - RNA, 19 nt, Artificial Sequence
  Description of Artificial Sequence: Synthetic oligonucleotide
  Antisense strand to SEQ ID NO: 948062
uauagcaaagguuuccacu

SEQ ID NO: 948064 - RNA, 19 nt, Artificial Sequence
  Description of Artificial Sequence: Synthetic oligonucleotide
  Sense strand starting at position 3767 of SEQ ID NO: 913712
guggaaaccuuugcuauag

SEQ ID NO: 948065 - RNA, 19 nt, Artificial Sequence
  Description of Artificial Sequence: Synthetic oligonucleotide
  Antisense strand to SEQ ID NO: 948064
cuauagcaaagguuuccac

SEQ ID NO: 948066 - RNA, 19 nt, Artificial Sequence
  Description of Artificial Sequence: Synthetic oligonucleotide
  Sense strand starting at position 2246 of SEQ ID NO: 913712
aauuuauauccgugccugu

SEQ ID NO: 948067 - RNA, 19 nt, Artificial Sequence
  Description of Artificial Sequence: Synthetic oligonucleotide
  Antisense strand to SEQ ID NO: 948066
acaggcacggauauaaauu

SEQ ID NO: 948068 - RNA, 19 nt, Artificial Sequence
  Description of Artificial Sequence: Synthetic oligonucleotide
  Sense strand starting at position 2961 of SEQ ID NO: 913712
gcggguuagguuuagaaca

SEQ ID NO: 948069 - RNA, 19 nt, Artificial Sequence
  Description of Artificial Sequence: Synthetic oligonucleotide
  Antisense strand to SEQ ID NO: 948068
uguucuaaaccuaacccgc

SEQ ID NO: 948070 - RNA, 19 nt, Artificial Sequence
  Description of Artificial Sequence: Synthetic oligonucleotide
  Sense strand starting at position 2917 of SEQ ID NO: 913712
ucuacuaguuaguuaauca

SEQ ID NO: 948071 - RNA, 19 nt, Artificial Sequence
  Description of Artificial Sequence: Synthetic oligonucleotide
  Antisense strand to SEQ ID NO: 948070
ugauuaacuaacuaguaga

SEQ ID NO: 948072 - RNA, 19 nt, Artificial Sequence
  Description of Artificial Sequence: Synthetic oligonucleotide
  Sense strand starting at position 3855 of SEQ ID NO: 913712
uccaaugcauguccagaua

SEQ ID NO: 948073 - RNA, 19 nt, Artificial Sequence
  Description of Artificial Sequence: Synthetic oligonucleotide
  Antisense strand to SEQ ID NO: 948072
uaucuggacaugcauugga

SEQ ID NO: 948074 - RNA, 19 nt, Artificial Sequence
  Description of Artificial Sequence: Synthetic oligonucleotide
  Sense strand starting at position 61 of SEQ ID NO: 913712
agcccagugaggugacaau

SEQ ID NO: 948075 - RNA, 19 nt, Artificial Sequence
  Description of Artificial Sequence: Synthetic oligonucleotide
  Antisense strand to SEQ ID NO: 948074
auugucaccucacugggcu

SEQ ID NO: 948076 - RNA, 19 nt, Artificial Sequence
  Description of Artificial Sequence: Synthetic oligonucleotide
  Sense strand starting at position 3005 of SEQ ID NO: 913712
agaaaucagccauguuucu

SEQ ID NO: 948077 - RNA, 19 nt, Artificial Sequence
  Description of Artificial Sequence: Synthetic oligonucleotide
  Antisense strand to SEQ ID NO: 948076
agaaacauggcugauuucu

SEQ ID NO: 948078 - RNA, 19 nt, Artificial Sequence
  Description of Artificial Sequence: Synthetic oligonucleotide
  Sense strand starting at position 2968 of SEQ ID NO: 913712
agguuuagaacaugugcau

SEQ ID NO: 948079 - RNA, 19 nt, Artificial Sequence
  Description of Artificial Sequence: Synthetic oligonucleotide
  Antisense strand to SEQ ID NO: 948078
augcacauguucuaaaccu

SEQ ID NO: 948080 - RNA, 19 nt, Artificial Sequence
  Description of Artificial Sequence: Synthetic oligonucleotide
  Sense strand starting at position 3172 of SEQ ID NO: 913712
uguguaugaccucacuguu

SEQ ID NO: 948081 - RNA, 19 nt, Artificial Sequence
  Description of Artificial Sequence: Synthetic oligonucleotide
  Antisense strand to SEQ ID NO: 948080
aacagugaggucauacaca

SEQ ID NO: 948082 - RNA, 19 nt, Artificial Sequence
  Description of Artificial Sequence: Synthetic oligonucleotide
  Sense strand starting at position 2925 of SEQ ID NO: 913712
uuaguuaaucauggcuauu

SEQ ID NO: 948083 - RNA, 19 nt, Artificial Sequence
  Description of Artificial Sequence: Synthetic oligonucleotide
  Antisense strand to SEQ ID NO: 948082
aauagccaugauuaacuaa

SEQ ID NO: 948084 - RNA, 19 nt, Artificial Sequence
  Description of Artificial Sequence: Synthetic oligonucleotide
  Sense strand starting at position 2369 of SEQ ID NO: 913712
uuaauuggguugcuuuaca

SEQ ID NO: 948085 - RNA, 19 nt, Artificial Sequence
  Description of Artificial Sequence: Synthetic oligonucleotide
  Antisense strand to SEQ ID NO: 948084
uguaaagcaacccaauuaa

SEQ ID NO: 948086 - RNA, 19 nt, Artificial Sequence
  Description of Artificial Sequence: Synthetic oligonucleotide
  Sense strand starting at position 3185 of SEQ ID NO: 913712
acuguucuuugucuuggaa

SEQ ID NO: 948087 - RNA, 19 nt, Artificial Sequence
  Description of Artificial Sequence: Synthetic oligonucleotide
  Antisense strand to SEQ ID NO: 948086
uuccaagacaaagaacagu

SEQ ID NO: 948088 - RNA, 19 nt, Artificial Sequence
  Description of Artificial Sequence: Synthetic oligonucleotide
  Sense strand starting at position 2400 of SEQ ID NO: 913712
gcaauaucccaacggguau

SEQ ID NO: 948089 - RNA, 19 nt, Artificial Sequence
  Description of Artificial Sequence: Synthetic oligonucleotide
  Antisense strand to SEQ ID NO: 948088
auacccguugggauauugc

SEQ ID NO: 948090 - RNA, 19 nt, Artificial Sequence
  Description of Artificial Sequence: Synthetic oligonucleotide
  Sense strand starting at position 2994 of SEQ ID NO: 913712
uguauuugcugagaaauca

SEQ ID NO: 948091 - RNA, 19 nt, Artificial Sequence
  Description of Artificial Sequence: Synthetic oligonucleotide
  Antisense strand to SEQ ID NO: 948090
ugauuucucagcaaauaca

SEQ ID NO: 948092 - RNA, 19 nt, Artificial Sequence
  Description of Artificial Sequence: Synthetic oligonucleotide
  Sense strand starting at position 3175 of SEQ ID NO: 913712
guaugaccucacuguucuu

SEQ ID NO: 948093 - RNA, 19 nt, Artificial Sequence
  Description of Artificial Sequence: Synthetic oligonucleotide
  Antisense strand to SEQ ID NO: 948092
aagaacagugaggucauac

SEQ ID NO: 948094 - RNA, 19 nt, Artificial Sequence
  Description of Artificial Sequence: Synthetic oligonucleotide
  Sense strand starting at position 3184 of SEQ ID NO: 913712
cacuguucuuugucuugga

SEQ ID NO: 948095 - RNA, 19 nt, Artificial Sequence
  Description of Artificial Sequence: Synthetic oligonucleotide
  Antisense strand to SEQ ID NO: 948094
uccaagacaaagaacagug

SEQ ID NO: 948096 - RNA, 19 nt, Artificial Sequence
  Description of Artificial Sequence: Synthetic oligonucleotide
  Sense strand starting at position 2498 of SEQ ID NO: 913712
gacacugucgggugugaua

SEQ ID NO: 948097 - RNA, 19 nt, Artificial Sequence
  Description of Artificial Sequence: Synthetic oligonucleotide
  Antisense strand to SEQ ID NO: 948096
uaucacacccgacaguguc

SEQ ID NO: 948098 - RNA, 19 nt, Artificial Sequence
  Description of Artificial Sequence: Synthetic oligonucleotide
  Sense strand starting at position 2941 of SEQ ID NO: 913712
auugcuggcguuuauagau

SEQ ID NO: 948099 - RNA, 19 nt, Artificial Sequence
  Description of Artificial Sequence: Synthetic oligonucleotide
  Antisense strand to SEQ ID NO: 948098
aucuauaaacgccagcaau

SEQ ID NO: 948100 - RNA, 19 nt, Artificial Sequence
  Description of Artificial Sequence: Synthetic oligonucleotide
  Sense strand starting at position 517 of SEQ ID NO: 913713
uuuaauaggcaugaucuua

SEQ ID NO: 948101 - RNA, 19 nt, Artificial Sequence
  Description of Artificial Sequence: Synthetic oligonucleotide
  Antisense strand to SEQ ID NO: 948100
uaagaucaugccuauuaaa

SEQ ID NO: 948102 - RNA, 19 nt, Artificial Sequence
  Description of Artificial Sequence: Synthetic oligonucleotide
  Sense strand starting at position 8 of SEQ ID NO: 913713
cuggguguuccgagcagga

SEQ ID NO: 948103 - RNA, 19 nt, Artificial Sequence
  Description of Artificial Sequence: Synthetic oligonucleotide
  Antisense strand to SEQ ID NO: 948102
uccugcucggaacacccag

SEQ ID NO: 948104 - RNA, 19 nt, Artificial Sequence
  Description of Artificial Sequence: Synthetic oligonucleotide
  Sense strand starting at position 2937 of SEQ ID NO: 913713
ugauguucuaggcaaggga

SEQ ID NO: 948105 - RNA, 19 nt, Artificial Sequence
  Description of Artificial Sequence: Synthetic oligonucleotide
  Antisense strand to SEQ ID NO: 948104
ucccuugccuagaacauca

SEQ ID NO: 948106 - RNA, 19 nt, Artificial Sequence
  Description of Artificial Sequence: Synthetic oligonucleotide
  Sense strand starting at position 2530 of SEQ ID NO: 913713
uguuguuaucaugacaaag

SEQ ID NO: 948107 - RNA, 19 nt, Artificial Sequence
  Description of Artificial Sequence: Synthetic oligonucleotide
  Antisense strand to SEQ ID NO: 948106
cuuugucaugauaacaaca

SEQ ID NO: 948108 - RNA, 19 nt, Artificial Sequence
  Description of Artificial Sequence: Synthetic oligonucleotide
  Sense strand starting at position 3632 of SEQ ID NO: 913713
uggcuuugaaaucagugaa

SEQ ID NO: 948109 - RNA, 19 nt, Artificial Sequence
  Description of Artificial Sequence: Synthetic oligonucleotide
  Antisense strand to SEQ ID NO: 948108
uucacugauuucaaagcca

SEQ ID NO: 948110 - RNA, 19 nt, Artificial Sequence
  Description of Artificial Sequence: Synthetic oligonucleotide
  Sense strand starting at position 3776 of SEQ ID NO: 913713
ucucuuuaggaugggauca

SEQ ID NO: 948111 - RNA, 19 nt, Artificial Sequence
  Description of Artificial Sequence: Synthetic oligonucleotide
  Antisense strand to SEQ ID NO: 948110
ugaucccauccuaaagaga

SEQ ID NO: 948112 - RNA, 19 nt, Artificial Sequence
  Description of Artificial Sequence: Synthetic oligonucleotide
  Sense strand starting at position 798 of SEQ ID NO: 913713
ccagaugagccuugaagga

SEQ ID NO: 948113 - RNA, 19 nt, Artificial Sequence
  Description of Artificial Sequence: Synthetic oligonucleotide
  Antisense strand to SEQ ID NO: 948112
uccuucaaggcucaucugg

SEQ ID NO: 948114 - RNA, 19 nt, Artificial Sequence
  Description of Artificial Sequence: Synthetic oligonucleotide
  Sense strand starting at position 501 of SEQ ID NO: 913713
ggacacaauugaucucuuu

SEQ ID NO: 948115 - RNA, 19 nt, Artificial Sequence
  Description of Artificial Sequence: Synthetic oligonucleotide
  Antisense strand to SEQ ID NO: 948114
aaagagaucaauugugucc

SEQ ID NO: 948116 - RNA, 19 nt, Artificial Sequence
  Description of Artificial Sequence: Synthetic oligonucleotide
  Sense strand starting at position 3608 of SEQ ID NO: 913713
agaacagaccuuugcacaa

SEQ ID NO: 948117 - RNA, 19 nt, Artificial Sequence
  Description of Artificial Sequence: Synthetic oligonucleotide
  Antisense strand to SEQ ID NO: 948116
uugugcaaaggucuguucu

SEQ ID NO: 948118 - RNA, 19 nt, Artificial Sequence
  Description of Artificial Sequence: Synthetic oligonucleotide
  Sense strand starting at position 2799 of SEQ ID NO: 913713
ucacguguuggguuacgua

SEQ ID NO: 948119 - RNA, 19 nt, Artificial Sequence
  Description of Artificial Sequence: Synthetic oligonucleotide
  Antisense strand to SEQ ID NO: 948118
uacguaacccaacacguga

SEQ ID NO: 948120 - RNA, 19 nt, Artificial Sequence
  Description of Artificial Sequence: Synthetic oligonucleotide
  Sense strand starting at position 490 of SEQ ID NO: 913713
uggguucuuguggacacaa

SEQ ID NO: 948121 - RNA, 19 nt, Artificial Sequence
  Description of Artificial Sequence: Synthetic oligonucleotide
  Antisense strand to SEQ ID NO: 948120
uuguguccacaagaaccca

SEQ ID NO: 948122 - RNA, 19 nt, Artificial Sequence
  Description of Artificial Sequence: Synthetic oligonucleotide
  Sense strand starting at position 3546 of SEQ ID NO: 913713
ggcguuacugagaggugua

SEQ ID NO: 948123 - RNA, 19 nt, Artificial Sequence
  Description of Artificial Sequence: Synthetic oligonucleotide
  Antisense strand to SEQ ID NO: 948122
uacaccucucaguaacgcc

SEQ ID NO: 948124 - RNA, 19 nt, Artificial Sequence
  Description of Artificial Sequence: Synthetic oligonucleotide
  Sense strand starting at position 91 of SEQ ID NO: 913713
gccucugccagugcugauu

SEQ ID NO: 948125 - RNA, 19 nt, Artificial Sequence
  Description of Artificial Sequence: Synthetic oligonucleotide
  Antisense strand to SEQ ID NO: 948124
aaucagcacuggcagaggc

SEQ ID NO: 948126 - RNA, 19 nt, Artificial Sequence
  Description of Artificial Sequence: Synthetic oligonucleotide
  Sense strand starting at position 1738 of SEQ ID NO: 913713
ggaugccuuagauagcaua

SEQ ID NO: 948127 - RNA, 19 nt, Artificial Sequence
  Description of Artificial Sequence: Synthetic oligonucleotide
  Antisense strand to SEQ ID NO: 948126
uaugcuaucuaaggcaucc

SEQ ID NO: 948128 - RNA, 19 nt, Artificial Sequence
  Description of Artificial Sequence: Synthetic oligonucleotide
  Sense strand starting at position 3405 of SEQ ID NO: 913713
gcagcuuggacucagaaca

SEQ ID NO: 948129 - RNA, 19 nt, Artificial Sequence
  Description of Artificial Sequence: Synthetic oligonucleotide
  Antisense strand to SEQ ID NO: 948128
uguucugaguccaagcugc

SEQ ID NO: 948130 - RNA, 19 nt, Artificial Sequence
  Description of Artificial Sequence: Synthetic oligonucleotide
  Sense strand starting at position 3649 of SEQ ID NO: 913713
aagucuuuccaugggauga

SEQ ID NO: 948131 - RNA, 19 nt, Artificial Sequence
  Description of Artificial Sequence: Synthetic oligonucleotide
  Antisense strand to SEQ ID NO: 948130
ucaucccauggaaagacuu

SEQ ID NO: 948132 - RNA, 19 nt, Artificial Sequence
  Description of Artificial Sequence: Synthetic oligonucleotide
  Sense strand starting at position 3293 of SEQ ID NO: 913713
ccuguugggccugaacaaa

SEQ ID NO: 948133 - RNA, 19 nt, Artificial Sequence
  Description of Artificial Sequence: Synthetic oligonucleotide
  Antisense strand to SEQ ID NO: 948132
uuuguucaggcccaacagg

SEQ ID NO: 948134 - RNA, 19 nt, Artificial Sequence
  Description of Artificial Sequence: Synthetic oligonucleotide
  Sense strand starting at position 1621 of SEQ ID NO: 913713
auugaauccuuggcauaga

SEQ ID NO: 948135 - RNA, 19 nt, Artificial Sequence
  Description of Artificial Sequence: Synthetic oligonucleotide
  Antisense strand to SEQ ID NO: 948134
ucuaugccaaggauucaau

SEQ ID NO: 948136 - RNA, 19 nt, Artificial Sequence
  Description of Artificial Sequence: Synthetic oligonucleotide
  Sense strand starting at position 492 of SEQ ID NO: 913713
gguucuuguggacacaauu

SEQ ID NO: 948137 - RNA, 19 nt, Artificial Sequence
  Description of Artificial Sequence: Synthetic oligonucleotide
  Antisense strand to SEQ ID NO: 948136
aauuguguccacaagaacc

SEQ ID NO: 948138 - RNA, 19 nt, Artificial Sequence
  Description of Artificial Sequence: Synthetic oligonucleotide
  Sense strand starting at position 3648 of SEQ ID NO: 913713
gaagucuuuccaugggaug

SEQ ID NO: 948139 - RNA, 19 nt, Artificial Sequence
  Description of Artificial Sequence: Synthetic oligonucleotide
  Antisense strand to SEQ ID NO: 948138
caucccauggaaagacuuc

SEQ ID NO: 948140 - RNA, 19 nt, Artificial Sequence
  Description of Artificial Sequence: Synthetic oligonucleotide
  Sense strand starting at position 3650 of SEQ ID NO: 913713
agucuuuccaugggaugag

SEQ ID NO: 948141 - RNA, 19 nt, Artificial Sequence
  Description of Artificial Sequence: Synthetic oligonucleotide
  Antisense strand to SEQ ID NO: 948140
cucaucccauggaaagacu

SEQ ID NO: 948142 - RNA, 19 nt, Artificial Sequence
  Description of Artificial Sequence: Synthetic oligonucleotide
  Sense strand starting at position 3895 of SEQ ID NO: 913713
ggacaugauuauguuccua

SEQ ID NO: 948143 - RNA, 19 nt, Artificial Sequence
  Description of Artificial Sequence: Synthetic oligonucleotide
  Antisense strand to SEQ ID NO: 948142
uaggaacauaaucaugucc

SEQ ID NO: 948144 - RNA, 19 nt, Artificial Sequence
  Description of Artificial Sequence: Synthetic oligonucleotide
  Sense strand starting at position 1713 of SEQ ID NO: 913713
gugacaguuggacauguua

SEQ ID NO: 948145 - RNA, 19 nt, Artificial Sequence
  Description of Artificial Sequence: Synthetic oligonucleotide
  Antisense strand to SEQ ID NO: 948144
uaacauguccaacugucac

SEQ ID NO: 948146 - RNA, 19 nt, Artificial Sequence
  Description of Artificial Sequence: Synthetic oligonucleotide
  Sense strand starting at position 3897 of SEQ ID NO: 913713
acaugauuauguuccuaua

SEQ ID NO: 948147 - RNA, 19 nt, Artificial Sequence
  Description of Artificial Sequence: Synthetic oligonucleotide
  Antisense strand to SEQ ID NO: 948146
uauaggaacauaaucaugu

SEQ ID NO: 948148 - RNA, 19 nt, Artificial Sequence
  Description of Artificial Sequence: Synthetic oligonucleotide
  Sense strand starting at position 1665 of SEQ ID NO: 913713
uaaguuuauguuggaugaa

SEQ ID NO: 948149 - RNA, 19 nt, Artificial Sequence
  Description of Artificial Sequence: Synthetic oligonucleotide
  Antisense strand to SEQ ID NO: 948148
uucauccaacauaaacuua

SEQ ID NO: 948150 - RNA, 19 nt, Artificial Sequence
  Description of Artificial Sequence: Synthetic oligonucleotide
  Sense strand starting at position 366 of SEQ ID NO: 913713
cuuugaucaagcggaggaa

SEQ ID NO: 948151 - RNA, 19 nt, Artificial Sequence
  Description of Artificial Sequence: Synthetic oligonucleotide
  Antisense strand to SEQ ID NO: 948150
uuccuccgcuugaucaaag

SEQ ID NO: 948152 - RNA, 19 nt, Artificial Sequence
  Description of Artificial Sequence: Synthetic oligonucleotide
  Sense strand starting at position 1322 of SEQ ID NO: 913713
cuagaaaguucuucucuag

SEQ ID NO: 948153 - RNA, 19 nt, Artificial Sequence
  Description of Artificial Sequence: Synthetic oligonucleotide
  Antisense strand to SEQ ID NO: 948152
cuagagaagaacuuucuag

SEQ ID NO: 948154 - RNA, 19 nt, Artificial Sequence
  Description of Artificial Sequence: Synthetic oligonucleotide
  Sense strand starting at position 406 of SEQ ID NO: 913713
ucaggacaauuguuuccua

SEQ ID NO: 948155 - RNA, 19 nt, Artificial Sequence
  Description of Artificial Sequence: Synthetic oligonucleotide
  Antisense strand to SEQ ID NO: 948154
uaggaaacaauuguccuga

SEQ ID NO: 948156 - RNA, 19 nt, Artificial Sequence
  Description of Artificial Sequence: Synthetic oligonucleotide
  Sense strand starting at position 1668 of SEQ ID NO: 913713
guuuauguuggaugaaaug

SEQ ID NO: 948157 - RNA, 19 nt, Artificial Sequence
  Description of Artificial Sequence: Synthetic oligonucleotide
  Antisense strand to SEQ ID NO: 948156
cauuucauccaacauaaac

SEQ ID NO: 948158 - RNA, 19 nt, Artificial Sequence
  Description of Artificial Sequence: Synthetic oligonucleotide
  Sense strand starting at position 1662 of SEQ ID NO: 913713
caauaaguuuauguuggau

SEQ ID NO: 948159 - RNA, 19 nt, Artificial Sequence
  Description of Artificial Sequence: Synthetic oligonucleotide
  Antisense strand to SEQ ID NO: 948158
auccaacauaaacuuauug

SEQ ID NO: 948160 - RNA, 19 nt, Artificial Sequence
  Description of Artificial Sequence: Synthetic oligonucleotide
  Sense strand starting at position 1401 of SEQ ID NO: 913713
cucacuccugagcaaguua

SEQ ID NO: 948161 - RNA, 19 nt, Artificial Sequence
  Description of Artificial Sequence: Synthetic oligonucleotide
  Antisense strand to SEQ ID NO: 948160
uaacuugcucaggagugag

SEQ ID NO: 948162 - RNA, 19 nt, Artificial Sequence
  Description of Artificial Sequence: Synthetic oligonucleotide
  Sense strand starting at position 586 of SEQ ID NO: 913713
gaauccuccugacuugagu

SEQ ID NO: 948163 - RNA, 19 nt, Artificial Sequence
  Description of Artificial Sequence: Synthetic oligonucleotide
  Antisense strand to SEQ ID NO: 948162
acucaagucaggaggauuc

SEQ ID NO: 948164 - RNA, 19 nt, Artificial Sequence
  Description of Artificial Sequence: Synthetic oligonucleotide
  Sense strand starting at position 3635 of SEQ ID NO: 913713
cuuugaaaucagugaaguc

SEQ ID NO: 948165 - RNA, 19 nt, Artificial Sequence
  Description of Artificial Sequence: Synthetic oligonucleotide
  Antisense strand to SEQ ID NO: 948164
gacuucacugauuucaaag

SEQ ID NO: 948166 - RNA, 19 nt, Artificial Sequence
  Description of Artificial Sequence: Synthetic oligonucleotide
  Sense strand starting at position 357 of SEQ ID NO: 913713
ggagucuuucuuugaucaa

SEQ ID NO: 948167 - RNA, 19 nt, Artificial Sequence
  Description of Artificial Sequence: Synthetic oligonucleotide
  Antisense strand to SEQ ID NO: 948166
uugaucaaagaaagacucc

SEQ ID NO: 948168 - RNA, 19 nt, Artificial Sequence
  Description of Artificial Sequence: Synthetic oligonucleotide
  Sense strand starting at position 1618 of SEQ ID NO: 913713
accauugaauccuuggcau

SEQ ID NO: 948169 - RNA, 19 nt, Artificial Sequence
  Description of Artificial Sequence: Synthetic oligonucleotide
  Antisense strand to SEQ ID NO: 948168
augccaaggauucaauggu

SEQ ID NO: 948170 - RNA, 19 nt, Artificial Sequence
  Description of Artificial Sequence: Synthetic oligonucleotide
  Sense strand starting at position 513 of SEQ ID NO: 913713
ucucuuuaauaggcaugau

SEQ ID NO: 948171 - RNA, 19 nt, Artificial Sequence
  Description of Artificial Sequence: Synthetic oligonucleotide
  Antisense strand to SEQ ID NO: 948170
aucaugccuauuaaagaga

SEQ ID NO: 948172 - RNA, 19 nt, Artificial Sequence
  Description of Artificial Sequence: Synthetic oligonucleotide
  Sense strand starting at position 3027 of SEQ ID NO: 913713
acgauuguggcucacugaa

SEQ ID NO: 948173 - RNA, 19 nt, Artificial Sequence
  Description of Artificial Sequence: Synthetic oligonucleotide
  Antisense strand to SEQ ID NO: 948172
uucagugagccacaaucgu

SEQ ID NO: 948174 - RNA, 19 nt, Artificial Sequence
  Description of Artificial Sequence: Synthetic oligonucleotide
  Sense strand starting at position 1700 of SEQ ID NO: 913713
ccacuuuauccaugugaca

SEQ ID NO: 948175 - RNA, 19 nt, Artificial Sequence
  Description of Artificial Sequence: Synthetic oligonucleotide
  Antisense strand to SEQ ID NO: 948174
ugucacauggauaaagugg

SEQ ID NO: 948176 - RNA, 19 nt, Artificial Sequence
  Description of Artificial Sequence: Synthetic oligonucleotide
  Sense strand starting at position 356 of SEQ ID NO: 913713
uggagucuuucuuugauca

SEQ ID NO: 948177 - RNA, 19 nt, Artificial Sequence
  Description of Artificial Sequence: Synthetic oligonucleotide
  Antisense strand to SEQ ID NO: 948176
ugaucaaagaaagacucca

SEQ ID NO: 948178 - RNA, 19 nt, Artificial Sequence
  Description of Artificial Sequence: Synthetic oligonucleotide
  Sense strand starting at position 563 of SEQ ID NO: 913713
agaaaucuaugccuggguu

SEQ ID NO: 948179 - RNA, 19 nt, Artificial Sequence
  Description of Artificial Sequence: Synthetic oligonucleotide
  Antisense strand to SEQ ID NO: 948178
aacccaggcauagauuucu

SEQ ID NO: 948180 - RNA, 19 nt, Artificial Sequence
  Description of Artificial Sequence: Synthetic oligonucleotide
  Sense strand starting at position 2705 of SEQ ID NO: 913714
uuuaauaggcaugaucuua

SEQ ID NO: 948181 - RNA, 19 nt, Artificial Sequence
  Description of Artificial Sequence: Synthetic oligonucleotide
  Antisense strand to SEQ ID NO: 948180
uaagaucaugccuauuaaa

SEQ ID NO: 948182 - RNA, 19 nt, Artificial Sequence
  Description of Artificial Sequence: Synthetic oligonucleotide
  Sense strand starting at position 2196 of SEQ ID NO: 913714
cuggguguuccgagcagga

SEQ ID NO: 948183 - RNA, 19 nt, Artificial Sequence
  Description of Artificial Sequence: Synthetic oligonucleotide
  Antisense strand to SEQ ID NO: 948182
uccugcucggaacacccag

SEQ ID NO: 948184 - RNA, 19 nt, Artificial Sequence
  Description of Artificial Sequence: Synthetic oligonucleotide
  Sense strand starting at position 1683 of SEQ ID NO: 913714
gccugcauugguucuugua

SEQ ID NO: 948185 - RNA, 19 nt, Artificial Sequence
  Description of Artificial Sequence: Synthetic oligonucleotide
  Antisense strand to SEQ ID NO: 948184
uacaagaaccaaugcaggc

SEQ ID NO: 948186 - RNA, 19 nt, Artificial Sequence
  Description of Artificial Sequence: Synthetic oligonucleotide
  Sense strand starting at position 2007 of SEQ ID NO: 913714
ggaugcaaauuauuaacua

SEQ ID NO: 948187 - RNA, 19 nt, Artificial Sequence
  Description of Artificial Sequence: Synthetic oligonucleotide
  Antisense strand to SEQ ID NO: 948186
uaguuaauaauuugcaucc

SEQ ID NO: 948188 - RNA, 19 nt, Artificial Sequence
  Description of Artificial Sequence: Synthetic oligonucleotide
  Sense strand starting at position 2986 of SEQ ID NO: 913714
ccagaugagccuugaagga

SEQ ID NO: 948189 - RNA, 19 nt, Artificial Sequence
  Description of Artificial Sequence: Synthetic oligonucleotide
  Antisense strand to SEQ ID NO: 948188
uccuucaaggcucaucugg

SEQ ID NO: 948190 - RNA, 19 nt, Artificial Sequence
  Description of Artificial Sequence: Synthetic oligonucleotide
  Sense strand starting at position 2689 of SEQ ID NO: 913714
ggacacaauugaucucuuu

SEQ ID NO: 948191 - RNA, 19 nt, Artificial Sequence
  Description of Artificial Sequence: Synthetic oligonucleotide
  Antisense strand to SEQ ID NO: 948190
aaagagaucaauugugucc

SEQ ID NO: 948192 - RNA, 19 nt, Artificial Sequence
  Description of Artificial Sequence: Synthetic oligonucleotide
  Sense strand starting at position 1092 of SEQ ID NO: 913714
uuuccaugcccacagagau

SEQ ID NO: 948193 - RNA, 19 nt, Artificial Sequence
  Description of Artificial Sequence: Synthetic oligonucleotide
  Antisense strand to SEQ ID NO: 948192
aucucugugggcauggaaa

SEQ ID NO: 948194 - RNA, 19 nt, Artificial Sequence
  Description of Artificial Sequence: Synthetic oligonucleotide
  Sense strand starting at position 2678 of SEQ ID NO: 913714
uggguucuuguggacacaa

SEQ ID NO: 948195 - RNA, 19 nt, Artificial Sequence
  Description of Artificial Sequence: Synthetic oligonucleotide
  Antisense strand to SEQ ID NO: 948194
uuguguccacaagaaccca

SEQ ID NO: 948196 - RNA, 19 nt, Artificial Sequence
  Description of Artificial Sequence: Synthetic oligonucleotide
  Sense strand starting at position 2279 of SEQ ID NO: 913714
gccucugccagugcugauu

SEQ ID NO: 948197 - RNA, 19 nt, Artificial Sequence
  Description of Artificial Sequence: Synthetic oligonucleotide
  Antisense strand to SEQ ID NO: 948196
aaucagcacuggcagaggc

SEQ ID NO: 948198 - RNA, 19 nt, Artificial Sequence
  Description of Artificial Sequence: Synthetic oligonucleotide
  Sense strand starting at position 689 of SEQ ID NO: 913714
augcaaagguacuuaauaa

SEQ ID NO: 948199 - RNA, 19 nt, Artificial Sequence
  Description of Artificial Sequence: Synthetic oligonucleotide
  Antisense strand to SEQ ID NO: 948198
uuauuaaguaccuuugcau

SEQ ID NO: 948200 - RNA, 19 nt, Artificial Sequence
  Description of Artificial Sequence: Synthetic oligonucleotide
  Sense strand starting at position 3926 of SEQ ID NO: 913714
ggaugccuuagauagcaua

SEQ ID NO: 948201 - RNA, 19 nt, Artificial Sequence
  Description of Artificial Sequence: Synthetic oligonucleotide
  Antisense strand to SEQ ID NO: 948200
uaugcuaucuaaggcaucc

SEQ ID NO: 948202 - RNA, 19 nt, Artificial Sequence
  Description of Artificial Sequence: Synthetic oligonucleotide
  Sense strand starting at position 128 of SEQ ID NO: 913714
ggaauugacuaagcucauu

SEQ ID NO: 948203 - RNA, 19 nt, Artificial Sequence
  Description of Artificial Sequence: Synthetic oligonucleotide
  Antisense strand to SEQ ID NO: 948202
aaugagcuuagucaauucc

SEQ ID NO: 948204 - RNA, 19 nt, Artificial Sequence
  Description of Artificial Sequence: Synthetic oligonucleotide
  Sense strand starting at position 3809 of SEQ ID NO: 913714
auugaauccuuggcauaga

SEQ ID NO: 948205 - RNA, 19 nt, Artificial Sequence
  Description of Artificial Sequence: Synthetic oligonucleotide
  Antisense strand to SEQ ID NO: 948204
ucuaugccaaggauucaau

SEQ ID NO: 948206 - RNA, 19 nt, Artificial Sequence
  Description of Artificial Sequence: Synthetic oligonucleotide
  Sense strand starting at position 2680 of SEQ ID NO: 913714
gguucuuguggacacaauu

SEQ ID NO: 948207 - RNA, 19 nt, Artificial Sequence
  Description of Artificial Sequence: Synthetic oligonucleotide
  Antisense strand to SEQ ID NO: 948206
aauuguguccacaagaacc

SEQ ID NO: 948208 - RNA, 19 nt, Artificial Sequence
  Description of Artificial Sequence: Synthetic oligonucleotide
  Sense strand starting at position 3901 of SEQ ID NO: 913714
gugacaguuggacauguua

SEQ ID NO: 948209 - RNA, 19 nt, Artificial Sequence
  Description of Artificial Sequence: Synthetic oligonucleotide
  Antisense strand to SEQ ID NO: 948208
uaacauguccaacugucac

SEQ ID NO: 948210 - RNA, 19 nt, Artificial Sequence
  Description of Artificial Sequence: Synthetic oligonucleotide
  Sense strand starting at position 1069 of SEQ ID NO: 913714
cucuauuucugugcaaggu

SEQ ID NO: 948211 - RNA, 19 nt, Artificial Sequence
  Description of Artificial Sequence: Synthetic oligonucleotide
  Antisense strand to SEQ ID NO: 948210
accuugcacagaaauagag

SEQ ID NO: 948212 - RNA, 19 nt, Artificial Sequence
  Description of Artificial Sequence: Synthetic oligonucleotide
  Sense strand starting at position 3853 of SEQ ID NO: 913714
uaaguuuauguuggaugaa

SEQ ID NO: 948213 - RNA, 19 nt, Artificial Sequence
  Description of Artificial Sequence: Synthetic oligonucleotide
  Antisense strand to SEQ ID NO: 948212
uucauccaacauaaacuua

SEQ ID NO: 948214 - RNA, 19 nt, Artificial Sequence
  Description of Artificial Sequence: Synthetic oligonucleotide
  Sense strand starting at position 2554 of SEQ ID NO: 913714
cuuugaucaagcggaggaa

SEQ ID NO: 948215 - RNA, 19 nt, Artificial Sequence
  Description of Artificial Sequence: Synthetic oligonucleotide
  Antisense strand to SEQ ID NO: 948214
uuccuccgcuugaucaaag

SEQ ID NO: 948216 - RNA, 19 nt, Artificial Sequence
  Description of Artificial Sequence: Synthetic oligonucleotide
  Sense strand starting at position 3510 of SEQ ID NO: 913714
cuagaaaguucuucucuag

SEQ ID NO: 948217 - RNA, 19 nt, Artificial Sequence
  Description of Artificial Sequence: Synthetic oligonucleotide
  Antisense strand to SEQ ID NO: 948216
cuagagaagaacuuucuag

SEQ ID NO: 948218 - RNA, 19 nt, Artificial Sequence
  Description of Artificial Sequence: Synthetic oligonucleotide
  Sense strand starting at position 2594 of SEQ ID NO: 913714
ucaggacaauuguuuccua

SEQ ID NO: 948219 - RNA, 19 nt, Artificial Sequence
  Description of Artificial Sequence: Synthetic oligonucleotide
  Antisense strand to SEQ ID NO: 948218
uaggaaacaauuguccuga

SEQ ID NO: 948220 - RNA, 19 nt, Artificial Sequence
  Description of Artificial Sequence: Synthetic oligonucleotide
  Sense strand starting at position 316 of SEQ ID NO: 913714
aggaucuaauucuuuccga

SEQ ID NO: 948221 - RNA, 19 nt, Artificial Sequence
  Description of Artificial Sequence: Synthetic oligonucleotide
  Antisense strand to SEQ ID NO: 948220
ucggaaagaauuagauccu

SEQ ID NO: 948222 - RNA, 19 nt, Artificial Sequence
  Description of Artificial Sequence: Synthetic oligonucleotide
  Sense strand starting at position 1692 of SEQ ID NO: 913714
gguucuuguaguuagaaca

SEQ ID NO: 948223 - RNA, 19 nt, Artificial Sequence
  Description of Artificial Sequence: Synthetic oligonucleotide
  Antisense strand to SEQ ID NO: 948222
uguucuaacuacaagaacc

SEQ ID NO: 948224 - RNA, 19 nt, Artificial Sequence
  Description of Artificial Sequence: Synthetic oligonucleotide
  Sense strand starting at position 3856 of SEQ ID NO: 913714
guuuauguuggaugaaaug

SEQ ID NO: 948225 - RNA, 19 nt, Artificial Sequence
  Description of Artificial Sequence: Synthetic oligonucleotide
  Antisense strand to SEQ ID NO: 948224
cauuucauccaacauaaac

SEQ ID NO: 948226 - RNA, 19 nt, Artificial Sequence
  Description of Artificial Sequence: Synthetic oligonucleotide
  Sense strand starting at position 3850 of SEQ ID NO: 913714
caauaaguuuauguuggau

SEQ ID NO: 948227 - RNA, 19 nt, Artificial Sequence
  Description of Artificial Sequence: Synthetic oligonucleotide
  Antisense strand to SEQ ID NO: 948226
auccaacauaaacuuauug

SEQ ID NO: 948228 - RNA, 19 nt, Artificial Sequence
  Description of Artificial Sequence: Synthetic oligonucleotide
  Sense strand starting at position 3589 of SEQ ID NO: 913714
cucacuccugagcaaguua

SEQ ID NO: 948229 - RNA, 19 nt, Artificial Sequence
  Description of Artificial Sequence: Synthetic oligonucleotide
  Antisense strand to SEQ ID NO: 948228
uaacuugcucaggagugag

SEQ ID NO: 948230 - RNA, 19 nt, Artificial Sequence
  Description of Artificial Sequence: Synthetic oligonucleotide
  Sense strand starting at position 2774 of SEQ ID NO: 913714
gaauccuccugacuugagu

SEQ ID NO: 948231 - RNA, 19 nt, Artificial Sequence
  Description of Artificial Sequence: Synthetic oligonucleotide
  Antisense strand to SEQ ID NO: 948230
acucaagucaggaggauuc

SEQ ID NO: 948232 - RNA, 19 nt, Artificial Sequence
  Description of Artificial Sequence: Synthetic oligonucleotide
  Sense strand starting at position 2011 of SEQ ID NO: 913714
gcaaauuauuaacuaggca

SEQ ID NO: 948233 - RNA, 19 nt, Artificial Sequence
  Description of Artificial Sequence: Synthetic oligonucleotide
  Antisense strand to SEQ ID NO: 948232
ugccuaguuaauaauuugc

SEQ ID NO: 948234 - RNA, 19 nt, Artificial Sequence
  Description of Artificial Sequence: Synthetic oligonucleotide
  Sense strand starting at position 2545 of SEQ ID NO: 913714
ggagucuuucuuugaucaa

SEQ ID NO: 948235 - RNA, 19 nt, Artificial Sequence
  Description of Artificial Sequence: Synthetic oligonucleotide
  Antisense strand to SEQ ID NO: 948234
uugaucaaagaaagacucc

SEQ ID NO: 948236 - RNA, 19 nt, Artificial Sequence
  Description of Artificial Sequence: Synthetic oligonucleotide
  Sense strand starting at position 3806 of SEQ ID NO: 913714
accauugaauccuuggcau

SEQ ID NO: 948237 - RNA, 19 nt, Artificial Sequence
  Description of Artificial Sequence: Synthetic oligonucleotide
  Antisense strand to SEQ ID NO: 948236
augccaaggauucaauggu

SEQ ID NO: 948238 - RNA, 19 nt, Artificial Sequence
  Description of Artificial Sequence: Synthetic oligonucleotide
  Sense strand starting at position 2701 of SEQ ID NO: 913714
ucucuuuaauaggcaugau

SEQ ID NO: 948239 - RNA, 19 nt, Artificial Sequence
  Description of Artificial Sequence: Synthetic oligonucleotide
  Antisense strand to SEQ ID NO: 948238
aucaugccuauuaaagaga

SEQ ID NO: 948240 - RNA, 19 nt, Artificial Sequence
  Description of Artificial Sequence: Synthetic oligonucleotide
  Sense strand starting at position 713 of SEQ ID NO: 913714
agagguuaugacuguuauu

SEQ ID NO: 948241 - RNA, 19 nt, Artificial Sequence
  Description of Artificial Sequence: Synthetic oligonucleotide
  Antisense strand to SEQ ID NO: 948240
aauaacagucauaaccucu

SEQ ID NO: 948242 - RNA, 19 nt, Artificial Sequence
  Description of Artificial Sequence: Synthetic oligonucleotide
  Sense strand starting at position 3888 of SEQ ID NO: 913714
ccacuuuauccaugugaca

SEQ ID NO: 948243 - RNA, 19 nt, Artificial Sequence
  Description of Artificial Sequence: Synthetic oligonucleotide
  Antisense strand to SEQ ID NO: 948242
ugucacauggauaaagugg

SEQ ID NO: 948244 - RNA, 19 nt, Artificial Sequence
  Description of Artificial Sequence: Synthetic oligonucleotide
  Sense strand starting at position 114 of SEQ ID NO: 913714
cgaauccucucuuuggaau

SEQ ID NO: 948245 - RNA, 19 nt, Artificial Sequence
  Description of Artificial Sequence: Synthetic oligonucleotide
  Antisense strand to SEQ ID NO: 948244
auuccaaagagaggauucg

SEQ ID NO: 948246 - RNA, 19 nt, Artificial Sequence
  Description of Artificial Sequence: Synthetic oligonucleotide
  Sense strand starting at position 2544 of SEQ ID NO: 913714
uggagucuuucuuugauca

SEQ ID NO: 948247 - RNA, 19 nt, Artificial Sequence
  Description of Artificial Sequence: Synthetic oligonucleotide
  Antisense strand to SEQ ID NO: 948246
ugaucaaagaaagacucca

SEQ ID NO: 948248 - RNA, 19 nt, Artificial Sequence
  Description of Artificial Sequence: Synthetic oligonucleotide
  Sense strand starting at position 2751 of SEQ ID NO: 913714
agaaaucuaugccuggguu

SEQ ID NO: 948249 - RNA, 19 nt, Artificial Sequence
  Description of Artificial Sequence: Synthetic oligonucleotide
  Antisense strand to SEQ ID NO: 948248
aacccaggcauagauuucu

SEQ ID NO: 948250 - RNA, 19 nt, Artificial Sequence
  Description of Artificial Sequence: Synthetic oligonucleotide
  Sense strand starting at position 557 of SEQ ID NO: 913714
uaagauaggugucugagca

SEQ ID NO: 948251 - RNA, 19 nt, Artificial Sequence
  Description of Artificial Sequence: Synthetic oligonucleotide
  Antisense strand to SEQ ID NO: 948250
ugcucagacaccuaucuua

SEQ ID NO: 948252 - RNA, 19 nt, Artificial Sequence
  Description of Artificial Sequence: Synthetic oligonucleotide
  Sense strand starting at position 524 of SEQ ID NO: 913714
agaagugagucacuuggca

SEQ ID NO: 948253 - RNA, 19 nt, Artificial Sequence
  Description of Artificial Sequence: Synthetic oligonucleotide
  Antisense strand to SEQ ID NO: 948252
ugccaagugacucacuucu

SEQ ID NO: 948254 - RNA, 19 nt, Artificial Sequence
  Description of Artificial Sequence: Synthetic oligonucleotide
  Sense strand starting at position 1425 of SEQ ID NO: 913714
agccacaaaucgcuggaaa

SEQ ID NO: 948255 - RNA, 19 nt, Artificial Sequence
  Description of Artificial Sequence: Synthetic oligonucleotide
  Antisense strand to SEQ ID NO: 948254
uuuccagcgauuuguggcu

SEQ ID NO: 948256 - RNA, 19 nt, Artificial Sequence
  Description of Artificial Sequence: Synthetic oligonucleotide
  Sense strand starting at position 1449 of SEQ ID NO: 913714
gugugucagcaccaauaga

SEQ ID NO: 948257 - RNA, 19 nt, Artificial Sequence
  Description of Artificial Sequence: Synthetic oligonucleotide
  Antisense strand to SEQ ID NO: 948256
ucuauuggugcugacacac

SEQ ID NO: 948258 - RNA, 19 nt, Artificial Sequence
  Description of Artificial Sequence: Synthetic oligonucleotide
  Sense strand starting at position 554 of SEQ ID NO: 913714
agcuaagauaggugucuga

SEQ ID NO: 948259 - RNA, 19 nt, Artificial Sequence
  Description of Artificial Sequence: Synthetic oligonucleotide
  Antisense strand to SEQ ID NO: 948258
ucagacaccuaucuuagcu

SEQ ID NO: 948260 - RNA, 19 nt, Artificial Sequence
  Description of Artificial Sequence: Synthetic oligonucleotide
  Sense strand starting at position 1095 of SEQ ID NO: 913715
uagauaacuuggguuuaaa

SEQ ID NO: 948261 - RNA, 19 nt, Artificial Sequence
  Description of Artificial Sequence: Synthetic oligonucleotide
  Antisense strand to SEQ ID NO: 948260
uuuaaacccaaguuaucua

SEQ ID NO: 948262 - RNA, 19 nt, Artificial Sequence
  Description of Artificial Sequence: Synthetic oligonucleotide
  Sense strand starting at position 722 of SEQ ID NO: 913715
guaaguucuuagucauuua

SEQ ID NO: 948263 - RNA, 19 nt, Artificial Sequence
  Description of Artificial Sequence: Synthetic oligonucleotide
  Antisense strand to SEQ ID NO: 948262
uaaaugacuaagaacuuac

SEQ ID NO: 948264 - RNA, 19 nt, Artificial Sequence
  Description of Artificial Sequence: Synthetic oligonucleotide
  Sense strand starting at position 1150 of SEQ ID NO: 913715
augucuguaccauaugaaa

SEQ ID NO: 948265 - RNA, 19 nt, Artificial Sequence
  Description of Artificial Sequence: Synthetic oligonucleotide
  Antisense strand to SEQ ID NO: 948264
uuucauaugguacagacau

SEQ ID NO: 948266 - RNA, 19 nt, Artificial Sequence
  Description of Artificial Sequence: Synthetic oligonucleotide
  Sense strand starting at position 1222 of SEQ ID NO: 913715
ggucacaauuaaguggaaa

SEQ ID NO: 948267 - RNA, 19 nt, Artificial Sequence
  Description of Artificial Sequence: Synthetic oligonucleotide
  Antisense strand to SEQ ID NO: 948266
uuuccacuuaauugugacc

SEQ ID NO: 948268 - RNA, 19 nt, Artificial Sequence
  Description of Artificial Sequence: Synthetic oligonucleotide
  Sense strand starting at position 692 of SEQ ID NO: 913715
acaguacuuaacgaagagu

SEQ ID NO: 948269 - RNA, 19 nt, Artificial Sequence
  Description of Artificial Sequence: Synthetic oligonucleotide
  Antisense strand to SEQ ID NO: 948268
acucuucguuaaguacugu

SEQ ID NO: 948270 - RNA, 19 nt, Artificial Sequence
  Description of Artificial Sequence: Synthetic oligonucleotide
  Sense strand starting at position 108 of SEQ ID NO: 913715
uauuaagaugguugauuag

SEQ ID NO: 948271 - RNA, 19 nt, Artificial Sequence
  Description of Artificial Sequence: Synthetic oligonucleotide
  Antisense strand to SEQ ID NO: 948270
cuaaucaaccaucuuaaua

SEQ ID NO: 948272 - RNA, 19 nt, Artificial Sequence
  Description of Artificial Sequence: Synthetic oligonucleotide
  Sense strand starting at position 1060 of SEQ ID NO: 913715
cgaagauacagcugggaaa

SEQ ID NO: 948273 - RNA, 19 nt, Artificial Sequence
  Description of Artificial Sequence: Synthetic oligonucleotide
  Antisense strand to SEQ ID NO: 948272
uuucccagcuguaucuucg

SEQ ID NO: 948274 - RNA, 19 nt, Artificial Sequence
  Description of Artificial Sequence: Synthetic oligonucleotide
  Sense strand starting at position 3457 of SEQ ID NO: 913715
gccaccuauuuacuuguua

SEQ ID NO: 948275 - RNA, 19 nt, Artificial Sequence
  Description of Artificial Sequence: Synthetic oligonucleotide
  Antisense strand to SEQ ID NO: 948274
uaacaaguaaauagguggc

SEQ ID NO: 948276 - RNA, 19 nt, Artificial Sequence
  Description of Artificial Sequence: Synthetic oligonucleotide
  Sense strand starting at position 2209 of SEQ ID NO: 913715
gcagagugucgcccgagau

SEQ ID NO: 948277 - RNA, 19 nt, Artificial Sequence
  Description of Artificial Sequence: Synthetic oligonucleotide
  Antisense strand to SEQ ID NO: 948276
aucucgggcgacacucugc

SEQ ID NO: 948278 - RNA, 19 nt, Artificial Sequence
  Description of Artificial Sequence: Synthetic oligonucleotide
  Sense strand starting at position 1387 of SEQ ID NO: 913715
acagaucaugccgacucaa

SEQ ID NO: 948279 - RNA, 19 nt, Artificial Sequence
  Description of Artificial Sequence: Synthetic oligonucleotide
  Antisense strand to SEQ ID NO: 948278
uugagucggcaugaucugu

SEQ ID NO: 948280 - RNA, 19 nt, Artificial Sequence
  Description of Artificial Sequence: Synthetic oligonucleotide
  Sense strand starting at position 1073 of SEQ ID NO: 913715
gggaaaucaucccugucaa

SEQ ID NO: 948281 - RNA, 19 nt, Artificial Sequence
  Description of Artificial Sequence: Synthetic oligonucleotide
  Antisense strand to SEQ ID NO: 948280
uugacagggaugauuuccc

SEQ ID NO: 948282 - RNA, 19 nt, Artificial Sequence
  Description of Artificial Sequence: Synthetic oligonucleotide
  Sense strand starting at position 1244 of SEQ ID NO: 913715
gccgcagagccuguuuaau

SEQ ID NO: 948283 - RNA, 19 nt, Artificial Sequence
  Description of Artificial Sequence: Synthetic oligonucleotide
  Antisense strand to SEQ ID NO: 948282
auuaaacaggcucugcggc

SEQ ID NO: 948284 - RNA, 19 nt, Artificial Sequence
  Description of Artificial Sequence: Synthetic oligonucleotide
  Sense strand starting at position 2832 of SEQ ID NO: 913715
guuccuuuccguuuauguu

SEQ ID NO: 948285 - RNA, 19 nt, Artificial Sequence
  Description of Artificial Sequence: Synthetic oligonucleotide
  Antisense strand to SEQ ID NO: 948284
aacauaaacggaaaggaac

SEQ ID NO: 948286 - RNA, 19 nt, Artificial Sequence
  Description of Artificial Sequence: Synthetic oligonucleotide
  Sense strand starting at position 1074 of SEQ ID NO: 913715
ggaaaucaucccugucaag

SEQ ID NO: 948287 - RNA, 19 nt, Artificial Sequence
  Description of Artificial Sequence: Synthetic oligonucleotide
  Antisense strand to SEQ ID NO: 948286
cuugacagggaugauuucc

SEQ ID NO: 948288 - RNA, 19 nt, Artificial Sequence
  Description of Artificial Sequence: Synthetic oligonucleotide
  Sense strand starting at position 3059 of SEQ ID NO: 913715
ccugcugaucuaggagaaa

SEQ ID NO: 948289 - RNA, 19 nt, Artificial Sequence
  Description of Artificial Sequence: Synthetic oligonucleotide
  Antisense strand to SEQ ID NO: 948288
uuucuccuagaucagcagg

SEQ ID NO: 948290 - RNA, 19 nt, Artificial Sequence
  Description of Artificial Sequence: Synthetic oligonucleotide
  Sense strand starting at position 143 of SEQ ID NO: 913715
ccuuacuguggguauuaaa

SEQ ID NO: 948291 - RNA, 19 nt, Artificial Sequence
  Description of Artificial Sequence: Synthetic oligonucleotide
  Antisense strand to SEQ ID NO: 948290
uuuaauacccacaguaagg

SEQ ID NO: 948292 - RNA, 19 nt, Artificial Sequence
  Description of Artificial Sequence: Synthetic oligonucleotide
  Sense strand starting at position 3169 of SEQ ID NO: 913715
auuggagguugagugaauu

SEQ ID NO: 948293 - RNA, 19 nt, Artificial Sequence
  Description of Artificial Sequence: Synthetic oligonucleotide
  Antisense strand to SEQ ID NO: 948292
aauucacucaaccuccaau

SEQ ID NO: 948294 - RNA, 19 nt, Artificial Sequence
  Description of Artificial Sequence: Synthetic oligonucleotide
  Sense strand starting at position 1083 of SEQ ID NO: 913715
cccugucaagcuuagauaa

SEQ ID NO: 948295 - RNA, 19 nt, Artificial Sequence
  Description of Artificial Sequence: Synthetic oligonucleotide
  Antisense strand to SEQ ID NO: 948294
uuaucuaagcuugacaggg

SEQ ID NO: 948296 - RNA, 19 nt, Artificial Sequence
  Description of Artificial Sequence: Synthetic oligonucleotide
  Sense strand starting at position 3701 of SEQ ID NO: 913715
uaugcugaucauggauaca

SEQ ID NO: 948297 - RNA, 19 nt, Artificial Sequence
  Description of Artificial Sequence: Synthetic oligonucleotide
  Antisense strand to SEQ ID NO: 948296
uguauccaugaucagcaua

SEQ ID NO: 948298 - RNA, 19 nt, Artificial Sequence
  Description of Artificial Sequence: Synthetic oligonucleotide
  Sense strand starting at position 3492 of SEQ ID NO: 913715
gaauaagugccauauaguc

SEQ ID NO: 948299 - RNA, 19 nt, Artificial Sequence
  Description of Artificial Sequence: Synthetic oligonucleotide
  Antisense strand to SEQ ID NO: 948298
gacuauauggcacuuauuc

SEQ ID NO: 948300 - RNA, 19 nt, Artificial Sequence
  Description of Artificial Sequence: Synthetic oligonucleotide
  Sense strand starting at position 1093 of SEQ ID NO: 913715
cuuagauaacuuggguuua

SEQ ID NO: 948301 - RNA, 19 nt, Artificial Sequence
  Description of Artificial Sequence: Synthetic oligonucleotide
  Antisense strand to SEQ ID NO: 948300
uaaacccaaguuaucuaag

SEQ ID NO: 948302 - RNA, 19 nt, Artificial Sequence
  Description of Artificial Sequence: Synthetic oligonucleotide
  Sense strand starting at position 581 of SEQ ID NO: 913715
cgcaauuugcugcauugau

SEQ ID NO: 948303 - RNA, 19 nt, Artificial Sequence
  Description of Artificial Sequence: Synthetic oligonucleotide
  Antisense strand to SEQ ID NO: 948302
aucaaugcagcaaauugcg

SEQ ID NO: 948304 - RNA, 19 nt, Artificial Sequence
  Description of Artificial Sequence: Synthetic oligonucleotide
  Sense strand starting at position 3787 of SEQ ID NO: 913715
cuaagucuagguugauaga

SEQ ID NO: 948305 - RNA, 19 nt, Artificial Sequence
  Description of Artificial Sequence: Synthetic oligonucleotide
  Antisense strand to SEQ ID NO: 948304
ucuaucaaccuagacuuag

SEQ ID NO: 948306 - RNA, 19 nt, Artificial Sequence
  Description of Artificial Sequence: Synthetic oligonucleotide
  Sense strand starting at position 105 of SEQ ID NO: 913715
aguuauuaagaugguugau

SEQ ID NO: 948307 - RNA, 19 nt, Artificial Sequence
  Description of Artificial Sequence: Synthetic oligonucleotide
  Antisense strand to SEQ ID NO: 948306
aucaaccaucuuaauaacu

SEQ ID NO: 948308 - RNA, 19 nt, Artificial Sequence
  Description of Artificial Sequence: Synthetic oligonucleotide
  Sense strand starting at position 570 of SEQ ID NO: 913715
ucauuacuguucgcaauuu

SEQ ID NO: 948309 - RNA, 19 nt, Artificial Sequence
  Description of Artificial Sequence: Synthetic oligonucleotide
  Antisense strand to SEQ ID NO: 948308
aaauugcgaacaguaauga

SEQ ID NO: 948310 - RNA, 19 nt, Artificial Sequence
  Description of Artificial Sequence: Synthetic oligonucleotide
  Sense strand starting at position 3300 of SEQ ID NO: 913715
acuaaauacuaguuauggu

SEQ ID NO: 948311 - RNA, 19 nt, Artificial Sequence
  Description of Artificial Sequence: Synthetic oligonucleotide
  Antisense strand to SEQ ID NO: 948310
accauaacuaguauuuagu

SEQ ID NO: 948312 - RNA, 19 nt, Artificial Sequence
  Description of Artificial Sequence: Synthetic oligonucleotide
  Sense strand starting at position 3698 of SEQ ID NO: 913715
cuguaugcugaucauggau

SEQ ID NO: 948313 - RNA, 19 nt, Artificial Sequence
  Description of Artificial Sequence: Synthetic oligonucleotide
  Antisense strand to SEQ ID NO: 948312
auccaugaucagcauacag

SEQ ID NO: 948314 - RNA, 19 nt, Artificial Sequence
  Description of Artificial Sequence: Synthetic oligonucleotide
  Sense strand starting at position 502 of SEQ ID NO: 913715
uuucuaggguaaucccuaa

SEQ ID NO: 948315 - RNA, 19 nt, Artificial Sequence
  Description of Artificial Sequence: Synthetic oligonucleotide
  Antisense strand to SEQ ID NO: 948314
uuagggauuacccuagaaa

SEQ ID NO: 948316 - RNA, 19 nt, Artificial Sequence
  Description of Artificial Sequence: Synthetic oligonucleotide
  Sense strand starting at position 2842 of SEQ ID NO: 913715
guuuauguuagagauguac

SEQ ID NO: 948317 - RNA, 19 nt, Artificial Sequence
  Description of Artificial Sequence: Synthetic oligonucleotide
  Antisense strand to SEQ ID NO: 948316
guacaucucuaacauaaac

SEQ ID NO: 948318 - RNA, 19 nt, Artificial Sequence
  Description of Artificial Sequence: Synthetic oligonucleotide
  Sense strand starting at position 3529 of SEQ ID NO: 913715
gcuaauagccuuggaggga

SEQ ID NO: 948319 - RNA, 19 nt, Artificial Sequence
  Description of Artificial Sequence: Synthetic oligonucleotide
  Antisense strand to SEQ ID NO: 948318
ucccuccaaggcuauuagc

SEQ ID NO: 948320 - RNA, 19 nt, Artificial Sequence
  Description of Artificial Sequence: Synthetic oligonucleotide
  Sense strand starting at position 142 of SEQ ID NO: 913715
accuuacuguggguauuaa

SEQ ID NO: 948321 - RNA, 19 nt, Artificial Sequence
  Description of Artificial Sequence: Synthetic oligonucleotide
  Antisense strand to SEQ ID NO: 948320
uuaauacccacaguaaggu

SEQ ID NO: 948322 - RNA, 19 nt, Artificial Sequence
  Description of Artificial Sequence: Synthetic oligonucleotide
  Sense strand starting at position 1400 of SEQ ID NO: 913715
acucaagaugcaggucauu

SEQ ID NO: 948323 - RNA, 19 nt, Artificial Sequence
  Description of Artificial Sequence: Synthetic oligonucleotide
  Antisense strand to SEQ ID NO: 948322
aaugaccugcaucuugagu

SEQ ID NO: 948324 - RNA, 19 nt, Artificial Sequence
  Description of Artificial Sequence: Synthetic oligonucleotide
  Sense strand starting at position 1250 of SEQ ID NO: 913715
gagccuguuuaaucugaag

SEQ ID NO: 948325 - RNA, 19 nt, Artificial Sequence
  Description of Artificial Sequence: Synthetic oligonucleotide
  Antisense strand to SEQ ID NO: 948324
cuucagauuaaacaggcuc

SEQ ID NO: 948326 - RNA, 19 nt, Artificial Sequence
  Description of Artificial Sequence: Synthetic oligonucleotide
  Sense strand starting at position 1145 of SEQ ID NO: 913715
gucacaugucuguaccaua

SEQ ID NO: 948327 - RNA, 19 nt, Artificial Sequence
  Description of Artificial Sequence: Synthetic oligonucleotide
  Antisense strand to SEQ ID NO: 948326
uaugguacagacaugugac

SEQ ID NO: 948328 - RNA, 19 nt, Artificial Sequence
  Description of Artificial Sequence: Synthetic oligonucleotide
  Sense strand starting at position 337 of SEQ ID NO: 913715
cuguuucuauaaguacaua

SEQ ID NO: 948329 - RNA, 19 nt, Artificial Sequence
  Description of Artificial Sequence: Synthetic oligonucleotide
  Antisense strand to SEQ ID NO: 948328
uauguacuuauagaaacag

SEQ ID NO: 948330 - RNA, 19 nt, Artificial Sequence
  Description of Artificial Sequence: Synthetic oligonucleotide
  Sense strand starting at position 1013 of SEQ ID NO: 913715
ggcaauauguaguuugaag

SEQ ID NO: 948331 - RNA, 19 nt, Artificial Sequence
  Description of Artificial Sequence: Synthetic oligonucleotide
  Antisense strand to SEQ ID NO: 948330
cuucaaacuacauauugcc

SEQ ID NO: 948332 - RNA, 19 nt, Artificial Sequence
  Description of Artificial Sequence: Synthetic oligonucleotide
  Sense strand starting at position 141 of SEQ ID NO: 913715
gaccuuacuguggguauua

SEQ ID NO: 948333 - RNA, 19 nt, Artificial Sequence
  Description of Artificial Sequence: Synthetic oligonucleotide
  Antisense strand to SEQ ID NO: 948332
uaauacccacaguaagguc

SEQ ID NO: 948334 - RNA, 19 nt, Artificial Sequence
  Description of Artificial Sequence: Synthetic oligonucleotide
  Sense strand starting at position 3324 of SEQ ID NO: 913715
augagauaagguugcaugu

SEQ ID NO: 948335 - RNA, 19 nt, Artificial Sequence
  Description of Artificial Sequence: Synthetic oligonucleotide
  Antisense strand to SEQ ID NO: 948334
acaugcaaccuuaucucau

SEQ ID NO: 948336 - RNA, 19 nt, Artificial Sequence
  Description of Artificial Sequence: Synthetic oligonucleotide
  Sense strand starting at position 3262 of SEQ ID NO: 913715
gguaucuauuguuuacaua

SEQ ID NO: 948337 - RNA, 19 nt, Artificial Sequence
  Description of Artificial Sequence: Synthetic oligonucleotide
  Antisense strand to SEQ ID NO: 948336
uauguaaacaauagauacc

SEQ ID NO: 948338 - RNA, 19 nt, Artificial Sequence
  Description of Artificial Sequence: Synthetic oligonucleotide
  Sense strand starting at position 229 of SEQ ID NO: 913715
guagacuuguauccacacu

SEQ ID NO: 948339 - RNA, 19 nt, Artificial Sequence
  Description of Artificial Sequence: Synthetic oligonucleotide
  Antisense strand to SEQ ID NO: 948338
aguguggauacaagucuac

SEQ ID NO: 948340 - RNA, 19 nt, Artificial Sequence
  Description of Artificial Sequence: Synthetic oligonucleotide
  Sense strand starting at position 1106 of SEQ ID NO: 913716
aggcaauaucuguaaacau

SEQ ID NO: 948341 - RNA, 19 nt, Artificial Sequence
  Description of Artificial Sequence: Synthetic oligonucleotide
  Antisense strand to SEQ ID NO: 948340
auguuuacagauauugccu

SEQ ID NO: 948342 - RNA, 19 nt, Artificial Sequence
  Description of Artificial Sequence: Synthetic oligonucleotide
  Sense strand starting at position 62 of SEQ ID NO: 913716
aaccuauuugguuguguag

SEQ ID NO: 948343 - RNA, 19 nt, Artificial Sequence
  Description of Artificial Sequence: Synthetic oligonucleotide
  Antisense strand to SEQ ID NO: 948342
cuacacaaccaaauagguu

SEQ ID NO: 948344 - RNA, 19 nt, Artificial Sequence
  Description of Artificial Sequence: Synthetic oligonucleotide
  Sense strand starting at position 900 of SEQ ID NO: 913716
uagcgauuccuguuugcca

SEQ ID NO: 948345 - RNA, 19 nt, Artificial Sequence
  Description of Artificial Sequence: Synthetic oligonucleotide
  Antisense strand to SEQ ID NO: 948344
uggcaaacaggaaucgcua

SEQ ID NO: 948346 - RNA, 19 nt, Artificial Sequence
  Description of Artificial Sequence: Synthetic oligonucleotide
  Sense strand starting at position 2765 of SEQ ID NO: 913716
gauguauggcauuaaauau

SEQ ID NO: 948347 - RNA, 19 nt, Artificial Sequence
  Description of Artificial Sequence: Synthetic oligonucleotide
  Antisense strand to SEQ ID NO: 948346
auauuuaaugccauacauc

SEQ ID NO: 948348 - RNA, 19 nt, Artificial Sequence
  Description of Artificial Sequence: Synthetic oligonucleotide
  Sense strand starting at position 776 of SEQ ID NO: 913716
uugaucacuuagguggaaa

SEQ ID NO: 948349 - RNA, 19 nt, Artificial Sequence
  Description of Artificial Sequence: Synthetic oligonucleotide
  Antisense strand to SEQ ID NO: 948348
uuuccaccuaagugaucaa

SEQ ID NO: 948350 - RNA, 19 nt, Artificial Sequence
  Description of Artificial Sequence: Synthetic oligonucleotide
  Sense strand starting at position 491 of SEQ ID NO: 913716
aucgguagaguuuaauaaa

SEQ ID NO: 948351 - RNA, 19 nt, Artificial Sequence
  Description of Artificial Sequence: Synthetic oligonucleotide
  Antisense strand to SEQ ID NO: 948350
uuuauuaaacucuaccgau

SEQ ID NO: 948352 - RNA, 19 nt, Artificial Sequence
  Description of Artificial Sequence: Synthetic oligonucleotide
  Sense strand starting at position 2496 of SEQ ID NO: 913716
uaagauuaugacuggguua

SEQ ID NO: 948353 - RNA, 19 nt, Artificial Sequence
  Description of Artificial Sequence: Synthetic oligonucleotide
  Antisense strand to SEQ ID NO: 948352
uaacccagucauaaucuua

SEQ ID NO: 948354 - RNA, 19 nt, Artificial Sequence
  Description of Artificial Sequence: Synthetic oligonucleotide
  Sense strand starting at position 3672 of SEQ ID NO: 913716
gggugauaaagcuacacuu

SEQ ID NO: 948355 - RNA, 19 nt, Artificial Sequence
  Description of Artificial Sequence: Synthetic oligonucleotide
  Antisense strand to SEQ ID NO: 948354
aaguguagcuuuaucaccc

SEQ ID NO: 948356 - RNA, 19 nt, Artificial Sequence
  Description of Artificial Sequence: Synthetic oligonucleotide
  Sense strand starting at position 2514 of SEQ ID NO: 913716
aaagaaagcuguuuaggau

SEQ ID NO: 948357 - RNA, 19 nt, Artificial Sequence
  Description of Artificial Sequence: Synthetic oligonucleotide
  Antisense strand to SEQ ID NO: 948356
auccuaaacagcuuucuuu

SEQ ID NO: 948358 - RNA, 19 nt, Artificial Sequence
  Description of Artificial Sequence: Synthetic oligonucleotide
  Sense strand starting at position 550 of SEQ ID NO: 913716
agagucaacgaucauucuu

SEQ ID NO: 948359 - RNA, 19 nt, Artificial Sequence
  Description of Artificial Sequence: Synthetic oligonucleotide
  Antisense strand to SEQ ID NO: 948358
aagaaugaucguugacucu

SEQ ID NO: 948360 - RNA, 19 nt, Artificial Sequence
  Description of Artificial Sequence: Synthetic oligonucleotide
  Sense strand starting at position 2495 of SEQ ID NO: 913716
uuaagauuaugacuggguu

SEQ ID NO: 948361 - RNA, 19 nt, Artificial Sequence
  Description of Artificial Sequence: Synthetic oligonucleotide
  Antisense strand to SEQ ID NO: 948360
aacccagucauaaucuuaa

SEQ ID NO: 948362 - RNA, 19 nt, Artificial Sequence
  Description of Artificial Sequence: Synthetic oligonucleotide
  Sense strand starting at position 1090 of SEQ ID NO: 913716
gcgaaaggauucucaaagg

SEQ ID NO: 948363 - RNA, 19 nt, Artificial Sequence
  Description of Artificial Sequence: Synthetic oligonucleotide
  Antisense strand to SEQ ID NO: 948362
ccuuugagaauccuuucgc

SEQ ID NO: 948364 - RNA, 19 nt, Artificial Sequence
  Description of Artificial Sequence: Synthetic oligonucleotide
  Sense strand starting at position 543 of SEQ ID NO: 913716
guacuuaagagucaacgau

SEQ ID NO: 948365 - RNA, 19 nt, Artificial Sequence
  Description of Artificial Sequence: Synthetic oligonucleotide
  Antisense strand to SEQ ID NO: 948364
aucguugacucuuaaguac

SEQ ID NO: 948366 - RNA, 19 nt, Artificial Sequence
  Description of Artificial Sequence: Synthetic oligonucleotide
  Sense strand starting at position 486 of SEQ ID NO: 913716
auaauaucgguagaguuua

SEQ ID NO: 948367 - RNA, 19 nt, Artificial Sequence
  Description of Artificial Sequence: Synthetic oligonucleotide
  Antisense strand to SEQ ID NO: 948366
uaaacucuaccgauauuau

SEQ ID NO: 948368 - RNA, 19 nt, Artificial Sequence
  Description of Artificial Sequence: Synthetic oligonucleotide
  Sense strand starting at position 484 of SEQ ID NO: 913716
ucauaauaucgguagaguu

SEQ ID NO: 948369 - RNA, 19 nt, Artificial Sequence
  Description of Artificial Sequence: Synthetic oligonucleotide
  Antisense strand to SEQ ID NO: 948368
aacucuaccgauauuauga

SEQ ID NO: 948370 - RNA, 19 nt, Artificial Sequence
  Description of Artificial Sequence: Synthetic oligonucleotide
  Sense strand starting at position 3428 of SEQ ID NO: 913716
ccauguuaucuagacuggu

SEQ ID NO: 948371 - RNA, 19 nt, Artificial Sequence
  Description of Artificial Sequence: Synthetic oligonucleotide
  Antisense strand to SEQ ID NO: 948370
accagucuagauaacaugg

SEQ ID NO: 948372 - RNA, 19 nt, Artificial Sequence
  Description of Artificial Sequence: Synthetic oligonucleotide
  Sense strand starting at position 536 of SEQ ID NO: 913716
cuaggcaguacuuaagagu

SEQ ID NO: 948373 - RNA, 19 nt, Artificial Sequence
  Description of Artificial Sequence: Synthetic oligonucleotide
  Antisense strand to SEQ ID NO: 948372
acucuuaaguacugccuag

SEQ ID NO: 948374 - RNA, 19 nt, Artificial Sequence
  Description of Artificial Sequence: Synthetic oligonucleotide
  Sense strand starting at position 373 of SEQ ID NO: 913716
gacagaaauucugcaggca

SEQ ID NO: 948375 - RNA, 19 nt, Artificial Sequence
  Description of Artificial Sequence: Synthetic oligonucleotide
  Antisense strand to SEQ ID NO: 948374
ugccugcagaauuucuguc

SEQ ID NO: 948376 - RNA, 19 nt, Artificial Sequence
  Description of Artificial Sequence: Synthetic oligonucleotide
  Sense strand starting at position 2335 of SEQ ID NO: 913716
cugcguaucugcacgagga

SEQ ID NO: 948377 - RNA, 19 nt, Artificial Sequence
  Description of Artificial Sequence: Synthetic oligonucleotide
  Antisense strand to SEQ ID NO: 948376
uccucgugcagauacgcag

SEQ ID NO: 948378 - RNA, 19 nt, Artificial Sequence
  Description of Artificial Sequence: Synthetic oligonucleotide
  Sense strand starting at position 908 of SEQ ID NO: 913716
ccuguuugccaugagacau

SEQ ID NO: 948379 - RNA, 19 nt, Artificial Sequence
  Description of Artificial Sequence: Synthetic oligonucleotide
  Antisense strand to SEQ ID NO: 948378
augucucauggcaaacagg

SEQ ID NO: 948380 - RNA, 19 nt, Artificial Sequence
  Description of Artificial Sequence: Synthetic oligonucleotide
  Sense strand starting at position 768 of SEQ ID NO: 913716
acagcaaguugaucacuua

SEQ ID NO: 948381 - RNA, 19 nt, Artificial Sequence
  Description of Artificial Sequence: Synthetic oligonucleotide
  Antisense strand to SEQ ID NO: 948380
uaagugaucaacuugcugu

SEQ ID NO: 948382 - RNA, 19 nt, Artificial Sequence
  Description of Artificial Sequence: Synthetic oligonucleotide
  Sense strand starting at position 3973 of SEQ ID NO: 913716
gcugccucauuuguucuaa

SEQ ID NO: 948383 - RNA, 19 nt, Artificial Sequence
  Description of Artificial Sequence: Synthetic oligonucleotide
  Antisense strand to SEQ ID NO: 948382
uuagaacaaaugaggcagc

SEQ ID NO: 948384 - RNA, 19 nt, Artificial Sequence
  Description of Artificial Sequence: Synthetic oligonucleotide
  Sense strand starting at position 483 of SEQ ID NO: 913716
aucauaauaucgguagagu

SEQ ID NO: 948385 - RNA, 19 nt, Artificial Sequence
  Description of Artificial Sequence: Synthetic oligonucleotide
  Antisense strand to SEQ ID NO: 948384
acucuaccgauauuaugau

SEQ ID NO: 948386 - RNA, 19 nt, Artificial Sequence
  Description of Artificial Sequence: Synthetic oligonucleotide
  Sense strand starting at position 1201 of SEQ ID NO: 913716
accacaccuccggguuaaa

SEQ ID NO: 948387 - RNA, 19 nt, Artificial Sequence
  Description of Artificial Sequence: Synthetic oligonucleotide
  Antisense strand to SEQ ID NO: 948386
uuuaacccggagguguggu

SEQ ID NO: 948388 - RNA, 19 nt, Artificial Sequence
  Description of Artificial Sequence: Synthetic oligonucleotide
  Sense strand starting at position 3434 of SEQ ID NO: 913716
uaucuagacuggucucgaa

SEQ ID NO: 948389 - RNA, 19 nt, Artificial Sequence
  Description of Artificial Sequence: Synthetic oligonucleotide
  Antisense strand to SEQ ID NO: 948388
uucgagaccagucuagaua

SEQ ID NO: 948390 - RNA, 19 nt, Artificial Sequence
  Description of Artificial Sequence: Synthetic oligonucleotide
  Sense strand starting at position 881 of SEQ ID NO: 913716
acauuacuucugcagguuu

SEQ ID NO: 948391 - RNA, 19 nt, Artificial Sequence
  Description of Artificial Sequence: Synthetic oligonucleotide
  Antisense strand to SEQ ID NO: 948390
aaaccugcagaaguaaugu

SEQ ID NO: 948392 - RNA, 19 nt, Artificial Sequence
  Description of Artificial Sequence: Synthetic oligonucleotide
  Sense strand starting at position 123 of SEQ ID NO: 913716
guuuaauagcaguaauagu

SEQ ID NO: 948393 - RNA, 19 nt, Artificial Sequence
  Description of Artificial Sequence: Synthetic oligonucleotide
  Antisense strand to SEQ ID NO: 948392
acuauuacugcuauuaaac

SEQ ID NO: 948394 - RNA, 19 nt, Artificial Sequence
  Description of Artificial Sequence: Synthetic oligonucleotide
  Sense strand starting at position 2154 of SEQ ID NO: 913716
guaacuauccugugagauu

SEQ ID NO: 948395 - RNA, 19 nt, Artificial Sequence
  Description of Artificial Sequence: Synthetic oligonucleotide
  Antisense strand to SEQ ID NO: 948394
aaucucacaggauaguuac

SEQ ID NO: 948396 - RNA, 19 nt, Artificial Sequence
  Description of Artificial Sequence: Synthetic oligonucleotide
  Sense strand starting at position 3908 of SEQ ID NO: 913716
aacacaugucucugaguug

SEQ ID NO: 948397 - RNA, 19 nt, Artificial Sequence
  Description of Artificial Sequence: Synthetic oligonucleotide
  Antisense strand to SEQ ID NO: 948396
caacucagagacauguguu

SEQ ID NO: 948398 - RNA, 19 nt, Artificial Sequence
  Description of Artificial Sequence: Synthetic oligonucleotide
  Sense strand starting at position 2511 of SEQ ID NO: 913716
guuaaagaaagcuguuuag

SEQ ID NO: 948399 - RNA, 19 nt, Artificial Sequence
  Description of Artificial Sequence: Synthetic oligonucleotide
  Antisense strand to SEQ ID NO: 948398
cuaaacagcuuucuuuaac

SEQ ID NO: 948400 - RNA, 19 nt, Artificial Sequence
  Description of Artificial Sequence: Synthetic oligonucleotide
  Sense strand starting at position 3742 of SEQ ID NO: 913716
gggaaaucuugaguugcuu

SEQ ID NO: 948401 - RNA, 19 nt, Artificial Sequence
  Description of Artificial Sequence: Synthetic oligonucleotide
  Antisense strand to SEQ ID NO: 948400
aagcaacucaagauuuccc

SEQ ID NO: 948402 - RNA, 19 nt, Artificial Sequence
  Description of Artificial Sequence: Synthetic oligonucleotide
  Sense strand starting at position 1249 of SEQ ID NO: 913716
cgaaccugaugccuaaauu

SEQ ID NO: 948403 - RNA, 19 nt, Artificial Sequence
  Description of Artificial Sequence: Synthetic oligonucleotide
  Antisense strand to SEQ ID NO: 948402
aauuuaggcaucagguucg

SEQ ID NO: 948404 - RNA, 19 nt, Artificial Sequence
  Description of Artificial Sequence: Synthetic oligonucleotide
  Sense strand starting at position 3865 of SEQ ID NO: 913716
aggagauguuugguuccuu

SEQ ID NO: 948405 - RNA, 19 nt, Artificial Sequence
  Description of Artificial Sequence: Synthetic oligonucleotide
  Antisense strand to SEQ ID NO: 948404
aaggaaccaaacaucuccu

SEQ ID NO: 948406 - RNA, 19 nt, Artificial Sequence
  Description of Artificial Sequence: Synthetic oligonucleotide
  Sense strand starting at position 2208 of SEQ ID NO: 913716
ucacauaucugguuccgaa

SEQ ID NO: 948407 - RNA, 19 nt, Artificial Sequence
  Description of Artificial Sequence: Synthetic oligonucleotide
  Antisense strand to SEQ ID NO: 948406
uucggaaccagauauguga

SEQ ID NO: 948408 - RNA, 19 nt, Artificial Sequence
  Description of Artificial Sequence: Synthetic oligonucleotide
  Sense strand starting at position 71 of SEQ ID NO: 913716
gguuguguaguucaauaau

SEQ ID NO: 948409 - RNA, 19 nt, Artificial Sequence
  Description of Artificial Sequence: Synthetic oligonucleotide
  Antisense strand to SEQ ID NO: 948408
auuauugaacuacacaacc

SEQ ID NO: 948410 - RNA, 19 nt, Artificial Sequence
  Description of Artificial Sequence: Synthetic oligonucleotide
  Sense strand starting at position 2822 of SEQ ID NO: 913716
ccacaacuuguaugauugu

SEQ ID NO: 948411 - RNA, 19 nt, Artificial Sequence
  Description of Artificial Sequence: Synthetic oligonucleotide
  Antisense strand to SEQ ID NO: 948410
acaaucauacaaguugugg

SEQ ID NO: 948412 - RNA, 19 nt, Artificial Sequence
  Description of Artificial Sequence: Synthetic oligonucleotide
  Sense strand starting at position 2231 of SEQ ID NO: 913716
gcaauuaaaguuugauagu

SEQ ID NO: 948413 - RNA, 19 nt, Artificial Sequence
  Description of Artificial Sequence: Synthetic oligonucleotide
  Antisense strand to SEQ ID NO: 948412
acuaucaaacuuuaauugc

SEQ ID NO: 948414 - RNA, 19 nt, Artificial Sequence
  Description of Artificial Sequence: Synthetic oligonucleotide
  Sense strand starting at position 2759 of SEQ ID NO: 913716
ucuuaagauguauggcauu

SEQ ID NO: 948415 - RNA, 19 nt, Artificial Sequence
  Description of Artificial Sequence: Synthetic oligonucleotide
  Antisense strand to SEQ ID NO: 948414
aaugccauacaucuuaaga

SEQ ID NO: 948416 - RNA, 19 nt, Artificial Sequence
  Description of Artificial Sequence: Synthetic oligonucleotide
  Sense strand starting at position 3780 of SEQ ID NO: 913716
cuagcuagcccugacaagu

SEQ ID NO: 948417 - RNA, 19 nt, Artificial Sequence
  Description of Artificial Sequence: Synthetic oligonucleotide
  Antisense strand to SEQ ID NO: 948416
acuugucagggcuagcuag

SEQ ID NO: 948418 - RNA, 19 nt, Artificial Sequence
  Description of Artificial Sequence: Synthetic oligonucleotide
  Sense strand starting at position 386 of SEQ ID NO: 913716
caggcagccugaguugaaa

SEQ ID NO: 948419 - RNA, 19 nt, Artificial Sequence
  Description of Artificial Sequence: Synthetic oligonucleotide
  Antisense strand to SEQ ID NO: 948418
uuucaacucaggcugccug

SEQ ID NO: 948420 - RNA, 19 nt, Artificial Sequence
  Description of Artificial Sequence: Synthetic oligonucleotide
  Sense strand starting at position 3125 of SEQ ID NO: 913717
uguguauucguguccuagg

SEQ ID NO: 948421 - RNA, 19 nt, Artificial Sequence
  Description of Artificial Sequence: Synthetic oligonucleotide
  Antisense strand to SEQ ID NO: 948420
ccuaggacacgaauacaca

SEQ ID NO: 948422 - RNA, 19 nt, Artificial Sequence
  Description of Artificial Sequence: Synthetic oligonucleotide
  Sense strand starting at position 617 of SEQ ID NO: 913717
agugguaaccgggauuaaa

SEQ ID NO: 948423 - RNA, 19 nt, Artificial Sequence
  Description of Artificial Sequence: Synthetic oligonucleotide
  Antisense strand to SEQ ID NO: 948422
uuuaaucccgguuaccacu

SEQ ID NO: 948424 - RNA, 19 nt, Artificial Sequence
  Description of Artificial Sequence: Synthetic oligonucleotide
  Sense strand starting at position 3892 of SEQ ID NO: 913717
ugacaagaugcuuaagcaa

SEQ ID NO: 948425 - RNA, 19 nt, Artificial Sequence
  Description of Artificial Sequence: Synthetic oligonucleotide
  Antisense strand to SEQ ID NO: 948424
uugcuuaagcaucuuguca

SEQ ID NO: 948426 - RNA, 19 nt, Artificial Sequence
  Description of Artificial Sequence: Synthetic oligonucleotide
  Sense strand starting at position 2530 of SEQ ID NO: 913717
ccugaaagauaggcuugaa

SEQ ID NO: 948427 - RNA, 19 nt, Artificial Sequence
  Description of Artificial Sequence: Synthetic oligonucleotide
  Antisense strand to SEQ ID NO: 948426
uucaagccuaucuuucagg

SEQ ID NO: 948428 - RNA, 19 nt, Artificial Sequence
  Description of Artificial Sequence: Synthetic oligonucleotide
  Sense strand starting at position 3930 of SEQ ID NO: 913717
ugagaaaugguaggaaugu

SEQ ID NO: 948429 - RNA, 19 nt, Artificial Sequence
  Description of Artificial Sequence: Synthetic oligonucleotide
  Antisense strand to SEQ ID NO: 948428
acauuccuaccauuucuca

SEQ ID NO: 948430 - RNA, 19 nt, Artificial Sequence
  Description of Artificial Sequence: Synthetic oligonucleotide
  Sense strand starting at position 1056 of SEQ ID NO: 913717
guaucagaacucgauaauu

SEQ ID NO: 948431 - RNA, 19 nt, Artificial Sequence
  Description of Artificial Sequence: Synthetic oligonucleotide
  Antisense strand to SEQ ID NO: 948430
aauuaucgaguucugauac

SEQ ID NO: 948432 - RNA, 19 nt, Artificial Sequence
  Description of Artificial Sequence: Synthetic oligonucleotide
  Sense strand starting at position 1388 of SEQ ID NO: 913717
cggccucaaccugagagaa

SEQ ID NO: 948433 - RNA, 19 nt, Artificial Sequence
  Description of Artificial Sequence: Synthetic oligonucleotide
  Antisense strand to SEQ ID NO: 948432
uucucucagguugaggccg

SEQ ID NO: 948434 - RNA, 19 nt, Artificial Sequence
  Description of Artificial Sequence: Synthetic oligonucleotide
  Sense strand starting at position 2166 of SEQ ID NO: 913717
ggaguuugcgaagacaaac

SEQ ID NO: 948435 - RNA, 19 nt, Artificial Sequence
  Description of Artificial Sequence: Synthetic oligonucleotide
  Antisense strand to SEQ ID NO: 948434
guuugucuucgcaaacucc

SEQ ID NO: 948436 - RNA, 19 nt, Artificial Sequence
  Description of Artificial Sequence: Synthetic oligonucleotide
  Sense strand starting at position 332 of SEQ ID NO: 913717
aguucuuaucuguaacaga

SEQ ID NO: 948437 - RNA, 19 nt, Artificial Sequence
  Description of Artificial Sequence: Synthetic oligonucleotide
  Antisense strand to SEQ ID NO: 948436
ucuguuacagauaagaacu

SEQ ID NO: 948438 - RNA, 19 nt, Artificial Sequence
  Description of Artificial Sequence: Synthetic oligonucleotide
  Sense strand starting at position 2529 of SEQ ID NO: 913717
cccugaaagauaggcuuga

SEQ ID NO: 948439 - RNA, 19 nt, Artificial Sequence
  Description of Artificial Sequence: Synthetic oligonucleotide
  Antisense strand to SEQ ID NO: 948438
ucaagccuaucuuucaggg

SEQ ID NO: 948440 - RNA, 19 nt, Artificial Sequence
  Description of Artificial Sequence: Synthetic oligonucleotide
  Sense strand starting at position 3124 of SEQ ID NO: 913717
guguguauucguguccuag

SEQ ID NO: 948441 - RNA, 19 nt, Artificial Sequence
  Description of Artificial Sequence: Synthetic oligonucleotide
  Antisense strand to SEQ ID NO: 948440
cuaggacacgaauacacac

SEQ ID NO: 948442 - RNA, 19 nt, Artificial Sequence
  Description of Artificial Sequence: Synthetic oligonucleotide
  Sense strand starting at position 2417 of SEQ ID NO: 913717
ccagucugaggaugugaga

SEQ ID NO: 948443 - RNA, 19 nt, Artificial Sequence
  Description of Artificial Sequence: Synthetic oligonucleotide
  Antisense strand to SEQ ID NO: 948442
ucucacauccucagacugg

SEQ ID NO: 948444 - RNA, 19 nt, Artificial Sequence
  Description of Artificial Sequence: Synthetic oligonucleotide
  Sense strand starting at position 1055 of SEQ ID NO: 913717
gguaucagaacucgauaau

SEQ ID NO: 948445 - RNA, 19 nt, Artificial Sequence
  Description of Artificial Sequence: Synthetic oligonucleotide
  Antisense strand to SEQ ID NO: 948444
auuaucgaguucugauacc

SEQ ID NO: 948446 - RNA, 19 nt, Artificial Sequence
  Description of Artificial Sequence: Synthetic oligonucleotide
  Sense strand starting at position 646 of SEQ ID NO: 913717
gugggcaaucuauaucuau

SEQ ID NO: 948447 - RNA, 19 nt, Artificial Sequence
  Description of Artificial Sequence: Synthetic oligonucleotide
  Antisense strand to SEQ ID NO: 948446
auagauauagauugcccac

SEQ ID NO: 948448 - RNA, 19 nt, Artificial Sequence
  Description of Artificial Sequence: Synthetic oligonucleotide
  Sense strand starting at position 2209 of SEQ ID NO: 913717
gaaugcuucggcgugcaca

SEQ ID NO: 948449 - RNA, 19 nt, Artificial Sequence
  Description of Artificial Sequence: Synthetic oligonucleotide
  Antisense strand to SEQ ID NO: 948448
ugugcacgccgaagcauuc

SEQ ID NO: 948450 - RNA, 19 nt, Artificial Sequence
  Description of Artificial Sequence: Synthetic oligonucleotide
  Sense strand starting at position 761 of SEQ ID NO: 913717
uggcgaaaucuguagaacu

SEQ ID NO: 948451 - RNA, 19 nt, Artificial Sequence
  Description of Artificial Sequence: Synthetic oligonucleotide
  Antisense strand to SEQ ID NO: 948450
aguucuacagauuucgcca

SEQ ID NO: 948452 - RNA, 19 nt, Artificial Sequence
  Description of Artificial Sequence: Synthetic oligonucleotide
  Sense strand starting at position 900 of SEQ ID NO: 913717
ggaagucagccuuauucug

SEQ ID NO: 948453 - RNA, 19 nt, Artificial Sequence
  Description of Artificial Sequence: Synthetic oligonucleotide
  Antisense strand to SEQ ID NO: 948452
cagaauaaggcugacuucc

SEQ ID NO: 948454 - RNA, 19 nt, Artificial Sequence
  Description of Artificial Sequence: Synthetic oligonucleotide
  Sense strand starting at position 3139 of SEQ ID NO: 913717
cuaggcuugccauauaaau

SEQ ID NO: 948455 - RNA, 19 nt, Artificial Sequence
  Description of Artificial Sequence: Synthetic oligonucleotide
  Antisense strand to SEQ ID NO: 948454
auuuauauggcaagccuag

SEQ ID NO: 948456 - RNA, 19 nt, Artificial Sequence
  Description of Artificial Sequence: Synthetic oligonucleotide
  Sense strand starting at position 763 of SEQ ID NO: 913717
gcgaaaucuguagaacuuu

SEQ ID NO: 948457 - RNA, 19 nt, Artificial Sequence
  Description of Artificial Sequence: Synthetic oligonucleotide
  Antisense strand to SEQ ID NO: 948456
aaaguucuacagauuucgc

SEQ ID NO: 948458 - RNA, 19 nt, Artificial Sequence
  Description of Artificial Sequence: Synthetic oligonucleotide
  Sense strand starting at position 753 of SEQ ID NO: 913717
uagucugauggcgaaaucu

SEQ ID NO: 948459 - RNA, 19 nt, Artificial Sequence
  Description of Artificial Sequence: Synthetic oligonucleotide
  Antisense strand to SEQ ID NO: 948458
agauuucgccaucagacua

SEQ ID NO: 948460 - RNA, 19 nt, Artificial Sequence
  Description of Artificial Sequence: Synthetic oligonucleotide
  Sense strand starting at position 759 of SEQ ID NO: 913717
gauggcgaaaucuguagaa

SEQ ID NO: 948461 - RNA, 19 nt, Artificial Sequence
  Description of Artificial Sequence: Synthetic oligonucleotide
  Antisense strand to SEQ ID NO: 948460
uucuacagauuucgccauc

SEQ ID NO: 948462 - RNA, 19 nt, Artificial Sequence
  Description of Artificial Sequence: Synthetic oligonucleotide
  Sense strand starting at position 920 of SEQ ID NO: 913717
agcagucauccacauucuu

SEQ ID NO: 948463 - RNA, 19 nt, Artificial Sequence
  Description of Artificial Sequence: Synthetic oligonucleotide
  Antisense strand to SEQ ID NO: 948462
aagaauguggaugacugcu

SEQ ID NO: 948464 - RNA, 19 nt, Artificial Sequence
  Description of Artificial Sequence: Synthetic oligonucleotide
  Sense strand starting at position 2424 of SEQ ID NO: 913717
gaggaugugagauguguug

SEQ ID NO: 948465 - RNA, 19 nt, Artificial Sequence
  Description of Artificial Sequence: Synthetic oligonucleotide
  Antisense strand to SEQ ID NO: 948464
caacacaucucacauccuc

SEQ ID NO: 948466 - RNA, 19 nt, Artificial Sequence
  Description of Artificial Sequence: Synthetic oligonucleotide
  Sense strand starting at position 2680 of SEQ ID NO: 913717
gaaauuguaaguuggguau

SEQ ID NO: 948467 - RNA, 19 nt, Artificial Sequence
  Description of Artificial Sequence: Synthetic oligonucleotide
  Antisense strand to SEQ ID NO: 948466
auacccaacuuacaauuuc

SEQ ID NO: 948468 - RNA, 19 nt, Artificial Sequence
  Description of Artificial Sequence: Synthetic oligonucleotide
  Sense strand starting at position 614 of SEQ ID NO: 913717
acaagugguaaccgggauu

SEQ ID NO: 948469 - RNA, 19 nt, Artificial Sequence
  Description of Artificial Sequence: Synthetic oligonucleotide
  Antisense strand to SEQ ID NO: 948468
aaucccgguuaccacuugu

SEQ ID NO: 948470 - RNA, 19 nt, Artificial Sequence
  Description of Artificial Sequence: Synthetic oligonucleotide
  Sense strand starting at position 331 of SEQ ID NO: 913717
gaguucuuaucuguaacag

SEQ ID NO: 948471 - RNA, 19 nt, Artificial Sequence
  Description of Artificial Sequence: Synthetic oligonucleotide
  Antisense strand to SEQ ID NO: 948470
cuguuacagauaagaacuc

SEQ ID NO: 948472 - RNA, 19 nt, Artificial Sequence
  Description of Artificial Sequence: Synthetic oligonucleotide
  Sense strand starting at position 3323 of SEQ ID NO: 913717
gcaauccuuguagaagcau

SEQ ID NO: 948473 - RNA, 19 nt, Artificial Sequence
  Description of Artificial Sequence: Synthetic oligonucleotide
  Antisense strand to SEQ ID NO: 948472
augcuucuacaaggauugc

SEQ ID NO: 948474 - RNA, 19 nt, Artificial Sequence
  Description of Artificial Sequence: Synthetic oligonucleotide
  Sense strand starting at position 2430 of SEQ ID NO: 913717
gugagauguguugauggca

SEQ ID NO: 948475 - RNA, 19 nt, Artificial Sequence
  Description of Artificial Sequence: Synthetic oligonucleotide
  Antisense strand to SEQ ID NO: 948474
ugccaucaacacaucucac

SEQ ID NO: 948476 - RNA, 19 nt, Artificial Sequence
  Description of Artificial Sequence: Synthetic oligonucleotide
  Sense strand starting at position 868 of SEQ ID NO: 913717
aacacaucgcguuacuaaa

SEQ ID NO: 948477 - RNA, 19 nt, Artificial Sequence
  Description of Artificial Sequence: Synthetic oligonucleotide
  Antisense strand to SEQ ID NO: 948476
uuuaguaacgcgauguguu

SEQ ID NO: 948478 - RNA, 19 nt, Artificial Sequence
  Description of Artificial Sequence: Synthetic oligonucleotide
  Sense strand starting at position 3098 of SEQ ID NO: 913717
cugucugugcuagaauaug

SEQ ID NO: 948479 - RNA, 19 nt, Artificial Sequence
  Description of Artificial Sequence: Synthetic oligonucleotide
  Antisense strand to SEQ ID NO: 948478
cauauucuagcacagacag

SEQ ID NO: 948480 - RNA, 19 nt, Artificial Sequence
  Description of Artificial Sequence: Synthetic oligonucleotide
  Sense strand starting at position 112 of SEQ ID NO: 913717
agacuaaacuaauaggaau

SEQ ID NO: 948481 - RNA, 19 nt, Artificial Sequence
  Description of Artificial Sequence: Synthetic oligonucleotide
  Antisense strand to SEQ ID NO: 948480
auuccuauuaguuuagucu

SEQ ID NO: 948482 - RNA, 19 nt, Artificial Sequence
  Description of Artificial Sequence: Synthetic oligonucleotide
  Sense strand starting at position 329 of SEQ ID NO: 913717
uggaguucuuaucuguaac

SEQ ID NO: 948483 - RNA, 19 nt, Artificial Sequence
  Description of Artificial Sequence: Synthetic oligonucleotide
  Antisense strand to SEQ ID NO: 948482
guuacagauaagaacucca

SEQ ID NO: 948484 - RNA, 19 nt, Artificial Sequence
  Description of Artificial Sequence: Synthetic oligonucleotide
  Sense strand starting at position 3094 of SEQ ID NO: 913717
agaacugucugugcuagaa

SEQ ID NO: 948485 - RNA, 19 nt, Artificial Sequence
  Description of Artificial Sequence: Synthetic oligonucleotide
  Antisense strand to SEQ ID NO: 948484
uucuagcacagacaguucu

SEQ ID NO: 948486 - RNA, 19 nt, Artificial Sequence
  Description of Artificial Sequence: Synthetic oligonucleotide
  Sense strand starting at position 3319 of SEQ ID NO: 913717
cuuggcaauccuuguagaa

SEQ ID NO: 948487 - RNA, 19 nt, Artificial Sequence
  Description of Artificial Sequence: Synthetic oligonucleotide
  Antisense strand to SEQ ID NO: 948486
uucuacaaggauugccaag

SEQ ID NO: 948488 - RNA, 19 nt, Artificial Sequence
  Description of Artificial Sequence: Synthetic oligonucleotide
  Sense strand starting at position 1076 of SEQ ID NO: 913717
ccaagaguucugcauuguc

SEQ ID NO: 948489 - RNA, 19 nt, Artificial Sequence
  Description of Artificial Sequence: Synthetic oligonucleotide
  Antisense strand to SEQ ID NO: 948488
gacaaugcagaacucuugg

SEQ ID NO: 948490 - RNA, 19 nt, Artificial Sequence
  Description of Artificial Sequence: Synthetic oligonucleotide
  Sense strand starting at position 3093 of SEQ ID NO: 913717
aagaacugucugugcuaga

SEQ ID NO: 948491 - RNA, 19 nt, Artificial Sequence
  Description of Artificial Sequence: Synthetic oligonucleotide
  Antisense strand to SEQ ID NO: 948490
ucuagcacagacaguucuu

SEQ ID NO: 948492 - RNA, 19 nt, Artificial Sequence
  Description of Artificial Sequence: Synthetic oligonucleotide
  Sense strand starting at position 3161 of SEQ ID NO: 913717
aacagauucgguggcuuaa

SEQ ID NO: 948493 - RNA, 19 nt, Artificial Sequence
  Description of Artificial Sequence: Synthetic oligonucleotide
  Antisense strand to SEQ ID NO: 948492
uuaagccaccgaaucuguu

SEQ ID NO: 948494 - RNA, 19 nt, Artificial Sequence
  Description of Artificial Sequence: Synthetic oligonucleotide
  Sense strand starting at position 3309 of SEQ ID NO: 913717
gccaacaauccuuggcaau

SEQ ID NO: 948495 - RNA, 19 nt, Artificial Sequence
  Description of Artificial Sequence: Synthetic oligonucleotide
  Antisense strand to SEQ ID NO: 948494
auugccaaggauuguuggc

SEQ ID NO: 948496 - RNA, 19 nt, Artificial Sequence
  Description of Artificial Sequence: Synthetic oligonucleotide
  Sense strand starting at position 2451 of SEQ ID NO: 913717
ggcugaagcuacucuacua

SEQ ID NO: 948497 - RNA, 19 nt, Artificial Sequence
  Description of Artificial Sequence: Synthetic oligonucleotide
  Antisense strand to SEQ ID NO: 948496
uaguagaguagcuucagcc

SEQ ID NO: 948498 - RNA, 19 nt, Artificial Sequence
  Description of Artificial Sequence: Synthetic oligonucleotide
  Sense strand starting at position 2121 of SEQ ID NO: 913717
ccgcuuugcguugcuuuaa

SEQ ID NO: 948499 - RNA, 19 nt, Artificial Sequence
  Description of Artificial Sequence: Synthetic oligonucleotide
  Antisense strand to SEQ ID NO: 948498
uuaaagcaacgcaaagcgg

SEQ ID NO: 948500 - RNA, 19 nt, Artificial Sequence
  Description of Artificial Sequence: Synthetic oligonucleotide
  Sense strand starting at position 998 of SEQ ID NO: 913718
uccugaauuugucuguauu

SEQ ID NO: 948501 - RNA, 19 nt, Artificial Sequence
  Description of Artificial Sequence: Synthetic oligonucleotide
  Antisense strand to SEQ ID NO: 948500
aauacagacaaauucagga

SEQ ID NO: 948502 - RNA, 19 nt, Artificial Sequence
  Description of Artificial Sequence: Synthetic oligonucleotide
  Sense strand starting at position 152 of SEQ ID NO: 913718
ggcaacauuuccgucaaug

SEQ ID NO: 948503 - RNA, 19 nt, Artificial Sequence
  Description of Artificial Sequence: Synthetic oligonucleotide
  Antisense strand to SEQ ID NO: 948502
cauugacggaaauguugcc

SEQ ID NO: 948504 - RNA, 19 nt, Artificial Sequence
  Description of Artificial Sequence: Synthetic oligonucleotide
  Sense strand starting at position 3734 of SEQ ID NO: 913718
auuggcugacuaugaagaa

SEQ ID NO: 948505 - RNA, 19 nt, Artificial Sequence
  Description of Artificial Sequence: Synthetic oligonucleotide
  Antisense strand to SEQ ID NO: 948504
uucuucauagucagccaau

SEQ ID NO: 948506 - RNA, 19 nt, Artificial Sequence
  Description of Artificial Sequence: Synthetic oligonucleotide
  Sense strand starting at position 3833 of SEQ ID NO: 913718
auaaguaaguccuugaaga

SEQ ID NO: 948507 - RNA, 19 nt, Artificial Sequence
  Description of Artificial Sequence: Synthetic oligonucleotide
  Antisense strand to SEQ ID NO: 948506
ucuucaaggacuuacuuau

SEQ ID NO: 948508 - RNA, 19 nt, Artificial Sequence
  Description of Artificial Sequence: Synthetic oligonucleotide
  Sense strand starting at position 3834 of SEQ ID NO: 913718
uaaguaaguccuugaagaa

SEQ ID NO: 948509 - RNA, 19 nt, Artificial Sequence
  Description of Artificial Sequence: Synthetic oligonucleotide
  Antisense strand to SEQ ID NO: 948508
uucuucaaggacuuacuua

SEQ ID NO: 948510 - RNA, 19 nt, Artificial Sequence
  Description of Artificial Sequence: Synthetic oligonucleotide
  Sense strand starting at position 2522 of SEQ ID NO: 913718
gccguuucccgagcucaga

SEQ ID NO: 948511 - RNA, 19 nt, Artificial Sequence
  Description of Artificial Sequence: Synthetic oligonucleotide
  Antisense strand to SEQ ID NO: 948510
ucugagcucgggaaacggc

SEQ ID NO: 948512 - RNA, 19 nt, Artificial Sequence
  Description of Artificial Sequence: Synthetic oligonucleotide
  Sense strand starting at position 163 of SEQ ID NO: 913718
cgucaauguguuuccuguu

SEQ ID NO: 948513 - RNA, 19 nt, Artificial Sequence
  Description of Artificial Sequence: Synthetic oligonucleotide
  Antisense strand to SEQ ID NO: 948512
aacaggaaacacauugacg

SEQ ID NO: 948514 - RNA, 19 nt, Artificial Sequence
  Description of Artificial Sequence: Synthetic oligonucleotide
  Sense strand starting at position 3422 of SEQ ID NO: 913718
uagcaugugagcguuguua

SEQ ID NO: 948515 - RNA, 19 nt, Artificial Sequence
  Description of Artificial Sequence: Synthetic oligonucleotide
  Antisense strand to SEQ ID NO: 948514
uaacaacgcucacaugcua

SEQ ID NO: 948516 - RNA, 19 nt, Artificial Sequence
  Description of Artificial Sequence: Synthetic oligonucleotide
  Sense strand starting at position 472 of SEQ ID NO: 913718
gccguaauaauggagacau

SEQ ID NO: 948517 - RNA, 19 nt, Artificial Sequence
  Description of Artificial Sequence: Synthetic oligonucleotide
  Antisense strand to SEQ ID NO: 948516
augucuccauuauuacggc

SEQ ID NO: 948518 - RNA, 19 nt, Artificial Sequence
  Description of Artificial Sequence: Synthetic oligonucleotide
  Sense strand starting at position 3598 of SEQ ID NO: 913718
aguguacuacacuaucauu

SEQ ID NO: 948519 - RNA, 19 nt, Artificial Sequence
  Description of Artificial Sequence: Synthetic oligonucleotide
  Antisense strand to SEQ ID NO: 948518
aaugauaguguaguacacu

SEQ ID NO: 948520 - RNA, 19 nt, Artificial Sequence
  Description of Artificial Sequence: Synthetic oligonucleotide
  Sense strand starting at position 3899 of SEQ ID NO: 913718
aagacaucuugugucagaa

SEQ ID NO: 948521 - RNA, 19 nt, Artificial Sequence
  Description of Artificial Sequence: Synthetic oligonucleotide
  Antisense strand to SEQ ID NO: 948520
uucugacacaagaugucuu

SEQ ID NO: 948522 - RNA, 19 nt, Artificial Sequence
  Description of Artificial Sequence: Synthetic oligonucleotide
  Sense strand starting at position 225 of SEQ ID NO: 913718
gcaguaacccaaggaaacu

SEQ ID NO: 948523 - RNA, 19 nt, Artificial Sequence
  Description of Artificial Sequence: Synthetic oligonucleotide
  Antisense strand to SEQ ID NO: 948522
aguuuccuuggguuacugc

SEQ ID NO: 948524 - RNA, 19 nt, Artificial Sequence
  Description of Artificial Sequence: Synthetic oligonucleotide
  Sense strand starting at position 895 of SEQ ID NO: 913718
auaggaagcaacugguuau

SEQ ID NO: 948525 - RNA, 19 nt, Artificial Sequence
  Description of Artificial Sequence: Synthetic oligonucleotide
  Antisense strand to SEQ ID NO: 948524
auaaccaguugcuuccuau

SEQ ID NO: 948526 - RNA, 19 nt, Artificial Sequence
  Description of Artificial Sequence: Synthetic oligonucleotide
  Sense strand starting at position 3780 of SEQ ID NO: 913718
agcugugaauaucuggaga

SEQ ID NO: 948527 - RNA, 19 nt, Artificial Sequence
  Description of Artificial Sequence: Synthetic oligonucleotide
  Antisense strand to SEQ ID NO: 948526
ucuccagauauucacagcu

SEQ ID NO: 948528 - RNA, 19 nt, Artificial Sequence
  Description of Artificial Sequence: Synthetic oligonucleotide
  Sense strand starting at position 3802 of SEQ ID NO: 913718
gcacuagauggauguauga

SEQ ID NO: 948529 - RNA, 19 nt, Artificial Sequence
  Description of Artificial Sequence: Synthetic oligonucleotide
  Antisense strand to SEQ ID NO: 948528
ucauacauccaucuagugc

SEQ ID NO: 948530 - RNA, 19 nt, Artificial Sequence
  Description of Artificial Sequence: Synthetic oligonucleotide
  Sense strand starting at position 3044 of SEQ ID NO: 913718
uauugagacuucucagguu

SEQ ID NO: 948531 - RNA, 19 nt, Artificial Sequence
  Description of Artificial Sequence: Synthetic oligonucleotide
  Antisense strand to SEQ ID NO: 948530
aaccugagaagucucaaua

SEQ ID NO: 948532 - RNA, 19 nt, Artificial Sequence
  Description of Artificial Sequence: Synthetic oligonucleotide
  Sense strand starting at position 3484 of SEQ ID NO: 913718
aucugaaacguuugagacu

SEQ ID NO: 948533 - RNA, 19 nt, Artificial Sequence
  Description of Artificial Sequence: Synthetic oligonucleotide
  Antisense strand to SEQ ID NO: 948532
agucucaaacguuucagau

SEQ ID NO: 948534 - RNA, 19 nt, Artificial Sequence
  Description of Artificial Sequence: Synthetic oligonucleotide
  Sense strand starting at position 3641 of SEQ ID NO: 913718
guaagaauauaauugcucu

SEQ ID NO: 948535 - RNA, 19 nt, Artificial Sequence
  Description of Artificial Sequence: Synthetic oligonucleotide
  Antisense strand to SEQ ID NO: 948534
agagcaauuauauucuuac

SEQ ID NO: 948536 - RNA, 19 nt, Artificial Sequence
  Description of Artificial Sequence: Synthetic oligonucleotide
  Sense strand starting at position 2979 of SEQ ID NO: 913718
cggugagccguuucugcua

SEQ ID NO: 948537 - RNA, 19 nt, Artificial Sequence
  Description of Artificial Sequence: Synthetic oligonucleotide
  Antisense strand to SEQ ID NO: 948536
uagcagaaacggcucaccg

SEQ ID NO: 948538 - RNA, 19 nt, Artificial Sequence
  Description of Artificial Sequence: Synthetic oligonucleotide
  Sense strand starting at position 968 of SEQ ID NO: 913718
acggaucccggcuaucaga

SEQ ID NO: 948539 - RNA, 19 nt, Artificial Sequence
  Description of Artificial Sequence: Synthetic oligonucleotide
  Antisense strand to SEQ ID NO: 948538
ucugauagccgggauccgu

SEQ ID NO: 948540 - RNA, 19 nt, Artificial Sequence
  Description of Artificial Sequence: Synthetic oligonucleotide
  Sense strand starting at position 3811 of SEQ ID NO: 913718
ggauguaugaccuauucgu

SEQ ID NO: 948541 - RNA, 19 nt, Artificial Sequence
  Description of Artificial Sequence: Synthetic oligonucleotide
  Antisense strand to SEQ ID NO: 948540
acgaauaggucauacaucc

SEQ ID NO: 948542 - RNA, 19 nt, Artificial Sequence
  Description of Artificial Sequence: Synthetic oligonucleotide
  Sense strand starting at position 3021 of SEQ ID NO: 913718
uggaaagacuucccugcuu

SEQ ID NO: 948543 - RNA, 19 nt, Artificial Sequence
  Description of Artificial Sequence: Synthetic oligonucleotide
  Antisense strand to SEQ ID NO: 948542
aagcagggaagucuuucca

SEQ ID NO: 948544 - RNA, 19 nt, Artificial Sequence
  Description of Artificial Sequence: Synthetic oligonucleotide
  Sense strand starting at position 3254 of SEQ ID NO: 913718
auguaugugcuaggaagga

SEQ ID NO: 948545 - RNA, 19 nt, Artificial Sequence
  Description of Artificial Sequence: Synthetic oligonucleotide
  Antisense strand to SEQ ID NO: 948544
uccuuccuagcacauacau

SEQ ID NO: 948546 - RNA, 19 nt, Artificial Sequence
  Description of Artificial Sequence: Synthetic oligonucleotide
  Sense strand starting at position 3728 of SEQ ID NO: 913718
acgaacauuggcugacuau

SEQ ID NO: 948547 - RNA, 19 nt, Artificial Sequence
  Description of Artificial Sequence: Synthetic oligonucleotide
  Antisense strand to SEQ ID NO: 948546
auagucagccaauguucgu

SEQ ID NO: 948548 - RNA, 19 nt, Artificial Sequence
  Description of Artificial Sequence: Synthetic oligonucleotide
  Sense strand starting at position 3493 of SEQ ID NO: 913718
guuugagacuuggccuaaa

SEQ ID NO: 948549 - RNA, 19 nt, Artificial Sequence
  Description of Artificial Sequence: Synthetic oligonucleotide
  Antisense strand to SEQ ID NO: 948548
uuuaggccaagucucaaac

SEQ ID NO: 948550 - RNA, 19 nt, Artificial Sequence
  Description of Artificial Sequence: Synthetic oligonucleotide
  Sense strand starting at position 697 of SEQ ID NO: 913718
gaauauaugcccuaugugu

SEQ ID NO: 948551 - RNA, 19 nt, Artificial Sequence
  Description of Artificial Sequence: Synthetic oligonucleotide
  Antisense strand to SEQ ID NO: 948550
acacauagggcauauauuc

SEQ ID NO: 948552 - RNA, 19 nt, Artificial Sequence
  Description of Artificial Sequence: Synthetic oligonucleotide
  Sense strand starting at position 3603 of SEQ ID NO: 913718
acuacacuaucauucgagu

SEQ ID NO: 948553 - RNA, 19 nt, Artificial Sequence
  Description of Artificial Sequence: Synthetic oligonucleotide
  Antisense strand to SEQ ID NO: 948552
acucgaaugauaguguagu

SEQ ID NO: 948554 - RNA, 19 nt, Artificial Sequence
  Description of Artificial Sequence: Synthetic oligonucleotide
  Sense strand starting at position 157 of SEQ ID NO: 913718
cauuuccgucaauguguuu

SEQ ID NO: 948555 - RNA, 19 nt, Artificial Sequence
  Description of Artificial Sequence: Synthetic oligonucleotide
  Antisense strand to SEQ ID NO: 948554
aaacacauugacggaaaug

SEQ ID NO: 948556 - RNA, 19 nt, Artificial Sequence
  Description of Artificial Sequence: Synthetic oligonucleotide
  Sense strand starting at position 3428 of SEQ ID NO: 913718
gugagcguuguuaguuaau

SEQ ID NO: 948557 - RNA, 19 nt, Artificial Sequence
  Description of Artificial Sequence: Synthetic oligonucleotide
  Antisense strand to SEQ ID NO: 948556
auuaacuaacaacgcucac

SEQ ID NO: 948558 - RNA, 19 nt, Artificial Sequence
  Description of Artificial Sequence: Synthetic oligonucleotide
  Sense strand starting at position 3553 of SEQ ID NO: 913718
agaaucuaaugacagacaa

SEQ ID NO: 948559 - RNA, 19 nt, Artificial Sequence
  Description of Artificial Sequence: Synthetic oligonucleotide
  Antisense strand to SEQ ID NO: 948558
uugucugucauuagauucu

SEQ ID NO: 948560 - RNA, 19 nt, Artificial Sequence
  Description of Artificial Sequence: Synthetic oligonucleotide
  Sense strand starting at position 979 of SEQ ID NO: 913718
cuaucagaagucgaguguu

SEQ ID NO: 948561 - RNA, 19 nt, Artificial Sequence
  Description of Artificial Sequence: Synthetic oligonucleotide
  Antisense strand to SEQ ID NO: 948560
aacacucgacuucugauag

SEQ ID NO: 948562 - RNA, 19 nt, Artificial Sequence
  Description of Artificial Sequence: Synthetic oligonucleotide
  Sense strand starting at position 695 of SEQ ID NO: 913718
uggaauauaugcccuaugu

SEQ ID NO: 948563 - RNA, 19 nt, Artificial Sequence
  Description of Artificial Sequence: Synthetic oligonucleotide
  Antisense strand to SEQ ID NO: 948562
acauagggcauauauucca

SEQ ID NO: 948564 - RNA, 19 nt, Artificial Sequence
  Description of Artificial Sequence: Synthetic oligonucleotide
  Sense strand starting at position 424 of SEQ ID NO: 913718
cccuguuaacggugagaag

SEQ ID NO: 948565 - RNA, 19 nt, Artificial Sequence
  Description of Artificial Sequence: Synthetic oligonucleotide
  Antisense strand to SEQ ID NO: 948564
cuucucaccguuaacaggg

SEQ ID NO: 948566 - RNA, 19 nt, Artificial Sequence
  Description of Artificial Sequence: Synthetic oligonucleotide
  Sense strand starting at position 3250 of SEQ ID NO: 913718
auauauguaugugcuagga

SEQ ID NO: 948567 - RNA, 19 nt, Artificial Sequence
  Description of Artificial Sequence: Synthetic oligonucleotide
  Antisense strand to SEQ ID NO: 948566
uccuagcacauacauauau

SEQ ID NO: 948568 - RNA, 19 nt, Artificial Sequence
  Description of Artificial Sequence: Synthetic oligonucleotide
  Sense strand starting at position 1109 of SEQ ID NO: 913718
cagauuuacuccuaucgag

SEQ ID NO: 948569 - RNA, 19 nt, Artificial Sequence
  Description of Artificial Sequence: Synthetic oligonucleotide
  Antisense strand to SEQ ID NO: 948568
cucgauaggaguaaaucug

SEQ ID NO: 948570 - RNA, 19 nt, Artificial Sequence
  Description of Artificial Sequence: Synthetic oligonucleotide
  Sense strand starting at position 3908 of SEQ ID NO: 913718
ugugucagaaaccgugaaa

SEQ ID NO: 948571 - RNA, 19 nt, Artificial Sequence
  Description of Artificial Sequence: Synthetic oligonucleotide
  Antisense strand to SEQ ID NO: 948570
uuucacgguuucugacaca

SEQ ID NO: 948572 - RNA, 19 nt, Artificial Sequence
  Description of Artificial Sequence: Synthetic oligonucleotide
  Sense strand starting at position 1010 of SEQ ID NO: 913718
cuguauugaggaugucgau

SEQ ID NO: 948573 - RNA, 19 nt, Artificial Sequence
  Description of Artificial Sequence: Synthetic oligonucleotide
  Antisense strand to SEQ ID NO: 948572
aucgacauccucaauacag

SEQ ID NO: 948574 - RNA, 19 nt, Artificial Sequence
  Description of Artificial Sequence: Synthetic oligonucleotide
  Sense strand starting at position 3460 of SEQ ID NO: 913718
agucaccaucccugaguuu

SEQ ID NO: 948575 - RNA, 19 nt, Artificial Sequence
  Description of Artificial Sequence: Synthetic oligonucleotide
  Antisense strand to SEQ ID NO: 948574
aaacucagggauggugacu

SEQ ID NO: 948576 - RNA, 19 nt, Artificial Sequence
  Description of Artificial Sequence: Synthetic oligonucleotide
  Sense strand starting at position 3773 of SEQ ID NO: 913718
cauguauagcugugaauau

SEQ ID NO: 948577 - RNA, 19 nt, Artificial Sequence
  Description of Artificial Sequence: Synthetic oligonucleotide
  Antisense strand to SEQ ID NO: 948576
auauucacagcuauacaug

SEQ ID NO: 948578 - RNA, 19 nt, Artificial Sequence
  Description of Artificial Sequence: Synthetic oligonucleotide
  Sense strand starting at position 471 of SEQ ID NO: 913718
cgccguaauaauggagaca

SEQ ID NO: 948579 - RNA, 19 nt, Artificial Sequence
  Description of Artificial Sequence: Synthetic oligonucleotide
  Antisense strand to SEQ ID NO: 948578
ugucuccauuauuacggcg

SEQ ID NO: 948580 - RNA, 19 nt, Artificial Sequence
  Description of Artificial Sequence: Synthetic oligonucleotide
  Sense strand starting at position 2437 of SEQ ID NO: 913719
uguuuagcaucauuugauu

SEQ ID NO: 948581 - RNA, 19 nt, Artificial Sequence
  Description of Artificial Sequence: Synthetic oligonucleotide
  Antisense strand to SEQ ID NO: 948580
aaucaaaugaugcuaaaca

SEQ ID NO: 948582 - RNA, 19 nt, Artificial Sequence
  Description of Artificial Sequence: Synthetic oligonucleotide
  Sense strand starting at position 228 of SEQ ID NO: 913719
uagugugggacugaauacu

SEQ ID NO: 948583 - RNA, 19 nt, Artificial Sequence
  Description of Artificial Sequence: Synthetic oligonucleotide
  Antisense strand to SEQ ID NO: 948582
aguauucagucccacacua

SEQ ID NO: 948584 - RNA, 19 nt, Artificial Sequence
  Description of Artificial Sequence: Synthetic oligonucleotide
  Sense strand starting at position 2753 of SEQ ID NO: 913719
cuuauaugacaaggaugua

SEQ ID NO: 948585 - RNA, 19 nt, Artificial Sequence
  Description of Artificial Sequence: Synthetic oligonucleotide
  Antisense strand to SEQ ID NO: 948584
uacauccuugucauauaag

SEQ ID NO: 948586 - RNA, 19 nt, Artificial Sequence
  Description of Artificial Sequence: Synthetic oligonucleotide
  Sense strand starting at position 3096 of SEQ ID NO: 913719
agaugagaucgcuaaccca

SEQ ID NO: 948587 - RNA, 19 nt, Artificial Sequence
  Description of Artificial Sequence: Synthetic oligonucleotide
  Antisense strand to SEQ ID NO: 948586
uggguuagcgaucucaucu

SEQ ID NO: 948588 - RNA, 19 nt, Artificial Sequence
  Description of Artificial Sequence: Synthetic oligonucleotide
  Sense strand starting at position 297 of SEQ ID NO: 913719
gaggaagaaucacugucuu

SEQ ID NO: 948589 - RNA, 19 nt, Artificial Sequence
  Description of Artificial Sequence: Synthetic oligonucleotide
  Antisense strand to SEQ ID NO: 948588
aagacagugauucuuccuc

SEQ ID NO: 948590 - RNA, 19 nt, Artificial Sequence
  Description of Artificial Sequence: Synthetic oligonucleotide
  Sense strand starting at position 666 of SEQ ID NO: 913719
agcagagucaaguaaugac

SEQ ID NO: 948591 - RNA, 19 nt, Artificial Sequence
  Description of Artificial Sequence: Synthetic oligonucleotide
  Antisense strand to SEQ ID NO: 948590
gucauuacuugacucugcu

SEQ ID NO: 948592 - RNA, 19 nt, Artificial Sequence
  Description of Artificial Sequence: Synthetic oligonucleotide
  Sense strand starting at position 550 of SEQ ID NO: 913719
cugauuuaguugcuccauu

SEQ ID NO: 948593 - RNA, 19 nt, Artificial Sequence
  Description of Artificial Sequence: Synthetic oligonucleotide
  Antisense strand to SEQ ID NO: 948592
aauggagcaacuaaaucag

SEQ ID NO: 948594 - RNA, 19 nt, Artificial Sequence
  Description of Artificial Sequence: Synthetic oligonucleotide
  Sense strand starting at position 2044 of SEQ ID NO: 913719
gagagcgguccagagacau

SEQ ID NO: 948595 - RNA, 19 nt, Artificial Sequence
  Description of Artificial Sequence: Synthetic oligonucleotide
  Antisense strand to SEQ ID NO: 948594
augucucuggaccgcucuc

SEQ ID NO: 948596 - RNA, 19 nt, Artificial Sequence
  Description of Artificial Sequence: Synthetic oligonucleotide
  Sense strand starting at position 2512 of SEQ ID NO: 913719
guuauuagaggccaaccau

SEQ ID NO: 948597 - RNA, 19 nt, Artificial Sequence
  Description of Artificial Sequence: Synthetic oligonucleotide
  Antisense strand to SEQ ID NO: 948596
augguuggccucuaauaac

SEQ ID NO: 948598 - RNA, 19 nt, Artificial Sequence
  Description of Artificial Sequence: Synthetic oligonucleotide
  Sense strand starting at position 2127 of SEQ ID NO: 913719
ggcuccacugcugaagaaa

SEQ ID NO: 948599 - RNA, 19 nt, Artificial Sequence
  Description of Artificial Sequence: Synthetic oligonucleotide
  Antisense strand to SEQ ID NO: 948598
uuucuucagcaguggagcc

SEQ ID NO: 948600 - RNA, 19 nt, Artificial Sequence
  Description of Artificial Sequence: Synthetic oligonucleotide
  Sense strand starting at position 492 of SEQ ID NO: 913719
agcuaaauccagugacaaa

SEQ ID NO: 948601 - RNA, 19 nt, Artificial Sequence
  Description of Artificial Sequence: Synthetic oligonucleotide
  Antisense strand to SEQ ID NO: 948600
uuugucacuggauuuagcu

SEQ ID NO: 948602 - RNA, 19 nt, Artificial Sequence
  Description of Artificial Sequence: Synthetic oligonucleotide
  Sense strand starting at position 321 of SEQ ID NO: 913719
ucuuguguugcuguuguga

SEQ ID NO: 948603 - RNA, 19 nt, Artificial Sequence
  Description of Artificial Sequence: Synthetic oligonucleotide
  Antisense strand to SEQ ID NO: 948602
ucacaacagcaacacaaga

SEQ ID NO: 948604 - RNA, 19 nt, Artificial Sequence
  Description of Artificial Sequence: Synthetic oligonucleotide
  Sense strand starting at position 2670 of SEQ ID NO: 913719
guacacauccuguauacau

SEQ ID NO: 948605 - RNA, 19 nt, Artificial Sequence
  Description of Artificial Sequence: Synthetic oligonucleotide
  Antisense strand to SEQ ID NO: 948604
auguauacaggauguguac

SEQ ID NO: 948606 - RNA, 19 nt, Artificial Sequence
  Description of Artificial Sequence: Synthetic oligonucleotide
  Sense strand starting at position 2255 of SEQ ID NO: 913719
ucaguuaggcauuaaacuu

SEQ ID NO: 948607 - RNA, 19 nt, Artificial Sequence
  Description of Artificial Sequence: Synthetic oligonucleotide
  Antisense strand to SEQ ID NO: 948606
aaguuuaaugccuaacuga

SEQ ID NO: 948608 - RNA, 19 nt, Artificial Sequence
  Description of Artificial Sequence: Synthetic oligonucleotide
  Sense strand starting at position 2853 of SEQ ID NO: 913719
ccuuuaaaucagggcuaga

SEQ ID NO: 948609 - RNA, 19 nt, Artificial Sequence
  Description of Artificial Sequence: Synthetic oligonucleotide
  Antisense strand to SEQ ID NO: 948608
ucuagcccugauuuaaagg

SEQ ID NO: 948610 - RNA, 19 nt, Artificial Sequence
  Description of Artificial Sequence: Synthetic oligonucleotide
  Sense strand starting at position 938 of SEQ ID NO: 913719
gcaacuaacucuuuaugag

SEQ ID NO: 948611 - RNA, 19 nt, Artificial Sequence
  Description of Artificial Sequence: Synthetic oligonucleotide
  Antisense strand to SEQ ID NO: 948610
cucauaaagaguuaguugc

SEQ ID NO: 948612 - RNA, 19 nt, Artificial Sequence
  Description of Artificial Sequence: Synthetic oligonucleotide
  Sense strand starting at position 2337 of SEQ ID NO: 913719
agugaucacauugguagau

SEQ ID NO: 948613 - RNA, 19 nt, Artificial Sequence
  Description of Artificial Sequence: Synthetic oligonucleotide
  Antisense strand to SEQ ID NO: 948612
aucuaccaaugugaucacu

SEQ ID NO: 948614 - RNA, 19 nt, Artificial Sequence
  Description of Artificial Sequence: Synthetic oligonucleotide
  Sense strand starting at position 2336 of SEQ ID NO: 913719
cagugaucacauugguaga

SEQ ID NO: 948615 - RNA, 19 nt, Artificial Sequence
  Description of Artificial Sequence: Synthetic oligonucleotide
  Antisense strand to SEQ ID NO: 948614
ucuaccaaugugaucacug

SEQ ID NO: 948616 - RNA, 19 nt, Artificial Sequence
  Description of Artificial Sequence: Synthetic oligonucleotide
  Sense strand starting at position 2155 of SEQ ID NO: 913719
acacuagucccacggaaua

SEQ ID NO: 948617 - RNA, 19 nt, Artificial Sequence
  Description of Artificial Sequence: Synthetic oligonucleotide
  Antisense strand to SEQ ID NO: 948616
uauuccgugggacuagugu

SEQ ID NO: 948618 - RNA, 19 nt, Artificial Sequence
  Description of Artificial Sequence: Synthetic oligonucleotide
  Sense strand starting at position 3277 of SEQ ID NO: 913719
guaauuaugcuacauagua

SEQ ID NO: 948619 - RNA, 19 nt, Artificial Sequence
  Description of Artificial Sequence: Synthetic oligonucleotide
  Antisense strand to SEQ ID NO: 948618
uacuauguagcauaauuac

SEQ ID NO: 948620 - RNA, 19 nt, Artificial Sequence
  Description of Artificial Sequence: Synthetic oligonucleotide
  Sense strand starting at position 2729 of SEQ ID NO: 913719
gcaucacuccuguaauuag

SEQ ID NO: 948621 - RNA, 19 nt, Artificial Sequence
  Description of Artificial Sequence: Synthetic oligonucleotide
  Antisense strand to SEQ ID NO: 948620
cuaauuacaggagugaugc

SEQ ID NO: 948622 - RNA, 19 nt, Artificial Sequence
  Description of Artificial Sequence: Synthetic oligonucleotide
  Sense strand starting at position 2027 of SEQ ID NO: 913719
agagaugagcugcgagaga

SEQ ID NO: 948623 - RNA, 19 nt, Artificial Sequence
  Description of Artificial Sequence: Synthetic oligonucleotide
  Antisense strand to SEQ ID NO: 948622
ucucucgcagcucaucucu

SEQ ID NO: 948624 - RNA, 19 nt, Artificial Sequence
  Description of Artificial Sequence: Synthetic oligonucleotide
  Sense strand starting at position 163 of SEQ ID NO: 913719
ccaaaugcgagaggguaau

SEQ ID NO: 948625 - RNA, 19 nt, Artificial Sequence
  Description of Artificial Sequence: Synthetic oligonucleotide
  Antisense strand to SEQ ID NO: 948624
auuacccucucgcauuugg

SEQ ID NO: 948626 - RNA, 19 nt, Artificial Sequence
  Description of Artificial Sequence: Synthetic oligonucleotide
  Sense strand starting at position 260 of SEQ ID NO: 913719
auaagaggcuguccucaua

SEQ ID NO: 948627 - RNA, 19 nt, Artificial Sequence
  Description of Artificial Sequence: Synthetic oligonucleotide
  Antisense strand to SEQ ID NO: 948626
uaugaggacagccucuuau

SEQ ID NO: 948628 - RNA, 19 nt, Artificial Sequence
  Description of Artificial Sequence: Synthetic oligonucleotide
  Sense strand starting at position 842 of SEQ ID NO: 913719
ggcuucucacuuugaacaa

SEQ ID NO: 948629 - RNA, 19 nt, Artificial Sequence
  Description of Artificial Sequence: Synthetic oligonucleotide
  Antisense strand to SEQ ID NO: 948628
uuguucaaagugagaagcc

SEQ ID NO: 948630 - RNA, 19 nt, Artificial Sequence
  Description of Artificial Sequence: Synthetic oligonucleotide
  Sense strand starting at position 174 of SEQ ID NO: 913719
aggguaauucaccgugaag

SEQ ID NO: 948631 - RNA, 19 nt, Artificial Sequence
  Description of Artificial Sequence: Synthetic oligonucleotide
  Antisense strand to SEQ ID NO: 948630
cuucacggugaauuacccu

SEQ ID NO: 948632 - RNA, 19 nt, Artificial Sequence
  Description of Artificial Sequence: Synthetic oligonucleotide
  Sense strand starting at position 3599 of SEQ ID NO: 913719
caggcugaauguuugaauu

SEQ ID NO: 948633 - RNA, 19 nt, Artificial Sequence
  Description of Artificial Sequence: Synthetic oligonucleotide
  Antisense strand to SEQ ID NO: 948632
aauucaaacauucagccug

SEQ ID NO: 948634 - RNA, 19 nt, Artificial Sequence
  Description of Artificial Sequence: Synthetic oligonucleotide
  Sense strand starting at position 240 of SEQ ID NO: 913719
gaauacugucucggaccua

SEQ ID NO: 948635 - RNA, 19 nt, Artificial Sequence
  Description of Artificial Sequence: Synthetic oligonucleotide
  Antisense strand to SEQ ID NO: 948634
uagguccgagacaguauuc

SEQ ID NO: 948636 - RNA, 19 nt, Artificial Sequence
  Description of Artificial Sequence: Synthetic oligonucleotide
  Sense strand starting at position 2738 of SEQ ID NO: 913719
cuguaauuagguuagcuua

SEQ ID NO: 948637 - RNA, 19 nt, Artificial Sequence
  Description of Artificial Sequence: Synthetic oligonucleotide
  Antisense strand to SEQ ID NO: 948636
uaagcuaaccuaauuacag

SEQ ID NO: 948638 - RNA, 19 nt, Artificial Sequence
  Description of Artificial Sequence: Synthetic oligonucleotide
  Sense strand starting at position 3265 of SEQ ID NO: 913719
uggcuuaacuauguaauua

SEQ ID NO: 948639 - RNA, 19 nt, Artificial Sequence
  Description of Artificial Sequence: Synthetic oligonucleotide
  Antisense strand to SEQ ID NO: 948638
uaauuacauaguuaagcca

SEQ ID NO: 948640 - RNA, 19 nt, Artificial Sequence
  Description of Artificial Sequence: Synthetic oligonucleotide
  Sense strand starting at position 2587 of SEQ ID NO: 913719
ucuauugcuuacuuggaca

SEQ ID NO: 948641 - RNA, 19 nt, Artificial Sequence
  Description of Artificial Sequence: Synthetic oligonucleotide
  Antisense strand to SEQ ID NO: 948640
uguccaaguaagcaauaga

SEQ ID NO: 948642 - RNA, 19 nt, Artificial Sequence
  Description of Artificial Sequence: Synthetic oligonucleotide
  Sense strand starting at position 431 of SEQ ID NO: 913719
guugaacuauccucaguca

SEQ ID NO: 948643 - RNA, 19 nt, Artificial Sequence
  Description of Artificial Sequence: Synthetic oligonucleotide
  Antisense strand to SEQ ID NO: 948642
ugacugaggauaguucaac

SEQ ID NO: 948644 - RNA, 19 nt, Artificial Sequence
  Description of Artificial Sequence: Synthetic oligonucleotide
  Sense strand starting at position 3319 of SEQ ID NO: 913719
uagggcuaccucuguggaa

SEQ ID NO: 948645 - RNA, 19 nt, Artificial Sequence
  Description of Artificial Sequence: Synthetic oligonucleotide
  Antisense strand to SEQ ID NO: 948644
uuccacagagguagcccua

SEQ ID NO: 948646 - RNA, 19 nt, Artificial Sequence
  Description of Artificial Sequence: Synthetic oligonucleotide
  Sense strand starting at position 31 of SEQ ID NO: 913719
gacaacugcuaaguguuaa

SEQ ID NO: 948647 - RNA, 19 nt, Artificial Sequence
  Description of Artificial Sequence: Synthetic oligonucleotide
  Antisense strand to SEQ ID NO: 948646
uuaacacuuagcaguuguc

SEQ ID NO: 948648 - RNA, 19 nt, Artificial Sequence
  Description of Artificial Sequence: Synthetic oligonucleotide
  Sense strand starting at position 223 of SEQ ID NO: 913719
uguuauagugugggacuga

SEQ ID NO: 948649 - RNA, 19 nt, Artificial Sequence
  Description of Artificial Sequence: Synthetic oligonucleotide
  Antisense strand to SEQ ID NO: 948648
ucagucccacacuauaaca

SEQ ID NO: 948650 - RNA, 19 nt, Artificial Sequence
  Description of Artificial Sequence: Synthetic oligonucleotide
  Sense strand starting at position 839 of SEQ ID NO: 913719
cuuggcuucucacuuugaa

SEQ ID NO: 948651 - RNA, 19 nt, Artificial Sequence
  Description of Artificial Sequence: Synthetic oligonucleotide
  Antisense strand to SEQ ID NO: 948650
uucaaagugagaagccaag

SEQ ID NO: 948652 - RNA, 19 nt, Artificial Sequence
  Description of Artificial Sequence: Synthetic oligonucleotide
  Sense strand starting at position 2740 of SEQ ID NO: 913719
guaauuagguuagcuuaua

SEQ ID NO: 948653 - RNA, 19 nt, Artificial Sequence
  Description of Artificial Sequence: Synthetic oligonucleotide
  Antisense strand to SEQ ID NO: 948652
uauaagcuaaccuaauuac

SEQ ID NO: 948654 - RNA, 19 nt, Artificial Sequence
  Description of Artificial Sequence: Synthetic oligonucleotide
  Sense strand starting at position 3264 of SEQ ID NO: 913719
cuggcuuaacuauguaauu

SEQ ID NO: 948655 - RNA, 19 nt, Artificial Sequence
  Description of Artificial Sequence: Synthetic oligonucleotide
  Antisense strand to SEQ ID NO: 948654
aauuacauaguuaagccag

SEQ ID NO: 948656 - RNA, 19 nt, Artificial Sequence
  Description of Artificial Sequence: Synthetic oligonucleotide
  Sense strand starting at position 185 of SEQ ID NO: 913719
ccgugaaguacugagcgaa

SEQ ID NO: 948657 - RNA, 19 nt, Artificial Sequence
  Description of Artificial Sequence: Synthetic oligonucleotide
  Antisense strand to SEQ ID NO: 948656
uucgcucaguacuucacgg

SEQ ID NO: 948658 - RNA, 19 nt, Artificial Sequence
  Description of Artificial Sequence: Synthetic oligonucleotide
  Sense strand starting at position 1578 of SEQ ID NO: 913719
uccuguuaaucagcacgaa

SEQ ID NO: 948659 - RNA, 19 nt, Artificial Sequence
  Description of Artificial Sequence: Synthetic oligonucleotide
  Antisense strand to SEQ ID NO: 948658
uucgugcugauuaacagga

SEQ ID NO: 948660 - RNA, 19 nt, Artificial Sequence
  Description of Artificial Sequence: Synthetic oligonucleotide
  Sense strand starting at position 3027 of SEQ ID NO: 913720
auguaaugagcucaaauau

SEQ ID NO: 948661 - RNA, 19 nt, Artificial Sequence
  Description of Artificial Sequence: Synthetic oligonucleotide
  Antisense strand to SEQ ID NO: 948660
auauuugagcucauuacau

SEQ ID NO: 948662 - RNA, 19 nt, Artificial Sequence
  Description of Artificial Sequence: Synthetic oligonucleotide
  Sense strand starting at position 438 of SEQ ID NO: 913720
ugcuuaaagccauaaagag

SEQ ID NO: 948663 - RNA, 19 nt, Artificial Sequence
  Description of Artificial Sequence: Synthetic oligonucleotide
  Antisense strand to SEQ ID NO: 948662
cucuuuauggcuuuaagca

SEQ ID NO: 948664 - RNA, 19 nt, Artificial Sequence
  Description of Artificial Sequence: Synthetic oligonucleotide
  Sense strand starting at position 173 of SEQ ID NO: 913720
ugucuugagcuauaaagga

SEQ ID NO: 948665 - RNA, 19 nt, Artificial Sequence
  Description of Artificial Sequence: Synthetic oligonucleotide
  Antisense strand to SEQ ID NO: 948664
uccuuuauagcucaagaca

SEQ ID NO: 948666 - RNA, 19 nt, Artificial Sequence
  Description of Artificial Sequence: Synthetic oligonucleotide
  Sense strand starting at position 2954 of SEQ ID NO: 913720
acuuuaggauucuuagauu

SEQ ID NO: 948667 - RNA, 19 nt, Artificial Sequence
  Description of Artificial Sequence: Synthetic oligonucleotide
  Antisense strand to SEQ ID NO: 948666
aaucuaagaauccuaaagu

SEQ ID NO: 948668 - RNA, 19 nt, Artificial Sequence
  Description of Artificial Sequence: Synthetic oligonucleotide
  Sense strand starting at position 3514 of SEQ ID NO: 913720
uugaaucaccucugagacu

SEQ ID NO: 948669 - RNA, 19 nt, Artificial Sequence
  Description of Artificial Sequence: Synthetic oligonucleotide
  Antisense strand to SEQ ID NO: 948668
agucucagaggugauucaa

SEQ ID NO: 948670 - RNA, 19 nt, Artificial Sequence
  Description of Artificial Sequence: Synthetic oligonucleotide
  Sense strand starting at position 287 of SEQ ID NO: 913720
gaagaacaucagugaugca

SEQ ID NO: 948671 - RNA, 19 nt, Artificial Sequence
  Description of Artificial Sequence: Synthetic oligonucleotide
  Antisense strand to SEQ ID NO: 948670
ugcaucacugauguucuuc

SEQ ID NO: 948672 - RNA, 19 nt, Artificial Sequence
  Description of Artificial Sequence: Synthetic oligonucleotide
  Sense strand starting at position 2975 of SEQ ID NO: 913720
uuauuucuguguuccggaa

SEQ ID NO: 948673 - RNA, 19 nt, Artificial Sequence
  Description of Artificial Sequence: Synthetic oligonucleotide
  Antisense strand to SEQ ID NO: 948672
uuccggaacacagaaauaa

SEQ ID NO: 948674 - RNA, 19 nt, Artificial Sequence
  Description of Artificial Sequence: Synthetic oligonucleotide
  Sense strand starting at position 3631 of SEQ ID NO: 913720
uaaggaauggcagguauca

SEQ ID NO: 948675 - RNA, 19 nt, Artificial Sequence
  Description of Artificial Sequence: Synthetic oligonucleotide
  Antisense strand to SEQ ID NO: 948674
ugauaccugccauuccuua

SEQ ID NO: 948676 - RNA, 19 nt, Artificial Sequence
  Description of Artificial Sequence: Synthetic oligonucleotide
  Sense strand starting at position 2901 of SEQ ID NO: 913720
agaggaaguuacguaggau

SEQ ID NO: 948677 - RNA, 19 nt, Artificial Sequence
  Description of Artificial Sequence: Synthetic oligonucleotide
  Antisense strand to SEQ ID NO: 948676
auccuacguaacuuccucu

SEQ ID NO: 948678 - RNA, 19 nt, Artificial Sequence
  Description of Artificial Sequence: Synthetic oligonucleotide
  Sense strand starting at position 843 of SEQ ID NO: 913720
cgccaaagucaagaugacu

SEQ ID NO: 948679 - RNA, 19 nt, Artificial Sequence
  Description of Artificial Sequence: Synthetic oligonucleotide
  Antisense strand to SEQ ID NO: 948678
agucaucuugacuuuggcg

SEQ ID NO: 948680 - RNA, 19 nt, Artificial Sequence
  Description of Artificial Sequence: Synthetic oligonucleotide
  Sense strand starting at position 1667 of SEQ ID NO: 913720
ugacaaugccgguagaauc

SEQ ID NO: 948681 - RNA, 19 nt, Artificial Sequence
  Description of Artificial Sequence: Synthetic oligonucleotide
  Antisense strand to SEQ ID NO: 948680
gauucuaccggcauuguca

SEQ ID NO: 948682 - RNA, 19 nt, Artificial Sequence
  Description of Artificial Sequence: Synthetic oligonucleotide
  Sense strand starting at position 3308 of SEQ ID NO: 913720
agcucuugacuuuaggagu

SEQ ID NO: 948683 - RNA, 19 nt, Artificial Sequence
  Description of Artificial Sequence: Synthetic oligonucleotide
  Antisense strand to SEQ ID NO: 948682
acuccuaaagucaagagcu

SEQ ID NO: 948684 - RNA, 19 nt, Artificial Sequence
  Description of Artificial Sequence: Synthetic oligonucleotide
  Sense strand starting at position 3059 of SEQ ID NO: 913720
ugcuauucugguuagacag

SEQ ID NO: 948685 - RNA, 19 nt, Artificial Sequence
  Description of Artificial Sequence: Synthetic oligonucleotide
  Antisense strand to SEQ ID NO: 948684
cugucuaaccagaauagca

SEQ ID NO: 948686 - RNA, 19 nt, Artificial Sequence
  Description of Artificial Sequence: Synthetic oligonucleotide
  Sense strand starting at position 1244 of SEQ ID NO: 913720
gaggccuaugagcaaaguu

SEQ ID NO: 948687 - RNA, 19 nt, Artificial Sequence
  Description of Artificial Sequence: Synthetic oligonucleotide
  Antisense strand to SEQ ID NO: 948686
aacuuugcucauaggccuc

SEQ ID NO: 948688 - RNA, 19 nt, Artificial Sequence
  Description of Artificial Sequence: Synthetic oligonucleotide
  Sense strand starting at position 3927 of SEQ ID NO: 913720
acaagaugguuguucucaa

SEQ ID NO: 948689 - RNA, 19 nt, Artificial Sequence
  Description of Artificial Sequence: Synthetic oligonucleotide
  Antisense strand to SEQ ID NO: 948688
uugagaacaaccaucuugu

SEQ ID NO: 948690 - RNA, 19 nt, Artificial Sequence
  Description of Artificial Sequence: Synthetic oligonucleotide
  Sense strand starting at position 1308 of SEQ ID NO: 913720
ucaccucguccucagauua

SEQ ID NO: 948691 - RNA, 19 nt, Artificial Sequence
  Description of Artificial Sequence: Synthetic oligonucleotide
  Antisense strand to SEQ ID NO: 948690
uaaucugaggacgagguga

SEQ ID NO: 948692 - RNA, 19 nt, Artificial Sequence
  Description of Artificial Sequence: Synthetic oligonucleotide
  Sense strand starting at position 3928 of SEQ ID NO: 913720
caagaugguuguucucaac

SEQ ID NO: 948693 - RNA, 19 nt, Artificial Sequence
  Description of Artificial Sequence: Synthetic oligonucleotide
  Antisense strand to SEQ ID NO: 948692
guugagaacaaccaucuug

SEQ ID NO: 948694 - RNA, 19 nt, Artificial Sequence
  Description of Artificial Sequence: Synthetic oligonucleotide
  Sense strand starting at position 3267 of SEQ ID NO: 913720
accauauggugcccugaga

SEQ ID NO: 948695 - RNA, 19 nt, Artificial Sequence
  Description of Artificial Sequence: Synthetic oligonucleotide
  Antisense strand to SEQ ID NO: 948694
ucucagggcaccauauggu

SEQ ID NO: 948696 - RNA, 19 nt, Artificial Sequence
  Description of Artificial Sequence: Synthetic oligonucleotide
  Sense strand starting at position 3105 of SEQ ID NO: 913720
ucagucuugcuggacuuua

SEQ ID NO: 948697 - RNA, 19 nt, Artificial Sequence
  Description of Artificial Sequence: Synthetic oligonucleotide
  Antisense strand to SEQ ID NO: 948696
uaaaguccagcaagacuga

SEQ ID NO: 948698 - RNA, 19 nt, Artificial Sequence
  Description of Artificial Sequence: Synthetic oligonucleotide
  Sense strand starting at position 1176 of SEQ ID NO: 913720
cugugcuggcuagaaauua

SEQ ID NO: 948699 - RNA, 19 nt, Artificial Sequence
  Description of Artificial Sequence: Synthetic oligonucleotide
  Antisense strand to SEQ ID NO: 948698
uaauuucuagccagcacag

SEQ ID NO: 948700 - RNA, 19 nt, Artificial Sequence
  Description of Artificial Sequence: Synthetic oligonucleotide
  Sense strand starting at position 3581 of SEQ ID NO: 913720
uugauuguuguguaauacu

SEQ ID NO: 948701 - RNA, 19 nt, Artificial Sequence
  Description of Artificial Sequence: Synthetic oligonucleotide
  Antisense strand to SEQ ID NO: 948700
aguauuacacaacaaucaa

SEQ ID NO: 948702 - RNA, 19 nt, Artificial Sequence
  Description of Artificial Sequence: Synthetic oligonucleotide
  Sense strand starting at position 261 of SEQ ID NO: 913720
ggagaacugucucccuggu

SEQ ID NO: 948703 - RNA, 19 nt, Artificial Sequence
  Description of Artificial Sequence: Synthetic oligonucleotide
  Antisense strand to SEQ ID NO: 948702
accagggagacaguucucc

SEQ ID NO: 948704 - RNA, 19 nt, Artificial Sequence
  Description of Artificial Sequence: Synthetic oligonucleotide
  Sense strand starting at position 606 of SEQ ID NO: 913720
ggugaaguuccugggugga

SEQ ID NO: 948705 - RNA, 19 nt, Artificial Sequence
  Description of Artificial Sequence: Synthetic oligonucleotide
  Antisense strand to SEQ ID NO: 948704
uccacccaggaacuucacc

SEQ ID NO: 948706 - RNA, 19 nt, Artificial Sequence
  Description of Artificial Sequence: Synthetic oligonucleotide
  Sense strand starting at position 851 of SEQ ID NO: 913720
ucaagaugacuuugccagu

SEQ ID NO: 948707 - RNA, 19 nt, Artificial Sequence
  Description of Artificial Sequence: Synthetic oligonucleotide
  Antisense strand to SEQ ID NO: 948706
acuggcaaagucaucuuga

SEQ ID NO: 948708 - RNA, 19 nt, Artificial Sequence
  Description of Artificial Sequence: Synthetic oligonucleotide
  Sense strand starting at position 2436 of SEQ ID NO: 913720
ggucccauuccucggaaau

SEQ ID NO: 948709 - RNA, 19 nt, Artificial Sequence
  Description of Artificial Sequence: Synthetic oligonucleotide
  Antisense strand to SEQ ID NO: 948708
auuuccgaggaaugggacc

SEQ ID NO: 948710 - RNA, 19 nt, Artificial Sequence
  Description of Artificial Sequence: Synthetic oligonucleotide
  Sense strand starting at position 2437 of SEQ ID NO: 913720
gucccauuccucggaaaug

SEQ ID NO: 948711 - RNA, 19 nt, Artificial Sequence
  Description of Artificial Sequence: Synthetic oligonucleotide
  Antisense strand to SEQ ID NO: 948710
cauuuccgaggaaugggac

SEQ ID NO: 948712 - RNA, 19 nt, Artificial Sequence
  Description of Artificial Sequence: Synthetic oligonucleotide
  Sense strand starting at position 3773 of SEQ ID NO: 913720
cauagagagugccaauuua

SEQ ID NO: 948713 - RNA, 19 nt, Artificial Sequence
  Description of Artificial Sequence: Synthetic oligonucleotide
  Antisense strand to SEQ ID NO: 948712
uaaauuggcacucucuaug

SEQ ID NO: 948714 - RNA, 19 nt, Artificial Sequence
  Description of Artificial Sequence: Synthetic oligonucleotide
  Sense strand starting at position 1174 of SEQ ID NO: 913720
uccugugcuggcuagaaau

SEQ ID NO: 948715 - RNA, 19 nt, Artificial Sequence
  Description of Artificial Sequence: Synthetic oligonucleotide
  Antisense strand to SEQ ID NO: 948714
auuucuagccagcacagga

SEQ ID NO: 948716 - RNA, 19 nt, Artificial Sequence
  Description of Artificial Sequence: Synthetic oligonucleotide
  Sense strand starting at position 3058 of SEQ ID NO: 913720
uugcuauucugguuagaca

SEQ ID NO: 948717 - RNA, 19 nt, Artificial Sequence
  Description of Artificial Sequence: Synthetic oligonucleotide
  Antisense strand to SEQ ID NO: 948716
ugucuaaccagaauagcaa

SEQ ID NO: 948718 - RNA, 19 nt, Artificial Sequence
  Description of Artificial Sequence: Synthetic oligonucleotide
  Sense strand starting at position 3153 of SEQ ID NO: 913720
acagcuuggaucugugagu

SEQ ID NO: 948719 - RNA, 19 nt, Artificial Sequence
  Description of Artificial Sequence: Synthetic oligonucleotide
  Antisense strand to SEQ ID NO: 948718
acucacagauccaagcugu

SEQ ID NO: 948720 - RNA, 19 nt, Artificial Sequence
  Description of Artificial Sequence: Synthetic oligonucleotide
  Sense strand starting at position 3580 of SEQ ID NO: 913720
cuugauuguuguguaauac

SEQ ID NO: 948721 - RNA, 19 nt, Artificial Sequence
  Description of Artificial Sequence: Synthetic oligonucleotide
  Antisense strand to SEQ ID NO: 948720
guauuacacaacaaucaag

SEQ ID NO: 948722 - RNA, 19 nt, Artificial Sequence
  Description of Artificial Sequence: Synthetic oligonucleotide
  Sense strand starting at position 2435 of SEQ ID NO: 913720
cggucccauuccucggaaa

SEQ ID NO: 948723 - RNA, 19 nt, Artificial Sequence
  Description of Artificial Sequence: Synthetic oligonucleotide
  Antisense strand to SEQ ID NO: 948722
uuuccgaggaaugggaccg

SEQ ID NO: 948724 - RNA, 19 nt, Artificial Sequence
  Description of Artificial Sequence: Synthetic oligonucleotide
  Sense strand starting at position 167 of SEQ ID NO: 913720
gcccacugucuugagcuau

SEQ ID NO: 948725 - RNA, 19 nt, Artificial Sequence
  Description of Artificial Sequence: Synthetic oligonucleotide
  Antisense strand to SEQ ID NO: 948724
auagcucaagacagugggc

SEQ ID NO: 948726 - RNA, 19 nt, Artificial Sequence
  Description of Artificial Sequence: Synthetic oligonucleotide
  Sense strand starting at position 3589 of SEQ ID NO: 913720
uguguaauacuguacgcaa

SEQ ID NO: 948727 - RNA, 19 nt, Artificial Sequence
  Description of Artificial Sequence: Synthetic oligonucleotide
  Antisense strand to SEQ ID NO: 948726
uugcguacaguauuacaca

SEQ ID NO: 948728 - RNA, 19 nt, Artificial Sequence
  Description of Artificial Sequence: Synthetic oligonucleotide
  Sense strand starting at position 3665 of SEQ ID NO: 913720
aguuaaugcgguuaaagcu

SEQ ID NO: 948729 - RNA, 19 nt, Artificial Sequence
  Description of Artificial Sequence: Synthetic oligonucleotide
  Antisense strand to SEQ ID NO: 948728
agcuuuaaccgcauuaacu

SEQ ID NO: 948730 - RNA, 19 nt, Artificial Sequence
  Description of Artificial Sequence: Synthetic oligonucleotide
  Sense strand starting at position 3002 of SEQ ID NO: 913720
gagcuuuagugccuuacaa

SEQ ID NO: 948731 - RNA, 19 nt, Artificial Sequence
  Description of Artificial Sequence: Synthetic oligonucleotide
  Antisense strand to SEQ ID NO: 948730
uuguaaggcacuaaagcuc

SEQ ID NO: 948732 - RNA, 19 nt, Artificial Sequence
  Description of Artificial Sequence: Synthetic oligonucleotide
  Sense strand starting at position 958 of SEQ ID NO: 913720
cgucuuucccuacagcuua

SEQ ID NO: 948733 - RNA, 19 nt, Artificial Sequence
  Description of Artificial Sequence: Synthetic oligonucleotide
  Antisense strand to SEQ ID NO: 948732
uaagcuguagggaaagacg

SEQ ID NO: 948734 - RNA, 19 nt, Artificial Sequence
  Description of Artificial Sequence: Synthetic oligonucleotide
  Sense strand starting at position 3726 of SEQ ID NO: 913720
agggccuagcagugugaua

SEQ ID NO: 948735 - RNA, 19 nt, Artificial Sequence
  Description of Artificial Sequence: Synthetic oligonucleotide
  Antisense strand to SEQ ID NO: 948734
uaucacacugcuaggcccu

SEQ ID NO: 948736 - RNA, 19 nt, Artificial Sequence
  Description of Artificial Sequence: Synthetic oligonucleotide
  Sense strand starting at position 1093 of SEQ ID NO: 913720
ggaggaugcaugcguccaa

SEQ ID NO: 948737 - RNA, 19 nt, Artificial Sequence
  Description of Artificial Sequence: Synthetic oligonucleotide
  Antisense strand to SEQ ID NO: 948736
uuggacgcaugcauccucc

SEQ ID NO: 948738 - RNA, 19 nt, Artificial Sequence
  Description of Artificial Sequence: Synthetic oligonucleotide
  Sense strand starting at position 3104 of SEQ ID NO: 913720
cucagucuugcuggacuuu

SEQ ID NO: 948739 - RNA, 19 nt, Artificial Sequence
  Description of Artificial Sequence: Synthetic oligonucleotide
  Antisense strand to SEQ ID NO: 948738
aaaguccagcaagacugag

SEQ ID NO: 948740 - RNA, 19 nt, Artificial Sequence
  Description of Artificial Sequence: Synthetic oligonucleotide
  Sense strand starting at position 34 of SEQ ID NO: 913721
auguaaugagcucaaauau

SEQ ID NO: 948741 - RNA, 19 nt, Artificial Sequence
  Description of Artificial Sequence: Synthetic oligonucleotide
  Antisense strand to SEQ ID NO: 948740
auauuugagcucauuacau

SEQ ID NO: 948742 - RNA, 19 nt, Artificial Sequence
  Description of Artificial Sequence: Synthetic oligonucleotide
  Sense strand starting at position 2737 of SEQ ID NO: 913721
uuaaucagucaaugaggau

SEQ ID NO: 948743 - RNA, 19 nt, Artificial Sequence
  Description of Artificial Sequence: Synthetic oligonucleotide
  Antisense strand to SEQ ID NO: 948742
auccucauugacugauuaa

SEQ ID NO: 948744 - RNA, 19 nt, Artificial Sequence
  Description of Artificial Sequence: Synthetic oligonucleotide
  Sense strand starting at position 2067 of SEQ ID NO: 913721
cugggccucagauaaguaa

SEQ ID NO: 948745 - RNA, 19 nt, Artificial Sequence
  Description of Artificial Sequence: Synthetic oligonucleotide
  Antisense strand to SEQ ID NO: 948744
uuacuuaucugaggcccag

SEQ ID NO: 948746 - RNA, 19 nt, Artificial Sequence
  Description of Artificial Sequence: Synthetic oligonucleotide
  Sense strand starting at position 2080 of SEQ ID NO: 913721
aaguaacacugagucauga

SEQ ID NO: 948747 - RNA, 19 nt, Artificial Sequence
  Description of Artificial Sequence: Synthetic oligonucleotide
  Antisense strand to SEQ ID NO: 948746
ucaugacucaguguuacuu

SEQ ID NO: 948748 - RNA, 19 nt, Artificial Sequence
  Description of Artificial Sequence: Synthetic oligonucleotide
  Sense strand starting at position 2704 of SEQ ID NO: 913721
ugagguuagaagggcaaau

SEQ ID NO: 948749 - RNA, 19 nt, Artificial Sequence
  Description of Artificial Sequence: Synthetic oligonucleotide
  Antisense strand to SEQ ID NO: 948748
auuugcccuucuaaccuca

SEQ ID NO: 948750 - RNA, 19 nt, Artificial Sequence
  Description of Artificial Sequence: Synthetic oligonucleotide
  Sense strand starting at position 3400 of SEQ ID NO: 913721
aagagaugccucggaagag

SEQ ID NO: 948751 - RNA, 19 nt, Artificial Sequence
  Description of Artificial Sequence: Synthetic oligonucleotide
  Antisense strand to SEQ ID NO: 948750
cucuuccgaggcaucucuu

SEQ ID NO: 948752 - RNA, 19 nt, Artificial Sequence
  Description of Artificial Sequence: Synthetic oligonucleotide
  Sense strand starting at position 521 of SEQ ID NO: 913721
uugaaucaccucugagacu

SEQ ID NO: 948753 - RNA, 19 nt, Artificial Sequence
  Description of Artificial Sequence: Synthetic oligonucleotide
  Antisense strand to SEQ ID NO: 948752
agucucagaggugauucaa

SEQ ID NO: 948754 - RNA, 19 nt, Artificial Sequence
  Description of Artificial Sequence: Synthetic oligonucleotide
  Sense strand starting at position 1274 of SEQ ID NO: 913721
ggccuuugagagggaaacu

SEQ ID NO: 948755 - RNA, 19 nt, Artificial Sequence
  Description of Artificial Sequence: Synthetic oligonucleotide
  Antisense strand to SEQ ID NO: 948754
aguuucccucucaaaggcc

SEQ ID NO: 948756 - RNA, 19 nt, Artificial Sequence
  Description of Artificial Sequence: Synthetic oligonucleotide
  Sense strand starting at position 1283 of SEQ ID NO: 913721
gagggaaacugcuucucaa

SEQ ID NO: 948757 - RNA, 19 nt, Artificial Sequence
  Description of Artificial Sequence: Synthetic oligonucleotide
  Antisense strand to SEQ ID NO: 948756
uugagaagcaguuucccuc

SEQ ID NO: 948758 - RNA, 19 nt, Artificial Sequence
  Description of Artificial Sequence: Synthetic oligonucleotide
  Sense strand starting at position 2749 of SEQ ID NO: 913721
ugaggaugugaagguuaua

SEQ ID NO: 948759 - RNA, 19 nt, Artificial Sequence
  Description of Artificial Sequence: Synthetic oligonucleotide
  Antisense strand to SEQ ID NO: 948758
uauaaccuucacauccuca

SEQ ID NO: 948760 - RNA, 19 nt, Artificial Sequence
  Description of Artificial Sequence: Synthetic oligonucleotide
  Sense strand starting at position 2514 of SEQ ID NO: 913721
uuggaaugucuguaccaau

SEQ ID NO: 948761 - RNA, 19 nt, Artificial Sequence
  Description of Artificial Sequence: Synthetic oligonucleotide
  Antisense strand to SEQ ID NO: 948760
auugguacagacauuccaa

SEQ ID NO: 948762 - RNA, 19 nt, Artificial Sequence
  Description of Artificial Sequence: Synthetic oligonucleotide
  Sense strand starting at position 1213 of SEQ ID NO: 913721
ccagguuacccugaaaugu

SEQ ID NO: 948763 - RNA, 19 nt, Artificial Sequence
  Description of Artificial Sequence: Synthetic oligonucleotide
  Antisense strand to SEQ ID NO: 948762
acauuucaggguaaccugg

SEQ ID NO: 948764 - RNA, 19 nt, Artificial Sequence
  Description of Artificial Sequence: Synthetic oligonucleotide
  Sense strand starting at position 1364 of SEQ ID NO: 913721
gagaaaugucucuaggccu

SEQ ID NO: 948765 - RNA, 19 nt, Artificial Sequence
  Description of Artificial Sequence: Synthetic oligonucleotide
  Antisense strand to SEQ ID NO: 948764
aggccuagagacauuucuc

SEQ ID NO: 948766 - RNA, 19 nt, Artificial Sequence
  Description of Artificial Sequence: Synthetic oligonucleotide
  Sense strand starting at position 638 of SEQ ID NO: 913721
uaaggaauggcagguauca

SEQ ID NO: 948767 - RNA, 19 nt, Artificial Sequence
  Description of Artificial Sequence: Synthetic oligonucleotide
  Antisense strand to SEQ ID NO: 948766
ugauaccugccauuccuua

SEQ ID NO: 948768 - RNA, 19 nt, Artificial Sequence
  Description of Artificial Sequence: Synthetic oligonucleotide
  Sense strand starting at position 2614 of SEQ ID NO: 913721
gcacacucugaauagcaau

SEQ ID NO: 948769 - RNA, 19 nt, Artificial Sequence
  Description of Artificial Sequence: Synthetic oligonucleotide
  Antisense strand to SEQ ID NO: 948768
auugcuauucagagugugc

SEQ ID NO: 948770 - RNA, 19 nt, Artificial Sequence
  Description of Artificial Sequence: Synthetic oligonucleotide
  Sense strand starting at position 2715 of SEQ ID NO: 913721
gggcaaauaucauuaucug

SEQ ID NO: 948771 - RNA, 19 nt, Artificial Sequence
  Description of Artificial Sequence: Synthetic oligonucleotide
  Antisense strand to SEQ ID NO: 948770
cagauaaugauauuugccc

SEQ ID NO: 948772 - RNA, 19 nt, Artificial Sequence
  Description of Artificial Sequence: Synthetic oligonucleotide
  Sense strand starting at position 3923 of SEQ ID NO: 913721
auauuauaacagggucagu

SEQ ID NO: 948773 - RNA, 19 nt, Artificial Sequence
  Description of Artificial Sequence: Synthetic oligonucleotide
  Antisense strand to SEQ ID NO: 948772
acugacccuguuauaauau

SEQ ID NO: 948774 - RNA, 19 nt, Artificial Sequence
  Description of Artificial Sequence: Synthetic oligonucleotide
  Sense strand starting at position 2095 of SEQ ID NO: 913721
augacugccuaacugauau

SEQ ID NO: 948775 - RNA, 19 nt, Artificial Sequence
  Description of Artificial Sequence: Synthetic oligonucleotide
  Antisense strand to SEQ ID NO: 948774
auaucaguuaggcagucau

SEQ ID NO: 948776 - RNA, 19 nt, Artificial Sequence
  Description of Artificial Sequence: Synthetic oligonucleotide
  Sense strand starting at position 315 of SEQ ID NO: 913721
agcucuugacuuuaggagu

SEQ ID NO: 948777 - RNA, 19 nt, Artificial Sequence
  Description of Artificial Sequence: Synthetic oligonucleotide
  Antisense strand to SEQ ID NO: 948776
acuccuaaagucaagagcu

SEQ ID NO: 948778 - RNA, 19 nt, Artificial Sequence
  Description of Artificial Sequence: Synthetic oligonucleotide
  Sense strand starting at position 66 of SEQ ID NO: 913721
ugcuauucugguuagacag

SEQ ID NO: 948779 - RNA, 19 nt, Artificial Sequence
  Description of Artificial Sequence: Synthetic oligonucleotide
  Antisense strand to SEQ ID NO: 948778
cugucuaaccagaauagca

SEQ ID NO: 948780 - RNA, 19 nt, Artificial Sequence
  Description of Artificial Sequence: Synthetic oligonucleotide
  Sense strand starting at position 2105 of SEQ ID NO: 913721
aacugauaugggugacugu

SEQ ID NO: 948781 - RNA, 19 nt, Artificial Sequence
  Description of Artificial Sequence: Synthetic oligonucleotide
  Antisense strand to SEQ ID NO: 948780
acagucacccauaucaguu

SEQ ID NO: 948782 - RNA, 19 nt, Artificial Sequence
  Description of Artificial Sequence: Synthetic oligonucleotide
  Sense strand starting at position 934 of SEQ ID NO: 913721
acaagaugguuguucucaa

SEQ ID NO: 948783 - RNA, 19 nt, Artificial Sequence
  Description of Artificial Sequence: Synthetic oligonucleotide
  Antisense strand to SEQ ID NO: 948782
uugagaacaaccaucuugu

SEQ ID NO: 948784 - RNA, 19 nt, Artificial Sequence
  Description of Artificial Sequence: Synthetic oligonucleotide
  Sense strand starting at position 1415 of SEQ ID NO: 913721
cucccugugccagaaauau

SEQ ID NO: 948785 - RNA, 19 nt, Artificial Sequence
  Description of Artificial Sequence: Synthetic oligonucleotide
  Antisense strand to SEQ ID NO: 948784
auauuucuggcacagggag

SEQ ID NO: 948786 - RNA, 19 nt, Artificial Sequence
  Description of Artificial Sequence: Synthetic oligonucleotide
  Sense strand starting at position 2295 of SEQ ID NO: 913721
gacaguuacucccuggauc

SEQ ID NO: 948787 - RNA, 19 nt, Artificial Sequence
  Description of Artificial Sequence: Synthetic oligonucleotide
  Antisense strand to SEQ ID NO: 948786
gauccagggaguaacuguc

SEQ ID NO: 948788 - RNA, 19 nt, Artificial Sequence
  Description of Artificial Sequence: Synthetic oligonucleotide
  Sense strand starting at position 1210 of SEQ ID NO: 913721
gagccagguuacccugaaa

SEQ ID NO: 948789 - RNA, 19 nt, Artificial Sequence
  Description of Artificial Sequence: Synthetic oligonucleotide
  Antisense strand to SEQ ID NO: 948788
uuucaggguaaccuggcuc

SEQ ID NO: 948790 - RNA, 19 nt, Artificial Sequence
  Description of Artificial Sequence: Synthetic oligonucleotide
  Sense strand starting at position 3622 of SEQ ID NO: 913721
cuagcuuuccaugggaaca

SEQ ID NO: 948791 - RNA, 19 nt, Artificial Sequence
  Description of Artificial Sequence: Synthetic oligonucleotide
  Antisense strand to SEQ ID NO: 948790
uguucccauggaaagcuag

SEQ ID NO: 948792 - RNA, 19 nt, Artificial Sequence
  Description of Artificial Sequence: Synthetic oligonucleotide
  Sense strand starting at position 2635 of SEQ ID NO: 913721
uuacauaacguugacaguu

SEQ ID NO: 948793 - RNA, 19 nt, Artificial Sequence
  Description of Artificial Sequence: Synthetic oligonucleotide
  Antisense strand to SEQ ID NO: 948792
aacugucaacguuauguaa

SEQ ID NO: 948794 - RNA, 19 nt, Artificial Sequence
  Description of Artificial Sequence: Synthetic oligonucleotide
  Sense strand starting at position 2101 of SEQ ID NO: 913721
gccuaacugauauggguga

SEQ ID NO: 948795 - RNA, 19 nt, Artificial Sequence
  Description of Artificial Sequence: Synthetic oligonucleotide
  Antisense strand to SEQ ID NO: 948794
ucacccauaucaguuaggc

SEQ ID NO: 948796 - RNA, 19 nt, Artificial Sequence
  Description of Artificial Sequence: Synthetic oligonucleotide
  Sense strand starting at position 1232 of SEQ ID NO: 913721
ccuguuugcaggcaggaaa

SEQ ID NO: 948797 - RNA, 19 nt, Artificial Sequence
  Description of Artificial Sequence: Synthetic oligonucleotide
  Antisense strand to SEQ ID NO: 948796
uuuccugccugcaaacagg

SEQ ID NO: 948798 - RNA, 19 nt, Artificial Sequence
  Description of Artificial Sequence: Synthetic oligonucleotide
  Sense strand starting at position 1721 of SEQ ID NO: 913721
uuuguucgccgcucauauu

SEQ ID NO: 948799 - RNA, 19 nt, Artificial Sequence
  Description of Artificial Sequence: Synthetic oligonucleotide
  Antisense strand to SEQ ID NO: 948798
aauaugagcggcgaacaaa

SEQ ID NO: 948800 - RNA, 19 nt, Artificial Sequence
  Description of Artificial Sequence: Synthetic oligonucleotide
  Sense strand starting at position 1079 of SEQ ID NO: 913721
gcugaauaagccuaaugca

SEQ ID NO: 948801 - RNA, 19 nt, Artificial Sequence
  Description of Artificial Sequence: Synthetic oligonucleotide
  Antisense strand to SEQ ID NO: 948800
ugcauuaggcuuauucagc

SEQ ID NO: 948802 - RNA, 19 nt, Artificial Sequence
  Description of Artificial Sequence: Synthetic oligonucleotide
  Sense strand starting at position 935 of SEQ ID NO: 913721
caagaugguuguucucaac

SEQ ID NO: 948803 - RNA, 19 nt, Artificial Sequence
  Description of Artificial Sequence: Synthetic oligonucleotide
  Antisense strand to SEQ ID NO: 948802
guugagaacaaccaucuug

SEQ ID NO: 948804 - RNA, 19 nt, Artificial Sequence
  Description of Artificial Sequence: Synthetic oligonucleotide
  Sense strand starting at position 1286 of SEQ ID NO: 913721
ggaaacugcuucucaaggu

SEQ ID NO: 948805 - RNA, 19 nt, Artificial Sequence
  Description of Artificial Sequence: Synthetic oligonucleotide
  Antisense strand to SEQ ID NO: 948804
accuugagaagcaguuucc

SEQ ID NO: 948806 - RNA, 19 nt, Artificial Sequence
  Description of Artificial Sequence: Synthetic oligonucleotide
  Sense strand starting at position 274 of SEQ ID NO: 913721
accauauggugcccugaga

SEQ ID NO: 948807 - RNA, 19 nt, Artificial Sequence
  Description of Artificial Sequence: Synthetic oligonucleotide
  Antisense strand to SEQ ID NO: 948806
ucucagggcaccauauggu

SEQ ID NO: 948808 - RNA, 19 nt, Artificial Sequence
  Description of Artificial Sequence: Synthetic oligonucleotide
  Sense strand starting at position 3621 of SEQ ID NO: 913721
ccuagcuuuccaugggaac

SEQ ID NO: 948809 - RNA, 19 nt, Artificial Sequence
  Description of Artificial Sequence: Synthetic oligonucleotide
  Antisense strand to SEQ ID NO: 948808
guucccauggaaagcuagg

SEQ ID NO: 948810 - RNA, 19 nt, Artificial Sequence
  Description of Artificial Sequence: Synthetic oligonucleotide
  Sense strand starting at position 3279 of SEQ ID NO: 913721
cccuauagaguuuguuaag

SEQ ID NO: 948811 - RNA, 19 nt, Artificial Sequence
  Description of Artificial Sequence: Synthetic oligonucleotide
  Antisense strand to SEQ ID NO: 948810
cuuaacaaacucuauaggg

SEQ ID NO: 948812 - RNA, 19 nt, Artificial Sequence
  Description of Artificial Sequence: Synthetic oligonucleotide
  Sense strand starting at position 3964 of SEQ ID NO: 913721
aacuguggccuguaacauu

SEQ ID NO: 948813 - RNA, 19 nt, Artificial Sequence
  Description of Artificial Sequence: Synthetic oligonucleotide
  Antisense strand to SEQ ID NO: 948812
aauguuacaggccacaguu

SEQ ID NO: 948814 - RNA, 19 nt, Artificial Sequence
  Description of Artificial Sequence: Synthetic oligonucleotide
  Sense strand starting at position 3443 of SEQ ID NO: 913721
uuggaucagugguuuccaa

SEQ ID NO: 948815 - RNA, 19 nt, Artificial Sequence
  Description of Artificial Sequence: Synthetic oligonucleotide
  Antisense strand to SEQ ID NO: 948814
uuggaaaccacugauccaa

SEQ ID NO: 948816 - RNA, 19 nt, Artificial Sequence
  Description of Artificial Sequence: Synthetic oligonucleotide
  Sense strand starting at position 112 of SEQ ID NO: 913721
ucagucuugcuggacuuua

SEQ ID NO: 948817 - RNA, 19 nt, Artificial Sequence
  Description of Artificial Sequence: Synthetic oligonucleotide
  Antisense strand to SEQ ID NO: 948816
uaaaguccagcaagacuga

SEQ ID NO: 948818 - RNA, 19 nt, Artificial Sequence
  Description of Artificial Sequence: Synthetic oligonucleotide
  Sense strand starting at position 588 of SEQ ID NO: 913721
uugauuguuguguaauacu

SEQ ID NO: 948819 - RNA, 19 nt, Artificial Sequence
  Description of Artificial Sequence: Synthetic oligonucleotide
  Antisense strand to SEQ ID NO: 948818
aguauuacacaacaaucaa

SEQ ID NO: 948820 - RNA, 19 nt, Artificial Sequence
  Description of Artificial Sequence: Synthetic oligonucleotide
  Sense strand starting at position 654 of SEQ ID NO: 913722
cuuauaauccuguguauuu

SEQ ID NO: 948821 - RNA, 19 nt, Artificial Sequence
  Description of Artificial Sequence: Synthetic oligonucleotide
  Antisense strand to SEQ ID NO: 948820
aaauacacaggauuauaag

SEQ ID NO: 948822 - RNA, 19 nt, Artificial Sequence
  Description of Artificial Sequence: Synthetic oligonucleotide
  Sense strand starting at position 781 of SEQ ID NO: 913722
gagaguuccugaucuaaag

SEQ ID NO: 948823 - RNA, 19 nt, Artificial Sequence
  Description of Artificial Sequence: Synthetic oligonucleotide
  Antisense strand to SEQ ID NO: 948822
cuuuagaucaggaacucuc

SEQ ID NO: 948824 - RNA, 19 nt, Artificial Sequence
  Description of Artificial Sequence: Synthetic oligonucleotide
  Sense strand starting at position 2284 of SEQ ID NO: 913722
gggagcugaggaugacuua

SEQ ID NO: 948825 - RNA, 19 nt, Artificial Sequence
  Description of Artificial Sequence: Synthetic oligonucleotide
  Antisense strand to SEQ ID NO: 948824
uaagucauccucagcuccc

SEQ ID NO: 948826 - RNA, 19 nt, Artificial Sequence
  Description of Artificial Sequence: Synthetic oligonucleotide
  Sense strand starting at position 557 of SEQ ID NO: 913722
cuggaucuugcugaauaau

SEQ ID NO: 948827 - RNA, 19 nt, Artificial Sequence
  Description of Artificial Sequence: Synthetic oligonucleotide
  Antisense strand to SEQ ID NO: 948826
auuauucagcaagauccag

SEQ ID NO: 948828 - RNA, 19 nt, Artificial Sequence
  Description of Artificial Sequence: Synthetic oligonucleotide
  Sense strand starting at position 3948 of SEQ ID NO: 913722
acaagaauguguuugacaa

SEQ ID NO: 948829 - RNA, 19 nt, Artificial Sequence
  Description of Artificial Sequence: Synthetic oligonucleotide
  Antisense strand to SEQ ID NO: 948828
uugucaaacacauucuugu

SEQ ID NO: 948830 - RNA, 19 nt, Artificial Sequence
  Description of Artificial Sequence: Synthetic oligonucleotide
  Sense strand starting at position 3949 of SEQ ID NO: 913722
caagaauguguuugacaaa

SEQ ID NO: 948831 - RNA, 19 nt, Artificial Sequence
  Description of Artificial Sequence: Synthetic oligonucleotide
  Antisense strand to SEQ ID NO: 948830
uuugucaaacacauucuug

SEQ ID NO: 948832 - RNA, 19 nt, Artificial Sequence
  Description of Artificial Sequence: Synthetic oligonucleotide
  Sense strand starting at position 2203 of SEQ ID NO: 913722
cugaaucuaugggucagau

SEQ ID NO: 948833 - RNA, 19 nt, Artificial Sequence
  Description of Artificial Sequence: Synthetic oligonucleotide
  Antisense strand to SEQ ID NO: 948832
aucugacccauagauucag

SEQ ID NO: 948834 - RNA, 19 nt, Artificial Sequence
  Description of Artificial Sequence: Synthetic oligonucleotide
  Sense strand starting at position 990 of SEQ ID NO: 913722
aucuucuguguauaaggau

SEQ ID NO: 948835 - RNA, 19 nt, Artificial Sequence
  Description of Artificial Sequence: Synthetic oligonucleotide
  Antisense strand to SEQ ID NO: 948834
auccuuauacacagaagau

SEQ ID NO: 948836 - RNA, 19 nt, Artificial Sequence
  Description of Artificial Sequence: Synthetic oligonucleotide
  Sense strand starting at position 2202 of SEQ ID NO: 913722
ccugaaucuaugggucaga

SEQ ID NO: 948837 - RNA, 19 nt, Artificial Sequence
  Description of Artificial Sequence: Synthetic oligonucleotide
  Antisense strand to SEQ ID NO: 948836
ucugacccauagauucagg

SEQ ID NO: 948838 - RNA, 19 nt, Artificial Sequence
  Description of Artificial Sequence: Synthetic oligonucleotide
  Sense strand starting at position 2180 of SEQ ID NO: 913722
ggagaacuuaguggcacaa

SEQ ID NO: 948839 - RNA, 19 nt, Artificial Sequence
  Description of Artificial Sequence: Synthetic oligonucleotide
  Antisense strand to SEQ ID NO: 948838
uugugccacuaaguucucc

SEQ ID NO: 948840 - RNA, 19 nt, Artificial Sequence
  Description of Artificial Sequence: Synthetic oligonucleotide
  Sense strand starting at position 2377 of SEQ ID NO: 913722
ggugaaaccuuucuccaaa

SEQ ID NO: 948841 - RNA, 19 nt, Artificial Sequence
  Description of Artificial Sequence: Synthetic oligonucleotide
  Antisense strand to SEQ ID NO: 948840
uuuggagaaagguuucacc

SEQ ID NO: 948842 - RNA, 19 nt, Artificial Sequence
  Description of Artificial Sequence: Synthetic oligonucleotide
  Sense strand starting at position 2378 of SEQ ID NO: 913722
gugaaaccuuucuccaaag

SEQ ID NO: 948843 - RNA, 19 nt, Artificial Sequence
  Description of Artificial Sequence: Synthetic oligonucleotide
  Antisense strand to SEQ ID NO: 948842
cuuuggagaaagguuucac

SEQ ID NO: 948844 - RNA, 19 nt, Artificial Sequence
  Description of Artificial Sequence: Synthetic oligonucleotide
  Sense strand starting at position 3956 of SEQ ID NO: 913722
guguuugacaaagaguuua

SEQ ID NO: 948845 - RNA, 19 nt, Artificial Sequence
  Description of Artificial Sequence: Synthetic oligonucleotide
  Antisense strand to SEQ ID NO: 948844
uaaacucuuugucaaacac

SEQ ID NO: 948846 - RNA, 19 nt, Artificial Sequence
  Description of Artificial Sequence: Synthetic oligonucleotide
  Sense strand starting at position 1699 of SEQ ID NO: 913722
agccaaagaugcuuagaag

SEQ ID NO: 948847 - RNA, 19 nt, Artificial Sequence
  Description of Artificial Sequence: Synthetic oligonucleotide
  Antisense strand to SEQ ID NO: 948846
cuucuaagcaucuuuggcu

SEQ ID NO: 948848 - RNA, 19 nt, Artificial Sequence
  Description of Artificial Sequence: Synthetic oligonucleotide
  Sense strand starting at position 2570 of SEQ ID NO: 913722
ggcucacgacuauaaaucu

SEQ ID NO: 948849 - RNA, 19 nt, Artificial Sequence
  Description of Artificial Sequence: Synthetic oligonucleotide
  Antisense strand to SEQ ID NO: 948848
agauuuauagucgugagcc

SEQ ID NO: 948850 - RNA, 19 nt, Artificial Sequence
  Description of Artificial Sequence: Synthetic oligonucleotide
  Sense strand starting at position 1260 of SEQ ID NO: 913722
gaacucacuuguucuggaa

SEQ ID NO: 948851 - RNA, 19 nt, Artificial Sequence
  Description of Artificial Sequence: Synthetic oligonucleotide
  Antisense strand to SEQ ID NO: 948850
uuccagaacaagugaguuc

SEQ ID NO: 948852 - RNA, 19 nt, Artificial Sequence
  Description of Artificial Sequence: Synthetic oligonucleotide
  Sense strand starting at position 1067 of SEQ ID NO: 913722
ucaugugcuuauuugagca

SEQ ID NO: 948853 - RNA, 19 nt, Artificial Sequence
  Description of Artificial Sequence: Synthetic oligonucleotide
  Antisense strand to SEQ ID NO: 948852
ugcucaaauaagcacauga

SEQ ID NO: 948854 - RNA, 19 nt, Artificial Sequence
  Description of Artificial Sequence: Synthetic oligonucleotide
  Sense strand starting at position 2521 of SEQ ID NO: 913722
acaguaguaucaccauaca

SEQ ID NO: 948855 - RNA, 19 nt, Artificial Sequence
  Description of Artificial Sequence: Synthetic oligonucleotide
  Antisense strand to SEQ ID NO: 948854
uguauggugauacuacugu

SEQ ID NO: 948856 - RNA, 19 nt, Artificial Sequence
  Description of Artificial Sequence: Synthetic oligonucleotide
  Sense strand starting at position 3976 of SEQ ID NO: 913722
aaucuaucuggccagaugu

SEQ ID NO: 948857 - RNA, 19 nt, Artificial Sequence
  Description of Artificial Sequence: Synthetic oligonucleotide
  Antisense strand to SEQ ID NO: 948856
acaucuggccagauagauu

SEQ ID NO: 948858 - RNA, 19 nt, Artificial Sequence
  Description of Artificial Sequence: Synthetic oligonucleotide
  Sense strand starting at position 1868 of SEQ ID NO: 913722
uggaguucucgugaggaca

SEQ ID NO: 948859 - RNA, 19 nt, Artificial Sequence
  Description of Artificial Sequence: Synthetic oligonucleotide
  Antisense strand to SEQ ID NO: 948858
uguccucacgagaacucca

SEQ ID NO: 948860 - RNA, 19 nt, Artificial Sequence
  Description of Artificial Sequence: Synthetic oligonucleotide
  Sense strand starting at position 2042 of SEQ ID NO: 913722
ugcaaucaauuagucagaa

SEQ ID NO: 948861 - RNA, 19 nt, Artificial Sequence
  Description of Artificial Sequence: Synthetic oligonucleotide
  Antisense strand to SEQ ID NO: 948860
uucugacuaauugauugca

SEQ ID NO: 948862 - RNA, 19 nt, Artificial Sequence
  Description of Artificial Sequence: Synthetic oligonucleotide
  Sense strand starting at position 2043 of SEQ ID NO: 913722
gcaaucaauuagucagaau

SEQ ID NO: 948863 - RNA, 19 nt, Artificial Sequence
  Description of Artificial Sequence: Synthetic oligonucleotide
  Antisense strand to SEQ ID NO: 948862
auucugacuaauugauugc

SEQ ID NO: 948864 - RNA, 19 nt, Artificial Sequence
  Description of Artificial Sequence: Synthetic oligonucleotide
  Sense strand starting at position 889 of SEQ ID NO: 913722
gccuaugaauucuuacaga

SEQ ID NO: 948865 - RNA, 19 nt, Artificial Sequence
  Description of Artificial Sequence: Synthetic oligonucleotide
  Antisense strand to SEQ ID NO: 948864
ucuguaagaauucauaggc

SEQ ID NO: 948866 - RNA, 19 nt, Artificial Sequence
  Description of Artificial Sequence: Synthetic oligonucleotide
  Sense strand starting at position 3978 of SEQ ID NO: 913722
ucuaucuggccagauguga

SEQ ID NO: 948867 - RNA, 19 nt, Artificial Sequence
  Description of Artificial Sequence: Synthetic oligonucleotide
  Antisense strand to SEQ ID NO: 948866
ucacaucuggccagauaga

SEQ ID NO: 948868 - RNA, 19 nt, Artificial Sequence
  Description of Artificial Sequence: Synthetic oligonucleotide
  Sense strand starting at position 3837 of SEQ ID NO: 913722
gucuauacuuuaucugaag

SEQ ID NO: 948869 - RNA, 19 nt, Artificial Sequence
  Description of Artificial Sequence: Synthetic oligonucleotide
  Antisense strand to SEQ ID NO: 948868
cuucagauaaaguauagac

SEQ ID NO: 948870 - RNA, 19 nt, Artificial Sequence
  Description of Artificial Sequence: Synthetic oligonucleotide
  Sense strand starting at position 3899 of SEQ ID NO: 913722
aaguaaguauuugauagga

SEQ ID NO: 948871 - RNA, 19 nt, Artificial Sequence
  Description of Artificial Sequence: Synthetic oligonucleotide
  Antisense strand to SEQ ID NO: 948870
uccuaucaaauacuuacuu

SEQ ID NO: 948872 - RNA, 19 nt, Artificial Sequence
  Description of Artificial Sequence: Synthetic oligonucleotide
  Sense strand starting at position 1871 of SEQ ID NO: 913722
aguucucgugaggacaauu

SEQ ID NO: 948873 - RNA, 19 nt, Artificial Sequence
  Description of Artificial Sequence: Synthetic oligonucleotide
  Antisense strand to SEQ ID NO: 948872
aauuguccucacgagaacu

SEQ ID NO: 948874 - RNA, 19 nt, Artificial Sequence
  Description of Artificial Sequence: Synthetic oligonucleotide
  Sense strand starting at position 2568 of SEQ ID NO: 913722
guggcucacgacuauaaau

SEQ ID NO: 948875 - RNA, 19 nt, Artificial Sequence
  Description of Artificial Sequence: Synthetic oligonucleotide
  Antisense strand to SEQ ID NO: 948874
auuuauagucgugagccac

SEQ ID NO: 948876 - RNA, 19 nt, Artificial Sequence
  Description of Artificial Sequence: Synthetic oligonucleotide
  Sense strand starting at position 3901 of SEQ ID NO: 913722
guaaguauuugauaggaau

SEQ ID NO: 948877 - RNA, 19 nt, Artificial Sequence
  Description of Artificial Sequence: Synthetic oligonucleotide
  Antisense strand to SEQ ID NO: 948876
auuccuaucaaauacuuac

SEQ ID NO: 948878 - RNA, 19 nt, Artificial Sequence
  Description of Artificial Sequence: Synthetic oligonucleotide
  Sense strand starting at position 3376 of SEQ ID NO: 913722
guauguaauuaagcacaua

SEQ ID NO: 948879 - RNA, 19 nt, Artificial Sequence
  Description of Artificial Sequence: Synthetic oligonucleotide
  Antisense strand to SEQ ID NO: 948878
uaugugcuuaauuacauac

SEQ ID NO: 948880 - RNA, 19 nt, Artificial Sequence
  Description of Artificial Sequence: Synthetic oligonucleotide
  Sense strand starting at position 777 of SEQ ID NO: 913722
gguugagaguuccugaucu

SEQ ID NO: 948881 - RNA, 19 nt, Artificial Sequence
  Description of Artificial Sequence: Synthetic oligonucleotide
  Antisense strand to SEQ ID NO: 948880
agaucaggaacucucaacc

SEQ ID NO: 948882 - RNA, 19 nt, Artificial Sequence
  Description of Artificial Sequence: Synthetic oligonucleotide
  Sense strand starting at position 704 of SEQ ID NO: 913722
auacaagguuucuuguauu

SEQ ID NO: 948883 - RNA, 19 nt, Artificial Sequence
  Description of Artificial Sequence: Synthetic oligonucleotide
  Antisense strand to SEQ ID NO: 948882
aauacaagaaaccuuguau

SEQ ID NO: 948884 - RNA, 19 nt, Artificial Sequence
  Description of Artificial Sequence: Synthetic oligonucleotide
  Sense strand starting at position 3943 of SEQ ID NO: 913722
gcaauacaagaauguguuu

SEQ ID NO: 948885 - RNA, 19 nt, Artificial Sequence
  Description of Artificial Sequence: Synthetic oligonucleotide
  Antisense strand to SEQ ID NO: 948884
aaacacauucuuguauugc

SEQ ID NO: 948886 - RNA, 19 nt, Artificial Sequence
  Description of Artificial Sequence: Synthetic oligonucleotide
  Sense strand starting at position 3364 of SEQ ID NO: 913722
ugucauacuuaaguaugua

SEQ ID NO: 948887 - RNA, 19 nt, Artificial Sequence
  Description of Artificial Sequence: Synthetic oligonucleotide
  Antisense strand to SEQ ID NO: 948886
uacauacuuaaguaugaca

SEQ ID NO: 948888 - RNA, 19 nt, Artificial Sequence
  Description of Artificial Sequence: Synthetic oligonucleotide
  Sense strand starting at position 3346 of SEQ ID NO: 913722
aagagcacucuguggaguu

SEQ ID NO: 948889 - RNA, 19 nt, Artificial Sequence
  Description of Artificial Sequence: Synthetic oligonucleotide
  Antisense strand to SEQ ID NO: 948888
aacuccacagagugcucuu

SEQ ID NO: 948890 - RNA, 19 nt, Artificial Sequence
  Description of Artificial Sequence: Synthetic oligonucleotide
  Sense strand starting at position 3442 of SEQ ID NO: 913722
ugacaauaguugucucuuu

SEQ ID NO: 948891 - RNA, 19 nt, Artificial Sequence
  Description of Artificial Sequence: Synthetic oligonucleotide
  Antisense strand to SEQ ID NO: 948890
aaagagacaacuauuguca

SEQ ID NO: 948892 - RNA, 19 nt, Artificial Sequence
  Description of Artificial Sequence: Synthetic oligonucleotide
  Sense strand starting at position 2350 of SEQ ID NO: 913722
ucaacugauuaagaugaaa

SEQ ID NO: 948893 - RNA, 19 nt, Artificial Sequence
  Description of Artificial Sequence: Synthetic oligonucleotide
  Antisense strand to SEQ ID NO: 948892
uuucaucuuaaucaguuga

SEQ ID NO: 948894 - RNA, 19 nt, Artificial Sequence
  Description of Artificial Sequence: Synthetic oligonucleotide
  Sense strand starting at position 686 of SEQ ID NO: 913722
acauuauucugagaaagaa

SEQ ID NO: 948895 - RNA, 19 nt, Artificial Sequence
  Description of Artificial Sequence: Synthetic oligonucleotide
  Antisense strand to SEQ ID NO: 948894
uucuuucucagaauaaugu

SEQ ID NO: 948896 - RNA, 19 nt, Artificial Sequence
  Description of Artificial Sequence: Synthetic oligonucleotide
  Sense strand starting at position 987 of SEQ ID NO: 913722
aguaucuucuguguauaag

SEQ ID NO: 948897 - RNA, 19 nt, Artificial Sequence
  Description of Artificial Sequence: Synthetic oligonucleotide
  Antisense strand to SEQ ID NO: 948896
cuuauacacagaagauacu

SEQ ID NO: 948898 - RNA, 19 nt, Artificial Sequence
  Description of Artificial Sequence: Synthetic oligonucleotide
  Sense strand starting at position 985 of SEQ ID NO: 913722
agaguaucuucuguguaua

SEQ ID NO: 948899 - RNA, 19 nt, Artificial Sequence
  Description of Artificial Sequence: Synthetic oligonucleotide
  Antisense strand to SEQ ID NO: 948898
uauacacagaagauacucu

SEQ ID NO: 948900 - RNA, 19 nt, Artificial Sequence
  Description of Artificial Sequence: Synthetic oligonucleotide
  Sense strand starting at position 2614 of SEQ ID NO: 913723
ggaaucacugcuggagaga

SEQ ID NO: 948901 - RNA, 19 nt, Artificial Sequence
  Description of Artificial Sequence: Synthetic oligonucleotide
  Antisense strand to SEQ ID NO: 948900
ucucuccagcagugauucc

SEQ ID NO: 948902 - RNA, 19 nt, Artificial Sequence
  Description of Artificial Sequence: Synthetic oligonucleotide
  Sense strand starting at position 2148 of SEQ ID NO: 913723
gcuugacuacuugagaauu

SEQ ID NO: 948903 - RNA, 19 nt, Artificial Sequence
  Description of Artificial Sequence: Synthetic oligonucleotide
  Antisense strand to SEQ ID NO: 948902
aauucucaaguagucaagc

SEQ ID NO: 948904 - RNA, 19 nt, Artificial Sequence
  Description of Artificial Sequence: Synthetic oligonucleotide
  Sense strand starting at position 1559 of SEQ ID NO: 913723
cccgcuuccgcauccaaua

SEQ ID NO: 948905 - RNA, 19 nt, Artificial Sequence
  Description of Artificial Sequence: Synthetic oligonucleotide
  Antisense strand to SEQ ID NO: 948904
uauuggaugcggaagcggg

SEQ ID NO: 948906 - RNA, 19 nt, Artificial Sequence
  Description of Artificial Sequence: Synthetic oligonucleotide
  Sense strand starting at position 702 of SEQ ID NO: 913723
agcagaaagcauugaagga

SEQ ID NO: 948907 - RNA, 19 nt, Artificial Sequence
  Description of Artificial Sequence: Synthetic oligonucleotide
  Antisense strand to SEQ ID NO: 948906
uccuucaaugcuuucugcu

SEQ ID NO: 948908 - RNA, 19 nt, Artificial Sequence
  Description of Artificial Sequence: Synthetic oligonucleotide
  Sense strand starting at position 586 of SEQ ID NO: 913723
ucaaguuugagaugagauc

SEQ ID NO: 948909 - RNA, 19 nt, Artificial Sequence
  Description of Artificial Sequence: Synthetic oligonucleotide
  Antisense strand to SEQ ID NO: 948908
gaucucaucucaaacuuga

SEQ ID NO: 948910 - RNA, 19 nt, Artificial Sequence
  Description of Artificial Sequence: Synthetic oligonucleotide
  Sense strand starting at position 3519 of SEQ ID NO: 913723
agguuacgugaucacaaag

SEQ ID NO: 948911 - RNA, 19 nt, Artificial Sequence
  Description of Artificial Sequence: Synthetic oligonucleotide
  Antisense strand to SEQ ID NO: 948910
cuuugugaucacguaaccu

SEQ ID NO: 948912 - RNA, 19 nt, Artificial Sequence
  Description of Artificial Sequence: Synthetic oligonucleotide
  Sense strand starting at position 597 of SEQ ID NO: 913723
augagaucugcucaucuca

SEQ ID NO: 948913 - RNA, 19 nt, Artificial Sequence
  Description of Artificial Sequence: Synthetic oligonucleotide
  Antisense strand to SEQ ID NO: 948912
ugagaugagcagaucucau

SEQ ID NO: 948914 - RNA, 19 nt, Artificial Sequence
  Description of Artificial Sequence: Synthetic oligonucleotide
  Sense strand starting at position 3557 of SEQ ID NO: 913723
gggucaauccuggaaguuu

SEQ ID NO: 948915 - RNA, 19 nt, Artificial Sequence
  Description of Artificial Sequence: Synthetic oligonucleotide
  Antisense strand to SEQ ID NO: 948914
aaacuuccaggauugaccc

SEQ ID NO: 948916 - RNA, 19 nt, Artificial Sequence
  Description of Artificial Sequence: Synthetic oligonucleotide
  Sense strand starting at position 1006 of SEQ ID NO: 913723
ccaugaauaguguaccauu

SEQ ID NO: 948917 - RNA, 19 nt, Artificial Sequence
  Description of Artificial Sequence: Synthetic oligonucleotide
  Antisense strand to SEQ ID NO: 948916
aaugguacacuauucaugg

SEQ ID NO: 948918 - RNA, 19 nt, Artificial Sequence
  Description of Artificial Sequence: Synthetic oligonucleotide
  Sense strand starting at position 886 of SEQ ID NO: 913723
uuuagcugccuggaaagaa

SEQ ID NO: 948919 - RNA, 19 nt, Artificial Sequence
  Description of Artificial Sequence: Synthetic oligonucleotide
  Antisense strand to SEQ ID NO: 948918
uucuuuccaggcagcuaaa

SEQ ID NO: 948920 - RNA, 19 nt, Artificial Sequence
  Description of Artificial Sequence: Synthetic oligonucleotide
  Sense strand starting at position 2072 of SEQ ID NO: 913723
acacuugauugucuaauag

SEQ ID NO: 948921 - RNA, 19 nt, Artificial Sequence
  Description of Artificial Sequence: Synthetic oligonucleotide
  Antisense strand to SEQ ID NO: 948920
cuauuagacaaucaagugu

SEQ ID NO: 948922 - RNA, 19 nt, Artificial Sequence
  Description of Artificial Sequence: Synthetic oligonucleotide
  Sense strand starting at position 689 of SEQ ID NO: 913723
ggagucauggcacagcaga

SEQ ID NO: 948923 - RNA, 19 nt, Artificial Sequence
  Description of Artificial Sequence: Synthetic oligonucleotide
  Antisense strand to SEQ ID NO: 948922
ucugcugugccaugacucc

SEQ ID NO: 948924 - RNA, 19 nt, Artificial Sequence
  Description of Artificial Sequence: Synthetic oligonucleotide
  Sense strand starting at position 593 of SEQ ID NO: 913723
ugagaugagaucugcucau

SEQ ID NO: 948925 - RNA, 19 nt, Artificial Sequence
  Description of Artificial Sequence: Synthetic oligonucleotide
  Antisense strand to SEQ ID NO: 948924
augagcagaucucaucuca

SEQ ID NO: 948926 - RNA, 19 nt, Artificial Sequence
  Description of Artificial Sequence: Synthetic oligonucleotide
  Sense strand starting at position 2146 of SEQ ID NO: 913723
uugcuugacuacuugagaa

SEQ ID NO: 948927 - RNA, 19 nt, Artificial Sequence
  Description of Artificial Sequence: Synthetic oligonucleotide
  Antisense strand to SEQ ID NO: 948926
uucucaaguagucaagcaa

SEQ ID NO: 948928 - RNA, 19 nt, Artificial Sequence
  Description of Artificial Sequence: Synthetic oligonucleotide
  Sense strand starting at position 3518 of SEQ ID NO: 913723
aagguuacgugaucacaaa

SEQ ID NO: 948929 - RNA, 19 nt, Artificial Sequence
  Description of Artificial Sequence: Synthetic oligonucleotide
  Antisense strand to SEQ ID NO: 948928
uuugugaucacguaaccuu

SEQ ID NO: 948930 - RNA, 19 nt, Artificial Sequence
  Description of Artificial Sequence: Synthetic oligonucleotide
  Sense strand starting at position 968 of SEQ ID NO: 913723
agacaaguucccugagcaa

SEQ ID NO: 948931 - RNA, 19 nt, Artificial Sequence
  Description of Artificial Sequence: Synthetic oligonucleotide
  Antisense strand to SEQ ID NO: 948930
uugcucagggaacuugucu

SEQ ID NO: 948932 - RNA, 19 nt, Artificial Sequence
  Description of Artificial Sequence: Synthetic oligonucleotide
  Sense strand starting at position 806 of SEQ ID NO: 913723
ucaucugcacuuugagaga

SEQ ID NO: 948933 - RNA, 19 nt, Artificial Sequence
  Description of Artificial Sequence: Synthetic oligonucleotide
  Antisense strand to SEQ ID NO: 948932
ucucucaaagugcagauga

SEQ ID NO: 948934 - RNA, 19 nt, Artificial Sequence
  Description of Artificial Sequence: Synthetic oligonucleotide
  Sense strand starting at position 3514 of SEQ ID NO: 913723
cagaaagguuacgugauca

SEQ ID NO: 948935 - RNA, 19 nt, Artificial Sequence
  Description of Artificial Sequence: Synthetic oligonucleotide
  Antisense strand to SEQ ID NO: 948934
ugaucacguaaccuuucug

SEQ ID NO: 948936 - RNA, 19 nt, Artificial Sequence
  Description of Artificial Sequence: Synthetic oligonucleotide
  Sense strand starting at position 811 of SEQ ID NO: 913723
ugcacuuugagagaugcuu

SEQ ID NO: 948937 - RNA, 19 nt, Artificial Sequence
  Description of Artificial Sequence: Synthetic oligonucleotide
  Antisense strand to SEQ ID NO: 948936
aagcaucucucaaagugca

SEQ ID NO: 948938 - RNA, 19 nt, Artificial Sequence
  Description of Artificial Sequence: Synthetic oligonucleotide
  Sense strand starting at position 2470 of SEQ ID NO: 913723
acuaauagcccaugguuaa

SEQ ID NO: 948939 - RNA, 19 nt, Artificial Sequence
  Description of Artificial Sequence: Synthetic oligonucleotide
  Antisense strand to SEQ ID NO: 948938
uuaaccaugggcuauuagu

SEQ ID NO: 948940 - RNA, 19 nt, Artificial Sequence
  Description of Artificial Sequence: Synthetic oligonucleotide
  Sense strand starting at position 967 of SEQ ID NO: 913723
uagacaaguucccugagca

SEQ ID NO: 948941 - RNA, 19 nt, Artificial Sequence
  Description of Artificial Sequence: Synthetic oligonucleotide
  Antisense strand to SEQ ID NO: 948940
ugcucagggaacuugucua

SEQ ID NO: 948942 - RNA, 19 nt, Artificial Sequence
  Description of Artificial Sequence: Synthetic oligonucleotide
  Sense strand starting at position 2677 of SEQ ID NO: 913723
gacucacgccuguaacaau

SEQ ID NO: 948943 - RNA, 19 nt, Artificial Sequence
  Description of Artificial Sequence: Synthetic oligonucleotide
  Antisense strand to SEQ ID NO: 948942
auuguuacaggcgugaguc

SEQ ID NO: 948944 - RNA, 19 nt, Artificial Sequence
  Description of Artificial Sequence: Synthetic oligonucleotide
  Sense strand starting at position 2602 of SEQ ID NO: 913723
cagugcucacugggaauca

SEQ ID NO: 948945 - RNA, 19 nt, Artificial Sequence
  Description of Artificial Sequence: Synthetic oligonucleotide
  Antisense strand to SEQ ID NO: 948944
ugauucccagugagcacug

SEQ ID NO: 948946 - RNA, 19 nt, Artificial Sequence
  Description of Artificial Sequence: Synthetic oligonucleotide
  Sense strand starting at position 2600 of SEQ ID NO: 913723
accagugcucacugggaau

SEQ ID NO: 948947 - RNA, 19 nt, Artificial Sequence
  Description of Artificial Sequence: Synthetic oligonucleotide
  Antisense strand to SEQ ID NO: 948946
auucccagugagcacuggu

SEQ ID NO: 948948 - RNA, 19 nt, Artificial Sequence
  Description of Artificial Sequence: Synthetic oligonucleotide
  Sense strand starting at position 3232 of SEQ ID NO: 913723
aaugcagucguggaaucau

SEQ ID NO: 948949 - RNA, 19 nt, Artificial Sequence
  Description of Artificial Sequence: Synthetic oligonucleotide
  Antisense strand to SEQ ID NO: 948948
augauuccacgacugcauu

SEQ ID NO: 948950 - RNA, 19 nt, Artificial Sequence
  Description of Artificial Sequence: Synthetic oligonucleotide
  Sense strand starting at position 2246 of SEQ ID NO: 913723
ugcgaaguugggcacuaaa

SEQ ID NO: 948951 - RNA, 19 nt, Artificial Sequence
  Description of Artificial Sequence: Synthetic oligonucleotide
  Antisense strand to SEQ ID NO: 948950
uuuagugcccaacuucgca

SEQ ID NO: 948952 - RNA, 19 nt, Artificial Sequence
  Description of Artificial Sequence: Synthetic oligonucleotide
  Sense strand starting at position 1014 of SEQ ID NO: 913723
aguguaccauuggcaaaua

SEQ ID NO: 948953 - RNA, 19 nt, Artificial Sequence
  Description of Artificial Sequence: Synthetic oligonucleotide
  Antisense strand to SEQ ID NO: 948952
uauuugccaaugguacacu

SEQ ID NO: 948954 - RNA, 19 nt, Artificial Sequence
  Description of Artificial Sequence: Synthetic oligonucleotide
  Sense strand starting at position 1683 of SEQ ID NO: 913723
auaugcucccaguaucuuu

SEQ ID NO: 948955 - RNA, 19 nt, Artificial Sequence
  Description of Artificial Sequence: Synthetic oligonucleotide
  Antisense strand to SEQ ID NO: 948954
aaagauacugggagcauau

SEQ ID NO: 948956 - RNA, 19 nt, Artificial Sequence
  Description of Artificial Sequence: Synthetic oligonucleotide
  Sense strand starting at position 2401 of SEQ ID NO: 913723
uguccuggucaaugggauu

SEQ ID NO: 948957 - RNA, 19 nt, Artificial Sequence
  Description of Artificial Sequence: Synthetic oligonucleotide
  Antisense strand to SEQ ID NO: 948956
aaucccauugaccaggaca

SEQ ID NO: 948958 - RNA, 19 nt, Artificial Sequence
  Description of Artificial Sequence: Synthetic oligonucleotide
  Sense strand starting at position 725 of SEQ ID NO: 913723
ucagccaacuuggauuuaa

SEQ ID NO: 948959 - RNA, 19 nt, Artificial Sequence
  Description of Artificial Sequence: Synthetic oligonucleotide
  Antisense strand to SEQ ID NO: 948958
uuaaauccaaguuggcuga

SEQ ID NO: 948960 - RNA, 19 nt, Artificial Sequence
  Description of Artificial Sequence: Synthetic oligonucleotide
  Sense strand starting at position 1491 of SEQ ID NO: 913723
ggccuuuccgagcaaacau

SEQ ID NO: 948961 - RNA, 19 nt, Artificial Sequence
  Description of Artificial Sequence: Synthetic oligonucleotide
  Antisense strand to SEQ ID NO: 948960
auguuugcucggaaaggcc

SEQ ID NO: 948962 - RNA, 19 nt, Artificial Sequence
  Description of Artificial Sequence: Synthetic oligonucleotide
  Sense strand starting at position 2442 of SEQ ID NO: 913723
uuccauuugugacagauca

SEQ ID NO: 948963 - RNA, 19 nt, Artificial Sequence
  Description of Artificial Sequence: Synthetic oligonucleotide
  Antisense strand to SEQ ID NO: 948962
ugaucugucacaaauggaa

SEQ ID NO: 948964 - RNA, 19 nt, Artificial Sequence
  Description of Artificial Sequence: Synthetic oligonucleotide
  Sense strand starting at position 1592 of SEQ ID NO: 913723
ccgagugaaguguaagguu

SEQ ID NO: 948965 - RNA, 19 nt, Artificial Sequence
  Description of Artificial Sequence: Synthetic oligonucleotide
  Antisense strand to SEQ ID NO: 948964
aaccuuacacuucacucgg

SEQ ID NO: 948966 - RNA, 19 nt, Artificial Sequence
  Description of Artificial Sequence: Synthetic oligonucleotide
  Sense strand starting at position 1586 of SEQ ID NO: 913723
gaaguuccgagugaagugu

SEQ ID NO: 948967 - RNA, 19 nt, Artificial Sequence
  Description of Artificial Sequence: Synthetic oligonucleotide
  Antisense strand to SEQ ID NO: 948966
acacuucacucggaacuuc

SEQ ID NO: 948968 - RNA, 19 nt, Artificial Sequence
  Description of Artificial Sequence: Synthetic oligonucleotide
  Sense strand starting at position 1585 of SEQ ID NO: 913723
ggaaguuccgagugaagug

SEQ ID NO: 948969 - RNA, 19 nt, Artificial Sequence
  Description of Artificial Sequence: Synthetic oligonucleotide
  Antisense strand to SEQ ID NO: 948968
cacuucacucggaacuucc

SEQ ID NO: 948970 - RNA, 19 nt, Artificial Sequence
  Description of Artificial Sequence: Synthetic oligonucleotide
  Sense strand starting at position 2068 of SEQ ID NO: 913723
gcacacacuugauugucua

SEQ ID NO: 948971 - RNA, 19 nt, Artificial Sequence
  Description of Artificial Sequence: Synthetic oligonucleotide
  Antisense strand to SEQ ID NO: 948970
uagacaaucaagugugugc

SEQ ID NO: 948972 - RNA, 19 nt, Artificial Sequence
  Description of Artificial Sequence: Synthetic oligonucleotide
  Sense strand starting at position 971 of SEQ ID NO: 913723
caaguucccugagcaaagu

SEQ ID NO: 948973 - RNA, 19 nt, Artificial Sequence
  Description of Artificial Sequence: Synthetic oligonucleotide
  Antisense strand to SEQ ID NO: 948972
acuuugcucagggaacuug

SEQ ID NO: 948974 - RNA, 19 nt, Artificial Sequence
  Description of Artificial Sequence: Synthetic oligonucleotide
  Sense strand starting at position 2440 of SEQ ID NO: 913723
ucuuccauuugugacagau

SEQ ID NO: 948975 - RNA, 19 nt, Artificial Sequence
  Description of Artificial Sequence: Synthetic oligonucleotide
  Antisense strand to SEQ ID NO: 948974
aucugucacaaauggaaga

SEQ ID NO: 948976 - RNA, 19 nt, Artificial Sequence
  Description of Artificial Sequence: Synthetic oligonucleotide
  Sense strand starting at position 3231 of SEQ ID NO: 913723
gaaugcagucguggaauca

SEQ ID NO: 948977 - RNA, 19 nt, Artificial Sequence
  Description of Artificial Sequence: Synthetic oligonucleotide
  Antisense strand to SEQ ID NO: 948976
ugauuccacgacugcauuc

SEQ ID NO: 948978 - RNA, 19 nt, Artificial Sequence
  Description of Artificial Sequence: Synthetic oligonucleotide
  Sense strand starting at position 797 of SEQ ID NO: 913723
ggacuucugucaucugcac

SEQ ID NO: 948979 - RNA, 19 nt, Artificial Sequence
  Description of Artificial Sequence: Synthetic oligonucleotide
  Antisense strand to SEQ ID NO: 948978
gugcagaugacagaagucc

SEQ ID NO: 948980 - RNA, 19 nt, Artificial Sequence
  Description of Artificial Sequence: Synthetic oligonucleotide
  Sense strand starting at position 1098 of SEQ ID NO: 913724
agagauuacgguggagaca

SEQ ID NO: 948981 - RNA, 19 nt, Artificial Sequence
  Description of Artificial Sequence: Synthetic oligonucleotide
  Antisense strand to SEQ ID NO: 948980
ugucuccaccguaaucucu

SEQ ID NO: 948982 - RNA, 19 nt, Artificial Sequence
  Description of Artificial Sequence: Synthetic oligonucleotide
  Sense strand starting at position 3604 of SEQ ID NO: 913724
gggcuaauugauuaggagu

SEQ ID NO: 948983 - RNA, 19 nt, Artificial Sequence
  Description of Artificial Sequence: Synthetic oligonucleotide
  Antisense strand to SEQ ID NO: 948982
acuccuaaucaauuagccc

SEQ ID NO: 948984 - RNA, 19 nt, Artificial Sequence
  Description of Artificial Sequence: Synthetic oligonucleotide
  Sense strand starting at position 2697 of SEQ ID NO: 913724
acaacucaugccgauuaaa

SEQ ID NO: 948985 - RNA, 19 nt, Artificial Sequence
  Description of Artificial Sequence: Synthetic oligonucleotide
  Antisense strand to SEQ ID NO: 948984
uuuaaucggcaugaguugu

SEQ ID NO: 948986 - RNA, 19 nt, Artificial Sequence
  Description of Artificial Sequence: Synthetic oligonucleotide
  Sense strand starting at position 3947 of SEQ ID NO: 913724
ucggauucucacuaaccau

SEQ ID NO: 948987 - RNA, 19 nt, Artificial Sequence
  Description of Artificial Sequence: Synthetic oligonucleotide
  Antisense strand to SEQ ID NO: 948986
augguuagugagaauccga

SEQ ID NO: 948988 - RNA, 19 nt, Artificial Sequence
  Description of Artificial Sequence: Synthetic oligonucleotide
  Sense strand starting at position 2799 of SEQ ID NO: 913724
guagguacuccauaaaccu

SEQ ID NO: 948989 - RNA, 19 nt, Artificial Sequence
  Description of Artificial Sequence: Synthetic oligonucleotide
  Antisense strand to SEQ ID NO: 948988
agguuuauggaguaccuac

SEQ ID NO: 948990 - RNA, 19 nt, Artificial Sequence
  Description of Artificial Sequence: Synthetic oligonucleotide
  Sense strand starting at position 868 of SEQ ID NO: 913724
guaauugagcuggaagagu

SEQ ID NO: 948991 - RNA, 19 nt, Artificial Sequence
  Description of Artificial Sequence: Synthetic oligonucleotide
  Antisense strand to SEQ ID NO: 948990
acucuuccagcucaauuac

SEQ ID NO: 948992 - RNA, 19 nt, Artificial Sequence
  Description of Artificial Sequence: Synthetic oligonucleotide
  Sense strand starting at position 867 of SEQ ID NO: 913724
gguaauugagcuggaagag

SEQ ID NO: 948993 - RNA, 19 nt, Artificial Sequence
  Description of Artificial Sequence: Synthetic oligonucleotide
  Antisense strand to SEQ ID NO: 948992
cucuuccagcucaauuacc

SEQ ID NO: 948994 - RNA, 19 nt, Artificial Sequence
  Description of Artificial Sequence: Synthetic oligonucleotide
  Sense strand starting at position 853 of SEQ ID NO: 913724
cgaauuugcuuggugguaa

SEQ ID NO: 948995 - RNA, 19 nt, Artificial Sequence
  Description of Artificial Sequence: Synthetic oligonucleotide
  Antisense strand to SEQ ID NO: 948994
uuaccaccaagcaaauucg

SEQ ID NO: 948996 - RNA, 19 nt, Artificial Sequence
  Description of Artificial Sequence: Synthetic oligonucleotide
  Sense strand starting at position 3221 of SEQ ID NO: 913724
cuagaauuagcccagccaa

SEQ ID NO: 948997 - RNA, 19 nt, Artificial Sequence
  Description of Artificial Sequence: Synthetic oligonucleotide
  Antisense strand to SEQ ID NO: 948996
uuggcugggcuaauucuag

SEQ ID NO: 948998 - RNA, 19 nt, Artificial Sequence
  Description of Artificial Sequence: Synthetic oligonucleotide
  Sense strand starting at position 866 of SEQ ID NO: 913724
ugguaauugagcuggaaga

SEQ ID NO: 948999 - RNA, 19 nt, Artificial Sequence
  Description of Artificial Sequence: Synthetic oligonucleotide
  Antisense strand to SEQ ID NO: 948998
ucuuccagcucaauuacca

SEQ ID NO: 949000 - RNA, 19 nt, Artificial Sequence
  Description of Artificial Sequence: Synthetic oligonucleotide
  Sense strand starting at position 2911 of SEQ ID NO: 913724
gccuuacucccaggaagaa

SEQ ID NO: 949001 - RNA, 19 nt, Artificial Sequence
  Description of Artificial Sequence: Synthetic oligonucleotide
  Antisense strand to SEQ ID NO: 949000
uucuuccugggaguaaggc

SEQ ID NO: 949002 - RNA, 19 nt, Artificial Sequence
  Description of Artificial Sequence: Synthetic oligonucleotide
  Sense strand starting at position 984 of SEQ ID NO: 913724
gaggaaccgucucugaaau

SEQ ID NO: 949003 - RNA, 19 nt, Artificial Sequence
  Description of Artificial Sequence: Synthetic oligonucleotide
  Antisense strand to SEQ ID NO: 949002
auuucagagacgguuccuc

SEQ ID NO: 949004 - RNA, 19 nt, Artificial Sequence
  Description of Artificial Sequence: Synthetic oligonucleotide
  Sense strand starting at position 3521 of SEQ ID NO: 913724
ucauuagccgcggugaguu

SEQ ID NO: 949005 - RNA, 19 nt, Artificial Sequence
  Description of Artificial Sequence: Synthetic oligonucleotide
  Antisense strand to SEQ ID NO: 949004
aacucaccgcggcuaauga

SEQ ID NO: 949006 - RNA, 19 nt, Artificial Sequence
  Description of Artificial Sequence: Synthetic oligonucleotide
  Sense strand starting at position 1083 of SEQ ID NO: 913724
gaagaagacucagaaagag

SEQ ID NO: 949007 - RNA, 19 nt, Artificial Sequence
  Description of Artificial Sequence: Synthetic oligonucleotide
  Antisense strand to SEQ ID NO: 949006
cucuuucugagucuucuuc

SEQ ID NO: 949008 - RNA, 19 nt, Artificial Sequence
  Description of Artificial Sequence: Synthetic oligonucleotide
  Sense strand starting at position 3797 of SEQ ID NO: 913724
gcucauuaacccggaagga

SEQ ID NO: 949009 - RNA, 19 nt, Artificial Sequence
  Description of Artificial Sequence: Synthetic oligonucleotide
  Antisense strand to SEQ ID NO: 949008
uccuuccggguuaaugagc

SEQ ID NO: 949010 - RNA, 19 nt, Artificial Sequence
  Description of Artificial Sequence: Synthetic oligonucleotide
  Sense strand starting at position 3596 of SEQ ID NO: 913724
ucguuaaugggcuaauuga

SEQ ID NO: 949011 - RNA, 19 nt, Artificial Sequence
  Description of Artificial Sequence: Synthetic oligonucleotide
  Antisense strand to SEQ ID NO: 949010
ucaauuagcccauuaacga

SEQ ID NO: 949012 - RNA, 19 nt, Artificial Sequence
  Description of Artificial Sequence: Synthetic oligonucleotide
  Sense strand starting at position 2566 of SEQ ID NO: 913724
agaccucaucccugucaca

SEQ ID NO: 949013 - RNA, 19 nt, Artificial Sequence
  Description of Artificial Sequence: Synthetic oligonucleotide
  Antisense strand to SEQ ID NO: 949012
ugugacagggaugaggucu

SEQ ID NO: 949014 - RNA, 19 nt, Artificial Sequence
  Description of Artificial Sequence: Synthetic oligonucleotide
  Sense strand starting at position 1024 of SEQ ID NO: 913724
gagugcuaaucauuccaag

SEQ ID NO: 949015 - RNA, 19 nt, Artificial Sequence
  Description of Artificial Sequence: Synthetic oligonucleotide
  Antisense strand to SEQ ID NO: 949014
cuuggaaugauuagcacuc

SEQ ID NO: 949016 - RNA, 19 nt, Artificial Sequence
  Description of Artificial Sequence: Synthetic oligonucleotide
  Sense strand starting at position 864 of SEQ ID NO: 913724
ggugguaauugagcuggaa

SEQ ID NO: 949017 - RNA, 19 nt, Artificial Sequence
  Description of Artificial Sequence: Synthetic oligonucleotide
  Antisense strand to SEQ ID NO: 949016
uuccagcucaauuaccacc

SEQ ID NO: 949018 - RNA, 19 nt, Artificial Sequence
  Description of Artificial Sequence: Synthetic oligonucleotide
  Sense strand starting at position 2888 of SEQ ID NO: 913724
uccgaacugcugcagaaau

SEQ ID NO: 949019 - RNA, 19 nt, Artificial Sequence
  Description of Artificial Sequence: Synthetic oligonucleotide
  Antisense strand to SEQ ID NO: 949018
auuucugcagcaguucgga

SEQ ID NO: 949020 - RNA, 19 nt, Artificial Sequence
  Description of Artificial Sequence: Synthetic oligonucleotide
  Sense strand starting at position 3210 of SEQ ID NO: 913724
uguuacccgagcuagaauu

SEQ ID NO: 949021 - RNA, 19 nt, Artificial Sequence
  Description of Artificial Sequence: Synthetic oligonucleotide
  Antisense strand to SEQ ID NO: 949020
aauucuagcucggguaaca

SEQ ID NO: 949022 - RNA, 19 nt, Artificial Sequence
  Description of Artificial Sequence: Synthetic oligonucleotide
  Sense strand starting at position 3937 of SEQ ID NO: 913724
gaaagaaucgucggauucu

SEQ ID NO: 949023 - RNA, 19 nt, Artificial Sequence
  Description of Artificial Sequence: Synthetic oligonucleotide
  Antisense strand to SEQ ID NO: 949022
agaauccgacgauucuuuc

SEQ ID NO: 949024 - RNA, 19 nt, Artificial Sequence
  Description of Artificial Sequence: Synthetic oligonucleotide
  Sense strand starting at position 3126 of SEQ ID NO: 913724
gugcucaguaaauagugau

SEQ ID NO: 949025 - RNA, 19 nt, Artificial Sequence
  Description of Artificial Sequence: Synthetic oligonucleotide
  Antisense strand to SEQ ID NO: 949024
aucacuauuuacugagcac

SEQ ID NO: 949026 - RNA, 19 nt, Artificial Sequence
  Description of Artificial Sequence: Synthetic oligonucleotide
  Sense strand starting at position 3267 of SEQ ID NO: 913724
ugcacaagcuuccuggaaa

SEQ ID NO: 949027 - RNA, 19 nt, Artificial Sequence
  Description of Artificial Sequence: Synthetic oligonucleotide
  Antisense strand to SEQ ID NO: 949026
uuuccaggaagcuugugca

SEQ ID NO: 949028 - RNA, 19 nt, Artificial Sequence
  Description of Artificial Sequence: Synthetic oligonucleotide
  Sense strand starting at position 3946 of SEQ ID NO: 913724
gucggauucucacuaacca

SEQ ID NO: 949029 - RNA, 19 nt, Artificial Sequence
  Description of Artificial Sequence: Synthetic oligonucleotide
  Antisense strand to SEQ ID NO: 949028
ugguuagugagaauccgac

SEQ ID NO: 949030 - RNA, 19 nt, Artificial Sequence
  Description of Artificial Sequence: Synthetic oligonucleotide
  Sense strand starting at position 1166 of SEQ ID NO: 913724
guaccagaugugcagugau

SEQ ID NO: 949031 - RNA, 19 nt, Artificial Sequence
  Description of Artificial Sequence: Synthetic oligonucleotide
  Antisense strand to SEQ ID NO: 949030
aucacugcacaucugguac

SEQ ID NO: 949032 - RNA, 19 nt, Artificial Sequence
  Description of Artificial Sequence: Synthetic oligonucleotide
  Sense strand starting at position 1015 of SEQ ID NO: 913724
aucaucuuggagugcuaau

SEQ ID NO: 949033 - RNA, 19 nt, Artificial Sequence
  Description of Artificial Sequence: Synthetic oligonucleotide
  Antisense strand to SEQ ID NO: 949032
auuagcacuccaagaugau

SEQ ID NO: 949034 - RNA, 19 nt, Artificial Sequence
  Description of Artificial Sequence: Synthetic oligonucleotide
  Sense strand starting at position 852 of SEQ ID NO: 913724
gcgaauuugcuugguggua

SEQ ID NO: 949035 - RNA, 19 nt, Artificial Sequence
  Description of Artificial Sequence: Synthetic oligonucleotide
  Antisense strand to SEQ ID NO: 949034
uaccaccaagcaaauucgc

SEQ ID NO: 949036 - RNA, 19 nt, Artificial Sequence
  Description of Artificial Sequence: Synthetic oligonucleotide
  Sense strand starting at position 3812 of SEQ ID NO: 913724
aggaccuggcgcugaaaua

SEQ ID NO: 949037 - RNA, 19 nt, Artificial Sequence
  Description of Artificial Sequence: Synthetic oligonucleotide
  Antisense strand to SEQ ID NO: 949036
uauuucagcgccagguccu

SEQ ID NO: 949038 - RNA, 19 nt, Artificial Sequence
  Description of Artificial Sequence: Synthetic oligonucleotide
  Sense strand starting at position 3196 of SEQ ID NO: 913724
auuccuagaucagcuguua

SEQ ID NO: 949039 - RNA, 19 nt, Artificial Sequence
  Description of Artificial Sequence: Synthetic oligonucleotide
  Antisense strand to SEQ ID NO: 949038
uaacagcugaucuaggaau

SEQ ID NO: 949040 - RNA, 19 nt, Artificial Sequence
  Description of Artificial Sequence: Synthetic oligonucleotide
  Sense strand starting at position 851 of SEQ ID NO: 913724
ggcgaauuugcuugguggu

SEQ ID NO: 949041 - RNA, 19 nt, Artificial Sequence
  Description of Artificial Sequence: Synthetic oligonucleotide
  Antisense strand to SEQ ID NO: 949040
accaccaagcaaauucgcc

SEQ ID NO: 949042 - RNA, 19 nt, Artificial Sequence
  Description of Artificial Sequence: Synthetic oligonucleotide
  Sense strand starting at position 1169 of SEQ ID NO: 913724
ccagaugugcagugauuga

SEQ ID NO: 949043 - RNA, 19 nt, Artificial Sequence
  Description of Artificial Sequence: Synthetic oligonucleotide
  Antisense strand to SEQ ID NO: 949042
ucaaucacugcacaucugg

SEQ ID NO: 949044 - RNA, 19 nt, Artificial Sequence
  Description of Artificial Sequence: Synthetic oligonucleotide
  Sense strand starting at position 2898 of SEQ ID NO: 913724
ugcagaaauagacgccuua

SEQ ID NO: 949045 - RNA, 19 nt, Artificial Sequence
  Description of Artificial Sequence: Synthetic oligonucleotide
  Antisense strand to SEQ ID NO: 949044
uaaggcgucuauuucugca

SEQ ID NO: 949046 - RNA, 19 nt, Artificial Sequence
  Description of Artificial Sequence: Synthetic oligonucleotide
  Sense strand starting at position 3031 of SEQ ID NO: 913724
cgguuucuuuauuccuaaa

SEQ ID NO: 949047 - RNA, 19 nt, Artificial Sequence
  Description of Artificial Sequence: Synthetic oligonucleotide
  Antisense strand to SEQ ID NO: 949046
uuuaggaauaaagaaaccg

SEQ ID NO: 949048 - RNA, 19 nt, Artificial Sequence
  Description of Artificial Sequence: Synthetic oligonucleotide
  Sense strand starting at position 879 of SEQ ID NO: 913724
ggaagaguuccucgagcuu

SEQ ID NO: 949049 - RNA, 19 nt, Artificial Sequence
  Description of Artificial Sequence: Synthetic oligonucleotide
  Antisense strand to SEQ ID NO: 949048
aagcucgaggaacucuucc

SEQ ID NO: 949050 - RNA, 19 nt, Artificial Sequence
  Description of Artificial Sequence: Synthetic oligonucleotide
  Sense strand starting at position 3122 of SEQ ID NO: 913724
cguggugcucaguaaauag

SEQ ID NO: 949051 - RNA, 19 nt, Artificial Sequence
  Description of Artificial Sequence: Synthetic oligonucleotide
  Antisense strand to SEQ ID NO: 949050
cuauuuacugagcaccacg

SEQ ID NO: 949052 - RNA, 19 nt, Artificial Sequence
  Description of Artificial Sequence: Synthetic oligonucleotide
  Sense strand starting at position 3778 of SEQ ID NO: 913724
agcuuuaaucaugguguca

SEQ ID NO: 949053 - RNA, 19 nt, Artificial Sequence
  Description of Artificial Sequence: Synthetic oligonucleotide
  Antisense strand to SEQ ID NO: 949052
ugacaccaugauuaaagcu

SEQ ID NO: 949054 - RNA, 19 nt, Artificial Sequence
  Description of Artificial Sequence: Synthetic oligonucleotide
  Sense strand starting at position 3030 of SEQ ID NO: 913724
ucgguuucuuuauuccuaa

SEQ ID NO: 949055 - RNA, 19 nt, Artificial Sequence
  Description of Artificial Sequence: Synthetic oligonucleotide
  Antisense strand to SEQ ID NO: 949054
uuaggaauaaagaaaccga

SEQ ID NO: 949056 - RNA, 19 nt, Artificial Sequence
  Description of Artificial Sequence: Synthetic oligonucleotide
  Sense strand starting at position 894 of SEQ ID NO: 913724
gcuuuauaggguggcauca

SEQ ID NO: 949057 - RNA, 19 nt, Artificial Sequence
  Description of Artificial Sequence: Synthetic oligonucleotide
  Antisense strand to SEQ ID NO: 949056
ugaugccacccuauaaagc

SEQ ID NO: 949058 - RNA, 19 nt, Artificial Sequence
  Description of Artificial Sequence: Synthetic oligonucleotide
  Sense strand starting at position 3119 of SEQ ID NO: 913724
caccguggugcucaguaaa

SEQ ID NO: 949059 - RNA, 19 nt, Artificial Sequence
  Description of Artificial Sequence: Synthetic oligonucleotide
  Antisense strand to SEQ ID NO: 949058
uuuacugagcaccacggug

SEQ ID NO: 949060 - RNA, 19 nt, Artificial Sequence
  Description of Artificial Sequence: Synthetic oligonucleotide
  Sense strand starting at position 3374 of SEQ ID NO: 913725
uggcguuuggagcugucua

SEQ ID NO: 949061 - RNA, 19 nt, Artificial Sequence
  Description of Artificial Sequence: Synthetic oligonucleotide
  Antisense strand to SEQ ID NO: 949060
uagacagcuccaaacgcca

SEQ ID NO: 949062 - RNA, 19 nt, Artificial Sequence
  Description of Artificial Sequence: Synthetic oligonucleotide
  Sense strand starting at position 3488 of SEQ ID NO: 913725
cagcgaaguccuuagagaa

SEQ ID NO: 949063 - RNA, 19 nt, Artificial Sequence
  Description of Artificial Sequence: Synthetic oligonucleotide
  Antisense strand to SEQ ID NO: 949062
uucucuaaggacuucgcug

SEQ ID NO: 949064 - RNA, 19 nt, Artificial Sequence
  Description of Artificial Sequence: Synthetic oligonucleotide
  Sense strand starting at position 3636 of SEQ ID NO: 913725
aaaucagaauuguuuguga

SEQ ID NO: 949065 - RNA, 19 nt, Artificial Sequence
  Description of Artificial Sequence: Synthetic oligonucleotide
  Antisense strand to SEQ ID NO: 949064
ucacaaacaauucugauuu

SEQ ID NO: 949066 - RNA, 19 nt, Artificial Sequence
  Description of Artificial Sequence: Synthetic oligonucleotide
  Sense strand starting at position 3379 of SEQ ID NO: 913725
uuuggagcugucuaacuaa

SEQ ID NO: 949067 - RNA, 19 nt, Artificial Sequence
  Description of Artificial Sequence: Synthetic oligonucleotide
  Antisense strand to SEQ ID NO: 949066
uuaguuagacagcuccaaa

SEQ ID NO: 949068 - RNA, 19 nt, Artificial Sequence
  Description of Artificial Sequence: Synthetic oligonucleotide
  Sense strand starting at position 3667 of SEQ ID NO: 913725
agagacagcuuucuuauca

SEQ ID NO: 949069 - RNA, 19 nt, Artificial Sequence
  Description of Artificial Sequence: Synthetic oligonucleotide
  Antisense strand to SEQ ID NO: 949068
ugauaagaaagcugucucu

SEQ ID NO: 949070 - RNA, 19 nt, Artificial Sequence
  Description of Artificial Sequence: Synthetic oligonucleotide
  Sense strand starting at position 3671 of SEQ ID NO: 913725
acagcuuucuuaucagaga

SEQ ID NO: 949071 - RNA, 19 nt, Artificial Sequence
  Description of Artificial Sequence: Synthetic oligonucleotide
  Antisense strand to SEQ ID NO: 949070
ucucugauaagaaagcugu

SEQ ID NO: 949072 - RNA, 19 nt, Artificial Sequence
  Description of Artificial Sequence: Synthetic oligonucleotide
  Sense strand starting at position 33 of SEQ ID NO: 913725
cgaaaucucugacccgaaa

SEQ ID NO: 949073 - RNA, 19 nt, Artificial Sequence
  Description of Artificial Sequence: Synthetic oligonucleotide
  Antisense strand to SEQ ID NO: 949072
uuucgggucagagauuucg

SEQ ID NO: 949074 - RNA, 19 nt, Artificial Sequence
  Description of Artificial Sequence: Synthetic oligonucleotide
  Sense strand starting at position 3529 of SEQ ID NO: 913725
ggcuuagugaaaggacauu

SEQ ID NO: 949075 - RNA, 19 nt, Artificial Sequence
  Description of Artificial Sequence: Synthetic oligonucleotide
  Antisense strand to SEQ ID NO: 949074
aauguccuuucacuaagcc

SEQ ID NO: 949076 - RNA, 19 nt, Artificial Sequence
  Description of Artificial Sequence: Synthetic oligonucleotide
  Sense strand starting at position 3668 of SEQ ID NO: 913725
gagacagcuuucuuaucag

SEQ ID NO: 949077 - RNA, 19 nt, Artificial Sequence
  Description of Artificial Sequence: Synthetic oligonucleotide
  Antisense strand to SEQ ID NO: 949076
cugauaagaaagcugucuc

SEQ ID NO: 949078 - RNA, 19 nt, Artificial Sequence
  Description of Artificial Sequence: Synthetic oligonucleotide
  Sense strand starting at position 22 of SEQ ID NO: 913725
aaacuaucggccgaaaucu

SEQ ID NO: 949079 - RNA, 19 nt, Artificial Sequence
  Description of Artificial Sequence: Synthetic oligonucleotide
  Antisense strand to SEQ ID NO: 949078
agauuucggccgauaguuu

SEQ ID NO: 949080 - RNA, 19 nt, Artificial Sequence
  Description of Artificial Sequence: Synthetic oligonucleotide
  Sense strand starting at position 3053 of SEQ ID NO: 913725
agggaauccagguguaagu

SEQ ID NO: 949081 - RNA, 19 nt, Artificial Sequence
  Description of Artificial Sequence: Synthetic oligonucleotide
  Antisense strand to SEQ ID NO: 949080
acuuacaccuggauucccu

SEQ ID NO: 949082 - RNA, 19 nt, Artificial Sequence
  Description of Artificial Sequence: Synthetic oligonucleotide
  Sense strand starting at position 3082 of SEQ ID NO: 913725
cgucuucggacucagaaau

SEQ ID NO: 949083 - RNA, 19 nt, Artificial Sequence
  Description of Artificial Sequence: Synthetic oligonucleotide
  Antisense strand to SEQ ID NO: 949082
auuucugaguccgaagacg

SEQ ID NO: 949084 - RNA, 19 nt, Artificial Sequence
  Description of Artificial Sequence: Synthetic oligonucleotide
  Sense strand starting at position 2379 of SEQ ID NO: 913725
gcgauugggcgcguacaau

SEQ ID NO: 949085 - RNA, 19 nt, Artificial Sequence
  Description of Artificial Sequence: Synthetic oligonucleotide
  Antisense strand to SEQ ID NO: 949084
auuguacgcgcccaaucgc

SEQ ID NO: 949086 - RNA, 19 nt, Artificial Sequence
  Description of Artificial Sequence: Synthetic oligonucleotide
  Sense strand starting at position 3601 of SEQ ID NO: 913725
gcagacauuuaagacucau

SEQ ID NO: 949087 - RNA, 19 nt, Artificial Sequence
  Description of Artificial Sequence: Synthetic oligonucleotide
  Antisense strand to SEQ ID NO: 949086
augagucuuaaaugucugc

SEQ ID NO: 949088 - RNA, 19 nt, Artificial Sequence
  Description of Artificial Sequence: Synthetic oligonucleotide
  Sense strand starting at position 3521 of SEQ ID NO: 913725
ugcagaacggcuuagugaa

SEQ ID NO: 949089 - RNA, 19 nt, Artificial Sequence
  Description of Artificial Sequence: Synthetic oligonucleotide
  Antisense strand to SEQ ID NO: 949088
uucacuaagccguucugca

SEQ ID NO: 949090 - RNA, 19 nt, Artificial Sequence
  Description of Artificial Sequence: Synthetic oligonucleotide
  Sense strand starting at position 2496 of SEQ ID NO: 913725
uuggcuucgggcuauaaga

SEQ ID NO: 949091 - RNA, 19 nt, Artificial Sequence
  Description of Artificial Sequence: Synthetic oligonucleotide
  Antisense strand to SEQ ID NO: 949090
ucuuauagcccgaagccaa

SEQ ID NO: 949092 - RNA, 19 nt, Artificial Sequence
  Description of Artificial Sequence: Synthetic oligonucleotide
  Sense strand starting at position 2522 of SEQ ID NO: 913725
cguuauuggcuuuauauag

SEQ ID NO: 949093 - RNA, 19 nt, Artificial Sequence
  Description of Artificial Sequence: Synthetic oligonucleotide
  Antisense strand to SEQ ID NO: 949092
cuauauaaagccaauaacg

SEQ ID NO: 949094 - RNA, 19 nt, Artificial Sequence
  Description of Artificial Sequence: Synthetic oligonucleotide
  Sense strand starting at position 2529 of SEQ ID NO: 913725
ggcuuuauauaguccaauu

SEQ ID NO: 949095 - RNA, 19 nt, Artificial Sequence
  Description of Artificial Sequence: Synthetic oligonucleotide
  Antisense strand to SEQ ID NO: 949094
aauuggacuauauaaagcc

SEQ ID NO: 949096 - RNA, 19 nt, Artificial Sequence
  Description of Artificial Sequence: Synthetic oligonucleotide
  Sense strand starting at position 3639 of SEQ ID NO: 913725
ucagaauuguuugugaggu

SEQ ID NO: 949097 - RNA, 19 nt, Artificial Sequence
  Description of Artificial Sequence: Synthetic oligonucleotide
  Antisense strand to SEQ ID NO: 949096
accucacaaacaauucuga

SEQ ID NO: 949098 - RNA, 19 nt, Artificial Sequence
  Description of Artificial Sequence: Synthetic oligonucleotide
  Sense strand starting at position 3910 of SEQ ID NO: 913725
ucucgacgggcauauguaa

SEQ ID NO: 949099 - RNA, 19 nt, Artificial Sequence
  Description of Artificial Sequence: Synthetic oligonucleotide
  Antisense strand to SEQ ID NO: 949098
uuacauaugcccgucgaga

SEQ ID NO: 949100 - RNA, 19 nt, Artificial Sequence
  Description of Artificial Sequence: Synthetic oligonucleotide
  Sense strand starting at position 3905 of SEQ ID NO: 913725
ccaaaucucgacgggcaua

SEQ ID NO: 949101 - RNA, 19 nt, Artificial Sequence
  Description of Artificial Sequence: Synthetic oligonucleotide
  Antisense strand to SEQ ID NO: 949100
uaugcccgucgagauuugg

SEQ ID NO: 949102 - RNA, 19 nt, Artificial Sequence
  Description of Artificial Sequence: Synthetic oligonucleotide
  Sense strand starting at position 3904 of SEQ ID NO: 913725
accaaaucucgacgggcau

SEQ ID NO: 949103 - RNA, 19 nt, Artificial Sequence
  Description of Artificial Sequence: Synthetic oligonucleotide
  Antisense strand to SEQ ID NO: 949102
augcccgucgagauuuggu

SEQ ID NO: 949104 - RNA, 19 nt, Artificial Sequence
  Description of Artificial Sequence: Synthetic oligonucleotide
  Sense strand starting at position 3789 of SEQ ID NO: 913725
uagauugagccucgccuaa

SEQ ID NO: 949105 - RNA, 19 nt, Artificial Sequence
  Description of Artificial Sequence: Synthetic oligonucleotide
  Antisense strand to SEQ ID NO: 949104
uuaggcgaggcucaaucua

SEQ ID NO: 949106 - RNA, 19 nt, Artificial Sequence
  Description of Artificial Sequence: Synthetic oligonucleotide
  Sense strand starting at position 3791 of SEQ ID NO: 913725
gauugagccucgccuaauu

SEQ ID NO: 949107 - RNA, 19 nt, Artificial Sequence
  Description of Artificial Sequence: Synthetic oligonucleotide
  Antisense strand to SEQ ID NO: 949106
aauuaggcgaggcucaauc

SEQ ID NO: 949108 - RNA, 19 nt, Artificial Sequence
  Description of Artificial Sequence: Synthetic oligonucleotide
  Sense strand starting at position 127 of SEQ ID NO: 913725
agggaugaauugcacgaaa

SEQ ID NO: 949109 - RNA, 19 nt, Artificial Sequence
  Description of Artificial Sequence: Synthetic oligonucleotide
  Antisense strand to SEQ ID NO: 949108
uuucgugcaauucaucccu

SEQ ID NO: 949110 - RNA, 19 nt, Artificial Sequence
  Description of Artificial Sequence: Synthetic oligonucleotide
  Sense strand starting at position 3924 of SEQ ID NO: 913725
uguaauguuucuuucugca

SEQ ID NO: 949111 - RNA, 19 nt, Artificial Sequence
  Description of Artificial Sequence: Synthetic oligonucleotide
  Antisense strand to SEQ ID NO: 949110
ugcagaaagaaacauuaca

SEQ ID NO: 949112 - RNA, 19 nt, Artificial Sequence
  Description of Artificial Sequence: Synthetic oligonucleotide
  Sense strand starting at position 117 of SEQ ID NO: 913725
ccaauccauuagggaugaa

SEQ ID NO: 949113 - RNA, 19 nt, Artificial Sequence
  Description of Artificial Sequence: Synthetic oligonucleotide
  Antisense strand to SEQ ID NO: 949112
uucaucccuaauggauugg

SEQ ID NO: 949114 - RNA, 19 nt, Artificial Sequence
  Description of Artificial Sequence: Synthetic oligonucleotide
  Sense strand starting at position 3630 of SEQ ID NO: 913725
ucaaguaaaucagaauugu

SEQ ID NO: 949115 - RNA, 19 nt, Artificial Sequence
  Description of Artificial Sequence: Synthetic oligonucleotide
  Antisense strand to SEQ ID NO: 949114
acaauucugauuuacuuga

SEQ ID NO: 949116 - RNA, 19 nt, Artificial Sequence
  Description of Artificial Sequence: Synthetic oligonucleotide
  Sense strand starting at position 3674 of SEQ ID NO: 913725
gcuuucuuaucagagaaag

SEQ ID NO: 949117 - RNA, 19 nt, Artificial Sequence
  Description of Artificial Sequence: Synthetic oligonucleotide
  Antisense strand to SEQ ID NO: 949116
cuuucucugauaagaaagc

SEQ ID NO: 949118 - RNA, 19 nt, Artificial Sequence
  Description of Artificial Sequence: Synthetic oligonucleotide
  Sense strand starting at position 3062 of SEQ ID NO: 913725
agguguaaguccucgcacu

SEQ ID NO: 949119 - RNA, 19 nt, Artificial Sequence
  Description of Artificial Sequence: Synthetic oligonucleotide
  Antisense strand to SEQ ID NO: 949118
agugcgaggacuuacaccu

SEQ ID NO: 949120 - RNA, 19 nt, Artificial Sequence
  Description of Artificial Sequence: Synthetic oligonucleotide
  Sense strand starting at position 2519 of SEQ ID NO: 913725
gcccguuauuggcuuuaua

SEQ ID NO: 949121 - RNA, 19 nt, Artificial Sequence
  Description of Artificial Sequence: Synthetic oligonucleotide
  Antisense strand to SEQ ID NO: 949120
uauaaagccaauaacgggc

SEQ ID NO: 949122 - RNA, 19 nt, Artificial Sequence
  Description of Artificial Sequence: Synthetic oligonucleotide
  Sense strand starting at position 3063 of SEQ ID NO: 913725
gguguaaguccucgcacug

SEQ ID NO: 949123 - RNA, 19 nt, Artificial Sequence
  Description of Artificial Sequence: Synthetic oligonucleotide
  Antisense strand to SEQ ID NO: 949122
cagugcgaggacuuacacc

SEQ ID NO: 949124 - RNA, 19 nt, Artificial Sequence
  Description of Artificial Sequence: Synthetic oligonucleotide
  Sense strand starting at position 3375 of SEQ ID NO: 913725
ggcguuuggagcugucuaa

SEQ ID NO: 949125 - RNA, 19 nt, Artificial Sequence
  Description of Artificial Sequence: Synthetic oligonucleotide
  Antisense strand to SEQ ID NO: 949124
uuagacagcuccaaacgcc

SEQ ID NO: 949126 - RNA, 19 nt, Artificial Sequence
  Description of Artificial Sequence: Synthetic oligonucleotide
  Sense strand starting at position 2325 of SEQ ID NO: 913725
ggaugcuaaugaugaaauc

SEQ ID NO: 949127 - RNA, 19 nt, Artificial Sequence
  Description of Artificial Sequence: Synthetic oligonucleotide
  Antisense strand to SEQ ID NO: 949126
gauuucaucauuagcaucc

SEQ ID NO: 949128 - RNA, 19 nt, Artificial Sequence
  Description of Artificial Sequence: Synthetic oligonucleotide
  Sense strand starting at position 3094 of SEQ ID NO: 913725
cagaaauccgcguggccuu

SEQ ID NO: 949129 - RNA, 19 nt, Artificial Sequence
  Description of Artificial Sequence: Synthetic oligonucleotide
  Antisense strand to SEQ ID NO: 949128
aaggccacgcggauuucug

SEQ ID NO: 949130 - RNA, 19 nt, Artificial Sequence
  Description of Artificial Sequence: Synthetic oligonucleotide
  Sense strand starting at position 2561 of SEQ ID NO: 913725
ggacaagccuauuagcaca

SEQ ID NO: 949131 - RNA, 19 nt, Artificial Sequence
  Description of Artificial Sequence: Synthetic oligonucleotide
  Antisense strand to SEQ ID NO: 949130
ugugcuaauaggcuugucc

SEQ ID NO: 949132 - RNA, 19 nt, Artificial Sequence
  Description of Artificial Sequence: Synthetic oligonucleotide
  Sense strand starting at position 2378 of SEQ ID NO: 913725
ggcgauugggcgcguacaa

SEQ ID NO: 949133 - RNA, 19 nt, Artificial Sequence
  Description of Artificial Sequence: Synthetic oligonucleotide
  Antisense strand to SEQ ID NO: 949132
uuguacgcgcccaaucgcc

SEQ ID NO: 949134 - RNA, 19 nt, Artificial Sequence
  Description of Artificial Sequence: Synthetic oligonucleotide
  Sense strand starting at position 31 of SEQ ID NO: 913725
gccgaaaucucugacccga

SEQ ID NO: 949135 - RNA, 19 nt, Artificial Sequence
  Description of Artificial Sequence: Synthetic oligonucleotide
  Antisense strand to SEQ ID NO: 949134
ucgggucagagauuucggc

SEQ ID NO: 949136 - RNA, 19 nt, Artificial Sequence
  Description of Artificial Sequence: Synthetic oligonucleotide
  Sense strand starting at position 2322 of SEQ ID NO: 913725
gccggaugcuaaugaugaa

SEQ ID NO: 949137 - RNA, 19 nt, Artificial Sequence
  Description of Artificial Sequence: Synthetic oligonucleotide
  Antisense strand to SEQ ID NO: 949136
uucaucauuagcauccggc

SEQ ID NO: 949138 - RNA, 19 nt, Artificial Sequence
  Description of Artificial Sequence: Synthetic oligonucleotide
  Sense strand starting at position 3640 of SEQ ID NO: 913725
cagaauuguuugugagguc

SEQ ID NO: 949139 - RNA, 19 nt, Artificial Sequence
  Description of Artificial Sequence: Synthetic oligonucleotide
  Antisense strand to SEQ ID NO: 949138
gaccucacaaacaauucug

SEQ ID NO: 949140 - RNA, 19 nt, Artificial Sequence
  Description of Artificial Sequence: Synthetic oligonucleotide
  Sense strand starting at position 3092 of SEQ ID NO: 913726
acagguuaagcugaacauu

SEQ ID NO: 949141 - RNA, 19 nt, Artificial Sequence
  Description of Artificial Sequence: Synthetic oligonucleotide
  Antisense strand to SEQ ID NO: 949140
aauguucagcuuaaccugu

SEQ ID NO: 949142 - RNA, 19 nt, Artificial Sequence
  Description of Artificial Sequence: Synthetic oligonucleotide
  Sense strand starting at position 70 of SEQ ID NO: 913726
ccgcgagcaguuucgagaa

SEQ ID NO: 949143 - RNA, 19 nt, Artificial Sequence
  Description of Artificial Sequence: Synthetic oligonucleotide
  Antisense strand to SEQ ID NO: 949142
uucucgaaacugcucgcgg

SEQ ID NO: 949144 - RNA, 19 nt, Artificial Sequence
  Description of Artificial Sequence: Synthetic oligonucleotide
  Sense strand starting at position 3440 of SEQ ID NO: 913726
aauagugucagaugaugag

SEQ ID NO: 949145 - RNA, 19 nt, Artificial Sequence
  Description of Artificial Sequence: Synthetic oligonucleotide
  Antisense strand to SEQ ID NO: 949144
cucaucaucugacacuauu

SEQ ID NO: 949146 - RNA, 19 nt, Artificial Sequence
  Description of Artificial Sequence: Synthetic oligonucleotide
  Sense strand starting at position 3446 of SEQ ID NO: 913726
gucagaugaugagugggau

SEQ ID NO: 949147 - RNA, 19 nt, Artificial Sequence
  Description of Artificial Sequence: Synthetic oligonucleotide
  Antisense strand to SEQ ID NO: 949146
aucccacucaucaucugac

SEQ ID NO: 949148 - RNA, 19 nt, Artificial Sequence
  Description of Artificial Sequence: Synthetic oligonucleotide
  Sense strand starting at position 3365 of SEQ ID NO: 913726
ggauuacuggauugagcca

SEQ ID NO: 949149 - RNA, 19 nt, Artificial Sequence
  Description of Artificial Sequence: Synthetic oligonucleotide
  Antisense strand to SEQ ID NO: 949148
uggcucaauccaguaaucc

SEQ ID NO: 949150 - RNA, 19 nt, Artificial Sequence
  Description of Artificial Sequence: Synthetic oligonucleotide
  Sense strand starting at position 3662 of SEQ ID NO: 913726
auagguagguauucuuaag

SEQ ID NO: 949151 - RNA, 19 nt, Artificial Sequence
  Description of Artificial Sequence: Synthetic oligonucleotide
  Antisense strand to SEQ ID NO: 949150
cuuaagaauaccuaccuau

SEQ ID NO: 949152 - RNA, 19 nt, Artificial Sequence
  Description of Artificial Sequence: Synthetic oligonucleotide
  Sense strand starting at position 1242 of SEQ ID NO: 913726
cagguuugcggcgcuuaaa

SEQ ID NO: 949153 - RNA, 19 nt, Artificial Sequence
  Description of Artificial Sequence: Synthetic oligonucleotide
  Antisense strand to SEQ ID NO: 949152
uuuaagcgccgcaaaccug

SEQ ID NO: 949154 - RNA, 19 nt, Artificial Sequence
  Description of Artificial Sequence: Synthetic oligonucleotide
  Sense strand starting at position 2844 of SEQ ID NO: 913726
aguugcucaggugauaaau

SEQ ID NO: 949155 - RNA, 19 nt, Artificial Sequence
  Description of Artificial Sequence: Synthetic oligonucleotide
  Antisense strand to SEQ ID NO: 949154
auuuaucaccugagcaacu

SEQ ID NO: 949156 - RNA, 19 nt, Artificial Sequence
  Description of Artificial Sequence: Synthetic oligonucleotide
  Sense strand starting at position 3312 of SEQ ID NO: 913726
ucgggaacuccuggacuca

SEQ ID NO: 949157 - RNA, 19 nt, Artificial Sequence
  Description of Artificial Sequence: Synthetic oligonucleotide
  Antisense strand to SEQ ID NO: 949156
ugaguccaggaguucccga

SEQ ID NO: 949158 - RNA, 19 nt, Artificial Sequence
  Description of Artificial Sequence: Synthetic oligonucleotide
  Sense strand starting at position 3370 of SEQ ID NO: 913726
acuggauugagccacgcau

SEQ ID NO: 949159 - RNA, 19 nt, Artificial Sequence
  Description of Artificial Sequence: Synthetic oligonucleotide
  Antisense strand to SEQ ID NO: 949158
augcguggcucaauccagu

SEQ ID NO: 949160 - RNA, 19 nt, Artificial Sequence
  Description of Artificial Sequence: Synthetic oligonucleotide
  Sense strand starting at position 3100 of SEQ ID NO: 913726
agcugaacauuguuacuau

SEQ ID NO: 949161 - RNA, 19 nt, Artificial Sequence
  Description of Artificial Sequence: Synthetic oligonucleotide
  Antisense strand to SEQ ID NO: 949160
auaguaacaauguucagcu

SEQ ID NO: 949162 - RNA, 19 nt, Artificial Sequence
  Description of Artificial Sequence: Synthetic oligonucleotide
  Sense strand starting at position 606 of SEQ ID NO: 913726
ggaagucuugugcaacucu

SEQ ID NO: 949163 - RNA, 19 nt, Artificial Sequence
  Description of Artificial Sequence: Synthetic oligonucleotide
  Antisense strand to SEQ ID NO: 949162
agaguugcacaagacuucc

SEQ ID NO: 949164 - RNA, 19 nt, Artificial Sequence
  Description of Artificial Sequence: Synthetic oligonucleotide
  Sense strand starting at position 3103 of SEQ ID NO: 913726
ugaacauuguuacuauugu

SEQ ID NO: 949165 - RNA, 19 nt, Artificial Sequence
  Description of Artificial Sequence: Synthetic oligonucleotide
  Antisense strand to SEQ ID NO: 949164
acaauaguaacaauguuca

SEQ ID NO: 949166 - RNA, 19 nt, Artificial Sequence
  Description of Artificial Sequence: Synthetic oligonucleotide
  Sense strand starting at position 2824 of SEQ ID NO: 913726
ggagggauuugucagguug

SEQ ID NO: 949167 - RNA, 19 nt, Artificial Sequence
  Description of Artificial Sequence: Synthetic oligonucleotide
  Antisense strand to SEQ ID NO: 949166
caaccugacaaaucccucc

SEQ ID NO: 949168 - RNA, 19 nt, Artificial Sequence
  Description of Artificial Sequence: Synthetic oligonucleotide
  Sense strand starting at position 2839 of SEQ ID NO: 913726
guugaaguugcucagguga

SEQ ID NO: 949169 - RNA, 19 nt, Artificial Sequence
  Description of Artificial Sequence: Synthetic oligonucleotide
  Antisense strand to SEQ ID NO: 949168
ucaccugagcaacuucaac

SEQ ID NO: 949170 - RNA, 19 nt, Artificial Sequence
  Description of Artificial Sequence: Synthetic oligonucleotide
  Sense strand starting at position 2092 of SEQ ID NO: 913726
ggacguuucuggagaggag

SEQ ID NO: 949171 - RNA, 19 nt, Artificial Sequence
  Description of Artificial Sequence: Synthetic oligonucleotide
  Antisense strand to SEQ ID NO: 949170
cuccucuccagaaacgucc

SEQ ID NO: 949172 - RNA, 19 nt, Artificial Sequence
  Description of Artificial Sequence: Synthetic oligonucleotide
  Sense strand starting at position 3010 of SEQ ID NO: 913726
ugauguauuguagggcuaa

SEQ ID NO: 949173 - RNA, 19 nt, Artificial Sequence
  Description of Artificial Sequence: Synthetic oligonucleotide
  Antisense strand to SEQ ID NO: 949172
uuagcccuacaauacauca

SEQ ID NO: 949174 - RNA, 19 nt, Artificial Sequence
  Description of Artificial Sequence: Synthetic oligonucleotide
  Sense strand starting at position 1361 of SEQ ID NO: 913726
uucggauagucucccuaau

SEQ ID NO: 949175 - RNA, 19 nt, Artificial Sequence
  Description of Artificial Sequence: Synthetic oligonucleotide
  Antisense strand to SEQ ID NO: 949174
auuagggagacuauccgaa

SEQ ID NO: 949176 - RNA, 19 nt, Artificial Sequence
  Description of Artificial Sequence: Synthetic oligonucleotide
  Sense strand starting at position 1363 of SEQ ID NO: 913726
cggauagucucccuaaucu

SEQ ID NO: 949177 - RNA, 19 nt, Artificial Sequence
  Description of Artificial Sequence: Synthetic oligonucleotide
  Antisense strand to SEQ ID NO: 949176
agauuagggagacuauccg

SEQ ID NO: 949178 - RNA, 19 nt, Artificial Sequence
  Description of Artificial Sequence: Synthetic oligonucleotide
  Sense strand starting at position 2329 of SEQ ID NO: 913726
ccaguaauuugggaggcua

SEQ ID NO: 949179 - RNA, 19 nt, Artificial Sequence
  Description of Artificial Sequence: Synthetic oligonucleotide
  Antisense strand to SEQ ID NO: 949178
uagccucccaaauuacugg

SEQ ID NO: 949180 - RNA, 19 nt, Artificial Sequence
  Description of Artificial Sequence: Synthetic oligonucleotide
  Sense strand starting at position 338 of SEQ ID NO: 913726
acaaguuuccuacgagcag

SEQ ID NO: 949181 - RNA, 19 nt, Artificial Sequence
  Description of Artificial Sequence: Synthetic oligonucleotide
  Antisense strand to SEQ ID NO: 949180
cugcucguaggaaacuugu

SEQ ID NO: 949182 - RNA, 19 nt, Artificial Sequence
  Description of Artificial Sequence: Synthetic oligonucleotide
  Sense strand starting at position 3119 of SEQ ID NO: 913726
uguuauuauuuccagacug

SEQ ID NO: 949183 - RNA, 19 nt, Artificial Sequence
  Description of Artificial Sequence: Synthetic oligonucleotide
  Antisense strand to SEQ ID NO: 949182
cagucuggaaauaauaaca

SEQ ID NO: 949184 - RNA, 19 nt, Artificial Sequence
  Description of Artificial Sequence: Synthetic oligonucleotide
  Sense strand starting at position 2856 of SEQ ID NO: 913726
gauaaauuccgugguguga

SEQ ID NO: 949185 - RNA, 19 nt, Artificial Sequence
  Description of Artificial Sequence: Synthetic oligonucleotide
  Antisense strand to SEQ ID NO: 949184
ucacaccacggaauuuauc

SEQ ID NO: 949186 - RNA, 19 nt, Artificial Sequence
  Description of Artificial Sequence: Synthetic oligonucleotide
  Sense strand starting at position 426 of SEQ ID NO: 913726
gcgcgcacgagucagauuu

SEQ ID NO: 949187 - RNA, 19 nt, Artificial Sequence
  Description of Artificial Sequence: Synthetic oligonucleotide
  Antisense strand to SEQ ID NO: 949186
aaaucugacucgugcgcgc

SEQ ID NO: 949188 - RNA, 19 nt, Artificial Sequence
  Description of Artificial Sequence: Synthetic oligonucleotide
  Sense strand starting at position 2088 of SEQ ID NO: 913726
gcgaggacguuucuggaga

SEQ ID NO: 949189 - RNA, 19 nt, Artificial Sequence
  Description of Artificial Sequence: Synthetic oligonucleotide
  Antisense strand to SEQ ID NO: 949188
ucuccagaaacguccucgc

SEQ ID NO: 949190 - RNA, 19 nt, Artificial Sequence
  Description of Artificial Sequence: Synthetic oligonucleotide
  Sense strand starting at position 2826 of SEQ ID NO: 913726
agggauuugucagguugaa

SEQ ID NO: 949191 - RNA, 19 nt, Artificial Sequence
  Description of Artificial Sequence: Synthetic oligonucleotide
  Antisense strand to SEQ ID NO: 949190
uucaaccugacaaaucccu

SEQ ID NO: 949192 - RNA, 19 nt, Artificial Sequence
  Description of Artificial Sequence: Synthetic oligonucleotide
  Sense strand starting at position 2855 of SEQ ID NO: 913726
ugauaaauuccguggugug

SEQ ID NO: 949193 - RNA, 19 nt, Artificial Sequence
  Description of Artificial Sequence: Synthetic oligonucleotide
  Antisense strand to SEQ ID NO: 949192
cacaccacggaauuuauca

SEQ ID NO: 949194 - RNA, 19 nt, Artificial Sequence
  Description of Artificial Sequence: Synthetic oligonucleotide
  Sense strand starting at position 3459 of SEQ ID NO: 913726
ugggaugauugugaugaag

SEQ ID NO: 949195 - RNA, 19 nt, Artificial Sequence
  Description of Artificial Sequence: Synthetic oligonucleotide
  Antisense strand to SEQ ID NO: 949194
cuucaucacaaucauccca

SEQ ID NO: 949196 - RNA, 19 nt, Artificial Sequence
  Description of Artificial Sequence: Synthetic oligonucleotide
  Sense strand starting at position 2233 of SEQ ID NO: 913726
acugaaaugugcgccgaaa

SEQ ID NO: 949197 - RNA, 19 nt, Artificial Sequence
  Description of Artificial Sequence: Synthetic oligonucleotide
  Antisense strand to SEQ ID NO: 949196
uuucggcgcacauuucagu

SEQ ID NO: 949198 - RNA, 19 nt, Artificial Sequence
  Description of Artificial Sequence: Synthetic oligonucleotide
  Sense strand starting at position 1033 of SEQ ID NO: 913726
gcgcuuuccugacuccaaa

SEQ ID NO: 949199 - RNA, 19 nt, Artificial Sequence
  Description of Artificial Sequence: Synthetic oligonucleotide
  Antisense strand to SEQ ID NO: 949198
uuuggagucaggaaagcgc

SEQ ID NO: 949200 - RNA, 19 nt, Artificial Sequence
  Description of Artificial Sequence: Synthetic oligonucleotide
  Sense strand starting at position 3067 of SEQ ID NO: 913726
aagagaugaugucaaggca

SEQ ID NO: 949201 - RNA, 19 nt, Artificial Sequence
  Description of Artificial Sequence: Synthetic oligonucleotide
  Antisense strand to SEQ ID NO: 949200
ugccuugacaucaucucuu

SEQ ID NO: 949202 - RNA, 19 nt, Artificial Sequence
  Description of Artificial Sequence: Synthetic oligonucleotide
  Sense strand starting at position 2854 of SEQ ID NO: 913726
gugauaaauuccguggugu

SEQ ID NO: 949203 - RNA, 19 nt, Artificial Sequence
  Description of Artificial Sequence: Synthetic oligonucleotide
  Antisense strand to SEQ ID NO: 949202
acaccacggaauuuaucac

SEQ ID NO: 949204 - RNA, 19 nt, Artificial Sequence
  Description of Artificial Sequence: Synthetic oligonucleotide
  Sense strand starting at position 3461 of SEQ ID NO: 913726
ggaugauugugaugaagga

SEQ ID NO: 949205 - RNA, 19 nt, Artificial Sequence
  Description of Artificial Sequence: Synthetic oligonucleotide
  Antisense strand to SEQ ID NO: 949204
uccuucaucacaaucaucc

SEQ ID NO: 949206 - RNA, 19 nt, Artificial Sequence
  Description of Artificial Sequence: Synthetic oligonucleotide
  Sense strand starting at position 2232 of SEQ ID NO: 913726
cacugaaaugugcgccgaa

SEQ ID NO: 949207 - RNA, 19 nt, Artificial Sequence
  Description of Artificial Sequence: Synthetic oligonucleotide
  Antisense strand to SEQ ID NO: 949206
uucggcgcacauuucagug

SEQ ID NO: 949208 - RNA, 19 nt, Artificial Sequence
  Description of Artificial Sequence: Synthetic oligonucleotide
  Sense strand starting at position 3136 of SEQ ID NO: 913726
ugaguaucgcccugucauu

SEQ ID NO: 949209 - RNA, 19 nt, Artificial Sequence
  Description of Artificial Sequence: Synthetic oligonucleotide
  Antisense strand to SEQ ID NO: 949208
aaugacagggcgauacuca

SEQ ID NO: 949210 - RNA, 19 nt, Artificial Sequence
  Description of Artificial Sequence: Synthetic oligonucleotide
  Sense strand starting at position 3023 of SEQ ID NO: 913726
ggcuaauaauuguaaccau

SEQ ID NO: 949211 - RNA, 19 nt, Artificial Sequence
  Description of Artificial Sequence: Synthetic oligonucleotide
  Antisense strand to SEQ ID NO: 949210
augguuacaauuauuagcc

SEQ ID NO: 949212 - RNA, 19 nt, Artificial Sequence
  Description of Artificial Sequence: Synthetic oligonucleotide
  Sense strand starting at position 3458 of SEQ ID NO: 913726
gugggaugauugugaugaa

SEQ ID NO: 949213 - RNA, 19 nt, Artificial Sequence
  Description of Artificial Sequence: Synthetic oligonucleotide
  Antisense strand to SEQ ID NO: 949212
uucaucacaaucaucccac

SEQ ID NO: 949214 - RNA, 19 nt, Artificial Sequence
  Description of Artificial Sequence: Synthetic oligonucleotide
  Sense strand starting at position 3101 of SEQ ID NO: 913726
gcugaacauuguuacuauu

SEQ ID NO: 949215 - RNA, 19 nt, Artificial Sequence
  Description of Artificial Sequence: Synthetic oligonucleotide
  Antisense strand to SEQ ID NO: 949214
aauaguaacaauguucagc

SEQ ID NO: 949216 - RNA, 19 nt, Artificial Sequence
  Description of Artificial Sequence: Synthetic oligonucleotide
  Sense strand starting at position 1241 of SEQ ID NO: 913726
ccagguuugcggcgcuuaa

SEQ ID NO: 949217 - RNA, 19 nt, Artificial Sequence
  Description of Artificial Sequence: Synthetic oligonucleotide
  Antisense strand to SEQ ID NO: 949216
uuaagcgccgcaaaccugg

SEQ ID NO: 949218 - RNA, 19 nt, Artificial Sequence
  Description of Artificial Sequence: Synthetic oligonucleotide
  Sense strand starting at position 3282 of SEQ ID NO: 913726
ggcgagguuucgcuguguu

SEQ ID NO: 949219 - RNA, 19 nt, Artificial Sequence
  Description of Artificial Sequence: Synthetic oligonucleotide
  Antisense strand to SEQ ID NO: 949218
aacacagcgaaaccucgcc

SEQ ID NO: 949220 - RNA, 19 nt, Artificial Sequence
  Description of Artificial Sequence: Synthetic oligonucleotide
  Sense strand starting at position 3456 of SEQ ID NO: 913727
acagguuaagcugaacauu

SEQ ID NO: 949221 - RNA, 19 nt, Artificial Sequence
  Description of Artificial Sequence: Synthetic oligonucleotide
  Antisense strand to SEQ ID NO: 949220
aauguucagcuuaaccugu

SEQ ID NO: 949222 - RNA, 19 nt, Artificial Sequence
  Description of Artificial Sequence: Synthetic oligonucleotide
  Sense strand starting at position 434 of SEQ ID NO: 913727
ccgcgagcaguuucgagaa

SEQ ID NO: 949223 - RNA, 19 nt, Artificial Sequence
  Description of Artificial Sequence: Synthetic oligonucleotide
  Antisense strand to SEQ ID NO: 949222
uucucgaaacugcucgcgg

SEQ ID NO: 949224 - RNA, 19 nt, Artificial Sequence
  Description of Artificial Sequence: Synthetic oligonucleotide
  Sense strand starting at position 3804 of SEQ ID NO: 913727
aauagugucagaugaugag

SEQ ID NO: 949225 - RNA, 19 nt, Artificial Sequence
  Description of Artificial Sequence: Synthetic oligonucleotide
  Antisense strand to SEQ ID NO: 949224
cucaucaucugacacuauu

SEQ ID NO: 949226 - RNA, 19 nt, Artificial Sequence
  Description of Artificial Sequence: Synthetic oligonucleotide
  Sense strand starting at position 3810 of SEQ ID NO: 913727
gucagaugaugagugggau

SEQ ID NO: 949227 - RNA, 19 nt, Artificial Sequence
  Description of Artificial Sequence: Synthetic oligonucleotide
  Antisense strand to SEQ ID NO: 949226
aucccacucaucaucugac

SEQ ID NO: 949228 - RNA, 19 nt, Artificial Sequence
  Description of Artificial Sequence: Synthetic oligonucleotide
  Sense strand starting at position 3729 of SEQ ID NO: 913727
ggauuacuggauugagcca

SEQ ID NO: 949229 - RNA, 19 nt, Artificial Sequence
  Description of Artificial Sequence: Synthetic oligonucleotide
  Antisense strand to SEQ ID NO: 949228
uggcucaauccaguaaucc

SEQ ID NO: 949230 - RNA, 19 nt, Artificial Sequence
  Description of Artificial Sequence: Synthetic oligonucleotide
  Sense strand starting at position 1606 of SEQ ID NO: 913727
cagguuugcggcgcuuaaa

SEQ ID NO: 949231 - RNA, 19 nt, Artificial Sequence
  Description of Artificial Sequence: Synthetic oligonucleotide
  Antisense strand to SEQ ID NO: 949230
uuuaagcgccgcaaaccug

SEQ ID NO: 949232 - RNA, 19 nt, Artificial Sequence
  Description of Artificial Sequence: Synthetic oligonucleotide
  Sense strand starting at position 203 of SEQ ID NO: 913727
gaauuauaugcguguauuu

SEQ ID NO: 949233 - RNA, 19 nt, Artificial Sequence
  Description of Artificial Sequence: Synthetic oligonucleotide
  Antisense strand to SEQ ID NO: 949232
aaauacacgcauauaauuc

SEQ ID NO: 949234 - RNA, 19 nt, Artificial Sequence
  Description of Artificial Sequence: Synthetic oligonucleotide
  Sense strand starting at position 3208 of SEQ ID NO: 913727
aguugcucaggugauaaau

SEQ ID NO: 949235 - RNA, 19 nt, Artificial Sequence
  Description of Artificial Sequence: Synthetic oligonucleotide
  Antisense strand to SEQ ID NO: 949234
auuuaucaccugagcaacu

SEQ ID NO: 949236 - RNA, 19 nt, Artificial Sequence
  Description of Artificial Sequence: Synthetic oligonucleotide
  Sense strand starting at position 3676 of SEQ ID NO: 913727
ucgggaacuccuggacuca

SEQ ID NO: 949237 - RNA, 19 nt, Artificial Sequence
  Description of Artificial Sequence: Synthetic oligonucleotide
  Antisense strand to SEQ ID NO: 949236
ugaguccaggaguucccga

SEQ ID NO: 949238 - RNA, 19 nt, Artificial Sequence
  Description of Artificial Sequence: Synthetic oligonucleotide
  Sense strand starting at position 3734 of SEQ ID NO: 913727
acuggauugagccacgcau

SEQ ID NO: 949239 - RNA, 19 nt, Artificial Sequence
  Description of Artificial Sequence: Synthetic oligonucleotide
  Antisense strand to SEQ ID NO: 949238
augcguggcucaauccagu

SEQ ID NO: 949240 - RNA, 19 nt, Artificial Sequence
  Description of Artificial Sequence: Synthetic oligonucleotide
  Sense strand starting at position 3464 of SEQ ID NO: 913727
agcugaacauuguuacuau

SEQ ID NO: 949241 - RNA, 19 nt, Artificial Sequence
  Description of Artificial Sequence: Synthetic oligonucleotide
  Antisense strand to SEQ ID NO: 949240
auaguaacaauguucagcu

SEQ ID NO: 949242 - RNA, 19 nt, Artificial Sequence
  Description of Artificial Sequence: Synthetic oligonucleotide
  Sense strand starting at position 970 of SEQ ID NO: 913727
ggaagucuugugcaacucu

SEQ ID NO: 949243 - RNA, 19 nt, Artificial Sequence
  Description of Artificial Sequence: Synthetic oligonucleotide
  Antisense strand to SEQ ID NO: 949242
agaguugcacaagacuucc

SEQ ID NO: 949244 - RNA, 19 nt, Artificial Sequence
  Description of Artificial Sequence: Synthetic oligonucleotide
  Sense strand starting at position 3467 of SEQ ID NO: 913727
ugaacauuguuacuauugu

SEQ ID NO: 949245 - RNA, 19 nt, Artificial Sequence
  Description of Artificial Sequence: Synthetic oligonucleotide
  Antisense strand to SEQ ID NO: 949244
acaauaguaacaauguuca

SEQ ID NO: 949246 - RNA, 19 nt, Artificial Sequence
  Description of Artificial Sequence: Synthetic oligonucleotide
  Sense strand starting at position 74 of SEQ ID NO: 913727
acgagucacuuugcaggaa

SEQ ID NO: 949247 - RNA, 19 nt, Artificial Sequence
  Description of Artificial Sequence: Synthetic oligonucleotide
  Antisense strand to SEQ ID NO: 949246
uuccugcaaagugacucgu

SEQ ID NO: 949248 - RNA, 19 nt, Artificial Sequence
  Description of Artificial Sequence: Synthetic oligonucleotide
  Sense strand starting at position 3188 of SEQ ID NO: 913727
ggagggauuugucagguug

SEQ ID NO: 949249 - RNA, 19 nt, Artificial Sequence
  Description of Artificial Sequence: Synthetic oligonucleotide
  Antisense strand to SEQ ID NO: 949248
caaccugacaaaucccucc

SEQ ID NO: 949250 - RNA, 19 nt, Artificial Sequence
  Description of Artificial Sequence: Synthetic oligonucleotide
  Sense strand starting at position 3203 of SEQ ID NO: 913727
guugaaguugcucagguga

SEQ ID NO: 949251 - RNA, 19 nt, Artificial Sequence
  Description of Artificial Sequence: Synthetic oligonucleotide
  Antisense strand to SEQ ID NO: 949250
ucaccugagcaacuucaac

SEQ ID NO: 949252 - RNA, 19 nt, Artificial Sequence
  Description of Artificial Sequence: Synthetic oligonucleotide
  Sense strand starting at position 2456 of SEQ ID NO: 913727
ggacguuucuggagaggag

SEQ ID NO: 949253 - RNA, 19 nt, Artificial Sequence
  Description of Artificial Sequence: Synthetic oligonucleotide
  Antisense strand to SEQ ID NO: 949252
cuccucuccagaaacgucc

SEQ ID NO: 949254 - RNA, 19 nt, Artificial Sequence
  Description of Artificial Sequence: Synthetic oligonucleotide
  Sense strand starting at position 3374 of SEQ ID NO: 913727
ugauguauuguagggcuaa

SEQ ID NO: 949255 - RNA, 19 nt, Artificial Sequence
  Description of Artificial Sequence: Synthetic oligonucleotide
  Antisense strand to SEQ ID NO: 949254
uuagcccuacaauacauca

SEQ ID NO: 949256 - RNA, 19 nt, Artificial Sequence
  Description of Artificial Sequence: Synthetic oligonucleotide
  Sense strand starting at position 200 of SEQ ID NO: 913727
aaagaauuauaugcgugua

SEQ ID NO: 949257 - RNA, 19 nt, Artificial Sequence
  Description of Artificial Sequence: Synthetic oligonucleotide
  Antisense strand to SEQ ID NO: 949256
uacacgcauauaauucuuu

SEQ ID NO: 949258 - RNA, 19 nt, Artificial Sequence
  Description of Artificial Sequence: Synthetic oligonucleotide
  Sense strand starting at position 1725 of SEQ ID NO: 913727
uucggauagucucccuaau

SEQ ID NO: 949259 - RNA, 19 nt, Artificial Sequence
  Description of Artificial Sequence: Synthetic oligonucleotide
  Antisense strand to SEQ ID NO: 949258
auuagggagacuauccgaa

SEQ ID NO: 949260 - RNA, 19 nt, Artificial Sequence
  Description of Artificial Sequence: Synthetic oligonucleotide
  Sense strand starting at position 1727 of SEQ ID NO: 913727
cggauagucucccuaaucu

SEQ ID NO: 949261 - RNA, 19 nt, Artificial Sequence
  Description of Artificial Sequence: Synthetic oligonucleotide
  Antisense strand to SEQ ID NO: 949260
agauuagggagacuauccg

SEQ ID NO: 949262 - RNA, 19 nt, Artificial Sequence
  Description of Artificial Sequence: Synthetic oligonucleotide
  Sense strand starting at position 2693 of SEQ ID NO: 913727
ccaguaauuugggaggcua

SEQ ID NO: 949263 - RNA, 19 nt, Artificial Sequence
  Description of Artificial Sequence: Synthetic oligonucleotide
  Antisense strand to SEQ ID NO: 949262
uagccucccaaauuacugg

SEQ ID NO: 949264 - RNA, 19 nt, Artificial Sequence
  Description of Artificial Sequence: Synthetic oligonucleotide
  Sense strand starting at position 702 of SEQ ID NO: 913727
acaaguuuccuacgagcag

SEQ ID NO: 949265 - RNA, 19 nt, Artificial Sequence
  Description of Artificial Sequence: Synthetic oligonucleotide
  Antisense strand to SEQ ID NO: 949264
cugcucguaggaaacuugu

SEQ ID NO: 949266 - RNA, 19 nt, Artificial Sequence
  Description of Artificial Sequence: Synthetic oligonucleotide
  Sense strand starting at position 3483 of SEQ ID NO: 913727
uguuauuauuuccagacug

SEQ ID NO: 949267 - RNA, 19 nt, Artificial Sequence
  Description of Artificial Sequence: Synthetic oligonucleotide
  Antisense strand to SEQ ID NO: 949266
cagucuggaaauaauaaca

SEQ ID NO: 949268 - RNA, 19 nt, Artificial Sequence
  Description of Artificial Sequence: Synthetic oligonucleotide
  Sense strand starting at position 3220 of SEQ ID NO: 913727
gauaaauuccgugguguga

SEQ ID NO: 949269 - RNA, 19 nt, Artificial Sequence
  Description of Artificial Sequence: Synthetic oligonucleotide
  Antisense strand to SEQ ID NO: 949268
ucacaccacggaauuuauc

SEQ ID NO: 949270 - RNA, 19 nt, Artificial Sequence
  Description of Artificial Sequence: Synthetic oligonucleotide
  Sense strand starting at position 790 of SEQ ID NO: 913727
gcgcgcacgagucagauuu

SEQ ID NO: 949271 - RNA, 19 nt, Artificial Sequence
  Description of Artificial Sequence: Synthetic oligonucleotide
  Antisense strand to SEQ ID NO: 949270
aaaucugacucgugcgcgc

SEQ ID NO: 949272 - RNA, 19 nt, Artificial Sequence
  Description of Artificial Sequence: Synthetic oligonucleotide
  Sense strand starting at position 2452 of SEQ ID NO: 913727
gcgaggacguuucuggaga

SEQ ID NO: 949273 - RNA, 19 nt, Artificial Sequence
  Description of Artificial Sequence: Synthetic oligonucleotide
  Antisense strand to SEQ ID NO: 949272
ucuccagaaacguccucgc

SEQ ID NO: 949274 - RNA, 19 nt, Artificial Sequence
  Description of Artificial Sequence: Synthetic oligonucleotide
  Sense strand starting at position 3190 of SEQ ID NO: 913727
agggauuugucagguugaa

SEQ ID NO: 949275 - RNA, 19 nt, Artificial Sequence
  Description of Artificial Sequence: Synthetic oligonucleotide
  Antisense strand to SEQ ID NO: 949274
uucaaccugacaaaucccu

SEQ ID NO: 949276 - RNA, 19 nt, Artificial Sequence
  Description of Artificial Sequence: Synthetic oligonucleotide
  Sense strand starting at position 3219 of SEQ ID NO: 913727
ugauaaauuccguggugug

SEQ ID NO: 949277 - RNA, 19 nt, Artificial Sequence
  Description of Artificial Sequence: Synthetic oligonucleotide
  Antisense strand to SEQ ID NO: 949276
cacaccacggaauuuauca

SEQ ID NO: 949278 - RNA, 19 nt, Artificial Sequence
  Description of Artificial Sequence: Synthetic oligonucleotide
  Sense strand starting at position 3823 of SEQ ID NO: 913727
ugggaugauugugaugaag

SEQ ID NO: 949279 - RNA, 19 nt, Artificial Sequence
  Description of Artificial Sequence: Synthetic oligonucleotide
  Antisense strand to SEQ ID NO: 949278
cuucaucacaaucauccca

SEQ ID NO: 949280 - RNA, 19 nt, Artificial Sequence
  Description of Artificial Sequence: Synthetic oligonucleotide
  Sense strand starting at position 2597 of SEQ ID NO: 913727
acugaaaugugcgccgaaa

SEQ ID NO: 949281 - RNA, 19 nt, Artificial Sequence
  Description of Artificial Sequence: Synthetic oligonucleotide
  Antisense strand to SEQ ID NO: 949280
uuucggcgcacauuucagu

SEQ ID NO: 949282 - RNA, 19 nt, Artificial Sequence
  Description of Artificial Sequence: Synthetic oligonucleotide
  Sense strand starting at position 1397 of SEQ ID NO: 913727
gcgcuuuccugacuccaaa

SEQ ID NO: 949283 - RNA, 19 nt, Artificial Sequence
  Description of Artificial Sequence: Synthetic oligonucleotide
  Antisense strand to SEQ ID NO: 949282
uuuggagucaggaaagcgc

SEQ ID NO: 949284 - RNA, 19 nt, Artificial Sequence
  Description of Artificial Sequence: Synthetic oligonucleotide
  Sense strand starting at position 3431 of SEQ ID NO: 913727
aagagaugaugucaaggca

SEQ ID NO: 949285 - RNA, 19 nt, Artificial Sequence
  Description of Artificial Sequence: Synthetic oligonucleotide
  Antisense strand to SEQ ID NO: 949284
ugccuugacaucaucucuu

SEQ ID NO: 949286 - RNA, 19 nt, Artificial Sequence
  Description of Artificial Sequence: Synthetic oligonucleotide
  Sense strand starting at position 3218 of SEQ ID NO: 913727
gugauaaauuccguggugu

SEQ ID NO: 949287 - RNA, 19 nt, Artificial Sequence
  Description of Artificial Sequence: Synthetic oligonucleotide
  Antisense strand to SEQ ID NO: 949286
acaccacggaauuuaucac

SEQ ID NO: 949288 - RNA, 19 nt, Artificial Sequence
  Description of Artificial Sequence: Synthetic oligonucleotide
  Sense strand starting at position 3825 of SEQ ID NO: 913727
ggaugauugugaugaagga

SEQ ID NO: 949289 - RNA, 19 nt, Artificial Sequence
  Description of Artificial Sequence: Synthetic oligonucleotide
  Antisense strand to SEQ ID NO: 949288
uccuucaucacaaucaucc

SEQ ID NO: 949290 - RNA, 19 nt, Artificial Sequence
  Description of Artificial Sequence: Synthetic oligonucleotide
  Sense strand starting at position 2596 of SEQ ID NO: 913727
cacugaaaugugcgccgaa

SEQ ID NO: 949291 - RNA, 19 nt, Artificial Sequence
  Description of Artificial Sequence: Synthetic oligonucleotide
  Antisense strand to SEQ ID NO: 949290
uucggcgcacauuucagug

SEQ ID NO: 949292 - RNA, 19 nt, Artificial Sequence
  Description of Artificial Sequence: Synthetic oligonucleotide
  Sense strand starting at position 3500 of SEQ ID NO: 913727
ugaguaucgcccugucauu

SEQ ID NO: 949293 - RNA, 19 nt, Artificial Sequence
  Description of Artificial Sequence: Synthetic oligonucleotide
  Antisense strand to SEQ ID NO: 949292
aaugacagggcgauacuca

SEQ ID NO: 949294 - RNA, 19 nt, Artificial Sequence
  Description of Artificial Sequence: Synthetic oligonucleotide
  Sense strand starting at position 57 of SEQ ID NO: 913727
uaaauucugugagagcaac

SEQ ID NO: 949295 - RNA, 19 nt, Artificial Sequence
  Description of Artificial Sequence: Synthetic oligonucleotide
  Antisense strand to SEQ ID NO: 949294
guugcucucacagaauuua

SEQ ID NO: 949296 - RNA, 19 nt, Artificial Sequence
  Description of Artificial Sequence: Synthetic oligonucleotide
  Sense strand starting at position 3387 of SEQ ID NO: 913727
ggcuaauaauuguaaccau

SEQ ID NO: 949297 - RNA, 19 nt, Artificial Sequence
  Description of Artificial Sequence: Synthetic oligonucleotide
  Antisense strand to SEQ ID NO: 949296
augguuacaauuauuagcc

SEQ ID NO: 949298 - RNA, 19 nt, Artificial Sequence
  Description of Artificial Sequence: Synthetic oligonucleotide
  Sense strand starting at position 3822 of SEQ ID NO: 913727
gugggaugauugugaugaa

SEQ ID NO: 949299 - RNA, 19 nt, Artificial Sequence
  Description of Artificial Sequence: Synthetic oligonucleotide
  Antisense strand to SEQ ID NO: 949298
uucaucacaaucaucccac

SEQ ID NO: 949300 - RNA, 19 nt, Artificial Sequence
  Description of Artificial Sequence: Synthetic oligonucleotide
  Sense strand starting at position 504 of SEQ ID NO: 913728
ugaauaaagcuuuauaacg

SEQ ID NO: 949301 - RNA, 19 nt, Artificial Sequence
  Description of Artificial Sequence: Synthetic oligonucleotide
  Antisense strand to SEQ ID NO: 949300
cguuauaaagcuuuauuca

SEQ ID NO: 949302 - RNA, 19 nt, Artificial Sequence
  Description of Artificial Sequence: Synthetic oligonucleotide
  Sense strand starting at position 1467 of SEQ ID NO: 913728
ccgcgagcaguuucgagaa

SEQ ID NO: 949303 - RNA, 19 nt, Artificial Sequence
  Description of Artificial Sequence: Synthetic oligonucleotide
  Antisense strand to SEQ ID NO: 949302
uucucgaaacugcucgcgg

SEQ ID NO: 949304 - RNA, 19 nt, Artificial Sequence
  Description of Artificial Sequence: Synthetic oligonucleotide
  Sense strand starting at position 268 of SEQ ID NO: 913728
guaagagucaacuaaugug

SEQ ID NO: 949305 - RNA, 19 nt, Artificial Sequence
  Description of Artificial Sequence: Synthetic oligonucleotide
  Antisense strand to SEQ ID NO: 949304
cacauuaguugacucuuac

SEQ ID NO: 949306 - RNA, 19 nt, Artificial Sequence
  Description of Artificial Sequence: Synthetic oligonucleotide
  Sense strand starting at position 225 of SEQ ID NO: 913728
cugagcauguaauuagaaa

SEQ ID NO: 949307 - RNA, 19 nt, Artificial Sequence
  Description of Artificial Sequence: Synthetic oligonucleotide
  Antisense strand to SEQ ID NO: 949306
uuucuaauuacaugcucag

SEQ ID NO: 949308 - RNA, 19 nt, Artificial Sequence
  Description of Artificial Sequence: Synthetic oligonucleotide
  Sense strand starting at position 750 of SEQ ID NO: 913728
ggaggauccguugagcaca

SEQ ID NO: 949309 - RNA, 19 nt, Artificial Sequence
  Description of Artificial Sequence: Synthetic oligonucleotide
  Antisense strand to SEQ ID NO: 949308
ugugcucaacggauccucc

SEQ ID NO: 949310 - RNA, 19 nt, Artificial Sequence
  Description of Artificial Sequence: Synthetic oligonucleotide
  Sense strand starting at position 2639 of SEQ ID NO: 913728
cagguuugcggcgcuuaaa

SEQ ID NO: 949311 - RNA, 19 nt, Artificial Sequence
  Description of Artificial Sequence: Synthetic oligonucleotide
  Antisense strand to SEQ ID NO: 949310
uuuaagcgccgcaaaccug

SEQ ID NO: 949312 - RNA, 19 nt, Artificial Sequence
  Description of Artificial Sequence: Synthetic oligonucleotide
  Sense strand starting at position 1236 of SEQ ID NO: 913728
gaauuauaugcguguauuu

SEQ ID NO: 949313 - RNA, 19 nt, Artificial Sequence
  Description of Artificial Sequence: Synthetic oligonucleotide
  Antisense strand to SEQ ID NO: 949312
aaauacacgcauauaauuc

SEQ ID NO: 949314 - RNA, 19 nt, Artificial Sequence
  Description of Artificial Sequence: Synthetic oligonucleotide
  Sense strand starting at position 1014 of SEQ ID NO: 913728
agaucuucuugcuuaggaa

SEQ ID NO: 949315 - RNA, 19 nt, Artificial Sequence
  Description of Artificial Sequence: Synthetic oligonucleotide
  Antisense strand to SEQ ID NO: 949314
uuccuaagcaagaagaucu

SEQ ID NO: 949316 - RNA, 19 nt, Artificial Sequence
  Description of Artificial Sequence: Synthetic oligonucleotide
  Sense strand starting at position 215 of SEQ ID NO: 913728
uggaguaguccugagcaug

SEQ ID NO: 949317 - RNA, 19 nt, Artificial Sequence
  Description of Artificial Sequence: Synthetic oligonucleotide
  Antisense strand to SEQ ID NO: 949316
caugcucaggacuacucca

SEQ ID NO: 949318 - RNA, 19 nt, Artificial Sequence
  Description of Artificial Sequence: Synthetic oligonucleotide
  Sense strand starting at position 955 of SEQ ID NO: 913728
ggccgauaaugacucuaau

SEQ ID NO: 949319 - RNA, 19 nt, Artificial Sequence
  Description of Artificial Sequence: Synthetic oligonucleotide
  Antisense strand to SEQ ID NO: 949318
auuagagucauuaucggcc

SEQ ID NO: 949320 - RNA, 19 nt, Artificial Sequence
  Description of Artificial Sequence: Synthetic oligonucleotide
  Sense strand starting at position 138 of SEQ ID NO: 913728
aauugugucccuggacaca

SEQ ID NO: 949321 - RNA, 19 nt, Artificial Sequence
  Description of Artificial Sequence: Synthetic oligonucleotide
  Antisense strand to SEQ ID NO: 949320
uguguccagggacacaauu

SEQ ID NO: 949322 - RNA, 19 nt, Artificial Sequence
  Description of Artificial Sequence: Synthetic oligonucleotide
  Sense strand starting at position 218 of SEQ ID NO: 913728
aguaguccugagcauguaa

SEQ ID NO: 949323 - RNA, 19 nt, Artificial Sequence
  Description of Artificial Sequence: Synthetic oligonucleotide
  Antisense strand to SEQ ID NO: 949322
uuacaugcucaggacuacu

SEQ ID NO: 949324 - RNA, 19 nt, Artificial Sequence
  Description of Artificial Sequence: Synthetic oligonucleotide
  Sense strand starting at position 2003 of SEQ ID NO: 913728
ggaagucuugugcaacucu

SEQ ID NO: 949325 - RNA, 19 nt, Artificial Sequence
  Description of Artificial Sequence: Synthetic oligonucleotide
  Antisense strand to SEQ ID NO: 949324
agaguugcacaagacuucc

SEQ ID NO: 949326 - RNA, 19 nt, Artificial Sequence
  Description of Artificial Sequence: Synthetic oligonucleotide
  Sense strand starting at position 136 of SEQ ID NO: 913728
ccaauugugucccuggaca

SEQ ID NO: 949327 - RNA, 19 nt, Artificial Sequence
  Description of Artificial Sequence: Synthetic oligonucleotide
  Antisense strand to SEQ ID NO: 949326
uguccagggacacaauugg

SEQ ID NO: 949328 - RNA, 19 nt, Artificial Sequence
  Description of Artificial Sequence: Synthetic oligonucleotide
  Sense strand starting at position 982 of SEQ ID NO: 913728
ugcacaccggaauguaaua

SEQ ID NO: 949329 - RNA, 19 nt, Artificial Sequence
  Description of Artificial Sequence: Synthetic oligonucleotide
  Antisense strand to SEQ ID NO: 949328
uauuacauuccggugugca

SEQ ID NO: 949330 - RNA, 19 nt, Artificial Sequence
  Description of Artificial Sequence: Synthetic oligonucleotide
  Sense strand starting at position 1107 of SEQ ID NO: 913728
acgagucacuuugcaggaa

SEQ ID NO: 949331 - RNA, 19 nt, Artificial Sequence
  Description of Artificial Sequence: Synthetic oligonucleotide
  Antisense strand to SEQ ID NO: 949330
uuccugcaaagugacucgu

SEQ ID NO: 949332 - RNA, 19 nt, Artificial Sequence
  Description of Artificial Sequence: Synthetic oligonucleotide
  Sense strand starting at position 3489 of SEQ ID NO: 913728
ggacguuucuggagaggag

SEQ ID NO: 949333 - RNA, 19 nt, Artificial Sequence
  Description of Artificial Sequence: Synthetic oligonucleotide
  Antisense strand to SEQ ID NO: 949332
cuccucuccagaaacgucc

SEQ ID NO: 949334 - RNA, 19 nt, Artificial Sequence
  Description of Artificial Sequence: Synthetic oligonucleotide
  Sense strand starting at position 1233 of SEQ ID NO: 913728
aaagaauuauaugcgugua

SEQ ID NO: 949335 - RNA, 19 nt, Artificial Sequence
  Description of Artificial Sequence: Synthetic oligonucleotide
  Antisense strand to SEQ ID NO: 949334
uacacgcauauaauucuuu

SEQ ID NO: 949336 - RNA, 19 nt, Artificial Sequence
  Description of Artificial Sequence: Synthetic oligonucleotide
  Sense strand starting at position 2758 of SEQ ID NO: 913728
uucggauagucucccuaau

SEQ ID NO: 949337 - RNA, 19 nt, Artificial Sequence
  Description of Artificial Sequence: Synthetic oligonucleotide
  Antisense strand to SEQ ID NO: 949336
auuagggagacuauccgaa

SEQ ID NO: 949338 - RNA, 19 nt, Artificial Sequence
  Description of Artificial Sequence: Synthetic oligonucleotide
  Sense strand starting at position 2760 of SEQ ID NO: 913728
cggauagucucccuaaucu

SEQ ID NO: 949339 - RNA, 19 nt, Artificial Sequence
  Description of Artificial Sequence: Synthetic oligonucleotide
  Antisense strand to SEQ ID NO: 949338
agauuagggagacuauccg

SEQ ID NO: 949340 - RNA, 19 nt, Artificial Sequence
  Description of Artificial Sequence: Synthetic oligonucleotide
  Sense strand starting at position 3726 of SEQ ID NO: 913728
ccaguaauuugggaggcua

SEQ ID NO: 949341 - RNA, 19 nt, Artificial Sequence
  Description of Artificial Sequence: Synthetic oligonucleotide
  Antisense strand to SEQ ID NO: 949340
uagccucccaaauuacugg

SEQ ID NO: 949342 - RNA, 19 nt, Artificial Sequence
  Description of Artificial Sequence: Synthetic oligonucleotide
  Sense strand starting at position 1735 of SEQ ID NO: 913728
acaaguuuccuacgagcag

SEQ ID NO: 949343 - RNA, 19 nt, Artificial Sequence
  Description of Artificial Sequence: Synthetic oligonucleotide
  Antisense strand to SEQ ID NO: 949342
cugcucguaggaaacuugu

SEQ ID NO: 949344 - RNA, 19 nt, Artificial Sequence
  Description of Artificial Sequence: Synthetic oligonucleotide
  Sense strand starting at position 1823 of SEQ ID NO: 913728
gcgcgcacgagucagauuu

SEQ ID NO: 949345 - RNA, 19 nt, Artificial Sequence
  Description of Artificial Sequence: Synthetic oligonucleotide
  Antisense strand to SEQ ID NO: 949344
aaaucugacucgugcgcgc

SEQ ID NO: 949346 - RNA, 19 nt, Artificial Sequence
  Description of Artificial Sequence: Synthetic oligonucleotide
  Sense strand starting at position 3485 of SEQ ID NO: 913728
gcgaggacguuucuggaga

SEQ ID NO: 949347 - RNA, 19 nt, Artificial Sequence
  Description of Artificial Sequence: Synthetic oligonucleotide
  Antisense strand to SEQ ID NO: 949346
ucuccagaaacguccucgc

SEQ ID NO: 949348 - RNA, 19 nt, Artificial Sequence
  Description of Artificial Sequence: Synthetic oligonucleotide
  Sense strand starting at position 220 of SEQ ID NO: 913728
uaguccugagcauguaauu

SEQ ID NO: 949349 - RNA, 19 nt, Artificial Sequence
  Description of Artificial Sequence: Synthetic oligonucleotide
  Antisense strand to SEQ ID NO: 949348
aauuacaugcucaggacua

SEQ ID NO: 949350 - RNA, 19 nt, Artificial Sequence
  Description of Artificial Sequence: Synthetic oligonucleotide
  Sense strand starting at position 512 of SEQ ID NO: 913728
gcuuuauaacgcuacccuu

SEQ ID NO: 949351 - RNA, 19 nt, Artificial Sequence
  Description of Artificial Sequence: Synthetic oligonucleotide
  Antisense strand to SEQ ID NO: 949350
aaggguagcguuauaaagc

SEQ ID NO: 949352 - RNA, 19 nt, Artificial Sequence
  Description of Artificial Sequence: Synthetic oligonucleotide
  Sense strand starting at position 614 of SEQ ID NO: 913728
gugagaaucgcuugagcac

SEQ ID NO: 949353 - RNA, 19 nt, Artificial Sequence
  Description of Artificial Sequence: Synthetic oligonucleotide
  Antisense strand to SEQ ID NO: 949352
gugcucaagcgauucucac

SEQ ID NO: 949354 - RNA, 19 nt, Artificial Sequence
  Description of Artificial Sequence: Synthetic oligonucleotide
  Sense strand starting at position 3630 of SEQ ID NO: 913728
acugaaaugugcgccgaaa

SEQ ID NO: 949355 - RNA, 19 nt, Artificial Sequence
  Description of Artificial Sequence: Synthetic oligonucleotide
  Antisense strand to SEQ ID NO: 949354
uuucggcgcacauuucagu

SEQ ID NO: 949356 - RNA, 19 nt, Artificial Sequence
  Description of Artificial Sequence: Synthetic oligonucleotide
  Sense strand starting at position 2430 of SEQ ID NO: 913728
gcgcuuuccugacuccaaa

SEQ ID NO: 949357 - RNA, 19 nt, Artificial Sequence
  Description of Artificial Sequence: Synthetic oligonucleotide
  Antisense strand to SEQ ID NO: 949356
uuuggagucaggaaagcgc

SEQ ID NO: 949358 - RNA, 19 nt, Artificial Sequence
  Description of Artificial Sequence: Synthetic oligonucleotide
  Sense strand starting at position 3629 of SEQ ID NO: 913728
cacugaaaugugcgccgaa

SEQ ID NO: 949359 - RNA, 19 nt, Artificial Sequence
  Description of Artificial Sequence: Synthetic oligonucleotide
  Antisense strand to SEQ ID NO: 949358
uucggcgcacauuucagug

SEQ ID NO: 949360 - RNA, 19 nt, Artificial Sequence
  Description of Artificial Sequence: Synthetic oligonucleotide
  Sense strand starting at position 1018 of SEQ ID NO: 913728
cuucuugcuuaggaauaaa

SEQ ID NO: 949361 - RNA, 19 nt, Artificial Sequence
  Description of Artificial Sequence: Synthetic oligonucleotide
  Antisense strand to SEQ ID NO: 949360
uuuauuccuaagcaagaag

SEQ ID NO: 949362 - RNA, 19 nt, Artificial Sequence
  Description of Artificial Sequence: Synthetic oligonucleotide
  Sense strand starting at position 1090 of SEQ ID NO: 913728
uaaauucugugagagcaac

SEQ ID NO: 949363 - RNA, 19 nt, Artificial Sequence
  Description of Artificial Sequence: Synthetic oligonucleotide
  Antisense strand to SEQ ID NO: 949362
guugcucucacagaauuua

SEQ ID NO: 949364 - RNA, 19 nt, Artificial Sequence
  Description of Artificial Sequence: Synthetic oligonucleotide
  Sense strand starting at position 1085 of SEQ ID NO: 913728
guuuauaaauucugugaga

SEQ ID NO: 949365 - RNA, 19 nt, Artificial Sequence
  Description of Artificial Sequence: Synthetic oligonucleotide
  Antisense strand to SEQ ID NO: 949364
ucucacagaauuuauaaac

SEQ ID NO: 949366 - RNA, 19 nt, Artificial Sequence
  Description of Artificial Sequence: Synthetic oligonucleotide
  Sense strand starting at position 1108 of SEQ ID NO: 913728
cgagucacuuugcaggaau

SEQ ID NO: 949367 - RNA, 19 nt, Artificial Sequence
  Description of Artificial Sequence: Synthetic oligonucleotide
  Antisense strand to SEQ ID NO: 949366
auuccugcaaagugacucg

SEQ ID NO: 949368 - RNA, 19 nt, Artificial Sequence
  Description of Artificial Sequence: Synthetic oligonucleotide
  Sense strand starting at position 2638 of SEQ ID NO: 913728
ccagguuugcggcgcuuaa

SEQ ID NO: 949369 - RNA, 19 nt, Artificial Sequence
  Description of Artificial Sequence: Synthetic oligonucleotide
  Antisense strand to SEQ ID NO: 949368
uuaagcgccgcaaaccugg

SEQ ID NO: 949370 - RNA, 19 nt, Artificial Sequence
  Description of Artificial Sequence: Synthetic oligonucleotide
  Sense strand starting at position 1017 of SEQ ID NO: 913728
ucuucuugcuuaggaauaa

SEQ ID NO: 949371 - RNA, 19 nt, Artificial Sequence
  Description of Artificial Sequence: Synthetic oligonucleotide
  Antisense strand to SEQ ID NO: 949370
uuauuccuaagcaagaaga

SEQ ID NO: 949372 - RNA, 19 nt, Artificial Sequence
  Description of Artificial Sequence: Synthetic oligonucleotide
  Sense strand starting at position 271 of SEQ ID NO: 913728
agagucaacuaaugugguu

SEQ ID NO: 949373 - RNA, 19 nt, Artificial Sequence
  Description of Artificial Sequence: Synthetic oligonucleotide
  Antisense strand to SEQ ID NO: 949372
aaccacauuaguugacucu

SEQ ID NO: 949374 - RNA, 19 nt, Artificial Sequence
  Description of Artificial Sequence: Synthetic oligonucleotide
  Sense strand starting at position 2001 of SEQ ID NO: 913728
aaggaagucuugugcaacu

SEQ ID NO: 949375 - RNA, 19 nt, Artificial Sequence
  Description of Artificial Sequence: Synthetic oligonucleotide
  Antisense strand to SEQ ID NO: 949374
aguugcacaagacuuccuu

SEQ ID NO: 949376 - RNA, 19 nt, Artificial Sequence
  Description of Artificial Sequence: Synthetic oligonucleotide
  Sense strand starting at position 1469 of SEQ ID NO: 913728
gcgagcaguuucgagaacu

SEQ ID NO: 949377 - RNA, 19 nt, Artificial Sequence
  Description of Artificial Sequence: Synthetic oligonucleotide
  Antisense strand to SEQ ID NO: 949376
aguucucgaaacugcucgc

SEQ ID NO: 949378 - RNA, 19 nt, Artificial Sequence
  Description of Artificial Sequence: Synthetic oligonucleotide
  Sense strand starting at position 2650 of SEQ ID NO: 913728
cgcuuaaacucagaucgcu

SEQ ID NO: 949379 - RNA, 19 nt, Artificial Sequence
  Description of Artificial Sequence: Synthetic oligonucleotide
  Antisense strand to SEQ ID NO: 949378
agcgaucugaguuuaagcg

SEQ ID NO: 949380 - RNA, 19 nt, Artificial Sequence
  Description of Artificial Sequence: Synthetic oligonucleotide
  Sense strand starting at position 3761 of SEQ ID NO: 913729
gagaauaacuguccaugau

SEQ ID NO: 949381 - RNA, 19 nt, Artificial Sequence
  Description of Artificial Sequence: Synthetic oligonucleotide
  Antisense strand to SEQ ID NO: 949380
aucauggacaguuauucuc

SEQ ID NO: 949382 - RNA, 19 nt, Artificial Sequence
  Description of Artificial Sequence: Synthetic oligonucleotide
  Sense strand starting at position 409 of SEQ ID NO: 913729
uuguuuaucccugcgugau

SEQ ID NO: 949383 - RNA, 19 nt, Artificial Sequence
  Description of Artificial Sequence: Synthetic oligonucleotide
  Antisense strand to SEQ ID NO: 949382
aucacgcagggauaaacaa

SEQ ID NO: 949384 - RNA, 19 nt, Artificial Sequence
  Description of Artificial Sequence: Synthetic oligonucleotide
  Sense strand starting at position 2179 of SEQ ID NO: 913729
aagagaagccagcaaguua

SEQ ID NO: 949385 - RNA, 19 nt, Artificial Sequence
  Description of Artificial Sequence: Synthetic oligonucleotide
  Antisense strand to SEQ ID NO: 949384
uaacuugcuggcuucucuu

SEQ ID NO: 949386 - RNA, 19 nt, Artificial Sequence
  Description of Artificial Sequence: Synthetic oligonucleotide
  Sense strand starting at position 3725 of SEQ ID NO: 913729
uuugaaguuguccacaaag

SEQ ID NO: 949387 - RNA, 19 nt, Artificial Sequence
  Description of Artificial Sequence: Synthetic oligonucleotide
  Antisense strand to SEQ ID NO: 949386
cuuuguggacaacuucaaa

SEQ ID NO: 949388 - RNA, 19 nt, Artificial Sequence
  Description of Artificial Sequence: Synthetic oligonucleotide
  Sense strand starting at position 3645 of SEQ ID NO: 913729
cagaauuaugguuauguua

SEQ ID NO: 949389 - RNA, 19 nt, Artificial Sequence
  Description of Artificial Sequence: Synthetic oligonucleotide
  Antisense strand to SEQ ID NO: 949388
uaacauaaccauaauucug

SEQ ID NO: 949390 - RNA, 19 nt, Artificial Sequence
  Description of Artificial Sequence: Synthetic oligonucleotide
  Sense strand starting at position 215 of SEQ ID NO: 913729
agugauuauuacuuaagac

SEQ ID NO: 949391 - RNA, 19 nt, Artificial Sequence
  Description of Artificial Sequence: Synthetic oligonucleotide
  Antisense strand to SEQ ID NO: 949390
gucuuaaguaauaaucacu

SEQ ID NO: 949392 - RNA, 19 nt, Artificial Sequence
  Description of Artificial Sequence: Synthetic oligonucleotide
  Sense strand starting at position 2574 of SEQ ID NO: 913729
gaaacaagaugugcuauga

SEQ ID NO: 949393 - RNA, 19 nt, Artificial Sequence
  Description of Artificial Sequence: Synthetic oligonucleotide
  Antisense strand to SEQ ID NO: 949392
ucauagcacaucuuguuuc

SEQ ID NO: 949394 - RNA, 19 nt, Artificial Sequence
  Description of Artificial Sequence: Synthetic oligonucleotide
  Sense strand starting at position 2544 of SEQ ID NO: 913729
ucagauuacguggaaagug

SEQ ID NO: 949395 - RNA, 19 nt, Artificial Sequence
  Description of Artificial Sequence: Synthetic oligonucleotide
  Antisense strand to SEQ ID NO: 949394
cacuuuccacguaaucuga

SEQ ID NO: 949396 - RNA, 19 nt, Artificial Sequence
  Description of Artificial Sequence: Synthetic oligonucleotide
  Sense strand starting at position 3566 of SEQ ID NO: 913729
ugauguagacugugggaaa

SEQ ID NO: 949397 - RNA, 19 nt, Artificial Sequence
  Description of Artificial Sequence: Synthetic oligonucleotide
  Antisense strand to SEQ ID NO: 949396
uuucccacagucuacauca

SEQ ID NO: 949398 - RNA, 19 nt, Artificial Sequence
  Description of Artificial Sequence: Synthetic oligonucleotide
  Sense strand starting at position 781 of SEQ ID NO: 913729
acagguuggacgggauuaa

SEQ ID NO: 949399 - RNA, 19 nt, Artificial Sequence
  Description of Artificial Sequence: Synthetic oligonucleotide
  Antisense strand to SEQ ID NO: 949398
uuaaucccguccaaccugu

SEQ ID NO: 949400 - RNA, 19 nt, Artificial Sequence
  Description of Artificial Sequence: Synthetic oligonucleotide
  Sense strand starting at position 3765 of SEQ ID NO: 913729
auaacuguccaugauuagu

SEQ ID NO: 949401 - RNA, 19 nt, Artificial Sequence
  Description of Artificial Sequence: Synthetic oligonucleotide
  Antisense strand to SEQ ID NO: 949400
acuaaucauggacaguuau

SEQ ID NO: 949402 - RNA, 19 nt, Artificial Sequence
  Description of Artificial Sequence: Synthetic oligonucleotide
  Sense strand starting at position 3727 of SEQ ID NO: 913729
ugaaguuguccacaaagua

SEQ ID NO: 949403 - RNA, 19 nt, Artificial Sequence
  Description of Artificial Sequence: Synthetic oligonucleotide
  Antisense strand to SEQ ID NO: 949402
uacuuuguggacaacuuca

SEQ ID NO: 949404 - RNA, 19 nt, Artificial Sequence
  Description of Artificial Sequence: Synthetic oligonucleotide
  Sense strand starting at position 370 of SEQ ID NO: 913729
ggaacccagucaucuuaau

SEQ ID NO: 949405 - RNA, 19 nt, Artificial Sequence
  Description of Artificial Sequence: Synthetic oligonucleotide
  Antisense strand to SEQ ID NO: 949404
auuaagaugacuggguucc

SEQ ID NO: 949406 - RNA, 19 nt, Artificial Sequence
  Description of Artificial Sequence: Synthetic oligonucleotide
  Sense strand starting at position 2409 of SEQ ID NO: 913729
ucgauaauaugaucaguga

SEQ ID NO: 949407 - RNA, 19 nt, Artificial Sequence
  Description of Artificial Sequence: Synthetic oligonucleotide
  Antisense strand to SEQ ID NO: 949406
ucacugaucauauuaucga

SEQ ID NO: 949408 - RNA, 19 nt, Artificial Sequence
  Description of Artificial Sequence: Synthetic oligonucleotide
  Sense strand starting at position 2606 of SEQ ID NO: 913729
auuaaagcuccugauguau

SEQ ID NO: 949409 - RNA, 19 nt, Artificial Sequence
  Description of Artificial Sequence: Synthetic oligonucleotide
  Antisense strand to SEQ ID NO: 949408
auacaucaggagcuuuaau

SEQ ID NO: 949410 - RNA, 19 nt, Artificial Sequence
  Description of Artificial Sequence: Synthetic oligonucleotide
  Sense strand starting at position 3644 of SEQ ID NO: 913729
acagaauuaugguuauguu

SEQ ID NO: 949411 - RNA, 19 nt, Artificial Sequence
  Description of Artificial Sequence: Synthetic oligonucleotide
  Antisense strand to SEQ ID NO: 949410
aacauaaccauaauucugu

SEQ ID NO: 949412 - RNA, 19 nt, Artificial Sequence
  Description of Artificial Sequence: Synthetic oligonucleotide
  Sense strand starting at position 2578 of SEQ ID NO: 913729
caagaugugcuaugaacua

SEQ ID NO: 949413 - RNA, 19 nt, Artificial Sequence
  Description of Artificial Sequence: Synthetic oligonucleotide
  Antisense strand to SEQ ID NO: 949412
uaguucauagcacaucuug

SEQ ID NO: 949414 - RNA, 19 nt, Artificial Sequence
  Description of Artificial Sequence: Synthetic oligonucleotide
  Sense strand starting at position 2089 of SEQ ID NO: 913729
ccgaguucucccgaaggga

SEQ ID NO: 949415 - RNA, 19 nt, Artificial Sequence
  Description of Artificial Sequence: Synthetic oligonucleotide
  Antisense strand to SEQ ID NO: 949414
ucccuucgggagaacucgg

SEQ ID NO: 949416 - RNA, 19 nt, Artificial Sequence
  Description of Artificial Sequence: Synthetic oligonucleotide
  Sense strand starting at position 421 of SEQ ID NO: 913729
gcgugauccacagaccaac

SEQ ID NO: 949417 - RNA, 19 nt, Artificial Sequence
  Description of Artificial Sequence: Synthetic oligonucleotide
  Antisense strand to SEQ ID NO: 949416
guuggucuguggaucacgc

SEQ ID NO: 949418 - RNA, 19 nt, Artificial Sequence
  Description of Artificial Sequence: Synthetic oligonucleotide
  Sense strand starting at position 3795 of SEQ ID NO: 913729
cugugugacaggcacauua

SEQ ID NO: 949419 - RNA, 19 nt, Artificial Sequence
  Description of Artificial Sequence: Synthetic oligonucleotide
  Antisense strand to SEQ ID NO: 949418
uaaugugccugucacacag

SEQ ID NO: 949420 - RNA, 19 nt, Artificial Sequence
  Description of Artificial Sequence: Synthetic oligonucleotide
  Sense strand starting at position 1251 of SEQ ID NO: 913729
cagaaauccaagugguggu

SEQ ID NO: 949421 - RNA, 19 nt, Artificial Sequence
  Description of Artificial Sequence: Synthetic oligonucleotide
  Antisense strand to SEQ ID NO: 949420
accaccacuuggauuucug

SEQ ID NO: 949422 - RNA, 19 nt, Artificial Sequence
  Description of Artificial Sequence: Synthetic oligonucleotide
  Sense strand starting at position 255 of SEQ ID NO: 913729
uggaaagcauuacauuuau

SEQ ID NO: 949423 - RNA, 19 nt, Artificial Sequence
  Description of Artificial Sequence: Synthetic oligonucleotide
  Antisense strand to SEQ ID NO: 949422
auaaauguaaugcuuucca

SEQ ID NO: 949424 - RNA, 19 nt, Artificial Sequence
  Description of Artificial Sequence: Synthetic oligonucleotide
  Sense strand starting at position 80 of SEQ ID NO: 913729
ggcugagggcuauggaauu

SEQ ID NO: 949425 - RNA, 19 nt, Artificial Sequence
  Description of Artificial Sequence: Synthetic oligonucleotide
  Antisense strand to SEQ ID NO: 949424
aauuccauagcccucagcc

SEQ ID NO: 949426 - RNA, 19 nt, Artificial Sequence
  Description of Artificial Sequence: Synthetic oligonucleotide
  Sense strand starting at position 2541 of SEQ ID NO: 913729
guuucagauuacguggaaa

SEQ ID NO: 949427 - RNA, 19 nt, Artificial Sequence
  Description of Artificial Sequence: Synthetic oligonucleotide
  Antisense strand to SEQ ID NO: 949426
uuuccacguaaucugaaac

SEQ ID NO: 949428 - RNA, 19 nt, Artificial Sequence
  Description of Artificial Sequence: Synthetic oligonucleotide
  Sense strand starting at position 419 of SEQ ID NO: 913729
cugcgugauccacagacca

SEQ ID NO: 949429 - RNA, 19 nt, Artificial Sequence
  Description of Artificial Sequence: Synthetic oligonucleotide
  Antisense strand to SEQ ID NO: 949428
uggucuguggaucacgcag

SEQ ID NO: 949430 - RNA, 19 nt, Artificial Sequence
  Description of Artificial Sequence: Synthetic oligonucleotide
  Sense strand starting at position 2543 of SEQ ID NO: 913729
uucagauuacguggaaagu

SEQ ID NO: 949431 - RNA, 19 nt, Artificial Sequence
  Description of Artificial Sequence: Synthetic oligonucleotide
  Antisense strand to SEQ ID NO: 949430
acuuuccacguaaucugaa

SEQ ID NO: 949432 - RNA, 19 nt, Artificial Sequence
  Description of Artificial Sequence: Synthetic oligonucleotide
  Sense strand starting at position 3937 of SEQ ID NO: 913729
ucucuaugaugcccagacu

SEQ ID NO: 949433 - RNA, 19 nt, Artificial Sequence
  Description of Artificial Sequence: Synthetic oligonucleotide
  Antisense strand to SEQ ID NO: 949432
agucugggcaucauagaga

SEQ ID NO: 949434 - RNA, 19 nt, Artificial Sequence
  Description of Artificial Sequence: Synthetic oligonucleotide
  Sense strand starting at position 159 of SEQ ID NO: 913729
ugaaccuguugucuuaaca

SEQ ID NO: 949435 - RNA, 19 nt, Artificial Sequence
  Description of Artificial Sequence: Synthetic oligonucleotide
  Antisense strand to SEQ ID NO: 949434
uguuaagacaacagguuca

SEQ ID NO: 949436 - RNA, 19 nt, Artificial Sequence
  Description of Artificial Sequence: Synthetic oligonucleotide
  Sense strand starting at position 205 of SEQ ID NO: 913729
gcaaacuuccagugauuau

SEQ ID NO: 949437 - RNA, 19 nt, Artificial Sequence
  Description of Artificial Sequence: Synthetic oligonucleotide
  Antisense strand to SEQ ID NO: 949436
auaaucacuggaaguuugc

SEQ ID NO: 949438 - RNA, 19 nt, Artificial Sequence
  Description of Artificial Sequence: Synthetic oligonucleotide
  Sense strand starting at position 3724 of SEQ ID NO: 913729
guuugaaguuguccacaaa

SEQ ID NO: 949439 - RNA, 19 nt, Artificial Sequence
  Description of Artificial Sequence: Synthetic oligonucleotide
  Antisense strand to SEQ ID NO: 949438
uuuguggacaacuucaaac

SEQ ID NO: 949440 - RNA, 19 nt, Artificial Sequence
  Description of Artificial Sequence: Synthetic oligonucleotide
  Sense strand starting at position 3788 of SEQ ID NO: 913729
guugaaucugugugacagg

SEQ ID NO: 949441 - RNA, 19 nt, Artificial Sequence
  Description of Artificial Sequence: Synthetic oligonucleotide
  Antisense strand to SEQ ID NO: 949440
ccugucacacagauucaac

SEQ ID NO: 949442 - RNA, 19 nt, Artificial Sequence
  Description of Artificial Sequence: Synthetic oligonucleotide
  Sense strand starting at position 859 of SEQ ID NO: 913729
cggcuaucugcagaguaaa

SEQ ID NO: 949443 - RNA, 19 nt, Artificial Sequence
  Description of Artificial Sequence: Synthetic oligonucleotide
  Antisense strand to SEQ ID NO: 949442
uuuacucugcagauagccg

SEQ ID NO: 949444 - RNA, 19 nt, Artificial Sequence
  Description of Artificial Sequence: Synthetic oligonucleotide
  Sense strand starting at position 1898 of SEQ ID NO: 913729
gaggccucgugauccaaga

SEQ ID NO: 949445 - RNA, 19 nt, Artificial Sequence
  Description of Artificial Sequence: Synthetic oligonucleotide
  Antisense strand to SEQ ID NO: 949444
ucuuggaucacgaggccuc

SEQ ID NO: 949446 - RNA, 19 nt, Artificial Sequence
  Description of Artificial Sequence: Synthetic oligonucleotide
  Sense strand starting at position 91 of SEQ ID NO: 913729
auggaauucugagaacuaa

SEQ ID NO: 949447 - RNA, 19 nt, Artificial Sequence
  Description of Artificial Sequence: Synthetic oligonucleotide
  Antisense strand to SEQ ID NO: 949446
uuaguucucagaauuccau

SEQ ID NO: 949448 - RNA, 19 nt, Artificial Sequence
  Description of Artificial Sequence: Synthetic oligonucleotide
  Sense strand starting at position 517 of SEQ ID NO: 913729
gcuguaagccuguagacca

SEQ ID NO: 949449 - RNA, 19 nt, Artificial Sequence
  Description of Artificial Sequence: Synthetic oligonucleotide
  Antisense strand to SEQ ID NO: 949448
uggucuacaggcuuacagc

SEQ ID NO: 949450 - RNA, 19 nt, Artificial Sequence
  Description of Artificial Sequence: Synthetic oligonucleotide
  Sense strand starting at position 3698 of SEQ ID NO: 913729
ugaaauauuugugauggcu

SEQ ID NO: 949451 - RNA, 19 nt, Artificial Sequence
  Description of Artificial Sequence: Synthetic oligonucleotide
  Antisense strand to SEQ ID NO: 949450
agccaucacaaauauuuca

SEQ ID NO: 949452 - RNA, 19 nt, Artificial Sequence
  Description of Artificial Sequence: Synthetic oligonucleotide
  Sense strand starting at position 103 of SEQ ID NO: 913729
gaacuaagcugcuugaguu

SEQ ID NO: 949453 - RNA, 19 nt, Artificial Sequence
  Description of Artificial Sequence: Synthetic oligonucleotide
  Antisense strand to SEQ ID NO: 949452
aacucaagcagcuuaguuc

SEQ ID NO: 949454 - RNA, 19 nt, Artificial Sequence
  Description of Artificial Sequence: Synthetic oligonucleotide
  Sense strand starting at position 772 of SEQ ID NO: 913729
cgcagugauacagguugga

SEQ ID NO: 949455 - RNA, 19 nt, Artificial Sequence
  Description of Artificial Sequence: Synthetic oligonucleotide
  Antisense strand to SEQ ID NO: 949454
uccaaccuguaucacugcg

SEQ ID NO: 949456 - RNA, 19 nt, Artificial Sequence
  Description of Artificial Sequence: Synthetic oligonucleotide
  Sense strand starting at position 857 of SEQ ID NO: 913729
uucggcuaucugcagagua

SEQ ID NO: 949457 - RNA, 19 nt, Artificial Sequence
  Description of Artificial Sequence: Synthetic oligonucleotide
  Antisense strand to SEQ ID NO: 949456
uacucugcagauagccgaa

SEQ ID NO: 949458 - RNA, 19 nt, Artificial Sequence
  Description of Artificial Sequence: Synthetic oligonucleotide
  Sense strand starting at position 766 of SEQ ID NO: 913729
gcucuucgcagugauacag

SEQ ID NO: 949459 - RNA, 19 nt, Artificial Sequence
  Description of Artificial Sequence: Synthetic oligonucleotide
  Antisense strand to SEQ ID NO: 949458
cuguaucacugcgaagagc

SEQ ID NO: 949460 - RNA, 19 nt, Artificial Sequence
  Description of Artificial Sequence: Synthetic oligonucleotide
  Sense strand starting at position 924 of SEQ ID NO: 913730
uuguuuaucccugcgugau

SEQ ID NO: 949461 - RNA, 19 nt, Artificial Sequence
  Description of Artificial Sequence: Synthetic oligonucleotide
  Antisense strand to SEQ ID NO: 949460
aucacgcagggauaaacaa

SEQ ID NO: 949462 - RNA, 19 nt, Artificial Sequence
  Description of Artificial Sequence: Synthetic oligonucleotide
  Sense strand starting at position 2694 of SEQ ID NO: 913730
aagagaagccagcaaguua

SEQ ID NO: 949463 - RNA, 19 nt, Artificial Sequence
  Description of Artificial Sequence: Synthetic oligonucleotide
  Antisense strand to SEQ ID NO: 949462
uaacuugcuggcuucucuu

SEQ ID NO: 949464 - RNA, 19 nt, Artificial Sequence
  Description of Artificial Sequence: Synthetic oligonucleotide
  Sense strand starting at position 59 of SEQ ID NO: 913730
agggaaacgccuuauugau

SEQ ID NO: 949465 - RNA, 19 nt, Artificial Sequence
  Description of Artificial Sequence: Synthetic oligonucleotide
  Antisense strand to SEQ ID NO: 949464
aucaauaaggcguuucccu

SEQ ID NO: 949466 - RNA, 19 nt, Artificial Sequence
  Description of Artificial Sequence: Synthetic oligonucleotide
  Sense strand starting at position 730 of SEQ ID NO: 913730
agugauuauuacuuaagac

SEQ ID NO: 949467 - RNA, 19 nt, Artificial Sequence
  Description of Artificial Sequence: Synthetic oligonucleotide
  Antisense strand to SEQ ID NO: 949466
gucuuaaguaauaaucacu

SEQ ID NO: 949468 - RNA, 19 nt, Artificial Sequence
  Description of Artificial Sequence: Synthetic oligonucleotide
  Sense strand starting at position 3089 of SEQ ID NO: 913730
gaaacaagaugugcuauga

SEQ ID NO: 949469 - RNA, 19 nt, Artificial Sequence
  Description of Artificial Sequence: Synthetic oligonucleotide
  Antisense strand to SEQ ID NO: 949468
ucauagcacaucuuguuuc

SEQ ID NO: 949470 - RNA, 19 nt, Artificial Sequence
  Description of Artificial Sequence: Synthetic oligonucleotide
  Sense strand starting at position 3059 of SEQ ID NO: 913730
ucagauuacguggaaagug

SEQ ID NO: 949471 - RNA, 19 nt, Artificial Sequence
  Description of Artificial Sequence: Synthetic oligonucleotide
  Antisense strand to SEQ ID NO: 949470
cacuuuccacguaaucuga

SEQ ID NO: 949472 - RNA, 19 nt, Artificial Sequence
  Description of Artificial Sequence: Synthetic oligonucleotide
  Sense strand starting at position 1296 of SEQ ID NO: 913730
acagguuggacgggauuaa

SEQ ID NO: 949473 - RNA, 19 nt, Artificial Sequence
  Description of Artificial Sequence: Synthetic oligonucleotide
  Antisense strand to SEQ ID NO: 949472
uuaaucccguccaaccugu

SEQ ID NO: 949474 - RNA, 19 nt, Artificial Sequence
  Description of Artificial Sequence: Synthetic oligonucleotide
  Sense strand starting at position 497 of SEQ ID NO: 913730
ggguaacuucuuugaaaua

SEQ ID NO: 949475 - RNA, 19 nt, Artificial Sequence
  Description of Artificial Sequence: Synthetic oligonucleotide
  Antisense strand to SEQ ID NO: 949474
uauuucaaagaaguuaccc

SEQ ID NO: 949476 - RNA, 19 nt, Artificial Sequence
  Description of Artificial Sequence: Synthetic oligonucleotide
  Sense strand starting at position 885 of SEQ ID NO: 913730
ggaacccagucaucuuaau

SEQ ID NO: 949477 - RNA, 19 nt, Artificial Sequence
  Description of Artificial Sequence: Synthetic oligonucleotide
  Antisense strand to SEQ ID NO: 949476
auuaagaugacuggguucc

SEQ ID NO: 949478 - RNA, 19 nt, Artificial Sequence
  Description of Artificial Sequence: Synthetic oligonucleotide
  Sense strand starting at position 2924 of SEQ ID NO: 913730
ucgauaauaugaucaguga

SEQ ID NO: 949479 - RNA, 19 nt, Artificial Sequence
  Description of Artificial Sequence: Synthetic oligonucleotide
  Antisense strand to SEQ ID NO: 949478
ucacugaucauauuaucga

SEQ ID NO: 949480 - RNA, 19 nt, Artificial Sequence
  Description of Artificial Sequence: Synthetic oligonucleotide
  Sense strand starting at position 3121 of SEQ ID NO: 913730
auuaaagcuccugauguau

SEQ ID NO: 949481 - RNA, 19 nt, Artificial Sequence
  Description of Artificial Sequence: Synthetic oligonucleotide
  Antisense strand to SEQ ID NO: 949480
auacaucaggagcuuuaau

SEQ ID NO: 949482 - RNA, 19 nt, Artificial Sequence
  Description of Artificial Sequence: Synthetic oligonucleotide
  Sense strand starting at position 495 of SEQ ID NO: 913730
uuggguaacuucuuugaaa

SEQ ID NO: 949483 - RNA, 19 nt, Artificial Sequence
  Description of Artificial Sequence: Synthetic oligonucleotide
  Antisense strand to SEQ ID NO: 949482
uuucaaagaaguuacccaa

SEQ ID NO: 949484 - RNA, 19 nt, Artificial Sequence
  Description of Artificial Sequence: Synthetic oligonucleotide
  Sense strand starting at position 496 of SEQ ID NO: 913730
uggguaacuucuuugaaau

SEQ ID NO: 949485 - RNA, 19 nt, Artificial Sequence
  Description of Artificial Sequence: Synthetic oligonucleotide
  Antisense strand to SEQ ID NO: 949484
auuucaaagaaguuaccca

SEQ ID NO: 949486 - RNA, 19 nt, Artificial Sequence
  Description of Artificial Sequence: Synthetic oligonucleotide
  Sense strand starting at position 74 of SEQ ID NO: 913730
ugaucuugaugagauuuac

SEQ ID NO: 949487 - RNA, 19 nt, Artificial Sequence
  Description of Artificial Sequence: Synthetic oligonucleotide
  Antisense strand to SEQ ID NO: 949486
guaaaucucaucaagauca

SEQ ID NO: 949488 - RNA, 19 nt, Artificial Sequence
  Description of Artificial Sequence: Synthetic oligonucleotide
  Sense strand starting at position 271 of SEQ ID NO: 913730
cccuaagugcugggaggaa

SEQ ID NO: 949489 - RNA, 19 nt, Artificial Sequence
  Description of Artificial Sequence: Synthetic oligonucleotide
  Antisense strand to SEQ ID NO: 949488
uuccucccagcacuuaggg

SEQ ID NO: 949490 - RNA, 19 nt, Artificial Sequence
  Description of Artificial Sequence: Synthetic oligonucleotide
  Sense strand starting at position 3093 of SEQ ID NO: 913730
caagaugugcuaugaacua

SEQ ID NO: 949491 - RNA, 19 nt, Artificial Sequence
  Description of Artificial Sequence: Synthetic oligonucleotide
  Antisense strand to SEQ ID NO: 949490
uaguucauagcacaucuug

SEQ ID NO: 949492 - RNA, 19 nt, Artificial Sequence
  Description of Artificial Sequence: Synthetic oligonucleotide
  Sense strand starting at position 2604 of SEQ ID NO: 913730
ccgaguucucccgaaggga

SEQ ID NO: 949493 - RNA, 19 nt, Artificial Sequence
  Description of Artificial Sequence: Synthetic oligonucleotide
  Antisense strand to SEQ ID NO: 949492
ucccuucgggagaacucgg

SEQ ID NO: 949494 - RNA, 19 nt, Artificial Sequence
  Description of Artificial Sequence: Synthetic oligonucleotide
  Sense strand starting at position 936 of SEQ ID NO: 913730
gcgugauccacagaccaac

SEQ ID NO: 949495 - RNA, 19 nt, Artificial Sequence
  Description of Artificial Sequence: Synthetic oligonucleotide
  Antisense strand to SEQ ID NO: 949494
guuggucuguggaucacgc

SEQ ID NO: 949496 - RNA, 19 nt, Artificial Sequence
  Description of Artificial Sequence: Synthetic oligonucleotide
  Sense strand starting at position 427 of SEQ ID NO: 913730
cagucugauuuauaggaac

SEQ ID NO: 949497 - RNA, 19 nt, Artificial Sequence
  Description of Artificial Sequence: Synthetic oligonucleotide
  Antisense strand to SEQ ID NO: 949496
guuccuauaaaucagacug

SEQ ID NO: 949498 - RNA, 19 nt, Artificial Sequence
  Description of Artificial Sequence: Synthetic oligonucleotide
  Sense strand starting at position 1766 of SEQ ID NO: 913730
cagaaauccaagugguggu

SEQ ID NO: 949499 - RNA, 19 nt, Artificial Sequence
  Description of Artificial Sequence: Synthetic oligonucleotide
  Antisense strand to SEQ ID NO: 949498
accaccacuuggauuucug

SEQ ID NO: 949500 - RNA, 19 nt, Artificial Sequence
  Description of Artificial Sequence: Synthetic oligonucleotide
  Sense strand starting at position 770 of SEQ ID NO: 913730
uggaaagcauuacauuuau

SEQ ID NO: 949501 - RNA, 19 nt, Artificial Sequence
  Description of Artificial Sequence: Synthetic oligonucleotide
  Antisense strand to SEQ ID NO: 949500
auaaauguaaugcuuucca

SEQ ID NO: 949502 - RNA, 19 nt, Artificial Sequence
  Description of Artificial Sequence: Synthetic oligonucleotide
  Sense strand starting at position 406 of SEQ ID NO: 913730
gggugcuugcuagaaauug

SEQ ID NO: 949503 - RNA, 19 nt, Artificial Sequence
  Description of Artificial Sequence: Synthetic oligonucleotide
  Antisense strand to SEQ ID NO: 949502
caauuucuagcaagcaccc

SEQ ID NO: 949504 - RNA, 19 nt, Artificial Sequence
  Description of Artificial Sequence: Synthetic oligonucleotide
  Sense strand starting at position 595 of SEQ ID NO: 913730
ggcugagggcuauggaauu

SEQ ID NO: 949505 - RNA, 19 nt, Artificial Sequence
  Description of Artificial Sequence: Synthetic oligonucleotide
  Antisense strand to SEQ ID NO: 949504
aauuccauagcccucagcc

SEQ ID NO: 949506 - RNA, 19 nt, Artificial Sequence
  Description of Artificial Sequence: Synthetic oligonucleotide
  Sense strand starting at position 3056 of SEQ ID NO: 913730
guuucagauuacguggaaa

SEQ ID NO: 949507 - RNA, 19 nt, Artificial Sequence
  Description of Artificial Sequence: Synthetic oligonucleotide
  Antisense strand to SEQ ID NO: 949506
uuuccacguaaucugaaac

SEQ ID NO: 949508 - RNA, 19 nt, Artificial Sequence
  Description of Artificial Sequence: Synthetic oligonucleotide
  Sense strand starting at position 934 of SEQ ID NO: 913730
cugcgugauccacagacca

SEQ ID NO: 949509 - RNA, 19 nt, Artificial Sequence
  Description of Artificial Sequence: Synthetic oligonucleotide
  Antisense strand to SEQ ID NO: 949508
uggucuguggaucacgcag

SEQ ID NO: 949510 - RNA, 19 nt, Artificial Sequence
  Description of Artificial Sequence: Synthetic oligonucleotide
  Sense strand starting at position 3058 of SEQ ID NO: 913730
uucagauuacguggaaagu

SEQ ID NO: 949511 - RNA, 19 nt, Artificial Sequence
  Description of Artificial Sequence: Synthetic oligonucleotide
  Antisense strand to SEQ ID NO: 949510
acuuuccacguaaucugaa

SEQ ID NO: 949512 - RNA, 19 nt, Artificial Sequence
  Description of Artificial Sequence: Synthetic oligonucleotide
  Sense strand starting at position 84 of SEQ ID NO: 913730
gagauuuacucuugaugag

SEQ ID NO: 949513 - RNA, 19 nt, Artificial Sequence
  Description of Artificial Sequence: Synthetic oligonucleotide
  Antisense strand to SEQ ID NO: 949512
cucaucaagaguaaaucuc

SEQ ID NO: 949514 - RNA, 19 nt, Artificial Sequence
  Description of Artificial Sequence: Synthetic oligonucleotide
  Sense strand starting at position 674 of SEQ ID NO: 913730
ugaaccuguugucuuaaca

SEQ ID NO: 949515 - RNA, 19 nt, Artificial Sequence
  Description of Artificial Sequence: Synthetic oligonucleotide
  Antisense strand to SEQ ID NO: 949514
uguuaagacaacagguuca

SEQ ID NO: 949516 - RNA, 19 nt, Artificial Sequence
  Description of Artificial Sequence: Synthetic oligonucleotide
  Sense strand starting at position 720 of SEQ ID NO: 913730
gcaaacuuccagugauuau

SEQ ID NO: 949517 - RNA, 19 nt, Artificial Sequence
  Description of Artificial Sequence: Synthetic oligonucleotide
  Antisense strand to SEQ ID NO: 949516
auaaucacuggaaguuugc

SEQ ID NO: 949518 - RNA, 19 nt, Artificial Sequence
  Description of Artificial Sequence: Synthetic oligonucleotide
  Sense strand starting at position 61 of SEQ ID NO: 913730
ggaaacgccuuauugaucu

SEQ ID NO: 949519 - RNA, 19 nt, Artificial Sequence
  Description of Artificial Sequence: Synthetic oligonucleotide
  Antisense strand to SEQ ID NO: 949518
agaucaauaaggcguuucc

SEQ ID NO: 949520 - RNA, 19 nt, Artificial Sequence
  Description of Artificial Sequence: Synthetic oligonucleotide
  Sense strand starting at position 1374 of SEQ ID NO: 913730
cggcuaucugcagaguaaa

SEQ ID NO: 949521 - RNA, 19 nt, Artificial Sequence
  Description of Artificial Sequence: Synthetic oligonucleotide
  Antisense strand to SEQ ID NO: 949520
uuuacucugcagauagccg

SEQ ID NO: 949522 - RNA, 19 nt, Artificial Sequence
  Description of Artificial Sequence: Synthetic oligonucleotide
  Sense strand starting at position 2413 of SEQ ID NO: 913730
gaggccucgugauccaaga

SEQ ID NO: 949523 - RNA, 19 nt, Artificial Sequence
  Description of Artificial Sequence: Synthetic oligonucleotide
  Antisense strand to SEQ ID NO: 949522
ucuuggaucacgaggccuc

SEQ ID NO: 949524 - RNA, 19 nt, Artificial Sequence
  Description of Artificial Sequence: Synthetic oligonucleotide
  Sense strand starting at position 87 of SEQ ID NO: 913730
auuuacucuugaugagauu

SEQ ID NO: 949525 - RNA, 19 nt, Artificial Sequence
  Description of Artificial Sequence: Synthetic oligonucleotide
  Antisense strand to SEQ ID NO: 949524
aaucucaucaagaguaaau

SEQ ID NO: 949526 - RNA, 19 nt, Artificial Sequence
  Description of Artificial Sequence: Synthetic oligonucleotide
  Sense strand starting at position 606 of SEQ ID NO: 913730
auggaauucugagaacuaa

SEQ ID NO: 949527 - RNA, 19 nt, Artificial Sequence
  Description of Artificial Sequence: Synthetic oligonucleotide
  Antisense strand to SEQ ID NO: 949526
uuaguucucagaauuccau

SEQ ID NO: 949528 - RNA, 19 nt, Artificial Sequence
  Description of Artificial Sequence: Synthetic oligonucleotide
  Sense strand starting at position 1032 of SEQ ID NO: 913730
gcuguaagccuguagacca

SEQ ID NO: 949529 - RNA, 19 nt, Artificial Sequence
  Description of Artificial Sequence: Synthetic oligonucleotide
  Antisense strand to SEQ ID NO: 949528
uggucuacaggcuuacagc

SEQ ID NO: 949530 - RNA, 19 nt, Artificial Sequence
  Description of Artificial Sequence: Synthetic oligonucleotide
  Sense strand starting at position 65 of SEQ ID NO: 913730
acgccuuauugaucuugau

SEQ ID NO: 949531 - RNA, 19 nt, Artificial Sequence
  Description of Artificial Sequence: Synthetic oligonucleotide
  Antisense strand to SEQ ID NO: 949530
aucaagaucaauaaggcgu

SEQ ID NO: 949532 - RNA, 19 nt, Artificial Sequence
  Description of Artificial Sequence: Synthetic oligonucleotide
  Sense strand starting at position 618 of SEQ ID NO: 913730
gaacuaagcugcuugaguu

SEQ ID NO: 949533 - RNA, 19 nt, Artificial Sequence
  Description of Artificial Sequence: Synthetic oligonucleotide
  Antisense strand to SEQ ID NO: 949532
aacucaagcagcuuaguuc

SEQ ID NO: 949534 - RNA, 19 nt, Artificial Sequence
  Description of Artificial Sequence: Synthetic oligonucleotide
  Sense strand starting at position 1287 of SEQ ID NO: 913730
cgcagugauacagguugga

SEQ ID NO: 949535 - RNA, 19 nt, Artificial Sequence
  Description of Artificial Sequence: Synthetic oligonucleotide
  Antisense strand to SEQ ID NO: 949534
uccaaccuguaucacugcg

SEQ ID NO: 949536 - RNA, 19 nt, Artificial Sequence
  Description of Artificial Sequence: Synthetic oligonucleotide
  Sense strand starting at position 1372 of SEQ ID NO: 913730
uucggcuaucugcagagua

SEQ ID NO: 949537 - RNA, 19 nt, Artificial Sequence
  Description of Artificial Sequence: Synthetic oligonucleotide
  Antisense strand to SEQ ID NO: 949536
uacucugcagauagccgaa

SEQ ID NO: 949538 - RNA, 19 nt, Artificial Sequence
  Description of Artificial Sequence: Synthetic oligonucleotide
  Sense strand starting at position 1281 of SEQ ID NO: 913730
gcucuucgcagugauacag

SEQ ID NO: 949539 - RNA, 19 nt, Artificial Sequence
  Description of Artificial Sequence: Synthetic oligonucleotide
  Antisense strand to SEQ ID NO: 949538
cuguaucacugcgaagagc

SEQ ID NO: 949540 - RNA, 19 nt, Artificial Sequence
  Description of Artificial Sequence: Synthetic oligonucleotide
  Sense strand starting at position 3132 of SEQ ID NO: 913731
acagguuaagcugaacauu

SEQ ID NO: 949541 - RNA, 19 nt, Artificial Sequence
  Description of Artificial Sequence: Synthetic oligonucleotide
  Antisense strand to SEQ ID NO: 949540
aauguucagcuuaaccugu

SEQ ID NO: 949542 - RNA, 19 nt, Artificial Sequence
  Description of Artificial Sequence: Synthetic oligonucleotide
  Sense strand starting at position 110 of SEQ ID NO: 913731
ccgcgagcaguuucgagaa

SEQ ID NO: 949543 - RNA, 19 nt, Artificial Sequence
  Description of Artificial Sequence: Synthetic oligonucleotide
  Antisense strand to SEQ ID NO: 949542
uucucgaaacugcucgcgg

SEQ ID NO: 949544 - RNA, 19 nt, Artificial Sequence
  Description of Artificial Sequence: Synthetic oligonucleotide
  Sense strand starting at position 3480 of SEQ ID NO: 913731
aauagugucagaugaugag

SEQ ID NO: 949545 - RNA, 19 nt, Artificial Sequence
  Description of Artificial Sequence: Synthetic oligonucleotide
  Antisense strand to SEQ ID NO: 949544
cucaucaucugacacuauu

SEQ ID NO: 949546 - RNA, 19 nt, Artificial Sequence
  Description of Artificial Sequence: Synthetic oligonucleotide
  Sense strand starting at position 3486 of SEQ ID NO: 913731
gucagaugaugagugggau

SEQ ID NO: 949547 - RNA, 19 nt, Artificial Sequence
  Description of Artificial Sequence: Synthetic oligonucleotide
  Antisense strand to SEQ ID NO: 949546
aucccacucaucaucugac

SEQ ID NO: 949548 - RNA, 19 nt, Artificial Sequence
  Description of Artificial Sequence: Synthetic oligonucleotide
  Sense strand starting at position 3405 of SEQ ID NO: 913731
ggauuacuggauugagcca

SEQ ID NO: 949549 - RNA, 19 nt, Artificial Sequence
  Description of Artificial Sequence: Synthetic oligonucleotide
  Antisense strand to SEQ ID NO: 949548
uggcucaauccaguaaucc

SEQ ID NO: 949550 - RNA, 19 nt, Artificial Sequence
  Description of Artificial Sequence: Synthetic oligonucleotide
  Sense strand starting at position 3702 of SEQ ID NO: 913731
auagguagguauucuuaag

SEQ ID NO: 949551 - RNA, 19 nt, Artificial Sequence
  Description of Artificial Sequence: Synthetic oligonucleotide
  Antisense strand to SEQ ID NO: 949550
cuuaagaauaccuaccuau

SEQ ID NO: 949552 - RNA, 19 nt, Artificial Sequence
  Description of Artificial Sequence: Synthetic oligonucleotide
  Sense strand starting at position 1282 of SEQ ID NO: 913731
cagguuugcggcgcuuaaa

SEQ ID NO: 949553 - RNA, 19 nt, Artificial Sequence
  Description of Artificial Sequence: Synthetic oligonucleotide
  Antisense strand to SEQ ID NO: 949552
uuuaagcgccgcaaaccug

SEQ ID NO: 949554 - RNA, 19 nt, Artificial Sequence
  Description of Artificial Sequence: Synthetic oligonucleotide
  Sense strand starting at position 2884 of SEQ ID NO: 913731
aguugcucaggugauaaau

SEQ ID NO: 949555 - RNA, 19 nt, Artificial Sequence
  Description of Artificial Sequence: Synthetic oligonucleotide
  Antisense strand to SEQ ID NO: 949554
auuuaucaccugagcaacu

SEQ ID NO: 949556 - RNA, 19 nt, Artificial Sequence
  Description of Artificial Sequence: Synthetic oligonucleotide
  Sense strand starting at position 3352 of SEQ ID NO: 913731
ucgggaacuccuggacuca

SEQ ID NO: 949557 - RNA, 19 nt, Artificial Sequence
  Description of Artificial Sequence: Synthetic oligonucleotide
  Antisense strand to SEQ ID NO: 949556
ugaguccaggaguucccga

SEQ ID NO: 949558 - RNA, 19 nt, Artificial Sequence
  Description of Artificial Sequence: Synthetic oligonucleotide
  Sense strand starting at position 3410 of SEQ ID NO: 913731
acuggauugagccacgcau

SEQ ID NO: 949559 - RNA, 19 nt, Artificial Sequence
  Description of Artificial Sequence: Synthetic oligonucleotide
  Antisense strand to SEQ ID NO: 949558
augcguggcucaauccagu

SEQ ID NO: 949560 - RNA, 19 nt, Artificial Sequence
  Description of Artificial Sequence: Synthetic oligonucleotide
  Sense strand starting at position 3140 of SEQ ID NO: 913731
agcugaacauuguuacuau

SEQ ID NO: 949561 - RNA, 19 nt, Artificial Sequence
  Description of Artificial Sequence: Synthetic oligonucleotide
  Antisense strand to SEQ ID NO: 949560
auaguaacaauguucagcu

SEQ ID NO: 949562 - RNA, 19 nt, Artificial Sequence
  Description of Artificial Sequence: Synthetic oligonucleotide
  Sense strand starting at position 646 of SEQ ID NO: 913731
ggaagucuugugcaacucu

SEQ ID NO: 949563 - RNA, 19 nt, Artificial Sequence
  Description of Artificial Sequence: Synthetic oligonucleotide
  Antisense strand to SEQ ID NO: 949562
agaguugcacaagacuucc

SEQ ID NO: 949564 - RNA, 19 nt, Artificial Sequence
  Description of Artificial Sequence: Synthetic oligonucleotide
  Sense strand starting at position 3143 of SEQ ID NO: 913731
ugaacauuguuacuauugu

SEQ ID NO: 949565 - RNA, 19 nt, Artificial Sequence
  Description of Artificial Sequence: Synthetic oligonucleotide
  Antisense strand to SEQ ID NO: 949564
acaauaguaacaauguuca

SEQ ID NO: 949566 - RNA, 19 nt, Artificial Sequence
  Description of Artificial Sequence: Synthetic oligonucleotide
  Sense strand starting at position 2864 of SEQ ID NO: 913731
ggagggauuugucagguug

SEQ ID NO: 949567 - RNA, 19 nt, Artificial Sequence
  Description of Artificial Sequence: Synthetic oligonucleotide
  Antisense strand to SEQ ID NO: 949566
caaccugacaaaucccucc

SEQ ID NO: 949568 - RNA, 19 nt, Artificial Sequence
  Description of Artificial Sequence: Synthetic oligonucleotide
  Sense strand starting at position 2879 of SEQ ID NO: 913731
guugaaguugcucagguga

SEQ ID NO: 949569 - RNA, 19 nt, Artificial Sequence
  Description of Artificial Sequence: Synthetic oligonucleotide
  Antisense strand to SEQ ID NO: 949568
ucaccugagcaacuucaac

SEQ ID NO: 949570 - RNA, 19 nt, Artificial Sequence
  Description of Artificial Sequence: Synthetic oligonucleotide
  Sense strand starting at position 2132 of SEQ ID NO: 913731
ggacguuucuggagaggag

SEQ ID NO: 949571 - RNA, 19 nt, Artificial Sequence
  Description of Artificial Sequence: Synthetic oligonucleotide
  Antisense strand to SEQ ID NO: 949570
cuccucuccagaaacgucc

SEQ ID NO: 949572 - RNA, 19 nt, Artificial Sequence
  Description of Artificial Sequence: Synthetic oligonucleotide
  Sense strand starting at position 3050 of SEQ ID NO: 913731
ugauguauuguagggcuaa

SEQ ID NO: 949573 - RNA, 19 nt, Artificial Sequence
  Description of Artificial Sequence: Synthetic oligonucleotide
  Antisense strand to SEQ ID NO: 949572
uuagcccuacaauacauca

SEQ ID NO: 949574 - RNA, 19 nt, Artificial Sequence
  Description of Artificial Sequence: Synthetic oligonucleotide
  Sense strand starting at position 1401 of SEQ ID NO: 913731
uucggauagucucccuaau

SEQ ID NO: 949575 - RNA, 19 nt, Artificial Sequence
  Description of Artificial Sequence: Synthetic oligonucleotide
  Antisense strand to SEQ ID NO: 949574
auuagggagacuauccgaa

SEQ ID NO: 949576 - RNA, 19 nt, Artificial Sequence
  Description of Artificial Sequence: Synthetic oligonucleotide
  Sense strand starting at position 1403 of SEQ ID NO: 913731
cggauagucucccuaaucu

SEQ ID NO: 949577 - RNA, 19 nt, Artificial Sequence
  Description of Artificial Sequence: Synthetic oligonucleotide
  Antisense strand to SEQ ID NO: 949576
agauuagggagacuauccg

SEQ ID NO: 949578 - RNA, 19 nt, Artificial Sequence
  Description of Artificial Sequence: Synthetic oligonucleotide
  Sense strand starting at position 2369 of SEQ ID NO: 913731
ccaguaauuugggaggcua

SEQ ID NO: 949579 - RNA, 19 nt, Artificial Sequence
  Description of Artificial Sequence: Synthetic oligonucleotide
  Antisense strand to SEQ ID NO: 949578
uagccucccaaauuacugg

SEQ ID NO: 949580 - RNA, 19 nt, Artificial Sequence
  Description of Artificial Sequence: Synthetic oligonucleotide
  Sense strand starting at position 378 of SEQ ID NO: 913731
acaaguuuccuacgagcag

SEQ ID NO: 949581 - RNA, 19 nt, Artificial Sequence
  Description of Artificial Sequence: Synthetic oligonucleotide
  Antisense strand to SEQ ID NO: 949580
cugcucguaggaaacuugu

SEQ ID NO: 949582 - RNA, 19 nt, Artificial Sequence
  Description of Artificial Sequence: Synthetic oligonucleotide
  Sense strand starting at position 3159 of SEQ ID NO: 913731
uguuauuauuuccagacug

SEQ ID NO: 949583 - RNA, 19 nt, Artificial Sequence
  Description of Artificial Sequence: Synthetic oligonucleotide
  Antisense strand to SEQ ID NO: 949582
cagucuggaaauaauaaca

SEQ ID NO: 949584 - RNA, 19 nt, Artificial Sequence
  Description of Artificial Sequence: Synthetic oligonucleotide
  Sense strand starting at position 2896 of SEQ ID NO: 913731
gauaaauuccgugguguga

SEQ ID NO: 949585 - RNA, 19 nt, Artificial Sequence
  Description of Artificial Sequence: Synthetic oligonucleotide
  Antisense strand to SEQ ID NO: 949584
ucacaccacggaauuuauc

SEQ ID NO: 949586 - RNA, 19 nt, Artificial Sequence
  Description of Artificial Sequence: Synthetic oligonucleotide
  Sense strand starting at position 466 of SEQ ID NO: 913731
gcgcgcacgagucagauuu

SEQ ID NO: 949587 - RNA, 19 nt, Artificial Sequence
  Description of Artificial Sequence: Synthetic oligonucleotide
  Antisense strand to SEQ ID NO: 949586
aaaucugacucgugcgcgc

SEQ ID NO: 949588 - RNA, 19 nt, Artificial Sequence
  Description of Artificial Sequence: Synthetic oligonucleotide
  Sense strand starting at position 2128 of SEQ ID NO: 913731
gcgaggacguuucuggaga

SEQ ID NO: 949589 - RNA, 19 nt, Artificial Sequence
  Description of Artificial Sequence: Synthetic oligonucleotide
  Antisense strand to SEQ ID NO: 949588
ucuccagaaacguccucgc

SEQ ID NO: 949590 - RNA, 19 nt, Artificial Sequence
  Description of Artificial Sequence: Synthetic oligonucleotide
  Sense strand starting at position 2866 of SEQ ID NO: 913731
agggauuugucagguugaa

SEQ ID NO: 949591 - RNA, 19 nt, Artificial Sequence
  Description of Artificial Sequence: Synthetic oligonucleotide
  Antisense strand to SEQ ID NO: 949590
uucaaccugacaaaucccu

SEQ ID NO: 949592 - RNA, 19 nt, Artificial Sequence
  Description of Artificial Sequence: Synthetic oligonucleotide
  Sense strand starting at position 2895 of SEQ ID NO: 913731
ugauaaauuccguggugug

SEQ ID NO: 949593 - RNA, 19 nt, Artificial Sequence
  Description of Artificial Sequence: Synthetic oligonucleotide
  Antisense strand to SEQ ID NO: 949592
cacaccacggaauuuauca

SEQ ID NO: 949594 - RNA, 19 nt, Artificial Sequence
  Description of Artificial Sequence: Synthetic oligonucleotide
  Sense strand starting at position 3499 of SEQ ID NO: 913731
ugggaugauugugaugaag

SEQ ID NO: 949595 - RNA, 19 nt, Artificial Sequence
  Description of Artificial Sequence: Synthetic oligonucleotide
  Antisense strand to SEQ ID NO: 949594
cuucaucacaaucauccca

SEQ ID NO: 949596 - RNA, 19 nt, Artificial Sequence
  Description of Artificial Sequence: Synthetic oligonucleotide
  Sense strand starting at position 2273 of SEQ ID NO: 913731
acugaaaugugcgccgaaa

SEQ ID NO: 949597 - RNA, 19 nt, Artificial Sequence
  Description of Artificial Sequence: Synthetic oligonucleotide
  Antisense strand to SEQ ID NO: 949596
uuucggcgcacauuucagu

SEQ ID NO: 949598 - RNA, 19 nt, Artificial Sequence
  Description of Artificial Sequence: Synthetic oligonucleotide
  Sense strand starting at position 1073 of SEQ ID NO: 913731
gcgcuuuccugacuccaaa

SEQ ID NO: 949599 - RNA, 19 nt, Artificial Sequence
  Description of Artificial Sequence: Synthetic oligonucleotide
  Antisense strand to SEQ ID NO: 949598
uuuggagucaggaaagcgc

SEQ ID NO: 949600 - RNA, 19 nt, Artificial Sequence
  Description of Artificial Sequence: Synthetic oligonucleotide
  Sense strand starting at position 3107 of SEQ ID NO: 913731
aagagaugaugucaaggca

SEQ ID NO: 949601 - RNA, 19 nt, Artificial Sequence
  Description of Artificial Sequence: Synthetic oligonucleotide
  Antisense strand to SEQ ID NO: 949600
ugccuugacaucaucucuu

SEQ ID NO: 949602 - RNA, 19 nt, Artificial Sequence
  Description of Artificial Sequence: Synthetic oligonucleotide
  Sense strand starting at position 2894 of SEQ ID NO: 913731
gugauaaauuccguggugu

SEQ ID NO: 949603 - RNA, 19 nt, Artificial Sequence
  Description of Artificial Sequence: Synthetic oligonucleotide
  Antisense strand to SEQ ID NO: 949602
acaccacggaauuuaucac

SEQ ID NO: 949604 - RNA, 19 nt, Artificial Sequence
  Description of Artificial Sequence: Synthetic oligonucleotide
  Sense strand starting at position 3501 of SEQ ID NO: 913731
ggaugauugugaugaagga

SEQ ID NO: 949605 - RNA, 19 nt, Artificial Sequence
  Description of Artificial Sequence: Synthetic oligonucleotide
  Antisense strand to SEQ ID NO: 949604
uccuucaucacaaucaucc

SEQ ID NO: 949606 - RNA, 19 nt, Artificial Sequence
  Description of Artificial Sequence: Synthetic oligonucleotide
  Sense strand starting at position 2272 of SEQ ID NO: 913731
cacugaaaugugcgccgaa

SEQ ID NO: 949607 - RNA, 19 nt, Artificial Sequence
  Description of Artificial Sequence: Synthetic oligonucleotide
  Antisense strand to SEQ ID NO: 949606
uucggcgcacauuucagug

SEQ ID NO: 949608 - RNA, 19 nt, Artificial Sequence
  Description of Artificial Sequence: Synthetic oligonucleotide
  Sense strand starting at position 3176 of SEQ ID NO: 913731
ugaguaucgcccugucauu

SEQ ID NO: 949609 - RNA, 19 nt, Artificial Sequence
  Description of Artificial Sequence: Synthetic oligonucleotide
  Antisense strand to SEQ ID NO: 949608
aaugacagggcgauacuca

SEQ ID NO: 949610 - RNA, 19 nt, Artificial Sequence
  Description of Artificial Sequence: Synthetic oligonucleotide
  Sense strand starting at position 3063 of SEQ ID NO: 913731
ggcuaauaauuguaaccau

SEQ ID NO: 949611 - RNA, 19 nt, Artificial Sequence
  Description of Artificial Sequence: Synthetic oligonucleotide
  Antisense strand to SEQ ID NO: 949610
augguuacaauuauuagcc

SEQ ID NO: 949612 - RNA, 19 nt, Artificial Sequence
  Description of Artificial Sequence: Synthetic oligonucleotide
  Sense strand starting at position 3498 of SEQ ID NO: 913731
gugggaugauugugaugaa

SEQ ID NO: 949613 - RNA, 19 nt, Artificial Sequence
  Description of Artificial Sequence: Synthetic oligonucleotide
  Antisense strand to SEQ ID NO: 949612
uucaucacaaucaucccac

SEQ ID NO: 949614 - RNA, 19 nt, Artificial Sequence
  Description of Artificial Sequence: Synthetic oligonucleotide
  Sense strand starting at position 3141 of SEQ ID NO: 913731
gcugaacauuguuacuauu

SEQ ID NO: 949615 - RNA, 19 nt, Artificial Sequence
  Description of Artificial Sequence: Synthetic oligonucleotide
  Antisense strand to SEQ ID NO: 949614
aauaguaacaauguucagc

SEQ ID NO: 949616 - RNA, 19 nt, Artificial Sequence
  Description of Artificial Sequence: Synthetic oligonucleotide
  Sense strand starting at position 1281 of SEQ ID NO: 913731
ccagguuugcggcgcuuaa

SEQ ID NO: 949617 - RNA, 19 nt, Artificial Sequence
  Description of Artificial Sequence: Synthetic oligonucleotide
  Antisense strand to SEQ ID NO: 949616
uuaagcgccgcaaaccugg

SEQ ID NO: 949618 - RNA, 19 nt, Artificial Sequence
  Description of Artificial Sequence: Synthetic oligonucleotide
  Sense strand starting at position 3322 of SEQ ID NO: 913731
ggcgagguuucgcuguguu

SEQ ID NO: 949619 - RNA, 19 nt, Artificial Sequence
  Description of Artificial Sequence: Synthetic oligonucleotide
  Antisense strand to SEQ ID NO: 949618
aacacagcgaaaccucgcc

SEQ ID NO: 949620 - RNA, 19 nt, Artificial Sequence
  Description of Artificial Sequence: Synthetic oligonucleotide
  Sense strand starting at position 2032 of SEQ ID NO: 913732
cgggaaagucgguuucgca

SEQ ID NO: 949621 - RNA, 19 nt, Artificial Sequence
  Description of Artificial Sequence: Synthetic oligonucleotide
  Antisense strand to SEQ ID NO: 949620
ugcgaaaccgacuuucccg

SEQ ID NO: 949622 - RNA, 19 nt, Artificial Sequence
  Description of Artificial Sequence: Synthetic oligonucleotide
  Sense strand starting at position 3798 of SEQ ID NO: 913732
guaagaauucccuaaguca

SEQ ID NO: 949623 - RNA, 19 nt, Artificial Sequence
  Description of Artificial Sequence: Synthetic oligonucleotide
  Antisense strand to SEQ ID NO: 949622
ugacuuagggaauucuuac

SEQ ID NO: 949624 - RNA, 19 nt, Artificial Sequence
  Description of Artificial Sequence: Synthetic oligonucleotide
  Sense strand starting at position 3595 of SEQ ID NO: 913732
aacuuugugguacagacau

SEQ ID NO: 949625 - RNA, 19 nt, Artificial Sequence
  Description of Artificial Sequence: Synthetic oligonucleotide
  Antisense strand to SEQ ID NO: 949624
augucuguaccacaaaguu

SEQ ID NO: 949626 - RNA, 19 nt, Artificial Sequence
  Description of Artificial Sequence: Synthetic oligonucleotide
  Sense strand starting at position 3869 of SEQ ID NO: 913732
aagaaaggacaguguuauc

SEQ ID NO: 949627 - RNA, 19 nt, Artificial Sequence
  Description of Artificial Sequence: Synthetic oligonucleotide
  Antisense strand to SEQ ID NO: 949626
gauaacacuguccuuucuu

SEQ ID NO: 949628 - RNA, 19 nt, Artificial Sequence
  Description of Artificial Sequence: Synthetic oligonucleotide
  Sense strand starting at position 3801 of SEQ ID NO: 913732
agaauucccuaagucauga

SEQ ID NO: 949629 - RNA, 19 nt, Artificial Sequence
  Description of Artificial Sequence: Synthetic oligonucleotide
  Antisense strand to SEQ ID NO: 949628
ucaugacuuagggaauucu

SEQ ID NO: 949630 - RNA, 19 nt, Artificial Sequence
  Description of Artificial Sequence: Synthetic oligonucleotide
  Sense strand starting at position 3532 of SEQ ID NO: 913732
auguuagaaauguggauga

SEQ ID NO: 949631 - RNA, 19 nt, Artificial Sequence
  Description of Artificial Sequence: Synthetic oligonucleotide
  Antisense strand to SEQ ID NO: 949630
ucauccacauuucuaacau

SEQ ID NO: 949632 - RNA, 19 nt, Artificial Sequence
  Description of Artificial Sequence: Synthetic oligonucleotide
  Sense strand starting at position 3196 of SEQ ID NO: 913732
aagagaucagugcaaguuc

SEQ ID NO: 949633 - RNA, 19 nt, Artificial Sequence
  Description of Artificial Sequence: Synthetic oligonucleotide
  Antisense strand to SEQ ID NO: 949632
gaacuugcacugaucucuu

SEQ ID NO: 949634 - RNA, 19 nt, Artificial Sequence
  Description of Artificial Sequence: Synthetic oligonucleotide
  Sense strand starting at position 2802 of SEQ ID NO: 913732
ucaccaagguuccuaauga

SEQ ID NO: 949635 - RNA, 19 nt, Artificial Sequence
  Description of Artificial Sequence: Synthetic oligonucleotide
  Antisense strand to SEQ ID NO: 949634
ucauuaggaaccuugguga

SEQ ID NO: 949636 - RNA, 19 nt, Artificial Sequence
  Description of Artificial Sequence: Synthetic oligonucleotide
  Sense strand starting at position 3651 of SEQ ID NO: 913732
aacguaggaggauguauaa

SEQ ID NO: 949637 - RNA, 19 nt, Artificial Sequence
  Description of Artificial Sequence: Synthetic oligonucleotide
  Antisense strand to SEQ ID NO: 949636
uuauacauccuccuacguu

SEQ ID NO: 949638 - RNA, 19 nt, Artificial Sequence
  Description of Artificial Sequence: Synthetic oligonucleotide
  Sense strand starting at position 2437 of SEQ ID NO: 913732
aguguuucugggccgcgaa

SEQ ID NO: 949639 - RNA, 19 nt, Artificial Sequence
  Description of Artificial Sequence: Synthetic oligonucleotide
  Antisense strand to SEQ ID NO: 949638
uucgcggcccagaaacacu

SEQ ID NO: 949640 - RNA, 19 nt, Artificial Sequence
  Description of Artificial Sequence: Synthetic oligonucleotide
  Sense strand starting at position 944 of SEQ ID NO: 913732
cggcuaagcguccuuuauu

SEQ ID NO: 949641 - RNA, 19 nt, Artificial Sequence
  Description of Artificial Sequence: Synthetic oligonucleotide
  Antisense strand to SEQ ID NO: 949640
aauaaaggacgcuuagccg

SEQ ID NO: 949642 - RNA, 19 nt, Artificial Sequence
  Description of Artificial Sequence: Synthetic oligonucleotide
  Sense strand starting at position 943 of SEQ ID NO: 913732
ccggcuaagcguccuuuau

SEQ ID NO: 949643 - RNA, 19 nt, Artificial Sequence
  Description of Artificial Sequence: Synthetic oligonucleotide
  Antisense strand to SEQ ID NO: 949642
auaaaggacgcuuagccgg

SEQ ID NO: 949644 - RNA, 19 nt, Artificial Sequence
  Description of Artificial Sequence: Synthetic oligonucleotide
  Sense strand starting at position 3126 of SEQ ID NO: 913732
ggagacucuugucucaaac

SEQ ID NO: 949645 - RNA, 19 nt, Artificial Sequence
  Description of Artificial Sequence: Synthetic oligonucleotide
  Antisense strand to SEQ ID NO: 949644
guuugagacaagagucucc

SEQ ID NO: 949646 - RNA, 19 nt, Artificial Sequence
  Description of Artificial Sequence: Synthetic oligonucleotide
  Sense strand starting at position 958 of SEQ ID NO: 913732
uuauuccucccaggagacu

SEQ ID NO: 949647 - RNA, 19 nt, Artificial Sequence
  Description of Artificial Sequence: Synthetic oligonucleotide
  Antisense strand to SEQ ID NO: 949646
agucuccugggaggaauaa

SEQ ID NO: 949648 - RNA, 19 nt, Artificial Sequence
  Description of Artificial Sequence: Synthetic oligonucleotide
  Sense strand starting at position 432 of SEQ ID NO: 913732
acgauuacaguguacuaua

SEQ ID NO: 949649 - RNA, 19 nt, Artificial Sequence
  Description of Artificial Sequence: Synthetic oligonucleotide
  Antisense strand to SEQ ID NO: 949648
uauaguacacuguaaucgu

SEQ ID NO: 949650 - RNA, 19 nt, Artificial Sequence
  Description of Artificial Sequence: Synthetic oligonucleotide
  Sense strand starting at position 30 of SEQ ID NO: 913732
agauguguaguccaaucca

SEQ ID NO: 949651 - RNA, 19 nt, Artificial Sequence
  Description of Artificial Sequence: Synthetic oligonucleotide
  Antisense strand to SEQ ID NO: 949650
uggauuggacuacacaucu

SEQ ID NO: 949652 - RNA, 19 nt, Artificial Sequence
  Description of Artificial Sequence: Synthetic oligonucleotide
  Sense strand starting at position 1570 of SEQ ID NO: 913732
cggcgucguccacugaauu

SEQ ID NO: 949653 - RNA, 19 nt, Artificial Sequence
  Description of Artificial Sequence: Synthetic oligonucleotide
  Antisense strand to SEQ ID NO: 949652
aauucaguggacgacgccg

SEQ ID NO: 949654 - RNA, 19 nt, Artificial Sequence
  Description of Artificial Sequence: Synthetic oligonucleotide
  Sense strand starting at position 2232 of SEQ ID NO: 913732
gcaguucugccagugugua

SEQ ID NO: 949655 - RNA, 19 nt, Artificial Sequence
  Description of Artificial Sequence: Synthetic oligonucleotide
  Antisense strand to SEQ ID NO: 949654
uacacacuggcagaacugc

SEQ ID NO: 949656 - RNA, 19 nt, Artificial Sequence
  Description of Artificial Sequence: Synthetic oligonucleotide
  Sense strand starting at position 2899 of SEQ ID NO: 913732
ucgcuugagcguaagaguu

SEQ ID NO: 949657 - RNA, 19 nt, Artificial Sequence
  Description of Artificial Sequence: Synthetic oligonucleotide
  Antisense strand to SEQ ID NO: 949656
aacucuuacgcucaagcga

SEQ ID NO: 949658 - RNA, 19 nt, Artificial Sequence
  Description of Artificial Sequence: Synthetic oligonucleotide
  Sense strand starting at position 2126 of SEQ ID NO: 913732
ggcuguuccaguuaaagag

SEQ ID NO: 949659 - RNA, 19 nt, Artificial Sequence
  Description of Artificial Sequence: Synthetic oligonucleotide
  Antisense strand to SEQ ID NO: 949658
cucuuuaacuggaacagcc

SEQ ID NO: 949660 - RNA, 19 nt, Artificial Sequence
  Description of Artificial Sequence: Synthetic oligonucleotide
  Sense strand starting at position 3874 of SEQ ID NO: 913732
aggacaguguuaucaucau

SEQ ID NO: 949661 - RNA, 19 nt, Artificial Sequence
  Description of Artificial Sequence: Synthetic oligonucleotide
  Antisense strand to SEQ ID NO: 949660
augaugauaacacuguccu

SEQ ID NO: 949662 - RNA, 19 nt, Artificial Sequence
  Description of Artificial Sequence: Synthetic oligonucleotide
  Sense strand starting at position 972 of SEQ ID NO: 913732
agacuuuccguuuaucuag

SEQ ID NO: 949663 - RNA, 19 nt, Artificial Sequence
  Description of Artificial Sequence: Synthetic oligonucleotide
  Antisense strand to SEQ ID NO: 949662
cuagauaaacggaaagucu

SEQ ID NO: 949664 - RNA, 19 nt, Artificial Sequence
  Description of Artificial Sequence: Synthetic oligonucleotide
  Sense strand starting at position 3194 of SEQ ID NO: 913732
uaaagagaucagugcaagu

SEQ ID NO: 949665 - RNA, 19 nt, Artificial Sequence
  Description of Artificial Sequence: Synthetic oligonucleotide
  Antisense strand to SEQ ID NO: 949664
acuugcacugaucucuuua

SEQ ID NO: 949666 - RNA, 19 nt, Artificial Sequence
  Description of Artificial Sequence: Synthetic oligonucleotide
  Sense strand starting at position 374 of SEQ ID NO: 913732
cgugacuggguuuacaauu

SEQ ID NO: 949667 - RNA, 19 nt, Artificial Sequence
  Description of Artificial Sequence: Synthetic oligonucleotide
  Antisense strand to SEQ ID NO: 949666
aauuguaaacccagucacg

SEQ ID NO: 949668 - RNA, 19 nt, Artificial Sequence
  Description of Artificial Sequence: Synthetic oligonucleotide
  Sense strand starting at position 28 of SEQ ID NO: 913732
aaagauguguaguccaauc

SEQ ID NO: 949669 - RNA, 19 nt, Artificial Sequence
  Description of Artificial Sequence: Synthetic oligonucleotide
  Antisense strand to SEQ ID NO: 949668
gauuggacuacacaucuuu

SEQ ID NO: 949670 - RNA, 19 nt, Artificial Sequence
  Description of Artificial Sequence: Synthetic oligonucleotide
  Sense strand starting at position 3712 of SEQ ID NO: 913732
guaaguuuccauuaccuuc

SEQ ID NO: 949671 - RNA, 19 nt, Artificial Sequence
  Description of Artificial Sequence: Synthetic oligonucleotide
  Antisense strand to SEQ ID NO: 949670
gaagguaauggaaacuuac

SEQ ID NO: 949672 - RNA, 19 nt, Artificial Sequence
  Description of Artificial Sequence: Synthetic oligonucleotide
  Sense strand starting at position 2688 of SEQ ID NO: 913732
gacugauuagccuguggag

SEQ ID NO: 949673 - RNA, 19 nt, Artificial Sequence
  Description of Artificial Sequence: Synthetic oligonucleotide
  Antisense strand to SEQ ID NO: 949672
cuccacaggcuaaucaguc

SEQ ID NO: 949674 - RNA, 19 nt, Artificial Sequence
  Description of Artificial Sequence: Synthetic oligonucleotide
  Sense strand starting at position 1187 of SEQ ID NO: 913732
gggaaucugcgucagaagu

SEQ ID NO: 949675 - RNA, 19 nt, Artificial Sequence
  Description of Artificial Sequence: Synthetic oligonucleotide
  Antisense strand to SEQ ID NO: 949674
acuucugacgcagauuccc

SEQ ID NO: 949676 - RNA, 19 nt, Artificial Sequence
  Description of Artificial Sequence: Synthetic oligonucleotide
  Sense strand starting at position 440 of SEQ ID NO: 913732
aguguacuauacuccuaca

SEQ ID NO: 949677 - RNA, 19 nt, Artificial Sequence
  Description of Artificial Sequence: Synthetic oligonucleotide
  Antisense strand to SEQ ID NO: 949676
uguaggaguauaguacacu

SEQ ID NO: 949678 - RNA, 19 nt, Artificial Sequence
  Description of Artificial Sequence: Synthetic oligonucleotide
  Sense strand starting at position 2794 of SEQ ID NO: 913732
cugucaugucaccaagguu

SEQ ID NO: 949679 - RNA, 19 nt, Artificial Sequence
  Description of Artificial Sequence: Synthetic oligonucleotide
  Antisense strand to SEQ ID NO: 949678
aaccuuggugacaugacag

SEQ ID NO: 949680 - RNA, 19 nt, Artificial Sequence
  Description of Artificial Sequence: Synthetic oligonucleotide
  Sense strand starting at position 430 of SEQ ID NO: 913732
auacgauuacaguguacua

SEQ ID NO: 949681 - RNA, 19 nt, Artificial Sequence
  Description of Artificial Sequence: Synthetic oligonucleotide
  Antisense strand to SEQ ID NO: 949680
uaguacacuguaaucguau

SEQ ID NO: 949682 - RNA, 19 nt, Artificial Sequence
  Description of Artificial Sequence: Synthetic oligonucleotide
  Sense strand starting at position 2274 of SEQ ID NO: 913732
uggagaaguucuccgguga

SEQ ID NO: 949683 - RNA, 19 nt, Artificial Sequence
  Description of Artificial Sequence: Synthetic oligonucleotide
  Antisense strand to SEQ ID NO: 949682
ucaccggagaacuucucca

SEQ ID NO: 949684 - RNA, 19 nt, Artificial Sequence
  Description of Artificial Sequence: Synthetic oligonucleotide
  Sense strand starting at position 969 of SEQ ID NO: 913732
aggagacuuuccguuuauc

SEQ ID NO: 949685 - RNA, 19 nt, Artificial Sequence
  Description of Artificial Sequence: Synthetic oligonucleotide
  Antisense strand to SEQ ID NO: 949684
gauaaacggaaagucuccu

SEQ ID NO: 949686 - RNA, 19 nt, Artificial Sequence
  Description of Artificial Sequence: Synthetic oligonucleotide
  Sense strand starting at position 967 of SEQ ID NO: 913732
ccaggagacuuuccguuua

SEQ ID NO: 949687 - RNA, 19 nt, Artificial Sequence
  Description of Artificial Sequence: Synthetic oligonucleotide
  Antisense strand to SEQ ID NO: 949686
uaaacggaaagucuccugg

SEQ ID NO: 949688 - RNA, 19 nt, Artificial Sequence
  Description of Artificial Sequence: Synthetic oligonucleotide
  Sense strand starting at position 2275 of SEQ ID NO: 913732
ggagaaguucuccggugau

SEQ ID NO: 949689 - RNA, 19 nt, Artificial Sequence
  Description of Artificial Sequence: Synthetic oligonucleotide
  Antisense strand to SEQ ID NO: 949688
aucaccggagaacuucucc

SEQ ID NO: 949690 - RNA, 19 nt, Artificial Sequence
  Description of Artificial Sequence: Synthetic oligonucleotide
  Sense strand starting at position 1185 of SEQ ID NO: 913732
uugggaaucugcgucagaa

SEQ ID NO: 949691 - RNA, 19 nt, Artificial Sequence
  Description of Artificial Sequence: Synthetic oligonucleotide
  Antisense strand to SEQ ID NO: 949690
uucugacgcagauucccaa

SEQ ID NO: 949692 - RNA, 19 nt, Artificial Sequence
  Description of Artificial Sequence: Synthetic oligonucleotide
  Sense strand starting at position 3973 of SEQ ID NO: 913732
gaguacaguguguagcaua

SEQ ID NO: 949693 - RNA, 19 nt, Artificial Sequence
  Description of Artificial Sequence: Synthetic oligonucleotide
  Antisense strand to SEQ ID NO: 949692
uaugcuacacacuguacuc

SEQ ID NO: 949694 - RNA, 19 nt, Artificial Sequence
  Description of Artificial Sequence: Synthetic oligonucleotide
  Sense strand starting at position 371 of SEQ ID NO: 913732
ccacgugacuggguuuaca

SEQ ID NO: 949695 - RNA, 19 nt, Artificial Sequence
  Description of Artificial Sequence: Synthetic oligonucleotide
  Antisense strand to SEQ ID NO: 949694
uguaaacccagucacgugg

SEQ ID NO: 949696 - RNA, 19 nt, Artificial Sequence
  Description of Artificial Sequence: Synthetic oligonucleotide
  Sense strand starting at position 2231 of SEQ ID NO: 913732
ggcaguucugccagugugu

SEQ ID NO: 949697 - RNA, 19 nt, Artificial Sequence
  Description of Artificial Sequence: Synthetic oligonucleotide
  Antisense strand to SEQ ID NO: 949696
acacacuggcagaacugcc

SEQ ID NO: 949698 - RNA, 19 nt, Artificial Sequence
  Description of Artificial Sequence: Synthetic oligonucleotide
  Sense strand starting at position 2278 of SEQ ID NO: 913732
gaaguucuccggugaucug

SEQ ID NO: 949699 - RNA, 19 nt, Artificial Sequence
  Description of Artificial Sequence: Synthetic oligonucleotide
  Antisense strand to SEQ ID NO: 949698
cagaucaccggagaacuuc

SEQ ID NO: 949700 - RNA, 19 nt, Artificial Sequence
  Description of Artificial Sequence: Synthetic oligonucleotide
  Sense strand starting at position 1003 of SEQ ID NO: 913733
ggaggcuuuguccagaaga

SEQ ID NO: 949701 - RNA, 19 nt, Artificial Sequence
  Description of Artificial Sequence: Synthetic oligonucleotide
  Antisense strand to SEQ ID NO: 949700
ucuucuggacaaagccucc

SEQ ID NO: 949702 - RNA, 19 nt, Artificial Sequence
  Description of Artificial Sequence: Synthetic oligonucleotide
  Sense strand starting at position 771 of SEQ ID NO: 913733
gggauugugcaguaaggaa

SEQ ID NO: 949703 - RNA, 19 nt, Artificial Sequence
  Description of Artificial Sequence: Synthetic oligonucleotide
  Antisense strand to SEQ ID NO: 949702
uuccuuacugcacaauccc

SEQ ID NO: 949704 - RNA, 19 nt, Artificial Sequence
  Description of Artificial Sequence: Synthetic oligonucleotide
  Sense strand starting at position 3035 of SEQ ID NO: 913733
aauaaugcugagggugaaa

SEQ ID NO: 949705 - RNA, 19 nt, Artificial Sequence
  Description of Artificial Sequence: Synthetic oligonucleotide
  Antisense strand to SEQ ID NO: 949704
uuucacccucagcauuauu

SEQ ID NO: 949706 - RNA, 19 nt, Artificial Sequence
  Description of Artificial Sequence: Synthetic oligonucleotide
  Sense strand starting at position 912 of SEQ ID NO: 913733
gggagacccauguguaaag

SEQ ID NO: 949707 - RNA, 19 nt, Artificial Sequence
  Description of Artificial Sequence: Synthetic oligonucleotide
  Antisense strand to SEQ ID NO: 949706
cuuuacacaugggucuccc

SEQ ID NO: 949708 - RNA, 19 nt, Artificial Sequence
  Description of Artificial Sequence: Synthetic oligonucleotide
  Sense strand starting at position 1156 of SEQ ID NO: 913733
agaaucacucugggagcua

SEQ ID NO: 949709 - RNA, 19 nt, Artificial Sequence
  Description of Artificial Sequence: Synthetic oligonucleotide
  Antisense strand to SEQ ID NO: 949708
uagcucccagagugauucu

SEQ ID NO: 949710 - RNA, 19 nt, Artificial Sequence
  Description of Artificial Sequence: Synthetic oligonucleotide
  Sense strand starting at position 137 of SEQ ID NO: 913733
guccgauagggacagcaau

SEQ ID NO: 949711 - RNA, 19 nt, Artificial Sequence
  Description of Artificial Sequence: Synthetic oligonucleotide
  Antisense strand to SEQ ID NO: 949710
auugcugucccuaucggac

SEQ ID NO: 949712 - RNA, 19 nt, Artificial Sequence
  Description of Artificial Sequence: Synthetic oligonucleotide
  Sense strand starting at position 2445 of SEQ ID NO: 913733
ggaaaugaacaucgcaauu

SEQ ID NO: 949713 - RNA, 19 nt, Artificial Sequence
  Description of Artificial Sequence: Synthetic oligonucleotide
  Antisense strand to SEQ ID NO: 949712
aauugcgauguucauuucc

SEQ ID NO: 949714 - RNA, 19 nt, Artificial Sequence
  Description of Artificial Sequence: Synthetic oligonucleotide
  Sense strand starting at position 3608 of SEQ ID NO: 913733
acgccagugacugaaucaa

SEQ ID NO: 949715 - RNA, 19 nt, Artificial Sequence
  Description of Artificial Sequence: Synthetic oligonucleotide
  Antisense strand to SEQ ID NO: 949714
uugauucagucacuggcgu

SEQ ID NO: 949716 - RNA, 19 nt, Artificial Sequence
  Description of Artificial Sequence: Synthetic oligonucleotide
  Sense strand starting at position 892 of SEQ ID NO: 913733
ggucccuaaccucagaguu

SEQ ID NO: 949717 - RNA, 19 nt, Artificial Sequence
  Description of Artificial Sequence: Synthetic oligonucleotide
  Antisense strand to SEQ ID NO: 949716
aacucugagguuagggacc

SEQ ID NO: 949718 - RNA, 19 nt, Artificial Sequence
  Description of Artificial Sequence: Synthetic oligonucleotide
  Sense strand starting at position 555 of SEQ ID NO: 913733
accagacacuccguugaaa

SEQ ID NO: 949719 - RNA, 19 nt, Artificial Sequence
  Description of Artificial Sequence: Synthetic oligonucleotide
  Antisense strand to SEQ ID NO: 949718
uuucaacggagugucuggu

SEQ ID NO: 949720 - RNA, 19 nt, Artificial Sequence
  Description of Artificial Sequence: Synthetic oligonucleotide
  Sense strand starting at position 557 of SEQ ID NO: 913733
cagacacuccguugaaaua

SEQ ID NO: 949721 - RNA, 19 nt, Artificial Sequence
  Description of Artificial Sequence: Synthetic oligonucleotide
  Antisense strand to SEQ ID NO: 949720
uauuucaacggagugucug

SEQ ID NO: 949722 - RNA, 19 nt, Artificial Sequence
  Description of Artificial Sequence: Synthetic oligonucleotide
  Sense strand starting at position 3505 of SEQ ID NO: 913733
ggacaaguuuauguacuau

SEQ ID NO: 949723 - RNA, 19 nt, Artificial Sequence
  Description of Artificial Sequence: Synthetic oligonucleotide
  Antisense strand to SEQ ID NO: 949722
auaguacauaaacuugucc

SEQ ID NO: 949724 - RNA, 19 nt, Artificial Sequence
  Description of Artificial Sequence: Synthetic oligonucleotide
  Sense strand starting at position 131 of SEQ ID NO: 913733
ccauguguccgauagggac

SEQ ID NO: 949725 - RNA, 19 nt, Artificial Sequence
  Description of Artificial Sequence: Synthetic oligonucleotide
  Antisense strand to SEQ ID NO: 949724
gucccuaucggacacaugg

SEQ ID NO: 949726 - RNA, 19 nt, Artificial Sequence
  Description of Artificial Sequence: Synthetic oligonucleotide
  Sense strand starting at position 2959 of SEQ ID NO: 913733
ccaagaauguugcuuaaau

SEQ ID NO: 949727 - RNA, 19 nt, Artificial Sequence
  Description of Artificial Sequence: Synthetic oligonucleotide
  Antisense strand to SEQ ID NO: 949726
auuuaagcaacauucuugg

SEQ ID NO: 949728 - RNA, 19 nt, Artificial Sequence
  Description of Artificial Sequence: Synthetic oligonucleotide
  Sense strand starting at position 3484 of SEQ ID NO: 913733
uuggaauggugcucuggaa

SEQ ID NO: 949729 - RNA, 19 nt, Artificial Sequence
  Description of Artificial Sequence: Synthetic oligonucleotide
  Antisense strand to SEQ ID NO: 949728
uuccagagcaccauuccaa

SEQ ID NO: 949730 - RNA, 19 nt, Artificial Sequence
  Description of Artificial Sequence: Synthetic oligonucleotide
  Sense strand starting at position 167 of SEQ ID NO: 913733
aagucagugccagagaugu

SEQ ID NO: 949731 - RNA, 19 nt, Artificial Sequence
  Description of Artificial Sequence: Synthetic oligonucleotide
  Antisense strand to SEQ ID NO: 949730
acaucucuggcacugacuu

SEQ ID NO: 949732 - RNA, 19 nt, Artificial Sequence
  Description of Artificial Sequence: Synthetic oligonucleotide
  Sense strand starting at position 512 of SEQ ID NO: 913733
acacgauacugccucaaua

SEQ ID NO: 949733 - RNA, 19 nt, Artificial Sequence
  Description of Artificial Sequence: Synthetic oligonucleotide
  Antisense strand to SEQ ID NO: 949732
uauugaggcaguaucgugu

SEQ ID NO: 949734 - RNA, 19 nt, Artificial Sequence
  Description of Artificial Sequence: Synthetic oligonucleotide
  Sense strand starting at position 169 of SEQ ID NO: 913733
gucagugccagagauguga

SEQ ID NO: 949735 - RNA, 19 nt, Artificial Sequence
  Description of Artificial Sequence: Synthetic oligonucleotide
  Antisense strand to SEQ ID NO: 949734
ucacaucucuggcacugac

SEQ ID NO: 949736 - RNA, 19 nt, Artificial Sequence
  Description of Artificial Sequence: Synthetic oligonucleotide
  Sense strand starting at position 2816 of SEQ ID NO: 913733
guuaacuguccugaaggcu

SEQ ID NO: 949737 - RNA, 19 nt, Artificial Sequence
  Description of Artificial Sequence: Synthetic oligonucleotide
  Antisense strand to SEQ ID NO: 949736
agccuucaggacaguuaac

SEQ ID NO: 949738 - RNA, 19 nt, Artificial Sequence
  Description of Artificial Sequence: Synthetic oligonucleotide
  Sense strand starting at position 28 of SEQ ID NO: 913733
aguaccuuccaauguauau

SEQ ID NO: 949739 - RNA, 19 nt, Artificial Sequence
  Description of Artificial Sequence: Synthetic oligonucleotide
  Antisense strand to SEQ ID NO: 949738
auauacauuggaagguacu

SEQ ID NO: 949740 - RNA, 19 nt, Artificial Sequence
  Description of Artificial Sequence: Synthetic oligonucleotide
  Sense strand starting at position 2813 of SEQ ID NO: 913733
ucuguuaacuguccugaag

SEQ ID NO: 949741 - RNA, 19 nt, Artificial Sequence
  Description of Artificial Sequence: Synthetic oligonucleotide
  Antisense strand to SEQ ID NO: 949740
cuucaggacaguuaacaga

SEQ ID NO: 949742 - RNA, 19 nt, Artificial Sequence
  Description of Artificial Sequence: Synthetic oligonucleotide
  Sense strand starting at position 162 of SEQ ID NO: 913733
acacuaagucagugccaga

SEQ ID NO: 949743 - RNA, 19 nt, Artificial Sequence
  Description of Artificial Sequence: Synthetic oligonucleotide
  Antisense strand to SEQ ID NO: 949742
ucuggcacugacuuagugu

SEQ ID NO: 949744 - RNA, 19 nt, Artificial Sequence
  Description of Artificial Sequence: Synthetic oligonucleotide
  Sense strand starting at position 2217 of SEQ ID NO: 913733
gggccaggaugaguguauu

SEQ ID NO: 949745 - RNA, 19 nt, Artificial Sequence
  Description of Artificial Sequence: Synthetic oligonucleotide
  Antisense strand to SEQ ID NO: 949744
aauacacucauccuggccc

SEQ ID NO: 949746 - RNA, 19 nt, Artificial Sequence
  Description of Artificial Sequence: Synthetic oligonucleotide
  Sense strand starting at position 3585 of SEQ ID NO: 913733
gcaccuccacuguaugagu

SEQ ID NO: 949747 - RNA, 19 nt, Artificial Sequence
  Description of Artificial Sequence: Synthetic oligonucleotide
  Antisense strand to SEQ ID NO: 949746
acucauacaguggaggugc

SEQ ID NO: 949748 - RNA, 19 nt, Artificial Sequence
  Description of Artificial Sequence: Synthetic oligonucleotide
  Sense strand starting at position 1189 of SEQ ID NO: 913733
caguuuacagcuggguaaa

SEQ ID NO: 949749 - RNA, 19 nt, Artificial Sequence
  Description of Artificial Sequence: Synthetic oligonucleotide
  Antisense strand to SEQ ID NO: 949748
uuuacccagcuguaaacug

SEQ ID NO: 949750 - RNA, 19 nt, Artificial Sequence
  Description of Artificial Sequence: Synthetic oligonucleotide
  Sense strand starting at position 1188 of SEQ ID NO: 913733
acaguuuacagcuggguaa

SEQ ID NO: 949751 - RNA, 19 nt, Artificial Sequence
  Description of Artificial Sequence: Synthetic oligonucleotide
  Antisense strand to SEQ ID NO: 949750
uuacccagcuguaaacugu

SEQ ID NO: 949752 - RNA, 19 nt, Artificial Sequence
  Description of Artificial Sequence: Synthetic oligonucleotide
  Sense strand starting at position 171 of SEQ ID NO: 913733
cagugccagagaugugauu

SEQ ID NO: 949753 - RNA, 19 nt, Artificial Sequence
  Description of Artificial Sequence: Synthetic oligonucleotide
  Antisense strand to SEQ ID NO: 949752
aaucacaucucuggcacug

SEQ ID NO: 949754 - RNA, 19 nt, Artificial Sequence
  Description of Artificial Sequence: Synthetic oligonucleotide
  Sense strand starting at position 2886 of SEQ ID NO: 913733
acuggcauugugugaagau

SEQ ID NO: 949755 - RNA, 19 nt, Artificial Sequence
  Description of Artificial Sequence: Synthetic oligonucleotide
  Antisense strand to SEQ ID NO: 949754
aucuucacacaaugccagu

SEQ ID NO: 949756 - RNA, 19 nt, Artificial Sequence
  Description of Artificial Sequence: Synthetic oligonucleotide
  Sense strand starting at position 865 of SEQ ID NO: 913733
acauguugauuguugcaaa

SEQ ID NO: 949757 - RNA, 19 nt, Artificial Sequence
  Description of Artificial Sequence: Synthetic oligonucleotide
  Antisense strand to SEQ ID NO: 949756
uuugcaacaaucaacaugu

SEQ ID NO: 949758 - RNA, 19 nt, Artificial Sequence
  Description of Artificial Sequence: Synthetic oligonucleotide
  Sense strand starting at position 1213 of SEQ ID NO: 913733
gcaggugagguuuagcuua

SEQ ID NO: 949759 - RNA, 19 nt, Artificial Sequence
  Description of Artificial Sequence: Synthetic oligonucleotide
  Antisense strand to SEQ ID NO: 949758
uaagcuaaaccucaccugc

SEQ ID NO: 949760 - RNA, 19 nt, Artificial Sequence
  Description of Artificial Sequence: Synthetic oligonucleotide
  Sense strand starting at position 2086 of SEQ ID NO: 913733
caagaagcugccugugaca

SEQ ID NO: 949761 - RNA, 19 nt, Artificial Sequence
  Description of Artificial Sequence: Synthetic oligonucleotide
  Antisense strand to SEQ ID NO: 949760
ugucacaggcagcuucuug

SEQ ID NO: 949762 - RNA, 19 nt, Artificial Sequence
  Description of Artificial Sequence: Synthetic oligonucleotide
  Sense strand starting at position 3338 of SEQ ID NO: 913733
ucaugauucuggccuccuu

SEQ ID NO: 949763 - RNA, 19 nt, Artificial Sequence
  Description of Artificial Sequence: Synthetic oligonucleotide
  Antisense strand to SEQ ID NO: 949762
aaggaggccagaaucauga

SEQ ID NO: 949764 - RNA, 19 nt, Artificial Sequence
  Description of Artificial Sequence: Synthetic oligonucleotide
  Sense strand starting at position 3437 of SEQ ID NO: 913733
gcacuugcacucuggacau

SEQ ID NO: 949765 - RNA, 19 nt, Artificial Sequence
  Description of Artificial Sequence: Synthetic oligonucleotide
  Antisense strand to SEQ ID NO: 949764
auguccagagugcaagugc

SEQ ID NO: 949766 - RNA, 19 nt, Artificial Sequence
  Description of Artificial Sequence: Synthetic oligonucleotide
  Sense strand starting at position 3179 of SEQ ID NO: 913733
gacuaaguguucccuaguc

SEQ ID NO: 949767 - RNA, 19 nt, Artificial Sequence
  Description of Artificial Sequence: Synthetic oligonucleotide
  Antisense strand to SEQ ID NO: 949766
gacuagggaacacuuaguc

SEQ ID NO: 949768 - RNA, 19 nt, Artificial Sequence
  Description of Artificial Sequence: Synthetic oligonucleotide
  Sense strand starting at position 570 of SEQ ID NO: 913733
gaaauaguguggccuagca

SEQ ID NO: 949769 - RNA, 19 nt, Artificial Sequence
  Description of Artificial Sequence: Synthetic oligonucleotide
  Antisense strand to SEQ ID NO: 949768
ugcuaggccacacuauuuc

SEQ ID NO: 949770 - RNA, 19 nt, Artificial Sequence
  Description of Artificial Sequence: Synthetic oligonucleotide
  Sense strand starting at position 567 of SEQ ID NO: 913733
guugaaauaguguggccua

SEQ ID NO: 949771 - RNA, 19 nt, Artificial Sequence
  Description of Artificial Sequence: Synthetic oligonucleotide
  Antisense strand to SEQ ID NO: 949770
uaggccacacuauuucaac

SEQ ID NO: 949772 - RNA, 19 nt, Artificial Sequence
  Description of Artificial Sequence: Synthetic oligonucleotide
  Sense strand starting at position 676 of SEQ ID NO: 913733
cuauguguuagccgaauga

SEQ ID NO: 949773 - RNA, 19 nt, Artificial Sequence
  Description of Artificial Sequence: Synthetic oligonucleotide
  Antisense strand to SEQ ID NO: 949772
ucauucggcuaacacauag

SEQ ID NO: 949774 - RNA, 19 nt, Artificial Sequence
  Description of Artificial Sequence: Synthetic oligonucleotide
  Sense strand starting at position 988 of SEQ ID NO: 913733
aacuaauucuggcaaggag

SEQ ID NO: 949775 - RNA, 19 nt, Artificial Sequence
  Description of Artificial Sequence: Synthetic oligonucleotide
  Antisense strand to SEQ ID NO: 949774
cuccuugccagaauuaguu

SEQ ID NO: 949776 - RNA, 19 nt, Artificial Sequence
  Description of Artificial Sequence: Synthetic oligonucleotide
  Sense strand starting at position 680 of SEQ ID NO: 913733
guguuagccgaaugaccuu

SEQ ID NO: 949777 - RNA, 19 nt, Artificial Sequence
  Description of Artificial Sequence: Synthetic oligonucleotide
  Antisense strand to SEQ ID NO: 949776
aaggucauucggcuaacac

SEQ ID NO: 949778 - RNA, 19 nt, Artificial Sequence
  Description of Artificial Sequence: Synthetic oligonucleotide
  Sense strand starting at position 3237 of SEQ ID NO: 913733
cugccuagauccuaagaaa

SEQ ID NO: 949779 - RNA, 19 nt, Artificial Sequence
  Description of Artificial Sequence: Synthetic oligonucleotide
  Antisense strand to SEQ ID NO: 949778
uuucuuaggaucuaggcag

SEQ ID NO: 949780 - RNA, 19 nt, Artificial Sequence
  Description of Artificial Sequence: Synthetic oligonucleotide
  Sense strand starting at position 1238 of SEQ ID NO: 913734
acgaguucggccuuuagca

SEQ ID NO: 949781 - RNA, 19 nt, Artificial Sequence
  Description of Artificial Sequence: Synthetic oligonucleotide
  Antisense strand to SEQ ID NO: 949780
ugcuaaaggccgaacucgu

SEQ ID NO: 949782 - RNA, 19 nt, Artificial Sequence
  Description of Artificial Sequence: Synthetic oligonucleotide
  Sense strand starting at position 3224 of SEQ ID NO: 913734
agugguaucauuuguagca

SEQ ID NO: 949783 - RNA, 19 nt, Artificial Sequence
  Description of Artificial Sequence: Synthetic oligonucleotide
  Antisense strand to SEQ ID NO: 949782
ugcuacaaaugauaccacu

SEQ ID NO: 949784 - RNA, 19 nt, Artificial Sequence
  Description of Artificial Sequence: Synthetic oligonucleotide
  Sense strand starting at position 992 of SEQ ID NO: 913734
ggguuagaucaugggagug

SEQ ID NO: 949785 - RNA, 19 nt, Artificial Sequence
  Description of Artificial Sequence: Synthetic oligonucleotide
  Antisense strand to SEQ ID NO: 949784
cacucccaugaucuaaccc

SEQ ID NO: 949786 - RNA, 19 nt, Artificial Sequence
  Description of Artificial Sequence: Synthetic oligonucleotide
  Sense strand starting at position 1302 of SEQ ID NO: 913734
ugccauauucccgaaacag

SEQ ID NO: 949787 - RNA, 19 nt, Artificial Sequence
  Description of Artificial Sequence: Synthetic oligonucleotide
  Antisense strand to SEQ ID NO: 949786
cuguuucgggaauauggca

SEQ ID NO: 949788 - RNA, 19 nt, Artificial Sequence
  Description of Artificial Sequence: Synthetic oligonucleotide
  Sense strand starting at position 2592 of SEQ ID NO: 913734
gauauaguagauugagcau

SEQ ID NO: 949789 - RNA, 19 nt, Artificial Sequence
  Description of Artificial Sequence: Synthetic oligonucleotide
  Antisense strand to SEQ ID NO: 949788
augcucaaucuacuauauc

SEQ ID NO: 949790 - RNA, 19 nt, Artificial Sequence
  Description of Artificial Sequence: Synthetic oligonucleotide
  Sense strand starting at position 2892 of SEQ ID NO: 913734
aacugcaauguaugaggau

SEQ ID NO: 949791 - RNA, 19 nt, Artificial Sequence
  Description of Artificial Sequence: Synthetic oligonucleotide
  Antisense strand to SEQ ID NO: 949790
auccucauacauugcaguu

SEQ ID NO: 949792 - RNA, 19 nt, Artificial Sequence
  Description of Artificial Sequence: Synthetic oligonucleotide
  Sense strand starting at position 2716 of SEQ ID NO: 913734
agggcaaauucuuccaacu

SEQ ID NO: 949793 - RNA, 19 nt, Artificial Sequence
  Description of Artificial Sequence: Synthetic oligonucleotide
  Antisense strand to SEQ ID NO: 949792
aguuggaagaauuugcccu

SEQ ID NO: 949794 - RNA, 19 nt, Artificial Sequence
  Description of Artificial Sequence: Synthetic oligonucleotide
  Sense strand starting at position 3687 of SEQ ID NO: 913734
aggagaauugcugguacca

SEQ ID NO: 949795 - RNA, 19 nt, Artificial Sequence
  Description of Artificial Sequence: Synthetic oligonucleotide
  Antisense strand to SEQ ID NO: 949794
ugguaccagcaauucuccu

SEQ ID NO: 949796 - RNA, 19 nt, Artificial Sequence
  Description of Artificial Sequence: Synthetic oligonucleotide
  Sense strand starting at position 2810 of SEQ ID NO: 913734
cuuucaguggucgaaugaa

SEQ ID NO: 949797 - RNA, 19 nt, Artificial Sequence
  Description of Artificial Sequence: Synthetic oligonucleotide
  Antisense strand to SEQ ID NO: 949796
uucauucgaccacugaaag

SEQ ID NO: 949798 - RNA, 19 nt, Artificial Sequence
  Description of Artificial Sequence: Synthetic oligonucleotide
  Sense strand starting at position 2228 of SEQ ID NO: 913734
ucaggcuuugccuaaugaa

SEQ ID NO: 949799 - RNA, 19 nt, Artificial Sequence
  Description of Artificial Sequence: Synthetic oligonucleotide
  Antisense strand to SEQ ID NO: 949798
uucauuaggcaaagccuga

SEQ ID NO: 949800 - RNA, 19 nt, Artificial Sequence
  Description of Artificial Sequence: Synthetic oligonucleotide
  Sense strand starting at position 1391 of SEQ ID NO: 913734
gcuaucuugcccuagaaag

SEQ ID NO: 949801 - RNA, 19 nt, Artificial Sequence
  Description of Artificial Sequence: Synthetic oligonucleotide
  Antisense strand to SEQ ID NO: 949800
cuuucuagggcaagauagc

SEQ ID NO: 949802 - RNA, 19 nt, Artificial Sequence
  Description of Artificial Sequence: Synthetic oligonucleotide
  Sense strand starting at position 3976 of SEQ ID NO: 913734
augugagaauuccuuccuu

SEQ ID NO: 949803 - RNA, 19 nt, Artificial Sequence
  Description of Artificial Sequence: Synthetic oligonucleotide
  Antisense strand to SEQ ID NO: 949802
aaggaaggaauucucacau

SEQ ID NO: 949804 - RNA, 19 nt, Artificial Sequence
  Description of Artificial Sequence: Synthetic oligonucleotide
  Sense strand starting at position 1360 of SEQ ID NO: 913734
cggugucacacugagacuu

SEQ ID NO: 949805 - RNA, 19 nt, Artificial Sequence
  Description of Artificial Sequence: Synthetic oligonucleotide
  Antisense strand to SEQ ID NO: 949804
aagucucagugugacaccg

SEQ ID NO: 949806 - RNA, 19 nt, Artificial Sequence
  Description of Artificial Sequence: Synthetic oligonucleotide
  Sense strand starting at position 2563 of SEQ ID NO: 913734
caagguauggguugcaaga

SEQ ID NO: 949807 - RNA, 19 nt, Artificial Sequence
  Description of Artificial Sequence: Synthetic oligonucleotide
  Antisense strand to SEQ ID NO: 949806
ucuugcaacccauaccuug

SEQ ID NO: 949808 - RNA, 19 nt, Artificial Sequence
  Description of Artificial Sequence: Synthetic oligonucleotide
  Sense strand starting at position 1111 of SEQ ID NO: 913734
uaaucaaucugguuccgga

SEQ ID NO: 949809 - RNA, 19 nt, Artificial Sequence
  Description of Artificial Sequence: Synthetic oligonucleotide
  Antisense strand to SEQ ID NO: 949808
uccggaaccagauugauua

SEQ ID NO: 949810 - RNA, 19 nt, Artificial Sequence
  Description of Artificial Sequence: Synthetic oligonucleotide
  Sense strand starting at position 1719 of SEQ ID NO: 913734
ggaggcuugacuugugaca

SEQ ID NO: 949811 - RNA, 19 nt, Artificial Sequence
  Description of Artificial Sequence: Synthetic oligonucleotide
  Antisense strand to SEQ ID NO: 949810
ugucacaagucaagccucc

SEQ ID NO: 949812 - RNA, 19 nt, Artificial Sequence
  Description of Artificial Sequence: Synthetic oligonucleotide
  Sense strand starting at position 940 of SEQ ID NO: 913734
cucaaacuccugcggagaa

SEQ ID NO: 949813 - RNA, 19 nt, Artificial Sequence
  Description of Artificial Sequence: Synthetic oligonucleotide
  Antisense strand to SEQ ID NO: 949812
uucuccgcaggaguuugag

SEQ ID NO: 949814 - RNA, 19 nt, Artificial Sequence
  Description of Artificial Sequence: Synthetic oligonucleotide
  Sense strand starting at position 2413 of SEQ ID NO: 913734
ugaaccuauguuugcaaua

SEQ ID NO: 949815 - RNA, 19 nt, Artificial Sequence
  Description of Artificial Sequence: Synthetic oligonucleotide
  Antisense strand to SEQ ID NO: 949814
uauugcaaacauagguuca

SEQ ID NO: 949816 - RNA, 19 nt, Artificial Sequence
  Description of Artificial Sequence: Synthetic oligonucleotide
  Sense strand starting at position 1284 of SEQ ID NO: 913734
ccacaugauuggcccgaau

SEQ ID NO: 949817 - RNA, 19 nt, Artificial Sequence
  Description of Artificial Sequence: Synthetic oligonucleotide
  Antisense strand to SEQ ID NO: 949816
auucgggccaaucaugugg

SEQ ID NO: 949818 - RNA, 19 nt, Artificial Sequence
  Description of Artificial Sequence: Synthetic oligonucleotide
  Sense strand starting at position 757 of SEQ ID NO: 913734
gggagcuugcuaggaguga

SEQ ID NO: 949819 - RNA, 19 nt, Artificial Sequence
  Description of Artificial Sequence: Synthetic oligonucleotide
  Antisense strand to SEQ ID NO: 949818
ucacuccuagcaagcuccc

SEQ ID NO: 949820 - RNA, 19 nt, Artificial Sequence
  Description of Artificial Sequence: Synthetic oligonucleotide
  Sense strand starting at position 2407 of SEQ ID NO: 913734
uuguguugaaccuauguuu

SEQ ID NO: 949821 - RNA, 19 nt, Artificial Sequence
  Description of Artificial Sequence: Synthetic oligonucleotide
  Antisense strand to SEQ ID NO: 949820
aaacauagguucaacacaa

SEQ ID NO: 949822 - RNA, 19 nt, Artificial Sequence
  Description of Artificial Sequence: Synthetic oligonucleotide
  Sense strand starting at position 1 of SEQ ID NO: 913734
ugguugugagcggagaagu

SEQ ID NO: 949823 - RNA, 19 nt, Artificial Sequence
  Description of Artificial Sequence: Synthetic oligonucleotide
  Antisense strand to SEQ ID NO: 949822
acuucuccgcucacaacca

SEQ ID NO: 949824 - RNA, 19 nt, Artificial Sequence
  Description of Artificial Sequence: Synthetic oligonucleotide
  Sense strand starting at position 73 of SEQ ID NO: 913734
gcgggugucagguaaugag

SEQ ID NO: 949825 - RNA, 19 nt, Artificial Sequence
  Description of Artificial Sequence: Synthetic oligonucleotide
  Antisense strand to SEQ ID NO: 949824
cucauuaccugacacccgc

SEQ ID NO: 949826 - RNA, 19 nt, Artificial Sequence
  Description of Artificial Sequence: Synthetic oligonucleotide
  Sense strand starting at position 2410 of SEQ ID NO: 913734
uguugaaccuauguuugca

SEQ ID NO: 949827 - RNA, 19 nt, Artificial Sequence
  Description of Artificial Sequence: Synthetic oligonucleotide
  Antisense strand to SEQ ID NO: 949826
ugcaaacauagguucaaca

SEQ ID NO: 949828 - RNA, 19 nt, Artificial Sequence
  Description of Artificial Sequence: Synthetic oligonucleotide
  Sense strand starting at position 2839 of SEQ ID NO: 913734
uggauaugcuguuauuuac

SEQ ID NO: 949829 - RNA, 19 nt, Artificial Sequence
  Description of Artificial Sequence: Synthetic oligonucleotide
  Antisense strand to SEQ ID NO: 949828
guaaauaacagcauaucca

SEQ ID NO: 949830 - RNA, 19 nt, Artificial Sequence
  Description of Artificial Sequence: Synthetic oligonucleotide
  Sense strand starting at position 2809 of SEQ ID NO: 913734
gcuuucaguggucgaauga

SEQ ID NO: 949831 - RNA, 19 nt, Artificial Sequence
  Description of Artificial Sequence: Synthetic oligonucleotide
  Antisense strand to SEQ ID NO: 949830
ucauucgaccacugaaagc

SEQ ID NO: 949832 - RNA, 19 nt, Artificial Sequence
  Description of Artificial Sequence: Synthetic oligonucleotide
  Sense strand starting at position 843 of SEQ ID NO: 913734
cugggaugauacgaugaau

SEQ ID NO: 949833 - RNA, 19 nt, Artificial Sequence
  Description of Artificial Sequence: Synthetic oligonucleotide
  Antisense strand to SEQ ID NO: 949832
auucaucguaucaucccag

SEQ ID NO: 949834 - RNA, 19 nt, Artificial Sequence
  Description of Artificial Sequence: Synthetic oligonucleotide
  Sense strand starting at position 512 of SEQ ID NO: 913734
acugcugcccguugagaaa

SEQ ID NO: 949835 - RNA, 19 nt, Artificial Sequence
  Description of Artificial Sequence: Synthetic oligonucleotide
  Antisense strand to SEQ ID NO: 949834
uuucucaacgggcagcagu

SEQ ID NO: 949836 - RNA, 19 nt, Artificial Sequence
  Description of Artificial Sequence: Synthetic oligonucleotide
  Sense strand starting at position 1389 of SEQ ID NO: 913734
ucgcuaucuugcccuagaa

SEQ ID NO: 949837 - RNA, 19 nt, Artificial Sequence
  Description of Artificial Sequence: Synthetic oligonucleotide
  Antisense strand to SEQ ID NO: 949836
uucuagggcaagauagcga

SEQ ID NO: 949838 - RNA, 19 nt, Artificial Sequence
  Description of Artificial Sequence: Synthetic oligonucleotide
  Sense strand starting at position 2808 of SEQ ID NO: 913734
ugcuuucaguggucgaaug

SEQ ID NO: 949839 - RNA, 19 nt, Artificial Sequence
  Description of Artificial Sequence: Synthetic oligonucleotide
  Antisense strand to SEQ ID NO: 949838
cauucgaccacugaaagca

SEQ ID NO: 949840 - RNA, 19 nt, Artificial Sequence
  Description of Artificial Sequence: Synthetic oligonucleotide
  Sense strand starting at position 2820 of SEQ ID NO: 913734
ucgaaugaauuccaucaaa

SEQ ID NO: 949841 - RNA, 19 nt, Artificial Sequence
  Description of Artificial Sequence: Synthetic oligonucleotide
  Antisense strand to SEQ ID NO: 949840
uuugauggaauucauucga

SEQ ID NO: 949842 - RNA, 19 nt, Artificial Sequence
  Description of Artificial Sequence: Synthetic oligonucleotide
  Sense strand starting at position 2982 of SEQ ID NO: 913734
guggaguggugucuuguga

SEQ ID NO: 949843 - RNA, 19 nt, Artificial Sequence
  Description of Artificial Sequence: Synthetic oligonucleotide
  Antisense strand to SEQ ID NO: 949842
ucacaagacaccacuccac

SEQ ID NO: 949844 - RNA, 19 nt, Artificial Sequence
  Description of Artificial Sequence: Synthetic oligonucleotide
  Sense strand starting at position 3284 of SEQ ID NO: 913734
uuuaguuauguacggguuu

SEQ ID NO: 949845 - RNA, 19 nt, Artificial Sequence
  Description of Artificial Sequence: Synthetic oligonucleotide
  Antisense strand to SEQ ID NO: 949844
aaacccguacauaacuaaa

SEQ ID NO: 949846 - RNA, 19 nt, Artificial Sequence
  Description of Artificial Sequence: Synthetic oligonucleotide
  Sense strand starting at position 3328 of SEQ ID NO: 913734
caaauuuguuugugguaaa

SEQ ID NO: 949847 - RNA, 19 nt, Artificial Sequence
  Description of Artificial Sequence: Synthetic oligonucleotide
  Antisense strand to SEQ ID NO: 949846
uuuaccacaaacaaauuug

SEQ ID NO: 949848 - RNA, 19 nt, Artificial Sequence
  Description of Artificial Sequence: Synthetic oligonucleotide
  Sense strand starting at position 1034 of SEQ ID NO: 913734
uuagcaaacugcguucuua

SEQ ID NO: 949849 - RNA, 19 nt, Artificial Sequence
  Description of Artificial Sequence: Synthetic oligonucleotide
  Antisense strand to SEQ ID NO: 949848
uaagaacgcaguuugcuaa

SEQ ID NO: 949850 - RNA, 19 nt, Artificial Sequence
  Description of Artificial Sequence: Synthetic oligonucleotide
  Sense strand starting at position 2624 of SEQ ID NO: 913734
ggcagaggcuaagaaucaa

SEQ ID NO: 949851 - RNA, 19 nt, Artificial Sequence
  Description of Artificial Sequence: Synthetic oligonucleotide
  Antisense strand to SEQ ID NO: 949850
uugauucuuagccucugcc

SEQ ID NO: 949852 - RNA, 19 nt, Artificial Sequence
  Description of Artificial Sequence: Synthetic oligonucleotide
  Sense strand starting at position 1388 of SEQ ID NO: 913734
cucgcuaucuugcccuaga

SEQ ID NO: 949853 - RNA, 19 nt, Artificial Sequence
  Description of Artificial Sequence: Synthetic oligonucleotide
  Antisense strand to SEQ ID NO: 949852
ucuagggcaagauagcgag

SEQ ID NO: 949854 - RNA, 19 nt, Artificial Sequence
  Description of Artificial Sequence: Synthetic oligonucleotide
  Sense strand starting at position 2805 of SEQ ID NO: 913734
cuaugcuuucaguggucga

SEQ ID NO: 949855 - RNA, 19 nt, Artificial Sequence
  Description of Artificial Sequence: Synthetic oligonucleotide
  Antisense strand to SEQ ID NO: 949854
ucgaccacugaaagcauag

SEQ ID NO: 949856 - RNA, 19 nt, Artificial Sequence
  Description of Artificial Sequence: Synthetic oligonucleotide
  Sense strand starting at position 3689 of SEQ ID NO: 913734
gagaauugcugguaccaag

SEQ ID NO: 949857 - RNA, 19 nt, Artificial Sequence
  Description of Artificial Sequence: Synthetic oligonucleotide
  Antisense strand to SEQ ID NO: 949856
cuugguaccagcaauucuc

SEQ ID NO: 949858 - RNA, 19 nt, Artificial Sequence
  Description of Artificial Sequence: Synthetic oligonucleotide
  Sense strand starting at position 1647 of SEQ ID NO: 913734
gccaguuucuguccaguuu

SEQ ID NO: 949859 - RNA, 19 nt, Artificial Sequence
  Description of Artificial Sequence: Synthetic oligonucleotide
  Antisense strand to SEQ ID NO: 949858
aaacuggacagaaacuggc

SEQ ID NO: 949860 - RNA, 19 nt, Artificial Sequence
  Description of Artificial Sequence: Synthetic oligonucleotide
  Sense strand starting at position 2592 of SEQ ID NO: 913735
cuuccauaucacuauguga

SEQ ID NO: 949861 - RNA, 19 nt, Artificial Sequence
  Description of Artificial Sequence: Synthetic oligonucleotide
  Antisense strand to SEQ ID NO: 949860
ucacauagugauauggaag

SEQ ID NO: 949862 - RNA, 19 nt, Artificial Sequence
  Description of Artificial Sequence: Synthetic oligonucleotide
  Sense strand starting at position 2743 of SEQ ID NO: 913735
gagucagugcaacaaauca

SEQ ID NO: 949863 - RNA, 19 nt, Artificial Sequence
  Description of Artificial Sequence: Synthetic oligonucleotide
  Antisense strand to SEQ ID NO: 949862
ugauuuguugcacugacuc

SEQ ID NO: 949864 - RNA, 19 nt, Artificial Sequence
  Description of Artificial Sequence: Synthetic oligonucleotide
  Sense strand starting at position 2682 of SEQ ID NO: 913735
uaagaucaagcagguauua

SEQ ID NO: 949865 - RNA, 19 nt, Artificial Sequence
  Description of Artificial Sequence: Synthetic oligonucleotide
  Antisense strand to SEQ ID NO: 949864
uaauaccugcuugaucuua

SEQ ID NO: 949866 - RNA, 19 nt, Artificial Sequence
  Description of Artificial Sequence: Synthetic oligonucleotide
  Sense strand starting at position 3242 of SEQ ID NO: 913735
acagccuucucauugaaag

SEQ ID NO: 949867 - RNA, 19 nt, Artificial Sequence
  Description of Artificial Sequence: Synthetic oligonucleotide
  Antisense strand to SEQ ID NO: 949866
cuuucaaugagaaggcugu

SEQ ID NO: 949868 - RNA, 19 nt, Artificial Sequence
  Description of Artificial Sequence: Synthetic oligonucleotide
  Sense strand starting at position 2664 of SEQ ID NO: 913735
gagauuacguaacuuaacu

SEQ ID NO: 949869 - RNA, 19 nt, Artificial Sequence
  Description of Artificial Sequence: Synthetic oligonucleotide
  Antisense strand to SEQ ID NO: 949868
aguuaaguuacguaaucuc

SEQ ID NO: 949870 - RNA, 19 nt, Artificial Sequence
  Description of Artificial Sequence: Synthetic oligonucleotide
  Sense strand starting at position 2594 of SEQ ID NO: 913735
uccauaucacuaugugaca

SEQ ID NO: 949871 - RNA, 19 nt, Artificial Sequence
  Description of Artificial Sequence: Synthetic oligonucleotide
  Antisense strand to SEQ ID NO: 949870
ugucacauagugauaugga

SEQ ID NO: 949872 - RNA, 19 nt, Artificial Sequence
  Description of Artificial Sequence: Synthetic oligonucleotide
  Sense strand starting at position 3017 of SEQ ID NO: 913735
ccguccucagcauagaaau

SEQ ID NO: 949873 - RNA, 19 nt, Artificial Sequence
  Description of Artificial Sequence: Synthetic oligonucleotide
  Antisense strand to SEQ ID NO: 949872
auuucuaugcugaggacgg

SEQ ID NO: 949874 - RNA, 19 nt, Artificial Sequence
  Description of Artificial Sequence: Synthetic oligonucleotide
  Sense strand starting at position 3239 of SEQ ID NO: 913735
uugacagccuucucauuga

SEQ ID NO: 949875 - RNA, 19 nt, Artificial Sequence
  Description of Artificial Sequence: Synthetic oligonucleotide
  Antisense strand to SEQ ID NO: 949874
ucaaugagaaggcugucaa

SEQ ID NO: 949876 - RNA, 19 nt, Artificial Sequence
  Description of Artificial Sequence: Synthetic oligonucleotide
  Sense strand starting at position 3015 of SEQ ID NO: 913735
uuccguccucagcauagaa

SEQ ID NO: 949877 - RNA, 19 nt, Artificial Sequence
  Description of Artificial Sequence: Synthetic oligonucleotide
  Antisense strand to SEQ ID NO: 949876
uucuaugcugaggacggaa

SEQ ID NO: 949878 - RNA, 19 nt, Artificial Sequence
  Description of Artificial Sequence: Synthetic oligonucleotide
  Sense strand starting at position 2691 of SEQ ID NO: 913735
gcagguauuaaguggugga

SEQ ID NO: 949879 - RNA, 19 nt, Artificial Sequence
  Description of Artificial Sequence: Synthetic oligonucleotide
  Antisense strand to SEQ ID NO: 949878
uccaccacuuaauaccugc

SEQ ID NO: 949880 - RNA, 19 nt, Artificial Sequence
  Description of Artificial Sequence: Synthetic oligonucleotide
  Sense strand starting at position 3766 of SEQ ID NO: 913735
cugcuaucuccauguccca

SEQ ID NO: 949881 - RNA, 19 nt, Artificial Sequence
  Description of Artificial Sequence: Synthetic oligonucleotide
  Antisense strand to SEQ ID NO: 949880
ugggacauggagauagcag

SEQ ID NO: 949882 - RNA, 19 nt, Artificial Sequence
  Description of Artificial Sequence: Synthetic oligonucleotide
  Sense strand starting at position 2379 of SEQ ID NO: 913735
augacaaucuaguggaaau

SEQ ID NO: 949883 - RNA, 19 nt, Artificial Sequence
  Description of Artificial Sequence: Synthetic oligonucleotide
  Antisense strand to SEQ ID NO: 949882
auuuccacuagauugucau

SEQ ID NO: 949884 - RNA, 19 nt, Artificial Sequence
  Description of Artificial Sequence: Synthetic oligonucleotide
  Sense strand starting at position 2362 of SEQ ID NO: 913735
accucaaccucauggagau

SEQ ID NO: 949885 - RNA, 19 nt, Artificial Sequence
  Description of Artificial Sequence: Synthetic oligonucleotide
  Antisense strand to SEQ ID NO: 949884
aucuccaugagguugaggu

SEQ ID NO: 949886 - RNA, 19 nt, Artificial Sequence
  Description of Artificial Sequence: Synthetic oligonucleotide
  Sense strand starting at position 2694 of SEQ ID NO: 913735
gguauuaagugguggaggu

SEQ ID NO: 949887 - RNA, 19 nt, Artificial Sequence
  Description of Artificial Sequence: Synthetic oligonucleotide
  Antisense strand to SEQ ID NO: 949886
accuccaccacuuaauacc

SEQ ID NO: 949888 - RNA, 19 nt, Artificial Sequence
  Description of Artificial Sequence: Synthetic oligonucleotide
  Sense strand starting at position 3045 of SEQ ID NO: 913735
ucucuccugucuuggaauu

SEQ ID NO: 949889 - RNA, 19 nt, Artificial Sequence
  Description of Artificial Sequence: Synthetic oligonucleotide
  Antisense strand to SEQ ID NO: 949888
aauuccaagacaggagaga

SEQ ID NO: 949890 - RNA, 19 nt, Artificial Sequence
  Description of Artificial Sequence: Synthetic oligonucleotide
  Sense strand starting at position 3256 of SEQ ID NO: 913735
gaaagucccuccugugguu

SEQ ID NO: 949891 - RNA, 19 nt, Artificial Sequence
  Description of Artificial Sequence: Synthetic oligonucleotide
  Antisense strand to SEQ ID NO: 949890
aaccacaggagggacuuuc

SEQ ID NO: 949892 - RNA, 19 nt, Artificial Sequence
  Description of Artificial Sequence: Synthetic oligonucleotide
  Sense strand starting at position 504 of SEQ ID NO: 913736
cgaauuucgcaaggaguga

SEQ ID NO: 949893 - RNA, 19 nt, Artificial Sequence
  Description of Artificial Sequence: Synthetic oligonucleotide
  Antisense strand to SEQ ID NO: 949892
ucacuccuugcgaaauucg

SEQ ID NO: 949894 - RNA, 19 nt, Artificial Sequence
  Description of Artificial Sequence: Synthetic oligonucleotide
  Sense strand starting at position 1654 of SEQ ID NO: 913736
agccaucaugaaugaugga

SEQ ID NO: 949895 - RNA, 19 nt, Artificial Sequence
  Description of Artificial Sequence: Synthetic oligonucleotide
  Antisense strand to SEQ ID NO: 949894
uccaucauucaugauggcu

SEQ ID NO: 949896 - RNA, 19 nt, Artificial Sequence
  Description of Artificial Sequence: Synthetic oligonucleotide
  Sense strand starting at position 1348 of SEQ ID NO: 913736
aggcuaauuguggauauau

SEQ ID NO: 949897 - RNA, 19 nt, Artificial Sequence
  Description of Artificial Sequence: Synthetic oligonucleotide
  Antisense strand to SEQ ID NO: 949896
auauauccacaauuagccu

SEQ ID NO: 949898 - RNA, 19 nt, Artificial Sequence
  Description of Artificial Sequence: Synthetic oligonucleotide
  Sense strand starting at position 1393 of SEQ ID NO: 913736
acugauaaguuucugaaau

SEQ ID NO: 949899 - RNA, 19 nt, Artificial Sequence
  Description of Artificial Sequence: Synthetic oligonucleotide
  Antisense strand to SEQ ID NO: 949898
auuucagaaacuuaucagu

SEQ ID NO: 949900 - RNA, 19 nt, Artificial Sequence
  Description of Artificial Sequence: Synthetic oligonucleotide
  Sense strand starting at position 1177 of SEQ ID NO: 913736
cgugcaaucccgcuugaac

SEQ ID NO: 949901 - RNA, 19 nt, Artificial Sequence
  Description of Artificial Sequence: Synthetic oligonucleotide
  Antisense strand to SEQ ID NO: 949900
guucaagcgggauugcacg

SEQ ID NO: 949902 - RNA, 19 nt, Artificial Sequence
  Description of Artificial Sequence: Synthetic oligonucleotide
  Sense strand starting at position 1176 of SEQ ID NO: 913736
ucgugcaaucccgcuugaa

SEQ ID NO: 949903 - RNA, 19 nt, Artificial Sequence
  Description of Artificial Sequence: Synthetic oligonucleotide
  Antisense strand to SEQ ID NO: 949902
uucaagcgggauugcacga

SEQ ID NO: 949904 - RNA, 19 nt, Artificial Sequence
  Description of Artificial Sequence: Synthetic oligonucleotide
  Sense strand starting at position 1628 of SEQ ID NO: 913736
ccugccuuaccuuaggaaa

SEQ ID NO: 949905 - RNA, 19 nt, Artificial Sequence
  Description of Artificial Sequence: Synthetic oligonucleotide
  Antisense strand to SEQ ID NO: 949904
uuuccuaagguaaggcagg

SEQ ID NO: 949906 - RNA, 19 nt, Artificial Sequence
  Description of Artificial Sequence: Synthetic oligonucleotide
  Sense strand starting at position 1019 of SEQ ID NO: 913736
uuacaaaguccugaagucu

SEQ ID NO: 949907 - RNA, 19 nt, Artificial Sequence
  Description of Artificial Sequence: Synthetic oligonucleotide
  Antisense strand to SEQ ID NO: 949906
agacuucaggacuuuguaa

SEQ ID NO: 949908 - RNA, 19 nt, Artificial Sequence
  Description of Artificial Sequence: Synthetic oligonucleotide
  Sense strand starting at position 3473 of SEQ ID NO: 913736
ggacaaggguuagucuuaa

SEQ ID NO: 949909 - RNA, 19 nt, Artificial Sequence
  Description of Artificial Sequence: Synthetic oligonucleotide
  Antisense strand to SEQ ID NO: 949908
uuaagacuaacccuugucc

SEQ ID NO: 949910 - RNA, 19 nt, Artificial Sequence
  Description of Artificial Sequence: Synthetic oligonucleotide
  Sense strand starting at position 653 of SEQ ID NO: 913736
uucgacauugcagaggauu

SEQ ID NO: 949911 - RNA, 19 nt, Artificial Sequence
  Description of Artificial Sequence: Synthetic oligonucleotide
  Antisense strand to SEQ ID NO: 949910
aauccucugcaaugucgaa

SEQ ID NO: 949912 - RNA, 19 nt, Artificial Sequence
  Description of Artificial Sequence: Synthetic oligonucleotide
  Sense strand starting at position 1359 of SEQ ID NO: 913736
ggauauauguaagcacaac

SEQ ID NO: 949913 - RNA, 19 nt, Artificial Sequence
  Description of Artificial Sequence: Synthetic oligonucleotide
  Antisense strand to SEQ ID NO: 949912
guugugcuuacauauaucc

SEQ ID NO: 949914 - RNA, 19 nt, Artificial Sequence
  Description of Artificial Sequence: Synthetic oligonucleotide
  Sense strand starting at position 3939 of SEQ ID NO: 913736
ccucuuagagauggcaaca

SEQ ID NO: 949915 - RNA, 19 nt, Artificial Sequence
  Description of Artificial Sequence: Synthetic oligonucleotide
  Antisense strand to SEQ ID NO: 949914
uguugccaucucuaagagg

SEQ ID NO: 949916 - RNA, 19 nt, Artificial Sequence
  Description of Artificial Sequence: Synthetic oligonucleotide
  Sense strand starting at position 1651 of SEQ ID NO: 913736
gccagccaucaugaaugau

SEQ ID NO: 949917 - RNA, 19 nt, Artificial Sequence
  Description of Artificial Sequence: Synthetic oligonucleotide
  Antisense strand to SEQ ID NO: 949916
aucauucaugauggcuggc

SEQ ID NO: 949918 - RNA, 19 nt, Artificial Sequence
  Description of Artificial Sequence: Synthetic oligonucleotide
  Sense strand starting at position 613 of SEQ ID NO: 913736
cuccaacuuguagggaauu

SEQ ID NO: 949919 - RNA, 19 nt, Artificial Sequence
  Description of Artificial Sequence: Synthetic oligonucleotide
  Antisense strand to SEQ ID NO: 949918
aauucccuacaaguuggag

SEQ ID NO: 949920 - RNA, 19 nt, Artificial Sequence
  Description of Artificial Sequence: Synthetic oligonucleotide
  Sense strand starting at position 3761 of SEQ ID NO: 913736
cuguuacauagugaaguau

SEQ ID NO: 949921 - RNA, 19 nt, Artificial Sequence
  Description of Artificial Sequence: Synthetic oligonucleotide
  Antisense strand to SEQ ID NO: 949920
auacuucacuauguaacag

SEQ ID NO: 949922 - RNA, 19 nt, Artificial Sequence
  Description of Artificial Sequence: Synthetic oligonucleotide
  Sense strand starting at position 3936 of SEQ ID NO: 913736
gcaccucuuagagauggca

SEQ ID NO: 949923 - RNA, 19 nt, Artificial Sequence
  Description of Artificial Sequence: Synthetic oligonucleotide
  Antisense strand to SEQ ID NO: 949922
ugccaucucuaagaggugc

SEQ ID NO: 949924 - RNA, 19 nt, Artificial Sequence
  Description of Artificial Sequence: Synthetic oligonucleotide
  Sense strand starting at position 1025 of SEQ ID NO: 913736
aguccugaagucuggaaau

SEQ ID NO: 949925 - RNA, 19 nt, Artificial Sequence
  Description of Artificial Sequence: Synthetic oligonucleotide
  Antisense strand to SEQ ID NO: 949924
auuuccagacuucaggacu

SEQ ID NO: 949926 - RNA, 19 nt, Artificial Sequence
  Description of Artificial Sequence: Synthetic oligonucleotide
  Sense strand starting at position 847 of SEQ ID NO: 913736
gaagccucccuggaguauu

SEQ ID NO: 949927 - RNA, 19 nt, Artificial Sequence
  Description of Artificial Sequence: Synthetic oligonucleotide
  Antisense strand to SEQ ID NO: 949926
aauacuccagggaggcuuc

SEQ ID NO: 949928 - RNA, 19 nt, Artificial Sequence
  Description of Artificial Sequence: Synthetic oligonucleotide
  Sense strand starting at position 3334 of SEQ ID NO: 913736
gggacuucuacuuggcaga

SEQ ID NO: 949929 - RNA, 19 nt, Artificial Sequence
  Description of Artificial Sequence: Synthetic oligonucleotide
  Antisense strand to SEQ ID NO: 949928
ucugccaaguagaaguccc

SEQ ID NO: 949930 - RNA, 19 nt, Artificial Sequence
  Description of Artificial Sequence: Synthetic oligonucleotide
  Sense strand starting at position 3484 of SEQ ID NO: 913736
agucuuaaagcccagcaaa

SEQ ID NO: 949931 - RNA, 19 nt, Artificial Sequence
  Description of Artificial Sequence: Synthetic oligonucleotide
  Antisense strand to SEQ ID NO: 949930
uuugcugggcuuuaagacu

SEQ ID NO: 949932 - RNA, 19 nt, Artificial Sequence
  Description of Artificial Sequence: Synthetic oligonucleotide
  Sense strand starting at position 3336 of SEQ ID NO: 913736
gacuucuacuuggcagaug

SEQ ID NO: 949933 - RNA, 19 nt, Artificial Sequence
  Description of Artificial Sequence: Synthetic oligonucleotide
  Antisense strand to SEQ ID NO: 949932
caucugccaaguagaaguc

SEQ ID NO: 949934 - RNA, 19 nt, Artificial Sequence
  Description of Artificial Sequence: Synthetic oligonucleotide
  Sense strand starting at position 3335 of SEQ ID NO: 913736
ggacuucuacuuggcagau

SEQ ID NO: 949935 - RNA, 19 nt, Artificial Sequence
  Description of Artificial Sequence: Synthetic oligonucleotide
  Antisense strand to SEQ ID NO: 949934
aucugccaaguagaagucc

SEQ ID NO: 949936 - RNA, 19 nt, Artificial Sequence
  Description of Artificial Sequence: Synthetic oligonucleotide
  Sense strand starting at position 1350 of SEQ ID NO: 913736
gcuaauuguggauauaugu

SEQ ID NO: 949937 - RNA, 19 nt, Artificial Sequence
  Description of Artificial Sequence: Synthetic oligonucleotide
  Antisense strand to SEQ ID NO: 949936
acauauauccacaauuagc

SEQ ID NO: 949938 - RNA, 19 nt, Artificial Sequence
  Description of Artificial Sequence: Synthetic oligonucleotide
  Sense strand starting at position 751 of SEQ ID NO: 913736
ggaagagugugagcccaau

SEQ ID NO: 949939 - RNA, 19 nt, Artificial Sequence
  Description of Artificial Sequence: Synthetic oligonucleotide
  Antisense strand to SEQ ID NO: 949938
auugggcucacacucuucc

SEQ ID NO: 949940 - RNA, 19 nt, Artificial Sequence
  Description of Artificial Sequence: Synthetic oligonucleotide
  Sense strand starting at position 1648 of SEQ ID NO: 913736
cgagccagccaucaugaau

SEQ ID NO: 949941 - RNA, 19 nt, Artificial Sequence
  Description of Artificial Sequence: Synthetic oligonucleotide
  Antisense strand to SEQ ID NO: 949940
auucaugauggcuggcucg

SEQ ID NO: 949942 - RNA, 19 nt, Artificial Sequence
  Description of Artificial Sequence: Synthetic oligonucleotide
  Sense strand starting at position 1693 of SEQ ID NO: 913736
ggaaguucucauugacugu

SEQ ID NO: 949943 - RNA, 19 nt, Artificial Sequence
  Description of Artificial Sequence: Synthetic oligonucleotide
  Antisense strand to SEQ ID NO: 949942
acagucaaugagaacuucc

SEQ ID NO: 949944 - RNA, 19 nt, Artificial Sequence
  Description of Artificial Sequence: Synthetic oligonucleotide
  Sense strand starting at position 1971 of SEQ ID NO: 913736
agugacuaauuguccuuau

SEQ ID NO: 949945 - RNA, 19 nt, Artificial Sequence
  Description of Artificial Sequence: Synthetic oligonucleotide
  Antisense strand to SEQ ID NO: 949944
auaaggacaauuagucacu

SEQ ID NO: 949946 - RNA, 19 nt, Artificial Sequence
  Description of Artificial Sequence: Synthetic oligonucleotide
  Sense strand starting at position 1423 of SEQ ID NO: 913736
ugcaaacaugugcaucuua

SEQ ID NO: 949947 - RNA, 19 nt, Artificial Sequence
  Description of Artificial Sequence: Synthetic oligonucleotide
  Antisense strand to SEQ ID NO: 949946
uaagaugcacauguuugca

SEQ ID NO: 949948 - RNA, 19 nt, Artificial Sequence
  Description of Artificial Sequence: Synthetic oligonucleotide
  Sense strand starting at position 3769 of SEQ ID NO: 913736
uagugaaguauuggauguu

SEQ ID NO: 949949 - RNA, 19 nt, Artificial Sequence
  Description of Artificial Sequence: Synthetic oligonucleotide
  Antisense strand to SEQ ID NO: 949948
aacauccaauacuucacua

SEQ ID NO: 949950 - RNA, 19 nt, Artificial Sequence
  Description of Artificial Sequence: Synthetic oligonucleotide
  Sense strand starting at position 1148 of SEQ ID NO: 913736
aacgaucuuuccguggaaa

SEQ ID NO: 949951 - RNA, 19 nt, Artificial Sequence
  Description of Artificial Sequence: Synthetic oligonucleotide
  Antisense strand to SEQ ID NO: 949950
uuuccacggaaagaucguu

SEQ ID NO: 949952 - RNA, 19 nt, Artificial Sequence
  Description of Artificial Sequence: Synthetic oligonucleotide
  Sense strand starting at position 2251 of SEQ ID NO: 913736
uuaagagauuucuacugca

SEQ ID NO: 949953 - RNA, 19 nt, Artificial Sequence
  Description of Artificial Sequence: Synthetic oligonucleotide
  Antisense strand to SEQ ID NO: 949952
ugcaguagaaaucucuuaa

SEQ ID NO: 949954 - RNA, 19 nt, Artificial Sequence
  Description of Artificial Sequence: Synthetic oligonucleotide
  Sense strand starting at position 1526 of SEQ ID NO: 913736
gagagaucugcuuggcuua

SEQ ID NO: 949955 - RNA, 19 nt, Artificial Sequence
  Description of Artificial Sequence: Synthetic oligonucleotide
  Antisense strand to SEQ ID NO: 949954
uaagccaagcagaucucuc

SEQ ID NO: 949956 - RNA, 19 nt, Artificial Sequence
  Description of Artificial Sequence: Synthetic oligonucleotide
  Sense strand starting at position 859 of SEQ ID NO: 913736
gaguauuucuaggacucuu

SEQ ID NO: 949957 - RNA, 19 nt, Artificial Sequence
  Description of Artificial Sequence: Synthetic oligonucleotide
  Antisense strand to SEQ ID NO: 949956
aagaguccuagaaauacuc

SEQ ID NO: 949958 - RNA, 19 nt, Artificial Sequence
  Description of Artificial Sequence: Synthetic oligonucleotide
  Sense strand starting at position 1972 of SEQ ID NO: 913736
gugacuaauuguccuuauc

SEQ ID NO: 949959 - RNA, 19 nt, Artificial Sequence
  Description of Artificial Sequence: Synthetic oligonucleotide
  Antisense strand to SEQ ID NO: 949958
gauaaggacaauuagucac

SEQ ID NO: 949960 - RNA, 19 nt, Artificial Sequence
  Description of Artificial Sequence: Synthetic oligonucleotide
  Sense strand starting at position 3631 of SEQ ID NO: 913736
aaucgagauuauguugcau

SEQ ID NO: 949961 - RNA, 19 nt, Artificial Sequence
  Description of Artificial Sequence: Synthetic oligonucleotide
  Antisense strand to SEQ ID NO: 949960
augcaacauaaucucgauu

SEQ ID NO: 949962 - RNA, 19 nt, Artificial Sequence
  Description of Artificial Sequence: Synthetic oligonucleotide
  Sense strand starting at position 375 of SEQ ID NO: 913736
accuuuccuccacguggaa

SEQ ID NO: 949963 - RNA, 19 nt, Artificial Sequence
  Description of Artificial Sequence: Synthetic oligonucleotide
  Antisense strand to SEQ ID NO: 949962
uuccacguggaggaaaggu

SEQ ID NO: 949964 - RNA, 19 nt, Artificial Sequence
  Description of Artificial Sequence: Synthetic oligonucleotide
  Sense strand starting at position 1527 of SEQ ID NO: 913736
agagaucugcuuggcuuau

SEQ ID NO: 949965 - RNA, 19 nt, Artificial Sequence
  Description of Artificial Sequence: Synthetic oligonucleotide
  Antisense strand to SEQ ID NO: 949964
auaagccaagcagaucucu

SEQ ID NO: 949966 - RNA, 19 nt, Artificial Sequence
  Description of Artificial Sequence: Synthetic oligonucleotide
  Sense strand starting at position 1962 of SEQ ID NO: 913736
ggucucgcuagugacuaau

SEQ ID NO: 949967 - RNA, 19 nt, Artificial Sequence
  Description of Artificial Sequence: Synthetic oligonucleotide
  Antisense strand to SEQ ID NO: 949966
auuagucacuagcgagacc

SEQ ID NO: 949968 - RNA, 19 nt, Artificial Sequence
  Description of Artificial Sequence: Synthetic oligonucleotide
  Sense strand starting at position 1301 of SEQ ID NO: 913736
uuguaacugcucugaaccu

SEQ ID NO: 949969 - RNA, 19 nt, Artificial Sequence
  Description of Artificial Sequence: Synthetic oligonucleotide
  Antisense strand to SEQ ID NO: 949968
agguucagagcaguuacaa

SEQ ID NO: 949970 - RNA, 19 nt, Artificial Sequence
  Description of Artificial Sequence: Synthetic oligonucleotide
  Sense strand starting at position 1528 of SEQ ID NO: 913736
gagaucugcuuggcuuauu

SEQ ID NO: 949971 - RNA, 19 nt, Artificial Sequence
  Description of Artificial Sequence: Synthetic oligonucleotide
  Antisense strand to SEQ ID NO: 949970
aauaagccaagcagaucuc

SEQ ID NO: 949972 - RNA, 19 nt, Artificial Sequence
  Description of Artificial Sequence: Synthetic oligonucleotide
  Sense strand starting at position 270 of SEQ ID NO: 913737
acccuaucccagcaugaga

SEQ ID NO: 949973 - RNA, 19 nt, Artificial Sequence
  Description of Artificial Sequence: Synthetic oligonucleotide
  Antisense strand to SEQ ID NO: 949972
ucucaugcugggauagggu

SEQ ID NO: 949974 - RNA, 19 nt, Artificial Sequence
  Description of Artificial Sequence: Synthetic oligonucleotide
  Sense strand starting at position 2651 of SEQ ID NO: 913737
uccuuagaagucugagaau

SEQ ID NO: 949975 - RNA, 19 nt, Artificial Sequence
  Description of Artificial Sequence: Synthetic oligonucleotide
  Antisense strand to SEQ ID NO: 949974
auucucagacuucuaagga

SEQ ID NO: 949976 - RNA, 19 nt, Artificial Sequence
  Description of Artificial Sequence: Synthetic oligonucleotide
  Sense strand starting at position 3329 of SEQ ID NO: 913737
cugcgaaauggguauaaca

SEQ ID NO: 949977 - RNA, 19 nt, Artificial Sequence
  Description of Artificial Sequence: Synthetic oligonucleotide
  Antisense strand to SEQ ID NO: 949976
uguuauacccauuucgcag

SEQ ID NO: 949978 - RNA, 19 nt, Artificial Sequence
  Description of Artificial Sequence: Synthetic oligonucleotide
  Sense strand starting at position 2612 of SEQ ID NO: 913737
cugagucgcgccuuccaua

SEQ ID NO: 949979 - RNA, 19 nt, Artificial Sequence
  Description of Artificial Sequence: Synthetic oligonucleotide
  Antisense strand to SEQ ID NO: 949978
uauggaaggcgcgacucag

SEQ ID NO: 949980 - RNA, 19 nt, Artificial Sequence
  Description of Artificial Sequence: Synthetic oligonucleotide
  Sense strand starting at position 2613 of SEQ ID NO: 913737
ugagucgcgccuuccauau

SEQ ID NO: 949981 - RNA, 19 nt, Artificial Sequence
  Description of Artificial Sequence: Synthetic oligonucleotide
  Antisense strand to SEQ ID NO: 949980
auauggaaggcgcgacuca

SEQ ID NO: 949982 - RNA, 19 nt, Artificial Sequence
  Description of Artificial Sequence: Synthetic oligonucleotide
  Sense strand starting at position 3409 of SEQ ID NO: 913737
ggaucuagcacaugguaaa

SEQ ID NO: 949983 - RNA, 19 nt, Artificial Sequence
  Description of Artificial Sequence: Synthetic oligonucleotide
  Antisense strand to SEQ ID NO: 949982
uuuaccaugugcuagaucc

SEQ ID NO: 949984 - RNA, 19 nt, Artificial Sequence
  Description of Artificial Sequence: Synthetic oligonucleotide
  Sense strand starting at position 3379 of SEQ ID NO: 913737
auagacuaugcauguaaca

SEQ ID NO: 949985 - RNA, 19 nt, Artificial Sequence
  Description of Artificial Sequence: Synthetic oligonucleotide
  Antisense strand to SEQ ID NO: 949984
uguuacaugcauagucuau

SEQ ID NO: 949986 - RNA, 19 nt, Artificial Sequence
  Description of Artificial Sequence: Synthetic oligonucleotide
  Sense strand starting at position 3376 of SEQ ID NO: 913737
uagauagacuaugcaugua

SEQ ID NO: 949987 - RNA, 19 nt, Artificial Sequence
  Description of Artificial Sequence: Synthetic oligonucleotide
  Antisense strand to SEQ ID NO: 949986
uacaugcauagucuaucua

SEQ ID NO: 949988 - RNA, 19 nt, Artificial Sequence
  Description of Artificial Sequence: Synthetic oligonucleotide
  Sense strand starting at position 3134 of SEQ ID NO: 913737
agcguuauggaugacggaa

SEQ ID NO: 949989 - RNA, 19 nt, Artificial Sequence
  Description of Artificial Sequence: Synthetic oligonucleotide
  Antisense strand to SEQ ID NO: 949988
uuccgucauccauaacgcu

SEQ ID NO: 949990 - RNA, 19 nt, Artificial Sequence
  Description of Artificial Sequence: Synthetic oligonucleotide
  Sense strand starting at position 419 of SEQ ID NO: 913737
aauccaguugcugagugau

SEQ ID NO: 949991 - RNA, 19 nt, Artificial Sequence
  Description of Artificial Sequence: Synthetic oligonucleotide
  Antisense strand to SEQ ID NO: 949990
aucacucagcaacuggauu

SEQ ID NO: 949992 - RNA, 19 nt, Artificial Sequence
  Description of Artificial Sequence: Synthetic oligonucleotide
  Sense strand starting at position 797 of SEQ ID NO: 913737
gcucguuucguggcugaau

SEQ ID NO: 949993 - RNA, 19 nt, Artificial Sequence
  Description of Artificial Sequence: Synthetic oligonucleotide
  Antisense strand to SEQ ID NO: 949992
auucagccacgaaacgagc

SEQ ID NO: 949994 - RNA, 19 nt, Artificial Sequence
  Description of Artificial Sequence: Synthetic oligonucleotide
  Sense strand starting at position 294 of SEQ ID NO: 913737
gaaacuggcucaguaauuc

SEQ ID NO: 949995 - RNA, 19 nt, Artificial Sequence
  Description of Artificial Sequence: Synthetic oligonucleotide
  Antisense strand to SEQ ID NO: 949994
gaauuacugagccaguuuc

SEQ ID NO: 949996 - RNA, 19 nt, Artificial Sequence
  Description of Artificial Sequence: Synthetic oligonucleotide
  Sense strand starting at position 309 of SEQ ID NO: 913737
auucucaggcuuuagcaau

SEQ ID NO: 949997 - RNA, 19 nt, Artificial Sequence
  Description of Artificial Sequence: Synthetic oligonucleotide
  Antisense strand to SEQ ID NO: 949996
auugcuaaagccugagaau

SEQ ID NO: 949998 - RNA, 19 nt, Artificial Sequence
  Description of Artificial Sequence: Synthetic oligonucleotide
  Sense strand starting at position 3038 of SEQ ID NO: 913737
uccagagauggguggcauu

SEQ ID NO: 949999 - RNA, 19 nt, Artificial Sequence
  Description of Artificial Sequence: Synthetic oligonucleotide
  Antisense strand to SEQ ID NO: 949998
aaugccacccaucucugga

SEQ ID NO: 950000 - RNA, 19 nt, Artificial Sequence
  Description of Artificial Sequence: Synthetic oligonucleotide
  Sense strand starting at position 629 of SEQ ID NO: 913737
cccugauccgcaggaacaa

SEQ ID NO: 950001 - RNA, 19 nt, Artificial Sequence
  Description of Artificial Sequence: Synthetic oligonucleotide
  Antisense strand to SEQ ID NO: 950000
uuguuccugcggaucaggg

SEQ ID NO: 950002 - RNA, 19 nt, Artificial Sequence
  Description of Artificial Sequence: Synthetic oligonucleotide
  Sense strand starting at position 290 of SEQ ID NO: 913737
gcaagaaacuggcucagua

SEQ ID NO: 950003 - RNA, 19 nt, Artificial Sequence
  Description of Artificial Sequence: Synthetic oligonucleotide
  Antisense strand to SEQ ID NO: 950002
uacugagccaguuucuugc

SEQ ID NO: 950004 - RNA, 19 nt, Artificial Sequence
  Description of Artificial Sequence: Synthetic oligonucleotide
  Sense strand starting at position 3319 of SEQ ID NO: 913737
auauucucaucugcgaaau

SEQ ID NO: 950005 - RNA, 19 nt, Artificial Sequence
  Description of Artificial Sequence: Synthetic oligonucleotide
  Antisense strand to SEQ ID NO: 950004
auuucgcagaugagaauau

SEQ ID NO: 950006 - RNA, 19 nt, Artificial Sequence
  Description of Artificial Sequence: Synthetic oligonucleotide
  Sense strand starting at position 2619 of SEQ ID NO: 913737
gcgccuuccauauauggga

SEQ ID NO: 950007 - RNA, 19 nt, Artificial Sequence
  Description of Artificial Sequence: Synthetic oligonucleotide
  Antisense strand to SEQ ID NO: 950006
ucccauauauggaaggcgc

SEQ ID NO: 950008 - RNA, 19 nt, Artificial Sequence
  Description of Artificial Sequence: Synthetic oligonucleotide
  Sense strand starting at position 864 of SEQ ID NO: 913737
ugucgcucccgggaaagau

SEQ ID NO: 950009 - RNA, 19 nt, Artificial Sequence
  Description of Artificial Sequence: Synthetic oligonucleotide
  Antisense strand to SEQ ID NO: 950008
aucuuucccgggagcgaca

SEQ ID NO: 950010 - RNA, 19 nt, Artificial Sequence
  Description of Artificial Sequence: Synthetic oligonucleotide
  Sense strand starting at position 3316 of SEQ ID NO: 913737
ucaauauucucaucugcga

SEQ ID NO: 950011 - RNA, 19 nt, Artificial Sequence
  Description of Artificial Sequence: Synthetic oligonucleotide
  Antisense strand to SEQ ID NO: 950010
ucgcagaugagaauauuga

SEQ ID NO: 950012 - RNA, 19 nt, Artificial Sequence
  Description of Artificial Sequence: Synthetic oligonucleotide
  Sense strand starting at position 3133 of SEQ ID NO: 913737
gagcguuauggaugacgga

SEQ ID NO: 950013 - RNA, 19 nt, Artificial Sequence
  Description of Artificial Sequence: Synthetic oligonucleotide
  Antisense strand to SEQ ID NO: 950012
uccgucauccauaacgcuc

SEQ ID NO: 950014 - RNA, 19 nt, Artificial Sequence
  Description of Artificial Sequence: Synthetic oligonucleotide
  Sense strand starting at position 3048 of SEQ ID NO: 913737
gguggcauuucccaaagau

SEQ ID NO: 950015 - RNA, 19 nt, Artificial Sequence
  Description of Artificial Sequence: Synthetic oligonucleotide
  Antisense strand to SEQ ID NO: 950014
aucuuugggaaaugccacc

SEQ ID NO: 950016 - RNA, 19 nt, Artificial Sequence
  Description of Artificial Sequence: Synthetic oligonucleotide
  Sense strand starting at position 3231 of SEQ ID NO: 913737
ucugucugccugcauuaaa

SEQ ID NO: 950017 - RNA, 19 nt, Artificial Sequence
  Description of Artificial Sequence: Synthetic oligonucleotide
  Antisense strand to SEQ ID NO: 950016
uuuaaugcaggcagacaga

SEQ ID NO: 950018 - RNA, 19 nt, Artificial Sequence
  Description of Artificial Sequence: Synthetic oligonucleotide
  Sense strand starting at position 3127 of SEQ ID NO: 913737
cugcgagagcguuauggau

SEQ ID NO: 950019 - RNA, 19 nt, Artificial Sequence
  Description of Artificial Sequence: Synthetic oligonucleotide
  Antisense strand to SEQ ID NO: 950018
auccauaacgcucucgcag

SEQ ID NO: 950020 - RNA, 19 nt, Artificial Sequence
  Description of Artificial Sequence: Synthetic oligonucleotide
  Sense strand starting at position 2654 of SEQ ID NO: 913737
uuagaagucugagaauaac

SEQ ID NO: 950021 - RNA, 19 nt, Artificial Sequence
  Description of Artificial Sequence: Synthetic oligonucleotide
  Antisense strand to SEQ ID NO: 950020
guuauucucagacuucuaa

SEQ ID NO: 950022 - RNA, 19 nt, Artificial Sequence
  Description of Artificial Sequence: Synthetic oligonucleotide
  Sense strand starting at position 3649 of SEQ ID NO: 913737
gugcuugaugccuggauca

SEQ ID NO: 950023 - RNA, 19 nt, Artificial Sequence
  Description of Artificial Sequence: Synthetic oligonucleotide
  Antisense strand to SEQ ID NO: 950022
ugauccaggcaucaagcac

SEQ ID NO: 950024 - RNA, 19 nt, Artificial Sequence
  Description of Artificial Sequence: Synthetic oligonucleotide
  Sense strand starting at position 247 of SEQ ID NO: 913737
ccuuguauuugguaucauc

SEQ ID NO: 950025 - RNA, 19 nt, Artificial Sequence
  Description of Artificial Sequence: Synthetic oligonucleotide
  Antisense strand to SEQ ID NO: 950024
gaugauaccaaauacaagg

SEQ ID NO: 950026 - RNA, 19 nt, Artificial Sequence
  Description of Artificial Sequence: Synthetic oligonucleotide
  Sense strand starting at position 421 of SEQ ID NO: 913737
uccaguugcugagugaugu

SEQ ID NO: 950027 - RNA, 19 nt, Artificial Sequence
  Description of Artificial Sequence: Synthetic oligonucleotide
  Antisense strand to SEQ ID NO: 950026
acaucacucagcaacugga

SEQ ID NO: 950028 - RNA, 19 nt, Artificial Sequence
  Description of Artificial Sequence: Synthetic oligonucleotide
  Sense strand starting at position 422 of SEQ ID NO: 913737
ccaguugcugagugauguu

SEQ ID NO: 950029 - RNA, 19 nt, Artificial Sequence
  Description of Artificial Sequence: Synthetic oligonucleotide
  Antisense strand to SEQ ID NO: 950028
aacaucacucagcaacugg

SEQ ID NO: 950030 - RNA, 19 nt, Artificial Sequence
  Description of Artificial Sequence: Synthetic oligonucleotide
  Sense strand starting at position 808 of SEQ ID NO: 913737
ggcugaaucucccuugcgu

SEQ ID NO: 950031 - RNA, 19 nt, Artificial Sequence
  Description of Artificial Sequence: Synthetic oligonucleotide
  Antisense strand to SEQ ID NO: 950030
acgcaagggagauucagcc

SEQ ID NO: 950032 - RNA, 19 nt, Artificial Sequence
  Description of Artificial Sequence: Synthetic oligonucleotide
  Sense strand starting at position 2660 of SEQ ID NO: 913737
gucugagaauaacgauauu

SEQ ID NO: 950033 - RNA, 19 nt, Artificial Sequence
  Description of Artificial Sequence: Synthetic oligonucleotide
  Antisense strand to SEQ ID NO: 950032
aauaucguuauucucagac

SEQ ID NO: 950034 - RNA, 19 nt, Artificial Sequence
  Description of Artificial Sequence: Synthetic oligonucleotide
  Sense strand starting at position 2689 of SEQ ID NO: 913737
ggcuucaguugugaaugau

SEQ ID NO: 950035 - RNA, 19 nt, Artificial Sequence
  Description of Artificial Sequence: Synthetic oligonucleotide
  Antisense strand to SEQ ID NO: 950034
aucauucacaacugaagcc

SEQ ID NO: 950036 - RNA, 19 nt, Artificial Sequence
  Description of Artificial Sequence: Synthetic oligonucleotide
  Sense strand starting at position 302 of SEQ ID NO: 913737
cucaguaauucucaggcuu

SEQ ID NO: 950037 - RNA, 19 nt, Artificial Sequence
  Description of Artificial Sequence: Synthetic oligonucleotide
  Antisense strand to SEQ ID NO: 950036
aagccugagaauuacugag

SEQ ID NO: 950038 - RNA, 19 nt, Artificial Sequence
  Description of Artificial Sequence: Synthetic oligonucleotide
  Sense strand starting at position 2688 of SEQ ID NO: 913737
aggcuucaguugugaauga

SEQ ID NO: 950039 - RNA, 19 nt, Artificial Sequence
  Description of Artificial Sequence: Synthetic oligonucleotide
  Antisense strand to SEQ ID NO: 950038
ucauucacaacugaagccu

SEQ ID NO: 950040 - RNA, 19 nt, Artificial Sequence
  Description of Artificial Sequence: Synthetic oligonucleotide
  Sense strand starting at position 796 of SEQ ID NO: 913737
cgcucguuucguggcugaa

SEQ ID NO: 950041 - RNA, 19 nt, Artificial Sequence
  Description of Artificial Sequence: Synthetic oligonucleotide
  Antisense strand to SEQ ID NO: 950040
uucagccacgaaacgagcg

SEQ ID NO: 950042 - RNA, 19 nt, Artificial Sequence
  Description of Artificial Sequence: Synthetic oligonucleotide
  Sense strand starting at position 3397 of SEQ ID NO: 913737
augcuuagcuugggaucua

SEQ ID NO: 950043 - RNA, 19 nt, Artificial Sequence
  Description of Artificial Sequence: Synthetic oligonucleotide
  Antisense strand to SEQ ID NO: 950042
uagaucccaagcuaagcau

SEQ ID NO: 950044 - RNA, 19 nt, Artificial Sequence
  Description of Artificial Sequence: Synthetic oligonucleotide
  Sense strand starting at position 3129 of SEQ ID NO: 913737
gcgagagcguuauggauga

SEQ ID NO: 950045 - RNA, 19 nt, Artificial Sequence
  Description of Artificial Sequence: Synthetic oligonucleotide
  Antisense strand to SEQ ID NO: 950044
ucauccauaacgcucucgc

SEQ ID NO: 950046 - RNA, 19 nt, Artificial Sequence
  Description of Artificial Sequence: Synthetic oligonucleotide
  Sense strand starting at position 2615 of SEQ ID NO: 913737
agucgcgccuuccauauau

SEQ ID NO: 950047 - RNA, 19 nt, Artificial Sequence
  Description of Artificial Sequence: Synthetic oligonucleotide
  Antisense strand to SEQ ID NO: 950046
auauauggaaggcgcgacu

SEQ ID NO: 950048 - RNA, 19 nt, Artificial Sequence
  Description of Artificial Sequence: Synthetic oligonucleotide
  Sense strand starting at position 861 of SEQ ID NO: 913737
gccugucgcucccgggaaa

SEQ ID NO: 950049 - RNA, 19 nt, Artificial Sequence
  Description of Artificial Sequence: Synthetic oligonucleotide
  Antisense strand to SEQ ID NO: 950048
uuucccgggagcgacaggc

SEQ ID NO: 950050 - RNA, 19 nt, Artificial Sequence
  Description of Artificial Sequence: Synthetic oligonucleotide
  Sense strand starting at position 463 of SEQ ID NO: 913738
cugcaaagucaacaauuga

SEQ ID NO: 950051 - RNA, 19 nt, Artificial Sequence
  Description of Artificial Sequence: Synthetic oligonucleotide
  Antisense strand to SEQ ID NO: 950050
ucaauuguugacuuugcag

SEQ ID NO: 950052 - RNA, 19 nt, Artificial Sequence
  Description of Artificial Sequence: Synthetic oligonucleotide
  Sense strand starting at position 1509 of SEQ ID NO: 913738
gacgacuuuccggaggaau

SEQ ID NO: 950053 - RNA, 19 nt, Artificial Sequence
  Description of Artificial Sequence: Synthetic oligonucleotide
  Antisense strand to SEQ ID NO: 950052
auuccuccggaaagucguc

SEQ ID NO: 950054 - RNA, 19 nt, Artificial Sequence
  Description of Artificial Sequence: Synthetic oligonucleotide
  Sense strand starting at position 3596 of SEQ ID NO: 913738
guuauuacucgauauaaag

SEQ ID NO: 950055 - RNA, 19 nt, Artificial Sequence
  Description of Artificial Sequence: Synthetic oligonucleotide
  Antisense strand to SEQ ID NO: 950054
cuuuauaucgaguaauaac

SEQ ID NO: 950056 - RNA, 19 nt, Artificial Sequence
  Description of Artificial Sequence: Synthetic oligonucleotide
  Sense strand starting at position 3614 of SEQ ID NO: 913738
gauauuuguuuagcuaagu

SEQ ID NO: 950057 - RNA, 19 nt, Artificial Sequence
  Description of Artificial Sequence: Synthetic oligonucleotide
  Antisense strand to SEQ ID NO: 950056
acuuagcuaaacaaauauc

SEQ ID NO: 950058 - RNA, 19 nt, Artificial Sequence
  Description of Artificial Sequence: Synthetic oligonucleotide
  Sense strand starting at position 325 of SEQ ID NO: 913738
guuacuuugccaucugugu

SEQ ID NO: 950059 - RNA, 19 nt, Artificial Sequence
  Description of Artificial Sequence: Synthetic oligonucleotide
  Antisense strand to SEQ ID NO: 950058
acacagauggcaaaguaac

SEQ ID NO: 950060 - RNA, 19 nt, Artificial Sequence
  Description of Artificial Sequence: Synthetic oligonucleotide
  Sense strand starting at position 2569 of SEQ ID NO: 913738
guggguuuguauuuggauu

SEQ ID NO: 950061 - RNA, 19 nt, Artificial Sequence
  Description of Artificial Sequence: Synthetic oligonucleotide
  Antisense strand to SEQ ID NO: 950060
aauccaaauacaaacccac

SEQ ID NO: 950062 - RNA, 19 nt, Artificial Sequence
  Description of Artificial Sequence: Synthetic oligonucleotide
  Sense strand starting at position 3751 of SEQ ID NO: 913738
agagacagcaucuggauua

SEQ ID NO: 950063 - RNA, 19 nt, Artificial Sequence
  Description of Artificial Sequence: Synthetic oligonucleotide
  Antisense strand to SEQ ID NO: 950062
uaauccagaugcugucucu

SEQ ID NO: 950064 - RNA, 19 nt, Artificial Sequence
  Description of Artificial Sequence: Synthetic oligonucleotide
  Sense strand starting at position 3152 of SEQ ID NO: 913738
gagugaauggauggguaua

SEQ ID NO: 950065 - RNA, 19 nt, Artificial Sequence
  Description of Artificial Sequence: Synthetic oligonucleotide
  Antisense strand to SEQ ID NO: 950064
uauacccauccauucacuc

SEQ ID NO: 950066 - RNA, 19 nt, Artificial Sequence
  Description of Artificial Sequence: Synthetic oligonucleotide
  Sense strand starting at position 3546 of SEQ ID NO: 913738
ugagcucugcaauaauuaa

SEQ ID NO: 950067 - RNA, 19 nt, Artificial Sequence
  Description of Artificial Sequence: Synthetic oligonucleotide
  Antisense strand to SEQ ID NO: 950066
uuaauuauugcagagcuca

SEQ ID NO: 950068 - RNA, 19 nt, Artificial Sequence
  Description of Artificial Sequence: Synthetic oligonucleotide
  Sense strand starting at position 2783 of SEQ ID NO: 913738
uaggacucuguaggugaaa

SEQ ID NO: 950069 - RNA, 19 nt, Artificial Sequence
  Description of Artificial Sequence: Synthetic oligonucleotide
  Antisense strand to SEQ ID NO: 950068
uuucaccuacagaguccua

SEQ ID NO: 950070 - RNA, 19 nt, Artificial Sequence
  Description of Artificial Sequence: Synthetic oligonucleotide
  Sense strand starting at position 333 of SEQ ID NO: 913738
gccaucuguguggaaagaa

SEQ ID NO: 950071 - RNA, 19 nt, Artificial Sequence
  Description of Artificial Sequence: Synthetic oligonucleotide
  Antisense strand to SEQ ID NO: 950070
uucuuuccacacagauggc

SEQ ID NO: 950072 - RNA, 19 nt, Artificial Sequence
  Description of Artificial Sequence: Synthetic oligonucleotide
  Sense strand starting at position 2405 of SEQ ID NO: 913738
uggcccuggcuauaaauaa

SEQ ID NO: 950073 - RNA, 19 nt, Artificial Sequence
  Description of Artificial Sequence: Synthetic oligonucleotide
  Antisense strand to SEQ ID NO: 950072
uuauuuauagccagggcca

SEQ ID NO: 950074 - RNA, 19 nt, Artificial Sequence
  Description of Artificial Sequence: Synthetic oligonucleotide
  Sense strand starting at position 2743 of SEQ ID NO: 913738
aguugaguagcuuaaauca

SEQ ID NO: 950075 - RNA, 19 nt, Artificial Sequence
  Description of Artificial Sequence: Synthetic oligonucleotide
  Antisense strand to SEQ ID NO: 950074
ugauuuaagcuacucaacu

SEQ ID NO: 950076 - RNA, 19 nt, Artificial Sequence
  Description of Artificial Sequence: Synthetic oligonucleotide
  Sense strand starting at position 2888 of SEQ ID NO: 913738
ugaacucgcagucagaaua

SEQ ID NO: 950077 - RNA, 19 nt, Artificial Sequence
  Description of Artificial Sequence: Synthetic oligonucleotide
  Antisense strand to SEQ ID NO: 950076
uauucugacugcgaguuca

SEQ ID NO: 950078 - RNA, 19 nt, Artificial Sequence
  Description of Artificial Sequence: Synthetic oligonucleotide
  Sense strand starting at position 434 of SEQ ID NO: 913738
gaagaacugccucauguuu

SEQ ID NO: 950079 - RNA, 19 nt, Artificial Sequence
  Description of Artificial Sequence: Synthetic oligonucleotide
  Antisense strand to SEQ ID NO: 950078
aaacaugaggcaguucuuc

SEQ ID NO: 950080 - RNA, 19 nt, Artificial Sequence
  Description of Artificial Sequence: Synthetic oligonucleotide
  Sense strand starting at position 2094 of SEQ ID NO: 913738
gucauuuguccuggcaacu

SEQ ID NO: 950081 - RNA, 19 nt, Artificial Sequence
  Description of Artificial Sequence: Synthetic oligonucleotide
  Antisense strand to SEQ ID NO: 950080
aguugccaggacaaaugac

SEQ ID NO: 950082 - RNA, 19 nt, Artificial Sequence
  Description of Artificial Sequence: Synthetic oligonucleotide
  Sense strand starting at position 3543 of SEQ ID NO: 913738
cuaugagcucugcaauaau

SEQ ID NO: 950083 - RNA, 19 nt, Artificial Sequence
  Description of Artificial Sequence: Synthetic oligonucleotide
  Antisense strand to SEQ ID NO: 950082
auuauugcagagcucauag

SEQ ID NO: 950084 - RNA, 19 nt, Artificial Sequence
  Description of Artificial Sequence: Synthetic oligonucleotide
  Sense strand starting at position 2645 of SEQ ID NO: 913738
gcuuccaaccagcaagauu

SEQ ID NO: 950085 - RNA, 19 nt, Artificial Sequence
  Description of Artificial Sequence: Synthetic oligonucleotide
  Antisense strand to SEQ ID NO: 950084
aaucuugcugguuggaagc

SEQ ID NO: 950086 - RNA, 19 nt, Artificial Sequence
  Description of Artificial Sequence: Synthetic oligonucleotide
  Sense strand starting at position 957 of SEQ ID NO: 913738
ggcaacggaguucaugauu

SEQ ID NO: 950087 - RNA, 19 nt, Artificial Sequence
  Description of Artificial Sequence: Synthetic oligonucleotide
  Antisense strand to SEQ ID NO: 950086
aaucaugaacuccguugcc

SEQ ID NO: 950088 - RNA, 19 nt, Artificial Sequence
  Description of Artificial Sequence: Synthetic oligonucleotide
  Sense strand starting at position 3878 of SEQ ID NO: 913738
uguguaaucgcagaggaag

SEQ ID NO: 950089 - RNA, 19 nt, Artificial Sequence
  Description of Artificial Sequence: Synthetic oligonucleotide
  Antisense strand to SEQ ID NO: 950088
cuuccucugcgauuacaca

SEQ ID NO: 950090 - RNA, 19 nt, Artificial Sequence
  Description of Artificial Sequence: Synthetic oligonucleotide
  Sense strand starting at position 272 of SEQ ID NO: 913738
cgaaauacauagucucauu

SEQ ID NO: 950091 - RNA, 19 nt, Artificial Sequence
  Description of Artificial Sequence: Synthetic oligonucleotide
  Antisense strand to SEQ ID NO: 950090
aaugagacuauguauuucg

SEQ ID NO: 950092 - RNA, 19 nt, Artificial Sequence
  Description of Artificial Sequence: Synthetic oligonucleotide
  Sense strand starting at position 2738 of SEQ ID NO: 913738
cauugaguugaguagcuua

SEQ ID NO: 950093 - RNA, 19 nt, Artificial Sequence
  Description of Artificial Sequence: Synthetic oligonucleotide
  Antisense strand to SEQ ID NO: 950092
uaagcuacucaacucaaug

SEQ ID NO: 950094 - RNA, 19 nt, Artificial Sequence
  Description of Artificial Sequence: Synthetic oligonucleotide
  Sense strand starting at position 963 of SEQ ID NO: 913738
ggaguucaugauuaucguu

SEQ ID NO: 950095 - RNA, 19 nt, Artificial Sequence
  Description of Artificial Sequence: Synthetic oligonucleotide
  Antisense strand to SEQ ID NO: 950094
aacgauaaucaugaacucc

SEQ ID NO: 950096 - RNA, 19 nt, Artificial Sequence
  Description of Artificial Sequence: Synthetic oligonucleotide
  Sense strand starting at position 309 of SEQ ID NO: 913738
gcauuugugcaccaguguu

SEQ ID NO: 950097 - RNA, 19 nt, Artificial Sequence
  Description of Artificial Sequence: Synthetic oligonucleotide
  Antisense strand to SEQ ID NO: 950096
aacacuggugcacaaaugc

SEQ ID NO: 950098 - RNA, 19 nt, Artificial Sequence
  Description of Artificial Sequence: Synthetic oligonucleotide
  Sense strand starting at position 306 of SEQ ID NO: 913738
ugugcauuugugcaccagu

SEQ ID NO: 950099 - RNA, 19 nt, Artificial Sequence
  Description of Artificial Sequence: Synthetic oligonucleotide
  Antisense strand to SEQ ID NO: 950098
acuggugcacaaaugcaca

SEQ ID NO: 950100 - RNA, 19 nt, Artificial Sequence
  Description of Artificial Sequence: Synthetic oligonucleotide
  Sense strand starting at position 1566 of SEQ ID NO: 913738
cggaguguccucgcggcaa

SEQ ID NO: 950101 - RNA, 19 nt, Artificial Sequence
  Description of Artificial Sequence: Synthetic oligonucleotide
  Antisense strand to SEQ ID NO: 950100
uugccgcgaggacacuccg

SEQ ID NO: 950102 - RNA, 19 nt, Artificial Sequence
  Description of Artificial Sequence: Synthetic oligonucleotide
  Sense strand starting at position 2585 of SEQ ID NO: 913738
auuagaguuugugcaaaga

SEQ ID NO: 950103 - RNA, 19 nt, Artificial Sequence
  Description of Artificial Sequence: Synthetic oligonucleotide
  Antisense strand to SEQ ID NO: 950102
ucuuugcacaaacucuaau

SEQ ID NO: 950104 - RNA, 19 nt, Artificial Sequence
  Description of Artificial Sequence: Synthetic oligonucleotide
  Sense strand starting at position 3942 of SEQ ID NO: 913738
ucuauuacugcuuaugagu

SEQ ID NO: 950105 - RNA, 19 nt, Artificial Sequence
  Description of Artificial Sequence: Synthetic oligonucleotide
  Antisense strand to SEQ ID NO: 950104
acucauaagcaguaauaga

SEQ ID NO: 950106 - RNA, 19 nt, Artificial Sequence
  Description of Artificial Sequence: Synthetic oligonucleotide
  Sense strand starting at position 2583 of SEQ ID NO: 913738
ggauuagaguuugugcaaa

SEQ ID NO: 950107 - RNA, 19 nt, Artificial Sequence
  Description of Artificial Sequence: Synthetic oligonucleotide
  Antisense strand to SEQ ID NO: 950106
uuugcacaaacucuaaucc

SEQ ID NO: 950108 - RNA, 19 nt, Artificial Sequence
  Description of Artificial Sequence: Synthetic oligonucleotide
  Sense strand starting at position 3592 of SEQ ID NO: 913738
acauguuauuacucgauau

SEQ ID NO: 950109 - RNA, 19 nt, Artificial Sequence
  Description of Artificial Sequence: Synthetic oligonucleotide
  Antisense strand to SEQ ID NO: 950108
auaucgaguaauaacaugu

SEQ ID NO: 950110 - RNA, 19 nt, Artificial Sequence
  Description of Artificial Sequence: Synthetic oligonucleotide
  Sense strand starting at position 2116 of SEQ ID NO: 913738
ggcagauucuuuccaaccu

SEQ ID NO: 950111 - RNA, 19 nt, Artificial Sequence
  Description of Artificial Sequence: Synthetic oligonucleotide
  Antisense strand to SEQ ID NO: 950110
agguuggaaagaaucugcc

SEQ ID NO: 950112 - RNA, 19 nt, Artificial Sequence
  Description of Artificial Sequence: Synthetic oligonucleotide
  Sense strand starting at position 2114 of SEQ ID NO: 913738
cuggcagauucuuuccaac

SEQ ID NO: 950113 - RNA, 19 nt, Artificial Sequence
  Description of Artificial Sequence: Synthetic oligonucleotide
  Antisense strand to SEQ ID NO: 950112
guuggaaagaaucugccag

SEQ ID NO: 950114 - RNA, 19 nt, Artificial Sequence
  Description of Artificial Sequence: Synthetic oligonucleotide
  Sense strand starting at position 522 of SEQ ID NO: 913738
cuauuauuacguuaccuuu

SEQ ID NO: 950115 - RNA, 19 nt, Artificial Sequence
  Description of Artificial Sequence: Synthetic oligonucleotide
  Antisense strand to SEQ ID NO: 950114
aaagguaacguaauaauag

SEQ ID NO: 950116 - RNA, 19 nt, Artificial Sequence
  Description of Artificial Sequence: Synthetic oligonucleotide
  Sense strand starting at position 3003 of SEQ ID NO: 913738
aagguaaguggcuaugcua

SEQ ID NO: 950117 - RNA, 19 nt, Artificial Sequence
  Description of Artificial Sequence: Synthetic oligonucleotide
  Antisense strand to SEQ ID NO: 950116
uagcauagccacuuaccuu

SEQ ID NO: 950118 - RNA, 19 nt, Artificial Sequence
  Description of Artificial Sequence: Synthetic oligonucleotide
  Sense strand starting at position 2741 of SEQ ID NO: 913738
ugaguugaguagcuuaaau

SEQ ID NO: 950119 - RNA, 19 nt, Artificial Sequence
  Description of Artificial Sequence: Synthetic oligonucleotide
  Antisense strand to SEQ ID NO: 950118
auuuaagcuacucaacuca

SEQ ID NO: 950120 - RNA, 19 nt, Artificial Sequence
  Description of Artificial Sequence: Synthetic oligonucleotide
  Sense strand starting at position 3655 of SEQ ID NO: 913738
cuauaauuguguccuauac

SEQ ID NO: 950121 - RNA, 19 nt, Artificial Sequence
  Description of Artificial Sequence: Synthetic oligonucleotide
  Antisense strand to SEQ ID NO: 950120
guauaggacacaauuauag

SEQ ID NO: 950122 - RNA, 19 nt, Artificial Sequence
  Description of Artificial Sequence: Synthetic oligonucleotide
  Sense strand starting at position 3822 of SEQ ID NO: 913738
auuauugcaugucugacua

SEQ ID NO: 950123 - RNA, 19 nt, Artificial Sequence
  Description of Artificial Sequence: Synthetic oligonucleotide
  Antisense strand to SEQ ID NO: 950122
uagucagacaugcaauaau

SEQ ID NO: 950124 - RNA, 19 nt, Artificial Sequence
  Description of Artificial Sequence: Synthetic oligonucleotide
  Sense strand starting at position 3866 of SEQ ID NO: 913738
gguaaagaagcuuguguaa

SEQ ID NO: 950125 - RNA, 19 nt, Artificial Sequence
  Description of Artificial Sequence: Synthetic oligonucleotide
  Antisense strand to SEQ ID NO: 950124
uuacacaagcuucuuuacc

SEQ ID NO: 950126 - RNA, 19 nt, Artificial Sequence
  Description of Artificial Sequence: Synthetic oligonucleotide
  Sense strand starting at position 2582 of SEQ ID NO: 913738
uggauuagaguuugugcaa

SEQ ID NO: 950127 - RNA, 19 nt, Artificial Sequence
  Description of Artificial Sequence: Synthetic oligonucleotide
  Antisense strand to SEQ ID NO: 950126
uugcacaaacucuaaucca

SEQ ID NO: 950128 - RNA, 19 nt, Artificial Sequence
  Description of Artificial Sequence: Synthetic oligonucleotide
  Sense strand starting at position 3948 of SEQ ID NO: 913738
acugcuuaugagugauccu

SEQ ID NO: 950129 - RNA, 19 nt, Artificial Sequence
  Description of Artificial Sequence: Synthetic oligonucleotide
  Antisense strand to SEQ ID NO: 950128
aggaucacucauaagcagu

SEQ ID NO: 950130 - RNA, 19 nt, Artificial Sequence
  Description of Artificial Sequence: Synthetic oligonucleotide
  Sense strand starting at position 259 of SEQ ID NO: 913739
acaggauacuagucuugaa

SEQ ID NO: 950131 - RNA, 19 nt, Artificial Sequence
  Description of Artificial Sequence: Synthetic oligonucleotide
  Antisense strand to SEQ ID NO: 950130
uucaagacuaguauccugu

SEQ ID NO: 950132 - RNA, 19 nt, Artificial Sequence
  Description of Artificial Sequence: Synthetic oligonucleotide
  Sense strand starting at position 3720 of SEQ ID NO: 913739
ggauaugaaucaucccuug

SEQ ID NO: 950133 - RNA, 19 nt, Artificial Sequence
  Description of Artificial Sequence: Synthetic oligonucleotide
  Antisense strand to SEQ ID NO: 950132
caagggaugauucauaucc

SEQ ID NO: 950134 - RNA, 19 nt, Artificial Sequence
  Description of Artificial Sequence: Synthetic oligonucleotide
  Sense strand starting at position 1481 of SEQ ID NO: 913739
gcgugaugagcgucaggau

SEQ ID NO: 950135 - RNA, 19 nt, Artificial Sequence
  Description of Artificial Sequence: Synthetic oligonucleotide
  Antisense strand to SEQ ID NO: 950134
auccugacgcucaucacgc

SEQ ID NO: 950136 - RNA, 19 nt, Artificial Sequence
  Description of Artificial Sequence: Synthetic oligonucleotide
  Sense strand starting at position 3321 of SEQ ID NO: 913739
aguuuaucugauuacuaug

SEQ ID NO: 950137 - RNA, 19 nt, Artificial Sequence
  Description of Artificial Sequence: Synthetic oligonucleotide
  Antisense strand to SEQ ID NO: 950136
cauaguaaucagauaaacu

SEQ ID NO: 950138 - RNA, 19 nt, Artificial Sequence
  Description of Artificial Sequence: Synthetic oligonucleotide
  Sense strand starting at position 722 of SEQ ID NO: 913739
agaugcaauguguaagaca

SEQ ID NO: 950139 - RNA, 19 nt, Artificial Sequence
  Description of Artificial Sequence: Synthetic oligonucleotide
  Antisense strand to SEQ ID NO: 950138
ugucuuacacauugcaucu

SEQ ID NO: 950140 - RNA, 19 nt, Artificial Sequence
  Description of Artificial Sequence: Synthetic oligonucleotide
  Sense strand starting at position 3191 of SEQ ID NO: 913739
aaaguauauugaucagagu

SEQ ID NO: 950141 - RNA, 19 nt, Artificial Sequence
  Description of Artificial Sequence: Synthetic oligonucleotide
  Antisense strand to SEQ ID NO: 950140
acucugaucaauauacuuu

SEQ ID NO: 950142 - RNA, 19 nt, Artificial Sequence
  Description of Artificial Sequence: Synthetic oligonucleotide
  Sense strand starting at position 9 of SEQ ID NO: 913739
auuauaaacccuggucaag

SEQ ID NO: 950143 - RNA, 19 nt, Artificial Sequence
  Description of Artificial Sequence: Synthetic oligonucleotide
  Antisense strand to SEQ ID NO: 950142
cuugaccaggguuuauaau

SEQ ID NO: 950144 - RNA, 19 nt, Artificial Sequence
  Description of Artificial Sequence: Synthetic oligonucleotide
  Sense strand starting at position 3708 of SEQ ID NO: 913739
cuaucuuacccaggauaug

SEQ ID NO: 950145 - RNA, 19 nt, Artificial Sequence
  Description of Artificial Sequence: Synthetic oligonucleotide
  Antisense strand to SEQ ID NO: 950144
cauauccuggguaagauag

SEQ ID NO: 950146 - RNA, 19 nt, Artificial Sequence
  Description of Artificial Sequence: Synthetic oligonucleotide
  Sense strand starting at position 504 of SEQ ID NO: 913739
ccuagcaucccugacagau

SEQ ID NO: 950147 - RNA, 19 nt, Artificial Sequence
  Description of Artificial Sequence: Synthetic oligonucleotide
  Antisense strand to SEQ ID NO: 950146
aucugucagggaugcuagg

SEQ ID NO: 950148 - RNA, 19 nt, Artificial Sequence
  Description of Artificial Sequence: Synthetic oligonucleotide
  Sense strand starting at position 2918 of SEQ ID NO: 913739
caaagaaaugaccgguuau

SEQ ID NO: 950149 - RNA, 19 nt, Artificial Sequence
  Description of Artificial Sequence: Synthetic oligonucleotide
  Antisense strand to SEQ ID NO: 950148
auaaccggucauuucuuug

SEQ ID NO: 950150 - RNA, 19 nt, Artificial Sequence
  Description of Artificial Sequence: Synthetic oligonucleotide
  Sense strand starting at position 573 of SEQ ID NO: 913739
ucccaagggcuaugaugaa

SEQ ID NO: 950151 - RNA, 19 nt, Artificial Sequence
  Description of Artificial Sequence: Synthetic oligonucleotide
  Antisense strand to SEQ ID NO: 950150
uucaucauagcccuuggga

SEQ ID NO: 950152 - RNA, 19 nt, Artificial Sequence
  Description of Artificial Sequence: Synthetic oligonucleotide
  Sense strand starting at position 3290 of SEQ ID NO: 913739
gcugguaaggaauaguuau

SEQ ID NO: 950153 - RNA, 19 nt, Artificial Sequence
  Description of Artificial Sequence: Synthetic oligonucleotide
  Antisense strand to SEQ ID NO: 950152
auaacuauuccuuaccagc

SEQ ID NO: 950154 - RNA, 19 nt, Artificial Sequence
  Description of Artificial Sequence: Synthetic oligonucleotide
  Sense strand starting at position 2783 of SEQ ID NO: 913739
cuuccuggaugucuagaaa

SEQ ID NO: 950155 - RNA, 19 nt, Artificial Sequence
  Description of Artificial Sequence: Synthetic oligonucleotide
  Antisense strand to SEQ ID NO: 950154
uuucuagacauccaggaag

SEQ ID NO: 950156 - RNA, 19 nt, Artificial Sequence
  Description of Artificial Sequence: Synthetic oligonucleotide
  Sense strand starting at position 2949 of SEQ ID NO: 913739
aggaauccuggagguguau

SEQ ID NO: 950157 - RNA, 19 nt, Artificial Sequence
  Description of Artificial Sequence: Synthetic oligonucleotide
  Antisense strand to SEQ ID NO: 950156
auacaccuccaggauuccu

SEQ ID NO: 950158 - RNA, 19 nt, Artificial Sequence
  Description of Artificial Sequence: Synthetic oligonucleotide
  Sense strand starting at position 287 of SEQ ID NO: 913739
aaauucugagugugaauau

SEQ ID NO: 950159 - RNA, 19 nt, Artificial Sequence
  Description of Artificial Sequence: Synthetic oligonucleotide
  Antisense strand to SEQ ID NO: 950158
auauucacacucagaauuu

SEQ ID NO: 950160 - RNA, 19 nt, Artificial Sequence
  Description of Artificial Sequence: Synthetic oligonucleotide
  Sense strand starting at position 448 of SEQ ID NO: 913739
gaagaaacccugugggucu

SEQ ID NO: 950161 - RNA, 19 nt, Artificial Sequence
  Description of Artificial Sequence: Synthetic oligonucleotide
  Antisense strand to SEQ ID NO: 950160
agacccacaggguuucuuc

SEQ ID NO: 950162 - RNA, 19 nt, Artificial Sequence
  Description of Artificial Sequence: Synthetic oligonucleotide
  Sense strand starting at position 377 of SEQ ID NO: 913739
aguugucaacugcauaaua

SEQ ID NO: 950163 - RNA, 19 nt, Artificial Sequence
  Description of Artificial Sequence: Synthetic oligonucleotide
  Antisense strand to SEQ ID NO: 950162
uauuaugcaguugacaacu

SEQ ID NO: 950164 - RNA, 19 nt, Artificial Sequence
  Description of Artificial Sequence: Synthetic oligonucleotide
  Sense strand starting at position 2549 of SEQ ID NO: 913739
gucucugagcacuacacua

SEQ ID NO: 950165 - RNA, 19 nt, Artificial Sequence
  Description of Artificial Sequence: Synthetic oligonucleotide
  Antisense strand to SEQ ID NO: 950164
uaguguagugcucagagac

SEQ ID NO: 950166 - RNA, 19 nt, Artificial Sequence
  Description of Artificial Sequence: Synthetic oligonucleotide
  Sense strand starting at position 3439 of SEQ ID NO: 913739
cuccucucugccuaggaua

SEQ ID NO: 950167 - RNA, 19 nt, Artificial Sequence
  Description of Artificial Sequence: Synthetic oligonucleotide
  Antisense strand to SEQ ID NO: 950166
uauccuaggcagagaggag

SEQ ID NO: 950168 - RNA, 19 nt, Artificial Sequence
  Description of Artificial Sequence: Synthetic oligonucleotide
  Sense strand starting at position 3197 of SEQ ID NO: 913739
uauugaucagagugcugaa

SEQ ID NO: 950169 - RNA, 19 nt, Artificial Sequence
  Description of Artificial Sequence: Synthetic oligonucleotide
  Antisense strand to SEQ ID NO: 950168
uucagcacucugaucaaua

SEQ ID NO: 950170 - RNA, 19 nt, Artificial Sequence
  Description of Artificial Sequence: Synthetic oligonucleotide
  Sense strand starting at position 567 of SEQ ID NO: 913739
gaagguucccaagggcuau

SEQ ID NO: 950171 - RNA, 19 nt, Artificial Sequence
  Description of Artificial Sequence: Synthetic oligonucleotide
  Antisense strand to SEQ ID NO: 950170
auagcccuugggaaccuuc

SEQ ID NO: 950172 - RNA, 19 nt, Artificial Sequence
  Description of Artificial Sequence: Synthetic oligonucleotide
  Sense strand starting at position 3003 of SEQ ID NO: 913739
guauccaaacccugucaga

SEQ ID NO: 950173 - RNA, 19 nt, Artificial Sequence
  Description of Artificial Sequence: Synthetic oligonucleotide
  Antisense strand to SEQ ID NO: 950172
ucugacaggguuuggauac

SEQ ID NO: 950174 - RNA, 19 nt, Artificial Sequence
  Description of Artificial Sequence: Synthetic oligonucleotide
  Sense strand starting at position 3148 of SEQ ID NO: 913739
gcccuagcggauuauaaau

SEQ ID NO: 950175 - RNA, 19 nt, Artificial Sequence
  Description of Artificial Sequence: Synthetic oligonucleotide
  Antisense strand to SEQ ID NO: 950174
auuuauaauccgcuagggc

SEQ ID NO: 950176 - RNA, 19 nt, Artificial Sequence
  Description of Artificial Sequence: Synthetic oligonucleotide
  Sense strand starting at position 404 of SEQ ID NO: 913739
gucaaagacuagcuccauu

SEQ ID NO: 950177 - RNA, 19 nt, Artificial Sequence
  Description of Artificial Sequence: Synthetic oligonucleotide
  Antisense strand to SEQ ID NO: 950176
aauggagcuagucuuugac

SEQ ID NO: 950178 - RNA, 19 nt, Artificial Sequence
  Description of Artificial Sequence: Synthetic oligonucleotide
  Sense strand starting at position 2930 of SEQ ID NO: 913739
cgguuauacucuucuauaa

SEQ ID NO: 950179 - RNA, 19 nt, Artificial Sequence
  Description of Artificial Sequence: Synthetic oligonucleotide
  Antisense strand to SEQ ID NO: 950178
uuauagaagaguauaaccg

SEQ ID NO: 950180 - RNA, 19 nt, Artificial Sequence
  Description of Artificial Sequence: Synthetic oligonucleotide
  Sense strand starting at position 1118 of SEQ ID NO: 913739
cuugaagucuagcuugauc

SEQ ID NO: 950181 - RNA, 19 nt, Artificial Sequence
  Description of Artificial Sequence: Synthetic oligonucleotide
  Antisense strand to SEQ ID NO: 950180
gaucaagcuagacuucaag

SEQ ID NO: 950182 - RNA, 19 nt, Artificial Sequence
  Description of Artificial Sequence: Synthetic oligonucleotide
  Sense strand starting at position 3904 of SEQ ID NO: 913739
aauaguuuguugcuggaau

SEQ ID NO: 950183 - RNA, 19 nt, Artificial Sequence
  Description of Artificial Sequence: Synthetic oligonucleotide
  Antisense strand to SEQ ID NO: 950182
auuccagcaacaaacuauu

SEQ ID NO: 950184 - RNA, 19 nt, Artificial Sequence
  Description of Artificial Sequence: Synthetic oligonucleotide
  Sense strand starting at position 2955 of SEQ ID NO: 913739
ccuggagguguauguugau

SEQ ID NO: 950185 - RNA, 19 nt, Artificial Sequence
  Description of Artificial Sequence: Synthetic oligonucleotide
  Antisense strand to SEQ ID NO: 950184
aucaacauacaccuccagg

SEQ ID NO: 950186 - RNA, 19 nt, Artificial Sequence
  Description of Artificial Sequence: Synthetic oligonucleotide
  Sense strand starting at position 979 of SEQ ID NO: 913739
uuaaauucgucacuacagu

SEQ ID NO: 950187 - RNA, 19 nt, Artificial Sequence
  Description of Artificial Sequence: Synthetic oligonucleotide
  Antisense strand to SEQ ID NO: 950186
acuguagugacgaauuuaa

SEQ ID NO: 950188 - RNA, 19 nt, Artificial Sequence
  Description of Artificial Sequence: Synthetic oligonucleotide
  Sense strand starting at position 2889 of SEQ ID NO: 913739
cguagcauucuggaagucu

SEQ ID NO: 950189 - RNA, 19 nt, Artificial Sequence
  Description of Artificial Sequence: Synthetic oligonucleotide
  Antisense strand to SEQ ID NO: 950188
agacuuccagaaugcuacg

SEQ ID NO: 950190 - RNA, 19 nt, Artificial Sequence
  Description of Artificial Sequence: Synthetic oligonucleotide
  Sense strand starting at position 975 of SEQ ID NO: 913739
ggucuuaaauucgucacua

SEQ ID NO: 950191 - RNA, 19 nt, Artificial Sequence
  Description of Artificial Sequence: Synthetic oligonucleotide
  Antisense strand to SEQ ID NO: 950190
uagugacgaauuuaagacc

SEQ ID NO: 950192 - RNA, 19 nt, Artificial Sequence
  Description of Artificial Sequence: Synthetic oligonucleotide
  Sense strand starting at position 698 of SEQ ID NO: 913739
gcgauuccgaacugaccau

SEQ ID NO: 950193 - RNA, 19 nt, Artificial Sequence
  Description of Artificial Sequence: Synthetic oligonucleotide
  Antisense strand to SEQ ID NO: 950192
auggucaguucggaaucgc

SEQ ID NO: 950194 - RNA, 19 nt, Artificial Sequence
  Description of Artificial Sequence: Synthetic oligonucleotide
  Sense strand starting at position 3280 of SEQ ID NO: 913739
cuugcaaucagcugguaag

SEQ ID NO: 950195 - RNA, 19 nt, Artificial Sequence
  Description of Artificial Sequence: Synthetic oligonucleotide
  Antisense strand to SEQ ID NO: 950194
cuuaccagcugauugcaag

SEQ ID NO: 950196 - RNA, 19 nt, Artificial Sequence
  Description of Artificial Sequence: Synthetic oligonucleotide
  Sense strand starting at position 3659 of SEQ ID NO: 913739
auguguaaguugucaauug

SEQ ID NO: 950197 - RNA, 19 nt, Artificial Sequence
  Description of Artificial Sequence: Synthetic oligonucleotide
  Antisense strand to SEQ ID NO: 950196
caauugacaacuuacacau

SEQ ID NO: 950198 - RNA, 19 nt, Artificial Sequence
  Description of Artificial Sequence: Synthetic oligonucleotide
  Sense strand starting at position 976 of SEQ ID NO: 913739
gucuuaaauucgucacuac

SEQ ID NO: 950199 - RNA, 19 nt, Artificial Sequence
  Description of Artificial Sequence: Synthetic oligonucleotide
  Antisense strand to SEQ ID NO: 950198
guagugacgaauuuaagac

SEQ ID NO: 950200 - RNA, 19 nt, Artificial Sequence
  Description of Artificial Sequence: Synthetic oligonucleotide
  Sense strand starting at position 3532 of SEQ ID NO: 913739
uaagauggaugaggaaauu

SEQ ID NO: 950201 - RNA, 19 nt, Artificial Sequence
  Description of Artificial Sequence: Synthetic oligonucleotide
  Antisense strand to SEQ ID NO: 950200
aauuuccucauccaucuua

SEQ ID NO: 950202 - RNA, 19 nt, Artificial Sequence
  Description of Artificial Sequence: Synthetic oligonucleotide
  Sense strand starting at position 3597 of SEQ ID NO: 913739
guuuguuaucuguggugaa

SEQ ID NO: 950203 - RNA, 19 nt, Artificial Sequence
  Description of Artificial Sequence: Synthetic oligonucleotide
  Antisense strand to SEQ ID NO: 950202
uucaccacagauaacaaac

SEQ ID NO: 950204 - RNA, 19 nt, Artificial Sequence
  Description of Artificial Sequence: Synthetic oligonucleotide
  Sense strand starting at position 2352 of SEQ ID NO: 913739
cuguccuugccgcaugaua

SEQ ID NO: 950205 - RNA, 19 nt, Artificial Sequence
  Description of Artificial Sequence: Synthetic oligonucleotide
  Antisense strand to SEQ ID NO: 950204
uaucaugcggcaaggacag

SEQ ID NO: 950206 - RNA, 19 nt, Artificial Sequence
  Description of Artificial Sequence: Synthetic oligonucleotide
  Sense strand starting at position 3568 of SEQ ID NO: 913739
guuaguuauucucuguuuc

SEQ ID NO: 950207 - RNA, 19 nt, Artificial Sequence
  Description of Artificial Sequence: Synthetic oligonucleotide
  Antisense strand to SEQ ID NO: 950206
gaaacagagaauaacuaac

SEQ ID NO: 950208 - RNA, 19 nt, Artificial Sequence
  Description of Artificial Sequence: Synthetic oligonucleotide
  Sense strand starting at position 2898 of SEQ ID NO: 913739
cuggaagucuuacacauaa

SEQ ID NO: 950209 - RNA, 19 nt, Artificial Sequence
  Description of Artificial Sequence: Synthetic oligonucleotide
  Antisense strand to SEQ ID NO: 950208
uuauguguaagacuuccag

SEQ ID NO: 950210 - RNA, 19 nt, Artificial Sequence
  Description of Artificial Sequence: Synthetic oligonucleotide
  Sense strand starting at position 3565 of SEQ ID NO: 913740
gugaauaaauuggugauaa

SEQ ID NO: 950211 - RNA, 19 nt, Artificial Sequence
  Description of Artificial Sequence: Synthetic oligonucleotide
  Antisense strand to SEQ ID NO: 950210
uuaucaccaauuuauucac

SEQ ID NO: 950212 - RNA, 19 nt, Artificial Sequence
  Description of Artificial Sequence: Synthetic oligonucleotide
  Sense strand starting at position 2216 of SEQ ID NO: 913740
cacauauucgcuuuccgca

SEQ ID NO: 950213 - RNA, 19 nt, Artificial Sequence
  Description of Artificial Sequence: Synthetic oligonucleotide
  Antisense strand to SEQ ID NO: 950212
ugcggaaagcgaauaugug

SEQ ID NO: 950214 - RNA, 19 nt, Artificial Sequence
  Description of Artificial Sequence: Synthetic oligonucleotide
  Sense strand starting at position 3495 of SEQ ID NO: 913740
gaaguccaucggcaaagaa

SEQ ID NO: 950215 - RNA, 19 nt, Artificial Sequence
  Description of Artificial Sequence: Synthetic oligonucleotide
  Antisense strand to SEQ ID NO: 950214
uucuuugccgauggacuuc

SEQ ID NO: 950216 - RNA, 19 nt, Artificial Sequence
  Description of Artificial Sequence: Synthetic oligonucleotide
  Sense strand starting at position 3564 of SEQ ID NO: 913740
ggugaauaaauuggugaua

SEQ ID NO: 950217 - RNA, 19 nt, Artificial Sequence
  Description of Artificial Sequence: Synthetic oligonucleotide
  Antisense strand to SEQ ID NO: 950216
uaucaccaauuuauucacc

SEQ ID NO: 950218 - RNA, 19 nt, Artificial Sequence
  Description of Artificial Sequence: Synthetic oligonucleotide
  Sense strand starting at position 3054 of SEQ ID NO: 913740
cagagcugacuuugggaua

SEQ ID NO: 950219 - RNA, 19 nt, Artificial Sequence
  Description of Artificial Sequence: Synthetic oligonucleotide
  Antisense strand to SEQ ID NO: 950218
uaucccaaagucagcucug

SEQ ID NO: 950220 - RNA, 19 nt, Artificial Sequence
  Description of Artificial Sequence: Synthetic oligonucleotide
  Sense strand starting at position 3563 of SEQ ID NO: 913740
uggugaauaaauuggugau

SEQ ID NO: 950221 - RNA, 19 nt, Artificial Sequence
  Description of Artificial Sequence: Synthetic oligonucleotide
  Antisense strand to SEQ ID NO: 950220
aucaccaauuuauucacca

SEQ ID NO: 950222 - RNA, 19 nt, Artificial Sequence
  Description of Artificial Sequence: Synthetic oligonucleotide
  Sense strand starting at position 3555 of SEQ ID NO: 913740
acacgugguggugaauaaa

SEQ ID NO: 950223 - RNA, 19 nt, Artificial Sequence
  Description of Artificial Sequence: Synthetic oligonucleotide
  Antisense strand to SEQ ID NO: 950222
uuuauucaccaccacgugu

SEQ ID NO: 950224 - RNA, 19 nt, Artificial Sequence
  Description of Artificial Sequence: Synthetic oligonucleotide
  Sense strand starting at position 3416 of SEQ ID NO: 913740
gaggccucugcugaugaga

SEQ ID NO: 950225 - RNA, 19 nt, Artificial Sequence
  Description of Artificial Sequence: Synthetic oligonucleotide
  Antisense strand to SEQ ID NO: 950224
ucucaucagcagaggccuc

SEQ ID NO: 950226 - RNA, 19 nt, Artificial Sequence
  Description of Artificial Sequence: Synthetic oligonucleotide
  Sense strand starting at position 491 of SEQ ID NO: 913740
ugcugaacucgauauuauu

SEQ ID NO: 950227 - RNA, 19 nt, Artificial Sequence
  Description of Artificial Sequence: Synthetic oligonucleotide
  Antisense strand to SEQ ID NO: 950226
aauaauaucgaguucagca

SEQ ID NO: 950228 - RNA, 19 nt, Artificial Sequence
  Description of Artificial Sequence: Synthetic oligonucleotide
  Sense strand starting at position 2572 of SEQ ID NO: 913740
gcagaaguaauucgaauag

SEQ ID NO: 950229 - RNA, 19 nt, Artificial Sequence
  Description of Artificial Sequence: Synthetic oligonucleotide
  Antisense strand to SEQ ID NO: 950228
cuauucgaauuacuucugc

SEQ ID NO: 950230 - RNA, 19 nt, Artificial Sequence
  Description of Artificial Sequence: Synthetic oligonucleotide
  Sense strand starting at position 930 of SEQ ID NO: 913740
ccgugaucaaagcagugaa

SEQ ID NO: 950231 - RNA, 19 nt, Artificial Sequence
  Description of Artificial Sequence: Synthetic oligonucleotide
  Antisense strand to SEQ ID NO: 950230
uucacugcuuugaucacgg

SEQ ID NO: 950232 - RNA, 19 nt, Artificial Sequence
  Description of Artificial Sequence: Synthetic oligonucleotide
  Sense strand starting at position 559 of SEQ ID NO: 913740
ccgcgagagaguuagacau

SEQ ID NO: 950233 - RNA, 19 nt, Artificial Sequence
  Description of Artificial Sequence: Synthetic oligonucleotide
  Antisense strand to SEQ ID NO: 950232
augucuaacucucucgcgg

SEQ ID NO: 950234 - RNA, 19 nt, Artificial Sequence
  Description of Artificial Sequence: Synthetic oligonucleotide
  Sense strand starting at position 2835 of SEQ ID NO: 913740
guccgagagucaucaggag

SEQ ID NO: 950235 - RNA, 19 nt, Artificial Sequence
  Description of Artificial Sequence: Synthetic oligonucleotide
  Antisense strand to SEQ ID NO: 950234
cuccugaugacucucggac

SEQ ID NO: 950236 - RNA, 19 nt, Artificial Sequence
  Description of Artificial Sequence: Synthetic oligonucleotide
  Sense strand starting at position 2700 of SEQ ID NO: 913740
agcggucucagaugggaaa

SEQ ID NO: 950237 - RNA, 19 nt, Artificial Sequence
  Description of Artificial Sequence: Synthetic oligonucleotide
  Antisense strand to SEQ ID NO: 950236
uuucccaucugagaccgcu

SEQ ID NO: 950238 - RNA, 19 nt, Artificial Sequence
  Description of Artificial Sequence: Synthetic oligonucleotide
  Sense strand starting at position 145 of SEQ ID NO: 913740
aucacuucucuccgggaca

SEQ ID NO: 950239 - RNA, 19 nt, Artificial Sequence
  Description of Artificial Sequence: Synthetic oligonucleotide
  Antisense strand to SEQ ID NO: 950238
ugucccggagagaagugau

SEQ ID NO: 950240 - RNA, 19 nt, Artificial Sequence
  Description of Artificial Sequence: Synthetic oligonucleotide
  Sense strand starting at position 566 of SEQ ID NO: 913740
agaguuagacauugcucca

SEQ ID NO: 950241 - RNA, 19 nt, Artificial Sequence
  Description of Artificial Sequence: Synthetic oligonucleotide
  Antisense strand to SEQ ID NO: 950240
uggagcaaugucuaacucu

SEQ ID NO: 950242 - RNA, 19 nt, Artificial Sequence
  Description of Artificial Sequence: Synthetic oligonucleotide
  Sense strand starting at position 658 of SEQ ID NO: 913740
guagacuucuuccucauca

SEQ ID NO: 950243 - RNA, 19 nt, Artificial Sequence
  Description of Artificial Sequence: Synthetic oligonucleotide
  Antisense strand to SEQ ID NO: 950242
ugaugaggaagaagucuac

SEQ ID NO: 950244 - RNA, 19 nt, Artificial Sequence
  Description of Artificial Sequence: Synthetic oligonucleotide
  Sense strand starting at position 2799 of SEQ ID NO: 913740
ggagaaucuuuggugcauc

SEQ ID NO: 950245 - RNA, 19 nt, Artificial Sequence
  Description of Artificial Sequence: Synthetic oligonucleotide
  Antisense strand to SEQ ID NO: 950244
gaugcaccaaagauucucc

SEQ ID NO: 950246 - RNA, 19 nt, Artificial Sequence
  Description of Artificial Sequence: Synthetic oligonucleotide
  Sense strand starting at position 3453 of SEQ ID NO: 913740
agcugugguuaaccacaaa

SEQ ID NO: 950247 - RNA, 19 nt, Artificial Sequence
  Description of Artificial Sequence: Synthetic oligonucleotide
  Antisense strand to SEQ ID NO: 950246
uuugugguuaaccacagcu

SEQ ID NO: 950248 - RNA, 19 nt, Artificial Sequence
  Description of Artificial Sequence: Synthetic oligonucleotide
  Sense strand starting at position 3319 of SEQ ID NO: 913740
cuggacuccaagcgauauu

SEQ ID NO: 950249 - RNA, 19 nt, Artificial Sequence
  Description of Artificial Sequence: Synthetic oligonucleotide
  Antisense strand to SEQ ID NO: 950248
aauaucgcuuggaguccag

SEQ ID NO: 950250 - RNA, 19 nt, Artificial Sequence
  Description of Artificial Sequence: Synthetic oligonucleotide
  Sense strand starting at position 489 of SEQ ID NO: 913740
gcugcugaacucgauauua

SEQ ID NO: 950251 - RNA, 19 nt, Artificial Sequence
  Description of Artificial Sequence: Synthetic oligonucleotide
  Antisense strand to SEQ ID NO: 950250
uaauaucgaguucagcagc

SEQ ID NO: 950252 - RNA, 19 nt, Artificial Sequence
  Description of Artificial Sequence: Synthetic oligonucleotide
  Sense strand starting at position 996 of SEQ ID NO: 913740
gacuucuugugguccugaa

SEQ ID NO: 950253 - RNA, 19 nt, Artificial Sequence
  Description of Artificial Sequence: Synthetic oligonucleotide
  Antisense strand to SEQ ID NO: 950252
uucaggaccacaagaaguc

SEQ ID NO: 950254 - RNA, 19 nt, Artificial Sequence
  Description of Artificial Sequence: Synthetic oligonucleotide
  Sense strand starting at position 3494 of SEQ ID NO: 913740
cgaaguccaucggcaaaga

SEQ ID NO: 950255 - RNA, 19 nt, Artificial Sequence
  Description of Artificial Sequence: Synthetic oligonucleotide
  Antisense strand to SEQ ID NO: 950254
ucuuugccgauggacuucg

SEQ ID NO: 950256 - RNA, 19 nt, Artificial Sequence
  Description of Artificial Sequence: Synthetic oligonucleotide
  Sense strand starting at position 517 of SEQ ID NO: 913740
auggccucugccugaagau

SEQ ID NO: 950257 - RNA, 19 nt, Artificial Sequence
  Description of Artificial Sequence: Synthetic oligonucleotide
  Antisense strand to SEQ ID NO: 950256
aucuucaggcagaggccau

SEQ ID NO: 950258 - RNA, 19 nt, Artificial Sequence
  Description of Artificial Sequence: Synthetic oligonucleotide
  Sense strand starting at position 2744 of SEQ ID NO: 913740
caccaagugcgugauuauu

SEQ ID NO: 950259 - RNA, 19 nt, Artificial Sequence
  Description of Artificial Sequence: Synthetic oligonucleotide
  Antisense strand to SEQ ID NO: 950258
aauaaucacgcacuuggug

SEQ ID NO: 950260 - RNA, 19 nt, Artificial Sequence
  Description of Artificial Sequence: Synthetic oligonucleotide
  Sense strand starting at position 990 of SEQ ID NO: 913740
cgaaaugacuucuuguggu

SEQ ID NO: 950261 - RNA, 19 nt, Artificial Sequence
  Description of Artificial Sequence: Synthetic oligonucleotide
  Antisense strand to SEQ ID NO: 950260
accacaagaagucauuucg

SEQ ID NO: 950262 - RNA, 19 nt, Artificial Sequence
  Description of Artificial Sequence: Synthetic oligonucleotide
  Sense strand starting at position 3820 of SEQ ID NO: 913740
gggaguuucuaggcucuuu

SEQ ID NO: 950263 - RNA, 19 nt, Artificial Sequence
  Description of Artificial Sequence: Synthetic oligonucleotide
  Antisense strand to SEQ ID NO: 950262
aaagagccuagaaacuccc

SEQ ID NO: 950264 - RNA, 19 nt, Artificial Sequence
  Description of Artificial Sequence: Synthetic oligonucleotide
  Sense strand starting at position 569 of SEQ ID NO: 913740
guuagacauugcuccauuc

SEQ ID NO: 950265 - RNA, 19 nt, Artificial Sequence
  Description of Artificial Sequence: Synthetic oligonucleotide
  Antisense strand to SEQ ID NO: 950264
gaauggagcaaugucuaac

SEQ ID NO: 950266 - RNA, 19 nt, Artificial Sequence
  Description of Artificial Sequence: Synthetic oligonucleotide
  Sense strand starting at position 2235 of SEQ ID NO: 913740
gguucucucgcugagauuc

SEQ ID NO: 950267 - RNA, 19 nt, Artificial Sequence
  Description of Artificial Sequence: Synthetic oligonucleotide
  Antisense strand to SEQ ID NO: 950266
gaaucucagcgagagaacc

SEQ ID NO: 950268 - RNA, 19 nt, Artificial Sequence
  Description of Artificial Sequence: Synthetic oligonucleotide
  Sense strand starting at position 2631 of SEQ ID NO: 913740
guggcaugcguguccguau

SEQ ID NO: 950269 - RNA, 19 nt, Artificial Sequence
  Description of Artificial Sequence: Synthetic oligonucleotide
  Antisense strand to SEQ ID NO: 950268
auacggacacgcaugccac

SEQ ID NO: 950270 - RNA, 19 nt, Artificial Sequence
  Description of Artificial Sequence: Synthetic oligonucleotide
  Sense strand starting at position 2829 of SEQ ID NO: 913740
augcgaguccgagagucau

SEQ ID NO: 950271 - RNA, 19 nt, Artificial Sequence
  Description of Artificial Sequence: Synthetic oligonucleotide
  Antisense strand to SEQ ID NO: 950270
augacucucggacucgcau

SEQ ID NO: 950272 - RNA, 19 nt, Artificial Sequence
  Description of Artificial Sequence: Synthetic oligonucleotide
  Sense strand starting at position 3492 of SEQ ID NO: 913740
uucgaaguccaucggcaaa

SEQ ID NO: 950273 - RNA, 19 nt, Artificial Sequence
  Description of Artificial Sequence: Synthetic oligonucleotide
  Antisense strand to SEQ ID NO: 950272
uuugccgauggacuucgaa

SEQ ID NO: 950274 - RNA, 19 nt, Artificial Sequence
  Description of Artificial Sequence: Synthetic oligonucleotide
  Sense strand starting at position 2233 of SEQ ID NO: 913740
cagguucucucgcugagau

SEQ ID NO: 950275 - RNA, 19 nt, Artificial Sequence
  Description of Artificial Sequence: Synthetic oligonucleotide
  Antisense strand to SEQ ID NO: 950274
aucucagcgagagaaccug

SEQ ID NO: 950276 - RNA, 19 nt, Artificial Sequence
  Description of Artificial Sequence: Synthetic oligonucleotide
  Sense strand starting at position 2234 of SEQ ID NO: 913740
agguucucucgcugagauu

SEQ ID NO: 950277 - RNA, 19 nt, Artificial Sequence
  Description of Artificial Sequence: Synthetic oligonucleotide
  Antisense strand to SEQ ID NO: 950276
aaucucagcgagagaaccu

SEQ ID NO: 950278 - RNA, 19 nt, Artificial Sequence
  Description of Artificial Sequence: Synthetic oligonucleotide
  Sense strand starting at position 174 of SEQ ID NO: 913740
gccugacuaggcugaguuu

SEQ ID NO: 950279 - RNA, 19 nt, Artificial Sequence
  Description of Artificial Sequence: Synthetic oligonucleotide
  Antisense strand to SEQ ID NO: 950278
aaacucagccuagucaggc

SEQ ID NO: 950280 - RNA, 19 nt, Artificial Sequence
  Description of Artificial Sequence: Synthetic oligonucleotide
  Sense strand starting at position 3412 of SEQ ID NO: 913740
ggcagaggccucugcugau

SEQ ID NO: 950281 - RNA, 19 nt, Artificial Sequence
  Description of Artificial Sequence: Synthetic oligonucleotide
  Antisense strand to SEQ ID NO: 950280
aucagcagaggccucugcc

SEQ ID NO: 950282 - RNA, 19 nt, Artificial Sequence
  Description of Artificial Sequence: Synthetic oligonucleotide
  Sense strand starting at position 2809 of SEQ ID NO: 913740
uggugcauccguugggaca

SEQ ID NO: 950283 - RNA, 19 nt, Artificial Sequence
  Description of Artificial Sequence: Synthetic oligonucleotide
  Antisense strand to SEQ ID NO: 950282
ugucccaacggaugcacca

SEQ ID NO: 950284 - RNA, 19 nt, Artificial Sequence
  Description of Artificial Sequence: Synthetic oligonucleotide
  Sense strand starting at position 2743 of SEQ ID NO: 913740
ucaccaagugcgugauuau

SEQ ID NO: 950285 - RNA, 19 nt, Artificial Sequence
  Description of Artificial Sequence: Synthetic oligonucleotide
  Antisense strand to SEQ ID NO: 950284
auaaucacgcacuugguga

SEQ ID NO: 950286 - RNA, 19 nt, Artificial Sequence
  Description of Artificial Sequence: Synthetic oligonucleotide
  Sense strand starting at position 205 of SEQ ID NO: 913740
gcuccuguguuggugaaau

SEQ ID NO: 950287 - RNA, 19 nt, Artificial Sequence
  Description of Artificial Sequence: Synthetic oligonucleotide
  Antisense strand to SEQ ID NO: 950286
auuucaccaacacaggagc

SEQ ID NO: 950288 - RNA, 19 nt, Artificial Sequence
  Description of Artificial Sequence: Synthetic oligonucleotide
  Sense strand starting at position 204 of SEQ ID NO: 913740
ugcuccuguguuggugaaa

SEQ ID NO: 950289 - RNA, 19 nt, Artificial Sequence
  Description of Artificial Sequence: Synthetic oligonucleotide
  Antisense strand to SEQ ID NO: 950288
uuucaccaacacaggagca

SEQ ID NO: 950290 - RNA, 19 nt, Artificial Sequence
  Description of Artificial Sequence: Synthetic oligonucleotide
  Sense strand starting at position 1482 of SEQ ID NO: 913741
ugacaaugaucauugagua

SEQ ID NO: 950291 - RNA, 19 nt, Artificial Sequence
  Description of Artificial Sequence: Synthetic oligonucleotide
  Antisense strand to SEQ ID NO: 950290
uacucaaugaucauuguca

SEQ ID NO: 950292 - RNA, 19 nt, Artificial Sequence
  Description of Artificial Sequence: Synthetic oligonucleotide
  Sense strand starting at position 1477 of SEQ ID NO: 913741
gugggugacaaugaucauu

SEQ ID NO: 950293 - RNA, 19 nt, Artificial Sequence
  Description of Artificial Sequence: Synthetic oligonucleotide
  Antisense strand to SEQ ID NO: 950292
aaugaucauugucacccac

SEQ ID NO: 950294 - RNA, 19 nt, Artificial Sequence
  Description of Artificial Sequence: Synthetic oligonucleotide
  Sense strand starting at position 701 of SEQ ID NO: 913741
guugaagauaggugaauga

SEQ ID NO: 950295 - RNA, 19 nt, Artificial Sequence
  Description of Artificial Sequence: Synthetic oligonucleotide
  Antisense strand to SEQ ID NO: 950294
ucauucaccuaucuucaac

SEQ ID NO: 950296 - RNA, 19 nt, Artificial Sequence
  Description of Artificial Sequence: Synthetic oligonucleotide
  Sense strand starting at position 1835 of SEQ ID NO: 913741
agaguuuccuguuuauuuc

SEQ ID NO: 950297 - RNA, 19 nt, Artificial Sequence
  Description of Artificial Sequence: Synthetic oligonucleotide
  Antisense strand to SEQ ID NO: 950296
gaaauaaacaggaaacucu

SEQ ID NO: 950298 - RNA, 19 nt, Artificial Sequence
  Description of Artificial Sequence: Synthetic oligonucleotide
  Sense strand starting at position 628 of SEQ ID NO: 913741
ucuuauuuaccuggucuuu

SEQ ID NO: 950299 - RNA, 19 nt, Artificial Sequence
  Description of Artificial Sequence: Synthetic oligonucleotide
  Antisense strand to SEQ ID NO: 950298
aaagaccagguaaauaaga

SEQ ID NO: 950300 - RNA, 19 nt, Artificial Sequence
  Description of Artificial Sequence: Synthetic oligonucleotide
  Sense strand starting at position 1585 of SEQ ID NO: 913741
cuggcuaccuugguauuua

SEQ ID NO: 950301 - RNA, 19 nt, Artificial Sequence
  Description of Artificial Sequence: Synthetic oligonucleotide
  Antisense strand to SEQ ID NO: 950300
uaaauaccaagguagccag

SEQ ID NO: 950302 - RNA, 19 nt, Artificial Sequence
  Description of Artificial Sequence: Synthetic oligonucleotide
  Sense strand starting at position 1135 of SEQ ID NO: 913741
uuuagaaaugcuggagaac

SEQ ID NO: 950303 - RNA, 19 nt, Artificial Sequence
  Description of Artificial Sequence: Synthetic oligonucleotide
  Antisense strand to SEQ ID NO: 950302
guucuccagcauuucuaaa

SEQ ID NO: 950304 - RNA, 19 nt, Artificial Sequence
  Description of Artificial Sequence: Synthetic oligonucleotide
  Sense strand starting at position 2503 of SEQ ID NO: 913741
agaucucaugacuaguagu

SEQ ID NO: 950305 - RNA, 19 nt, Artificial Sequence
  Description of Artificial Sequence: Synthetic oligonucleotide
  Antisense strand to SEQ ID NO: 950304
acuacuagucaugagaucu

SEQ ID NO: 950306 - RNA, 19 nt, Artificial Sequence
  Description of Artificial Sequence: Synthetic oligonucleotide
  Sense strand starting at position 1888 of SEQ ID NO: 913741
gguauuaaagaagguaauc

SEQ ID NO: 950307 - RNA, 19 nt, Artificial Sequence
  Description of Artificial Sequence: Synthetic oligonucleotide
  Antisense strand to SEQ ID NO: 950306
gauuaccuucuuuaauacc

SEQ ID NO: 950308 - RNA, 19 nt, Artificial Sequence
  Description of Artificial Sequence: Synthetic oligonucleotide
  Sense strand starting at position 1787 of SEQ ID NO: 913741
ccuaacaggaguuggauua

SEQ ID NO: 950309 - RNA, 19 nt, Artificial Sequence
  Description of Artificial Sequence: Synthetic oligonucleotide
  Antisense strand to SEQ ID NO: 950308
uaauccaacuccuguuagg

SEQ ID NO: 950310 - RNA, 19 nt, Artificial Sequence
  Description of Artificial Sequence: Synthetic oligonucleotide
  Sense strand starting at position 710 of SEQ ID NO: 913741
aggugaaugagccaaguau

SEQ ID NO: 950311 - RNA, 19 nt, Artificial Sequence
  Description of Artificial Sequence: Synthetic oligonucleotide
  Antisense strand to SEQ ID NO: 950310
auacuuggcucauucaccu

SEQ ID NO: 950312 - RNA, 19 nt, Artificial Sequence
  Description of Artificial Sequence: Synthetic oligonucleotide
  Sense strand starting at position 660 of SEQ ID NO: 913741
cucuuuaaacuguaaaggu

SEQ ID NO: 950313 - RNA, 19 nt, Artificial Sequence
  Description of Artificial Sequence: Synthetic oligonucleotide
  Antisense strand to SEQ ID NO: 950312
accuuuacaguuuaaagag

SEQ ID NO: 950314 - RNA, 19 nt, Artificial Sequence
  Description of Artificial Sequence: Synthetic oligonucleotide
  Sense strand starting at position 3266 of SEQ ID NO: 913741
gccuaaaugaggcaaguaa

SEQ ID NO: 950315 - RNA, 19 nt, Artificial Sequence
  Description of Artificial Sequence: Synthetic oligonucleotide
  Antisense strand to SEQ ID NO: 950314
uuacuugccucauuuaggc

SEQ ID NO: 950316 - RNA, 19 nt, Artificial Sequence
  Description of Artificial Sequence: Synthetic oligonucleotide
  Sense strand starting at position 1295 of SEQ ID NO: 913741
gucagacauuuagacaaga

SEQ ID NO: 950317 - RNA, 19 nt, Artificial Sequence
  Description of Artificial Sequence: Synthetic oligonucleotide
  Antisense strand to SEQ ID NO: 950316
ucuugucuaaaugucugac

SEQ ID NO: 950318 - RNA, 19 nt, Artificial Sequence
  Description of Artificial Sequence: Synthetic oligonucleotide
  Sense strand starting at position 1885 of SEQ ID NO: 913741
gcggguauuaaagaaggua

SEQ ID NO: 950319 - RNA, 19 nt, Artificial Sequence
  Description of Artificial Sequence: Synthetic oligonucleotide
  Antisense strand to SEQ ID NO: 950318
uaccuucuuuaauacccgc

SEQ ID NO: 950320 - RNA, 19 nt, Artificial Sequence
  Description of Artificial Sequence: Synthetic oligonucleotide
  Sense strand starting at position 1803 of SEQ ID NO: 913741
uuaaauggccucuaagguu

SEQ ID NO: 950321 - RNA, 19 nt, Artificial Sequence
  Description of Artificial Sequence: Synthetic oligonucleotide
  Antisense strand to SEQ ID NO: 950320
aaccuuagaggccauuuaa

SEQ ID NO: 950322 - RNA, 19 nt, Artificial Sequence
  Description of Artificial Sequence: Synthetic oligonucleotide
  Sense strand starting at position 1971 of SEQ ID NO: 913741
auguaucacugaccuacua

SEQ ID NO: 950323 - RNA, 19 nt, Artificial Sequence
  Description of Artificial Sequence: Synthetic oligonucleotide
  Antisense strand to SEQ ID NO: 950322
uaguaggucagugauacau

SEQ ID NO: 950324 - RNA, 19 nt, Artificial Sequence
  Description of Artificial Sequence: Synthetic oligonucleotide
  Sense strand starting at position 2513 of SEQ ID NO: 913741
acuaguaguaggugacaaa

SEQ ID NO: 950325 - RNA, 19 nt, Artificial Sequence
  Description of Artificial Sequence: Synthetic oligonucleotide
  Antisense strand to SEQ ID NO: 950324
uuugucaccuacuacuagu

SEQ ID NO: 950326 - RNA, 19 nt, Artificial Sequence
  Description of Artificial Sequence: Synthetic oligonucleotide
  Sense strand starting at position 1773 of SEQ ID NO: 913741
gggccaaguguauaccuaa

SEQ ID NO: 950327 - RNA, 19 nt, Artificial Sequence
  Description of Artificial Sequence: Synthetic oligonucleotide
  Antisense strand to SEQ ID NO: 950326
uuagguauacacuuggccc

SEQ ID NO: 950328 - RNA, 19 nt, Artificial Sequence
  Description of Artificial Sequence: Synthetic oligonucleotide
  Sense strand starting at position 2561 of SEQ ID NO: 913741
cuuaaagauugucuaguga

SEQ ID NO: 950329 - RNA, 19 nt, Artificial Sequence
  Description of Artificial Sequence: Synthetic oligonucleotide
  Antisense strand to SEQ ID NO: 950328
ucacuagacaaucuuuaag

SEQ ID NO: 950330 - RNA, 19 nt, Artificial Sequence
  Description of Artificial Sequence: Synthetic oligonucleotide
  Sense strand starting at position 634 of SEQ ID NO: 913741
uuaccuggucuuugaaaua

SEQ ID NO: 950331 - RNA, 19 nt, Artificial Sequence
  Description of Artificial Sequence: Synthetic oligonucleotide
  Antisense strand to SEQ ID NO: 950330
uauuucaaagaccagguaa

SEQ ID NO: 950332 - RNA, 19 nt, Artificial Sequence
  Description of Artificial Sequence: Synthetic oligonucleotide
  Sense strand starting at position 1646 of SEQ ID NO: 913741
acuacuuagcugggauacu

SEQ ID NO: 950333 - RNA, 19 nt, Artificial Sequence
  Description of Artificial Sequence: Synthetic oligonucleotide
  Antisense strand to SEQ ID NO: 950332
aguaucccagcuaaguagu

SEQ ID NO: 950334 - RNA, 19 nt, Artificial Sequence
  Description of Artificial Sequence: Synthetic oligonucleotide
  Sense strand starting at position 2175 of SEQ ID NO: 913741
gcucuagagcagcaagaau

SEQ ID NO: 950335 - RNA, 19 nt, Artificial Sequence
  Description of Artificial Sequence: Synthetic oligonucleotide
  Antisense strand to SEQ ID NO: 950334
auucuugcugcucuagagc

SEQ ID NO: 950336 - RNA, 19 nt, Artificial Sequence
  Description of Artificial Sequence: Synthetic oligonucleotide
  Sense strand starting at position 490 of SEQ ID NO: 913741
gaguucuuaccaggucaaa

SEQ ID NO: 950337 - RNA, 19 nt, Artificial Sequence
  Description of Artificial Sequence: Synthetic oligonucleotide
  Antisense strand to SEQ ID NO: 950336
uuugaccugguaagaacuc

SEQ ID NO: 950338 - RNA, 19 nt, Artificial Sequence
  Description of Artificial Sequence: Synthetic oligonucleotide
  Sense strand starting at position 3368 of SEQ ID NO: 913741
augcauguaucacuuaaga

SEQ ID NO: 950339 - RNA, 19 nt, Artificial Sequence
  Description of Artificial Sequence: Synthetic oligonucleotide
  Antisense strand to SEQ ID NO: 950338
ucuuaagugauacaugcau

SEQ ID NO: 950340 - RNA, 19 nt, Artificial Sequence
  Description of Artificial Sequence: Synthetic oligonucleotide
  Sense strand starting at position 412 of SEQ ID NO: 913741
ccuaaaguguuucuuaaag

SEQ ID NO: 950341 - RNA, 19 nt, Artificial Sequence
  Description of Artificial Sequence: Synthetic oligonucleotide
  Antisense strand to SEQ ID NO: 950340
cuuuaagaaacacuuuagg

SEQ ID NO: 950342 - RNA, 19 nt, Artificial Sequence
  Description of Artificial Sequence: Synthetic oligonucleotide
  Sense strand starting at position 633 of SEQ ID NO: 913741
uuuaccuggucuuugaaau

SEQ ID NO: 950343 - RNA, 19 nt, Artificial Sequence
  Description of Artificial Sequence: Synthetic oligonucleotide
  Antisense strand to SEQ ID NO: 950342
auuucaaagaccagguaaa

SEQ ID NO: 950344 - RNA, 19 nt, Artificial Sequence
  Description of Artificial Sequence: Synthetic oligonucleotide
  Sense strand starting at position 2560 of SEQ ID NO: 913741
ucuuaaagauugucuagug

SEQ ID NO: 950345 - RNA, 19 nt, Artificial Sequence
  Description of Artificial Sequence: Synthetic oligonucleotide
  Antisense strand to SEQ ID NO: 950344
cacuagacaaucuuuaaga

SEQ ID NO: 950346 - RNA, 19 nt, Artificial Sequence
  Description of Artificial Sequence: Synthetic oligonucleotide
  Sense strand starting at position 1186 of SEQ ID NO: 913741
gggcaaaugcuguaacuuu

SEQ ID NO: 950347 - RNA, 19 nt, Artificial Sequence
  Description of Artificial Sequence: Synthetic oligonucleotide
  Antisense strand to SEQ ID NO: 950346
aaaguuacagcauuugccc

SEQ ID NO: 950348 - RNA, 19 nt, Artificial Sequence
  Description of Artificial Sequence: Synthetic oligonucleotide
  Sense strand starting at position 2436 of SEQ ID NO: 913741
gacugucaacucugagguu

SEQ ID NO: 950349 - RNA, 19 nt, Artificial Sequence
  Description of Artificial Sequence: Synthetic oligonucleotide
  Antisense strand to SEQ ID NO: 950348
aaccucagaguugacaguc

SEQ ID NO: 950350 - RNA, 19 nt, Artificial Sequence
  Description of Artificial Sequence: Synthetic oligonucleotide
  Sense strand starting at position 2349 of SEQ ID NO: 913741
gcagaugagcaggguucaa

SEQ ID NO: 950351 - RNA, 19 nt, Artificial Sequence
  Description of Artificial Sequence: Synthetic oligonucleotide
  Antisense strand to SEQ ID NO: 950350
uugaacccugcucaucugc

SEQ ID NO: 950352 - RNA, 19 nt, Artificial Sequence
  Description of Artificial Sequence: Synthetic oligonucleotide
  Sense strand starting at position 3293 of SEQ ID NO: 913741
caguguggcaaguaaagua

SEQ ID NO: 950353 - RNA, 19 nt, Artificial Sequence
  Description of Artificial Sequence: Synthetic oligonucleotide
  Antisense strand to SEQ ID NO: 950352
uacuuuacuugccacacug

SEQ ID NO: 950354 - RNA, 19 nt, Artificial Sequence
  Description of Artificial Sequence: Synthetic oligonucleotide
  Sense strand starting at position 2164 of SEQ ID NO: 913741
gucaauuacuggcucuaga

SEQ ID NO: 950355 - RNA, 19 nt, Artificial Sequence
  Description of Artificial Sequence: Synthetic oligonucleotide
  Antisense strand to SEQ ID NO: 950354
ucuagagccaguaauugac

SEQ ID NO: 950356 - RNA, 19 nt, Artificial Sequence
  Description of Artificial Sequence: Synthetic oligonucleotide
  Sense strand starting at position 3135 of SEQ ID NO: 913741
ucuccucauguugguaaga

SEQ ID NO: 950357 - RNA, 19 nt, Artificial Sequence
  Description of Artificial Sequence: Synthetic oligonucleotide
  Antisense strand to SEQ ID NO: 950356
ucuuaccaacaugaggaga

SEQ ID NO: 950358 - RNA, 19 nt, Artificial Sequence
  Description of Artificial Sequence: Synthetic oligonucleotide
  Sense strand starting at position 2069 of SEQ ID NO: 913741
gguauuuaauugcauaaga

SEQ ID NO: 950359 - RNA, 19 nt, Artificial Sequence
  Description of Artificial Sequence: Synthetic oligonucleotide
  Antisense strand to SEQ ID NO: 950358
ucuuaugcaauuaaauacc

SEQ ID NO: 950360 - RNA, 19 nt, Artificial Sequence
  Description of Artificial Sequence: Synthetic oligonucleotide
  Sense strand starting at position 1084 of SEQ ID NO: 913741
ucuaaugcuuaggcaacua

SEQ ID NO: 950361 - RNA, 19 nt, Artificial Sequence
  Description of Artificial Sequence: Synthetic oligonucleotide
  Antisense strand to SEQ ID NO: 950360
uaguugccuaagcauuaga

SEQ ID NO: 950362 - RNA, 19 nt, Artificial Sequence
  Description of Artificial Sequence: Synthetic oligonucleotide
  Sense strand starting at position 2162 of SEQ ID NO: 913741
gggucaauuacuggcucua

SEQ ID NO: 950363 - RNA, 19 nt, Artificial Sequence
  Description of Artificial Sequence: Synthetic oligonucleotide
  Antisense strand to SEQ ID NO: 950362
uagagccaguaauugaccc

SEQ ID NO: 950364 - RNA, 19 nt, Artificial Sequence
  Description of Artificial Sequence: Synthetic oligonucleotide
  Sense strand starting at position 1878 of SEQ ID NO: 913741
ugucucagcggguauuaaa

SEQ ID NO: 950365 - RNA, 19 nt, Artificial Sequence
  Description of Artificial Sequence: Synthetic oligonucleotide
  Antisense strand to SEQ ID NO: 950364
uuuaauacccgcugagaca

SEQ ID NO: 950366 - RNA, 19 nt, Artificial Sequence
  Description of Artificial Sequence: Synthetic oligonucleotide
  Sense strand starting at position 1341 of SEQ ID NO: 913741
uggacuaauuaagaauaac

SEQ ID NO: 950367 - RNA, 19 nt, Artificial Sequence
  Description of Artificial Sequence: Synthetic oligonucleotide
  Antisense strand to SEQ ID NO: 950366
guuauucuuaauuagucca

SEQ ID NO: 950368 - RNA, 19 nt, Artificial Sequence
  Description of Artificial Sequence: Synthetic oligonucleotide
  Sense strand starting at position 1320 of SEQ ID NO: 913741
ucguuaucacuaggacuuu

SEQ ID NO: 950369 - RNA, 19 nt, Artificial Sequence
  Description of Artificial Sequence: Synthetic oligonucleotide
  Antisense strand to SEQ ID NO: 950368
aaaguccuagugauaacga

SEQ ID NO: 950370 - RNA, 19 nt, Artificial Sequence
  Description of Artificial Sequence: Synthetic oligonucleotide
  Sense strand starting at position 3166 of SEQ ID NO: 913742
guguuaaugcagccuuucu

SEQ ID NO: 950371 - RNA, 19 nt, Artificial Sequence
  Description of Artificial Sequence: Synthetic oligonucleotide
  Antisense strand to SEQ ID NO: 950370
agaaaggcugcauuaacac

SEQ ID NO: 950372 - RNA, 19 nt, Artificial Sequence
  Description of Artificial Sequence: Synthetic oligonucleotide
  Sense strand starting at position 3361 of SEQ ID NO: 913742
ucgagacuuggagauuagu

SEQ ID NO: 950373 - RNA, 19 nt, Artificial Sequence
  Description of Artificial Sequence: Synthetic oligonucleotide
  Antisense strand to SEQ ID NO: 950372
acuaaucuccaagucucga

SEQ ID NO: 950374 - RNA, 19 nt, Artificial Sequence
  Description of Artificial Sequence: Synthetic oligonucleotide
  Sense strand starting at position 2876 of SEQ ID NO: 913742
cugauugacagacgaucaa

SEQ ID NO: 950375 - RNA, 19 nt, Artificial Sequence
  Description of Artificial Sequence: Synthetic oligonucleotide
  Antisense strand to SEQ ID NO: 950374
uugaucgucugucaaucag

SEQ ID NO: 950376 - RNA, 19 nt, Artificial Sequence
  Description of Artificial Sequence: Synthetic oligonucleotide
  Sense strand starting at position 3027 of SEQ ID NO: 913742
aaggcaaaccuuuggauga

SEQ ID NO: 950377 - RNA, 19 nt, Artificial Sequence
  Description of Artificial Sequence: Synthetic oligonucleotide
  Antisense strand to SEQ ID NO: 950376
ucauccaaagguuugccuu

SEQ ID NO: 950378 - RNA, 19 nt, Artificial Sequence
  Description of Artificial Sequence: Synthetic oligonucleotide
  Sense strand starting at position 1733 of SEQ ID NO: 913742
gcggcuuuaagugcugaau

SEQ ID NO: 950379 - RNA, 19 nt, Artificial Sequence
  Description of Artificial Sequence: Synthetic oligonucleotide
  Antisense strand to SEQ ID NO: 950378
auucagcacuuaaagccgc

SEQ ID NO: 950380 - RNA, 19 nt, Artificial Sequence
  Description of Artificial Sequence: Synthetic oligonucleotide
  Sense strand starting at position 581 of SEQ ID NO: 913742
guuauaauacaggacuugu

SEQ ID NO: 950381 - RNA, 19 nt, Artificial Sequence
  Description of Artificial Sequence: Synthetic oligonucleotide
  Antisense strand to SEQ ID NO: 950380
acaaguccuguauuauaac

SEQ ID NO: 950382 - RNA, 19 nt, Artificial Sequence
  Description of Artificial Sequence: Synthetic oligonucleotide
  Sense strand starting at position 3357 of SEQ ID NO: 913742
auacucgagacuuggagau

SEQ ID NO: 950383 - RNA, 19 nt, Artificial Sequence
  Description of Artificial Sequence: Synthetic oligonucleotide
  Antisense strand to SEQ ID NO: 950382
aucuccaagucucgaguau

SEQ ID NO: 950384 - RNA, 19 nt, Artificial Sequence
  Description of Artificial Sequence: Synthetic oligonucleotide
  Sense strand starting at position 119 of SEQ ID NO: 913742
cuauaugcuggagacagua

SEQ ID NO: 950385 - RNA, 19 nt, Artificial Sequence
  Description of Artificial Sequence: Synthetic oligonucleotide
  Antisense strand to SEQ ID NO: 950384
uacugucuccagcauauag

SEQ ID NO: 950386 - RNA, 19 nt, Artificial Sequence
  Description of Artificial Sequence: Synthetic oligonucleotide
  Sense strand starting at position 17 of SEQ ID NO: 913742
cggacuuuauaacuacaga

SEQ ID NO: 950387 - RNA, 19 nt, Artificial Sequence
  Description of Artificial Sequence: Synthetic oligonucleotide
  Antisense strand to SEQ ID NO: 950386
ucuguaguuauaaaguccg

SEQ ID NO: 950388 - RNA, 19 nt, Artificial Sequence
  Description of Artificial Sequence: Synthetic oligonucleotide
  Sense strand starting at position 153 of SEQ ID NO: 913742
cuagccuaucaguaaugaa

SEQ ID NO: 950389 - RNA, 19 nt, Artificial Sequence
  Description of Artificial Sequence: Synthetic oligonucleotide
  Antisense strand to SEQ ID NO: 950388
uucauuacugauaggcuag

SEQ ID NO: 950390 - RNA, 19 nt, Artificial Sequence
  Description of Artificial Sequence: Synthetic oligonucleotide
  Sense strand starting at position 2924 of SEQ ID NO: 913742
caaguauugcuuuaaaugg

SEQ ID NO: 950391 - RNA, 19 nt, Artificial Sequence
  Description of Artificial Sequence: Synthetic oligonucleotide
  Antisense strand to SEQ ID NO: 950390
ccauuuaaagcaauacuug

SEQ ID NO: 950392 - RNA, 19 nt, Artificial Sequence
  Description of Artificial Sequence: Synthetic oligonucleotide
  Sense strand starting at position 3393 of SEQ ID NO: 913742
cugagaucucuuuaggcua

SEQ ID NO: 950393 - RNA, 19 nt, Artificial Sequence
  Description of Artificial Sequence: Synthetic oligonucleotide
  Antisense strand to SEQ ID NO: 950392
uagccuaaagagaucucag

SEQ ID NO: 950394 - RNA, 19 nt, Artificial Sequence
  Description of Artificial Sequence: Synthetic oligonucleotide
  Sense strand starting at position 3404 of SEQ ID NO: 913742
uuaggcuacuuauuagaaa

SEQ ID NO: 950395 - RNA, 19 nt, Artificial Sequence
  Description of Artificial Sequence: Synthetic oligonucleotide
  Antisense strand to SEQ ID NO: 950394
uuucuaauaaguagccuaa

SEQ ID NO: 950396 - RNA, 19 nt, Artificial Sequence
  Description of Artificial Sequence: Synthetic oligonucleotide
  Sense strand starting at position 2869 of SEQ ID NO: 913742
uagguuucugauugacaga

SEQ ID NO: 950397 - RNA, 19 nt, Artificial Sequence
  Description of Artificial Sequence: Synthetic oligonucleotide
  Antisense strand to SEQ ID NO: 950396
ucugucaaucagaaaccua

SEQ ID NO: 950398 - RNA, 19 nt, Artificial Sequence
  Description of Artificial Sequence: Synthetic oligonucleotide
  Sense strand starting at position 3713 of SEQ ID NO: 913742
augagacucuaugucucaa

SEQ ID NO: 950399 - RNA, 19 nt, Artificial Sequence
  Description of Artificial Sequence: Synthetic oligonucleotide
  Antisense strand to SEQ ID NO: 950398
uugagacauagagucucau

SEQ ID NO: 950400 - RNA, 19 nt, Artificial Sequence
  Description of Artificial Sequence: Synthetic oligonucleotide
  Sense strand starting at position 3859 of SEQ ID NO: 913742
aguagauguccuggauaag

SEQ ID NO: 950401 - RNA, 19 nt, Artificial Sequence
  Description of Artificial Sequence: Synthetic oligonucleotide
  Antisense strand to SEQ ID NO: 950400
cuuauccaggacaucuacu

SEQ ID NO: 950402 - RNA, 19 nt, Artificial Sequence
  Description of Artificial Sequence: Synthetic oligonucleotide
  Sense strand starting at position 864 of SEQ ID NO: 913742
aagucaaaguuccuuggaa

SEQ ID NO: 950403 - RNA, 19 nt, Artificial Sequence
  Description of Artificial Sequence: Synthetic oligonucleotide
  Antisense strand to SEQ ID NO: 950402
uuccaaggaacuuugacuu

SEQ ID NO: 950404 - RNA, 19 nt, Artificial Sequence
  Description of Artificial Sequence: Synthetic oligonucleotide
  Sense strand starting at position 971 of SEQ ID NO: 913742
caaauaacguuucuaggga

SEQ ID NO: 950405 - RNA, 19 nt, Artificial Sequence
  Description of Artificial Sequence: Synthetic oligonucleotide
  Antisense strand to SEQ ID NO: 950404
ucccuagaaacguuauuug

SEQ ID NO: 950406 - RNA, 19 nt, Artificial Sequence
  Description of Artificial Sequence: Synthetic oligonucleotide
  Sense strand starting at position 3807 of SEQ ID NO: 913742
agcccugaaguuuaaacuu

SEQ ID NO: 950407 - RNA, 19 nt, Artificial Sequence
  Description of Artificial Sequence: Synthetic oligonucleotide
  Antisense strand to SEQ ID NO: 950406
aaguuuaaacuucagggcu

SEQ ID NO: 950408 - RNA, 19 nt, Artificial Sequence
  Description of Artificial Sequence: Synthetic oligonucleotide
  Sense strand starting at position 865 of SEQ ID NO: 913742
agucaaaguuccuuggaag

SEQ ID NO: 950409 - RNA, 19 nt, Artificial Sequence
  Description of Artificial Sequence: Synthetic oligonucleotide
  Antisense strand to SEQ ID NO: 950408
cuuccaaggaacuuugacu

SEQ ID NO: 950410 - RNA, 19 nt, Artificial Sequence
  Description of Artificial Sequence: Synthetic oligonucleotide
  Sense strand starting at position 2868 of SEQ ID NO: 913742
uuagguuucugauugacag

SEQ ID NO: 950411 - RNA, 19 nt, Artificial Sequence
  Description of Artificial Sequence: Synthetic oligonucleotide
  Antisense strand to SEQ ID NO: 950410
cugucaaucagaaaccuaa

SEQ ID NO: 950412 - RNA, 19 nt, Artificial Sequence
  Description of Artificial Sequence: Synthetic oligonucleotide
  Sense strand starting at position 3132 of SEQ ID NO: 913742
aguagucaaucaccuugaa

SEQ ID NO: 950413 - RNA, 19 nt, Artificial Sequence
  Description of Artificial Sequence: Synthetic oligonucleotide
  Antisense strand to SEQ ID NO: 950412
uucaaggugauugacuacu

SEQ ID NO: 950414 - RNA, 19 nt, Artificial Sequence
  Description of Artificial Sequence: Synthetic oligonucleotide
  Sense strand starting at position 1227 of SEQ ID NO: 913742
agaggaucccgagguaucu

SEQ ID NO: 950415 - RNA, 19 nt, Artificial Sequence
  Description of Artificial Sequence: Synthetic oligonucleotide
  Antisense strand to SEQ ID NO: 950414
agauaccucgggauccucu

SEQ ID NO: 950416 - RNA, 19 nt, Artificial Sequence
  Description of Artificial Sequence: Synthetic oligonucleotide
  Sense strand starting at position 3856 of SEQ ID NO: 913742
uggaguagauguccuggau

SEQ ID NO: 950417 - RNA, 19 nt, Artificial Sequence
  Description of Artificial Sequence: Synthetic oligonucleotide
  Antisense strand to SEQ ID NO: 950416
auccaggacaucuacucca

SEQ ID NO: 950418 - RNA, 19 nt, Artificial Sequence
  Description of Artificial Sequence: Synthetic oligonucleotide
  Sense strand starting at position 2950 of SEQ ID NO: 913742
guaggaggguuccuuaauc

SEQ ID NO: 950419 - RNA, 19 nt, Artificial Sequence
  Description of Artificial Sequence: Synthetic oligonucleotide
  Antisense strand to SEQ ID NO: 950418
gauuaaggaacccuccuac

SEQ ID NO: 950420 - RNA, 19 nt, Artificial Sequence
  Description of Artificial Sequence: Synthetic oligonucleotide
  Sense strand starting at position 3125 of SEQ ID NO: 913742
aaugcagaguagucaauca

SEQ ID NO: 950421 - RNA, 19 nt, Artificial Sequence
  Description of Artificial Sequence: Synthetic oligonucleotide
  Antisense strand to SEQ ID NO: 950420
ugauugacuacucugcauu

SEQ ID NO: 950422 - RNA, 19 nt, Artificial Sequence
  Description of Artificial Sequence: Synthetic oligonucleotide
  Sense strand starting at position 3135 of SEQ ID NO: 913742
agucaaucaccuugaagca

SEQ ID NO: 950423 - RNA, 19 nt, Artificial Sequence
  Description of Artificial Sequence: Synthetic oligonucleotide
  Antisense strand to SEQ ID NO: 950422
ugcuucaaggugauugacu

SEQ ID NO: 950424 - RNA, 19 nt, Artificial Sequence
  Description of Artificial Sequence: Synthetic oligonucleotide
  Sense strand starting at position 2955 of SEQ ID NO: 913742
aggguuccuuaaucaaguu

SEQ ID NO: 950425 - RNA, 19 nt, Artificial Sequence
  Description of Artificial Sequence: Synthetic oligonucleotide
  Antisense strand to SEQ ID NO: 950424
aacuugauuaaggaacccu

SEQ ID NO: 950426 - RNA, 19 nt, Artificial Sequence
  Description of Artificial Sequence: Synthetic oligonucleotide
  Sense strand starting at position 2832 of SEQ ID NO: 913742
gcuauuagggauggugacu

SEQ ID NO: 950427 - RNA, 19 nt, Artificial Sequence
  Description of Artificial Sequence: Synthetic oligonucleotide
  Antisense strand to SEQ ID NO: 950426
agucaccaucccuaauagc

SEQ ID NO: 950428 - RNA, 19 nt, Artificial Sequence
  Description of Artificial Sequence: Synthetic oligonucleotide
  Sense strand starting at position 520 of SEQ ID NO: 913742
ccuacuacgcauugggaaa

SEQ ID NO: 950429 - RNA, 19 nt, Artificial Sequence
  Description of Artificial Sequence: Synthetic oligonucleotide
  Antisense strand to SEQ ID NO: 950428
uuucccaaugcguaguagg

SEQ ID NO: 950430 - RNA, 19 nt, Artificial Sequence
  Description of Artificial Sequence: Synthetic oligonucleotide
  Sense strand starting at position 1349 of SEQ ID NO: 913742
aacucagugcccggagaaa

SEQ ID NO: 950431 - RNA, 19 nt, Artificial Sequence
  Description of Artificial Sequence: Synthetic oligonucleotide
  Antisense strand to SEQ ID NO: 950430
uuucuccgggcacugaguu

SEQ ID NO: 950432 - RNA, 19 nt, Artificial Sequence
  Description of Artificial Sequence: Synthetic oligonucleotide
  Sense strand starting at position 262 of SEQ ID NO: 913742
ugcacauuauaggagauuu

SEQ ID NO: 950433 - RNA, 19 nt, Artificial Sequence
  Description of Artificial Sequence: Synthetic oligonucleotide
  Antisense strand to SEQ ID NO: 950432
aaaucuccuauaaugugca

SEQ ID NO: 950434 - RNA, 19 nt, Artificial Sequence
  Description of Artificial Sequence: Synthetic oligonucleotide
  Sense strand starting at position 152 of SEQ ID NO: 913742
ccuagccuaucaguaauga

SEQ ID NO: 950435 - RNA, 19 nt, Artificial Sequence
  Description of Artificial Sequence: Synthetic oligonucleotide
  Antisense strand to SEQ ID NO: 950434
ucauuacugauaggcuagg

SEQ ID NO: 950436 - RNA, 19 nt, Artificial Sequence
  Description of Artificial Sequence: Synthetic oligonucleotide
  Sense strand starting at position 565 of SEQ ID NO: 913742
ccagcauuacccuacuguu

SEQ ID NO: 950437 - RNA, 19 nt, Artificial Sequence
  Description of Artificial Sequence: Synthetic oligonucleotide
  Antisense strand to SEQ ID NO: 950436
aacaguaggguaaugcugg

SEQ ID NO: 950438 - RNA, 19 nt, Artificial Sequence
  Description of Artificial Sequence: Synthetic oligonucleotide
  Sense strand starting at position 1736 of SEQ ID NO: 913742
gcuuuaagugcugaaucac

SEQ ID NO: 950439 - RNA, 19 nt, Artificial Sequence
  Description of Artificial Sequence: Synthetic oligonucleotide
  Antisense strand to SEQ ID NO: 950438
gugauucagcacuuaaagc

SEQ ID NO: 950440 - RNA, 19 nt, Artificial Sequence
  Description of Artificial Sequence: Synthetic oligonucleotide
  Sense strand starting at position 681 of SEQ ID NO: 913742
gcauaucuaggcuggauua

SEQ ID NO: 950441 - RNA, 19 nt, Artificial Sequence
  Description of Artificial Sequence: Synthetic oligonucleotide
  Antisense strand to SEQ ID NO: 950440
uaauccagccuagauaugc

SEQ ID NO: 950442 - RNA, 19 nt, Artificial Sequence
  Description of Artificial Sequence: Synthetic oligonucleotide
  Sense strand starting at position 3155 of SEQ ID NO: 913742
cuccucugagaguguuaau

SEQ ID NO: 950443 - RNA, 19 nt, Artificial Sequence
  Description of Artificial Sequence: Synthetic oligonucleotide
  Antisense strand to SEQ ID NO: 950442
auuaacacucucagaggag

SEQ ID NO: 950444 - RNA, 19 nt, Artificial Sequence
  Description of Artificial Sequence: Synthetic oligonucleotide
  Sense strand starting at position 590 of SEQ ID NO: 913742
caggacuuguguccuucua

SEQ ID NO: 950445 - RNA, 19 nt, Artificial Sequence
  Description of Artificial Sequence: Synthetic oligonucleotide
  Antisense strand to SEQ ID NO: 950444
uagaaggacacaaguccug

SEQ ID NO: 950446 - RNA, 19 nt, Artificial Sequence
  Description of Artificial Sequence: Synthetic oligonucleotide
  Sense strand starting at position 592 of SEQ ID NO: 913742
ggacuuguguccuucuaau

SEQ ID NO: 950447 - RNA, 19 nt, Artificial Sequence
  Description of Artificial Sequence: Synthetic oligonucleotide
  Antisense strand to SEQ ID NO: 950446
auuagaaggacacaagucc

SEQ ID NO: 950448 - RNA, 19 nt, Artificial Sequence
  Description of Artificial Sequence: Synthetic oligonucleotide
  Sense strand starting at position 3319 of SEQ ID NO: 913742
ucagaagauuacuauagag

SEQ ID NO: 950449 - RNA, 19 nt, Artificial Sequence
  Description of Artificial Sequence: Synthetic oligonucleotide
  Antisense strand to SEQ ID NO: 950448
cucuauaguaaucuucuga

SEQ ID NO: 950450 - RNA, 19 nt, Artificial Sequence
  Description of Artificial Sequence: Synthetic oligonucleotide
  Sense strand starting at position 648 of SEQ ID NO: 913743
uuaucaucuguagaugauc

SEQ ID NO: 950451 - RNA, 19 nt, Artificial Sequence
  Description of Artificial Sequence: Synthetic oligonucleotide
  Antisense strand to SEQ ID NO: 950450
gaucaucuacagaugauaa

SEQ ID NO: 950452 - RNA, 19 nt, Artificial Sequence
  Description of Artificial Sequence: Synthetic oligonucleotide
  Sense strand starting at position 1155 of SEQ ID NO: 913743
gcgggaacacaucauccaa

SEQ ID NO: 950453 - RNA, 19 nt, Artificial Sequence
  Description of Artificial Sequence: Synthetic oligonucleotide
  Antisense strand to SEQ ID NO: 950452
uuggaugauguguucccgc

SEQ ID NO: 950454 - RNA, 19 nt, Artificial Sequence
  Description of Artificial Sequence: Synthetic oligonucleotide
  Sense strand starting at position 704 of SEQ ID NO: 913743
aguugugcuguauuguuua

SEQ ID NO: 950455 - RNA, 19 nt, Artificial Sequence
  Description of Artificial Sequence: Synthetic oligonucleotide
  Antisense strand to SEQ ID NO: 950454
uaaacaauacagcacaacu

SEQ ID NO: 950456 - RNA, 19 nt, Artificial Sequence
  Description of Artificial Sequence: Synthetic oligonucleotide
  Sense strand starting at position 2822 of SEQ ID NO: 913743
gcgccuagcccucuaaacu

SEQ ID NO: 950457 - RNA, 19 nt, Artificial Sequence
  Description of Artificial Sequence: Synthetic oligonucleotide
  Antisense strand to SEQ ID NO: 950456
aguuuagagggcuaggcgc

SEQ ID NO: 950458 - RNA, 19 nt, Artificial Sequence
  Description of Artificial Sequence: Synthetic oligonucleotide
  Sense strand starting at position 561 of SEQ ID NO: 913743
gcgcacucugcuuccacaa

SEQ ID NO: 950459 - RNA, 19 nt, Artificial Sequence
  Description of Artificial Sequence: Synthetic oligonucleotide
  Antisense strand to SEQ ID NO: 950458
uuguggaagcagagugcgc

SEQ ID NO: 950460 - RNA, 19 nt, Artificial Sequence
  Description of Artificial Sequence: Synthetic oligonucleotide
  Sense strand starting at position 631 of SEQ ID NO: 913743
gcgggccgaacguuaaauu

SEQ ID NO: 950461 - RNA, 19 nt, Artificial Sequence
  Description of Artificial Sequence: Synthetic oligonucleotide
  Antisense strand to SEQ ID NO: 950460
aauuuaacguucggcccgc

SEQ ID NO: 950462 - RNA, 19 nt, Artificial Sequence
  Description of Artificial Sequence: Synthetic oligonucleotide
  Sense strand starting at position 2483 of SEQ ID NO: 913743
ggguguuccacgcuauguu

SEQ ID NO: 950463 - RNA, 19 nt, Artificial Sequence
  Description of Artificial Sequence: Synthetic oligonucleotide
  Antisense strand to SEQ ID NO: 950462
aacauagcguggaacaccc

SEQ ID NO: 950464 - RNA, 19 nt, Artificial Sequence
  Description of Artificial Sequence: Synthetic oligonucleotide
  Sense strand starting at position 724 of SEQ ID NO: 913743
agaauaagucuguauaugu

SEQ ID NO: 950465 - RNA, 19 nt, Artificial Sequence
  Description of Artificial Sequence: Synthetic oligonucleotide
  Antisense strand to SEQ ID NO: 950464
acauauacagacuuauucu

SEQ ID NO: 950466 - RNA, 19 nt, Artificial Sequence
  Description of Artificial Sequence: Synthetic oligonucleotide
  Sense strand starting at position 833 of SEQ ID NO: 913743
uguauauuaggugaucacu

SEQ ID NO: 950467 - RNA, 19 nt, Artificial Sequence
  Description of Artificial Sequence: Synthetic oligonucleotide
  Antisense strand to SEQ ID NO: 950466
agugaucaccuaauauaca

SEQ ID NO: 950468 - RNA, 19 nt, Artificial Sequence
  Description of Artificial Sequence: Synthetic oligonucleotide
  Sense strand starting at position 1441 of SEQ ID NO: 913743
guuccuaaaccucagguga

SEQ ID NO: 950469 - RNA, 19 nt, Artificial Sequence
  Description of Artificial Sequence: Synthetic oligonucleotide
  Antisense strand to SEQ ID NO: 950468
ucaccugagguuuaggaac

SEQ ID NO: 950470 - RNA, 19 nt, Artificial Sequence
  Description of Artificial Sequence: Synthetic oligonucleotide
  Sense strand starting at position 722 of SEQ ID NO: 913743
acagaauaagucuguauau

SEQ ID NO: 950471 - RNA, 19 nt, Artificial Sequence
  Description of Artificial Sequence: Synthetic oligonucleotide
  Antisense strand to SEQ ID NO: 950470
auauacagacuuauucugu

SEQ ID NO: 950472 - RNA, 19 nt, Artificial Sequence
  Description of Artificial Sequence: Synthetic oligonucleotide
  Sense strand starting at position 723 of SEQ ID NO: 913743
cagaauaagucuguauaug

SEQ ID NO: 950473 - RNA, 19 nt, Artificial Sequence
  Description of Artificial Sequence: Synthetic oligonucleotide
  Antisense strand to SEQ ID NO: 950472
cauauacagacuuauucug

SEQ ID NO: 950474 - RNA, 19 nt, Artificial Sequence
  Description of Artificial Sequence: Synthetic oligonucleotide
  Sense strand starting at position 656 of SEQ ID NO: 913743
uguagaugaucucuuauag

SEQ ID NO: 950475 - RNA, 19 nt, Artificial Sequence
  Description of Artificial Sequence: Synthetic oligonucleotide
  Antisense strand to SEQ ID NO: 950474
cuauaagagaucaucuaca

SEQ ID NO: 950476 - RNA, 19 nt, Artificial Sequence
  Description of Artificial Sequence: Synthetic oligonucleotide
  Sense strand starting at position 2504 of SEQ ID NO: 913743
gaguguucgcuuucgaggu

SEQ ID NO: 950477 - RNA, 19 nt, Artificial Sequence
  Description of Artificial Sequence: Synthetic oligonucleotide
  Antisense strand to SEQ ID NO: 950476
accucgaaagcgaacacuc

SEQ ID NO: 950478 - RNA, 19 nt, Artificial Sequence
  Description of Artificial Sequence: Synthetic oligonucleotide
  Sense strand starting at position 1226 of SEQ ID NO: 913743
gcuccauucccaggagaag

SEQ ID NO: 950479 - RNA, 19 nt, Artificial Sequence
  Description of Artificial Sequence: Synthetic oligonucleotide
  Antisense strand to SEQ ID NO: 950478
cuucuccugggaauggagc

SEQ ID NO: 950480 - RNA, 19 nt, Artificial Sequence
  Description of Artificial Sequence: Synthetic oligonucleotide
  Sense strand starting at position 3388 of SEQ ID NO: 913743
aggccaaaguauucuaaua

SEQ ID NO: 950481 - RNA, 19 nt, Artificial Sequence
  Description of Artificial Sequence: Synthetic oligonucleotide
  Antisense strand to SEQ ID NO: 950480
uauuagaauacuuuggccu

SEQ ID NO: 950482 - RNA, 19 nt, Artificial Sequence
  Description of Artificial Sequence: Synthetic oligonucleotide
  Sense strand starting at position 653 of SEQ ID NO: 913743
aucuguagaugaucucuua

SEQ ID NO: 950483 - RNA, 19 nt, Artificial Sequence
  Description of Artificial Sequence: Synthetic oligonucleotide
  Antisense strand to SEQ ID NO: 950482
uaagagaucaucuacagau

SEQ ID NO: 950484 - RNA, 19 nt, Artificial Sequence
  Description of Artificial Sequence: Synthetic oligonucleotide
  Sense strand starting at position 568 of SEQ ID NO: 913743
cugcuuccacaaugaugaa

SEQ ID NO: 950485 - RNA, 19 nt, Artificial Sequence
  Description of Artificial Sequence: Synthetic oligonucleotide
  Antisense strand to SEQ ID NO: 950484
uucaucauuguggaagcag

SEQ ID NO: 950486 - RNA, 19 nt, Artificial Sequence
  Description of Artificial Sequence: Synthetic oligonucleotide
  Sense strand starting at position 831 of SEQ ID NO: 913743
acuguauauuaggugauca

SEQ ID NO: 950487 - RNA, 19 nt, Artificial Sequence
  Description of Artificial Sequence: Synthetic oligonucleotide
  Antisense strand to SEQ ID NO: 950486
ugaucaccuaauauacagu

SEQ ID NO: 950488 - RNA, 19 nt, Artificial Sequence
  Description of Artificial Sequence: Synthetic oligonucleotide
  Sense strand starting at position 823 of SEQ ID NO: 913743
guaggccaacuguauauua

SEQ ID NO: 950489 - RNA, 19 nt, Artificial Sequence
  Description of Artificial Sequence: Synthetic oligonucleotide
  Antisense strand to SEQ ID NO: 950488
uaauauacaguuggccuac

SEQ ID NO: 950490 - RNA, 19 nt, Artificial Sequence
  Description of Artificial Sequence: Synthetic oligonucleotide
  Sense strand starting at position 642 of SEQ ID NO: 913743
guuaaauuaucaucuguag

SEQ ID NO: 950491 - RNA, 19 nt, Artificial Sequence
  Description of Artificial Sequence: Synthetic oligonucleotide
  Antisense strand to SEQ ID NO: 950490
cuacagaugauaauuuaac

SEQ ID NO: 950492 - RNA, 19 nt, Artificial Sequence
  Description of Artificial Sequence: Synthetic oligonucleotide
  Sense strand starting at position 444 of SEQ ID NO: 913743
guccuuugucuacaccaca

SEQ ID NO: 950493 - RNA, 19 nt, Artificial Sequence
  Description of Artificial Sequence: Synthetic oligonucleotide
  Antisense strand to SEQ ID NO: 950492
ugugguguagacaaaggac

SEQ ID NO: 950494 - RNA, 19 nt, Artificial Sequence
  Description of Artificial Sequence: Synthetic oligonucleotide
  Sense strand starting at position 709 of SEQ ID NO: 913743
ugcuguauuguuuacagaa

SEQ ID NO: 950495 - RNA, 19 nt, Artificial Sequence
  Description of Artificial Sequence: Synthetic oligonucleotide
  Antisense strand to SEQ ID NO: 950494
uucuguaaacaauacagca

SEQ ID NO: 950496 - RNA, 19 nt, Artificial Sequence
  Description of Artificial Sequence: Synthetic oligonucleotide
  Sense strand starting at position 607 of SEQ ID NO: 913743
uccaaaguaucccuguuaa

SEQ ID NO: 950497 - RNA, 19 nt, Artificial Sequence
  Description of Artificial Sequence: Synthetic oligonucleotide
  Antisense strand to SEQ ID NO: 950496
uuaacagggauacuuugga

SEQ ID NO: 950498 - RNA, 19 nt, Artificial Sequence
  Description of Artificial Sequence: Synthetic oligonucleotide
  Sense strand starting at position 852 of SEQ ID NO: 913743
aagauagguuucguuacua

SEQ ID NO: 950499 - RNA, 19 nt, Artificial Sequence
  Description of Artificial Sequence: Synthetic oligonucleotide
  Antisense strand to SEQ ID NO: 950498
uaguaacgaaaccuaucuu

SEQ ID NO: 950500 - RNA, 19 nt, Artificial Sequence
  Description of Artificial Sequence: Synthetic oligonucleotide
  Sense strand starting at position 2406 of SEQ ID NO: 913743
cucguaugucuagaacgau

SEQ ID NO: 950501 - RNA, 19 nt, Artificial Sequence
  Description of Artificial Sequence: Synthetic oligonucleotide
  Antisense strand to SEQ ID NO: 950500
aucguucuagacauacgag

SEQ ID NO: 950502 - RNA, 19 nt, Artificial Sequence
  Description of Artificial Sequence: Synthetic oligonucleotide
  Sense strand starting at position 1917 of SEQ ID NO: 913743
acacaaucucgccaagcuu

SEQ ID NO: 950503 - RNA, 19 nt, Artificial Sequence
  Description of Artificial Sequence: Synthetic oligonucleotide
  Antisense strand to SEQ ID NO: 950502
aagcuuggcgagauugugu

SEQ ID NO: 950504 - RNA, 19 nt, Artificial Sequence
  Description of Artificial Sequence: Synthetic oligonucleotide
  Sense strand starting at position 2521 of SEQ ID NO: 913743
guacaugacuacguucuaa

SEQ ID NO: 950505 - RNA, 19 nt, Artificial Sequence
  Description of Artificial Sequence: Synthetic oligonucleotide
  Antisense strand to SEQ ID NO: 950504
uuagaacguagucauguac

SEQ ID NO: 950506 - RNA, 19 nt, Artificial Sequence
  Description of Artificial Sequence: Synthetic oligonucleotide
  Sense strand starting at position 1116 of SEQ ID NO: 913743
acgucuauuuaugcguuua

SEQ ID NO: 950507 - RNA, 19 nt, Artificial Sequence
  Description of Artificial Sequence: Synthetic oligonucleotide
  Antisense strand to SEQ ID NO: 950506
uaaacgcauaaauagacgu

SEQ ID NO: 950508 - RNA, 19 nt, Artificial Sequence
  Description of Artificial Sequence: Synthetic oligonucleotide
  Sense strand starting at position 1117 of SEQ ID NO: 913743
cgucuauuuaugcguuuaa

SEQ ID NO: 950509 - RNA, 19 nt, Artificial Sequence
  Description of Artificial Sequence: Synthetic oligonucleotide
  Antisense strand to SEQ ID NO: 950508
uuaaacgcauaaauagacg

SEQ ID NO: 950510 - RNA, 19 nt, Artificial Sequence
  Description of Artificial Sequence: Synthetic oligonucleotide
  Sense strand starting at position 2520 of SEQ ID NO: 913743
gguacaugacuacguucua

SEQ ID NO: 950511 - RNA, 19 nt, Artificial Sequence
  Description of Artificial Sequence: Synthetic oligonucleotide
  Antisense strand to SEQ ID NO: 950510
uagaacguagucauguacc

SEQ ID NO: 950512 - RNA, 19 nt, Artificial Sequence
  Description of Artificial Sequence: Synthetic oligonucleotide
  Sense strand starting at position 632 of SEQ ID NO: 913743
cgggccgaacguuaaauua

SEQ ID NO: 950513 - RNA, 19 nt, Artificial Sequence
  Description of Artificial Sequence: Synthetic oligonucleotide
  Antisense strand to SEQ ID NO: 950512
uaauuuaacguucggcccg

SEQ ID NO: 950514 - RNA, 19 nt, Artificial Sequence
  Description of Artificial Sequence: Synthetic oligonucleotide
  Sense strand starting at position 2510 of SEQ ID NO: 913743
ucgcuuucgagguacauga

SEQ ID NO: 950515 - RNA, 19 nt, Artificial Sequence
  Description of Artificial Sequence: Synthetic oligonucleotide
  Antisense strand to SEQ ID NO: 950514
ucauguaccucgaaagcga

SEQ ID NO: 950516 - RNA, 19 nt, Artificial Sequence
  Description of Artificial Sequence: Synthetic oligonucleotide
  Sense strand starting at position 856 of SEQ ID NO: 913743
uagguuucguuacuacaua

SEQ ID NO: 950517 - RNA, 19 nt, Artificial Sequence
  Description of Artificial Sequence: Synthetic oligonucleotide
  Antisense strand to SEQ ID NO: 950516
uauguaguaacgaaaccua

SEQ ID NO: 950518 - RNA, 19 nt, Artificial Sequence
  Description of Artificial Sequence: Synthetic oligonucleotide
  Sense strand starting at position 2525 of SEQ ID NO: 913743
augacuacguucuaaauuu

SEQ ID NO: 950519 - RNA, 19 nt, Artificial Sequence
  Description of Artificial Sequence: Synthetic oligonucleotide
  Antisense strand to SEQ ID NO: 950518
aaauuuagaacguagucau

SEQ ID NO: 950520 - RNA, 19 nt, Artificial Sequence
  Description of Artificial Sequence: Synthetic oligonucleotide
  Sense strand starting at position 777 of SEQ ID NO: 913743
uaaugugcaguugguuaaa

SEQ ID NO: 950521 - RNA, 19 nt, Artificial Sequence
  Description of Artificial Sequence: Synthetic oligonucleotide
  Antisense strand to SEQ ID NO: 950520
uuuaaccaacugcacauua

SEQ ID NO: 950522 - RNA, 19 nt, Artificial Sequence
  Description of Artificial Sequence: Synthetic oligonucleotide
  Sense strand starting at position 2823 of SEQ ID NO: 913743
cgccuagcccucuaaacuu

SEQ ID NO: 950523 - RNA, 19 nt, Artificial Sequence
  Description of Artificial Sequence: Synthetic oligonucleotide
  Antisense strand to SEQ ID NO: 950522
aaguuuagagggcuaggcg

SEQ ID NO: 950524 - RNA, 19 nt, Artificial Sequence
  Description of Artificial Sequence: Synthetic oligonucleotide
  Sense strand starting at position 698 of SEQ ID NO: 913743
auaaauaguugugcuguau

SEQ ID NO: 950525 - RNA, 19 nt, Artificial Sequence
  Description of Artificial Sequence: Synthetic oligonucleotide
  Antisense strand to SEQ ID NO: 950524
auacagcacaacuauuuau

SEQ ID NO: 950526 - RNA, 19 nt, Artificial Sequence
  Description of Artificial Sequence: Synthetic oligonucleotide
  Sense strand starting at position 2401 of SEQ ID NO: 913743
gaguucucguaugucuaga

SEQ ID NO: 950527 - RNA, 19 nt, Artificial Sequence
  Description of Artificial Sequence: Synthetic oligonucleotide
  Antisense strand to SEQ ID NO: 950526
ucuagacauacgagaacuc

SEQ ID NO: 950528 - RNA, 19 nt, Artificial Sequence
  Description of Artificial Sequence: Synthetic oligonucleotide
  Sense strand starting at position 2797 of SEQ ID NO: 913743
gcugagauuccggguguga

SEQ ID NO: 950529 - RNA, 19 nt, Artificial Sequence
  Description of Artificial Sequence: Synthetic oligonucleotide
  Antisense strand to SEQ ID NO: 950528
ucacacccggaaucucagc

SEQ ID NO: 950530 - RNA, 19 nt, Artificial Sequence
  Description of Artificial Sequence: Synthetic oligonucleotide
  Sense strand starting at position 3772 of SEQ ID NO: 913744
gacaguugaugaccuauaa

SEQ ID NO: 950531 - RNA, 19 nt, Artificial Sequence
  Description of Artificial Sequence: Synthetic oligonucleotide
  Antisense strand to SEQ ID NO: 950530
uuauaggucaucaacuguc

SEQ ID NO: 950532 - RNA, 19 nt, Artificial Sequence
  Description of Artificial Sequence: Synthetic oligonucleotide
  Sense strand starting at position 1277 of SEQ ID NO: 913744
uggaucagacguggagaaa

SEQ ID NO: 950533 - RNA, 19 nt, Artificial Sequence
  Description of Artificial Sequence: Synthetic oligonucleotide
  Antisense strand to SEQ ID NO: 950532
uuucuccacgucugaucca

SEQ ID NO: 950534 - RNA, 19 nt, Artificial Sequence
  Description of Artificial Sequence: Synthetic oligonucleotide
  Sense strand starting at position 3515 of SEQ ID NO: 913744
ugggaucgucaccaccaaa

SEQ ID NO: 950535 - RNA, 19 nt, Artificial Sequence
  Description of Artificial Sequence: Synthetic oligonucleotide
  Antisense strand to SEQ ID NO: 950534
uuugguggugacgauccca

SEQ ID NO: 950536 - RNA, 19 nt, Artificial Sequence
  Description of Artificial Sequence: Synthetic oligonucleotide
  Sense strand starting at position 3205 of SEQ ID NO: 913744
ugaauuaggcuuugaggaa

SEQ ID NO: 950537 - RNA, 19 nt, Artificial Sequence
  Description of Artificial Sequence: Synthetic oligonucleotide
  Antisense strand to SEQ ID NO: 950536
uuccucaaagccuaauuca

SEQ ID NO: 950538 - RNA, 19 nt, Artificial Sequence
  Description of Artificial Sequence: Synthetic oligonucleotide
  Sense strand starting at position 188 of SEQ ID NO: 913744
aggaaagucugacuuuacu

SEQ ID NO: 950539 - RNA, 19 nt, Artificial Sequence
  Description of Artificial Sequence: Synthetic oligonucleotide
  Antisense strand to SEQ ID NO: 950538
aguaaagucagacuuuccu

SEQ ID NO: 950540 - RNA, 19 nt, Artificial Sequence
  Description of Artificial Sequence: Synthetic oligonucleotide
  Sense strand starting at position 1368 of SEQ ID NO: 913744
aggugaagaucuucucaca

SEQ ID NO: 950541 - RNA, 19 nt, Artificial Sequence
  Description of Artificial Sequence: Synthetic oligonucleotide
  Antisense strand to SEQ ID NO: 950540
ugugagaagaucuucaccu

SEQ ID NO: 950542 - RNA, 19 nt, Artificial Sequence
  Description of Artificial Sequence: Synthetic oligonucleotide
  Sense strand starting at position 1276 of SEQ ID NO: 913744
cuggaucagacguggagaa

SEQ ID NO: 950543 - RNA, 19 nt, Artificial Sequence
  Description of Artificial Sequence: Synthetic oligonucleotide
  Antisense strand to SEQ ID NO: 950542
uucuccacgucugauccag

SEQ ID NO: 950544 - RNA, 19 nt, Artificial Sequence
  Description of Artificial Sequence: Synthetic oligonucleotide
  Sense strand starting at position 2714 of SEQ ID NO: 913744
aaaccaauguguuuggaag

SEQ ID NO: 950545 - RNA, 19 nt, Artificial Sequence
  Description of Artificial Sequence: Synthetic oligonucleotide
  Antisense strand to SEQ ID NO: 950544
cuuccaaacacauugguuu

SEQ ID NO: 950546 - RNA, 19 nt, Artificial Sequence
  Description of Artificial Sequence: Synthetic oligonucleotide
  Sense strand starting at position 142 of SEQ ID NO: 913744
ggcuuaagauggucaaaga

SEQ ID NO: 950547 - RNA, 19 nt, Artificial Sequence
  Description of Artificial Sequence: Synthetic oligonucleotide
  Antisense strand to SEQ ID NO: 950546
ucuuugaccaucuuaagcc

SEQ ID NO: 950548 - RNA, 19 nt, Artificial Sequence
  Description of Artificial Sequence: Synthetic oligonucleotide
  Sense strand starting at position 1842 of SEQ ID NO: 913744
gacuuaaugcauggacaug

SEQ ID NO: 950549 - RNA, 19 nt, Artificial Sequence
  Description of Artificial Sequence: Synthetic oligonucleotide
  Antisense strand to SEQ ID NO: 950548
cauguccaugcauuaaguc

SEQ ID NO: 950550 - RNA, 19 nt, Artificial Sequence
  Description of Artificial Sequence: Synthetic oligonucleotide
  Sense strand starting at position 2715 of SEQ ID NO: 913744
aaccaauguguuuggaaga

SEQ ID NO: 950551 - RNA, 19 nt, Artificial Sequence
  Description of Artificial Sequence: Synthetic oligonucleotide
  Antisense strand to SEQ ID NO: 950550
ucuuccaaacacauugguu

SEQ ID NO: 950552 - RNA, 19 nt, Artificial Sequence
  Description of Artificial Sequence: Synthetic oligonucleotide
  Sense strand starting at position 3739 of SEQ ID NO: 913744
uuucuuaagagagguuaug

SEQ ID NO: 950553 - RNA, 19 nt, Artificial Sequence
  Description of Artificial Sequence: Synthetic oligonucleotide
  Antisense strand to SEQ ID NO: 950552
cauaaccucucuuaagaaa

SEQ ID NO: 950554 - RNA, 19 nt, Artificial Sequence
  Description of Artificial Sequence: Synthetic oligonucleotide
  Sense strand starting at position 1072 of SEQ ID NO: 913744
acgggaaaucuuggguaca

SEQ ID NO: 950555 - RNA, 19 nt, Artificial Sequence
  Description of Artificial Sequence: Synthetic oligonucleotide
  Antisense strand to SEQ ID NO: 950554
uguacccaagauuucccgu

SEQ ID NO: 950556 - RNA, 19 nt, Artificial Sequence
  Description of Artificial Sequence: Synthetic oligonucleotide
  Sense strand starting at position 2951 of SEQ ID NO: 913744
agcagugauggguaauauu

SEQ ID NO: 950557 - RNA, 19 nt, Artificial Sequence
  Description of Artificial Sequence: Synthetic oligonucleotide
  Antisense strand to SEQ ID NO: 950556
aauauuacccaucacugcu

SEQ ID NO: 950558 - RNA, 19 nt, Artificial Sequence
  Description of Artificial Sequence: Synthetic oligonucleotide
  Sense strand starting at position 2720 of SEQ ID NO: 913744
auguguuuggaagagcuaa

SEQ ID NO: 950559 - RNA, 19 nt, Artificial Sequence
  Description of Artificial Sequence: Synthetic oligonucleotide
  Antisense strand to SEQ ID NO: 950558
uuagcucuuccaaacacau

SEQ ID NO: 950560 - RNA, 19 nt, Artificial Sequence
  Description of Artificial Sequence: Synthetic oligonucleotide
  Sense strand starting at position 177 of SEQ ID NO: 913744
ggaguuaaagcaggaaagu

SEQ ID NO: 950561 - RNA, 19 nt, Artificial Sequence
  Description of Artificial Sequence: Synthetic oligonucleotide
  Antisense strand to SEQ ID NO: 950560
acuuuccugcuuuaacucc

SEQ ID NO: 950562 - RNA, 19 nt, Artificial Sequence
  Description of Artificial Sequence: Synthetic oligonucleotide
  Sense strand starting at position 1970 of SEQ ID NO: 913744
uggagacuccuggguauca

SEQ ID NO: 950563 - RNA, 19 nt, Artificial Sequence
  Description of Artificial Sequence: Synthetic oligonucleotide
  Antisense strand to SEQ ID NO: 950562
ugauacccaggagucucca

SEQ ID NO: 950564 - RNA, 19 nt, Artificial Sequence
  Description of Artificial Sequence: Synthetic oligonucleotide
  Sense strand starting at position 3105 of SEQ ID NO: 913744
aauaaauggucuguuugaa

SEQ ID NO: 950565 - RNA, 19 nt, Artificial Sequence
  Description of Artificial Sequence: Synthetic oligonucleotide
  Antisense strand to SEQ ID NO: 950564
uucaaacagaccauuuauu

SEQ ID NO: 950566 - RNA, 19 nt, Artificial Sequence
  Description of Artificial Sequence: Synthetic oligonucleotide
  Sense strand starting at position 1202 of SEQ ID NO: 913744
cgagguaaacuguagguaa

SEQ ID NO: 950567 - RNA, 19 nt, Artificial Sequence
  Description of Artificial Sequence: Synthetic oligonucleotide
  Antisense strand to SEQ ID NO: 950566
uuaccuacaguuuaccucg

SEQ ID NO: 950568 - RNA, 19 nt, Artificial Sequence
  Description of Artificial Sequence: Synthetic oligonucleotide
  Sense strand starting at position 3580 of SEQ ID NO: 913744
aaggaauugucauucucug

SEQ ID NO: 950569 - RNA, 19 nt, Artificial Sequence
  Description of Artificial Sequence: Synthetic oligonucleotide
  Antisense strand to SEQ ID NO: 950568
cagagaaugacaauuccuu

SEQ ID NO: 950570 - RNA, 19 nt, Artificial Sequence
  Description of Artificial Sequence: Synthetic oligonucleotide
  Sense strand starting at position 28 of SEQ ID NO: 913744
gaucauuaugcaugacaug

SEQ ID NO: 950571 - RNA, 19 nt, Artificial Sequence
  Description of Artificial Sequence: Synthetic oligonucleotide
  Antisense strand to SEQ ID NO: 950570
caugucaugcauaaugauc

SEQ ID NO: 950572 - RNA, 19 nt, Artificial Sequence
  Description of Artificial Sequence: Synthetic oligonucleotide
  Sense strand starting at position 1841 of SEQ ID NO: 913744
ugacuuaaugcauggacau

SEQ ID NO: 950573 - RNA, 19 nt, Artificial Sequence
  Description of Artificial Sequence: Synthetic oligonucleotide
  Antisense strand to SEQ ID NO: 950572
auguccaugcauuaaguca

SEQ ID NO: 950574 - RNA, 19 nt, Artificial Sequence
  Description of Artificial Sequence: Synthetic oligonucleotide
  Sense strand starting at position 1979 of SEQ ID NO: 913744
cuggguaucagauguggaa

SEQ ID NO: 950575 - RNA, 19 nt, Artificial Sequence
  Description of Artificial Sequence: Synthetic oligonucleotide
  Antisense strand to SEQ ID NO: 950574
uuccacaucugauacccag

SEQ ID NO: 950576 - RNA, 19 nt, Artificial Sequence
  Description of Artificial Sequence: Synthetic oligonucleotide
  Sense strand starting at position 1981 of SEQ ID NO: 913744
ggguaucagauguggaacu

SEQ ID NO: 950577 - RNA, 19 nt, Artificial Sequence
  Description of Artificial Sequence: Synthetic oligonucleotide
  Antisense strand to SEQ ID NO: 950576
aguuccacaucugauaccc

SEQ ID NO: 950578 - RNA, 19 nt, Artificial Sequence
  Description of Artificial Sequence: Synthetic oligonucleotide
  Sense strand starting at position 3776 of SEQ ID NO: 913744
guugaugaccuauaaugcu

SEQ ID NO: 950579 - RNA, 19 nt, Artificial Sequence
  Description of Artificial Sequence: Synthetic oligonucleotide
  Antisense strand to SEQ ID NO: 950578
agcauuauaggucaucaac

SEQ ID NO: 950580 - RNA, 19 nt, Artificial Sequence
  Description of Artificial Sequence: Synthetic oligonucleotide
  Sense strand starting at position 140 of SEQ ID NO: 913744
auggcuuaagauggucaaa

SEQ ID NO: 950581 - RNA, 19 nt, Artificial Sequence
  Description of Artificial Sequence: Synthetic oligonucleotide
  Antisense strand to SEQ ID NO: 950580
uuugaccaucuuaagccau

SEQ ID NO: 950582 - RNA, 19 nt, Artificial Sequence
  Description of Artificial Sequence: Synthetic oligonucleotide
  Sense strand starting at position 2576 of SEQ ID NO: 913744
cuguauauaucaucccaga

SEQ ID NO: 950583 - RNA, 19 nt, Artificial Sequence
  Description of Artificial Sequence: Synthetic oligonucleotide
  Antisense strand to SEQ ID NO: 950582
ucugggaugauauauacag

SEQ ID NO: 950584 - RNA, 19 nt, Artificial Sequence
  Description of Artificial Sequence: Synthetic oligonucleotide
  Sense strand starting at position 1358 of SEQ ID NO: 913744
gcagauucuuaggugaaga

SEQ ID NO: 950585 - RNA, 19 nt, Artificial Sequence
  Description of Artificial Sequence: Synthetic oligonucleotide
  Antisense strand to SEQ ID NO: 950584
ucuucaccuaagaaucugc

SEQ ID NO: 950586 - RNA, 19 nt, Artificial Sequence
  Description of Artificial Sequence: Synthetic oligonucleotide
  Sense strand starting at position 1204 of SEQ ID NO: 913744
agguaaacuguagguaaca

SEQ ID NO: 950587 - RNA, 19 nt, Artificial Sequence
  Description of Artificial Sequence: Synthetic oligonucleotide
  Antisense strand to SEQ ID NO: 950586
uguuaccuacaguuuaccu

SEQ ID NO: 950588 - RNA, 19 nt, Artificial Sequence
  Description of Artificial Sequence: Synthetic oligonucleotide
  Sense strand starting at position 3104 of SEQ ID NO: 913744
gaauaaauggucuguuuga

SEQ ID NO: 950589 - RNA, 19 nt, Artificial Sequence
  Description of Artificial Sequence: Synthetic oligonucleotide
  Antisense strand to SEQ ID NO: 950588
ucaaacagaccauuuauuc

SEQ ID NO: 950590 - RNA, 19 nt, Artificial Sequence
  Description of Artificial Sequence: Synthetic oligonucleotide
  Sense strand starting at position 3403 of SEQ ID NO: 913744
uuauuaucacagcaucgau

SEQ ID NO: 950591 - RNA, 19 nt, Artificial Sequence
  Description of Artificial Sequence: Synthetic oligonucleotide
  Antisense strand to SEQ ID NO: 950590
aucgaugcugugauaauaa

SEQ ID NO: 950592 - RNA, 19 nt, Artificial Sequence
  Description of Artificial Sequence: Synthetic oligonucleotide
  Sense strand starting at position 3721 of SEQ ID NO: 913744
aggcuauaugcggagaauu

SEQ ID NO: 950593 - RNA, 19 nt, Artificial Sequence
  Description of Artificial Sequence: Synthetic oligonucleotide
  Antisense strand to SEQ ID NO: 950592
aauucuccgcauauagccu

SEQ ID NO: 950594 - RNA, 19 nt, Artificial Sequence
  Description of Artificial Sequence: Synthetic oligonucleotide
  Sense strand starting at position 3640 of SEQ ID NO: 913744
uagguugaucuggguacaa

SEQ ID NO: 950595 - RNA, 19 nt, Artificial Sequence
  Description of Artificial Sequence: Synthetic oligonucleotide
  Antisense strand to SEQ ID NO: 950594
uuguacccagaucaaccua

SEQ ID NO: 950596 - RNA, 19 nt, Artificial Sequence
  Description of Artificial Sequence: Synthetic oligonucleotide
  Sense strand starting at position 3055 of SEQ ID NO: 913744
aaaggcuaugccugaaaug

SEQ ID NO: 950597 - RNA, 19 nt, Artificial Sequence
  Description of Artificial Sequence: Synthetic oligonucleotide
  Antisense strand to SEQ ID NO: 950596
cauuucaggcauagccuuu

SEQ ID NO: 950598 - RNA, 19 nt, Artificial Sequence
  Description of Artificial Sequence: Synthetic oligonucleotide
  Sense strand starting at position 3972 of SEQ ID NO: 913744
caaguauuguagguaugaa

SEQ ID NO: 950599 - RNA, 19 nt, Artificial Sequence
  Description of Artificial Sequence: Synthetic oligonucleotide
  Antisense strand to SEQ ID NO: 950598
uucauaccuacaauacuug

SEQ ID NO: 950600 - RNA, 19 nt, Artificial Sequence
  Description of Artificial Sequence: Synthetic oligonucleotide
  Sense strand starting at position 875 of SEQ ID NO: 913744
ugugacccgaccugaaaua

SEQ ID NO: 950601 - RNA, 19 nt, Artificial Sequence
  Description of Artificial Sequence: Synthetic oligonucleotide
  Antisense strand to SEQ ID NO: 950600
uauuucaggucgggucaca

SEQ ID NO: 950602 - RNA, 19 nt, Artificial Sequence
  Description of Artificial Sequence: Synthetic oligonucleotide
  Sense strand starting at position 1033 of SEQ ID NO: 913744
gaaggugaaucaucuguuu

SEQ ID NO: 950603 - RNA, 19 nt, Artificial Sequence
  Description of Artificial Sequence: Synthetic oligonucleotide
  Antisense strand to SEQ ID NO: 950602
aaacagaugauucaccuuc

SEQ ID NO: 950604 - RNA, 19 nt, Artificial Sequence
  Description of Artificial Sequence: Synthetic oligonucleotide
  Sense strand starting at position 412 of SEQ ID NO: 913744
ggaauuuaaucagaugcca

SEQ ID NO: 950605 - RNA, 19 nt, Artificial Sequence
  Description of Artificial Sequence: Synthetic oligonucleotide
  Antisense strand to SEQ ID NO: 950604
uggcaucugauuaaauucc

SEQ ID NO: 950606 - RNA, 19 nt, Artificial Sequence
  Description of Artificial Sequence: Synthetic oligonucleotide
  Sense strand starting at position 3056 of SEQ ID NO: 913744
aaggcuaugccugaaaugu

SEQ ID NO: 950607 - RNA, 19 nt, Artificial Sequence
  Description of Artificial Sequence: Synthetic oligonucleotide
  Antisense strand to SEQ ID NO: 950606
acauuucaggcauagccuu

SEQ ID NO: 950608 - RNA, 19 nt, Artificial Sequence
  Description of Artificial Sequence: Synthetic oligonucleotide
  Sense strand starting at position 1117 of SEQ ID NO: 913744
uccuuuagugacgaguuaa

SEQ ID NO: 950609 - RNA, 19 nt, Artificial Sequence
  Description of Artificial Sequence: Synthetic oligonucleotide
  Antisense strand to SEQ ID NO: 950608
uuaacucgucacuaaagga

SEQ ID NO: 950610 - RNA, 19 nt, Artificial Sequence
  Description of Artificial Sequence: Synthetic oligonucleotide
  Sense strand starting at position 1988 of SEQ ID NO: 913745
ggguguguccuugcaaguu

SEQ ID NO: 950611 - RNA, 19 nt, Artificial Sequence
  Description of Artificial Sequence: Synthetic oligonucleotide
  Antisense strand to SEQ ID NO: 950610
aacuugcaaggacacaccc

SEQ ID NO: 950612 - RNA, 19 nt, Artificial Sequence
  Description of Artificial Sequence: Synthetic oligonucleotide
  Sense strand starting at position 3728 of SEQ ID NO: 913745
cuagauagcaugcagagau

SEQ ID NO: 950613 - RNA, 19 nt, Artificial Sequence
  Description of Artificial Sequence: Synthetic oligonucleotide
  Antisense strand to SEQ ID NO: 950612
aucucugcaugcuaucuag

SEQ ID NO: 950614 - RNA, 19 nt, Artificial Sequence
  Description of Artificial Sequence: Synthetic oligonucleotide
  Sense strand starting at position 3026 of SEQ ID NO: 913745
auuguuguccgggugcauu

SEQ ID NO: 950615 - RNA, 19 nt, Artificial Sequence
  Description of Artificial Sequence: Synthetic oligonucleotide
  Antisense strand to SEQ ID NO: 950614
aaugcacccggacaacaau

SEQ ID NO: 950616 - RNA, 19 nt, Artificial Sequence
  Description of Artificial Sequence: Synthetic oligonucleotide
  Sense strand starting at position 2428 of SEQ ID NO: 913745
caaccaaucugguuuagga

SEQ ID NO: 950617 - RNA, 19 nt, Artificial Sequence
  Description of Artificial Sequence: Synthetic oligonucleotide
  Antisense strand to SEQ ID NO: 950616
uccuaaaccagauugguug

SEQ ID NO: 950618 - RNA, 19 nt, Artificial Sequence
  Description of Artificial Sequence: Synthetic oligonucleotide
  Sense strand starting at position 1732 of SEQ ID NO: 913745
accugaccucacugagauc

SEQ ID NO: 950619 - RNA, 19 nt, Artificial Sequence
  Description of Artificial Sequence: Synthetic oligonucleotide
  Antisense strand to SEQ ID NO: 950618
gaucucagugaggucaggu

SEQ ID NO: 950620 - RNA, 19 nt, Artificial Sequence
  Description of Artificial Sequence: Synthetic oligonucleotide
  Sense strand starting at position 2516 of SEQ ID NO: 913745
ggagguaugguuugaaaua

SEQ ID NO: 950621 - RNA, 19 nt, Artificial Sequence
  Description of Artificial Sequence: Synthetic oligonucleotide
  Antisense strand to SEQ ID NO: 950620
uauuucaaaccauaccucc

SEQ ID NO: 950622 - RNA, 19 nt, Artificial Sequence
  Description of Artificial Sequence: Synthetic oligonucleotide
  Sense strand starting at position 2187 of SEQ ID NO: 913745
ucacguccucccuaaagaa

SEQ ID NO: 950623 - RNA, 19 nt, Artificial Sequence
  Description of Artificial Sequence: Synthetic oligonucleotide
  Antisense strand to SEQ ID NO: 950622
uucuuuagggaggacguga

SEQ ID NO: 950624 - RNA, 19 nt, Artificial Sequence
  Description of Artificial Sequence: Synthetic oligonucleotide
  Sense strand starting at position 1588 of SEQ ID NO: 913745
gggcuauagcaugagguaa

SEQ ID NO: 950625 - RNA, 19 nt, Artificial Sequence
  Description of Artificial Sequence: Synthetic oligonucleotide
  Antisense strand to SEQ ID NO: 950624
uuaccucaugcuauagccc

SEQ ID NO: 950626 - RNA, 19 nt, Artificial Sequence
  Description of Artificial Sequence: Synthetic oligonucleotide
  Sense strand starting at position 2558 of SEQ ID NO: 913745
uggacacugucauucugaa

SEQ ID NO: 950627 - RNA, 19 nt, Artificial Sequence
  Description of Artificial Sequence: Synthetic oligonucleotide
  Antisense strand to SEQ ID NO: 950626
uucagaaugacagugucca

SEQ ID NO: 950628 - RNA, 19 nt, Artificial Sequence
  Description of Artificial Sequence: Synthetic oligonucleotide
  Sense strand starting at position 3441 of SEQ ID NO: 913745
ggcacacugccagaucuaa

SEQ ID NO: 950629 - RNA, 19 nt, Artificial Sequence
  Description of Artificial Sequence: Synthetic oligonucleotide
  Antisense strand to SEQ ID NO: 950628
uuagaucuggcagugugcc

SEQ ID NO: 950630 - RNA, 19 nt, Artificial Sequence
  Description of Artificial Sequence: Synthetic oligonucleotide
  Sense strand starting at position 3849 of SEQ ID NO: 913745
gucucuuugggcuaaacaa

SEQ ID NO: 950631 - RNA, 19 nt, Artificial Sequence
  Description of Artificial Sequence: Synthetic oligonucleotide
  Antisense strand to SEQ ID NO: 950630
uuguuuagcccaaagagac

SEQ ID NO: 950632 - RNA, 19 nt, Artificial Sequence
  Description of Artificial Sequence: Synthetic oligonucleotide
  Sense strand starting at position 3669 of SEQ ID NO: 913745
ggagcaagaugucuuugga

SEQ ID NO: 950633 - RNA, 19 nt, Artificial Sequence
  Description of Artificial Sequence: Synthetic oligonucleotide
  Antisense strand to SEQ ID NO: 950632
uccaaagacaucuugcucc

SEQ ID NO: 950634 - RNA, 19 nt, Artificial Sequence
  Description of Artificial Sequence: Synthetic oligonucleotide
  Sense strand starting at position 3765 of SEQ ID NO: 913745
uugccauugcugugaauuu

SEQ ID NO: 950635 - RNA, 19 nt, Artificial Sequence
  Description of Artificial Sequence: Synthetic oligonucleotide
  Antisense strand to SEQ ID NO: 950634
aaauucacagcaauggcaa

SEQ ID NO: 950636 - RNA, 19 nt, Artificial Sequence
  Description of Artificial Sequence: Synthetic oligonucleotide
  Sense strand starting at position 2617 of SEQ ID NO: 913745
gaguuuaaauaguuagcaa

SEQ ID NO: 950637 - RNA, 19 nt, Artificial Sequence
  Description of Artificial Sequence: Synthetic oligonucleotide
  Antisense strand to SEQ ID NO: 950636
uugcuaacuauuuaaacuc

SEQ ID NO: 950638 - RNA, 19 nt, Artificial Sequence
  Description of Artificial Sequence: Synthetic oligonucleotide
  Sense strand starting at position 2404 of SEQ ID NO: 913745
ugguuucagcuugacggaa

SEQ ID NO: 950639 - RNA, 19 nt, Artificial Sequence
  Description of Artificial Sequence: Synthetic oligonucleotide
  Antisense strand to SEQ ID NO: 950638
uuccgucaagcugaaacca

SEQ ID NO: 950640 - RNA, 19 nt, Artificial Sequence
  Description of Artificial Sequence: Synthetic oligonucleotide
  Sense strand starting at position 2533 of SEQ ID NO: 913745
uagagagcccucuauugcu

SEQ ID NO: 950641 - RNA, 19 nt, Artificial Sequence
  Description of Artificial Sequence: Synthetic oligonucleotide
  Antisense strand to SEQ ID NO: 950640
agcaauagagggcucucua

SEQ ID NO: 950642 - RNA, 19 nt, Artificial Sequence
  Description of Artificial Sequence: Synthetic oligonucleotide
  Sense strand starting at position 3672 of SEQ ID NO: 913745
gcaagaugucuuuggaauu

SEQ ID NO: 950643 - RNA, 19 nt, Artificial Sequence
  Description of Artificial Sequence: Synthetic oligonucleotide
  Antisense strand to SEQ ID NO: 950642
aauuccaaagacaucuugc

SEQ ID NO: 950644 - RNA, 19 nt, Artificial Sequence
  Description of Artificial Sequence: Synthetic oligonucleotide
  Sense strand starting at position 689 of SEQ ID NO: 913745
ucaucauaggccuguaaug

SEQ ID NO: 950645 - RNA, 19 nt, Artificial Sequence
  Description of Artificial Sequence: Synthetic oligonucleotide
  Antisense strand to SEQ ID NO: 950644
cauuacaggccuaugauga

SEQ ID NO: 950646 - RNA, 19 nt, Artificial Sequence
  Description of Artificial Sequence: Synthetic oligonucleotide
  Sense strand starting at position 2138 of SEQ ID NO: 913745
uuucuagugcugcagaaac

SEQ ID NO: 950647 - RNA, 19 nt, Artificial Sequence
  Description of Artificial Sequence: Synthetic oligonucleotide
  Antisense strand to SEQ ID NO: 950646
guuucugcagcacuagaaa

SEQ ID NO: 950648 - RNA, 19 nt, Artificial Sequence
  Description of Artificial Sequence: Synthetic oligonucleotide
  Sense strand starting at position 2709 of SEQ ID NO: 913745
uaaugauucuuggcugggu

SEQ ID NO: 950649 - RNA, 19 nt, Artificial Sequence
  Description of Artificial Sequence: Synthetic oligonucleotide
  Antisense strand to SEQ ID NO: 950648
acccagccaagaaucauua

SEQ ID NO: 950650 - RNA, 19 nt, Artificial Sequence
  Description of Artificial Sequence: Synthetic oligonucleotide
  Sense strand starting at position 1587 of SEQ ID NO: 913745
ugggcuauagcaugaggua

SEQ ID NO: 950651 - RNA, 19 nt, Artificial Sequence
  Description of Artificial Sequence: Synthetic oligonucleotide
  Antisense strand to SEQ ID NO: 950650
uaccucaugcuauagccca

SEQ ID NO: 950652 - RNA, 19 nt, Artificial Sequence
  Description of Artificial Sequence: Synthetic oligonucleotide
  Sense strand starting at position 489 of SEQ ID NO: 913745
auuguuacacgaugcauga

SEQ ID NO: 950653 - RNA, 19 nt, Artificial Sequence
  Description of Artificial Sequence: Synthetic oligonucleotide
  Antisense strand to SEQ ID NO: 950652
ucaugcaucguguaacaau

SEQ ID NO: 950654 - RNA, 19 nt, Artificial Sequence
  Description of Artificial Sequence: Synthetic oligonucleotide
  Sense strand starting at position 1600 of SEQ ID NO: 913745
gagguaagcuuccucaagu

SEQ ID NO: 950655 - RNA, 19 nt, Artificial Sequence
  Description of Artificial Sequence: Synthetic oligonucleotide
  Antisense strand to SEQ ID NO: 950654
acuugaggaagcuuaccuc

SEQ ID NO: 950656 - RNA, 19 nt, Artificial Sequence
  Description of Artificial Sequence: Synthetic oligonucleotide
  Sense strand starting at position 427 of SEQ ID NO: 913745
agguuugauguuugcauaa

SEQ ID NO: 950657 - RNA, 19 nt, Artificial Sequence
  Description of Artificial Sequence: Synthetic oligonucleotide
  Antisense strand to SEQ ID NO: 950656
uuaugcaaacaucaaaccu

SEQ ID NO: 950658 - RNA, 19 nt, Artificial Sequence
  Description of Artificial Sequence: Synthetic oligonucleotide
  Sense strand starting at position 512 of SEQ ID NO: 913745
guaaguaccugccuuauaa

SEQ ID NO: 950659 - RNA, 19 nt, Artificial Sequence
  Description of Artificial Sequence: Synthetic oligonucleotide
  Antisense strand to SEQ ID NO: 950658
uuauaaggcagguacuuac

SEQ ID NO: 950660 - RNA, 19 nt, Artificial Sequence
  Description of Artificial Sequence: Synthetic oligonucleotide
  Sense strand starting at position 1601 of SEQ ID NO: 913745
agguaagcuuccucaaguu

SEQ ID NO: 950661 - RNA, 19 nt, Artificial Sequence
  Description of Artificial Sequence: Synthetic oligonucleotide
  Antisense strand to SEQ ID NO: 950660
aacuugaggaagcuuaccu

SEQ ID NO: 950662 - RNA, 19 nt, Artificial Sequence
  Description of Artificial Sequence: Synthetic oligonucleotide
  Sense strand starting at position 18 of SEQ ID NO: 913745
agcaaaugaguuugccauc

SEQ ID NO: 950663 - RNA, 19 nt, Artificial Sequence
  Description of Artificial Sequence: Synthetic oligonucleotide
  Antisense strand to SEQ ID NO: 950662
gauggcaaacucauuugcu

SEQ ID NO: 950664 - RNA, 19 nt, Artificial Sequence
  Description of Artificial Sequence: Synthetic oligonucleotide
  Sense strand starting at position 1498 of SEQ ID NO: 913745
agaagugaaucugauggga

SEQ ID NO: 950665 - RNA, 19 nt, Artificial Sequence
  Description of Artificial Sequence: Synthetic oligonucleotide
  Antisense strand to SEQ ID NO: 950664
ucccaucagauucacuucu

SEQ ID NO: 950666 - RNA, 19 nt, Artificial Sequence
  Description of Artificial Sequence: Synthetic oligonucleotide
  Sense strand starting at position 500 of SEQ ID NO: 913745
augcaugacuguguaagua

SEQ ID NO: 950667 - RNA, 19 nt, Artificial Sequence
  Description of Artificial Sequence: Synthetic oligonucleotide
  Antisense strand to SEQ ID NO: 950666
uacuuacacagucaugcau

SEQ ID NO: 950668 - RNA, 19 nt, Artificial Sequence
  Description of Artificial Sequence: Synthetic oligonucleotide
  Sense strand starting at position 426 of SEQ ID NO: 913745
uagguuugauguuugcaua

SEQ ID NO: 950669 - RNA, 19 nt, Artificial Sequence
  Description of Artificial Sequence: Synthetic oligonucleotide
  Antisense strand to SEQ ID NO: 950668
uaugcaaacaucaaaccua

SEQ ID NO: 950670 - RNA, 19 nt, Artificial Sequence
  Description of Artificial Sequence: Synthetic oligonucleotide
  Sense strand starting at position 297 of SEQ ID NO: 913745
gcuguacucuauguuuaaa

SEQ ID NO: 950671 - RNA, 19 nt, Artificial Sequence
  Description of Artificial Sequence: Synthetic oligonucleotide
  Antisense strand to SEQ ID NO: 950670
uuuaaacauagaguacagc

SEQ ID NO: 950672 - RNA, 19 nt, Artificial Sequence
  Description of Artificial Sequence: Synthetic oligonucleotide
  Sense strand starting at position 19 of SEQ ID NO: 913745
gcaaaugaguuugccaucu

SEQ ID NO: 950673 - RNA, 19 nt, Artificial Sequence
  Description of Artificial Sequence: Synthetic oligonucleotide
  Antisense strand to SEQ ID NO: 950672
agauggcaaacucauuugc

SEQ ID NO: 950674 - RNA, 19 nt, Artificial Sequence
  Description of Artificial Sequence: Synthetic oligonucleotide
  Sense strand starting at position 499 of SEQ ID NO: 913745
gaugcaugacuguguaagu

SEQ ID NO: 950675 - RNA, 19 nt, Artificial Sequence
  Description of Artificial Sequence: Synthetic oligonucleotide
  Antisense strand to SEQ ID NO: 950674
acuuacacagucaugcauc

SEQ ID NO: 950676 - RNA, 19 nt, Artificial Sequence
  Description of Artificial Sequence: Synthetic oligonucleotide
  Sense strand starting at position 2403 of SEQ ID NO: 913745
uugguuucagcuugacgga

SEQ ID NO: 950677 - RNA, 19 nt, Artificial Sequence
  Description of Artificial Sequence: Synthetic oligonucleotide
  Antisense strand to SEQ ID NO: 950676
uccgucaagcugaaaccaa

SEQ ID NO: 950678 - RNA, 19 nt, Artificial Sequence
  Description of Artificial Sequence: Synthetic oligonucleotide
  Sense strand starting at position 3832 of SEQ ID NO: 913745
ucagaaucuugcuuagugu

SEQ ID NO: 950679 - RNA, 19 nt, Artificial Sequence
  Description of Artificial Sequence: Synthetic oligonucleotide
  Antisense strand to SEQ ID NO: 950678
acacuaagcaagauucuga

SEQ ID NO: 950680 - RNA, 19 nt, Artificial Sequence
  Description of Artificial Sequence: Synthetic oligonucleotide
  Sense strand starting at position 144 of SEQ ID NO: 913745
cacuuauugucugugugau

SEQ ID NO: 950681 - RNA, 19 nt, Artificial Sequence
  Description of Artificial Sequence: Synthetic oligonucleotide
  Antisense strand to SEQ ID NO: 950680
aucacacagacaauaagug

SEQ ID NO: 950682 - RNA, 19 nt, Artificial Sequence
  Description of Artificial Sequence: Synthetic oligonucleotide
  Sense strand starting at position 150 of SEQ ID NO: 913745
uugucugugugaucuuaac

SEQ ID NO: 950683 - RNA, 19 nt, Artificial Sequence
  Description of Artificial Sequence: Synthetic oligonucleotide
  Antisense strand to SEQ ID NO: 950682
guuaagaucacacagacaa

SEQ ID NO: 950684 - RNA, 19 nt, Artificial Sequence
  Description of Artificial Sequence: Synthetic oligonucleotide
  Sense strand starting at position 156 of SEQ ID NO: 913745
gugugaucuuaacauuucu

SEQ ID NO: 950685 - RNA, 19 nt, Artificial Sequence
  Description of Artificial Sequence: Synthetic oligonucleotide
  Antisense strand to SEQ ID NO: 950684
agaaauguuaagaucacac

SEQ ID NO: 950686 - RNA, 19 nt, Artificial Sequence
  Description of Artificial Sequence: Synthetic oligonucleotide
  Sense strand starting at position 296 of SEQ ID NO: 913745
ugcuguacucuauguuuaa

SEQ ID NO: 950687 - RNA, 19 nt, Artificial Sequence
  Description of Artificial Sequence: Synthetic oligonucleotide
  Antisense strand to SEQ ID NO: 950686
uuaaacauagaguacagca

SEQ ID NO: 950688 - RNA, 19 nt, Artificial Sequence
  Description of Artificial Sequence: Synthetic oligonucleotide
  Sense strand starting at position 1735 of SEQ ID NO: 913745
ugaccucacugagaucuaa

SEQ ID NO: 950689 - RNA, 19 nt, Artificial Sequence
  Description of Artificial Sequence: Synthetic oligonucleotide
  Antisense strand to SEQ ID NO: 950688
uuagaucucagugagguca

SEQ ID NO: 950690 - RNA, 19 nt, Artificial Sequence
  Description of Artificial Sequence: Synthetic oligonucleotide
  Sense strand starting at position 2705 of SEQ ID NO: 913746
aauguagucagagaaugug

SEQ ID NO: 950691 - RNA, 19 nt, Artificial Sequence
  Description of Artificial Sequence: Synthetic oligonucleotide
  Antisense strand to SEQ ID NO: 950690
cacauucucugacuacauu

SEQ ID NO: 950692 - RNA, 19 nt, Artificial Sequence
  Description of Artificial Sequence: Synthetic oligonucleotide
  Sense strand starting at position 3421 of SEQ ID NO: 913746
gcacucagaccugauuaca

SEQ ID NO: 950693 - RNA, 19 nt, Artificial Sequence
  Description of Artificial Sequence: Synthetic oligonucleotide
  Antisense strand to SEQ ID NO: 950692
uguaaucaggucugagugc

SEQ ID NO: 950694 - RNA, 19 nt, Artificial Sequence
  Description of Artificial Sequence: Synthetic oligonucleotide
  Sense strand starting at position 507 of SEQ ID NO: 913746
acucuagcaggucagaaua

SEQ ID NO: 950695 - RNA, 19 nt, Artificial Sequence
  Description of Artificial Sequence: Synthetic oligonucleotide
  Antisense strand to SEQ ID NO: 950694
uauucugaccugcuagagu

SEQ ID NO: 950696 - RNA, 19 nt, Artificial Sequence
  Description of Artificial Sequence: Synthetic oligonucleotide
  Sense strand starting at position 407 of SEQ ID NO: 913746
aagacaggucuacauguuu

SEQ ID NO: 950697 - RNA, 19 nt, Artificial Sequence
  Description of Artificial Sequence: Synthetic oligonucleotide
  Antisense strand to SEQ ID NO: 950696
aaacauguagaccugucuu

SEQ ID NO: 950698 - RNA, 19 nt, Artificial Sequence
  Description of Artificial Sequence: Synthetic oligonucleotide
  Sense strand starting at position 2701 of SEQ ID NO: 913746
augcaauguagucagagaa

SEQ ID NO: 950699 - RNA, 19 nt, Artificial Sequence
  Description of Artificial Sequence: Synthetic oligonucleotide
  Antisense strand to SEQ ID NO: 950698
uucucugacuacauugcau

SEQ ID NO: 950700 - RNA, 19 nt, Artificial Sequence
  Description of Artificial Sequence: Synthetic oligonucleotide
  Sense strand starting at position 2027 of SEQ ID NO: 913746
uuauauaugggagguauau

SEQ ID NO: 950701 - RNA, 19 nt, Artificial Sequence
  Description of Artificial Sequence: Synthetic oligonucleotide
  Antisense strand to SEQ ID NO: 950700
auauaccucccauauauaa

SEQ ID NO: 950702 - RNA, 19 nt, Artificial Sequence
  Description of Artificial Sequence: Synthetic oligonucleotide
  Sense strand starting at position 2809 of SEQ ID NO: 913746
ugaagauuaucuguuacaa

SEQ ID NO: 950703 - RNA, 19 nt, Artificial Sequence
  Description of Artificial Sequence: Synthetic oligonucleotide
  Antisense strand to SEQ ID NO: 950702
uuguaacagauaaucuuca

SEQ ID NO: 950704 - RNA, 19 nt, Artificial Sequence
  Description of Artificial Sequence: Synthetic oligonucleotide
  Sense strand starting at position 1440 of SEQ ID NO: 913746
gggagcaccagccagauau

SEQ ID NO: 950705 - RNA, 19 nt, Artificial Sequence
  Description of Artificial Sequence: Synthetic oligonucleotide
  Antisense strand to SEQ ID NO: 950704
auaucuggcuggugcuccc

SEQ ID NO: 950706 - RNA, 19 nt, Artificial Sequence
  Description of Artificial Sequence: Synthetic oligonucleotide
  Sense strand starting at position 676 of SEQ ID NO: 913746
gcaacaugaucaccuggaa

SEQ ID NO: 950707 - RNA, 19 nt, Artificial Sequence
  Description of Artificial Sequence: Synthetic oligonucleotide
  Antisense strand to SEQ ID NO: 950706
uuccaggugaucauguugc

SEQ ID NO: 950708 - RNA, 19 nt, Artificial Sequence
  Description of Artificial Sequence: Synthetic oligonucleotide
  Sense strand starting at position 2453 of SEQ ID NO: 913746
gaagaaugagguugcagau

SEQ ID NO: 950709 - RNA, 19 nt, Artificial Sequence
  Description of Artificial Sequence: Synthetic oligonucleotide
  Antisense strand to SEQ ID NO: 950708
aucugcaaccucauucuuc

SEQ ID NO: 950710 - RNA, 19 nt, Artificial Sequence
  Description of Artificial Sequence: Synthetic oligonucleotide
  Sense strand starting at position 2522 of SEQ ID NO: 913746
uugagauauuggucuauaa

SEQ ID NO: 950711 - RNA, 19 nt, Artificial Sequence
  Description of Artificial Sequence: Synthetic oligonucleotide
  Antisense strand to SEQ ID NO: 950710
uuauagaccaauaucucaa

SEQ ID NO: 950712 - RNA, 19 nt, Artificial Sequence
  Description of Artificial Sequence: Synthetic oligonucleotide
  Sense strand starting at position 3257 of SEQ ID NO: 913746
augauucuauaauugggua

SEQ ID NO: 950713 - RNA, 19 nt, Artificial Sequence
  Description of Artificial Sequence: Synthetic oligonucleotide
  Antisense strand to SEQ ID NO: 950712
uacccaauuauagaaucau

SEQ ID NO: 950714 - RNA, 19 nt, Artificial Sequence
  Description of Artificial Sequence: Synthetic oligonucleotide
  Sense strand starting at position 1442 of SEQ ID NO: 913746
gagcaccagccagauauua

SEQ ID NO: 950715 - RNA, 19 nt, Artificial Sequence
  Description of Artificial Sequence: Synthetic oligonucleotide
  Antisense strand to SEQ ID NO: 950714
uaauaucuggcuggugcuc

SEQ ID NO: 950716 - RNA, 19 nt, Artificial Sequence
  Description of Artificial Sequence: Synthetic oligonucleotide
  Sense strand starting at position 1474 of SEQ ID NO: 913746
ggugaaggucauggaauua

SEQ ID NO: 950717 - RNA, 19 nt, Artificial Sequence
  Description of Artificial Sequence: Synthetic oligonucleotide
  Antisense strand to SEQ ID NO: 950716
uaauuccaugaccuucacc

SEQ ID NO: 950718 - RNA, 19 nt, Artificial Sequence
  Description of Artificial Sequence: Synthetic oligonucleotide
  Sense strand starting at position 2678 of SEQ ID NO: 913746
ugagcuggucaguagagaa

SEQ ID NO: 950719 - RNA, 19 nt, Artificial Sequence
  Description of Artificial Sequence: Synthetic oligonucleotide
  Antisense strand to SEQ ID NO: 950718
uucucuacugaccagcuca

SEQ ID NO: 950720 - RNA, 19 nt, Artificial Sequence
  Description of Artificial Sequence: Synthetic oligonucleotide
  Sense strand starting at position 3240 of SEQ ID NO: 913746
gcugucaggaagcagaaau

SEQ ID NO: 950721 - RNA, 19 nt, Artificial Sequence
  Description of Artificial Sequence: Synthetic oligonucleotide
  Antisense strand to SEQ ID NO: 950720
auuucugcuuccugacagc

SEQ ID NO: 950722 - RNA, 19 nt, Artificial Sequence
  Description of Artificial Sequence: Synthetic oligonucleotide
  Sense strand starting at position 2160 of SEQ ID NO: 913746
gaggaugggugugugagaa

SEQ ID NO: 950723 - RNA, 19 nt, Artificial Sequence
  Description of Artificial Sequence: Synthetic oligonucleotide
  Antisense strand to SEQ ID NO: 950722
uucucacacacccauccuc

SEQ ID NO: 950724 - RNA, 19 nt, Artificial Sequence
  Description of Artificial Sequence: Synthetic oligonucleotide
  Sense strand starting at position 3059 of SEQ ID NO: 913746
gcgauuucccucugaguga

SEQ ID NO: 950725 - RNA, 19 nt, Artificial Sequence
  Description of Artificial Sequence: Synthetic oligonucleotide
  Antisense strand to SEQ ID NO: 950724
ucacucagagggaaaucgc

SEQ ID NO: 950726 - RNA, 19 nt, Artificial Sequence
  Description of Artificial Sequence: Synthetic oligonucleotide
  Sense strand starting at position 2159 of SEQ ID NO: 913746
agaggaugggugugugaga

SEQ ID NO: 950727 - RNA, 19 nt, Artificial Sequence
  Description of Artificial Sequence: Synthetic oligonucleotide
  Antisense strand to SEQ ID NO: 950726
ucucacacacccauccucu

SEQ ID NO: 950728 - RNA, 19 nt, Artificial Sequence
  Description of Artificial Sequence: Synthetic oligonucleotide
  Sense strand starting at position 2884 of SEQ ID NO: 913746
auaugaucccaaggcugau

SEQ ID NO: 950729 - RNA, 19 nt, Artificial Sequence
  Description of Artificial Sequence: Synthetic oligonucleotide
  Antisense strand to SEQ ID NO: 950728
aucagccuugggaucauau

SEQ ID NO: 950730 - RNA, 19 nt, Artificial Sequence
  Description of Artificial Sequence: Synthetic oligonucleotide
  Sense strand starting at position 2631 of SEQ ID NO: 913746
uuugaugaucuuuacuguu

SEQ ID NO: 950731 - RNA, 19 nt, Artificial Sequence
  Description of Artificial Sequence: Synthetic oligonucleotide
  Antisense strand to SEQ ID NO: 950730
aacaguaaagaucaucaaa

SEQ ID NO: 950732 - RNA, 19 nt, Artificial Sequence
  Description of Artificial Sequence: Synthetic oligonucleotide
  Sense strand starting at position 2062 of SEQ ID NO: 913746
acccuugaugccuagugaa

SEQ ID NO: 950733 - RNA, 19 nt, Artificial Sequence
  Description of Artificial Sequence: Synthetic oligonucleotide
  Antisense strand to SEQ ID NO: 950732
uucacuaggcaucaagggu

SEQ ID NO: 950734 - RNA, 19 nt, Artificial Sequence
  Description of Artificial Sequence: Synthetic oligonucleotide
  Sense strand starting at position 2003 of SEQ ID NO: 913746
gggcuucucagauaagcau

SEQ ID NO: 950735 - RNA, 19 nt, Artificial Sequence
  Description of Artificial Sequence: Synthetic oligonucleotide
  Antisense strand to SEQ ID NO: 950734
augcuuaucugagaagccc

SEQ ID NO: 950736 - RNA, 19 nt, Artificial Sequence
  Description of Artificial Sequence: Synthetic oligonucleotide
  Sense strand starting at position 1485 of SEQ ID NO: 913746
uggaauuaauuccuaagcu

SEQ ID NO: 950737 - RNA, 19 nt, Artificial Sequence
  Description of Artificial Sequence: Synthetic oligonucleotide
  Antisense strand to SEQ ID NO: 950736
agcuuaggaauuaauucca

SEQ ID NO: 950738 - RNA, 19 nt, Artificial Sequence
  Description of Artificial Sequence: Synthetic oligonucleotide
  Sense strand starting at position 2210 of SEQ ID NO: 913746
gucaaugugguguaggaga

SEQ ID NO: 950739 - RNA, 19 nt, Artificial Sequence
  Description of Artificial Sequence: Synthetic oligonucleotide
  Antisense strand to SEQ ID NO: 950738
ucuccuacaccacauugac

SEQ ID NO: 950740 - RNA, 19 nt, Artificial Sequence
  Description of Artificial Sequence: Synthetic oligonucleotide
  Sense strand starting at position 3277 of SEQ ID NO: 913746
cuuaaauugugucuggaaa

SEQ ID NO: 950741 - RNA, 19 nt, Artificial Sequence
  Description of Artificial Sequence: Synthetic oligonucleotide
  Antisense strand to SEQ ID NO: 950740
uuuccagacacaauuuaag

SEQ ID NO: 950742 - RNA, 19 nt, Artificial Sequence
  Description of Artificial Sequence: Synthetic oligonucleotide
  Sense strand starting at position 2212 of SEQ ID NO: 913746
caaugugguguaggagaua

SEQ ID NO: 950743 - RNA, 19 nt, Artificial Sequence
  Description of Artificial Sequence: Synthetic oligonucleotide
  Antisense strand to SEQ ID NO: 950742
uaucuccuacaccacauug

SEQ ID NO: 950744 - RNA, 19 nt, Artificial Sequence
  Description of Artificial Sequence: Synthetic oligonucleotide
  Sense strand starting at position 2076 of SEQ ID NO: 913746
gugaauuggcagggugaaa

SEQ ID NO: 950745 - RNA, 19 nt, Artificial Sequence
  Description of Artificial Sequence: Synthetic oligonucleotide
  Antisense strand to SEQ ID NO: 950744
uuucacccugccaauucac

SEQ ID NO: 950746 - RNA, 19 nt, Artificial Sequence
  Description of Artificial Sequence: Synthetic oligonucleotide
  Sense strand starting at position 2075 of SEQ ID NO: 913746
agugaauuggcagggugaa

SEQ ID NO: 950747 - RNA, 19 nt, Artificial Sequence
  Description of Artificial Sequence: Synthetic oligonucleotide
  Antisense strand to SEQ ID NO: 950746
uucacccugccaauucacu

SEQ ID NO: 950748 - RNA, 19 nt, Artificial Sequence
  Description of Artificial Sequence: Synthetic oligonucleotide
  Sense strand starting at position 2024 of SEQ ID NO: 913746
ugcuuauauaugggaggua

SEQ ID NO: 950749 - RNA, 19 nt, Artificial Sequence
  Description of Artificial Sequence: Synthetic oligonucleotide
  Antisense strand to SEQ ID NO: 950748
uaccucccauauauaagca

SEQ ID NO: 950750 - RNA, 19 nt, Artificial Sequence
  Description of Artificial Sequence: Synthetic oligonucleotide
  Sense strand starting at position 3311 of SEQ ID NO: 913746
caaggugacagguguaauu

SEQ ID NO: 950751 - RNA, 19 nt, Artificial Sequence
  Description of Artificial Sequence: Synthetic oligonucleotide
  Antisense strand to SEQ ID NO: 950750
aauuacaccugucaccuug

SEQ ID NO: 950752 - RNA, 19 nt, Artificial Sequence
  Description of Artificial Sequence: Synthetic oligonucleotide
  Sense strand starting at position 3275 of SEQ ID NO: 913746
aucuuaaauugugucugga

SEQ ID NO: 950753 - RNA, 19 nt, Artificial Sequence
  Description of Artificial Sequence: Synthetic oligonucleotide
  Antisense strand to SEQ ID NO: 950752
uccagacacaauuuaagau

SEQ ID NO: 950754 - RNA, 19 nt, Artificial Sequence
  Description of Artificial Sequence: Synthetic oligonucleotide
  Sense strand starting at position 2103 of SEQ ID NO: 913746
gaggaauagggcugucucu

SEQ ID NO: 950755 - RNA, 19 nt, Artificial Sequence
  Description of Artificial Sequence: Synthetic oligonucleotide
  Antisense strand to SEQ ID NO: 950754
agagacagcccuauuccuc

SEQ ID NO: 950756 - RNA, 19 nt, Artificial Sequence
  Description of Artificial Sequence: Synthetic oligonucleotide
  Sense strand starting at position 2700 of SEQ ID NO: 913746
uaugcaauguagucagaga

SEQ ID NO: 950757 - RNA, 19 nt, Artificial Sequence
  Description of Artificial Sequence: Synthetic oligonucleotide
  Antisense strand to SEQ ID NO: 950756
ucucugacuacauugcaua

SEQ ID NO: 950758 - RNA, 19 nt, Artificial Sequence
  Description of Artificial Sequence: Synthetic oligonucleotide
  Sense strand starting at position 2016 of SEQ ID NO: 913746
aagcauggugcuuauauau

SEQ ID NO: 950759 - RNA, 19 nt, Artificial Sequence
  Description of Artificial Sequence: Synthetic oligonucleotide
  Antisense strand to SEQ ID NO: 950758
auauauaagcaccaugcuu

SEQ ID NO: 950760 - RNA, 19 nt, Artificial Sequence
  Description of Artificial Sequence: Synthetic oligonucleotide
  Sense strand starting at position 323 of SEQ ID NO: 913746
ccaggagcccguuauauua

SEQ ID NO: 950761 - RNA, 19 nt, Artificial Sequence
  Description of Artificial Sequence: Synthetic oligonucleotide
  Antisense strand to SEQ ID NO: 950760
uaauauaacgggcuccugg

SEQ ID NO: 950762 - RNA, 19 nt, Artificial Sequence
  Description of Artificial Sequence: Synthetic oligonucleotide
  Sense strand starting at position 2899 of SEQ ID NO: 913746
ugauguaauugcccacaca

SEQ ID NO: 950763 - RNA, 19 nt, Artificial Sequence
  Description of Artificial Sequence: Synthetic oligonucleotide
  Antisense strand to SEQ ID NO: 950762
ugugugggcaauuacauca

SEQ ID NO: 950764 - RNA, 19 nt, Artificial Sequence
  Description of Artificial Sequence: Synthetic oligonucleotide
  Sense strand starting at position 415 of SEQ ID NO: 913746
ucuacauguuugcuagaaa

SEQ ID NO: 950765 - RNA, 19 nt, Artificial Sequence
  Description of Artificial Sequence: Synthetic oligonucleotide
  Antisense strand to SEQ ID NO: 950764
uuucuagcaaacauguaga

SEQ ID NO: 950766 - RNA, 19 nt, Artificial Sequence
  Description of Artificial Sequence: Synthetic oligonucleotide
  Sense strand starting at position 1122 of SEQ ID NO: 913746
ggugaacagucuuuaagug

SEQ ID NO: 950767 - RNA, 19 nt, Artificial Sequence
  Description of Artificial Sequence: Synthetic oligonucleotide
  Antisense strand to SEQ ID NO: 950766
cacuuaaagacuguucacc

SEQ ID NO: 950768 - RNA, 19 nt, Artificial Sequence
  Description of Artificial Sequence: Synthetic oligonucleotide
  Sense strand starting at position 1202 of SEQ ID NO: 913746
auugcuuucucguuuauuu

SEQ ID NO: 950769 - RNA, 19 nt, Artificial Sequence
  Description of Artificial Sequence: Synthetic oligonucleotide
  Antisense strand to SEQ ID NO: 950768
aaauaaacgagaaagcaau

SEQ ID NO: 950770 - RNA, 19 nt, Artificial Sequence
  Description of Artificial Sequence: Synthetic oligonucleotide
  Sense strand starting at position 957 of SEQ ID NO: 913747
uuuagacuagcaggaaaua

SEQ ID NO: 950771 - RNA, 19 nt, Artificial Sequence
  Description of Artificial Sequence: Synthetic oligonucleotide
  Antisense strand to SEQ ID NO: 950770
uauuuccugcuagucuaaa

SEQ ID NO: 950772 - RNA, 19 nt, Artificial Sequence
  Description of Artificial Sequence: Synthetic oligonucleotide
  Sense strand starting at position 1201 of SEQ ID NO: 913747
gaauguuagaggugagaac

SEQ ID NO: 950773 - RNA, 19 nt, Artificial Sequence
  Description of Artificial Sequence: Synthetic oligonucleotide
  Antisense strand to SEQ ID NO: 950772
guucucaccucuaacauuc

SEQ ID NO: 950774 - RNA, 19 nt, Artificial Sequence
  Description of Artificial Sequence: Synthetic oligonucleotide
  Sense strand starting at position 242 of SEQ ID NO: 913747
ugagguuaucuccaccaua

SEQ ID NO: 950775 - RNA, 19 nt, Artificial Sequence
  Description of Artificial Sequence: Synthetic oligonucleotide
  Antisense strand to SEQ ID NO: 950774
uaugguggagauaaccuca

SEQ ID NO: 950776 - RNA, 19 nt, Artificial Sequence
  Description of Artificial Sequence: Synthetic oligonucleotide
  Sense strand starting at position 879 of SEQ ID NO: 913747
gauucugggugacuacaaa

SEQ ID NO: 950777 - RNA, 19 nt, Artificial Sequence
  Description of Artificial Sequence: Synthetic oligonucleotide
  Antisense strand to SEQ ID NO: 950776
uuuguagucacccagaauc

SEQ ID NO: 950778 - RNA, 19 nt, Artificial Sequence
  Description of Artificial Sequence: Synthetic oligonucleotide
  Sense strand starting at position 511 of SEQ ID NO: 913747
gccucuuaucuggaugaaa

SEQ ID NO: 950779 - RNA, 19 nt, Artificial Sequence
  Description of Artificial Sequence: Synthetic oligonucleotide
  Antisense strand to SEQ ID NO: 950778
uuucauccagauaagaggc

SEQ ID NO: 950780 - RNA, 19 nt, Artificial Sequence
  Description of Artificial Sequence: Synthetic oligonucleotide
  Sense strand starting at position 2123 of SEQ ID NO: 913747
cggccuggugcuucacuua

SEQ ID NO: 950781 - RNA, 19 nt, Artificial Sequence
  Description of Artificial Sequence: Synthetic oligonucleotide
  Antisense strand to SEQ ID NO: 950780
uaagugaagcaccaggccg

SEQ ID NO: 950782 - RNA, 19 nt, Artificial Sequence
  Description of Artificial Sequence: Synthetic oligonucleotide
  Sense strand starting at position 2682 of SEQ ID NO: 913747
aaaguaguuguugacuaaa

SEQ ID NO: 950783 - RNA, 19 nt, Artificial Sequence
  Description of Artificial Sequence: Synthetic oligonucleotide
  Antisense strand to SEQ ID NO: 950782
uuuagucaacaacuacuuu

SEQ ID NO: 950784 - RNA, 19 nt, Artificial Sequence
  Description of Artificial Sequence: Synthetic oligonucleotide
  Sense strand starting at position 3425 of SEQ ID NO: 913747
uugcaugugaguguuuguu

SEQ ID NO: 950785 - RNA, 19 nt, Artificial Sequence
  Description of Artificial Sequence: Synthetic oligonucleotide
  Antisense strand to SEQ ID NO: 950784
aacaaacacucacaugcaa

SEQ ID NO: 950786 - RNA, 19 nt, Artificial Sequence
  Description of Artificial Sequence: Synthetic oligonucleotide
  Sense strand starting at position 2579 of SEQ ID NO: 913747
guuauuuagccucgacagg

SEQ ID NO: 950787 - RNA, 19 nt, Artificial Sequence
  Description of Artificial Sequence: Synthetic oligonucleotide
  Antisense strand to SEQ ID NO: 950786
ccugucgaggcuaaauaac

SEQ ID NO: 950788 - RNA, 19 nt, Artificial Sequence
  Description of Artificial Sequence: Synthetic oligonucleotide
  Sense strand starting at position 875 of SEQ ID NO: 913747
uauagauucugggugacua

SEQ ID NO: 950789 - RNA, 19 nt, Artificial Sequence
  Description of Artificial Sequence: Synthetic oligonucleotide
  Antisense strand to SEQ ID NO: 950788
uagucacccagaaucuaua

SEQ ID NO: 950790 - RNA, 19 nt, Artificial Sequence
  Description of Artificial Sequence: Synthetic oligonucleotide
  Sense strand starting at position 3967 of SEQ ID NO: 913747
uggugugaugaacauguga

SEQ ID NO: 950791 - RNA, 19 nt, Artificial Sequence
  Description of Artificial Sequence: Synthetic oligonucleotide
  Antisense strand to SEQ ID NO: 950790
ucacauguucaucacacca

SEQ ID NO: 950792 - RNA, 19 nt, Artificial Sequence
  Description of Artificial Sequence: Synthetic oligonucleotide
  Sense strand starting at position 876 of SEQ ID NO: 913747
auagauucugggugacuac

SEQ ID NO: 950793 - RNA, 19 nt, Artificial Sequence
  Description of Artificial Sequence: Synthetic oligonucleotide
  Antisense strand to SEQ ID NO: 950792
guagucacccagaaucuau

SEQ ID NO: 950794 - RNA, 19 nt, Artificial Sequence
  Description of Artificial Sequence: Synthetic oligonucleotide
  Sense strand starting at position 2685 of SEQ ID NO: 913747
guaguuguugacuaaauga

SEQ ID NO: 950795 - RNA, 19 nt, Artificial Sequence
  Description of Artificial Sequence: Synthetic oligonucleotide
  Antisense strand to SEQ ID NO: 950794
ucauuuagucaacaacuac

SEQ ID NO: 950796 - RNA, 19 nt, Artificial Sequence
  Description of Artificial Sequence: Synthetic oligonucleotide
  Sense strand starting at position 3712 of SEQ ID NO: 913747
ucucaauguccaugagaua

SEQ ID NO: 950797 - RNA, 19 nt, Artificial Sequence
  Description of Artificial Sequence: Synthetic oligonucleotide
  Antisense strand to SEQ ID NO: 950796
uaucucauggacauugaga

SEQ ID NO: 950798 - RNA, 19 nt, Artificial Sequence
  Description of Artificial Sequence: Synthetic oligonucleotide
  Sense strand starting at position 2380 of SEQ ID NO: 913747
aaaugcucuugaguaagag

SEQ ID NO: 950799 - RNA, 19 nt, Artificial Sequence
  Description of Artificial Sequence: Synthetic oligonucleotide
  Antisense strand to SEQ ID NO: 950798
cucuuacucaagagcauuu

SEQ ID NO: 950800 - RNA, 19 nt, Artificial Sequence
  Description of Artificial Sequence: Synthetic oligonucleotide
  Sense strand starting at position 3009 of SEQ ID NO: 913747
gaaagauccuggcuuacug

SEQ ID NO: 950801 - RNA, 19 nt, Artificial Sequence
  Description of Artificial Sequence: Synthetic oligonucleotide
  Antisense strand to SEQ ID NO: 950800
caguaagccaggaucuuuc

SEQ ID NO: 950802 - RNA, 19 nt, Artificial Sequence
  Description of Artificial Sequence: Synthetic oligonucleotide
  Sense strand starting at position 2440 of SEQ ID NO: 913747
guggaauguacugauggca

SEQ ID NO: 950803 - RNA, 19 nt, Artificial Sequence
  Description of Artificial Sequence: Synthetic oligonucleotide
  Antisense strand to SEQ ID NO: 950802
ugccaucaguacauuccac

SEQ ID NO: 950804 - RNA, 19 nt, Artificial Sequence
  Description of Artificial Sequence: Synthetic oligonucleotide
  Sense strand starting at position 455 of SEQ ID NO: 913747
ucccgauuccuauagaagu

SEQ ID NO: 950805 - RNA, 19 nt, Artificial Sequence
  Description of Artificial Sequence: Synthetic oligonucleotide
  Antisense strand to SEQ ID NO: 950804
acuucuauaggaaucggga

SEQ ID NO: 950806 - RNA, 19 nt, Artificial Sequence
  Description of Artificial Sequence: Synthetic oligonucleotide
  Sense strand starting at position 2738 of SEQ ID NO: 913747
cuaucuggauuugaaauca

SEQ ID NO: 950807 - RNA, 19 nt, Artificial Sequence
  Description of Artificial Sequence: Synthetic oligonucleotide
  Antisense strand to SEQ ID NO: 950806
ugauuucaaauccagauag

SEQ ID NO: 950808 - RNA, 19 nt, Artificial Sequence
  Description of Artificial Sequence: Synthetic oligonucleotide
  Sense strand starting at position 3007 of SEQ ID NO: 913747
uggaaagauccuggcuuac

SEQ ID NO: 950809 - RNA, 19 nt, Artificial Sequence
  Description of Artificial Sequence: Synthetic oligonucleotide
  Antisense strand to SEQ ID NO: 950808
guaagccaggaucuuucca

SEQ ID NO: 950810 - RNA, 19 nt, Artificial Sequence
  Description of Artificial Sequence: Synthetic oligonucleotide
  Sense strand starting at position 2565 of SEQ ID NO: 913747
cacuguaaggagcaguuau

SEQ ID NO: 950811 - RNA, 19 nt, Artificial Sequence
  Description of Artificial Sequence: Synthetic oligonucleotide
  Antisense strand to SEQ ID NO: 950810
auaacugcuccuuacagug

SEQ ID NO: 950812 - RNA, 19 nt, Artificial Sequence
  Description of Artificial Sequence: Synthetic oligonucleotide
  Sense strand starting at position 1600 of SEQ ID NO: 913747
agaugaauuuaggaagcuu

SEQ ID NO: 950813 - RNA, 19 nt, Artificial Sequence
  Description of Artificial Sequence: Synthetic oligonucleotide
  Antisense strand to SEQ ID NO: 950812
aagcuuccuaaauucaucu

SEQ ID NO: 950814 - RNA, 19 nt, Artificial Sequence
  Description of Artificial Sequence: Synthetic oligonucleotide
  Sense strand starting at position 2423 of SEQ ID NO: 913747
agaagaacuuccucuuugu

SEQ ID NO: 950815 - RNA, 19 nt, Artificial Sequence
  Description of Artificial Sequence: Synthetic oligonucleotide
  Antisense strand to SEQ ID NO: 950814
acaaagaggaaguucuucu

SEQ ID NO: 950816 - RNA, 19 nt, Artificial Sequence
  Description of Artificial Sequence: Synthetic oligonucleotide
  Sense strand starting at position 1762 of SEQ ID NO: 913747
ggauuugcauuggacaaga

SEQ ID NO: 950817 - RNA, 19 nt, Artificial Sequence
  Description of Artificial Sequence: Synthetic oligonucleotide
  Antisense strand to SEQ ID NO: 950816
ucuuguccaaugcaaaucc

SEQ ID NO: 950818 - RNA, 19 nt, Artificial Sequence
  Description of Artificial Sequence: Synthetic oligonucleotide
  Sense strand starting at position 2426 of SEQ ID NO: 913747
agaacuuccucuuugugga

SEQ ID NO: 950819 - RNA, 19 nt, Artificial Sequence
  Description of Artificial Sequence: Synthetic oligonucleotide
  Antisense strand to SEQ ID NO: 950818
uccacaaagaggaaguucu

SEQ ID NO: 950820 - RNA, 19 nt, Artificial Sequence
  Description of Artificial Sequence: Synthetic oligonucleotide
  Sense strand starting at position 2851 of SEQ ID NO: 913747
gugguguugggaggaugaa

SEQ ID NO: 950821 - RNA, 19 nt, Artificial Sequence
  Description of Artificial Sequence: Synthetic oligonucleotide
  Antisense strand to SEQ ID NO: 950820
uucauccucccaacaccac

SEQ ID NO: 950822 - RNA, 19 nt, Artificial Sequence
  Description of Artificial Sequence: Synthetic oligonucleotide
  Sense strand starting at position 513 of SEQ ID NO: 913747
cucuuaucuggaugaaagc

SEQ ID NO: 950823 - RNA, 19 nt, Artificial Sequence
  Description of Artificial Sequence: Synthetic oligonucleotide
  Antisense strand to SEQ ID NO: 950822
gcuuucauccagauaagag

SEQ ID NO: 950824 - RNA, 19 nt, Artificial Sequence
  Description of Artificial Sequence: Synthetic oligonucleotide
  Sense strand starting at position 472 of SEQ ID NO: 913747
guuccaguuguauacacaa

SEQ ID NO: 950825 - RNA, 19 nt, Artificial Sequence
  Description of Artificial Sequence: Synthetic oligonucleotide
  Antisense strand to SEQ ID NO: 950824
uuguguauacaacuggaac

SEQ ID NO: 950826 - RNA, 19 nt, Artificial Sequence
  Description of Artificial Sequence: Synthetic oligonucleotide
  Sense strand starting at position 796 of SEQ ID NO: 913747
gacagaugggucuguauug

SEQ ID NO: 950827 - RNA, 19 nt, Artificial Sequence
  Description of Artificial Sequence: Synthetic oligonucleotide
  Antisense strand to SEQ ID NO: 950826
caauacagacccaucuguc

SEQ ID NO: 950828 - RNA, 19 nt, Artificial Sequence
  Description of Artificial Sequence: Synthetic oligonucleotide
  Sense strand starting at position 2427 of SEQ ID NO: 913747
gaacuuccucuuuguggaa

SEQ ID NO: 950829 - RNA, 19 nt, Artificial Sequence
  Description of Artificial Sequence: Synthetic oligonucleotide
  Antisense strand to SEQ ID NO: 950828
uuccacaaagaggaaguuc

SEQ ID NO: 950830 - RNA, 19 nt, Artificial Sequence
  Description of Artificial Sequence: Synthetic oligonucleotide
  Sense strand starting at position 2443 of SEQ ID NO: 913747
gaauguacugauggcauca

SEQ ID NO: 950831 - RNA, 19 nt, Artificial Sequence
  Description of Artificial Sequence: Synthetic oligonucleotide
  Antisense strand to SEQ ID NO: 950830
ugaugccaucaguacauuc

SEQ ID NO: 950832 - RNA, 19 nt, Artificial Sequence
  Description of Artificial Sequence: Synthetic oligonucleotide
  Sense strand starting at position 1385 of SEQ ID NO: 913747
uuaacaguaucugcugaaa

SEQ ID NO: 950833 - RNA, 19 nt, Artificial Sequence
  Description of Artificial Sequence: Synthetic oligonucleotide
  Antisense strand to SEQ ID NO: 950832
uuucagcagauacuguuaa

SEQ ID NO: 950834 - RNA, 19 nt, Artificial Sequence
  Description of Artificial Sequence: Synthetic oligonucleotide
  Sense strand starting at position 165 of SEQ ID NO: 913747
ggagcucauucccuuaaca

SEQ ID NO: 950835 - RNA, 19 nt, Artificial Sequence
  Description of Artificial Sequence: Synthetic oligonucleotide
  Antisense strand to SEQ ID NO: 950834
uguuaagggaaugagcucc

SEQ ID NO: 950836 - RNA, 19 nt, Artificial Sequence
  Description of Artificial Sequence: Synthetic oligonucleotide
  Sense strand starting at position 2612 of SEQ ID NO: 913747
ucugaaucauugcugaauc

SEQ ID NO: 950837 - RNA, 19 nt, Artificial Sequence
  Description of Artificial Sequence: Synthetic oligonucleotide
  Antisense strand to SEQ ID NO: 950836
gauucagcaaugauucaga

SEQ ID NO: 950838 - RNA, 19 nt, Artificial Sequence
  Description of Artificial Sequence: Synthetic oligonucleotide
  Sense strand starting at position 2431 of SEQ ID NO: 913747
uuccucuuuguggaaugua

SEQ ID NO: 950839 - RNA, 19 nt, Artificial Sequence
  Description of Artificial Sequence: Synthetic oligonucleotide
  Antisense strand to SEQ ID NO: 950838
uacauuccacaaagaggaa

SEQ ID NO: 950840 - RNA, 19 nt, Artificial Sequence
  Description of Artificial Sequence: Synthetic oligonucleotide
  Sense strand starting at position 2007 of SEQ ID NO: 913747
gugaaauuggcaggacucu

SEQ ID NO: 950841 - RNA, 19 nt, Artificial Sequence
  Description of Artificial Sequence: Synthetic oligonucleotide
  Antisense strand to SEQ ID NO: 950840
agaguccugccaauuucac

SEQ ID NO: 950842 - RNA, 19 nt, Artificial Sequence
  Description of Artificial Sequence: Synthetic oligonucleotide
  Sense strand starting at position 667 of SEQ ID NO: 913747
cuaggacucuguccuuaau

SEQ ID NO: 950843 - RNA, 19 nt, Artificial Sequence
  Description of Artificial Sequence: Synthetic oligonucleotide
  Antisense strand to SEQ ID NO: 950842
auuaaggacagaguccuag

SEQ ID NO: 950844 - RNA, 19 nt, Artificial Sequence
  Description of Artificial Sequence: Synthetic oligonucleotide
  Sense strand starting at position 444 of SEQ ID NO: 913747
aggaccuauucucccgauu

SEQ ID NO: 950845 - RNA, 19 nt, Artificial Sequence
  Description of Artificial Sequence: Synthetic oligonucleotide
  Antisense strand to SEQ ID NO: 950844
aaucgggagaauagguccu

SEQ ID NO: 950846 - RNA, 19 nt, Artificial Sequence
  Description of Artificial Sequence: Synthetic oligonucleotide
  Sense strand starting at position 1022 of SEQ ID NO: 913747
aggugucucauaggaagua

SEQ ID NO: 950847 - RNA, 19 nt, Artificial Sequence
  Description of Artificial Sequence: Synthetic oligonucleotide
  Antisense strand to SEQ ID NO: 950846
uacuuccuaugagacaccu

SEQ ID NO: 950848 - RNA, 19 nt, Artificial Sequence
  Description of Artificial Sequence: Synthetic oligonucleotide
  Sense strand starting at position 3590 of SEQ ID NO: 913747
acccuagucggcuaucaaa

SEQ ID NO: 950849 - RNA, 19 nt, Artificial Sequence
  Description of Artificial Sequence: Synthetic oligonucleotide
  Antisense strand to SEQ ID NO: 950848
uuugauagccgacuagggu

SEQ ID NO: 950850 - RNA, 19 nt, Artificial Sequence
  Description of Artificial Sequence: Synthetic oligonucleotide
  Sense strand starting at position 2936 of SEQ ID NO: 913748
ucccuuggacuguaaucaa

SEQ ID NO: 950851 - RNA, 19 nt, Artificial Sequence
  Description of Artificial Sequence: Synthetic oligonucleotide
  Antisense strand to SEQ ID NO: 950850
uugauuacaguccaaggga

SEQ ID NO: 950852 - RNA, 19 nt, Artificial Sequence
  Description of Artificial Sequence: Synthetic oligonucleotide
  Sense strand starting at position 278 of SEQ ID NO: 913748
cacagacuccaggguagau

SEQ ID NO: 950853 - RNA, 19 nt, Artificial Sequence
  Description of Artificial Sequence: Synthetic oligonucleotide
  Antisense strand to SEQ ID NO: 950852
aucuacccuggagucugug

SEQ ID NO: 950854 - RNA, 19 nt, Artificial Sequence
  Description of Artificial Sequence: Synthetic oligonucleotide
  Sense strand starting at position 3642 of SEQ ID NO: 913748
ugcugucauagagguauuu

SEQ ID NO: 950855 - RNA, 19 nt, Artificial Sequence
  Description of Artificial Sequence: Synthetic oligonucleotide
  Antisense strand to SEQ ID NO: 950854
aaauaccucuaugacagca

SEQ ID NO: 950856 - RNA, 19 nt, Artificial Sequence
  Description of Artificial Sequence: Synthetic oligonucleotide
  Sense strand starting at position 2939 of SEQ ID NO: 913748
cuuggacuguaaucaauag

SEQ ID NO: 950857 - RNA, 19 nt, Artificial Sequence
  Description of Artificial Sequence: Synthetic oligonucleotide
  Antisense strand to SEQ ID NO: 950856
cuauugauuacaguccaag

SEQ ID NO: 950858 - RNA, 19 nt, Artificial Sequence
  Description of Artificial Sequence: Synthetic oligonucleotide
  Sense strand starting at position 1019 of SEQ ID NO: 913748
gaagccuuguaugcauuua

SEQ ID NO: 950859 - RNA, 19 nt, Artificial Sequence
  Description of Artificial Sequence: Synthetic oligonucleotide
  Antisense strand to SEQ ID NO: 950858
uaaaugcauacaaggcuuc

SEQ ID NO: 950860 - RNA, 19 nt, Artificial Sequence
  Description of Artificial Sequence: Synthetic oligonucleotide
  Sense strand starting at position 3601 of SEQ ID NO: 913748
ggaaauucagugcaggagu

SEQ ID NO: 950861 - RNA, 19 nt, Artificial Sequence
  Description of Artificial Sequence: Synthetic oligonucleotide
  Antisense strand to SEQ ID NO: 950860
acuccugcacugaauuucc

SEQ ID NO: 950862 - RNA, 19 nt, Artificial Sequence
  Description of Artificial Sequence: Synthetic oligonucleotide
  Sense strand starting at position 3690 of SEQ ID NO: 913748
agcuaauguggugaauuaa

SEQ ID NO: 950863 - RNA, 19 nt, Artificial Sequence
  Description of Artificial Sequence: Synthetic oligonucleotide
  Antisense strand to SEQ ID NO: 950862
uuaauucaccacauuagcu

SEQ ID NO: 950864 - RNA, 19 nt, Artificial Sequence
  Description of Artificial Sequence: Synthetic oligonucleotide
  Sense strand starting at position 77 of SEQ ID NO: 913748
uggaucugcaucuaguaga

SEQ ID NO: 950865 - RNA, 19 nt, Artificial Sequence
  Description of Artificial Sequence: Synthetic oligonucleotide
  Antisense strand to SEQ ID NO: 950864
ucuacuagaugcagaucca

SEQ ID NO: 950866 - RNA, 19 nt, Artificial Sequence
  Description of Artificial Sequence: Synthetic oligonucleotide
  Sense strand starting at position 1018 of SEQ ID NO: 913748
ggaagccuuguaugcauuu

SEQ ID NO: 950867 - RNA, 19 nt, Artificial Sequence
  Description of Artificial Sequence: Synthetic oligonucleotide
  Antisense strand to SEQ ID NO: 950866
aaaugcauacaaggcuucc

SEQ ID NO: 950868 - RNA, 19 nt, Artificial Sequence
  Description of Artificial Sequence: Synthetic oligonucleotide
  Sense strand starting at position 3701 of SEQ ID NO: 913748
ugaauuaagcagcauuauc

SEQ ID NO: 950869 - RNA, 19 nt, Artificial Sequence
  Description of Artificial Sequence: Synthetic oligonucleotide
  Antisense strand to SEQ ID NO: 950868
gauaaugcugcuuaauuca

SEQ ID NO: 950870 - RNA, 19 nt, Artificial Sequence
  Description of Artificial Sequence: Synthetic oligonucleotide
  Sense strand starting at position 2552 of SEQ ID NO: 913748
aaacguagaccucauguua

SEQ ID NO: 950871 - RNA, 19 nt, Artificial Sequence
  Description of Artificial Sequence: Synthetic oligonucleotide
  Antisense strand to SEQ ID NO: 950870
uaacaugaggucuacguuu

SEQ ID NO: 950872 - RNA, 19 nt, Artificial Sequence
  Description of Artificial Sequence: Synthetic oligonucleotide
  Sense strand starting at position 3541 of SEQ ID NO: 913748
gagauucuggugcagugaa

SEQ ID NO: 950873 - RNA, 19 nt, Artificial Sequence
  Description of Artificial Sequence: Synthetic oligonucleotide
  Antisense strand to SEQ ID NO: 950872
uucacugcaccagaaucuc

SEQ ID NO: 950874 - RNA, 19 nt, Artificial Sequence
  Description of Artificial Sequence: Synthetic oligonucleotide
  Sense strand starting at position 3599 of SEQ ID NO: 913748
uuggaaauucagugcagga

SEQ ID NO: 950875 - RNA, 19 nt, Artificial Sequence
  Description of Artificial Sequence: Synthetic oligonucleotide
  Antisense strand to SEQ ID NO: 950874
uccugcacugaauuuccaa

SEQ ID NO: 950876 - RNA, 19 nt, Artificial Sequence
  Description of Artificial Sequence: Synthetic oligonucleotide
  Sense strand starting at position 1102 of SEQ ID NO: 913748
ugugguccucuuuaaauau

SEQ ID NO: 950877 - RNA, 19 nt, Artificial Sequence
  Description of Artificial Sequence: Synthetic oligonucleotide
  Antisense strand to SEQ ID NO: 950876
auauuuaaagaggaccaca

SEQ ID NO: 950878 - RNA, 19 nt, Artificial Sequence
  Description of Artificial Sequence: Synthetic oligonucleotide
  Sense strand starting at position 3488 of SEQ ID NO: 913748
gagccuucugauuauugua

SEQ ID NO: 950879 - RNA, 19 nt, Artificial Sequence
  Description of Artificial Sequence: Synthetic oligonucleotide
  Antisense strand to SEQ ID NO: 950878
uacaauaaucagaaggcuc

SEQ ID NO: 950880 - RNA, 19 nt, Artificial Sequence
  Description of Artificial Sequence: Synthetic oligonucleotide
  Sense strand starting at position 432 of SEQ ID NO: 913748
cugguuaugcuccaacuga

SEQ ID NO: 950881 - RNA, 19 nt, Artificial Sequence
  Description of Artificial Sequence: Synthetic oligonucleotide
  Antisense strand to SEQ ID NO: 950880
ucaguuggagcauaaccag

SEQ ID NO: 950882 - RNA, 19 nt, Artificial Sequence
  Description of Artificial Sequence: Synthetic oligonucleotide
  Sense strand starting at position 3950 of SEQ ID NO: 913748
cacucuaaggcauggguaa

SEQ ID NO: 950883 - RNA, 19 nt, Artificial Sequence
  Description of Artificial Sequence: Synthetic oligonucleotide
  Antisense strand to SEQ ID NO: 950882
uuacccaugccuuagagug

SEQ ID NO: 950884 - RNA, 19 nt, Artificial Sequence
  Description of Artificial Sequence: Synthetic oligonucleotide
  Sense strand starting at position 3698 of SEQ ID NO: 913748
uggugaauuaagcagcauu

SEQ ID NO: 950885 - RNA, 19 nt, Artificial Sequence
  Description of Artificial Sequence: Synthetic oligonucleotide
  Antisense strand to SEQ ID NO: 950884
aaugcugcuuaauucacca

SEQ ID NO: 950886 - RNA, 19 nt, Artificial Sequence
  Description of Artificial Sequence: Synthetic oligonucleotide
  Sense strand starting at position 352 of SEQ ID NO: 913748
gaaaguggcuuucuugaag

SEQ ID NO: 950887 - RNA, 19 nt, Artificial Sequence
  Description of Artificial Sequence: Synthetic oligonucleotide
  Antisense strand to SEQ ID NO: 950886
cuucaagaaagccacuuuc

SEQ ID NO: 950888 - RNA, 19 nt, Artificial Sequence
  Description of Artificial Sequence: Synthetic oligonucleotide
  Sense strand starting at position 360 of SEQ ID NO: 913748
cuuucuugaagugguaaga

SEQ ID NO: 950889 - RNA, 19 nt, Artificial Sequence
  Description of Artificial Sequence: Synthetic oligonucleotide
  Antisense strand to SEQ ID NO: 950888
ucuuaccacuucaagaaag

SEQ ID NO: 950890 - RNA, 19 nt, Artificial Sequence
  Description of Artificial Sequence: Synthetic oligonucleotide
  Sense strand starting at position 2277 of SEQ ID NO: 913748
guuacauguuaaccagacu

SEQ ID NO: 950891 - RNA, 19 nt, Artificial Sequence
  Description of Artificial Sequence: Synthetic oligonucleotide
  Antisense strand to SEQ ID NO: 950890
agucugguuaacauguaac

SEQ ID NO: 950892 - RNA, 19 nt, Artificial Sequence
  Description of Artificial Sequence: Synthetic oligonucleotide
  Sense strand starting at position 626 of SEQ ID NO: 913748
ucagauaagcugggauguu

SEQ ID NO: 950893 - RNA, 19 nt, Artificial Sequence
  Description of Artificial Sequence: Synthetic oligonucleotide
  Antisense strand to SEQ ID NO: 950892
aacaucccagcuuaucuga

SEQ ID NO: 950894 - RNA, 19 nt, Artificial Sequence
  Description of Artificial Sequence: Synthetic oligonucleotide
  Sense strand starting at position 3588 of SEQ ID NO: 913748
ucacaagugccuuggaaau

SEQ ID NO: 950895 - RNA, 19 nt, Artificial Sequence
  Description of Artificial Sequence: Synthetic oligonucleotide
  Antisense strand to SEQ ID NO: 950894
auuuccaaggcacuuguga

SEQ ID NO: 950896 - RNA, 19 nt, Artificial Sequence
  Description of Artificial Sequence: Synthetic oligonucleotide
  Sense strand starting at position 1436 of SEQ ID NO: 913748
agaagcaagcaugguuuaa

SEQ ID NO: 950897 - RNA, 19 nt, Artificial Sequence
  Description of Artificial Sequence: Synthetic oligonucleotide
  Antisense strand to SEQ ID NO: 950896
uuaaaccaugcuugcuucu

SEQ ID NO: 950898 - RNA, 19 nt, Artificial Sequence
  Description of Artificial Sequence: Synthetic oligonucleotide
  Sense strand starting at position 1302 of SEQ ID NO: 913748
ggucacuagaccugcuaga

SEQ ID NO: 950899 - RNA, 19 nt, Artificial Sequence
  Description of Artificial Sequence: Synthetic oligonucleotide
  Antisense strand to SEQ ID NO: 950898
ucuagcaggucuagugacc

SEQ ID NO: 950900 - RNA, 19 nt, Artificial Sequence
  Description of Artificial Sequence: Synthetic oligonucleotide
  Sense strand starting at position 197 of SEQ ID NO: 913748
gcugcuaguccuuaggaaa

SEQ ID NO: 950901 - RNA, 19 nt, Artificial Sequence
  Description of Artificial Sequence: Synthetic oligonucleotide
  Antisense strand to SEQ ID NO: 950900
uuuccuaaggacuagcagc

SEQ ID NO: 950902 - RNA, 19 nt, Artificial Sequence
  Description of Artificial Sequence: Synthetic oligonucleotide
  Sense strand starting at position 3981 of SEQ ID NO: 913748
ggcccuuacucuccagaua

SEQ ID NO: 950903 - RNA, 19 nt, Artificial Sequence
  Description of Artificial Sequence: Synthetic oligonucleotide
  Antisense strand to SEQ ID NO: 950902
uaucuggagaguaagggcc

SEQ ID NO: 950904 - RNA, 19 nt, Artificial Sequence
  Description of Artificial Sequence: Synthetic oligonucleotide
  Sense strand starting at position 923 of SEQ ID NO: 913748
agaaacaagcuuugcuuua

SEQ ID NO: 950905 - RNA, 19 nt, Artificial Sequence
  Description of Artificial Sequence: Synthetic oligonucleotide
  Antisense strand to SEQ ID NO: 950904
uaaagcaaagcuuguuucu

SEQ ID NO: 950906 - RNA, 19 nt, Artificial Sequence
  Description of Artificial Sequence: Synthetic oligonucleotide
  Sense strand starting at position 3640 of SEQ ID NO: 913748
agugcugucauagagguau

SEQ ID NO: 950907 - RNA, 19 nt, Artificial Sequence
  Description of Artificial Sequence: Synthetic oligonucleotide
  Antisense strand to SEQ ID NO: 950906
auaccucuaugacagcacu

SEQ ID NO: 950908 - RNA, 19 nt, Artificial Sequence
  Description of Artificial Sequence: Synthetic oligonucleotide
  Sense strand starting at position 1117 of SEQ ID NO: 913748
auauauguuuguuucugga

SEQ ID NO: 950909 - RNA, 19 nt, Artificial Sequence
  Description of Artificial Sequence: Synthetic oligonucleotide
  Antisense strand to SEQ ID NO: 950908
uccagaaacaaacauauau

SEQ ID NO: 950910 - RNA, 19 nt, Artificial Sequence
  Description of Artificial Sequence: Synthetic oligonucleotide
  Sense strand starting at position 635 of SEQ ID NO: 913748
cugggauguuaccuuucuu

SEQ ID NO: 950911 - RNA, 19 nt, Artificial Sequence
  Description of Artificial Sequence: Synthetic oligonucleotide
  Antisense strand to SEQ ID NO: 950910
aagaaagguaacaucccag

SEQ ID NO: 950912 - RNA, 19 nt, Artificial Sequence
  Description of Artificial Sequence: Synthetic oligonucleotide
  Sense strand starting at position 3800 of SEQ ID NO: 913748
gagucauaucacugagccu

SEQ ID NO: 950913 - RNA, 19 nt, Artificial Sequence
  Description of Artificial Sequence: Synthetic oligonucleotide
  Antisense strand to SEQ ID NO: 950912
aggcucagugauaugacuc

SEQ ID NO: 950914 - RNA, 19 nt, Artificial Sequence
  Description of Artificial Sequence: Synthetic oligonucleotide
  Sense strand starting at position 479 of SEQ ID NO: 913748
ucaguugguuggucagaac

SEQ ID NO: 950915 - RNA, 19 nt, Artificial Sequence
  Description of Artificial Sequence: Synthetic oligonucleotide
  Antisense strand to SEQ ID NO: 950914
guucugaccaaccaacuga

SEQ ID NO: 950916 - RNA, 19 nt, Artificial Sequence
  Description of Artificial Sequence: Synthetic oligonucleotide
  Sense strand starting at position 1081 of SEQ ID NO: 913748
ucaguaugccuaugaagua

SEQ ID NO: 950917 - RNA, 19 nt, Artificial Sequence
  Description of Artificial Sequence: Synthetic oligonucleotide
  Antisense strand to SEQ ID NO: 950916
uacuucauaggcauacuga

SEQ ID NO: 950918 - RNA, 19 nt, Artificial Sequence
  Description of Artificial Sequence: Synthetic oligonucleotide
  Sense strand starting at position 1422 of SEQ ID NO: 913748
ugacacauuugcugagaag

SEQ ID NO: 950919 - RNA, 19 nt, Artificial Sequence
  Description of Artificial Sequence: Synthetic oligonucleotide
  Antisense strand to SEQ ID NO: 950918
cuucucagcaaauguguca

SEQ ID NO: 950920 - RNA, 19 nt, Artificial Sequence
  Description of Artificial Sequence: Synthetic oligonucleotide
  Sense strand starting at position 3777 of SEQ ID NO: 913748
ugcuuaguucugggauauu

SEQ ID NO: 950921 - RNA, 19 nt, Artificial Sequence
  Description of Artificial Sequence: Synthetic oligonucleotide
  Antisense strand to SEQ ID NO: 950920
aauaucccagaacuaagca

SEQ ID NO: 950922 - RNA, 19 nt, Artificial Sequence
  Description of Artificial Sequence: Synthetic oligonucleotide
  Sense strand starting at position 3490 of SEQ ID NO: 913748
gccuucugauuauuguaua

SEQ ID NO: 950923 - RNA, 19 nt, Artificial Sequence
  Description of Artificial Sequence: Synthetic oligonucleotide
  Antisense strand to SEQ ID NO: 950922
uauacaauaaucagaaggc

SEQ ID NO: 950924 - RNA, 19 nt, Artificial Sequence
  Description of Artificial Sequence: Synthetic oligonucleotide
  Sense strand starting at position 3555 of SEQ ID NO: 913748
gugaaucugaugugagcuu

SEQ ID NO: 950925 - RNA, 19 nt, Artificial Sequence
  Description of Artificial Sequence: Synthetic oligonucleotide
  Antisense strand to SEQ ID NO: 950924
aagcucacaucagauucac

SEQ ID NO: 950926 - RNA, 19 nt, Artificial Sequence
  Description of Artificial Sequence: Synthetic oligonucleotide
  Sense strand starting at position 359 of SEQ ID NO: 913748
gcuuucuugaagugguaag

SEQ ID NO: 950927 - RNA, 19 nt, Artificial Sequence
  Description of Artificial Sequence: Synthetic oligonucleotide
  Antisense strand to SEQ ID NO: 950926
cuuaccacuucaagaaagc

SEQ ID NO: 950928 - RNA, 19 nt, Artificial Sequence
  Description of Artificial Sequence: Synthetic oligonucleotide
  Sense strand starting at position 3487 of SEQ ID NO: 913748
ugagccuucugauuauugu

SEQ ID NO: 950929 - RNA, 19 nt, Artificial Sequence
  Description of Artificial Sequence: Synthetic oligonucleotide
  Antisense strand to SEQ ID NO: 950928
acaauaaucagaaggcuca

SEQ ID NO: 950930 - RNA, 19 nt, Artificial Sequence
  Description of Artificial Sequence: Synthetic oligonucleotide
  Sense strand starting at position 534 of SEQ ID NO: 913749
gguauuuggcagugaauuc

SEQ ID NO: 950931 - RNA, 19 nt, Artificial Sequence
  Description of Artificial Sequence: Synthetic oligonucleotide
  Antisense strand to SEQ ID NO: 950930
gaauucacugccaaauacc

SEQ ID NO: 950932 - RNA, 19 nt, Artificial Sequence
  Description of Artificial Sequence: Synthetic oligonucleotide
  Sense strand starting at position 129 of SEQ ID NO: 913749
ugaauuugugaguguguaa

SEQ ID NO: 950933 - RNA, 19 nt, Artificial Sequence
  Description of Artificial Sequence: Synthetic oligonucleotide
  Antisense strand to SEQ ID NO: 950932
uuacacacucacaaauuca

SEQ ID NO: 950934 - RNA, 19 nt, Artificial Sequence
  Description of Artificial Sequence: Synthetic oligonucleotide
  Sense strand starting at position 3157 of SEQ ID NO: 913749
agcauacaaugaguaauaa

SEQ ID NO: 950935 - RNA, 19 nt, Artificial Sequence
  Description of Artificial Sequence: Synthetic oligonucleotide
  Antisense strand to SEQ ID NO: 950934
uuauuacucauuguaugcu

SEQ ID NO: 950936 - RNA, 19 nt, Artificial Sequence
  Description of Artificial Sequence: Synthetic oligonucleotide
  Sense strand starting at position 1477 of SEQ ID NO: 913749
gaaacaugagcugaugcau

SEQ ID NO: 950937 - RNA, 19 nt, Artificial Sequence
  Description of Artificial Sequence: Synthetic oligonucleotide
  Antisense strand to SEQ ID NO: 950936
augcaucagcucauguuuc

SEQ ID NO: 950938 - RNA, 19 nt, Artificial Sequence
  Description of Artificial Sequence: Synthetic oligonucleotide
  Sense strand starting at position 2468 of SEQ ID NO: 913749
ucuugaacuccugauagca

SEQ ID NO: 950939 - RNA, 19 nt, Artificial Sequence
  Description of Artificial Sequence: Synthetic oligonucleotide
  Antisense strand to SEQ ID NO: 950938
ugcuaucaggaguucaaga

SEQ ID NO: 950940 - RNA, 19 nt, Artificial Sequence
  Description of Artificial Sequence: Synthetic oligonucleotide
  Sense strand starting at position 998 of SEQ ID NO: 913749
gcuucccaccauuagagau

SEQ ID NO: 950941 - RNA, 19 nt, Artificial Sequence
  Description of Artificial Sequence: Synthetic oligonucleotide
  Antisense strand to SEQ ID NO: 950940
aucucuaauggugggaagc

SEQ ID NO: 950942 - RNA, 19 nt, Artificial Sequence
  Description of Artificial Sequence: Synthetic oligonucleotide
  Sense strand starting at position 3155 of SEQ ID NO: 913749
cgagcauacaaugaguaau

SEQ ID NO: 950943 - RNA, 19 nt, Artificial Sequence
  Description of Artificial Sequence: Synthetic oligonucleotide
  Antisense strand to SEQ ID NO: 950942
auuacucauuguaugcucg

SEQ ID NO: 950944 - RNA, 19 nt, Artificial Sequence
  Description of Artificial Sequence: Synthetic oligonucleotide
  Sense strand starting at position 3022 of SEQ ID NO: 913749
uagguaucugaccaucagu

SEQ ID NO: 950945 - RNA, 19 nt, Artificial Sequence
  Description of Artificial Sequence: Synthetic oligonucleotide
  Antisense strand to SEQ ID NO: 950944
acugauggucagauaccua

SEQ ID NO: 950946 - RNA, 19 nt, Artificial Sequence
  Description of Artificial Sequence: Synthetic oligonucleotide
  Sense strand starting at position 3922 of SEQ ID NO: 913749
guaagaucauaucucauug

SEQ ID NO: 950947 - RNA, 19 nt, Artificial Sequence
  Description of Artificial Sequence: Synthetic oligonucleotide
  Antisense strand to SEQ ID NO: 950946
caaugagauaugaucuuac

SEQ ID NO: 950948 - RNA, 19 nt, Artificial Sequence
  Description of Artificial Sequence: Synthetic oligonucleotide
  Sense strand starting at position 2039 of SEQ ID NO: 913749
aaauuuguuugagagaaug

SEQ ID NO: 950949 - RNA, 19 nt, Artificial Sequence
  Description of Artificial Sequence: Synthetic oligonucleotide
  Antisense strand to SEQ ID NO: 950948
cauucucucaaacaaauuu

SEQ ID NO: 950950 - RNA, 19 nt, Artificial Sequence
  Description of Artificial Sequence: Synthetic oligonucleotide
  Sense strand starting at position 704 of SEQ ID NO: 913749
uagagaugcuuggugggaa

SEQ ID NO: 950951 - RNA, 19 nt, Artificial Sequence
  Description of Artificial Sequence: Synthetic oligonucleotide
  Antisense strand to SEQ ID NO: 950950
uucccaccaagcaucucua

SEQ ID NO: 950952 - RNA, 19 nt, Artificial Sequence
  Description of Artificial Sequence: Synthetic oligonucleotide
  Sense strand starting at position 3025 of SEQ ID NO: 913749
guaucugaccaucagucua

SEQ ID NO: 950953 - RNA, 19 nt, Artificial Sequence
  Description of Artificial Sequence: Synthetic oligonucleotide
  Antisense strand to SEQ ID NO: 950952
uagacugauggucagauac

SEQ ID NO: 950954 - RNA, 19 nt, Artificial Sequence
  Description of Artificial Sequence: Synthetic oligonucleotide
  Sense strand starting at position 128 of SEQ ID NO: 913749
gugaauuugugagugugua

SEQ ID NO: 950955 - RNA, 19 nt, Artificial Sequence
  Description of Artificial Sequence: Synthetic oligonucleotide
  Antisense strand to SEQ ID NO: 950954
uacacacucacaaauucac

SEQ ID NO: 950956 - RNA, 19 nt, Artificial Sequence
  Description of Artificial Sequence: Synthetic oligonucleotide
  Sense strand starting at position 3981 of SEQ ID NO: 913749
cguacagguuuguuauuua

SEQ ID NO: 950957 - RNA, 19 nt, Artificial Sequence
  Description of Artificial Sequence: Synthetic oligonucleotide
  Antisense strand to SEQ ID NO: 950956
uaaauaacaaaccuguacg

SEQ ID NO: 950958 - RNA, 19 nt, Artificial Sequence
  Description of Artificial Sequence: Synthetic oligonucleotide
  Sense strand starting at position 1367 of SEQ ID NO: 913749
gaguaauucccuuaggucu

SEQ ID NO: 950959 - RNA, 19 nt, Artificial Sequence
  Description of Artificial Sequence: Synthetic oligonucleotide
  Antisense strand to SEQ ID NO: 950958
agaccuaagggaauuacuc

SEQ ID NO: 950960 - RNA, 19 nt, Artificial Sequence
  Description of Artificial Sequence: Synthetic oligonucleotide
  Sense strand starting at position 2671 of SEQ ID NO: 913749
ucuaaugauugucuauuga

SEQ ID NO: 950961 - RNA, 19 nt, Artificial Sequence
  Description of Artificial Sequence: Synthetic oligonucleotide
  Antisense strand to SEQ ID NO: 950960
ucaauagacaaucauuaga

SEQ ID NO: 950962 - RNA, 19 nt, Artificial Sequence
  Description of Artificial Sequence: Synthetic oligonucleotide
  Sense strand starting at position 2693 of SEQ ID NO: 913749
ucuauuggaugucuccaaa

SEQ ID NO: 950963 - RNA, 19 nt, Artificial Sequence
  Description of Artificial Sequence: Synthetic oligonucleotide
  Antisense strand to SEQ ID NO: 950962
uuuggagacauccaauaga

SEQ ID NO: 950964 - RNA, 19 nt, Artificial Sequence
  Description of Artificial Sequence: Synthetic oligonucleotide
  Sense strand starting at position 1443 of SEQ ID NO: 913749
ccucucauugcaggaaaua

SEQ ID NO: 950965 - RNA, 19 nt, Artificial Sequence
  Description of Artificial Sequence: Synthetic oligonucleotide
  Antisense strand to SEQ ID NO: 950964
uauuuccugcaaugagagg

SEQ ID NO: 950966 - RNA, 19 nt, Artificial Sequence
  Description of Artificial Sequence: Synthetic oligonucleotide
  Sense strand starting at position 1365 of SEQ ID NO: 913749
aagaguaauucccuuaggu

SEQ ID NO: 950967 - RNA, 19 nt, Artificial Sequence
  Description of Artificial Sequence: Synthetic oligonucleotide
  Antisense strand to SEQ ID NO: 950966
accuaagggaauuacucuu

SEQ ID NO: 950968 - RNA, 19 nt, Artificial Sequence
  Description of Artificial Sequence: Synthetic oligonucleotide
  Sense strand starting at position 210 of SEQ ID NO: 913749
cagugaguucuccagguga

SEQ ID NO: 950969 - RNA, 19 nt, Artificial Sequence
  Description of Artificial Sequence: Synthetic oligonucleotide
  Antisense strand to SEQ ID NO: 950968
ucaccuggagaacucacug

SEQ ID NO: 950970 - RNA, 19 nt, Artificial Sequence
  Description of Artificial Sequence: Synthetic oligonucleotide
  Sense strand starting at position 805 of SEQ ID NO: 913749
guuuacugagauuaugcuu

SEQ ID NO: 950971 - RNA, 19 nt, Artificial Sequence
  Description of Artificial Sequence: Synthetic oligonucleotide
  Antisense strand to SEQ ID NO: 950970
aagcauaaucucaguaaac

SEQ ID NO: 950972 - RNA, 19 nt, Artificial Sequence
  Description of Artificial Sequence: Synthetic oligonucleotide
  Sense strand starting at position 810 of SEQ ID NO: 913749
cugagauuaugcuuuauau

SEQ ID NO: 950973 - RNA, 19 nt, Artificial Sequence
  Description of Artificial Sequence: Synthetic oligonucleotide
  Antisense strand to SEQ ID NO: 950972
auauaaagcauaaucucag

SEQ ID NO: 950974 - RNA, 19 nt, Artificial Sequence
  Description of Artificial Sequence: Synthetic oligonucleotide
  Sense strand starting at position 2187 of SEQ ID NO: 913749
ggauaugccucauuacauc

SEQ ID NO: 950975 - RNA, 19 nt, Artificial Sequence
  Description of Artificial Sequence: Synthetic oligonucleotide
  Antisense strand to SEQ ID NO: 950974
gauguaaugaggcauaucc

SEQ ID NO: 950976 - RNA, 19 nt, Artificial Sequence
  Description of Artificial Sequence: Synthetic oligonucleotide
  Sense strand starting at position 157 of SEQ ID NO: 913749
cagaguuccucaguggaug

SEQ ID NO: 950977 - RNA, 19 nt, Artificial Sequence
  Description of Artificial Sequence: Synthetic oligonucleotide
  Antisense strand to SEQ ID NO: 950976
cauccacugaggaacucug

SEQ ID NO: 950978 - RNA, 19 nt, Artificial Sequence
  Description of Artificial Sequence: Synthetic oligonucleotide
  Sense strand starting at position 2670 of SEQ ID NO: 913749
uucuaaugauugucuauug

SEQ ID NO: 950979 - RNA, 19 nt, Artificial Sequence
  Description of Artificial Sequence: Synthetic oligonucleotide
  Antisense strand to SEQ ID NO: 950978
caauagacaaucauuagaa

SEQ ID NO: 950980 - RNA, 19 nt, Artificial Sequence
  Description of Artificial Sequence: Synthetic oligonucleotide
  Sense strand starting at position 287 of SEQ ID NO: 913749
uccuauagccucuggaaau

SEQ ID NO: 950981 - RNA, 19 nt, Artificial Sequence
  Description of Artificial Sequence: Synthetic oligonucleotide
  Antisense strand to SEQ ID NO: 950980
auuuccagaggcuauagga

SEQ ID NO: 950982 - RNA, 19 nt, Artificial Sequence
  Description of Artificial Sequence: Synthetic oligonucleotide
  Sense strand starting at position 1515 of SEQ ID NO: 913749
cauguaguuccguagggaa

SEQ ID NO: 950983 - RNA, 19 nt, Artificial Sequence
  Description of Artificial Sequence: Synthetic oligonucleotide
  Antisense strand to SEQ ID NO: 950982
uucccuacggaacuacaug

SEQ ID NO: 950984 - RNA, 19 nt, Artificial Sequence
  Description of Artificial Sequence: Synthetic oligonucleotide
  Sense strand starting at position 1401 of SEQ ID NO: 913749
aaguuuguggcugagugaa

SEQ ID NO: 950985 - RNA, 19 nt, Artificial Sequence
  Description of Artificial Sequence: Synthetic oligonucleotide
  Antisense strand to SEQ ID NO: 950984
uucacucagccacaaacuu

SEQ ID NO: 950986 - RNA, 19 nt, Artificial Sequence
  Description of Artificial Sequence: Synthetic oligonucleotide
  Sense strand starting at position 324 of SEQ ID NO: 913749
accugaguccagcauaguu

SEQ ID NO: 950987 - RNA, 19 nt, Artificial Sequence
  Description of Artificial Sequence: Synthetic oligonucleotide
  Antisense strand to SEQ ID NO: 950986
aacuaugcuggacucaggu

SEQ ID NO: 950988 - RNA, 19 nt, Artificial Sequence
  Description of Artificial Sequence: Synthetic oligonucleotide
  Sense strand starting at position 871 of SEQ ID NO: 913749
uugguaaauguuuaugcau

SEQ ID NO: 950989 - RNA, 19 nt, Artificial Sequence
  Description of Artificial Sequence: Synthetic oligonucleotide
  Antisense strand to SEQ ID NO: 950988
augcauaaacauuuaccaa

SEQ ID NO: 950990 - RNA, 19 nt, Artificial Sequence
  Description of Artificial Sequence: Synthetic oligonucleotide
  Sense strand starting at position 1665 of SEQ ID NO: 913749
gugccugcacaguaagaaa

SEQ ID NO: 950991 - RNA, 19 nt, Artificial Sequence
  Description of Artificial Sequence: Synthetic oligonucleotide
  Antisense strand to SEQ ID NO: 950990
uuucuuacugugcaggcac

SEQ ID NO: 950992 - RNA, 19 nt, Artificial Sequence
  Description of Artificial Sequence: Synthetic oligonucleotide
  Sense strand starting at position 850 of SEQ ID NO: 913749
caguguauagucugaugag

SEQ ID NO: 950993 - RNA, 19 nt, Artificial Sequence
  Description of Artificial Sequence: Synthetic oligonucleotide
  Antisense strand to SEQ ID NO: 950992
cucaucagacuauacacug

SEQ ID NO: 950994 - RNA, 19 nt, Artificial Sequence
  Description of Artificial Sequence: Synthetic oligonucleotide
  Sense strand starting at position 3927 of SEQ ID NO: 913749
aucauaucucauuguaggu

SEQ ID NO: 950995 - RNA, 19 nt, Artificial Sequence
  Description of Artificial Sequence: Synthetic oligonucleotide
  Antisense strand to SEQ ID NO: 950994
accuacaaugagauaugau

SEQ ID NO: 950996 - RNA, 19 nt, Artificial Sequence
  Description of Artificial Sequence: Synthetic oligonucleotide
  Sense strand starting at position 1162 of SEQ ID NO: 913749
uuguaagaauuguuucuuc

SEQ ID NO: 950997 - RNA, 19 nt, Artificial Sequence
  Description of Artificial Sequence: Synthetic oligonucleotide
  Antisense strand to SEQ ID NO: 950996
gaagaaacaauucuuacaa

SEQ ID NO: 950998 - RNA, 19 nt, Artificial Sequence
  Description of Artificial Sequence: Synthetic oligonucleotide
  Sense strand starting at position 874 of SEQ ID NO: 913749
guaaauguuuaugcauaug

SEQ ID NO: 950999 - RNA, 19 nt, Artificial Sequence
  Description of Artificial Sequence: Synthetic oligonucleotide
  Antisense strand to SEQ ID NO: 950998
cauaugcauaaacauuuac

SEQ ID NO: 951000 - RNA, 19 nt, Artificial Sequence
  Description of Artificial Sequence: Synthetic oligonucleotide
  Sense strand starting at position 2057 of SEQ ID NO: 913749
guggaagcauuccuaaugu

SEQ ID NO: 951001 - RNA, 19 nt, Artificial Sequence
  Description of Artificial Sequence: Synthetic oligonucleotide
  Antisense strand to SEQ ID NO: 951000
acauuaggaaugcuuccac

SEQ ID NO: 951002 - RNA, 19 nt, Artificial Sequence
  Description of Artificial Sequence: Synthetic oligonucleotide
  Sense strand starting at position 3154 of SEQ ID NO: 913749
gcgagcauacaaugaguaa

SEQ ID NO: 951003 - RNA, 19 nt, Artificial Sequence
  Description of Artificial Sequence: Synthetic oligonucleotide
  Antisense strand to SEQ ID NO: 951002
uuacucauuguaugcucgc

SEQ ID NO: 951004 - RNA, 19 nt, Artificial Sequence
  Description of Artificial Sequence: Synthetic oligonucleotide
  Sense strand starting at position 1236 of SEQ ID NO: 913749
guggguuugcaguacugau

SEQ ID NO: 951005 - RNA, 19 nt, Artificial Sequence
  Description of Artificial Sequence: Synthetic oligonucleotide
  Antisense strand to SEQ ID NO: 951004
aucaguacugcaaacccac

SEQ ID NO: 951006 - RNA, 19 nt, Artificial Sequence
  Description of Artificial Sequence: Synthetic oligonucleotide
  Sense strand starting at position 1240 of SEQ ID NO: 913749
guuugcaguacugauugua

SEQ ID NO: 951007 - RNA, 19 nt, Artificial Sequence
  Description of Artificial Sequence: Synthetic oligonucleotide
  Antisense strand to SEQ ID NO: 951006
uacaaucaguacugcaaac

SEQ ID NO: 951008 - RNA, 19 nt, Artificial Sequence
  Description of Artificial Sequence: Synthetic oligonucleotide
  Sense strand starting at position 3792 of SEQ ID NO: 913749
ccgaacuguuauccauagu

SEQ ID NO: 951009 - RNA, 19 nt, Artificial Sequence
  Description of Artificial Sequence: Synthetic oligonucleotide
  Antisense strand to SEQ ID NO: 951008
acuauggauaacaguucgg

SEQ ID NO: 951010 - RNA, 19 nt, Artificial Sequence
  Description of Artificial Sequence: Synthetic oligonucleotide
  Sense strand starting at position 2379 of SEQ ID NO: 913750
auuucuguuggguguaaac

SEQ ID NO: 951011 - RNA, 19 nt, Artificial Sequence
  Description of Artificial Sequence: Synthetic oligonucleotide
  Antisense strand to SEQ ID NO: 951010
guuuacacccaacagaaau

SEQ ID NO: 951012 - RNA, 19 nt, Artificial Sequence
  Description of Artificial Sequence: Synthetic oligonucleotide
  Sense strand starting at position 3137 of SEQ ID NO: 913750
ugaaauauugucuaccuug

SEQ ID NO: 951013 - RNA, 19 nt, Artificial Sequence
  Description of Artificial Sequence: Synthetic oligonucleotide
  Antisense strand to SEQ ID NO: 951012
caagguagacaauauuuca

SEQ ID NO: 951014 - RNA, 19 nt, Artificial Sequence
  Description of Artificial Sequence: Synthetic oligonucleotide
  Sense strand starting at position 2544 of SEQ ID NO: 913750
uaaagacaagagugguauu

SEQ ID NO: 951015 - RNA, 19 nt, Artificial Sequence
  Description of Artificial Sequence: Synthetic oligonucleotide
  Antisense strand to SEQ ID NO: 951014
aauaccacucuugucuuua

SEQ ID NO: 951016 - RNA, 19 nt, Artificial Sequence
  Description of Artificial Sequence: Synthetic oligonucleotide
  Sense strand starting at position 2386 of SEQ ID NO: 913750
uuggguguaaacugagaaa

SEQ ID NO: 951017 - RNA, 19 nt, Artificial Sequence
  Description of Artificial Sequence: Synthetic oligonucleotide
  Antisense strand to SEQ ID NO: 951016
uuucucaguuuacacccaa

SEQ ID NO: 951018 - RNA, 19 nt, Artificial Sequence
  Description of Artificial Sequence: Synthetic oligonucleotide
  Sense strand starting at position 2096 of SEQ ID NO: 913750
gucuuucggaguugaauuu

SEQ ID NO: 951019 - RNA, 19 nt, Artificial Sequence
  Description of Artificial Sequence: Synthetic oligonucleotide
  Antisense strand to SEQ ID NO: 951018
aaauucaacuccgaaagac

SEQ ID NO: 951020 - RNA, 19 nt, Artificial Sequence
  Description of Artificial Sequence: Synthetic oligonucleotide
  Sense strand starting at position 2477 of SEQ ID NO: 913750
cccacaauuguaggagacu

SEQ ID NO: 951021 - RNA, 19 nt, Artificial Sequence
  Description of Artificial Sequence: Synthetic oligonucleotide
  Antisense strand to SEQ ID NO: 951020
agucuccuacaauuguggg

SEQ ID NO: 951022 - RNA, 19 nt, Artificial Sequence
  Description of Artificial Sequence: Synthetic oligonucleotide
  Sense strand starting at position 2513 of SEQ ID NO: 913750
ucgccaauggugcuuugua

SEQ ID NO: 951023 - RNA, 19 nt, Artificial Sequence
  Description of Artificial Sequence: Synthetic oligonucleotide
  Antisense strand to SEQ ID NO: 951022
uacaaagcaccauuggcga

SEQ ID NO: 951024 - RNA, 19 nt, Artificial Sequence
  Description of Artificial Sequence: Synthetic oligonucleotide
  Sense strand starting at position 1682 of SEQ ID NO: 913750
ugcgcuggaaaugaauaaa

SEQ ID NO: 951025 - RNA, 19 nt, Artificial Sequence
  Description of Artificial Sequence: Synthetic oligonucleotide
  Antisense strand to SEQ ID NO: 951024
uuuauucauuuccagcgca

SEQ ID NO: 951026 - RNA, 19 nt, Artificial Sequence
  Description of Artificial Sequence: Synthetic oligonucleotide
  Sense strand starting at position 3202 of SEQ ID NO: 913750
gcgagugccucauuuaaag

SEQ ID NO: 951027 - RNA, 19 nt, Artificial Sequence
  Description of Artificial Sequence: Synthetic oligonucleotide
  Antisense strand to SEQ ID NO: 951026
cuuuaaaugaggcacucgc

SEQ ID NO: 951028 - RNA, 19 nt, Artificial Sequence
  Description of Artificial Sequence: Synthetic oligonucleotide
  Sense strand starting at position 114 of SEQ ID NO: 913750
agagguaacacguaucuuu

SEQ ID NO: 951029 - RNA, 19 nt, Artificial Sequence
  Description of Artificial Sequence: Synthetic oligonucleotide
  Antisense strand to SEQ ID NO: 951028
aaagauacguguuaccucu

SEQ ID NO: 951030 - RNA, 19 nt, Artificial Sequence
  Description of Artificial Sequence: Synthetic oligonucleotide
  Sense strand starting at position 922 of SEQ ID NO: 913750
ucauuaaaugcggaagguu

SEQ ID NO: 951031 - RNA, 19 nt, Artificial Sequence
  Description of Artificial Sequence: Synthetic oligonucleotide
  Antisense strand to SEQ ID NO: 951030
aaccuuccgcauuuaauga

SEQ ID NO: 951032 - RNA, 19 nt, Artificial Sequence
  Description of Artificial Sequence: Synthetic oligonucleotide
  Sense strand starting at position 67 of SEQ ID NO: 913750
uaacuuugucuuugggaag

SEQ ID NO: 951033 - RNA, 19 nt, Artificial Sequence
  Description of Artificial Sequence: Synthetic oligonucleotide
  Antisense strand to SEQ ID NO: 951032
cuucccaaagacaaaguua

SEQ ID NO: 951034 - RNA, 19 nt, Artificial Sequence
  Description of Artificial Sequence: Synthetic oligonucleotide
  Sense strand starting at position 2397 of SEQ ID NO: 913750
cugagaaauuuggagcuaa

SEQ ID NO: 951035 - RNA, 19 nt, Artificial Sequence
  Description of Artificial Sequence: Synthetic oligonucleotide
  Antisense strand to SEQ ID NO: 951034
uuagcuccaaauuucucag

SEQ ID NO: 951036 - RNA, 19 nt, Artificial Sequence
  Description of Artificial Sequence: Synthetic oligonucleotide
  Sense strand starting at position 2376 of SEQ ID NO: 913750
guuauuucuguugggugua

SEQ ID NO: 951037 - RNA, 19 nt, Artificial Sequence
  Description of Artificial Sequence: Synthetic oligonucleotide
  Antisense strand to SEQ ID NO: 951036
uacacccaacagaaauaac

SEQ ID NO: 951038 - RNA, 19 nt, Artificial Sequence
  Description of Artificial Sequence: Synthetic oligonucleotide
  Sense strand starting at position 2183 of SEQ ID NO: 913750
gcccguguaacuguuuguu

SEQ ID NO: 951039 - RNA, 19 nt, Artificial Sequence
  Description of Artificial Sequence: Synthetic oligonucleotide
  Antisense strand to SEQ ID NO: 951038
aacaaacaguuacacgggc

SEQ ID NO: 951040 - RNA, 19 nt, Artificial Sequence
  Description of Artificial Sequence: Synthetic oligonucleotide
  Sense strand starting at position 727 of SEQ ID NO: 913750
gucaacugauaggauuuau

SEQ ID NO: 951041 - RNA, 19 nt, Artificial Sequence
  Description of Artificial Sequence: Synthetic oligonucleotide
  Antisense strand to SEQ ID NO: 951040
auaaauccuaucaguugac

SEQ ID NO: 951042 - RNA, 19 nt, Artificial Sequence
  Description of Artificial Sequence: Synthetic oligonucleotide
  Sense strand starting at position 3145 of SEQ ID NO: 913750
ugucuaccuugaucacuga

SEQ ID NO: 951043 - RNA, 19 nt, Artificial Sequence
  Description of Artificial Sequence: Synthetic oligonucleotide
  Antisense strand to SEQ ID NO: 951042
ucagugaucaagguagaca

SEQ ID NO: 951044 - RNA, 19 nt, Artificial Sequence
  Description of Artificial Sequence: Synthetic oligonucleotide
  Sense strand starting at position 2389 of SEQ ID NO: 913750
gguguaaacugagaaauuu

SEQ ID NO: 951045 - RNA, 19 nt, Artificial Sequence
  Description of Artificial Sequence: Synthetic oligonucleotide
  Antisense strand to SEQ ID NO: 951044
aaauuucucaguuuacacc

SEQ ID NO: 951046 - RNA, 19 nt, Artificial Sequence
  Description of Artificial Sequence: Synthetic oligonucleotide
  Sense strand starting at position 3600 of SEQ ID NO: 913750
gagcuuaauacguagguga

SEQ ID NO: 951047 - RNA, 19 nt, Artificial Sequence
  Description of Artificial Sequence: Synthetic oligonucleotide
  Antisense strand to SEQ ID NO: 951046
ucaccuacguauuaagcuc

SEQ ID NO: 951048 - RNA, 19 nt, Artificial Sequence
  Description of Artificial Sequence: Synthetic oligonucleotide
  Sense strand starting at position 647 of SEQ ID NO: 913750
guggguggcacuuaaacuu

SEQ ID NO: 951049 - RNA, 19 nt, Artificial Sequence
  Description of Artificial Sequence: Synthetic oligonucleotide
  Antisense strand to SEQ ID NO: 951048
aaguuuaagugccacccac

SEQ ID NO: 951050 - RNA, 19 nt, Artificial Sequence
  Description of Artificial Sequence: Synthetic oligonucleotide
  Sense strand starting at position 66 of SEQ ID NO: 913750
guaacuuugucuuugggaa

SEQ ID NO: 951051 - RNA, 19 nt, Artificial Sequence
  Description of Artificial Sequence: Synthetic oligonucleotide
  Antisense strand to SEQ ID NO: 951050
uucccaaagacaaaguuac

SEQ ID NO: 951052 - RNA, 19 nt, Artificial Sequence
  Description of Artificial Sequence: Synthetic oligonucleotide
  Sense strand starting at position 143 of SEQ ID NO: 913750
guucuucugcuaggaagaa

SEQ ID NO: 951053 - RNA, 19 nt, Artificial Sequence
  Description of Artificial Sequence: Synthetic oligonucleotide
  Antisense strand to SEQ ID NO: 951052
uucuuccuagcagaagaac

SEQ ID NO: 951054 - RNA, 19 nt, Artificial Sequence
  Description of Artificial Sequence: Synthetic oligonucleotide
  Sense strand starting at position 3588 of SEQ ID NO: 913750
cuaagugaugcugagcuua

SEQ ID NO: 951055 - RNA, 19 nt, Artificial Sequence
  Description of Artificial Sequence: Synthetic oligonucleotide
  Antisense strand to SEQ ID NO: 951054
uaagcucagcaucacuuag

SEQ ID NO: 951056 - RNA, 19 nt, Artificial Sequence
  Description of Artificial Sequence: Synthetic oligonucleotide
  Sense strand starting at position 2373 of SEQ ID NO: 913750
gcuguuauuucuguugggu

SEQ ID NO: 951057 - RNA, 19 nt, Artificial Sequence
  Description of Artificial Sequence: Synthetic oligonucleotide
  Antisense strand to SEQ ID NO: 951056
acccaacagaaauaacagc

SEQ ID NO: 951058 - RNA, 19 nt, Artificial Sequence
  Description of Artificial Sequence: Synthetic oligonucleotide
  Sense strand starting at position 2489 of SEQ ID NO: 913750
ggagacugcuucucuucca

SEQ ID NO: 951059 - RNA, 19 nt, Artificial Sequence
  Description of Artificial Sequence: Synthetic oligonucleotide
  Antisense strand to SEQ ID NO: 951058
uggaagagaagcagucucc

SEQ ID NO: 951060 - RNA, 19 nt, Artificial Sequence
  Description of Artificial Sequence: Synthetic oligonucleotide
  Sense strand starting at position 1681 of SEQ ID NO: 913750
cugcgcuggaaaugaauaa

SEQ ID NO: 951061 - RNA, 19 nt, Artificial Sequence
  Description of Artificial Sequence: Synthetic oligonucleotide
  Antisense strand to SEQ ID NO: 951060
uuauucauuuccagcgcag

SEQ ID NO: 951062 - RNA, 19 nt, Artificial Sequence
  Description of Artificial Sequence: Synthetic oligonucleotide
  Sense strand starting at position 717 of SEQ ID NO: 913750
gugcuaagcagucaacuga

SEQ ID NO: 951063 - RNA, 19 nt, Artificial Sequence
  Description of Artificial Sequence: Synthetic oligonucleotide
  Antisense strand to SEQ ID NO: 951062
ucaguugacugcuuagcac

SEQ ID NO: 951064 - RNA, 19 nt, Artificial Sequence
  Description of Artificial Sequence: Synthetic oligonucleotide
  Sense strand starting at position 3635 of SEQ ID NO: 913750
gguuccuuccaguagguuu

SEQ ID NO: 951065 - RNA, 19 nt, Artificial Sequence
  Description of Artificial Sequence: Synthetic oligonucleotide
  Antisense strand to SEQ ID NO: 951064
aaaccuacuggaaggaacc

SEQ ID NO: 951066 - RNA, 19 nt, Artificial Sequence
  Description of Artificial Sequence: Synthetic oligonucleotide
  Sense strand starting at position 3590 of SEQ ID NO: 913750
aagugaugcugagcuuaau

SEQ ID NO: 951067 - RNA, 19 nt, Artificial Sequence
  Description of Artificial Sequence: Synthetic oligonucleotide
  Antisense strand to SEQ ID NO: 951066
auuaagcucagcaucacuu

SEQ ID NO: 951068 - RNA, 19 nt, Artificial Sequence
  Description of Artificial Sequence: Synthetic oligonucleotide
  Sense strand starting at position 2486 of SEQ ID NO: 913750
guaggagacugcuucucuu

SEQ ID NO: 951069 - RNA, 19 nt, Artificial Sequence
  Description of Artificial Sequence: Synthetic oligonucleotide
  Antisense strand to SEQ ID NO: 951068
aagagaagcagucuccuac

SEQ ID NO: 951070 - RNA, 19 nt, Artificial Sequence
  Description of Artificial Sequence: Synthetic oligonucleotide
  Sense strand starting at position 2361 of SEQ ID NO: 913750
cuauacaucuaugcuguua

SEQ ID NO: 951071 - RNA, 19 nt, Artificial Sequence
  Description of Artificial Sequence: Synthetic oligonucleotide
  Antisense strand to SEQ ID NO: 951070
uaacagcauagauguauag

SEQ ID NO: 951072 - RNA, 19 nt, Artificial Sequence
  Description of Artificial Sequence: Synthetic oligonucleotide
  Sense strand starting at position 2040 of SEQ ID NO: 913750
accgaaacuuaauagaaga

SEQ ID NO: 951073 - RNA, 19 nt, Artificial Sequence
  Description of Artificial Sequence: Synthetic oligonucleotide
  Antisense strand to SEQ ID NO: 951072
ucuucuauuaaguuucggu

SEQ ID NO: 951074 - RNA, 19 nt, Artificial Sequence
  Description of Artificial Sequence: Synthetic oligonucleotide
  Sense strand starting at position 2720 of SEQ ID NO: 913750
uugaguuaaugucuguauu

SEQ ID NO: 951075 - RNA, 19 nt, Artificial Sequence
  Description of Artificial Sequence: Synthetic oligonucleotide
  Antisense strand to SEQ ID NO: 951074
aauacagacauuaacucaa

SEQ ID NO: 951076 - RNA, 19 nt, Artificial Sequence
  Description of Artificial Sequence: Synthetic oligonucleotide
  Sense strand starting at position 3700 of SEQ ID NO: 913750
gugcuacaguuguuaaaga

SEQ ID NO: 951077 - RNA, 19 nt, Artificial Sequence
  Description of Artificial Sequence: Synthetic oligonucleotide
  Antisense strand to SEQ ID NO: 951076
ucuuuaacaacuguagcac

SEQ ID NO: 951078 - RNA, 19 nt, Artificial Sequence
  Description of Artificial Sequence: Synthetic oligonucleotide
  Sense strand starting at position 1075 of SEQ ID NO: 913750
acaaucugugcuugguaca

SEQ ID NO: 951079 - RNA, 19 nt, Artificial Sequence
  Description of Artificial Sequence: Synthetic oligonucleotide
  Antisense strand to SEQ ID NO: 951078
uguaccaagcacagauugu

SEQ ID NO: 951080 - RNA, 19 nt, Artificial Sequence
  Description of Artificial Sequence: Synthetic oligonucleotide
  Sense strand starting at position 3263 of SEQ ID NO: 913750
ggucaccuguggcuauuaa

SEQ ID NO: 951081 - RNA, 19 nt, Artificial Sequence
  Description of Artificial Sequence: Synthetic oligonucleotide
  Antisense strand to SEQ ID NO: 951080
uuaauagccacaggugacc

SEQ ID NO: 951082 - RNA, 19 nt, Artificial Sequence
  Description of Artificial Sequence: Synthetic oligonucleotide
  Sense strand starting at position 2721 of SEQ ID NO: 913750
ugaguuaaugucuguauuc

SEQ ID NO: 951083 - RNA, 19 nt, Artificial Sequence
  Description of Artificial Sequence: Synthetic oligonucleotide
  Antisense strand to SEQ ID NO: 951082
gaauacagacauuaacuca

SEQ ID NO: 951084 - RNA, 19 nt, Artificial Sequence
  Description of Artificial Sequence: Synthetic oligonucleotide
  Sense strand starting at position 2347 of SEQ ID NO: 913750
gcaacacugcaaugcuaua

SEQ ID NO: 951085 - RNA, 19 nt, Artificial Sequence
  Description of Artificial Sequence: Synthetic oligonucleotide
  Antisense strand to SEQ ID NO: 951084
uauagcauugcaguguugc

SEQ ID NO: 951086 - RNA, 19 nt, Artificial Sequence
  Description of Artificial Sequence: Synthetic oligonucleotide
  Sense strand starting at position 820 of SEQ ID NO: 913750
gagaaacuuugggaucacu

SEQ ID NO: 951087 - RNA, 19 nt, Artificial Sequence
  Description of Artificial Sequence: Synthetic oligonucleotide
  Antisense strand to SEQ ID NO: 951086
agugaucccaaaguuucuc

SEQ ID NO: 951088 - RNA, 19 nt, Artificial Sequence
  Description of Artificial Sequence: Synthetic oligonucleotide
  Sense strand starting at position 78 of SEQ ID NO: 913750
uugggaagcuaauaagaga

SEQ ID NO: 951089 - RNA, 19 nt, Artificial Sequence
  Description of Artificial Sequence: Synthetic oligonucleotide
  Antisense strand to SEQ ID NO: 951088
ucucuuauuagcuucccaa

SEQ ID NO: 951090 - RNA, 19 nt, Artificial Sequence
  Description of Artificial Sequence: Synthetic oligonucleotide
  Sense strand starting at position 138 of SEQ ID NO: 913751
aaauaaggauugguuucua

SEQ ID NO: 951091 - RNA, 19 nt, Artificial Sequence
  Description of Artificial Sequence: Synthetic oligonucleotide
  Antisense strand to SEQ ID NO: 951090
uagaaaccaauccuuauuu

SEQ ID NO: 951092 - RNA, 19 nt, Artificial Sequence
  Description of Artificial Sequence: Synthetic oligonucleotide
  Sense strand starting at position 3175 of SEQ ID NO: 913751
acacuuguauuugucagua

SEQ ID NO: 951093 - RNA, 19 nt, Artificial Sequence
  Description of Artificial Sequence: Synthetic oligonucleotide
  Antisense strand to SEQ ID NO: 951092
uacugacaaauacaagugu

SEQ ID NO: 951094 - RNA, 19 nt, Artificial Sequence
  Description of Artificial Sequence: Synthetic oligonucleotide
  Sense strand starting at position 3023 of SEQ ID NO: 913751
ccaugaacuuaagcugaaa

SEQ ID NO: 951095 - RNA, 19 nt, Artificial Sequence
  Description of Artificial Sequence: Synthetic oligonucleotide
  Antisense strand to SEQ ID NO: 951094
uuucagcuuaaguucaugg

SEQ ID NO: 951096 - RNA, 19 nt, Artificial Sequence
  Description of Artificial Sequence: Synthetic oligonucleotide
  Sense strand starting at position 142 of SEQ ID NO: 913751
aaggauugguuucuaugga

SEQ ID NO: 951097 - RNA, 19 nt, Artificial Sequence
  Description of Artificial Sequence: Synthetic oligonucleotide
  Antisense strand to SEQ ID NO: 951096
uccauagaaaccaauccuu

SEQ ID NO: 951098 - RNA, 19 nt, Artificial Sequence
  Description of Artificial Sequence: Synthetic oligonucleotide
  Sense strand starting at position 3780 of SEQ ID NO: 913751
agcuaaauugauugaacau

SEQ ID NO: 951099 - RNA, 19 nt, Artificial Sequence
  Description of Artificial Sequence: Synthetic oligonucleotide
  Antisense strand to SEQ ID NO: 951098
auguucaaucaauuuagcu

SEQ ID NO: 951100 - RNA, 19 nt, Artificial Sequence
  Description of Artificial Sequence: Synthetic oligonucleotide
  Sense strand starting at position 150 of SEQ ID NO: 913751
guuucuauggaguaacaug

SEQ ID NO: 951101 - RNA, 19 nt, Artificial Sequence
  Description of Artificial Sequence: Synthetic oligonucleotide
  Antisense strand to SEQ ID NO: 951100
cauguuacuccauagaaac

SEQ ID NO: 951102 - RNA, 19 nt, Artificial Sequence
  Description of Artificial Sequence: Synthetic oligonucleotide
  Sense strand starting at position 3972 of SEQ ID NO: 913751
auuaaaugagcucauaugu

SEQ ID NO: 951103 - RNA, 19 nt, Artificial Sequence
  Description of Artificial Sequence: Synthetic oligonucleotide
  Antisense strand to SEQ ID NO: 951102
acauaugagcucauuuaau

SEQ ID NO: 951104 - RNA, 19 nt, Artificial Sequence
  Description of Artificial Sequence: Synthetic oligonucleotide
  Sense strand starting at position 79 of SEQ ID NO: 913751
uaauuauggucacugagau

SEQ ID NO: 951105 - RNA, 19 nt, Artificial Sequence
  Description of Artificial Sequence: Synthetic oligonucleotide
  Antisense strand to SEQ ID NO: 951104
aucucagugaccauaauua

SEQ ID NO: 951106 - RNA, 19 nt, Artificial Sequence
  Description of Artificial Sequence: Synthetic oligonucleotide
  Sense strand starting at position 3179 of SEQ ID NO: 913751
uuguauuugucaguacacu

SEQ ID NO: 951107 - RNA, 19 nt, Artificial Sequence
  Description of Artificial Sequence: Synthetic oligonucleotide
  Antisense strand to SEQ ID NO: 951106
aguguacugacaaauacaa

SEQ ID NO: 951108 - RNA, 19 nt, Artificial Sequence
  Description of Artificial Sequence: Synthetic oligonucleotide
  Sense strand starting at position 80 of SEQ ID NO: 913751
aauuauggucacugagauu

SEQ ID NO: 951109 - RNA, 19 nt, Artificial Sequence
  Description of Artificial Sequence: Synthetic oligonucleotide
  Antisense strand to SEQ ID NO: 951108
aaucucagugaccauaauu

SEQ ID NO: 951110 - RNA, 19 nt, Artificial Sequence
  Description of Artificial Sequence: Synthetic oligonucleotide
  Sense strand starting at position 3359 of SEQ ID NO: 913751
aggccugaagugcaauaaa

SEQ ID NO: 951111 - RNA, 19 nt, Artificial Sequence
  Description of Artificial Sequence: Synthetic oligonucleotide
  Antisense strand to SEQ ID NO: 951110
uuuauugcacuucaggccu

SEQ ID NO: 951112 - RNA, 19 nt, Artificial Sequence
  Description of Artificial Sequence: Synthetic oligonucleotide
  Sense strand starting at position 3420 of SEQ ID NO: 913751
guuaauaacuuagcaaaga

SEQ ID NO: 951113 - RNA, 19 nt, Artificial Sequence
  Description of Artificial Sequence: Synthetic oligonucleotide
  Antisense strand to SEQ ID NO: 951112
ucuuugcuaaguuauuaac

SEQ ID NO: 951114 - RNA, 19 nt, Artificial Sequence
  Description of Artificial Sequence: Synthetic oligonucleotide
  Sense strand starting at position 869 of SEQ ID NO: 913751
uaguccuaaguagggaaau

SEQ ID NO: 951115 - RNA, 19 nt, Artificial Sequence
  Description of Artificial Sequence: Synthetic oligonucleotide
  Antisense strand to SEQ ID NO: 951114
auuucccuacuuaggacua

SEQ ID NO: 951116 - RNA, 19 nt, Artificial Sequence
  Description of Artificial Sequence: Synthetic oligonucleotide
  Sense strand starting at position 2705 of SEQ ID NO: 913751
ucuggaucucuggaugcau

SEQ ID NO: 951117 - RNA, 19 nt, Artificial Sequence
  Description of Artificial Sequence: Synthetic oligonucleotide
  Antisense strand to SEQ ID NO: 951116
augcauccagagauccaga

SEQ ID NO: 951118 - RNA, 19 nt, Artificial Sequence
  Description of Artificial Sequence: Synthetic oligonucleotide
  Sense strand starting at position 147 of SEQ ID NO: 913751
uugguuucuauggaguaac

SEQ ID NO: 951119 - RNA, 19 nt, Artificial Sequence
  Description of Artificial Sequence: Synthetic oligonucleotide
  Antisense strand to SEQ ID NO: 951118
guuacuccauagaaaccaa

SEQ ID NO: 951120 - RNA, 19 nt, Artificial Sequence
  Description of Artificial Sequence: Synthetic oligonucleotide
  Sense strand starting at position 558 of SEQ ID NO: 913751
gguugaaugagcuaguaac

SEQ ID NO: 951121 - RNA, 19 nt, Artificial Sequence
  Description of Artificial Sequence: Synthetic oligonucleotide
  Antisense strand to SEQ ID NO: 951120
guuacuagcucauucaacc

SEQ ID NO: 951122 - RNA, 19 nt, Artificial Sequence
  Description of Artificial Sequence: Synthetic oligonucleotide
  Sense strand starting at position 1227 of SEQ ID NO: 913751
ugucuucuuccgcuuguca

SEQ ID NO: 951123 - RNA, 19 nt, Artificial Sequence
  Description of Artificial Sequence: Synthetic oligonucleotide
  Antisense strand to SEQ ID NO: 951122
ugacaagcggaagaagaca

SEQ ID NO: 951124 - RNA, 19 nt, Artificial Sequence
  Description of Artificial Sequence: Synthetic oligonucleotide
  Sense strand starting at position 3793 of SEQ ID NO: 913751
gaacaucgacuguagcaua

SEQ ID NO: 951125 - RNA, 19 nt, Artificial Sequence
  Description of Artificial Sequence: Synthetic oligonucleotide
  Antisense strand to SEQ ID NO: 951124
uaugcuacagucgauguuc

SEQ ID NO: 951126 - RNA, 19 nt, Artificial Sequence
  Description of Artificial Sequence: Synthetic oligonucleotide
  Sense strand starting at position 2011 of SEQ ID NO: 913751
ugacaacugcauggaguaa

SEQ ID NO: 951127 - RNA, 19 nt, Artificial Sequence
  Description of Artificial Sequence: Synthetic oligonucleotide
  Antisense strand to SEQ ID NO: 951126
uuacuccaugcaguuguca

SEQ ID NO: 951128 - RNA, 19 nt, Artificial Sequence
  Description of Artificial Sequence: Synthetic oligonucleotide
  Sense strand starting at position 1490 of SEQ ID NO: 913751
cgggcaggaucauuagaua

SEQ ID NO: 951129 - RNA, 19 nt, Artificial Sequence
  Description of Artificial Sequence: Synthetic oligonucleotide
  Antisense strand to SEQ ID NO: 951128
uaucuaaugauccugcccg

SEQ ID NO: 951130 - RNA, 19 nt, Artificial Sequence
  Description of Artificial Sequence: Synthetic oligonucleotide
  Sense strand starting at position 3380 of SEQ ID NO: 913751
acaguaagugauuauuguu

SEQ ID NO: 951131 - RNA, 19 nt, Artificial Sequence
  Description of Artificial Sequence: Synthetic oligonucleotide
  Antisense strand to SEQ ID NO: 951130
aacaauaaucacuuacugu

SEQ ID NO: 951132 - RNA, 19 nt, Artificial Sequence
  Description of Artificial Sequence: Synthetic oligonucleotide
  Sense strand starting at position 685 of SEQ ID NO: 913751
gaauaacuggugugacuac

SEQ ID NO: 951133 - RNA, 19 nt, Artificial Sequence
  Description of Artificial Sequence: Synthetic oligonucleotide
  Antisense strand to SEQ ID NO: 951132
guagucacaccaguuauuc

SEQ ID NO: 951134 - RNA, 19 nt, Artificial Sequence
  Description of Artificial Sequence: Synthetic oligonucleotide
  Sense strand starting at position 479 of SEQ ID NO: 913751
cauacagaggucugcauaa

SEQ ID NO: 951135 - RNA, 19 nt, Artificial Sequence
  Description of Artificial Sequence: Synthetic oligonucleotide
  Antisense strand to SEQ ID NO: 951134
uuaugcagaccucuguaug

SEQ ID NO: 951136 - RNA, 19 nt, Artificial Sequence
  Description of Artificial Sequence: Synthetic oligonucleotide
  Sense strand starting at position 549 of SEQ ID NO: 913751
gcaucuacagguugaauga

SEQ ID NO: 951137 - RNA, 19 nt, Artificial Sequence
  Description of Artificial Sequence: Synthetic oligonucleotide
  Antisense strand to SEQ ID NO: 951136
ucauucaaccuguagaugc

SEQ ID NO: 951138 - RNA, 19 nt, Artificial Sequence
  Description of Artificial Sequence: Synthetic oligonucleotide
  Sense strand starting at position 2010 of SEQ ID NO: 913751
cugacaacugcauggagua

SEQ ID NO: 951139 - RNA, 19 nt, Artificial Sequence
  Description of Artificial Sequence: Synthetic oligonucleotide
  Antisense strand to SEQ ID NO: 951138
uacuccaugcaguugucag

SEQ ID NO: 951140 - RNA, 19 nt, Artificial Sequence
  Description of Artificial Sequence: Synthetic oligonucleotide
  Sense strand starting at position 3615 of SEQ ID NO: 913751
agggauagagcugguggua

SEQ ID NO: 951141 - RNA, 19 nt, Artificial Sequence
  Description of Artificial Sequence: Synthetic oligonucleotide
  Antisense strand to SEQ ID NO: 951140
uaccaccagcucuaucccu

SEQ ID NO: 951142 - RNA, 19 nt, Artificial Sequence
  Description of Artificial Sequence: Synthetic oligonucleotide
  Sense strand starting at position 2961 of SEQ ID NO: 913751
guaucuuccguggauagac

SEQ ID NO: 951143 - RNA, 19 nt, Artificial Sequence
  Description of Artificial Sequence: Synthetic oligonucleotide
  Antisense strand to SEQ ID NO: 951142
gucuauccacggaagauac

SEQ ID NO: 951144 - RNA, 19 nt, Artificial Sequence
  Description of Artificial Sequence: Synthetic oligonucleotide
  Sense strand starting at position 3379 of SEQ ID NO: 913751
aacaguaagugauuauugu

SEQ ID NO: 951145 - RNA, 19 nt, Artificial Sequence
  Description of Artificial Sequence: Synthetic oligonucleotide
  Antisense strand to SEQ ID NO: 951144
acaauaaucacuuacuguu

SEQ ID NO: 951146 - RNA, 19 nt, Artificial Sequence
  Description of Artificial Sequence: Synthetic oligonucleotide
  Sense strand starting at position 3738 of SEQ ID NO: 913751
cuuauaguccuuuauaguu

SEQ ID NO: 951147 - RNA, 19 nt, Artificial Sequence
  Description of Artificial Sequence: Synthetic oligonucleotide
  Antisense strand to SEQ ID NO: 951146
aacuauaaaggacuauaag

SEQ ID NO: 951148 - RNA, 19 nt, Artificial Sequence
  Description of Artificial Sequence: Synthetic oligonucleotide
  Sense strand starting at position 1511 of SEQ ID NO: 913751
auacgaaggcuuuaaacgu

SEQ ID NO: 951149 - RNA, 19 nt, Artificial Sequence
  Description of Artificial Sequence: Synthetic oligonucleotide
  Antisense strand to SEQ ID NO: 951148
acguuuaaagccuucguau

SEQ ID NO: 951150 - RNA, 19 nt, Artificial Sequence
  Description of Artificial Sequence: Synthetic oligonucleotide
  Sense strand starting at position 556 of SEQ ID NO: 913751
cagguugaaugagcuagua

SEQ ID NO: 951151 - RNA, 19 nt, Artificial Sequence
  Description of Artificial Sequence: Synthetic oligonucleotide
  Antisense strand to SEQ ID NO: 951150
uacuagcucauucaaccug

SEQ ID NO: 951152 - RNA, 19 nt, Artificial Sequence
  Description of Artificial Sequence: Synthetic oligonucleotide
  Sense strand starting at position 2605 of SEQ ID NO: 913751
cugcuuuggcggagcaagu

SEQ ID NO: 951153 - RNA, 19 nt, Artificial Sequence
  Description of Artificial Sequence: Synthetic oligonucleotide
  Antisense strand to SEQ ID NO: 951152
acuugcuccgccaaagcag

SEQ ID NO: 951154 - RNA, 19 nt, Artificial Sequence
  Description of Artificial Sequence: Synthetic oligonucleotide
  Sense strand starting at position 83 of SEQ ID NO: 913751
uauggucacugagauuuac

SEQ ID NO: 951155 - RNA, 19 nt, Artificial Sequence
  Description of Artificial Sequence: Synthetic oligonucleotide
  Antisense strand to SEQ ID NO: 951154
guaaaucucagugaccaua

SEQ ID NO: 951156 - RNA, 19 nt, Artificial Sequence
  Description of Artificial Sequence: Synthetic oligonucleotide
  Sense strand starting at position 1302 of SEQ ID NO: 913751
uaguguuugcuagaacuug

SEQ ID NO: 951157 - RNA, 19 nt, Artificial Sequence
  Description of Artificial Sequence: Synthetic oligonucleotide
  Antisense strand to SEQ ID NO: 951156
caaguucuagcaaacacua

SEQ ID NO: 951158 - RNA, 19 nt, Artificial Sequence
  Description of Artificial Sequence: Synthetic oligonucleotide
  Sense strand starting at position 3260 of SEQ ID NO: 913751
gaguuaggcuuuccaacug

SEQ ID NO: 951159 - RNA, 19 nt, Artificial Sequence
  Description of Artificial Sequence: Synthetic oligonucleotide
  Antisense strand to SEQ ID NO: 951158
caguuggaaagccuaacuc

SEQ ID NO: 951160 - RNA, 19 nt, Artificial Sequence
  Description of Artificial Sequence: Synthetic oligonucleotide
  Sense strand starting at position 405 of SEQ ID NO: 913751
gaaauuuacuucggagaua

SEQ ID NO: 951161 - RNA, 19 nt, Artificial Sequence
  Description of Artificial Sequence: Synthetic oligonucleotide
  Antisense strand to SEQ ID NO: 951160
uaucuccgaaguaaauuuc

SEQ ID NO: 951162 - RNA, 19 nt, Artificial Sequence
  Description of Artificial Sequence: Synthetic oligonucleotide
  Sense strand starting at position 1591 of SEQ ID NO: 913751
cgacauccucgccaggauu

SEQ ID NO: 951163 - RNA, 19 nt, Artificial Sequence
  Description of Artificial Sequence: Synthetic oligonucleotide
  Antisense strand to SEQ ID NO: 951162
aauccuggcgaggaugucg

SEQ ID NO: 951164 - RNA, 19 nt, Artificial Sequence
  Description of Artificial Sequence: Synthetic oligonucleotide
  Sense strand starting at position 3252 of SEQ ID NO: 913751
gcuuuaaugaguuaggcuu

SEQ ID NO: 951165 - RNA, 19 nt, Artificial Sequence
  Description of Artificial Sequence: Synthetic oligonucleotide
  Antisense strand to SEQ ID NO: 951164
aagccuaacucauuaaagc

SEQ ID NO: 951166 - RNA, 19 nt, Artificial Sequence
  Description of Artificial Sequence: Synthetic oligonucleotide
  Sense strand starting at position 53 of SEQ ID NO: 913751
agauguguuuacccuccau

SEQ ID NO: 951167 - RNA, 19 nt, Artificial Sequence
  Description of Artificial Sequence: Synthetic oligonucleotide
  Antisense strand to SEQ ID NO: 951166
auggaggguaaacacaucu

SEQ ID NO: 951168 - RNA, 19 nt, Artificial Sequence
  Description of Artificial Sequence: Synthetic oligonucleotide
  Sense strand starting at position 2762 of SEQ ID NO: 913751
uuucccgagugauuacauu

SEQ ID NO: 951169 - RNA, 19 nt, Artificial Sequence
  Description of Artificial Sequence: Synthetic oligonucleotide
  Antisense strand to SEQ ID NO: 951168
aauguaaucacucgggaaa

SEQ ID NO: 951170 - RNA, 19 nt, Artificial Sequence
  Description of Artificial Sequence: Synthetic oligonucleotide
  Sense strand starting at position 180 of SEQ ID NO: 913752
cccgacuggauguaaauua

SEQ ID NO: 951171 - RNA, 19 nt, Artificial Sequence
  Description of Artificial Sequence: Synthetic oligonucleotide
  Antisense strand to SEQ ID NO: 951170
uaauuuacauccagucggg

SEQ ID NO: 951172 - RNA, 19 nt, Artificial Sequence
  Description of Artificial Sequence: Synthetic oligonucleotide
  Sense strand starting at position 3179 of SEQ ID NO: 913752
agucaacugguagggaaua

SEQ ID NO: 951173 - RNA, 19 nt, Artificial Sequence
  Description of Artificial Sequence: Synthetic oligonucleotide
  Antisense strand to SEQ ID NO: 951172
uauucccuaccaguugacu

SEQ ID NO: 951174 - RNA, 19 nt, Artificial Sequence
  Description of Artificial Sequence: Synthetic oligonucleotide
  Sense strand starting at position 3168 of SEQ ID NO: 913752
uggaacuauugagucaacu

SEQ ID NO: 951175 - RNA, 19 nt, Artificial Sequence
  Description of Artificial Sequence: Synthetic oligonucleotide
  Antisense strand to SEQ ID NO: 951174
aguugacucaauaguucca

SEQ ID NO: 951176 - RNA, 19 nt, Artificial Sequence
  Description of Artificial Sequence: Synthetic oligonucleotide
  Sense strand starting at position 374 of SEQ ID NO: 913752
agagcucccugacuauaaa

SEQ ID NO: 951177 - RNA, 19 nt, Artificial Sequence
  Description of Artificial Sequence: Synthetic oligonucleotide
  Antisense strand to SEQ ID NO: 951176
uuuauagucagggagcucu

SEQ ID NO: 951178 - RNA, 19 nt, Artificial Sequence
  Description of Artificial Sequence: Synthetic oligonucleotide
  Sense strand starting at position 3456 of SEQ ID NO: 913752
guggauauccaugagccua

SEQ ID NO: 951179 - RNA, 19 nt, Artificial Sequence
  Description of Artificial Sequence: Synthetic oligonucleotide
  Antisense strand to SEQ ID NO: 951178
uaggcucauggauauccac

SEQ ID NO: 951180 - RNA, 19 nt, Artificial Sequence
  Description of Artificial Sequence: Synthetic oligonucleotide
  Sense strand starting at position 3613 of SEQ ID NO: 913752
agguaaauguuucuugaaa

SEQ ID NO: 951181 - RNA, 19 nt, Artificial Sequence
  Description of Artificial Sequence: Synthetic oligonucleotide
  Antisense strand to SEQ ID NO: 951180
uuucaagaaacauuuaccu

SEQ ID NO: 951182 - RNA, 19 nt, Artificial Sequence
  Description of Artificial Sequence: Synthetic oligonucleotide
  Sense strand starting at position 2236 of SEQ ID NO: 913752
acgagacaucuccaagccu

SEQ ID NO: 951183 - RNA, 19 nt, Artificial Sequence
  Description of Artificial Sequence: Synthetic oligonucleotide
  Antisense strand to SEQ ID NO: 951182
aggcuuggagaugucucgu

SEQ ID NO: 951184 - RNA, 19 nt, Artificial Sequence
  Description of Artificial Sequence: Synthetic oligonucleotide
  Sense strand starting at position 2955 of SEQ ID NO: 913752
gcauguauacaauagagca

SEQ ID NO: 951185 - RNA, 19 nt, Artificial Sequence
  Description of Artificial Sequence: Synthetic oligonucleotide
  Antisense strand to SEQ ID NO: 951184
ugcucuauuguauacaugc

SEQ ID NO: 951186 - RNA, 19 nt, Artificial Sequence
  Description of Artificial Sequence: Synthetic oligonucleotide
  Sense strand starting at position 3614 of SEQ ID NO: 913752
gguaaauguuucuugaaac

SEQ ID NO: 951187 - RNA, 19 nt, Artificial Sequence
  Description of Artificial Sequence: Synthetic oligonucleotide
  Antisense strand to SEQ ID NO: 951186
guuucaagaaacauuuacc

SEQ ID NO: 951188 - RNA, 19 nt, Artificial Sequence
  Description of Artificial Sequence: Synthetic oligonucleotide
  Sense strand starting at position 1685 of SEQ ID NO: 913752
gggcaaagucaucggagag

SEQ ID NO: 951189 - RNA, 19 nt, Artificial Sequence
  Description of Artificial Sequence: Synthetic oligonucleotide
  Antisense strand to SEQ ID NO: 951188
cucuccgaugacuuugccc

SEQ ID NO: 951190 - RNA, 19 nt, Artificial Sequence
  Description of Artificial Sequence: Synthetic oligonucleotide
  Sense strand starting at position 226 of SEQ ID NO: 913752
agaucauggcguuacuaau

SEQ ID NO: 951191 - RNA, 19 nt, Artificial Sequence
  Description of Artificial Sequence: Synthetic oligonucleotide
  Antisense strand to SEQ ID NO: 951190
auuaguaacgccaugaucu

SEQ ID NO: 951192 - RNA, 19 nt, Artificial Sequence
  Description of Artificial Sequence: Synthetic oligonucleotide
  Sense strand starting at position 1684 of SEQ ID NO: 913752
ugggcaaagucaucggaga

SEQ ID NO: 951193 - RNA, 19 nt, Artificial Sequence
  Description of Artificial Sequence: Synthetic oligonucleotide
  Antisense strand to SEQ ID NO: 951192
ucuccgaugacuuugccca

SEQ ID NO: 951194 - RNA, 19 nt, Artificial Sequence
  Description of Artificial Sequence: Synthetic oligonucleotide
  Sense strand starting at position 371 of SEQ ID NO: 913752
ccaagagcucccugacuau

SEQ ID NO: 951195 - RNA, 19 nt, Artificial Sequence
  Description of Artificial Sequence: Synthetic oligonucleotide
  Antisense strand to SEQ ID NO: 951194
auagucagggagcucuugg

SEQ ID NO: 951196 - RNA, 19 nt, Artificial Sequence
  Description of Artificial Sequence: Synthetic oligonucleotide
  Sense strand starting at position 235 of SEQ ID NO: 913752
cguuacuaauuccuauaga

SEQ ID NO: 951197 - RNA, 19 nt, Artificial Sequence
  Description of Artificial Sequence: Synthetic oligonucleotide
  Antisense strand to SEQ ID NO: 951196
ucuauaggaauuaguaacg

SEQ ID NO: 951198 - RNA, 19 nt, Artificial Sequence
  Description of Artificial Sequence: Synthetic oligonucleotide
  Sense strand starting at position 3455 of SEQ ID NO: 913752
aguggauauccaugagccu

SEQ ID NO: 951199 - RNA, 19 nt, Artificial Sequence
  Description of Artificial Sequence: Synthetic oligonucleotide
  Antisense strand to SEQ ID NO: 951198
aggcucauggauauccacu

SEQ ID NO: 951200 - RNA, 19 nt, Artificial Sequence
  Description of Artificial Sequence: Synthetic oligonucleotide
  Sense strand starting at position 2866 of SEQ ID NO: 913752
ucaagaugauaagaucaaa

SEQ ID NO: 951201 - RNA, 19 nt, Artificial Sequence
  Description of Artificial Sequence: Synthetic oligonucleotide
  Antisense strand to SEQ ID NO: 951200
uuugaucuuaucaucuuga

SEQ ID NO: 951202 - RNA, 19 nt, Artificial Sequence
  Description of Artificial Sequence: Synthetic oligonucleotide
  Sense strand starting at position 3277 of SEQ ID NO: 913752
agcauugauuguguuaaag

SEQ ID NO: 951203 - RNA, 19 nt, Artificial Sequence
  Description of Artificial Sequence: Synthetic oligonucleotide
  Antisense strand to SEQ ID NO: 951202
cuuuaacacaaucaaugcu

SEQ ID NO: 951204 - RNA, 19 nt, Artificial Sequence
  Description of Artificial Sequence: Synthetic oligonucleotide
  Sense strand starting at position 2984 of SEQ ID NO: 913752
uauggacauuuaugaagua

SEQ ID NO: 951205 - RNA, 19 nt, Artificial Sequence
  Description of Artificial Sequence: Synthetic oligonucleotide
  Antisense strand to SEQ ID NO: 951204
uacuucauaaauguccaua

SEQ ID NO: 951206 - RNA, 19 nt, Artificial Sequence
  Description of Artificial Sequence: Synthetic oligonucleotide
  Sense strand starting at position 648 of SEQ ID NO: 913752
ucgcuuaagaauuggaagu

SEQ ID NO: 951207 - RNA, 19 nt, Artificial Sequence
  Description of Artificial Sequence: Synthetic oligonucleotide
  Antisense strand to SEQ ID NO: 951206
acuuccaauucuuaagcga

SEQ ID NO: 951208 - RNA, 19 nt, Artificial Sequence
  Description of Artificial Sequence: Synthetic oligonucleotide
  Sense strand starting at position 649 of SEQ ID NO: 913752
cgcuuaagaauuggaaguu

SEQ ID NO: 951209 - RNA, 19 nt, Artificial Sequence
  Description of Artificial Sequence: Synthetic oligonucleotide
  Antisense strand to SEQ ID NO: 951208
aacuuccaauucuuaagcg

SEQ ID NO: 951210 - RNA, 19 nt, Artificial Sequence
  Description of Artificial Sequence: Synthetic oligonucleotide
  Sense strand starting at position 3104 of SEQ ID NO: 913752
ugucauaaaugucuuucua

SEQ ID NO: 951211 - RNA, 19 nt, Artificial Sequence
  Description of Artificial Sequence: Synthetic oligonucleotide
  Antisense strand to SEQ ID NO: 951210
uagaaagacauuuaugaca

SEQ ID NO: 951212 - RNA, 19 nt, Artificial Sequence
  Description of Artificial Sequence: Synthetic oligonucleotide
  Sense strand starting at position 1461 of SEQ ID NO: 913752
gugacagauccgugacuca

SEQ ID NO: 951213 - RNA, 19 nt, Artificial Sequence
  Description of Artificial Sequence: Synthetic oligonucleotide
  Antisense strand to SEQ ID NO: 951212
ugagucacggaucugucac

SEQ ID NO: 951214 - RNA, 19 nt, Artificial Sequence
  Description of Artificial Sequence: Synthetic oligonucleotide
  Sense strand starting at position 1451 of SEQ ID NO: 913752
gugcaaagcggugacagau

SEQ ID NO: 951215 - RNA, 19 nt, Artificial Sequence
  Description of Artificial Sequence: Synthetic oligonucleotide
  Antisense strand to SEQ ID NO: 951214
aucugucaccgcuuugcac

SEQ ID NO: 951216 - RNA, 19 nt, Artificial Sequence
  Description of Artificial Sequence: Synthetic oligonucleotide
  Sense strand starting at position 221 of SEQ ID NO: 913752
cacacagaucauggcguua

SEQ ID NO: 951217 - RNA, 19 nt, Artificial Sequence
  Description of Artificial Sequence: Synthetic oligonucleotide
  Antisense strand to SEQ ID NO: 951216
uaacgccaugaucugugug

SEQ ID NO: 951218 - RNA, 19 nt, Artificial Sequence
  Description of Artificial Sequence: Synthetic oligonucleotide
  Sense strand starting at position 3611 of SEQ ID NO: 913752
gcagguaaauguuucuuga

SEQ ID NO: 951219 - RNA, 19 nt, Artificial Sequence
  Description of Artificial Sequence: Synthetic oligonucleotide
  Antisense strand to SEQ ID NO: 951218
ucaagaaacauuuaccugc

SEQ ID NO: 951220 - RNA, 19 nt, Artificial Sequence
  Description of Artificial Sequence: Synthetic oligonucleotide
  Sense strand starting at position 3046 of SEQ ID NO: 913752
ggcugcaaauuaucauagu

SEQ ID NO: 951221 - RNA, 19 nt, Artificial Sequence
  Description of Artificial Sequence: Synthetic oligonucleotide
  Antisense strand to SEQ ID NO: 951220
acuaugauaauuugcagcc

SEQ ID NO: 951222 - RNA, 19 nt, Artificial Sequence
  Description of Artificial Sequence: Synthetic oligonucleotide
  Sense strand starting at position 781 of SEQ ID NO: 913752
ggaguaguuucucccggac

SEQ ID NO: 951223 - RNA, 19 nt, Artificial Sequence
  Description of Artificial Sequence: Synthetic oligonucleotide
  Antisense strand to SEQ ID NO: 951222
guccgggagaaacuacucc

SEQ ID NO: 951224 - RNA, 19 nt, Artificial Sequence
  Description of Artificial Sequence: Synthetic oligonucleotide
  Sense strand starting at position 523 of SEQ ID NO: 913752
cgcuuucuucucgaauaca

SEQ ID NO: 951225 - RNA, 19 nt, Artificial Sequence
  Description of Artificial Sequence: Synthetic oligonucleotide
  Antisense strand to SEQ ID NO: 951224
uguauucgagaagaaagcg

SEQ ID NO: 951226 - RNA, 19 nt, Artificial Sequence
  Description of Artificial Sequence: Synthetic oligonucleotide
  Sense strand starting at position 3274 of SEQ ID NO: 913752
acuagcauugauuguguua

SEQ ID NO: 951227 - RNA, 19 nt, Artificial Sequence
  Description of Artificial Sequence: Synthetic oligonucleotide
  Antisense strand to SEQ ID NO: 951226
uaacacaaucaaugcuagu

SEQ ID NO: 951228 - RNA, 19 nt, Artificial Sequence
  Description of Artificial Sequence: Synthetic oligonucleotide
  Sense strand starting at position 3604 of SEQ ID NO: 913752
cuuucucgcagguaaaugu

SEQ ID NO: 951229 - RNA, 19 nt, Artificial Sequence
  Description of Artificial Sequence: Synthetic oligonucleotide
  Antisense strand to SEQ ID NO: 951228
acauuuaccugcgagaaag

SEQ ID NO: 951230 - RNA, 19 nt, Artificial Sequence
  Description of Artificial Sequence: Synthetic oligonucleotide
  Sense strand starting at position 3602 of SEQ ID NO: 913752
cacuuucucgcagguaaau

SEQ ID NO: 951231 - RNA, 19 nt, Artificial Sequence
  Description of Artificial Sequence: Synthetic oligonucleotide
  Antisense strand to SEQ ID NO: 951230
auuuaccugcgagaaagug

SEQ ID NO: 951232 - RNA, 19 nt, Artificial Sequence
  Description of Artificial Sequence: Synthetic oligonucleotide
  Sense strand starting at position 639 of SEQ ID NO: 913752
guuuccugaucgcuuaaga

SEQ ID NO: 951233 - RNA, 19 nt, Artificial Sequence
  Description of Artificial Sequence: Synthetic oligonucleotide
  Antisense strand to SEQ ID NO: 951232
ucuuaagcgaucaggaaac

SEQ ID NO: 951234 - RNA, 19 nt, Artificial Sequence
  Description of Artificial Sequence: Synthetic oligonucleotide
  Sense strand starting at position 1459 of SEQ ID NO: 913752
cggugacagauccgugacu

SEQ ID NO: 951235 - RNA, 19 nt, Artificial Sequence
  Description of Artificial Sequence: Synthetic oligonucleotide
  Antisense strand to SEQ ID NO: 951234
agucacggaucugucaccg

SEQ ID NO: 951236 - RNA, 19 nt, Artificial Sequence
  Description of Artificial Sequence: Synthetic oligonucleotide
  Sense strand starting at position 232 of SEQ ID NO: 913752
uggcguuacuaauuccuau

SEQ ID NO: 951237 - RNA, 19 nt, Artificial Sequence
  Description of Artificial Sequence: Synthetic oligonucleotide
  Antisense strand to SEQ ID NO: 951236
auaggaauuaguaacgcca

SEQ ID NO: 951238 - RNA, 19 nt, Artificial Sequence
  Description of Artificial Sequence: Synthetic oligonucleotide
  Sense strand starting at position 2210 of SEQ ID NO: 913752
caggucuagcggugacauu

SEQ ID NO: 951239 - RNA, 19 nt, Artificial Sequence
  Description of Artificial Sequence: Synthetic oligonucleotide
  Antisense strand to SEQ ID NO: 951238
aaugucaccgcuagaccug

SEQ ID NO: 951240 - RNA, 19 nt, Artificial Sequence
  Description of Artificial Sequence: Synthetic oligonucleotide
  Sense strand starting at position 637 of SEQ ID NO: 913752
ugguuuccugaucgcuuaa

SEQ ID NO: 951241 - RNA, 19 nt, Artificial Sequence
  Description of Artificial Sequence: Synthetic oligonucleotide
  Antisense strand to SEQ ID NO: 951240
uuaagcgaucaggaaacca

SEQ ID NO: 951242 - RNA, 19 nt, Artificial Sequence
  Description of Artificial Sequence: Synthetic oligonucleotide
  Sense strand starting at position 3130 of SEQ ID NO: 913752
uugugaauuuaagaucgcu

SEQ ID NO: 951243 - RNA, 19 nt, Artificial Sequence
  Description of Artificial Sequence: Synthetic oligonucleotide
  Antisense strand to SEQ ID NO: 951242
agcgaucuuaaauucacaa

SEQ ID NO: 951244 - RNA, 19 nt, Artificial Sequence
  Description of Artificial Sequence: Synthetic oligonucleotide
  Sense strand starting at position 2694 of SEQ ID NO: 913752
gccaguuccugucucuuaa

SEQ ID NO: 951245 - RNA, 19 nt, Artificial Sequence
  Description of Artificial Sequence: Synthetic oligonucleotide
  Antisense strand to SEQ ID NO: 951244
uuaagagacaggaacuggc

SEQ ID NO: 951246 - RNA, 19 nt, Artificial Sequence
  Description of Artificial Sequence: Synthetic oligonucleotide
  Sense strand starting at position 2253 of SEQ ID NO: 913752
cucggucauugccucuuaa

SEQ ID NO: 951247 - RNA, 19 nt, Artificial Sequence
  Description of Artificial Sequence: Synthetic oligonucleotide
  Antisense strand to SEQ ID NO: 951246
uuaagaggcaaugaccgag

SEQ ID NO: 951248 - RNA, 19 nt, Artificial Sequence
  Description of Artificial Sequence: Synthetic oligonucleotide
  Sense strand starting at position 636 of SEQ ID NO: 913752
cugguuuccugaucgcuua

SEQ ID NO: 951249 - RNA, 19 nt, Artificial Sequence
  Description of Artificial Sequence: Synthetic oligonucleotide
  Antisense strand to SEQ ID NO: 951248
uaagcgaucaggaaaccag

SEQ ID NO: 951250 - RNA, 19 nt, Artificial Sequence
  Description of Artificial Sequence: Synthetic oligonucleotide
  Sense strand starting at position 64 of SEQ ID NO: 913753
aggagugaucaccauguug

SEQ ID NO: 951251 - RNA, 19 nt, Artificial Sequence
  Description of Artificial Sequence: Synthetic oligonucleotide
  Antisense strand to SEQ ID NO: 951250
caacauggugaucacuccu

SEQ ID NO: 951252 - RNA, 19 nt, Artificial Sequence
  Description of Artificial Sequence: Synthetic oligonucleotide
  Sense strand starting at position 756 of SEQ ID NO: 913753
cccgacuggauguaaauua

SEQ ID NO: 951253 - RNA, 19 nt, Artificial Sequence
  Description of Artificial Sequence: Synthetic oligonucleotide
  Antisense strand to SEQ ID NO: 951252
uaauuuacauccagucggg

SEQ ID NO: 951254 - RNA, 19 nt, Artificial Sequence
  Description of Artificial Sequence: Synthetic oligonucleotide
  Sense strand starting at position 3755 of SEQ ID NO: 913753
agucaacugguagggaaua

SEQ ID NO: 951255 - RNA, 19 nt, Artificial Sequence
  Description of Artificial Sequence: Synthetic oligonucleotide
  Antisense strand to SEQ ID NO: 951254
uauucccuaccaguugacu

SEQ ID NO: 951256 - RNA, 19 nt, Artificial Sequence
  Description of Artificial Sequence: Synthetic oligonucleotide
  Sense strand starting at position 3744 of SEQ ID NO: 913753
uggaacuauugagucaacu

SEQ ID NO: 951257 - RNA, 19 nt, Artificial Sequence
  Description of Artificial Sequence: Synthetic oligonucleotide
  Antisense strand to SEQ ID NO: 951256
aguugacucaauaguucca

SEQ ID NO: 951258 - RNA, 19 nt, Artificial Sequence
  Description of Artificial Sequence: Synthetic oligonucleotide
  Sense strand starting at position 323 of SEQ ID NO: 913753
cauugagagcuuugggaag

SEQ ID NO: 951259 - RNA, 19 nt, Artificial Sequence
  Description of Artificial Sequence: Synthetic oligonucleotide
  Antisense strand to SEQ ID NO: 951258
cuucccaaagcucucaaug

SEQ ID NO: 951260 - RNA, 19 nt, Artificial Sequence
  Description of Artificial Sequence: Synthetic oligonucleotide
  Sense strand starting at position 950 of SEQ ID NO: 913753
agagcucccugacuauaaa

SEQ ID NO: 951261 - RNA, 19 nt, Artificial Sequence
  Description of Artificial Sequence: Synthetic oligonucleotide
  Antisense strand to SEQ ID NO: 951260
uuuauagucagggagcucu

SEQ ID NO: 951262 - RNA, 19 nt, Artificial Sequence
  Description of Artificial Sequence: Synthetic oligonucleotide
  Sense strand starting at position 2812 of SEQ ID NO: 913753
acgagacaucuccaagccu

SEQ ID NO: 951263 - RNA, 19 nt, Artificial Sequence
  Description of Artificial Sequence: Synthetic oligonucleotide
  Antisense strand to SEQ ID NO: 951262
aggcuuggagaugucucgu

SEQ ID NO: 951264 - RNA, 19 nt, Artificial Sequence
  Description of Artificial Sequence: Synthetic oligonucleotide
  Sense strand starting at position 3531 of SEQ ID NO: 913753
gcauguauacaauagagca

SEQ ID NO: 951265 - RNA, 19 nt, Artificial Sequence
  Description of Artificial Sequence: Synthetic oligonucleotide
  Antisense strand to SEQ ID NO: 951264
ugcucuauuguauacaugc

SEQ ID NO: 951266 - RNA, 19 nt, Artificial Sequence
  Description of Artificial Sequence: Synthetic oligonucleotide
  Sense strand starting at position 66 of SEQ ID NO: 913753
gagugaucaccauguugga

SEQ ID NO: 951267 - RNA, 19 nt, Artificial Sequence
  Description of Artificial Sequence: Synthetic oligonucleotide
  Antisense strand to SEQ ID NO: 951266
uccaacauggugaucacuc

SEQ ID NO: 951268 - RNA, 19 nt, Artificial Sequence
  Description of Artificial Sequence: Synthetic oligonucleotide
  Sense strand starting at position 2261 of SEQ ID NO: 913753
gggcaaagucaucggagag

SEQ ID NO: 951269 - RNA, 19 nt, Artificial Sequence
  Description of Artificial Sequence: Synthetic oligonucleotide
  Antisense strand to SEQ ID NO: 951268
cucuccgaugacuuugccc

SEQ ID NO: 951270 - RNA, 19 nt, Artificial Sequence
  Description of Artificial Sequence: Synthetic oligonucleotide
  Sense strand starting at position 802 of SEQ ID NO: 913753
agaucauggcguuacuaau

SEQ ID NO: 951271 - RNA, 19 nt, Artificial Sequence
  Description of Artificial Sequence: Synthetic oligonucleotide
  Antisense strand to SEQ ID NO: 951270
auuaguaacgccaugaucu

SEQ ID NO: 951272 - RNA, 19 nt, Artificial Sequence
  Description of Artificial Sequence: Synthetic oligonucleotide
  Sense strand starting at position 2260 of SEQ ID NO: 913753
ugggcaaagucaucggaga

SEQ ID NO: 951273 - RNA, 19 nt, Artificial Sequence
  Description of Artificial Sequence: Synthetic oligonucleotide
  Antisense strand to SEQ ID NO: 951272
ucuccgaugacuuugccca

SEQ ID NO: 951274 - RNA, 19 nt, Artificial Sequence
  Description of Artificial Sequence: Synthetic oligonucleotide
  Sense strand starting at position 947 of SEQ ID NO: 913753
ccaagagcucccugacuau

SEQ ID NO: 951275 - RNA, 19 nt, Artificial Sequence
  Description of Artificial Sequence: Synthetic oligonucleotide
  Antisense strand to SEQ ID NO: 951274
auagucagggagcucuugg

SEQ ID NO: 951276 - RNA, 19 nt, Artificial Sequence
  Description of Artificial Sequence: Synthetic oligonucleotide
  Sense strand starting at position 811 of SEQ ID NO: 913753
cguuacuaauuccuauaga

SEQ ID NO: 951277 - RNA, 19 nt, Artificial Sequence
  Description of Artificial Sequence: Synthetic oligonucleotide
  Antisense strand to SEQ ID NO: 951276
ucuauaggaauuaguaacg

SEQ ID NO: 951278 - RNA, 19 nt, Artificial Sequence
  Description of Artificial Sequence: Synthetic oligonucleotide
  Sense strand starting at position 79 of SEQ ID NO: 913753
guuggaucagccugaccaa

SEQ ID NO: 951279 - RNA, 19 nt, Artificial Sequence
  Description of Artificial Sequence: Synthetic oligonucleotide
  Antisense strand to SEQ ID NO: 951278
uuggucaggcugauccaac

SEQ ID NO: 951280 - RNA, 19 nt, Artificial Sequence
  Description of Artificial Sequence: Synthetic oligonucleotide
  Sense strand starting at position 347 of SEQ ID NO: 913753
guagcaacaucuuucuaag

SEQ ID NO: 951281 - RNA, 19 nt, Artificial Sequence
  Description of Artificial Sequence: Synthetic oligonucleotide
  Antisense strand to SEQ ID NO: 951280
cuuagaaagauguugcuac

SEQ ID NO: 951282 - RNA, 19 nt, Artificial Sequence
  Description of Artificial Sequence: Synthetic oligonucleotide
  Sense strand starting at position 3442 of SEQ ID NO: 913753
ucaagaugauaagaucaaa

SEQ ID NO: 951283 - RNA, 19 nt, Artificial Sequence
  Description of Artificial Sequence: Synthetic oligonucleotide
  Antisense strand to SEQ ID NO: 951282
uuugaucuuaucaucuuga

SEQ ID NO: 951284 - RNA, 19 nt, Artificial Sequence
  Description of Artificial Sequence: Synthetic oligonucleotide
  Sense strand starting at position 3853 of SEQ ID NO: 913753
agcauugauuguguuaaag

SEQ ID NO: 951285 - RNA, 19 nt, Artificial Sequence
  Description of Artificial Sequence: Synthetic oligonucleotide
  Antisense strand to SEQ ID NO: 951284
cuuuaacacaaucaaugcu

SEQ ID NO: 951286 - RNA, 19 nt, Artificial Sequence
  Description of Artificial Sequence: Synthetic oligonucleotide
  Sense strand starting at position 3560 of SEQ ID NO: 913753
uauggacauuuaugaagua

SEQ ID NO: 951287 - RNA, 19 nt, Artificial Sequence
  Description of Artificial Sequence: Synthetic oligonucleotide
  Antisense strand to SEQ ID NO: 951286
uacuucauaaauguccaua

SEQ ID NO: 951288 - RNA, 19 nt, Artificial Sequence
  Description of Artificial Sequence: Synthetic oligonucleotide
  Sense strand starting at position 1224 of SEQ ID NO: 913753
ucgcuuaagaauuggaagu

SEQ ID NO: 951289 - RNA, 19 nt, Artificial Sequence
  Description of Artificial Sequence: Synthetic oligonucleotide
  Antisense strand to SEQ ID NO: 951288
acuuccaauucuuaagcga

SEQ ID NO: 951290 - RNA, 19 nt, Artificial Sequence
  Description of Artificial Sequence: Synthetic oligonucleotide
  Sense strand starting at position 1225 of SEQ ID NO: 913753
cgcuuaagaauuggaaguu

SEQ ID NO: 951291 - RNA, 19 nt, Artificial Sequence
  Description of Artificial Sequence: Synthetic oligonucleotide
  Antisense strand to SEQ ID NO: 951290
aacuuccaauucuuaagcg

SEQ ID NO: 951292 - RNA, 19 nt, Artificial Sequence
  Description of Artificial Sequence: Synthetic oligonucleotide
  Sense strand starting at position 3680 of SEQ ID NO: 913753
ugucauaaaugucuuucua

SEQ ID NO: 951293 - RNA, 19 nt, Artificial Sequence
  Description of Artificial Sequence: Synthetic oligonucleotide
  Antisense strand to SEQ ID NO: 951292
uagaaagacauuuaugaca

SEQ ID NO: 951294 - RNA, 19 nt, Artificial Sequence
  Description of Artificial Sequence: Synthetic oligonucleotide
  Sense strand starting at position 2037 of SEQ ID NO: 913753
gugacagauccgugacuca

SEQ ID NO: 951295 - RNA, 19 nt, Artificial Sequence
  Description of Artificial Sequence: Synthetic oligonucleotide
  Antisense strand to SEQ ID NO: 951294
ugagucacggaucugucac

SEQ ID NO: 951296 - RNA, 19 nt, Artificial Sequence
  Description of Artificial Sequence: Synthetic oligonucleotide
  Sense strand starting at position 2027 of SEQ ID NO: 913753
gugcaaagcggugacagau

SEQ ID NO: 951297 - RNA, 19 nt, Artificial Sequence
  Description of Artificial Sequence: Synthetic oligonucleotide
  Antisense strand to SEQ ID NO: 951296
aucugucaccgcuuugcac

SEQ ID NO: 951298 - RNA, 19 nt, Artificial Sequence
  Description of Artificial Sequence: Synthetic oligonucleotide
  Sense strand starting at position 797 of SEQ ID NO: 913753
cacacagaucauggcguua

SEQ ID NO: 951299 - RNA, 19 nt, Artificial Sequence
  Description of Artificial Sequence: Synthetic oligonucleotide
  Antisense strand to SEQ ID NO: 951298
uaacgccaugaucugugug

SEQ ID NO: 951300 - RNA, 19 nt, Artificial Sequence
  Description of Artificial Sequence: Synthetic oligonucleotide
  Sense strand starting at position 3622 of SEQ ID NO: 913753
ggcugcaaauuaucauagu

SEQ ID NO: 951301 - RNA, 19 nt, Artificial Sequence
  Description of Artificial Sequence: Synthetic oligonucleotide
  Antisense strand to SEQ ID NO: 951300
acuaugauaauuugcagcc

SEQ ID NO: 951302 - RNA, 19 nt, Artificial Sequence
  Description of Artificial Sequence: Synthetic oligonucleotide
  Sense strand starting at position 1357 of SEQ ID NO: 913753
ggaguaguuucucccggac

SEQ ID NO: 951303 - RNA, 19 nt, Artificial Sequence
  Description of Artificial Sequence: Synthetic oligonucleotide
  Antisense strand to SEQ ID NO: 951302
guccgggagaaacuacucc

SEQ ID NO: 951304 - RNA, 19 nt, Artificial Sequence
  Description of Artificial Sequence: Synthetic oligonucleotide
  Sense strand starting at position 1099 of SEQ ID NO: 913753
cgcuuucuucucgaauaca

SEQ ID NO: 951305 - RNA, 19 nt, Artificial Sequence
  Description of Artificial Sequence: Synthetic oligonucleotide
  Antisense strand to SEQ ID NO: 951304
uguauucgagaagaaagcg

SEQ ID NO: 951306 - RNA, 19 nt, Artificial Sequence
  Description of Artificial Sequence: Synthetic oligonucleotide
  Sense strand starting at position 3850 of SEQ ID NO: 913753
acuagcauugauuguguua

SEQ ID NO: 951307 - RNA, 19 nt, Artificial Sequence
  Description of Artificial Sequence: Synthetic oligonucleotide
  Antisense strand to SEQ ID NO: 951306
uaacacaaucaaugcuagu

SEQ ID NO: 951308 - RNA, 19 nt, Artificial Sequence
  Description of Artificial Sequence: Synthetic oligonucleotide
  Sense strand starting at position 456 of SEQ ID NO: 913753
ucugcugggcuuugacuaa

SEQ ID NO: 951309 - RNA, 19 nt, Artificial Sequence
  Description of Artificial Sequence: Synthetic oligonucleotide
  Antisense strand to SEQ ID NO: 951308
uuagucaaagcccagcaga

SEQ ID NO: 951310 - RNA, 19 nt, Artificial Sequence
  Description of Artificial Sequence: Synthetic oligonucleotide
  Sense strand starting at position 1215 of SEQ ID NO: 913753
guuuccugaucgcuuaaga

SEQ ID NO: 951311 - RNA, 19 nt, Artificial Sequence
  Description of Artificial Sequence: Synthetic oligonucleotide
  Antisense strand to SEQ ID NO: 951310
ucuuaagcgaucaggaaac

SEQ ID NO: 951312 - RNA, 19 nt, Artificial Sequence
  Description of Artificial Sequence: Synthetic oligonucleotide
  Sense strand starting at position 2035 of SEQ ID NO: 913753
cggugacagauccgugacu

SEQ ID NO: 951313 - RNA, 19 nt, Artificial Sequence
  Description of Artificial Sequence: Synthetic oligonucleotide
  Antisense strand to SEQ ID NO: 951312
agucacggaucugucaccg

SEQ ID NO: 951314 - RNA, 19 nt, Artificial Sequence
  Description of Artificial Sequence: Synthetic oligonucleotide
  Sense strand starting at position 808 of SEQ ID NO: 913753
uggcguuacuaauuccuau

SEQ ID NO: 951315 - RNA, 19 nt, Artificial Sequence
  Description of Artificial Sequence: Synthetic oligonucleotide
  Antisense strand to SEQ ID NO: 951314
auaggaauuaguaacgcca

SEQ ID NO: 951316 - RNA, 19 nt, Artificial Sequence
  Description of Artificial Sequence: Synthetic oligonucleotide
  Sense strand starting at position 2786 of SEQ ID NO: 913753
caggucuagcggugacauu

SEQ ID NO: 951317 - RNA, 19 nt, Artificial Sequence
  Description of Artificial Sequence: Synthetic oligonucleotide
  Antisense strand to SEQ ID NO: 951316
aaugucaccgcuagaccug

SEQ ID NO: 951318 - RNA, 19 nt, Artificial Sequence
  Description of Artificial Sequence: Synthetic oligonucleotide
  Sense strand starting at position 1213 of SEQ ID NO: 913753
ugguuuccugaucgcuuaa

SEQ ID NO: 951319 - RNA, 19 nt, Artificial Sequence
  Description of Artificial Sequence: Synthetic oligonucleotide
  Antisense strand to SEQ ID NO: 951318
uuaagcgaucaggaaacca

SEQ ID NO: 951320 - RNA, 19 nt, Artificial Sequence
  Description of Artificial Sequence: Synthetic oligonucleotide
  Sense strand starting at position 3706 of SEQ ID NO: 913753
uugugaauuuaagaucgcu

SEQ ID NO: 951321 - RNA, 19 nt, Artificial Sequence
  Description of Artificial Sequence: Synthetic oligonucleotide
  Antisense strand to SEQ ID NO: 951320
agcgaucuuaaauucacaa

SEQ ID NO: 951322 - RNA, 19 nt, Artificial Sequence
  Description of Artificial Sequence: Synthetic oligonucleotide
  Sense strand starting at position 3270 of SEQ ID NO: 913753
gccaguuccugucucuuaa

SEQ ID NO: 951323 - RNA, 19 nt, Artificial Sequence
  Description of Artificial Sequence: Synthetic oligonucleotide
  Antisense strand to SEQ ID NO: 951322
uuaagagacaggaacuggc

SEQ ID NO: 951324 - RNA, 19 nt, Artificial Sequence
  Description of Artificial Sequence: Synthetic oligonucleotide
  Sense strand starting at position 2829 of SEQ ID NO: 913753
cucggucauugccucuuaa

SEQ ID NO: 951325 - RNA, 19 nt, Artificial Sequence
  Description of Artificial Sequence: Synthetic oligonucleotide
  Antisense strand to SEQ ID NO: 951324
uuaagaggcaaugaccgag

SEQ ID NO: 951326 - RNA, 19 nt, Artificial Sequence
  Description of Artificial Sequence: Synthetic oligonucleotide
  Sense strand starting at position 1212 of SEQ ID NO: 913753
cugguuuccugaucgcuua

SEQ ID NO: 951327 - RNA, 19 nt, Artificial Sequence
  Description of Artificial Sequence: Synthetic oligonucleotide
  Antisense strand to SEQ ID NO: 951326
uaagcgaucaggaaaccag

SEQ ID NO: 951328 - RNA, 19 nt, Artificial Sequence
  Description of Artificial Sequence: Synthetic oligonucleotide
  Sense strand starting at position 3274 of SEQ ID NO: 913753
guuccugucucuuaaauuu

SEQ ID NO: 951329 - RNA, 19 nt, Artificial Sequence
  Description of Artificial Sequence: Synthetic oligonucleotide
  Antisense strand to SEQ ID NO: 951328
aaauuuaagagacaggaac

SEQ ID NO: 951330 - RNA, 19 nt, Artificial Sequence
  Description of Artificial Sequence: Synthetic oligonucleotide
  Sense strand starting at position 2603 of SEQ ID NO: 913754
agucuugcuuauuuauuga

SEQ ID NO: 951331 - RNA, 19 nt, Artificial Sequence
  Description of Artificial Sequence: Synthetic oligonucleotide
  Antisense strand to SEQ ID NO: 951330
ucaauaaauaagcaagacu

SEQ ID NO: 951332 - RNA, 19 nt, Artificial Sequence
  Description of Artificial Sequence: Synthetic oligonucleotide
  Sense strand starting at position 516 of SEQ ID NO: 913754
ccugaaaugcaucauuaug

SEQ ID NO: 951333 - RNA, 19 nt, Artificial Sequence
  Description of Artificial Sequence: Synthetic oligonucleotide
  Antisense strand to SEQ ID NO: 951332
cauaaugaugcauuucagg

SEQ ID NO: 951334 - RNA, 19 nt, Artificial Sequence
  Description of Artificial Sequence: Synthetic oligonucleotide
  Sense strand starting at position 1479 of SEQ ID NO: 913754
auuaauugucaaggacuga

SEQ ID NO: 951335 - RNA, 19 nt, Artificial Sequence
  Description of Artificial Sequence: Synthetic oligonucleotide
  Antisense strand to SEQ ID NO: 951334
ucaguccuugacaauuaau

SEQ ID NO: 951336 - RNA, 19 nt, Artificial Sequence
  Description of Artificial Sequence: Synthetic oligonucleotide
  Sense strand starting at position 1276 of SEQ ID NO: 913754
uuugauauaugaguacuca

SEQ ID NO: 951337 - RNA, 19 nt, Artificial Sequence
  Description of Artificial Sequence: Synthetic oligonucleotide
  Antisense strand to SEQ ID NO: 951336
ugaguacucauauaucaaa

SEQ ID NO: 951338 - RNA, 19 nt, Artificial Sequence
  Description of Artificial Sequence: Synthetic oligonucleotide
  Sense strand starting at position 1226 of SEQ ID NO: 913754
guauacauccuugaagcua

SEQ ID NO: 951339 - RNA, 19 nt, Artificial Sequence
  Description of Artificial Sequence: Synthetic oligonucleotide
  Antisense strand to SEQ ID NO: 951338
uagcuucaaggauguauac

SEQ ID NO: 951340 - RNA, 19 nt, Artificial Sequence
  Description of Artificial Sequence: Synthetic oligonucleotide
  Sense strand starting at position 623 of SEQ ID NO: 913754
aucugucuuccugaguaag

SEQ ID NO: 951341 - RNA, 19 nt, Artificial Sequence
  Description of Artificial Sequence: Synthetic oligonucleotide
  Antisense strand to SEQ ID NO: 951340
cuuacucaggaagacagau

SEQ ID NO: 951342 - RNA, 19 nt, Artificial Sequence
  Description of Artificial Sequence: Synthetic oligonucleotide
  Sense strand starting at position 1185 of SEQ ID NO: 913754
aggaaauuccuagguguua

SEQ ID NO: 951343 - RNA, 19 nt, Artificial Sequence
  Description of Artificial Sequence: Synthetic oligonucleotide
  Antisense strand to SEQ ID NO: 951342
uaacaccuaggaauuuccu

SEQ ID NO: 951344 - RNA, 19 nt, Artificial Sequence
  Description of Artificial Sequence: Synthetic oligonucleotide
  Sense strand starting at position 685 of SEQ ID NO: 913754
agugguuugagguagaagu

SEQ ID NO: 951345 - RNA, 19 nt, Artificial Sequence
  Description of Artificial Sequence: Synthetic oligonucleotide
  Antisense strand to SEQ ID NO: 951344
acuucuaccucaaaccacu

SEQ ID NO: 951346 - RNA, 19 nt, Artificial Sequence
  Description of Artificial Sequence: Synthetic oligonucleotide
  Sense strand starting at position 680 of SEQ ID NO: 913754
ggaagagugguuugaggua

SEQ ID NO: 951347 - RNA, 19 nt, Artificial Sequence
  Description of Artificial Sequence: Synthetic oligonucleotide
  Antisense strand to SEQ ID NO: 951346
uaccucaaaccacucuucc

SEQ ID NO: 951348 - RNA, 19 nt, Artificial Sequence
  Description of Artificial Sequence: Synthetic oligonucleotide
  Sense strand starting at position 3462 of SEQ ID NO: 913754
uguggauugucauuauaaa

SEQ ID NO: 951349 - RNA, 19 nt, Artificial Sequence
  Description of Artificial Sequence: Synthetic oligonucleotide
  Antisense strand to SEQ ID NO: 951348
uuuauaaugacaauccaca

SEQ ID NO: 951350 - RNA, 19 nt, Artificial Sequence
  Description of Artificial Sequence: Synthetic oligonucleotide
  Sense strand starting at position 578 of SEQ ID NO: 913754
acuuguugccauuauagac

SEQ ID NO: 951351 - RNA, 19 nt, Artificial Sequence
  Description of Artificial Sequence: Synthetic oligonucleotide
  Antisense strand to SEQ ID NO: 951350
gucuauaauggcaacaagu

SEQ ID NO: 951352 - RNA, 19 nt, Artificial Sequence
  Description of Artificial Sequence: Synthetic oligonucleotide
  Sense strand starting at position 2347 of SEQ ID NO: 913754
acaagauucuggucaggca

SEQ ID NO: 951353 - RNA, 19 nt, Artificial Sequence
  Description of Artificial Sequence: Synthetic oligonucleotide
  Antisense strand to SEQ ID NO: 951352
ugccugaccagaaucuugu

SEQ ID NO: 951354 - RNA, 19 nt, Artificial Sequence
  Description of Artificial Sequence: Synthetic oligonucleotide
  Sense strand starting at position 1186 of SEQ ID NO: 913754
ggaaauuccuagguguuau

SEQ ID NO: 951355 - RNA, 19 nt, Artificial Sequence
  Description of Artificial Sequence: Synthetic oligonucleotide
  Antisense strand to SEQ ID NO: 951354
auaacaccuaggaauuucc

SEQ ID NO: 951356 - RNA, 19 nt, Artificial Sequence
  Description of Artificial Sequence: Synthetic oligonucleotide
  Sense strand starting at position 1280 of SEQ ID NO: 913754
auauaugaguacucauguc

SEQ ID NO: 951357 - RNA, 19 nt, Artificial Sequence
  Description of Artificial Sequence: Synthetic oligonucleotide
  Antisense strand to SEQ ID NO: 951356
gacaugaguacucauauau

SEQ ID NO: 951358 - RNA, 19 nt, Artificial Sequence
  Description of Artificial Sequence: Synthetic oligonucleotide
  Sense strand starting at position 2451 of SEQ ID NO: 913754
uguacuagccaucaucauu

SEQ ID NO: 951359 - RNA, 19 nt, Artificial Sequence
  Description of Artificial Sequence: Synthetic oligonucleotide
  Antisense strand to SEQ ID NO: 951358
aaugaugauggcuaguaca

SEQ ID NO: 951360 - RNA, 19 nt, Artificial Sequence
  Description of Artificial Sequence: Synthetic oligonucleotide
  Sense strand starting at position 3301 of SEQ ID NO: 913754
gguauaacuuccucucuag

SEQ ID NO: 951361 - RNA, 19 nt, Artificial Sequence
  Description of Artificial Sequence: Synthetic oligonucleotide
  Antisense strand to SEQ ID NO: 951360
cuagagaggaaguuauacc

SEQ ID NO: 951362 - RNA, 19 nt, Artificial Sequence
  Description of Artificial Sequence: Synthetic oligonucleotide
  Sense strand starting at position 2359 of SEQ ID NO: 913754
ucaggcagccuccaauauu

SEQ ID NO: 951363 - RNA, 19 nt, Artificial Sequence
  Description of Artificial Sequence: Synthetic oligonucleotide
  Antisense strand to SEQ ID NO: 951362
aauauuggaggcugccuga

SEQ ID NO: 951364 - RNA, 19 nt, Artificial Sequence
  Description of Artificial Sequence: Synthetic oligonucleotide
  Sense strand starting at position 3459 of SEQ ID NO: 913754
uaauguggauugucauuau

SEQ ID NO: 951365 - RNA, 19 nt, Artificial Sequence
  Description of Artificial Sequence: Synthetic oligonucleotide
  Antisense strand to SEQ ID NO: 951364
auaaugacaauccacauua

SEQ ID NO: 951366 - RNA, 19 nt, Artificial Sequence
  Description of Artificial Sequence: Synthetic oligonucleotide
  Sense strand starting at position 626 of SEQ ID NO: 913754
ugucuuccugaguaagcaa

SEQ ID NO: 951367 - RNA, 19 nt, Artificial Sequence
  Description of Artificial Sequence: Synthetic oligonucleotide
  Antisense strand to SEQ ID NO: 951366
uugcuuacucaggaagaca

SEQ ID NO: 951368 - RNA, 19 nt, Artificial Sequence
  Description of Artificial Sequence: Synthetic oligonucleotide
  Sense strand starting at position 2642 of SEQ ID NO: 913754
uuaugaaaugguugagugu

SEQ ID NO: 951369 - RNA, 19 nt, Artificial Sequence
  Description of Artificial Sequence: Synthetic oligonucleotide
  Antisense strand to SEQ ID NO: 951368
acacucaaccauuucauaa

SEQ ID NO: 951370 - RNA, 19 nt, Artificial Sequence
  Description of Artificial Sequence: Synthetic oligonucleotide
  Sense strand starting at position 3338 of SEQ ID NO: 913754
gggcaagugcuccaguaga

SEQ ID NO: 951371 - RNA, 19 nt, Artificial Sequence
  Description of Artificial Sequence: Synthetic oligonucleotide
  Antisense strand to SEQ ID NO: 951370
ucuacuggagcacuugccc

SEQ ID NO: 951372 - RNA, 19 nt, Artificial Sequence
  Description of Artificial Sequence: Synthetic oligonucleotide
  Sense strand starting at position 1949 of SEQ ID NO: 913754
aggaguugcucucuuuaag

SEQ ID NO: 951373 - RNA, 19 nt, Artificial Sequence
  Description of Artificial Sequence: Synthetic oligonucleotide
  Antisense strand to SEQ ID NO: 951372
cuuaaagagagcaacuccu

SEQ ID NO: 951374 - RNA, 19 nt, Artificial Sequence
  Description of Artificial Sequence: Synthetic oligonucleotide
  Sense strand starting at position 1818 of SEQ ID NO: 913754
ggaggucuuucucugcaga

SEQ ID NO: 951375 - RNA, 19 nt, Artificial Sequence
  Description of Artificial Sequence: Synthetic oligonucleotide
  Antisense strand to SEQ ID NO: 951374
ucugcagagaaagaccucc

SEQ ID NO: 951376 - RNA, 19 nt, Artificial Sequence
  Description of Artificial Sequence: Synthetic oligonucleotide
  Sense strand starting at position 1273 of SEQ ID NO: 913754
guguuugauauaugaguac

SEQ ID NO: 951377 - RNA, 19 nt, Artificial Sequence
  Description of Artificial Sequence: Synthetic oligonucleotide
  Antisense strand to SEQ ID NO: 951376
guacucauauaucaaacac

SEQ ID NO: 951378 - RNA, 19 nt, Artificial Sequence
  Description of Artificial Sequence: Synthetic oligonucleotide
  Sense strand starting at position 1648 of SEQ ID NO: 913754
gguucuguggcugggaaga

SEQ ID NO: 951379 - RNA, 19 nt, Artificial Sequence
  Description of Artificial Sequence: Synthetic oligonucleotide
  Antisense strand to SEQ ID NO: 951378
ucuucccagccacagaacc

SEQ ID NO: 951380 - RNA, 19 nt, Artificial Sequence
  Description of Artificial Sequence: Synthetic oligonucleotide
  Sense strand starting at position 2291 of SEQ ID NO: 913754
cuguaacguccucaggagu

SEQ ID NO: 951381 - RNA, 19 nt, Artificial Sequence
  Description of Artificial Sequence: Synthetic oligonucleotide
  Antisense strand to SEQ ID NO: 951380
acuccugaggacguuacag

SEQ ID NO: 951382 - RNA, 19 nt, Artificial Sequence
  Description of Artificial Sequence: Synthetic oligonucleotide
  Sense strand starting at position 1225 of SEQ ID NO: 913754
uguauacauccuugaagcu

SEQ ID NO: 951383 - RNA, 19 nt, Artificial Sequence
  Description of Artificial Sequence: Synthetic oligonucleotide
  Antisense strand to SEQ ID NO: 951382
agcuucaaggauguauaca

SEQ ID NO: 951384 - RNA, 19 nt, Artificial Sequence
  Description of Artificial Sequence: Synthetic oligonucleotide
  Sense strand starting at position 1266 of SEQ ID NO: 913754
ucucccaguguuugauaua

SEQ ID NO: 951385 - RNA, 19 nt, Artificial Sequence
  Description of Artificial Sequence: Synthetic oligonucleotide
  Antisense strand to SEQ ID NO: 951384
uauaucaaacacugggaga

SEQ ID NO: 951386 - RNA, 19 nt, Artificial Sequence
  Description of Artificial Sequence: Synthetic oligonucleotide
  Sense strand starting at position 1952 of SEQ ID NO: 913754
aguugcucucuuuaaguau

SEQ ID NO: 951387 - RNA, 19 nt, Artificial Sequence
  Description of Artificial Sequence: Synthetic oligonucleotide
  Antisense strand to SEQ ID NO: 951386
auacuuaaagagagcaacu

SEQ ID NO: 951388 - RNA, 19 nt, Artificial Sequence
  Description of Artificial Sequence: Synthetic oligonucleotide
  Sense strand starting at position 2108 of SEQ ID NO: 913754
guucaauugcuggaggugu

SEQ ID NO: 951389 - RNA, 19 nt, Artificial Sequence
  Description of Artificial Sequence: Synthetic oligonucleotide
  Antisense strand to SEQ ID NO: 951388
acaccuccagcaauugaac

SEQ ID NO: 951390 - RNA, 19 nt, Artificial Sequence
  Description of Artificial Sequence: Synthetic oligonucleotide
  Sense strand starting at position 2843 of SEQ ID NO: 913754
auccgagcacuuugguaga

SEQ ID NO: 951391 - RNA, 19 nt, Artificial Sequence
  Description of Artificial Sequence: Synthetic oligonucleotide
  Antisense strand to SEQ ID NO: 951390
ucuaccaaagugcucggau

SEQ ID NO: 951392 - RNA, 19 nt, Artificial Sequence
  Description of Artificial Sequence: Synthetic oligonucleotide
  Sense strand starting at position 1674 of SEQ ID NO: 913754
ccaucagccuucccggaau

SEQ ID NO: 951393 - RNA, 19 nt, Artificial Sequence
  Description of Artificial Sequence: Synthetic oligonucleotide
  Antisense strand to SEQ ID NO: 951392
auuccgggaaggcugaugg

SEQ ID NO: 951394 - RNA, 19 nt, Artificial Sequence
  Description of Artificial Sequence: Synthetic oligonucleotide
  Sense strand starting at position 3457 of SEQ ID NO: 913754
guuaauguggauugucauu

SEQ ID NO: 951395 - RNA, 19 nt, Artificial Sequence
  Description of Artificial Sequence: Synthetic oligonucleotide
  Antisense strand to SEQ ID NO: 951394
aaugacaauccacauuaac

SEQ ID NO: 951396 - RNA, 19 nt, Artificial Sequence
  Description of Artificial Sequence: Synthetic oligonucleotide
  Sense strand starting at position 1108 of SEQ ID NO: 913754
auaggauuaugagaaguag

SEQ ID NO: 951397 - RNA, 19 nt, Artificial Sequence
  Description of Artificial Sequence: Synthetic oligonucleotide
  Antisense strand to SEQ ID NO: 951396
cuacuucucauaauccuau

SEQ ID NO: 951398 - RNA, 19 nt, Artificial Sequence
  Description of Artificial Sequence: Synthetic oligonucleotide
  Sense strand starting at position 2062 of SEQ ID NO: 913754
acaauauaguuugcgguaa

SEQ ID NO: 951399 - RNA, 19 nt, Artificial Sequence
  Description of Artificial Sequence: Synthetic oligonucleotide
  Antisense strand to SEQ ID NO: 951398
uuaccgcaaacuauauugu

SEQ ID NO: 951400 - RNA, 19 nt, Artificial Sequence
  Description of Artificial Sequence: Synthetic oligonucleotide
  Sense strand starting at position 621 of SEQ ID NO: 913754
uuaucugucuuccugagua

SEQ ID NO: 951401 - RNA, 19 nt, Artificial Sequence
  Description of Artificial Sequence: Synthetic oligonucleotide
  Antisense strand to SEQ ID NO: 951400
uacucaggaagacagauaa

SEQ ID NO: 951402 - RNA, 19 nt, Artificial Sequence
  Description of Artificial Sequence: Synthetic oligonucleotide
  Sense strand starting at position 1265 of SEQ ID NO: 913754
uucucccaguguuugauau

SEQ ID NO: 951403 - RNA, 19 nt, Artificial Sequence
  Description of Artificial Sequence: Synthetic oligonucleotide
  Antisense strand to SEQ ID NO: 951402
auaucaaacacugggagaa

SEQ ID NO: 951404 - RNA, 19 nt, Artificial Sequence
  Description of Artificial Sequence: Synthetic oligonucleotide
  Sense strand starting at position 2645 of SEQ ID NO: 913754
ugaaaugguugaguguguu

SEQ ID NO: 951405 - RNA, 19 nt, Artificial Sequence
  Description of Artificial Sequence: Synthetic oligonucleotide
  Antisense strand to SEQ ID NO: 951404
aacacacucaaccauuuca

SEQ ID NO: 951406 - RNA, 19 nt, Artificial Sequence
  Description of Artificial Sequence: Synthetic oligonucleotide
  Sense strand starting at position 1330 of SEQ ID NO: 913754
ccugauagcuucuuaguug

SEQ ID NO: 951407 - RNA, 19 nt, Artificial Sequence
  Description of Artificial Sequence: Synthetic oligonucleotide
  Antisense strand to SEQ ID NO: 951406
caacuaagaagcuaucagg

SEQ ID NO: 951408 - RNA, 19 nt, Artificial Sequence
  Description of Artificial Sequence: Synthetic oligonucleotide
  Sense strand starting at position 2491 of SEQ ID NO: 913754
cugaaagugcauugucauu

SEQ ID NO: 951409 - RNA, 19 nt, Artificial Sequence
  Description of Artificial Sequence: Synthetic oligonucleotide
  Antisense strand to SEQ ID NO: 951408
aaugacaaugcacuuucag

SEQ ID NO: 951410 - RNA, 19 nt, Artificial Sequence
  Description of Artificial Sequence: Synthetic oligonucleotide
  Sense strand starting at position 3723 of SEQ ID NO: 913755
aacacugcugaguaaugau

SEQ ID NO: 951411 - RNA, 19 nt, Artificial Sequence
  Description of Artificial Sequence: Synthetic oligonucleotide
  Antisense strand to SEQ ID NO: 951410
aucauuacucagcaguguu

SEQ ID NO: 951412 - RNA, 19 nt, Artificial Sequence
  Description of Artificial Sequence: Synthetic oligonucleotide
  Sense strand starting at position 180 of SEQ ID NO: 913755
cggcgaacgcuuucuuaag

SEQ ID NO: 951413 - RNA, 19 nt, Artificial Sequence
  Description of Artificial Sequence: Synthetic oligonucleotide
  Antisense strand to SEQ ID NO: 951412
cuuaagaaagcguucgccg

SEQ ID NO: 951414 - RNA, 19 nt, Artificial Sequence
  Description of Artificial Sequence: Synthetic oligonucleotide
  Sense strand starting at position 3496 of SEQ ID NO: 913755
gggaauaugcuugggacag

SEQ ID NO: 951415 - RNA, 19 nt, Artificial Sequence
  Description of Artificial Sequence: Synthetic oligonucleotide
  Antisense strand to SEQ ID NO: 951414
cugucccaagcauauuccc

SEQ ID NO: 951416 - RNA, 19 nt, Artificial Sequence
  Description of Artificial Sequence: Synthetic oligonucleotide
  Sense strand starting at position 3066 of SEQ ID NO: 913755
gugggcauuugagauuuca

SEQ ID NO: 951417 - RNA, 19 nt, Artificial Sequence
  Description of Artificial Sequence: Synthetic oligonucleotide
  Antisense strand to SEQ ID NO: 951416
ugaaaucucaaaugcccac

SEQ ID NO: 951418 - RNA, 19 nt, Artificial Sequence
  Description of Artificial Sequence: Synthetic oligonucleotide
  Sense strand starting at position 187 of SEQ ID NO: 913755
cgcuuucuuaaggaggaaa

SEQ ID NO: 951419 - RNA, 19 nt, Artificial Sequence
  Description of Artificial Sequence: Synthetic oligonucleotide
  Antisense strand to SEQ ID NO: 951418
uuuccuccuuaagaaagcg

SEQ ID NO: 951420 - RNA, 19 nt, Artificial Sequence
  Description of Artificial Sequence: Synthetic oligonucleotide
  Sense strand starting at position 105 of SEQ ID NO: 913755
gacauaauuucugagaugg

SEQ ID NO: 951421 - RNA, 19 nt, Artificial Sequence
  Description of Artificial Sequence: Synthetic oligonucleotide
  Antisense strand to SEQ ID NO: 951420
ccaucucagaaauuauguc

SEQ ID NO: 951422 - RNA, 19 nt, Artificial Sequence
  Description of Artificial Sequence: Synthetic oligonucleotide
  Sense strand starting at position 107 of SEQ ID NO: 913755
cauaauuucugagauggga

SEQ ID NO: 951423 - RNA, 19 nt, Artificial Sequence
  Description of Artificial Sequence: Synthetic oligonucleotide
  Antisense strand to SEQ ID NO: 951422
ucccaucucagaaauuaug

SEQ ID NO: 951424 - RNA, 19 nt, Artificial Sequence
  Description of Artificial Sequence: Synthetic oligonucleotide
  Sense strand starting at position 60 of SEQ ID NO: 913755
caguuaauugccuagagau

SEQ ID NO: 951425 - RNA, 19 nt, Artificial Sequence
  Description of Artificial Sequence: Synthetic oligonucleotide
  Antisense strand to SEQ ID NO: 951424
aucucuaggcaauuaacug

SEQ ID NO: 951426 - RNA, 19 nt, Artificial Sequence
  Description of Artificial Sequence: Synthetic oligonucleotide
  Sense strand starting at position 3364 of SEQ ID NO: 913755
uggauauggcuuuggagag

SEQ ID NO: 951427 - RNA, 19 nt, Artificial Sequence
  Description of Artificial Sequence: Synthetic oligonucleotide
  Antisense strand to SEQ ID NO: 951426
cucuccaaagccauaucca

SEQ ID NO: 951428 - RNA, 19 nt, Artificial Sequence
  Description of Artificial Sequence: Synthetic oligonucleotide
  Sense strand starting at position 2613 of SEQ ID NO: 913755
gugccucucccagaagaga

SEQ ID NO: 951429 - RNA, 19 nt, Artificial Sequence
  Description of Artificial Sequence: Synthetic oligonucleotide
  Antisense strand to SEQ ID NO: 951428
ucucuucugggagaggcac

SEQ ID NO: 951430 - RNA, 19 nt, Artificial Sequence
  Description of Artificial Sequence: Synthetic oligonucleotide
  Sense strand starting at position 62 of SEQ ID NO: 913755
guuaauugccuagagauuc

SEQ ID NO: 951431 - RNA, 19 nt, Artificial Sequence
  Description of Artificial Sequence: Synthetic oligonucleotide
  Antisense strand to SEQ ID NO: 951430
gaaucucuaggcaauuaac

SEQ ID NO: 951432 - RNA, 19 nt, Artificial Sequence
  Description of Artificial Sequence: Synthetic oligonucleotide
  Sense strand starting at position 9 of SEQ ID NO: 913755
gcagguagccaagacugau

SEQ ID NO: 951433 - RNA, 19 nt, Artificial Sequence
  Description of Artificial Sequence: Synthetic oligonucleotide
  Antisense strand to SEQ ID NO: 951432
aucagucuuggcuaccugc

SEQ ID NO: 951434 - RNA, 19 nt, Artificial Sequence
  Description of Artificial Sequence: Synthetic oligonucleotide
  Sense strand starting at position 3722 of SEQ ID NO: 913755
uaacacugcugaguaauga

SEQ ID NO: 951435 - RNA, 19 nt, Artificial Sequence
  Description of Artificial Sequence: Synthetic oligonucleotide
  Antisense strand to SEQ ID NO: 951434
ucauuacucagcaguguua

SEQ ID NO: 951436 - RNA, 19 nt, Artificial Sequence
  Description of Artificial Sequence: Synthetic oligonucleotide
  Sense strand starting at position 3461 of SEQ ID NO: 913755
guaguucuaggauaaguuu

SEQ ID NO: 951437 - RNA, 19 nt, Artificial Sequence
  Description of Artificial Sequence: Synthetic oligonucleotide
  Antisense strand to SEQ ID NO: 951436
aaacuuauccuagaacuac

SEQ ID NO: 951438 - RNA, 19 nt, Artificial Sequence
  Description of Artificial Sequence: Synthetic oligonucleotide
  Sense strand starting at position 3306 of SEQ ID NO: 913755
gucaguguggcgucuguaa

SEQ ID NO: 951439 - RNA, 19 nt, Artificial Sequence
  Description of Artificial Sequence: Synthetic oligonucleotide
  Antisense strand to SEQ ID NO: 951438
uuacagacgccacacugac

SEQ ID NO: 951440 - RNA, 19 nt, Artificial Sequence
  Description of Artificial Sequence: Synthetic oligonucleotide
  Sense strand starting at position 104 of SEQ ID NO: 913755
agacauaauuucugagaug

SEQ ID NO: 951441 - RNA, 19 nt, Artificial Sequence
  Description of Artificial Sequence: Synthetic oligonucleotide
  Antisense strand to SEQ ID NO: 951440
caucucagaaauuaugucu

SEQ ID NO: 951442 - RNA, 19 nt, Artificial Sequence
  Description of Artificial Sequence: Synthetic oligonucleotide
  Sense strand starting at position 2284 of SEQ ID NO: 913755
gccuaaacgacugagguuu

SEQ ID NO: 951443 - RNA, 19 nt, Artificial Sequence
  Description of Artificial Sequence: Synthetic oligonucleotide
  Antisense strand to SEQ ID NO: 951442
aaaccucagucguuuaggc

SEQ ID NO: 951444 - RNA, 19 nt, Artificial Sequence
  Description of Artificial Sequence: Synthetic oligonucleotide
  Sense strand starting at position 2530 of SEQ ID NO: 913755
gggagaugcuacgucagaa

SEQ ID NO: 951445 - RNA, 19 nt, Artificial Sequence
  Description of Artificial Sequence: Synthetic oligonucleotide
  Antisense strand to SEQ ID NO: 951444
uucugacguagcaucuccc

SEQ ID NO: 951446 - RNA, 19 nt, Artificial Sequence
  Description of Artificial Sequence: Synthetic oligonucleotide
  Sense strand starting at position 3577 of SEQ ID NO: 913755
gcuugaugucauggaagau

SEQ ID NO: 951447 - RNA, 19 nt, Artificial Sequence
  Description of Artificial Sequence: Synthetic oligonucleotide
  Antisense strand to SEQ ID NO: 951446
aucuuccaugacaucaagc

SEQ ID NO: 951448 - RNA, 19 nt, Artificial Sequence
  Description of Artificial Sequence: Synthetic oligonucleotide
  Sense strand starting at position 3622 of SEQ ID NO: 913755
ucugguuccucaucacaga

SEQ ID NO: 951449 - RNA, 19 nt, Artificial Sequence
  Description of Artificial Sequence: Synthetic oligonucleotide
  Antisense strand to SEQ ID NO: 951448
ucugugaugaggaaccaga

SEQ ID NO: 951450 - RNA, 19 nt, Artificial Sequence
  Description of Artificial Sequence: Synthetic oligonucleotide
  Sense strand starting at position 3458 of SEQ ID NO: 913755
gacguaguucuaggauaag

SEQ ID NO: 951451 - RNA, 19 nt, Artificial Sequence
  Description of Artificial Sequence: Synthetic oligonucleotide
  Antisense strand to SEQ ID NO: 951450
cuuauccuagaacuacguc

SEQ ID NO: 951452 - RNA, 19 nt, Artificial Sequence
  Description of Artificial Sequence: Synthetic oligonucleotide
  Sense strand starting at position 199 of SEQ ID NO: 913755
gaggaaaugucagcuggug

SEQ ID NO: 951453 - RNA, 19 nt, Artificial Sequence
  Description of Artificial Sequence: Synthetic oligonucleotide
  Antisense strand to SEQ ID NO: 951452
caccagcugacauuuccuc

SEQ ID NO: 951454 - RNA, 19 nt, Artificial Sequence
  Description of Artificial Sequence: Synthetic oligonucleotide
  Sense strand starting at position 3720 of SEQ ID NO: 913755
gcuaacacugcugaguaau

SEQ ID NO: 951455 - RNA, 19 nt, Artificial Sequence
  Description of Artificial Sequence: Synthetic oligonucleotide
  Antisense strand to SEQ ID NO: 951454
auuacucagcaguguuagc

SEQ ID NO: 951456 - RNA, 19 nt, Artificial Sequence
  Description of Artificial Sequence: Synthetic oligonucleotide
  Sense strand starting at position 201 of SEQ ID NO: 913755
ggaaaugucagcuggugga

SEQ ID NO: 951457 - RNA, 19 nt, Artificial Sequence
  Description of Artificial Sequence: Synthetic oligonucleotide
  Antisense strand to SEQ ID NO: 951456
uccaccagcugacauuucc

SEQ ID NO: 951458 - RNA, 19 nt, Artificial Sequence
  Description of Artificial Sequence: Synthetic oligonucleotide
  Sense strand starting at position 2816 of SEQ ID NO: 913755
uuguguuuagagcauuaua

SEQ ID NO: 951459 - RNA, 19 nt, Artificial Sequence
  Description of Artificial Sequence: Synthetic oligonucleotide
  Antisense strand to SEQ ID NO: 951458
uauaaugcucuaaacacaa

SEQ ID NO: 951460 - RNA, 19 nt, Artificial Sequence
  Description of Artificial Sequence: Synthetic oligonucleotide
  Sense strand starting at position 3671 of SEQ ID NO: 913755
ugaggucuuugggcuuaga

SEQ ID NO: 951461 - RNA, 19 nt, Artificial Sequence
  Description of Artificial Sequence: Synthetic oligonucleotide
  Antisense strand to SEQ ID NO: 951460
ucuaagcccaaagaccuca

SEQ ID NO: 951462 - RNA, 19 nt, Artificial Sequence
  Description of Artificial Sequence: Synthetic oligonucleotide
  Sense strand starting at position 2246 of SEQ ID NO: 913755
agaaucgacugcuucggaa

SEQ ID NO: 951463 - RNA, 19 nt, Artificial Sequence
  Description of Artificial Sequence: Synthetic oligonucleotide
  Antisense strand to SEQ ID NO: 951462
uuccgaagcagucgauucu

SEQ ID NO: 951464 - RNA, 19 nt, Artificial Sequence
  Description of Artificial Sequence: Synthetic oligonucleotide
  Sense strand starting at position 660 of SEQ ID NO: 913755
aagggcuucuuuguuugaa

SEQ ID NO: 951465 - RNA, 19 nt, Artificial Sequence
  Description of Artificial Sequence: Synthetic oligonucleotide
  Antisense strand to SEQ ID NO: 951464
uucaaacaaagaagcccuu

SEQ ID NO: 951466 - RNA, 19 nt, Artificial Sequence
  Description of Artificial Sequence: Synthetic oligonucleotide
  Sense strand starting at position 59 of SEQ ID NO: 913755
gcaguuaauugccuagaga

SEQ ID NO: 951467 - RNA, 19 nt, Artificial Sequence
  Description of Artificial Sequence: Synthetic oligonucleotide
  Antisense strand to SEQ ID NO: 951466
ucucuaggcaauuaacugc

SEQ ID NO: 951468 - RNA, 19 nt, Artificial Sequence
  Description of Artificial Sequence: Synthetic oligonucleotide
  Sense strand starting at position 3732 of SEQ ID NO: 913755
gaguaaugauugucugcca

SEQ ID NO: 951469 - RNA, 19 nt, Artificial Sequence
  Description of Artificial Sequence: Synthetic oligonucleotide
  Antisense strand to SEQ ID NO: 951468
uggcagacaaucauuacuc

SEQ ID NO: 951470 - RNA, 19 nt, Artificial Sequence
  Description of Artificial Sequence: Synthetic oligonucleotide
  Sense strand starting at position 2594 of SEQ ID NO: 913755
gcggaaagauguucagcaa

SEQ ID NO: 951471 - RNA, 19 nt, Artificial Sequence
  Description of Artificial Sequence: Synthetic oligonucleotide
  Antisense strand to SEQ ID NO: 951470
uugcugaacaucuuuccgc

SEQ ID NO: 951472 - RNA, 19 nt, Artificial Sequence
  Description of Artificial Sequence: Synthetic oligonucleotide
  Sense strand starting at position 2283 of SEQ ID NO: 913755
ugccuaaacgacugagguu

SEQ ID NO: 951473 - RNA, 19 nt, Artificial Sequence
  Description of Artificial Sequence: Synthetic oligonucleotide
  Antisense strand to SEQ ID NO: 951472
aaccucagucguuuaggca

SEQ ID NO: 951474 - RNA, 19 nt, Artificial Sequence
  Description of Artificial Sequence: Synthetic oligonucleotide
  Sense strand starting at position 3735 of SEQ ID NO: 913755
uaaugauugucugccagua

SEQ ID NO: 951475 - RNA, 19 nt, Artificial Sequence
  Description of Artificial Sequence: Synthetic oligonucleotide
  Antisense strand to SEQ ID NO: 951474
uacuggcagacaaucauua

SEQ ID NO: 951476 - RNA, 19 nt, Artificial Sequence
  Description of Artificial Sequence: Synthetic oligonucleotide
  Sense strand starting at position 2963 of SEQ ID NO: 913755
ccauuuguauaagaagugu

SEQ ID NO: 951477 - RNA, 19 nt, Artificial Sequence
  Description of Artificial Sequence: Synthetic oligonucleotide
  Antisense strand to SEQ ID NO: 951476
acacuucuuauacaaaugg

SEQ ID NO: 951478 - RNA, 19 nt, Artificial Sequence
  Description of Artificial Sequence: Synthetic oligonucleotide
  Sense strand starting at position 2609 of SEQ ID NO: 913755
gcaagugccucucccagaa

SEQ ID NO: 951479 - RNA, 19 nt, Artificial Sequence
  Description of Artificial Sequence: Synthetic oligonucleotide
  Antisense strand to SEQ ID NO: 951478
uucugggagaggcacuugc

SEQ ID NO: 951480 - RNA, 19 nt, Artificial Sequence
  Description of Artificial Sequence: Synthetic oligonucleotide
  Sense strand starting at position 2958 of SEQ ID NO: 913755
ccuugccauuuguauaaga

SEQ ID NO: 951481 - RNA, 19 nt, Artificial Sequence
  Description of Artificial Sequence: Synthetic oligonucleotide
  Antisense strand to SEQ ID NO: 951480
ucuuauacaaauggcaagg

SEQ ID NO: 951482 - RNA, 19 nt, Artificial Sequence
  Description of Artificial Sequence: Synthetic oligonucleotide
  Sense strand starting at position 3569 of SEQ ID NO: 913755
ggcuuugugcuugauguca

SEQ ID NO: 951483 - RNA, 19 nt, Artificial Sequence
  Description of Artificial Sequence: Synthetic oligonucleotide
  Antisense strand to SEQ ID NO: 951482
ugacaucaagcacaaagcc

SEQ ID NO: 951484 - RNA, 19 nt, Artificial Sequence
  Description of Artificial Sequence: Synthetic oligonucleotide
  Sense strand starting at position 182 of SEQ ID NO: 913755
gcgaacgcuuucuuaagga

SEQ ID NO: 951485 - RNA, 19 nt, Artificial Sequence
  Description of Artificial Sequence: Synthetic oligonucleotide
  Antisense strand to SEQ ID NO: 951484
uccuuaagaaagcguucgc

SEQ ID NO: 951486 - RNA, 19 nt, Artificial Sequence
  Description of Artificial Sequence: Synthetic oligonucleotide
  Sense strand starting at position 3907 of SEQ ID NO: 913755
ugcuuagugcagugagacu

SEQ ID NO: 951487 - RNA, 19 nt, Artificial Sequence
  Description of Artificial Sequence: Synthetic oligonucleotide
  Antisense strand to SEQ ID NO: 951486
agucucacugcacuaagca

SEQ ID NO: 951488 - RNA, 19 nt, Artificial Sequence
  Description of Artificial Sequence: Synthetic oligonucleotide
  Sense strand starting at position 3535 of SEQ ID NO: 913755
aagggaucuuaugggacuu

SEQ ID NO: 951489 - RNA, 19 nt, Artificial Sequence
  Description of Artificial Sequence: Synthetic oligonucleotide
  Antisense strand to SEQ ID NO: 951488
aagucccauaagaucccuu

SEQ ID NO: 951490 - RNA, 19 nt, Artificial Sequence
  Description of Artificial Sequence: Synthetic oligonucleotide
  Sense strand starting at position 1169 of SEQ ID NO: 913756
caggauuugugguuccagu

SEQ ID NO: 951491 - RNA, 19 nt, Artificial Sequence
  Description of Artificial Sequence: Synthetic oligonucleotide
  Antisense strand to SEQ ID NO: 951490
acuggaaccacaaauccug

SEQ ID NO: 951492 - RNA, 19 nt, Artificial Sequence
  Description of Artificial Sequence: Synthetic oligonucleotide
  Sense strand starting at position 3771 of SEQ ID NO: 913756
uaauguuaagucgugcagu

SEQ ID NO: 951493 - RNA, 19 nt, Artificial Sequence
  Description of Artificial Sequence: Synthetic oligonucleotide
  Antisense strand to SEQ ID NO: 951492
acugcacgacuuaacauua

SEQ ID NO: 951494 - RNA, 19 nt, Artificial Sequence
  Description of Artificial Sequence: Synthetic oligonucleotide
  Sense strand starting at position 3205 of SEQ ID NO: 913756
uuaacaaccucagugagau

SEQ ID NO: 951495 - RNA, 19 nt, Artificial Sequence
  Description of Artificial Sequence: Synthetic oligonucleotide
  Antisense strand to SEQ ID NO: 951494
aucucacugagguuguuaa

SEQ ID NO: 951496 - RNA, 19 nt, Artificial Sequence
  Description of Artificial Sequence: Synthetic oligonucleotide
  Sense strand starting at position 365 of SEQ ID NO: 913756
ugggauccugggugggaau

SEQ ID NO: 951497 - RNA, 19 nt, Artificial Sequence
  Description of Artificial Sequence: Synthetic oligonucleotide
  Antisense strand to SEQ ID NO: 951496
auucccacccaggauccca

SEQ ID NO: 951498 - RNA, 19 nt, Artificial Sequence
  Description of Artificial Sequence: Synthetic oligonucleotide
  Sense strand starting at position 696 of SEQ ID NO: 913756
aggguuaggguuugggaau

SEQ ID NO: 951499 - RNA, 19 nt, Artificial Sequence
  Description of Artificial Sequence: Synthetic oligonucleotide
  Antisense strand to SEQ ID NO: 951498
auucccaaacccuaacccu

SEQ ID NO: 951500 - RNA, 19 nt, Artificial Sequence
  Description of Artificial Sequence: Synthetic oligonucleotide
  Sense strand starting at position 3821 of SEQ ID NO: 913756
agggcuaguguuuaauaga

SEQ ID NO: 951501 - RNA, 19 nt, Artificial Sequence
  Description of Artificial Sequence: Synthetic oligonucleotide
  Antisense strand to SEQ ID NO: 951500
ucuauuaaacacuagcccu

SEQ ID NO: 951502 - RNA, 19 nt, Artificial Sequence
  Description of Artificial Sequence: Synthetic oligonucleotide
  Sense strand starting at position 3830 of SEQ ID NO: 913756
guuuaauagaaagggcuca

SEQ ID NO: 951503 - RNA, 19 nt, Artificial Sequence
  Description of Artificial Sequence: Synthetic oligonucleotide
  Antisense strand to SEQ ID NO: 951502
ugagcccuuucuauuaaac

SEQ ID NO: 951504 - RNA, 19 nt, Artificial Sequence
  Description of Artificial Sequence: Synthetic oligonucleotide
  Sense strand starting at position 1164 of SEQ ID NO: 913756
gcagucaggauuugugguu

SEQ ID NO: 951505 - RNA, 19 nt, Artificial Sequence
  Description of Artificial Sequence: Synthetic oligonucleotide
  Antisense strand to SEQ ID NO: 951504
aaccacaaauccugacugc

SEQ ID NO: 951506 - RNA, 19 nt, Artificial Sequence
  Description of Artificial Sequence: Synthetic oligonucleotide
  Sense strand starting at position 1357 of SEQ ID NO: 913756
gaguuucgaggucaggauu

SEQ ID NO: 951507 - RNA, 19 nt, Artificial Sequence
  Description of Artificial Sequence: Synthetic oligonucleotide
  Antisense strand to SEQ ID NO: 951506
aauccugaccucgaaacuc

SEQ ID NO: 951508 - RNA, 19 nt, Artificial Sequence
  Description of Artificial Sequence: Synthetic oligonucleotide
  Sense strand starting at position 2008 of SEQ ID NO: 913756
auuagauccgcugggaaag

SEQ ID NO: 951509 - RNA, 19 nt, Artificial Sequence
  Description of Artificial Sequence: Synthetic oligonucleotide
  Antisense strand to SEQ ID NO: 951508
cuuucccagcggaucuaau

SEQ ID NO: 951510 - RNA, 19 nt, Artificial Sequence
  Description of Artificial Sequence: Synthetic oligonucleotide
  Sense strand starting at position 217 of SEQ ID NO: 913756
ugcuuuauuuggguuggca

SEQ ID NO: 951511 - RNA, 19 nt, Artificial Sequence
  Description of Artificial Sequence: Synthetic oligonucleotide
  Antisense strand to SEQ ID NO: 951510
ugccaacccaaauaaagca

SEQ ID NO: 951512 - RNA, 19 nt, Artificial Sequence
  Description of Artificial Sequence: Synthetic oligonucleotide
  Sense strand starting at position 1143 of SEQ ID NO: 913756
agguucuguaaccagaguu

SEQ ID NO: 951513 - RNA, 19 nt, Artificial Sequence
  Description of Artificial Sequence: Synthetic oligonucleotide
  Antisense strand to SEQ ID NO: 951512
aacucugguuacagaaccu

SEQ ID NO: 951514 - RNA, 19 nt, Artificial Sequence
  Description of Artificial Sequence: Synthetic oligonucleotide
  Sense strand starting at position 99 of SEQ ID NO: 913756
gcacacauccgucauaaag

SEQ ID NO: 951515 - RNA, 19 nt, Artificial Sequence
  Description of Artificial Sequence: Synthetic oligonucleotide
  Antisense strand to SEQ ID NO: 951514
cuuuaugacggaugugugc

SEQ ID NO: 951516 - RNA, 19 nt, Artificial Sequence
  Description of Artificial Sequence: Synthetic oligonucleotide
  Sense strand starting at position 2194 of SEQ ID NO: 913756
cugaguugggccuagaucu

SEQ ID NO: 951517 - RNA, 19 nt, Artificial Sequence
  Description of Artificial Sequence: Synthetic oligonucleotide
  Antisense strand to SEQ ID NO: 951516
agaucuaggcccaacucag

SEQ ID NO: 951518 - RNA, 19 nt, Artificial Sequence
  Description of Artificial Sequence: Synthetic oligonucleotide
  Sense strand starting at position 979 of SEQ ID NO: 913756
caguaugaaggcugggauu

SEQ ID NO: 951519 - RNA, 19 nt, Artificial Sequence
  Description of Artificial Sequence: Synthetic oligonucleotide
  Antisense strand to SEQ ID NO: 951518
aaucccagccuucauacug

SEQ ID NO: 951520 - RNA, 19 nt, Artificial Sequence
  Description of Artificial Sequence: Synthetic oligonucleotide
  Sense strand starting at position 3625 of SEQ ID NO: 913756
uguauaaaccaaugucuac

SEQ ID NO: 951521 - RNA, 19 nt, Artificial Sequence
  Description of Artificial Sequence: Synthetic oligonucleotide
  Antisense strand to SEQ ID NO: 951520
guagacauugguuuauaca

SEQ ID NO: 951522 - RNA, 19 nt, Artificial Sequence
  Description of Artificial Sequence: Synthetic oligonucleotide
  Sense strand starting at position 1003 of SEQ ID NO: 913756
gcuagaauucagugauugg

SEQ ID NO: 951523 - RNA, 19 nt, Artificial Sequence
  Description of Artificial Sequence: Synthetic oligonucleotide
  Antisense strand to SEQ ID NO: 951522
ccaaucacugaauucuagc

SEQ ID NO: 951524 - RNA, 19 nt, Artificial Sequence
  Description of Artificial Sequence: Synthetic oligonucleotide
  Sense strand starting at position 1157 of SEQ ID NO: 913756
gaguucugcagucaggauu

SEQ ID NO: 951525 - RNA, 19 nt, Artificial Sequence
  Description of Artificial Sequence: Synthetic oligonucleotide
  Antisense strand to SEQ ID NO: 951524
aauccugacugcagaacuc

SEQ ID NO: 951526 - RNA, 19 nt, Artificial Sequence
  Description of Artificial Sequence: Synthetic oligonucleotide
  Sense strand starting at position 981 of SEQ ID NO: 913756
guaugaaggcugggauucu

SEQ ID NO: 951527 - RNA, 19 nt, Artificial Sequence
  Description of Artificial Sequence: Synthetic oligonucleotide
  Antisense strand to SEQ ID NO: 951526
agaaucccagccuucauac

SEQ ID NO: 951528 - RNA, 19 nt, Artificial Sequence
  Description of Artificial Sequence: Synthetic oligonucleotide
  Sense strand starting at position 3328 of SEQ ID NO: 913756
gcaggcacuccggaggauu

SEQ ID NO: 951529 - RNA, 19 nt, Artificial Sequence
  Description of Artificial Sequence: Synthetic oligonucleotide
  Antisense strand to SEQ ID NO: 951528
aauccuccggagugccugc

SEQ ID NO: 951530 - RNA, 19 nt, Artificial Sequence
  Description of Artificial Sequence: Synthetic oligonucleotide
  Sense strand starting at position 948 of SEQ ID NO: 913756
aggcuagauuggcuuuaga

SEQ ID NO: 951531 - RNA, 19 nt, Artificial Sequence
  Description of Artificial Sequence: Synthetic oligonucleotide
  Antisense strand to SEQ ID NO: 951530
ucuaaagccaaucuagccu

SEQ ID NO: 951532 - RNA, 19 nt, Artificial Sequence
  Description of Artificial Sequence: Synthetic oligonucleotide
  Sense strand starting at position 709 of SEQ ID NO: 913756
gggaauucugcaggcucaa

SEQ ID NO: 951533 - RNA, 19 nt, Artificial Sequence
  Description of Artificial Sequence: Synthetic oligonucleotide
  Antisense strand to SEQ ID NO: 951532
uugagccugcagaauuccc

SEQ ID NO: 951534 - RNA, 19 nt, Artificial Sequence
  Description of Artificial Sequence: Synthetic oligonucleotide
  Sense strand starting at position 3459 of SEQ ID NO: 913756
uguucuguucuaggaagac

SEQ ID NO: 951535 - RNA, 19 nt, Artificial Sequence
  Description of Artificial Sequence: Synthetic oligonucleotide
  Antisense strand to SEQ ID NO: 951534
gucuuccuagaacagaaca

SEQ ID NO: 951536 - RNA, 19 nt, Artificial Sequence
  Description of Artificial Sequence: Synthetic oligonucleotide
  Sense strand starting at position 3956 of SEQ ID NO: 913756
ggaacuugaucuuggauuu

SEQ ID NO: 951537 - RNA, 19 nt, Artificial Sequence
  Description of Artificial Sequence: Synthetic oligonucleotide
  Antisense strand to SEQ ID NO: 951536
aaauccaagaucaaguucc

SEQ ID NO: 951538 - RNA, 19 nt, Artificial Sequence
  Description of Artificial Sequence: Synthetic oligonucleotide
  Sense strand starting at position 3701 of SEQ ID NO: 913756
ccgcaaauucauggguuga

SEQ ID NO: 951539 - RNA, 19 nt, Artificial Sequence
  Description of Artificial Sequence: Synthetic oligonucleotide
  Antisense strand to SEQ ID NO: 951538
ucaacccaugaauuugcgg

SEQ ID NO: 951540 - RNA, 19 nt, Artificial Sequence
  Description of Artificial Sequence: Synthetic oligonucleotide
  Sense strand starting at position 97 of SEQ ID NO: 913756
uggcacacauccgucauaa

SEQ ID NO: 951541 - RNA, 19 nt, Artificial Sequence
  Description of Artificial Sequence: Synthetic oligonucleotide
  Antisense strand to SEQ ID NO: 951540
uuaugacggaugugugcca

SEQ ID NO: 951542 - RNA, 19 nt, Artificial Sequence
  Description of Artificial Sequence: Synthetic oligonucleotide
  Sense strand starting at position 3636 of SEQ ID NO: 913756
augucuacuuuagucagua

SEQ ID NO: 951543 - RNA, 19 nt, Artificial Sequence
  Description of Artificial Sequence: Synthetic oligonucleotide
  Antisense strand to SEQ ID NO: 951542
uacugacuaaaguagacau

SEQ ID NO: 951544 - RNA, 19 nt, Artificial Sequence
  Description of Artificial Sequence: Synthetic oligonucleotide
  Sense strand starting at position 3049 of SEQ ID NO: 913756
ccgggacaugccuguagau

SEQ ID NO: 951545 - RNA, 19 nt, Artificial Sequence
  Description of Artificial Sequence: Synthetic oligonucleotide
  Antisense strand to SEQ ID NO: 951544
aucuacaggcaugucccgg

SEQ ID NO: 951546 - RNA, 19 nt, Artificial Sequence
  Description of Artificial Sequence: Synthetic oligonucleotide
  Sense strand starting at position 3805 of SEQ ID NO: 913756
uguuaagucgugcaauagg

SEQ ID NO: 951547 - RNA, 19 nt, Artificial Sequence
  Description of Artificial Sequence: Synthetic oligonucleotide
  Antisense strand to SEQ ID NO: 951546
ccuauugcacgacuuaaca

SEQ ID NO: 951548 - RNA, 19 nt, Artificial Sequence
  Description of Artificial Sequence: Synthetic oligonucleotide
  Sense strand starting at position 1070 of SEQ ID NO: 913756
ggguuaggguuugugguua

SEQ ID NO: 951549 - RNA, 19 nt, Artificial Sequence
  Description of Artificial Sequence: Synthetic oligonucleotide
  Antisense strand to SEQ ID NO: 951548
uaaccacaaacccuaaccc

SEQ ID NO: 951550 - RNA, 19 nt, Artificial Sequence
  Description of Artificial Sequence: Synthetic oligonucleotide
  Sense strand starting at position 3814 of SEQ ID NO: 913756
gugcaauagggcuaguguu

SEQ ID NO: 951551 - RNA, 19 nt, Artificial Sequence
  Description of Artificial Sequence: Synthetic oligonucleotide
  Antisense strand to SEQ ID NO: 951550
aacacuagcccuauugcac

SEQ ID NO: 951552 - RNA, 19 nt, Artificial Sequence
  Description of Artificial Sequence: Synthetic oligonucleotide
  Sense strand starting at position 1671 of SEQ ID NO: 913756
ggacuuacgucgucgaaga

SEQ ID NO: 951553 - RNA, 19 nt, Artificial Sequence
  Description of Artificial Sequence: Synthetic oligonucleotide
  Antisense strand to SEQ ID NO: 951552
ucuucgacgacguaagucc

SEQ ID NO: 951554 - RNA, 19 nt, Artificial Sequence
  Description of Artificial Sequence: Synthetic oligonucleotide
  Sense strand starting at position 1672 of SEQ ID NO: 913756
gacuuacgucgucgaagag

SEQ ID NO: 951555 - RNA, 19 nt, Artificial Sequence
  Description of Artificial Sequence: Synthetic oligonucleotide
  Antisense strand to SEQ ID NO: 951554
cucuucgacgacguaaguc

SEQ ID NO: 951556 - RNA, 19 nt, Artificial Sequence
  Description of Artificial Sequence: Synthetic oligonucleotide
  Sense strand starting at position 1074 of SEQ ID NO: 913756
uaggguuugugguuauguu

SEQ ID NO: 951557 - RNA, 19 nt, Artificial Sequence
  Description of Artificial Sequence: Synthetic oligonucleotide
  Antisense strand to SEQ ID NO: 951556
aacauaaccacaaacccua

SEQ ID NO: 951558 - RNA, 19 nt, Artificial Sequence
  Description of Artificial Sequence: Synthetic oligonucleotide
  Sense strand starting at position 96 of SEQ ID NO: 913756
guggcacacauccgucaua

SEQ ID NO: 951559 - RNA, 19 nt, Artificial Sequence
  Description of Artificial Sequence: Synthetic oligonucleotide
  Antisense strand to SEQ ID NO: 951558
uaugacggaugugugccac

SEQ ID NO: 951560 - RNA, 19 nt, Artificial Sequence
  Description of Artificial Sequence: Synthetic oligonucleotide
  Sense strand starting at position 2201 of SEQ ID NO: 913756
gggccuagaucugaacaga

SEQ ID NO: 951561 - RNA, 19 nt, Artificial Sequence
  Description of Artificial Sequence: Synthetic oligonucleotide
  Antisense strand to SEQ ID NO: 951560
ucuguucagaucuaggccc

SEQ ID NO: 951562 - RNA, 19 nt, Artificial Sequence
  Description of Artificial Sequence: Synthetic oligonucleotide
  Sense strand starting at position 982 of SEQ ID NO: 913756
uaugaaggcugggauucua

SEQ ID NO: 951563 - RNA, 19 nt, Artificial Sequence
  Description of Artificial Sequence: Synthetic oligonucleotide
  Antisense strand to SEQ ID NO: 951562
uagaaucccagccuucaua

SEQ ID NO: 951564 - RNA, 19 nt, Artificial Sequence
  Description of Artificial Sequence: Synthetic oligonucleotide
  Sense strand starting at position 1274 of SEQ ID NO: 913756
uggguuuggugcgcacaga

SEQ ID NO: 951565 - RNA, 19 nt, Artificial Sequence
  Description of Artificial Sequence: Synthetic oligonucleotide
  Antisense strand to SEQ ID NO: 951564
ucugugcgcaccaaaccca

SEQ ID NO: 951566 - RNA, 19 nt, Artificial Sequence
  Description of Artificial Sequence: Synthetic oligonucleotide
  Sense strand starting at position 3545 of SEQ ID NO: 913756
gcaucacuggcuuguguua

SEQ ID NO: 951567 - RNA, 19 nt, Artificial Sequence
  Description of Artificial Sequence: Synthetic oligonucleotide
  Antisense strand to SEQ ID NO: 951566
uaacacaagccagugaugc

SEQ ID NO: 951568 - RNA, 19 nt, Artificial Sequence
  Description of Artificial Sequence: Synthetic oligonucleotide
  Sense strand starting at position 3824 of SEQ ID NO: 913756
gcuaguguuuaauagaaag

SEQ ID NO: 951569 - RNA, 19 nt, Artificial Sequence
  Description of Artificial Sequence: Synthetic oligonucleotide
  Antisense strand to SEQ ID NO: 951568
cuuucuauuaaacacuagc

SEQ ID NO: 951570 - RNA, 19 nt, Artificial Sequence
  Description of Artificial Sequence: Synthetic oligonucleotide
  Sense strand starting at position 3394 of SEQ ID NO: 913757
agacaauuggugcaauauu

SEQ ID NO: 951571 - RNA, 19 nt, Artificial Sequence
  Description of Artificial Sequence: Synthetic oligonucleotide
  Antisense strand to SEQ ID NO: 951570
aauauugcaccaauugucu

SEQ ID NO: 951572 - RNA, 19 nt, Artificial Sequence
  Description of Artificial Sequence: Synthetic oligonucleotide
  Sense strand starting at position 3931 of SEQ ID NO: 913757
agagacagguguucaaaug

SEQ ID NO: 951573 - RNA, 19 nt, Artificial Sequence
  Description of Artificial Sequence: Synthetic oligonucleotide
  Antisense strand to SEQ ID NO: 951572
cauuugaacaccugucucu

SEQ ID NO: 951574 - RNA, 19 nt, Artificial Sequence
  Description of Artificial Sequence: Synthetic oligonucleotide
  Sense strand starting at position 744 of SEQ ID NO: 913757
gaaagaaauacgugagagu

SEQ ID NO: 951575 - RNA, 19 nt, Artificial Sequence
  Description of Artificial Sequence: Synthetic oligonucleotide
  Antisense strand to SEQ ID NO: 951574
acucucacguauuucuuuc

SEQ ID NO: 951576 - RNA, 19 nt, Artificial Sequence
  Description of Artificial Sequence: Synthetic oligonucleotide
  Sense strand starting at position 1509 of SEQ ID NO: 913757
ccucaauuugcacguacaa

SEQ ID NO: 951577 - RNA, 19 nt, Artificial Sequence
  Description of Artificial Sequence: Synthetic oligonucleotide
  Antisense strand to SEQ ID NO: 951576
uuguacgugcaaauugagg

SEQ ID NO: 951578 - RNA, 19 nt, Artificial Sequence
  Description of Artificial Sequence: Synthetic oligonucleotide
  Sense strand starting at position 3265 of SEQ ID NO: 913757
gacugcgcauuuccagaau

SEQ ID NO: 951579 - RNA, 19 nt, Artificial Sequence
  Description of Artificial Sequence: Synthetic oligonucleotide
  Antisense strand to SEQ ID NO: 951578
auucuggaaaugcgcaguc

SEQ ID NO: 951580 - RNA, 19 nt, Artificial Sequence
  Description of Artificial Sequence: Synthetic oligonucleotide
  Sense strand starting at position 531 of SEQ ID NO: 913757
gaagguaaucaaugaguuc

SEQ ID NO: 951581 - RNA, 19 nt, Artificial Sequence
  Description of Artificial Sequence: Synthetic oligonucleotide
  Antisense strand to SEQ ID NO: 951580
gaacucauugauuaccuuc

SEQ ID NO: 951582 - RNA, 19 nt, Artificial Sequence
  Description of Artificial Sequence: Synthetic oligonucleotide
  Sense strand starting at position 3391 of SEQ ID NO: 913757
acaagacaauuggugcaau

SEQ ID NO: 951583 - RNA, 19 nt, Artificial Sequence
  Description of Artificial Sequence: Synthetic oligonucleotide
  Antisense strand to SEQ ID NO: 951582
auugcaccaauugucuugu

SEQ ID NO: 951584 - RNA, 19 nt, Artificial Sequence
  Description of Artificial Sequence: Synthetic oligonucleotide
  Sense strand starting at position 703 of SEQ ID NO: 913757
ggugguauuggaggaugau

SEQ ID NO: 951585 - RNA, 19 nt, Artificial Sequence
  Description of Artificial Sequence: Synthetic oligonucleotide
  Antisense strand to SEQ ID NO: 951584
aucauccuccaauaccacc

SEQ ID NO: 951586 - RNA, 19 nt, Artificial Sequence
  Description of Artificial Sequence: Synthetic oligonucleotide
  Sense strand starting at position 1366 of SEQ ID NO: 913757
auuaaaucugcguaagaau

SEQ ID NO: 951587 - RNA, 19 nt, Artificial Sequence
  Description of Artificial Sequence: Synthetic oligonucleotide
  Antisense strand to SEQ ID NO: 951586
auucuuacgcagauuuaau

SEQ ID NO: 951588 - RNA, 19 nt, Artificial Sequence
  Description of Artificial Sequence: Synthetic oligonucleotide
  Sense strand starting at position 3268 of SEQ ID NO: 913757
ugcgcauuuccagaaugcu

SEQ ID NO: 951589 - RNA, 19 nt, Artificial Sequence
  Description of Artificial Sequence: Synthetic oligonucleotide
  Antisense strand to SEQ ID NO: 951588
agcauucuggaaaugcgca

SEQ ID NO: 951590 - RNA, 19 nt, Artificial Sequence
  Description of Artificial Sequence: Synthetic oligonucleotide
  Sense strand starting at position 1381 of SEQ ID NO: 913757
gaaugaggucauuguuuaa

SEQ ID NO: 951591 - RNA, 19 nt, Artificial Sequence
  Description of Artificial Sequence: Synthetic oligonucleotide
  Antisense strand to SEQ ID NO: 951590
uuaaacaaugaccucauuc

SEQ ID NO: 951592 - RNA, 19 nt, Artificial Sequence
  Description of Artificial Sequence: Synthetic oligonucleotide
  Sense strand starting at position 2276 of SEQ ID NO: 913757
agaaguaauuugcaggaaa

SEQ ID NO: 951593 - RNA, 19 nt, Artificial Sequence
  Description of Artificial Sequence: Synthetic oligonucleotide
  Antisense strand to SEQ ID NO: 951592
uuuccugcaaauuacuucu

SEQ ID NO: 951594 - RNA, 19 nt, Artificial Sequence
  Description of Artificial Sequence: Synthetic oligonucleotide
  Sense strand starting at position 1516 of SEQ ID NO: 913757
uugcacguacaauaauaua

SEQ ID NO: 951595 - RNA, 19 nt, Artificial Sequence
  Description of Artificial Sequence: Synthetic oligonucleotide
  Antisense strand to SEQ ID NO: 951594
uauauuauuguacgugcaa

SEQ ID NO: 951596 - RNA, 19 nt, Artificial Sequence
  Description of Artificial Sequence: Synthetic oligonucleotide
  Sense strand starting at position 177 of SEQ ID NO: 913757
guuagaaugacguaacagu

SEQ ID NO: 951597 - RNA, 19 nt, Artificial Sequence
  Description of Artificial Sequence: Synthetic oligonucleotide
  Antisense strand to SEQ ID NO: 951596
acuguuacgucauucuaac

SEQ ID NO: 951598 - RNA, 19 nt, Artificial Sequence
  Description of Artificial Sequence: Synthetic oligonucleotide
  Sense strand starting at position 3663 of SEQ ID NO: 913757
aucguuugucaucagggaa

SEQ ID NO: 951599 - RNA, 19 nt, Artificial Sequence
  Description of Artificial Sequence: Synthetic oligonucleotide
  Antisense strand to SEQ ID NO: 951598
uucccugaugacaaacgau

SEQ ID NO: 951600 - RNA, 19 nt, Artificial Sequence
  Description of Artificial Sequence: Synthetic oligonucleotide
  Sense strand starting at position 1384 of SEQ ID NO: 913757
ugaggucauuguuuaacag

SEQ ID NO: 951601 - RNA, 19 nt, Artificial Sequence
  Description of Artificial Sequence: Synthetic oligonucleotide
  Antisense strand to SEQ ID NO: 951600
cuguuaaacaaugaccuca

SEQ ID NO: 951602 - RNA, 19 nt, Artificial Sequence
  Description of Artificial Sequence: Synthetic oligonucleotide
  Sense strand starting at position 3479 of SEQ ID NO: 913757
agaauacaucccuguaguu

SEQ ID NO: 951603 - RNA, 19 nt, Artificial Sequence
  Description of Artificial Sequence: Synthetic oligonucleotide
  Antisense strand to SEQ ID NO: 951602
aacuacagggauguauucu

SEQ ID NO: 951604 - RNA, 19 nt, Artificial Sequence
  Description of Artificial Sequence: Synthetic oligonucleotide
  Sense strand starting at position 20 of SEQ ID NO: 913757
aaugauacguggucauuag

SEQ ID NO: 951605 - RNA, 19 nt, Artificial Sequence
  Description of Artificial Sequence: Synthetic oligonucleotide
  Antisense strand to SEQ ID NO: 951604
cuaaugaccacguaucauu

SEQ ID NO: 951606 - RNA, 19 nt, Artificial Sequence
  Description of Artificial Sequence: Synthetic oligonucleotide
  Sense strand starting at position 24 of SEQ ID NO: 913757
auacguggucauuagugau

SEQ ID NO: 951607 - RNA, 19 nt, Artificial Sequence
  Description of Artificial Sequence: Synthetic oligonucleotide
  Antisense strand to SEQ ID NO: 951606
aucacuaaugaccacguau

SEQ ID NO: 951608 - RNA, 19 nt, Artificial Sequence
  Description of Artificial Sequence: Synthetic oligonucleotide
  Sense strand starting at position 21 of SEQ ID NO: 913757
augauacguggucauuagu

SEQ ID NO: 951609 - RNA, 19 nt, Artificial Sequence
  Description of Artificial Sequence: Synthetic oligonucleotide
  Antisense strand to SEQ ID NO: 951608
acuaaugaccacguaucau

SEQ ID NO: 951610 - RNA, 19 nt, Artificial Sequence
  Description of Artificial Sequence: Synthetic oligonucleotide
  Sense strand starting at position 3098 of SEQ ID NO: 913757
gauggagucugucuaaggu

SEQ ID NO: 951611 - RNA, 19 nt, Artificial Sequence
  Description of Artificial Sequence: Synthetic oligonucleotide
  Antisense strand to SEQ ID NO: 951610
accuuagacagacuccauc

SEQ ID NO: 951612 - RNA, 19 nt, Artificial Sequence
  Description of Artificial Sequence: Synthetic oligonucleotide
  Sense strand starting at position 1261 of SEQ ID NO: 913757
cuguaagaaagccgacauu

SEQ ID NO: 951613 - RNA, 19 nt, Artificial Sequence
  Description of Artificial Sequence: Synthetic oligonucleotide
  Antisense strand to SEQ ID NO: 951612
aaugucggcuuucuuacag

SEQ ID NO: 951614 - RNA, 19 nt, Artificial Sequence
  Description of Artificial Sequence: Synthetic oligonucleotide
  Sense strand starting at position 1470 of SEQ ID NO: 913757
gcuugaguccaacagucuu

SEQ ID NO: 951615 - RNA, 19 nt, Artificial Sequence
  Description of Artificial Sequence: Synthetic oligonucleotide
  Antisense strand to SEQ ID NO: 951614
aagacuguuggacucaagc

SEQ ID NO: 951616 - RNA, 19 nt, Artificial Sequence
  Description of Artificial Sequence: Synthetic oligonucleotide
  Sense strand starting at position 3095 of SEQ ID NO: 913757
cacgauggagucugucuaa

SEQ ID NO: 951617 - RNA, 19 nt, Artificial Sequence
  Description of Artificial Sequence: Synthetic oligonucleotide
  Antisense strand to SEQ ID NO: 951616
uuagacagacuccaucgug

SEQ ID NO: 951618 - RNA, 19 nt, Artificial Sequence
  Description of Artificial Sequence: Synthetic oligonucleotide
  Sense strand starting at position 1467 of SEQ ID NO: 913757
guagcuugaguccaacagu

SEQ ID NO: 951619 - RNA, 19 nt, Artificial Sequence
  Description of Artificial Sequence: Synthetic oligonucleotide
  Antisense strand to SEQ ID NO: 951618
acuguuggacucaagcuac

SEQ ID NO: 951620 - RNA, 19 nt, Artificial Sequence
  Description of Artificial Sequence: Synthetic oligonucleotide
  Sense strand starting at position 2112 of SEQ ID NO: 913757
ugaagaagcugcucuauuc

SEQ ID NO: 951621 - RNA, 19 nt, Artificial Sequence
  Description of Artificial Sequence: Synthetic oligonucleotide
  Antisense strand to SEQ ID NO: 951620
gaauagagcagcuucuuca

SEQ ID NO: 951622 - RNA, 19 nt, Artificial Sequence
  Description of Artificial Sequence: Synthetic oligonucleotide
  Sense strand starting at position 1364 of SEQ ID NO: 913757
uuauuaaaucugcguaaga

SEQ ID NO: 951623 - RNA, 19 nt, Artificial Sequence
  Description of Artificial Sequence: Synthetic oligonucleotide
  Antisense strand to SEQ ID NO: 951622
ucuuacgcagauuuaauaa

SEQ ID NO: 951624 - RNA, 19 nt, Artificial Sequence
  Description of Artificial Sequence: Synthetic oligonucleotide
  Sense strand starting at position 1221 of SEQ ID NO: 913757
agagauguuucugcauucu

SEQ ID NO: 951625 - RNA, 19 nt, Artificial Sequence
  Description of Artificial Sequence: Synthetic oligonucleotide
  Antisense strand to SEQ ID NO: 951624
agaaugcagaaacaucucu

SEQ ID NO: 951626 - RNA, 19 nt, Artificial Sequence
  Description of Artificial Sequence: Synthetic oligonucleotide
  Sense strand starting at position 3662 of SEQ ID NO: 913757
caucguuugucaucaggga

SEQ ID NO: 951627 - RNA, 19 nt, Artificial Sequence
  Description of Artificial Sequence: Synthetic oligonucleotide
  Antisense strand to SEQ ID NO: 951626
ucccugaugacaaacgaug

SEQ ID NO: 951628 - RNA, 19 nt, Artificial Sequence
  Description of Artificial Sequence: Synthetic oligonucleotide
  Sense strand starting at position 1363 of SEQ ID NO: 913757
uuuauuaaaucugcguaag

SEQ ID NO: 951629 - RNA, 19 nt, Artificial Sequence
  Description of Artificial Sequence: Synthetic oligonucleotide
  Antisense strand to SEQ ID NO: 951628
cuuacgcagauuuaauaaa

SEQ ID NO: 951630 - RNA, 19 nt, Artificial Sequence
  Description of Artificial Sequence: Synthetic oligonucleotide
  Sense strand starting at position 1239 of SEQ ID NO: 913757
uuaugcuggucuccaaauu

SEQ ID NO: 951631 - RNA, 19 nt, Artificial Sequence
  Description of Artificial Sequence: Synthetic oligonucleotide
  Antisense strand to SEQ ID NO: 951630
aauuuggagaccagcauaa

SEQ ID NO: 951632 - RNA, 19 nt, Artificial Sequence
  Description of Artificial Sequence: Synthetic oligonucleotide
  Sense strand starting at position 3881 of SEQ ID NO: 913757
acaggauuaucagauaauc

SEQ ID NO: 951633 - RNA, 19 nt, Artificial Sequence
  Description of Artificial Sequence: Synthetic oligonucleotide
  Antisense strand to SEQ ID NO: 951632
gauuaucugauaauccugu

SEQ ID NO: 951634 - RNA, 19 nt, Artificial Sequence
  Description of Artificial Sequence: Synthetic oligonucleotide
  Sense strand starting at position 3343 of SEQ ID NO: 913757
gguacuggucucugguaca

SEQ ID NO: 951635 - RNA, 19 nt, Artificial Sequence
  Description of Artificial Sequence: Synthetic oligonucleotide
  Antisense strand to SEQ ID NO: 951634
uguaccagagaccaguacc

SEQ ID NO: 951636 - RNA, 19 nt, Artificial Sequence
  Description of Artificial Sequence: Synthetic oligonucleotide
  Sense strand starting at position 3203 of SEQ ID NO: 913757
ucuguauccggcgaccaau

SEQ ID NO: 951637 - RNA, 19 nt, Artificial Sequence
  Description of Artificial Sequence: Synthetic oligonucleotide
  Antisense strand to SEQ ID NO: 951636
auuggucgccggauacaga

SEQ ID NO: 951638 - RNA, 19 nt, Artificial Sequence
  Description of Artificial Sequence: Synthetic oligonucleotide
  Sense strand starting at position 3658 of SEQ ID NO: 913757
uuaacaucguuugucauca

SEQ ID NO: 951639 - RNA, 19 nt, Artificial Sequence
  Description of Artificial Sequence: Synthetic oligonucleotide
  Antisense strand to SEQ ID NO: 951638
ugaugacaaacgauguuaa

SEQ ID NO: 951640 - RNA, 19 nt, Artificial Sequence
  Description of Artificial Sequence: Synthetic oligonucleotide
  Sense strand starting at position 1236 of SEQ ID NO: 913757
uucuuaugcuggucuccaa

SEQ ID NO: 951641 - RNA, 19 nt, Artificial Sequence
  Description of Artificial Sequence: Synthetic oligonucleotide
  Antisense strand to SEQ ID NO: 951640
uuggagaccagcauaagaa

SEQ ID NO: 951642 - RNA, 19 nt, Artificial Sequence
  Description of Artificial Sequence: Synthetic oligonucleotide
  Sense strand starting at position 3441 of SEQ ID NO: 913757
ugauaaauaugauggacaa

SEQ ID NO: 951643 - RNA, 19 nt, Artificial Sequence
  Description of Artificial Sequence: Synthetic oligonucleotide
  Antisense strand to SEQ ID NO: 951642
uuguccaucauauuuauca

SEQ ID NO: 951644 - RNA, 19 nt, Artificial Sequence
  Description of Artificial Sequence: Synthetic oligonucleotide
  Sense strand starting at position 3586 of SEQ ID NO: 913757
uggcaaagcguuugaauac

SEQ ID NO: 951645 - RNA, 19 nt, Artificial Sequence
  Description of Artificial Sequence: Synthetic oligonucleotide
  Antisense strand to SEQ ID NO: 951644
guauucaaacgcuuugcca

SEQ ID NO: 951646 - RNA, 19 nt, Artificial Sequence
  Description of Artificial Sequence: Synthetic oligonucleotide
  Sense strand starting at position 3655 of SEQ ID NO: 913757
uccuuaacaucguuuguca

SEQ ID NO: 951647 - RNA, 19 nt, Artificial Sequence
  Description of Artificial Sequence: Synthetic oligonucleotide
  Antisense strand to SEQ ID NO: 951646
ugacaaacgauguuaagga

SEQ ID NO: 951648 - RNA, 19 nt, Artificial Sequence
  Description of Artificial Sequence: Synthetic oligonucleotide
  Sense strand starting at position 2214 of SEQ ID NO: 913757
cugcaacaauggucgcaua

SEQ ID NO: 951649 - RNA, 19 nt, Artificial Sequence
  Description of Artificial Sequence: Synthetic oligonucleotide
  Antisense strand to SEQ ID NO: 951648
uaugcgaccauuguugcag

SEQ ID NO: 951650 - RNA, 19 nt, Artificial Sequence
  Description of Artificial Sequence: Synthetic oligonucleotide
  Sense strand starting at position 836 of SEQ ID NO: 913758
aagaaucucugagugauau

SEQ ID NO: 951651 - RNA, 19 nt, Artificial Sequence
  Description of Artificial Sequence: Synthetic oligonucleotide
  Antisense strand to SEQ ID NO: 951650
auaucacucagagauucuu

SEQ ID NO: 951652 - RNA, 19 nt, Artificial Sequence
  Description of Artificial Sequence: Synthetic oligonucleotide
  Sense strand starting at position 59 of SEQ ID NO: 913758
ugaguuggagacgaucuua

SEQ ID NO: 951653 - RNA, 19 nt, Artificial Sequence
  Description of Artificial Sequence: Synthetic oligonucleotide
  Antisense strand to SEQ ID NO: 951652
uaagaucgucuccaacuca

SEQ ID NO: 951654 - RNA, 19 nt, Artificial Sequence
  Description of Artificial Sequence: Synthetic oligonucleotide
  Sense strand starting at position 837 of SEQ ID NO: 913758
agaaucucugagugauaug

SEQ ID NO: 951655 - RNA, 19 nt, Artificial Sequence
  Description of Artificial Sequence: Synthetic oligonucleotide
  Antisense strand to SEQ ID NO: 951654
cauaucacucagagauucu

SEQ ID NO: 951656 - RNA, 19 nt, Artificial Sequence
  Description of Artificial Sequence: Synthetic oligonucleotide
  Sense strand starting at position 3294 of SEQ ID NO: 913758
aggaguuccacaugacuag

SEQ ID NO: 951657 - RNA, 19 nt, Artificial Sequence
  Description of Artificial Sequence: Synthetic oligonucleotide
  Antisense strand to SEQ ID NO: 951656
cuagucauguggaacuccu

SEQ ID NO: 951658 - RNA, 19 nt, Artificial Sequence
  Description of Artificial Sequence: Synthetic oligonucleotide
  Sense strand starting at position 107 of SEQ ID NO: 913758
uuuagaauccaaggaguug

SEQ ID NO: 951659 - RNA, 19 nt, Artificial Sequence
  Description of Artificial Sequence: Synthetic oligonucleotide
  Antisense strand to SEQ ID NO: 951658
caacuccuuggauucuaaa

SEQ ID NO: 951660 - RNA, 19 nt, Artificial Sequence
  Description of Artificial Sequence: Synthetic oligonucleotide
  Sense strand starting at position 3295 of SEQ ID NO: 913758
ggaguuccacaugacuagu

SEQ ID NO: 951661 - RNA, 19 nt, Artificial Sequence
  Description of Artificial Sequence: Synthetic oligonucleotide
  Antisense strand to SEQ ID NO: 951660
acuagucauguggaacucc

SEQ ID NO: 951662 - RNA, 19 nt, Artificial Sequence
  Description of Artificial Sequence: Synthetic oligonucleotide
  Sense strand starting at position 293 of SEQ ID NO: 913758
acucuaucccgagaucauc

SEQ ID NO: 951663 - RNA, 19 nt, Artificial Sequence
  Description of Artificial Sequence: Synthetic oligonucleotide
  Antisense strand to SEQ ID NO: 951662
gaugaucucgggauagagu

SEQ ID NO: 951664 - RNA, 19 nt, Artificial Sequence
  Description of Artificial Sequence: Synthetic oligonucleotide
  Sense strand starting at position 2569 of SEQ ID NO: 913758
cuauuagaaguuugacaac

SEQ ID NO: 951665 - RNA, 19 nt, Artificial Sequence
  Description of Artificial Sequence: Synthetic oligonucleotide
  Antisense strand to SEQ ID NO: 951664
guugucaaacuucuaauag

SEQ ID NO: 951666 - RNA, 19 nt, Artificial Sequence
  Description of Artificial Sequence: Synthetic oligonucleotide
  Sense strand starting at position 789 of SEQ ID NO: 913758
uggcuccuuccuuaaagaa

SEQ ID NO: 951667 - RNA, 19 nt, Artificial Sequence
  Description of Artificial Sequence: Synthetic oligonucleotide
  Antisense strand to SEQ ID NO: 951666
uucuuuaaggaaggagcca

SEQ ID NO: 951668 - RNA, 19 nt, Artificial Sequence
  Description of Artificial Sequence: Synthetic oligonucleotide
  Sense strand starting at position 1525 of SEQ ID NO: 913758
ccuuccagucagggaauaa

SEQ ID NO: 951669 - RNA, 19 nt, Artificial Sequence
  Description of Artificial Sequence: Synthetic oligonucleotide
  Antisense strand to SEQ ID NO: 951668
uuauucccugacuggaagg

SEQ ID NO: 951670 - RNA, 19 nt, Artificial Sequence
  Description of Artificial Sequence: Synthetic oligonucleotide
  Sense strand starting at position 3631 of SEQ ID NO: 913758
auuacauugccagauguga

SEQ ID NO: 951671 - RNA, 19 nt, Artificial Sequence
  Description of Artificial Sequence: Synthetic oligonucleotide
  Antisense strand to SEQ ID NO: 951670
ucacaucuggcaauguaau

SEQ ID NO: 951672 - RNA, 19 nt, Artificial Sequence
  Description of Artificial Sequence: Synthetic oligonucleotide
  Sense strand starting at position 3628 of SEQ ID NO: 913758
ugaauuacauugccagaug

SEQ ID NO: 951673 - RNA, 19 nt, Artificial Sequence
  Description of Artificial Sequence: Synthetic oligonucleotide
  Antisense strand to SEQ ID NO: 951672
caucuggcaauguaauuca

SEQ ID NO: 951674 - RNA, 19 nt, Artificial Sequence
  Description of Artificial Sequence: Synthetic oligonucleotide
  Sense strand starting at position 2724 of SEQ ID NO: 913758
gggcgguuuggagaagacu

SEQ ID NO: 951675 - RNA, 19 nt, Artificial Sequence
  Description of Artificial Sequence: Synthetic oligonucleotide
  Antisense strand to SEQ ID NO: 951674
agucuucuccaaaccgccc

SEQ ID NO: 951676 - RNA, 19 nt, Artificial Sequence
  Description of Artificial Sequence: Synthetic oligonucleotide
  Sense strand starting at position 832 of SEQ ID NO: 913758
guggaagaaucucugagug

SEQ ID NO: 951677 - RNA, 19 nt, Artificial Sequence
  Description of Artificial Sequence: Synthetic oligonucleotide
  Antisense strand to SEQ ID NO: 951676
cacucagagauucuuccac

SEQ ID NO: 951678 - RNA, 19 nt, Artificial Sequence
  Description of Artificial Sequence: Synthetic oligonucleotide
  Sense strand starting at position 3298 of SEQ ID NO: 913758
guuccacaugacuaguuau

SEQ ID NO: 951679 - RNA, 19 nt, Artificial Sequence
  Description of Artificial Sequence: Synthetic oligonucleotide
  Antisense strand to SEQ ID NO: 951678
auaacuagucauguggaac

SEQ ID NO: 951680 - RNA, 19 nt, Artificial Sequence
  Description of Artificial Sequence: Synthetic oligonucleotide
  Sense strand starting at position 2700 of SEQ ID NO: 913758
ugcugcugugucccgaauu

SEQ ID NO: 951681 - RNA, 19 nt, Artificial Sequence
  Description of Artificial Sequence: Synthetic oligonucleotide
  Antisense strand to SEQ ID NO: 951680
aauucgggacacagcagca

SEQ ID NO: 951682 - RNA, 19 nt, Artificial Sequence
  Description of Artificial Sequence: Synthetic oligonucleotide
  Sense strand starting at position 314 of SEQ ID NO: 913758
gaacuuuaucugggccaag

SEQ ID NO: 951683 - RNA, 19 nt, Artificial Sequence
  Description of Artificial Sequence: Synthetic oligonucleotide
  Antisense strand to SEQ ID NO: 951682
cuuggcccagauaaaguuc

SEQ ID NO: 951684 - RNA, 19 nt, Artificial Sequence
  Description of Artificial Sequence: Synthetic oligonucleotide
  Sense strand starting at position 1522 of SEQ ID NO: 913758
gcuccuuccagucagggaa

SEQ ID NO: 951685 - RNA, 19 nt, Artificial Sequence
  Description of Artificial Sequence: Synthetic oligonucleotide
  Antisense strand to SEQ ID NO: 951684
uucccugacuggaaggagc

SEQ ID NO: 951686 - RNA, 19 nt, Artificial Sequence
  Description of Artificial Sequence: Synthetic oligonucleotide
  Sense strand starting at position 2976 of SEQ ID NO: 913758
ucagauggugguugaacua

SEQ ID NO: 951687 - RNA, 19 nt, Artificial Sequence
  Description of Artificial Sequence: Synthetic oligonucleotide
  Antisense strand to SEQ ID NO: 951686
uaguucaaccaccaucuga

SEQ ID NO: 951688 - RNA, 19 nt, Artificial Sequence
  Description of Artificial Sequence: Synthetic oligonucleotide
  Sense strand starting at position 58 of SEQ ID NO: 913758
augaguuggagacgaucuu

SEQ ID NO: 951689 - RNA, 19 nt, Artificial Sequence
  Description of Artificial Sequence: Synthetic oligonucleotide
  Antisense strand to SEQ ID NO: 951688
aagaucgucuccaacucau

SEQ ID NO: 951690 - RNA, 19 nt, Artificial Sequence
  Description of Artificial Sequence: Synthetic oligonucleotide
  Sense strand starting at position 3957 of SEQ ID NO: 913758
gcagucagucauuaacuaa

SEQ ID NO: 951691 - RNA, 19 nt, Artificial Sequence
  Description of Artificial Sequence: Synthetic oligonucleotide
  Antisense strand to SEQ ID NO: 951690
uuaguuaaugacugacugc

SEQ ID NO: 951692 - RNA, 19 nt, Artificial Sequence
  Description of Artificial Sequence: Synthetic oligonucleotide
  Sense strand starting at position 3449 of SEQ ID NO: 913758
cuaucaaaucuuugugaug

SEQ ID NO: 951693 - RNA, 19 nt, Artificial Sequence
  Description of Artificial Sequence: Synthetic oligonucleotide
  Antisense strand to SEQ ID NO: 951692
caucacaaagauuugauag

SEQ ID NO: 951694 - RNA, 19 nt, Artificial Sequence
  Description of Artificial Sequence: Synthetic oligonucleotide
  Sense strand starting at position 538 of SEQ ID NO: 913758
ccgaacgaguuacuaauaa

SEQ ID NO: 951695 - RNA, 19 nt, Artificial Sequence
  Description of Artificial Sequence: Synthetic oligonucleotide
  Antisense strand to SEQ ID NO: 951694
uuauuaguaacucguucgg

SEQ ID NO: 951696 - RNA, 19 nt, Artificial Sequence
  Description of Artificial Sequence: Synthetic oligonucleotide
  Sense strand starting at position 3436 of SEQ ID NO: 913758
ggaggugguuacucuauca

SEQ ID NO: 951697 - RNA, 19 nt, Artificial Sequence
  Description of Artificial Sequence: Synthetic oligonucleotide
  Antisense strand to SEQ ID NO: 951696
ugauagaguaaccaccucc

SEQ ID NO: 951698 - RNA, 19 nt, Artificial Sequence
  Description of Artificial Sequence: Synthetic oligonucleotide
  Sense strand starting at position 2975 of SEQ ID NO: 913758
cucagauggugguugaacu

SEQ ID NO: 951699 - RNA, 19 nt, Artificial Sequence
  Description of Artificial Sequence: Synthetic oligonucleotide
  Antisense strand to SEQ ID NO: 951698
aguucaaccaccaucugag

SEQ ID NO: 951700 - RNA, 19 nt, Artificial Sequence
  Description of Artificial Sequence: Synthetic oligonucleotide
  Sense strand starting at position 331 of SEQ ID NO: 913758
aggaguuuauccuccauuc

SEQ ID NO: 951701 - RNA, 19 nt, Artificial Sequence
  Description of Artificial Sequence: Synthetic oligonucleotide
  Antisense strand to SEQ ID NO: 951700
gaauggaggauaaacuccu

SEQ ID NO: 951702 - RNA, 19 nt, Artificial Sequence
  Description of Artificial Sequence: Synthetic oligonucleotide
  Sense strand starting at position 3775 of SEQ ID NO: 913758
auaucaaugcuuggaccuu

SEQ ID NO: 951703 - RNA, 19 nt, Artificial Sequence
  Description of Artificial Sequence: Synthetic oligonucleotide
  Antisense strand to SEQ ID NO: 951702
aagguccaagcauugauau

SEQ ID NO: 951704 - RNA, 19 nt, Artificial Sequence
  Description of Artificial Sequence: Synthetic oligonucleotide
  Sense strand starting at position 2558 of SEQ ID NO: 913758
uuucguauucccuauuaga

SEQ ID NO: 951705 - RNA, 19 nt, Artificial Sequence
  Description of Artificial Sequence: Synthetic oligonucleotide
  Antisense strand to SEQ ID NO: 951704
ucuaauagggaauacgaaa

SEQ ID NO: 951706 - RNA, 19 nt, Artificial Sequence
  Description of Artificial Sequence: Synthetic oligonucleotide
  Sense strand starting at position 938 of SEQ ID NO: 913758
agggacugcucuguuuaaa

SEQ ID NO: 951707 - RNA, 19 nt, Artificial Sequence
  Description of Artificial Sequence: Synthetic oligonucleotide
  Antisense strand to SEQ ID NO: 951706
uuuaaacagagcagucccu

SEQ ID NO: 951708 - RNA, 19 nt, Artificial Sequence
  Description of Artificial Sequence: Synthetic oligonucleotide
  Sense strand starting at position 2783 of SEQ ID NO: 913758
ucguuuggcgaggauaaga

SEQ ID NO: 951709 - RNA, 19 nt, Artificial Sequence
  Description of Artificial Sequence: Synthetic oligonucleotide
  Antisense strand to SEQ ID NO: 951708
ucuuauccucgccaaacga

SEQ ID NO: 951710 - RNA, 19 nt, Artificial Sequence
  Description of Artificial Sequence: Synthetic oligonucleotide
  Sense strand starting at position 3365 of SEQ ID NO: 913758
caaagcguccuggaaucuu

SEQ ID NO: 951711 - RNA, 19 nt, Artificial Sequence
  Description of Artificial Sequence: Synthetic oligonucleotide
  Antisense strand to SEQ ID NO: 951710
aagauuccaggacgcuuug

SEQ ID NO: 951712 - RNA, 19 nt, Artificial Sequence
  Description of Artificial Sequence: Synthetic oligonucleotide
  Sense strand starting at position 2962 of SEQ ID NO: 913758
gaagucucuuggucucaga

SEQ ID NO: 951713 - RNA, 19 nt, Artificial Sequence
  Description of Artificial Sequence: Synthetic oligonucleotide
  Antisense strand to SEQ ID NO: 951712
ucugagaccaagagacuuc

SEQ ID NO: 951714 - RNA, 19 nt, Artificial Sequence
  Description of Artificial Sequence: Synthetic oligonucleotide
  Sense strand starting at position 3026 of SEQ ID NO: 913758
aucauugagucuuccuacu

SEQ ID NO: 951715 - RNA, 19 nt, Artificial Sequence
  Description of Artificial Sequence: Synthetic oligonucleotide
  Antisense strand to SEQ ID NO: 951714
aguaggaagacucaaugau

SEQ ID NO: 951716 - RNA, 19 nt, Artificial Sequence
  Description of Artificial Sequence: Synthetic oligonucleotide
  Sense strand starting at position 788 of SEQ ID NO: 913758
cuggcuccuuccuuaaaga

SEQ ID NO: 951717 - RNA, 19 nt, Artificial Sequence
  Description of Artificial Sequence: Synthetic oligonucleotide
  Antisense strand to SEQ ID NO: 951716
ucuuuaaggaaggagccag

SEQ ID NO: 951718 - RNA, 19 nt, Artificial Sequence
  Description of Artificial Sequence: Synthetic oligonucleotide
  Sense strand starting at position 89 of SEQ ID NO: 913758
guucuaauagucuaagcuu

SEQ ID NO: 951719 - RNA, 19 nt, Artificial Sequence
  Description of Artificial Sequence: Synthetic oligonucleotide
  Antisense strand to SEQ ID NO: 951718
aagcuuagacuauuagaac

SEQ ID NO: 951720 - RNA, 19 nt, Artificial Sequence
  Description of Artificial Sequence: Synthetic oligonucleotide
  Sense strand starting at position 2973 of SEQ ID NO: 913758
gucucagauggugguugaa

SEQ ID NO: 951721 - RNA, 19 nt, Artificial Sequence
  Description of Artificial Sequence: Synthetic oligonucleotide
  Antisense strand to SEQ ID NO: 951720
uucaaccaccaucugagac

SEQ ID NO: 951722 - RNA, 19 nt, Artificial Sequence
  Description of Artificial Sequence: Synthetic oligonucleotide
  Sense strand starting at position 5 of SEQ ID NO: 913758
cagguuagccuuuauaguu

SEQ ID NO: 951723 - RNA, 19 nt, Artificial Sequence
  Description of Artificial Sequence: Synthetic oligonucleotide
  Antisense strand to SEQ ID NO: 951722
aacuauaaaggcuaaccug

SEQ ID NO: 951724 - RNA, 19 nt, Artificial Sequence
  Description of Artificial Sequence: Synthetic oligonucleotide
  Sense strand starting at position 937 of SEQ ID NO: 913758
cagggacugcucuguuuaa

SEQ ID NO: 951725 - RNA, 19 nt, Artificial Sequence
  Description of Artificial Sequence: Synthetic oligonucleotide
  Antisense strand to SEQ ID NO: 951724
uuaaacagagcagucccug

SEQ ID NO: 951726 - RNA, 19 nt, Artificial Sequence
  Description of Artificial Sequence: Synthetic oligonucleotide
  Sense strand starting at position 3956 of SEQ ID NO: 913758
agcagucagucauuaacua

SEQ ID NO: 951727 - RNA, 19 nt, Artificial Sequence
  Description of Artificial Sequence: Synthetic oligonucleotide
  Antisense strand to SEQ ID NO: 951726
uaguuaaugacugacugcu

SEQ ID NO: 951728 - RNA, 19 nt, Artificial Sequence
  Description of Artificial Sequence: Synthetic oligonucleotide
  Sense strand starting at position 3868 of SEQ ID NO: 913758
ugacuuuacuaugcaguca

SEQ ID NO: 951729 - RNA, 19 nt, Artificial Sequence
  Description of Artificial Sequence: Synthetic oligonucleotide
  Antisense strand to SEQ ID NO: 951728
ugacugcauaguaaaguca

SEQ ID NO: 951730 - RNA, 19 nt, Artificial Sequence
  Description of Artificial Sequence: Synthetic oligonucleotide
  Sense strand starting at position 142 of SEQ ID NO: 913759
ggaggaaaugucuaugcug

SEQ ID NO: 951731 - RNA, 19 nt, Artificial Sequence
  Description of Artificial Sequence: Synthetic oligonucleotide
  Antisense strand to SEQ ID NO: 951730
cagcauagacauuuccucc

SEQ ID NO: 951732 - RNA, 19 nt, Artificial Sequence
  Description of Artificial Sequence: Synthetic oligonucleotide
  Sense strand starting at position 3775 of SEQ ID NO: 913759
gucgauuuccugcaauccu

SEQ ID NO: 951733 - RNA, 19 nt, Artificial Sequence
  Description of Artificial Sequence: Synthetic oligonucleotide
  Antisense strand to SEQ ID NO: 951732
aggauugcaggaaaucgac

SEQ ID NO: 951734 - RNA, 19 nt, Artificial Sequence
  Description of Artificial Sequence: Synthetic oligonucleotide
  Sense strand starting at position 2715 of SEQ ID NO: 913759
cugaguagauaauuauauc

SEQ ID NO: 951735 - RNA, 19 nt, Artificial Sequence
  Description of Artificial Sequence: Synthetic oligonucleotide
  Antisense strand to SEQ ID NO: 951734
gauauaauuaucuacucag

SEQ ID NO: 951736 - RNA, 19 nt, Artificial Sequence
  Description of Artificial Sequence: Synthetic oligonucleotide
  Sense strand starting at position 2705 of SEQ ID NO: 913759
uuccaagguccugaguaga

SEQ ID NO: 951737 - RNA, 19 nt, Artificial Sequence
  Description of Artificial Sequence: Synthetic oligonucleotide
  Antisense strand to SEQ ID NO: 951736
ucuacucaggaccuuggaa

SEQ ID NO: 951738 - RNA, 19 nt, Artificial Sequence
  Description of Artificial Sequence: Synthetic oligonucleotide
  Sense strand starting at position 3915 of SEQ ID NO: 913759
gcaguaguccaggauaaag

SEQ ID NO: 951739 - RNA, 19 nt, Artificial Sequence
  Description of Artificial Sequence: Synthetic oligonucleotide
  Antisense strand to SEQ ID NO: 951738
cuuuauccuggacuacugc

SEQ ID NO: 951740 - RNA, 19 nt, Artificial Sequence
  Description of Artificial Sequence: Synthetic oligonucleotide
  Sense strand starting at position 1133 of SEQ ID NO: 913759
uugugcucaagggagaauu

SEQ ID NO: 951741 - RNA, 19 nt, Artificial Sequence
  Description of Artificial Sequence: Synthetic oligonucleotide
  Antisense strand to SEQ ID NO: 951740
aauucucccuugagcacaa

SEQ ID NO: 951742 - RNA, 19 nt, Artificial Sequence
  Description of Artificial Sequence: Synthetic oligonucleotide
  Sense strand starting at position 1128 of SEQ ID NO: 913759
agaccuugugcucaaggga

SEQ ID NO: 951743 - RNA, 19 nt, Artificial Sequence
  Description of Artificial Sequence: Synthetic oligonucleotide
  Antisense strand to SEQ ID NO: 951742
ucccuugagcacaaggucu

SEQ ID NO: 951744 - RNA, 19 nt, Artificial Sequence
  Description of Artificial Sequence: Synthetic oligonucleotide
  Sense strand starting at position 2810 of SEQ ID NO: 913759
gccgcuggcauguuauaua

SEQ ID NO: 951745 - RNA, 19 nt, Artificial Sequence
  Description of Artificial Sequence: Synthetic oligonucleotide
  Antisense strand to SEQ ID NO: 951744
uauauaacaugccagcggc

SEQ ID NO: 951746 - RNA, 19 nt, Artificial Sequence
  Description of Artificial Sequence: Synthetic oligonucleotide
  Sense strand starting at position 784 of SEQ ID NO: 913759
uauuacaguggccaugaua

SEQ ID NO: 951747 - RNA, 19 nt, Artificial Sequence
  Description of Artificial Sequence: Synthetic oligonucleotide
  Antisense strand to SEQ ID NO: 951746
uaucauggccacuguaaua

SEQ ID NO: 951748 - RNA, 19 nt, Artificial Sequence
  Description of Artificial Sequence: Synthetic oligonucleotide
  Sense strand starting at position 855 of SEQ ID NO: 913759
acaauaugcgugugaauuu

SEQ ID NO: 951749 - RNA, 19 nt, Artificial Sequence
  Description of Artificial Sequence: Synthetic oligonucleotide
  Antisense strand to SEQ ID NO: 951748
aaauucacacgcauauugu

SEQ ID NO: 951750 - RNA, 19 nt, Artificial Sequence
  Description of Artificial Sequence: Synthetic oligonucleotide
  Sense strand starting at position 183 of SEQ ID NO: 913759
uuuaccucgguauacuaaa

SEQ ID NO: 951751 - RNA, 19 nt, Artificial Sequence
  Description of Artificial Sequence: Synthetic oligonucleotide
  Antisense strand to SEQ ID NO: 951750
uuuaguauaccgagguaaa

SEQ ID NO: 951752 - RNA, 19 nt, Artificial Sequence
  Description of Artificial Sequence: Synthetic oligonucleotide
  Sense strand starting at position 908 of SEQ ID NO: 913759
ccacgccucccagagaaau

SEQ ID NO: 951753 - RNA, 19 nt, Artificial Sequence
  Description of Artificial Sequence: Synthetic oligonucleotide
  Antisense strand to SEQ ID NO: 951752
auuucucugggaggcgugg

SEQ ID NO: 951754 - RNA, 19 nt, Artificial Sequence
  Description of Artificial Sequence: Synthetic oligonucleotide
  Sense strand starting at position 2847 of SEQ ID NO: 913759
gaagguaaaucgucacaag

SEQ ID NO: 951755 - RNA, 19 nt, Artificial Sequence
  Description of Artificial Sequence: Synthetic oligonucleotide
  Antisense strand to SEQ ID NO: 951754
cuugugacgauuuaccuuc

SEQ ID NO: 951756 - RNA, 19 nt, Artificial Sequence
  Description of Artificial Sequence: Synthetic oligonucleotide
  Sense strand starting at position 3471 of SEQ ID NO: 913759
guccuauaaccuugagaug

SEQ ID NO: 951757 - RNA, 19 nt, Artificial Sequence
  Description of Artificial Sequence: Synthetic oligonucleotide
  Antisense strand to SEQ ID NO: 951756
caucucaagguuauaggac

SEQ ID NO: 951758 - RNA, 19 nt, Artificial Sequence
  Description of Artificial Sequence: Synthetic oligonucleotide
  Sense strand starting at position 2781 of SEQ ID NO: 913759
gggacucagucauugauuc

SEQ ID NO: 951759 - RNA, 19 nt, Artificial Sequence
  Description of Artificial Sequence: Synthetic oligonucleotide
  Antisense strand to SEQ ID NO: 951758
gaaucaaugacugaguccc

SEQ ID NO: 951760 - RNA, 19 nt, Artificial Sequence
  Description of Artificial Sequence: Synthetic oligonucleotide
  Sense strand starting at position 258 of SEQ ID NO: 913759
ugcacaaggcuaugagaga

SEQ ID NO: 951761 - RNA, 19 nt, Artificial Sequence
  Description of Artificial Sequence: Synthetic oligonucleotide
  Antisense strand to SEQ ID NO: 951760
ucucucauagccuugugca

SEQ ID NO: 951762 - RNA, 19 nt, Artificial Sequence
  Description of Artificial Sequence: Synthetic oligonucleotide
  Sense strand starting at position 888 of SEQ ID NO: 913759
gaguuucugcacuacugga

SEQ ID NO: 951763 - RNA, 19 nt, Artificial Sequence
  Description of Artificial Sequence: Synthetic oligonucleotide
  Antisense strand to SEQ ID NO: 951762
uccaguagugcagaaacuc

SEQ ID NO: 951764 - RNA, 19 nt, Artificial Sequence
  Description of Artificial Sequence: Synthetic oligonucleotide
  Sense strand starting at position 144 of SEQ ID NO: 913759
aggaaaugucuaugcugag

SEQ ID NO: 951765 - RNA, 19 nt, Artificial Sequence
  Description of Artificial Sequence: Synthetic oligonucleotide
  Antisense strand to SEQ ID NO: 951764
cucagcauagacauuuccu

SEQ ID NO: 951766 - RNA, 19 nt, Artificial Sequence
  Description of Artificial Sequence: Synthetic oligonucleotide
  Sense strand starting at position 2895 of SEQ ID NO: 913759
uuagguaucugauuaaagu

SEQ ID NO: 951767 - RNA, 19 nt, Artificial Sequence
  Description of Artificial Sequence: Synthetic oligonucleotide
  Antisense strand to SEQ ID NO: 951766
acuuuaaucagauaccuaa

SEQ ID NO: 951768 - RNA, 19 nt, Artificial Sequence
  Description of Artificial Sequence: Synthetic oligonucleotide
  Sense strand starting at position 372 of SEQ ID NO: 913759
cgcuuugagaaauagcaua

SEQ ID NO: 951769 - RNA, 19 nt, Artificial Sequence
  Description of Artificial Sequence: Synthetic oligonucleotide
  Antisense strand to SEQ ID NO: 951768
uaugcuauuucucaaagcg

SEQ ID NO: 951770 - RNA, 19 nt, Artificial Sequence
  Description of Artificial Sequence: Synthetic oligonucleotide
  Sense strand starting at position 1609 of SEQ ID NO: 913759
cggugagguccgcauuucu

SEQ ID NO: 951771 - RNA, 19 nt, Artificial Sequence
  Description of Artificial Sequence: Synthetic oligonucleotide
  Antisense strand to SEQ ID NO: 951770
agaaaugcggaccucaccg

SEQ ID NO: 951772 - RNA, 19 nt, Artificial Sequence
  Description of Artificial Sequence: Synthetic oligonucleotide
  Sense strand starting at position 3914 of SEQ ID NO: 913759
ggcaguaguccaggauaaa

SEQ ID NO: 951773 - RNA, 19 nt, Artificial Sequence
  Description of Artificial Sequence: Synthetic oligonucleotide
  Antisense strand to SEQ ID NO: 951772
uuuauccuggacuacugcc

SEQ ID NO: 951774 - RNA, 19 nt, Artificial Sequence
  Description of Artificial Sequence: Synthetic oligonucleotide
  Sense strand starting at position 1131 of SEQ ID NO: 913759
ccuugugcucaagggagaa

SEQ ID NO: 951775 - RNA, 19 nt, Artificial Sequence
  Description of Artificial Sequence: Synthetic oligonucleotide
  Antisense strand to SEQ ID NO: 951774
uucucccuugagcacaagg

SEQ ID NO: 951776 - RNA, 19 nt, Artificial Sequence
  Description of Artificial Sequence: Synthetic oligonucleotide
  Sense strand starting at position 3782 of SEQ ID NO: 913759
uccugcaauccugaagcau

SEQ ID NO: 951777 - RNA, 19 nt, Artificial Sequence
  Description of Artificial Sequence: Synthetic oligonucleotide
  Antisense strand to SEQ ID NO: 951776
augcuucaggauugcagga

SEQ ID NO: 951778 - RNA, 19 nt, Artificial Sequence
  Description of Artificial Sequence: Synthetic oligonucleotide
  Sense strand starting at position 181 of SEQ ID NO: 913759
ucuuuaccucgguauacua

SEQ ID NO: 951779 - RNA, 19 nt, Artificial Sequence
  Description of Artificial Sequence: Synthetic oligonucleotide
  Antisense strand to SEQ ID NO: 951778
uaguauaccgagguaaaga

SEQ ID NO: 951780 - RNA, 19 nt, Artificial Sequence
  Description of Artificial Sequence: Synthetic oligonucleotide
  Sense strand starting at position 2338 of SEQ ID NO: 913759
ggagcaguccggcaagaau

SEQ ID NO: 951781 - RNA, 19 nt, Artificial Sequence
  Description of Artificial Sequence: Synthetic oligonucleotide
  Antisense strand to SEQ ID NO: 951780
auucuugccggacugcucc

SEQ ID NO: 951782 - RNA, 19 nt, Artificial Sequence
  Description of Artificial Sequence: Synthetic oligonucleotide
  Sense strand starting at position 2887 of SEQ ID NO: 913759
gucaaaucuuagguaucug

SEQ ID NO: 951783 - RNA, 19 nt, Artificial Sequence
  Description of Artificial Sequence: Synthetic oligonucleotide
  Antisense strand to SEQ ID NO: 951782
cagauaccuaagauuugac

SEQ ID NO: 951784 - RNA, 19 nt, Artificial Sequence
  Description of Artificial Sequence: Synthetic oligonucleotide
  Sense strand starting at position 3912 of SEQ ID NO: 913759
guggcaguaguccaggaua

SEQ ID NO: 951785 - RNA, 19 nt, Artificial Sequence
  Description of Artificial Sequence: Synthetic oligonucleotide
  Antisense strand to SEQ ID NO: 951784
uauccuggacuacugccac

SEQ ID NO: 951786 - RNA, 19 nt, Artificial Sequence
  Description of Artificial Sequence: Synthetic oligonucleotide
  Sense strand starting at position 235 of SEQ ID NO: 913759
gaguguuacugauucccag

SEQ ID NO: 951787 - RNA, 19 nt, Artificial Sequence
  Description of Artificial Sequence: Synthetic oligonucleotide
  Antisense strand to SEQ ID NO: 951786
cugggaaucaguaacacuc

SEQ ID NO: 951788 - RNA, 19 nt, Artificial Sequence
  Description of Artificial Sequence: Synthetic oligonucleotide
  Sense strand starting at position 1108 of SEQ ID NO: 913759
gcuacucgccuauaauaaa

SEQ ID NO: 951789 - RNA, 19 nt, Artificial Sequence
  Description of Artificial Sequence: Synthetic oligonucleotide
  Antisense strand to SEQ ID NO: 951788
uuuauuauaggcgaguagc

SEQ ID NO: 951790 - RNA, 19 nt, Artificial Sequence
  Description of Artificial Sequence: Synthetic oligonucleotide
  Sense strand starting at position 636 of SEQ ID NO: 913759
gcucuuccgggucaaagau

SEQ ID NO: 951791 - RNA, 19 nt, Artificial Sequence
  Description of Artificial Sequence: Synthetic oligonucleotide
  Antisense strand to SEQ ID NO: 951790
aucuuugacccggaagagc

SEQ ID NO: 951792 - RNA, 19 nt, Artificial Sequence
  Description of Artificial Sequence: Synthetic oligonucleotide
  Sense strand starting at position 2788 of SEQ ID NO: 913759
agucauugauuccuguaug

SEQ ID NO: 951793 - RNA, 19 nt, Artificial Sequence
  Description of Artificial Sequence: Synthetic oligonucleotide
  Antisense strand to SEQ ID NO: 951792
cauacaggaaucaaugacu

SEQ ID NO: 951794 - RNA, 19 nt, Artificial Sequence
  Description of Artificial Sequence: Synthetic oligonucleotide
  Sense strand starting at position 1066 of SEQ ID NO: 913759
agauuagcaucaucugcau

SEQ ID NO: 951795 - RNA, 19 nt, Artificial Sequence
  Description of Artificial Sequence: Synthetic oligonucleotide
  Antisense strand to SEQ ID NO: 951794
augcagaugaugcuaaucu

SEQ ID NO: 951796 - RNA, 19 nt, Artificial Sequence
  Description of Artificial Sequence: Synthetic oligonucleotide
  Sense strand starting at position 3794 of SEQ ID NO: 913759
gaagcauugcgugacuaau

SEQ ID NO: 951797 - RNA, 19 nt, Artificial Sequence
  Description of Artificial Sequence: Synthetic oligonucleotide
  Antisense strand to SEQ ID NO: 951796
auuagucacgcaaugcuuc

SEQ ID NO: 951798 - RNA, 19 nt, Artificial Sequence
  Description of Artificial Sequence: Synthetic oligonucleotide
  Sense strand starting at position 973 of SEQ ID NO: 913759
ggacaagcuuucuucccuu

SEQ ID NO: 951799 - RNA, 19 nt, Artificial Sequence
  Description of Artificial Sequence: Synthetic oligonucleotide
  Antisense strand to SEQ ID NO: 951798
aagggaagaaagcuugucc

SEQ ID NO: 951800 - RNA, 19 nt, Artificial Sequence
  Description of Artificial Sequence: Synthetic oligonucleotide
  Sense strand starting at position 2457 of SEQ ID NO: 913759
gcaggcagcuuauuagaga

SEQ ID NO: 951801 - RNA, 19 nt, Artificial Sequence
  Description of Artificial Sequence: Synthetic oligonucleotide
  Antisense strand to SEQ ID NO: 951800
ucucuaauaagcugccugc

SEQ ID NO: 951802 - RNA, 19 nt, Artificial Sequence
  Description of Artificial Sequence: Synthetic oligonucleotide
  Sense strand starting at position 231 of SEQ ID NO: 913759
uccugaguguuacugauuc

SEQ ID NO: 951803 - RNA, 19 nt, Artificial Sequence
  Description of Artificial Sequence: Synthetic oligonucleotide
  Antisense strand to SEQ ID NO: 951802
gaaucaguaacacucagga

SEQ ID NO: 951804 - RNA, 19 nt, Artificial Sequence
  Description of Artificial Sequence: Synthetic oligonucleotide
  Sense strand starting at position 780 of SEQ ID NO: 913759
aauguauuacaguggccau

SEQ ID NO: 951805 - RNA, 19 nt, Artificial Sequence
  Description of Artificial Sequence: Synthetic oligonucleotide
  Antisense strand to SEQ ID NO: 951804
auggccacuguaauacauu

SEQ ID NO: 951806 - RNA, 19 nt, Artificial Sequence
  Description of Artificial Sequence: Synthetic oligonucleotide
  Sense strand starting at position 783 of SEQ ID NO: 913759
guauuacaguggccaugau

SEQ ID NO: 951807 - RNA, 19 nt, Artificial Sequence
  Description of Artificial Sequence: Synthetic oligonucleotide
  Antisense strand to SEQ ID NO: 951806
aucauggccacuguaauac

SEQ ID NO: 951808 - RNA, 19 nt, Artificial Sequence
  Description of Artificial Sequence: Synthetic oligonucleotide
  Sense strand starting at position 168 of SEQ ID NO: 913759
ugaggacguuguuucuuua

SEQ ID NO: 951809 - RNA, 19 nt, Artificial Sequence
  Description of Artificial Sequence: Synthetic oligonucleotide
  Antisense strand to SEQ ID NO: 951808
uaaagaaacaacguccuca

SEQ ID NO: 951810 - RNA, 19 nt, Artificial Sequence
  Description of Artificial Sequence: Synthetic oligonucleotide
  Sense strand starting at position 3239 of SEQ ID NO: 913760
uuaggaaguggugggaaau

SEQ ID NO: 951811 - RNA, 19 nt, Artificial Sequence
  Description of Artificial Sequence: Synthetic oligonucleotide
  Antisense strand to SEQ ID NO: 951810
auuucccaccacuuccuaa

SEQ ID NO: 951812 - RNA, 19 nt, Artificial Sequence
  Description of Artificial Sequence: Synthetic oligonucleotide
  Sense strand starting at position 1998 of SEQ ID NO: 913760
ugugaugagaguuaaaguu

SEQ ID NO: 951813 - RNA, 19 nt, Artificial Sequence
  Description of Artificial Sequence: Synthetic oligonucleotide
  Antisense strand to SEQ ID NO: 951812
aacuuuaacucucaucaca

SEQ ID NO: 951814 - RNA, 19 nt, Artificial Sequence
  Description of Artificial Sequence: Synthetic oligonucleotide
  Sense strand starting at position 60 of SEQ ID NO: 913760
cagaucuguccuugagaag

SEQ ID NO: 951815 - RNA, 19 nt, Artificial Sequence
  Description of Artificial Sequence: Synthetic oligonucleotide
  Antisense strand to SEQ ID NO: 951814
cuucucaaggacagaucug

SEQ ID NO: 951816 - RNA, 19 nt, Artificial Sequence
  Description of Artificial Sequence: Synthetic oligonucleotide
  Sense strand starting at position 1863 of SEQ ID NO: 913760
gagcuugcuccaguugugu

SEQ ID NO: 951817 - RNA, 19 nt, Artificial Sequence
  Description of Artificial Sequence: Synthetic oligonucleotide
  Antisense strand to SEQ ID NO: 951816
acacaacuggagcaagcuc

SEQ ID NO: 951818 - RNA, 19 nt, Artificial Sequence
  Description of Artificial Sequence: Synthetic oligonucleotide
  Sense strand starting at position 61 of SEQ ID NO: 913760
agaucuguccuugagaagc

SEQ ID NO: 951819 - RNA, 19 nt, Artificial Sequence
  Description of Artificial Sequence: Synthetic oligonucleotide
  Antisense strand to SEQ ID NO: 951818
gcuucucaaggacagaucu

SEQ ID NO: 951820 - RNA, 19 nt, Artificial Sequence
  Description of Artificial Sequence: Synthetic oligonucleotide
  Sense strand starting at position 1985 of SEQ ID NO: 913760
ggcuuugcacgucugugau

SEQ ID NO: 951821 - RNA, 19 nt, Artificial Sequence
  Description of Artificial Sequence: Synthetic oligonucleotide
  Antisense strand to SEQ ID NO: 951820
aucacagacgugcaaagcc

SEQ ID NO: 951822 - RNA, 19 nt, Artificial Sequence
  Description of Artificial Sequence: Synthetic oligonucleotide
  Sense strand starting at position 2080 of SEQ ID NO: 913760
caagaaagccucgaggguu

SEQ ID NO: 951823 - RNA, 19 nt, Artificial Sequence
  Description of Artificial Sequence: Synthetic oligonucleotide
  Antisense strand to SEQ ID NO: 951822
aacccucgaggcuuucuug

SEQ ID NO: 951824 - RNA, 19 nt, Artificial Sequence
  Description of Artificial Sequence: Synthetic oligonucleotide
  Sense strand starting at position 1781 of SEQ ID NO: 913760
gucccaucucaaggacaau

SEQ ID NO: 951825 - RNA, 19 nt, Artificial Sequence
  Description of Artificial Sequence: Synthetic oligonucleotide
  Antisense strand to SEQ ID NO: 951824
auuguccuugagaugggac

SEQ ID NO: 951826 - RNA, 19 nt, Artificial Sequence
  Description of Artificial Sequence: Synthetic oligonucleotide
  Sense strand starting at position 59 of SEQ ID NO: 913760
ccagaucuguccuugagaa

SEQ ID NO: 951827 - RNA, 19 nt, Artificial Sequence
  Description of Artificial Sequence: Synthetic oligonucleotide
  Antisense strand to SEQ ID NO: 951826
uucucaaggacagaucugg

SEQ ID NO: 951828 - RNA, 19 nt, Artificial Sequence
  Description of Artificial Sequence: Synthetic oligonucleotide
  Sense strand starting at position 2706 of SEQ ID NO: 913760
gcaucuugggcauauuaaa

SEQ ID NO: 951829 - RNA, 19 nt, Artificial Sequence
  Description of Artificial Sequence: Synthetic oligonucleotide
  Antisense strand to SEQ ID NO: 951828
uuuaauaugcccaagaugc

SEQ ID NO: 951830 - RNA, 19 nt, Artificial Sequence
  Description of Artificial Sequence: Synthetic oligonucleotide
  Sense strand starting at position 199 of SEQ ID NO: 913760
ccgaacacucagggucaaa

SEQ ID NO: 951831 - RNA, 19 nt, Artificial Sequence
  Description of Artificial Sequence: Synthetic oligonucleotide
  Antisense strand to SEQ ID NO: 951830
uuugacccugaguguucgg

SEQ ID NO: 951832 - RNA, 19 nt, Artificial Sequence
  Description of Artificial Sequence: Synthetic oligonucleotide
  Sense strand starting at position 2704 of SEQ ID NO: 913760
aggcaucuugggcauauua

SEQ ID NO: 951833 - RNA, 19 nt, Artificial Sequence
  Description of Artificial Sequence: Synthetic oligonucleotide
  Antisense strand to SEQ ID NO: 951832
uaauaugcccaagaugccu

SEQ ID NO: 951834 - RNA, 19 nt, Artificial Sequence
  Description of Artificial Sequence: Synthetic oligonucleotide
  Sense strand starting at position 3977 of SEQ ID NO: 913760
ggcaguuucgggagugguc

SEQ ID NO: 951835 - RNA, 19 nt, Artificial Sequence
  Description of Artificial Sequence: Synthetic oligonucleotide
  Antisense strand to SEQ ID NO: 951834
gaccacucccgaaacugcc

SEQ ID NO: 951836 - RNA, 19 nt, Artificial Sequence
  Description of Artificial Sequence: Synthetic oligonucleotide
  Sense strand starting at position 3319 of SEQ ID NO: 913760
gagccaguucuagagcaga

SEQ ID NO: 951837 - RNA, 19 nt, Artificial Sequence
  Description of Artificial Sequence: Synthetic oligonucleotide
  Antisense strand to SEQ ID NO: 951836
ucugcucuagaacuggcuc

SEQ ID NO: 951838 - RNA, 19 nt, Artificial Sequence
  Description of Artificial Sequence: Synthetic oligonucleotide
  Sense strand starting at position 2751 of SEQ ID NO: 913760
uguaauugugaugaaguuu

SEQ ID NO: 951839 - RNA, 19 nt, Artificial Sequence
  Description of Artificial Sequence: Synthetic oligonucleotide
  Antisense strand to SEQ ID NO: 951838
aaacuucaucacaauuaca

SEQ ID NO: 951840 - RNA, 19 nt, Artificial Sequence
  Description of Artificial Sequence: Synthetic oligonucleotide
  Sense strand starting at position 3837 of SEQ ID NO: 913760
ggugucucaagguauuaac

SEQ ID NO: 951841 - RNA, 19 nt, Artificial Sequence
  Description of Artificial Sequence: Synthetic oligonucleotide
  Antisense strand to SEQ ID NO: 951840
guuaauaccuugagacacc

SEQ ID NO: 951842 - RNA, 19 nt, Artificial Sequence
  Description of Artificial Sequence: Synthetic oligonucleotide
  Sense strand starting at position 885 of SEQ ID NO: 913760
guuacagacucugcauaaa

SEQ ID NO: 951843 - RNA, 19 nt, Artificial Sequence
  Description of Artificial Sequence: Synthetic oligonucleotide
  Antisense strand to SEQ ID NO: 951842
uuuaugcagagucuguaac

SEQ ID NO: 951844 - RNA, 19 nt, Artificial Sequence
  Description of Artificial Sequence: Synthetic oligonucleotide
  Sense strand starting at position 3388 of SEQ ID NO: 913760
gguaguuguuggaaggaag

SEQ ID NO: 951845 - RNA, 19 nt, Artificial Sequence
  Description of Artificial Sequence: Synthetic oligonucleotide
  Antisense strand to SEQ ID NO: 951844
cuuccuuccaacaacuacc

SEQ ID NO: 951846 - RNA, 19 nt, Artificial Sequence
  Description of Artificial Sequence: Synthetic oligonucleotide
  Sense strand starting at position 1984 of SEQ ID NO: 913760
cggcuuugcacgucuguga

SEQ ID NO: 951847 - RNA, 19 nt, Artificial Sequence
  Description of Artificial Sequence: Synthetic oligonucleotide
  Antisense strand to SEQ ID NO: 951846
ucacagacgugcaaagccg

SEQ ID NO: 951848 - RNA, 19 nt, Artificial Sequence
  Description of Artificial Sequence: Synthetic oligonucleotide
  Sense strand starting at position 884 of SEQ ID NO: 913760
gguuacagacucugcauaa

SEQ ID NO: 951849 - RNA, 19 nt, Artificial Sequence
  Description of Artificial Sequence: Synthetic oligonucleotide
  Antisense strand to SEQ ID NO: 951848
uuaugcagagucuguaacc

SEQ ID NO: 951850 - RNA, 19 nt, Artificial Sequence
  Description of Artificial Sequence: Synthetic oligonucleotide
  Sense strand starting at position 2973 of SEQ ID NO: 913760
auggucauucguuaacauu

SEQ ID NO: 951851 - RNA, 19 nt, Artificial Sequence
  Description of Artificial Sequence: Synthetic oligonucleotide
  Antisense strand to SEQ ID NO: 951850
aauguuaacgaaugaccau

SEQ ID NO: 951852 - RNA, 19 nt, Artificial Sequence
  Description of Artificial Sequence: Synthetic oligonucleotide
  Sense strand starting at position 969 of SEQ ID NO: 913760
ggaugcgugcgucuuggua

SEQ ID NO: 951853 - RNA, 19 nt, Artificial Sequence
  Description of Artificial Sequence: Synthetic oligonucleotide
  Antisense strand to SEQ ID NO: 951852
uaccaagacgcacgcaucc

SEQ ID NO: 951854 - RNA, 19 nt, Artificial Sequence
  Description of Artificial Sequence: Synthetic oligonucleotide
  Sense strand starting at position 3196 of SEQ ID NO: 913760
gagauuaaaugguugugca

SEQ ID NO: 951855 - RNA, 19 nt, Artificial Sequence
  Description of Artificial Sequence: Synthetic oligonucleotide
  Antisense strand to SEQ ID NO: 951854
ugcacaaccauuuaaucuc

SEQ ID NO: 951856 - RNA, 19 nt, Artificial Sequence
  Description of Artificial Sequence: Synthetic oligonucleotide
  Sense strand starting at position 739 of SEQ ID NO: 913760
ccugguuugcaagaaugca

SEQ ID NO: 951857 - RNA, 19 nt, Artificial Sequence
  Description of Artificial Sequence: Synthetic oligonucleotide
  Antisense strand to SEQ ID NO: 951856
ugcauucuugcaaaccagg

SEQ ID NO: 951858 - RNA, 19 nt, Artificial Sequence
  Description of Artificial Sequence: Synthetic oligonucleotide
  Sense strand starting at position 2703 of SEQ ID NO: 913760
aaggcaucuugggcauauu

SEQ ID NO: 951859 - RNA, 19 nt, Artificial Sequence
  Description of Artificial Sequence: Synthetic oligonucleotide
  Antisense strand to SEQ ID NO: 951858
aauaugcccaagaugccuu

SEQ ID NO: 951860 - RNA, 19 nt, Artificial Sequence
  Description of Artificial Sequence: Synthetic oligonucleotide
  Sense strand starting at position 1992 of SEQ ID NO: 913760
cacgucugugaugagaguu

SEQ ID NO: 951861 - RNA, 19 nt, Artificial Sequence
  Description of Artificial Sequence: Synthetic oligonucleotide
  Antisense strand to SEQ ID NO: 951860
aacucucaucacagacgug

SEQ ID NO: 951862 - RNA, 19 nt, Artificial Sequence
  Description of Artificial Sequence: Synthetic oligonucleotide
  Sense strand starting at position 3197 of SEQ ID NO: 913760
agauuaaaugguugugcau

SEQ ID NO: 951863 - RNA, 19 nt, Artificial Sequence
  Description of Artificial Sequence: Synthetic oligonucleotide
  Antisense strand to SEQ ID NO: 951862
augcacaaccauuuaaucu

SEQ ID NO: 951864 - RNA, 19 nt, Artificial Sequence
  Description of Artificial Sequence: Synthetic oligonucleotide
  Sense strand starting at position 3277 of SEQ ID NO: 913760
ggaagaggaucuuaauaac

SEQ ID NO: 951865 - RNA, 19 nt, Artificial Sequence
  Description of Artificial Sequence: Synthetic oligonucleotide
  Antisense strand to SEQ ID NO: 951864
guuauuaagauccucuucc

SEQ ID NO: 951866 - RNA, 19 nt, Artificial Sequence
  Description of Artificial Sequence: Synthetic oligonucleotide
  Sense strand starting at position 2968 of SEQ ID NO: 913760
aacauauggucauucguua

SEQ ID NO: 951867 - RNA, 19 nt, Artificial Sequence
  Description of Artificial Sequence: Synthetic oligonucleotide
  Antisense strand to SEQ ID NO: 951866
uaacgaaugaccauauguu

SEQ ID NO: 951868 - RNA, 19 nt, Artificial Sequence
  Description of Artificial Sequence: Synthetic oligonucleotide
  Sense strand starting at position 3280 of SEQ ID NO: 913760
agaggaucuuaauaacaau

SEQ ID NO: 951869 - RNA, 19 nt, Artificial Sequence
  Description of Artificial Sequence: Synthetic oligonucleotide
  Antisense strand to SEQ ID NO: 951868
auuguuauuaagauccucu

SEQ ID NO: 951870 - RNA, 19 nt, Artificial Sequence
  Description of Artificial Sequence: Synthetic oligonucleotide
  Sense strand starting at position 735 of SEQ ID NO: 913760
gcaaccugguuugcaagaa

SEQ ID NO: 951871 - RNA, 19 nt, Artificial Sequence
  Description of Artificial Sequence: Synthetic oligonucleotide
  Antisense strand to SEQ ID NO: 951870
uucuugcaaaccagguugc

SEQ ID NO: 951872 - RNA, 19 nt, Artificial Sequence
  Description of Artificial Sequence: Synthetic oligonucleotide
  Sense strand starting at position 3203 of SEQ ID NO: 913760
aaugguugugcaugggauu

SEQ ID NO: 951873 - RNA, 19 nt, Artificial Sequence
  Description of Artificial Sequence: Synthetic oligonucleotide
  Antisense strand to SEQ ID NO: 951872
aaucccaugcacaaccauu

SEQ ID NO: 951874 - RNA, 19 nt, Artificial Sequence
  Description of Artificial Sequence: Synthetic oligonucleotide
  Sense strand starting at position 2741 of SEQ ID NO: 913760
cuccauccuguguaauugu

SEQ ID NO: 951875 - RNA, 19 nt, Artificial Sequence
  Description of Artificial Sequence: Synthetic oligonucleotide
  Antisense strand to SEQ ID NO: 951874
acaauuacacaggauggag

SEQ ID NO: 951876 - RNA, 19 nt, Artificial Sequence
  Description of Artificial Sequence: Synthetic oligonucleotide
  Sense strand starting at position 978 of SEQ ID NO: 913760
cgucuugguaccuggaaca

SEQ ID NO: 951877 - RNA, 19 nt, Artificial Sequence
  Description of Artificial Sequence: Synthetic oligonucleotide
  Antisense strand to SEQ ID NO: 951876
uguuccagguaccaagacg

SEQ ID NO: 951878 - RNA, 19 nt, Artificial Sequence
  Description of Artificial Sequence: Synthetic oligonucleotide
  Sense strand starting at position 2772 of SEQ ID NO: 913760
cgcaguuaagaauguugga

SEQ ID NO: 951879 - RNA, 19 nt, Artificial Sequence
  Description of Artificial Sequence: Synthetic oligonucleotide
  Antisense strand to SEQ ID NO: 951878
uccaacauucuuaacugcg

SEQ ID NO: 951880 - RNA, 19 nt, Artificial Sequence
  Description of Artificial Sequence: Synthetic oligonucleotide
  Sense strand starting at position 2972 of SEQ ID NO: 913760
uauggucauucguuaacau

SEQ ID NO: 951881 - RNA, 19 nt, Artificial Sequence
  Description of Artificial Sequence: Synthetic oligonucleotide
  Antisense strand to SEQ ID NO: 951880
auguuaacgaaugaccaua

SEQ ID NO: 951882 - RNA, 19 nt, Artificial Sequence
  Description of Artificial Sequence: Synthetic oligonucleotide
  Sense strand starting at position 2739 of SEQ ID NO: 913760
aucuccauccuguguaauu

SEQ ID NO: 951883 - RNA, 19 nt, Artificial Sequence
  Description of Artificial Sequence: Synthetic oligonucleotide
  Antisense strand to SEQ ID NO: 951882
aauuacacaggauggagau

SEQ ID NO: 951884 - RNA, 19 nt, Artificial Sequence
  Description of Artificial Sequence: Synthetic oligonucleotide
  Sense strand starting at position 2740 of SEQ ID NO: 913760
ucuccauccuguguaauug

SEQ ID NO: 951885 - RNA, 19 nt, Artificial Sequence
  Description of Artificial Sequence: Synthetic oligonucleotide
  Antisense strand to SEQ ID NO: 951884
caauuacacaggauggaga

SEQ ID NO: 951886 - RNA, 19 nt, Artificial Sequence
  Description of Artificial Sequence: Synthetic oligonucleotide
  Sense strand starting at position 221 of SEQ ID NO: 913760
guguccuuucucuaggguu

SEQ ID NO: 951887 - RNA, 19 nt, Artificial Sequence
  Description of Artificial Sequence: Synthetic oligonucleotide
  Antisense strand to SEQ ID NO: 951886
aacccuagagaaaggacac

SEQ ID NO: 951888 - RNA, 19 nt, Artificial Sequence
  Description of Artificial Sequence: Synthetic oligonucleotide
  Sense strand starting at position 2744 of SEQ ID NO: 913760
cauccuguguaauugugau

SEQ ID NO: 951889 - RNA, 19 nt, Artificial Sequence
  Description of Artificial Sequence: Synthetic oligonucleotide
  Antisense strand to SEQ ID NO: 951888
aucacaauuacacaggaug

SEQ ID NO: 951890 - RNA, 19 nt, Artificial Sequence
  Description of Artificial Sequence: Synthetic oligonucleotide
  Sense strand starting at position 3493 of SEQ ID NO: 913761
ccgucaagcacuguugcaa

SEQ ID NO: 951891 - RNA, 19 nt, Artificial Sequence
  Description of Artificial Sequence: Synthetic oligonucleotide
  Antisense strand to SEQ ID NO: 951890
uugcaacagugcuugacgg

SEQ ID NO: 951892 - RNA, 19 nt, Artificial Sequence
  Description of Artificial Sequence: Synthetic oligonucleotide
  Sense strand starting at position 482 of SEQ ID NO: 913761
aggagucaauacucauuga

SEQ ID NO: 951893 - RNA, 19 nt, Artificial Sequence
  Description of Artificial Sequence: Synthetic oligonucleotide
  Antisense strand to SEQ ID NO: 951892
ucaaugaguauugacuccu

SEQ ID NO: 951894 - RNA, 19 nt, Artificial Sequence
  Description of Artificial Sequence: Synthetic oligonucleotide
  Sense strand starting at position 3412 of SEQ ID NO: 913761
agaacauuaugagauuuac

SEQ ID NO: 951895 - RNA, 19 nt, Artificial Sequence
  Description of Artificial Sequence: Synthetic oligonucleotide
  Antisense strand to SEQ ID NO: 951894
guaaaucucauaauguucu

SEQ ID NO: 951896 - RNA, 19 nt, Artificial Sequence
  Description of Artificial Sequence: Synthetic oligonucleotide
  Sense strand starting at position 2900 of SEQ ID NO: 913761
uguggguuccgcuugguga

SEQ ID NO: 951897 - RNA, 19 nt, Artificial Sequence
  Description of Artificial Sequence: Synthetic oligonucleotide
  Antisense strand to SEQ ID NO: 951896
ucaccaagcggaacccaca

SEQ ID NO: 951898 - RNA, 19 nt, Artificial Sequence
  Description of Artificial Sequence: Synthetic oligonucleotide
  Sense strand starting at position 3614 of SEQ ID NO: 913761
guagcaauuuguguacaga

SEQ ID NO: 951899 - RNA, 19 nt, Artificial Sequence
  Description of Artificial Sequence: Synthetic oligonucleotide
  Antisense strand to SEQ ID NO: 951898
ucuguacacaaauugcuac

SEQ ID NO: 951900 - RNA, 19 nt, Artificial Sequence
  Description of Artificial Sequence: Synthetic oligonucleotide
  Sense strand starting at position 3020 of SEQ ID NO: 913761
gcugccaaucaauauaaga

SEQ ID NO: 951901 - RNA, 19 nt, Artificial Sequence
  Description of Artificial Sequence: Synthetic oligonucleotide
  Antisense strand to SEQ ID NO: 951900
ucuuauauugauuggcagc

SEQ ID NO: 951902 - RNA, 19 nt, Artificial Sequence
  Description of Artificial Sequence: Synthetic oligonucleotide
  Sense strand starting at position 3727 of SEQ ID NO: 913761
caaauaauggguggacagu

SEQ ID NO: 951903 - RNA, 19 nt, Artificial Sequence
  Description of Artificial Sequence: Synthetic oligonucleotide
  Antisense strand to SEQ ID NO: 951902
acuguccacccauuauuug

SEQ ID NO: 951904 - RNA, 19 nt, Artificial Sequence
  Description of Artificial Sequence: Synthetic oligonucleotide
  Sense strand starting at position 3611 of SEQ ID NO: 913761
gagguagcaauuuguguac

SEQ ID NO: 951905 - RNA, 19 nt, Artificial Sequence
  Description of Artificial Sequence: Synthetic oligonucleotide
  Antisense strand to SEQ ID NO: 951904
guacacaaauugcuaccuc

SEQ ID NO: 951906 - RNA, 19 nt, Artificial Sequence
  Description of Artificial Sequence: Synthetic oligonucleotide
  Sense strand starting at position 3583 of SEQ ID NO: 913761
gcuagagcacuugacuaaa

SEQ ID NO: 951907 - RNA, 19 nt, Artificial Sequence
  Description of Artificial Sequence: Synthetic oligonucleotide
  Antisense strand to SEQ ID NO: 951906
uuuagucaagugcucuagc

SEQ ID NO: 951908 - RNA, 19 nt, Artificial Sequence
  Description of Artificial Sequence: Synthetic oligonucleotide
  Sense strand starting at position 2978 of SEQ ID NO: 913761
uuucucuugcaggagauua

SEQ ID NO: 951909 - RNA, 19 nt, Artificial Sequence
  Description of Artificial Sequence: Synthetic oligonucleotide
  Antisense strand to SEQ ID NO: 951908
uaaucuccugcaagagaaa

SEQ ID NO: 951910 - RNA, 19 nt, Artificial Sequence
  Description of Artificial Sequence: Synthetic oligonucleotide
  Sense strand starting at position 2774 of SEQ ID NO: 913761
ucauuaugagaauggcuga

SEQ ID NO: 951911 - RNA, 19 nt, Artificial Sequence
  Description of Artificial Sequence: Synthetic oligonucleotide
  Antisense strand to SEQ ID NO: 951910
ucagccauucucauaauga

SEQ ID NO: 951912 - RNA, 19 nt, Artificial Sequence
  Description of Artificial Sequence: Synthetic oligonucleotide
  Sense strand starting at position 1093 of SEQ ID NO: 913761
acucuugacguuuauaaac

SEQ ID NO: 951913 - RNA, 19 nt, Artificial Sequence
  Description of Artificial Sequence: Synthetic oligonucleotide
  Antisense strand to SEQ ID NO: 951912
guuuauaaacgucaagagu

SEQ ID NO: 951914 - RNA, 19 nt, Artificial Sequence
  Description of Artificial Sequence: Synthetic oligonucleotide
  Sense strand starting at position 870 of SEQ ID NO: 913761
uaccaaugagugcaaaguu

SEQ ID NO: 951915 - RNA, 19 nt, Artificial Sequence
  Description of Artificial Sequence: Synthetic oligonucleotide
  Antisense strand to SEQ ID NO: 951914
aacuuugcacucauuggua

SEQ ID NO: 951916 - RNA, 19 nt, Artificial Sequence
  Description of Artificial Sequence: Synthetic oligonucleotide
  Sense strand starting at position 3740 of SEQ ID NO: 913761
gacagugagcuaugaaauu

SEQ ID NO: 951917 - RNA, 19 nt, Artificial Sequence
  Description of Artificial Sequence: Synthetic oligonucleotide
  Antisense strand to SEQ ID NO: 951916
aauuucauagcucacuguc

SEQ ID NO: 951918 - RNA, 19 nt, Artificial Sequence
  Description of Artificial Sequence: Synthetic oligonucleotide
  Sense strand starting at position 3685 of SEQ ID NO: 913761
gcagucauuggucaagaau

SEQ ID NO: 951919 - RNA, 19 nt, Artificial Sequence
  Description of Artificial Sequence: Synthetic oligonucleotide
  Antisense strand to SEQ ID NO: 951918
auucuugaccaaugacugc

SEQ ID NO: 951920 - RNA, 19 nt, Artificial Sequence
  Description of Artificial Sequence: Synthetic oligonucleotide
  Sense strand starting at position 2798 of SEQ ID NO: 913761
ugucgauucgaugauugaa

SEQ ID NO: 951921 - RNA, 19 nt, Artificial Sequence
  Description of Artificial Sequence: Synthetic oligonucleotide
  Antisense strand to SEQ ID NO: 951920
uucaaucaucgaaucgaca

SEQ ID NO: 951922 - RNA, 19 nt, Artificial Sequence
  Description of Artificial Sequence: Synthetic oligonucleotide
  Sense strand starting at position 3453 of SEQ ID NO: 913761
uuaguuccuccaggacaau

SEQ ID NO: 951923 - RNA, 19 nt, Artificial Sequence
  Description of Artificial Sequence: Synthetic oligonucleotide
  Antisense strand to SEQ ID NO: 951922
auuguccuggaggaacuaa

SEQ ID NO: 951924 - RNA, 19 nt, Artificial Sequence
  Description of Artificial Sequence: Synthetic oligonucleotide
  Sense strand starting at position 3624 of SEQ ID NO: 913761
guguacagaagucaugagu

SEQ ID NO: 951925 - RNA, 19 nt, Artificial Sequence
  Description of Artificial Sequence: Synthetic oligonucleotide
  Antisense strand to SEQ ID NO: 951924
acucaugacuucuguacac

SEQ ID NO: 951926 - RNA, 19 nt, Artificial Sequence
  Description of Artificial Sequence: Synthetic oligonucleotide
  Sense strand starting at position 2808 of SEQ ID NO: 913761
augauugaagucuguacca

SEQ ID NO: 951927 - RNA, 19 nt, Artificial Sequence
  Description of Artificial Sequence: Synthetic oligonucleotide
  Antisense strand to SEQ ID NO: 951926
ugguacagacuucaaucau

SEQ ID NO: 951928 - RNA, 19 nt, Artificial Sequence
  Description of Artificial Sequence: Synthetic oligonucleotide
  Sense strand starting at position 802 of SEQ ID NO: 913761
agauauuacuguuccuauu

SEQ ID NO: 951929 - RNA, 19 nt, Artificial Sequence
  Description of Artificial Sequence: Synthetic oligonucleotide
  Antisense strand to SEQ ID NO: 951928
aauaggaacaguaauaucu

SEQ ID NO: 951930 - RNA, 19 nt, Artificial Sequence
  Description of Artificial Sequence: Synthetic oligonucleotide
  Sense strand starting at position 485 of SEQ ID NO: 913761
agucaauacucauugagca

SEQ ID NO: 951931 - RNA, 19 nt, Artificial Sequence
  Description of Artificial Sequence: Synthetic oligonucleotide
  Antisense strand to SEQ ID NO: 951930
ugcucaaugaguauugacu

SEQ ID NO: 951932 - RNA, 19 nt, Artificial Sequence
  Description of Artificial Sequence: Synthetic oligonucleotide
  Sense strand starting at position 3598 of SEQ ID NO: 913761
uaaacugaugugugaggua

SEQ ID NO: 951933 - RNA, 19 nt, Artificial Sequence
  Description of Artificial Sequence: Synthetic oligonucleotide
  Antisense strand to SEQ ID NO: 951932
uaccucacacaucaguuua

SEQ ID NO: 951934 - RNA, 19 nt, Artificial Sequence
  Description of Artificial Sequence: Synthetic oligonucleotide
  Sense strand starting at position 1088 of SEQ ID NO: 913761
cggcgacucuugacguuua

SEQ ID NO: 951935 - RNA, 19 nt, Artificial Sequence
  Description of Artificial Sequence: Synthetic oligonucleotide
  Antisense strand to SEQ ID NO: 951934
uaaacgucaagagucgccg

SEQ ID NO: 951936 - RNA, 19 nt, Artificial Sequence
  Description of Artificial Sequence: Synthetic oligonucleotide
  Sense strand starting at position 3603 of SEQ ID NO: 913761
ugaugugugagguagcaau

SEQ ID NO: 951937 - RNA, 19 nt, Artificial Sequence
  Description of Artificial Sequence: Synthetic oligonucleotide
  Antisense strand to SEQ ID NO: 951936
auugcuaccucacacauca

SEQ ID NO: 951938 - RNA, 19 nt, Artificial Sequence
  Description of Artificial Sequence: Synthetic oligonucleotide
  Sense strand starting at position 969 of SEQ ID NO: 913761
agaaaugacacgcgguaaa

SEQ ID NO: 951939 - RNA, 19 nt, Artificial Sequence
  Description of Artificial Sequence: Synthetic oligonucleotide
  Antisense strand to SEQ ID NO: 951938
uuuaccgcgugucauuucu

SEQ ID NO: 951940 - RNA, 19 nt, Artificial Sequence
  Description of Artificial Sequence: Synthetic oligonucleotide
  Sense strand starting at position 697 of SEQ ID NO: 913761
guaccaaucucauuagagc

SEQ ID NO: 951941 - RNA, 19 nt, Artificial Sequence
  Description of Artificial Sequence: Synthetic oligonucleotide
  Antisense strand to SEQ ID NO: 951940
gcucuaaugagauugguac

SEQ ID NO: 951942 - RNA, 19 nt, Artificial Sequence
  Description of Artificial Sequence: Synthetic oligonucleotide
  Sense strand starting at position 3172 of SEQ ID NO: 913761
gcuaaaugauguuccuaua

SEQ ID NO: 951943 - RNA, 19 nt, Artificial Sequence
  Description of Artificial Sequence: Synthetic oligonucleotide
  Antisense strand to SEQ ID NO: 951942
uauaggaacaucauuuagc

SEQ ID NO: 951944 - RNA, 19 nt, Artificial Sequence
  Description of Artificial Sequence: Synthetic oligonucleotide
  Sense strand starting at position 99 of SEQ ID NO: 913761
uugggagcucggugagaga

SEQ ID NO: 951945 - RNA, 19 nt, Artificial Sequence
  Description of Artificial Sequence: Synthetic oligonucleotide
  Antisense strand to SEQ ID NO: 951944
ucucucaccgagcucccaa

SEQ ID NO: 951946 - RNA, 19 nt, Artificial Sequence
  Description of Artificial Sequence: Synthetic oligonucleotide
  Sense strand starting at position 2517 of SEQ ID NO: 913761
cuugccugugucuaagaga

SEQ ID NO: 951947 - RNA, 19 nt, Artificial Sequence
  Description of Artificial Sequence: Synthetic oligonucleotide
  Antisense strand to SEQ ID NO: 951946
ucucuuagacacaggcaag

SEQ ID NO: 951948 - RNA, 19 nt, Artificial Sequence
  Description of Artificial Sequence: Synthetic oligonucleotide
  Sense strand starting at position 2607 of SEQ ID NO: 913761
gugaguugcguccugcuuu

SEQ ID NO: 951949 - RNA, 19 nt, Artificial Sequence
  Description of Artificial Sequence: Synthetic oligonucleotide
  Antisense strand to SEQ ID NO: 951948
aaagcaggacgcaacucac

SEQ ID NO: 951950 - RNA, 19 nt, Artificial Sequence
  Description of Artificial Sequence: Synthetic oligonucleotide
  Sense strand starting at position 486 of SEQ ID NO: 913761
gucaauacucauugagcau

SEQ ID NO: 951951 - RNA, 19 nt, Artificial Sequence
  Description of Artificial Sequence: Synthetic oligonucleotide
  Antisense strand to SEQ ID NO: 951950
augcucaaugaguauugac

SEQ ID NO: 951952 - RNA, 19 nt, Artificial Sequence
  Description of Artificial Sequence: Synthetic oligonucleotide
  Sense strand starting at position 3684 of SEQ ID NO: 913761
ugcagucauuggucaagaa

SEQ ID NO: 951953 - RNA, 19 nt, Artificial Sequence
  Description of Artificial Sequence: Synthetic oligonucleotide
  Antisense strand to SEQ ID NO: 951952
uucuugaccaaugacugca

SEQ ID NO: 951954 - RNA, 19 nt, Artificial Sequence
  Description of Artificial Sequence: Synthetic oligonucleotide
  Sense strand starting at position 2800 of SEQ ID NO: 913761
ucgauucgaugauugaagu

SEQ ID NO: 951955 - RNA, 19 nt, Artificial Sequence
  Description of Artificial Sequence: Synthetic oligonucleotide
  Antisense strand to SEQ ID NO: 951954
acuucaaucaucgaaucga

SEQ ID NO: 951956 - RNA, 19 nt, Artificial Sequence
  Description of Artificial Sequence: Synthetic oligonucleotide
  Sense strand starting at position 967 of SEQ ID NO: 913761
uaagaaaugacacgcggua

SEQ ID NO: 951957 - RNA, 19 nt, Artificial Sequence
  Description of Artificial Sequence: Synthetic oligonucleotide
  Antisense strand to SEQ ID NO: 951956
uaccgcgugucauuucuua

SEQ ID NO: 951958 - RNA, 19 nt, Artificial Sequence
  Description of Artificial Sequence: Synthetic oligonucleotide
  Sense strand starting at position 3113 of SEQ ID NO: 913761
gaagaccucuaggaaauga

SEQ ID NO: 951959 - RNA, 19 nt, Artificial Sequence
  Description of Artificial Sequence: Synthetic oligonucleotide
  Antisense strand to SEQ ID NO: 951958
ucauuuccuagaggucuuc

SEQ ID NO: 951960 - RNA, 19 nt, Artificial Sequence
  Description of Artificial Sequence: Synthetic oligonucleotide
  Sense strand starting at position 2628 of SEQ ID NO: 913761
auagauuuaucuggaggua

SEQ ID NO: 951961 - RNA, 19 nt, Artificial Sequence
  Description of Artificial Sequence: Synthetic oligonucleotide
  Antisense strand to SEQ ID NO: 951960
uaccuccagauaaaucuau

SEQ ID NO: 951962 - RNA, 19 nt, Artificial Sequence
  Description of Artificial Sequence: Synthetic oligonucleotide
  Sense strand starting at position 3702 of SEQ ID NO: 913761
auacgagucuacuugugau

SEQ ID NO: 951963 - RNA, 19 nt, Artificial Sequence
  Description of Artificial Sequence: Synthetic oligonucleotide
  Antisense strand to SEQ ID NO: 951962
aucacaaguagacucguau

SEQ ID NO: 951964 - RNA, 19 nt, Artificial Sequence
  Description of Artificial Sequence: Synthetic oligonucleotide
  Sense strand starting at position 374 of SEQ ID NO: 913761
cuaaguuaaccauguggca

SEQ ID NO: 951965 - RNA, 19 nt, Artificial Sequence
  Description of Artificial Sequence: Synthetic oligonucleotide
  Antisense strand to SEQ ID NO: 951964
ugccacaugguuaacuuag

SEQ ID NO: 951966 - RNA, 19 nt, Artificial Sequence
  Description of Artificial Sequence: Synthetic oligonucleotide
  Sense strand starting at position 3681 of SEQ ID NO: 913761
aacugcagucauuggucaa

SEQ ID NO: 951967 - RNA, 19 nt, Artificial Sequence
  Description of Artificial Sequence: Synthetic oligonucleotide
  Antisense strand to SEQ ID NO: 951966
uugaccaaugacugcaguu

SEQ ID NO: 951968 - RNA, 19 nt, Artificial Sequence
  Description of Artificial Sequence: Synthetic oligonucleotide
  Sense strand starting at position 564 of SEQ ID NO: 913761
gguuacuugugguuuaaac

SEQ ID NO: 951969 - RNA, 19 nt, Artificial Sequence
  Description of Artificial Sequence: Synthetic oligonucleotide
  Antisense strand to SEQ ID NO: 951968
guuuaaaccacaaguaacc

SEQ ID NO: 951970 - RNA, 19 nt, Artificial Sequence
  Description of Artificial Sequence: Synthetic oligonucleotide
  Sense strand starting at position 1247 of SEQ ID NO: 913762
gguguucugacacagaaug

SEQ ID NO: 951971 - RNA, 19 nt, Artificial Sequence
  Description of Artificial Sequence: Synthetic oligonucleotide
  Antisense strand to SEQ ID NO: 951970
cauucugugucagaacacc

SEQ ID NO: 951972 - RNA, 19 nt, Artificial Sequence
  Description of Artificial Sequence: Synthetic oligonucleotide
  Sense strand starting at position 1447 of SEQ ID NO: 913762
aucuuuauagaaggguuaa

SEQ ID NO: 951973 - RNA, 19 nt, Artificial Sequence
  Description of Artificial Sequence: Synthetic oligonucleotide
  Antisense strand to SEQ ID NO: 951972
uuaacccuucuauaaagau

SEQ ID NO: 951974 - RNA, 19 nt, Artificial Sequence
  Description of Artificial Sequence: Synthetic oligonucleotide
  Sense strand starting at position 1542 of SEQ ID NO: 913762
gaaugucuucuagaaaguc

SEQ ID NO: 951975 - RNA, 19 nt, Artificial Sequence
  Description of Artificial Sequence: Synthetic oligonucleotide
  Antisense strand to SEQ ID NO: 951974
gacuuucuagaagacauuc

SEQ ID NO: 951976 - RNA, 19 nt, Artificial Sequence
  Description of Artificial Sequence: Synthetic oligonucleotide
  Sense strand starting at position 3639 of SEQ ID NO: 913762
agggaaaucuaacugcauc

SEQ ID NO: 951977 - RNA, 19 nt, Artificial Sequence
  Description of Artificial Sequence: Synthetic oligonucleotide
  Antisense strand to SEQ ID NO: 951976
gaugcaguuagauuucccu

SEQ ID NO: 951978 - RNA, 19 nt, Artificial Sequence
  Description of Artificial Sequence: Synthetic oligonucleotide
  Sense strand starting at position 3659 of SEQ ID NO: 913762
aguuuagggacuuauuagu

SEQ ID NO: 951979 - RNA, 19 nt, Artificial Sequence
  Description of Artificial Sequence: Synthetic oligonucleotide
  Antisense strand to SEQ ID NO: 951978
acuaauaagucccuaaacu

SEQ ID NO: 951980 - RNA, 19 nt, Artificial Sequence
  Description of Artificial Sequence: Synthetic oligonucleotide
  Sense strand starting at position 324 of SEQ ID NO: 913762
ucaauauaaguguacucua

SEQ ID NO: 951981 - RNA, 19 nt, Artificial Sequence
  Description of Artificial Sequence: Synthetic oligonucleotide
  Antisense strand to SEQ ID NO: 951980
uagaguacacuuauauuga

SEQ ID NO: 951982 - RNA, 19 nt, Artificial Sequence
  Description of Artificial Sequence: Synthetic oligonucleotide
  Sense strand starting at position 3147 of SEQ ID NO: 913762
aucuuugauuggucaaaga

SEQ ID NO: 951983 - RNA, 19 nt, Artificial Sequence
  Description of Artificial Sequence: Synthetic oligonucleotide
  Antisense strand to SEQ ID NO: 951982
ucuuugaccaaucaaagau

SEQ ID NO: 951984 - RNA, 19 nt, Artificial Sequence
  Description of Artificial Sequence: Synthetic oligonucleotide
  Sense strand starting at position 1375 of SEQ ID NO: 913762
gcucuaugcaguguaguuu

SEQ ID NO: 951985 - RNA, 19 nt, Artificial Sequence
  Description of Artificial Sequence: Synthetic oligonucleotide
  Antisense strand to SEQ ID NO: 951984
aaacuacacugcauagagc

SEQ ID NO: 951986 - RNA, 19 nt, Artificial Sequence
  Description of Artificial Sequence: Synthetic oligonucleotide
  Sense strand starting at position 1073 of SEQ ID NO: 913762
auuggugaagccuaucaau

SEQ ID NO: 951987 - RNA, 19 nt, Artificial Sequence
  Description of Artificial Sequence: Synthetic oligonucleotide
  Antisense strand to SEQ ID NO: 951986
auugauaggcuucaccaau

SEQ ID NO: 951988 - RNA, 19 nt, Artificial Sequence
  Description of Artificial Sequence: Synthetic oligonucleotide
  Sense strand starting at position 2339 of SEQ ID NO: 913762
auggucucagcccauagaa

SEQ ID NO: 951989 - RNA, 19 nt, Artificial Sequence
  Description of Artificial Sequence: Synthetic oligonucleotide
  Antisense strand to SEQ ID NO: 951988
uucuaugggcugagaccau

SEQ ID NO: 951990 - RNA, 19 nt, Artificial Sequence
  Description of Artificial Sequence: Synthetic oligonucleotide
  Sense strand starting at position 1564 of SEQ ID NO: 913762
gcagauaauaauggacagu

SEQ ID NO: 951991 - RNA, 19 nt, Artificial Sequence
  Description of Artificial Sequence: Synthetic oligonucleotide
  Antisense strand to SEQ ID NO: 951990
acuguccauuauuaucugc

SEQ ID NO: 951992 - RNA, 19 nt, Artificial Sequence
  Description of Artificial Sequence: Synthetic oligonucleotide
  Sense strand starting at position 1488 of SEQ ID NO: 913762
acugcuuuccuagaugaug

SEQ ID NO: 951993 - RNA, 19 nt, Artificial Sequence
  Description of Artificial Sequence: Synthetic oligonucleotide
  Antisense strand to SEQ ID NO: 951992
caucaucuaggaaagcagu

SEQ ID NO: 951994 - RNA, 19 nt, Artificial Sequence
  Description of Artificial Sequence: Synthetic oligonucleotide
  Sense strand starting at position 1958 of SEQ ID NO: 913762
cugaacugaucaguccaau

SEQ ID NO: 951995 - RNA, 19 nt, Artificial Sequence
  Description of Artificial Sequence: Synthetic oligonucleotide
  Antisense strand to SEQ ID NO: 951994
auuggacugaucaguucag

SEQ ID NO: 951996 - RNA, 19 nt, Artificial Sequence
  Description of Artificial Sequence: Synthetic oligonucleotide
  Sense strand starting at position 1439 of SEQ ID NO: 913762
ggagccacaucuuuauaga

SEQ ID NO: 951997 - RNA, 19 nt, Artificial Sequence
  Description of Artificial Sequence: Synthetic oligonucleotide
  Antisense strand to SEQ ID NO: 951996
ucuauaaagauguggcucc

SEQ ID NO: 951998 - RNA, 19 nt, Artificial Sequence
  Description of Artificial Sequence: Synthetic oligonucleotide
  Sense strand starting at position 1787 of SEQ ID NO: 913762
accuuucucugaguaagag

SEQ ID NO: 951999 - RNA, 19 nt, Artificial Sequence
  Description of Artificial Sequence: Synthetic oligonucleotide
  Antisense strand to SEQ ID NO: 951998
cucuuacucagagaaaggu

SEQ ID NO: 952000 - RNA, 19 nt, Artificial Sequence
  Description of Artificial Sequence: Synthetic oligonucleotide
  Sense strand starting at position 3146 of SEQ ID NO: 913762
uaucuuugauuggucaaag

SEQ ID NO: 952001 - RNA, 19 nt, Artificial Sequence
  Description of Artificial Sequence: Synthetic oligonucleotide
  Antisense strand to SEQ ID NO: 952000
cuuugaccaaucaaagaua

SEQ ID NO: 952002 - RNA, 19 nt, Artificial Sequence
  Description of Artificial Sequence: Synthetic oligonucleotide
  Sense strand starting at position 3580 of SEQ ID NO: 913762
aguauaguacucuaguaua

SEQ ID NO: 952003 - RNA, 19 nt, Artificial Sequence
  Description of Artificial Sequence: Synthetic oligonucleotide
  Antisense strand to SEQ ID NO: 952002
uauacuagaguacuauacu

SEQ ID NO: 952004 - RNA, 19 nt, Artificial Sequence
  Description of Artificial Sequence: Synthetic oligonucleotide
  Sense strand starting at position 1538 of SEQ ID NO: 913762
gugagaaugucuucuagaa

SEQ ID NO: 952005 - RNA, 19 nt, Artificial Sequence
  Description of Artificial Sequence: Synthetic oligonucleotide
  Antisense strand to SEQ ID NO: 952004
uucuagaagacauucucac

SEQ ID NO: 952006 - RNA, 19 nt, Artificial Sequence
  Description of Artificial Sequence: Synthetic oligonucleotide
  Sense strand starting at position 2341 of SEQ ID NO: 913762
ggucucagcccauagaauc

SEQ ID NO: 952007 - RNA, 19 nt, Artificial Sequence
  Description of Artificial Sequence: Synthetic oligonucleotide
  Antisense strand to SEQ ID NO: 952006
gauucuaugggcugagacc

SEQ ID NO: 952008 - RNA, 19 nt, Artificial Sequence
  Description of Artificial Sequence: Synthetic oligonucleotide
  Sense strand starting at position 1826 of SEQ ID NO: 913762
gaaggagcagcaugauuau

SEQ ID NO: 952009 - RNA, 19 nt, Artificial Sequence
  Description of Artificial Sequence: Synthetic oligonucleotide
  Antisense strand to SEQ ID NO: 952008
auaaucaugcugcuccuuc

SEQ ID NO: 952010 - RNA, 19 nt, Artificial Sequence
  Description of Artificial Sequence: Synthetic oligonucleotide
  Sense strand starting at position 467 of SEQ ID NO: 913762
acaugcugaugaucuuaua

SEQ ID NO: 952011 - RNA, 19 nt, Artificial Sequence
  Description of Artificial Sequence: Synthetic oligonucleotide
  Antisense strand to SEQ ID NO: 952010
uauaagaucaucagcaugu

SEQ ID NO: 952012 - RNA, 19 nt, Artificial Sequence
  Description of Artificial Sequence: Synthetic oligonucleotide
  Sense strand starting at position 1536 of SEQ ID NO: 913762
gagugagaaugucuucuag

SEQ ID NO: 952013 - RNA, 19 nt, Artificial Sequence
  Description of Artificial Sequence: Synthetic oligonucleotide
  Antisense strand to SEQ ID NO: 952012
cuagaagacauucucacuc

SEQ ID NO: 952014 - RNA, 19 nt, Artificial Sequence
  Description of Artificial Sequence: Synthetic oligonucleotide
  Sense strand starting at position 102 of SEQ ID NO: 913762
gccuauuucuuuccagucu

SEQ ID NO: 952015 - RNA, 19 nt, Artificial Sequence
  Description of Artificial Sequence: Synthetic oligonucleotide
  Antisense strand to SEQ ID NO: 952014
agacuggaaagaaauaggc

SEQ ID NO: 952016 - RNA, 19 nt, Artificial Sequence
  Description of Artificial Sequence: Synthetic oligonucleotide
  Sense strand starting at position 2904 of SEQ ID NO: 913762
cuaugcaugcaauaaguaa

SEQ ID NO: 952017 - RNA, 19 nt, Artificial Sequence
  Description of Artificial Sequence: Synthetic oligonucleotide
  Antisense strand to SEQ ID NO: 952016
uuacuuauugcaugcauag

SEQ ID NO: 952018 - RNA, 19 nt, Artificial Sequence
  Description of Artificial Sequence: Synthetic oligonucleotide
  Sense strand starting at position 1552 of SEQ ID NO: 913762
uagaaagucuuugcagaua

SEQ ID NO: 952019 - RNA, 19 nt, Artificial Sequence
  Description of Artificial Sequence: Synthetic oligonucleotide
  Antisense strand to SEQ ID NO: 952018
uaucugcaaagacuuucua

SEQ ID NO: 952020 - RNA, 19 nt, Artificial Sequence
  Description of Artificial Sequence: Synthetic oligonucleotide
  Sense strand starting at position 3308 of SEQ ID NO: 913762
agguuuaaucguuauugga

SEQ ID NO: 952021 - RNA, 19 nt, Artificial Sequence
  Description of Artificial Sequence: Synthetic oligonucleotide
  Antisense strand to SEQ ID NO: 952020
uccaauaacgauuaaaccu

SEQ ID NO: 952022 - RNA, 19 nt, Artificial Sequence
  Description of Artificial Sequence: Synthetic oligonucleotide
  Sense strand starting at position 1844 of SEQ ID NO: 913762
ugacuuagguucucauaug

SEQ ID NO: 952023 - RNA, 19 nt, Artificial Sequence
  Description of Artificial Sequence: Synthetic oligonucleotide
  Antisense strand to SEQ ID NO: 952022
cauaugagaaccuaaguca

SEQ ID NO: 952024 - RNA, 19 nt, Artificial Sequence
  Description of Artificial Sequence: Synthetic oligonucleotide
  Sense strand starting at position 79 of SEQ ID NO: 913762
agaggacuguugcuaacau

SEQ ID NO: 952025 - RNA, 19 nt, Artificial Sequence
  Description of Artificial Sequence: Synthetic oligonucleotide
  Antisense strand to SEQ ID NO: 952024
auguuagcaacaguccucu

SEQ ID NO: 952026 - RNA, 19 nt, Artificial Sequence
  Description of Artificial Sequence: Synthetic oligonucleotide
  Sense strand starting at position 1408 of SEQ ID NO: 913762
gacagaacugcguauccau

SEQ ID NO: 952027 - RNA, 19 nt, Artificial Sequence
  Description of Artificial Sequence: Synthetic oligonucleotide
  Antisense strand to SEQ ID NO: 952026
auggauacgcaguucuguc

SEQ ID NO: 952028 - RNA, 19 nt, Artificial Sequence
  Description of Artificial Sequence: Synthetic oligonucleotide
  Sense strand starting at position 351 of SEQ ID NO: 913762
uggacaaauuuagauuguu

SEQ ID NO: 952029 - RNA, 19 nt, Artificial Sequence
  Description of Artificial Sequence: Synthetic oligonucleotide
  Antisense strand to SEQ ID NO: 952028
aacaaucuaaauuugucca

SEQ ID NO: 952030 - RNA, 19 nt, Artificial Sequence
  Description of Artificial Sequence: Synthetic oligonucleotide
  Sense strand starting at position 3143 of SEQ ID NO: 913762
cuauaucuuugauugguca

SEQ ID NO: 952031 - RNA, 19 nt, Artificial Sequence
  Description of Artificial Sequence: Synthetic oligonucleotide
  Antisense strand to SEQ ID NO: 952030
ugaccaaucaaagauauag

SEQ ID NO: 952032 - RNA, 19 nt, Artificial Sequence
  Description of Artificial Sequence: Synthetic oligonucleotide
  Sense strand starting at position 1550 of SEQ ID NO: 913762
ucuagaaagucuuugcaga

SEQ ID NO: 952033 - RNA, 19 nt, Artificial Sequence
  Description of Artificial Sequence: Synthetic oligonucleotide
  Antisense strand to SEQ ID NO: 952032
ucugcaaagacuuucuaga

SEQ ID NO: 952034 - RNA, 19 nt, Artificial Sequence
  Description of Artificial Sequence: Synthetic oligonucleotide
  Sense strand starting at position 640 of SEQ ID NO: 913762
guuuccaaaucaguggauu

SEQ ID NO: 952035 - RNA, 19 nt, Artificial Sequence
  Description of Artificial Sequence: Synthetic oligonucleotide
  Antisense strand to SEQ ID NO: 952034
aauccacugauuuggaaac

SEQ ID NO: 952036 - RNA, 19 nt, Artificial Sequence
  Description of Artificial Sequence: Synthetic oligonucleotide
  Sense strand starting at position 1784 of SEQ ID NO: 913762
uugaccuuucucugaguaa

SEQ ID NO: 952037 - RNA, 19 nt, Artificial Sequence
  Description of Artificial Sequence: Synthetic oligonucleotide
  Antisense strand to SEQ ID NO: 952036
uuacucagagaaaggucaa

SEQ ID NO: 952038 - RNA, 19 nt, Artificial Sequence
  Description of Artificial Sequence: Synthetic oligonucleotide
  Sense strand starting at position 1551 of SEQ ID NO: 913762
cuagaaagucuuugcagau

SEQ ID NO: 952039 - RNA, 19 nt, Artificial Sequence
  Description of Artificial Sequence: Synthetic oligonucleotide
  Antisense strand to SEQ ID NO: 952038
aucugcaaagacuuucuag

SEQ ID NO: 952040 - RNA, 19 nt, Artificial Sequence
  Description of Artificial Sequence: Synthetic oligonucleotide
  Sense strand starting at position 1835 of SEQ ID NO: 913762
gcaugauuaugacuuaggu

SEQ ID NO: 952041 - RNA, 19 nt, Artificial Sequence
  Description of Artificial Sequence: Synthetic oligonucleotide
  Antisense strand to SEQ ID NO: 952040
accuaagucauaaucaugc

SEQ ID NO: 952042 - RNA, 19 nt, Artificial Sequence
  Description of Artificial Sequence: Synthetic oligonucleotide
  Sense strand starting at position 2305 of SEQ ID NO: 913762
uguuaaguauuccucaaca

SEQ ID NO: 952043 - RNA, 19 nt, Artificial Sequence
  Description of Artificial Sequence: Synthetic oligonucleotide
  Antisense strand to SEQ ID NO: 952042
uguugaggaauacuuaaca

SEQ ID NO: 952044 - RNA, 19 nt, Artificial Sequence
  Description of Artificial Sequence: Synthetic oligonucleotide
  Sense strand starting at position 1930 of SEQ ID NO: 913762
uuaccuguuugagcaaaca

SEQ ID NO: 952045 - RNA, 19 nt, Artificial Sequence
  Description of Artificial Sequence: Synthetic oligonucleotide
  Antisense strand to SEQ ID NO: 952044
uguuugcucaaacagguaa

SEQ ID NO: 952046 - RNA, 19 nt, Artificial Sequence
  Description of Artificial Sequence: Synthetic oligonucleotide
  Sense strand starting at position 1783 of SEQ ID NO: 913762
cuugaccuuucucugagua

SEQ ID NO: 952047 - RNA, 19 nt, Artificial Sequence
  Description of Artificial Sequence: Synthetic oligonucleotide
  Antisense strand to SEQ ID NO: 952046
uacucagagaaaggucaag

SEQ ID NO: 952048 - RNA, 19 nt, Artificial Sequence
  Description of Artificial Sequence: Synthetic oligonucleotide
  Sense strand starting at position 1782 of SEQ ID NO: 913762
acuugaccuuucucugagu

SEQ ID NO: 952049 - RNA, 19 nt, Artificial Sequence
  Description of Artificial Sequence: Synthetic oligonucleotide
  Antisense strand to SEQ ID NO: 952048
acucagagaaaggucaagu

SEQ ID NO: 952050 - RNA, 19 nt, Artificial Sequence
  Description of Artificial Sequence: Synthetic oligonucleotide
  Sense strand starting at position 3964 of SEQ ID NO: 913763
ccgucaagcacuguugcaa

SEQ ID NO: 952051 - RNA, 19 nt, Artificial Sequence
  Description of Artificial Sequence: Synthetic oligonucleotide
  Antisense strand to SEQ ID NO: 952050
uugcaacagugcuugacgg

SEQ ID NO: 952052 - RNA, 19 nt, Artificial Sequence
  Description of Artificial Sequence: Synthetic oligonucleotide
  Sense strand starting at position 953 of SEQ ID NO: 913763
aggagucaauacucauuga

SEQ ID NO: 952053 - RNA, 19 nt, Artificial Sequence
  Description of Artificial Sequence: Synthetic oligonucleotide
  Antisense strand to SEQ ID NO: 952052
ucaaugaguauugacuccu

SEQ ID NO: 952054 - RNA, 19 nt, Artificial Sequence
  Description of Artificial Sequence: Synthetic oligonucleotide
  Sense strand starting at position 3883 of SEQ ID NO: 913763
agaacauuaugagauuuac

SEQ ID NO: 952055 - RNA, 19 nt, Artificial Sequence
  Description of Artificial Sequence: Synthetic oligonucleotide
  Antisense strand to SEQ ID NO: 952054
guaaaucucauaauguucu

SEQ ID NO: 952056 - RNA, 19 nt, Artificial Sequence
  Description of Artificial Sequence: Synthetic oligonucleotide
  Sense strand starting at position 3371 of SEQ ID NO: 913763
uguggguuccgcuugguga

SEQ ID NO: 952057 - RNA, 19 nt, Artificial Sequence
  Description of Artificial Sequence: Synthetic oligonucleotide
  Antisense strand to SEQ ID NO: 952056
ucaccaagcggaacccaca

SEQ ID NO: 952058 - RNA, 19 nt, Artificial Sequence
  Description of Artificial Sequence: Synthetic oligonucleotide
  Sense strand starting at position 3491 of SEQ ID NO: 913763
gcugccaaucaauauaaga

SEQ ID NO: 952059 - RNA, 19 nt, Artificial Sequence
  Description of Artificial Sequence: Synthetic oligonucleotide
  Antisense strand to SEQ ID NO: 952058
ucuuauauugauuggcagc

SEQ ID NO: 952060 - RNA, 19 nt, Artificial Sequence
  Description of Artificial Sequence: Synthetic oligonucleotide
  Sense strand starting at position 198 of SEQ ID NO: 913763
cccaaaugccuguaaugaa

SEQ ID NO: 952061 - RNA, 19 nt, Artificial Sequence
  Description of Artificial Sequence: Synthetic oligonucleotide
  Antisense strand to SEQ ID NO: 952060
uucauuacaggcauuuggg

SEQ ID NO: 952062 - RNA, 19 nt, Artificial Sequence
  Description of Artificial Sequence: Synthetic oligonucleotide
  Sense strand starting at position 3449 of SEQ ID NO: 913763
uuucucuugcaggagauua

SEQ ID NO: 952063 - RNA, 19 nt, Artificial Sequence
  Description of Artificial Sequence: Synthetic oligonucleotide
  Antisense strand to SEQ ID NO: 952062
uaaucuccugcaagagaaa

SEQ ID NO: 952064 - RNA, 19 nt, Artificial Sequence
  Description of Artificial Sequence: Synthetic oligonucleotide
  Sense strand starting at position 3245 of SEQ ID NO: 913763
ucauuaugagaauggcuga

SEQ ID NO: 952065 - RNA, 19 nt, Artificial Sequence
  Description of Artificial Sequence: Synthetic oligonucleotide
  Antisense strand to SEQ ID NO: 952064
ucagccauucucauaauga

SEQ ID NO: 952066 - RNA, 19 nt, Artificial Sequence
  Description of Artificial Sequence: Synthetic oligonucleotide
  Sense strand starting at position 1564 of SEQ ID NO: 913763
acucuugacguuuauaaac

SEQ ID NO: 952067 - RNA, 19 nt, Artificial Sequence
  Description of Artificial Sequence: Synthetic oligonucleotide
  Antisense strand to SEQ ID NO: 952066
guuuauaaacgucaagagu

SEQ ID NO: 952068 - RNA, 19 nt, Artificial Sequence
  Description of Artificial Sequence: Synthetic oligonucleotide
  Sense strand starting at position 442 of SEQ ID NO: 913763
uaagaaaggugucuaaucu

SEQ ID NO: 952069 - RNA, 19 nt, Artificial Sequence
  Description of Artificial Sequence: Synthetic oligonucleotide
  Antisense strand to SEQ ID NO: 952068
agauuagacaccuuucuua

SEQ ID NO: 952070 - RNA, 19 nt, Artificial Sequence
  Description of Artificial Sequence: Synthetic oligonucleotide
  Sense strand starting at position 402 of SEQ ID NO: 913763
uggucuacuguauaaccua

SEQ ID NO: 952071 - RNA, 19 nt, Artificial Sequence
  Description of Artificial Sequence: Synthetic oligonucleotide
  Antisense strand to SEQ ID NO: 952070
uagguuauacaguagacca

SEQ ID NO: 952072 - RNA, 19 nt, Artificial Sequence
  Description of Artificial Sequence: Synthetic oligonucleotide
  Sense strand starting at position 1341 of SEQ ID NO: 913763
uaccaaugagugcaaaguu

SEQ ID NO: 952073 - RNA, 19 nt, Artificial Sequence
  Description of Artificial Sequence: Synthetic oligonucleotide
  Antisense strand to SEQ ID NO: 952072
aacuuugcacucauuggua

SEQ ID NO: 952074 - RNA, 19 nt, Artificial Sequence
  Description of Artificial Sequence: Synthetic oligonucleotide
  Sense strand starting at position 339 of SEQ ID NO: 913763
ggccuugauguccacaaau

SEQ ID NO: 952075 - RNA, 19 nt, Artificial Sequence
  Description of Artificial Sequence: Synthetic oligonucleotide
  Antisense strand to SEQ ID NO: 952074
auuuguggacaucaaggcc

SEQ ID NO: 952076 - RNA, 19 nt, Artificial Sequence
  Description of Artificial Sequence: Synthetic oligonucleotide
  Sense strand starting at position 77 of SEQ ID NO: 913763
ucuauuugcuuccuguuua

SEQ ID NO: 952077 - RNA, 19 nt, Artificial Sequence
  Description of Artificial Sequence: Synthetic oligonucleotide
  Antisense strand to SEQ ID NO: 952076
uaaacaggaagcaaauaga

SEQ ID NO: 952078 - RNA, 19 nt, Artificial Sequence
  Description of Artificial Sequence: Synthetic oligonucleotide
  Sense strand starting at position 430 of SEQ ID NO: 913763
acguaugugguuuaagaaa

SEQ ID NO: 952079 - RNA, 19 nt, Artificial Sequence
  Description of Artificial Sequence: Synthetic oligonucleotide
  Antisense strand to SEQ ID NO: 952078
uuucuuaaaccacauacgu

SEQ ID NO: 952080 - RNA, 19 nt, Artificial Sequence
  Description of Artificial Sequence: Synthetic oligonucleotide
  Sense strand starting at position 3269 of SEQ ID NO: 913763
ugucgauucgaugauugaa

SEQ ID NO: 952081 - RNA, 19 nt, Artificial Sequence
  Description of Artificial Sequence: Synthetic oligonucleotide
  Antisense strand to SEQ ID NO: 952080
uucaaucaucgaaucgaca

SEQ ID NO: 952082 - RNA, 19 nt, Artificial Sequence
  Description of Artificial Sequence: Synthetic oligonucleotide
  Sense strand starting at position 312 of SEQ ID NO: 913763
gugagacucuaaguccuaa

SEQ ID NO: 952083 - RNA, 19 nt, Artificial Sequence
  Description of Artificial Sequence: Synthetic oligonucleotide
  Antisense strand to SEQ ID NO: 952082
uuaggacuuagagucucac

SEQ ID NO: 952084 - RNA, 19 nt, Artificial Sequence
  Description of Artificial Sequence: Synthetic oligonucleotide
  Sense strand starting at position 3924 of SEQ ID NO: 913763
uuaguuccuccaggacaau

SEQ ID NO: 952085 - RNA, 19 nt, Artificial Sequence
  Description of Artificial Sequence: Synthetic oligonucleotide
  Antisense strand to SEQ ID NO: 952084
auuguccuggaggaacuaa

SEQ ID NO: 952086 - RNA, 19 nt, Artificial Sequence
  Description of Artificial Sequence: Synthetic oligonucleotide
  Sense strand starting at position 53 of SEQ ID NO: 913763
agucaacacagacgaguua

SEQ ID NO: 952087 - RNA, 19 nt, Artificial Sequence
  Description of Artificial Sequence: Synthetic oligonucleotide
  Antisense strand to SEQ ID NO: 952086
uaacucgucuguguugacu

SEQ ID NO: 952088 - RNA, 19 nt, Artificial Sequence
  Description of Artificial Sequence: Synthetic oligonucleotide
  Sense strand starting at position 3279 of SEQ ID NO: 913763
augauugaagucuguacca

SEQ ID NO: 952089 - RNA, 19 nt, Artificial Sequence
  Description of Artificial Sequence: Synthetic oligonucleotide
  Antisense strand to SEQ ID NO: 952088
ugguacagacuucaaucau

SEQ ID NO: 952090 - RNA, 19 nt, Artificial Sequence
  Description of Artificial Sequence: Synthetic oligonucleotide
  Sense strand starting at position 1273 of SEQ ID NO: 913763
agauauuacuguuccuauu

SEQ ID NO: 952091 - RNA, 19 nt, Artificial Sequence
  Description of Artificial Sequence: Synthetic oligonucleotide
  Antisense strand to SEQ ID NO: 952090
aauaggaacaguaauaucu

SEQ ID NO: 952092 - RNA, 19 nt, Artificial Sequence
  Description of Artificial Sequence: Synthetic oligonucleotide
  Sense strand starting at position 956 of SEQ ID NO: 913763
agucaauacucauugagca

SEQ ID NO: 952093 - RNA, 19 nt, Artificial Sequence
  Description of Artificial Sequence: Synthetic oligonucleotide
  Antisense strand to SEQ ID NO: 952092
ugcucaaugaguauugacu

SEQ ID NO: 952094 - RNA, 19 nt, Artificial Sequence
  Description of Artificial Sequence: Synthetic oligonucleotide
  Sense strand starting at position 439 of SEQ ID NO: 913763
guuuaagaaaggugucuaa

SEQ ID NO: 952095 - RNA, 19 nt, Artificial Sequence
  Description of Artificial Sequence: Synthetic oligonucleotide
  Antisense strand to SEQ ID NO: 952094
uuagacaccuuucuuaaac

SEQ ID NO: 952096 - RNA, 19 nt, Artificial Sequence
  Description of Artificial Sequence: Synthetic oligonucleotide
  Sense strand starting at position 1559 of SEQ ID NO: 913763
cggcgacucuugacguuua

SEQ ID NO: 952097 - RNA, 19 nt, Artificial Sequence
  Description of Artificial Sequence: Synthetic oligonucleotide
  Antisense strand to SEQ ID NO: 952096
uaaacgucaagagucgccg

SEQ ID NO: 952098 - RNA, 19 nt, Artificial Sequence
  Description of Artificial Sequence: Synthetic oligonucleotide
  Sense strand starting at position 338 of SEQ ID NO: 913763
gggccuugauguccacaaa

SEQ ID NO: 952099 - RNA, 19 nt, Artificial Sequence
  Description of Artificial Sequence: Synthetic oligonucleotide
  Antisense strand to SEQ ID NO: 952098
uuuguggacaucaaggccc

SEQ ID NO: 952100 - RNA, 19 nt, Artificial Sequence
  Description of Artificial Sequence: Synthetic oligonucleotide
  Sense strand starting at position 1440 of SEQ ID NO: 913763
agaaaugacacgcgguaaa

SEQ ID NO: 952101 - RNA, 19 nt, Artificial Sequence
  Description of Artificial Sequence: Synthetic oligonucleotide
  Antisense strand to SEQ ID NO: 952100
uuuaccgcgugucauuucu

SEQ ID NO: 952102 - RNA, 19 nt, Artificial Sequence
  Description of Artificial Sequence: Synthetic oligonucleotide
  Sense strand starting at position 1168 of SEQ ID NO: 913763
guaccaaucucauuagagc

SEQ ID NO: 952103 - RNA, 19 nt, Artificial Sequence
  Description of Artificial Sequence: Synthetic oligonucleotide
  Antisense strand to SEQ ID NO: 952102
gcucuaaugagauugguac

SEQ ID NO: 952104 - RNA, 19 nt, Artificial Sequence
  Description of Artificial Sequence: Synthetic oligonucleotide
  Sense strand starting at position 3643 of SEQ ID NO: 913763
gcuaaaugauguuccuaua

SEQ ID NO: 952105 - RNA, 19 nt, Artificial Sequence
  Description of Artificial Sequence: Synthetic oligonucleotide
  Antisense strand to SEQ ID NO: 952104
uauaggaacaucauuuagc

SEQ ID NO: 952106 - RNA, 19 nt, Artificial Sequence
  Description of Artificial Sequence: Synthetic oligonucleotide
  Sense strand starting at position 570 of SEQ ID NO: 913763
uugggagcucggugagaga

SEQ ID NO: 952107 - RNA, 19 nt, Artificial Sequence
  Description of Artificial Sequence: Synthetic oligonucleotide
  Antisense strand to SEQ ID NO: 952106
ucucucaccgagcucccaa

SEQ ID NO: 952108 - RNA, 19 nt, Artificial Sequence
  Description of Artificial Sequence: Synthetic oligonucleotide
  Sense strand starting at position 2988 of SEQ ID NO: 913763
cuugccugugucuaagaga

SEQ ID NO: 952109 - RNA, 19 nt, Artificial Sequence
  Description of Artificial Sequence: Synthetic oligonucleotide
  Antisense strand to SEQ ID NO: 952108
ucucuuagacacaggcaag

SEQ ID NO: 952110 - RNA, 19 nt, Artificial Sequence
  Description of Artificial Sequence: Synthetic oligonucleotide
  Sense strand starting at position 3078 of SEQ ID NO: 913763
gugaguugcguccugcuuu

SEQ ID NO: 952111 - RNA, 19 nt, Artificial Sequence
  Description of Artificial Sequence: Synthetic oligonucleotide
  Antisense strand to SEQ ID NO: 952110
aaagcaggacgcaacucac

SEQ ID NO: 952112 - RNA, 19 nt, Artificial Sequence
  Description of Artificial Sequence: Synthetic oligonucleotide
  Sense strand starting at position 957 of SEQ ID NO: 913763
gucaauacucauugagcau

SEQ ID NO: 952113 - RNA, 19 nt, Artificial Sequence
  Description of Artificial Sequence: Synthetic oligonucleotide
  Antisense strand to SEQ ID NO: 952112
augcucaaugaguauugac

SEQ ID NO: 952114 - RNA, 19 nt, Artificial Sequence
  Description of Artificial Sequence: Synthetic oligonucleotide
  Sense strand starting at position 3271 of SEQ ID NO: 913763
ucgauucgaugauugaagu

SEQ ID NO: 952115 - RNA, 19 nt, Artificial Sequence
  Description of Artificial Sequence: Synthetic oligonucleotide
  Antisense strand to SEQ ID NO: 952114
acuucaaucaucgaaucga

SEQ ID NO: 952116 - RNA, 19 nt, Artificial Sequence
  Description of Artificial Sequence: Synthetic oligonucleotide
  Sense strand starting at position 1438 of SEQ ID NO: 913763
uaagaaaugacacgcggua

SEQ ID NO: 952117 - RNA, 19 nt, Artificial Sequence
  Description of Artificial Sequence: Synthetic oligonucleotide
  Antisense strand to SEQ ID NO: 952116
uaccgcgugucauuucuua

SEQ ID NO: 952118 - RNA, 19 nt, Artificial Sequence
  Description of Artificial Sequence: Synthetic oligonucleotide
  Sense strand starting at position 3584 of SEQ ID NO: 913763
gaagaccucuaggaaauga

SEQ ID NO: 952119 - RNA, 19 nt, Artificial Sequence
  Description of Artificial Sequence: Synthetic oligonucleotide
  Antisense strand to SEQ ID NO: 952118
ucauuuccuagaggucuuc

SEQ ID NO: 952120 - RNA, 19 nt, Artificial Sequence
  Description of Artificial Sequence: Synthetic oligonucleotide
  Sense strand starting at position 3099 of SEQ ID NO: 913763
auagauuuaucuggaggua

SEQ ID NO: 952121 - RNA, 19 nt, Artificial Sequence
  Description of Artificial Sequence: Synthetic oligonucleotide
  Antisense strand to SEQ ID NO: 952120
uaccuccagauaaaucuau

SEQ ID NO: 952122 - RNA, 19 nt, Artificial Sequence
  Description of Artificial Sequence: Synthetic oligonucleotide
  Sense strand starting at position 425 of SEQ ID NO: 913763
aaaggacguaugugguuua

SEQ ID NO: 952123 - RNA, 19 nt, Artificial Sequence
  Description of Artificial Sequence: Synthetic oligonucleotide
  Antisense strand to SEQ ID NO: 952122
uaaaccacauacguccuuu

SEQ ID NO: 952124 - RNA, 19 nt, Artificial Sequence
  Description of Artificial Sequence: Synthetic oligonucleotide
  Sense strand starting at position 428 of SEQ ID NO: 913763
ggacguaugugguuuaaga

SEQ ID NO: 952125 - RNA, 19 nt, Artificial Sequence
  Description of Artificial Sequence: Synthetic oligonucleotide
  Antisense strand to SEQ ID NO: 952124
ucuuaaaccacauacgucc

SEQ ID NO: 952126 - RNA, 19 nt, Artificial Sequence
  Description of Artificial Sequence: Synthetic oligonucleotide
  Sense strand starting at position 38 of SEQ ID NO: 913763
uagguuuaggucugaaguc

SEQ ID NO: 952127 - RNA, 19 nt, Artificial Sequence
  Description of Artificial Sequence: Synthetic oligonucleotide
  Antisense strand to SEQ ID NO: 952126
gacuucagaccuaaaccua

SEQ ID NO: 952128 - RNA, 19 nt, Artificial Sequence
  Description of Artificial Sequence: Synthetic oligonucleotide
  Sense strand starting at position 845 of SEQ ID NO: 913763
cuaaguuaaccauguggca

SEQ ID NO: 952129 - RNA, 19 nt, Artificial Sequence
  Description of Artificial Sequence: Synthetic oligonucleotide
  Antisense strand to SEQ ID NO: 952128
ugccacaugguuaacuuag

SEQ ID NO: 952130 - RNA, 19 nt, Artificial Sequence
  Description of Artificial Sequence: Synthetic oligonucleotide
  Sense strand starting at position 603 of SEQ ID NO: 913764
ugguuacgucucagaggug

SEQ ID NO: 952131 - RNA, 19 nt, Artificial Sequence
  Description of Artificial Sequence: Synthetic oligonucleotide
  Antisense strand to SEQ ID NO: 952130
caccucugagacguaacca

SEQ ID NO: 952132 - RNA, 19 nt, Artificial Sequence
  Description of Artificial Sequence: Synthetic oligonucleotide
  Sense strand starting at position 1684 of SEQ ID NO: 913764
uagcgauuccaauagauga

SEQ ID NO: 952133 - RNA, 19 nt, Artificial Sequence
  Description of Artificial Sequence: Synthetic oligonucleotide
  Antisense strand to SEQ ID NO: 952132
ucaucuauuggaaucgcua

SEQ ID NO: 952134 - RNA, 19 nt, Artificial Sequence
  Description of Artificial Sequence: Synthetic oligonucleotide
  Sense strand starting at position 2466 of SEQ ID NO: 913764
aaugucuuugauuaaggua

SEQ ID NO: 952135 - RNA, 19 nt, Artificial Sequence
  Description of Artificial Sequence: Synthetic oligonucleotide
  Antisense strand to SEQ ID NO: 952134
uaccuuaaucaaagacauu

SEQ ID NO: 952136 - RNA, 19 nt, Artificial Sequence
  Description of Artificial Sequence: Synthetic oligonucleotide
  Sense strand starting at position 3227 of SEQ ID NO: 913764
gagauacuguuucuggaga

SEQ ID NO: 952137 - RNA, 19 nt, Artificial Sequence
  Description of Artificial Sequence: Synthetic oligonucleotide
  Antisense strand to SEQ ID NO: 952136
ucuccagaaacaguaucuc

SEQ ID NO: 952138 - RNA, 19 nt, Artificial Sequence
  Description of Artificial Sequence: Synthetic oligonucleotide
  Sense strand starting at position 2842 of SEQ ID NO: 913764
aaauguaacuucuuggaug

SEQ ID NO: 952139 - RNA, 19 nt, Artificial Sequence
  Description of Artificial Sequence: Synthetic oligonucleotide
  Antisense strand to SEQ ID NO: 952138
cauccaagaaguuacauuu

SEQ ID NO: 952140 - RNA, 19 nt, Artificial Sequence
  Description of Artificial Sequence: Synthetic oligonucleotide
  Sense strand starting at position 1733 of SEQ ID NO: 913764
aggagugaucuguaaguac

SEQ ID NO: 952141 - RNA, 19 nt, Artificial Sequence
  Description of Artificial Sequence: Synthetic oligonucleotide
  Antisense strand to SEQ ID NO: 952140
guacuuacagaucacuccu

SEQ ID NO: 952142 - RNA, 19 nt, Artificial Sequence
  Description of Artificial Sequence: Synthetic oligonucleotide
  Sense strand starting at position 1419 of SEQ ID NO: 913764
aguuuacacugugucauuu

SEQ ID NO: 952143 - RNA, 19 nt, Artificial Sequence
  Description of Artificial Sequence: Synthetic oligonucleotide
  Antisense strand to SEQ ID NO: 952142
aaaugacacaguguaaacu

SEQ ID NO: 952144 - RNA, 19 nt, Artificial Sequence
  Description of Artificial Sequence: Synthetic oligonucleotide
  Sense strand starting at position 1686 of SEQ ID NO: 913764
gcgauuccaauagaugauu

SEQ ID NO: 952145 - RNA, 19 nt, Artificial Sequence
  Description of Artificial Sequence: Synthetic oligonucleotide
  Antisense strand to SEQ ID NO: 952144
aaucaucuauuggaaucgc

SEQ ID NO: 952146 - RNA, 19 nt, Artificial Sequence
  Description of Artificial Sequence: Synthetic oligonucleotide
  Sense strand starting at position 1148 of SEQ ID NO: 913764
uuacauuggagauggcuaa

SEQ ID NO: 952147 - RNA, 19 nt, Artificial Sequence
  Description of Artificial Sequence: Synthetic oligonucleotide
  Antisense strand to SEQ ID NO: 952146
uuagccaucuccaauguaa

SEQ ID NO: 952148 - RNA, 19 nt, Artificial Sequence
  Description of Artificial Sequence: Synthetic oligonucleotide
  Sense strand starting at position 651 of SEQ ID NO: 913764
uuuguuggacaugggaauu

SEQ ID NO: 952149 - RNA, 19 nt, Artificial Sequence
  Description of Artificial Sequence: Synthetic oligonucleotide
  Antisense strand to SEQ ID NO: 952148
aauucccauguccaacaaa

SEQ ID NO: 952150 - RNA, 19 nt, Artificial Sequence
  Description of Artificial Sequence: Synthetic oligonucleotide
  Sense strand starting at position 1445 of SEQ ID NO: 913764
aaagcaaaccauuggguua

SEQ ID NO: 952151 - RNA, 19 nt, Artificial Sequence
  Description of Artificial Sequence: Synthetic oligonucleotide
  Antisense strand to SEQ ID NO: 952150
uaacccaaugguuugcuuu

SEQ ID NO: 952152 - RNA, 19 nt, Artificial Sequence
  Description of Artificial Sequence: Synthetic oligonucleotide
  Sense strand starting at position 1142 of SEQ ID NO: 913764
cuuuccuuacauuggagau

SEQ ID NO: 952153 - RNA, 19 nt, Artificial Sequence
  Description of Artificial Sequence: Synthetic oligonucleotide
  Antisense strand to SEQ ID NO: 952152
aucuccaauguaaggaaag

SEQ ID NO: 952154 - RNA, 19 nt, Artificial Sequence
  Description of Artificial Sequence: Synthetic oligonucleotide
  Sense strand starting at position 3062 of SEQ ID NO: 913764
gccgugugucugcuggaga

SEQ ID NO: 952155 - RNA, 19 nt, Artificial Sequence
  Description of Artificial Sequence: Synthetic oligonucleotide
  Antisense strand to SEQ ID NO: 952154
ucuccagcagacacacggc

SEQ ID NO: 952156 - RNA, 19 nt, Artificial Sequence
  Description of Artificial Sequence: Synthetic oligonucleotide
  Sense strand starting at position 1182 of SEQ ID NO: 913764
accuguacuccaugggaau

SEQ ID NO: 952157 - RNA, 19 nt, Artificial Sequence
  Description of Artificial Sequence: Synthetic oligonucleotide
  Antisense strand to SEQ ID NO: 952156
auucccauggaguacaggu

SEQ ID NO: 952158 - RNA, 19 nt, Artificial Sequence
  Description of Artificial Sequence: Synthetic oligonucleotide
  Sense strand starting at position 3225 of SEQ ID NO: 913764
cugagauacuguuucugga

SEQ ID NO: 952159 - RNA, 19 nt, Artificial Sequence
  Description of Artificial Sequence: Synthetic oligonucleotide
  Antisense strand to SEQ ID NO: 952158
uccagaaacaguaucucag

SEQ ID NO: 952160 - RNA, 19 nt, Artificial Sequence
  Description of Artificial Sequence: Synthetic oligonucleotide
  Sense strand starting at position 844 of SEQ ID NO: 913764
gccaguuagaaaugacuga

SEQ ID NO: 952161 - RNA, 19 nt, Artificial Sequence
  Description of Artificial Sequence: Synthetic oligonucleotide
  Antisense strand to SEQ ID NO: 952160
ucagucauuucuaacuggc

SEQ ID NO: 952162 - RNA, 19 nt, Artificial Sequence
  Description of Artificial Sequence: Synthetic oligonucleotide
  Sense strand starting at position 2438 of SEQ ID NO: 913764
ggcagaucuucagugagaa

SEQ ID NO: 952163 - RNA, 19 nt, Artificial Sequence
  Description of Artificial Sequence: Synthetic oligonucleotide
  Antisense strand to SEQ ID NO: 952162
uucucacugaagaucugcc

SEQ ID NO: 952164 - RNA, 19 nt, Artificial Sequence
  Description of Artificial Sequence: Synthetic oligonucleotide
  Sense strand starting at position 771 of SEQ ID NO: 913764
cagugucugacuggacaga

SEQ ID NO: 952165 - RNA, 19 nt, Artificial Sequence
  Description of Artificial Sequence: Synthetic oligonucleotide
  Antisense strand to SEQ ID NO: 952164
ucuguccagucagacacug

SEQ ID NO: 952166 - RNA, 19 nt, Artificial Sequence
  Description of Artificial Sequence: Synthetic oligonucleotide
  Sense strand starting at position 3067 of SEQ ID NO: 913764
gugucugcuggagaaacau

SEQ ID NO: 952167 - RNA, 19 nt, Artificial Sequence
  Description of Artificial Sequence: Synthetic oligonucleotide
  Antisense strand to SEQ ID NO: 952166
auguuucuccagcagacac

SEQ ID NO: 952168 - RNA, 19 nt, Artificial Sequence
  Description of Artificial Sequence: Synthetic oligonucleotide
  Sense strand starting at position 2088 of SEQ ID NO: 913764
gcuuacugugaggacaagu

SEQ ID NO: 952169 - RNA, 19 nt, Artificial Sequence
  Description of Artificial Sequence: Synthetic oligonucleotide
  Antisense strand to SEQ ID NO: 952168
acuuguccucacaguaagc

SEQ ID NO: 952170 - RNA, 19 nt, Artificial Sequence
  Description of Artificial Sequence: Synthetic oligonucleotide
  Sense strand starting at position 762 of SEQ ID NO: 913764
aggcauuugcagugucuga

SEQ ID NO: 952171 - RNA, 19 nt, Artificial Sequence
  Description of Artificial Sequence: Synthetic oligonucleotide
  Antisense strand to SEQ ID NO: 952170
ucagacacugcaaaugccu

SEQ ID NO: 952172 - RNA, 19 nt, Artificial Sequence
  Description of Artificial Sequence: Synthetic oligonucleotide
  Sense strand starting at position 1194 of SEQ ID NO: 913764
ugggaauuauucuuguacu

SEQ ID NO: 952173 - RNA, 19 nt, Artificial Sequence
  Description of Artificial Sequence: Synthetic oligonucleotide
  Antisense strand to SEQ ID NO: 952172
aguacaagaauaauuccca

SEQ ID NO: 952174 - RNA, 19 nt, Artificial Sequence
  Description of Artificial Sequence: Synthetic oligonucleotide
  Sense strand starting at position 3214 of SEQ ID NO: 913764
ugcauucuugacugagaua

SEQ ID NO: 952175 - RNA, 19 nt, Artificial Sequence
  Description of Artificial Sequence: Synthetic oligonucleotide
  Antisense strand to SEQ ID NO: 952174
uaucucagucaagaaugca

SEQ ID NO: 952176 - RNA, 19 nt, Artificial Sequence
  Description of Artificial Sequence: Synthetic oligonucleotide
  Sense strand starting at position 2045 of SEQ ID NO: 913764
cgaacacccagagguuauu

SEQ ID NO: 952177 - RNA, 19 nt, Artificial Sequence
  Description of Artificial Sequence: Synthetic oligonucleotide
  Antisense strand to SEQ ID NO: 952176
aauaaccucuggguguucg

SEQ ID NO: 952178 - RNA, 19 nt, Artificial Sequence
  Description of Artificial Sequence: Synthetic oligonucleotide
  Sense strand starting at position 1183 of SEQ ID NO: 913764
ccuguacuccaugggaauu

SEQ ID NO: 952179 - RNA, 19 nt, Artificial Sequence
  Description of Artificial Sequence: Synthetic oligonucleotide
  Antisense strand to SEQ ID NO: 952178
aauucccauggaguacagg

SEQ ID NO: 952180 - RNA, 19 nt, Artificial Sequence
  Description of Artificial Sequence: Synthetic oligonucleotide
  Sense strand starting at position 2009 of SEQ ID NO: 913764
uguucuggagcucaaacuu

SEQ ID NO: 952181 - RNA, 19 nt, Artificial Sequence
  Description of Artificial Sequence: Synthetic oligonucleotide
  Antisense strand to SEQ ID NO: 952180
aaguuugagcuccagaaca

SEQ ID NO: 952182 - RNA, 19 nt, Artificial Sequence
  Description of Artificial Sequence: Synthetic oligonucleotide
  Sense strand starting at position 1731 of SEQ ID NO: 913764
caaggagugaucuguaagu

SEQ ID NO: 952183 - RNA, 19 nt, Artificial Sequence
  Description of Artificial Sequence: Synthetic oligonucleotide
  Antisense strand to SEQ ID NO: 952182
acuuacagaucacuccuug

SEQ ID NO: 952184 - RNA, 19 nt, Artificial Sequence
  Description of Artificial Sequence: Synthetic oligonucleotide
  Sense strand starting at position 3213 of SEQ ID NO: 913764
uugcauucuugacugagau

SEQ ID NO: 952185 - RNA, 19 nt, Artificial Sequence
  Description of Artificial Sequence: Synthetic oligonucleotide
  Antisense strand to SEQ ID NO: 952184
aucucagucaagaaugcaa

SEQ ID NO: 952186 - RNA, 19 nt, Artificial Sequence
  Description of Artificial Sequence: Synthetic oligonucleotide
  Sense strand starting at position 1456 of SEQ ID NO: 913764
uuggguuaggucuauucuu

SEQ ID NO: 952187 - RNA, 19 nt, Artificial Sequence
  Description of Artificial Sequence: Synthetic oligonucleotide
  Antisense strand to SEQ ID NO: 952186
aagaauagaccuaacccaa

SEQ ID NO: 952188 - RNA, 19 nt, Artificial Sequence
  Description of Artificial Sequence: Synthetic oligonucleotide
  Sense strand starting at position 501 of SEQ ID NO: 913764
caaagagauagcuguuggu

SEQ ID NO: 952189 - RNA, 19 nt, Artificial Sequence
  Description of Artificial Sequence: Synthetic oligonucleotide
  Antisense strand to SEQ ID NO: 952188
accaacagcuaucucuuug

SEQ ID NO: 952190 - RNA, 19 nt, Artificial Sequence
  Description of Artificial Sequence: Synthetic oligonucleotide
  Sense strand starting at position 2880 of SEQ ID NO: 913764
uccagcugugggcagaauu

SEQ ID NO: 952191 - RNA, 19 nt, Artificial Sequence
  Description of Artificial Sequence: Synthetic oligonucleotide
  Antisense strand to SEQ ID NO: 952190
aauucugcccacagcugga

SEQ ID NO: 952192 - RNA, 19 nt, Artificial Sequence
  Description of Artificial Sequence: Synthetic oligonucleotide
  Sense strand starting at position 2800 of SEQ ID NO: 913764
ccuccauccuggucagauu

SEQ ID NO: 952193 - RNA, 19 nt, Artificial Sequence
  Description of Artificial Sequence: Synthetic oligonucleotide
  Antisense strand to SEQ ID NO: 952192
aaucugaccaggauggagg

SEQ ID NO: 952194 - RNA, 19 nt, Artificial Sequence
  Description of Artificial Sequence: Synthetic oligonucleotide
  Sense strand starting at position 2373 of SEQ ID NO: 913764
ucucuuugaugacugucua

SEQ ID NO: 952195 - RNA, 19 nt, Artificial Sequence
  Description of Artificial Sequence: Synthetic oligonucleotide
  Antisense strand to SEQ ID NO: 952194
uagacagucaucaaagaga

SEQ ID NO: 952196 - RNA, 19 nt, Artificial Sequence
  Description of Artificial Sequence: Synthetic oligonucleotide
  Sense strand starting at position 1736 of SEQ ID NO: 913764
agugaucuguaaguacuua

SEQ ID NO: 952197 - RNA, 19 nt, Artificial Sequence
  Description of Artificial Sequence: Synthetic oligonucleotide
  Antisense strand to SEQ ID NO: 952196
uaaguacuuacagaucacu

SEQ ID NO: 952198 - RNA, 19 nt, Artificial Sequence
  Description of Artificial Sequence: Synthetic oligonucleotide
  Sense strand starting at position 3065 of SEQ ID NO: 913764
gugugucugcuggagaaac

SEQ ID NO: 952199 - RNA, 19 nt, Artificial Sequence
  Description of Artificial Sequence: Synthetic oligonucleotide
  Antisense strand to SEQ ID NO: 952198
guuucuccagcagacacac

SEQ ID NO: 952200 - RNA, 19 nt, Artificial Sequence
  Description of Artificial Sequence: Synthetic oligonucleotide
  Sense strand starting at position 1416 of SEQ ID NO: 913764
aagaguuuacacuguguca

SEQ ID NO: 952201 - RNA, 19 nt, Artificial Sequence
  Description of Artificial Sequence: Synthetic oligonucleotide
  Antisense strand to SEQ ID NO: 952200
ugacacaguguaaacucuu

SEQ ID NO: 952202 - RNA, 19 nt, Artificial Sequence
  Description of Artificial Sequence: Synthetic oligonucleotide
  Sense strand starting at position 2387 of SEQ ID NO: 913764
gucuaccuguuaccuauaa

SEQ ID NO: 952203 - RNA, 19 nt, Artificial Sequence
  Description of Artificial Sequence: Synthetic oligonucleotide
  Antisense strand to SEQ ID NO: 952202
uuauagguaacagguagac

SEQ ID NO: 952204 - RNA, 19 nt, Artificial Sequence
  Description of Artificial Sequence: Synthetic oligonucleotide
  Sense strand starting at position 2451 of SEQ ID NO: 913764
ugagaaugcuucgugaaug

SEQ ID NO: 952205 - RNA, 19 nt, Artificial Sequence
  Description of Artificial Sequence: Synthetic oligonucleotide
  Antisense strand to SEQ ID NO: 952204
cauucacgaagcauucuca

SEQ ID NO: 952206 - RNA, 19 nt, Artificial Sequence
  Description of Artificial Sequence: Synthetic oligonucleotide
  Sense strand starting at position 2112 of SEQ ID NO: 913764
gcagauggaugugcuugaa

SEQ ID NO: 952207 - RNA, 19 nt, Artificial Sequence
  Description of Artificial Sequence: Synthetic oligonucleotide
  Antisense strand to SEQ ID NO: 952206
uucaagcacauccaucugc

SEQ ID NO: 952208 - RNA, 19 nt, Artificial Sequence
  Description of Artificial Sequence: Synthetic oligonucleotide
  Sense strand starting at position 2115 of SEQ ID NO: 913764
gauggaugugcuugaaugu

SEQ ID NO: 952209 - RNA, 19 nt, Artificial Sequence
  Description of Artificial Sequence: Synthetic oligonucleotide
  Antisense strand to SEQ ID NO: 952208
acauucaagcacauccauc

SEQ ID NO: 952210 - RNA, 19 nt, Artificial Sequence
  Description of Artificial Sequence: Synthetic oligonucleotide
  Sense strand starting at position 3572 of SEQ ID NO: 913765
uuaaauaaucgugcgacgu

SEQ ID NO: 952211 - RNA, 19 nt, Artificial Sequence
  Description of Artificial Sequence: Synthetic oligonucleotide
  Antisense strand to SEQ ID NO: 952210
acgucgcacgauuauuuaa

SEQ ID NO: 952212 - RNA, 19 nt, Artificial Sequence
  Description of Artificial Sequence: Synthetic oligonucleotide
  Sense strand starting at position 3307 of SEQ ID NO: 913765
cugccauuggaagaauucu

SEQ ID NO: 952213 - RNA, 19 nt, Artificial Sequence
  Description of Artificial Sequence: Synthetic oligonucleotide
  Antisense strand to SEQ ID NO: 952212
agaauucuuccaauggcag

SEQ ID NO: 952214 - RNA, 19 nt, Artificial Sequence
  Description of Artificial Sequence: Synthetic oligonucleotide
  Sense strand starting at position 521 of SEQ ID NO: 913765
agagcugauaagugacaga

SEQ ID NO: 952215 - RNA, 19 nt, Artificial Sequence
  Description of Artificial Sequence: Synthetic oligonucleotide
  Antisense strand to SEQ ID NO: 952214
ucugucacuuaucagcucu

SEQ ID NO: 952216 - RNA, 19 nt, Artificial Sequence
  Description of Artificial Sequence: Synthetic oligonucleotide
  Sense strand starting at position 3664 of SEQ ID NO: 913765
gauugcaauuagguagaaa

SEQ ID NO: 952217 - RNA, 19 nt, Artificial Sequence
  Description of Artificial Sequence: Synthetic oligonucleotide
  Antisense strand to SEQ ID NO: 952216
uuucuaccuaauugcaauc

SEQ ID NO: 952218 - RNA, 19 nt, Artificial Sequence
  Description of Artificial Sequence: Synthetic oligonucleotide
  Sense strand starting at position 544 of SEQ ID NO: 913765
agaaucaaguggucccaga

SEQ ID NO: 952219 - RNA, 19 nt, Artificial Sequence
  Description of Artificial Sequence: Synthetic oligonucleotide
  Antisense strand to SEQ ID NO: 952218
ucugggaccacuugauucu

SEQ ID NO: 952220 - RNA, 19 nt, Artificial Sequence
  Description of Artificial Sequence: Synthetic oligonucleotide
  Sense strand starting at position 209 of SEQ ID NO: 913765
gacugugaagccuacuuga

SEQ ID NO: 952221 - RNA, 19 nt, Artificial Sequence
  Description of Artificial Sequence: Synthetic oligonucleotide
  Antisense strand to SEQ ID NO: 952220
ucaaguaggcuucacaguc

SEQ ID NO: 952222 - RNA, 19 nt, Artificial Sequence
  Description of Artificial Sequence: Synthetic oligonucleotide
  Sense strand starting at position 3611 of SEQ ID NO: 913765
uugacaguguaaucuaaag

SEQ ID NO: 952223 - RNA, 19 nt, Artificial Sequence
  Description of Artificial Sequence: Synthetic oligonucleotide
  Antisense strand to SEQ ID NO: 952222
cuuuagauuacacugucaa

SEQ ID NO: 952224 - RNA, 19 nt, Artificial Sequence
  Description of Artificial Sequence: Synthetic oligonucleotide
  Sense strand starting at position 3104 of SEQ ID NO: 913765
gcuuaauaggcaggacaaa

SEQ ID NO: 952225 - RNA, 19 nt, Artificial Sequence
  Description of Artificial Sequence: Synthetic oligonucleotide
  Antisense strand to SEQ ID NO: 952224
uuuguccugccuauuaagc

SEQ ID NO: 952226 - RNA, 19 nt, Artificial Sequence
  Description of Artificial Sequence: Synthetic oligonucleotide
  Sense strand starting at position 3123 of SEQ ID NO: 913765
ggauacuaccugcagucua

SEQ ID NO: 952227 - RNA, 19 nt, Artificial Sequence
  Description of Artificial Sequence: Synthetic oligonucleotide
  Antisense strand to SEQ ID NO: 952226
uagacugcagguaguaucc

SEQ ID NO: 952228 - RNA, 19 nt, Artificial Sequence
  Description of Artificial Sequence: Synthetic oligonucleotide
  Sense strand starting at position 3231 of SEQ ID NO: 913765
ugaguuucugguuauuaau

SEQ ID NO: 952229 - RNA, 19 nt, Artificial Sequence
  Description of Artificial Sequence: Synthetic oligonucleotide
  Antisense strand to SEQ ID NO: 952228
auuaauaaccagaaacuca

SEQ ID NO: 952230 - RNA, 19 nt, Artificial Sequence
  Description of Artificial Sequence: Synthetic oligonucleotide
  Sense strand starting at position 1032 of SEQ ID NO: 913765
agcuaaacggcuuaaauau

SEQ ID NO: 952231 - RNA, 19 nt, Artificial Sequence
  Description of Artificial Sequence: Synthetic oligonucleotide
  Antisense strand to SEQ ID NO: 952230
auauuuaagccguuuagcu

SEQ ID NO: 952232 - RNA, 19 nt, Artificial Sequence
  Description of Artificial Sequence: Synthetic oligonucleotide
  Sense strand starting at position 220 of SEQ ID NO: 913765
cuacuugaacuugguauau

SEQ ID NO: 952233 - RNA, 19 nt, Artificial Sequence
  Description of Artificial Sequence: Synthetic oligonucleotide
  Antisense strand to SEQ ID NO: 952232
auauaccaaguucaaguag

SEQ ID NO: 952234 - RNA, 19 nt, Artificial Sequence
  Description of Artificial Sequence: Synthetic oligonucleotide
  Sense strand starting at position 3785 of SEQ ID NO: 913765
augcucuuuguuuaaugaa

SEQ ID NO: 952235 - RNA, 19 nt, Artificial Sequence
  Description of Artificial Sequence: Synthetic oligonucleotide
  Antisense strand to SEQ ID NO: 952234
uucauuaaacaaagagcau

SEQ ID NO: 952236 - RNA, 19 nt, Artificial Sequence
  Description of Artificial Sequence: Synthetic oligonucleotide
  Sense strand starting at position 3302 of SEQ ID NO: 913765
ccauccugccauuggaaga

SEQ ID NO: 952237 - RNA, 19 nt, Artificial Sequence
  Description of Artificial Sequence: Synthetic oligonucleotide
  Antisense strand to SEQ ID NO: 952236
ucuuccaauggcaggaugg

SEQ ID NO: 952238 - RNA, 19 nt, Artificial Sequence
  Description of Artificial Sequence: Synthetic oligonucleotide
  Sense strand starting at position 3649 of SEQ ID NO: 913765
ucguaucaacaguaugauu

SEQ ID NO: 952239 - RNA, 19 nt, Artificial Sequence
  Description of Artificial Sequence: Synthetic oligonucleotide
  Antisense strand to SEQ ID NO: 952238
aaucauacuguugauacga

SEQ ID NO: 952240 - RNA, 19 nt, Artificial Sequence
  Description of Artificial Sequence: Synthetic oligonucleotide
  Sense strand starting at position 3654 of SEQ ID NO: 913765
ucaacaguaugauugcaau

SEQ ID NO: 952241 - RNA, 19 nt, Artificial Sequence
  Description of Artificial Sequence: Synthetic oligonucleotide
  Antisense strand to SEQ ID NO: 952240
auugcaaucauacuguuga

SEQ ID NO: 952242 - RNA, 19 nt, Artificial Sequence
  Description of Artificial Sequence: Synthetic oligonucleotide
  Sense strand starting at position 231 of SEQ ID NO: 913765
ugguauaugcuagaguuua

SEQ ID NO: 952243 - RNA, 19 nt, Artificial Sequence
  Description of Artificial Sequence: Synthetic oligonucleotide
  Antisense strand to SEQ ID NO: 952242
uaaacucuagcauauacca

SEQ ID NO: 952244 - RNA, 19 nt, Artificial Sequence
  Description of Artificial Sequence: Synthetic oligonucleotide
  Sense strand starting at position 3606 of SEQ ID NO: 913765
gaauguugacaguguaauc

SEQ ID NO: 952245 - RNA, 19 nt, Artificial Sequence
  Description of Artificial Sequence: Synthetic oligonucleotide
  Antisense strand to SEQ ID NO: 952244
gauuacacugucaacauuc

SEQ ID NO: 952246 - RNA, 19 nt, Artificial Sequence
  Description of Artificial Sequence: Synthetic oligonucleotide
  Sense strand starting at position 3218 of SEQ ID NO: 913765
cguguaguauuucugaguu

SEQ ID NO: 952247 - RNA, 19 nt, Artificial Sequence
  Description of Artificial Sequence: Synthetic oligonucleotide
  Antisense strand to SEQ ID NO: 952246
aacucagaaauacuacacg

SEQ ID NO: 952248 - RNA, 19 nt, Artificial Sequence
  Description of Artificial Sequence: Synthetic oligonucleotide
  Sense strand starting at position 3237 of SEQ ID NO: 913765
ucugguuauuaaucaugua

SEQ ID NO: 952249 - RNA, 19 nt, Artificial Sequence
  Description of Artificial Sequence: Synthetic oligonucleotide
  Antisense strand to SEQ ID NO: 952248
uacaugauuaauaaccaga

SEQ ID NO: 952250 - RNA, 19 nt, Artificial Sequence
  Description of Artificial Sequence: Synthetic oligonucleotide
  Sense strand starting at position 3233 of SEQ ID NO: 913765
aguuucugguuauuaauca

SEQ ID NO: 952251 - RNA, 19 nt, Artificial Sequence
  Description of Artificial Sequence: Synthetic oligonucleotide
  Antisense strand to SEQ ID NO: 952250
ugauuaauaaccagaaacu

SEQ ID NO: 952252 - RNA, 19 nt, Artificial Sequence
  Description of Artificial Sequence: Synthetic oligonucleotide
  Sense strand starting at position 212 of SEQ ID NO: 913765
ugugaagccuacuugaacu

SEQ ID NO: 952253 - RNA, 19 nt, Artificial Sequence
  Description of Artificial Sequence: Synthetic oligonucleotide
  Antisense strand to SEQ ID NO: 952252
aguucaaguaggcuucaca

SEQ ID NO: 952254 - RNA, 19 nt, Artificial Sequence
  Description of Artificial Sequence: Synthetic oligonucleotide
  Sense strand starting at position 1532 of SEQ ID NO: 913765
acagaaaucugcgcaauca

SEQ ID NO: 952255 - RNA, 19 nt, Artificial Sequence
  Description of Artificial Sequence: Synthetic oligonucleotide
  Antisense strand to SEQ ID NO: 952254
ugauugcgcagauuucugu

SEQ ID NO: 952256 - RNA, 19 nt, Artificial Sequence
  Description of Artificial Sequence: Synthetic oligonucleotide
  Sense strand starting at position 2856 of SEQ ID NO: 913765
ggaccagucuccucuguag

SEQ ID NO: 952257 - RNA, 19 nt, Artificial Sequence
  Description of Artificial Sequence: Synthetic oligonucleotide
  Antisense strand to SEQ ID NO: 952256
cuacagaggagacuggucc

SEQ ID NO: 952258 - RNA, 19 nt, Artificial Sequence
  Description of Artificial Sequence: Synthetic oligonucleotide
  Sense strand starting at position 1594 of SEQ ID NO: 913765
gggcacaguucugcaggaa

SEQ ID NO: 952259 - RNA, 19 nt, Artificial Sequence
  Description of Artificial Sequence: Synthetic oligonucleotide
  Antisense strand to SEQ ID NO: 952258
uuccugcagaacugugccc

SEQ ID NO: 952260 - RNA, 19 nt, Artificial Sequence
  Description of Artificial Sequence: Synthetic oligonucleotide
  Sense strand starting at position 1324 of SEQ ID NO: 913765
guagucgcuaaaugggaaa

SEQ ID NO: 952261 - RNA, 19 nt, Artificial Sequence
  Description of Artificial Sequence: Synthetic oligonucleotide
  Antisense strand to SEQ ID NO: 952260
uuucccauuuagcgacuac

SEQ ID NO: 952262 - RNA, 19 nt, Artificial Sequence
  Description of Artificial Sequence: Synthetic oligonucleotide
  Sense strand starting at position 3267 of SEQ ID NO: 913765
guauguaucuuaguuacaa

SEQ ID NO: 952263 - RNA, 19 nt, Artificial Sequence
  Description of Artificial Sequence: Synthetic oligonucleotide
  Antisense strand to SEQ ID NO: 952262
uuguaacuaagauacauac

SEQ ID NO: 952264 - RNA, 19 nt, Artificial Sequence
  Description of Artificial Sequence: Synthetic oligonucleotide
  Sense strand starting at position 131 of SEQ ID NO: 913765
aauauugugcuggguugaa

SEQ ID NO: 952265 - RNA, 19 nt, Artificial Sequence
  Description of Artificial Sequence: Synthetic oligonucleotide
  Antisense strand to SEQ ID NO: 952264
uucaacccagcacaauauu

SEQ ID NO: 952266 - RNA, 19 nt, Artificial Sequence
  Description of Artificial Sequence: Synthetic oligonucleotide
  Sense strand starting at position 130 of SEQ ID NO: 913765
aaauauugugcuggguuga

SEQ ID NO: 952267 - RNA, 19 nt, Artificial Sequence
  Description of Artificial Sequence: Synthetic oligonucleotide
  Antisense strand to SEQ ID NO: 952266
ucaacccagcacaauauuu

SEQ ID NO: 952268 - RNA, 19 nt, Artificial Sequence
  Description of Artificial Sequence: Synthetic oligonucleotide
  Sense strand starting at position 2987 of SEQ ID NO: 913765
ugcuuaauuucugucgcca

SEQ ID NO: 952269 - RNA, 19 nt, Artificial Sequence
  Description of Artificial Sequence: Synthetic oligonucleotide
  Antisense strand to SEQ ID NO: 952268
uggcgacagaaauuaagca

SEQ ID NO: 952270 - RNA, 19 nt, Artificial Sequence
  Description of Artificial Sequence: Synthetic oligonucleotide
  Sense strand starting at position 1411 of SEQ ID NO: 913765
gccuuucucccuggaucaa

SEQ ID NO: 952271 - RNA, 19 nt, Artificial Sequence
  Description of Artificial Sequence: Synthetic oligonucleotide
  Antisense strand to SEQ ID NO: 952270
uugauccagggagaaaggc

SEQ ID NO: 952272 - RNA, 19 nt, Artificial Sequence
  Description of Artificial Sequence: Synthetic oligonucleotide
  Sense strand starting at position 3260 of SEQ ID NO: 913765
agugccaguauguaucuua

SEQ ID NO: 952273 - RNA, 19 nt, Artificial Sequence
  Description of Artificial Sequence: Synthetic oligonucleotide
  Antisense strand to SEQ ID NO: 952272
uaagauacauacuggcacu

SEQ ID NO: 952274 - RNA, 19 nt, Artificial Sequence
  Description of Artificial Sequence: Synthetic oligonucleotide
  Sense strand starting at position 417 of SEQ ID NO: 913765
uaagcacuugggugucaua

SEQ ID NO: 952275 - RNA, 19 nt, Artificial Sequence
  Description of Artificial Sequence: Synthetic oligonucleotide
  Antisense strand to SEQ ID NO: 952274
uaugacacccaagugcuua

SEQ ID NO: 952276 - RNA, 19 nt, Artificial Sequence
  Description of Artificial Sequence: Synthetic oligonucleotide
  Sense strand starting at position 3382 of SEQ ID NO: 913765
ggugauacacauugcaguu

SEQ ID NO: 952277 - RNA, 19 nt, Artificial Sequence
  Description of Artificial Sequence: Synthetic oligonucleotide
  Antisense strand to SEQ ID NO: 952276
aacugcaauguguaucacc

SEQ ID NO: 952278 - RNA, 19 nt, Artificial Sequence
  Description of Artificial Sequence: Synthetic oligonucleotide
  Sense strand starting at position 3418 of SEQ ID NO: 913765
ucauguugcaaaggauguu

SEQ ID NO: 952279 - RNA, 19 nt, Artificial Sequence
  Description of Artificial Sequence: Synthetic oligonucleotide
  Antisense strand to SEQ ID NO: 952278
aacauccuuugcaacauga

SEQ ID NO: 952280 - RNA, 19 nt, Artificial Sequence
  Description of Artificial Sequence: Synthetic oligonucleotide
  Sense strand starting at position 1422 of SEQ ID NO: 913765
uggaucaacugggaaugau

SEQ ID NO: 952281 - RNA, 19 nt, Artificial Sequence
  Description of Artificial Sequence: Synthetic oligonucleotide
  Antisense strand to SEQ ID NO: 952280
aucauucccaguugaucca

SEQ ID NO: 952282 - RNA, 19 nt, Artificial Sequence
  Description of Artificial Sequence: Synthetic oligonucleotide
  Sense strand starting at position 1529 of SEQ ID NO: 913765
cgaacagaaaucugcgcaa

SEQ ID NO: 952283 - RNA, 19 nt, Artificial Sequence
  Description of Artificial Sequence: Synthetic oligonucleotide
  Antisense strand to SEQ ID NO: 952282
uugcgcagauuucuguucg

SEQ ID NO: 952284 - RNA, 19 nt, Artificial Sequence
  Description of Artificial Sequence: Synthetic oligonucleotide
  Sense strand starting at position 1072 of SEQ ID NO: 913765
gcacuucuacuuugugaca

SEQ ID NO: 952285 - RNA, 19 nt, Artificial Sequence
  Description of Artificial Sequence: Synthetic oligonucleotide
  Antisense strand to SEQ ID NO: 952284
ugucacaaaguagaagugc

SEQ ID NO: 952286 - RNA, 19 nt, Artificial Sequence
  Description of Artificial Sequence: Synthetic oligonucleotide
  Sense strand starting at position 1410 of SEQ ID NO: 913765
ugccuuucucccuggauca

SEQ ID NO: 952287 - RNA, 19 nt, Artificial Sequence
  Description of Artificial Sequence: Synthetic oligonucleotide
  Antisense strand to SEQ ID NO: 952286
ugauccagggagaaaggca

SEQ ID NO: 952288 - RNA, 19 nt, Artificial Sequence
  Description of Artificial Sequence: Synthetic oligonucleotide
  Sense strand starting at position 1434 of SEQ ID NO: 913765
gaaugaugauaacagcaga

SEQ ID NO: 952289 - RNA, 19 nt, Artificial Sequence
  Description of Artificial Sequence: Synthetic oligonucleotide
  Antisense strand to SEQ ID NO: 952288
ucugcuguuaucaucauuc

SEQ ID NO: 952290 - RNA, 19 nt, Artificial Sequence
  Description of Artificial Sequence: Synthetic oligonucleotide
  Sense strand starting at position 3676 of SEQ ID NO: 913766
guauaauuucucuguccau

SEQ ID NO: 952291 - RNA, 19 nt, Artificial Sequence
  Description of Artificial Sequence: Synthetic oligonucleotide
  Antisense strand to SEQ ID NO: 952290
auggacagagaaauuauac

SEQ ID NO: 952292 - RNA, 19 nt, Artificial Sequence
  Description of Artificial Sequence: Synthetic oligonucleotide
  Sense strand starting at position 2843 of SEQ ID NO: 913766
guugaaugaggguauaccu

SEQ ID NO: 952293 - RNA, 19 nt, Artificial Sequence
  Description of Artificial Sequence: Synthetic oligonucleotide
  Antisense strand to SEQ ID NO: 952292
agguauacccucauucaac

SEQ ID NO: 952294 - RNA, 19 nt, Artificial Sequence
  Description of Artificial Sequence: Synthetic oligonucleotide
  Sense strand starting at position 2947 of SEQ ID NO: 913766
guuagcaaaguagauuaaa

SEQ ID NO: 952295 - RNA, 19 nt, Artificial Sequence
  Description of Artificial Sequence: Synthetic oligonucleotide
  Antisense strand to SEQ ID NO: 952294
uuuaaucuacuuugcuaac

SEQ ID NO: 952296 - RNA, 19 nt, Artificial Sequence
  Description of Artificial Sequence: Synthetic oligonucleotide
  Sense strand starting at position 3733 of SEQ ID NO: 913766
aaggauacuguaugauuau

SEQ ID NO: 952297 - RNA, 19 nt, Artificial Sequence
  Description of Artificial Sequence: Synthetic oligonucleotide
  Antisense strand to SEQ ID NO: 952296
auaaucauacaguauccuu

SEQ ID NO: 952298 - RNA, 19 nt, Artificial Sequence
  Description of Artificial Sequence: Synthetic oligonucleotide
  Sense strand starting at position 3217 of SEQ ID NO: 913766
ucaagugaacccuggaaua

SEQ ID NO: 952299 - RNA, 19 nt, Artificial Sequence
  Description of Artificial Sequence: Synthetic oligonucleotide
  Antisense strand to SEQ ID NO: 952298
uauuccaggguucacuuga

SEQ ID NO: 952300 - RNA, 19 nt, Artificial Sequence
  Description of Artificial Sequence: Synthetic oligonucleotide
  Sense strand starting at position 3833 of SEQ ID NO: 913766
cccaaagaauggguugauu

SEQ ID NO: 952301 - RNA, 19 nt, Artificial Sequence
  Description of Artificial Sequence: Synthetic oligonucleotide
  Antisense strand to SEQ ID NO: 952300
aaucaacccauucuuuggg

SEQ ID NO: 952302 - RNA, 19 nt, Artificial Sequence
  Description of Artificial Sequence: Synthetic oligonucleotide
  Sense strand starting at position 3835 of SEQ ID NO: 913766
caaagaauggguugauucu

SEQ ID NO: 952303 - RNA, 19 nt, Artificial Sequence
  Description of Artificial Sequence: Synthetic oligonucleotide
  Antisense strand to SEQ ID NO: 952302
agaaucaacccauucuuug

SEQ ID NO: 952304 - RNA, 19 nt, Artificial Sequence
  Description of Artificial Sequence: Synthetic oligonucleotide
  Sense strand starting at position 3148 of SEQ ID NO: 913766
gucggugaacccuaagaaa

SEQ ID NO: 952305 - RNA, 19 nt, Artificial Sequence
  Description of Artificial Sequence: Synthetic oligonucleotide
  Antisense strand to SEQ ID NO: 952304
uuucuuaggguucaccgac

SEQ ID NO: 952306 - RNA, 19 nt, Artificial Sequence
  Description of Artificial Sequence: Synthetic oligonucleotide
  Sense strand starting at position 3547 of SEQ ID NO: 913766
agauuagacucucuuuaug

SEQ ID NO: 952307 - RNA, 19 nt, Artificial Sequence
  Description of Artificial Sequence: Synthetic oligonucleotide
  Antisense strand to SEQ ID NO: 952306
cauaaagagagucuaaucu

SEQ ID NO: 952308 - RNA, 19 nt, Artificial Sequence
  Description of Artificial Sequence: Synthetic oligonucleotide
  Sense strand starting at position 2718 of SEQ ID NO: 913766
augaaauacccauggcaac

SEQ ID NO: 952309 - RNA, 19 nt, Artificial Sequence
  Description of Artificial Sequence: Synthetic oligonucleotide
  Antisense strand to SEQ ID NO: 952308
guugccauggguauuucau

SEQ ID NO: 952310 - RNA, 19 nt, Artificial Sequence
  Description of Artificial Sequence: Synthetic oligonucleotide
  Sense strand starting at position 3268 of SEQ ID NO: 913766
cagugugaucuugaaccag

SEQ ID NO: 952311 - RNA, 19 nt, Artificial Sequence
  Description of Artificial Sequence: Synthetic oligonucleotide
  Antisense strand to SEQ ID NO: 952310
cugguucaagaucacacug

SEQ ID NO: 952312 - RNA, 19 nt, Artificial Sequence
  Description of Artificial Sequence: Synthetic oligonucleotide
  Sense strand starting at position 441 of SEQ ID NO: 913766
ccagcauaccuggaucauu

SEQ ID NO: 952313 - RNA, 19 nt, Artificial Sequence
  Description of Artificial Sequence: Synthetic oligonucleotide
  Antisense strand to SEQ ID NO: 952312
aaugauccagguaugcugg

SEQ ID NO: 952314 - RNA, 19 nt, Artificial Sequence
  Description of Artificial Sequence: Synthetic oligonucleotide
  Sense strand starting at position 2638 of SEQ ID NO: 913766
cacagucuucuugagugaa

SEQ ID NO: 952315 - RNA, 19 nt, Artificial Sequence
  Description of Artificial Sequence: Synthetic oligonucleotide
  Antisense strand to SEQ ID NO: 952314
uucacucaagaagacugug

SEQ ID NO: 952316 - RNA, 19 nt, Artificial Sequence
  Description of Artificial Sequence: Synthetic oligonucleotide
  Sense strand starting at position 1816 of SEQ ID NO: 913766
auaucauuacuguaucagu

SEQ ID NO: 952317 - RNA, 19 nt, Artificial Sequence
  Description of Artificial Sequence: Synthetic oligonucleotide
  Antisense strand to SEQ ID NO: 952316
acugauacaguaaugauau

SEQ ID NO: 952318 - RNA, 19 nt, Artificial Sequence
  Description of Artificial Sequence: Synthetic oligonucleotide
  Sense strand starting at position 1071 of SEQ ID NO: 913766
aaggaaaugaggcguuaag

SEQ ID NO: 952319 - RNA, 19 nt, Artificial Sequence
  Description of Artificial Sequence: Synthetic oligonucleotide
  Antisense strand to SEQ ID NO: 952318
cuuaacgccucauuuccuu

SEQ ID NO: 952320 - RNA, 19 nt, Artificial Sequence
  Description of Artificial Sequence: Synthetic oligonucleotide
  Sense strand starting at position 3857 of SEQ ID NO: 913766
uuugguuacucaccaagga

SEQ ID NO: 952321 - RNA, 19 nt, Artificial Sequence
  Description of Artificial Sequence: Synthetic oligonucleotide
  Antisense strand to SEQ ID NO: 952320
uccuuggugaguaaccaaa

SEQ ID NO: 952322 - RNA, 19 nt, Artificial Sequence
  Description of Artificial Sequence: Synthetic oligonucleotide
  Sense strand starting at position 2404 of SEQ ID NO: 913766
aggagaauaucgcuugaac

SEQ ID NO: 952323 - RNA, 19 nt, Artificial Sequence
  Description of Artificial Sequence: Synthetic oligonucleotide
  Antisense strand to SEQ ID NO: 952322
guucaagcgauauucuccu

SEQ ID NO: 952324 - RNA, 19 nt, Artificial Sequence
  Description of Artificial Sequence: Synthetic oligonucleotide
  Sense strand starting at position 4 of SEQ ID NO: 913766
ugucuuuaccuguaagaac

SEQ ID NO: 952325 - RNA, 19 nt, Artificial Sequence
  Description of Artificial Sequence: Synthetic oligonucleotide
  Antisense strand to SEQ ID NO: 952324
guucuuacagguaaagaca

SEQ ID NO: 952326 - RNA, 19 nt, Artificial Sequence
  Description of Artificial Sequence: Synthetic oligonucleotide
  Sense strand starting at position 1811 of SEQ ID NO: 913766
agcuuauaucauuacugua

SEQ ID NO: 952327 - RNA, 19 nt, Artificial Sequence
  Description of Artificial Sequence: Synthetic oligonucleotide
  Antisense strand to SEQ ID NO: 952326
uacaguaaugauauaagcu

SEQ ID NO: 952328 - RNA, 19 nt, Artificial Sequence
  Description of Artificial Sequence: Synthetic oligonucleotide
  Sense strand starting at position 2406 of SEQ ID NO: 913766
gagaauaucgcuugaacca

SEQ ID NO: 952329 - RNA, 19 nt, Artificial Sequence
  Description of Artificial Sequence: Synthetic oligonucleotide
  Antisense strand to SEQ ID NO: 952328
ugguucaagcgauauucuc

SEQ ID NO: 952330 - RNA, 19 nt, Artificial Sequence
  Description of Artificial Sequence: Synthetic oligonucleotide
  Sense strand starting at position 3970 of SEQ ID NO: 913766
agcaauuccagaggagcau

SEQ ID NO: 952331 - RNA, 19 nt, Artificial Sequence
  Description of Artificial Sequence: Synthetic oligonucleotide
  Antisense strand to SEQ ID NO: 952330
augcuccucuggaauugcu

SEQ ID NO: 952332 - RNA, 19 nt, Artificial Sequence
  Description of Artificial Sequence: Synthetic oligonucleotide
  Sense strand starting at position 3047 of SEQ ID NO: 913766
augggcauuuauuaaauga

SEQ ID NO: 952333 - RNA, 19 nt, Artificial Sequence
  Description of Artificial Sequence: Synthetic oligonucleotide
  Antisense strand to SEQ ID NO: 952332
ucauuuaauaaaugcccau

SEQ ID NO: 952334 - RNA, 19 nt, Artificial Sequence
  Description of Artificial Sequence: Synthetic oligonucleotide
  Sense strand starting at position 3956 of SEQ ID NO: 913766
uuaaguuuacugggagcaa

SEQ ID NO: 952335 - RNA, 19 nt, Artificial Sequence
  Description of Artificial Sequence: Synthetic oligonucleotide
  Antisense strand to SEQ ID NO: 952334
uugcucccaguaaacuuaa

SEQ ID NO: 952336 - RNA, 19 nt, Artificial Sequence
  Description of Artificial Sequence: Synthetic oligonucleotide
  Sense strand starting at position 3709 of SEQ ID NO: 913766
ggcucuuugauauggacca

SEQ ID NO: 952337 - RNA, 19 nt, Artificial Sequence
  Description of Artificial Sequence: Synthetic oligonucleotide
  Antisense strand to SEQ ID NO: 952336
ugguccauaucaaagagcc

SEQ ID NO: 952338 - RNA, 19 nt, Artificial Sequence
  Description of Artificial Sequence: Synthetic oligonucleotide
  Sense strand starting at position 3065 of SEQ ID NO: 913766
aggauuagguguguccaga

SEQ ID NO: 952339 - RNA, 19 nt, Artificial Sequence
  Description of Artificial Sequence: Synthetic oligonucleotide
  Antisense strand to SEQ ID NO: 952338
ucuggacacaccuaauccu

SEQ ID NO: 952340 - RNA, 19 nt, Artificial Sequence
  Description of Artificial Sequence: Synthetic oligonucleotide
  Sense strand starting at position 3264 of SEQ ID NO: 913766
cucacagugugaucuugaa

SEQ ID NO: 952341 - RNA, 19 nt, Artificial Sequence
  Description of Artificial Sequence: Synthetic oligonucleotide
  Antisense strand to SEQ ID NO: 952340
uucaagaucacacugugag

SEQ ID NO: 952342 - RNA, 19 nt, Artificial Sequence
  Description of Artificial Sequence: Synthetic oligonucleotide
  Sense strand starting at position 1613 of SEQ ID NO: 913766
gcacgaucauggucagaaa

SEQ ID NO: 952343 - RNA, 19 nt, Artificial Sequence
  Description of Artificial Sequence: Synthetic oligonucleotide
  Antisense strand to SEQ ID NO: 952342
uuucugaccaugaucgugc

SEQ ID NO: 952344 - RNA, 19 nt, Artificial Sequence
  Description of Artificial Sequence: Synthetic oligonucleotide
  Sense strand starting at position 3435 of SEQ ID NO: 913766
aggcauguagcuuacacau

SEQ ID NO: 952345 - RNA, 19 nt, Artificial Sequence
  Description of Artificial Sequence: Synthetic oligonucleotide
  Antisense strand to SEQ ID NO: 952344
auguguaagcuacaugccu

SEQ ID NO: 952346 - RNA, 19 nt, Artificial Sequence
  Description of Artificial Sequence: Synthetic oligonucleotide
  Sense strand starting at position 3064 of SEQ ID NO: 913766
gaggauuagguguguccag

SEQ ID NO: 952347 - RNA, 19 nt, Artificial Sequence
  Description of Artificial Sequence: Synthetic oligonucleotide
  Antisense strand to SEQ ID NO: 952346
cuggacacaccuaauccuc

SEQ ID NO: 952348 - RNA, 19 nt, Artificial Sequence
  Description of Artificial Sequence: Synthetic oligonucleotide
  Sense strand starting at position 1758 of SEQ ID NO: 913766
agugaugucacguacuuag

SEQ ID NO: 952349 - RNA, 19 nt, Artificial Sequence
  Description of Artificial Sequence: Synthetic oligonucleotide
  Antisense strand to SEQ ID NO: 952348
cuaaguacgugacaucacu

SEQ ID NO: 952350 - RNA, 19 nt, Artificial Sequence
  Description of Artificial Sequence: Synthetic oligonucleotide
  Sense strand starting at position 1657 of SEQ ID NO: 913766
ucuuaacagcugugagacu

SEQ ID NO: 952351 - RNA, 19 nt, Artificial Sequence
  Description of Artificial Sequence: Synthetic oligonucleotide
  Antisense strand to SEQ ID NO: 952350
agucucacagcuguuaaga

SEQ ID NO: 952352 - RNA, 19 nt, Artificial Sequence
  Description of Artificial Sequence: Synthetic oligonucleotide
  Sense strand starting at position 3841 of SEQ ID NO: 913766
auggguugauucucaguuu

SEQ ID NO: 952353 - RNA, 19 nt, Artificial Sequence
  Description of Artificial Sequence: Synthetic oligonucleotide
  Antisense strand to SEQ ID NO: 952352
aaacugagaaucaacccau

SEQ ID NO: 952354 - RNA, 19 nt, Artificial Sequence
  Description of Artificial Sequence: Synthetic oligonucleotide
  Sense strand starting at position 91 of SEQ ID NO: 913766
aucuaauucucaguuugua

SEQ ID NO: 952355 - RNA, 19 nt, Artificial Sequence
  Description of Artificial Sequence: Synthetic oligonucleotide
  Antisense strand to SEQ ID NO: 952354
uacaaacugagaauuagau

SEQ ID NO: 952356 - RNA, 19 nt, Artificial Sequence
  Description of Artificial Sequence: Synthetic oligonucleotide
  Sense strand starting at position 1203 of SEQ ID NO: 913766
agagacaauuuagguguaa

SEQ ID NO: 952357 - RNA, 19 nt, Artificial Sequence
  Description of Artificial Sequence: Synthetic oligonucleotide
  Antisense strand to SEQ ID NO: 952356
uuacaccuaaauugucucu

SEQ ID NO: 952358 - RNA, 19 nt, Artificial Sequence
  Description of Artificial Sequence: Synthetic oligonucleotide
  Sense strand starting at position 1553 of SEQ ID NO: 913766
auugguggucauuguuaaa

SEQ ID NO: 952359 - RNA, 19 nt, Artificial Sequence
  Description of Artificial Sequence: Synthetic oligonucleotide
  Antisense strand to SEQ ID NO: 952358
uuuaacaaugaccaccaau

SEQ ID NO: 952360 - RNA, 19 nt, Artificial Sequence
  Description of Artificial Sequence: Synthetic oligonucleotide
  Sense strand starting at position 3491 of SEQ ID NO: 913766
auguguuguaugcaauuag

SEQ ID NO: 952361 - RNA, 19 nt, Artificial Sequence
  Description of Artificial Sequence: Synthetic oligonucleotide
  Antisense strand to SEQ ID NO: 952360
cuaauugcauacaacacau

SEQ ID NO: 952362 - RNA, 19 nt, Artificial Sequence
  Description of Artificial Sequence: Synthetic oligonucleotide
  Sense strand starting at position 2781 of SEQ ID NO: 913766
gaaagagcacgugguaauu

SEQ ID NO: 952363 - RNA, 19 nt, Artificial Sequence
  Description of Artificial Sequence: Synthetic oligonucleotide
  Antisense strand to SEQ ID NO: 952362
aauuaccacgugcucuuuc

SEQ ID NO: 952364 - RNA, 19 nt, Artificial Sequence
  Description of Artificial Sequence: Synthetic oligonucleotide
  Sense strand starting at position 163 of SEQ ID NO: 913766
gaaugaagauuagaagagu

SEQ ID NO: 952365 - RNA, 19 nt, Artificial Sequence
  Description of Artificial Sequence: Synthetic oligonucleotide
  Antisense strand to SEQ ID NO: 952364
acucuucuaaucuucauuc

SEQ ID NO: 952366 - RNA, 19 nt, Artificial Sequence
  Description of Artificial Sequence: Synthetic oligonucleotide
  Sense strand starting at position 1695 of SEQ ID NO: 913766
uugguuaucucaucuguaa

SEQ ID NO: 952367 - RNA, 19 nt, Artificial Sequence
  Description of Artificial Sequence: Synthetic oligonucleotide
  Antisense strand to SEQ ID NO: 952366
uuacagaugagauaaccaa

SEQ ID NO: 952368 - RNA, 19 nt, Artificial Sequence
  Description of Artificial Sequence: Synthetic oligonucleotide
  Sense strand starting at position 3020 of SEQ ID NO: 913766
cuguccuucuccuuaggau

SEQ ID NO: 952369 - RNA, 19 nt, Artificial Sequence
  Description of Artificial Sequence: Synthetic oligonucleotide
  Antisense strand to SEQ ID NO: 952368
auccuaaggagaaggacag

SEQ ID NO: 952370 - RNA, 19 nt, Artificial Sequence
  Description of Artificial Sequence: Synthetic oligonucleotide
  Sense strand starting at position 2547 of SEQ ID NO: 913767
cucauaugugcgucaguca

SEQ ID NO: 952371 - RNA, 19 nt, Artificial Sequence
  Description of Artificial Sequence: Synthetic oligonucleotide
  Antisense strand to SEQ ID NO: 952370
ugacugacgcacauaugag

SEQ ID NO: 952372 - RNA, 19 nt, Artificial Sequence
  Description of Artificial Sequence: Synthetic oligonucleotide
  Sense strand starting at position 2915 of SEQ ID NO: 913767
uaaggaguccucugggaag

SEQ ID NO: 952373 - RNA, 19 nt, Artificial Sequence
  Description of Artificial Sequence: Synthetic oligonucleotide
  Antisense strand to SEQ ID NO: 952372
cuucccagaggacuccuua

SEQ ID NO: 952374 - RNA, 19 nt, Artificial Sequence
  Description of Artificial Sequence: Synthetic oligonucleotide
  Sense strand starting at position 2772 of SEQ ID NO: 913767
uggcaauaguguccaauuu

SEQ ID NO: 952375 - RNA, 19 nt, Artificial Sequence
  Description of Artificial Sequence: Synthetic oligonucleotide
  Antisense strand to SEQ ID NO: 952374
aaauuggacacuauugcca

SEQ ID NO: 952376 - RNA, 19 nt, Artificial Sequence
  Description of Artificial Sequence: Synthetic oligonucleotide
  Sense strand starting at position 1765 of SEQ ID NO: 913767
acacucugccucuaggaga

SEQ ID NO: 952377 - RNA, 19 nt, Artificial Sequence
  Description of Artificial Sequence: Synthetic oligonucleotide
  Antisense strand to SEQ ID NO: 952376
ucuccuagaggcagagugu

SEQ ID NO: 952378 - RNA, 19 nt, Artificial Sequence
  Description of Artificial Sequence: Synthetic oligonucleotide
  Sense strand starting at position 2627 of SEQ ID NO: 913767
ccuacugucaccgagaaag

SEQ ID NO: 952379 - RNA, 19 nt, Artificial Sequence
  Description of Artificial Sequence: Synthetic oligonucleotide
  Antisense strand to SEQ ID NO: 952378
cuuucucggugacaguagg

SEQ ID NO: 952380 - RNA, 19 nt, Artificial Sequence
  Description of Artificial Sequence: Synthetic oligonucleotide
  Sense strand starting at position 2714 of SEQ ID NO: 913767
ggagucaaacucuggaauc

SEQ ID NO: 952381 - RNA, 19 nt, Artificial Sequence
  Description of Artificial Sequence: Synthetic oligonucleotide
  Antisense strand to SEQ ID NO: 952380
gauuccagaguuugacucc

SEQ ID NO: 952382 - RNA, 19 nt, Artificial Sequence
  Description of Artificial Sequence: Synthetic oligonucleotide
  Sense strand starting at position 2685 of SEQ ID NO: 913767
uuugcagaggcuuagagaa

SEQ ID NO: 952383 - RNA, 19 nt, Artificial Sequence
  Description of Artificial Sequence: Synthetic oligonucleotide
  Antisense strand to SEQ ID NO: 952382
uucucuaagccucugcaaa

SEQ ID NO: 952384 - RNA, 19 nt, Artificial Sequence
  Description of Artificial Sequence: Synthetic oligonucleotide
  Sense strand starting at position 601 of SEQ ID NO: 913767
ucuuucuuccaagggauag

SEQ ID NO: 952385 - RNA, 19 nt, Artificial Sequence
  Description of Artificial Sequence: Synthetic oligonucleotide
  Antisense strand to SEQ ID NO: 952384
cuaucccuuggaagaaaga

SEQ ID NO: 952386 - RNA, 19 nt, Artificial Sequence
  Description of Artificial Sequence: Synthetic oligonucleotide
  Sense strand starting at position 2502 of SEQ ID NO: 913767
ccaguagguguccaaauaa

SEQ ID NO: 952387 - RNA, 19 nt, Artificial Sequence
  Description of Artificial Sequence: Synthetic oligonucleotide
  Antisense strand to SEQ ID NO: 952386
uuauuuggacaccuacugg

SEQ ID NO: 952388 - RNA, 19 nt, Artificial Sequence
  Description of Artificial Sequence: Synthetic oligonucleotide
  Sense strand starting at position 3255 of SEQ ID NO: 913767
uuugaaauuccuggaguga

SEQ ID NO: 952389 - RNA, 19 nt, Artificial Sequence
  Description of Artificial Sequence: Synthetic oligonucleotide
  Antisense strand to SEQ ID NO: 952388
ucacuccaggaauuucaaa

SEQ ID NO: 952390 - RNA, 19 nt, Artificial Sequence
  Description of Artificial Sequence: Synthetic oligonucleotide
  Sense strand starting at position 3274 of SEQ ID NO: 913767
aguggaaagcucuggauaa

SEQ ID NO: 952391 - RNA, 19 nt, Artificial Sequence
  Description of Artificial Sequence: Synthetic oligonucleotide
  Antisense strand to SEQ ID NO: 952390
uuauccagagcuuuccacu

SEQ ID NO: 952392 - RNA, 19 nt, Artificial Sequence
  Description of Artificial Sequence: Synthetic oligonucleotide
  Sense strand starting at position 2373 of SEQ ID NO: 913767
accuaugacuacucagagu

SEQ ID NO: 952393 - RNA, 19 nt, Artificial Sequence
  Description of Artificial Sequence: Synthetic oligonucleotide
  Antisense strand to SEQ ID NO: 952392
acucugaguagucauaggu

SEQ ID NO: 952394 - RNA, 19 nt, Artificial Sequence
  Description of Artificial Sequence: Synthetic oligonucleotide
  Sense strand starting at position 3759 of SEQ ID NO: 913767
acaucaaaccucugaggca

SEQ ID NO: 952395 - RNA, 19 nt, Artificial Sequence
  Description of Artificial Sequence: Synthetic oligonucleotide
  Antisense strand to SEQ ID NO: 952394
ugccucagagguuugaugu

SEQ ID NO: 952396 - RNA, 19 nt, Artificial Sequence
  Description of Artificial Sequence: Synthetic oligonucleotide
  Sense strand starting at position 1278 of SEQ ID NO: 913767
cucguauuccuccgaauuu

SEQ ID NO: 952397 - RNA, 19 nt, Artificial Sequence
  Description of Artificial Sequence: Synthetic oligonucleotide
  Antisense strand to SEQ ID NO: 952396
aaauucggaggaauacgag

SEQ ID NO: 952398 - RNA, 19 nt, Artificial Sequence
  Description of Artificial Sequence: Synthetic oligonucleotide
  Sense strand starting at position 3709 of SEQ ID NO: 913767
uuuauugaggcuuaagcau

SEQ ID NO: 952399 - RNA, 19 nt, Artificial Sequence
  Description of Artificial Sequence: Synthetic oligonucleotide
  Antisense strand to SEQ ID NO: 952398
augcuuaagccucaauaaa

SEQ ID NO: 952400 - RNA, 19 nt, Artificial Sequence
  Description of Artificial Sequence: Synthetic oligonucleotide
  Sense strand starting at position 2454 of SEQ ID NO: 913767
ggagcaauaaggugugaug

SEQ ID NO: 952401 - RNA, 19 nt, Artificial Sequence
  Description of Artificial Sequence: Synthetic oligonucleotide
  Antisense strand to SEQ ID NO: 952400
caucacaccuuauugcucc

SEQ ID NO: 952402 - RNA, 19 nt, Artificial Sequence
  Description of Artificial Sequence: Synthetic oligonucleotide
  Sense strand starting at position 3924 of SEQ ID NO: 913767
ugaccugguaucugugaaa

SEQ ID NO: 952403 - RNA, 19 nt, Artificial Sequence
  Description of Artificial Sequence: Synthetic oligonucleotide
  Antisense strand to SEQ ID NO: 952402
uuucacagauaccagguca

SEQ ID NO: 952404 - RNA, 19 nt, Artificial Sequence
  Description of Artificial Sequence: Synthetic oligonucleotide
  Sense strand starting at position 2626 of SEQ ID NO: 913767
uccuacugucaccgagaaa

SEQ ID NO: 952405 - RNA, 19 nt, Artificial Sequence
  Description of Artificial Sequence: Synthetic oligonucleotide
  Antisense strand to SEQ ID NO: 952404
uuucucggugacaguagga

SEQ ID NO: 952406 - RNA, 19 nt, Artificial Sequence
  Description of Artificial Sequence: Synthetic oligonucleotide
  Sense strand starting at position 3158 of SEQ ID NO: 913767
ggaagaggguaguugcuau

SEQ ID NO: 952407 - RNA, 19 nt, Artificial Sequence
  Description of Artificial Sequence: Synthetic oligonucleotide
  Antisense strand to SEQ ID NO: 952406
auagcaacuacccucuucc

SEQ ID NO: 952408 - RNA, 19 nt, Artificial Sequence
  Description of Artificial Sequence: Synthetic oligonucleotide
  Sense strand starting at position 324 of SEQ ID NO: 913767
aagggagucuuguuuccau

SEQ ID NO: 952409 - RNA, 19 nt, Artificial Sequence
  Description of Artificial Sequence: Synthetic oligonucleotide
  Antisense strand to SEQ ID NO: 952408
auggaaacaagacucccuu

SEQ ID NO: 952410 - RNA, 19 nt, Artificial Sequence
  Description of Artificial Sequence: Synthetic oligonucleotide
  Sense strand starting at position 1919 of SEQ ID NO: 913767
aucccagacuguucuucua

SEQ ID NO: 952411 - RNA, 19 nt, Artificial Sequence
  Description of Artificial Sequence: Synthetic oligonucleotide
  Antisense strand to SEQ ID NO: 952410
uagaagaacagucugggau

SEQ ID NO: 952412 - RNA, 19 nt, Artificial Sequence
  Description of Artificial Sequence: Synthetic oligonucleotide
  Sense strand starting at position 3398 of SEQ ID NO: 913767
agacguagcccuggagaca

SEQ ID NO: 952413 - RNA, 19 nt, Artificial Sequence
  Description of Artificial Sequence: Synthetic oligonucleotide
  Antisense strand to SEQ ID NO: 952412
ugucuccagggcuacgucu

SEQ ID NO: 952414 - RNA, 19 nt, Artificial Sequence
  Description of Artificial Sequence: Synthetic oligonucleotide
  Sense strand starting at position 2625 of SEQ ID NO: 913767
cuccuacugucaccgagaa

SEQ ID NO: 952415 - RNA, 19 nt, Artificial Sequence
  Description of Artificial Sequence: Synthetic oligonucleotide
  Antisense strand to SEQ ID NO: 952414
uucucggugacaguaggag

SEQ ID NO: 952416 - RNA, 19 nt, Artificial Sequence
  Description of Artificial Sequence: Synthetic oligonucleotide
  Sense strand starting at position 1379 of SEQ ID NO: 913767
cagaguucccaagagucgu

SEQ ID NO: 952417 - RNA, 19 nt, Artificial Sequence
  Description of Artificial Sequence: Synthetic oligonucleotide
  Antisense strand to SEQ ID NO: 952416
acgacucuugggaacucug

SEQ ID NO: 952418 - RNA, 19 nt, Artificial Sequence
  Description of Artificial Sequence: Synthetic oligonucleotide
  Sense strand starting at position 2501 of SEQ ID NO: 913767
cccaguagguguccaaaua

SEQ ID NO: 952419 - RNA, 19 nt, Artificial Sequence
  Description of Artificial Sequence: Synthetic oligonucleotide
  Antisense strand to SEQ ID NO: 952418
uauuuggacaccuacuggg

SEQ ID NO: 952420 - RNA, 19 nt, Artificial Sequence
  Description of Artificial Sequence: Synthetic oligonucleotide
  Sense strand starting at position 350 of SEQ ID NO: 913767
aagucagcgcuuuaagaau

SEQ ID NO: 952421 - RNA, 19 nt, Artificial Sequence
  Description of Artificial Sequence: Synthetic oligonucleotide
  Antisense strand to SEQ ID NO: 952420
auucuuaaagcgcugacuu

SEQ ID NO: 952422 - RNA, 19 nt, Artificial Sequence
  Description of Artificial Sequence: Synthetic oligonucleotide
  Sense strand starting at position 2977 of SEQ ID NO: 913767
gaguaugacuaaguugucu

SEQ ID NO: 952423 - RNA, 19 nt, Artificial Sequence
  Description of Artificial Sequence: Synthetic oligonucleotide
  Antisense strand to SEQ ID NO: 952422
agacaacuuagucauacuc

SEQ ID NO: 952424 - RNA, 19 nt, Artificial Sequence
  Description of Artificial Sequence: Synthetic oligonucleotide
  Sense strand starting at position 3923 of SEQ ID NO: 913767
gugaccugguaucugugaa

SEQ ID NO: 952425 - RNA, 19 nt, Artificial Sequence
  Description of Artificial Sequence: Synthetic oligonucleotide
  Antisense strand to SEQ ID NO: 952424
uucacagauaccaggucac

SEQ ID NO: 952426 - RNA, 19 nt, Artificial Sequence
  Description of Artificial Sequence: Synthetic oligonucleotide
  Sense strand starting at position 744 of SEQ ID NO: 913767
augugucucuauccuugaa

SEQ ID NO: 952427 - RNA, 19 nt, Artificial Sequence
  Description of Artificial Sequence: Synthetic oligonucleotide
  Antisense strand to SEQ ID NO: 952426
uucaaggauagagacacau

SEQ ID NO: 952428 - RNA, 19 nt, Artificial Sequence
  Description of Artificial Sequence: Synthetic oligonucleotide
  Sense strand starting at position 1664 of SEQ ID NO: 913767
cugagaaacuaggauggau

SEQ ID NO: 952429 - RNA, 19 nt, Artificial Sequence
  Description of Artificial Sequence: Synthetic oligonucleotide
  Antisense strand to SEQ ID NO: 952428
auccauccuaguuucucag

SEQ ID NO: 952430 - RNA, 19 nt, Artificial Sequence
  Description of Artificial Sequence: Synthetic oligonucleotide
  Sense strand starting at position 849 of SEQ ID NO: 913767
gggcaaugugcucaagguc

SEQ ID NO: 952431 - RNA, 19 nt, Artificial Sequence
  Description of Artificial Sequence: Synthetic oligonucleotide
  Antisense strand to SEQ ID NO: 952430
gaccuugagcacauugccc

SEQ ID NO: 952432 - RNA, 19 nt, Artificial Sequence
  Description of Artificial Sequence: Synthetic oligonucleotide
  Sense strand starting at position 852 of SEQ ID NO: 913767
caaugugcucaaggucaca

SEQ ID NO: 952433 - RNA, 19 nt, Artificial Sequence
  Description of Artificial Sequence: Synthetic oligonucleotide
  Antisense strand to SEQ ID NO: 952432
ugugaccuugagcacauug

SEQ ID NO: 952434 - RNA, 19 nt, Artificial Sequence
  Description of Artificial Sequence: Synthetic oligonucleotide
  Sense strand starting at position 2825 of SEQ ID NO: 913767
gugcuugguaaaugauacu

SEQ ID NO: 952435 - RNA, 19 nt, Artificial Sequence
  Description of Artificial Sequence: Synthetic oligonucleotide
  Antisense strand to SEQ ID NO: 952434
aguaucauuuaccaagcac

SEQ ID NO: 952436 - RNA, 19 nt, Artificial Sequence
  Description of Artificial Sequence: Synthetic oligonucleotide
  Sense strand starting at position 2890 of SEQ ID NO: 913767
uuguuaaaucgucaugguu

SEQ ID NO: 952437 - RNA, 19 nt, Artificial Sequence
  Description of Artificial Sequence: Synthetic oligonucleotide
  Antisense strand to SEQ ID NO: 952436
aaccaugacgauuuaacaa

SEQ ID NO: 952438 - RNA, 19 nt, Artificial Sequence
  Description of Artificial Sequence: Synthetic oligonucleotide
  Sense strand starting at position 3254 of SEQ ID NO: 913767
auuugaaauuccuggagug

SEQ ID NO: 952439 - RNA, 19 nt, Artificial Sequence
  Description of Artificial Sequence: Synthetic oligonucleotide
  Antisense strand to SEQ ID NO: 952438
cacuccaggaauuucaaau

SEQ ID NO: 952440 - RNA, 19 nt, Artificial Sequence
  Description of Artificial Sequence: Synthetic oligonucleotide
  Sense strand starting at position 3716 of SEQ ID NO: 913767
aggcuuaagcauugcacaa

SEQ ID NO: 952441 - RNA, 19 nt, Artificial Sequence
  Description of Artificial Sequence: Synthetic oligonucleotide
  Antisense strand to SEQ ID NO: 952440
uugugcaaugcuuaagccu

SEQ ID NO: 952442 - RNA, 19 nt, Artificial Sequence
  Description of Artificial Sequence: Synthetic oligonucleotide
  Sense strand starting at position 746 of SEQ ID NO: 913767
gugucucuauccuugaauu

SEQ ID NO: 952443 - RNA, 19 nt, Artificial Sequence
  Description of Artificial Sequence: Synthetic oligonucleotide
  Antisense strand to SEQ ID NO: 952442
aauucaaggauagagacac

SEQ ID NO: 952444 - RNA, 19 nt, Artificial Sequence
  Description of Artificial Sequence: Synthetic oligonucleotide
  Sense strand starting at position 1203 of SEQ ID NO: 913767
guuucuaugcgugaaucac

SEQ ID NO: 952445 - RNA, 19 nt, Artificial Sequence
  Description of Artificial Sequence: Synthetic oligonucleotide
  Antisense strand to SEQ ID NO: 952444
gugauucacgcauagaaac

SEQ ID NO: 952446 - RNA, 19 nt, Artificial Sequence
  Description of Artificial Sequence: Synthetic oligonucleotide
  Sense strand starting at position 3354 of SEQ ID NO: 913767
caguguaagugccuuggaa

SEQ ID NO: 952447 - RNA, 19 nt, Artificial Sequence
  Description of Artificial Sequence: Synthetic oligonucleotide
  Antisense strand to SEQ ID NO: 952446
uuccaaggcacuuacacug

SEQ ID NO: 952448 - RNA, 19 nt, Artificial Sequence
  Description of Artificial Sequence: Synthetic oligonucleotide
  Sense strand starting at position 2651 of SEQ ID NO: 913767
gcccaaagcucaucagcua

SEQ ID NO: 952449 - RNA, 19 nt, Artificial Sequence
  Description of Artificial Sequence: Synthetic oligonucleotide
  Antisense strand to SEQ ID NO: 952448
uagcugaugagcuuugggc

SEQ ID NO: 952450 - RNA, 19 nt, Artificial Sequence
  Description of Artificial Sequence: Synthetic oligonucleotide
  Sense strand starting at position 2878 of SEQ ID NO: 913768
cguucuggucgagcuuaau

SEQ ID NO: 952451 - RNA, 19 nt, Artificial Sequence
  Description of Artificial Sequence: Synthetic oligonucleotide
  Antisense strand to SEQ ID NO: 952450
auuaagcucgaccagaacg

SEQ ID NO: 952452 - RNA, 19 nt, Artificial Sequence
  Description of Artificial Sequence: Synthetic oligonucleotide
  Sense strand starting at position 2833 of SEQ ID NO: 913768
cuauguuagaaacgagaga

SEQ ID NO: 952453 - RNA, 19 nt, Artificial Sequence
  Description of Artificial Sequence: Synthetic oligonucleotide
  Antisense strand to SEQ ID NO: 952452
ucucucguuucuaacauag

SEQ ID NO: 952454 - RNA, 19 nt, Artificial Sequence
  Description of Artificial Sequence: Synthetic oligonucleotide
  Sense strand starting at position 3982 of SEQ ID NO: 913768
caggaagucuuccuggaac

SEQ ID NO: 952455 - RNA, 19 nt, Artificial Sequence
  Description of Artificial Sequence: Synthetic oligonucleotide
  Antisense strand to SEQ ID NO: 952454
guuccaggaagacuuccug

SEQ ID NO: 952456 - RNA, 19 nt, Artificial Sequence
  Description of Artificial Sequence: Synthetic oligonucleotide
  Sense strand starting at position 2752 of SEQ ID NO: 913768
agaacagugaccggauacu

SEQ ID NO: 952457 - RNA, 19 nt, Artificial Sequence
  Description of Artificial Sequence: Synthetic oligonucleotide
  Antisense strand to SEQ ID NO: 952456
aguauccggucacuguucu

SEQ ID NO: 952458 - RNA, 19 nt, Artificial Sequence
  Description of Artificial Sequence: Synthetic oligonucleotide
  Sense strand starting at position 828 of SEQ ID NO: 913768
ccagauugcgaccaauauc

SEQ ID NO: 952459 - RNA, 19 nt, Artificial Sequence
  Description of Artificial Sequence: Synthetic oligonucleotide
  Antisense strand to SEQ ID NO: 952458
gauauuggucgcaaucugg

SEQ ID NO: 952460 - RNA, 19 nt, Artificial Sequence
  Description of Artificial Sequence: Synthetic oligonucleotide
  Sense strand starting at position 3450 of SEQ ID NO: 913768
ucauccuugggcuaagagu

SEQ ID NO: 952461 - RNA, 19 nt, Artificial Sequence
  Description of Artificial Sequence: Synthetic oligonucleotide
  Antisense strand to SEQ ID NO: 952460
acucuuagcccaaggauga

SEQ ID NO: 952462 - RNA, 19 nt, Artificial Sequence
  Description of Artificial Sequence: Synthetic oligonucleotide
  Sense strand starting at position 1171 of SEQ ID NO: 913768
ugaggucuggcccacuaau

SEQ ID NO: 952463 - RNA, 19 nt, Artificial Sequence
  Description of Artificial Sequence: Synthetic oligonucleotide
  Antisense strand to SEQ ID NO: 952462
auuagugggccagaccuca

SEQ ID NO: 952464 - RNA, 19 nt, Artificial Sequence
  Description of Artificial Sequence: Synthetic oligonucleotide
  Sense strand starting at position 462 of SEQ ID NO: 913768
agcagagagucaguauaac

SEQ ID NO: 952465 - RNA, 19 nt, Artificial Sequence
  Description of Artificial Sequence: Synthetic oligonucleotide
  Antisense strand to SEQ ID NO: 952464
guuauacugacucucugcu

SEQ ID NO: 952466 - RNA, 19 nt, Artificial Sequence
  Description of Artificial Sequence: Synthetic oligonucleotide
  Sense strand starting at position 3141 of SEQ ID NO: 913768
uuuggcugagucugaaaga

SEQ ID NO: 952467 - RNA, 19 nt, Artificial Sequence
  Description of Artificial Sequence: Synthetic oligonucleotide
  Antisense strand to SEQ ID NO: 952466
ucuuucagacucagccaaa

SEQ ID NO: 952468 - RNA, 19 nt, Artificial Sequence
  Description of Artificial Sequence: Synthetic oligonucleotide
  Sense strand starting at position 3411 of SEQ ID NO: 913768
ggaaauuucugugaaguaa

SEQ ID NO: 952469 - RNA, 19 nt, Artificial Sequence
  Description of Artificial Sequence: Synthetic oligonucleotide
  Antisense strand to SEQ ID NO: 952468
uuacuucacagaaauuucc

SEQ ID NO: 952470 - RNA, 19 nt, Artificial Sequence
  Description of Artificial Sequence: Synthetic oligonucleotide
  Sense strand starting at position 2250 of SEQ ID NO: 913768
ggguuaaguccuuaccagu

SEQ ID NO: 952471 - RNA, 19 nt, Artificial Sequence
  Description of Artificial Sequence: Synthetic oligonucleotide
  Antisense strand to SEQ ID NO: 952470
acugguaaggacuuaaccc

SEQ ID NO: 952472 - RNA, 19 nt, Artificial Sequence
  Description of Artificial Sequence: Synthetic oligonucleotide
  Sense strand starting at position 2162 of SEQ ID NO: 913768
gaaucaggccaguggagua

SEQ ID NO: 952473 - RNA, 19 nt, Artificial Sequence
  Description of Artificial Sequence: Synthetic oligonucleotide
  Antisense strand to SEQ ID NO: 952472
uacuccacuggccugauuc

SEQ ID NO: 952474 - RNA, 19 nt, Artificial Sequence
  Description of Artificial Sequence: Synthetic oligonucleotide
  Sense strand starting at position 3119 of SEQ ID NO: 913768
uuaacacucgccuggaaga

SEQ ID NO: 952475 - RNA, 19 nt, Artificial Sequence
  Description of Artificial Sequence: Synthetic oligonucleotide
  Antisense strand to SEQ ID NO: 952474
ucuuccaggcgaguguuaa

SEQ ID NO: 952476 - RNA, 19 nt, Artificial Sequence
  Description of Artificial Sequence: Synthetic oligonucleotide
  Sense strand starting at position 2032 of SEQ ID NO: 913768
cccggaagcuccuuaagga

SEQ ID NO: 952477 - RNA, 19 nt, Artificial Sequence
  Description of Artificial Sequence: Synthetic oligonucleotide
  Antisense strand to SEQ ID NO: 952476
uccuuaaggagcuuccggg

SEQ ID NO: 952478 - RNA, 19 nt, Artificial Sequence
  Description of Artificial Sequence: Synthetic oligonucleotide
  Sense strand starting at position 3787 of SEQ ID NO: 913768
ugauaugcucuuugauaug

SEQ ID NO: 952479 - RNA, 19 nt, Artificial Sequence
  Description of Artificial Sequence: Synthetic oligonucleotide
  Antisense strand to SEQ ID NO: 952478
cauaucaaagagcauauca

SEQ ID NO: 952480 - RNA, 19 nt, Artificial Sequence
  Description of Artificial Sequence: Synthetic oligonucleotide
  Sense strand starting at position 3501 of SEQ ID NO: 913768
uugaaugcccucugggauu

SEQ ID NO: 952481 - RNA, 19 nt, Artificial Sequence
  Description of Artificial Sequence: Synthetic oligonucleotide
  Antisense strand to SEQ ID NO: 952480
aaucccagagggcauucaa

SEQ ID NO: 952482 - RNA, 19 nt, Artificial Sequence
  Description of Artificial Sequence: Synthetic oligonucleotide
  Sense strand starting at position 2730 of SEQ ID NO: 913768
cgggauuaaccgggcacaa

SEQ ID NO: 952483 - RNA, 19 nt, Artificial Sequence
  Description of Artificial Sequence: Synthetic oligonucleotide
  Antisense strand to SEQ ID NO: 952482
uugugcccgguuaaucccg

SEQ ID NO: 952484 - RNA, 19 nt, Artificial Sequence
  Description of Artificial Sequence: Synthetic oligonucleotide
  Sense strand starting at position 851 of SEQ ID NO: 913768
acucuacuguuugugaaau

SEQ ID NO: 952485 - RNA, 19 nt, Artificial Sequence
  Description of Artificial Sequence: Synthetic oligonucleotide
  Antisense strand to SEQ ID NO: 952484
auuucacaaacaguagagu

SEQ ID NO: 952486 - RNA, 19 nt, Artificial Sequence
  Description of Artificial Sequence: Synthetic oligonucleotide
  Sense strand starting at position 3448 of SEQ ID NO: 913768
ugucauccuugggcuaaga

SEQ ID NO: 952487 - RNA, 19 nt, Artificial Sequence
  Description of Artificial Sequence: Synthetic oligonucleotide
  Antisense strand to SEQ ID NO: 952486
ucuuagcccaaggaugaca

SEQ ID NO: 952488 - RNA, 19 nt, Artificial Sequence
  Description of Artificial Sequence: Synthetic oligonucleotide
  Sense strand starting at position 727 of SEQ ID NO: 913768
cagauagacucgguuugua

SEQ ID NO: 952489 - RNA, 19 nt, Artificial Sequence
  Description of Artificial Sequence: Synthetic oligonucleotide
  Antisense strand to SEQ ID NO: 952488
uacaaaccgagucuaucug

SEQ ID NO: 952490 - RNA, 19 nt, Artificial Sequence
  Description of Artificial Sequence: Synthetic oligonucleotide
  Sense strand starting at position 3489 of SEQ ID NO: 913768
caagguuagugcuugaaug

SEQ ID NO: 952491 - RNA, 19 nt, Artificial Sequence
  Description of Artificial Sequence: Synthetic oligonucleotide
  Antisense strand to SEQ ID NO: 952490
cauucaagcacuaaccuug

SEQ ID NO: 952492 - RNA, 19 nt, Artificial Sequence
  Description of Artificial Sequence: Synthetic oligonucleotide
  Sense strand starting at position 750 of SEQ ID NO: 913768
gcaagagcacugggucaua

SEQ ID NO: 952493 - RNA, 19 nt, Artificial Sequence
  Description of Artificial Sequence: Synthetic oligonucleotide
  Antisense strand to SEQ ID NO: 952492
uaugacccagugcucuugc

SEQ ID NO: 952494 - RNA, 19 nt, Artificial Sequence
  Description of Artificial Sequence: Synthetic oligonucleotide
  Sense strand starting at position 3117 of SEQ ID NO: 913768
cuuuaacacucgccuggaa

SEQ ID NO: 952495 - RNA, 19 nt, Artificial Sequence
  Description of Artificial Sequence: Synthetic oligonucleotide
  Antisense strand to SEQ ID NO: 952494
uuccaggcgaguguuaaag

SEQ ID NO: 952496 - RNA, 19 nt, Artificial Sequence
  Description of Artificial Sequence: Synthetic oligonucleotide
  Sense strand starting at position 3480 of SEQ ID NO: 913768
cuggaaugccaagguuagu

SEQ ID NO: 952497 - RNA, 19 nt, Artificial Sequence
  Description of Artificial Sequence: Synthetic oligonucleotide
  Antisense strand to SEQ ID NO: 952496
acuaaccuuggcauuccag

SEQ ID NO: 952498 - RNA, 19 nt, Artificial Sequence
  Description of Artificial Sequence: Synthetic oligonucleotide
  Sense strand starting at position 2887 of SEQ ID NO: 913768
cgagcuuaauaguuuauga

SEQ ID NO: 952499 - RNA, 19 nt, Artificial Sequence
  Description of Artificial Sequence: Synthetic oligonucleotide
  Antisense strand to SEQ ID NO: 952498
ucauaaacuauuaagcucg

SEQ ID NO: 952500 - RNA, 19 nt, Artificial Sequence
  Description of Artificial Sequence: Synthetic oligonucleotide
  Sense strand starting at position 246 of SEQ ID NO: 913768
ugcugauagcugugaaagg

SEQ ID NO: 952501 - RNA, 19 nt, Artificial Sequence
  Description of Artificial Sequence: Synthetic oligonucleotide
  Antisense strand to SEQ ID NO: 952500
ccuuucacagcuaucagca

SEQ ID NO: 952502 - RNA, 19 nt, Artificial Sequence
  Description of Artificial Sequence: Synthetic oligonucleotide
  Sense strand starting at position 3786 of SEQ ID NO: 913768
gugauaugcucuuugauau

SEQ ID NO: 952503 - RNA, 19 nt, Artificial Sequence
  Description of Artificial Sequence: Synthetic oligonucleotide
  Antisense strand to SEQ ID NO: 952502
auaucaaagagcauaucac

SEQ ID NO: 952504 - RNA, 19 nt, Artificial Sequence
  Description of Artificial Sequence: Synthetic oligonucleotide
  Sense strand starting at position 725 of SEQ ID NO: 913768
gucagauagacucgguuug

SEQ ID NO: 952505 - RNA, 19 nt, Artificial Sequence
  Description of Artificial Sequence: Synthetic oligonucleotide
  Antisense strand to SEQ ID NO: 952504
caaaccgagucuaucugac

SEQ ID NO: 952506 - RNA, 19 nt, Artificial Sequence
  Description of Artificial Sequence: Synthetic oligonucleotide
  Sense strand starting at position 884 of SEQ ID NO: 913768
guacucuacuaguugugaa

SEQ ID NO: 952507 - RNA, 19 nt, Artificial Sequence
  Description of Artificial Sequence: Synthetic oligonucleotide
  Antisense strand to SEQ ID NO: 952506
uucacaacuaguagaguac

SEQ ID NO: 952508 - RNA, 19 nt, Artificial Sequence
  Description of Artificial Sequence: Synthetic oligonucleotide
  Sense strand starting at position 2917 of SEQ ID NO: 913768
ucuauugucuucccuuuga

SEQ ID NO: 952509 - RNA, 19 nt, Artificial Sequence
  Description of Artificial Sequence: Synthetic oligonucleotide
  Antisense strand to SEQ ID NO: 952508
ucaaagggaagacaauaga

SEQ ID NO: 952510 - RNA, 19 nt, Artificial Sequence
  Description of Artificial Sequence: Synthetic oligonucleotide
  Sense strand starting at position 726 of SEQ ID NO: 913768
ucagauagacucgguuugu

SEQ ID NO: 952511 - RNA, 19 nt, Artificial Sequence
  Description of Artificial Sequence: Synthetic oligonucleotide
  Antisense strand to SEQ ID NO: 952510
acaaaccgagucuaucuga

SEQ ID NO: 952512 - RNA, 19 nt, Artificial Sequence
  Description of Artificial Sequence: Synthetic oligonucleotide
  Sense strand starting at position 2881 of SEQ ID NO: 913768
ucuggucgagcuuaauagu

SEQ ID NO: 952513 - RNA, 19 nt, Artificial Sequence
  Description of Artificial Sequence: Synthetic oligonucleotide
  Antisense strand to SEQ ID NO: 952512
acuauuaagcucgaccaga

SEQ ID NO: 952514 - RNA, 19 nt, Artificial Sequence
  Description of Artificial Sequence: Synthetic oligonucleotide
  Sense strand starting at position 3932 of SEQ ID NO: 913768
gacuaauuguaugcucagu

SEQ ID NO: 952515 - RNA, 19 nt, Artificial Sequence
  Description of Artificial Sequence: Synthetic oligonucleotide
  Antisense strand to SEQ ID NO: 952514
acugagcauacaauuaguc

SEQ ID NO: 952516 - RNA, 19 nt, Artificial Sequence
  Description of Artificial Sequence: Synthetic oligonucleotide
  Sense strand starting at position 849 of SEQ ID NO: 913768
guacucuacuguuugugaa

SEQ ID NO: 952517 - RNA, 19 nt, Artificial Sequence
  Description of Artificial Sequence: Synthetic oligonucleotide
  Antisense strand to SEQ ID NO: 952516
uucacaaacaguagaguac

SEQ ID NO: 952518 - RNA, 19 nt, Artificial Sequence
  Description of Artificial Sequence: Synthetic oligonucleotide
  Sense strand starting at position 3931 of SEQ ID NO: 913768
cgacuaauuguaugcucag

SEQ ID NO: 952519 - RNA, 19 nt, Artificial Sequence
  Description of Artificial Sequence: Synthetic oligonucleotide
  Antisense strand to SEQ ID NO: 952518
cugagcauacaauuagucg

SEQ ID NO: 952520 - RNA, 19 nt, Artificial Sequence
  Description of Artificial Sequence: Synthetic oligonucleotide
  Sense strand starting at position 3446 of SEQ ID NO: 913768
uuugucauccuugggcuaa

SEQ ID NO: 952521 - RNA, 19 nt, Artificial Sequence
  Description of Artificial Sequence: Synthetic oligonucleotide
  Antisense strand to SEQ ID NO: 952520
uuagcccaaggaugacaaa

SEQ ID NO: 952522 - RNA, 19 nt, Artificial Sequence
  Description of Artificial Sequence: Synthetic oligonucleotide
  Sense strand starting at position 244 of SEQ ID NO: 913768
ucugcugauagcugugaaa

SEQ ID NO: 952523 - RNA, 19 nt, Artificial Sequence
  Description of Artificial Sequence: Synthetic oligonucleotide
  Antisense strand to SEQ ID NO: 952522
uuucacagcuaucagcaga

SEQ ID NO: 952524 - RNA, 19 nt, Artificial Sequence
  Description of Artificial Sequence: Synthetic oligonucleotide
  Sense strand starting at position 235 of SEQ ID NO: 913768
cuaccugucucugcugaua

SEQ ID NO: 952525 - RNA, 19 nt, Artificial Sequence
  Description of Artificial Sequence: Synthetic oligonucleotide
  Antisense strand to SEQ ID NO: 952524
uaucagcagagacagguag

SEQ ID NO: 952526 - RNA, 19 nt, Artificial Sequence
  Description of Artificial Sequence: Synthetic oligonucleotide
  Sense strand starting at position 3665 of SEQ ID NO: 913768
ccuucuaccuggcuuguaa

SEQ ID NO: 952527 - RNA, 19 nt, Artificial Sequence
  Description of Artificial Sequence: Synthetic oligonucleotide
  Antisense strand to SEQ ID NO: 952526
uuacaagccagguagaagg

SEQ ID NO: 952528 - RNA, 19 nt, Artificial Sequence
  Description of Artificial Sequence: Synthetic oligonucleotide
  Sense strand starting at position 2787 of SEQ ID NO: 913768
guaguuucugguuacuguu

SEQ ID NO: 952529 - RNA, 19 nt, Artificial Sequence
  Description of Artificial Sequence: Synthetic oligonucleotide
  Antisense strand to SEQ ID NO: 952528
aacaguaaccagaaacuac

SEQ ID NO: 952530 - RNA, 19 nt, Artificial Sequence
  Description of Artificial Sequence: Synthetic oligonucleotide
  Sense strand starting at position 3751 of SEQ ID NO: 913769
uggacugagaauggguauu

SEQ ID NO: 952531 - RNA, 19 nt, Artificial Sequence
  Description of Artificial Sequence: Synthetic oligonucleotide
  Antisense strand to SEQ ID NO: 952530
aauacccauucucagucca

SEQ ID NO: 952532 - RNA, 19 nt, Artificial Sequence
  Description of Artificial Sequence: Synthetic oligonucleotide
  Sense strand starting at position 461 of SEQ ID NO: 913769
accgaaaugcuggacauca

SEQ ID NO: 952533 - RNA, 19 nt, Artificial Sequence
  Description of Artificial Sequence: Synthetic oligonucleotide
  Antisense strand to SEQ ID NO: 952532
ugauguccagcauuucggu

SEQ ID NO: 952534 - RNA, 19 nt, Artificial Sequence
  Description of Artificial Sequence: Synthetic oligonucleotide
  Sense strand starting at position 1111 of SEQ ID NO: 913769
uaaggaugugagcauccua

SEQ ID NO: 952535 - RNA, 19 nt, Artificial Sequence
  Description of Artificial Sequence: Synthetic oligonucleotide
  Antisense strand to SEQ ID NO: 952534
uaggaugcucacauccuua

SEQ ID NO: 952536 - RNA, 19 nt, Artificial Sequence
  Description of Artificial Sequence: Synthetic oligonucleotide
  Sense strand starting at position 2106 of SEQ ID NO: 913769
ugauguuaccgagacuuga

SEQ ID NO: 952537 - RNA, 19 nt, Artificial Sequence
  Description of Artificial Sequence: Synthetic oligonucleotide
  Antisense strand to SEQ ID NO: 952536
ucaagucucgguaacauca

SEQ ID NO: 952538 - RNA, 19 nt, Artificial Sequence
  Description of Artificial Sequence: Synthetic oligonucleotide
  Sense strand starting at position 1707 of SEQ ID NO: 913769
agaagagcuccuuacccuu

SEQ ID NO: 952539 - RNA, 19 nt, Artificial Sequence
  Description of Artificial Sequence: Synthetic oligonucleotide
  Antisense strand to SEQ ID NO: 952538
aaggguaaggagcucuucu

SEQ ID NO: 952540 - RNA, 19 nt, Artificial Sequence
  Description of Artificial Sequence: Synthetic oligonucleotide
  Sense strand starting at position 1254 of SEQ ID NO: 913769
aggagucccguucagagaa

SEQ ID NO: 952541 - RNA, 19 nt, Artificial Sequence
  Description of Artificial Sequence: Synthetic oligonucleotide
  Antisense strand to SEQ ID NO: 952540
uucucugaacgggacuccu

SEQ ID NO: 952542 - RNA, 19 nt, Artificial Sequence
  Description of Artificial Sequence: Synthetic oligonucleotide
  Sense strand starting at position 3354 of SEQ ID NO: 913769
ggaacugugaaauggaguu

SEQ ID NO: 952543 - RNA, 19 nt, Artificial Sequence
  Description of Artificial Sequence: Synthetic oligonucleotide
  Antisense strand to SEQ ID NO: 952542
aacuccauuucacaguucc

SEQ ID NO: 952544 - RNA, 19 nt, Artificial Sequence
  Description of Artificial Sequence: Synthetic oligonucleotide
  Sense strand starting at position 438 of SEQ ID NO: 913769
gaauuagggcaaugacuuu

SEQ ID NO: 952545 - RNA, 19 nt, Artificial Sequence
  Description of Artificial Sequence: Synthetic oligonucleotide
  Antisense strand to SEQ ID NO: 952544
aaagucauugcccuaauuc

SEQ ID NO: 952546 - RNA, 19 nt, Artificial Sequence
  Description of Artificial Sequence: Synthetic oligonucleotide
  Sense strand starting at position 3157 of SEQ ID NO: 913769
acgugauccagguaaacac

SEQ ID NO: 952547 - RNA, 19 nt, Artificial Sequence
  Description of Artificial Sequence: Synthetic oligonucleotide
  Antisense strand to SEQ ID NO: 952546
guguuuaccuggaucacgu

SEQ ID NO: 952548 - RNA, 19 nt, Artificial Sequence
  Description of Artificial Sequence: Synthetic oligonucleotide
  Sense strand starting at position 2712 of SEQ ID NO: 913769
gggaaauacugcccuugag

SEQ ID NO: 952549 - RNA, 19 nt, Artificial Sequence
  Description of Artificial Sequence: Synthetic oligonucleotide
  Antisense strand to SEQ ID NO: 952548
cucaagggcaguauuuccc

SEQ ID NO: 952550 - RNA, 19 nt, Artificial Sequence
  Description of Artificial Sequence: Synthetic oligonucleotide
  Sense strand starting at position 3347 of SEQ ID NO: 913769
uguauauggaacugugaaa

SEQ ID NO: 952551 - RNA, 19 nt, Artificial Sequence
  Description of Artificial Sequence: Synthetic oligonucleotide
  Antisense strand to SEQ ID NO: 952550
uuucacaguuccauauaca

SEQ ID NO: 952552 - RNA, 19 nt, Artificial Sequence
  Description of Artificial Sequence: Synthetic oligonucleotide
  Sense strand starting at position 2110 of SEQ ID NO: 913769
guuaccgagacuugaagaa

SEQ ID NO: 952553 - RNA, 19 nt, Artificial Sequence
  Description of Artificial Sequence: Synthetic oligonucleotide
  Antisense strand to SEQ ID NO: 952552
uucuucaagucucgguaac

SEQ ID NO: 952554 - RNA, 19 nt, Artificial Sequence
  Description of Artificial Sequence: Synthetic oligonucleotide
  Sense strand starting at position 371 of SEQ ID NO: 913769
guggauucugcagauuaau

SEQ ID NO: 952555 - RNA, 19 nt, Artificial Sequence
  Description of Artificial Sequence: Synthetic oligonucleotide
  Antisense strand to SEQ ID NO: 952554
auuaaucugcagaauccac

SEQ ID NO: 952556 - RNA, 19 nt, Artificial Sequence
  Description of Artificial Sequence: Synthetic oligonucleotide
  Sense strand starting at position 2562 of SEQ ID NO: 913769
gagauuguacaguaguuau

SEQ ID NO: 952557 - RNA, 19 nt, Artificial Sequence
  Description of Artificial Sequence: Synthetic oligonucleotide
  Antisense strand to SEQ ID NO: 952556
auaacuacuguacaaucuc

SEQ ID NO: 952558 - RNA, 19 nt, Artificial Sequence
  Description of Artificial Sequence: Synthetic oligonucleotide
  Sense strand starting at position 3227 of SEQ ID NO: 913769
uugacuuccucacugauga

SEQ ID NO: 952559 - RNA, 19 nt, Artificial Sequence
  Description of Artificial Sequence: Synthetic oligonucleotide
  Antisense strand to SEQ ID NO: 952558
ucaucagugaggaagucaa

SEQ ID NO: 952560 - RNA, 19 nt, Artificial Sequence
  Description of Artificial Sequence: Synthetic oligonucleotide
  Sense strand starting at position 2250 of SEQ ID NO: 913769
agauguggcucauuaaaga

SEQ ID NO: 952561 - RNA, 19 nt, Artificial Sequence
  Description of Artificial Sequence: Synthetic oligonucleotide
  Antisense strand to SEQ ID NO: 952560
ucuuuaaugagccacaucu

SEQ ID NO: 952562 - RNA, 19 nt, Artificial Sequence
  Description of Artificial Sequence: Synthetic oligonucleotide
  Sense strand starting at position 2979 of SEQ ID NO: 913769
gucugugugauguuugcga

SEQ ID NO: 952563 - RNA, 19 nt, Artificial Sequence
  Description of Artificial Sequence: Synthetic oligonucleotide
  Antisense strand to SEQ ID NO: 952562
ucgcaaacaucacacagac

SEQ ID NO: 952564 - RNA, 19 nt, Artificial Sequence
  Description of Artificial Sequence: Synthetic oligonucleotide
  Sense strand starting at position 933 of SEQ ID NO: 913769
ugaacugugagacgggauu

SEQ ID NO: 952565 - RNA, 19 nt, Artificial Sequence
  Description of Artificial Sequence: Synthetic oligonucleotide
  Antisense strand to SEQ ID NO: 952564
aaucccgucucacaguuca

SEQ ID NO: 952566 - RNA, 19 nt, Artificial Sequence
  Description of Artificial Sequence: Synthetic oligonucleotide
  Sense strand starting at position 2361 of SEQ ID NO: 913769
caggcacugcuuuaggaau

SEQ ID NO: 952567 - RNA, 19 nt, Artificial Sequence
  Description of Artificial Sequence: Synthetic oligonucleotide
  Antisense strand to SEQ ID NO: 952566
auuccuaaagcagugccug

SEQ ID NO: 952568 - RNA, 19 nt, Artificial Sequence
  Description of Artificial Sequence: Synthetic oligonucleotide
  Sense strand starting at position 704 of SEQ ID NO: 913769
auaagauguggcggaaaca

SEQ ID NO: 952569 - RNA, 19 nt, Artificial Sequence
  Description of Artificial Sequence: Synthetic oligonucleotide
  Antisense strand to SEQ ID NO: 952568
uguuuccgccacaucuuau

SEQ ID NO: 952570 - RNA, 19 nt, Artificial Sequence
  Description of Artificial Sequence: Synthetic oligonucleotide
  Sense strand starting at position 2891 of SEQ ID NO: 913769
ugacuccagcuuugauaag

SEQ ID NO: 952571 - RNA, 19 nt, Artificial Sequence
  Description of Artificial Sequence: Synthetic oligonucleotide
  Antisense strand to SEQ ID NO: 952570
cuuaucaaagcuggaguca

SEQ ID NO: 952572 - RNA, 19 nt, Artificial Sequence
  Description of Artificial Sequence: Synthetic oligonucleotide
  Sense strand starting at position 354 of SEQ ID NO: 913769
augucauauccauaacggu

SEQ ID NO: 952573 - RNA, 19 nt, Artificial Sequence
  Description of Artificial Sequence: Synthetic oligonucleotide
  Antisense strand to SEQ ID NO: 952572
accguuauggauaugacau

SEQ ID NO: 952574 - RNA, 19 nt, Artificial Sequence
  Description of Artificial Sequence: Synthetic oligonucleotide
  Sense strand starting at position 3072 of SEQ ID NO: 913769
guagcuugaguccaaacca

SEQ ID NO: 952575 - RNA, 19 nt, Artificial Sequence
  Description of Artificial Sequence: Synthetic oligonucleotide
  Antisense strand to SEQ ID NO: 952574
ugguuuggacucaagcuac

SEQ ID NO: 952576 - RNA, 19 nt, Artificial Sequence
  Description of Artificial Sequence: Synthetic oligonucleotide
  Sense strand starting at position 3153 of SEQ ID NO: 913769
ggugacgugauccagguaa

SEQ ID NO: 952577 - RNA, 19 nt, Artificial Sequence
  Description of Artificial Sequence: Synthetic oligonucleotide
  Antisense strand to SEQ ID NO: 952576
uuaccuggaucacgucacc

SEQ ID NO: 952578 - RNA, 19 nt, Artificial Sequence
  Description of Artificial Sequence: Synthetic oligonucleotide
  Sense strand starting at position 331 of SEQ ID NO: 913769
aggccauucuacuuauaug

SEQ ID NO: 952579 - RNA, 19 nt, Artificial Sequence
  Description of Artificial Sequence: Synthetic oligonucleotide
  Antisense strand to SEQ ID NO: 952578
cauauaaguagaauggccu

SEQ ID NO: 952580 - RNA, 19 nt, Artificial Sequence
  Description of Artificial Sequence: Synthetic oligonucleotide
  Sense strand starting at position 1107 of SEQ ID NO: 913769
guaauaaggaugugagcau

SEQ ID NO: 952581 - RNA, 19 nt, Artificial Sequence
  Description of Artificial Sequence: Synthetic oligonucleotide
  Antisense strand to SEQ ID NO: 952580
augcucacauccuuauuac

SEQ ID NO: 952582 - RNA, 19 nt, Artificial Sequence
  Description of Artificial Sequence: Synthetic oligonucleotide
  Sense strand starting at position 910 of SEQ ID NO: 913769
agggaaugcuaaguugagu

SEQ ID NO: 952583 - RNA, 19 nt, Artificial Sequence
  Description of Artificial Sequence: Synthetic oligonucleotide
  Antisense strand to SEQ ID NO: 952582
acucaacuuagcauucccu

SEQ ID NO: 952584 - RNA, 19 nt, Artificial Sequence
  Description of Artificial Sequence: Synthetic oligonucleotide
  Sense strand starting at position 2501 of SEQ ID NO: 913769
accggaucauccucuugau

SEQ ID NO: 952585 - RNA, 19 nt, Artificial Sequence
  Description of Artificial Sequence: Synthetic oligonucleotide
  Antisense strand to SEQ ID NO: 952584
aucaagaggaugauccggu

SEQ ID NO: 952586 - RNA, 19 nt, Artificial Sequence
  Description of Artificial Sequence: Synthetic oligonucleotide
  Sense strand starting at position 2549 of SEQ ID NO: 913769
gcccuacaacucugagauu

SEQ ID NO: 952587 - RNA, 19 nt, Artificial Sequence
  Description of Artificial Sequence: Synthetic oligonucleotide
  Antisense strand to SEQ ID NO: 952586
aaucucagaguuguagggc

SEQ ID NO: 952588 - RNA, 19 nt, Artificial Sequence
  Description of Artificial Sequence: Synthetic oligonucleotide
  Sense strand starting at position 3817 of SEQ ID NO: 913769
ccacgaggguucccaauua

SEQ ID NO: 952589 - RNA, 19 nt, Artificial Sequence
  Description of Artificial Sequence: Synthetic oligonucleotide
  Antisense strand to SEQ ID NO: 952588
uaauugggaacccucgugg

SEQ ID NO: 952590 - RNA, 19 nt, Artificial Sequence
  Description of Artificial Sequence: Synthetic oligonucleotide
  Sense strand starting at position 451 of SEQ ID NO: 913769
gacuuuagccaccgaaaug

SEQ ID NO: 952591 - RNA, 19 nt, Artificial Sequence
  Description of Artificial Sequence: Synthetic oligonucleotide
  Antisense strand to SEQ ID NO: 952590
cauuucgguggcuaaaguc

SEQ ID NO: 952592 - RNA, 19 nt, Artificial Sequence
  Description of Artificial Sequence: Synthetic oligonucleotide
  Sense strand starting at position 3713 of SEQ ID NO: 913769
ugccuccugccagaugaau

SEQ ID NO: 952593 - RNA, 19 nt, Artificial Sequence
  Description of Artificial Sequence: Synthetic oligonucleotide
  Antisense strand to SEQ ID NO: 952592
auucaucuggcaggaggca

SEQ ID NO: 952594 - RNA, 19 nt, Artificial Sequence
  Description of Artificial Sequence: Synthetic oligonucleotide
  Sense strand starting at position 690 of SEQ ID NO: 913769
gcaggcaucaccugauaag

SEQ ID NO: 952595 - RNA, 19 nt, Artificial Sequence
  Description of Artificial Sequence: Synthetic oligonucleotide
  Antisense strand to SEQ ID NO: 952594
cuuaucaggugaugccugc

SEQ ID NO: 952596 - RNA, 19 nt, Artificial Sequence
  Description of Artificial Sequence: Synthetic oligonucleotide
  Sense strand starting at position 1889 of SEQ ID NO: 913769
guccuuuguccagaccuca

SEQ ID NO: 952597 - RNA, 19 nt, Artificial Sequence
  Description of Artificial Sequence: Synthetic oligonucleotide
  Antisense strand to SEQ ID NO: 952596
ugaggucuggacaaaggac

SEQ ID NO: 952598 - RNA, 19 nt, Artificial Sequence
  Description of Artificial Sequence: Synthetic oligonucleotide
  Sense strand starting at position 3858 of SEQ ID NO: 913769
ugcuucuuggucuaugaau

SEQ ID NO: 952599 - RNA, 19 nt, Artificial Sequence
  Description of Artificial Sequence: Synthetic oligonucleotide
  Antisense strand to SEQ ID NO: 952598
auucauagaccaagaagca

SEQ ID NO: 952600 - RNA, 19 nt, Artificial Sequence
  Description of Artificial Sequence: Synthetic oligonucleotide
  Sense strand starting at position 2566 of SEQ ID NO: 913769
uuguacaguaguuaucgaa

SEQ ID NO: 952601 - RNA, 19 nt, Artificial Sequence
  Description of Artificial Sequence: Synthetic oligonucleotide
  Antisense strand to SEQ ID NO: 952600
uucgauaacuacuguacaa

SEQ ID NO: 952602 - RNA, 19 nt, Artificial Sequence
  Description of Artificial Sequence: Synthetic oligonucleotide
  Sense strand starting at position 291 of SEQ ID NO: 913769
ggcuuugcucaguaaauga

SEQ ID NO: 952603 - RNA, 19 nt, Artificial Sequence
  Description of Artificial Sequence: Synthetic oligonucleotide
  Antisense strand to SEQ ID NO: 952602
ucauuuacugagcaaagcc

SEQ ID NO: 952604 - RNA, 19 nt, Artificial Sequence
  Description of Artificial Sequence: Synthetic oligonucleotide
  Sense strand starting at position 3155 of SEQ ID NO: 913769
ugacgugauccagguaaac

SEQ ID NO: 952605 - RNA, 19 nt, Artificial Sequence
  Description of Artificial Sequence: Synthetic oligonucleotide
  Antisense strand to SEQ ID NO: 952604
guuuaccuggaucacguca

SEQ ID NO: 952606 - RNA, 19 nt, Artificial Sequence
  Description of Artificial Sequence: Synthetic oligonucleotide
  Sense strand starting at position 3051 of SEQ ID NO: 913769
gagcuuucucagggugaau

SEQ ID NO: 952607 - RNA, 19 nt, Artificial Sequence
  Description of Artificial Sequence: Synthetic oligonucleotide
  Antisense strand to SEQ ID NO: 952606
auucacccugagaaagcuc

SEQ ID NO: 952608 - RNA, 19 nt, Artificial Sequence
  Description of Artificial Sequence: Synthetic oligonucleotide
  Sense strand starting at position 50 of SEQ ID NO: 913769
gggauucuuuaugccaucu

SEQ ID NO: 952609 - RNA, 19 nt, Artificial Sequence
  Description of Artificial Sequence: Synthetic oligonucleotide
  Antisense strand to SEQ ID NO: 952608
agauggcauaaagaauccc

SEQ ID NO: 952610 - RNA, 19 nt, Artificial Sequence
  Description of Artificial Sequence: Synthetic oligonucleotide
  Sense strand starting at position 396 of SEQ ID NO: 913770
ggucaacuccaaggacaau

SEQ ID NO: 952611 - RNA, 19 nt, Artificial Sequence
  Description of Artificial Sequence: Synthetic oligonucleotide
  Antisense strand to SEQ ID NO: 952610
auuguccuuggaguugacc

SEQ ID NO: 952612 - RNA, 19 nt, Artificial Sequence
  Description of Artificial Sequence: Synthetic oligonucleotide
  Sense strand starting at position 853 of SEQ ID NO: 913770
gggucaauaagucagaggu

SEQ ID NO: 952613 - RNA, 19 nt, Artificial Sequence
  Description of Artificial Sequence: Synthetic oligonucleotide
  Antisense strand to SEQ ID NO: 952612
accucugacuuauugaccc

SEQ ID NO: 952614 - RNA, 19 nt, Artificial Sequence
  Description of Artificial Sequence: Synthetic oligonucleotide
  Sense strand starting at position 838 of SEQ ID NO: 913770
ggugaaaucacaggagggu

SEQ ID NO: 952615 - RNA, 19 nt, Artificial Sequence
  Description of Artificial Sequence: Synthetic oligonucleotide
  Antisense strand to SEQ ID NO: 952614
acccuccugugauuucacc

SEQ ID NO: 952616 - RNA, 19 nt, Artificial Sequence
  Description of Artificial Sequence: Synthetic oligonucleotide
  Sense strand starting at position 860 of SEQ ID NO: 913770
uaagucagagguuaagcaa

SEQ ID NO: 952617 - RNA, 19 nt, Artificial Sequence
  Description of Artificial Sequence: Synthetic oligonucleotide
  Antisense strand to SEQ ID NO: 952616
uugcuuaaccucugacuua

SEQ ID NO: 952618 - RNA, 19 nt, Artificial Sequence
  Description of Artificial Sequence: Synthetic oligonucleotide
  Sense strand starting at position 2806 of SEQ ID NO: 913770
aaaugagccggucacagaa

SEQ ID NO: 952619 - RNA, 19 nt, Artificial Sequence
  Description of Artificial Sequence: Synthetic oligonucleotide
  Antisense strand to SEQ ID NO: 952618
uucugugaccggcucauuu

SEQ ID NO: 952620 - RNA, 19 nt, Artificial Sequence
  Description of Artificial Sequence: Synthetic oligonucleotide
  Sense strand starting at position 3222 of SEQ ID NO: 913770
uggugagauccucacacuu

SEQ ID NO: 952621 - RNA, 19 nt, Artificial Sequence
  Description of Artificial Sequence: Synthetic oligonucleotide
  Antisense strand to SEQ ID NO: 952620
aagugugaggaucucacca

SEQ ID NO: 952622 - RNA, 19 nt, Artificial Sequence
  Description of Artificial Sequence: Synthetic oligonucleotide
  Sense strand starting at position 2929 of SEQ ID NO: 913770
ggagcuacuguuuaaugga

SEQ ID NO: 952623 - RNA, 19 nt, Artificial Sequence
  Description of Artificial Sequence: Synthetic oligonucleotide
  Antisense strand to SEQ ID NO: 952622
uccauuaaacaguagcucc

SEQ ID NO: 952624 - RNA, 19 nt, Artificial Sequence
  Description of Artificial Sequence: Synthetic oligonucleotide
  Sense strand starting at position 2708 of SEQ ID NO: 913770
agaauauccacguagcaga

SEQ ID NO: 952625 - RNA, 19 nt, Artificial Sequence
  Description of Artificial Sequence: Synthetic oligonucleotide
  Antisense strand to SEQ ID NO: 952624
ucugcuacguggauauucu

SEQ ID NO: 952626 - RNA, 19 nt, Artificial Sequence
  Description of Artificial Sequence: Synthetic oligonucleotide
  Sense strand starting at position 931 of SEQ ID NO: 913770
gagagaugccuuugauggg

SEQ ID NO: 952627 - RNA, 19 nt, Artificial Sequence
  Description of Artificial Sequence: Synthetic oligonucleotide
  Antisense strand to SEQ ID NO: 952626
cccaucaaaggcaucucuc

SEQ ID NO: 952628 - RNA, 19 nt, Artificial Sequence
  Description of Artificial Sequence: Synthetic oligonucleotide
  Sense strand starting at position 3194 of SEQ ID NO: 913770
ugucuaagaagaggugauu

SEQ ID NO: 952629 - RNA, 19 nt, Artificial Sequence
  Description of Artificial Sequence: Synthetic oligonucleotide
  Antisense strand to SEQ ID NO: 952628
aaucaccucuucuuagaca

SEQ ID NO: 952630 - RNA, 19 nt, Artificial Sequence
  Description of Artificial Sequence: Synthetic oligonucleotide
  Sense strand starting at position 2788 of SEQ ID NO: 913770
aagacauuaggcuggguga

SEQ ID NO: 952631 - RNA, 19 nt, Artificial Sequence
  Description of Artificial Sequence: Synthetic oligonucleotide
  Antisense strand to SEQ ID NO: 952630
ucacccagccuaaugucuu

SEQ ID NO: 952632 - RNA, 19 nt, Artificial Sequence
  Description of Artificial Sequence: Synthetic oligonucleotide
  Sense strand starting at position 2790 of SEQ ID NO: 913770
gacauuaggcugggugaaa

SEQ ID NO: 952633 - RNA, 19 nt, Artificial Sequence
  Description of Artificial Sequence: Synthetic oligonucleotide
  Antisense strand to SEQ ID NO: 952632
uuucacccagccuaauguc

SEQ ID NO: 952634 - RNA, 19 nt, Artificial Sequence
  Description of Artificial Sequence: Synthetic oligonucleotide
  Sense strand starting at position 2789 of SEQ ID NO: 913770
agacauuaggcugggugaa

SEQ ID NO: 952635 - RNA, 19 nt, Artificial Sequence
  Description of Artificial Sequence: Synthetic oligonucleotide
  Antisense strand to SEQ ID NO: 952634
uucacccagccuaaugucu

SEQ ID NO: 952636 - RNA, 19 nt, Artificial Sequence
  Description of Artificial Sequence: Synthetic oligonucleotide
  Sense strand starting at position 3186 of SEQ ID NO: 913770
cugcucauugucuaagaag

SEQ ID NO: 952637 - RNA, 19 nt, Artificial Sequence
  Description of Artificial Sequence: Synthetic oligonucleotide
  Antisense strand to SEQ ID NO: 952636
cuucuuagacaaugagcag

SEQ ID NO: 952638 - RNA, 19 nt, Artificial Sequence
  Description of Artificial Sequence: Synthetic oligonucleotide
  Sense strand starting at position 2791 of SEQ ID NO: 913770
acauuaggcugggugaaau

SEQ ID NO: 952639 - RNA, 19 nt, Artificial Sequence
  Description of Artificial Sequence: Synthetic oligonucleotide
  Antisense strand to SEQ ID NO: 952638
auuucacccagccuaaugu

SEQ ID NO: 952640 - RNA, 19 nt, Artificial Sequence
  Description of Artificial Sequence: Synthetic oligonucleotide
  Sense strand starting at position 2670 of SEQ ID NO: 913770
ccugcauccaucgauggau

SEQ ID NO: 952641 - RNA, 19 nt, Artificial Sequence
  Description of Artificial Sequence: Synthetic oligonucleotide
  Antisense strand to SEQ ID NO: 952640
auccaucgauggaugcagg

SEQ ID NO: 952642 - RNA, 19 nt, Artificial Sequence
  Description of Artificial Sequence: Synthetic oligonucleotide
  Sense strand starting at position 2825 of SEQ ID NO: 913770
ggacaaaugccgcaugauu

SEQ ID NO: 952643 - RNA, 19 nt, Artificial Sequence
  Description of Artificial Sequence: Synthetic oligonucleotide
  Antisense strand to SEQ ID NO: 952642
aaucaugcggcauuugucc

SEQ ID NO: 952644 - RNA, 19 nt, Artificial Sequence
  Description of Artificial Sequence: Synthetic oligonucleotide
  Sense strand starting at position 3732 of SEQ ID NO: 913770
gggaacuuucccggugaac

SEQ ID NO: 952645 - RNA, 19 nt, Artificial Sequence
  Description of Artificial Sequence: Synthetic oligonucleotide
  Antisense strand to SEQ ID NO: 952644
guucaccgggaaaguuccc

SEQ ID NO: 952646 - RNA, 19 nt, Artificial Sequence
  Description of Artificial Sequence: Synthetic oligonucleotide
  Sense strand starting at position 1460 of SEQ ID NO: 913770
ccuuuauucccaugugaga

SEQ ID NO: 952647 - RNA, 19 nt, Artificial Sequence
  Description of Artificial Sequence: Synthetic oligonucleotide
  Antisense strand to SEQ ID NO: 952646
ucucacaugggaauaaagg

SEQ ID NO: 952648 - RNA, 19 nt, Artificial Sequence
  Description of Artificial Sequence: Synthetic oligonucleotide
  Sense strand starting at position 3123 of SEQ ID NO: 913770
gguguaggcaaucagugau

SEQ ID NO: 952649 - RNA, 19 nt, Artificial Sequence
  Description of Artificial Sequence: Synthetic oligonucleotide
  Antisense strand to SEQ ID NO: 952648
aucacugauugccuacacc

SEQ ID NO: 952650 - RNA, 19 nt, Artificial Sequence
  Description of Artificial Sequence: Synthetic oligonucleotide
  Sense strand starting at position 937 of SEQ ID NO: 913770
ugccuuugaugggcaagaa

SEQ ID NO: 952651 - RNA, 19 nt, Artificial Sequence
  Description of Artificial Sequence: Synthetic oligonucleotide
  Antisense strand to SEQ ID NO: 952650
uucuugcccaucaaaggca

SEQ ID NO: 952652 - RNA, 19 nt, Artificial Sequence
  Description of Artificial Sequence: Synthetic oligonucleotide
  Sense strand starting at position 1170 of SEQ ID NO: 913770
ggucaugcuagagguggaa

SEQ ID NO: 952653 - RNA, 19 nt, Artificial Sequence
  Description of Artificial Sequence: Synthetic oligonucleotide
  Antisense strand to SEQ ID NO: 952652
uuccaccucuagcaugacc

SEQ ID NO: 952654 - RNA, 19 nt, Artificial Sequence
  Description of Artificial Sequence: Synthetic oligonucleotide
  Sense strand starting at position 3734 of SEQ ID NO: 913770
gaacuuucccggugaacac

SEQ ID NO: 952655 - RNA, 19 nt, Artificial Sequence
  Description of Artificial Sequence: Synthetic oligonucleotide
  Antisense strand to SEQ ID NO: 952654
guguucaccgggaaaguuc

SEQ ID NO: 952656 - RNA, 19 nt, Artificial Sequence
  Description of Artificial Sequence: Synthetic oligonucleotide
  Sense strand starting at position 2721 of SEQ ID NO: 913770
agcagaauauuauccagcu

SEQ ID NO: 952657 - RNA, 19 nt, Artificial Sequence
  Description of Artificial Sequence: Synthetic oligonucleotide
  Antisense strand to SEQ ID NO: 952656
agcuggauaauauucugcu

SEQ ID NO: 952658 - RNA, 19 nt, Artificial Sequence
  Description of Artificial Sequence: Synthetic oligonucleotide
  Sense strand starting at position 936 of SEQ ID NO: 913770
augccuuugaugggcaaga

SEQ ID NO: 952659 - RNA, 19 nt, Artificial Sequence
  Description of Artificial Sequence: Synthetic oligonucleotide
  Antisense strand to SEQ ID NO: 952658
ucuugcccaucaaaggcau

SEQ ID NO: 952660 - RNA, 19 nt, Artificial Sequence
  Description of Artificial Sequence: Synthetic oligonucleotide
  Sense strand starting at position 229 of SEQ ID NO: 913770
ucugguauccgagaagcga

SEQ ID NO: 952661 - RNA, 19 nt, Artificial Sequence
  Description of Artificial Sequence: Synthetic oligonucleotide
  Antisense strand to SEQ ID NO: 952660
ucgcuucucggauaccaga

SEQ ID NO: 952662 - RNA, 19 nt, Artificial Sequence
  Description of Artificial Sequence: Synthetic oligonucleotide
  Sense strand starting at position 1299 of SEQ ID NO: 913770
ccaaucuuucccgaggcuu

SEQ ID NO: 952663 - RNA, 19 nt, Artificial Sequence
  Description of Artificial Sequence: Synthetic oligonucleotide
  Antisense strand to SEQ ID NO: 952662
aagccucgggaaagauugg

SEQ ID NO: 952664 - RNA, 19 nt, Artificial Sequence
  Description of Artificial Sequence: Synthetic oligonucleotide
  Sense strand starting at position 2487 of SEQ ID NO: 913770
gcggcaauggcacauauaa

SEQ ID NO: 952665 - RNA, 19 nt, Artificial Sequence
  Description of Artificial Sequence: Synthetic oligonucleotide
  Antisense strand to SEQ ID NO: 952664
uuauaugugccauugccgc

SEQ ID NO: 952666 - RNA, 19 nt, Artificial Sequence
  Description of Artificial Sequence: Synthetic oligonucleotide
  Sense strand starting at position 18 of SEQ ID NO: 913770
agacgacagccaugucuga

SEQ ID NO: 952667 - RNA, 19 nt, Artificial Sequence
  Description of Artificial Sequence: Synthetic oligonucleotide
  Antisense strand to SEQ ID NO: 952666
ucagacauggcugucgucu

SEQ ID NO: 952668 - RNA, 19 nt, Artificial Sequence
  Description of Artificial Sequence: Synthetic oligonucleotide
  Sense strand starting at position 1542 of SEQ ID NO: 913770
guccuuuccagguauggca

SEQ ID NO: 952669 - RNA, 19 nt, Artificial Sequence
  Description of Artificial Sequence: Synthetic oligonucleotide
  Antisense strand to SEQ ID NO: 952668
ugccauaccuggaaaggac

SEQ ID NO: 952670 - RNA, 19 nt, Artificial Sequence
  Description of Artificial Sequence: Synthetic oligonucleotide
  Sense strand starting at position 225 of SEQ ID NO: 913770
gccuucugguauccgagaa

SEQ ID NO: 952671 - RNA, 19 nt, Artificial Sequence
  Description of Artificial Sequence: Synthetic oligonucleotide
  Antisense strand to SEQ ID NO: 952670
uucucggauaccagaaggc

SEQ ID NO: 952672 - RNA, 19 nt, Artificial Sequence
  Description of Artificial Sequence: Synthetic oligonucleotide
  Sense strand starting at position 1625 of SEQ ID NO: 913770
gauaauuucugugagcuca

SEQ ID NO: 952673 - RNA, 19 nt, Artificial Sequence
  Description of Artificial Sequence: Synthetic oligonucleotide
  Antisense strand to SEQ ID NO: 952672
ugagcucacagaaauuauc

SEQ ID NO: 952674 - RNA, 19 nt, Artificial Sequence
  Description of Artificial Sequence: Synthetic oligonucleotide
  Sense strand starting at position 3184 of SEQ ID NO: 913770
agcugcucauugucuaaga

SEQ ID NO: 952675 - RNA, 19 nt, Artificial Sequence
  Description of Artificial Sequence: Synthetic oligonucleotide
  Antisense strand to SEQ ID NO: 952674
ucuuagacaaugagcagcu

SEQ ID NO: 952676 - RNA, 19 nt, Artificial Sequence
  Description of Artificial Sequence: Synthetic oligonucleotide
  Sense strand starting at position 3185 of SEQ ID NO: 913770
gcugcucauugucuaagaa

SEQ ID NO: 952677 - RNA, 19 nt, Artificial Sequence
  Description of Artificial Sequence: Synthetic oligonucleotide
  Antisense strand to SEQ ID NO: 952676
uucuuagacaaugagcagc

SEQ ID NO: 952678 - RNA, 19 nt, Artificial Sequence
  Description of Artificial Sequence: Synthetic oligonucleotide
  Sense strand starting at position 95 of SEQ ID NO: 913770
gcauuagcacccugaccuu

SEQ ID NO: 952679 - RNA, 19 nt, Artificial Sequence
  Description of Artificial Sequence: Synthetic oligonucleotide
  Antisense strand to SEQ ID NO: 952678
aaggucagggugcuaaugc

SEQ ID NO: 952680 - RNA, 19 nt, Artificial Sequence
  Description of Artificial Sequence: Synthetic oligonucleotide
  Sense strand starting at position 2706 of SEQ ID NO: 913770
gcagaauauccacguagca

SEQ ID NO: 952681 - RNA, 19 nt, Artificial Sequence
  Description of Artificial Sequence: Synthetic oligonucleotide
  Antisense strand to SEQ ID NO: 952680
ugcuacguggauauucugc

SEQ ID NO: 952682 - RNA, 19 nt, Artificial Sequence
  Description of Artificial Sequence: Synthetic oligonucleotide
  Sense strand starting at position 3182 of SEQ ID NO: 913770
gaagcugcucauugucuaa

SEQ ID NO: 952683 - RNA, 19 nt, Artificial Sequence
  Description of Artificial Sequence: Synthetic oligonucleotide
  Antisense strand to SEQ ID NO: 952682
uuagacaaugagcagcuuc

SEQ ID NO: 952684 - RNA, 19 nt, Artificial Sequence
  Description of Artificial Sequence: Synthetic oligonucleotide
  Sense strand starting at position 3181 of SEQ ID NO: 913770
ggaagcugcucauugucua

SEQ ID NO: 952685 - RNA, 19 nt, Artificial Sequence
  Description of Artificial Sequence: Synthetic oligonucleotide
  Antisense strand to SEQ ID NO: 952684
uagacaaugagcagcuucc

SEQ ID NO: 952686 - RNA, 19 nt, Artificial Sequence
  Description of Artificial Sequence: Synthetic oligonucleotide
  Sense strand starting at position 141 of SEQ ID NO: 913770
gggccuuguuguuugggau

SEQ ID NO: 952687 - RNA, 19 nt, Artificial Sequence
  Description of Artificial Sequence: Synthetic oligonucleotide
  Antisense strand to SEQ ID NO: 952686
aucccaaacaacaaggccc

SEQ ID NO: 952688 - RNA, 19 nt, Artificial Sequence
  Description of Artificial Sequence: Synthetic oligonucleotide
  Sense strand starting at position 1409 of SEQ ID NO: 913770
gggugcuguuccuccaaau

SEQ ID NO: 952689 - RNA, 19 nt, Artificial Sequence
  Description of Artificial Sequence: Synthetic oligonucleotide
  Antisense strand to SEQ ID NO: 952688
auuuggaggaacagcaccc

SEQ ID NO: 952690 - RNA, 19 nt, Artificial Sequence
  Description of Artificial Sequence: Synthetic oligonucleotide
  Sense strand starting at position 2921 of SEQ ID NO: 913771
acaagaaugcucuaauagu

SEQ ID NO: 952691 - RNA, 19 nt, Artificial Sequence
  Description of Artificial Sequence: Synthetic oligonucleotide
  Antisense strand to SEQ ID NO: 952690
acuauuagagcauucuugu

SEQ ID NO: 952692 - RNA, 19 nt, Artificial Sequence
  Description of Artificial Sequence: Synthetic oligonucleotide
  Sense strand starting at position 26 of SEQ ID NO: 913771
acugcucuacuuuaaggaa

SEQ ID NO: 952693 - RNA, 19 nt, Artificial Sequence
  Description of Artificial Sequence: Synthetic oligonucleotide
  Antisense strand to SEQ ID NO: 952692
uuccuuaaaguagagcagu

SEQ ID NO: 952694 - RNA, 19 nt, Artificial Sequence
  Description of Artificial Sequence: Synthetic oligonucleotide
  Sense strand starting at position 3676 of SEQ ID NO: 913771
gucuauuaauuugucagua

SEQ ID NO: 952695 - RNA, 19 nt, Artificial Sequence
  Description of Artificial Sequence: Synthetic oligonucleotide
  Antisense strand to SEQ ID NO: 952694
uacugacaaauuaauagac

SEQ ID NO: 952696 - RNA, 19 nt, Artificial Sequence
  Description of Artificial Sequence: Synthetic oligonucleotide
  Sense strand starting at position 2691 of SEQ ID NO: 913771
aacugagcaccugaaaugu

SEQ ID NO: 952697 - RNA, 19 nt, Artificial Sequence
  Description of Artificial Sequence: Synthetic oligonucleotide
  Antisense strand to SEQ ID NO: 952696
acauuucaggugcucaguu

SEQ ID NO: 952698 - RNA, 19 nt, Artificial Sequence
  Description of Artificial Sequence: Synthetic oligonucleotide
  Sense strand starting at position 781 of SEQ ID NO: 913771
ucaaacaaacgauguuaaa

SEQ ID NO: 952699 - RNA, 19 nt, Artificial Sequence
  Description of Artificial Sequence: Synthetic oligonucleotide
  Antisense strand to SEQ ID NO: 952698
uuuaacaucguuuguuuga

SEQ ID NO: 952700 - RNA, 19 nt, Artificial Sequence
  Description of Artificial Sequence: Synthetic oligonucleotide
  Sense strand starting at position 2711 of SEQ ID NO: 913771
guuaaucugaauugagaug

SEQ ID NO: 952701 - RNA, 19 nt, Artificial Sequence
  Description of Artificial Sequence: Synthetic oligonucleotide
  Antisense strand to SEQ ID NO: 952700
caucucaauucagauuaac

SEQ ID NO: 952702 - RNA, 19 nt, Artificial Sequence
  Description of Artificial Sequence: Synthetic oligonucleotide
  Sense strand starting at position 1828 of SEQ ID NO: 913771
uccgaucugggucaggaua

SEQ ID NO: 952703 - RNA, 19 nt, Artificial Sequence
  Description of Artificial Sequence: Synthetic oligonucleotide
  Antisense strand to SEQ ID NO: 952702
uauccugacccagaucgga

SEQ ID NO: 952704 - RNA, 19 nt, Artificial Sequence
  Description of Artificial Sequence: Synthetic oligonucleotide
  Sense strand starting at position 1626 of SEQ ID NO: 913771
cggcgucauuguauaggaa

SEQ ID NO: 952705 - RNA, 19 nt, Artificial Sequence
  Description of Artificial Sequence: Synthetic oligonucleotide
  Antisense strand to SEQ ID NO: 952704
uuccuauacaaugacgccg

SEQ ID NO: 952706 - RNA, 19 nt, Artificial Sequence
  Description of Artificial Sequence: Synthetic oligonucleotide
  Sense strand starting at position 1541 of SEQ ID NO: 913771
gaguaucuaguguaaauac

SEQ ID NO: 952707 - RNA, 19 nt, Artificial Sequence
  Description of Artificial Sequence: Synthetic oligonucleotide
  Antisense strand to SEQ ID NO: 952706
guauuuacacuagauacuc

SEQ ID NO: 952708 - RNA, 19 nt, Artificial Sequence
  Description of Artificial Sequence: Synthetic oligonucleotide
  Sense strand starting at position 1501 of SEQ ID NO: 913771
gucaguaaguauuugcuga

SEQ ID NO: 952709 - RNA, 19 nt, Artificial Sequence
  Description of Artificial Sequence: Synthetic oligonucleotide
  Antisense strand to SEQ ID NO: 952708
ucagcaaauacuuacugac

SEQ ID NO: 952710 - RNA, 19 nt, Artificial Sequence
  Description of Artificial Sequence: Synthetic oligonucleotide
  Sense strand starting at position 3451 of SEQ ID NO: 913771
uccagaauggucuggaacu

SEQ ID NO: 952711 - RNA, 19 nt, Artificial Sequence
  Description of Artificial Sequence: Synthetic oligonucleotide
  Antisense strand to SEQ ID NO: 952710
aguuccagaccauucugga

SEQ ID NO: 952712 - RNA, 19 nt, Artificial Sequence
  Description of Artificial Sequence: Synthetic oligonucleotide
  Sense strand starting at position 1491 of SEQ ID NO: 913771
ggcuuuaaaggucaguaag

SEQ ID NO: 952713 - RNA, 19 nt, Artificial Sequence
  Description of Artificial Sequence: Synthetic oligonucleotide
  Antisense strand to SEQ ID NO: 952712
cuuacugaccuuuaaagcc

SEQ ID NO: 952714 - RNA, 19 nt, Artificial Sequence
  Description of Artificial Sequence: Synthetic oligonucleotide
  Sense strand starting at position 2718 of SEQ ID NO: 913771
ugaauugagaugugugaug

SEQ ID NO: 952715 - RNA, 19 nt, Artificial Sequence
  Description of Artificial Sequence: Synthetic oligonucleotide
  Antisense strand to SEQ ID NO: 952714
caucacacaucucaauuca

SEQ ID NO: 952716 - RNA, 19 nt, Artificial Sequence
  Description of Artificial Sequence: Synthetic oligonucleotide
  Sense strand starting at position 3667 of SEQ ID NO: 913771
ucagguuaugucuauuaau

SEQ ID NO: 952717 - RNA, 19 nt, Artificial Sequence
  Description of Artificial Sequence: Synthetic oligonucleotide
  Antisense strand to SEQ ID NO: 952716
auuaauagacauaaccuga

SEQ ID NO: 952718 - RNA, 19 nt, Artificial Sequence
  Description of Artificial Sequence: Synthetic oligonucleotide
  Sense strand starting at position 3534 of SEQ ID NO: 913771
ccugacaggccuuauagua

SEQ ID NO: 952719 - RNA, 19 nt, Artificial Sequence
  Description of Artificial Sequence: Synthetic oligonucleotide
  Antisense strand to SEQ ID NO: 952718
uacuauaaggccugucagg

SEQ ID NO: 952720 - RNA, 19 nt, Artificial Sequence
  Description of Artificial Sequence: Synthetic oligonucleotide
  Sense strand starting at position 2650 of SEQ ID NO: 913771
ucugauguuguccaauaug

SEQ ID NO: 952721 - RNA, 19 nt, Artificial Sequence
  Description of Artificial Sequence: Synthetic oligonucleotide
  Antisense strand to SEQ ID NO: 952720
cauauuggacaacaucaga

SEQ ID NO: 952722 - RNA, 19 nt, Artificial Sequence
  Description of Artificial Sequence: Synthetic oligonucleotide
  Sense strand starting at position 3449 of SEQ ID NO: 913771
uguccagaauggucuggaa

SEQ ID NO: 952723 - RNA, 19 nt, Artificial Sequence
  Description of Artificial Sequence: Synthetic oligonucleotide
  Antisense strand to SEQ ID NO: 952722
uuccagaccauucuggaca

SEQ ID NO: 952724 - RNA, 19 nt, Artificial Sequence
  Description of Artificial Sequence: Synthetic oligonucleotide
  Sense strand starting at position 2661 of SEQ ID NO: 913771
ccaauaugguaguuacuaa

SEQ ID NO: 952725 - RNA, 19 nt, Artificial Sequence
  Description of Artificial Sequence: Synthetic oligonucleotide
  Antisense strand to SEQ ID NO: 952724
uuaguaacuaccauauugg

SEQ ID NO: 952726 - RNA, 19 nt, Artificial Sequence
  Description of Artificial Sequence: Synthetic oligonucleotide
  Sense strand starting at position 390 of SEQ ID NO: 913771
aguagaauauggcccuaau

SEQ ID NO: 952727 - RNA, 19 nt, Artificial Sequence
  Description of Artificial Sequence: Synthetic oligonucleotide
  Antisense strand to SEQ ID NO: 952726
auuagggccauauucuacu

SEQ ID NO: 952728 - RNA, 19 nt, Artificial Sequence
  Description of Artificial Sequence: Synthetic oligonucleotide
  Sense strand starting at position 2653 of SEQ ID NO: 913771
gauguuguccaauauggua

SEQ ID NO: 952729 - RNA, 19 nt, Artificial Sequence
  Description of Artificial Sequence: Synthetic oligonucleotide
  Antisense strand to SEQ ID NO: 952728
uaccauauuggacaacauc

SEQ ID NO: 952730 - RNA, 19 nt, Artificial Sequence
  Description of Artificial Sequence: Synthetic oligonucleotide
  Sense strand starting at position 3569 of SEQ ID NO: 913771
uggagacuuacgugaugau

SEQ ID NO: 952731 - RNA, 19 nt, Artificial Sequence
  Description of Artificial Sequence: Synthetic oligonucleotide
  Antisense strand to SEQ ID NO: 952730
aucaucacguaagucucca

SEQ ID NO: 952732 - RNA, 19 nt, Artificial Sequence
  Description of Artificial Sequence: Synthetic oligonucleotide
  Sense strand starting at position 3753 of SEQ ID NO: 913771
caggaaagcuggccauaua

SEQ ID NO: 952733 - RNA, 19 nt, Artificial Sequence
  Description of Artificial Sequence: Synthetic oligonucleotide
  Antisense strand to SEQ ID NO: 952732
uauauggccagcuuuccug

SEQ ID NO: 952734 - RNA, 19 nt, Artificial Sequence
  Description of Artificial Sequence: Synthetic oligonucleotide
  Sense strand starting at position 2668 of SEQ ID NO: 913771
gguaguuacuaaucauaug

SEQ ID NO: 952735 - RNA, 19 nt, Artificial Sequence
  Description of Artificial Sequence: Synthetic oligonucleotide
  Antisense strand to SEQ ID NO: 952734
cauaugauuaguaacuacc

SEQ ID NO: 952736 - RNA, 19 nt, Artificial Sequence
  Description of Artificial Sequence: Synthetic oligonucleotide
  Sense strand starting at position 3862 of SEQ ID NO: 913771
gguaacaugcacugaaacu

SEQ ID NO: 952737 - RNA, 19 nt, Artificial Sequence
  Description of Artificial Sequence: Synthetic oligonucleotide
  Antisense strand to SEQ ID NO: 952736
aguuucagugcauguuacc

SEQ ID NO: 952738 - RNA, 19 nt, Artificial Sequence
  Description of Artificial Sequence: Synthetic oligonucleotide
  Sense strand starting at position 861 of SEQ ID NO: 913771
acaaucuccgguuaacagu

SEQ ID NO: 952739 - RNA, 19 nt, Artificial Sequence
  Description of Artificial Sequence: Synthetic oligonucleotide
  Antisense strand to SEQ ID NO: 952738
acuguuaaccggagauugu

SEQ ID NO: 952740 - RNA, 19 nt, Artificial Sequence
  Description of Artificial Sequence: Synthetic oligonucleotide
  Sense strand starting at position 3734 of SEQ ID NO: 913771
guaaguuucugacuuagag

SEQ ID NO: 952741 - RNA, 19 nt, Artificial Sequence
  Description of Artificial Sequence: Synthetic oligonucleotide
  Antisense strand to SEQ ID NO: 952740
cucuaagucagaaacuuac

SEQ ID NO: 952742 - RNA, 19 nt, Artificial Sequence
  Description of Artificial Sequence: Synthetic oligonucleotide
  Sense strand starting at position 1629 of SEQ ID NO: 913771
cgucauuguauaggaagaa

SEQ ID NO: 952743 - RNA, 19 nt, Artificial Sequence
  Description of Artificial Sequence: Synthetic oligonucleotide
  Antisense strand to SEQ ID NO: 952742
uucuuccuauacaaugacg

SEQ ID NO: 952744 - RNA, 19 nt, Artificial Sequence
  Description of Artificial Sequence: Synthetic oligonucleotide
  Sense strand starting at position 2700 of SEQ ID NO: 913771
ccugaaauguaguuaaucu

SEQ ID NO: 952745 - RNA, 19 nt, Artificial Sequence
  Description of Artificial Sequence: Synthetic oligonucleotide
  Antisense strand to SEQ ID NO: 952744
agauuaacuacauuucagg

SEQ ID NO: 952746 - RNA, 19 nt, Artificial Sequence
  Description of Artificial Sequence: Synthetic oligonucleotide
  Sense strand starting at position 3559 of SEQ ID NO: 913771
cguuucauaguggagacuu

SEQ ID NO: 952747 - RNA, 19 nt, Artificial Sequence
  Description of Artificial Sequence: Synthetic oligonucleotide
  Antisense strand to SEQ ID NO: 952746
aagucuccacuaugaaacg

SEQ ID NO: 952748 - RNA, 19 nt, Artificial Sequence
  Description of Artificial Sequence: Synthetic oligonucleotide
  Sense strand starting at position 2720 of SEQ ID NO: 913771
aauugagaugugugaugua

SEQ ID NO: 952749 - RNA, 19 nt, Artificial Sequence
  Description of Artificial Sequence: Synthetic oligonucleotide
  Antisense strand to SEQ ID NO: 952748
uacaucacacaucucaauu

SEQ ID NO: 952750 - RNA, 19 nt, Artificial Sequence
  Description of Artificial Sequence: Synthetic oligonucleotide
  Sense strand starting at position 1493 of SEQ ID NO: 913771
cuuuaaaggucaguaagua

SEQ ID NO: 952751 - RNA, 19 nt, Artificial Sequence
  Description of Artificial Sequence: Synthetic oligonucleotide
  Antisense strand to SEQ ID NO: 952750
uacuuacugaccuuuaaag

SEQ ID NO: 952752 - RNA, 19 nt, Artificial Sequence
  Description of Artificial Sequence: Synthetic oligonucleotide
  Sense strand starting at position 134 of SEQ ID NO: 913771
uuuguauuagucuaguaca

SEQ ID NO: 952753 - RNA, 19 nt, Artificial Sequence
  Description of Artificial Sequence: Synthetic oligonucleotide
  Antisense strand to SEQ ID NO: 952752
uguacuagacuaauacaaa

SEQ ID NO: 952754 - RNA, 19 nt, Artificial Sequence
  Description of Artificial Sequence: Synthetic oligonucleotide
  Sense strand starting at position 857 of SEQ ID NO: 913771
ucuaacaaucuccgguuaa

SEQ ID NO: 952755 - RNA, 19 nt, Artificial Sequence
  Description of Artificial Sequence: Synthetic oligonucleotide
  Antisense strand to SEQ ID NO: 952754
uuaaccggagauuguuaga

SEQ ID NO: 952756 - RNA, 19 nt, Artificial Sequence
  Description of Artificial Sequence: Synthetic oligonucleotide
  Sense strand starting at position 2291 of SEQ ID NO: 913771
augugacuaucucucaagu

SEQ ID NO: 952757 - RNA, 19 nt, Artificial Sequence
  Description of Artificial Sequence: Synthetic oligonucleotide
  Antisense strand to SEQ ID NO: 952756
acuugagagauagucacau

SEQ ID NO: 952758 - RNA, 19 nt, Artificial Sequence
  Description of Artificial Sequence: Synthetic oligonucleotide
  Sense strand starting at position 3664 of SEQ ID NO: 913771
acaucagguuaugucuauu

SEQ ID NO: 952759 - RNA, 19 nt, Artificial Sequence
  Description of Artificial Sequence: Synthetic oligonucleotide
  Antisense strand to SEQ ID NO: 952758
aauagacauaaccugaugu

SEQ ID NO: 952760 - RNA, 19 nt, Artificial Sequence
  Description of Artificial Sequence: Synthetic oligonucleotide
  Sense strand starting at position 1686 of SEQ ID NO: 913771
acaagucuccaacgagcaa

SEQ ID NO: 952761 - RNA, 19 nt, Artificial Sequence
  Description of Artificial Sequence: Synthetic oligonucleotide
  Antisense strand to SEQ ID NO: 952760
uugcucguuggagacuugu

SEQ ID NO: 952762 - RNA, 19 nt, Artificial Sequence
  Description of Artificial Sequence: Synthetic oligonucleotide
  Sense strand starting at position 622 of SEQ ID NO: 913771
accaaacuauaggaagaau

SEQ ID NO: 952763 - RNA, 19 nt, Artificial Sequence
  Description of Artificial Sequence: Synthetic oligonucleotide
  Antisense strand to SEQ ID NO: 952762
auucuuccuauaguuuggu

SEQ ID NO: 952764 - RNA, 19 nt, Artificial Sequence
  Description of Artificial Sequence: Synthetic oligonucleotide
  Sense strand starting at position 1199 of SEQ ID NO: 913771
ugaagcacuucugccauaa

SEQ ID NO: 952765 - RNA, 19 nt, Artificial Sequence
  Description of Artificial Sequence: Synthetic oligonucleotide
  Antisense strand to SEQ ID NO: 952764
uuauggcagaagugcuuca

SEQ ID NO: 952766 - RNA, 19 nt, Artificial Sequence
  Description of Artificial Sequence: Synthetic oligonucleotide
  Sense strand starting at position 1552 of SEQ ID NO: 913771
guaaauacuucuuuagucu

SEQ ID NO: 952767 - RNA, 19 nt, Artificial Sequence
  Description of Artificial Sequence: Synthetic oligonucleotide
  Antisense strand to SEQ ID NO: 952766
agacuaaagaaguauuuac

SEQ ID NO: 952768 - RNA, 19 nt, Artificial Sequence
  Description of Artificial Sequence: Synthetic oligonucleotide
  Sense strand starting at position 1551 of SEQ ID NO: 913771
uguaaauacuucuuuaguc

SEQ ID NO: 952769 - RNA, 19 nt, Artificial Sequence
  Description of Artificial Sequence: Synthetic oligonucleotide
  Antisense strand to SEQ ID NO: 952768
gacuaaagaaguauuuaca

SEQ ID NO: 952770 - RNA, 19 nt, Artificial Sequence
  Description of Artificial Sequence: Synthetic oligonucleotide
  Sense strand starting at position 1027 of SEQ ID NO: 913772
gcaaccuuacaggauaagu

SEQ ID NO: 952771 - RNA, 19 nt, Artificial Sequence
  Description of Artificial Sequence: Synthetic oligonucleotide
  Antisense strand to SEQ ID NO: 952770
acuuauccuguaagguugc

SEQ ID NO: 952772 - RNA, 19 nt, Artificial Sequence
  Description of Artificial Sequence: Synthetic oligonucleotide
  Sense strand starting at position 3130 of SEQ ID NO: 913772
cugcuaauagguuagaaac

SEQ ID NO: 952773 - RNA, 19 nt, Artificial Sequence
  Description of Artificial Sequence: Synthetic oligonucleotide
  Antisense strand to SEQ ID NO: 952772
guuucuaaccuauuagcag

SEQ ID NO: 952774 - RNA, 19 nt, Artificial Sequence
  Description of Artificial Sequence: Synthetic oligonucleotide
  Sense strand starting at position 3966 of SEQ ID NO: 913772
cauucuuaagaguauaggu

SEQ ID NO: 952775 - RNA, 19 nt, Artificial Sequence
  Description of Artificial Sequence: Synthetic oligonucleotide
  Antisense strand to SEQ ID NO: 952774
accuauacucuuaagaaug

SEQ ID NO: 952776 - RNA, 19 nt, Artificial Sequence
  Description of Artificial Sequence: Synthetic oligonucleotide
  Sense strand starting at position 885 of SEQ ID NO: 913772
auccuuuacgguuagaaag

SEQ ID NO: 952777 - RNA, 19 nt, Artificial Sequence
  Description of Artificial Sequence: Synthetic oligonucleotide
  Antisense strand to SEQ ID NO: 952776
cuuucuaaccguaaaggau

SEQ ID NO: 952778 - RNA, 19 nt, Artificial Sequence
  Description of Artificial Sequence: Synthetic oligonucleotide
  Sense strand starting at position 716 of SEQ ID NO: 913772
ucaauucugcauggcauuu

SEQ ID NO: 952779 - RNA, 19 nt, Artificial Sequence
  Description of Artificial Sequence: Synthetic oligonucleotide
  Antisense strand to SEQ ID NO: 952778
aaaugccaugcagaauuga

SEQ ID NO: 952780 - RNA, 19 nt, Artificial Sequence
  Description of Artificial Sequence: Synthetic oligonucleotide
  Sense strand starting at position 3720 of SEQ ID NO: 913772
uaaagugacuuggugacaa

SEQ ID NO: 952781 - RNA, 19 nt, Artificial Sequence
  Description of Artificial Sequence: Synthetic oligonucleotide
  Antisense strand to SEQ ID NO: 952780
uugucaccaagucacuuua

SEQ ID NO: 952782 - RNA, 19 nt, Artificial Sequence
  Description of Artificial Sequence: Synthetic oligonucleotide
  Sense strand starting at position 3020 of SEQ ID NO: 913772
guuaacagaguuuacagua

SEQ ID NO: 952783 - RNA, 19 nt, Artificial Sequence
  Description of Artificial Sequence: Synthetic oligonucleotide
  Antisense strand to SEQ ID NO: 952782
uacuguaaacucuguuaac

SEQ ID NO: 952784 - RNA, 19 nt, Artificial Sequence
  Description of Artificial Sequence: Synthetic oligonucleotide
  Sense strand starting at position 3025 of SEQ ID NO: 913772
cagaguuuacaguaguaau

SEQ ID NO: 952785 - RNA, 19 nt, Artificial Sequence
  Description of Artificial Sequence: Synthetic oligonucleotide
  Antisense strand to SEQ ID NO: 952784
auuacuacuguaaacucug

SEQ ID NO: 952786 - RNA, 19 nt, Artificial Sequence
  Description of Artificial Sequence: Synthetic oligonucleotide
  Sense strand starting at position 483 of SEQ ID NO: 913772
ggcucagggcauuacaaau

SEQ ID NO: 952787 - RNA, 19 nt, Artificial Sequence
  Description of Artificial Sequence: Synthetic oligonucleotide
  Antisense strand to SEQ ID NO: 952786
auuuguaaugcccugagcc

SEQ ID NO: 952788 - RNA, 19 nt, Artificial Sequence
  Description of Artificial Sequence: Synthetic oligonucleotide
  Sense strand starting at position 595 of SEQ ID NO: 913772
gugagaauguacuuggaac

SEQ ID NO: 952789 - RNA, 19 nt, Artificial Sequence
  Description of Artificial Sequence: Synthetic oligonucleotide
  Antisense strand to SEQ ID NO: 952788
guuccaaguacauucucac

SEQ ID NO: 952790 - RNA, 19 nt, Artificial Sequence
  Description of Artificial Sequence: Synthetic oligonucleotide
  Sense strand starting at position 3869 of SEQ ID NO: 913772
agugauauccuaggagcaa

SEQ ID NO: 952791 - RNA, 19 nt, Artificial Sequence
  Description of Artificial Sequence: Synthetic oligonucleotide
  Antisense strand to SEQ ID NO: 952790
uugcuccuaggauaucacu

SEQ ID NO: 952792 - RNA, 19 nt, Artificial Sequence
  Description of Artificial Sequence: Synthetic oligonucleotide
  Sense strand starting at position 293 of SEQ ID NO: 913772
ccauaucauugacuacagu

SEQ ID NO: 952793 - RNA, 19 nt, Artificial Sequence
  Description of Artificial Sequence: Synthetic oligonucleotide
  Antisense strand to SEQ ID NO: 952792
acuguagucaaugauaugg

SEQ ID NO: 952794 - RNA, 19 nt, Artificial Sequence
  Description of Artificial Sequence: Synthetic oligonucleotide
  Sense strand starting at position 2956 of SEQ ID NO: 913772
guaguccaauauucuaaau

SEQ ID NO: 952795 - RNA, 19 nt, Artificial Sequence
  Description of Artificial Sequence: Synthetic oligonucleotide
  Antisense strand to SEQ ID NO: 952794
auuuagaauauuggacuac

SEQ ID NO: 952796 - RNA, 19 nt, Artificial Sequence
  Description of Artificial Sequence: Synthetic oligonucleotide
  Sense strand starting at position 2901 of SEQ ID NO: 913772
acaaaugucagugagcagu

SEQ ID NO: 952797 - RNA, 19 nt, Artificial Sequence
  Description of Artificial Sequence: Synthetic oligonucleotide
  Antisense strand to SEQ ID NO: 952796
acugcucacugacauuugu

SEQ ID NO: 952798 - RNA, 19 nt, Artificial Sequence
  Description of Artificial Sequence: Synthetic oligonucleotide
  Sense strand starting at position 2900 of SEQ ID NO: 913772
uacaaaugucagugagcag

SEQ ID NO: 952799 - RNA, 19 nt, Artificial Sequence
  Description of Artificial Sequence: Synthetic oligonucleotide
  Antisense strand to SEQ ID NO: 952798
cugcucacugacauuugua

SEQ ID NO: 952800 - RNA, 19 nt, Artificial Sequence
  Description of Artificial Sequence: Synthetic oligonucleotide
  Sense strand starting at position 2899 of SEQ ID NO: 913772
cuacaaaugucagugagca

SEQ ID NO: 952801 - RNA, 19 nt, Artificial Sequence
  Description of Artificial Sequence: Synthetic oligonucleotide
  Antisense strand to SEQ ID NO: 952800
ugcucacugacauuuguag

SEQ ID NO: 952802 - RNA, 19 nt, Artificial Sequence
  Description of Artificial Sequence: Synthetic oligonucleotide
  Sense strand starting at position 3971 of SEQ ID NO: 913772
uuaagaguauagguugcua

SEQ ID NO: 952803 - RNA, 19 nt, Artificial Sequence
  Description of Artificial Sequence: Synthetic oligonucleotide
  Antisense strand to SEQ ID NO: 952802
uagcaaccuauacucuuaa

SEQ ID NO: 952804 - RNA, 19 nt, Artificial Sequence
  Description of Artificial Sequence: Synthetic oligonucleotide
  Sense strand starting at position 42 of SEQ ID NO: 913772
uaauaaguccugggcucua

SEQ ID NO: 952805 - RNA, 19 nt, Artificial Sequence
  Description of Artificial Sequence: Synthetic oligonucleotide
  Antisense strand to SEQ ID NO: 952804
uagagcccaggacuuauua

SEQ ID NO: 952806 - RNA, 19 nt, Artificial Sequence
  Description of Artificial Sequence: Synthetic oligonucleotide
  Sense strand starting at position 257 of SEQ ID NO: 913772
gcgauaucgagucaauauu

SEQ ID NO: 952807 - RNA, 19 nt, Artificial Sequence
  Description of Artificial Sequence: Synthetic oligonucleotide
  Antisense strand to SEQ ID NO: 952806
aauauugacucgauaucgc

SEQ ID NO: 952808 - RNA, 19 nt, Artificial Sequence
  Description of Artificial Sequence: Synthetic oligonucleotide
  Sense strand starting at position 2566 of SEQ ID NO: 913772
gucacugcuuuauuauaag

SEQ ID NO: 952809 - RNA, 19 nt, Artificial Sequence
  Description of Artificial Sequence: Synthetic oligonucleotide
  Antisense strand to SEQ ID NO: 952808
cuuauaauaaagcagugac

SEQ ID NO: 952810 - RNA, 19 nt, Artificial Sequence
  Description of Artificial Sequence: Synthetic oligonucleotide
  Sense strand starting at position 583 of SEQ ID NO: 913772
agcugucccucagugagaa

SEQ ID NO: 952811 - RNA, 19 nt, Artificial Sequence
  Description of Artificial Sequence: Synthetic oligonucleotide
  Antisense strand to SEQ ID NO: 952810
uucucacugagggacagcu

SEQ ID NO: 952812 - RNA, 19 nt, Artificial Sequence
  Description of Artificial Sequence: Synthetic oligonucleotide
  Sense strand starting at position 2638 of SEQ ID NO: 913772
cgugucugcgacagucuua

SEQ ID NO: 952813 - RNA, 19 nt, Artificial Sequence
  Description of Artificial Sequence: Synthetic oligonucleotide
  Antisense strand to SEQ ID NO: 952812
uaagacugucgcagacacg

SEQ ID NO: 952814 - RNA, 19 nt, Artificial Sequence
  Description of Artificial Sequence: Synthetic oligonucleotide
  Sense strand starting at position 3973 of SEQ ID NO: 913772
aagaguauagguugcuagu

SEQ ID NO: 952815 - RNA, 19 nt, Artificial Sequence
  Description of Artificial Sequence: Synthetic oligonucleotide
  Antisense strand to SEQ ID NO: 952814
acuagcaaccuauacucuu

SEQ ID NO: 952816 - RNA, 19 nt, Artificial Sequence
  Description of Artificial Sequence: Synthetic oligonucleotide
  Sense strand starting at position 715 of SEQ ID NO: 913772
aucaauucugcauggcauu

SEQ ID NO: 952817 - RNA, 19 nt, Artificial Sequence
  Description of Artificial Sequence: Synthetic oligonucleotide
  Antisense strand to SEQ ID NO: 952816
aaugccaugcagaauugau

SEQ ID NO: 952818 - RNA, 19 nt, Artificial Sequence
  Description of Artificial Sequence: Synthetic oligonucleotide
  Sense strand starting at position 2564 of SEQ ID NO: 913772
ucgucacugcuuuauuaua

SEQ ID NO: 952819 - RNA, 19 nt, Artificial Sequence
  Description of Artificial Sequence: Synthetic oligonucleotide
  Antisense strand to SEQ ID NO: 952818
uauaauaaagcagugacga

SEQ ID NO: 952820 - RNA, 19 nt, Artificial Sequence
  Description of Artificial Sequence: Synthetic oligonucleotide
  Sense strand starting at position 3667 of SEQ ID NO: 913772
ucuuaagaauuacagauga

SEQ ID NO: 952821 - RNA, 19 nt, Artificial Sequence
  Description of Artificial Sequence: Synthetic oligonucleotide
  Antisense strand to SEQ ID NO: 952820
ucaucuguaauucuuaaga

SEQ ID NO: 952822 - RNA, 19 nt, Artificial Sequence
  Description of Artificial Sequence: Synthetic oligonucleotide
  Sense strand starting at position 584 of SEQ ID NO: 913772
gcugucccucagugagaau

SEQ ID NO: 952823 - RNA, 19 nt, Artificial Sequence
  Description of Artificial Sequence: Synthetic oligonucleotide
  Antisense strand to SEQ ID NO: 952822
auucucacugagggacagc

SEQ ID NO: 952824 - RNA, 19 nt, Artificial Sequence
  Description of Artificial Sequence: Synthetic oligonucleotide
  Sense strand starting at position 3569 of SEQ ID NO: 913772
aaaugcauaucggcaaguu

SEQ ID NO: 952825 - RNA, 19 nt, Artificial Sequence
  Description of Artificial Sequence: Synthetic oligonucleotide
  Antisense strand to SEQ ID NO: 952824
aacuugccgauaugcauuu

SEQ ID NO: 952826 - RNA, 19 nt, Artificial Sequence
  Description of Artificial Sequence: Synthetic oligonucleotide
  Sense strand starting at position 2685 of SEQ ID NO: 913772
acacacuggucagauaaua

SEQ ID NO: 952827 - RNA, 19 nt, Artificial Sequence
  Description of Artificial Sequence: Synthetic oligonucleotide
  Antisense strand to SEQ ID NO: 952826
uauuaucugaccagugugu

SEQ ID NO: 952828 - RNA, 19 nt, Artificial Sequence
  Description of Artificial Sequence: Synthetic oligonucleotide
  Sense strand starting at position 2562 of SEQ ID NO: 913772
auucgucacugcuuuauua

SEQ ID NO: 952829 - RNA, 19 nt, Artificial Sequence
  Description of Artificial Sequence: Synthetic oligonucleotide
  Antisense strand to SEQ ID NO: 952828
uaauaaagcagugacgaau

SEQ ID NO: 952830 - RNA, 19 nt, Artificial Sequence
  Description of Artificial Sequence: Synthetic oligonucleotide
  Sense strand starting at position 2558 of SEQ ID NO: 913772
uuaaauucgucacugcuuu

SEQ ID NO: 952831 - RNA, 19 nt, Artificial Sequence
  Description of Artificial Sequence: Synthetic oligonucleotide
  Antisense strand to SEQ ID NO: 952830
aaagcagugacgaauuuaa

SEQ ID NO: 952832 - RNA, 19 nt, Artificial Sequence
  Description of Artificial Sequence: Synthetic oligonucleotide
  Sense strand starting at position 675 of SEQ ID NO: 913772
ggcagcgucacauguaaga

SEQ ID NO: 952833 - RNA, 19 nt, Artificial Sequence
  Description of Artificial Sequence: Synthetic oligonucleotide
  Antisense strand to SEQ ID NO: 952832
ucuuacaugugacgcugcc

SEQ ID NO: 952834 - RNA, 19 nt, Artificial Sequence
  Description of Artificial Sequence: Synthetic oligonucleotide
  Sense strand starting at position 2645 of SEQ ID NO: 913772
gcgacagucuuaguacuuu

SEQ ID NO: 952835 - RNA, 19 nt, Artificial Sequence
  Description of Artificial Sequence: Synthetic oligonucleotide
  Antisense strand to SEQ ID NO: 952834
aaaguacuaagacugucgc

SEQ ID NO: 952836 - RNA, 19 nt, Artificial Sequence
  Description of Artificial Sequence: Synthetic oligonucleotide
  Sense strand starting at position 3132 of SEQ ID NO: 913772
gcuaauagguuagaaacca

SEQ ID NO: 952837 - RNA, 19 nt, Artificial Sequence
  Description of Artificial Sequence: Synthetic oligonucleotide
  Antisense strand to SEQ ID NO: 952836
ugguuucuaaccuauuagc

SEQ ID NO: 952838 - RNA, 19 nt, Artificial Sequence
  Description of Artificial Sequence: Synthetic oligonucleotide
  Sense strand starting at position 3982 of SEQ ID NO: 913772
gguugcuaguugccuuaua

SEQ ID NO: 952839 - RNA, 19 nt, Artificial Sequence
  Description of Artificial Sequence: Synthetic oligonucleotide
  Antisense strand to SEQ ID NO: 952838
uauaaggcaacuagcaacc

SEQ ID NO: 952840 - RNA, 19 nt, Artificial Sequence
  Description of Artificial Sequence: Synthetic oligonucleotide
  Sense strand starting at position 3870 of SEQ ID NO: 913772
gugauauccuaggagcaaa

SEQ ID NO: 952841 - RNA, 19 nt, Artificial Sequence
  Description of Artificial Sequence: Synthetic oligonucleotide
  Antisense strand to SEQ ID NO: 952840
uuugcuccuaggauaucac

SEQ ID NO: 952842 - RNA, 19 nt, Artificial Sequence
  Description of Artificial Sequence: Synthetic oligonucleotide
  Sense strand starting at position 3724 of SEQ ID NO: 913772
gugacuuggugacaauaau

SEQ ID NO: 952843 - RNA, 19 nt, Artificial Sequence
  Description of Artificial Sequence: Synthetic oligonucleotide
  Antisense strand to SEQ ID NO: 952842
auuauugucaccaagucac

SEQ ID NO: 952844 - RNA, 19 nt, Artificial Sequence
  Description of Artificial Sequence: Synthetic oligonucleotide
  Sense strand starting at position 263 of SEQ ID NO: 913772
ucgagucaauauuaauaca

SEQ ID NO: 952845 - RNA, 19 nt, Artificial Sequence
  Description of Artificial Sequence: Synthetic oligonucleotide
  Antisense strand to SEQ ID NO: 952844
uguauuaauauugacucga

SEQ ID NO: 952846 - RNA, 19 nt, Artificial Sequence
  Description of Artificial Sequence: Synthetic oligonucleotide
  Sense strand starting at position 3983 of SEQ ID NO: 913772
guugcuaguugccuuauau

SEQ ID NO: 952847 - RNA, 19 nt, Artificial Sequence
  Description of Artificial Sequence: Synthetic oligonucleotide
  Antisense strand to SEQ ID NO: 952846
auauaaggcaacuagcaac

SEQ ID NO: 952848 - RNA, 19 nt, Artificial Sequence
  Description of Artificial Sequence: Synthetic oligonucleotide
  Sense strand starting at position 922 of SEQ ID NO: 913772
gaggaugaauccgggcaca

SEQ ID NO: 952849 - RNA, 19 nt, Artificial Sequence
  Description of Artificial Sequence: Synthetic oligonucleotide
  Antisense strand to SEQ ID NO: 952848
ugugcccggauucauccuc

SEQ ID NO: 952850 - RNA, 19 nt, Artificial Sequence
  Description of Artificial Sequence: Synthetic oligonucleotide
  Sense strand starting at position 29 of SEQ ID NO: 913773
accuucuguccauauagga

SEQ ID NO: 952851 - RNA, 19 nt, Artificial Sequence
  Description of Artificial Sequence: Synthetic oligonucleotide
  Antisense strand to SEQ ID NO: 952850
uccuauauggacagaaggu

SEQ ID NO: 952852 - RNA, 19 nt, Artificial Sequence
  Description of Artificial Sequence: Synthetic oligonucleotide
  Sense strand starting at position 3884 of SEQ ID NO: 913773
ggaggagaacuauggcuuu

SEQ ID NO: 952853 - RNA, 19 nt, Artificial Sequence
  Description of Artificial Sequence: Synthetic oligonucleotide
  Antisense strand to SEQ ID NO: 952852
aaagccauaguucuccucc

SEQ ID NO: 952854 - RNA, 19 nt, Artificial Sequence
  Description of Artificial Sequence: Synthetic oligonucleotide
  Sense strand starting at position 3862 of SEQ ID NO: 913773
aggcgccauuucuuugaga

SEQ ID NO: 952855 - RNA, 19 nt, Artificial Sequence
  Description of Artificial Sequence: Synthetic oligonucleotide
  Antisense strand to SEQ ID NO: 952854
ucucaaagaaauggcgccu

SEQ ID NO: 952856 - RNA, 19 nt, Artificial Sequence
  Description of Artificial Sequence: Synthetic oligonucleotide
  Sense strand starting at position 3863 of SEQ ID NO: 913773
ggcgccauuucuuugagag

SEQ ID NO: 952857 - RNA, 19 nt, Artificial Sequence
  Description of Artificial Sequence: Synthetic oligonucleotide
  Antisense strand to SEQ ID NO: 952856
cucucaaagaaauggcgcc

SEQ ID NO: 952858 - RNA, 19 nt, Artificial Sequence
  Description of Artificial Sequence: Synthetic oligonucleotide
  Sense strand starting at position 3864 of SEQ ID NO: 913773
gcgccauuucuuugagagg

SEQ ID NO: 952859 - RNA, 19 nt, Artificial Sequence
  Description of Artificial Sequence: Synthetic oligonucleotide
  Antisense strand to SEQ ID NO: 952858
ccucucaaagaaauggcgc

SEQ ID NO: 952860 - RNA, 19 nt, Artificial Sequence
  Description of Artificial Sequence: Synthetic oligonucleotide
  Sense strand starting at position 1117 of SEQ ID NO: 913773
gcaaucucgccuucgguau

SEQ ID NO: 952861 - RNA, 19 nt, Artificial Sequence
  Description of Artificial Sequence: Synthetic oligonucleotide
  Antisense strand to SEQ ID NO: 952860
auaccgaaggcgagauugc

SEQ ID NO: 952862 - RNA, 19 nt, Artificial Sequence
  Description of Artificial Sequence: Synthetic oligonucleotide
  Sense strand starting at position 1116 of SEQ ID NO: 913773
ugcaaucucgccuucggua

SEQ ID NO: 952863 - RNA, 19 nt, Artificial Sequence
  Description of Artificial Sequence: Synthetic oligonucleotide
  Antisense strand to SEQ ID NO: 952862
uaccgaaggcgagauugca

SEQ ID NO: 952864 - RNA, 19 nt, Artificial Sequence
  Description of Artificial Sequence: Synthetic oligonucleotide
  Sense strand starting at position 3832 of SEQ ID NO: 913773
uagagaguuugagcacgaa

SEQ ID NO: 952865 - RNA, 19 nt, Artificial Sequence
  Description of Artificial Sequence: Synthetic oligonucleotide
  Antisense strand to SEQ ID NO: 952864
uucgugcucaaacucucua

SEQ ID NO: 952866 - RNA, 19 nt, Artificial Sequence
  Description of Artificial Sequence: Synthetic oligonucleotide
  Sense strand starting at position 930 of SEQ ID NO: 913773
uucuuauuccaacaugcga

SEQ ID NO: 952867 - RNA, 19 nt, Artificial Sequence
  Description of Artificial Sequence: Synthetic oligonucleotide
  Antisense strand to SEQ ID NO: 952866
ucgcauguuggaauaagaa

SEQ ID NO: 952868 - RNA, 19 nt, Artificial Sequence
  Description of Artificial Sequence: Synthetic oligonucleotide
  Sense strand starting at position 246 of SEQ ID NO: 913773
ggacaccauuuguaaucua

SEQ ID NO: 952869 - RNA, 19 nt, Artificial Sequence
  Description of Artificial Sequence: Synthetic oligonucleotide
  Antisense strand to SEQ ID NO: 952868
uagauuacaaauggugucc

SEQ ID NO: 952870 - RNA, 19 nt, Artificial Sequence
  Description of Artificial Sequence: Synthetic oligonucleotide
  Sense strand starting at position 3887 of SEQ ID NO: 913773
ggagaacuauggcuuugca

SEQ ID NO: 952871 - RNA, 19 nt, Artificial Sequence
  Description of Artificial Sequence: Synthetic oligonucleotide
  Antisense strand to SEQ ID NO: 952870
ugcaaagccauaguucucc

SEQ ID NO: 952872 - RNA, 19 nt, Artificial Sequence
  Description of Artificial Sequence: Synthetic oligonucleotide
  Sense strand starting at position 3754 of SEQ ID NO: 913773
ugguucuuuccggagguga

SEQ ID NO: 952873 - RNA, 19 nt, Artificial Sequence
  Description of Artificial Sequence: Synthetic oligonucleotide
  Antisense strand to SEQ ID NO: 952872
ucaccuccggaaagaacca

SEQ ID NO: 952874 - RNA, 19 nt, Artificial Sequence
  Description of Artificial Sequence: Synthetic oligonucleotide
  Sense strand starting at position 3836 of SEQ ID NO: 913773
gaguuugagcacgaaguuu

SEQ ID NO: 952875 - RNA, 19 nt, Artificial Sequence
  Description of Artificial Sequence: Synthetic oligonucleotide
  Antisense strand to SEQ ID NO: 952874
aaacuucgugcucaaacuc

SEQ ID NO: 952876 - RNA, 19 nt, Artificial Sequence
  Description of Artificial Sequence: Synthetic oligonucleotide
  Sense strand starting at position 441 of SEQ ID NO: 913773
uaaugaauccagcguauca

SEQ ID NO: 952877 - RNA, 19 nt, Artificial Sequence
  Description of Artificial Sequence: Synthetic oligonucleotide
  Antisense strand to SEQ ID NO: 952876
ugauacgcuggauucauua

SEQ ID NO: 952878 - RNA, 19 nt, Artificial Sequence
  Description of Artificial Sequence: Synthetic oligonucleotide
  Sense strand starting at position 831 of SEQ ID NO: 913773
cugucuuagcaucaucuuu

SEQ ID NO: 952879 - RNA, 19 nt, Artificial Sequence
  Description of Artificial Sequence: Synthetic oligonucleotide
  Antisense strand to SEQ ID NO: 952878
aaagaugaugcuaagacag

SEQ ID NO: 952880 - RNA, 19 nt, Artificial Sequence
  Description of Artificial Sequence: Synthetic oligonucleotide
  Sense strand starting at position 3959 of SEQ ID NO: 913773
aagucugucccuggaguca

SEQ ID NO: 952881 - RNA, 19 nt, Artificial Sequence
  Description of Artificial Sequence: Synthetic oligonucleotide
  Antisense strand to SEQ ID NO: 952880
ugacuccagggacagacuu

SEQ ID NO: 952882 - RNA, 19 nt, Artificial Sequence
  Description of Artificial Sequence: Synthetic oligonucleotide
  Sense strand starting at position 3957 of SEQ ID NO: 913773
ugaagucugucccuggagu

SEQ ID NO: 952883 - RNA, 19 nt, Artificial Sequence
  Description of Artificial Sequence: Synthetic oligonucleotide
  Antisense strand to SEQ ID NO: 952882
acuccagggacagacuuca

SEQ ID NO: 952884 - RNA, 19 nt, Artificial Sequence
  Description of Artificial Sequence: Synthetic oligonucleotide
  Sense strand starting at position 3835 of SEQ ID NO: 913773
agaguuugagcacgaaguu

SEQ ID NO: 952885 - RNA, 19 nt, Artificial Sequence
  Description of Artificial Sequence: Synthetic oligonucleotide
  Antisense strand to SEQ ID NO: 952884
aacuucgugcucaaacucu

SEQ ID NO: 952886 - RNA, 19 nt, Artificial Sequence
  Description of Artificial Sequence: Synthetic oligonucleotide
  Sense strand starting at position 2296 of SEQ ID NO: 913773
gcuaaaguuugugugagag

SEQ ID NO: 952887 - RNA, 19 nt, Artificial Sequence
  Description of Artificial Sequence: Synthetic oligonucleotide
  Antisense strand to SEQ ID NO: 952886
cucucacacaaacuuuagc

SEQ ID NO: 952888 - RNA, 19 nt, Artificial Sequence
  Description of Artificial Sequence: Synthetic oligonucleotide
  Sense strand starting at position 3756 of SEQ ID NO: 913773
guucuuuccggaggugaau

SEQ ID NO: 952889 - RNA, 19 nt, Artificial Sequence
  Description of Artificial Sequence: Synthetic oligonucleotide
  Antisense strand to SEQ ID NO: 952888
auucaccuccggaaagaac

SEQ ID NO: 952890 - RNA, 19 nt, Artificial Sequence
  Description of Artificial Sequence: Synthetic oligonucleotide
  Sense strand starting at position 375 of SEQ ID NO: 913773
gcaugucucuuccugggau

SEQ ID NO: 952891 - RNA, 19 nt, Artificial Sequence
  Description of Artificial Sequence: Synthetic oligonucleotide
  Antisense strand to SEQ ID NO: 952890
aucccaggaagagacaugc

SEQ ID NO: 952892 - RNA, 19 nt, Artificial Sequence
  Description of Artificial Sequence: Synthetic oligonucleotide
  Sense strand starting at position 2202 of SEQ ID NO: 913773
agaggagcguagccuuauu

SEQ ID NO: 952893 - RNA, 19 nt, Artificial Sequence
  Description of Artificial Sequence: Synthetic oligonucleotide
  Antisense strand to SEQ ID NO: 952892
aauaaggcuacgcuccucu

SEQ ID NO: 952894 - RNA, 19 nt, Artificial Sequence
  Description of Artificial Sequence: Synthetic oligonucleotide
  Sense strand starting at position 3820 of SEQ ID NO: 913773
agaaauggcuccuagagag

SEQ ID NO: 952895 - RNA, 19 nt, Artificial Sequence
  Description of Artificial Sequence: Synthetic oligonucleotide
  Antisense strand to SEQ ID NO: 952894
cucucuaggagccauuucu

SEQ ID NO: 952896 - RNA, 19 nt, Artificial Sequence
  Description of Artificial Sequence: Synthetic oligonucleotide
  Sense strand starting at position 2211 of SEQ ID NO: 913773
uagccuuauuggcugcaga

SEQ ID NO: 952897 - RNA, 19 nt, Artificial Sequence
  Description of Artificial Sequence: Synthetic oligonucleotide
  Antisense strand to SEQ ID NO: 952896
ucugcagccaauaaggcua

SEQ ID NO: 952898 - RNA, 19 nt, Artificial Sequence
  Description of Artificial Sequence: Synthetic oligonucleotide
  Sense strand starting at position 827 of SEQ ID NO: 913773
ucugcugucuuagcaucau

SEQ ID NO: 952899 - RNA, 19 nt, Artificial Sequence
  Description of Artificial Sequence: Synthetic oligonucleotide
  Antisense strand to SEQ ID NO: 952898
augaugcuaagacagcaga

SEQ ID NO: 952900 - RNA, 19 nt, Artificial Sequence
  Description of Artificial Sequence: Synthetic oligonucleotide
  Sense strand starting at position 2293 of SEQ ID NO: 913773
gcagcuaaaguuuguguga

SEQ ID NO: 952901 - RNA, 19 nt, Artificial Sequence
  Description of Artificial Sequence: Synthetic oligonucleotide
  Antisense strand to SEQ ID NO: 952900
ucacacaaacuuuagcugc

SEQ ID NO: 952902 - RNA, 19 nt, Artificial Sequence
  Description of Artificial Sequence: Synthetic oligonucleotide
  Sense strand starting at position 2300 of SEQ ID NO: 913773
aaguuugugugagagcuga

SEQ ID NO: 952903 - RNA, 19 nt, Artificial Sequence
  Description of Artificial Sequence: Synthetic oligonucleotide
  Antisense strand to SEQ ID NO: 952902
ucagcucucacacaaacuu

SEQ ID NO: 952904 - RNA, 19 nt, Artificial Sequence
  Description of Artificial Sequence: Synthetic oligonucleotide
  Sense strand starting at position 376 of SEQ ID NO: 913773
caugucucuuccugggaua

SEQ ID NO: 952905 - RNA, 19 nt, Artificial Sequence
  Description of Artificial Sequence: Synthetic oligonucleotide
  Antisense strand to SEQ ID NO: 952904
uaucccaggaagagacaug

SEQ ID NO: 952906 - RNA, 19 nt, Artificial Sequence
  Description of Artificial Sequence: Synthetic oligonucleotide
  Sense strand starting at position 2298 of SEQ ID NO: 913773
uaaaguuugugugagagcu

SEQ ID NO: 952907 - RNA, 19 nt, Artificial Sequence
  Description of Artificial Sequence: Synthetic oligonucleotide
  Antisense strand to SEQ ID NO: 952906
agcucucacacaaacuuua

SEQ ID NO: 952908 - RNA, 19 nt, Artificial Sequence
  Description of Artificial Sequence: Synthetic oligonucleotide
  Sense strand starting at position 2295 of SEQ ID NO: 913773
agcuaaaguuugugugaga

SEQ ID NO: 952909 - RNA, 19 nt, Artificial Sequence
  Description of Artificial Sequence: Synthetic oligonucleotide
  Antisense strand to SEQ ID NO: 952908
ucucacacaaacuuuagcu

SEQ ID NO: 952910 - RNA, 19 nt, Artificial Sequence
  Description of Artificial Sequence: Synthetic oligonucleotide
  Sense strand starting at position 3368 of SEQ ID NO: 913773
gcggcauccuuguguggga

SEQ ID NO: 952911 - RNA, 19 nt, Artificial Sequence
  Description of Artificial Sequence: Synthetic oligonucleotide
  Antisense strand to SEQ ID NO: 952910
ucccacacaaggaugccgc

SEQ ID NO: 952912 - RNA, 19 nt, Artificial Sequence
  Description of Artificial Sequence: Synthetic oligonucleotide
  Sense strand starting at position 2752 of SEQ ID NO: 913774
agacaaguccgggaucuuu

SEQ ID NO: 952913 - RNA, 19 nt, Artificial Sequence
  Description of Artificial Sequence: Synthetic oligonucleotide
  Antisense strand to SEQ ID NO: 952912
aaagaucccggacuugucu

SEQ ID NO: 952914 - RNA, 19 nt, Artificial Sequence
  Description of Artificial Sequence: Synthetic oligonucleotide
  Sense strand starting at position 2971 of SEQ ID NO: 913774
ucaaauucucgguaaauau

SEQ ID NO: 952915 - RNA, 19 nt, Artificial Sequence
  Description of Artificial Sequence: Synthetic oligonucleotide
  Antisense strand to SEQ ID NO: 952914
auauuuaccgagaauuuga

SEQ ID NO: 952916 - RNA, 19 nt, Artificial Sequence
  Description of Artificial Sequence: Synthetic oligonucleotide
  Sense strand starting at position 2581 of SEQ ID NO: 913774
ggaauaagugucgaccuga

SEQ ID NO: 952917 - RNA, 19 nt, Artificial Sequence
  Description of Artificial Sequence: Synthetic oligonucleotide
  Antisense strand to SEQ ID NO: 952916
ucaggucgacacuuauucc

SEQ ID NO: 952918 - RNA, 19 nt, Artificial Sequence
  Description of Artificial Sequence: Synthetic oligonucleotide
  Sense strand starting at position 2772 of SEQ ID NO: 913774
agugaauugcugccggcuu

SEQ ID NO: 952919 - RNA, 19 nt, Artificial Sequence
  Description of Artificial Sequence: Synthetic oligonucleotide
  Antisense strand to SEQ ID NO: 952918
aagccggcagcaauucacu

SEQ ID NO: 952920 - RNA, 19 nt, Artificial Sequence
  Description of Artificial Sequence: Synthetic oligonucleotide
  Sense strand starting at position 857 of SEQ ID NO: 913774
ggauuauccaguuauggca

SEQ ID NO: 952921 - RNA, 19 nt, Artificial Sequence
  Description of Artificial Sequence: Synthetic oligonucleotide
  Antisense strand to SEQ ID NO: 952920
ugccauaacuggauaaucc

SEQ ID NO: 952922 - RNA, 19 nt, Artificial Sequence
  Description of Artificial Sequence: Synthetic oligonucleotide
  Sense strand starting at position 2688 of SEQ ID NO: 913774
aggagaggucucugacucu

SEQ ID NO: 952923 - RNA, 19 nt, Artificial Sequence
  Description of Artificial Sequence: Synthetic oligonucleotide
  Antisense strand to SEQ ID NO: 952922
agagucagagaccucuccu

SEQ ID NO: 952924 - RNA, 19 nt, Artificial Sequence
  Description of Artificial Sequence: Synthetic oligonucleotide
  Sense strand starting at position 2691 of SEQ ID NO: 913774
agaggucucugacucuaac

SEQ ID NO: 952925 - RNA, 19 nt, Artificial Sequence
  Description of Artificial Sequence: Synthetic oligonucleotide
  Antisense strand to SEQ ID NO: 952924
guuagagucagagaccucu

SEQ ID NO: 952926 - RNA, 19 nt, Artificial Sequence
  Description of Artificial Sequence: Synthetic oligonucleotide
  Sense strand starting at position 3805 of SEQ ID NO: 913774
gagagaccaugucucuuua

SEQ ID NO: 952927 - RNA, 19 nt, Artificial Sequence
  Description of Artificial Sequence: Synthetic oligonucleotide
  Antisense strand to SEQ ID NO: 952926
uaaagagacauggucucuc

SEQ ID NO: 952928 - RNA, 19 nt, Artificial Sequence
  Description of Artificial Sequence: Synthetic oligonucleotide
  Sense strand starting at position 3163 of SEQ ID NO: 913774
gcuguuauuaaguagagau

SEQ ID NO: 952929 - RNA, 19 nt, Artificial Sequence
  Description of Artificial Sequence: Synthetic oligonucleotide
  Antisense strand to SEQ ID NO: 952928
aucucuacuuaauaacagc

SEQ ID NO: 952930 - RNA, 19 nt, Artificial Sequence
  Description of Artificial Sequence: Synthetic oligonucleotide
  Sense strand starting at position 3005 of SEQ ID NO: 913774
gaaagacugccugaguguu

SEQ ID NO: 952931 - RNA, 19 nt, Artificial Sequence
  Description of Artificial Sequence: Synthetic oligonucleotide
  Antisense strand to SEQ ID NO: 952930
aacacucaggcagucuuuc

SEQ ID NO: 952932 - RNA, 19 nt, Artificial Sequence
  Description of Artificial Sequence: Synthetic oligonucleotide
  Sense strand starting at position 2567 of SEQ ID NO: 913774
aaucccugguccuuggaau

SEQ ID NO: 952933 - RNA, 19 nt, Artificial Sequence
  Description of Artificial Sequence: Synthetic oligonucleotide
  Antisense strand to SEQ ID NO: 952932
auuccaaggaccagggauu

SEQ ID NO: 952934 - RNA, 19 nt, Artificial Sequence
  Description of Artificial Sequence: Synthetic oligonucleotide
  Sense strand starting at position 2911 of SEQ ID NO: 913774
aggaaucgugccuaacuca

SEQ ID NO: 952935 - RNA, 19 nt, Artificial Sequence
  Description of Artificial Sequence: Synthetic oligonucleotide
  Antisense strand to SEQ ID NO: 952934
ugaguuaggcacgauuccu

SEQ ID NO: 952936 - RNA, 19 nt, Artificial Sequence
  Description of Artificial Sequence: Synthetic oligonucleotide
  Sense strand starting at position 2568 of SEQ ID NO: 913774
aucccugguccuuggaaua

SEQ ID NO: 952937 - RNA, 19 nt, Artificial Sequence
  Description of Artificial Sequence: Synthetic oligonucleotide
  Antisense strand to SEQ ID NO: 952936
uauuccaaggaccagggau

SEQ ID NO: 952938 - RNA, 19 nt, Artificial Sequence
  Description of Artificial Sequence: Synthetic oligonucleotide
  Sense strand starting at position 2751 of SEQ ID NO: 913774
cagacaaguccgggaucuu

SEQ ID NO: 952939 - RNA, 19 nt, Artificial Sequence
  Description of Artificial Sequence: Synthetic oligonucleotide
  Antisense strand to SEQ ID NO: 952938
aagaucccggacuugucug

SEQ ID NO: 952940 - RNA, 19 nt, Artificial Sequence
  Description of Artificial Sequence: Synthetic oligonucleotide
  Sense strand starting at position 3478 of SEQ ID NO: 913774
gcagcauccuuugcauuua

SEQ ID NO: 952941 - RNA, 19 nt, Artificial Sequence
  Description of Artificial Sequence: Synthetic oligonucleotide
  Antisense strand to SEQ ID NO: 952940
uaaaugcaaaggaugcugc

SEQ ID NO: 952942 - RNA, 19 nt, Artificial Sequence
  Description of Artificial Sequence: Synthetic oligonucleotide
  Sense strand starting at position 2542 of SEQ ID NO: 913774
caaacucuggcggauaguu

SEQ ID NO: 952943 - RNA, 19 nt, Artificial Sequence
  Description of Artificial Sequence: Synthetic oligonucleotide
  Antisense strand to SEQ ID NO: 952942
aacuauccgccagaguuug

SEQ ID NO: 952944 - RNA, 19 nt, Artificial Sequence
  Description of Artificial Sequence: Synthetic oligonucleotide
  Sense strand starting at position 3608 of SEQ ID NO: 913774
ugagguauagaauguaguu

SEQ ID NO: 952945 - RNA, 19 nt, Artificial Sequence
  Description of Artificial Sequence: Synthetic oligonucleotide
  Antisense strand to SEQ ID NO: 952944
aacuacauucuauaccuca

SEQ ID NO: 952946 - RNA, 19 nt, Artificial Sequence
  Description of Artificial Sequence: Synthetic oligonucleotide
  Sense strand starting at position 3792 of SEQ ID NO: 913774
agcucaaggguucgagaga

SEQ ID NO: 952947 - RNA, 19 nt, Artificial Sequence
  Description of Artificial Sequence: Synthetic oligonucleotide
  Antisense strand to SEQ ID NO: 952946
ucucucgaacccuugagcu

SEQ ID NO: 952948 - RNA, 19 nt, Artificial Sequence
  Description of Artificial Sequence: Synthetic oligonucleotide
  Sense strand starting at position 3477 of SEQ ID NO: 913774
ggcagcauccuuugcauuu

SEQ ID NO: 952949 - RNA, 19 nt, Artificial Sequence
  Description of Artificial Sequence: Synthetic oligonucleotide
  Antisense strand to SEQ ID NO: 952948
aaaugcaaaggaugcugcc

SEQ ID NO: 952950 - RNA, 19 nt, Artificial Sequence
  Description of Artificial Sequence: Synthetic oligonucleotide
  Sense strand starting at position 3716 of SEQ ID NO: 913774
gaaugaugagcuggagugu

SEQ ID NO: 952951 - RNA, 19 nt, Artificial Sequence
  Description of Artificial Sequence: Synthetic oligonucleotide
  Antisense strand to SEQ ID NO: 952950
acacuccagcucaucauuc

SEQ ID NO: 952952 - RNA, 19 nt, Artificial Sequence
  Description of Artificial Sequence: Synthetic oligonucleotide
  Sense strand starting at position 3015 of SEQ ID NO: 913774
cugaguguuuaaccuggau

SEQ ID NO: 952953 - RNA, 19 nt, Artificial Sequence
  Description of Artificial Sequence: Synthetic oligonucleotide
  Antisense strand to SEQ ID NO: 952952
auccagguuaaacacucag

SEQ ID NO: 952954 - RNA, 19 nt, Artificial Sequence
  Description of Artificial Sequence: Synthetic oligonucleotide
  Sense strand starting at position 2970 of SEQ ID NO: 913774
gucaaauucucgguaaaua

SEQ ID NO: 952955 - RNA, 19 nt, Artificial Sequence
  Description of Artificial Sequence: Synthetic oligonucleotide
  Antisense strand to SEQ ID NO: 952954
uauuuaccgagaauuugac

SEQ ID NO: 952956 - RNA, 19 nt, Artificial Sequence
  Description of Artificial Sequence: Synthetic oligonucleotide
  Sense strand starting at position 2403 of SEQ ID NO: 913774
cggucucaaauucgaaaua

SEQ ID NO: 952957 - RNA, 19 nt, Artificial Sequence
  Description of Artificial Sequence: Synthetic oligonucleotide
  Antisense strand to SEQ ID NO: 952956
uauuucgaauuugagaccg

SEQ ID NO: 952958 - RNA, 19 nt, Artificial Sequence
  Description of Artificial Sequence: Synthetic oligonucleotide
  Sense strand starting at position 3095 of SEQ ID NO: 913774
gugguucgugacgagaaca

SEQ ID NO: 952959 - RNA, 19 nt, Artificial Sequence
  Description of Artificial Sequence: Synthetic oligonucleotide
  Antisense strand to SEQ ID NO: 952958
uguucucgucacgaaccac

SEQ ID NO: 952960 - RNA, 19 nt, Artificial Sequence
  Description of Artificial Sequence: Synthetic oligonucleotide
  Sense strand starting at position 866 of SEQ ID NO: 913774
aguuauggcaguuagcaau

SEQ ID NO: 952961 - RNA, 19 nt, Artificial Sequence
  Description of Artificial Sequence: Synthetic oligonucleotide
  Antisense strand to SEQ ID NO: 952960
auugcuaacugccauaacu

SEQ ID NO: 952962 - RNA, 19 nt, Artificial Sequence
  Description of Artificial Sequence: Synthetic oligonucleotide
  Sense strand starting at position 3326 of SEQ ID NO: 913774
accuaugcgcaucauacau

SEQ ID NO: 952963 - RNA, 19 nt, Artificial Sequence
  Description of Artificial Sequence: Synthetic oligonucleotide
  Antisense strand to SEQ ID NO: 952962
auguaugaugcgcauaggu

SEQ ID NO: 952964 - RNA, 19 nt, Artificial Sequence
  Description of Artificial Sequence: Synthetic oligonucleotide
  Sense strand starting at position 2727 of SEQ ID NO: 913774
gagcuccuuggcugggaua

SEQ ID NO: 952965 - RNA, 19 nt, Artificial Sequence
  Description of Artificial Sequence: Synthetic oligonucleotide
  Antisense strand to SEQ ID NO: 952964
uaucccagccaaggagcuc

SEQ ID NO: 952966 - RNA, 19 nt, Artificial Sequence
  Description of Artificial Sequence: Synthetic oligonucleotide
  Sense strand starting at position 3007 of SEQ ID NO: 913774
aagacugccugaguguuua

SEQ ID NO: 952967 - RNA, 19 nt, Artificial Sequence
  Description of Artificial Sequence: Synthetic oligonucleotide
  Antisense strand to SEQ ID NO: 952966
uaaacacucaggcagucuu

SEQ ID NO: 952968 - RNA, 19 nt, Artificial Sequence
  Description of Artificial Sequence: Synthetic oligonucleotide
  Sense strand starting at position 2562 of SEQ ID NO: 913774
ugaguaaucccugguccuu

SEQ ID NO: 952969 - RNA, 19 nt, Artificial Sequence
  Description of Artificial Sequence: Synthetic oligonucleotide
  Antisense strand to SEQ ID NO: 952968
aaggaccagggauuacuca

SEQ ID NO: 952970 - RNA, 19 nt, Artificial Sequence
  Description of Artificial Sequence: Synthetic oligonucleotide
  Sense strand starting at position 3702 of SEQ ID NO: 913774
gaaguauaaugacagaaug

SEQ ID NO: 952971 - RNA, 19 nt, Artificial Sequence
  Description of Artificial Sequence: Synthetic oligonucleotide
  Antisense strand to SEQ ID NO: 952970
cauucugucauuauacuuc

SEQ ID NO: 952972 - RNA, 19 nt, Artificial Sequence
  Description of Artificial Sequence: Synthetic oligonucleotide
  Sense strand starting at position 2729 of SEQ ID NO: 913774
gcuccuuggcugggauaca

SEQ ID NO: 952973 - RNA, 19 nt, Artificial Sequence
  Description of Artificial Sequence: Synthetic oligonucleotide
  Antisense strand to SEQ ID NO: 952972
uguaucccagccaaggagc

SEQ ID NO: 952974 - RNA, 19 nt, Artificial Sequence
  Description of Artificial Sequence: Synthetic oligonucleotide
  Sense strand starting at position 1112 of SEQ ID NO: 913774
ggcacagagugcucaccua

SEQ ID NO: 952975 - RNA, 19 nt, Artificial Sequence
  Description of Artificial Sequence: Synthetic oligonucleotide
  Antisense strand to SEQ ID NO: 952974
uaggugagcacucugugcc

SEQ ID NO: 952976 - RNA, 19 nt, Artificial Sequence
  Description of Artificial Sequence: Synthetic oligonucleotide
  Sense strand starting at position 3162 of SEQ ID NO: 913774
cgcuguuauuaaguagaga

SEQ ID NO: 952977 - RNA, 19 nt, Artificial Sequence
  Description of Artificial Sequence: Synthetic oligonucleotide
  Antisense strand to SEQ ID NO: 952976
ucucuacuuaauaacagcg

SEQ ID NO: 952978 - RNA, 19 nt, Artificial Sequence
  Description of Artificial Sequence: Synthetic oligonucleotide
  Sense strand starting at position 2993 of SEQ ID NO: 913774
uggauuaaaugugaaagac

SEQ ID NO: 952979 - RNA, 19 nt, Artificial Sequence
  Description of Artificial Sequence: Synthetic oligonucleotide
  Antisense strand to SEQ ID NO: 952978
gucuuucacauuuaaucca

SEQ ID NO: 952980 - RNA, 19 nt, Artificial Sequence
  Description of Artificial Sequence: Synthetic oligonucleotide
  Sense strand starting at position 2475 of SEQ ID NO: 913774
caggaaaucuaggaaccga

SEQ ID NO: 952981 - RNA, 19 nt, Artificial Sequence
  Description of Artificial Sequence: Synthetic oligonucleotide
  Antisense strand to SEQ ID NO: 952980
ucgguuccuagauuuccug

SEQ ID NO: 952982 - RNA, 19 nt, Artificial Sequence
  Description of Artificial Sequence: Synthetic oligonucleotide
  Sense strand starting at position 3092 of SEQ ID NO: 913774
cuugugguucgugacgaga

SEQ ID NO: 952983 - RNA, 19 nt, Artificial Sequence
  Description of Artificial Sequence: Synthetic oligonucleotide
  Antisense strand to SEQ ID NO: 952982
ucucgucacgaaccacaag

SEQ ID NO: 952984 - RNA, 19 nt, Artificial Sequence
  Description of Artificial Sequence: Synthetic oligonucleotide
  Sense strand starting at position 3486 of SEQ ID NO: 913774
cuuugcauuuaaugaggga

SEQ ID NO: 952985 - RNA, 19 nt, Artificial Sequence
  Description of Artificial Sequence: Synthetic oligonucleotide
  Antisense strand to SEQ ID NO: 952984
ucccucauuaaaugcaaag

SEQ ID NO: 952986 - RNA, 19 nt, Artificial Sequence
  Description of Artificial Sequence: Synthetic oligonucleotide
  Sense strand starting at position 2981 of SEQ ID NO: 913774
gguaaauauuuguggauua

SEQ ID NO: 952987 - RNA, 19 nt, Artificial Sequence
  Description of Artificial Sequence: Synthetic oligonucleotide
  Antisense strand to SEQ ID NO: 952986
uaauccacaaauauuuacc

SEQ ID NO: 952988 - RNA, 19 nt, Artificial Sequence
  Description of Artificial Sequence: Synthetic oligonucleotide
  Sense strand starting at position 2561 of SEQ ID NO: 913774
gugaguaaucccugguccu

SEQ ID NO: 952989 - RNA, 19 nt, Artificial Sequence
  Description of Artificial Sequence: Synthetic oligonucleotide
  Antisense strand to SEQ ID NO: 952988
aggaccagggauuacucac

SEQ ID NO: 952990 - RNA, 19 nt, Artificial Sequence
  Description of Artificial Sequence: Synthetic oligonucleotide
  Sense strand starting at position 2967 of SEQ ID NO: 913774
cacgucaaauucucgguaa

SEQ ID NO: 952991 - RNA, 19 nt, Artificial Sequence
  Description of Artificial Sequence: Synthetic oligonucleotide
  Antisense strand to SEQ ID NO: 952990
uuaccgagaauuugacgug

SEQ ID NO: 952992 - RNA, 19 nt, Artificial Sequence
  Description of Artificial Sequence: Synthetic oligonucleotide
  Sense strand starting at position 983 of SEQ ID NO: 913775
agggcuuauggucaugaag

SEQ ID NO: 952993 - RNA, 19 nt, Artificial Sequence
  Description of Artificial Sequence: Synthetic oligonucleotide
  Antisense strand to SEQ ID NO: 952992
cuucaugaccauaagcccu

SEQ ID NO: 952994 - RNA, 19 nt, Artificial Sequence
  Description of Artificial Sequence: Synthetic oligonucleotide
  Sense strand starting at position 540 of SEQ ID NO: 913775
gaaggaagaggauguguuu

SEQ ID NO: 952995 - RNA, 19 nt, Artificial Sequence
  Description of Artificial Sequence: Synthetic oligonucleotide
  Antisense strand to SEQ ID NO: 952994
aaacacauccucuuccuuc

SEQ ID NO: 952996 - RNA, 19 nt, Artificial Sequence
  Description of Artificial Sequence: Synthetic oligonucleotide
  Sense strand starting at position 848 of SEQ ID NO: 913775
agggaugagacacgucaua

SEQ ID NO: 952997 - RNA, 19 nt, Artificial Sequence
  Description of Artificial Sequence: Synthetic oligonucleotide
  Antisense strand to SEQ ID NO: 952996
uaugacgugucucaucccu

SEQ ID NO: 952998 - RNA, 19 nt, Artificial Sequence
  Description of Artificial Sequence: Synthetic oligonucleotide
  Sense strand starting at position 3262 of SEQ ID NO: 913775
gggauagguauaugugaau

SEQ ID NO: 952999 - RNA, 19 nt, Artificial Sequence
  Description of Artificial Sequence: Synthetic oligonucleotide
  Antisense strand to SEQ ID NO: 952998
auucacauauaccuauccc

SEQ ID NO: 953000 - RNA, 19 nt, Artificial Sequence
  Description of Artificial Sequence: Synthetic oligonucleotide
  Sense strand starting at position 3628 of SEQ ID NO: 913775
gaggaaugagucugggcaa

SEQ ID NO: 953001 - RNA, 19 nt, Artificial Sequence
  Description of Artificial Sequence: Synthetic oligonucleotide
  Antisense strand to SEQ ID NO: 953000
uugcccagacucauuccuc

SEQ ID NO: 953002 - RNA, 19 nt, Artificial Sequence
  Description of Artificial Sequence: Synthetic oligonucleotide
  Sense strand starting at position 3894 of SEQ ID NO: 913775
auguuagagccagaacucu

SEQ ID NO: 953003 - RNA, 19 nt, Artificial Sequence
  Description of Artificial Sequence: Synthetic oligonucleotide
  Antisense strand to SEQ ID NO: 953002
agaguucuggcucuaacau

SEQ ID NO: 953004 - RNA, 19 nt, Artificial Sequence
  Description of Artificial Sequence: Synthetic oligonucleotide
  Sense strand starting at position 3092 of SEQ ID NO: 913775
aguggcugaggguaagauu

SEQ ID NO: 953005 - RNA, 19 nt, Artificial Sequence
  Description of Artificial Sequence: Synthetic oligonucleotide
  Antisense strand to SEQ ID NO: 953004
aaucuuacccucagccacu

SEQ ID NO: 953006 - RNA, 19 nt, Artificial Sequence
  Description of Artificial Sequence: Synthetic oligonucleotide
  Sense strand starting at position 3274 of SEQ ID NO: 913775
ugugaauaaacuggucaag

SEQ ID NO: 953007 - RNA, 19 nt, Artificial Sequence
  Description of Artificial Sequence: Synthetic oligonucleotide
  Antisense strand to SEQ ID NO: 953006
cuugaccaguuuauucaca

SEQ ID NO: 953008 - RNA, 19 nt, Artificial Sequence
  Description of Artificial Sequence: Synthetic oligonucleotide
  Sense strand starting at position 331 of SEQ ID NO: 913775
aaauguacccagggugaca

SEQ ID NO: 953009 - RNA, 19 nt, Artificial Sequence
  Description of Artificial Sequence: Synthetic oligonucleotide
  Antisense strand to SEQ ID NO: 953008
ugucacccuggguacauuu

SEQ ID NO: 953010 - RNA, 19 nt, Artificial Sequence
  Description of Artificial Sequence: Synthetic oligonucleotide
  Sense strand starting at position 3631 of SEQ ID NO: 913775
gaaugagucugggcaacag

SEQ ID NO: 953011 - RNA, 19 nt, Artificial Sequence
  Description of Artificial Sequence: Synthetic oligonucleotide
  Antisense strand to SEQ ID NO: 953010
cuguugcccagacucauuc

SEQ ID NO: 953012 - RNA, 19 nt, Artificial Sequence
  Description of Artificial Sequence: Synthetic oligonucleotide
  Sense strand starting at position 3614 of SEQ ID NO: 913775
uuaccucuaucuuugagga

SEQ ID NO: 953013 - RNA, 19 nt, Artificial Sequence
  Description of Artificial Sequence: Synthetic oligonucleotide
  Antisense strand to SEQ ID NO: 953012
uccucaaagauagagguaa

SEQ ID NO: 953014 - RNA, 19 nt, Artificial Sequence
  Description of Artificial Sequence: Synthetic oligonucleotide
  Sense strand starting at position 1455 of SEQ ID NO: 913775
auaagagugccugggaaug

SEQ ID NO: 953015 - RNA, 19 nt, Artificial Sequence
  Description of Artificial Sequence: Synthetic oligonucleotide
  Antisense strand to SEQ ID NO: 953014
cauucccaggcacucuuau

SEQ ID NO: 953016 - RNA, 19 nt, Artificial Sequence
  Description of Artificial Sequence: Synthetic oligonucleotide
  Sense strand starting at position 1026 of SEQ ID NO: 913775
aaaguagagcccugacaca

SEQ ID NO: 953017 - RNA, 19 nt, Artificial Sequence
  Description of Artificial Sequence: Synthetic oligonucleotide
  Antisense strand to SEQ ID NO: 953016
ugugucagggcucuacuuu

SEQ ID NO: 953018 - RNA, 19 nt, Artificial Sequence
  Description of Artificial Sequence: Synthetic oligonucleotide
  Sense strand starting at position 3217 of SEQ ID NO: 913775
aagguugauuuccaggaga

SEQ ID NO: 953019 - RNA, 19 nt, Artificial Sequence
  Description of Artificial Sequence: Synthetic oligonucleotide
  Antisense strand to SEQ ID NO: 953018
ucuccuggaaaucaaccuu

SEQ ID NO: 953020 - RNA, 19 nt, Artificial Sequence
  Description of Artificial Sequence: Synthetic oligonucleotide
  Sense strand starting at position 1453 of SEQ ID NO: 913775
ccauaagagugccugggaa

SEQ ID NO: 953021 - RNA, 19 nt, Artificial Sequence
  Description of Artificial Sequence: Synthetic oligonucleotide
  Antisense strand to SEQ ID NO: 953020
uucccaggcacucuuaugg

SEQ ID NO: 953022 - RNA, 19 nt, Artificial Sequence
  Description of Artificial Sequence: Synthetic oligonucleotide
  Sense strand starting at position 3100 of SEQ ID NO: 913775
aggguaagauugucuuuag

SEQ ID NO: 953023 - RNA, 19 nt, Artificial Sequence
  Description of Artificial Sequence: Synthetic oligonucleotide
  Antisense strand to SEQ ID NO: 953022
cuaaagacaaucuuacccu

SEQ ID NO: 953024 - RNA, 19 nt, Artificial Sequence
  Description of Artificial Sequence: Synthetic oligonucleotide
  Sense strand starting at position 3103 of SEQ ID NO: 913775
guaagauugucuuuaggag

SEQ ID NO: 953025 - RNA, 19 nt, Artificial Sequence
  Description of Artificial Sequence: Synthetic oligonucleotide
  Antisense strand to SEQ ID NO: 953024
cuccuaaagacaaucuuac

SEQ ID NO: 953026 - RNA, 19 nt, Artificial Sequence
  Description of Artificial Sequence: Synthetic oligonucleotide
  Sense strand starting at position 982 of SEQ ID NO: 913775
gagggcuuauggucaugaa

SEQ ID NO: 953027 - RNA, 19 nt, Artificial Sequence
  Description of Artificial Sequence: Synthetic oligonucleotide
  Antisense strand to SEQ ID NO: 953026
uucaugaccauaagcccuc

SEQ ID NO: 953028 - RNA, 19 nt, Artificial Sequence
  Description of Artificial Sequence: Synthetic oligonucleotide
  Sense strand starting at position 3256 of SEQ ID NO: 913775
aguucugggauagguauau

SEQ ID NO: 953029 - RNA, 19 nt, Artificial Sequence
  Description of Artificial Sequence: Synthetic oligonucleotide
  Antisense strand to SEQ ID NO: 953028
auauaccuaucccagaacu

SEQ ID NO: 953030 - RNA, 19 nt, Artificial Sequence
  Description of Artificial Sequence: Synthetic oligonucleotide
  Sense strand starting at position 3101 of SEQ ID NO: 913775
ggguaagauugucuuuagg

SEQ ID NO: 953031 - RNA, 19 nt, Artificial Sequence
  Description of Artificial Sequence: Synthetic oligonucleotide
  Antisense strand to SEQ ID NO: 953030
ccuaaagacaaucuuaccc

SEQ ID NO: 953032 - RNA, 19 nt, Artificial Sequence
  Description of Artificial Sequence: Synthetic oligonucleotide
  Sense strand starting at position 1042 of SEQ ID NO: 913775
acauucugguaguuacaca

SEQ ID NO: 953033 - RNA, 19 nt, Artificial Sequence
  Description of Artificial Sequence: Synthetic oligonucleotide
  Antisense strand to SEQ ID NO: 953032
uguguaacuaccagaaugu

SEQ ID NO: 953034 - RNA, 19 nt, Artificial Sequence
  Description of Artificial Sequence: Synthetic oligonucleotide
  Sense strand starting at position 1 of SEQ ID NO: 913775
gacaguggguccuuuggau

SEQ ID NO: 953035 - RNA, 19 nt, Artificial Sequence
  Description of Artificial Sequence: Synthetic oligonucleotide
  Antisense strand to SEQ ID NO: 953034
auccaaaggacccacuguc

SEQ ID NO: 953036 - RNA, 19 nt, Artificial Sequence
  Description of Artificial Sequence: Synthetic oligonucleotide
  Sense strand starting at position 3949 of SEQ ID NO: 913775
agguuaaauggauggcagu

SEQ ID NO: 953037 - RNA, 19 nt, Artificial Sequence
  Description of Artificial Sequence: Synthetic oligonucleotide
  Antisense strand to SEQ ID NO: 953036
acugccauccauuuaaccu

SEQ ID NO: 953038 - RNA, 19 nt, Artificial Sequence
  Description of Artificial Sequence: Synthetic oligonucleotide
  Sense strand starting at position 2573 of SEQ ID NO: 913775
ccaggucaguuucucaaga

SEQ ID NO: 953039 - RNA, 19 nt, Artificial Sequence
  Description of Artificial Sequence: Synthetic oligonucleotide
  Antisense strand to SEQ ID NO: 953038
ucuugagaaacugaccugg

SEQ ID NO: 953040 - RNA, 19 nt, Artificial Sequence
  Description of Artificial Sequence: Synthetic oligonucleotide
  Sense strand starting at position 2859 of SEQ ID NO: 913775
gucugaccuuccucaggau

SEQ ID NO: 953041 - RNA, 19 nt, Artificial Sequence
  Description of Artificial Sequence: Synthetic oligonucleotide
  Antisense strand to SEQ ID NO: 953040
auccugaggaaggucagac

SEQ ID NO: 953042 - RNA, 19 nt, Artificial Sequence
  Description of Artificial Sequence: Synthetic oligonucleotide
  Sense strand starting at position 2736 of SEQ ID NO: 913775
aagaaaugcccuuguuaug

SEQ ID NO: 953043 - RNA, 19 nt, Artificial Sequence
  Description of Artificial Sequence: Synthetic oligonucleotide
  Antisense strand to SEQ ID NO: 953042
cauaacaagggcauuucuu

SEQ ID NO: 953044 - RNA, 19 nt, Artificial Sequence
  Description of Artificial Sequence: Synthetic oligonucleotide
  Sense strand starting at position 704 of SEQ ID NO: 913775
gccauaaggucucuuggaa

SEQ ID NO: 953045 - RNA, 19 nt, Artificial Sequence
  Description of Artificial Sequence: Synthetic oligonucleotide
  Antisense strand to SEQ ID NO: 953044
uuccaagagaccuuauggc

SEQ ID NO: 953046 - RNA, 19 nt, Artificial Sequence
  Description of Artificial Sequence: Synthetic oligonucleotide
  Sense strand starting at position 2564 of SEQ ID NO: 913775
acuagugaaccaggucagu

SEQ ID NO: 953047 - RNA, 19 nt, Artificial Sequence
  Description of Artificial Sequence: Synthetic oligonucleotide
  Antisense strand to SEQ ID NO: 953046
acugaccugguucacuagu

SEQ ID NO: 953048 - RNA, 19 nt, Artificial Sequence
  Description of Artificial Sequence: Synthetic oligonucleotide
  Sense strand starting at position 574 of SEQ ID NO: 913775
gaaguucugaaagguuugu

SEQ ID NO: 953049 - RNA, 19 nt, Artificial Sequence
  Description of Artificial Sequence: Synthetic oligonucleotide
  Antisense strand to SEQ ID NO: 953048
acaaaccuuucagaacuuc

SEQ ID NO: 953050 - RNA, 19 nt, Artificial Sequence
  Description of Artificial Sequence: Synthetic oligonucleotide
  Sense strand starting at position 463 of SEQ ID NO: 913775
ccaagugguuugguggaca

SEQ ID NO: 953051 - RNA, 19 nt, Artificial Sequence
  Description of Artificial Sequence: Synthetic oligonucleotide
  Antisense strand to SEQ ID NO: 953050
uguccaccaaaccacuugg

SEQ ID NO: 953052 - RNA, 19 nt, Artificial Sequence
  Description of Artificial Sequence: Synthetic oligonucleotide
  Sense strand starting at position 2389 of SEQ ID NO: 913775
cuaauauuagcaggcucau

SEQ ID NO: 953053 - RNA, 19 nt, Artificial Sequence
  Description of Artificial Sequence: Synthetic oligonucleotide
  Antisense strand to SEQ ID NO: 953052
augagccugcuaauauuag

SEQ ID NO: 953054 - RNA, 19 nt, Artificial Sequence
  Description of Artificial Sequence: Synthetic oligonucleotide
  Sense strand starting at position 3054 of SEQ ID NO: 913775
aggaauuguggcgggaguu

SEQ ID NO: 953055 - RNA, 19 nt, Artificial Sequence
  Description of Artificial Sequence: Synthetic oligonucleotide
  Antisense strand to SEQ ID NO: 953054
aacucccgccacaauuccu

SEQ ID NO: 953056 - RNA, 19 nt, Artificial Sequence
  Description of Artificial Sequence: Synthetic oligonucleotide
  Sense strand starting at position 3982 of SEQ ID NO: 913775
acaugcucucacugcugaa

SEQ ID NO: 953057 - RNA, 19 nt, Artificial Sequence
  Description of Artificial Sequence: Synthetic oligonucleotide
  Antisense strand to SEQ ID NO: 953056
uucagcagugagagcaugu

SEQ ID NO: 953058 - RNA, 19 nt, Artificial Sequence
  Description of Artificial Sequence: Synthetic oligonucleotide
  Sense strand starting at position 3883 of SEQ ID NO: 913775
auagcugcucaauguuaga

SEQ ID NO: 953059 - RNA, 19 nt, Artificial Sequence
  Description of Artificial Sequence: Synthetic oligonucleotide
  Antisense strand to SEQ ID NO: 953058
ucuaacauugagcagcuau

SEQ ID NO: 953060 - RNA, 19 nt, Artificial Sequence
  Description of Artificial Sequence: Synthetic oligonucleotide
  Sense strand starting at position 3857 of SEQ ID NO: 913775
guuaguggcuucucuggaa

SEQ ID NO: 953061 - RNA, 19 nt, Artificial Sequence
  Description of Artificial Sequence: Synthetic oligonucleotide
  Antisense strand to SEQ ID NO: 953060
uuccagagaagccacuaac

SEQ ID NO: 953062 - RNA, 19 nt, Artificial Sequence
  Description of Artificial Sequence: Synthetic oligonucleotide
  Sense strand starting at position 2208 of SEQ ID NO: 913775
cacaguucuggcugaggca

SEQ ID NO: 953063 - RNA, 19 nt, Artificial Sequence
  Description of Artificial Sequence: Synthetic oligonucleotide
  Antisense strand to SEQ ID NO: 953062
ugccucagccagaacugug

SEQ ID NO: 953064 - RNA, 19 nt, Artificial Sequence
  Description of Artificial Sequence: Synthetic oligonucleotide
  Sense strand starting at position 3811 of SEQ ID NO: 913775
cccagccugugaucucuua

SEQ ID NO: 953065 - RNA, 19 nt, Artificial Sequence
  Description of Artificial Sequence: Synthetic oligonucleotide
  Antisense strand to SEQ ID NO: 953064
uaagagaucacaggcuggg

SEQ ID NO: 953066 - RNA, 19 nt, Artificial Sequence
  Description of Artificial Sequence: Synthetic oligonucleotide
  Sense strand starting at position 2656 of SEQ ID NO: 913775
uguccuagauuccuuguuu

SEQ ID NO: 953067 - RNA, 19 nt, Artificial Sequence
  Description of Artificial Sequence: Synthetic oligonucleotide
  Antisense strand to SEQ ID NO: 953066
aaacaaggaaucuaggaca

SEQ ID NO: 953068 - RNA, 19 nt, Artificial Sequence
  Description of Artificial Sequence: Synthetic oligonucleotide
  Sense strand starting at position 1156 of SEQ ID NO: 913775
acucaaacaucugacgaga

SEQ ID NO: 953069 - RNA, 19 nt, Artificial Sequence
  Description of Artificial Sequence: Synthetic oligonucleotide
  Antisense strand to SEQ ID NO: 953068
ucucgucagauguuugagu

SEQ ID NO: 953070 - RNA, 19 nt, Artificial Sequence
  Description of Artificial Sequence: Synthetic oligonucleotide
  Sense strand starting at position 3880 of SEQ ID NO: 913775
ugcauagcugcucaauguu

SEQ ID NO: 953071 - RNA, 19 nt, Artificial Sequence
  Description of Artificial Sequence: Synthetic oligonucleotide
  Antisense strand to SEQ ID NO: 953070
aacauugagcagcuaugca

SEQ ID NO: 953072 - RNA, 19 nt, Artificial Sequence
  Description of Artificial Sequence: Synthetic oligonucleotide
  Sense strand starting at position 3953 of SEQ ID NO: 913776
ccauuaaagcuggaagcaa

SEQ ID NO: 953073 - RNA, 19 nt, Artificial Sequence
  Description of Artificial Sequence: Synthetic oligonucleotide
  Antisense strand to SEQ ID NO: 953072
uugcuuccagcuuuaaugg

SEQ ID NO: 953074 - RNA, 19 nt, Artificial Sequence
  Description of Artificial Sequence: Synthetic oligonucleotide
  Sense strand starting at position 3945 of SEQ ID NO: 913776
gugagaacccauuaaagcu

SEQ ID NO: 953075 - RNA, 19 nt, Artificial Sequence
  Description of Artificial Sequence: Synthetic oligonucleotide
  Antisense strand to SEQ ID NO: 953074
agcuuuaauggguucucac

SEQ ID NO: 953076 - RNA, 19 nt, Artificial Sequence
  Description of Artificial Sequence: Synthetic oligonucleotide
  Sense strand starting at position 197 of SEQ ID NO: 913776
agagucugucaggagugaa

SEQ ID NO: 953077 - RNA, 19 nt, Artificial Sequence
  Description of Artificial Sequence: Synthetic oligonucleotide
  Antisense strand to SEQ ID NO: 953076
uucacuccugacagacucu

SEQ ID NO: 953078 - RNA, 19 nt, Artificial Sequence
  Description of Artificial Sequence: Synthetic oligonucleotide
  Sense strand starting at position 2322 of SEQ ID NO: 913776
gggaaugaaccguaucuuu

SEQ ID NO: 953079 - RNA, 19 nt, Artificial Sequence
  Description of Artificial Sequence: Synthetic oligonucleotide
  Antisense strand to SEQ ID NO: 953078
aaagauacgguucauuccc

SEQ ID NO: 953080 - RNA, 19 nt, Artificial Sequence
  Description of Artificial Sequence: Synthetic oligonucleotide
  Sense strand starting at position 1256 of SEQ ID NO: 913776
acagaaucccagugaucac

SEQ ID NO: 953081 - RNA, 19 nt, Artificial Sequence
  Description of Artificial Sequence: Synthetic oligonucleotide
  Antisense strand to SEQ ID NO: 953080
gugaucacugggauucugu

SEQ ID NO: 953082 - RNA, 19 nt, Artificial Sequence
  Description of Artificial Sequence: Synthetic oligonucleotide
  Sense strand starting at position 158 of SEQ ID NO: 913776
caggacucaugguccuaaa

SEQ ID NO: 953083 - RNA, 19 nt, Artificial Sequence
  Description of Artificial Sequence: Synthetic oligonucleotide
  Antisense strand to SEQ ID NO: 953082
uuuaggaccaugaguccug

SEQ ID NO: 953084 - RNA, 19 nt, Artificial Sequence
  Description of Artificial Sequence: Synthetic oligonucleotide
  Sense strand starting at position 2439 of SEQ ID NO: 913776
agaggacagaguugucaug

SEQ ID NO: 953085 - RNA, 19 nt, Artificial Sequence
  Description of Artificial Sequence: Synthetic oligonucleotide
  Antisense strand to SEQ ID NO: 953084
caugacaacucuguccucu

SEQ ID NO: 953086 - RNA, 19 nt, Artificial Sequence
  Description of Artificial Sequence: Synthetic oligonucleotide
  Sense strand starting at position 1077 of SEQ ID NO: 913776
uggagaugugcauacaccu

SEQ ID NO: 953087 - RNA, 19 nt, Artificial Sequence
  Description of Artificial Sequence: Synthetic oligonucleotide
  Antisense strand to SEQ ID NO: 953086
agguguaugcacaucucca

SEQ ID NO: 953088 - RNA, 19 nt, Artificial Sequence
  Description of Artificial Sequence: Synthetic oligonucleotide
  Sense strand starting at position 1309 of SEQ ID NO: 913776
cccagugaugcacaacuua

SEQ ID NO: 953089 - RNA, 19 nt, Artificial Sequence
  Description of Artificial Sequence: Synthetic oligonucleotide
  Antisense strand to SEQ ID NO: 953088
uaaguugugcaucacuggg

SEQ ID NO: 953090 - RNA, 19 nt, Artificial Sequence
  Description of Artificial Sequence: Synthetic oligonucleotide
  Sense strand starting at position 315 of SEQ ID NO: 913776
aucccugugccacgaauuu

SEQ ID NO: 953091 - RNA, 19 nt, Artificial Sequence
  Description of Artificial Sequence: Synthetic oligonucleotide
  Antisense strand to SEQ ID NO: 953090
aaauucguggcacagggau

SEQ ID NO: 953092 - RNA, 19 nt, Artificial Sequence
  Description of Artificial Sequence: Synthetic oligonucleotide
  Sense strand starting at position 253 of SEQ ID NO: 913776
cucagagacuucucaaguc

SEQ ID NO: 953093 - RNA, 19 nt, Artificial Sequence
  Description of Artificial Sequence: Synthetic oligonucleotide
  Antisense strand to SEQ ID NO: 953092
gacuugagaagucucugag

SEQ ID NO: 953094 - RNA, 19 nt, Artificial Sequence
  Description of Artificial Sequence: Synthetic oligonucleotide
  Sense strand starting at position 2914 of SEQ ID NO: 913776
gcaaaucuuguccacuuga

SEQ ID NO: 953095 - RNA, 19 nt, Artificial Sequence
  Description of Artificial Sequence: Synthetic oligonucleotide
  Antisense strand to SEQ ID NO: 953094
ucaaguggacaagauuugc

SEQ ID NO: 953096 - RNA, 19 nt, Artificial Sequence
  Description of Artificial Sequence: Synthetic oligonucleotide
  Sense strand starting at position 395 of SEQ ID NO: 913776
aaaccaucucgaggcauga

SEQ ID NO: 953097 - RNA, 19 nt, Artificial Sequence
  Description of Artificial Sequence: Synthetic oligonucleotide
  Antisense strand to SEQ ID NO: 953096
ucaugccucgagaugguuu

SEQ ID NO: 953098 - RNA, 19 nt, Artificial Sequence
  Description of Artificial Sequence: Synthetic oligonucleotide
  Sense strand starting at position 282 of SEQ ID NO: 913776
gugagaaacuugccagauc

SEQ ID NO: 953099 - RNA, 19 nt, Artificial Sequence
  Description of Artificial Sequence: Synthetic oligonucleotide
  Antisense strand to SEQ ID NO: 953098
gaucuggcaaguuucucac

SEQ ID NO: 953100 - RNA, 19 nt, Artificial Sequence
  Description of Artificial Sequence: Synthetic oligonucleotide
  Sense strand starting at position 2241 of SEQ ID NO: 913776
agccuucucagggagcauu

SEQ ID NO: 953101 - RNA, 19 nt, Artificial Sequence
  Description of Artificial Sequence: Synthetic oligonucleotide
  Antisense strand to SEQ ID NO: 953100
aaugcucccugagaaggcu

SEQ ID NO: 953102 - RNA, 19 nt, Artificial Sequence
  Description of Artificial Sequence: Synthetic oligonucleotide
  Sense strand starting at position 826 of SEQ ID NO: 913776
ccagaagauuuccagguau

SEQ ID NO: 953103 - RNA, 19 nt, Artificial Sequence
  Description of Artificial Sequence: Synthetic oligonucleotide
  Antisense strand to SEQ ID NO: 953102
auaccuggaaaucuucugg

SEQ ID NO: 953104 - RNA, 19 nt, Artificial Sequence
  Description of Artificial Sequence: Synthetic oligonucleotide
  Sense strand starting at position 1 of SEQ ID NO: 913776
gccagacuauuugaaugga

SEQ ID NO: 953105 - RNA, 19 nt, Artificial Sequence
  Description of Artificial Sequence: Synthetic oligonucleotide
  Antisense strand to SEQ ID NO: 953104
uccauucaaauagucuggc

SEQ ID NO: 953106 - RNA, 19 nt, Artificial Sequence
  Description of Artificial Sequence: Synthetic oligonucleotide
  Sense strand starting at position 2901 of SEQ ID NO: 913776
cuccuaacucugggcaaau

SEQ ID NO: 953107 - RNA, 19 nt, Artificial Sequence
  Description of Artificial Sequence: Synthetic oligonucleotide
  Antisense strand to SEQ ID NO: 953106
auuugcccagaguuaggag

SEQ ID NO: 953108 - RNA, 19 nt, Artificial Sequence
  Description of Artificial Sequence: Synthetic oligonucleotide
  Sense strand starting at position 2507 of SEQ ID NO: 913776
gaaagaggccaguguauug

SEQ ID NO: 953109 - RNA, 19 nt, Artificial Sequence
  Description of Artificial Sequence: Synthetic oligonucleotide
  Antisense strand to SEQ ID NO: 953108
caauacacuggccucuuuc

SEQ ID NO: 953110 - RNA, 19 nt, Artificial Sequence
  Description of Artificial Sequence: Synthetic oligonucleotide
  Sense strand starting at position 1413 of SEQ ID NO: 913776
ccaugucauguaugaacuu

SEQ ID NO: 953111 - RNA, 19 nt, Artificial Sequence
  Description of Artificial Sequence: Synthetic oligonucleotide
  Antisense strand to SEQ ID NO: 953110
aaguucauacaugacaugg

SEQ ID NO: 953112 - RNA, 19 nt, Artificial Sequence
  Description of Artificial Sequence: Synthetic oligonucleotide
  Sense strand starting at position 675 of SEQ ID NO: 913776
ugcaucgagugauuaauga

SEQ ID NO: 953113 - RNA, 19 nt, Artificial Sequence
  Description of Artificial Sequence: Synthetic oligonucleotide
  Antisense strand to SEQ ID NO: 953112
ucauuaaucacucgaugca

SEQ ID NO: 953114 - RNA, 19 nt, Artificial Sequence
  Description of Artificial Sequence: Synthetic oligonucleotide
  Sense strand starting at position 3400 of SEQ ID NO: 913776
gcugcagacuacccuaaau

SEQ ID NO: 953115 - RNA, 19 nt, Artificial Sequence
  Description of Artificial Sequence: Synthetic oligonucleotide
  Antisense strand to SEQ ID NO: 953114
auuuaggguagucugcagc

SEQ ID NO: 953116 - RNA, 19 nt, Artificial Sequence
  Description of Artificial Sequence: Synthetic oligonucleotide
  Sense strand starting at position 2912 of SEQ ID NO: 913776
gggcaaaucuuguccacuu

SEQ ID NO: 953117 - RNA, 19 nt, Artificial Sequence
  Description of Artificial Sequence: Synthetic oligonucleotide
  Antisense strand to SEQ ID NO: 953116
aaguggacaagauuugccc

SEQ ID NO: 953118 - RNA, 19 nt, Artificial Sequence
  Description of Artificial Sequence: Synthetic oligonucleotide
  Sense strand starting at position 3585 of SEQ ID NO: 913776
cccgauuugucucccgcua

SEQ ID NO: 953119 - RNA, 19 nt, Artificial Sequence
  Description of Artificial Sequence: Synthetic oligonucleotide
  Antisense strand to SEQ ID NO: 953118
uagcgggagacaaaucggg

SEQ ID NO: 953120 - RNA, 19 nt, Artificial Sequence
  Description of Artificial Sequence: Synthetic oligonucleotide
  Sense strand starting at position 1404 of SEQ ID NO: 913776
cuaucagucccaugucaug

SEQ ID NO: 953121 - RNA, 19 nt, Artificial Sequence
  Description of Artificial Sequence: Synthetic oligonucleotide
  Antisense strand to SEQ ID NO: 953120
caugacaugggacugauag

SEQ ID NO: 953122 - RNA, 19 nt, Artificial Sequence
  Description of Artificial Sequence: Synthetic oligonucleotide
  Sense strand starting at position 3625 of SEQ ID NO: 913776
aggagagcuccugguaguc

SEQ ID NO: 953123 - RNA, 19 nt, Artificial Sequence
  Description of Artificial Sequence: Synthetic oligonucleotide
  Antisense strand to SEQ ID NO: 953122
gacuaccaggagcucuccu

SEQ ID NO: 953124 - RNA, 19 nt, Artificial Sequence
  Description of Artificial Sequence: Synthetic oligonucleotide
  Sense strand starting at position 2855 of SEQ ID NO: 913776
cccgcaugauugguugaaa

SEQ ID NO: 953125 - RNA, 19 nt, Artificial Sequence
  Description of Artificial Sequence: Synthetic oligonucleotide
  Antisense strand to SEQ ID NO: 953124
uuucaaccaaucaugcggg

SEQ ID NO: 953126 - RNA, 19 nt, Artificial Sequence
  Description of Artificial Sequence: Synthetic oligonucleotide
  Sense strand starting at position 2240 of SEQ ID NO: 913776
cagccuucucagggagcau

SEQ ID NO: 953127 - RNA, 19 nt, Artificial Sequence
  Description of Artificial Sequence: Synthetic oligonucleotide
  Antisense strand to SEQ ID NO: 953126
augcucccugagaaggcug

SEQ ID NO: 953128 - RNA, 19 nt, Artificial Sequence
  Description of Artificial Sequence: Synthetic oligonucleotide
  Sense strand starting at position 2445 of SEQ ID NO: 913776
cagaguugucauggcaacu

SEQ ID NO: 953129 - RNA, 19 nt, Artificial Sequence
  Description of Artificial Sequence: Synthetic oligonucleotide
  Antisense strand to SEQ ID NO: 953128
aguugccaugacaacucug

SEQ ID NO: 953130 - RNA, 19 nt, Artificial Sequence
  Description of Artificial Sequence: Synthetic oligonucleotide
  Sense strand starting at position 673 of SEQ ID NO: 913776
gcugcaucgagugauuaau

SEQ ID NO: 953131 - RNA, 19 nt, Artificial Sequence
  Description of Artificial Sequence: Synthetic oligonucleotide
  Antisense strand to SEQ ID NO: 953130
auuaaucacucgaugcagc

SEQ ID NO: 953132 - RNA, 19 nt, Artificial Sequence
  Description of Artificial Sequence: Synthetic oligonucleotide
  Sense strand starting at position 726 of SEQ ID NO: 913776
ggaagucaugccugcaaug

SEQ ID NO: 953133 - RNA, 19 nt, Artificial Sequence
  Description of Artificial Sequence: Synthetic oligonucleotide
  Antisense strand to SEQ ID NO: 953132
cauugcaggcaugacuucc

SEQ ID NO: 953134 - RNA, 19 nt, Artificial Sequence
  Description of Artificial Sequence: Synthetic oligonucleotide
  Sense strand starting at position 2879 of SEQ ID NO: 913776
acauuuaaguggugagaau

SEQ ID NO: 953135 - RNA, 19 nt, Artificial Sequence
  Description of Artificial Sequence: Synthetic oligonucleotide
  Antisense strand to SEQ ID NO: 953134
auucucaccacuuaaaugu

SEQ ID NO: 953136 - RNA, 19 nt, Artificial Sequence
  Description of Artificial Sequence: Synthetic oligonucleotide
  Sense strand starting at position 3556 of SEQ ID NO: 913776
gggagucuucguugacacu

SEQ ID NO: 953137 - RNA, 19 nt, Artificial Sequence
  Description of Artificial Sequence: Synthetic oligonucleotide
  Antisense strand to SEQ ID NO: 953136
agugucaacgaagacuccc

SEQ ID NO: 953138 - RNA, 19 nt, Artificial Sequence
  Description of Artificial Sequence: Synthetic oligonucleotide
  Sense strand starting at position 2854 of SEQ ID NO: 913776
ucccgcaugauugguugaa

SEQ ID NO: 953139 - RNA, 19 nt, Artificial Sequence
  Description of Artificial Sequence: Synthetic oligonucleotide
  Antisense strand to SEQ ID NO: 953138
uucaaccaaucaugcggga

SEQ ID NO: 953140 - RNA, 19 nt, Artificial Sequence
  Description of Artificial Sequence: Synthetic oligonucleotide
  Sense strand starting at position 2665 of SEQ ID NO: 913776
agccgaaugcuucgagaag

SEQ ID NO: 953141 - RNA, 19 nt, Artificial Sequence
  Description of Artificial Sequence: Synthetic oligonucleotide
  Antisense strand to SEQ ID NO: 953140
cuucucgaagcauucggcu

SEQ ID NO: 953142 - RNA, 19 nt, Artificial Sequence
  Description of Artificial Sequence: Synthetic oligonucleotide
  Sense strand starting at position 181 of SEQ ID NO: 913776
ccaggcauccuguggcaga

SEQ ID NO: 953143 - RNA, 19 nt, Artificial Sequence
  Description of Artificial Sequence: Synthetic oligonucleotide
  Antisense strand to SEQ ID NO: 953142
ucugccacaggaugccugg

SEQ ID NO: 953144 - RNA, 19 nt, Artificial Sequence
  Description of Artificial Sequence: Synthetic oligonucleotide
  Sense strand starting at position 2567 of SEQ ID NO: 913776
ucugucuccuggcuccaaa

SEQ ID NO: 953145 - RNA, 19 nt, Artificial Sequence
  Description of Artificial Sequence: Synthetic oligonucleotide
  Antisense strand to SEQ ID NO: 953144
uuuggagccaggagacaga

SEQ ID NO: 953146 - RNA, 19 nt, Artificial Sequence
  Description of Artificial Sequence: Synthetic oligonucleotide
  Sense strand starting at position 672 of SEQ ID NO: 913776
agcugcaucgagugauuaa

SEQ ID NO: 953147 - RNA, 19 nt, Artificial Sequence
  Description of Artificial Sequence: Synthetic oligonucleotide
  Antisense strand to SEQ ID NO: 953146
uuaaucacucgaugcagcu

SEQ ID NO: 953148 - RNA, 19 nt, Artificial Sequence
  Description of Artificial Sequence: Synthetic oligonucleotide
  Sense strand starting at position 3554 of SEQ ID NO: 913776
ccgggagucuucguugaca

SEQ ID NO: 953149 - RNA, 19 nt, Artificial Sequence
  Description of Artificial Sequence: Synthetic oligonucleotide
  Antisense strand to SEQ ID NO: 953148
ugucaacgaagacucccgg

SEQ ID NO: 953150 - RNA, 19 nt, Artificial Sequence
  Description of Artificial Sequence: Synthetic oligonucleotide
  Sense strand starting at position 2837 of SEQ ID NO: 913776
cgcucuuucgacugggauc

SEQ ID NO: 953151 - RNA, 19 nt, Artificial Sequence
  Description of Artificial Sequence: Synthetic oligonucleotide
  Antisense strand to SEQ ID NO: 953150
gaucccagucgaaagagcg

SEQ ID NO: 953152 - RNA, 19 nt, Artificial Sequence
  Description of Artificial Sequence: Synthetic oligonucleotide
  Sense strand starting at position 490 of SEQ ID NO: 913777
uggagauccugauuaagug

SEQ ID NO: 953153 - RNA, 19 nt, Artificial Sequence
  Description of Artificial Sequence: Synthetic oligonucleotide
  Antisense strand to SEQ ID NO: 953152
cacuuaaucaggaucucca

SEQ ID NO: 953154 - RNA, 19 nt, Artificial Sequence
  Description of Artificial Sequence: Synthetic oligonucleotide
  Sense strand starting at position 3786 of SEQ ID NO: 913777
ccagaaguggucugagaaa

SEQ ID NO: 953155 - RNA, 19 nt, Artificial Sequence
  Description of Artificial Sequence: Synthetic oligonucleotide
  Antisense strand to SEQ ID NO: 953154
uuucucagaccacuucugg

SEQ ID NO: 953156 - RNA, 19 nt, Artificial Sequence
  Description of Artificial Sequence: Synthetic oligonucleotide
  Sense strand starting at position 2444 of SEQ ID NO: 913777
aguaguaaccuauaauagu

SEQ ID NO: 953157 - RNA, 19 nt, Artificial Sequence
  Description of Artificial Sequence: Synthetic oligonucleotide
  Antisense strand to SEQ ID NO: 953156
acuauuauagguuacuacu

SEQ ID NO: 953158 - RNA, 19 nt, Artificial Sequence
  Description of Artificial Sequence: Synthetic oligonucleotide
  Sense strand starting at position 1067 of SEQ ID NO: 913777
gaccaccaagucugagauu

SEQ ID NO: 953159 - RNA, 19 nt, Artificial Sequence
  Description of Artificial Sequence: Synthetic oligonucleotide
  Antisense strand to SEQ ID NO: 953158
aaucucagacuuggugguc

SEQ ID NO: 953160 - RNA, 19 nt, Artificial Sequence
  Description of Artificial Sequence: Synthetic oligonucleotide
  Sense strand starting at position 1015 of SEQ ID NO: 913777
uuccaagagccagaauguu

SEQ ID NO: 953161 - RNA, 19 nt, Artificial Sequence
  Description of Artificial Sequence: Synthetic oligonucleotide
  Antisense strand to SEQ ID NO: 953160
aacauucuggcucuuggaa

SEQ ID NO: 953162 - RNA, 19 nt, Artificial Sequence
  Description of Artificial Sequence: Synthetic oligonucleotide
  Sense strand starting at position 3436 of SEQ ID NO: 913777
cgcugugcagcuuugauga

SEQ ID NO: 953163 - RNA, 19 nt, Artificial Sequence
  Description of Artificial Sequence: Synthetic oligonucleotide
  Antisense strand to SEQ ID NO: 953162
ucaucaaagcugcacagcg

SEQ ID NO: 953164 - RNA, 19 nt, Artificial Sequence
  Description of Artificial Sequence: Synthetic oligonucleotide
  Sense strand starting at position 2421 of SEQ ID NO: 913777
uggucuucuggacagguga

SEQ ID NO: 953165 - RNA, 19 nt, Artificial Sequence
  Description of Artificial Sequence: Synthetic oligonucleotide
  Antisense strand to SEQ ID NO: 953164
ucaccuguccagaagacca

SEQ ID NO: 953166 - RNA, 19 nt, Artificial Sequence
  Description of Artificial Sequence: Synthetic oligonucleotide
  Sense strand starting at position 906 of SEQ ID NO: 913777
ugcucuguugaauacaaua

SEQ ID NO: 953167 - RNA, 19 nt, Artificial Sequence
  Description of Artificial Sequence: Synthetic oligonucleotide
  Antisense strand to SEQ ID NO: 953166
uauuguauucaacagagca

SEQ ID NO: 953168 - RNA, 19 nt, Artificial Sequence
  Description of Artificial Sequence: Synthetic oligonucleotide
  Sense strand starting at position 2370 of SEQ ID NO: 913777
aagugauucuuuccugaga

SEQ ID NO: 953169 - RNA, 19 nt, Artificial Sequence
  Description of Artificial Sequence: Synthetic oligonucleotide
  Antisense strand to SEQ ID NO: 953168
ucucaggaaagaaucacuu

SEQ ID NO: 953170 - RNA, 19 nt, Artificial Sequence
  Description of Artificial Sequence: Synthetic oligonucleotide
  Sense strand starting at position 3186 of SEQ ID NO: 913777
uccaaucuuuaguuaggga

SEQ ID NO: 953171 - RNA, 19 nt, Artificial Sequence
  Description of Artificial Sequence: Synthetic oligonucleotide
  Antisense strand to SEQ ID NO: 953170
ucccuaacuaaagauugga

SEQ ID NO: 953172 - RNA, 19 nt, Artificial Sequence
  Description of Artificial Sequence: Synthetic oligonucleotide
  Sense strand starting at position 451 of SEQ ID NO: 913777
ggccuuauccuugaaacuu

SEQ ID NO: 953173 - RNA, 19 nt, Artificial Sequence
  Description of Artificial Sequence: Synthetic oligonucleotide
  Antisense strand to SEQ ID NO: 953172
aaguuucaaggauaaggcc

SEQ ID NO: 953174 - RNA, 19 nt, Artificial Sequence
  Description of Artificial Sequence: Synthetic oligonucleotide
  Sense strand starting at position 1360 of SEQ ID NO: 913777
gggucaggcagacauaguu

SEQ ID NO: 953175 - RNA, 19 nt, Artificial Sequence
  Description of Artificial Sequence: Synthetic oligonucleotide
  Antisense strand to SEQ ID NO: 953174
aacuaugucugccugaccc

SEQ ID NO: 953176 - RNA, 19 nt, Artificial Sequence
  Description of Artificial Sequence: Synthetic oligonucleotide
  Sense strand starting at position 929 of SEQ ID NO: 913777
gcuuccuucgaggaacaca

SEQ ID NO: 953177 - RNA, 19 nt, Artificial Sequence
  Description of Artificial Sequence: Synthetic oligonucleotide
  Antisense strand to SEQ ID NO: 953176
uguguuccucgaaggaagc

SEQ ID NO: 953178 - RNA, 19 nt, Artificial Sequence
  Description of Artificial Sequence: Synthetic oligonucleotide
  Sense strand starting at position 2371 of SEQ ID NO: 913777
agugauucuuuccugagag

SEQ ID NO: 953179 - RNA, 19 nt, Artificial Sequence
  Description of Artificial Sequence: Synthetic oligonucleotide
  Antisense strand to SEQ ID NO: 953178
cucucaggaaagaaucacu

SEQ ID NO: 953180 - RNA, 19 nt, Artificial Sequence
  Description of Artificial Sequence: Synthetic oligonucleotide
  Sense strand starting at position 3311 of SEQ ID NO: 913777
gcuuguuaagcacaaagga

SEQ ID NO: 953181 - RNA, 19 nt, Artificial Sequence
  Description of Artificial Sequence: Synthetic oligonucleotide
  Antisense strand to SEQ ID NO: 953180
uccuuugugcuuaacaagc

SEQ ID NO: 953182 - RNA, 19 nt, Artificial Sequence
  Description of Artificial Sequence: Synthetic oligonucleotide
  Sense strand starting at position 2373 of SEQ ID NO: 913777
ugauucuuuccugagagcu

SEQ ID NO: 953183 - RNA, 19 nt, Artificial Sequence
  Description of Artificial Sequence: Synthetic oligonucleotide
  Antisense strand to SEQ ID NO: 953182
agcucucaggaaagaauca

SEQ ID NO: 953184 - RNA, 19 nt, Artificial Sequence
  Description of Artificial Sequence: Synthetic oligonucleotide
  Sense strand starting at position 2968 of SEQ ID NO: 913777
uaaugacaucguuagggca

SEQ ID NO: 953185 - RNA, 19 nt, Artificial Sequence
  Description of Artificial Sequence: Synthetic oligonucleotide
  Antisense strand to SEQ ID NO: 953184
ugcccuaacgaugucauua

SEQ ID NO: 953186 - RNA, 19 nt, Artificial Sequence
  Description of Artificial Sequence: Synthetic oligonucleotide
  Sense strand starting at position 3653 of SEQ ID NO: 913777
uguuaugauccagaggcuu

SEQ ID NO: 953187 - RNA, 19 nt, Artificial Sequence
  Description of Artificial Sequence: Synthetic oligonucleotide
  Antisense strand to SEQ ID NO: 953186
aagccucuggaucauaaca

SEQ ID NO: 953188 - RNA, 19 nt, Artificial Sequence
  Description of Artificial Sequence: Synthetic oligonucleotide
  Sense strand starting at position 498 of SEQ ID NO: 913777
cugauuaaguggguuugga

SEQ ID NO: 953189 - RNA, 19 nt, Artificial Sequence
  Description of Artificial Sequence: Synthetic oligonucleotide
  Antisense strand to SEQ ID NO: 953188
uccaaacccacuuaaucag

SEQ ID NO: 953190 - RNA, 19 nt, Artificial Sequence
  Description of Artificial Sequence: Synthetic oligonucleotide
  Sense strand starting at position 1290 of SEQ ID NO: 913777
ggugcuccugcuggaauuu

SEQ ID NO: 953191 - RNA, 19 nt, Artificial Sequence
  Description of Artificial Sequence: Synthetic oligonucleotide
  Antisense strand to SEQ ID NO: 953190
aaauuccagcaggagcacc

SEQ ID NO: 953192 - RNA, 19 nt, Artificial Sequence
  Description of Artificial Sequence: Synthetic oligonucleotide
  Sense strand starting at position 2658 of SEQ ID NO: 913777
ugggcauuagcagauguga

SEQ ID NO: 953193 - RNA, 19 nt, Artificial Sequence
  Description of Artificial Sequence: Synthetic oligonucleotide
  Antisense strand to SEQ ID NO: 953192
ucacaucugcuaaugccca

SEQ ID NO: 953194 - RNA, 19 nt, Artificial Sequence
  Description of Artificial Sequence: Synthetic oligonucleotide
  Sense strand starting at position 577 of SEQ ID NO: 913777
cuuagagagccuugaacuu

SEQ ID NO: 953195 - RNA, 19 nt, Artificial Sequence
  Description of Artificial Sequence: Synthetic oligonucleotide
  Antisense strand to SEQ ID NO: 953194
aaguucaaggcucucuaag

SEQ ID NO: 953196 - RNA, 19 nt, Artificial Sequence
  Description of Artificial Sequence: Synthetic oligonucleotide
  Sense strand starting at position 528 of SEQ ID NO: 913777
ggauguguacucuaggcag

SEQ ID NO: 953197 - RNA, 19 nt, Artificial Sequence
  Description of Artificial Sequence: Synthetic oligonucleotide
  Antisense strand to SEQ ID NO: 953196
cugccuagaguacacaucc

SEQ ID NO: 953198 - RNA, 19 nt, Artificial Sequence
  Description of Artificial Sequence: Synthetic oligonucleotide
  Sense strand starting at position 2776 of SEQ ID NO: 913777
agaguagaccaaugugcaa

SEQ ID NO: 953199 - RNA, 19 nt, Artificial Sequence
  Description of Artificial Sequence: Synthetic oligonucleotide
  Antisense strand to SEQ ID NO: 953198
uugcacauuggucuacucu

SEQ ID NO: 953200 - RNA, 19 nt, Artificial Sequence
  Description of Artificial Sequence: Synthetic oligonucleotide
  Sense strand starting at position 3449 of SEQ ID NO: 913777
ugaugagcaugguucauga

SEQ ID NO: 953201 - RNA, 19 nt, Artificial Sequence
  Description of Artificial Sequence: Synthetic oligonucleotide
  Antisense strand to SEQ ID NO: 953200
ucaugaaccaugcucauca

SEQ ID NO: 953202 - RNA, 19 nt, Artificial Sequence
  Description of Artificial Sequence: Synthetic oligonucleotide
  Sense strand starting at position 1319 of SEQ ID NO: 913777
uggguuguucccuaaauuc

SEQ ID NO: 953203 - RNA, 19 nt, Artificial Sequence
  Description of Artificial Sequence: Synthetic oligonucleotide
  Antisense strand to SEQ ID NO: 953202
gaauuuagggaacaaccca

SEQ ID NO: 953204 - RNA, 19 nt, Artificial Sequence
  Description of Artificial Sequence: Synthetic oligonucleotide
  Sense strand starting at position 995 of SEQ ID NO: 913777
acuauaaagugacuucugu

SEQ ID NO: 953205 - RNA, 19 nt, Artificial Sequence
  Description of Artificial Sequence: Synthetic oligonucleotide
  Antisense strand to SEQ ID NO: 953204
acagaagucacuuuauagu

SEQ ID NO: 953206 - RNA, 19 nt, Artificial Sequence
  Description of Artificial Sequence: Synthetic oligonucleotide
  Sense strand starting at position 3752 of SEQ ID NO: 913777
gucugcuucccagaggauu

SEQ ID NO: 953207 - RNA, 19 nt, Artificial Sequence
  Description of Artificial Sequence: Synthetic oligonucleotide
  Antisense strand to SEQ ID NO: 953206
aauccucugggaagcagac

SEQ ID NO: 953208 - RNA, 19 nt, Artificial Sequence
  Description of Artificial Sequence: Synthetic oligonucleotide
  Sense strand starting at position 2368 of SEQ ID NO: 913777
ucaagugauucuuuccuga

SEQ ID NO: 953209 - RNA, 19 nt, Artificial Sequence
  Description of Artificial Sequence: Synthetic oligonucleotide
  Antisense strand to SEQ ID NO: 953208
ucaggaaagaaucacuuga

SEQ ID NO: 953210 - RNA, 19 nt, Artificial Sequence
  Description of Artificial Sequence: Synthetic oligonucleotide
  Sense strand starting at position 2491 of SEQ ID NO: 913777
agagcucaaugguuuccaa

SEQ ID NO: 953211 - RNA, 19 nt, Artificial Sequence
  Description of Artificial Sequence: Synthetic oligonucleotide
  Antisense strand to SEQ ID NO: 953210
uuggaaaccauugagcucu

SEQ ID NO: 953212 - RNA, 19 nt, Artificial Sequence
  Description of Artificial Sequence: Synthetic oligonucleotide
  Sense strand starting at position 3775 of SEQ ID NO: 913777
aguaguuggcaccagaagu

SEQ ID NO: 953213 - RNA, 19 nt, Artificial Sequence
  Description of Artificial Sequence: Synthetic oligonucleotide
  Antisense strand to SEQ ID NO: 953212
acuucuggugccaacuacu

SEQ ID NO: 953214 - RNA, 19 nt, Artificial Sequence
  Description of Artificial Sequence: Synthetic oligonucleotide
  Sense strand starting at position 2423 of SEQ ID NO: 913777
gucuucuggacaggugaua

SEQ ID NO: 953215 - RNA, 19 nt, Artificial Sequence
  Description of Artificial Sequence: Synthetic oligonucleotide
  Antisense strand to SEQ ID NO: 953214
uaucaccuguccagaagac

SEQ ID NO: 953216 - RNA, 19 nt, Artificial Sequence
  Description of Artificial Sequence: Synthetic oligonucleotide
  Sense strand starting at position 903 of SEQ ID NO: 913777
ucuugcucuguugaauaca

SEQ ID NO: 953217 - RNA, 19 nt, Artificial Sequence
  Description of Artificial Sequence: Synthetic oligonucleotide
  Antisense strand to SEQ ID NO: 953216
uguauucaacagagcaaga

SEQ ID NO: 953218 - RNA, 19 nt, Artificial Sequence
  Description of Artificial Sequence: Synthetic oligonucleotide
  Sense strand starting at position 925 of SEQ ID NO: 913777
acaagcuuccuucgaggaa

SEQ ID NO: 953219 - RNA, 19 nt, Artificial Sequence
  Description of Artificial Sequence: Synthetic oligonucleotide
  Antisense strand to SEQ ID NO: 953218
uuccucgaaggaagcuugu

SEQ ID NO: 953220 - RNA, 19 nt, Artificial Sequence
  Description of Artificial Sequence: Synthetic oligonucleotide
  Sense strand starting at position 2626 of SEQ ID NO: 913777
uaggguaggucaucucacu

SEQ ID NO: 953221 - RNA, 19 nt, Artificial Sequence
  Description of Artificial Sequence: Synthetic oligonucleotide
  Antisense strand to SEQ ID NO: 953220
agugagaugaccuacccua

SEQ ID NO: 953222 - RNA, 19 nt, Artificial Sequence
  Description of Artificial Sequence: Synthetic oligonucleotide
  Sense strand starting at position 449 of SEQ ID NO: 913777
uuggccuuauccuugaaac

SEQ ID NO: 953223 - RNA, 19 nt, Artificial Sequence
  Description of Artificial Sequence: Synthetic oligonucleotide
  Antisense strand to SEQ ID NO: 953222
guuucaaggauaaggccaa

SEQ ID NO: 953224 - RNA, 19 nt, Artificial Sequence
  Description of Artificial Sequence: Synthetic oligonucleotide
  Sense strand starting at position 1629 of SEQ ID NO: 913777
gaaagaaguuacucgcuua

SEQ ID NO: 953225 - RNA, 19 nt, Artificial Sequence
  Description of Artificial Sequence: Synthetic oligonucleotide
  Antisense strand to SEQ ID NO: 953224
uaagcgaguaacuucuuuc

SEQ ID NO: 953226 - RNA, 19 nt, Artificial Sequence
  Description of Artificial Sequence: Synthetic oligonucleotide
  Sense strand starting at position 1632 of SEQ ID NO: 913777
agaaguuacucgcuuaaag

SEQ ID NO: 953227 - RNA, 19 nt, Artificial Sequence
  Description of Artificial Sequence: Synthetic oligonucleotide
  Antisense strand to SEQ ID NO: 953226
cuuuaagcgaguaacuucu

SEQ ID NO: 953228 - RNA, 19 nt, Artificial Sequence
  Description of Artificial Sequence: Synthetic oligonucleotide
  Sense strand starting at position 3036 of SEQ ID NO: 913777
gcaggcauagauugaggua

SEQ ID NO: 953229 - RNA, 19 nt, Artificial Sequence
  Description of Artificial Sequence: Synthetic oligonucleotide
  Antisense strand to SEQ ID NO: 953228
uaccucaaucuaugccugc

SEQ ID NO: 953230 - RNA, 19 nt, Artificial Sequence
  Description of Artificial Sequence: Synthetic oligonucleotide
  Sense strand starting at position 450 of SEQ ID NO: 913777
uggccuuauccuugaaacu

SEQ ID NO: 953231 - RNA, 19 nt, Artificial Sequence
  Description of Artificial Sequence: Synthetic oligonucleotide
  Antisense strand to SEQ ID NO: 953230
aguuucaaggauaaggcca

SEQ ID NO: 953232 - RNA, 19 nt, Artificial Sequence
  Description of Artificial Sequence: Synthetic oligonucleotide
  Sense strand starting at position 3267 of SEQ ID NO: 913778
acaauagaguucccugaag

SEQ ID NO: 953233 - RNA, 19 nt, Artificial Sequence
  Description of Artificial Sequence: Synthetic oligonucleotide
  Antisense strand to SEQ ID NO: 953232
cuucagggaacucuauugu

SEQ ID NO: 953234 - RNA, 19 nt, Artificial Sequence
  Description of Artificial Sequence: Synthetic oligonucleotide
  Sense strand starting at position 224 of SEQ ID NO: 913778
gguuuaacuuuacuagaaa

SEQ ID NO: 953235 - RNA, 19 nt, Artificial Sequence
  Description of Artificial Sequence: Synthetic oligonucleotide
  Antisense strand to SEQ ID NO: 953234
uuucuaguaaaguuaaacc

SEQ ID NO: 953236 - RNA, 19 nt, Artificial Sequence
  Description of Artificial Sequence: Synthetic oligonucleotide
  Sense strand starting at position 3860 of SEQ ID NO: 913778
uuggguuuagaguacacau

SEQ ID NO: 953237 - RNA, 19 nt, Artificial Sequence
  Description of Artificial Sequence: Synthetic oligonucleotide
  Antisense strand to SEQ ID NO: 953236
auguguacucuaaacccaa

SEQ ID NO: 953238 - RNA, 19 nt, Artificial Sequence
  Description of Artificial Sequence: Synthetic oligonucleotide
  Sense strand starting at position 828 of SEQ ID NO: 913778
ccaauagugggauggaucu

SEQ ID NO: 953239 - RNA, 19 nt, Artificial Sequence
  Description of Artificial Sequence: Synthetic oligonucleotide
  Antisense strand to SEQ ID NO: 953238
agauccaucccacuauugg

SEQ ID NO: 953240 - RNA, 19 nt, Artificial Sequence
  Description of Artificial Sequence: Synthetic oligonucleotide
  Sense strand starting at position 222 of SEQ ID NO: 913778
ucgguuuaacuuuacuaga

SEQ ID NO: 953241 - RNA, 19 nt, Artificial Sequence
  Description of Artificial Sequence: Synthetic oligonucleotide
  Antisense strand to SEQ ID NO: 953240
ucuaguaaaguuaaaccga

SEQ ID NO: 953242 - RNA, 19 nt, Artificial Sequence
  Description of Artificial Sequence: Synthetic oligonucleotide
  Sense strand starting at position 3808 of SEQ ID NO: 913778
ggcugaagaggauguuuga

SEQ ID NO: 953243 - RNA, 19 nt, Artificial Sequence
  Description of Artificial Sequence: Synthetic oligonucleotide
  Antisense strand to SEQ ID NO: 953242
ucaaacauccucuucagcc

SEQ ID NO: 953244 - RNA, 19 nt, Artificial Sequence
  Description of Artificial Sequence: Synthetic oligonucleotide
  Sense strand starting at position 769 of SEQ ID NO: 913778
gguuacaucagauaugcga

SEQ ID NO: 953245 - RNA, 19 nt, Artificial Sequence
  Description of Artificial Sequence: Synthetic oligonucleotide
  Antisense strand to SEQ ID NO: 953244
ucgcauaucugauguaacc

SEQ ID NO: 953246 - RNA, 19 nt, Artificial Sequence
  Description of Artificial Sequence: Synthetic oligonucleotide
  Sense strand starting at position 3927 of SEQ ID NO: 913778
guaagaguucuugaguauu

SEQ ID NO: 953247 - RNA, 19 nt, Artificial Sequence
  Description of Artificial Sequence: Synthetic oligonucleotide
  Antisense strand to SEQ ID NO: 953246
aauacucaagaacucuuac

SEQ ID NO: 953248 - RNA, 19 nt, Artificial Sequence
  Description of Artificial Sequence: Synthetic oligonucleotide
  Sense strand starting at position 3925 of SEQ ID NO: 913778
agguaagaguucuugagua

SEQ ID NO: 953249 - RNA, 19 nt, Artificial Sequence
  Description of Artificial Sequence: Synthetic oligonucleotide
  Antisense strand to SEQ ID NO: 953248
uacucaagaacucuuaccu

SEQ ID NO: 953250 - RNA, 19 nt, Artificial Sequence
  Description of Artificial Sequence: Synthetic oligonucleotide
  Sense strand starting at position 2307 of SEQ ID NO: 913778
agccgcucuccgcuuauua

SEQ ID NO: 953251 - RNA, 19 nt, Artificial Sequence
  Description of Artificial Sequence: Synthetic oligonucleotide
  Antisense strand to SEQ ID NO: 953250
uaauaagcggagagcggcu

SEQ ID NO: 953252 - RNA, 19 nt, Artificial Sequence
  Description of Artificial Sequence: Synthetic oligonucleotide
  Sense strand starting at position 1610 of SEQ ID NO: 913778
ggaugaugagcgcauccau

SEQ ID NO: 953253 - RNA, 19 nt, Artificial Sequence
  Description of Artificial Sequence: Synthetic oligonucleotide
  Antisense strand to SEQ ID NO: 953252
auggaugcgcucaucaucc

SEQ ID NO: 953254 - RNA, 19 nt, Artificial Sequence
  Description of Artificial Sequence: Synthetic oligonucleotide
  Sense strand starting at position 3631 of SEQ ID NO: 913778
guuuaagccuaauuggaau

SEQ ID NO: 953255 - RNA, 19 nt, Artificial Sequence
  Description of Artificial Sequence: Synthetic oligonucleotide
  Antisense strand to SEQ ID NO: 953254
auuccaauuaggcuuaaac

SEQ ID NO: 953256 - RNA, 19 nt, Artificial Sequence
  Description of Artificial Sequence: Synthetic oligonucleotide
  Sense strand starting at position 3982 of SEQ ID NO: 913778
cagaaagugugcuccagaa

SEQ ID NO: 953257 - RNA, 19 nt, Artificial Sequence
  Description of Artificial Sequence: Synthetic oligonucleotide
  Antisense strand to SEQ ID NO: 953256
uucuggagcacacuuucug

SEQ ID NO: 953258 - RNA, 19 nt, Artificial Sequence
  Description of Artificial Sequence: Synthetic oligonucleotide
  Sense strand starting at position 343 of SEQ ID NO: 913778
gggaauuacucagaaagaa

SEQ ID NO: 953259 - RNA, 19 nt, Artificial Sequence
  Description of Artificial Sequence: Synthetic oligonucleotide
  Antisense strand to SEQ ID NO: 953258
uucuuucugaguaauuccc

SEQ ID NO: 953260 - RNA, 19 nt, Artificial Sequence
  Description of Artificial Sequence: Synthetic oligonucleotide
  Sense strand starting at position 2327 of SEQ ID NO: 913778
gugguaacucguuaauaau

SEQ ID NO: 953261 - RNA, 19 nt, Artificial Sequence
  Description of Artificial Sequence: Synthetic oligonucleotide
  Antisense strand to SEQ ID NO: 953260
auuauuaacgaguuaccac

SEQ ID NO: 953262 - RNA, 19 nt, Artificial Sequence
  Description of Artificial Sequence: Synthetic oligonucleotide
  Sense strand starting at position 1736 of SEQ ID NO: 913778
ggauauugcuacucauucu

SEQ ID NO: 953263 - RNA, 19 nt, Artificial Sequence
  Description of Artificial Sequence: Synthetic oligonucleotide
  Antisense strand to SEQ ID NO: 953262
agaaugaguagcaauaucc

SEQ ID NO: 953264 - RNA, 19 nt, Artificial Sequence
  Description of Artificial Sequence: Synthetic oligonucleotide
  Sense strand starting at position 271 of SEQ ID NO: 913778
guaucuacccugcacuauu

SEQ ID NO: 953265 - RNA, 19 nt, Artificial Sequence
  Description of Artificial Sequence: Synthetic oligonucleotide
  Antisense strand to SEQ ID NO: 953264
aauagugcaggguagauac

SEQ ID NO: 953266 - RNA, 19 nt, Artificial Sequence
  Description of Artificial Sequence: Synthetic oligonucleotide
  Sense strand starting at position 3617 of SEQ ID NO: 913778
uuuccagcucauuaguuua

SEQ ID NO: 953267 - RNA, 19 nt, Artificial Sequence
  Description of Artificial Sequence: Synthetic oligonucleotide
  Antisense strand to SEQ ID NO: 953266
uaaacuaaugagcuggaaa

SEQ ID NO: 953268 - RNA, 19 nt, Artificial Sequence
  Description of Artificial Sequence: Synthetic oligonucleotide
  Sense strand starting at position 3557 of SEQ ID NO: 913778
cgcuaauuaaaucgaggau

SEQ ID NO: 953269 - RNA, 19 nt, Artificial Sequence
  Description of Artificial Sequence: Synthetic oligonucleotide
  Antisense strand to SEQ ID NO: 953268
auccucgauuuaauuagcg

SEQ ID NO: 953270 - RNA, 19 nt, Artificial Sequence
  Description of Artificial Sequence: Synthetic oligonucleotide
  Sense strand starting at position 216 of SEQ ID NO: 913778
ggguccucgguuuaacuuu

SEQ ID NO: 953271 - RNA, 19 nt, Artificial Sequence
  Description of Artificial Sequence: Synthetic oligonucleotide
  Antisense strand to SEQ ID NO: 953270
aaaguuaaaccgaggaccc

SEQ ID NO: 953272 - RNA, 19 nt, Artificial Sequence
  Description of Artificial Sequence: Synthetic oligonucleotide
  Sense strand starting at position 547 of SEQ ID NO: 913778
gggcgucugcaccaggaau

SEQ ID NO: 953273 - RNA, 19 nt, Artificial Sequence
  Description of Artificial Sequence: Synthetic oligonucleotide
  Antisense strand to SEQ ID NO: 953272
auuccuggugcagacgccc

SEQ ID NO: 953274 - RNA, 19 nt, Artificial Sequence
  Description of Artificial Sequence: Synthetic oligonucleotide
  Sense strand starting at position 3418 of SEQ ID NO: 913778
gaagaaggaguccguguuu

SEQ ID NO: 953275 - RNA, 19 nt, Artificial Sequence
  Description of Artificial Sequence: Synthetic oligonucleotide
  Antisense strand to SEQ ID NO: 953274
aaacacggacuccuucuuc

SEQ ID NO: 953276 - RNA, 19 nt, Artificial Sequence
  Description of Artificial Sequence: Synthetic oligonucleotide
  Sense strand starting at position 3835 of SEQ ID NO: 913778
ucuugcuugauucggaaua

SEQ ID NO: 953277 - RNA, 19 nt, Artificial Sequence
  Description of Artificial Sequence: Synthetic oligonucleotide
  Antisense strand to SEQ ID NO: 953276
uauuccgaaucaagcaaga

SEQ ID NO: 953278 - RNA, 19 nt, Artificial Sequence
  Description of Artificial Sequence: Synthetic oligonucleotide
  Sense strand starting at position 2326 of SEQ ID NO: 913778
ggugguaacucguuaauaa

SEQ ID NO: 953279 - RNA, 19 nt, Artificial Sequence
  Description of Artificial Sequence: Synthetic oligonucleotide
  Antisense strand to SEQ ID NO: 953278
uuauuaacgaguuaccacc

SEQ ID NO: 953280 - RNA, 19 nt, Artificial Sequence
  Description of Artificial Sequence: Synthetic oligonucleotide
  Sense strand starting at position 314 of SEQ ID NO: 913778
aacgguucgcgcgugaagu

SEQ ID NO: 953281 - RNA, 19 nt, Artificial Sequence
  Description of Artificial Sequence: Synthetic oligonucleotide
  Antisense strand to SEQ ID NO: 953280
acuucacgcgcgaaccguu

SEQ ID NO: 953282 - RNA, 19 nt, Artificial Sequence
  Description of Artificial Sequence: Synthetic oligonucleotide
  Sense strand starting at position 3833 of SEQ ID NO: 913778
ucucuugcuugauucggaa

SEQ ID NO: 953283 - RNA, 19 nt, Artificial Sequence
  Description of Artificial Sequence: Synthetic oligonucleotide
  Antisense strand to SEQ ID NO: 953282
uuccgaaucaagcaagaga

SEQ ID NO: 953284 - RNA, 19 nt, Artificial Sequence
  Description of Artificial Sequence: Synthetic oligonucleotide
  Sense strand starting at position 78 of SEQ ID NO: 913778
aauuaaugaucaggagaga

SEQ ID NO: 953285 - RNA, 19 nt, Artificial Sequence
  Description of Artificial Sequence: Synthetic oligonucleotide
  Antisense strand to SEQ ID NO: 953284
ucucuccugaucauuaauu

SEQ ID NO: 953286 - RNA, 19 nt, Artificial Sequence
  Description of Artificial Sequence: Synthetic oligonucleotide
  Sense strand starting at position 903 of SEQ ID NO: 913778
ccgggauucccuugugcaa

SEQ ID NO: 953287 - RNA, 19 nt, Artificial Sequence
  Description of Artificial Sequence: Synthetic oligonucleotide
  Antisense strand to SEQ ID NO: 953286
uugcacaagggaaucccgg

SEQ ID NO: 953288 - RNA, 19 nt, Artificial Sequence
  Description of Artificial Sequence: Synthetic oligonucleotide
  Sense strand starting at position 269 of SEQ ID NO: 913778
guguaucuacccugcacua

SEQ ID NO: 953289 - RNA, 19 nt, Artificial Sequence
  Description of Artificial Sequence: Synthetic oligonucleotide
  Antisense strand to SEQ ID NO: 953288
uagugcaggguagauacac

SEQ ID NO: 953290 - RNA, 19 nt, Artificial Sequence
  Description of Artificial Sequence: Synthetic oligonucleotide
  Sense strand starting at position 3713 of SEQ ID NO: 913778
ugaggcugucuccgugaga

SEQ ID NO: 953291 - RNA, 19 nt, Artificial Sequence
  Description of Artificial Sequence: Synthetic oligonucleotide
  Antisense strand to SEQ ID NO: 953290
ucucacggagacagccuca

SEQ ID NO: 953292 - RNA, 19 nt, Artificial Sequence
  Description of Artificial Sequence: Synthetic oligonucleotide
  Sense strand starting at position 3716 of SEQ ID NO: 913778
ggcugucuccgugagaguc

SEQ ID NO: 953293 - RNA, 19 nt, Artificial Sequence
  Description of Artificial Sequence: Synthetic oligonucleotide
  Antisense strand to SEQ ID NO: 953292
gacucucacggagacagcc

SEQ ID NO: 953294 - RNA, 19 nt, Artificial Sequence
  Description of Artificial Sequence: Synthetic oligonucleotide
  Sense strand starting at position 2317 of SEQ ID NO: 913778
cgcuuauuaggugguaacu

SEQ ID NO: 953295 - RNA, 19 nt, Artificial Sequence
  Description of Artificial Sequence: Synthetic oligonucleotide
  Antisense strand to SEQ ID NO: 953294
aguuaccaccuaauaagcg

SEQ ID NO: 953296 - RNA, 19 nt, Artificial Sequence
  Description of Artificial Sequence: Synthetic oligonucleotide
  Sense strand starting at position 3616 of SEQ ID NO: 913778
guuuccagcucauuaguuu

SEQ ID NO: 953297 - RNA, 19 nt, Artificial Sequence
  Description of Artificial Sequence: Synthetic oligonucleotide
  Antisense strand to SEQ ID NO: 953296
aaacuaaugagcuggaaac

SEQ ID NO: 953298 - RNA, 19 nt, Artificial Sequence
  Description of Artificial Sequence: Synthetic oligonucleotide
  Sense strand starting at position 192 of SEQ ID NO: 913778
ugcugugcccuguagaagu

SEQ ID NO: 953299 - RNA, 19 nt, Artificial Sequence
  Description of Artificial Sequence: Synthetic oligonucleotide
  Antisense strand to SEQ ID NO: 953298
acuucuacagggcacagca

SEQ ID NO: 953300 - RNA, 19 nt, Artificial Sequence
  Description of Artificial Sequence: Synthetic oligonucleotide
  Sense strand starting at position 1723 of SEQ ID NO: 913778
agaugguucgcguggauau

SEQ ID NO: 953301 - RNA, 19 nt, Artificial Sequence
  Description of Artificial Sequence: Synthetic oligonucleotide
  Antisense strand to SEQ ID NO: 953300
auauccacgcgaaccaucu

SEQ ID NO: 953302 - RNA, 19 nt, Artificial Sequence
  Description of Artificial Sequence: Synthetic oligonucleotide
  Sense strand starting at position 1720 of SEQ ID NO: 913778
cugagaugguucgcgugga

SEQ ID NO: 953303 - RNA, 19 nt, Artificial Sequence
  Description of Artificial Sequence: Synthetic oligonucleotide
  Antisense strand to SEQ ID NO: 953302
uccacgcgaaccaucucag

SEQ ID NO: 953304 - RNA, 19 nt, Artificial Sequence
  Description of Artificial Sequence: Synthetic oligonucleotide
  Sense strand starting at position 875 of SEQ ID NO: 913778
cccuguuaucucgggccau

SEQ ID NO: 953305 - RNA, 19 nt, Artificial Sequence
  Description of Artificial Sequence: Synthetic oligonucleotide
  Antisense strand to SEQ ID NO: 953304
auggcccgagauaacaggg

SEQ ID NO: 953306 - RNA, 19 nt, Artificial Sequence
  Description of Artificial Sequence: Synthetic oligonucleotide
  Sense strand starting at position 3828 of SEQ ID NO: 913778
gcuucucucuugcuugauu

SEQ ID NO: 953307 - RNA, 19 nt, Artificial Sequence
  Description of Artificial Sequence: Synthetic oligonucleotide
  Antisense strand to SEQ ID NO: 953306
aaucaagcaagagagaagc

SEQ ID NO: 953308 - RNA, 19 nt, Artificial Sequence
  Description of Artificial Sequence: Synthetic oligonucleotide
  Sense strand starting at position 1724 of SEQ ID NO: 913778
gaugguucgcguggauauu

SEQ ID NO: 953309 - RNA, 19 nt, Artificial Sequence
  Description of Artificial Sequence: Synthetic oligonucleotide
  Antisense strand to SEQ ID NO: 953308
aauauccacgcgaaccauc

SEQ ID NO: 953310 - RNA, 19 nt, Artificial Sequence
  Description of Artificial Sequence: Synthetic oligonucleotide
  Sense strand starting at position 604 of SEQ ID NO: 913778
ggaagacgcuccgcguaaa

SEQ ID NO: 953311 - RNA, 19 nt, Artificial Sequence
  Description of Artificial Sequence: Synthetic oligonucleotide
  Antisense strand to SEQ ID NO: 953310
uuuacgcggagcgucuucc

SEQ ID NO: 953312 - RNA, 19 nt, Artificial Sequence
  Description of Artificial Sequence: Synthetic oligonucleotide
  Sense strand starting at position 3290 of SEQ ID NO: 913779
agcgucuugcuuccugaau

SEQ ID NO: 953313 - RNA, 19 nt, Artificial Sequence
  Description of Artificial Sequence: Synthetic oligonucleotide
  Antisense strand to SEQ ID NO: 953312
auucaggaagcaagacgcu

SEQ ID NO: 953314 - RNA, 19 nt, Artificial Sequence
  Description of Artificial Sequence: Synthetic oligonucleotide
  Sense strand starting at position 216 of SEQ ID NO: 913779
gagugaaauugggugacca

SEQ ID NO: 953315 - RNA, 19 nt, Artificial Sequence
  Description of Artificial Sequence: Synthetic oligonucleotide
  Antisense strand to SEQ ID NO: 953314
uggucacccaauuucacuc

SEQ ID NO: 953316 - RNA, 19 nt, Artificial Sequence
  Description of Artificial Sequence: Synthetic oligonucleotide
  Sense strand starting at position 3881 of SEQ ID NO: 913779
aggaaucacuguuccugaa

SEQ ID NO: 953317 - RNA, 19 nt, Artificial Sequence
  Description of Artificial Sequence: Synthetic oligonucleotide
  Antisense strand to SEQ ID NO: 953316
uucaggaacagugauuccu

SEQ ID NO: 953318 - RNA, 19 nt, Artificial Sequence
  Description of Artificial Sequence: Synthetic oligonucleotide
  Sense strand starting at position 2782 of SEQ ID NO: 913779
gggucugaggucagucgua

SEQ ID NO: 953319 - RNA, 19 nt, Artificial Sequence
  Description of Artificial Sequence: Synthetic oligonucleotide
  Antisense strand to SEQ ID NO: 953318
uacgacugaccucagaccc

SEQ ID NO: 953320 - RNA, 19 nt, Artificial Sequence
  Description of Artificial Sequence: Synthetic oligonucleotide
  Sense strand starting at position 2743 of SEQ ID NO: 913779
cuggauuccagaugcaaga

SEQ ID NO: 953321 - RNA, 19 nt, Artificial Sequence
  Description of Artificial Sequence: Synthetic oligonucleotide
  Antisense strand to SEQ ID NO: 953320
ucuugcaucuggaauccag

SEQ ID NO: 953322 - RNA, 19 nt, Artificial Sequence
  Description of Artificial Sequence: Synthetic oligonucleotide
  Sense strand starting at position 3726 of SEQ ID NO: 913779
acuagagaaggcuguagau

SEQ ID NO: 953323 - RNA, 19 nt, Artificial Sequence
  Description of Artificial Sequence: Synthetic oligonucleotide
  Antisense strand to SEQ ID NO: 953322
aucuacagccuucucuagu

SEQ ID NO: 953324 - RNA, 19 nt, Artificial Sequence
  Description of Artificial Sequence: Synthetic oligonucleotide
  Sense strand starting at position 3928 of SEQ ID NO: 913779
auaggcaagucauugacaa

SEQ ID NO: 953325 - RNA, 19 nt, Artificial Sequence
  Description of Artificial Sequence: Synthetic oligonucleotide
  Antisense strand to SEQ ID NO: 953324
uugucaaugacuugccuau

SEQ ID NO: 953326 - RNA, 19 nt, Artificial Sequence
  Description of Artificial Sequence: Synthetic oligonucleotide
  Sense strand starting at position 555 of SEQ ID NO: 913779
gaaguagggucaguuaaag

SEQ ID NO: 953327 - RNA, 19 nt, Artificial Sequence
  Description of Artificial Sequence: Synthetic oligonucleotide
  Antisense strand to SEQ ID NO: 953326
cuuuaacugacccuacuuc

SEQ ID NO: 953328 - RNA, 19 nt, Artificial Sequence
  Description of Artificial Sequence: Synthetic oligonucleotide
  Sense strand starting at position 3319 of SEQ ID NO: 913779
uuuaaucgccaagaugacu

SEQ ID NO: 953329 - RNA, 19 nt, Artificial Sequence
  Description of Artificial Sequence: Synthetic oligonucleotide
  Antisense strand to SEQ ID NO: 953328
agucaucuuggcgauuaaa

SEQ ID NO: 953330 - RNA, 19 nt, Artificial Sequence
  Description of Artificial Sequence: Synthetic oligonucleotide
  Sense strand starting at position 3929 of SEQ ID NO: 913779
uaggcaagucauugacaaa

SEQ ID NO: 953331 - RNA, 19 nt, Artificial Sequence
  Description of Artificial Sequence: Synthetic oligonucleotide
  Antisense strand to SEQ ID NO: 953330
uuugucaaugacuugccua

SEQ ID NO: 953332 - RNA, 19 nt, Artificial Sequence
  Description of Artificial Sequence: Synthetic oligonucleotide
  Sense strand starting at position 2950 of SEQ ID NO: 913779
aagagacuuucugcgagag

SEQ ID NO: 953333 - RNA, 19 nt, Artificial Sequence
  Description of Artificial Sequence: Synthetic oligonucleotide
  Antisense strand to SEQ ID NO: 953332
cucucgcagaaagucucuu

SEQ ID NO: 953334 - RNA, 19 nt, Artificial Sequence
  Description of Artificial Sequence: Synthetic oligonucleotide
  Sense strand starting at position 3557 of SEQ ID NO: 913779
cugucuuagguuuaaugau

SEQ ID NO: 953335 - RNA, 19 nt, Artificial Sequence
  Description of Artificial Sequence: Synthetic oligonucleotide
  Antisense strand to SEQ ID NO: 953334
aucauuaaaccuaagacag

SEQ ID NO: 953336 - RNA, 19 nt, Artificial Sequence
  Description of Artificial Sequence: Synthetic oligonucleotide
  Sense strand starting at position 3461 of SEQ ID NO: 913779
gucagaucuggaugaagca

SEQ ID NO: 953337 - RNA, 19 nt, Artificial Sequence
  Description of Artificial Sequence: Synthetic oligonucleotide
  Antisense strand to SEQ ID NO: 953336
ugcuucauccagaucugac

SEQ ID NO: 953338 - RNA, 19 nt, Artificial Sequence
  Description of Artificial Sequence: Synthetic oligonucleotide
  Sense strand starting at position 325 of SEQ ID NO: 913779
ucagaagcuaagugggauu

SEQ ID NO: 953339 - RNA, 19 nt, Artificial Sequence
  Description of Artificial Sequence: Synthetic oligonucleotide
  Antisense strand to SEQ ID NO: 953338
aaucccacuuagcuucuga

SEQ ID NO: 953340 - RNA, 19 nt, Artificial Sequence
  Description of Artificial Sequence: Synthetic oligonucleotide
  Sense strand starting at position 2951 of SEQ ID NO: 913779
agagacuuucugcgagaga

SEQ ID NO: 953341 - RNA, 19 nt, Artificial Sequence
  Description of Artificial Sequence: Synthetic oligonucleotide
  Antisense strand to SEQ ID NO: 953340
ucucucgcagaaagucucu

SEQ ID NO: 953342 - RNA, 19 nt, Artificial Sequence
  Description of Artificial Sequence: Synthetic oligonucleotide
  Sense strand starting at position 226 of SEQ ID NO: 913779
gggugaccaggaugcauua

SEQ ID NO: 953343 - RNA, 19 nt, Artificial Sequence
  Description of Artificial Sequence: Synthetic oligonucleotide
  Antisense strand to SEQ ID NO: 953342
uaaugcauccuggucaccc

SEQ ID NO: 953344 - RNA, 19 nt, Artificial Sequence
  Description of Artificial Sequence: Synthetic oligonucleotide
  Sense strand starting at position 3541 of SEQ ID NO: 913779
cugagauccuagucuacug

SEQ ID NO: 953345 - RNA, 19 nt, Artificial Sequence
  Description of Artificial Sequence: Synthetic oligonucleotide
  Antisense strand to SEQ ID NO: 953344
caguagacuaggaucucag

SEQ ID NO: 953346 - RNA, 19 nt, Artificial Sequence
  Description of Artificial Sequence: Synthetic oligonucleotide
  Sense strand starting at position 841 of SEQ ID NO: 913779
gcgaaaccucccgaugaca

SEQ ID NO: 953347 - RNA, 19 nt, Artificial Sequence
  Description of Artificial Sequence: Synthetic oligonucleotide
  Antisense strand to SEQ ID NO: 953346
ugucaucgggagguuucgc

SEQ ID NO: 953348 - RNA, 19 nt, Artificial Sequence
  Description of Artificial Sequence: Synthetic oligonucleotide
  Sense strand starting at position 2910 of SEQ ID NO: 913779
uuuacugguucucugaaau

SEQ ID NO: 953349 - RNA, 19 nt, Artificial Sequence
  Description of Artificial Sequence: Synthetic oligonucleotide
  Antisense strand to SEQ ID NO: 953348
auuucagagaaccaguaaa

SEQ ID NO: 953350 - RNA, 19 nt, Artificial Sequence
  Description of Artificial Sequence: Synthetic oligonucleotide
  Sense strand starting at position 2909 of SEQ ID NO: 913779
cuuuacugguucucugaaa

SEQ ID NO: 953351 - RNA, 19 nt, Artificial Sequence
  Description of Artificial Sequence: Synthetic oligonucleotide
  Antisense strand to SEQ ID NO: 953350
uuucagagaaccaguaaag

SEQ ID NO: 953352 - RNA, 19 nt, Artificial Sequence
  Description of Artificial Sequence: Synthetic oligonucleotide
  Sense strand starting at position 3801 of SEQ ID NO: 913779
gugaaagcacccugacauc

SEQ ID NO: 953353 - RNA, 19 nt, Artificial Sequence
  Description of Artificial Sequence: Synthetic oligonucleotide
  Antisense strand to SEQ ID NO: 953352
gaugucagggugcuuucac

SEQ ID NO: 953354 - RNA, 19 nt, Artificial Sequence
  Description of Artificial Sequence: Synthetic oligonucleotide
  Sense strand starting at position 3051 of SEQ ID NO: 913779
cccagacauccuugaggcu

SEQ ID NO: 953355 - RNA, 19 nt, Artificial Sequence
  Description of Artificial Sequence: Synthetic oligonucleotide
  Antisense strand to SEQ ID NO: 953354
agccucaaggaugucuggg

SEQ ID NO: 953356 - RNA, 19 nt, Artificial Sequence
  Description of Artificial Sequence: Synthetic oligonucleotide
  Sense strand starting at position 3316 of SEQ ID NO: 913779
cuguuuaaucgccaagaug

SEQ ID NO: 953357 - RNA, 19 nt, Artificial Sequence
  Description of Artificial Sequence: Synthetic oligonucleotide
  Antisense strand to SEQ ID NO: 953356
caucuuggcgauuaaacag

SEQ ID NO: 953358 - RNA, 19 nt, Artificial Sequence
  Description of Artificial Sequence: Synthetic oligonucleotide
  Sense strand starting at position 3699 of SEQ ID NO: 913779
gcauguuccuaauuagaac

SEQ ID NO: 953359 - RNA, 19 nt, Artificial Sequence
  Description of Artificial Sequence: Synthetic oligonucleotide
  Antisense strand to SEQ ID NO: 953358
guucuaauuaggaacaugc

SEQ ID NO: 953360 - RNA, 19 nt, Artificial Sequence
  Description of Artificial Sequence: Synthetic oligonucleotide
  Sense strand starting at position 309 of SEQ ID NO: 913779
aaguguagacuugguauca

SEQ ID NO: 953361 - RNA, 19 nt, Artificial Sequence
  Description of Artificial Sequence: Synthetic oligonucleotide
  Antisense strand to SEQ ID NO: 953360
ugauaccaagucuacacuu

SEQ ID NO: 953362 - RNA, 19 nt, Artificial Sequence
  Description of Artificial Sequence: Synthetic oligonucleotide
  Sense strand starting at position 310 of SEQ ID NO: 913779
aguguagacuugguaucag

SEQ ID NO: 953363 - RNA, 19 nt, Artificial Sequence
  Description of Artificial Sequence: Synthetic oligonucleotide
  Antisense strand to SEQ ID NO: 953362
cugauaccaagucuacacu

SEQ ID NO: 953364 - RNA, 19 nt, Artificial Sequence
  Description of Artificial Sequence: Synthetic oligonucleotide
  Sense strand starting at position 2384 of SEQ ID NO: 913779
ugcacaggaugccuuuaaa

SEQ ID NO: 953365 - RNA, 19 nt, Artificial Sequence
  Description of Artificial Sequence: Synthetic oligonucleotide
  Antisense strand to SEQ ID NO: 953364
uuuaaaggcauccugugca

SEQ ID NO: 953366 - RNA, 19 nt, Artificial Sequence
  Description of Artificial Sequence: Synthetic oligonucleotide
  Sense strand starting at position 1424 of SEQ ID NO: 913779
cgguuuccuuauccaagga

SEQ ID NO: 953367 - RNA, 19 nt, Artificial Sequence
  Description of Artificial Sequence: Synthetic oligonucleotide
  Antisense strand to SEQ ID NO: 953366
uccuuggauaaggaaaccg

SEQ ID NO: 953368 - RNA, 19 nt, Artificial Sequence
  Description of Artificial Sequence: Synthetic oligonucleotide
  Sense strand starting at position 133 of SEQ ID NO: 913779
augaaucaucucuguugca

SEQ ID NO: 953369 - RNA, 19 nt, Artificial Sequence
  Description of Artificial Sequence: Synthetic oligonucleotide
  Antisense strand to SEQ ID NO: 953368
ugcaacagagaugauucau

SEQ ID NO: 953370 - RNA, 19 nt, Artificial Sequence
  Description of Artificial Sequence: Synthetic oligonucleotide
  Sense strand starting at position 2822 of SEQ ID NO: 913779
guuccuugagcucaucagu

SEQ ID NO: 953371 - RNA, 19 nt, Artificial Sequence
  Description of Artificial Sequence: Synthetic oligonucleotide
  Antisense strand to SEQ ID NO: 953370
acugaugagcucaaggaac

SEQ ID NO: 953372 - RNA, 19 nt, Artificial Sequence
  Description of Artificial Sequence: Synthetic oligonucleotide
  Sense strand starting at position 3315 of SEQ ID NO: 913779
acuguuuaaucgccaagau

SEQ ID NO: 953373 - RNA, 19 nt, Artificial Sequence
  Description of Artificial Sequence: Synthetic oligonucleotide
  Antisense strand to SEQ ID NO: 953372
aucuuggcgauuaaacagu

SEQ ID NO: 953374 - RNA, 19 nt, Artificial Sequence
  Description of Artificial Sequence: Synthetic oligonucleotide
  Sense strand starting at position 3312 of SEQ ID NO: 913779
gacacuguuuaaucgccaa

SEQ ID NO: 953375 - RNA, 19 nt, Artificial Sequence
  Description of Artificial Sequence: Synthetic oligonucleotide
  Antisense strand to SEQ ID NO: 953374
uuggcgauuaaacaguguc

SEQ ID NO: 953376 - RNA, 19 nt, Artificial Sequence
  Description of Artificial Sequence: Synthetic oligonucleotide
  Sense strand starting at position 2702 of SEQ ID NO: 913779
gcgaaagcacuccgaacaa

SEQ ID NO: 953377 - RNA, 19 nt, Artificial Sequence
  Description of Artificial Sequence: Synthetic oligonucleotide
  Antisense strand to SEQ ID NO: 953376
uuguucggagugcuuucgc

SEQ ID NO: 953378 - RNA, 19 nt, Artificial Sequence
  Description of Artificial Sequence: Synthetic oligonucleotide
  Sense strand starting at position 3032 of SEQ ID NO: 913779
guuugucccuuagcagaga

SEQ ID NO: 953379 - RNA, 19 nt, Artificial Sequence
  Description of Artificial Sequence: Synthetic oligonucleotide
  Antisense strand to SEQ ID NO: 953378
ucucugcuaagggacaaac

SEQ ID NO: 953380 - RNA, 19 nt, Artificial Sequence
  Description of Artificial Sequence: Synthetic oligonucleotide
  Sense strand starting at position 3226 of SEQ ID NO: 913779
ugcagugaucuccagugca

SEQ ID NO: 953381 - RNA, 19 nt, Artificial Sequence
  Description of Artificial Sequence: Synthetic oligonucleotide
  Antisense strand to SEQ ID NO: 953380
ugcacuggagaucacugca

SEQ ID NO: 953382 - RNA, 19 nt, Artificial Sequence
  Description of Artificial Sequence: Synthetic oligonucleotide
  Sense strand starting at position 2816 of SEQ ID NO: 913779
agcagaguuccuugagcuc

SEQ ID NO: 953383 - RNA, 19 nt, Artificial Sequence
  Description of Artificial Sequence: Synthetic oligonucleotide
  Antisense strand to SEQ ID NO: 953382
gagcucaaggaacucugcu

SEQ ID NO: 953384 - RNA, 19 nt, Artificial Sequence
  Description of Artificial Sequence: Synthetic oligonucleotide
  Sense strand starting at position 9 of SEQ ID NO: 913779
gagugugagucauuguggu

SEQ ID NO: 953385 - RNA, 19 nt, Artificial Sequence
  Description of Artificial Sequence: Synthetic oligonucleotide
  Antisense strand to SEQ ID NO: 953384
accacaaugacucacacuc

SEQ ID NO: 953386 - RNA, 19 nt, Artificial Sequence
  Description of Artificial Sequence: Synthetic oligonucleotide
  Sense strand starting at position 3030 of SEQ ID NO: 913779
gcguuugucccuuagcaga

SEQ ID NO: 953387 - RNA, 19 nt, Artificial Sequence
  Description of Artificial Sequence: Synthetic oligonucleotide
  Antisense strand to SEQ ID NO: 953386
ucugcuaagggacaaacgc

SEQ ID NO: 953388 - RNA, 19 nt, Artificial Sequence
  Description of Artificial Sequence: Synthetic oligonucleotide
  Sense strand starting at position 3458 of SEQ ID NO: 913779
agagucagaucuggaugaa

SEQ ID NO: 953389 - RNA, 19 nt, Artificial Sequence
  Description of Artificial Sequence: Synthetic oligonucleotide
  Antisense strand to SEQ ID NO: 953388
uucauccagaucugacucu

SEQ ID NO: 953390 - RNA, 19 nt, Artificial Sequence
  Description of Artificial Sequence: Synthetic oligonucleotide
  Sense strand starting at position 2678 of SEQ ID NO: 913779
gcgugaaccuccgccagaa

SEQ ID NO: 953391 - RNA, 19 nt, Artificial Sequence
  Description of Artificial Sequence: Synthetic oligonucleotide
  Antisense strand to SEQ ID NO: 953390
uucuggcggagguucacgc

SEQ ID NO: 953392 - RNA, 19 nt, Artificial Sequence
  Description of Artificial Sequence: Synthetic oligonucleotide
  Sense strand starting at position 3637 of SEQ ID NO: 913780
ugucauuugguguagcaca

SEQ ID NO: 953393 - RNA, 19 nt, Artificial Sequence
  Description of Artificial Sequence: Synthetic oligonucleotide
  Antisense strand to SEQ ID NO: 953392
ugugcuacaccaaaugaca

SEQ ID NO: 953394 - RNA, 19 nt, Artificial Sequence
  Description of Artificial Sequence: Synthetic oligonucleotide
  Sense strand starting at position 273 of SEQ ID NO: 913780
gguugaauuccugaaguag

SEQ ID NO: 953395 - RNA, 19 nt, Artificial Sequence
  Description of Artificial Sequence: Synthetic oligonucleotide
  Antisense strand to SEQ ID NO: 953394
cuacuucaggaauucaacc

SEQ ID NO: 953396 - RNA, 19 nt, Artificial Sequence
  Description of Artificial Sequence: Synthetic oligonucleotide
  Sense strand starting at position 3198 of SEQ ID NO: 913780
acuuaaggucucuaugacu

SEQ ID NO: 953397 - RNA, 19 nt, Artificial Sequence
  Description of Artificial Sequence: Synthetic oligonucleotide
  Antisense strand to SEQ ID NO: 953396
agucauagagaccuuaagu

SEQ ID NO: 953398 - RNA, 19 nt, Artificial Sequence
  Description of Artificial Sequence: Synthetic oligonucleotide
  Sense strand starting at position 12 of SEQ ID NO: 913780
guuaaaugaaggcaaguau

SEQ ID NO: 953399 - RNA, 19 nt, Artificial Sequence
  Description of Artificial Sequence: Synthetic oligonucleotide
  Antisense strand to SEQ ID NO: 953398
auacuugccuucauuuaac

SEQ ID NO: 953400 - RNA, 19 nt, Artificial Sequence
  Description of Artificial Sequence: Synthetic oligonucleotide
  Sense strand starting at position 3866 of SEQ ID NO: 913780
agggaaaugucucccacca

SEQ ID NO: 953401 - RNA, 19 nt, Artificial Sequence
  Description of Artificial Sequence: Synthetic oligonucleotide
  Antisense strand to SEQ ID NO: 953400
uggugggagacauuucccu

SEQ ID NO: 953402 - RNA, 19 nt, Artificial Sequence
  Description of Artificial Sequence: Synthetic oligonucleotide
  Sense strand starting at position 72 of SEQ ID NO: 913780
aacagugacgucuacauaa

SEQ ID NO: 953403 - RNA, 19 nt, Artificial Sequence
  Description of Artificial Sequence: Synthetic oligonucleotide
  Antisense strand to SEQ ID NO: 953402
uuauguagacgucacuguu

SEQ ID NO: 953404 - RNA, 19 nt, Artificial Sequence
  Description of Artificial Sequence: Synthetic oligonucleotide
  Sense strand starting at position 1235 of SEQ ID NO: 913780
uuuauuugucauugcuuag

SEQ ID NO: 953405 - RNA, 19 nt, Artificial Sequence
  Description of Artificial Sequence: Synthetic oligonucleotide
  Antisense strand to SEQ ID NO: 953404
cuaagcaaugacaaauaaa

SEQ ID NO: 953406 - RNA, 19 nt, Artificial Sequence
  Description of Artificial Sequence: Synthetic oligonucleotide
  Sense strand starting at position 3241 of SEQ ID NO: 913780
uugcuuuaaggaggaacua

SEQ ID NO: 953407 - RNA, 19 nt, Artificial Sequence
  Description of Artificial Sequence: Synthetic oligonucleotide
  Antisense strand to SEQ ID NO: 953406
uaguuccuccuuaaagcaa

SEQ ID NO: 953408 - RNA, 19 nt, Artificial Sequence
  Description of Artificial Sequence: Synthetic oligonucleotide
  Sense strand starting at position 738 of SEQ ID NO: 913780
gaacaugcugccuauagga

SEQ ID NO: 953409 - RNA, 19 nt, Artificial Sequence
  Description of Artificial Sequence: Synthetic oligonucleotide
  Antisense strand to SEQ ID NO: 953408
uccuauaggcagcauguuc

SEQ ID NO: 953410 - RNA, 19 nt, Artificial Sequence
  Description of Artificial Sequence: Synthetic oligonucleotide
  Sense strand starting at position 3777 of SEQ ID NO: 913780
gcagaugcugauuaagauu

SEQ ID NO: 953411 - RNA, 19 nt, Artificial Sequence
  Description of Artificial Sequence: Synthetic oligonucleotide
  Antisense strand to SEQ ID NO: 953410
aaucuuaaucagcaucugc

SEQ ID NO: 953412 - RNA, 19 nt, Artificial Sequence
  Description of Artificial Sequence: Synthetic oligonucleotide
  Sense strand starting at position 2108 of SEQ ID NO: 913780
ucgggugauccacauauua

SEQ ID NO: 953413 - RNA, 19 nt, Artificial Sequence
  Description of Artificial Sequence: Synthetic oligonucleotide
  Antisense strand to SEQ ID NO: 953412
uaauauguggaucacccga

SEQ ID NO: 953414 - RNA, 19 nt, Artificial Sequence
  Description of Artificial Sequence: Synthetic oligonucleotide
  Sense strand starting at position 3432 of SEQ ID NO: 913780
guauuaaugcuaggaagag

SEQ ID NO: 953415 - RNA, 19 nt, Artificial Sequence
  Description of Artificial Sequence: Synthetic oligonucleotide
  Antisense strand to SEQ ID NO: 953414
cucuuccuagcauuaauac

SEQ ID NO: 953416 - RNA, 19 nt, Artificial Sequence
  Description of Artificial Sequence: Synthetic oligonucleotide
  Sense strand starting at position 3632 of SEQ ID NO: 913780
cuaccugucauuuggugua

SEQ ID NO: 953417 - RNA, 19 nt, Artificial Sequence
  Description of Artificial Sequence: Synthetic oligonucleotide
  Antisense strand to SEQ ID NO: 953416
uacaccaaaugacagguag

SEQ ID NO: 953418 - RNA, 19 nt, Artificial Sequence
  Description of Artificial Sequence: Synthetic oligonucleotide
  Sense strand starting at position 3222 of SEQ ID NO: 913780
acagaauuaccuggcaauc

SEQ ID NO: 953419 - RNA, 19 nt, Artificial Sequence
  Description of Artificial Sequence: Synthetic oligonucleotide
  Antisense strand to SEQ ID NO: 953418
gauugccagguaauucugu

SEQ ID NO: 953420 - RNA, 19 nt, Artificial Sequence
  Description of Artificial Sequence: Synthetic oligonucleotide
  Sense strand starting at position 862 of SEQ ID NO: 913780
ucuggaaauucccuacgga

SEQ ID NO: 953421 - RNA, 19 nt, Artificial Sequence
  Description of Artificial Sequence: Synthetic oligonucleotide
  Antisense strand to SEQ ID NO: 953420
uccguagggaauuuccaga

SEQ ID NO: 953422 - RNA, 19 nt, Artificial Sequence
  Description of Artificial Sequence: Synthetic oligonucleotide
  Sense strand starting at position 74 of SEQ ID NO: 913780
cagugacgucuacauaaca

SEQ ID NO: 953423 - RNA, 19 nt, Artificial Sequence
  Description of Artificial Sequence: Synthetic oligonucleotide
  Antisense strand to SEQ ID NO: 953422
uguuauguagacgucacug

SEQ ID NO: 953424 - RNA, 19 nt, Artificial Sequence
  Description of Artificial Sequence: Synthetic oligonucleotide
  Sense strand starting at position 3415 of SEQ ID NO: 913780
guguauuugucuuuaaagu

SEQ ID NO: 953425 - RNA, 19 nt, Artificial Sequence
  Description of Artificial Sequence: Synthetic oligonucleotide
  Antisense strand to SEQ ID NO: 953424
acuuuaaagacaaauacac

SEQ ID NO: 953426 - RNA, 19 nt, Artificial Sequence
  Description of Artificial Sequence: Synthetic oligonucleotide
  Sense strand starting at position 3235 of SEQ ID NO: 913780
gcaaucuugcuuuaaggag

SEQ ID NO: 953427 - RNA, 19 nt, Artificial Sequence
  Description of Artificial Sequence: Synthetic oligonucleotide
  Antisense strand to SEQ ID NO: 953426
cuccuuaaagcaagauugc

SEQ ID NO: 953428 - RNA, 19 nt, Artificial Sequence
  Description of Artificial Sequence: Synthetic oligonucleotide
  Sense strand starting at position 271 of SEQ ID NO: 913780
gagguugaauuccugaagu

SEQ ID NO: 953429 - RNA, 19 nt, Artificial Sequence
  Description of Artificial Sequence: Synthetic oligonucleotide
  Antisense strand to SEQ ID NO: 953428
acuucaggaauucaaccuc

SEQ ID NO: 953430 - RNA, 19 nt, Artificial Sequence
  Description of Artificial Sequence: Synthetic oligonucleotide
  Sense strand starting at position 1496 of SEQ ID NO: 913780
guaacuccaucuuugaaug

SEQ ID NO: 953431 - RNA, 19 nt, Artificial Sequence
  Description of Artificial Sequence: Synthetic oligonucleotide
  Antisense strand to SEQ ID NO: 953430
cauucaaagauggaguuac

SEQ ID NO: 953432 - RNA, 19 nt, Artificial Sequence
  Description of Artificial Sequence: Synthetic oligonucleotide
  Sense strand starting at position 1273 of SEQ ID NO: 913780
ggcucacugcacuacaaau

SEQ ID NO: 953433 - RNA, 19 nt, Artificial Sequence
  Description of Artificial Sequence: Synthetic oligonucleotide
  Antisense strand to SEQ ID NO: 953432
auuuguagugcagugagcc

SEQ ID NO: 953434 - RNA, 19 nt, Artificial Sequence
  Description of Artificial Sequence: Synthetic oligonucleotide
  Sense strand starting at position 2913 of SEQ ID NO: 913780
gauugugaccucgagugac

SEQ ID NO: 953435 - RNA, 19 nt, Artificial Sequence
  Description of Artificial Sequence: Synthetic oligonucleotide
  Antisense strand to SEQ ID NO: 953434
gucacucgaggucacaauc

SEQ ID NO: 953436 - RNA, 19 nt, Artificial Sequence
  Description of Artificial Sequence: Synthetic oligonucleotide
  Sense strand starting at position 3776 of SEQ ID NO: 913780
ggcagaugcugauuaagau

SEQ ID NO: 953437 - RNA, 19 nt, Artificial Sequence
  Description of Artificial Sequence: Synthetic oligonucleotide
  Antisense strand to SEQ ID NO: 953436
aucuuaaucagcaucugcc

SEQ ID NO: 953438 - RNA, 19 nt, Artificial Sequence
  Description of Artificial Sequence: Synthetic oligonucleotide
  Sense strand starting at position 288 of SEQ ID NO: 913780
guaggauccuguccuagaa

SEQ ID NO: 953439 - RNA, 19 nt, Artificial Sequence
  Description of Artificial Sequence: Synthetic oligonucleotide
  Antisense strand to SEQ ID NO: 953438
uucuaggacaggauccuac

SEQ ID NO: 953440 - RNA, 19 nt, Artificial Sequence
  Description of Artificial Sequence: Synthetic oligonucleotide
  Sense strand starting at position 2199 of SEQ ID NO: 913780
gaaagaguauaugcugagu

SEQ ID NO: 953441 - RNA, 19 nt, Artificial Sequence
  Description of Artificial Sequence: Synthetic oligonucleotide
  Antisense strand to SEQ ID NO: 953440
acucagcauauacucuuuc

SEQ ID NO: 953442 - RNA, 19 nt, Artificial Sequence
  Description of Artificial Sequence: Synthetic oligonucleotide
  Sense strand starting at position 1239 of SEQ ID NO: 913780
uuugucauugcuuagagau

SEQ ID NO: 953443 - RNA, 19 nt, Artificial Sequence
  Description of Artificial Sequence: Synthetic oligonucleotide
  Antisense strand to SEQ ID NO: 953442
aucucuaagcaaugacaaa

SEQ ID NO: 953444 - RNA, 19 nt, Artificial Sequence
  Description of Artificial Sequence: Synthetic oligonucleotide
  Sense strand starting at position 2840 of SEQ ID NO: 913780
agggcauuccagcaagguu

SEQ ID NO: 953445 - RNA, 19 nt, Artificial Sequence
  Description of Artificial Sequence: Synthetic oligonucleotide
  Antisense strand to SEQ ID NO: 953444
aaccuugcuggaaugcccu

SEQ ID NO: 953446 - RNA, 19 nt, Artificial Sequence
  Description of Artificial Sequence: Synthetic oligonucleotide
  Sense strand starting at position 3388 of SEQ ID NO: 913780
agaucauccugauucuugu

SEQ ID NO: 953447 - RNA, 19 nt, Artificial Sequence
  Description of Artificial Sequence: Synthetic oligonucleotide
  Antisense strand to SEQ ID NO: 953446
acaagaaucaggaugaucu

SEQ ID NO: 953448 - RNA, 19 nt, Artificial Sequence
  Description of Artificial Sequence: Synthetic oligonucleotide
  Sense strand starting at position 3116 of SEQ ID NO: 913780
agaagacgcggugaaucuu

SEQ ID NO: 953449 - RNA, 19 nt, Artificial Sequence
  Description of Artificial Sequence: Synthetic oligonucleotide
  Antisense strand to SEQ ID NO: 953448
aagauucaccgcgucuucu

SEQ ID NO: 953450 - RNA, 19 nt, Artificial Sequence
  Description of Artificial Sequence: Synthetic oligonucleotide
  Sense strand starting at position 2963 of SEQ ID NO: 913780
uuggccauuuaagacauaa

SEQ ID NO: 953451 - RNA, 19 nt, Artificial Sequence
  Description of Artificial Sequence: Synthetic oligonucleotide
  Antisense strand to SEQ ID NO: 953450
uuaugucuuaaauggccaa

SEQ ID NO: 953452 - RNA, 19 nt, Artificial Sequence
  Description of Artificial Sequence: Synthetic oligonucleotide
  Sense strand starting at position 165 of SEQ ID NO: 913780
cucugaagccucugaauug

SEQ ID NO: 953453 - RNA, 19 nt, Artificial Sequence
  Description of Artificial Sequence: Synthetic oligonucleotide
  Antisense strand to SEQ ID NO: 953452
caauucagaggcuucagag

SEQ ID NO: 953454 - RNA, 19 nt, Artificial Sequence
  Description of Artificial Sequence: Synthetic oligonucleotide
  Sense strand starting at position 3396 of SEQ ID NO: 913780
cugauucuuguauacuguu

SEQ ID NO: 953455 - RNA, 19 nt, Artificial Sequence
  Description of Artificial Sequence: Synthetic oligonucleotide
  Antisense strand to SEQ ID NO: 953454
aacaguauacaagaaucag

SEQ ID NO: 953456 - RNA, 19 nt, Artificial Sequence
  Description of Artificial Sequence: Synthetic oligonucleotide
  Sense strand starting at position 2101 of SEQ ID NO: 913780
ucccaaaucgggugaucca

SEQ ID NO: 953457 - RNA, 19 nt, Artificial Sequence
  Description of Artificial Sequence: Synthetic oligonucleotide
  Antisense strand to SEQ ID NO: 953456
uggaucacccgauuuggga

SEQ ID NO: 953458 - RNA, 19 nt, Artificial Sequence
  Description of Artificial Sequence: Synthetic oligonucleotide
  Sense strand starting at position 2705 of SEQ ID NO: 913780
ugcgaugucagauaucuca

SEQ ID NO: 953459 - RNA, 19 nt, Artificial Sequence
  Description of Artificial Sequence: Synthetic oligonucleotide
  Antisense strand to SEQ ID NO: 953458
ugagauaucugacaucgca

SEQ ID NO: 953460 - RNA, 19 nt, Artificial Sequence
  Description of Artificial Sequence: Synthetic oligonucleotide
  Sense strand starting at position 2872 of SEQ ID NO: 913780
gaucaagaaugugugcuga

SEQ ID NO: 953461 - RNA, 19 nt, Artificial Sequence
  Description of Artificial Sequence: Synthetic oligonucleotide
  Antisense strand to SEQ ID NO: 953460
ucagcacacauucuugauc

SEQ ID NO: 953462 - RNA, 19 nt, Artificial Sequence
  Description of Artificial Sequence: Synthetic oligonucleotide
  Sense strand starting at position 176 of SEQ ID NO: 913780
cugaauugcccugauuguu

SEQ ID NO: 953463 - RNA, 19 nt, Artificial Sequence
  Description of Artificial Sequence: Synthetic oligonucleotide
  Antisense strand to SEQ ID NO: 953462
aacaaucagggcaauucag

SEQ ID NO: 953464 - RNA, 19 nt, Artificial Sequence
  Description of Artificial Sequence: Synthetic oligonucleotide
  Sense strand starting at position 2847 of SEQ ID NO: 913780
uccagcaagguuugagauu

SEQ ID NO: 953465 - RNA, 19 nt, Artificial Sequence
  Description of Artificial Sequence: Synthetic oligonucleotide
  Antisense strand to SEQ ID NO: 953464
aaucucaaaccuugcugga

SEQ ID NO: 953466 - RNA, 19 nt, Artificial Sequence
  Description of Artificial Sequence: Synthetic oligonucleotide
  Sense strand starting at position 3391 of SEQ ID NO: 913780
ucauccugauucuuguaua

SEQ ID NO: 953467 - RNA, 19 nt, Artificial Sequence
  Description of Artificial Sequence: Synthetic oligonucleotide
  Antisense strand to SEQ ID NO: 953466
uauacaagaaucaggauga

SEQ ID NO: 953468 - RNA, 19 nt, Artificial Sequence
  Description of Artificial Sequence: Synthetic oligonucleotide
  Sense strand starting at position 2202 of SEQ ID NO: 913780
agaguauaugcugaguguu

SEQ ID NO: 953469 - RNA, 19 nt, Artificial Sequence
  Description of Artificial Sequence: Synthetic oligonucleotide
  Antisense strand to SEQ ID NO: 953468
aacacucagcauauacucu

SEQ ID NO: 953470 - RNA, 19 nt, Artificial Sequence
  Description of Artificial Sequence: Synthetic oligonucleotide
  Sense strand starting at position 2874 of SEQ ID NO: 913780
ucaagaaugugugcugaac

SEQ ID NO: 953471 - RNA, 19 nt, Artificial Sequence
  Description of Artificial Sequence: Synthetic oligonucleotide
  Antisense strand to SEQ ID NO: 953470
guucagcacacauucuuga

SEQ ID NO: 953472 - RNA, 19 nt, Artificial Sequence
  Description of Artificial Sequence: Synthetic oligonucleotide
  Sense strand starting at position 1327 of SEQ ID NO: 913781
ugucacagagcacauaaau

SEQ ID NO: 953473 - RNA, 19 nt, Artificial Sequence
  Description of Artificial Sequence: Synthetic oligonucleotide
  Antisense strand to SEQ ID NO: 953472
auuuaugugcucugugaca

SEQ ID NO: 953474 - RNA, 19 nt, Artificial Sequence
  Description of Artificial Sequence: Synthetic oligonucleotide
  Sense strand starting at position 3837 of SEQ ID NO: 913781
gggcauuguccgagagagc

SEQ ID NO: 953475 - RNA, 19 nt, Artificial Sequence
  Description of Artificial Sequence: Synthetic oligonucleotide
  Antisense strand to SEQ ID NO: 953474
gcucucucggacaaugccc

SEQ ID NO: 953476 - RNA, 19 nt, Artificial Sequence
  Description of Artificial Sequence: Synthetic oligonucleotide
  Sense strand starting at position 2291 of SEQ ID NO: 913781
uguguuugccuagcuaauc

SEQ ID NO: 953477 - RNA, 19 nt, Artificial Sequence
  Description of Artificial Sequence: Synthetic oligonucleotide
  Antisense strand to SEQ ID NO: 953476
gauuagcuaggcaaacaca

SEQ ID NO: 953478 - RNA, 19 nt, Artificial Sequence
  Description of Artificial Sequence: Synthetic oligonucleotide
  Sense strand starting at position 2619 of SEQ ID NO: 913781
ggcugauugagugaaucag

SEQ ID NO: 953479 - RNA, 19 nt, Artificial Sequence
  Description of Artificial Sequence: Synthetic oligonucleotide
  Antisense strand to SEQ ID NO: 953478
cugauucacucaaucagcc

SEQ ID NO: 953480 - RNA, 19 nt, Artificial Sequence
  Description of Artificial Sequence: Synthetic oligonucleotide
  Sense strand starting at position 3664 of SEQ ID NO: 913781
ccaauagcgggauacauua

SEQ ID NO: 953481 - RNA, 19 nt, Artificial Sequence
  Description of Artificial Sequence: Synthetic oligonucleotide
  Antisense strand to SEQ ID NO: 953480
uaauguaucccgcuauugg

SEQ ID NO: 953482 - RNA, 19 nt, Artificial Sequence
  Description of Artificial Sequence: Synthetic oligonucleotide
  Sense strand starting at position 1552 of SEQ ID NO: 913781
ugcaaucgccuauugcauu

SEQ ID NO: 953483 - RNA, 19 nt, Artificial Sequence
  Description of Artificial Sequence: Synthetic oligonucleotide
  Antisense strand to SEQ ID NO: 953482
aaugcaauaggcgauugca

SEQ ID NO: 953484 - RNA, 19 nt, Artificial Sequence
  Description of Artificial Sequence: Synthetic oligonucleotide
  Sense strand starting at position 2164 of SEQ ID NO: 913781
uuggaaguugcauaucaga

SEQ ID NO: 953485 - RNA, 19 nt, Artificial Sequence
  Description of Artificial Sequence: Synthetic oligonucleotide
  Antisense strand to SEQ ID NO: 953484
ucugauaugcaacuuccaa

SEQ ID NO: 953486 - RNA, 19 nt, Artificial Sequence
  Description of Artificial Sequence: Synthetic oligonucleotide
  Sense strand starting at position 2711 of SEQ ID NO: 913781
uugaaauacugacuaucga

SEQ ID NO: 953487 - RNA, 19 nt, Artificial Sequence
  Description of Artificial Sequence: Synthetic oligonucleotide
  Antisense strand to SEQ ID NO: 953486
ucgauagucaguauuucaa

SEQ ID NO: 953488 - RNA, 19 nt, Artificial Sequence
  Description of Artificial Sequence: Synthetic oligonucleotide
  Sense strand starting at position 2031 of SEQ ID NO: 913781
aaggaaacacgugauguuu

SEQ ID NO: 953489 - RNA, 19 nt, Artificial Sequence
  Description of Artificial Sequence: Synthetic oligonucleotide
  Antisense strand to SEQ ID NO: 953488
aaacaucacguguuuccuu

SEQ ID NO: 953490 - RNA, 19 nt, Artificial Sequence
  Description of Artificial Sequence: Synthetic oligonucleotide
  Sense strand starting at position 396 of SEQ ID NO: 913781
auaaacaaccagugugaua

SEQ ID NO: 953491 - RNA, 19 nt, Artificial Sequence
  Description of Artificial Sequence: Synthetic oligonucleotide
  Antisense strand to SEQ ID NO: 953490
uaucacacugguuguuuau

SEQ ID NO: 953492 - RNA, 19 nt, Artificial Sequence
  Description of Artificial Sequence: Synthetic oligonucleotide
  Sense strand starting at position 2177 of SEQ ID NO: 913781
aucagaugugcauauauua

SEQ ID NO: 953493 - RNA, 19 nt, Artificial Sequence
  Description of Artificial Sequence: Synthetic oligonucleotide
  Antisense strand to SEQ ID NO: 953492
uaauauaugcacaucugau

SEQ ID NO: 953494 - RNA, 19 nt, Artificial Sequence
  Description of Artificial Sequence: Synthetic oligonucleotide
  Sense strand starting at position 2175 of SEQ ID NO: 913781
auaucagaugugcauauau

SEQ ID NO: 953495 - RNA, 19 nt, Artificial Sequence
  Description of Artificial Sequence: Synthetic oligonucleotide
  Antisense strand to SEQ ID NO: 953494
auauaugcacaucugauau

SEQ ID NO: 953496 - RNA, 19 nt, Artificial Sequence
  Description of Artificial Sequence: Synthetic oligonucleotide
  Sense strand starting at position 1422 of SEQ ID NO: 913781
ccacaagauuuauagauug

SEQ ID NO: 953497 - RNA, 19 nt, Artificial Sequence
  Description of Artificial Sequence: Synthetic oligonucleotide
  Antisense strand to SEQ ID NO: 953496
caaucuauaaaucuugugg

SEQ ID NO: 953498 - RNA, 19 nt, Artificial Sequence
  Description of Artificial Sequence: Synthetic oligonucleotide
  Sense strand starting at position 381 of SEQ ID NO: 913781
uaaccaggucccuggauaa

SEQ ID NO: 953499 - RNA, 19 nt, Artificial Sequence
  Description of Artificial Sequence: Synthetic oligonucleotide
  Antisense strand to SEQ ID NO: 953498
uuauccagggaccugguua

SEQ ID NO: 953500 - RNA, 19 nt, Artificial Sequence
  Description of Artificial Sequence: Synthetic oligonucleotide
  Sense strand starting at position 2519 of SEQ ID NO: 913781
gaguuaauugauuauuguc

SEQ ID NO: 953501 - RNA, 19 nt, Artificial Sequence
  Description of Artificial Sequence: Synthetic oligonucleotide
  Antisense strand to SEQ ID NO: 953500
gacaauaaucaauuaacuc

SEQ ID NO: 953502 - RNA, 19 nt, Artificial Sequence
  Description of Artificial Sequence: Synthetic oligonucleotide
  Sense strand starting at position 947 of SEQ ID NO: 913781
agugaauuacugcaagagu

SEQ ID NO: 953503 - RNA, 19 nt, Artificial Sequence
  Description of Artificial Sequence: Synthetic oligonucleotide
  Antisense strand to SEQ ID NO: 953502
acucuugcaguaauucacu

SEQ ID NO: 953504 - RNA, 19 nt, Artificial Sequence
  Description of Artificial Sequence: Synthetic oligonucleotide
  Sense strand starting at position 3672 of SEQ ID NO: 913781
gggauacauuagguaaugu

SEQ ID NO: 953505 - RNA, 19 nt, Artificial Sequence
  Description of Artificial Sequence: Synthetic oligonucleotide
  Antisense strand to SEQ ID NO: 953504
acauuaccuaauguauccc

SEQ ID NO: 953506 - RNA, 19 nt, Artificial Sequence
  Description of Artificial Sequence: Synthetic oligonucleotide
  Sense strand starting at position 1398 of SEQ ID NO: 913781
uuauaagguuagccagaaa

SEQ ID NO: 953507 - RNA, 19 nt, Artificial Sequence
  Description of Artificial Sequence: Synthetic oligonucleotide
  Antisense strand to SEQ ID NO: 953506
uuucuggcuaaccuuauaa

SEQ ID NO: 953508 - RNA, 19 nt, Artificial Sequence
  Description of Artificial Sequence: Synthetic oligonucleotide
  Sense strand starting at position 1397 of SEQ ID NO: 913781
auuauaagguuagccagaa

SEQ ID NO: 953509 - RNA, 19 nt, Artificial Sequence
  Description of Artificial Sequence: Synthetic oligonucleotide
  Antisense strand to SEQ ID NO: 953508
uucuggcuaaccuuauaau

SEQ ID NO: 953510 - RNA, 19 nt, Artificial Sequence
  Description of Artificial Sequence: Synthetic oligonucleotide
  Sense strand starting at position 298 of SEQ ID NO: 913781
ggaagagucguuuauccaa

SEQ ID NO: 953511 - RNA, 19 nt, Artificial Sequence
  Description of Artificial Sequence: Synthetic oligonucleotide
  Antisense strand to SEQ ID NO: 953510
uuggauaaacgacucuucc

SEQ ID NO: 953512 - RNA, 19 nt, Artificial Sequence
  Description of Artificial Sequence: Synthetic oligonucleotide
  Sense strand starting at position 760 of SEQ ID NO: 913781
cguaaaccacauuggauaa

SEQ ID NO: 953513 - RNA, 19 nt, Artificial Sequence
  Description of Artificial Sequence: Synthetic oligonucleotide
  Antisense strand to SEQ ID NO: 953512
uuauccaaugugguuuacg

SEQ ID NO: 953514 - RNA, 19 nt, Artificial Sequence
  Description of Artificial Sequence: Synthetic oligonucleotide
  Sense strand starting at position 2651 of SEQ ID NO: 913781
uaaugaaguuagguuaacu

SEQ ID NO: 953515 - RNA, 19 nt, Artificial Sequence
  Description of Artificial Sequence: Synthetic oligonucleotide
  Antisense strand to SEQ ID NO: 953514
aguuaaccuaacuucauua

SEQ ID NO: 953516 - RNA, 19 nt, Artificial Sequence
  Description of Artificial Sequence: Synthetic oligonucleotide
  Sense strand starting at position 470 of SEQ ID NO: 913781
auaguuuauccugaagcca

SEQ ID NO: 953517 - RNA, 19 nt, Artificial Sequence
  Description of Artificial Sequence: Synthetic oligonucleotide
  Antisense strand to SEQ ID NO: 953516
uggcuucaggauaaacuau

SEQ ID NO: 953518 - RNA, 19 nt, Artificial Sequence
  Description of Artificial Sequence: Synthetic oligonucleotide
  Sense strand starting at position 717 of SEQ ID NO: 913781
uccauaggguuaucaugau

SEQ ID NO: 953519 - RNA, 19 nt, Artificial Sequence
  Description of Artificial Sequence: Synthetic oligonucleotide
  Antisense strand to SEQ ID NO: 953518
aucaugauaacccuaugga

SEQ ID NO: 953520 - RNA, 19 nt, Artificial Sequence
  Description of Artificial Sequence: Synthetic oligonucleotide
  Sense strand starting at position 2037 of SEQ ID NO: 913781
acacgugauguuuauaaau

SEQ ID NO: 953521 - RNA, 19 nt, Artificial Sequence
  Description of Artificial Sequence: Synthetic oligonucleotide
  Antisense strand to SEQ ID NO: 953520
auuuauaaacaucacgugu

SEQ ID NO: 953522 - RNA, 19 nt, Artificial Sequence
  Description of Artificial Sequence: Synthetic oligonucleotide
  Sense strand starting at position 2410 of SEQ ID NO: 913781
aaaugaguuccauaguguu

SEQ ID NO: 953523 - RNA, 19 nt, Artificial Sequence
  Description of Artificial Sequence: Synthetic oligonucleotide
  Antisense strand to SEQ ID NO: 953522
aacacuauggaacucauuu

SEQ ID NO: 953524 - RNA, 19 nt, Artificial Sequence
  Description of Artificial Sequence: Synthetic oligonucleotide
  Sense strand starting at position 1039 of SEQ ID NO: 913781
agagauuuguuauaucaag

SEQ ID NO: 953525 - RNA, 19 nt, Artificial Sequence
  Description of Artificial Sequence: Synthetic oligonucleotide
  Antisense strand to SEQ ID NO: 953524
cuugauauaacaaaucucu

SEQ ID NO: 953526 - RNA, 19 nt, Artificial Sequence
  Description of Artificial Sequence: Synthetic oligonucleotide
  Sense strand starting at position 3809 of SEQ ID NO: 913781
gguauuuaaugagaaucua

SEQ ID NO: 953527 - RNA, 19 nt, Artificial Sequence
  Description of Artificial Sequence: Synthetic oligonucleotide
  Antisense strand to SEQ ID NO: 953526
uagauucucauuaaauacc

SEQ ID NO: 953528 - RNA, 19 nt, Artificial Sequence
  Description of Artificial Sequence: Synthetic oligonucleotide
  Sense strand starting at position 3662 of SEQ ID NO: 913781
ggccaauagcgggauacau

SEQ ID NO: 953529 - RNA, 19 nt, Artificial Sequence
  Description of Artificial Sequence: Synthetic oligonucleotide
  Antisense strand to SEQ ID NO: 953528
auguaucccgcuauuggcc

SEQ ID NO: 953530 - RNA, 19 nt, Artificial Sequence
  Description of Artificial Sequence: Synthetic oligonucleotide
  Sense strand starting at position 2610 of SEQ ID NO: 913781
acucacuauggcugauuga

SEQ ID NO: 953531 - RNA, 19 nt, Artificial Sequence
  Description of Artificial Sequence: Synthetic oligonucleotide
  Antisense strand to SEQ ID NO: 953530
ucaaucagccauagugagu

SEQ ID NO: 953532 - RNA, 19 nt, Artificial Sequence
  Description of Artificial Sequence: Synthetic oligonucleotide
  Sense strand starting at position 3197 of SEQ ID NO: 913781
aagguuagauaacugugua

SEQ ID NO: 953533 - RNA, 19 nt, Artificial Sequence
  Description of Artificial Sequence: Synthetic oligonucleotide
  Antisense strand to SEQ ID NO: 953532
uacacaguuaucuaaccuu

SEQ ID NO: 953534 - RNA, 19 nt, Artificial Sequence
  Description of Artificial Sequence: Synthetic oligonucleotide
  Sense strand starting at position 380 of SEQ ID NO: 913781
guaaccaggucccuggaua

SEQ ID NO: 953535 - RNA, 19 nt, Artificial Sequence
  Description of Artificial Sequence: Synthetic oligonucleotide
  Antisense strand to SEQ ID NO: 953534
uauccagggaccugguuac

SEQ ID NO: 953536 - RNA, 19 nt, Artificial Sequence
  Description of Artificial Sequence: Synthetic oligonucleotide
  Sense strand starting at position 3732 of SEQ ID NO: 913781
gcucuuaguagauaaggca

SEQ ID NO: 953537 - RNA, 19 nt, Artificial Sequence
  Description of Artificial Sequence: Synthetic oligonucleotide
  Antisense strand to SEQ ID NO: 953536
ugccuuaucuacuaagagc

SEQ ID NO: 953538 - RNA, 19 nt, Artificial Sequence
  Description of Artificial Sequence: Synthetic oligonucleotide
  Sense strand starting at position 3781 of SEQ ID NO: 913781
ggcugaaguaaguaucuuu

SEQ ID NO: 953539 - RNA, 19 nt, Artificial Sequence
  Description of Artificial Sequence: Synthetic oligonucleotide
  Antisense strand to SEQ ID NO: 953538
aaagauacuuacuucagcc

SEQ ID NO: 953540 - RNA, 19 nt, Artificial Sequence
  Description of Artificial Sequence: Synthetic oligonucleotide
  Sense strand starting at position 300 of SEQ ID NO: 913781
aagagucguuuauccaaag

SEQ ID NO: 953541 - RNA, 19 nt, Artificial Sequence
  Description of Artificial Sequence: Synthetic oligonucleotide
  Antisense strand to SEQ ID NO: 953540
cuuuggauaaacgacucuu

SEQ ID NO: 953542 - RNA, 19 nt, Artificial Sequence
  Description of Artificial Sequence: Synthetic oligonucleotide
  Sense strand starting at position 2488 of SEQ ID NO: 913781
auuauagaugucuguauca

SEQ ID NO: 953543 - RNA, 19 nt, Artificial Sequence
  Description of Artificial Sequence: Synthetic oligonucleotide
  Antisense strand to SEQ ID NO: 953542
ugauacagacaucuauaau

SEQ ID NO: 953544 - RNA, 19 nt, Artificial Sequence
  Description of Artificial Sequence: Synthetic oligonucleotide
  Sense strand starting at position 3198 of SEQ ID NO: 913781
agguuagauaacuguguau

SEQ ID NO: 953545 - RNA, 19 nt, Artificial Sequence
  Description of Artificial Sequence: Synthetic oligonucleotide
  Antisense strand to SEQ ID NO: 953544
auacacaguuaucuaaccu

SEQ ID NO: 953546 - RNA, 19 nt, Artificial Sequence
  Description of Artificial Sequence: Synthetic oligonucleotide
  Sense strand starting at position 574 of SEQ ID NO: 913781
ugugcuguccaggacuuaa

SEQ ID NO: 953547 - RNA, 19 nt, Artificial Sequence
  Description of Artificial Sequence: Synthetic oligonucleotide
  Antisense strand to SEQ ID NO: 953546
uuaaguccuggacagcaca

SEQ ID NO: 953548 - RNA, 19 nt, Artificial Sequence
  Description of Artificial Sequence: Synthetic oligonucleotide
  Sense strand starting at position 2495 of SEQ ID NO: 913781
augucuguaucauuauuga

SEQ ID NO: 953549 - RNA, 19 nt, Artificial Sequence
  Description of Artificial Sequence: Synthetic oligonucleotide
  Antisense strand to SEQ ID NO: 953548
ucaauaaugauacagacau

SEQ ID NO: 953550 - RNA, 19 nt, Artificial Sequence
  Description of Artificial Sequence: Synthetic oligonucleotide
  Sense strand starting at position 7 of SEQ ID NO: 913781
cacuguugaaggugaaguu

SEQ ID NO: 953551 - RNA, 19 nt, Artificial Sequence
  Description of Artificial Sequence: Synthetic oligonucleotide
  Antisense strand to SEQ ID NO: 953550
aacuucaccuucaacagug

SEQ ID NO: 953552 - RNA, 19 nt, Artificial Sequence
  Description of Artificial Sequence: Synthetic oligonucleotide
  Sense strand starting at position 3204 of SEQ ID NO: 913782
uaagaugucucacuaggaa

SEQ ID NO: 953553 - RNA, 19 nt, Artificial Sequence
  Description of Artificial Sequence: Synthetic oligonucleotide
  Antisense strand to SEQ ID NO: 953552
uuccuagugagacaucuua

SEQ ID NO: 953554 - RNA, 19 nt, Artificial Sequence
  Description of Artificial Sequence: Synthetic oligonucleotide
  Sense strand starting at position 1141 of SEQ ID NO: 913782
uuauuugaguucuuccagu

SEQ ID NO: 953555 - RNA, 19 nt, Artificial Sequence
  Description of Artificial Sequence: Synthetic oligonucleotide
  Antisense strand to SEQ ID NO: 953554
acuggaagaacucaaauaa

SEQ ID NO: 953556 - RNA, 19 nt, Artificial Sequence
  Description of Artificial Sequence: Synthetic oligonucleotide
  Sense strand starting at position 3069 of SEQ ID NO: 913782
aaagaauuccaugacgucu

SEQ ID NO: 953557 - RNA, 19 nt, Artificial Sequence
  Description of Artificial Sequence: Synthetic oligonucleotide
  Antisense strand to SEQ ID NO: 953556
agacgucauggaauucuuu

SEQ ID NO: 953558 - RNA, 19 nt, Artificial Sequence
  Description of Artificial Sequence: Synthetic oligonucleotide
  Sense strand starting at position 3314 of SEQ ID NO: 913782
cagcaaggguuuguuauuu

SEQ ID NO: 953559 - RNA, 19 nt, Artificial Sequence
  Description of Artificial Sequence: Synthetic oligonucleotide
  Antisense strand to SEQ ID NO: 953558
aaauaacaaacccuugcug

SEQ ID NO: 953560 - RNA, 19 nt, Artificial Sequence
  Description of Artificial Sequence: Synthetic oligonucleotide
  Sense strand starting at position 1492 of SEQ ID NO: 913782
gggaaacugccucauguaa

SEQ ID NO: 953561 - RNA, 19 nt, Artificial Sequence
  Description of Artificial Sequence: Synthetic oligonucleotide
  Antisense strand to SEQ ID NO: 953560
uuacaugaggcaguuuccc

SEQ ID NO: 953562 - RNA, 19 nt, Artificial Sequence
  Description of Artificial Sequence: Synthetic oligonucleotide
  Sense strand starting at position 412 of SEQ ID NO: 913782
cagcaugaugguuaagauu

SEQ ID NO: 953563 - RNA, 19 nt, Artificial Sequence
  Description of Artificial Sequence: Synthetic oligonucleotide
  Antisense strand to SEQ ID NO: 953562
aaucuuaaccaucaugcug

SEQ ID NO: 953564 - RNA, 19 nt, Artificial Sequence
  Description of Artificial Sequence: Synthetic oligonucleotide
  Sense strand starting at position 2796 of SEQ ID NO: 913782
gaggacuggcauuaaugca

SEQ ID NO: 953565 - RNA, 19 nt, Artificial Sequence
  Description of Artificial Sequence: Synthetic oligonucleotide
  Antisense strand to SEQ ID NO: 953564
ugcauuaaugccaguccuc

SEQ ID NO: 953566 - RNA, 19 nt, Artificial Sequence
  Description of Artificial Sequence: Synthetic oligonucleotide
  Sense strand starting at position 1555 of SEQ ID NO: 913782
aaggaauauuauguacagu

SEQ ID NO: 953567 - RNA, 19 nt, Artificial Sequence
  Description of Artificial Sequence: Synthetic oligonucleotide
  Antisense strand to SEQ ID NO: 953566
acuguacauaauauuccuu

SEQ ID NO: 953568 - RNA, 19 nt, Artificial Sequence
  Description of Artificial Sequence: Synthetic oligonucleotide
  Sense strand starting at position 2020 of SEQ ID NO: 913782
cuuggaaauuagucacuga

SEQ ID NO: 953569 - RNA, 19 nt, Artificial Sequence
  Description of Artificial Sequence: Synthetic oligonucleotide
  Antisense strand to SEQ ID NO: 953568
ucagugacuaauuuccaag

SEQ ID NO: 953570 - RNA, 19 nt, Artificial Sequence
  Description of Artificial Sequence: Synthetic oligonucleotide
  Sense strand starting at position 2139 of SEQ ID NO: 913782
cuagguaaauggguuaaca

SEQ ID NO: 953571 - RNA, 19 nt, Artificial Sequence
  Description of Artificial Sequence: Synthetic oligonucleotide
  Antisense strand to SEQ ID NO: 953570
uguuaacccauuuaccuag

SEQ ID NO: 953572 - RNA, 19 nt, Artificial Sequence
  Description of Artificial Sequence: Synthetic oligonucleotide
  Sense strand starting at position 558 of SEQ ID NO: 913782
gaguaaagacauggcauua

SEQ ID NO: 953573 - RNA, 19 nt, Artificial Sequence
  Description of Artificial Sequence: Synthetic oligonucleotide
  Antisense strand to SEQ ID NO: 953572
uaaugccaugucuuuacuc

SEQ ID NO: 953574 - RNA, 19 nt, Artificial Sequence
  Description of Artificial Sequence: Synthetic oligonucleotide
  Sense strand starting at position 418 of SEQ ID NO: 913782
gaugguuaagauuguauaa

SEQ ID NO: 953575 - RNA, 19 nt, Artificial Sequence
  Description of Artificial Sequence: Synthetic oligonucleotide
  Antisense strand to SEQ ID NO: 953574
uuauacaaucuuaaccauc

SEQ ID NO: 953576 - RNA, 19 nt, Artificial Sequence
  Description of Artificial Sequence: Synthetic oligonucleotide
  Sense strand starting at position 34 of SEQ ID NO: 913782
gaagucuuggcagaauucu

SEQ ID NO: 953577 - RNA, 19 nt, Artificial Sequence
  Description of Artificial Sequence: Synthetic oligonucleotide
  Antisense strand to SEQ ID NO: 953576
agaauucugccaagacuuc

SEQ ID NO: 953578 - RNA, 19 nt, Artificial Sequence
  Description of Artificial Sequence: Synthetic oligonucleotide
  Sense strand starting at position 2869 of SEQ ID NO: 913782
ucugauuaccaucauguuu

SEQ ID NO: 953579 - RNA, 19 nt, Artificial Sequence
  Description of Artificial Sequence: Synthetic oligonucleotide
  Antisense strand to SEQ ID NO: 953578
aaacaugaugguaaucaga

SEQ ID NO: 953580 - RNA, 19 nt, Artificial Sequence
  Description of Artificial Sequence: Synthetic oligonucleotide
  Sense strand starting at position 72 of SEQ ID NO: 913782
gugacugacuuucuaagac

SEQ ID NO: 953581 - RNA, 19 nt, Artificial Sequence
  Description of Artificial Sequence: Synthetic oligonucleotide
  Antisense strand to SEQ ID NO: 953580
gucuuagaaagucagucac

SEQ ID NO: 953582 - RNA, 19 nt, Artificial Sequence
  Description of Artificial Sequence: Synthetic oligonucleotide
  Sense strand starting at position 1035 of SEQ ID NO: 913782
auauaauggcaauguauga

SEQ ID NO: 953583 - RNA, 19 nt, Artificial Sequence
  Description of Artificial Sequence: Synthetic oligonucleotide
  Antisense strand to SEQ ID NO: 953582
ucauacauugccauuauau

SEQ ID NO: 953584 - RNA, 19 nt, Artificial Sequence
  Description of Artificial Sequence: Synthetic oligonucleotide
  Sense strand starting at position 548 of SEQ ID NO: 913782
uuuggcuaaugaguaaaga

SEQ ID NO: 953585 - RNA, 19 nt, Artificial Sequence
  Description of Artificial Sequence: Synthetic oligonucleotide
  Antisense strand to SEQ ID NO: 953584
ucuuuacucauuagccaaa

SEQ ID NO: 953586 - RNA, 19 nt, Artificial Sequence
  Description of Artificial Sequence: Synthetic oligonucleotide
  Sense strand starting at position 17 of SEQ ID NO: 913782
aggugacuuagauguugga

SEQ ID NO: 953587 - RNA, 19 nt, Artificial Sequence
  Description of Artificial Sequence: Synthetic oligonucleotide
  Antisense strand to SEQ ID NO: 953586
uccaacaucuaagucaccu

SEQ ID NO: 953588 - RNA, 19 nt, Artificial Sequence
  Description of Artificial Sequence: Synthetic oligonucleotide
  Sense strand starting at position 3147 of SEQ ID NO: 913782
ucacuuugugguuauuaaa

SEQ ID NO: 953589 - RNA, 19 nt, Artificial Sequence
  Description of Artificial Sequence: Synthetic oligonucleotide
  Antisense strand to SEQ ID NO: 953588
uuuaauaaccacaaaguga

SEQ ID NO: 953590 - RNA, 19 nt, Artificial Sequence
  Description of Artificial Sequence: Synthetic oligonucleotide
  Sense strand starting at position 1312 of SEQ ID NO: 913782
ucugaagucugaguuagaa

SEQ ID NO: 953591 - RNA, 19 nt, Artificial Sequence
  Description of Artificial Sequence: Synthetic oligonucleotide
  Antisense strand to SEQ ID NO: 953590
uucuaacucagacuucaga

SEQ ID NO: 953592 - RNA, 19 nt, Artificial Sequence
  Description of Artificial Sequence: Synthetic oligonucleotide
  Sense strand starting at position 557 of SEQ ID NO: 913782
ugaguaaagacauggcauu

SEQ ID NO: 953593 - RNA, 19 nt, Artificial Sequence
  Description of Artificial Sequence: Synthetic oligonucleotide
  Antisense strand to SEQ ID NO: 953592
aaugccaugucuuuacuca

SEQ ID NO: 953594 - RNA, 19 nt, Artificial Sequence
  Description of Artificial Sequence: Synthetic oligonucleotide
  Sense strand starting at position 2919 of SEQ ID NO: 913782
agcuauccaagugggaaua

SEQ ID NO: 953595 - RNA, 19 nt, Artificial Sequence
  Description of Artificial Sequence: Synthetic oligonucleotide
  Antisense strand to SEQ ID NO: 953594
uauucccacuuggauagcu

SEQ ID NO: 953596 - RNA, 19 nt, Artificial Sequence
  Description of Artificial Sequence: Synthetic oligonucleotide
  Sense strand starting at position 1401 of SEQ ID NO: 913782
guuucuugaacguaagaua

SEQ ID NO: 953597 - RNA, 19 nt, Artificial Sequence
  Description of Artificial Sequence: Synthetic oligonucleotide
  Antisense strand to SEQ ID NO: 953596
uaucuuacguucaagaaac

SEQ ID NO: 953598 - RNA, 19 nt, Artificial Sequence
  Description of Artificial Sequence: Synthetic oligonucleotide
  Sense strand starting at position 1309 of SEQ ID NO: 913782
agaucugaagucugaguua

SEQ ID NO: 953599 - RNA, 19 nt, Artificial Sequence
  Description of Artificial Sequence: Synthetic oligonucleotide
  Antisense strand to SEQ ID NO: 953598
uaacucagacuucagaucu

SEQ ID NO: 953600 - RNA, 19 nt, Artificial Sequence
  Description of Artificial Sequence: Synthetic oligonucleotide
  Sense strand starting at position 1170 of SEQ ID NO: 913782
aggguaguuucuucaagag

SEQ ID NO: 953601 - RNA, 19 nt, Artificial Sequence
  Description of Artificial Sequence: Synthetic oligonucleotide
  Antisense strand to SEQ ID NO: 953600
cucuugaagaaacuacccu

SEQ ID NO: 953602 - RNA, 19 nt, Artificial Sequence
  Description of Artificial Sequence: Synthetic oligonucleotide
  Sense strand starting at position 2443 of SEQ ID NO: 913782
agauaaggaggcugucuau

SEQ ID NO: 953603 - RNA, 19 nt, Artificial Sequence
  Description of Artificial Sequence: Synthetic oligonucleotide
  Antisense strand to SEQ ID NO: 953602
auagacagccuccuuaucu

SEQ ID NO: 953604 - RNA, 19 nt, Artificial Sequence
  Description of Artificial Sequence: Synthetic oligonucleotide
  Sense strand starting at position 21 of SEQ ID NO: 913782
gacuuagauguuggaaguc

SEQ ID NO: 953605 - RNA, 19 nt, Artificial Sequence
  Description of Artificial Sequence: Synthetic oligonucleotide
  Antisense strand to SEQ ID NO: 953604
gacuuccaacaucuaaguc

SEQ ID NO: 953606 - RNA, 19 nt, Artificial Sequence
  Description of Artificial Sequence: Synthetic oligonucleotide
  Sense strand starting at position 2446 of SEQ ID NO: 913782
uaaggaggcugucuauuaa

SEQ ID NO: 953607 - RNA, 19 nt, Artificial Sequence
  Description of Artificial Sequence: Synthetic oligonucleotide
  Antisense strand to SEQ ID NO: 953606
uuaauagacagccuccuua

SEQ ID NO: 953608 - RNA, 19 nt, Artificial Sequence
  Description of Artificial Sequence: Synthetic oligonucleotide
  Sense strand starting at position 3231 of SEQ ID NO: 913782
ggaugaagugguuguaaca

SEQ ID NO: 953609 - RNA, 19 nt, Artificial Sequence
  Description of Artificial Sequence: Synthetic oligonucleotide
  Antisense strand to SEQ ID NO: 953608
uguuacaaccacuucaucc

SEQ ID NO: 953610 - RNA, 19 nt, Artificial Sequence
  Description of Artificial Sequence: Synthetic oligonucleotide
  Sense strand starting at position 469 of SEQ ID NO: 913782
cggguauucuuacuaagga

SEQ ID NO: 953611 - RNA, 19 nt, Artificial Sequence
  Description of Artificial Sequence: Synthetic oligonucleotide
  Antisense strand to SEQ ID NO: 953610
uccuuaguaagaauacccg

SEQ ID NO: 953612 - RNA, 19 nt, Artificial Sequence
  Description of Artificial Sequence: Synthetic oligonucleotide
  Sense strand starting at position 31 of SEQ ID NO: 913782
uuggaagucuuggcagaau

SEQ ID NO: 953613 - RNA, 19 nt, Artificial Sequence
  Description of Artificial Sequence: Synthetic oligonucleotide
  Antisense strand to SEQ ID NO: 953612
auucugccaagacuuccaa

SEQ ID NO: 953614 - RNA, 19 nt, Artificial Sequence
  Description of Artificial Sequence: Synthetic oligonucleotide
  Sense strand starting at position 807 of SEQ ID NO: 913782
uagugaguuuaaguaacua

SEQ ID NO: 953615 - RNA, 19 nt, Artificial Sequence
  Description of Artificial Sequence: Synthetic oligonucleotide
  Antisense strand to SEQ ID NO: 953614
uaguuacuuaaacucacua

SEQ ID NO: 953616 - RNA, 19 nt, Artificial Sequence
  Description of Artificial Sequence: Synthetic oligonucleotide
  Sense strand starting at position 3462 of SEQ ID NO: 913782
gucugauuaggccacgaug

SEQ ID NO: 953617 - RNA, 19 nt, Artificial Sequence
  Description of Artificial Sequence: Synthetic oligonucleotide
  Antisense strand to SEQ ID NO: 953616
caucguggccuaaucagac

SEQ ID NO: 953618 - RNA, 19 nt, Artificial Sequence
  Description of Artificial Sequence: Synthetic oligonucleotide
  Sense strand starting at position 1399 of SEQ ID NO: 913782
aaguuucuugaacguaaga

SEQ ID NO: 953619 - RNA, 19 nt, Artificial Sequence
  Description of Artificial Sequence: Synthetic oligonucleotide
  Antisense strand to SEQ ID NO: 953618
ucuuacguucaagaaacuu

SEQ ID NO: 953620 - RNA, 19 nt, Artificial Sequence
  Description of Artificial Sequence: Synthetic oligonucleotide
  Sense strand starting at position 2495 of SEQ ID NO: 913782
uuggguagcagccauuaau

SEQ ID NO: 953621 - RNA, 19 nt, Artificial Sequence
  Description of Artificial Sequence: Synthetic oligonucleotide
  Antisense strand to SEQ ID NO: 953620
auuaauggcugcuacccaa

SEQ ID NO: 953622 - RNA, 19 nt, Artificial Sequence
  Description of Artificial Sequence: Synthetic oligonucleotide
  Sense strand starting at position 3146 of SEQ ID NO: 913782
aucacuuugugguuauuaa

SEQ ID NO: 953623 - RNA, 19 nt, Artificial Sequence
  Description of Artificial Sequence: Synthetic oligonucleotide
  Antisense strand to SEQ ID NO: 953622
uuaauaaccacaaagugau

SEQ ID NO: 953624 - RNA, 19 nt, Artificial Sequence
  Description of Artificial Sequence: Synthetic oligonucleotide
  Sense strand starting at position 3142 of SEQ ID NO: 913782
ucaaaucacuuugugguua

SEQ ID NO: 953625 - RNA, 19 nt, Artificial Sequence
  Description of Artificial Sequence: Synthetic oligonucleotide
  Antisense strand to SEQ ID NO: 953624
uaaccacaaagugauuuga

SEQ ID NO: 953626 - RNA, 19 nt, Artificial Sequence
  Description of Artificial Sequence: Synthetic oligonucleotide
  Sense strand starting at position 811 of SEQ ID NO: 913782
gaguuuaaguaacuagcua

SEQ ID NO: 953627 - RNA, 19 nt, Artificial Sequence
  Description of Artificial Sequence: Synthetic oligonucleotide
  Antisense strand to SEQ ID NO: 953626
uagcuaguuacuuaaacuc

SEQ ID NO: 953628 - RNA, 19 nt, Artificial Sequence
  Description of Artificial Sequence: Synthetic oligonucleotide
  Sense strand starting at position 3141 of SEQ ID NO: 913782
aucaaaucacuuugugguu

SEQ ID NO: 953629 - RNA, 19 nt, Artificial Sequence
  Description of Artificial Sequence: Synthetic oligonucleotide
  Antisense strand to SEQ ID NO: 953628
aaccacaaagugauuugau

SEQ ID NO: 953630 - RNA, 19 nt, Artificial Sequence
  Description of Artificial Sequence: Synthetic oligonucleotide
  Sense strand starting at position 2136 of SEQ ID NO: 913782
ggccuagguaaauggguua

SEQ ID NO: 953631 - RNA, 19 nt, Artificial Sequence
  Description of Artificial Sequence: Synthetic oligonucleotide
  Antisense strand to SEQ ID NO: 953630
uaacccauuuaccuaggcc

SEQ ID NO: 953632 - RNA, 19 nt, Artificial Sequence
  Description of Artificial Sequence: Synthetic oligonucleotide
  Sense strand starting at position 1282 of SEQ ID NO: 913783
gcaauaaguccauaagacu

SEQ ID NO: 953633 - RNA, 19 nt, Artificial Sequence
  Description of Artificial Sequence: Synthetic oligonucleotide
  Antisense strand to SEQ ID NO: 953632
agucuuauggacuuauugc

SEQ ID NO: 953634 - RNA, 19 nt, Artificial Sequence
  Description of Artificial Sequence: Synthetic oligonucleotide
  Sense strand starting at position 3062 of SEQ ID NO: 913783
auagacauaugguuugaac

SEQ ID NO: 953635 - RNA, 19 nt, Artificial Sequence
  Description of Artificial Sequence: Synthetic oligonucleotide
  Antisense strand to SEQ ID NO: 953634
guucaaaccauaugucuau

SEQ ID NO: 953636 - RNA, 19 nt, Artificial Sequence
  Description of Artificial Sequence: Synthetic oligonucleotide
  Sense strand starting at position 2765 of SEQ ID NO: 913783
ccaagagcugauuauuauc

SEQ ID NO: 953637 - RNA, 19 nt, Artificial Sequence
  Description of Artificial Sequence: Synthetic oligonucleotide
  Antisense strand to SEQ ID NO: 953636
gauaauaaucagcucuugg

SEQ ID NO: 953638 - RNA, 19 nt, Artificial Sequence
  Description of Artificial Sequence: Synthetic oligonucleotide
  Sense strand starting at position 1159 of SEQ ID NO: 913783
gagggucucggacaccaau

SEQ ID NO: 953639 - RNA, 19 nt, Artificial Sequence
  Description of Artificial Sequence: Synthetic oligonucleotide
  Antisense strand to SEQ ID NO: 953638
auugguguccgagacccuc

SEQ ID NO: 953640 - RNA, 19 nt, Artificial Sequence
  Description of Artificial Sequence: Synthetic oligonucleotide
  Sense strand starting at position 2226 of SEQ ID NO: 913783
cggaauauuguuuacaaac

SEQ ID NO: 953641 - RNA, 19 nt, Artificial Sequence
  Description of Artificial Sequence: Synthetic oligonucleotide
  Antisense strand to SEQ ID NO: 953640
guuuguaaacaauauuccg

SEQ ID NO: 953642 - RNA, 19 nt, Artificial Sequence
  Description of Artificial Sequence: Synthetic oligonucleotide
  Sense strand starting at position 2150 of SEQ ID NO: 913783
aguuuaucuccagauugac

SEQ ID NO: 953643 - RNA, 19 nt, Artificial Sequence
  Description of Artificial Sequence: Synthetic oligonucleotide
  Antisense strand to SEQ ID NO: 953642
gucaaucuggagauaaacu

SEQ ID NO: 953644 - RNA, 19 nt, Artificial Sequence
  Description of Artificial Sequence: Synthetic oligonucleotide
  Sense strand starting at position 2800 of SEQ ID NO: 913783
uugaucgagagccauaaau

SEQ ID NO: 953645 - RNA, 19 nt, Artificial Sequence
  Description of Artificial Sequence: Synthetic oligonucleotide
  Antisense strand to SEQ ID NO: 953644
auuuauggcucucgaucaa

SEQ ID NO: 953646 - RNA, 19 nt, Artificial Sequence
  Description of Artificial Sequence: Synthetic oligonucleotide
  Sense strand starting at position 775 of SEQ ID NO: 913783
ccagaaggaucacuugagu

SEQ ID NO: 953647 - RNA, 19 nt, Artificial Sequence
  Description of Artificial Sequence: Synthetic oligonucleotide
  Antisense strand to SEQ ID NO: 953646
acucaagugauccuucugg

SEQ ID NO: 953648 - RNA, 19 nt, Artificial Sequence
  Description of Artificial Sequence: Synthetic oligonucleotide
  Sense strand starting at position 3337 of SEQ ID NO: 913783
agagcuccagacuggaaua

SEQ ID NO: 953649 - RNA, 19 nt, Artificial Sequence
  Description of Artificial Sequence: Synthetic oligonucleotide
  Antisense strand to SEQ ID NO: 953648
uauuccagucuggagcucu

SEQ ID NO: 953650 - RNA, 19 nt, Artificial Sequence
  Description of Artificial Sequence: Synthetic oligonucleotide
  Sense strand starting at position 128 of SEQ ID NO: 913783
acagguguugaccaauauu

SEQ ID NO: 953651 - RNA, 19 nt, Artificial Sequence
  Description of Artificial Sequence: Synthetic oligonucleotide
  Antisense strand to SEQ ID NO: 953650
aauauuggucaacaccugu

SEQ ID NO: 953652 - RNA, 19 nt, Artificial Sequence
  Description of Artificial Sequence: Synthetic oligonucleotide
  Sense strand starting at position 2148 of SEQ ID NO: 913783
ugaguuuaucuccagauug

SEQ ID NO: 953653 - RNA, 19 nt, Artificial Sequence
  Description of Artificial Sequence: Synthetic oligonucleotide
  Antisense strand to SEQ ID NO: 953652
caaucuggagauaaacuca

SEQ ID NO: 953654 - RNA, 19 nt, Artificial Sequence
  Description of Artificial Sequence: Synthetic oligonucleotide
  Sense strand starting at position 465 of SEQ ID NO: 913783
gugcccugcccagauuuau

SEQ ID NO: 953655 - RNA, 19 nt, Artificial Sequence
  Description of Artificial Sequence: Synthetic oligonucleotide
  Antisense strand to SEQ ID NO: 953654
auaaaucugggcagggcac

SEQ ID NO: 953656 - RNA, 19 nt, Artificial Sequence
  Description of Artificial Sequence: Synthetic oligonucleotide
  Sense strand starting at position 3167 of SEQ ID NO: 913783
ucgacagaauuauucugaa

SEQ ID NO: 953657 - RNA, 19 nt, Artificial Sequence
  Description of Artificial Sequence: Synthetic oligonucleotide
  Antisense strand to SEQ ID NO: 953656
uucagaauaauucugucga

SEQ ID NO: 953658 - RNA, 19 nt, Artificial Sequence
  Description of Artificial Sequence: Synthetic oligonucleotide
  Sense strand starting at position 2862 of SEQ ID NO: 913783
ugaaauacagguuguagga

SEQ ID NO: 953659 - RNA, 19 nt, Artificial Sequence
  Description of Artificial Sequence: Synthetic oligonucleotide
  Antisense strand to SEQ ID NO: 953658
uccuacaaccuguauuuca

SEQ ID NO: 953660 - RNA, 19 nt, Artificial Sequence
  Description of Artificial Sequence: Synthetic oligonucleotide
  Sense strand starting at position 2792 of SEQ ID NO: 913783
auaaucucuugaucgagag

SEQ ID NO: 953661 - RNA, 19 nt, Artificial Sequence
  Description of Artificial Sequence: Synthetic oligonucleotide
  Antisense strand to SEQ ID NO: 953660
cucucgaucaagagauuau

SEQ ID NO: 953662 - RNA, 19 nt, Artificial Sequence
  Description of Artificial Sequence: Synthetic oligonucleotide
  Sense strand starting at position 3127 of SEQ ID NO: 913783
ucagguuucccacaguaaa

SEQ ID NO: 953663 - RNA, 19 nt, Artificial Sequence
  Description of Artificial Sequence: Synthetic oligonucleotide
  Antisense strand to SEQ ID NO: 953662
uuuacugugggaaaccuga

SEQ ID NO: 953664 - RNA, 19 nt, Artificial Sequence
  Description of Artificial Sequence: Synthetic oligonucleotide
  Sense strand starting at position 2291 of SEQ ID NO: 913783
accuuuagacauuaagugu

SEQ ID NO: 953665 - RNA, 19 nt, Artificial Sequence
  Description of Artificial Sequence: Synthetic oligonucleotide
  Antisense strand to SEQ ID NO: 953664
acacuuaaugucuaaaggu

SEQ ID NO: 953666 - RNA, 19 nt, Artificial Sequence
  Description of Artificial Sequence: Synthetic oligonucleotide
  Sense strand starting at position 3064 of SEQ ID NO: 913783
agacauaugguuugaaccu

SEQ ID NO: 953667 - RNA, 19 nt, Artificial Sequence
  Description of Artificial Sequence: Synthetic oligonucleotide
  Antisense strand to SEQ ID NO: 953666
agguucaaaccauaugucu

SEQ ID NO: 953668 - RNA, 19 nt, Artificial Sequence
  Description of Artificial Sequence: Synthetic oligonucleotide
  Sense strand starting at position 3247 of SEQ ID NO: 913783
accuuaucccugggagauc

SEQ ID NO: 953669 - RNA, 19 nt, Artificial Sequence
  Description of Artificial Sequence: Synthetic oligonucleotide
  Antisense strand to SEQ ID NO: 953668
gaucucccagggauaaggu

SEQ ID NO: 953670 - RNA, 19 nt, Artificial Sequence
  Description of Artificial Sequence: Synthetic oligonucleotide
  Sense strand starting at position 131 of SEQ ID NO: 913783
gguguugaccaauauuacu

SEQ ID NO: 953671 - RNA, 19 nt, Artificial Sequence
  Description of Artificial Sequence: Synthetic oligonucleotide
  Antisense strand to SEQ ID NO: 953670
aguaauauuggucaacacc

SEQ ID NO: 953672 - RNA, 19 nt, Artificial Sequence
  Description of Artificial Sequence: Synthetic oligonucleotide
  Sense strand starting at position 2091 of SEQ ID NO: 913783
uggaaaugaaguugucaau

SEQ ID NO: 953673 - RNA, 19 nt, Artificial Sequence
  Description of Artificial Sequence: Synthetic oligonucleotide
  Antisense strand to SEQ ID NO: 953672
auugacaacuucauuucca

SEQ ID NO: 953674 - RNA, 19 nt, Artificial Sequence
  Description of Artificial Sequence: Synthetic oligonucleotide
  Sense strand starting at position 2388 of SEQ ID NO: 913783
uugggaugccaguaacauu

SEQ ID NO: 953675 - RNA, 19 nt, Artificial Sequence
  Description of Artificial Sequence: Synthetic oligonucleotide
  Antisense strand to SEQ ID NO: 953674
aauguuacuggcaucccaa

SEQ ID NO: 953676 - RNA, 19 nt, Artificial Sequence
  Description of Artificial Sequence: Synthetic oligonucleotide
  Sense strand starting at position 2770 of SEQ ID NO: 913783
agcugauuauuaucauuga

SEQ ID NO: 953677 - RNA, 19 nt, Artificial Sequence
  Description of Artificial Sequence: Synthetic oligonucleotide
  Antisense strand to SEQ ID NO: 953676
ucaaugauaauaaucagcu

SEQ ID NO: 953678 - RNA, 19 nt, Artificial Sequence
  Description of Artificial Sequence: Synthetic oligonucleotide
  Sense strand starting at position 3397 of SEQ ID NO: 913783
agcugcugugugucaguau

SEQ ID NO: 953679 - RNA, 19 nt, Artificial Sequence
  Description of Artificial Sequence: Synthetic oligonucleotide
  Antisense strand to SEQ ID NO: 953678
auacugacacacagcagcu

SEQ ID NO: 953680 - RNA, 19 nt, Artificial Sequence
  Description of Artificial Sequence: Synthetic oligonucleotide
  Sense strand starting at position 2224 of SEQ ID NO: 913783
aucggaauauuguuuacaa

SEQ ID NO: 953681 - RNA, 19 nt, Artificial Sequence
  Description of Artificial Sequence: Synthetic oligonucleotide
  Antisense strand to SEQ ID NO: 953680
uuguaaacaauauuccgau

SEQ ID NO: 953682 - RNA, 19 nt, Artificial Sequence
  Description of Artificial Sequence: Synthetic oligonucleotide
  Sense strand starting at position 2225 of SEQ ID NO: 913783
ucggaauauuguuuacaaa

SEQ ID NO: 953683 - RNA, 19 nt, Artificial Sequence
  Description of Artificial Sequence: Synthetic oligonucleotide
  Antisense strand to SEQ ID NO: 953682
uuuguaaacaauauuccga

SEQ ID NO: 953684 - RNA, 19 nt, Artificial Sequence
  Description of Artificial Sequence: Synthetic oligonucleotide
  Sense strand starting at position 2850 of SEQ ID NO: 913783
ucacuucgacccugaaaua

SEQ ID NO: 953685 - RNA, 19 nt, Artificial Sequence
  Description of Artificial Sequence: Synthetic oligonucleotide
  Antisense strand to SEQ ID NO: 953684
uauuucagggucgaaguga

SEQ ID NO: 953686 - RNA, 19 nt, Artificial Sequence
  Description of Artificial Sequence: Synthetic oligonucleotide
  Sense strand starting at position 550 of SEQ ID NO: 913783
gagaucaguuuggcccaaa

SEQ ID NO: 953687 - RNA, 19 nt, Artificial Sequence
  Description of Artificial Sequence: Synthetic oligonucleotide
  Antisense strand to SEQ ID NO: 953686
uuugggccaaacugaucuc

SEQ ID NO: 953688 - RNA, 19 nt, Artificial Sequence
  Description of Artificial Sequence: Synthetic oligonucleotide
  Sense strand starting at position 1052 of SEQ ID NO: 913783
cggucauugucauuuccuu

SEQ ID NO: 953689 - RNA, 19 nt, Artificial Sequence
  Description of Artificial Sequence: Synthetic oligonucleotide
  Antisense strand to SEQ ID NO: 953688
aaggaaaugacaaugaccg

SEQ ID NO: 953690 - RNA, 19 nt, Artificial Sequence
  Description of Artificial Sequence: Synthetic oligonucleotide
  Sense strand starting at position 654 of SEQ ID NO: 913783
acaaaugaauuugguaaga

SEQ ID NO: 953691 - RNA, 19 nt, Artificial Sequence
  Description of Artificial Sequence: Synthetic oligonucleotide
  Antisense strand to SEQ ID NO: 953690
ucuuaccaaauucauuugu

SEQ ID NO: 953692 - RNA, 19 nt, Artificial Sequence
  Description of Artificial Sequence: Synthetic oligonucleotide
  Sense strand starting at position 2219 of SEQ ID NO: 913783
agcauaucggaauauuguu

SEQ ID NO: 953693 - RNA, 19 nt, Artificial Sequence
  Description of Artificial Sequence: Synthetic oligonucleotide
  Antisense strand to SEQ ID NO: 953692
aacaauauuccgauaugcu

SEQ ID NO: 953694 - RNA, 19 nt, Artificial Sequence
  Description of Artificial Sequence: Synthetic oligonucleotide
  Sense strand starting at position 2796 of SEQ ID NO: 913783
ucucuugaucgagagccau

SEQ ID NO: 953695 - RNA, 19 nt, Artificial Sequence
  Description of Artificial Sequence: Synthetic oligonucleotide
  Antisense strand to SEQ ID NO: 953694
auggcucucgaucaagaga

SEQ ID NO: 953696 - RNA, 19 nt, Artificial Sequence
  Description of Artificial Sequence: Synthetic oligonucleotide
  Sense strand starting at position 548 of SEQ ID NO: 913783
gagagaucaguuuggccca

SEQ ID NO: 953697 - RNA, 19 nt, Artificial Sequence
  Description of Artificial Sequence: Synthetic oligonucleotide
  Antisense strand to SEQ ID NO: 953696
ugggccaaacugaucucuc

SEQ ID NO: 953698 - RNA, 19 nt, Artificial Sequence
  Description of Artificial Sequence: Synthetic oligonucleotide
  Sense strand starting at position 2196 of SEQ ID NO: 913783
uuaauaucggcuuacuuua

SEQ ID NO: 953699 - RNA, 19 nt, Artificial Sequence
  Description of Artificial Sequence: Synthetic oligonucleotide
  Antisense strand to SEQ ID NO: 953698
uaaaguaagccgauauuaa

SEQ ID NO: 953700 - RNA, 19 nt, Artificial Sequence
  Description of Artificial Sequence: Synthetic oligonucleotide
  Sense strand starting at position 37 of SEQ ID NO: 913783
ucaacacugcugugauaaa

SEQ ID NO: 953701 - RNA, 19 nt, Artificial Sequence
  Description of Artificial Sequence: Synthetic oligonucleotide
  Antisense strand to SEQ ID NO: 953700
uuuaucacagcaguguuga

SEQ ID NO: 953702 - RNA, 19 nt, Artificial Sequence
  Description of Artificial Sequence: Synthetic oligonucleotide
  Sense strand starting at position 3485 of SEQ ID NO: 913783
uucuacaugucagugaaug

SEQ ID NO: 953703 - RNA, 19 nt, Artificial Sequence
  Description of Artificial Sequence: Synthetic oligonucleotide
  Antisense strand to SEQ ID NO: 953702
cauucacugacauguagaa

SEQ ID NO: 953704 - RNA, 19 nt, Artificial Sequence
  Description of Artificial Sequence: Synthetic oligonucleotide
  Sense strand starting at position 2201 of SEQ ID NO: 913783
aucggcuuacuuuaacgaa

SEQ ID NO: 953705 - RNA, 19 nt, Artificial Sequence
  Description of Artificial Sequence: Synthetic oligonucleotide
  Antisense strand to SEQ ID NO: 953704
uucguuaaaguaagccgau

SEQ ID NO: 953706 - RNA, 19 nt, Artificial Sequence
  Description of Artificial Sequence: Synthetic oligonucleotide
  Sense strand starting at position 3966 of SEQ ID NO: 913783
gauaguacugcuuagucca

SEQ ID NO: 953707 - RNA, 19 nt, Artificial Sequence
  Description of Artificial Sequence: Synthetic oligonucleotide
  Antisense strand to SEQ ID NO: 953706
uggacuaagcaguacuauc

SEQ ID NO: 953708 - RNA, 19 nt, Artificial Sequence
  Description of Artificial Sequence: Synthetic oligonucleotide
  Sense strand starting at position 1069 of SEQ ID NO: 913783
uugagacguuaagauuuaa

SEQ ID NO: 953709 - RNA, 19 nt, Artificial Sequence
  Description of Artificial Sequence: Synthetic oligonucleotide
  Antisense strand to SEQ ID NO: 953708
uuaaaucuuaacgucucaa

SEQ ID NO: 953710 - RNA, 19 nt, Artificial Sequence
  Description of Artificial Sequence: Synthetic oligonucleotide
  Sense strand starting at position 499 of SEQ ID NO: 913783
ccauauaaaugggaaacaa

SEQ ID NO: 953711 - RNA, 19 nt, Artificial Sequence
  Description of Artificial Sequence: Synthetic oligonucleotide
  Antisense strand to SEQ ID NO: 953710
uuguuucccauuuauaugg

SEQ ID NO: 953712 - RNA, 19 nt, Artificial Sequence
  Description of Artificial Sequence: Synthetic oligonucleotide
  Sense strand starting at position 3404 of SEQ ID NO: 913784
cgaacaauguaauugaaug

SEQ ID NO: 953713 - RNA, 19 nt, Artificial Sequence
  Description of Artificial Sequence: Synthetic oligonucleotide
  Antisense strand to SEQ ID NO: 953712
cauucaauuacauuguucg

SEQ ID NO: 953714 - RNA, 19 nt, Artificial Sequence
  Description of Artificial Sequence: Synthetic oligonucleotide
  Sense strand starting at position 1309 of SEQ ID NO: 913784
cugcgauuagcgcccuaau

SEQ ID NO: 953715 - RNA, 19 nt, Artificial Sequence
  Description of Artificial Sequence: Synthetic oligonucleotide
  Antisense strand to SEQ ID NO: 953714
auuagggcgcuaaucgcag

SEQ ID NO: 953716 - RNA, 19 nt, Artificial Sequence
  Description of Artificial Sequence: Synthetic oligonucleotide
  Sense strand starting at position 261 of SEQ ID NO: 913784
accuaaugucaagguaaau

SEQ ID NO: 953717 - RNA, 19 nt, Artificial Sequence
  Description of Artificial Sequence: Synthetic oligonucleotide
  Antisense strand to SEQ ID NO: 953716
auuuaccuugacauuaggu

SEQ ID NO: 953718 - RNA, 19 nt, Artificial Sequence
  Description of Artificial Sequence: Synthetic oligonucleotide
  Sense strand starting at position 2958 of SEQ ID NO: 913784
ugaaauauugcugaugcau

SEQ ID NO: 953719 - RNA, 19 nt, Artificial Sequence
  Description of Artificial Sequence: Synthetic oligonucleotide
  Antisense strand to SEQ ID NO: 953718
augcaucagcaauauuuca

SEQ ID NO: 953720 - RNA, 19 nt, Artificial Sequence
  Description of Artificial Sequence: Synthetic oligonucleotide
  Sense strand starting at position 3644 of SEQ ID NO: 913784
augagaugaugccuucuua

SEQ ID NO: 953721 - RNA, 19 nt, Artificial Sequence
  Description of Artificial Sequence: Synthetic oligonucleotide
  Antisense strand to SEQ ID NO: 953720
uaagaaggcaucaucucau

SEQ ID NO: 953722 - RNA, 19 nt, Artificial Sequence
  Description of Artificial Sequence: Synthetic oligonucleotide
  Sense strand starting at position 3184 of SEQ ID NO: 913784
cucaucacaguuugaugau

SEQ ID NO: 953723 - RNA, 19 nt, Artificial Sequence
  Description of Artificial Sequence: Synthetic oligonucleotide
  Antisense strand to SEQ ID NO: 953722
aucaucaaacugugaugag

SEQ ID NO: 953724 - RNA, 19 nt, Artificial Sequence
  Description of Artificial Sequence: Synthetic oligonucleotide
  Sense strand starting at position 2987 of SEQ ID NO: 913784
cagggaauguuaguuaagu

SEQ ID NO: 953725 - RNA, 19 nt, Artificial Sequence
  Description of Artificial Sequence: Synthetic oligonucleotide
  Antisense strand to SEQ ID NO: 953724
acuuaacuaacauucccug

SEQ ID NO: 953726 - RNA, 19 nt, Artificial Sequence
  Description of Artificial Sequence: Synthetic oligonucleotide
  Sense strand starting at position 2988 of SEQ ID NO: 913784
agggaauguuaguuaaguc

SEQ ID NO: 953727 - RNA, 19 nt, Artificial Sequence
  Description of Artificial Sequence: Synthetic oligonucleotide
  Antisense strand to SEQ ID NO: 953726
gacuuaacuaacauucccu

SEQ ID NO: 953728 - RNA, 19 nt, Artificial Sequence
  Description of Artificial Sequence: Synthetic oligonucleotide
  Sense strand starting at position 3259 of SEQ ID NO: 913784
ugcagaaucuagcccaaga

SEQ ID NO: 953729 - RNA, 19 nt, Artificial Sequence
  Description of Artificial Sequence: Synthetic oligonucleotide
  Antisense strand to SEQ ID NO: 953728
ucuugggcuagauucugca

SEQ ID NO: 953730 - RNA, 19 nt, Artificial Sequence
  Description of Artificial Sequence: Synthetic oligonucleotide
  Sense strand starting at position 2625 of SEQ ID NO: 913784
gugacaacagcuugggauu

SEQ ID NO: 953731 - RNA, 19 nt, Artificial Sequence
  Description of Artificial Sequence: Synthetic oligonucleotide
  Antisense strand to SEQ ID NO: 953730
aaucccaagcuguugucac

SEQ ID NO: 953732 - RNA, 19 nt, Artificial Sequence
  Description of Artificial Sequence: Synthetic oligonucleotide
  Sense strand starting at position 3345 of SEQ ID NO: 913784
aguagcaacguauaaucua

SEQ ID NO: 953733 - RNA, 19 nt, Artificial Sequence
  Description of Artificial Sequence: Synthetic oligonucleotide
  Antisense strand to SEQ ID NO: 953732
uagauuauacguugcuacu

SEQ ID NO: 953734 - RNA, 19 nt, Artificial Sequence
  Description of Artificial Sequence: Synthetic oligonucleotide
  Sense strand starting at position 750 of SEQ ID NO: 913784
agaccaagcuacuagauuu

SEQ ID NO: 953735 - RNA, 19 nt, Artificial Sequence
  Description of Artificial Sequence: Synthetic oligonucleotide
  Antisense strand to SEQ ID NO: 953734
aaaucuaguagcuuggucu

SEQ ID NO: 953736 - RNA, 19 nt, Artificial Sequence
  Description of Artificial Sequence: Synthetic oligonucleotide
  Sense strand starting at position 3326 of SEQ ID NO: 913784
ucauauguuccucaugguu

SEQ ID NO: 953737 - RNA, 19 nt, Artificial Sequence
  Description of Artificial Sequence: Synthetic oligonucleotide
  Antisense strand to SEQ ID NO: 953736
aaccaugaggaacauauga

SEQ ID NO: 953738 - RNA, 19 nt, Artificial Sequence
  Description of Artificial Sequence: Synthetic oligonucleotide
  Sense strand starting at position 3613 of SEQ ID NO: 913784
uugcaucucauaggagagu

SEQ ID NO: 953739 - RNA, 19 nt, Artificial Sequence
  Description of Artificial Sequence: Synthetic oligonucleotide
  Antisense strand to SEQ ID NO: 953738
acucuccuaugagaugcaa

SEQ ID NO: 953740 - RNA, 19 nt, Artificial Sequence
  Description of Artificial Sequence: Synthetic oligonucleotide
  Sense strand starting at position 666 of SEQ ID NO: 913784
ggagaaacaucacauuaaa

SEQ ID NO: 953741 - RNA, 19 nt, Artificial Sequence
  Description of Artificial Sequence: Synthetic oligonucleotide
  Antisense strand to SEQ ID NO: 953740
uuuaaugugauguuucucc

SEQ ID NO: 953742 - RNA, 19 nt, Artificial Sequence
  Description of Artificial Sequence: Synthetic oligonucleotide
  Sense strand starting at position 594 of SEQ ID NO: 913784
ccucaaucucuggguuauc

SEQ ID NO: 953743 - RNA, 19 nt, Artificial Sequence
  Description of Artificial Sequence: Synthetic oligonucleotide
  Antisense strand to SEQ ID NO: 953742
gauaacccagagauugagg

SEQ ID NO: 953744 - RNA, 19 nt, Artificial Sequence
  Description of Artificial Sequence: Synthetic oligonucleotide
  Sense strand starting at position 2220 of SEQ ID NO: 913784
acgucaacccuguggaaau

SEQ ID NO: 953745 - RNA, 19 nt, Artificial Sequence
  Description of Artificial Sequence: Synthetic oligonucleotide
  Antisense strand to SEQ ID NO: 953744
auuuccacaggguugacgu

SEQ ID NO: 953746 - RNA, 19 nt, Artificial Sequence
  Description of Artificial Sequence: Synthetic oligonucleotide
  Sense strand starting at position 840 of SEQ ID NO: 913784
aggugaugugcccaagcua

SEQ ID NO: 953747 - RNA, 19 nt, Artificial Sequence
  Description of Artificial Sequence: Synthetic oligonucleotide
  Antisense strand to SEQ ID NO: 953746
uagcuugggcacaucaccu

SEQ ID NO: 953748 - RNA, 19 nt, Artificial Sequence
  Description of Artificial Sequence: Synthetic oligonucleotide
  Sense strand starting at position 3325 of SEQ ID NO: 913784
aucauauguuccucauggu

SEQ ID NO: 953749 - RNA, 19 nt, Artificial Sequence
  Description of Artificial Sequence: Synthetic oligonucleotide
  Antisense strand to SEQ ID NO: 953748
accaugaggaacauaugau

SEQ ID NO: 953750 - RNA, 19 nt, Artificial Sequence
  Description of Artificial Sequence: Synthetic oligonucleotide
  Sense strand starting at position 606 of SEQ ID NO: 913784
gguuaucuauuccuuguaa

SEQ ID NO: 953751 - RNA, 19 nt, Artificial Sequence
  Description of Artificial Sequence: Synthetic oligonucleotide
  Antisense strand to SEQ ID NO: 953750
uuacaaggaauagauaacc

SEQ ID NO: 953752 - RNA, 19 nt, Artificial Sequence
  Description of Artificial Sequence: Synthetic oligonucleotide
  Sense strand starting at position 3600 of SEQ ID NO: 913784
ggguaaugaugguuugcau

SEQ ID NO: 953753 - RNA, 19 nt, Artificial Sequence
  Description of Artificial Sequence: Synthetic oligonucleotide
  Antisense strand to SEQ ID NO: 953752
augcaaaccaucauuaccc

SEQ ID NO: 953754 - RNA, 19 nt, Artificial Sequence
  Description of Artificial Sequence: Synthetic oligonucleotide
  Sense strand starting at position 2702 of SEQ ID NO: 913784
cauacucuccuguggcaga

SEQ ID NO: 953755 - RNA, 19 nt, Artificial Sequence
  Description of Artificial Sequence: Synthetic oligonucleotide
  Antisense strand to SEQ ID NO: 953754
ucugccacaggagaguaug

SEQ ID NO: 953756 - RNA, 19 nt, Artificial Sequence
  Description of Artificial Sequence: Synthetic oligonucleotide
  Sense strand starting at position 2627 of SEQ ID NO: 913784
gacaacagcuugggauuua

SEQ ID NO: 953757 - RNA, 19 nt, Artificial Sequence
  Description of Artificial Sequence: Synthetic oligonucleotide
  Antisense strand to SEQ ID NO: 953756
uaaaucccaagcuguuguc

SEQ ID NO: 953758 - RNA, 19 nt, Artificial Sequence
  Description of Artificial Sequence: Synthetic oligonucleotide
  Sense strand starting at position 224 of SEQ ID NO: 913784
ucaggaagcuuguuaagcu

SEQ ID NO: 953759 - RNA, 19 nt, Artificial Sequence
  Description of Artificial Sequence: Synthetic oligonucleotide
  Antisense strand to SEQ ID NO: 953758
agcuuaacaagcuuccuga

SEQ ID NO: 953760 - RNA, 19 nt, Artificial Sequence
  Description of Artificial Sequence: Synthetic oligonucleotide
  Sense strand starting at position 604 of SEQ ID NO: 913784
uggguuaucuauuccuugu

SEQ ID NO: 953761 - RNA, 19 nt, Artificial Sequence
  Description of Artificial Sequence: Synthetic oligonucleotide
  Antisense strand to SEQ ID NO: 953760
acaaggaauagauaaccca

SEQ ID NO: 953762 - RNA, 19 nt, Artificial Sequence
  Description of Artificial Sequence: Synthetic oligonucleotide
  Sense strand starting at position 592 of SEQ ID NO: 913784
gcccucaaucucuggguua

SEQ ID NO: 953763 - RNA, 19 nt, Artificial Sequence
  Description of Artificial Sequence: Synthetic oligonucleotide
  Antisense strand to SEQ ID NO: 953762
uaacccagagauugagggc

SEQ ID NO: 953764 - RNA, 19 nt, Artificial Sequence
  Description of Artificial Sequence: Synthetic oligonucleotide
  Sense strand starting at position 3154 of SEQ ID NO: 913784
agcccuuccuauguauuau

SEQ ID NO: 953765 - RNA, 19 nt, Artificial Sequence
  Description of Artificial Sequence: Synthetic oligonucleotide
  Antisense strand to SEQ ID NO: 953764
auaauacauaggaagggcu

SEQ ID NO: 953766 - RNA, 19 nt, Artificial Sequence
  Description of Artificial Sequence: Synthetic oligonucleotide
  Sense strand starting at position 3307 of SEQ ID NO: 913784
guuucuuuguucucuugaa

SEQ ID NO: 953767 - RNA, 19 nt, Artificial Sequence
  Description of Artificial Sequence: Synthetic oligonucleotide
  Antisense strand to SEQ ID NO: 953766
uucaagagaacaaagaaac

SEQ ID NO: 953768 - RNA, 19 nt, Artificial Sequence
  Description of Artificial Sequence: Synthetic oligonucleotide
  Sense strand starting at position 3654 of SEQ ID NO: 913784
gccuucuuaucacuuaguu

SEQ ID NO: 953769 - RNA, 19 nt, Artificial Sequence
  Description of Artificial Sequence: Synthetic oligonucleotide
  Antisense strand to SEQ ID NO: 953768
aacuaagugauaagaaggc

SEQ ID NO: 953770 - RNA, 19 nt, Artificial Sequence
  Description of Artificial Sequence: Synthetic oligonucleotide
  Sense strand starting at position 677 of SEQ ID NO: 913784
acauuaaacugucaggaca

SEQ ID NO: 953771 - RNA, 19 nt, Artificial Sequence
  Description of Artificial Sequence: Synthetic oligonucleotide
  Antisense strand to SEQ ID NO: 953770
uguccugacaguuuaaugu

SEQ ID NO: 953772 - RNA, 19 nt, Artificial Sequence
  Description of Artificial Sequence: Synthetic oligonucleotide
  Sense strand starting at position 3296 of SEQ ID NO: 913784
agagcaaggucguuucuuu

SEQ ID NO: 953773 - RNA, 19 nt, Artificial Sequence
  Description of Artificial Sequence: Synthetic oligonucleotide
  Antisense strand to SEQ ID NO: 953772
aaagaaacgaccuugcucu

SEQ ID NO: 953774 - RNA, 19 nt, Artificial Sequence
  Description of Artificial Sequence: Synthetic oligonucleotide
  Sense strand starting at position 3622 of SEQ ID NO: 913784
auaggagagucaugagaau

SEQ ID NO: 953775 - RNA, 19 nt, Artificial Sequence
  Description of Artificial Sequence: Synthetic oligonucleotide
  Antisense strand to SEQ ID NO: 953774
auucucaugacucuccuau

SEQ ID NO: 953776 - RNA, 19 nt, Artificial Sequence
  Description of Artificial Sequence: Synthetic oligonucleotide
  Sense strand starting at position 1466 of SEQ ID NO: 913784
gggugagguccgcgagauc

SEQ ID NO: 953777 - RNA, 19 nt, Artificial Sequence
  Description of Artificial Sequence: Synthetic oligonucleotide
  Antisense strand to SEQ ID NO: 953776
gaucucgcggaccucaccc

SEQ ID NO: 953778 - RNA, 19 nt, Artificial Sequence
  Description of Artificial Sequence: Synthetic oligonucleotide
  Sense strand starting at position 206 of SEQ ID NO: 913784
cagugacacuuagagacuu

SEQ ID NO: 953779 - RNA, 19 nt, Artificial Sequence
  Description of Artificial Sequence: Synthetic oligonucleotide
  Antisense strand to SEQ ID NO: 953778
aagucucuaagugucacug

SEQ ID NO: 953780 - RNA, 19 nt, Artificial Sequence
  Description of Artificial Sequence: Synthetic oligonucleotide
  Sense strand starting at position 231 of SEQ ID NO: 913784
gcuuguuaagcuggugacu

SEQ ID NO: 953781 - RNA, 19 nt, Artificial Sequence
  Description of Artificial Sequence: Synthetic oligonucleotide
  Antisense strand to SEQ ID NO: 953780
agucaccagcuuaacaagc

SEQ ID NO: 953782 - RNA, 19 nt, Artificial Sequence
  Description of Artificial Sequence: Synthetic oligonucleotide
  Sense strand starting at position 1184 of SEQ ID NO: 913784
gguuccagaucccauaaau

SEQ ID NO: 953783 - RNA, 19 nt, Artificial Sequence
  Description of Artificial Sequence: Synthetic oligonucleotide
  Antisense strand to SEQ ID NO: 953782
auuuaugggaucuggaacc

SEQ ID NO: 953784 - RNA, 19 nt, Artificial Sequence
  Description of Artificial Sequence: Synthetic oligonucleotide
  Sense strand starting at position 3185 of SEQ ID NO: 913784
ucaucacaguuugaugaua

SEQ ID NO: 953785 - RNA, 19 nt, Artificial Sequence
  Description of Artificial Sequence: Synthetic oligonucleotide
  Antisense strand to SEQ ID NO: 953784
uaucaucaaacugugauga

SEQ ID NO: 953786 - RNA, 19 nt, Artificial Sequence
  Description of Artificial Sequence: Synthetic oligonucleotide
  Sense strand starting at position 706 of SEQ ID NO: 913784
ggaguuguguggucugcac

SEQ ID NO: 953787 - RNA, 19 nt, Artificial Sequence
  Description of Artificial Sequence: Synthetic oligonucleotide
  Antisense strand to SEQ ID NO: 953786
gugcagaccacacaacucc

SEQ ID NO: 953788 - RNA, 19 nt, Artificial Sequence
  Description of Artificial Sequence: Synthetic oligonucleotide
  Sense strand starting at position 258 of SEQ ID NO: 913784
gacaccuaaugucaaggua

SEQ ID NO: 953789 - RNA, 19 nt, Artificial Sequence
  Description of Artificial Sequence: Synthetic oligonucleotide
  Antisense strand to SEQ ID NO: 953788
uaccuugacauuagguguc

SEQ ID NO: 953790 - RNA, 19 nt, Artificial Sequence
  Description of Artificial Sequence: Synthetic oligonucleotide
  Sense strand starting at position 1202 of SEQ ID NO: 913784
ugagauaauuaacgggauu

SEQ ID NO: 953791 - RNA, 19 nt, Artificial Sequence
  Description of Artificial Sequence: Synthetic oligonucleotide
  Antisense strand to SEQ ID NO: 953790
aaucccguuaauuaucuca

SEQ ID NO: 953792 - RNA, 19 nt, Artificial Sequence
  Description of Artificial Sequence: Synthetic oligonucleotide
  Sense strand starting at position 3662 of SEQ ID NO: 913785
augagucauccugacucau

SEQ ID NO: 953793 - RNA, 19 nt, Artificial Sequence
  Description of Artificial Sequence: Synthetic oligonucleotide
  Antisense strand to SEQ ID NO: 953792
augagucaggaugacucau

SEQ ID NO: 953794 - RNA, 19 nt, Artificial Sequence
  Description of Artificial Sequence: Synthetic oligonucleotide
  Sense strand starting at position 3078 of SEQ ID NO: 913785
aucauuaagcaugggagau

SEQ ID NO: 953795 - RNA, 19 nt, Artificial Sequence
  Description of Artificial Sequence: Synthetic oligonucleotide
  Antisense strand to SEQ ID NO: 953794
aucucccaugcuuaaugau

SEQ ID NO: 953796 - RNA, 19 nt, Artificial Sequence
  Description of Artificial Sequence: Synthetic oligonucleotide
  Sense strand starting at position 3079 of SEQ ID NO: 913785
ucauuaagcaugggagaua

SEQ ID NO: 953797 - RNA, 19 nt, Artificial Sequence
  Description of Artificial Sequence: Synthetic oligonucleotide
  Antisense strand to SEQ ID NO: 953796
uaucucccaugcuuaauga

SEQ ID NO: 953798 - RNA, 19 nt, Artificial Sequence
  Description of Artificial Sequence: Synthetic oligonucleotide
  Sense strand starting at position 3264 of SEQ ID NO: 913785
gagguugagauauggguaa

SEQ ID NO: 953799 - RNA, 19 nt, Artificial Sequence
  Description of Artificial Sequence: Synthetic oligonucleotide
  Antisense strand to SEQ ID NO: 953798
uuacccauaucucaaccuc

SEQ ID NO: 953800 - RNA, 19 nt, Artificial Sequence
  Description of Artificial Sequence: Synthetic oligonucleotide
  Sense strand starting at position 3652 of SEQ ID NO: 913785
guuaaaccugaugagucau

SEQ ID NO: 953801 - RNA, 19 nt, Artificial Sequence
  Description of Artificial Sequence: Synthetic oligonucleotide
  Antisense strand to SEQ ID NO: 953800
augacucaucagguuuaac

SEQ ID NO: 953802 - RNA, 19 nt, Artificial Sequence
  Description of Artificial Sequence: Synthetic oligonucleotide
  Sense strand starting at position 3042 of SEQ ID NO: 913785
ugacuauaagcugaagguu

SEQ ID NO: 953803 - RNA, 19 nt, Artificial Sequence
  Description of Artificial Sequence: Synthetic oligonucleotide
  Antisense strand to SEQ ID NO: 953802
aaccuucagcuuauaguca

SEQ ID NO: 953804 - RNA, 19 nt, Artificial Sequence
  Description of Artificial Sequence: Synthetic oligonucleotide
  Sense strand starting at position 1035 of SEQ ID NO: 913785
ccaacaaauguguaagggu

SEQ ID NO: 953805 - RNA, 19 nt, Artificial Sequence
  Description of Artificial Sequence: Synthetic oligonucleotide
  Antisense strand to SEQ ID NO: 953804
acccuuacacauuuguugg

SEQ ID NO: 953806 - RNA, 19 nt, Artificial Sequence
  Description of Artificial Sequence: Synthetic oligonucleotide
  Sense strand starting at position 3806 of SEQ ID NO: 913785
ggaguuuaagaaugaguua

SEQ ID NO: 953807 - RNA, 19 nt, Artificial Sequence
  Description of Artificial Sequence: Synthetic oligonucleotide
  Antisense strand to SEQ ID NO: 953806
uaacucauucuuaaacucc

SEQ ID NO: 953808 - RNA, 19 nt, Artificial Sequence
  Description of Artificial Sequence: Synthetic oligonucleotide
  Sense strand starting at position 2297 of SEQ ID NO: 913785
ggaugaccuucccuuuaga

SEQ ID NO: 953809 - RNA, 19 nt, Artificial Sequence
  Description of Artificial Sequence: Synthetic oligonucleotide
  Antisense strand to SEQ ID NO: 953808
ucuaaagggaaggucaucc

SEQ ID NO: 953810 - RNA, 19 nt, Artificial Sequence
  Description of Artificial Sequence: Synthetic oligonucleotide
  Sense strand starting at position 3266 of SEQ ID NO: 913785
gguugagauauggguaaau

SEQ ID NO: 953811 - RNA, 19 nt, Artificial Sequence
  Description of Artificial Sequence: Synthetic oligonucleotide
  Antisense strand to SEQ ID NO: 953810
auuuacccauaucucaacc

SEQ ID NO: 953812 - RNA, 19 nt, Artificial Sequence
  Description of Artificial Sequence: Synthetic oligonucleotide
  Sense strand starting at position 3008 of SEQ ID NO: 913785
aauuacaggucugugagaa

SEQ ID NO: 953813 - RNA, 19 nt, Artificial Sequence
  Description of Artificial Sequence: Synthetic oligonucleotide
  Antisense strand to SEQ ID NO: 953812
uucucacagaccuguaauu

SEQ ID NO: 953814 - RNA, 19 nt, Artificial Sequence
  Description of Artificial Sequence: Synthetic oligonucleotide
  Sense strand starting at position 159 of SEQ ID NO: 913785
gugaaagagcugcaacuaa

SEQ ID NO: 953815 - RNA, 19 nt, Artificial Sequence
  Description of Artificial Sequence: Synthetic oligonucleotide
  Antisense strand to SEQ ID NO: 953814
uuaguugcagcucuuucac

SEQ ID NO: 953816 - RNA, 19 nt, Artificial Sequence
  Description of Artificial Sequence: Synthetic oligonucleotide
  Sense strand starting at position 3784 of SEQ ID NO: 913785
acaguaguuagauaguauu

SEQ ID NO: 953817 - RNA, 19 nt, Artificial Sequence
  Description of Artificial Sequence: Synthetic oligonucleotide
  Antisense strand to SEQ ID NO: 953816
aauacuaucuaacuacugu

SEQ ID NO: 953818 - RNA, 19 nt, Artificial Sequence
  Description of Artificial Sequence: Synthetic oligonucleotide
  Sense strand starting at position 80 of SEQ ID NO: 913785
ggccuugauugaccagaag

SEQ ID NO: 953819 - RNA, 19 nt, Artificial Sequence
  Description of Artificial Sequence: Synthetic oligonucleotide
  Antisense strand to SEQ ID NO: 953818
cuucuggucaaucaaggcc

SEQ ID NO: 953820 - RNA, 19 nt, Artificial Sequence
  Description of Artificial Sequence: Synthetic oligonucleotide
  Sense strand starting at position 3649 of SEQ ID NO: 913785
ccuguuaaaccugaugagu

SEQ ID NO: 953821 - RNA, 19 nt, Artificial Sequence
  Description of Artificial Sequence: Synthetic oligonucleotide
  Antisense strand to SEQ ID NO: 953820
acucaucagguuuaacagg

SEQ ID NO: 953822 - RNA, 19 nt, Artificial Sequence
  Description of Artificial Sequence: Synthetic oligonucleotide
  Sense strand starting at position 3007 of SEQ ID NO: 913785
aaauuacaggucugugaga

SEQ ID NO: 953823 - RNA, 19 nt, Artificial Sequence
  Description of Artificial Sequence: Synthetic oligonucleotide
  Antisense strand to SEQ ID NO: 953822
ucucacagaccuguaauuu

SEQ ID NO: 953824 - RNA, 19 nt, Artificial Sequence
  Description of Artificial Sequence: Synthetic oligonucleotide
  Sense strand starting at position 3009 of SEQ ID NO: 913785
auuacaggucugugagaaa

SEQ ID NO: 953825 - RNA, 19 nt, Artificial Sequence
  Description of Artificial Sequence: Synthetic oligonucleotide
  Antisense strand to SEQ ID NO: 953824
uuucucacagaccuguaau

SEQ ID NO: 953826 - RNA, 19 nt, Artificial Sequence
  Description of Artificial Sequence: Synthetic oligonucleotide
  Sense strand starting at position 3483 of SEQ ID NO: 913785
uugauaugggauuguauua

SEQ ID NO: 953827 - RNA, 19 nt, Artificial Sequence
  Description of Artificial Sequence: Synthetic oligonucleotide
  Antisense strand to SEQ ID NO: 953826
uaauacaaucccauaucaa

SEQ ID NO: 953828 - RNA, 19 nt, Artificial Sequence
  Description of Artificial Sequence: Synthetic oligonucleotide
  Sense strand starting at position 2570 of SEQ ID NO: 913785
agugauaccuacucucaag

SEQ ID NO: 953829 - RNA, 19 nt, Artificial Sequence
  Description of Artificial Sequence: Synthetic oligonucleotide
  Antisense strand to SEQ ID NO: 953828
cuugagaguagguaucacu

SEQ ID NO: 953830 - RNA, 19 nt, Artificial Sequence
  Description of Artificial Sequence: Synthetic oligonucleotide
  Sense strand starting at position 689 of SEQ ID NO: 913785
uuagcauuugguuguugau

SEQ ID NO: 953831 - RNA, 19 nt, Artificial Sequence
  Description of Artificial Sequence: Synthetic oligonucleotide
  Antisense strand to SEQ ID NO: 953830
aucaacaaccaaaugcuaa

SEQ ID NO: 953832 - RNA, 19 nt, Artificial Sequence
  Description of Artificial Sequence: Synthetic oligonucleotide
  Sense strand starting at position 2388 of SEQ ID NO: 913785
gcguuugucccaguucacu

SEQ ID NO: 953833 - RNA, 19 nt, Artificial Sequence
  Description of Artificial Sequence: Synthetic oligonucleotide
  Antisense strand to SEQ ID NO: 953832
agugaacugggacaaacgc

SEQ ID NO: 953834 - RNA, 19 nt, Artificial Sequence
  Description of Artificial Sequence: Synthetic oligonucleotide
  Sense strand starting at position 882 of SEQ ID NO: 913785
ugaccuugcugacuaauaa

SEQ ID NO: 953835 - RNA, 19 nt, Artificial Sequence
  Description of Artificial Sequence: Synthetic oligonucleotide
  Antisense strand to SEQ ID NO: 953834
uuauuagucagcaagguca

SEQ ID NO: 953836 - RNA, 19 nt, Artificial Sequence
  Description of Artificial Sequence: Synthetic oligonucleotide
  Sense strand starting at position 722 of SEQ ID NO: 913785
aagugugguaacugaugaa

SEQ ID NO: 953837 - RNA, 19 nt, Artificial Sequence
  Description of Artificial Sequence: Synthetic oligonucleotide
  Antisense strand to SEQ ID NO: 953836
uucaucaguuaccacacuu

SEQ ID NO: 953838 - RNA, 19 nt, Artificial Sequence
  Description of Artificial Sequence: Synthetic oligonucleotide
  Sense strand starting at position 688 of SEQ ID NO: 913785
guuagcauuugguuguuga

SEQ ID NO: 953839 - RNA, 19 nt, Artificial Sequence
  Description of Artificial Sequence: Synthetic oligonucleotide
  Antisense strand to SEQ ID NO: 953838
ucaacaaccaaaugcuaac

SEQ ID NO: 953840 - RNA, 19 nt, Artificial Sequence
  Description of Artificial Sequence: Synthetic oligonucleotide
  Sense strand starting at position 3658 of SEQ ID NO: 913785
ccugaugagucauccugac

SEQ ID NO: 953841 - RNA, 19 nt, Artificial Sequence
  Description of Artificial Sequence: Synthetic oligonucleotide
  Antisense strand to SEQ ID NO: 953840
gucaggaugacucaucagg

SEQ ID NO: 953842 - RNA, 19 nt, Artificial Sequence
  Description of Artificial Sequence: Synthetic oligonucleotide
  Sense strand starting at position 272 of SEQ ID NO: 913785
ccuuuaaaucuguaugguu

SEQ ID NO: 953843 - RNA, 19 nt, Artificial Sequence
  Description of Artificial Sequence: Synthetic oligonucleotide
  Antisense strand to SEQ ID NO: 953842
aaccauacagauuuaaagg

SEQ ID NO: 953844 - RNA, 19 nt, Artificial Sequence
  Description of Artificial Sequence: Synthetic oligonucleotide
  Sense strand starting at position 880 of SEQ ID NO: 913785
guugaccuugcugacuaau

SEQ ID NO: 953845 - RNA, 19 nt, Artificial Sequence
  Description of Artificial Sequence: Synthetic oligonucleotide
  Antisense strand to SEQ ID NO: 953844
auuagucagcaaggucaac

SEQ ID NO: 953846 - RNA, 19 nt, Artificial Sequence
  Description of Artificial Sequence: Synthetic oligonucleotide
  Sense strand starting at position 3244 of SEQ ID NO: 913785
cuccaugauaguuguagag

SEQ ID NO: 953847 - RNA, 19 nt, Artificial Sequence
  Description of Artificial Sequence: Synthetic oligonucleotide
  Antisense strand to SEQ ID NO: 953846
cucuacaacuaucauggag

SEQ ID NO: 953848 - RNA, 19 nt, Artificial Sequence
  Description of Artificial Sequence: Synthetic oligonucleotide
  Sense strand starting at position 218 of SEQ ID NO: 913785
uggucuugucagcaagaca

SEQ ID NO: 953849 - RNA, 19 nt, Artificial Sequence
  Description of Artificial Sequence: Synthetic oligonucleotide
  Antisense strand to SEQ ID NO: 953848
ugucuugcugacaagacca

SEQ ID NO: 953850 - RNA, 19 nt, Artificial Sequence
  Description of Artificial Sequence: Synthetic oligonucleotide
  Sense strand starting at position 3384 of SEQ ID NO: 913785
guacuuuagcaugagugau

SEQ ID NO: 953851 - RNA, 19 nt, Artificial Sequence
  Description of Artificial Sequence: Synthetic oligonucleotide
  Antisense strand to SEQ ID NO: 953850
aucacucaugcuaaaguac

SEQ ID NO: 953852 - RNA, 19 nt, Artificial Sequence
  Description of Artificial Sequence: Synthetic oligonucleotide
  Sense strand starting at position 754 of SEQ ID NO: 913785
ugaagcaggucuuuauuaa

SEQ ID NO: 953853 - RNA, 19 nt, Artificial Sequence
  Description of Artificial Sequence: Synthetic oligonucleotide
  Antisense strand to SEQ ID NO: 953852
uuaauaaagaccugcuuca

SEQ ID NO: 953854 - RNA, 19 nt, Artificial Sequence
  Description of Artificial Sequence: Synthetic oligonucleotide
  Sense strand starting at position 3243 of SEQ ID NO: 913785
ucuccaugauaguuguaga

SEQ ID NO: 953855 - RNA, 19 nt, Artificial Sequence
  Description of Artificial Sequence: Synthetic oligonucleotide
  Antisense strand to SEQ ID NO: 953854
ucuacaacuaucauggaga

SEQ ID NO: 953856 - RNA, 19 nt, Artificial Sequence
  Description of Artificial Sequence: Synthetic oligonucleotide
  Sense strand starting at position 707 of SEQ ID NO: 913785
ucugguuugguucagaagu

SEQ ID NO: 953857 - RNA, 19 nt, Artificial Sequence
  Description of Artificial Sequence: Synthetic oligonucleotide
  Antisense strand to SEQ ID NO: 953856
acuucugaaccaaaccaga

SEQ ID NO: 953858 - RNA, 19 nt, Artificial Sequence
  Description of Artificial Sequence: Synthetic oligonucleotide
  Sense strand starting at position 2551 of SEQ ID NO: 913785
ucugaagaauaggaagaau

SEQ ID NO: 953859 - RNA, 19 nt, Artificial Sequence
  Description of Artificial Sequence: Synthetic oligonucleotide
  Antisense strand to SEQ ID NO: 953858
auucuuccuauucuucaga

SEQ ID NO: 953860 - RNA, 19 nt, Artificial Sequence
  Description of Artificial Sequence: Synthetic oligonucleotide
  Sense strand starting at position 645 of SEQ ID NO: 913785
cccuuuggucaggguaaua

SEQ ID NO: 953861 - RNA, 19 nt, Artificial Sequence
  Description of Artificial Sequence: Synthetic oligonucleotide
  Antisense strand to SEQ ID NO: 953860
uauuacccugaccaaaggg

SEQ ID NO: 953862 - RNA, 19 nt, Artificial Sequence
  Description of Artificial Sequence: Synthetic oligonucleotide
  Sense strand starting at position 704 of SEQ ID NO: 913785
ugaucugguuugguucaga

SEQ ID NO: 953863 - RNA, 19 nt, Artificial Sequence
  Description of Artificial Sequence: Synthetic oligonucleotide
  Antisense strand to SEQ ID NO: 953862
ucugaaccaaaccagauca

SEQ ID NO: 953864 - RNA, 19 nt, Artificial Sequence
  Description of Artificial Sequence: Synthetic oligonucleotide
  Sense strand starting at position 38 of SEQ ID NO: 913785
cucagaaaguccuccaguu

SEQ ID NO: 953865 - RNA, 19 nt, Artificial Sequence
  Description of Artificial Sequence: Synthetic oligonucleotide
  Antisense strand to SEQ ID NO: 953864
aacuggaggacuuucugag

SEQ ID NO: 953866 - RNA, 19 nt, Artificial Sequence
  Description of Artificial Sequence: Synthetic oligonucleotide
  Sense strand starting at position 2158 of SEQ ID NO: 913785
ugaccaugccgugagugaa

SEQ ID NO: 953867 - RNA, 19 nt, Artificial Sequence
  Description of Artificial Sequence: Synthetic oligonucleotide
  Antisense strand to SEQ ID NO: 953866
uucacucacggcaugguca

SEQ ID NO: 953868 - RNA, 19 nt, Artificial Sequence
  Description of Artificial Sequence: Synthetic oligonucleotide
  Sense strand starting at position 3383 of SEQ ID NO: 913785
aguacuuuagcaugaguga

SEQ ID NO: 953869 - RNA, 19 nt, Artificial Sequence
  Description of Artificial Sequence: Synthetic oligonucleotide
  Antisense strand to SEQ ID NO: 953868
ucacucaugcuaaaguacu

SEQ ID NO: 953870 - RNA, 19 nt, Artificial Sequence
  Description of Artificial Sequence: Synthetic oligonucleotide
  Sense strand starting at position 3914 of SEQ ID NO: 913785
aggcuccugagcugagauu

SEQ ID NO: 953871 - RNA, 19 nt, Artificial Sequence
  Description of Artificial Sequence: Synthetic oligonucleotide
  Antisense strand to SEQ ID NO: 953870
aaucucagcucaggagccu

SEQ ID NO: 953872 - RNA, 19 nt, Artificial Sequence
  Description of Artificial Sequence: Synthetic oligonucleotide
  Sense strand starting at position 247 of SEQ ID NO: 913786
gaaguuauuugccuaaguu

SEQ ID NO: 953873 - RNA, 19 nt, Artificial Sequence
  Description of Artificial Sequence: Synthetic oligonucleotide
  Antisense strand to SEQ ID NO: 953872
aacuuaggcaaauaacuuc

SEQ ID NO: 953874 - RNA, 19 nt, Artificial Sequence
  Description of Artificial Sequence: Synthetic oligonucleotide
  Sense strand starting at position 3581 of SEQ ID NO: 913786
augacaauccuaugaggua

SEQ ID NO: 953875 - RNA, 19 nt, Artificial Sequence
  Description of Artificial Sequence: Synthetic oligonucleotide
  Antisense strand to SEQ ID NO: 953874
uaccucauaggauugucau

SEQ ID NO: 953876 - RNA, 19 nt, Artificial Sequence
  Description of Artificial Sequence: Synthetic oligonucleotide
  Sense strand starting at position 638 of SEQ ID NO: 913786
agcacuagaguugaacuua

SEQ ID NO: 953877 - RNA, 19 nt, Artificial Sequence
  Description of Artificial Sequence: Synthetic oligonucleotide
  Antisense strand to SEQ ID NO: 953876
uaaguucaacucuagugcu

SEQ ID NO: 953878 - RNA, 19 nt, Artificial Sequence
  Description of Artificial Sequence: Synthetic oligonucleotide
  Sense strand starting at position 3235 of SEQ ID NO: 913786
ugaggcagucuccaaugaa

SEQ ID NO: 953879 - RNA, 19 nt, Artificial Sequence
  Description of Artificial Sequence: Synthetic oligonucleotide
  Antisense strand to SEQ ID NO: 953878
uucauuggagacugccuca

SEQ ID NO: 953880 - RNA, 19 nt, Artificial Sequence
  Description of Artificial Sequence: Synthetic oligonucleotide
  Sense strand starting at position 2960 of SEQ ID NO: 913786
aggaaauuagcauguagga

SEQ ID NO: 953881 - RNA, 19 nt, Artificial Sequence
  Description of Artificial Sequence: Synthetic oligonucleotide
  Antisense strand to SEQ ID NO: 953880
uccuacaugcuaauuuccu

SEQ ID NO: 953882 - RNA, 19 nt, Artificial Sequence
  Description of Artificial Sequence: Synthetic oligonucleotide
  Sense strand starting at position 2747 of SEQ ID NO: 913786
ccaugaucuccuugggaga

SEQ ID NO: 953883 - RNA, 19 nt, Artificial Sequence
  Description of Artificial Sequence: Synthetic oligonucleotide
  Antisense strand to SEQ ID NO: 953882
ucucccaaggagaucaugg

SEQ ID NO: 953884 - RNA, 19 nt, Artificial Sequence
  Description of Artificial Sequence: Synthetic oligonucleotide
  Sense strand starting at position 611 of SEQ ID NO: 913786
ggcagcuaccaucaaauaa

SEQ ID NO: 953885 - RNA, 19 nt, Artificial Sequence
  Description of Artificial Sequence: Synthetic oligonucleotide
  Antisense strand to SEQ ID NO: 953884
uuauuugaugguagcugcc

SEQ ID NO: 953886 - RNA, 19 nt, Artificial Sequence
  Description of Artificial Sequence: Synthetic oligonucleotide
  Sense strand starting at position 3163 of SEQ ID NO: 913786
aggucuaccagucauugga

SEQ ID NO: 953887 - RNA, 19 nt, Artificial Sequence
  Description of Artificial Sequence: Synthetic oligonucleotide
  Antisense strand to SEQ ID NO: 953886
uccaaugacugguagaccu

SEQ ID NO: 953888 - RNA, 19 nt, Artificial Sequence
  Description of Artificial Sequence: Synthetic oligonucleotide
  Sense strand starting at position 2973 of SEQ ID NO: 913786
guaggagguuuacuaagga

SEQ ID NO: 953889 - RNA, 19 nt, Artificial Sequence
  Description of Artificial Sequence: Synthetic oligonucleotide
  Antisense strand to SEQ ID NO: 953888
uccuuaguaaaccuccuac

SEQ ID NO: 953890 - RNA, 19 nt, Artificial Sequence
  Description of Artificial Sequence: Synthetic oligonucleotide
  Sense strand starting at position 2934 of SEQ ID NO: 913786
auugaaauugguugacuca

SEQ ID NO: 953891 - RNA, 19 nt, Artificial Sequence
  Description of Artificial Sequence: Synthetic oligonucleotide
  Antisense strand to SEQ ID NO: 953890
ugagucaaccaauuucaau

SEQ ID NO: 953892 - RNA, 19 nt, Artificial Sequence
  Description of Artificial Sequence: Synthetic oligonucleotide
  Sense strand starting at position 2622 of SEQ ID NO: 913786
auggaaguguacucacuaa

SEQ ID NO: 953893 - RNA, 19 nt, Artificial Sequence
  Description of Artificial Sequence: Synthetic oligonucleotide
  Antisense strand to SEQ ID NO: 953892
uuagugaguacacuuccau

SEQ ID NO: 953894 - RNA, 19 nt, Artificial Sequence
  Description of Artificial Sequence: Synthetic oligonucleotide
  Sense strand starting at position 3630 of SEQ ID NO: 913786
uggaaauagguuuggagca

SEQ ID NO: 953895 - RNA, 19 nt, Artificial Sequence
  Description of Artificial Sequence: Synthetic oligonucleotide
  Antisense strand to SEQ ID NO: 953894
ugcuccaaaccuauuucca

SEQ ID NO: 953896 - RNA, 19 nt, Artificial Sequence
  Description of Artificial Sequence: Synthetic oligonucleotide
  Sense strand starting at position 631 of SEQ ID NO: 913786
ucaacuuagcacuagaguu

SEQ ID NO: 953897 - RNA, 19 nt, Artificial Sequence
  Description of Artificial Sequence: Synthetic oligonucleotide
  Antisense strand to SEQ ID NO: 953896
aacucuagugcuaaguuga

SEQ ID NO: 953898 - RNA, 19 nt, Artificial Sequence
  Description of Artificial Sequence: Synthetic oligonucleotide
  Sense strand starting at position 747 of SEQ ID NO: 913786
gaaacaaauguuggcauua

SEQ ID NO: 953899 - RNA, 19 nt, Artificial Sequence
  Description of Artificial Sequence: Synthetic oligonucleotide
  Antisense strand to SEQ ID NO: 953898
uaaugccaacauuuguuuc

SEQ ID NO: 953900 - RNA, 19 nt, Artificial Sequence
  Description of Artificial Sequence: Synthetic oligonucleotide
  Sense strand starting at position 537 of SEQ ID NO: 913786
gcuggcagacaucacuaau

SEQ ID NO: 953901 - RNA, 19 nt, Artificial Sequence
  Description of Artificial Sequence: Synthetic oligonucleotide
  Antisense strand to SEQ ID NO: 953900
auuagugaugucugccagc

SEQ ID NO: 953902 - RNA, 19 nt, Artificial Sequence
  Description of Artificial Sequence: Synthetic oligonucleotide
  Sense strand starting at position 3643 of SEQ ID NO: 913786
ggagcagccagaugacuaa

SEQ ID NO: 953903 - RNA, 19 nt, Artificial Sequence
  Description of Artificial Sequence: Synthetic oligonucleotide
  Antisense strand to SEQ ID NO: 953902
uuagucaucuggcugcucc

SEQ ID NO: 953904 - RNA, 19 nt, Artificial Sequence
  Description of Artificial Sequence: Synthetic oligonucleotide
  Sense strand starting at position 3165 of SEQ ID NO: 913786
gucuaccagucauuggaaa

SEQ ID NO: 953905 - RNA, 19 nt, Artificial Sequence
  Description of Artificial Sequence: Synthetic oligonucleotide
  Antisense strand to SEQ ID NO: 953904
uuuccaaugacugguagac

SEQ ID NO: 953906 - RNA, 19 nt, Artificial Sequence
  Description of Artificial Sequence: Synthetic oligonucleotide
  Sense strand starting at position 3238 of SEQ ID NO: 913786
ggcagucuccaaugaacag

SEQ ID NO: 953907 - RNA, 19 nt, Artificial Sequence
  Description of Artificial Sequence: Synthetic oligonucleotide
  Antisense strand to SEQ ID NO: 953906
cuguucauuggagacugcc

SEQ ID NO: 953908 - RNA, 19 nt, Artificial Sequence
  Description of Artificial Sequence: Synthetic oligonucleotide
  Sense strand starting at position 2642 of SEQ ID NO: 913786
uggcaucugccucagaauc

SEQ ID NO: 953909 - RNA, 19 nt, Artificial Sequence
  Description of Artificial Sequence: Synthetic oligonucleotide
  Antisense strand to SEQ ID NO: 953908
gauucugaggcagaugcca

SEQ ID NO: 953910 - RNA, 19 nt, Artificial Sequence
  Description of Artificial Sequence: Synthetic oligonucleotide
  Sense strand starting at position 1031 of SEQ ID NO: 913786
accucuacucgaugugaga

SEQ ID NO: 953911 - RNA, 19 nt, Artificial Sequence
  Description of Artificial Sequence: Synthetic oligonucleotide
  Antisense strand to SEQ ID NO: 953910
ucucacaucgaguagaggu

SEQ ID NO: 953912 - RNA, 19 nt, Artificial Sequence
  Description of Artificial Sequence: Synthetic oligonucleotide
  Sense strand starting at position 966 of SEQ ID NO: 913786
uagagaucuuuaguuuggu

SEQ ID NO: 953913 - RNA, 19 nt, Artificial Sequence
  Description of Artificial Sequence: Synthetic oligonucleotide
  Antisense strand to SEQ ID NO: 953912
accaaacuaaagaucucua

SEQ ID NO: 953914 - RNA, 19 nt, Artificial Sequence
  Description of Artificial Sequence: Synthetic oligonucleotide
  Sense strand starting at position 3740 of SEQ ID NO: 913786
agaaaccauuaagaugaau

SEQ ID NO: 953915 - RNA, 19 nt, Artificial Sequence
  Description of Artificial Sequence: Synthetic oligonucleotide
  Antisense strand to SEQ ID NO: 953914
auucaucuuaaugguuucu

SEQ ID NO: 953916 - RNA, 19 nt, Artificial Sequence
  Description of Artificial Sequence: Synthetic oligonucleotide
  Sense strand starting at position 3541 of SEQ ID NO: 913786
uguacuagaugcuuuagau

SEQ ID NO: 953917 - RNA, 19 nt, Artificial Sequence
  Description of Artificial Sequence: Synthetic oligonucleotide
  Antisense strand to SEQ ID NO: 953916
aucuaaagcaucuaguaca

SEQ ID NO: 953918 - RNA, 19 nt, Artificial Sequence
  Description of Artificial Sequence: Synthetic oligonucleotide
  Sense strand starting at position 2469 of SEQ ID NO: 913786
gacaguaagaucuguuggu

SEQ ID NO: 953919 - RNA, 19 nt, Artificial Sequence
  Description of Artificial Sequence: Synthetic oligonucleotide
  Antisense strand to SEQ ID NO: 953918
accaacagaucuuacuguc

SEQ ID NO: 953920 - RNA, 19 nt, Artificial Sequence
  Description of Artificial Sequence: Synthetic oligonucleotide
  Sense strand starting at position 1104 of SEQ ID NO: 913786
cugggaugcccugguuaag

SEQ ID NO: 953921 - RNA, 19 nt, Artificial Sequence
  Description of Artificial Sequence: Synthetic oligonucleotide
  Antisense strand to SEQ ID NO: 953920
cuuaaccagggcaucccag

SEQ ID NO: 953922 - RNA, 19 nt, Artificial Sequence
  Description of Artificial Sequence: Synthetic oligonucleotide
  Sense strand starting at position 3321 of SEQ ID NO: 913786
cuuacuaauggcugugaua

SEQ ID NO: 953923 - RNA, 19 nt, Artificial Sequence
  Description of Artificial Sequence: Synthetic oligonucleotide
  Antisense strand to SEQ ID NO: 953922
uaucacagccauuaguaag

SEQ ID NO: 953924 - RNA, 19 nt, Artificial Sequence
  Description of Artificial Sequence: Synthetic oligonucleotide
  Sense strand starting at position 3311 of SEQ ID NO: 913786
agaugcugugcuuacuaau

SEQ ID NO: 953925 - RNA, 19 nt, Artificial Sequence
  Description of Artificial Sequence: Synthetic oligonucleotide
  Antisense strand to SEQ ID NO: 953924
auuaguaagcacagcaucu

SEQ ID NO: 953926 - RNA, 19 nt, Artificial Sequence
  Description of Artificial Sequence: Synthetic oligonucleotide
  Sense strand starting at position 3809 of SEQ ID NO: 913786
gggaaugcuauguaugugu

SEQ ID NO: 953927 - RNA, 19 nt, Artificial Sequence
  Description of Artificial Sequence: Synthetic oligonucleotide
  Antisense strand to SEQ ID NO: 953926
acacauacauagcauuccc

SEQ ID NO: 953928 - RNA, 19 nt, Artificial Sequence
  Description of Artificial Sequence: Synthetic oligonucleotide
  Sense strand starting at position 2470 of SEQ ID NO: 913786
acaguaagaucuguugguu

SEQ ID NO: 953929 - RNA, 19 nt, Artificial Sequence
  Description of Artificial Sequence: Synthetic oligonucleotide
  Antisense strand to SEQ ID NO: 953928
aaccaacagaucuuacugu

SEQ ID NO: 953930 - RNA, 19 nt, Artificial Sequence
  Description of Artificial Sequence: Synthetic oligonucleotide
  Sense strand starting at position 3466 of SEQ ID NO: 913786
cucagauagucagcuaucu

SEQ ID NO: 953931 - RNA, 19 nt, Artificial Sequence
  Description of Artificial Sequence: Synthetic oligonucleotide
  Antisense strand to SEQ ID NO: 953930
agauagcugacuaucugag

SEQ ID NO: 953932 - RNA, 19 nt, Artificial Sequence
  Description of Artificial Sequence: Synthetic oligonucleotide
  Sense strand starting at position 3807 of SEQ ID NO: 913786
cagggaaugcuauguaugu

SEQ ID NO: 953933 - RNA, 19 nt, Artificial Sequence
  Description of Artificial Sequence: Synthetic oligonucleotide
  Antisense strand to SEQ ID NO: 953932
acauacauagcauucccug

SEQ ID NO: 953934 - RNA, 19 nt, Artificial Sequence
  Description of Artificial Sequence: Synthetic oligonucleotide
  Sense strand starting at position 3140 of SEQ ID NO: 913786
gugcaagaaccaggcuuau

SEQ ID NO: 953935 - RNA, 19 nt, Artificial Sequence
  Description of Artificial Sequence: Synthetic oligonucleotide
  Antisense strand to SEQ ID NO: 953934
auaagccugguucuugcac

SEQ ID NO: 953936 - RNA, 19 nt, Artificial Sequence
  Description of Artificial Sequence: Synthetic oligonucleotide
  Sense strand starting at position 3456 of SEQ ID NO: 913786
cagagagacucucagauag

SEQ ID NO: 953937 - RNA, 19 nt, Artificial Sequence
  Description of Artificial Sequence: Synthetic oligonucleotide
  Antisense strand to SEQ ID NO: 953936
cuaucugagagucucucug

SEQ ID NO: 953938 - RNA, 19 nt, Artificial Sequence
  Description of Artificial Sequence: Synthetic oligonucleotide
  Sense strand starting at position 3689 of SEQ ID NO: 913786
ugguguaucugggauuuga

SEQ ID NO: 953939 - RNA, 19 nt, Artificial Sequence
  Description of Artificial Sequence: Synthetic oligonucleotide
  Antisense strand to SEQ ID NO: 953938
ucaaaucccagauacacca

SEQ ID NO: 953940 - RNA, 19 nt, Artificial Sequence
  Description of Artificial Sequence: Synthetic oligonucleotide
  Sense strand starting at position 758 of SEQ ID NO: 913786
uggcauuaauguguuaacu

SEQ ID NO: 953941 - RNA, 19 nt, Artificial Sequence
  Description of Artificial Sequence: Synthetic oligonucleotide
  Antisense strand to SEQ ID NO: 953940
aguuaacacauuaaugcca

SEQ ID NO: 953942 - RNA, 19 nt, Artificial Sequence
  Description of Artificial Sequence: Synthetic oligonucleotide
  Sense strand starting at position 3529 of SEQ ID NO: 913786
uuauccuaggcuuguacua

SEQ ID NO: 953943 - RNA, 19 nt, Artificial Sequence
  Description of Artificial Sequence: Synthetic oligonucleotide
  Antisense strand to SEQ ID NO: 953942
uaguacaagccuaggauaa

SEQ ID NO: 953944 - RNA, 19 nt, Artificial Sequence
  Description of Artificial Sequence: Synthetic oligonucleotide
  Sense strand starting at position 892 of SEQ ID NO: 913786
gcacccaucucaucuugua

SEQ ID NO: 953945 - RNA, 19 nt, Artificial Sequence
  Description of Artificial Sequence: Synthetic oligonucleotide
  Antisense strand to SEQ ID NO: 953944
uacaagaugagaugggugc

SEQ ID NO: 953946 - RNA, 19 nt, Artificial Sequence
  Description of Artificial Sequence: Synthetic oligonucleotide
  Sense strand starting at position 3850 of SEQ ID NO: 913786
guguuauugcuauacaugu

SEQ ID NO: 953947 - RNA, 19 nt, Artificial Sequence
  Description of Artificial Sequence: Synthetic oligonucleotide
  Antisense strand to SEQ ID NO: 953946
acauguauagcaauaacac

SEQ ID NO: 953948 - RNA, 19 nt, Artificial Sequence
  Description of Artificial Sequence: Synthetic oligonucleotide
  Sense strand starting at position 3677 of SEQ ID NO: 913786
acagcuauuaaguggugua

SEQ ID NO: 953949 - RNA, 19 nt, Artificial Sequence
  Description of Artificial Sequence: Synthetic oligonucleotide
  Antisense strand to SEQ ID NO: 953948
uacaccacuuaauagcugu

SEQ ID NO: 953950 - RNA, 19 nt, Artificial Sequence
  Description of Artificial Sequence: Synthetic oligonucleotide
  Sense strand starting at position 2801 of SEQ ID NO: 913786
auccaaguguuaucaacgu

SEQ ID NO: 953951 - RNA, 19 nt, Artificial Sequence
  Description of Artificial Sequence: Synthetic oligonucleotide
  Antisense strand to SEQ ID NO: 953950
acguugauaacacuuggau

SEQ ID NO: 953952 - RNA, 19 nt, Artificial Sequence
  Description of Artificial Sequence: Synthetic oligonucleotide
  Sense strand starting at position 749 of SEQ ID NO: 913787
cugaguaaacaauagccua

SEQ ID NO: 953953 - RNA, 19 nt, Artificial Sequence
  Description of Artificial Sequence: Synthetic oligonucleotide
  Antisense strand to SEQ ID NO: 953952
uaggcuauuguuuacucag

SEQ ID NO: 953954 - RNA, 19 nt, Artificial Sequence
  Description of Artificial Sequence: Synthetic oligonucleotide
  Sense strand starting at position 3073 of SEQ ID NO: 913787
auaauuaggaaguguuaag

SEQ ID NO: 953955 - RNA, 19 nt, Artificial Sequence
  Description of Artificial Sequence: Synthetic oligonucleotide
  Antisense strand to SEQ ID NO: 953954
cuuaacacuuccuaauuau

SEQ ID NO: 953956 - RNA, 19 nt, Artificial Sequence
  Description of Artificial Sequence: Synthetic oligonucleotide
  Sense strand starting at position 3484 of SEQ ID NO: 913787
gaaacaggagccuauuguu

SEQ ID NO: 953957 - RNA, 19 nt, Artificial Sequence
  Description of Artificial Sequence: Synthetic oligonucleotide
  Antisense strand to SEQ ID NO: 953956
aacaauaggcuccuguuuc

SEQ ID NO: 953958 - RNA, 19 nt, Artificial Sequence
  Description of Artificial Sequence: Synthetic oligonucleotide
  Sense strand starting at position 1177 of SEQ ID NO: 913787
gacagagauguuuacuugu

SEQ ID NO: 953959 - RNA, 19 nt, Artificial Sequence
  Description of Artificial Sequence: Synthetic oligonucleotide
  Antisense strand to SEQ ID NO: 953958
acaaguaaacaucucuguc

SEQ ID NO: 953960 - RNA, 19 nt, Artificial Sequence
  Description of Artificial Sequence: Synthetic oligonucleotide
  Sense strand starting at position 3170 of SEQ ID NO: 913787
agucaucaucucuaaguga

SEQ ID NO: 953961 - RNA, 19 nt, Artificial Sequence
  Description of Artificial Sequence: Synthetic oligonucleotide
  Antisense strand to SEQ ID NO: 953960
ucacuuagagaugaugacu

SEQ ID NO: 953962 - RNA, 19 nt, Artificial Sequence
  Description of Artificial Sequence: Synthetic oligonucleotide
  Sense strand starting at position 3847 of SEQ ID NO: 913787
auugauaaggccuaguauu

SEQ ID NO: 953963 - RNA, 19 nt, Artificial Sequence
  Description of Artificial Sequence: Synthetic oligonucleotide
  Antisense strand to SEQ ID NO: 953962
aauacuaggccuuaucaau

SEQ ID NO: 953964 - RNA, 19 nt, Artificial Sequence
  Description of Artificial Sequence: Synthetic oligonucleotide
  Sense strand starting at position 3109 of SEQ ID NO: 913787
guuccaaaucgugaugaaa

SEQ ID NO: 953965 - RNA, 19 nt, Artificial Sequence
  Description of Artificial Sequence: Synthetic oligonucleotide
  Antisense strand to SEQ ID NO: 953964
uuucaucacgauuuggaac

SEQ ID NO: 953966 - RNA, 19 nt, Artificial Sequence
  Description of Artificial Sequence: Synthetic oligonucleotide
  Sense strand starting at position 394 of SEQ ID NO: 913787
ucuuaaucugggugaugaa

SEQ ID NO: 953967 - RNA, 19 nt, Artificial Sequence
  Description of Artificial Sequence: Synthetic oligonucleotide
  Antisense strand to SEQ ID NO: 953966
uucaucacccagauuaaga

SEQ ID NO: 953968 - RNA, 19 nt, Artificial Sequence
  Description of Artificial Sequence: Synthetic oligonucleotide
  Sense strand starting at position 688 of SEQ ID NO: 913787
cugacaccuuguuuagaaa

SEQ ID NO: 953969 - RNA, 19 nt, Artificial Sequence
  Description of Artificial Sequence: Synthetic oligonucleotide
  Antisense strand to SEQ ID NO: 953968
uuucuaaacaaggugucag

SEQ ID NO: 953970 - RNA, 19 nt, Artificial Sequence
  Description of Artificial Sequence: Synthetic oligonucleotide
  Sense strand starting at position 976 of SEQ ID NO: 913787
ggaaguuauuuggaaacca

SEQ ID NO: 953971 - RNA, 19 nt, Artificial Sequence
  Description of Artificial Sequence: Synthetic oligonucleotide
  Antisense strand to SEQ ID NO: 953970
ugguuuccaaauaacuucc

SEQ ID NO: 953972 - RNA, 19 nt, Artificial Sequence
  Description of Artificial Sequence: Synthetic oligonucleotide
  Sense strand starting at position 2128 of SEQ ID NO: 913787
uagaauugaguguggaacu

SEQ ID NO: 953973 - RNA, 19 nt, Artificial Sequence
  Description of Artificial Sequence: Synthetic oligonucleotide
  Antisense strand to SEQ ID NO: 953972
aguuccacacucaauucua

SEQ ID NO: 953974 - RNA, 19 nt, Artificial Sequence
  Description of Artificial Sequence: Synthetic oligonucleotide
  Sense strand starting at position 739 of SEQ ID NO: 913787
guuaccagggcugaguaaa

SEQ ID NO: 953975 - RNA, 19 nt, Artificial Sequence
  Description of Artificial Sequence: Synthetic oligonucleotide
  Antisense strand to SEQ ID NO: 953974
uuuacucagcccugguaac

SEQ ID NO: 953976 - RNA, 19 nt, Artificial Sequence
  Description of Artificial Sequence: Synthetic oligonucleotide
  Sense strand starting at position 765 of SEQ ID NO: 913787
cuaagaaaguuuguugaua

SEQ ID NO: 953977 - RNA, 19 nt, Artificial Sequence
  Description of Artificial Sequence: Synthetic oligonucleotide
  Antisense strand to SEQ ID NO: 953976
uaucaacaaacuuucuuag

SEQ ID NO: 953978 - RNA, 19 nt, Artificial Sequence
  Description of Artificial Sequence: Synthetic oligonucleotide
  Sense strand starting at position 766 of SEQ ID NO: 913787
uaagaaaguuuguugauac

SEQ ID NO: 953979 - RNA, 19 nt, Artificial Sequence
  Description of Artificial Sequence: Synthetic oligonucleotide
  Antisense strand to SEQ ID NO: 953978
guaucaacaaacuuucuua

SEQ ID NO: 953980 - RNA, 19 nt, Artificial Sequence
  Description of Artificial Sequence: Synthetic oligonucleotide
  Sense strand starting at position 3089 of SEQ ID NO: 913787
aagcgauaaggcuacuaca

SEQ ID NO: 953981 - RNA, 19 nt, Artificial Sequence
  Description of Artificial Sequence: Synthetic oligonucleotide
  Antisense strand to SEQ ID NO: 953980
uguaguagccuuaucgcuu

SEQ ID NO: 953982 - RNA, 19 nt, Artificial Sequence
  Description of Artificial Sequence: Synthetic oligonucleotide
  Sense strand starting at position 285 of SEQ ID NO: 913787
uugaaauguauacggauca

SEQ ID NO: 953983 - RNA, 19 nt, Artificial Sequence
  Description of Artificial Sequence: Synthetic oligonucleotide
  Antisense strand to SEQ ID NO: 953982
ugauccguauacauuucaa

SEQ ID NO: 953984 - RNA, 19 nt, Artificial Sequence
  Description of Artificial Sequence: Synthetic oligonucleotide
  Sense strand starting at position 648 of SEQ ID NO: 913787
ugucacuggcuagacuuaa

SEQ ID NO: 953985 - RNA, 19 nt, Artificial Sequence
  Description of Artificial Sequence: Synthetic oligonucleotide
  Antisense strand to SEQ ID NO: 953984
uuaagucuagccagugaca

SEQ ID NO: 953986 - RNA, 19 nt, Artificial Sequence
  Description of Artificial Sequence: Synthetic oligonucleotide
  Sense strand starting at position 2247 of SEQ ID NO: 913787
aauuaaugagcuuguggaa

SEQ ID NO: 953987 - RNA, 19 nt, Artificial Sequence
  Description of Artificial Sequence: Synthetic oligonucleotide
  Antisense strand to SEQ ID NO: 953986
uuccacaagcucauuaauu

SEQ ID NO: 953988 - RNA, 19 nt, Artificial Sequence
  Description of Artificial Sequence: Synthetic oligonucleotide
  Sense strand starting at position 1046 of SEQ ID NO: 913787
uuuaguuuggucuaugaac

SEQ ID NO: 953989 - RNA, 19 nt, Artificial Sequence
  Description of Artificial Sequence: Synthetic oligonucleotide
  Antisense strand to SEQ ID NO: 953988
guucauagaccaaacuaaa

SEQ ID NO: 953990 - RNA, 19 nt, Artificial Sequence
  Description of Artificial Sequence: Synthetic oligonucleotide
  Sense strand starting at position 3117 of SEQ ID NO: 913787
ucgugaugaaauggacacu

SEQ ID NO: 953991 - RNA, 19 nt, Artificial Sequence
  Description of Artificial Sequence: Synthetic oligonucleotide
  Antisense strand to SEQ ID NO: 953990
aguguccauuucaucacga

SEQ ID NO: 953992 - RNA, 19 nt, Artificial Sequence
  Description of Artificial Sequence: Synthetic oligonucleotide
  Sense strand starting at position 2293 of SEQ ID NO: 913787
acucgccaugauuauaauu

SEQ ID NO: 953993 - RNA, 19 nt, Artificial Sequence
  Description of Artificial Sequence: Synthetic oligonucleotide
  Antisense strand to SEQ ID NO: 953992
aauuauaaucauggcgagu

SEQ ID NO: 953994 - RNA, 19 nt, Artificial Sequence
  Description of Artificial Sequence: Synthetic oligonucleotide
  Sense strand starting at position 687 of SEQ ID NO: 913787
ucugacaccuuguuuagaa

SEQ ID NO: 953995 - RNA, 19 nt, Artificial Sequence
  Description of Artificial Sequence: Synthetic oligonucleotide
  Antisense strand to SEQ ID NO: 953994
uucuaaacaaggugucaga

SEQ ID NO: 953996 - RNA, 19 nt, Artificial Sequence
  Description of Artificial Sequence: Synthetic oligonucleotide
  Sense strand starting at position 949 of SEQ ID NO: 913787
agcaguuucuagcuuauuu

SEQ ID NO: 953997 - RNA, 19 nt, Artificial Sequence
  Description of Artificial Sequence: Synthetic oligonucleotide
  Antisense strand to SEQ ID NO: 953996
aaauaagcuagaaacugcu

SEQ ID NO: 953998 - RNA, 19 nt, Artificial Sequence
  Description of Artificial Sequence: Synthetic oligonucleotide
  Sense strand starting at position 566 of SEQ ID NO: 913787
uguuauaugcacugcauuu

SEQ ID NO: 953999 - RNA, 19 nt, Artificial Sequence
  Description of Artificial Sequence: Synthetic oligonucleotide
  Antisense strand to SEQ ID NO: 953998
aaaugcagugcauauaaca

SEQ ID NO: 954000 - RNA, 19 nt, Artificial Sequence
  Description of Artificial Sequence: Synthetic oligonucleotide
  Sense strand starting at position 3489 of SEQ ID NO: 913787
aggagccuauuguuaugaa

SEQ ID NO: 954001 - RNA, 19 nt, Artificial Sequence
  Description of Artificial Sequence: Synthetic oligonucleotide
  Antisense strand to SEQ ID NO: 954000
uucauaacaauaggcuccu

SEQ ID NO: 954002 - RNA, 19 nt, Artificial Sequence
  Description of Artificial Sequence: Synthetic oligonucleotide
  Sense strand starting at position 3009 of SEQ ID NO: 913787
gcuggauuacuccagcaua

SEQ ID NO: 954003 - RNA, 19 nt, Artificial Sequence
  Description of Artificial Sequence: Synthetic oligonucleotide
  Antisense strand to SEQ ID NO: 954002
uaugcuggaguaauccagc

SEQ ID NO: 954004 - RNA, 19 nt, Artificial Sequence
  Description of Artificial Sequence: Synthetic oligonucleotide
  Sense strand starting at position 1048 of SEQ ID NO: 913787
uaguuuggucuaugaacaa

SEQ ID NO: 954005 - RNA, 19 nt, Artificial Sequence
  Description of Artificial Sequence: Synthetic oligonucleotide
  Antisense strand to SEQ ID NO: 954004
uuguucauagaccaaacua

SEQ ID NO: 954006 - RNA, 19 nt, Artificial Sequence
  Description of Artificial Sequence: Synthetic oligonucleotide
  Sense strand starting at position 1036 of SEQ ID NO: 913787
gaaauauccguuuaguuug

SEQ ID NO: 954007 - RNA, 19 nt, Artificial Sequence
  Description of Artificial Sequence: Synthetic oligonucleotide
  Antisense strand to SEQ ID NO: 954006
caaacuaaacggauauuuc

SEQ ID NO: 954008 - RNA, 19 nt, Artificial Sequence
  Description of Artificial Sequence: Synthetic oligonucleotide
  Sense strand starting at position 2426 of SEQ ID NO: 913787
gugugagagacggagucuu

SEQ ID NO: 954009 - RNA, 19 nt, Artificial Sequence
  Description of Artificial Sequence: Synthetic oligonucleotide
  Antisense strand to SEQ ID NO: 954008
aagacuccgucucucacac

SEQ ID NO: 954010 - RNA, 19 nt, Artificial Sequence
  Description of Artificial Sequence: Synthetic oligonucleotide
  Sense strand starting at position 2126 of SEQ ID NO: 913787
gcuagaauugaguguggaa

SEQ ID NO: 954011 - RNA, 19 nt, Artificial Sequence
  Description of Artificial Sequence: Synthetic oligonucleotide
  Antisense strand to SEQ ID NO: 954010
uuccacacucaauucuagc

SEQ ID NO: 954012 - RNA, 19 nt, Artificial Sequence
  Description of Artificial Sequence: Synthetic oligonucleotide
  Sense strand starting at position 1180 of SEQ ID NO: 913787
agagauguuuacuuguuua

SEQ ID NO: 954013 - RNA, 19 nt, Artificial Sequence
  Description of Artificial Sequence: Synthetic oligonucleotide
  Antisense strand to SEQ ID NO: 954012
uaaacaaguaaacaucucu

SEQ ID NO: 954014 - RNA, 19 nt, Artificial Sequence
  Description of Artificial Sequence: Synthetic oligonucleotide
  Sense strand starting at position 2290 of SEQ ID NO: 913787
agcacucgccaugauuaua

SEQ ID NO: 954015 - RNA, 19 nt, Artificial Sequence
  Description of Artificial Sequence: Synthetic oligonucleotide
  Antisense strand to SEQ ID NO: 954014
uauaaucauggcgagugcu

SEQ ID NO: 954016 - RNA, 19 nt, Artificial Sequence
  Description of Artificial Sequence: Synthetic oligonucleotide
  Sense strand starting at position 1236 of SEQ ID NO: 913787
aacagugauugauugcuuu

SEQ ID NO: 954017 - RNA, 19 nt, Artificial Sequence
  Description of Artificial Sequence: Synthetic oligonucleotide
  Antisense strand to SEQ ID NO: 954016
aaagcaaucaaucacuguu

SEQ ID NO: 954018 - RNA, 19 nt, Artificial Sequence
  Description of Artificial Sequence: Synthetic oligonucleotide
  Sense strand starting at position 3080 of SEQ ID NO: 913787
ggaaguguuaagcgauaag

SEQ ID NO: 954019 - RNA, 19 nt, Artificial Sequence
  Description of Artificial Sequence: Synthetic oligonucleotide
  Antisense strand to SEQ ID NO: 954018
cuuaucgcuuaacacuucc

SEQ ID NO: 954020 - RNA, 19 nt, Artificial Sequence
  Description of Artificial Sequence: Synthetic oligonucleotide
  Sense strand starting at position 1272 of SEQ ID NO: 913787
aacguaagugcuuaaccau

SEQ ID NO: 954021 - RNA, 19 nt, Artificial Sequence
  Description of Artificial Sequence: Synthetic oligonucleotide
  Antisense strand to SEQ ID NO: 954020
augguuaagcacuuacguu

SEQ ID NO: 954022 - RNA, 19 nt, Artificial Sequence
  Description of Artificial Sequence: Synthetic oligonucleotide
  Sense strand starting at position 1179 of SEQ ID NO: 913787
cagagauguuuacuuguuu

SEQ ID NO: 954023 - RNA, 19 nt, Artificial Sequence
  Description of Artificial Sequence: Synthetic oligonucleotide
  Antisense strand to SEQ ID NO: 954022
aaacaaguaaacaucucug

SEQ ID NO: 954024 - RNA, 19 nt, Artificial Sequence
  Description of Artificial Sequence: Synthetic oligonucleotide
  Sense strand starting at position 710 of SEQ ID NO: 913787
agucaucaccuucgauauc

SEQ ID NO: 954025 - RNA, 19 nt, Artificial Sequence
  Description of Artificial Sequence: Synthetic oligonucleotide
  Antisense strand to SEQ ID NO: 954024
gauaucgaaggugaugacu

SEQ ID NO: 954026 - RNA, 19 nt, Artificial Sequence
  Description of Artificial Sequence: Synthetic oligonucleotide
  Sense strand starting at position 1090 of SEQ ID NO: 913787
gcagcacaaucagaaauuu

SEQ ID NO: 954027 - RNA, 19 nt, Artificial Sequence
  Description of Artificial Sequence: Synthetic oligonucleotide
  Antisense strand to SEQ ID NO: 954026
aaauuucugauugugcugc

SEQ ID NO: 954028 - RNA, 19 nt, Artificial Sequence
  Description of Artificial Sequence: Synthetic oligonucleotide
  Sense strand starting at position 511 of SEQ ID NO: 913787
aagguaauauugccugguu

SEQ ID NO: 954029 - RNA, 19 nt, Artificial Sequence
  Description of Artificial Sequence: Synthetic oligonucleotide
  Antisense strand to SEQ ID NO: 954028
aaccaggcaauauuaccuu

SEQ ID NO: 954030 - RNA, 19 nt, Artificial Sequence
  Description of Artificial Sequence: Synthetic oligonucleotide
  Sense strand starting at position 2388 of SEQ ID NO: 913787
ccagaauagucuuugugug

SEQ ID NO: 954031 - RNA, 19 nt, Artificial Sequence
  Description of Artificial Sequence: Synthetic oligonucleotide
  Antisense strand to SEQ ID NO: 954030
cacacaaagacuauucugg

SEQ ID NO: 954032 - RNA, 19 nt, Artificial Sequence
  Description of Artificial Sequence: Synthetic oligonucleotide
  Sense strand starting at position 1094 of SEQ ID NO: 913788
uggagucuuggacauguaa

SEQ ID NO: 954033 - RNA, 19 nt, Artificial Sequence
  Description of Artificial Sequence: Synthetic oligonucleotide
  Antisense strand to SEQ ID NO: 954032
uuacauguccaagacucca

SEQ ID NO: 954034 - RNA, 19 nt, Artificial Sequence
  Description of Artificial Sequence: Synthetic oligonucleotide
  Sense strand starting at position 1049 of SEQ ID NO: 913788
caacuaaucgaugaguauu

SEQ ID NO: 954035 - RNA, 19 nt, Artificial Sequence
  Description of Artificial Sequence: Synthetic oligonucleotide
  Antisense strand to SEQ ID NO: 954034
aauacucaucgauuaguug

SEQ ID NO: 954036 - RNA, 19 nt, Artificial Sequence
  Description of Artificial Sequence: Synthetic oligonucleotide
  Sense strand starting at position 2640 of SEQ ID NO: 913788
agagauuuauuagacauac

SEQ ID NO: 954037 - RNA, 19 nt, Artificial Sequence
  Description of Artificial Sequence: Synthetic oligonucleotide
  Antisense strand to SEQ ID NO: 954036
guaugucuaauaaaucucu

SEQ ID NO: 954038 - RNA, 19 nt, Artificial Sequence
  Description of Artificial Sequence: Synthetic oligonucleotide
  Sense strand starting at position 3161 of SEQ ID NO: 913788
uuaguaauuggugaaucua

SEQ ID NO: 954039 - RNA, 19 nt, Artificial Sequence
  Description of Artificial Sequence: Synthetic oligonucleotide
  Antisense strand to SEQ ID NO: 954038
uagauucaccaauuacuaa

SEQ ID NO: 954040 - RNA, 19 nt, Artificial Sequence
  Description of Artificial Sequence: Synthetic oligonucleotide
  Sense strand starting at position 1007 of SEQ ID NO: 913788
cugaauguggucuacaaca

SEQ ID NO: 954041 - RNA, 19 nt, Artificial Sequence
  Description of Artificial Sequence: Synthetic oligonucleotide
  Antisense strand to SEQ ID NO: 954040
uguuguagaccacauucag

SEQ ID NO: 954042 - RNA, 19 nt, Artificial Sequence
  Description of Artificial Sequence: Synthetic oligonucleotide
  Sense strand starting at position 3919 of SEQ ID NO: 913788
gguuaaucuccuggagaaa

SEQ ID NO: 954043 - RNA, 19 nt, Artificial Sequence
  Description of Artificial Sequence: Synthetic oligonucleotide
  Antisense strand to SEQ ID NO: 954042
uuucuccaggagauuaacc

SEQ ID NO: 954044 - RNA, 19 nt, Artificial Sequence
  Description of Artificial Sequence: Synthetic oligonucleotide
  Sense strand starting at position 3631 of SEQ ID NO: 913788
aaguucugugaguagaaua

SEQ ID NO: 954045 - RNA, 19 nt, Artificial Sequence
  Description of Artificial Sequence: Synthetic oligonucleotide
  Antisense strand to SEQ ID NO: 954044
uauucuacucacagaacuu

SEQ ID NO: 954046 - RNA, 19 nt, Artificial Sequence
  Description of Artificial Sequence: Synthetic oligonucleotide
  Sense strand starting at position 2083 of SEQ ID NO: 913788
ggaagaagcucuccaauau

SEQ ID NO: 954047 - RNA, 19 nt, Artificial Sequence
  Description of Artificial Sequence: Synthetic oligonucleotide
  Antisense strand to SEQ ID NO: 954046
auauuggagagcuucuucc

SEQ ID NO: 954048 - RNA, 19 nt, Artificial Sequence
  Description of Artificial Sequence: Synthetic oligonucleotide
  Sense strand starting at position 3026 of SEQ ID NO: 913788
uugugauuaaguggaagaa

SEQ ID NO: 954049 - RNA, 19 nt, Artificial Sequence
  Description of Artificial Sequence: Synthetic oligonucleotide
  Antisense strand to SEQ ID NO: 954048
uucuuccacuuaaucacaa

SEQ ID NO: 954050 - RNA, 19 nt, Artificial Sequence
  Description of Artificial Sequence: Synthetic oligonucleotide
  Sense strand starting at position 2687 of SEQ ID NO: 913788
cuaauaucacccgauagua

SEQ ID NO: 954051 - RNA, 19 nt, Artificial Sequence
  Description of Artificial Sequence: Synthetic oligonucleotide
  Antisense strand to SEQ ID NO: 954050
uacuaucgggugauauuag

SEQ ID NO: 954052 - RNA, 19 nt, Artificial Sequence
  Description of Artificial Sequence: Synthetic oligonucleotide
  Sense strand starting at position 183 of SEQ ID NO: 913788
cggauuuccuuugccuaca

SEQ ID NO: 954053 - RNA, 19 nt, Artificial Sequence
  Description of Artificial Sequence: Synthetic oligonucleotide
  Antisense strand to SEQ ID NO: 954052
uguaggcaaaggaaauccg

SEQ ID NO: 954054 - RNA, 19 nt, Artificial Sequence
  Description of Artificial Sequence: Synthetic oligonucleotide
  Sense strand starting at position 2720 of SEQ ID NO: 913788
guuugacauuaaucaugag

SEQ ID NO: 954055 - RNA, 19 nt, Artificial Sequence
  Description of Artificial Sequence: Synthetic oligonucleotide
  Antisense strand to SEQ ID NO: 954054
cucaugauuaaugucaaac

SEQ ID NO: 954056 - RNA, 19 nt, Artificial Sequence
  Description of Artificial Sequence: Synthetic oligonucleotide
  Sense strand starting at position 1167 of SEQ ID NO: 913788
guaguuuagcaagaaauau

SEQ ID NO: 954057 - RNA, 19 nt, Artificial Sequence
  Description of Artificial Sequence: Synthetic oligonucleotide
  Antisense strand to SEQ ID NO: 954056
auauuucuugcuaaacuac

SEQ ID NO: 954058 - RNA, 19 nt, Artificial Sequence
  Description of Artificial Sequence: Synthetic oligonucleotide
  Sense strand starting at position 3844 of SEQ ID NO: 913788
uuacgaaaugcuuacugga

SEQ ID NO: 954059 - RNA, 19 nt, Artificial Sequence
  Description of Artificial Sequence: Synthetic oligonucleotide
  Antisense strand to SEQ ID NO: 954058
uccaguaagcauuucguaa

SEQ ID NO: 954060 - RNA, 19 nt, Artificial Sequence
  Description of Artificial Sequence: Synthetic oligonucleotide
  Sense strand starting at position 1184 of SEQ ID NO: 913788
auaagagaacugugccaga

SEQ ID NO: 954061 - RNA, 19 nt, Artificial Sequence
  Description of Artificial Sequence: Synthetic oligonucleotide
  Antisense strand to SEQ ID NO: 954060
ucuggcacaguucucuuau

SEQ ID NO: 954062 - RNA, 19 nt, Artificial Sequence
  Description of Artificial Sequence: Synthetic oligonucleotide
  Sense strand starting at position 3827 of SEQ ID NO: 913788
aguuacugacuugaguauu

SEQ ID NO: 954063 - RNA, 19 nt, Artificial Sequence
  Description of Artificial Sequence: Synthetic oligonucleotide
  Antisense strand to SEQ ID NO: 954062
aauacucaagucaguaacu

SEQ ID NO: 954064 - RNA, 19 nt, Artificial Sequence
  Description of Artificial Sequence: Synthetic oligonucleotide
  Sense strand starting at position 3174 of SEQ ID NO: 913788
aaucuaguugaaggguaua

SEQ ID NO: 954065 - RNA, 19 nt, Artificial Sequence
  Description of Artificial Sequence: Synthetic oligonucleotide
  Antisense strand to SEQ ID NO: 954064
uauacccuucaacuagauu

SEQ ID NO: 954066 - RNA, 19 nt, Artificial Sequence
  Description of Artificial Sequence: Synthetic oligonucleotide
  Sense strand starting at position 2666 of SEQ ID NO: 913788
aagugaagauacuuagcau

SEQ ID NO: 954067 - RNA, 19 nt, Artificial Sequence
  Description of Artificial Sequence: Synthetic oligonucleotide
  Antisense strand to SEQ ID NO: 954066
augcuaaguaucuucacuu

SEQ ID NO: 954068 - RNA, 19 nt, Artificial Sequence
  Description of Artificial Sequence: Synthetic oligonucleotide
  Sense strand starting at position 2062 of SEQ ID NO: 913788
gcgggcuuuccaguggcua

SEQ ID NO: 954069 - RNA, 19 nt, Artificial Sequence
  Description of Artificial Sequence: Synthetic oligonucleotide
  Antisense strand to SEQ ID NO: 954068
uagccacuggaaagcccgc

SEQ ID NO: 954070 - RNA, 19 nt, Artificial Sequence
  Description of Artificial Sequence: Synthetic oligonucleotide
  Sense strand starting at position 1096 of SEQ ID NO: 913788
gagucuuggacauguaaga

SEQ ID NO: 954071 - RNA, 19 nt, Artificial Sequence
  Description of Artificial Sequence: Synthetic oligonucleotide
  Antisense strand to SEQ ID NO: 954070
ucuuacauguccaagacuc

SEQ ID NO: 954072 - RNA, 19 nt, Artificial Sequence
  Description of Artificial Sequence: Synthetic oligonucleotide
  Sense strand starting at position 1048 of SEQ ID NO: 913788
acaacuaaucgaugaguau

SEQ ID NO: 954073 - RNA, 19 nt, Artificial Sequence
  Description of Artificial Sequence: Synthetic oligonucleotide
  Antisense strand to SEQ ID NO: 954072
auacucaucgauuaguugu

SEQ ID NO: 954074 - RNA, 19 nt, Artificial Sequence
  Description of Artificial Sequence: Synthetic oligonucleotide
  Sense strand starting at position 1224 of SEQ ID NO: 913788
gcgaaucgagauggagaaa

SEQ ID NO: 954075 - RNA, 19 nt, Artificial Sequence
  Description of Artificial Sequence: Synthetic oligonucleotide
  Antisense strand to SEQ ID NO: 954074
uuucuccaucucgauucgc

SEQ ID NO: 954076 - RNA, 19 nt, Artificial Sequence
  Description of Artificial Sequence: Synthetic oligonucleotide
  Sense strand starting at position 1223 of SEQ ID NO: 913788
agcgaaucgagauggagaa

SEQ ID NO: 954077 - RNA, 19 nt, Artificial Sequence
  Description of Artificial Sequence: Synthetic oligonucleotide
  Antisense strand to SEQ ID NO: 954076
uucuccaucucgauucgcu

SEQ ID NO: 954078 - RNA, 19 nt, Artificial Sequence
  Description of Artificial Sequence: Synthetic oligonucleotide
  Sense strand starting at position 2843 of SEQ ID NO: 913788
aaauuacuuuagucgagag

SEQ ID NO: 954079 - RNA, 19 nt, Artificial Sequence
  Description of Artificial Sequence: Synthetic oligonucleotide
  Antisense strand to SEQ ID NO: 954078
cucucgacuaaaguaauuu

SEQ ID NO: 954080 - RNA, 19 nt, Artificial Sequence
  Description of Artificial Sequence: Synthetic oligonucleotide
  Sense strand starting at position 2567 of SEQ ID NO: 913788
ggauguuaguaucucaaag

SEQ ID NO: 954081 - RNA, 19 nt, Artificial Sequence
  Description of Artificial Sequence: Synthetic oligonucleotide
  Antisense strand to SEQ ID NO: 954080
cuuugagauacuaacaucc

SEQ ID NO: 954082 - RNA, 19 nt, Artificial Sequence
  Description of Artificial Sequence: Synthetic oligonucleotide
  Sense strand starting at position 2266 of SEQ ID NO: 913788
aauucuguccuugaggcaa

SEQ ID NO: 954083 - RNA, 19 nt, Artificial Sequence
  Description of Artificial Sequence: Synthetic oligonucleotide
  Antisense strand to SEQ ID NO: 954082
uugccucaaggacagaauu

SEQ ID NO: 954084 - RNA, 19 nt, Artificial Sequence
  Description of Artificial Sequence: Synthetic oligonucleotide
  Sense strand starting at position 754 of SEQ ID NO: 913788
cgacuuaugcagggauaaa

SEQ ID NO: 954085 - RNA, 19 nt, Artificial Sequence
  Description of Artificial Sequence: Synthetic oligonucleotide
  Antisense strand to SEQ ID NO: 954084
uuuaucccugcauaagucg

SEQ ID NO: 954086 - RNA, 19 nt, Artificial Sequence
  Description of Artificial Sequence: Synthetic oligonucleotide
  Sense strand starting at position 2847 of SEQ ID NO: 913788
uacuuuagucgagagucaa

SEQ ID NO: 954087 - RNA, 19 nt, Artificial Sequence
  Description of Artificial Sequence: Synthetic oligonucleotide
  Antisense strand to SEQ ID NO: 954086
uugacucucgacuaaagua

SEQ ID NO: 954088 - RNA, 19 nt, Artificial Sequence
  Description of Artificial Sequence: Synthetic oligonucleotide
  Sense strand starting at position 3846 of SEQ ID NO: 913788
acgaaaugcuuacuggaua

SEQ ID NO: 954089 - RNA, 19 nt, Artificial Sequence
  Description of Artificial Sequence: Synthetic oligonucleotide
  Antisense strand to SEQ ID NO: 954088
uauccaguaagcauuucgu

SEQ ID NO: 954090 - RNA, 19 nt, Artificial Sequence
  Description of Artificial Sequence: Synthetic oligonucleotide
  Sense strand starting at position 1709 of SEQ ID NO: 913788
accgaauuaguaugacuca

SEQ ID NO: 954091 - RNA, 19 nt, Artificial Sequence
  Description of Artificial Sequence: Synthetic oligonucleotide
  Antisense strand to SEQ ID NO: 954090
ugagucauacuaauucggu

SEQ ID NO: 954092 - RNA, 19 nt, Artificial Sequence
  Description of Artificial Sequence: Synthetic oligonucleotide
  Sense strand starting at position 20 of SEQ ID NO: 913788
ccuugagaguuucuaugau

SEQ ID NO: 954093 - RNA, 19 nt, Artificial Sequence
  Description of Artificial Sequence: Synthetic oligonucleotide
  Antisense strand to SEQ ID NO: 954092
aucauagaaacucucaagg

SEQ ID NO: 954094 - RNA, 19 nt, Artificial Sequence
  Description of Artificial Sequence: Synthetic oligonucleotide
  Sense strand starting at position 1335 of SEQ ID NO: 913788
guaggaguagucuggaaau

SEQ ID NO: 954095 - RNA, 19 nt, Artificial Sequence
  Description of Artificial Sequence: Synthetic oligonucleotide
  Antisense strand to SEQ ID NO: 954094
auuuccagacuacuccuac

SEQ ID NO: 954096 - RNA, 19 nt, Artificial Sequence
  Description of Artificial Sequence: Synthetic oligonucleotide
  Sense strand starting at position 252 of SEQ ID NO: 913788
ccuugaucaggcugaaauu

SEQ ID NO: 954097 - RNA, 19 nt, Artificial Sequence
  Description of Artificial Sequence: Synthetic oligonucleotide
  Antisense strand to SEQ ID NO: 954096
aauuucagccugaucaagg

SEQ ID NO: 954098 - RNA, 19 nt, Artificial Sequence
  Description of Artificial Sequence: Synthetic oligonucleotide
  Sense strand starting at position 1148 of SEQ ID NO: 913788
cgugaacuucuguaaacua

SEQ ID NO: 954099 - RNA, 19 nt, Artificial Sequence
  Description of Artificial Sequence: Synthetic oligonucleotide
  Antisense strand to SEQ ID NO: 954098
uaguuuacagaaguucacg

SEQ ID NO: 954100 - RNA, 19 nt, Artificial Sequence
  Description of Artificial Sequence: Synthetic oligonucleotide
  Sense strand starting at position 3003 of SEQ ID NO: 913788
auugauugcaugugagaau

SEQ ID NO: 954101 - RNA, 19 nt, Artificial Sequence
  Description of Artificial Sequence: Synthetic oligonucleotide
  Antisense strand to SEQ ID NO: 954100
auucucacaugcaaucaau

SEQ ID NO: 954102 - RNA, 19 nt, Artificial Sequence
  Description of Artificial Sequence: Synthetic oligonucleotide
  Sense strand starting at position 2696 of SEQ ID NO: 913788
cccgauaguauuugugcua

SEQ ID NO: 954103 - RNA, 19 nt, Artificial Sequence
  Description of Artificial Sequence: Synthetic oligonucleotide
  Antisense strand to SEQ ID NO: 954102
uagcacaaauacuaucggg

SEQ ID NO: 954104 - RNA, 19 nt, Artificial Sequence
  Description of Artificial Sequence: Synthetic oligonucleotide
  Sense strand starting at position 1163 of SEQ ID NO: 913788
acuaguaguuuagcaagaa

SEQ ID NO: 954105 - RNA, 19 nt, Artificial Sequence
  Description of Artificial Sequence: Synthetic oligonucleotide
  Antisense strand to SEQ ID NO: 954104
uucuugcuaaacuacuagu

SEQ ID NO: 954106 - RNA, 19 nt, Artificial Sequence
  Description of Artificial Sequence: Synthetic oligonucleotide
  Sense strand starting at position 751 of SEQ ID NO: 913788
cagcgacuuaugcagggau

SEQ ID NO: 954107 - RNA, 19 nt, Artificial Sequence
  Description of Artificial Sequence: Synthetic oligonucleotide
  Antisense strand to SEQ ID NO: 954106
aucccugcauaagucgcug

SEQ ID NO: 954108 - RNA, 19 nt, Artificial Sequence
  Description of Artificial Sequence: Synthetic oligonucleotide
  Sense strand starting at position 147 of SEQ ID NO: 913788
cccucacccuggucuagaa

SEQ ID NO: 954109 - RNA, 19 nt, Artificial Sequence
  Description of Artificial Sequence: Synthetic oligonucleotide
  Antisense strand to SEQ ID NO: 954108
uucuagaccagggugaggg

SEQ ID NO: 954110 - RNA, 19 nt, Artificial Sequence
  Description of Artificial Sequence: Synthetic oligonucleotide
  Sense strand starting at position 1005 of SEQ ID NO: 913788
uucugaauguggucuacaa

SEQ ID NO: 954111 - RNA, 19 nt, Artificial Sequence
  Description of Artificial Sequence: Synthetic oligonucleotide
  Antisense strand to SEQ ID NO: 954110
uuguagaccacauucagaa

SEQ ID NO: 954112 - RNA, 19 nt, Artificial Sequence
  Description of Artificial Sequence: Synthetic oligonucleotide
  Sense strand starting at position 2345 of SEQ ID NO: 913789
gccagagauuuguuucuuc

SEQ ID NO: 954113 - RNA, 19 nt, Artificial Sequence
  Description of Artificial Sequence: Synthetic oligonucleotide
  Antisense strand to SEQ ID NO: 954112
gaagaaacaaaucucuggc

SEQ ID NO: 954114 - RNA, 19 nt, Artificial Sequence
  Description of Artificial Sequence: Synthetic oligonucleotide
  Sense strand starting at position 511 of SEQ ID NO: 913789
agaccuuaacugcagaagu

SEQ ID NO: 954115 - RNA, 19 nt, Artificial Sequence
  Description of Artificial Sequence: Synthetic oligonucleotide
  Antisense strand to SEQ ID NO: 954114
acuucugcaguuaaggucu

SEQ ID NO: 954116 - RNA, 19 nt, Artificial Sequence
  Description of Artificial Sequence: Synthetic oligonucleotide
  Sense strand starting at position 3544 of SEQ ID NO: 913789
guaagaaaucaguaggcca

SEQ ID NO: 954117 - RNA, 19 nt, Artificial Sequence
  Description of Artificial Sequence: Synthetic oligonucleotide
  Antisense strand to SEQ ID NO: 954116
uggccuacugauuucuuac

SEQ ID NO: 954118 - RNA, 19 nt, Artificial Sequence
  Description of Artificial Sequence: Synthetic oligonucleotide
  Sense strand starting at position 2335 of SEQ ID NO: 913789
auuggucacagccagagau

SEQ ID NO: 954119 - RNA, 19 nt, Artificial Sequence
  Description of Artificial Sequence: Synthetic oligonucleotide
  Antisense strand to SEQ ID NO: 954118
aucucuggcugugaccaau

SEQ ID NO: 954120 - RNA, 19 nt, Artificial Sequence
  Description of Artificial Sequence: Synthetic oligonucleotide
  Sense strand starting at position 2612 of SEQ ID NO: 913789
gcugaagaaauguggaaca

SEQ ID NO: 954121 - RNA, 19 nt, Artificial Sequence
  Description of Artificial Sequence: Synthetic oligonucleotide
  Antisense strand to SEQ ID NO: 954120
uguuccacauuucuucagc

SEQ ID NO: 954122 - RNA, 19 nt, Artificial Sequence
  Description of Artificial Sequence: Synthetic oligonucleotide
  Sense strand starting at position 2529 of SEQ ID NO: 913789
uagcucuuuccugagagag

SEQ ID NO: 954123 - RNA, 19 nt, Artificial Sequence
  Description of Artificial Sequence: Synthetic oligonucleotide
  Antisense strand to SEQ ID NO: 954122
cucucucaggaaagagcua

SEQ ID NO: 954124 - RNA, 19 nt, Artificial Sequence
  Description of Artificial Sequence: Synthetic oligonucleotide
  Sense strand starting at position 2789 of SEQ ID NO: 913789
aucccagugcuggaggaau

SEQ ID NO: 954125 - RNA, 19 nt, Artificial Sequence
  Description of Artificial Sequence: Synthetic oligonucleotide
  Antisense strand to SEQ ID NO: 954124
auuccuccagcacugggau

SEQ ID NO: 954126 - RNA, 19 nt, Artificial Sequence
  Description of Artificial Sequence: Synthetic oligonucleotide
  Sense strand starting at position 513 of SEQ ID NO: 913789
accuuaacugcagaaguau

SEQ ID NO: 954127 - RNA, 19 nt, Artificial Sequence
  Description of Artificial Sequence: Synthetic oligonucleotide
  Antisense strand to SEQ ID NO: 954126
auacuucugcaguuaaggu

SEQ ID NO: 954128 - RNA, 19 nt, Artificial Sequence
  Description of Artificial Sequence: Synthetic oligonucleotide
  Sense strand starting at position 701 of SEQ ID NO: 913789
cuaggucugcuagauuaaa

SEQ ID NO: 954129 - RNA, 19 nt, Artificial Sequence
  Description of Artificial Sequence: Synthetic oligonucleotide
  Antisense strand to SEQ ID NO: 954128
uuuaaucuagcagaccuag

SEQ ID NO: 954130 - RNA, 19 nt, Artificial Sequence
  Description of Artificial Sequence: Synthetic oligonucleotide
  Sense strand starting at position 3564 of SEQ ID NO: 913789
gcaugauggcucgugcuua

SEQ ID NO: 954131 - RNA, 19 nt, Artificial Sequence
  Description of Artificial Sequence: Synthetic oligonucleotide
  Antisense strand to SEQ ID NO: 954130
uaagcacgagccaucaugc

SEQ ID NO: 954132 - RNA, 19 nt, Artificial Sequence
  Description of Artificial Sequence: Synthetic oligonucleotide
  Sense strand starting at position 466 of SEQ ID NO: 913789
aucucacuauucuugggau

SEQ ID NO: 954133 - RNA, 19 nt, Artificial Sequence
  Description of Artificial Sequence: Synthetic oligonucleotide
  Antisense strand to SEQ ID NO: 954132
aucccaagaauagugagau

SEQ ID NO: 954134 - RNA, 19 nt, Artificial Sequence
  Description of Artificial Sequence: Synthetic oligonucleotide
  Sense strand starting at position 3766 of SEQ ID NO: 913789
ccaagauuacacugagcua

SEQ ID NO: 954135 - RNA, 19 nt, Artificial Sequence
  Description of Artificial Sequence: Synthetic oligonucleotide
  Antisense strand to SEQ ID NO: 954134
uagcucaguguaaucuugg

SEQ ID NO: 954136 - RNA, 19 nt, Artificial Sequence
  Description of Artificial Sequence: Synthetic oligonucleotide
  Sense strand starting at position 468 of SEQ ID NO: 913789
cucacuauucuugggauua

SEQ ID NO: 954137 - RNA, 19 nt, Artificial Sequence
  Description of Artificial Sequence: Synthetic oligonucleotide
  Antisense strand to SEQ ID NO: 954136
uaaucccaagaauagugag

SEQ ID NO: 954138 - RNA, 19 nt, Artificial Sequence
  Description of Artificial Sequence: Synthetic oligonucleotide
  Sense strand starting at position 3877 of SEQ ID NO: 913789
aaagaaggaguuuguguga

SEQ ID NO: 954139 - RNA, 19 nt, Artificial Sequence
  Description of Artificial Sequence: Synthetic oligonucleotide
  Antisense strand to SEQ ID NO: 954138
ucacacaaacuccuucuuu

SEQ ID NO: 954140 - RNA, 19 nt, Artificial Sequence
  Description of Artificial Sequence: Synthetic oligonucleotide
  Sense strand starting at position 3348 of SEQ ID NO: 913789
ccgugaauacuacaguuaa

SEQ ID NO: 954141 - RNA, 19 nt, Artificial Sequence
  Description of Artificial Sequence: Synthetic oligonucleotide
  Antisense strand to SEQ ID NO: 954140
uuaacuguaguauucacgg

SEQ ID NO: 954142 - RNA, 19 nt, Artificial Sequence
  Description of Artificial Sequence: Synthetic oligonucleotide
  Sense strand starting at position 837 of SEQ ID NO: 913789
gugaaaguuggagguauag

SEQ ID NO: 954143 - RNA, 19 nt, Artificial Sequence
  Description of Artificial Sequence: Synthetic oligonucleotide
  Antisense strand to SEQ ID NO: 954142
cuauaccuccaacuuucac

SEQ ID NO: 954144 - RNA, 19 nt, Artificial Sequence
  Description of Artificial Sequence: Synthetic oligonucleotide
  Sense strand starting at position 3976 of SEQ ID NO: 913789
cagucugaucaaugaaggu

SEQ ID NO: 954145 - RNA, 19 nt, Artificial Sequence
  Description of Artificial Sequence: Synthetic oligonucleotide
  Antisense strand to SEQ ID NO: 954144
accuucauugaucagacug

SEQ ID NO: 954146 - RNA, 19 nt, Artificial Sequence
  Description of Artificial Sequence: Synthetic oligonucleotide
  Sense strand starting at position 3972 of SEQ ID NO: 913789
aguccagucugaucaauga

SEQ ID NO: 954147 - RNA, 19 nt, Artificial Sequence
  Description of Artificial Sequence: Synthetic oligonucleotide
  Antisense strand to SEQ ID NO: 954146
ucauugaucagacuggacu

SEQ ID NO: 954148 - RNA, 19 nt, Artificial Sequence
  Description of Artificial Sequence: Synthetic oligonucleotide
  Sense strand starting at position 784 of SEQ ID NO: 913789
ugccauuuguaguuguuaa

SEQ ID NO: 954149 - RNA, 19 nt, Artificial Sequence
  Description of Artificial Sequence: Synthetic oligonucleotide
  Antisense strand to SEQ ID NO: 954148
uuaacaacuacaaauggca

SEQ ID NO: 954150 - RNA, 19 nt, Artificial Sequence
  Description of Artificial Sequence: Synthetic oligonucleotide
  Sense strand starting at position 1463 of SEQ ID NO: 913789
acuucagacucguugagag

SEQ ID NO: 954151 - RNA, 19 nt, Artificial Sequence
  Description of Artificial Sequence: Synthetic oligonucleotide
  Antisense strand to SEQ ID NO: 954150
cucucaacgagucugaagu

SEQ ID NO: 954152 - RNA, 19 nt, Artificial Sequence
  Description of Artificial Sequence: Synthetic oligonucleotide
  Sense strand starting at position 785 of SEQ ID NO: 913789
gccauuuguaguuguuaac

SEQ ID NO: 954153 - RNA, 19 nt, Artificial Sequence
  Description of Artificial Sequence: Synthetic oligonucleotide
  Antisense strand to SEQ ID NO: 954152
guuaacaacuacaaauggc

SEQ ID NO: 954154 - RNA, 19 nt, Artificial Sequence
  Description of Artificial Sequence: Synthetic oligonucleotide
  Sense strand starting at position 3233 of SEQ ID NO: 913789
gaguucugaugacauuuaa

SEQ ID NO: 954155 - RNA, 19 nt, Artificial Sequence
  Description of Artificial Sequence: Synthetic oligonucleotide
  Antisense strand to SEQ ID NO: 954154
uuaaaugucaucagaacuc

SEQ ID NO: 954156 - RNA, 19 nt, Artificial Sequence
  Description of Artificial Sequence: Synthetic oligonucleotide
  Sense strand starting at position 581 of SEQ ID NO: 913789
acacuuucugucugauaca

SEQ ID NO: 954157 - RNA, 19 nt, Artificial Sequence
  Description of Artificial Sequence: Synthetic oligonucleotide
  Antisense strand to SEQ ID NO: 954156
uguaucagacagaaagugu

SEQ ID NO: 954158 - RNA, 19 nt, Artificial Sequence
  Description of Artificial Sequence: Synthetic oligonucleotide
  Sense strand starting at position 992 of SEQ ID NO: 913789
ccagccgaucuuuauauua

SEQ ID NO: 954159 - RNA, 19 nt, Artificial Sequence
  Description of Artificial Sequence: Synthetic oligonucleotide
  Antisense strand to SEQ ID NO: 954158
uaauauaaagaucggcugg

SEQ ID NO: 954160 - RNA, 19 nt, Artificial Sequence
  Description of Artificial Sequence: Synthetic oligonucleotide
  Sense strand starting at position 656 of SEQ ID NO: 913789
ugcgauuugucuuucggag

SEQ ID NO: 954161 - RNA, 19 nt, Artificial Sequence
  Description of Artificial Sequence: Synthetic oligonucleotide
  Antisense strand to SEQ ID NO: 954160
cuccgaaagacaaaucgca

SEQ ID NO: 954162 - RNA, 19 nt, Artificial Sequence
  Description of Artificial Sequence: Synthetic oligonucleotide
  Sense strand starting at position 2464 of SEQ ID NO: 913789
ggaaucauuccuggcccau

SEQ ID NO: 954163 - RNA, 19 nt, Artificial Sequence
  Description of Artificial Sequence: Synthetic oligonucleotide
  Antisense strand to SEQ ID NO: 954162
augggccaggaaugauucc

SEQ ID NO: 954164 - RNA, 19 nt, Artificial Sequence
  Description of Artificial Sequence: Synthetic oligonucleotide
  Sense strand starting at position 3343 of SEQ ID NO: 913789
uguuuccgugaauacuaca

SEQ ID NO: 954165 - RNA, 19 nt, Artificial Sequence
  Description of Artificial Sequence: Synthetic oligonucleotide
  Antisense strand to SEQ ID NO: 954164
uguaguauucacggaaaca

SEQ ID NO: 954166 - RNA, 19 nt, Artificial Sequence
  Description of Artificial Sequence: Synthetic oligonucleotide
  Sense strand starting at position 1488 of SEQ ID NO: 913789
agcgacacaucacuuugau

SEQ ID NO: 954167 - RNA, 19 nt, Artificial Sequence
  Description of Artificial Sequence: Synthetic oligonucleotide
  Antisense strand to SEQ ID NO: 954166
aucaaagugaugugucgcu

SEQ ID NO: 954168 - RNA, 19 nt, Artificial Sequence
  Description of Artificial Sequence: Synthetic oligonucleotide
  Sense strand starting at position 921 of SEQ ID NO: 913789
cugguuauguuuccauaaa

SEQ ID NO: 954169 - RNA, 19 nt, Artificial Sequence
  Description of Artificial Sequence: Synthetic oligonucleotide
  Antisense strand to SEQ ID NO: 954168
uuuauggaaacauaaccag

SEQ ID NO: 954170 - RNA, 19 nt, Artificial Sequence
  Description of Artificial Sequence: Synthetic oligonucleotide
  Sense strand starting at position 2820 of SEQ ID NO: 913789
gccuaaagauggucuuuau

SEQ ID NO: 954171 - RNA, 19 nt, Artificial Sequence
  Description of Artificial Sequence: Synthetic oligonucleotide
  Antisense strand to SEQ ID NO: 954170
auaaagaccaucuuuaggc

SEQ ID NO: 954172 - RNA, 19 nt, Artificial Sequence
  Description of Artificial Sequence: Synthetic oligonucleotide
  Sense strand starting at position 3908 of SEQ ID NO: 913789
guaguauguccuugagaga

SEQ ID NO: 954173 - RNA, 19 nt, Artificial Sequence
  Description of Artificial Sequence: Synthetic oligonucleotide
  Antisense strand to SEQ ID NO: 954172
ucucucaaggacauacuac

SEQ ID NO: 954174 - RNA, 19 nt, Artificial Sequence
  Description of Artificial Sequence: Synthetic oligonucleotide
  Sense strand starting at position 239 of SEQ ID NO: 913789
guagaaaguuaguucuacu

SEQ ID NO: 954175 - RNA, 19 nt, Artificial Sequence
  Description of Artificial Sequence: Synthetic oligonucleotide
  Antisense strand to SEQ ID NO: 954174
aguagaacuaacuuucuac

SEQ ID NO: 954176 - RNA, 19 nt, Artificial Sequence
  Description of Artificial Sequence: Synthetic oligonucleotide
  Sense strand starting at position 2784 of SEQ ID NO: 913789
caucaaucccagugcugga

SEQ ID NO: 954177 - RNA, 19 nt, Artificial Sequence
  Description of Artificial Sequence: Synthetic oligonucleotide
  Antisense strand to SEQ ID NO: 954176
uccagcacugggauugaug

SEQ ID NO: 954178 - RNA, 19 nt, Artificial Sequence
  Description of Artificial Sequence: Synthetic oligonucleotide
  Sense strand starting at position 2524 of SEQ ID NO: 913789
aaggguagcucuuuccuga

SEQ ID NO: 954179 - RNA, 19 nt, Artificial Sequence
  Description of Artificial Sequence: Synthetic oligonucleotide
  Antisense strand to SEQ ID NO: 954178
ucaggaaagagcuacccuu

SEQ ID NO: 954180 - RNA, 19 nt, Artificial Sequence
  Description of Artificial Sequence: Synthetic oligonucleotide
  Sense strand starting at position 1261 of SEQ ID NO: 913789
gguuaucugaaccggcaaa

SEQ ID NO: 954181 - RNA, 19 nt, Artificial Sequence
  Description of Artificial Sequence: Synthetic oligonucleotide
  Antisense strand to SEQ ID NO: 954180
uuugccgguucagauaacc

SEQ ID NO: 954182 - RNA, 19 nt, Artificial Sequence
  Description of Artificial Sequence: Synthetic oligonucleotide
  Sense strand starting at position 427 of SEQ ID NO: 913789
acucaacucuaguuauguu

SEQ ID NO: 954183 - RNA, 19 nt, Artificial Sequence
  Description of Artificial Sequence: Synthetic oligonucleotide
  Antisense strand to SEQ ID NO: 954182
aacauaacuagaguugagu

SEQ ID NO: 954184 - RNA, 19 nt, Artificial Sequence
  Description of Artificial Sequence: Synthetic oligonucleotide
  Sense strand starting at position 398 of SEQ ID NO: 913789
cucacauucuggucucacu

SEQ ID NO: 954185 - RNA, 19 nt, Artificial Sequence
  Description of Artificial Sequence: Synthetic oligonucleotide
  Antisense strand to SEQ ID NO: 954184
agugagaccagaaugugag

SEQ ID NO: 954186 - RNA, 19 nt, Artificial Sequence
  Description of Artificial Sequence: Synthetic oligonucleotide
  Sense strand starting at position 624 of SEQ ID NO: 913789
cuaggcuguuaucccauaa

SEQ ID NO: 954187 - RNA, 19 nt, Artificial Sequence
  Description of Artificial Sequence: Synthetic oligonucleotide
  Antisense strand to SEQ ID NO: 954186
uuaugggauaacagccuag

SEQ ID NO: 954188 - RNA, 19 nt, Artificial Sequence
  Description of Artificial Sequence: Synthetic oligonucleotide
  Sense strand starting at position 3907 of SEQ ID NO: 913789
uguaguauguccuugagag

SEQ ID NO: 954189 - RNA, 19 nt, Artificial Sequence
  Description of Artificial Sequence: Synthetic oligonucleotide
  Antisense strand to SEQ ID NO: 954188
cucucaaggacauacuaca

SEQ ID NO: 954190 - RNA, 19 nt, Artificial Sequence
  Description of Artificial Sequence: Synthetic oligonucleotide
  Sense strand starting at position 1057 of SEQ ID NO: 913789
ccaacaguauccguaauug

SEQ ID NO: 954191 - RNA, 19 nt, Artificial Sequence
  Description of Artificial Sequence: Synthetic oligonucleotide
  Antisense strand to SEQ ID NO: 954190
caauuacggauacuguugg

SEQ ID NO: 954192 - RNA, 19 nt, Artificial Sequence
  Description of Artificial Sequence: Synthetic oligonucleotide
  Sense strand starting at position 3281 of SEQ ID NO: 913790
accauaaagcauuaguuga

SEQ ID NO: 954193 - RNA, 19 nt, Artificial Sequence
  Description of Artificial Sequence: Synthetic oligonucleotide
  Antisense strand to SEQ ID NO: 954192
ucaacuaaugcuuuauggu

SEQ ID NO: 954194 - RNA, 19 nt, Artificial Sequence
  Description of Artificial Sequence: Synthetic oligonucleotide
  Sense strand starting at position 3263 of SEQ ID NO: 913790
ccuaauuuauaugaaggga

SEQ ID NO: 954195 - RNA, 19 nt, Artificial Sequence
  Description of Artificial Sequence: Synthetic oligonucleotide
  Antisense strand to SEQ ID NO: 954194
ucccuucauauaaauuagg

SEQ ID NO: 954196 - RNA, 19 nt, Artificial Sequence
  Description of Artificial Sequence: Synthetic oligonucleotide
  Sense strand starting at position 3222 of SEQ ID NO: 913790
ggauuucuaaggcgcuaca

SEQ ID NO: 954197 - RNA, 19 nt, Artificial Sequence
  Description of Artificial Sequence: Synthetic oligonucleotide
  Antisense strand to SEQ ID NO: 954196
uguagcgccuuagaaaucc

SEQ ID NO: 954198 - RNA, 19 nt, Artificial Sequence
  Description of Artificial Sequence: Synthetic oligonucleotide
  Sense strand starting at position 3351 of SEQ ID NO: 913790
ucagaaugauaucugaugu

SEQ ID NO: 954199 - RNA, 19 nt, Artificial Sequence
  Description of Artificial Sequence: Synthetic oligonucleotide
  Antisense strand to SEQ ID NO: 954198
acaucagauaucauucuga

SEQ ID NO: 954200 - RNA, 19 nt, Artificial Sequence
  Description of Artificial Sequence: Synthetic oligonucleotide
  Sense strand starting at position 3920 of SEQ ID NO: 913790
gguccuaauccugaccuua

SEQ ID NO: 954201 - RNA, 19 nt, Artificial Sequence
  Description of Artificial Sequence: Synthetic oligonucleotide
  Antisense strand to SEQ ID NO: 954200
uaaggucaggauuaggacc

SEQ ID NO: 954202 - RNA, 19 nt, Artificial Sequence
  Description of Artificial Sequence: Synthetic oligonucleotide
  Sense strand starting at position 1349 of SEQ ID NO: 913790
agaugaguaguguggaaga

SEQ ID NO: 954203 - RNA, 19 nt, Artificial Sequence
  Description of Artificial Sequence: Synthetic oligonucleotide
  Antisense strand to SEQ ID NO: 954202
ucuuccacacuacucaucu

SEQ ID NO: 954204 - RNA, 19 nt, Artificial Sequence
  Description of Artificial Sequence: Synthetic oligonucleotide
  Sense strand starting at position 3931 of SEQ ID NO: 913790
ugaccuuaaucccuuugga

SEQ ID NO: 954205 - RNA, 19 nt, Artificial Sequence
  Description of Artificial Sequence: Synthetic oligonucleotide
  Antisense strand to SEQ ID NO: 954204
uccaaagggauuaagguca

SEQ ID NO: 954206 - RNA, 19 nt, Artificial Sequence
  Description of Artificial Sequence: Synthetic oligonucleotide
  Sense strand starting at position 264 of SEQ ID NO: 913790
ugacauauacuaugguuau

SEQ ID NO: 954207 - RNA, 19 nt, Artificial Sequence
  Description of Artificial Sequence: Synthetic oligonucleotide
  Antisense strand to SEQ ID NO: 954206
auaaccauaguauauguca

SEQ ID NO: 954208 - RNA, 19 nt, Artificial Sequence
  Description of Artificial Sequence: Synthetic oligonucleotide
  Sense strand starting at position 1480 of SEQ ID NO: 913790
gcgucuaguauugcaguau

SEQ ID NO: 954209 - RNA, 19 nt, Artificial Sequence
  Description of Artificial Sequence: Synthetic oligonucleotide
  Antisense strand to SEQ ID NO: 954208
auacugcaauacuagacgc

SEQ ID NO: 954210 - RNA, 19 nt, Artificial Sequence
  Description of Artificial Sequence: Synthetic oligonucleotide
  Sense strand starting at position 1128 of SEQ ID NO: 913790
gcgacaauccuacaaguag

SEQ ID NO: 954211 - RNA, 19 nt, Artificial Sequence
  Description of Artificial Sequence: Synthetic oligonucleotide
  Antisense strand to SEQ ID NO: 954210
cuacuuguaggauugucgc

SEQ ID NO: 954212 - RNA, 19 nt, Artificial Sequence
  Description of Artificial Sequence: Synthetic oligonucleotide
  Sense strand starting at position 3183 of SEQ ID NO: 913790
ggcugugucguagcaauuc

SEQ ID NO: 954213 - RNA, 19 nt, Artificial Sequence
  Description of Artificial Sequence: Synthetic oligonucleotide
  Antisense strand to SEQ ID NO: 954212
gaauugcuacgacacagcc

SEQ ID NO: 954214 - RNA, 19 nt, Artificial Sequence
  Description of Artificial Sequence: Synthetic oligonucleotide
  Sense strand starting at position 3630 of SEQ ID NO: 913790
ugcaguggugcucugcgaa

SEQ ID NO: 954215 - RNA, 19 nt, Artificial Sequence
  Description of Artificial Sequence: Synthetic oligonucleotide
  Antisense strand to SEQ ID NO: 954214
uucgcagagcaccacugca

SEQ ID NO: 954216 - RNA, 19 nt, Artificial Sequence
  Description of Artificial Sequence: Synthetic oligonucleotide
  Sense strand starting at position 1446 of SEQ ID NO: 913790
guaagagcugaugacuguu

SEQ ID NO: 954217 - RNA, 19 nt, Artificial Sequence
  Description of Artificial Sequence: Synthetic oligonucleotide
  Antisense strand to SEQ ID NO: 954216
aacagucaucagcucuuac

SEQ ID NO: 954218 - RNA, 19 nt, Artificial Sequence
  Description of Artificial Sequence: Synthetic oligonucleotide
  Sense strand starting at position 1354 of SEQ ID NO: 913790
aguaguguggaagagcuua

SEQ ID NO: 954219 - RNA, 19 nt, Artificial Sequence
  Description of Artificial Sequence: Synthetic oligonucleotide
  Antisense strand to SEQ ID NO: 954218
uaagcucuuccacacuacu

SEQ ID NO: 954220 - RNA, 19 nt, Artificial Sequence
  Description of Artificial Sequence: Synthetic oligonucleotide
  Sense strand starting at position 955 of SEQ ID NO: 913790
caguccaaucuccggagaa

SEQ ID NO: 954221 - RNA, 19 nt, Artificial Sequence
  Description of Artificial Sequence: Synthetic oligonucleotide
  Antisense strand to SEQ ID NO: 954220
uucuccggagauuggacug

SEQ ID NO: 954222 - RNA, 19 nt, Artificial Sequence
  Description of Artificial Sequence: Synthetic oligonucleotide
  Sense strand starting at position 3572 of SEQ ID NO: 913790
augugauggugagcaaaua

SEQ ID NO: 954223 - RNA, 19 nt, Artificial Sequence
  Description of Artificial Sequence: Synthetic oligonucleotide
  Antisense strand to SEQ ID NO: 954222
uauuugcucaccaucacau

SEQ ID NO: 954224 - RNA, 19 nt, Artificial Sequence
  Description of Artificial Sequence: Synthetic oligonucleotide
  Sense strand starting at position 3364 of SEQ ID NO: 913790
ugaugugaauuagccacau

SEQ ID NO: 954225 - RNA, 19 nt, Artificial Sequence
  Description of Artificial Sequence: Synthetic oligonucleotide
  Antisense strand to SEQ ID NO: 954224
auguggcuaauucacauca

SEQ ID NO: 954226 - RNA, 19 nt, Artificial Sequence
  Description of Artificial Sequence: Synthetic oligonucleotide
  Sense strand starting at position 250 of SEQ ID NO: 913790
uuguguuauguugaugaca

SEQ ID NO: 954227 - RNA, 19 nt, Artificial Sequence
  Description of Artificial Sequence: Synthetic oligonucleotide
  Antisense strand to SEQ ID NO: 954226
ugucaucaacauaacacaa

SEQ ID NO: 954228 - RNA, 19 nt, Artificial Sequence
  Description of Artificial Sequence: Synthetic oligonucleotide
  Sense strand starting at position 1449 of SEQ ID NO: 913790
agagcugaugacuguuacu

SEQ ID NO: 954229 - RNA, 19 nt, Artificial Sequence
  Description of Artificial Sequence: Synthetic oligonucleotide
  Antisense strand to SEQ ID NO: 954228
aguaacagucaucagcucu

SEQ ID NO: 954230 - RNA, 19 nt, Artificial Sequence
  Description of Artificial Sequence: Synthetic oligonucleotide
  Sense strand starting at position 1035 of SEQ ID NO: 913790
guguaaauuccauagugua

SEQ ID NO: 954231 - RNA, 19 nt, Artificial Sequence
  Description of Artificial Sequence: Synthetic oligonucleotide
  Antisense strand to SEQ ID NO: 954230
uacacuauggaauuuacac

SEQ ID NO: 954232 - RNA, 19 nt, Artificial Sequence
  Description of Artificial Sequence: Synthetic oligonucleotide
  Sense strand starting at position 513 of SEQ ID NO: 913790
ggauuuagaugaggucaca

SEQ ID NO: 954233 - RNA, 19 nt, Artificial Sequence
  Description of Artificial Sequence: Synthetic oligonucleotide
  Antisense strand to SEQ ID NO: 954232
ugugaccucaucuaaaucc

SEQ ID NO: 954234 - RNA, 19 nt, Artificial Sequence
  Description of Artificial Sequence: Synthetic oligonucleotide
  Sense strand starting at position 2704 of SEQ ID NO: 913790
cccuuuaagauucgaucga

SEQ ID NO: 954235 - RNA, 19 nt, Artificial Sequence
  Description of Artificial Sequence: Synthetic oligonucleotide
  Antisense strand to SEQ ID NO: 954234
ucgaucgaaucuuaaaggg

SEQ ID NO: 954236 - RNA, 19 nt, Artificial Sequence
  Description of Artificial Sequence: Synthetic oligonucleotide
  Sense strand starting at position 1454 of SEQ ID NO: 913790
ugaugacuguuacuggcau

SEQ ID NO: 954237 - RNA, 19 nt, Artificial Sequence
  Description of Artificial Sequence: Synthetic oligonucleotide
  Antisense strand to SEQ ID NO: 954236
augccaguaacagucauca

SEQ ID NO: 954238 - RNA, 19 nt, Artificial Sequence
  Description of Artificial Sequence: Synthetic oligonucleotide
  Sense strand starting at position 2708 of SEQ ID NO: 913790
uuaagauucgaucgaguca

SEQ ID NO: 954239 - RNA, 19 nt, Artificial Sequence
  Description of Artificial Sequence: Synthetic oligonucleotide
  Antisense strand to SEQ ID NO: 954238
ugacucgaucgaaucuuaa

SEQ ID NO: 954240 - RNA, 19 nt, Artificial Sequence
  Description of Artificial Sequence: Synthetic oligonucleotide
  Sense strand starting at position 3461 of SEQ ID NO: 913790
aggucacuguaguugaauu

SEQ ID NO: 954241 - RNA, 19 nt, Artificial Sequence
  Description of Artificial Sequence: Synthetic oligonucleotide
  Antisense strand to SEQ ID NO: 954240
aauucaacuacagugaccu

SEQ ID NO: 954242 - RNA, 19 nt, Artificial Sequence
  Description of Artificial Sequence: Synthetic oligonucleotide
  Sense strand starting at position 3486 of SEQ ID NO: 913790
uguauagauugucccacuu

SEQ ID NO: 954243 - RNA, 19 nt, Artificial Sequence
  Description of Artificial Sequence: Synthetic oligonucleotide
  Antisense strand to SEQ ID NO: 954242
aagugggacaaucuauaca

SEQ ID NO: 954244 - RNA, 19 nt, Artificial Sequence
  Description of Artificial Sequence: Synthetic oligonucleotide
  Sense strand starting at position 3713 of SEQ ID NO: 913790
cuuaguuucuaaguugauc

SEQ ID NO: 954245 - RNA, 19 nt, Artificial Sequence
  Description of Artificial Sequence: Synthetic oligonucleotide
  Antisense strand to SEQ ID NO: 954244
gaucaacuuagaaacuaag

SEQ ID NO: 954246 - RNA, 19 nt, Artificial Sequence
  Description of Artificial Sequence: Synthetic oligonucleotide
  Sense strand starting at position 1628 of SEQ ID NO: 913790
ggcucucgugcgcugagua

SEQ ID NO: 954247 - RNA, 19 nt, Artificial Sequence
  Description of Artificial Sequence: Synthetic oligonucleotide
  Antisense strand to SEQ ID NO: 954246
uacucagcgcacgagagcc

SEQ ID NO: 954248 - RNA, 19 nt, Artificial Sequence
  Description of Artificial Sequence: Synthetic oligonucleotide
  Sense strand starting at position 2799 of SEQ ID NO: 913790
ccuagaugccucugagggu

SEQ ID NO: 954249 - RNA, 19 nt, Artificial Sequence
  Description of Artificial Sequence: Synthetic oligonucleotide
  Antisense strand to SEQ ID NO: 954248
acccucagaggcaucuagg

SEQ ID NO: 954250 - RNA, 19 nt, Artificial Sequence
  Description of Artificial Sequence: Synthetic oligonucleotide
  Sense strand starting at position 3483 of SEQ ID NO: 913790
aguuguauagauuguccca

SEQ ID NO: 954251 - RNA, 19 nt, Artificial Sequence
  Description of Artificial Sequence: Synthetic oligonucleotide
  Antisense strand to SEQ ID NO: 954250
ugggacaaucuauacaacu

SEQ ID NO: 954252 - RNA, 19 nt, Artificial Sequence
  Description of Artificial Sequence: Synthetic oligonucleotide
  Sense strand starting at position 340 of SEQ ID NO: 913790
uccugauauugguauuuac

SEQ ID NO: 954253 - RNA, 19 nt, Artificial Sequence
  Description of Artificial Sequence: Synthetic oligonucleotide
  Antisense strand to SEQ ID NO: 954252
guaaauaccaauaucagga

SEQ ID NO: 954254 - RNA, 19 nt, Artificial Sequence
  Description of Artificial Sequence: Synthetic oligonucleotide
  Sense strand starting at position 3469 of SEQ ID NO: 913790
guaguugaauucucaguug

SEQ ID NO: 954255 - RNA, 19 nt, Artificial Sequence
  Description of Artificial Sequence: Synthetic oligonucleotide
  Antisense strand to SEQ ID NO: 954254
caacugagaauucaacuac

SEQ ID NO: 954256 - RNA, 19 nt, Artificial Sequence
  Description of Artificial Sequence: Synthetic oligonucleotide
  Sense strand starting at position 1043 of SEQ ID NO: 913790
uccauaguguagccauaua

SEQ ID NO: 954257 - RNA, 19 nt, Artificial Sequence
  Description of Artificial Sequence: Synthetic oligonucleotide
  Antisense strand to SEQ ID NO: 954256
uauauggcuacacuaugga

SEQ ID NO: 954258 - RNA, 19 nt, Artificial Sequence
  Description of Artificial Sequence: Synthetic oligonucleotide
  Sense strand starting at position 2532 of SEQ ID NO: 913790
ugaguucccucagcuaauc

SEQ ID NO: 954259 - RNA, 19 nt, Artificial Sequence
  Description of Artificial Sequence: Synthetic oligonucleotide
  Antisense strand to SEQ ID NO: 954258
gauuagcugagggaacuca

SEQ ID NO: 954260 - RNA, 19 nt, Artificial Sequence
  Description of Artificial Sequence: Synthetic oligonucleotide
  Sense strand starting at position 1229 of SEQ ID NO: 913790
ggcccugcuugacuuuaaa

SEQ ID NO: 954261 - RNA, 19 nt, Artificial Sequence
  Description of Artificial Sequence: Synthetic oligonucleotide
  Antisense strand to SEQ ID NO: 954260
uuuaaagucaagcagggcc

SEQ ID NO: 954262 - RNA, 19 nt, Artificial Sequence
  Description of Artificial Sequence: Synthetic oligonucleotide
  Sense strand starting at position 2681 of SEQ ID NO: 913790
cccuguagugcuggacaga

SEQ ID NO: 954263 - RNA, 19 nt, Artificial Sequence
  Description of Artificial Sequence: Synthetic oligonucleotide
  Antisense strand to SEQ ID NO: 954262
ucuguccagcacuacaggg

SEQ ID NO: 954264 - RNA, 19 nt, Artificial Sequence
  Description of Artificial Sequence: Synthetic oligonucleotide
  Sense strand starting at position 3603 of SEQ ID NO: 913790
gucaguuuccugggacagu

SEQ ID NO: 954265 - RNA, 19 nt, Artificial Sequence
  Description of Artificial Sequence: Synthetic oligonucleotide
  Antisense strand to SEQ ID NO: 954264
acugucccaggaaacugac

SEQ ID NO: 954266 - RNA, 19 nt, Artificial Sequence
  Description of Artificial Sequence: Synthetic oligonucleotide
  Sense strand starting at position 3472 of SEQ ID NO: 913790
guugaauucucaguuguau

SEQ ID NO: 954267 - RNA, 19 nt, Artificial Sequence
  Description of Artificial Sequence: Synthetic oligonucleotide
  Antisense strand to SEQ ID NO: 954266
auacaacugagaauucaac

SEQ ID NO: 954268 - RNA, 19 nt, Artificial Sequence
  Description of Artificial Sequence: Synthetic oligonucleotide
  Sense strand starting at position 917 of SEQ ID NO: 913790
uuccaauugccucaguguu

SEQ ID NO: 954269 - RNA, 19 nt, Artificial Sequence
  Description of Artificial Sequence: Synthetic oligonucleotide
  Antisense strand to SEQ ID NO: 954268
aacacugaggcaauuggaa

SEQ ID NO: 954270 - RNA, 19 nt, Artificial Sequence
  Description of Artificial Sequence: Synthetic oligonucleotide
  Sense strand starting at position 218 of SEQ ID NO: 913790
uguauuagaugauaaagag

SEQ ID NO: 954271 - RNA, 19 nt, Artificial Sequence
  Description of Artificial Sequence: Synthetic oligonucleotide
  Antisense strand to SEQ ID NO: 954270
cucuuuaucaucuaauaca

SEQ ID NO: 954272 - RNA, 19 nt, Artificial Sequence
  Description of Artificial Sequence: Synthetic oligonucleotide
  Sense strand starting at position 3853 of SEQ ID NO: 913791
ggaaccugauuagucauaa

SEQ ID NO: 954273 - RNA, 19 nt, Artificial Sequence
  Description of Artificial Sequence: Synthetic oligonucleotide
  Antisense strand to SEQ ID NO: 954272
uuaugacuaaucagguucc

SEQ ID NO: 954274 - RNA, 19 nt, Artificial Sequence
  Description of Artificial Sequence: Synthetic oligonucleotide
  Sense strand starting at position 3286 of SEQ ID NO: 913791
gaagguuaugcagagugaa

SEQ ID NO: 954275 - RNA, 19 nt, Artificial Sequence
  Description of Artificial Sequence: Synthetic oligonucleotide
  Antisense strand to SEQ ID NO: 954274
uucacucugcauaaccuuc

SEQ ID NO: 954276 - RNA, 19 nt, Artificial Sequence
  Description of Artificial Sequence: Synthetic oligonucleotide
  Sense strand starting at position 1638 of SEQ ID NO: 913791
ccaguacuccuccagagac

SEQ ID NO: 954277 - RNA, 19 nt, Artificial Sequence
  Description of Artificial Sequence: Synthetic oligonucleotide
  Antisense strand to SEQ ID NO: 954276
gucucuggaggaguacugg

SEQ ID NO: 954278 - RNA, 19 nt, Artificial Sequence
  Description of Artificial Sequence: Synthetic oligonucleotide
  Sense strand starting at position 3815 of SEQ ID NO: 913791
cggcacuaugaagauuaua

SEQ ID NO: 954279 - RNA, 19 nt, Artificial Sequence
  Description of Artificial Sequence: Synthetic oligonucleotide
  Antisense strand to SEQ ID NO: 954278
uauaaucuucauagugccg

SEQ ID NO: 954280 - RNA, 19 nt, Artificial Sequence
  Description of Artificial Sequence: Synthetic oligonucleotide
  Sense strand starting at position 2270 of SEQ ID NO: 913791
ggaggaguccgcgcuguga

SEQ ID NO: 954281 - RNA, 19 nt, Artificial Sequence
  Description of Artificial Sequence: Synthetic oligonucleotide
  Antisense strand to SEQ ID NO: 954280
ucacagcgcggacuccucc

SEQ ID NO: 954282 - RNA, 19 nt, Artificial Sequence
  Description of Artificial Sequence: Synthetic oligonucleotide
  Sense strand starting at position 500 of SEQ ID NO: 913791
cgaagcucucggagaguuu

SEQ ID NO: 954283 - RNA, 19 nt, Artificial Sequence
  Description of Artificial Sequence: Synthetic oligonucleotide
  Antisense strand to SEQ ID NO: 954282
aaacucuccgagagcuucg

SEQ ID NO: 954284 - RNA, 19 nt, Artificial Sequence
  Description of Artificial Sequence: Synthetic oligonucleotide
  Sense strand starting at position 1126 of SEQ ID NO: 913791
ggaaauguuaggcauucca

SEQ ID NO: 954285 - RNA, 19 nt, Artificial Sequence
  Description of Artificial Sequence: Synthetic oligonucleotide
  Antisense strand to SEQ ID NO: 954284
uggaaugccuaacauuucc

SEQ ID NO: 954286 - RNA, 19 nt, Artificial Sequence
  Description of Artificial Sequence: Synthetic oligonucleotide
  Sense strand starting at position 1161 of SEQ ID NO: 913791
uuggaaauggucuacaguu

SEQ ID NO: 954287 - RNA, 19 nt, Artificial Sequence
  Description of Artificial Sequence: Synthetic oligonucleotide
  Antisense strand to SEQ ID NO: 954286
aacuguagaccauuuccaa

SEQ ID NO: 954288 - RNA, 19 nt, Artificial Sequence
  Description of Artificial Sequence: Synthetic oligonucleotide
  Sense strand starting at position 761 of SEQ ID NO: 913791
gccucuauuugaucuggca

SEQ ID NO: 954289 - RNA, 19 nt, Artificial Sequence
  Description of Artificial Sequence: Synthetic oligonucleotide
  Antisense strand to SEQ ID NO: 954288
ugccagaucaaauagaggc

SEQ ID NO: 954290 - RNA, 19 nt, Artificial Sequence
  Description of Artificial Sequence: Synthetic oligonucleotide
  Sense strand starting at position 3514 of SEQ ID NO: 913791
ggguucucucaguaauuag

SEQ ID NO: 954291 - RNA, 19 nt, Artificial Sequence
  Description of Artificial Sequence: Synthetic oligonucleotide
  Antisense strand to SEQ ID NO: 954290
cuaauuacugagagaaccc

SEQ ID NO: 954292 - RNA, 19 nt, Artificial Sequence
  Description of Artificial Sequence: Synthetic oligonucleotide
  Sense strand starting at position 3387 of SEQ ID NO: 913791
uuaacucuguuuccaggaa

SEQ ID NO: 954293 - RNA, 19 nt, Artificial Sequence
  Description of Artificial Sequence: Synthetic oligonucleotide
  Antisense strand to SEQ ID NO: 954292
uuccuggaaacagaguuaa

SEQ ID NO: 954294 - RNA, 19 nt, Artificial Sequence
  Description of Artificial Sequence: Synthetic oligonucleotide
  Sense strand starting at position 3231 of SEQ ID NO: 913791
gugagucuggaguggagaa

SEQ ID NO: 954295 - RNA, 19 nt, Artificial Sequence
  Description of Artificial Sequence: Synthetic oligonucleotide
  Antisense strand to SEQ ID NO: 954294
uucuccacuccagacucac

SEQ ID NO: 954296 - RNA, 19 nt, Artificial Sequence
  Description of Artificial Sequence: Synthetic oligonucleotide
  Sense strand starting at position 1691 of SEQ ID NO: 913791
ucuggagcuccuggaagau

SEQ ID NO: 954297 - RNA, 19 nt, Artificial Sequence
  Description of Artificial Sequence: Synthetic oligonucleotide
  Antisense strand to SEQ ID NO: 954296
aucuuccaggagcuccaga

SEQ ID NO: 954298 - RNA, 19 nt, Artificial Sequence
  Description of Artificial Sequence: Synthetic oligonucleotide
  Sense strand starting at position 2855 of SEQ ID NO: 913791
gagaaacguguuuaucuug

SEQ ID NO: 954299 - RNA, 19 nt, Artificial Sequence
  Description of Artificial Sequence: Synthetic oligonucleotide
  Antisense strand to SEQ ID NO: 954298
caagauaaacacguuucuc

SEQ ID NO: 954300 - RNA, 19 nt, Artificial Sequence
  Description of Artificial Sequence: Synthetic oligonucleotide
  Sense strand starting at position 501 of SEQ ID NO: 913791
gaagcucucggagaguuua

SEQ ID NO: 954301 - RNA, 19 nt, Artificial Sequence
  Description of Artificial Sequence: Synthetic oligonucleotide
  Antisense strand to SEQ ID NO: 954300
uaaacucuccgagagcuuc

SEQ ID NO: 954302 - RNA, 19 nt, Artificial Sequence
  Description of Artificial Sequence: Synthetic oligonucleotide
  Sense strand starting at position 3391 of SEQ ID NO: 913791
cucuguuuccaggaaugca

SEQ ID NO: 954303 - RNA, 19 nt, Artificial Sequence
  Description of Artificial Sequence: Synthetic oligonucleotide
  Antisense strand to SEQ ID NO: 954302
ugcauuccuggaaacagag

SEQ ID NO: 954304 - RNA, 19 nt, Artificial Sequence
  Description of Artificial Sequence: Synthetic oligonucleotide
  Sense strand starting at position 3069 of SEQ ID NO: 913791
acugaauuguaacuguauu

SEQ ID NO: 954305 - RNA, 19 nt, Artificial Sequence
  Description of Artificial Sequence: Synthetic oligonucleotide
  Antisense strand to SEQ ID NO: 954304
aauacaguuacaauucagu

SEQ ID NO: 954306 - RNA, 19 nt, Artificial Sequence
  Description of Artificial Sequence: Synthetic oligonucleotide
  Sense strand starting at position 85 of SEQ ID NO: 913791
auauaagguugucuauacu

SEQ ID NO: 954307 - RNA, 19 nt, Artificial Sequence
  Description of Artificial Sequence: Synthetic oligonucleotide
  Antisense strand to SEQ ID NO: 954306
aguauagacaaccuuauau

SEQ ID NO: 954308 - RNA, 19 nt, Artificial Sequence
  Description of Artificial Sequence: Synthetic oligonucleotide
  Sense strand starting at position 2870 of SEQ ID NO: 913791
cuuguagagggcgaucuua

SEQ ID NO: 954309 - RNA, 19 nt, Artificial Sequence
  Description of Artificial Sequence: Synthetic oligonucleotide
  Antisense strand to SEQ ID NO: 954308
uaagaucgcccucuacaag

SEQ ID NO: 954310 - RNA, 19 nt, Artificial Sequence
  Description of Artificial Sequence: Synthetic oligonucleotide
  Sense strand starting at position 3513 of SEQ ID NO: 913791
aggguucucucaguaauua

SEQ ID NO: 954311 - RNA, 19 nt, Artificial Sequence
  Description of Artificial Sequence: Synthetic oligonucleotide
  Antisense strand to SEQ ID NO: 954310
uaauuacugagagaacccu

SEQ ID NO: 954312 - RNA, 19 nt, Artificial Sequence
  Description of Artificial Sequence: Synthetic oligonucleotide
  Sense strand starting at position 3248 of SEQ ID NO: 913791
aaaggagguuugucuugua

SEQ ID NO: 954313 - RNA, 19 nt, Artificial Sequence
  Description of Artificial Sequence: Synthetic oligonucleotide
  Antisense strand to SEQ ID NO: 954312
uacaagacaaaccuccuuu

SEQ ID NO: 954314 - RNA, 19 nt, Artificial Sequence
  Description of Artificial Sequence: Synthetic oligonucleotide
  Sense strand starting at position 617 of SEQ ID NO: 913791
ggagcagcuucuuugagga

SEQ ID NO: 954315 - RNA, 19 nt, Artificial Sequence
  Description of Artificial Sequence: Synthetic oligonucleotide
  Antisense strand to SEQ ID NO: 954314
uccucaaagaagcugcucc

SEQ ID NO: 954316 - RNA, 19 nt, Artificial Sequence
  Description of Artificial Sequence: Synthetic oligonucleotide
  Sense strand starting at position 3294 of SEQ ID NO: 913791
ugcagagugaauugacagu

SEQ ID NO: 954317 - RNA, 19 nt, Artificial Sequence
  Description of Artificial Sequence: Synthetic oligonucleotide
  Antisense strand to SEQ ID NO: 954316
acugucaauucacucugca

SEQ ID NO: 954318 - RNA, 19 nt, Artificial Sequence
  Description of Artificial Sequence: Synthetic oligonucleotide
  Sense strand starting at position 950 of SEQ ID NO: 913791
auuccaguucuacgacaau

SEQ ID NO: 954319 - RNA, 19 nt, Artificial Sequence
  Description of Artificial Sequence: Synthetic oligonucleotide
  Antisense strand to SEQ ID NO: 954318
auugucguagaacuggaau

SEQ ID NO: 954320 - RNA, 19 nt, Artificial Sequence
  Description of Artificial Sequence: Synthetic oligonucleotide
  Sense strand starting at position 917 of SEQ ID NO: 913791
cugguaaguuucuuaaauu

SEQ ID NO: 954321 - RNA, 19 nt, Artificial Sequence
  Description of Artificial Sequence: Synthetic oligonucleotide
  Antisense strand to SEQ ID NO: 954320
aauuuaagaaacuuaccag

SEQ ID NO: 954322 - RNA, 19 nt, Artificial Sequence
  Description of Artificial Sequence: Synthetic oligonucleotide
  Sense strand starting at position 916 of SEQ ID NO: 913791
ccugguaaguuucuuaaau

SEQ ID NO: 954323 - RNA, 19 nt, Artificial Sequence
  Description of Artificial Sequence: Synthetic oligonucleotide
  Antisense strand to SEQ ID NO: 954322
auuuaagaaacuuaccagg

SEQ ID NO: 954324 - RNA, 19 nt, Artificial Sequence
  Description of Artificial Sequence: Synthetic oligonucleotide
  Sense strand starting at position 2851 of SEQ ID NO: 913791
uugggagaaacguguuuau

SEQ ID NO: 954325 - RNA, 19 nt, Artificial Sequence
  Description of Artificial Sequence: Synthetic oligonucleotide
  Antisense strand to SEQ ID NO: 954324
auaaacacguuucucccaa

SEQ ID NO: 954326 - RNA, 19 nt, Artificial Sequence
  Description of Artificial Sequence: Synthetic oligonucleotide
  Sense strand starting at position 329 of SEQ ID NO: 913791
aggcgucugaguuacaaug

SEQ ID NO: 954327 - RNA, 19 nt, Artificial Sequence
  Description of Artificial Sequence: Synthetic oligonucleotide
  Antisense strand to SEQ ID NO: 954326
cauuguaacucagacgccu

SEQ ID NO: 954328 - RNA, 19 nt, Artificial Sequence
  Description of Artificial Sequence: Synthetic oligonucleotide
  Sense strand starting at position 82 of SEQ ID NO: 913791
uccauauaagguugucuau

SEQ ID NO: 954329 - RNA, 19 nt, Artificial Sequence
  Description of Artificial Sequence: Synthetic oligonucleotide
  Antisense strand to SEQ ID NO: 954328
auagacaaccuuauaugga

SEQ ID NO: 954330 - RNA, 19 nt, Artificial Sequence
  Description of Artificial Sequence: Synthetic oligonucleotide
  Sense strand starting at position 3982 of SEQ ID NO: 913791
gcgcucauugaccauugaa

SEQ ID NO: 954331 - RNA, 19 nt, Artificial Sequence
  Description of Artificial Sequence: Synthetic oligonucleotide
  Antisense strand to SEQ ID NO: 954330
uucaauggucaaugagcgc

SEQ ID NO: 954332 - RNA, 19 nt, Artificial Sequence
  Description of Artificial Sequence: Synthetic oligonucleotide
  Sense strand starting at position 2854 of SEQ ID NO: 913791
ggagaaacguguuuaucuu

SEQ ID NO: 954333 - RNA, 19 nt, Artificial Sequence
  Description of Artificial Sequence: Synthetic oligonucleotide
  Antisense strand to SEQ ID NO: 954332
aagauaaacacguuucucc

SEQ ID NO: 954334 - RNA, 19 nt, Artificial Sequence
  Description of Artificial Sequence: Synthetic oligonucleotide
  Sense strand starting at position 978 of SEQ ID NO: 913791
cgagguccuucuuuccaaa

SEQ ID NO: 954335 - RNA, 19 nt, Artificial Sequence
  Description of Artificial Sequence: Synthetic oligonucleotide
  Antisense strand to SEQ ID NO: 954334
uuuggaaagaaggaccucg

SEQ ID NO: 954336 - RNA, 19 nt, Artificial Sequence
  Description of Artificial Sequence: Synthetic oligonucleotide
  Sense strand starting at position 3283 of SEQ ID NO: 913791
ggugaagguuaugcagagu

SEQ ID NO: 954337 - RNA, 19 nt, Artificial Sequence
  Description of Artificial Sequence: Synthetic oligonucleotide
  Antisense strand to SEQ ID NO: 954336
acucugcauaaccuucacc

SEQ ID NO: 954338 - RNA, 19 nt, Artificial Sequence
  Description of Artificial Sequence: Synthetic oligonucleotide
  Sense strand starting at position 889 of SEQ ID NO: 913791
gggcgaugcuaccuauaag

SEQ ID NO: 954339 - RNA, 19 nt, Artificial Sequence
  Description of Artificial Sequence: Synthetic oligonucleotide
  Antisense strand to SEQ ID NO: 954338
cuuauagguagcaucgccc

SEQ ID NO: 954340 - RNA, 19 nt, Artificial Sequence
  Description of Artificial Sequence: Synthetic oligonucleotide
  Sense strand starting at position 3300 of SEQ ID NO: 913791
gugaauugacaguguucuu

SEQ ID NO: 954341 - RNA, 19 nt, Artificial Sequence
  Description of Artificial Sequence: Synthetic oligonucleotide
  Antisense strand to SEQ ID NO: 954340
aagaacacugucaauucac

SEQ ID NO: 954342 - RNA, 19 nt, Artificial Sequence
  Description of Artificial Sequence: Synthetic oligonucleotide
  Sense strand starting at position 2198 of SEQ ID NO: 913791
cucguucugauuggaaagu

SEQ ID NO: 954343 - RNA, 19 nt, Artificial Sequence
  Description of Artificial Sequence: Synthetic oligonucleotide
  Antisense strand to SEQ ID NO: 954342
acuuuccaaucagaacgag

SEQ ID NO: 954344 - RNA, 19 nt, Artificial Sequence
  Description of Artificial Sequence: Synthetic oligonucleotide
  Sense strand starting at position 2197 of SEQ ID NO: 913791
gcucguucugauuggaaag

SEQ ID NO: 954345 - RNA, 19 nt, Artificial Sequence
  Description of Artificial Sequence: Synthetic oligonucleotide
  Antisense strand to SEQ ID NO: 954344
cuuuccaaucagaacgagc

SEQ ID NO: 954346 - RNA, 19 nt, Artificial Sequence
  Description of Artificial Sequence: Synthetic oligonucleotide
  Sense strand starting at position 3196 of SEQ ID NO: 913791
gaagcauguggcuguaaga

SEQ ID NO: 954347 - RNA, 19 nt, Artificial Sequence
  Description of Artificial Sequence: Synthetic oligonucleotide
  Antisense strand to SEQ ID NO: 954346
ucuuacagccacaugcuuc

SEQ ID NO: 954348 - RNA, 19 nt, Artificial Sequence
  Description of Artificial Sequence: Synthetic oligonucleotide
  Sense strand starting at position 582 of SEQ ID NO: 913791
ggaaacuacuuagaucaau

SEQ ID NO: 954349 - RNA, 19 nt, Artificial Sequence
  Description of Artificial Sequence: Synthetic oligonucleotide
  Antisense strand to SEQ ID NO: 954348
auugaucuaaguaguuucc

SEQ ID NO: 954350 - RNA, 19 nt, Artificial Sequence
  Description of Artificial Sequence: Synthetic oligonucleotide
  Sense strand starting at position 324 of SEQ ID NO: 913791
aaaccaggcgucugaguua

SEQ ID NO: 954351 - RNA, 19 nt, Artificial Sequence
  Description of Artificial Sequence: Synthetic oligonucleotide
  Antisense strand to SEQ ID NO: 954350
uaacucagacgccugguuu

SEQ ID NO: 954352 - RNA, 19 nt, Artificial Sequence
  Description of Artificial Sequence: Synthetic oligonucleotide
  Sense strand starting at position 3101 of SEQ ID NO: 913792
agacuugaccuguauccau

SEQ ID NO: 954353 - RNA, 19 nt, Artificial Sequence
  Description of Artificial Sequence: Synthetic oligonucleotide
  Antisense strand to SEQ ID NO: 954352
auggauacaggucaagucu

SEQ ID NO: 954354 - RNA, 19 nt, Artificial Sequence
  Description of Artificial Sequence: Synthetic oligonucleotide
  Sense strand starting at position 239 of SEQ ID NO: 913792
guucucagaccagauaagu

SEQ ID NO: 954355 - RNA, 19 nt, Artificial Sequence
  Description of Artificial Sequence: Synthetic oligonucleotide
  Antisense strand to SEQ ID NO: 954354
acuuaucuggucugagaac

SEQ ID NO: 954356 - RNA, 19 nt, Artificial Sequence
  Description of Artificial Sequence: Synthetic oligonucleotide
  Sense strand starting at position 3465 of SEQ ID NO: 913792
gguugagcauauuucgauu

SEQ ID NO: 954357 - RNA, 19 nt, Artificial Sequence
  Description of Artificial Sequence: Synthetic oligonucleotide
  Antisense strand to SEQ ID NO: 954356
aaucgaaauaugcucaacc

SEQ ID NO: 954358 - RNA, 19 nt, Artificial Sequence
  Description of Artificial Sequence: Synthetic oligonucleotide
  Sense strand starting at position 3592 of SEQ ID NO: 913792
cugaguugcauugauagau

SEQ ID NO: 954359 - RNA, 19 nt, Artificial Sequence
  Description of Artificial Sequence: Synthetic oligonucleotide
  Antisense strand to SEQ ID NO: 954358
aucuaucaaugcaacucag

SEQ ID NO: 954360 - RNA, 19 nt, Artificial Sequence
  Description of Artificial Sequence: Synthetic oligonucleotide
  Sense strand starting at position 3730 of SEQ ID NO: 913792
uugaacuguauguagaagu

SEQ ID NO: 954361 - RNA, 19 nt, Artificial Sequence
  Description of Artificial Sequence: Synthetic oligonucleotide
  Antisense strand to SEQ ID NO: 954360
acuucuacauacaguucaa

SEQ ID NO: 954362 - RNA, 19 nt, Artificial Sequence
  Description of Artificial Sequence: Synthetic oligonucleotide
  Sense strand starting at position 475 of SEQ ID NO: 913792
agaauaggucgauguagag

SEQ ID NO: 954363 - RNA, 19 nt, Artificial Sequence
  Description of Artificial Sequence: Synthetic oligonucleotide
  Antisense strand to SEQ ID NO: 954362
cucuacaucgaccuauucu

SEQ ID NO: 954364 - RNA, 19 nt, Artificial Sequence
  Description of Artificial Sequence: Synthetic oligonucleotide
  Sense strand starting at position 3480 of SEQ ID NO: 913792
gauuaaaucuuggcuuagg

SEQ ID NO: 954365 - RNA, 19 nt, Artificial Sequence
  Description of Artificial Sequence: Synthetic oligonucleotide
  Antisense strand to SEQ ID NO: 954364
ccuaagccaagauuuaauc

SEQ ID NO: 954366 - RNA, 19 nt, Artificial Sequence
  Description of Artificial Sequence: Synthetic oligonucleotide
  Sense strand starting at position 3277 of SEQ ID NO: 913792
guguguuuggcuagacgga

SEQ ID NO: 954367 - RNA, 19 nt, Artificial Sequence
  Description of Artificial Sequence: Synthetic oligonucleotide
  Antisense strand to SEQ ID NO: 954366
uccgucuagccaaacacac

SEQ ID NO: 954368 - RNA, 19 nt, Artificial Sequence
  Description of Artificial Sequence: Synthetic oligonucleotide
  Sense strand starting at position 3199 of SEQ ID NO: 913792
gggugacuauaacauuuaa

SEQ ID NO: 954369 - RNA, 19 nt, Artificial Sequence
  Description of Artificial Sequence: Synthetic oligonucleotide
  Antisense strand to SEQ ID NO: 954368
uuaaauguuauagucaccc

SEQ ID NO: 954370 - RNA, 19 nt, Artificial Sequence
  Description of Artificial Sequence: Synthetic oligonucleotide
  Sense strand starting at position 473 of SEQ ID NO: 913792
gcagaauaggucgauguag

SEQ ID NO: 954371 - RNA, 19 nt, Artificial Sequence
  Description of Artificial Sequence: Synthetic oligonucleotide
  Antisense strand to SEQ ID NO: 954370
cuacaucgaccuauucugc

SEQ ID NO: 954372 - RNA, 19 nt, Artificial Sequence
  Description of Artificial Sequence: Synthetic oligonucleotide
  Sense strand starting at position 3728 of SEQ ID NO: 913792
cuuugaacuguauguagaa

SEQ ID NO: 954373 - RNA, 19 nt, Artificial Sequence
  Description of Artificial Sequence: Synthetic oligonucleotide
  Antisense strand to SEQ ID NO: 954372
uucuacauacaguucaaag

SEQ ID NO: 954374 - RNA, 19 nt, Artificial Sequence
  Description of Artificial Sequence: Synthetic oligonucleotide
  Sense strand starting at position 3916 of SEQ ID NO: 913792
gauauugaguaguuucuga

SEQ ID NO: 954375 - RNA, 19 nt, Artificial Sequence
  Description of Artificial Sequence: Synthetic oligonucleotide
  Antisense strand to SEQ ID NO: 954374
ucagaaacuacucaauauc

SEQ ID NO: 954376 - RNA, 19 nt, Artificial Sequence
  Description of Artificial Sequence: Synthetic oligonucleotide
  Sense strand starting at position 250 of SEQ ID NO: 913792
agauaagucacuuggcuga

SEQ ID NO: 954377 - RNA, 19 nt, Artificial Sequence
  Description of Artificial Sequence: Synthetic oligonucleotide
  Antisense strand to SEQ ID NO: 954376
ucagccaagugacuuaucu

SEQ ID NO: 954378 - RNA, 19 nt, Artificial Sequence
  Description of Artificial Sequence: Synthetic oligonucleotide
  Sense strand starting at position 3846 of SEQ ID NO: 913792
uaggauagugcuugaaauu

SEQ ID NO: 954379 - RNA, 19 nt, Artificial Sequence
  Description of Artificial Sequence: Synthetic oligonucleotide
  Antisense strand to SEQ ID NO: 954378
aauuucaagcacuauccua

SEQ ID NO: 954380 - RNA, 19 nt, Artificial Sequence
  Description of Artificial Sequence: Synthetic oligonucleotide
  Sense strand starting at position 3975 of SEQ ID NO: 913792
gcaagugaagauugcagaa

SEQ ID NO: 954381 - RNA, 19 nt, Artificial Sequence
  Description of Artificial Sequence: Synthetic oligonucleotide
  Antisense strand to SEQ ID NO: 954380
uucugcaaucuucacuugc

SEQ ID NO: 954382 - RNA, 19 nt, Artificial Sequence
  Description of Artificial Sequence: Synthetic oligonucleotide
  Sense strand starting at position 3490 of SEQ ID NO: 913792
uggcuuaggcccuagauca

SEQ ID NO: 954383 - RNA, 19 nt, Artificial Sequence
  Description of Artificial Sequence: Synthetic oligonucleotide
  Antisense strand to SEQ ID NO: 954382
ugaucuagggccuaagcca

SEQ ID NO: 954384 - RNA, 19 nt, Artificial Sequence
  Description of Artificial Sequence: Synthetic oligonucleotide
  Sense strand starting at position 1148 of SEQ ID NO: 913792
gggaaagaugcucgacucu

SEQ ID NO: 954385 - RNA, 19 nt, Artificial Sequence
  Description of Artificial Sequence: Synthetic oligonucleotide
  Antisense strand to SEQ ID NO: 954384
agagucgagcaucuuuccc

SEQ ID NO: 954386 - RNA, 19 nt, Artificial Sequence
  Description of Artificial Sequence: Synthetic oligonucleotide
  Sense strand starting at position 3752 of SEQ ID NO: 913792
guaguuugaagucaauagu

SEQ ID NO: 954387 - RNA, 19 nt, Artificial Sequence
  Description of Artificial Sequence: Synthetic oligonucleotide
  Antisense strand to SEQ ID NO: 954386
acuauugacuucaaacuac

SEQ ID NO: 954388 - RNA, 19 nt, Artificial Sequence
  Description of Artificial Sequence: Synthetic oligonucleotide
  Sense strand starting at position 3969 of SEQ ID NO: 913792
uguguagcaagugaagauu

SEQ ID NO: 954389 - RNA, 19 nt, Artificial Sequence
  Description of Artificial Sequence: Synthetic oligonucleotide
  Antisense strand to SEQ ID NO: 954388
aaucuucacuugcuacaca

SEQ ID NO: 954390 - RNA, 19 nt, Artificial Sequence
  Description of Artificial Sequence: Synthetic oligonucleotide
  Sense strand starting at position 1088 of SEQ ID NO: 913792
cuagguggucucugagaac

SEQ ID NO: 954391 - RNA, 19 nt, Artificial Sequence
  Description of Artificial Sequence: Synthetic oligonucleotide
  Antisense strand to SEQ ID NO: 954390
guucucagagaccaccuag

SEQ ID NO: 954392 - RNA, 19 nt, Artificial Sequence
  Description of Artificial Sequence: Synthetic oligonucleotide
  Sense strand starting at position 3923 of SEQ ID NO: 913792
aguaguuucugaucccaga

SEQ ID NO: 954393 - RNA, 19 nt, Artificial Sequence
  Description of Artificial Sequence: Synthetic oligonucleotide
  Antisense strand to SEQ ID NO: 954392
ucugggaucagaaacuacu

SEQ ID NO: 954394 - RNA, 19 nt, Artificial Sequence
  Description of Artificial Sequence: Synthetic oligonucleotide
  Sense strand starting at position 3167 of SEQ ID NO: 913792
ggaguagacggaugcgaaa

SEQ ID NO: 954395 - RNA, 19 nt, Artificial Sequence
  Description of Artificial Sequence: Synthetic oligonucleotide
  Antisense strand to SEQ ID NO: 954394
uuucgcauccgucuacucc

SEQ ID NO: 954396 - RNA, 19 nt, Artificial Sequence
  Description of Artificial Sequence: Synthetic oligonucleotide
  Sense strand starting at position 1507 of SEQ ID NO: 913792
gaacgauugugauccgaca

SEQ ID NO: 954397 - RNA, 19 nt, Artificial Sequence
  Description of Artificial Sequence: Synthetic oligonucleotide
  Antisense strand to SEQ ID NO: 954396
ugucggaucacaaucguuc

SEQ ID NO: 954398 - RNA, 19 nt, Artificial Sequence
  Description of Artificial Sequence: Synthetic oligonucleotide
  Sense strand starting at position 3845 of SEQ ID NO: 913792
guaggauagugcuugaaau

SEQ ID NO: 954399 - RNA, 19 nt, Artificial Sequence
  Description of Artificial Sequence: Synthetic oligonucleotide
  Antisense strand to SEQ ID NO: 954398
auuucaagcacuauccuac

SEQ ID NO: 954400 - RNA, 19 nt, Artificial Sequence
  Description of Artificial Sequence: Synthetic oligonucleotide
  Sense strand starting at position 3498 of SEQ ID NO: 913792
gcccuagaucaaggguuua

SEQ ID NO: 954401 - RNA, 19 nt, Artificial Sequence
  Description of Artificial Sequence: Synthetic oligonucleotide
  Antisense strand to SEQ ID NO: 954400
uaaacccuugaucuagggc

SEQ ID NO: 954402 - RNA, 19 nt, Artificial Sequence
  Description of Artificial Sequence: Synthetic oligonucleotide
  Sense strand starting at position 3796 of SEQ ID NO: 913792
cuuacuagaucuuuguuau

SEQ ID NO: 954403 - RNA, 19 nt, Artificial Sequence
  Description of Artificial Sequence: Synthetic oligonucleotide
  Antisense strand to SEQ ID NO: 954402
auaacaaagaucuaguaag

SEQ ID NO: 954404 - RNA, 19 nt, Artificial Sequence
  Description of Artificial Sequence: Synthetic oligonucleotide
  Sense strand starting at position 3334 of SEQ ID NO: 913792
uucuuaggcuaucuauaug

SEQ ID NO: 954405 - RNA, 19 nt, Artificial Sequence
  Description of Artificial Sequence: Synthetic oligonucleotide
  Antisense strand to SEQ ID NO: 954404
cauauagauagccuaagaa

SEQ ID NO: 954406 - RNA, 19 nt, Artificial Sequence
  Description of Artificial Sequence: Synthetic oligonucleotide
  Sense strand starting at position 3551 of SEQ ID NO: 913792
cgcauauugcaucagaauc

SEQ ID NO: 954407 - RNA, 19 nt, Artificial Sequence
  Description of Artificial Sequence: Synthetic oligonucleotide
  Antisense strand to SEQ ID NO: 954406
gauucugaugcaauaugcg

SEQ ID NO: 954408 - RNA, 19 nt, Artificial Sequence
  Description of Artificial Sequence: Synthetic oligonucleotide
  Sense strand starting at position 248 of SEQ ID NO: 913792
ccagauaagucacuuggcu

SEQ ID NO: 954409 - RNA, 19 nt, Artificial Sequence
  Description of Artificial Sequence: Synthetic oligonucleotide
  Antisense strand to SEQ ID NO: 954408
agccaagugacuuaucugg

SEQ ID NO: 954410 - RNA, 19 nt, Artificial Sequence
  Description of Artificial Sequence: Synthetic oligonucleotide
  Sense strand starting at position 3154 of SEQ ID NO: 913792
cucuuagaacgugggagua

SEQ ID NO: 954411 - RNA, 19 nt, Artificial Sequence
  Description of Artificial Sequence: Synthetic oligonucleotide
  Antisense strand to SEQ ID NO: 954410
uacucccacguucuaagag

SEQ ID NO: 954412 - RNA, 19 nt, Artificial Sequence
  Description of Artificial Sequence: Synthetic oligonucleotide
  Sense strand starting at position 3622 of SEQ ID NO: 913792
augacugauuugcauaacu

SEQ ID NO: 954413 - RNA, 19 nt, Artificial Sequence
  Description of Artificial Sequence: Synthetic oligonucleotide
  Antisense strand to SEQ ID NO: 954412
aguuaugcaaaucagucau

SEQ ID NO: 954414 - RNA, 19 nt, Artificial Sequence
  Description of Artificial Sequence: Synthetic oligonucleotide
  Sense strand starting at position 3191 of SEQ ID NO: 913792
cguaguuugggugacuaua

SEQ ID NO: 954415 - RNA, 19 nt, Artificial Sequence
  Description of Artificial Sequence: Synthetic oligonucleotide
  Antisense strand to SEQ ID NO: 954414
uauagucacccaaacuacg

SEQ ID NO: 954416 - RNA, 19 nt, Artificial Sequence
  Description of Artificial Sequence: Synthetic oligonucleotide
  Sense strand starting at position 3479 of SEQ ID NO: 913792
cgauuaaaucuuggcuuag

SEQ ID NO: 954417 - RNA, 19 nt, Artificial Sequence
  Description of Artificial Sequence: Synthetic oligonucleotide
  Antisense strand to SEQ ID NO: 954416
cuaagccaagauuuaaucg

SEQ ID NO: 954418 - RNA, 19 nt, Artificial Sequence
  Description of Artificial Sequence: Synthetic oligonucleotide
  Sense strand starting at position 3278 of SEQ ID NO: 913792
uguguuuggcuagacggaa

SEQ ID NO: 954419 - RNA, 19 nt, Artificial Sequence
  Description of Artificial Sequence: Synthetic oligonucleotide
  Antisense strand to SEQ ID NO: 954418
uuccgucuagccaaacaca

SEQ ID NO: 954420 - RNA, 19 nt, Artificial Sequence
  Description of Artificial Sequence: Synthetic oligonucleotide
  Sense strand starting at position 3392 of SEQ ID NO: 913792
aguacacuguuaguggauu

SEQ ID NO: 954421 - RNA, 19 nt, Artificial Sequence
  Description of Artificial Sequence: Synthetic oligonucleotide
  Antisense strand to SEQ ID NO: 954420
aauccacuaacaguguacu

SEQ ID NO: 954422 - RNA, 19 nt, Artificial Sequence
  Description of Artificial Sequence: Synthetic oligonucleotide
  Sense strand starting at position 321 of SEQ ID NO: 913792
uguugcaacaucggagaau

SEQ ID NO: 954423 - RNA, 19 nt, Artificial Sequence
  Description of Artificial Sequence: Synthetic oligonucleotide
  Antisense strand to SEQ ID NO: 954422
auucuccgauguugcaaca

SEQ ID NO: 954424 - RNA, 19 nt, Artificial Sequence
  Description of Artificial Sequence: Synthetic oligonucleotide
  Sense strand starting at position 1491 of SEQ ID NO: 913792
acagucaaaucucugcgaa

SEQ ID NO: 954425 - RNA, 19 nt, Artificial Sequence
  Description of Artificial Sequence: Synthetic oligonucleotide
  Antisense strand to SEQ ID NO: 954424
uucgcagagauuugacugu

SEQ ID NO: 954426 - RNA, 19 nt, Artificial Sequence
  Description of Artificial Sequence: Synthetic oligonucleotide
  Sense strand starting at position 3943 of SEQ ID NO: 913792
gguaauguguagguucaag

SEQ ID NO: 954427 - RNA, 19 nt, Artificial Sequence
  Description of Artificial Sequence: Synthetic oligonucleotide
  Antisense strand to SEQ ID NO: 954426
cuugaaccuacacauuacc

SEQ ID NO: 954428 - RNA, 19 nt, Artificial Sequence
  Description of Artificial Sequence: Synthetic oligonucleotide
  Sense strand starting at position 3331 of SEQ ID NO: 913792
gcuuucuuaggcuaucuau

SEQ ID NO: 954429 - RNA, 19 nt, Artificial Sequence
  Description of Artificial Sequence: Synthetic oligonucleotide
  Antisense strand to SEQ ID NO: 954428
auagauagccuaagaaagc

SEQ ID NO: 954430 - RNA, 19 nt, Artificial Sequence
  Description of Artificial Sequence: Synthetic oligonucleotide
  Sense strand starting at position 3468 of SEQ ID NO: 913792
ugagcauauuucgauuaaa

SEQ ID NO: 954431 - RNA, 19 nt, Artificial Sequence
  Description of Artificial Sequence: Synthetic oligonucleotide
  Antisense strand to SEQ ID NO: 954430
uuuaaucgaaauaugcuca

SEQ ID NO: 954432 - RNA, 19 nt, Artificial Sequence
  Description of Artificial Sequence: Synthetic oligonucleotide
  Sense strand starting at position 670 of SEQ ID NO: 913793
aacagauacccugggaugu

SEQ ID NO: 954433 - RNA, 19 nt, Artificial Sequence
  Description of Artificial Sequence: Synthetic oligonucleotide
  Antisense strand to SEQ ID NO: 954432
acaucccaggguaucuguu

SEQ ID NO: 954434 - RNA, 19 nt, Artificial Sequence
  Description of Artificial Sequence: Synthetic oligonucleotide
  Sense strand starting at position 92 of SEQ ID NO: 913793
ggcauucugggaugaugau

SEQ ID NO: 954435 - RNA, 19 nt, Artificial Sequence
  Description of Artificial Sequence: Synthetic oligonucleotide
  Antisense strand to SEQ ID NO: 954434
aucaucaucccagaaugcc

SEQ ID NO: 954436 - RNA, 19 nt, Artificial Sequence
  Description of Artificial Sequence: Synthetic oligonucleotide
  Sense strand starting at position 2750 of SEQ ID NO: 913793
gguagugccgcggucagaa

SEQ ID NO: 954437 - RNA, 19 nt, Artificial Sequence
  Description of Artificial Sequence: Synthetic oligonucleotide
  Antisense strand to SEQ ID NO: 954436
uucugaccgcggcacuacc

SEQ ID NO: 954438 - RNA, 19 nt, Artificial Sequence
  Description of Artificial Sequence: Synthetic oligonucleotide
  Sense strand starting at position 3748 of SEQ ID NO: 913793
gcaagcacuccuggaaaga

SEQ ID NO: 954439 - RNA, 19 nt, Artificial Sequence
  Description of Artificial Sequence: Synthetic oligonucleotide
  Antisense strand to SEQ ID NO: 954438
ucuuuccaggagugcuugc

SEQ ID NO: 954440 - RNA, 19 nt, Artificial Sequence
  Description of Artificial Sequence: Synthetic oligonucleotide
  Sense strand starting at position 3451 of SEQ ID NO: 913793
ggugcucagaccuggacau

SEQ ID NO: 954441 - RNA, 19 nt, Artificial Sequence
  Description of Artificial Sequence: Synthetic oligonucleotide
  Antisense strand to SEQ ID NO: 954440
auguccaggucugagcacc

SEQ ID NO: 954442 - RNA, 19 nt, Artificial Sequence
  Description of Artificial Sequence: Synthetic oligonucleotide
  Sense strand starting at position 1641 of SEQ ID NO: 913793
ggguuuccaccaggagcua

SEQ ID NO: 954443 - RNA, 19 nt, Artificial Sequence
  Description of Artificial Sequence: Synthetic oligonucleotide
  Antisense strand to SEQ ID NO: 954442
uagcuccugguggaaaccc

SEQ ID NO: 954444 - RNA, 19 nt, Artificial Sequence
  Description of Artificial Sequence: Synthetic oligonucleotide
  Sense strand starting at position 3959 of SEQ ID NO: 913793
gcugcuuuccuuuaaagau

SEQ ID NO: 954445 - RNA, 19 nt, Artificial Sequence
  Description of Artificial Sequence: Synthetic oligonucleotide
  Antisense strand to SEQ ID NO: 954444
aucuuuaaaggaaagcagc

SEQ ID NO: 954446 - RNA, 19 nt, Artificial Sequence
  Description of Artificial Sequence: Synthetic oligonucleotide
  Sense strand starting at position 17 of SEQ ID NO: 913793
uuaugaagccugcauaugu

SEQ ID NO: 954447 - RNA, 19 nt, Artificial Sequence
  Description of Artificial Sequence: Synthetic oligonucleotide
  Antisense strand to SEQ ID NO: 954446
acauaugcaggcuucauaa

SEQ ID NO: 954448 - RNA, 19 nt, Artificial Sequence
  Description of Artificial Sequence: Synthetic oligonucleotide
  Sense strand starting at position 3452 of SEQ ID NO: 913793
gugcucagaccuggacauu

SEQ ID NO: 954449 - RNA, 19 nt, Artificial Sequence
  Description of Artificial Sequence: Synthetic oligonucleotide
  Antisense strand to SEQ ID NO: 954448
aauguccaggucugagcac

SEQ ID NO: 954450 - RNA, 19 nt, Artificial Sequence
  Description of Artificial Sequence: Synthetic oligonucleotide
  Sense strand starting at position 89 of SEQ ID NO: 913793
uccggcauucugggaugau

SEQ ID NO: 954451 - RNA, 19 nt, Artificial Sequence
  Description of Artificial Sequence: Synthetic oligonucleotide
  Antisense strand to SEQ ID NO: 954450
aucaucccagaaugccgga

SEQ ID NO: 954452 - RNA, 19 nt, Artificial Sequence
  Description of Artificial Sequence: Synthetic oligonucleotide
  Sense strand starting at position 741 of SEQ ID NO: 913793
cgaggugaucuuggaagcu

SEQ ID NO: 954453 - RNA, 19 nt, Artificial Sequence
  Description of Artificial Sequence: Synthetic oligonucleotide
  Antisense strand to SEQ ID NO: 954452
agcuuccaagaucaccucg

SEQ ID NO: 954454 - RNA, 19 nt, Artificial Sequence
  Description of Artificial Sequence: Synthetic oligonucleotide
  Sense strand starting at position 15 of SEQ ID NO: 913793
ucuuaugaagccugcauau

SEQ ID NO: 954455 - RNA, 19 nt, Artificial Sequence
  Description of Artificial Sequence: Synthetic oligonucleotide
  Antisense strand to SEQ ID NO: 954454
auaugcaggcuucauaaga

SEQ ID NO: 954456 - RNA, 19 nt, Artificial Sequence
  Description of Artificial Sequence: Synthetic oligonucleotide
  Sense strand starting at position 2990 of SEQ ID NO: 913793
uguguucagggacgugaau

SEQ ID NO: 954457 - RNA, 19 nt, Artificial Sequence
  Description of Artificial Sequence: Synthetic oligonucleotide
  Antisense strand to SEQ ID NO: 954456
auucacgucccugaacaca

SEQ ID NO: 954458 - RNA, 19 nt, Artificial Sequence
  Description of Artificial Sequence: Synthetic oligonucleotide
  Sense strand starting at position 349 of SEQ ID NO: 913793
gcugcaaacucggugggau

SEQ ID NO: 954459 - RNA, 19 nt, Artificial Sequence
  Description of Artificial Sequence: Synthetic oligonucleotide
  Antisense strand to SEQ ID NO: 954458
aucccaccgaguuugcagc

SEQ ID NO: 954460 - RNA, 19 nt, Artificial Sequence
  Description of Artificial Sequence: Synthetic oligonucleotide
  Sense strand starting at position 250 of SEQ ID NO: 913793
guguguugggcucaguacu

SEQ ID NO: 954461 - RNA, 19 nt, Artificial Sequence
  Description of Artificial Sequence: Synthetic oligonucleotide
  Antisense strand to SEQ ID NO: 954460
aguacugagcccaacacac

SEQ ID NO: 954462 - RNA, 19 nt, Artificial Sequence
  Description of Artificial Sequence: Synthetic oligonucleotide
  Sense strand starting at position 296 of SEQ ID NO: 913793
cgaugcuuuccaggagugu

SEQ ID NO: 954463 - RNA, 19 nt, Artificial Sequence
  Description of Artificial Sequence: Synthetic oligonucleotide
  Antisense strand to SEQ ID NO: 954462
acacuccuggaaagcaucg

SEQ ID NO: 954464 - RNA, 19 nt, Artificial Sequence
  Description of Artificial Sequence: Synthetic oligonucleotide
  Sense strand starting at position 3969 of SEQ ID NO: 913793
uuuaaagauuugugggcuu

SEQ ID NO: 954465 - RNA, 19 nt, Artificial Sequence
  Description of Artificial Sequence: Synthetic oligonucleotide
  Antisense strand to SEQ ID NO: 954464
aagcccacaaaucuuuaaa

SEQ ID NO: 954466 - RNA, 19 nt, Artificial Sequence
  Description of Artificial Sequence: Synthetic oligonucleotide
  Sense strand starting at position 6 of SEQ ID NO: 913793
guuccuacaucuuaugaag

SEQ ID NO: 954467 - RNA, 19 nt, Artificial Sequence
  Description of Artificial Sequence: Synthetic oligonucleotide
  Antisense strand to SEQ ID NO: 954466
cuucauaagauguaggaac

SEQ ID NO: 954468 - RNA, 19 nt, Artificial Sequence
  Description of Artificial Sequence: Synthetic oligonucleotide
  Sense strand starting at position 3983 of SEQ ID NO: 913793
ggcuuuggucucuguuguu

SEQ ID NO: 954469 - RNA, 19 nt, Artificial Sequence
  Description of Artificial Sequence: Synthetic oligonucleotide
  Antisense strand to SEQ ID NO: 954468
aacaacagagaccaaagcc

SEQ ID NO: 954470 - RNA, 19 nt, Artificial Sequence
  Description of Artificial Sequence: Synthetic oligonucleotide
  Sense strand starting at position 90 of SEQ ID NO: 913793
ccggcauucugggaugaug

SEQ ID NO: 954471 - RNA, 19 nt, Artificial Sequence
  Description of Artificial Sequence: Synthetic oligonucleotide
  Antisense strand to SEQ ID NO: 954470
caucaucccagaaugccgg

SEQ ID NO: 954472 - RNA, 19 nt, Artificial Sequence
  Description of Artificial Sequence: Synthetic oligonucleotide
  Sense strand starting at position 3767 of SEQ ID NO: 913793
cgugcaugcgguugguaaa

SEQ ID NO: 954473 - RNA, 19 nt, Artificial Sequence
  Description of Artificial Sequence: Synthetic oligonucleotide
  Antisense strand to SEQ ID NO: 954472
uuuaccaaccgcaugcacg

SEQ ID NO: 954474 - RNA, 19 nt, Artificial Sequence
  Description of Artificial Sequence: Synthetic oligonucleotide
  Sense strand starting at position 294 of SEQ ID NO: 913793
cccgaugcuuuccaggagu

SEQ ID NO: 954475 - RNA, 19 nt, Artificial Sequence
  Description of Artificial Sequence: Synthetic oligonucleotide
  Antisense strand to SEQ ID NO: 954474
acuccuggaaagcaucggg

SEQ ID NO: 954476 - RNA, 19 nt, Artificial Sequence
  Description of Artificial Sequence: Synthetic oligonucleotide
  Sense strand starting at position 3558 of SEQ ID NO: 913794
cguguaccugugcuuacaa

SEQ ID NO: 954477 - RNA, 19 nt, Artificial Sequence
  Description of Artificial Sequence: Synthetic oligonucleotide
  Antisense strand to SEQ ID NO: 954476
uuguaagcacagguacacg

SEQ ID NO: 954478 - RNA, 19 nt, Artificial Sequence
  Description of Artificial Sequence: Synthetic oligonucleotide
  Sense strand starting at position 3555 of SEQ ID NO: 913794
aaccguguaccugugcuua

SEQ ID NO: 954479 - RNA, 19 nt, Artificial Sequence
  Description of Artificial Sequence: Synthetic oligonucleotide
  Antisense strand to SEQ ID NO: 954478
uaagcacagguacacgguu

SEQ ID NO: 954480 - RNA, 19 nt, Artificial Sequence
  Description of Artificial Sequence: Synthetic oligonucleotide
  Sense strand starting at position 3788 of SEQ ID NO: 913794
gacuguugacaucaagguu

SEQ ID NO: 954481 - RNA, 19 nt, Artificial Sequence
  Description of Artificial Sequence: Synthetic oligonucleotide
  Antisense strand to SEQ ID NO: 954480
aaccuugaugucaacaguc

SEQ ID NO: 954482 - RNA, 19 nt, Artificial Sequence
  Description of Artificial Sequence: Synthetic oligonucleotide
  Sense strand starting at position 329 of SEQ ID NO: 913794
guaaauuacccugacugua

SEQ ID NO: 954483 - RNA, 19 nt, Artificial Sequence
  Description of Artificial Sequence: Synthetic oligonucleotide
  Antisense strand to SEQ ID NO: 954482
uacagucaggguaauuuac

SEQ ID NO: 954484 - RNA, 19 nt, Artificial Sequence
  Description of Artificial Sequence: Synthetic oligonucleotide
  Sense strand starting at position 3411 of SEQ ID NO: 913794
guauguugcguuucccuua

SEQ ID NO: 954485 - RNA, 19 nt, Artificial Sequence
  Description of Artificial Sequence: Synthetic oligonucleotide
  Antisense strand to SEQ ID NO: 954484
uaagggaaacgcaacauac

SEQ ID NO: 954486 - RNA, 19 nt, Artificial Sequence
  Description of Artificial Sequence: Synthetic oligonucleotide
  Sense strand starting at position 3833 of SEQ ID NO: 913794
gcauccuagcuuuaaggga

SEQ ID NO: 954487 - RNA, 19 nt, Artificial Sequence
  Description of Artificial Sequence: Synthetic oligonucleotide
  Antisense strand to SEQ ID NO: 954486
ucccuuaaagcuaggaugc

SEQ ID NO: 954488 - RNA, 19 nt, Artificial Sequence
  Description of Artificial Sequence: Synthetic oligonucleotide
  Sense strand starting at position 701 of SEQ ID NO: 913794
acaaguuauugggcaucca

SEQ ID NO: 954489 - RNA, 19 nt, Artificial Sequence
  Description of Artificial Sequence: Synthetic oligonucleotide
  Antisense strand to SEQ ID NO: 954488
uggaugcccaauaacuugu

SEQ ID NO: 954490 - RNA, 19 nt, Artificial Sequence
  Description of Artificial Sequence: Synthetic oligonucleotide
  Sense strand starting at position 243 of SEQ ID NO: 913794
ucuuauaugguuugauuac

SEQ ID NO: 954491 - RNA, 19 nt, Artificial Sequence
  Description of Artificial Sequence: Synthetic oligonucleotide
  Antisense strand to SEQ ID NO: 954490
guaaucaaaccauauaaga

SEQ ID NO: 954492 - RNA, 19 nt, Artificial Sequence
  Description of Artificial Sequence: Synthetic oligonucleotide
  Sense strand starting at position 328 of SEQ ID NO: 913794
uguaaauuacccugacugu

SEQ ID NO: 954493 - RNA, 19 nt, Artificial Sequence
  Description of Artificial Sequence: Synthetic oligonucleotide
  Antisense strand to SEQ ID NO: 954492
acagucaggguaauuuaca

SEQ ID NO: 954494 - RNA, 19 nt, Artificial Sequence
  Description of Artificial Sequence: Synthetic oligonucleotide
  Sense strand starting at position 838 of SEQ ID NO: 913794
uuacauucgcaugaaguuu

SEQ ID NO: 954495 - RNA, 19 nt, Artificial Sequence
  Description of Artificial Sequence: Synthetic oligonucleotide
  Antisense strand to SEQ ID NO: 954494
aaacuucaugcgaauguaa

SEQ ID NO: 954496 - RNA, 19 nt, Artificial Sequence
  Description of Artificial Sequence: Synthetic oligonucleotide
  Sense strand starting at position 42 of SEQ ID NO: 913794
augaauaagccaugccuuu

SEQ ID NO: 954497 - RNA, 19 nt, Artificial Sequence
  Description of Artificial Sequence: Synthetic oligonucleotide
  Antisense strand to SEQ ID NO: 954496
aaaggcauggcuuauucau

SEQ ID NO: 954498 - RNA, 19 nt, Artificial Sequence
  Description of Artificial Sequence: Synthetic oligonucleotide
  Sense strand starting at position 878 of SEQ ID NO: 913794
cggaaagacucuucacguu

SEQ ID NO: 954499 - RNA, 19 nt, Artificial Sequence
  Description of Artificial Sequence: Synthetic oligonucleotide
  Antisense strand to SEQ ID NO: 954498
aacgugaagagucuuuccg

SEQ ID NO: 954500 - RNA, 19 nt, Artificial Sequence
  Description of Artificial Sequence: Synthetic oligonucleotide
  Sense strand starting at position 1974 of SEQ ID NO: 913794
ucccguucgcaugagaaca

SEQ ID NO: 954501 - RNA, 19 nt, Artificial Sequence
  Description of Artificial Sequence: Synthetic oligonucleotide
  Antisense strand to SEQ ID NO: 954500
uguucucaugcgaacggga

SEQ ID NO: 954502 - RNA, 19 nt, Artificial Sequence
  Description of Artificial Sequence: Synthetic oligonucleotide
  Sense strand starting at position 3456 of SEQ ID NO: 913794
ugcucugauuggcuacaua

SEQ ID NO: 954503 - RNA, 19 nt, Artificial Sequence
  Description of Artificial Sequence: Synthetic oligonucleotide
  Antisense strand to SEQ ID NO: 954502
uauguagccaaucagagca

SEQ ID NO: 954504 - RNA, 19 nt, Artificial Sequence
  Description of Artificial Sequence: Synthetic oligonucleotide
  Sense strand starting at position 837 of SEQ ID NO: 913794
auuacauucgcaugaaguu

SEQ ID NO: 954505 - RNA, 19 nt, Artificial Sequence
  Description of Artificial Sequence: Synthetic oligonucleotide
  Antisense strand to SEQ ID NO: 954504
aacuucaugcgaauguaau

SEQ ID NO: 954506 - RNA, 19 nt, Artificial Sequence
  Description of Artificial Sequence: Synthetic oligonucleotide
  Sense strand starting at position 763 of SEQ ID NO: 913794
acagcuagguuucucaagu

SEQ ID NO: 954507 - RNA, 19 nt, Artificial Sequence
  Description of Artificial Sequence: Synthetic oligonucleotide
  Antisense strand to SEQ ID NO: 954506
acuugagaaaccuagcugu

SEQ ID NO: 954508 - RNA, 19 nt, Artificial Sequence
  Description of Artificial Sequence: Synthetic oligonucleotide
  Sense strand starting at position 3695 of SEQ ID NO: 913794
ccagccugugcuuauaauu

SEQ ID NO: 954509 - RNA, 19 nt, Artificial Sequence
  Description of Artificial Sequence: Synthetic oligonucleotide
  Antisense strand to SEQ ID NO: 954508
aauuauaagcacaggcugg

SEQ ID NO: 954510 - RNA, 19 nt, Artificial Sequence
  Description of Artificial Sequence: Synthetic oligonucleotide
  Sense strand starting at position 3819 of SEQ ID NO: 913794
ugugaaaccuuguugcauc

SEQ ID NO: 954511 - RNA, 19 nt, Artificial Sequence
  Description of Artificial Sequence: Synthetic oligonucleotide
  Antisense strand to SEQ ID NO: 954510
gaugcaacaagguuucaca

SEQ ID NO: 954512 - RNA, 19 nt, Artificial Sequence
  Description of Artificial Sequence: Synthetic oligonucleotide
  Sense strand starting at position 764 of SEQ ID NO: 913794
cagcuagguuucucaaguu

SEQ ID NO: 954513 - RNA, 19 nt, Artificial Sequence
  Description of Artificial Sequence: Synthetic oligonucleotide
  Antisense strand to SEQ ID NO: 954512
aacuugagaaaccuagcug

SEQ ID NO: 954514 - RNA, 19 nt, Artificial Sequence
  Description of Artificial Sequence: Synthetic oligonucleotide
  Sense strand starting at position 3808 of SEQ ID NO: 913794
ggugccuucuuugugaaac

SEQ ID NO: 954515 - RNA, 19 nt, Artificial Sequence
  Description of Artificial Sequence: Synthetic oligonucleotide
  Antisense strand to SEQ ID NO: 954514
guuucacaaagaaggcacc

SEQ ID NO: 954516 - RNA, 19 nt, Artificial Sequence
  Description of Artificial Sequence: Synthetic oligonucleotide
  Sense strand starting at position 28 of SEQ ID NO: 913794
gaggguaacuucuaaugaa

SEQ ID NO: 954517 - RNA, 19 nt, Artificial Sequence
  Description of Artificial Sequence: Synthetic oligonucleotide
  Antisense strand to SEQ ID NO: 954516
uucauuagaaguuacccuc

SEQ ID NO: 954518 - RNA, 19 nt, Artificial Sequence
  Description of Artificial Sequence: Synthetic oligonucleotide
  Sense strand starting at position 3830 of SEQ ID NO: 913794
guugcauccuagcuuuaag

SEQ ID NO: 954519 - RNA, 19 nt, Artificial Sequence
  Description of Artificial Sequence: Synthetic oligonucleotide
  Antisense strand to SEQ ID NO: 954518
cuuaaagcuaggaugcaac

SEQ ID NO: 954520 - RNA, 19 nt, Artificial Sequence
  Description of Artificial Sequence: Synthetic oligonucleotide
  Sense strand starting at position 720 of SEQ ID NO: 913794
cuuagagaaucucaaacga

SEQ ID NO: 954521 - RNA, 19 nt, Artificial Sequence
  Description of Artificial Sequence: Synthetic oligonucleotide
  Antisense strand to SEQ ID NO: 954520
ucguuugagauucucuaag

SEQ ID NO: 954522 - RNA, 19 nt, Artificial Sequence
  Description of Artificial Sequence: Synthetic oligonucleotide
  Sense strand starting at position 236 of SEQ ID NO: 913794
agcuauuucuuauaugguu

SEQ ID NO: 954523 - RNA, 19 nt, Artificial Sequence
  Description of Artificial Sequence: Synthetic oligonucleotide
  Antisense strand to SEQ ID NO: 954522
aaccauauaagaaauagcu

SEQ ID NO: 954524 - RNA, 19 nt, Artificial Sequence
  Description of Artificial Sequence: Synthetic oligonucleotide
  Sense strand starting at position 3317 of SEQ ID NO: 913794
ugccguuuccgugaggaug

SEQ ID NO: 954525 - RNA, 19 nt, Artificial Sequence
  Description of Artificial Sequence: Synthetic oligonucleotide
  Antisense strand to SEQ ID NO: 954524
cauccucacggaaacggca

SEQ ID NO: 954526 - RNA, 19 nt, Artificial Sequence
  Description of Artificial Sequence: Synthetic oligonucleotide
  Sense strand starting at position 3694 of SEQ ID NO: 913794
cccagccugugcuuauaau

SEQ ID NO: 954527 - RNA, 19 nt, Artificial Sequence
  Description of Artificial Sequence: Synthetic oligonucleotide
  Antisense strand to SEQ ID NO: 954526
auuauaagcacaggcuggg

SEQ ID NO: 954528 - RNA, 19 nt, Artificial Sequence
  Description of Artificial Sequence: Synthetic oligonucleotide
  Sense strand starting at position 3805 of SEQ ID NO: 913794
uugggugccuucuuuguga

SEQ ID NO: 954529 - RNA, 19 nt, Artificial Sequence
  Description of Artificial Sequence: Synthetic oligonucleotide
  Antisense strand to SEQ ID NO: 954528
ucacaaagaaggcacccaa

SEQ ID NO: 954530 - RNA, 19 nt, Artificial Sequence
  Description of Artificial Sequence: Synthetic oligonucleotide
  Sense strand starting at position 3416 of SEQ ID NO: 913794
uugcguuucccuuaagcuu

SEQ ID NO: 954531 - RNA, 19 nt, Artificial Sequence
  Description of Artificial Sequence: Synthetic oligonucleotide
  Antisense strand to SEQ ID NO: 954530
aagcuuaagggaaacgcaa

SEQ ID NO: 954532 - RNA, 19 nt, Artificial Sequence
  Description of Artificial Sequence: Synthetic oligonucleotide
  Sense strand starting at position 1094 of SEQ ID NO: 913794
acuuccugguucuaaagga

SEQ ID NO: 954533 - RNA, 19 nt, Artificial Sequence
  Description of Artificial Sequence: Synthetic oligonucleotide
  Antisense strand to SEQ ID NO: 954532
uccuuuagaaccaggaagu

SEQ ID NO: 954534 - RNA, 19 nt, Artificial Sequence
  Description of Artificial Sequence: Synthetic oligonucleotide
  Sense strand starting at position 31 of SEQ ID NO: 913794
gguaacuucuaaugaauaa

SEQ ID NO: 954535 - RNA, 19 nt, Artificial Sequence
  Description of Artificial Sequence: Synthetic oligonucleotide
  Antisense strand to SEQ ID NO: 954534
uuauucauuagaaguuacc

SEQ ID NO: 954536 - RNA, 19 nt, Artificial Sequence
  Description of Artificial Sequence: Synthetic oligonucleotide
  Sense strand starting at position 1624 of SEQ ID NO: 913794
ccgcguccuccgggaagau

SEQ ID NO: 954537 - RNA, 19 nt, Artificial Sequence
  Description of Artificial Sequence: Synthetic oligonucleotide
  Antisense strand to SEQ ID NO: 954536
aucuucccggaggacgcgg

SEQ ID NO: 954538 - RNA, 19 nt, Artificial Sequence
  Description of Artificial Sequence: Synthetic oligonucleotide
  Sense strand starting at position 244 of SEQ ID NO: 913794
cuuauaugguuugauuaca

SEQ ID NO: 954539 - RNA, 19 nt, Artificial Sequence
  Description of Artificial Sequence: Synthetic oligonucleotide
  Antisense strand to SEQ ID NO: 954538
uguaaucaaaccauauaag

SEQ ID NO: 954540 - RNA, 19 nt, Artificial Sequence
  Description of Artificial Sequence: Synthetic oligonucleotide
  Sense strand starting at position 3734 of SEQ ID NO: 913794
ugcugacaauucugcauuu

SEQ ID NO: 954541 - RNA, 19 nt, Artificial Sequence
  Description of Artificial Sequence: Synthetic oligonucleotide
  Antisense strand to SEQ ID NO: 954540
aaaugcagaauugucagca

SEQ ID NO: 954542 - RNA, 19 nt, Artificial Sequence
  Description of Artificial Sequence: Synthetic oligonucleotide
  Sense strand starting at position 3557 of SEQ ID NO: 913794
ccguguaccugugcuuaca

SEQ ID NO: 954543 - RNA, 19 nt, Artificial Sequence
  Description of Artificial Sequence: Synthetic oligonucleotide
  Antisense strand to SEQ ID NO: 954542
uguaagcacagguacacgg

SEQ ID NO: 954544 - RNA, 19 nt, Artificial Sequence
  Description of Artificial Sequence: Synthetic oligonucleotide
  Sense strand starting at position 698 of SEQ ID NO: 913794
aagacaaguuauugggcau

SEQ ID NO: 954545 - RNA, 19 nt, Artificial Sequence
  Description of Artificial Sequence: Synthetic oligonucleotide
  Antisense strand to SEQ ID NO: 954544
augcccaauaacuugucuu

SEQ ID NO: 954546 - RNA, 19 nt, Artificial Sequence
  Description of Artificial Sequence: Synthetic oligonucleotide
  Sense strand starting at position 3782 of SEQ ID NO: 913794
uggguagacuguugacauc

SEQ ID NO: 954547 - RNA, 19 nt, Artificial Sequence
  Description of Artificial Sequence: Synthetic oligonucleotide
  Antisense strand to SEQ ID NO: 954546
gaugucaacagucuaccca

SEQ ID NO: 954548 - RNA, 19 nt, Artificial Sequence
  Description of Artificial Sequence: Synthetic oligonucleotide
  Sense strand starting at position 3810 of SEQ ID NO: 913794
ugccuucuuugugaaaccu

SEQ ID NO: 954549 - RNA, 19 nt, Artificial Sequence
  Description of Artificial Sequence: Synthetic oligonucleotide
  Antisense strand to SEQ ID NO: 954548
agguuucacaaagaaggca

SEQ ID NO: 954550 - RNA, 19 nt, Artificial Sequence
  Description of Artificial Sequence: Synthetic oligonucleotide
  Sense strand starting at position 569 of SEQ ID NO: 913794
uggaguugcucucaucucu

SEQ ID NO: 954551 - RNA, 19 nt, Artificial Sequence
  Description of Artificial Sequence: Synthetic oligonucleotide
  Antisense strand to SEQ ID NO: 954550
agagaugagagcaacucca

SEQ ID NO: 954552 - RNA, 19 nt, Artificial Sequence
  Description of Artificial Sequence: Synthetic oligonucleotide
  Sense strand starting at position 183 of SEQ ID NO: 913794
gcuuguuaaucugaugccu

SEQ ID NO: 954553 - RNA, 19 nt, Artificial Sequence
  Description of Artificial Sequence: Synthetic oligonucleotide
  Antisense strand to SEQ ID NO: 954552
aggcaucagauuaacaagc

SEQ ID NO: 954554 - RNA, 19 nt, Artificial Sequence
  Description of Artificial Sequence: Synthetic oligonucleotide
  Sense strand starting at position 185 of SEQ ID NO: 913794
uuguuaaucugaugccuuu

SEQ ID NO: 954555 - RNA, 19 nt, Artificial Sequence
  Description of Artificial Sequence: Synthetic oligonucleotide
  Antisense strand to SEQ ID NO: 954554
aaaggcaucagauuaacaa

SEQ ID NO: 954556 - RNA, 19 nt, Artificial Sequence
  Description of Artificial Sequence: Synthetic oligonucleotide
  Sense strand starting at position 3611 of SEQ ID NO: 913795
uuugaauguguguuugugu

SEQ ID NO: 954557 - RNA, 19 nt, Artificial Sequence
  Description of Artificial Sequence: Synthetic oligonucleotide
  Antisense strand to SEQ ID NO: 954556
acacaaacacacauucaaa

SEQ ID NO: 954558 - RNA, 19 nt, Artificial Sequence
  Description of Artificial Sequence: Synthetic oligonucleotide
  Sense strand starting at position 260 of SEQ ID NO: 913795
gggcuuucgagcgcuagga

SEQ ID NO: 954559 - RNA, 19 nt, Artificial Sequence
  Description of Artificial Sequence: Synthetic oligonucleotide
  Antisense strand to SEQ ID NO: 954558
uccuagcgcucgaaagccc

SEQ ID NO: 954560 - RNA, 19 nt, Artificial Sequence
  Description of Artificial Sequence: Synthetic oligonucleotide
  Sense strand starting at position 3850 of SEQ ID NO: 913795
gguuggaguccagggagaa

SEQ ID NO: 954561 - RNA, 19 nt, Artificial Sequence
  Description of Artificial Sequence: Synthetic oligonucleotide
  Antisense strand to SEQ ID NO: 954560
uucucccuggacuccaacc

SEQ ID NO: 954562 - RNA, 19 nt, Artificial Sequence
  Description of Artificial Sequence: Synthetic oligonucleotide
  Sense strand starting at position 1344 of SEQ ID NO: 913795
cccagaggucccugggaaa

SEQ ID NO: 954563 - RNA, 19 nt, Artificial Sequence
  Description of Artificial Sequence: Synthetic oligonucleotide
  Antisense strand to SEQ ID NO: 954562
uuucccagggaccucuggg

SEQ ID NO: 954564 - RNA, 19 nt, Artificial Sequence
  Description of Artificial Sequence: Synthetic oligonucleotide
  Sense strand starting at position 3630 of SEQ ID NO: 913795
guguuucuccaugcguaua

SEQ ID NO: 954565 - RNA, 19 nt, Artificial Sequence
  Description of Artificial Sequence: Synthetic oligonucleotide
  Antisense strand to SEQ ID NO: 954564
uauacgcauggagaaacac

SEQ ID NO: 954566 - RNA, 19 nt, Artificial Sequence
  Description of Artificial Sequence: Synthetic oligonucleotide
  Sense strand starting at position 508 of SEQ ID NO: 913795
cuccgaguucugcucgagu

SEQ ID NO: 954567 - RNA, 19 nt, Artificial Sequence
  Description of Artificial Sequence: Synthetic oligonucleotide
  Antisense strand to SEQ ID NO: 954566
acucgagcagaacucggag

SEQ ID NO: 954568 - RNA, 19 nt, Artificial Sequence
  Description of Artificial Sequence: Synthetic oligonucleotide
  Sense strand starting at position 2146 of SEQ ID NO: 913795
gugcuauuuaaagguguca

SEQ ID NO: 954569 - RNA, 19 nt, Artificial Sequence
  Description of Artificial Sequence: Synthetic oligonucleotide
  Antisense strand to SEQ ID NO: 954568
ugacaccuuuaaauagcac

SEQ ID NO: 954570 - RNA, 19 nt, Artificial Sequence
  Description of Artificial Sequence: Synthetic oligonucleotide
  Sense strand starting at position 2517 of SEQ ID NO: 913795
uugggaagcucauuaauua

SEQ ID NO: 954571 - RNA, 19 nt, Artificial Sequence
  Description of Artificial Sequence: Synthetic oligonucleotide
  Antisense strand to SEQ ID NO: 954570
uaauuaaugagcuucccaa

SEQ ID NO: 954572 - RNA, 19 nt, Artificial Sequence
  Description of Artificial Sequence: Synthetic oligonucleotide
  Sense strand starting at position 139 of SEQ ID NO: 913795
auugcuucgagagggaaga

SEQ ID NO: 954573 - RNA, 19 nt, Artificial Sequence
  Description of Artificial Sequence: Synthetic oligonucleotide
  Antisense strand to SEQ ID NO: 954572
ucuucccucucgaagcaau

SEQ ID NO: 954574 - RNA, 19 nt, Artificial Sequence
  Description of Artificial Sequence: Synthetic oligonucleotide
  Sense strand starting at position 1064 of SEQ ID NO: 913795
accuaagaguugguuugaa

SEQ ID NO: 954575 - RNA, 19 nt, Artificial Sequence
  Description of Artificial Sequence: Synthetic oligonucleotide
  Antisense strand to SEQ ID NO: 954574
uucaaaccaacucuuaggu

SEQ ID NO: 954576 - RNA, 19 nt, Artificial Sequence
  Description of Artificial Sequence: Synthetic oligonucleotide
  Sense strand starting at position 2612 of SEQ ID NO: 913795
cggcccgagcuguuuguaa

SEQ ID NO: 954577 - RNA, 19 nt, Artificial Sequence
  Description of Artificial Sequence: Synthetic oligonucleotide
  Antisense strand to SEQ ID NO: 954576
uuacaaacagcucgggccg

SEQ ID NO: 954578 - RNA, 19 nt, Artificial Sequence
  Description of Artificial Sequence: Synthetic oligonucleotide
  Sense strand starting at position 3640 of SEQ ID NO: 913795
augcguauauuuguguaaa

SEQ ID NO: 954579 - RNA, 19 nt, Artificial Sequence
  Description of Artificial Sequence: Synthetic oligonucleotide
  Antisense strand to SEQ ID NO: 954578
uuuacacaaauauacgcau

SEQ ID NO: 954580 - RNA, 19 nt, Artificial Sequence
  Description of Artificial Sequence: Synthetic oligonucleotide
  Sense strand starting at position 3642 of SEQ ID NO: 913795
gcguauauuuguguaaaug

SEQ ID NO: 954581 - RNA, 19 nt, Artificial Sequence
  Description of Artificial Sequence: Synthetic oligonucleotide
  Antisense strand to SEQ ID NO: 954580
cauuuacacaaauauacgc

SEQ ID NO: 954582 - RNA, 19 nt, Artificial Sequence
  Description of Artificial Sequence: Synthetic oligonucleotide
  Sense strand starting at position 1063 of SEQ ID NO: 913795
uaccuaagaguugguuuga

SEQ ID NO: 954583 - RNA, 19 nt, Artificial Sequence
  Description of Artificial Sequence: Synthetic oligonucleotide
  Antisense strand to SEQ ID NO: 954582
ucaaaccaacucuuaggua

SEQ ID NO: 954584 - RNA, 19 nt, Artificial Sequence
  Description of Artificial Sequence: Synthetic oligonucleotide
  Sense strand starting at position 772 of SEQ ID NO: 913795
cgacuuucgccgcuucuua

SEQ ID NO: 954585 - RNA, 19 nt, Artificial Sequence
  Description of Artificial Sequence: Synthetic oligonucleotide
  Antisense strand to SEQ ID NO: 954584
uaagaagcggcgaaagucg

SEQ ID NO: 954586 - RNA, 19 nt, Artificial Sequence
  Description of Artificial Sequence: Synthetic oligonucleotide
  Sense strand starting at position 2282 of SEQ ID NO: 913795
cuaacaaguuagccuugau

SEQ ID NO: 954587 - RNA, 19 nt, Artificial Sequence
  Description of Artificial Sequence: Synthetic oligonucleotide
  Antisense strand to SEQ ID NO: 954586
aucaaggcuaacuuguuag

SEQ ID NO: 954588 - RNA, 19 nt, Artificial Sequence
  Description of Artificial Sequence: Synthetic oligonucleotide
  Sense strand starting at position 3664 of SEQ ID NO: 913795
gugaaccuguggguauaua

SEQ ID NO: 954589 - RNA, 19 nt, Artificial Sequence
  Description of Artificial Sequence: Synthetic oligonucleotide
  Antisense strand to SEQ ID NO: 954588
uauauacccacagguucac

SEQ ID NO: 954590 - RNA, 19 nt, Artificial Sequence
  Description of Artificial Sequence: Synthetic oligonucleotide
  Sense strand starting at position 15 of SEQ ID NO: 913795
gugggaagaacccgcuaua

SEQ ID NO: 954591 - RNA, 19 nt, Artificial Sequence
  Description of Artificial Sequence: Synthetic oligonucleotide
  Antisense strand to SEQ ID NO: 954590
uauagcggguucuucccac

SEQ ID NO: 954592 - RNA, 19 nt, Artificial Sequence
  Description of Artificial Sequence: Synthetic oligonucleotide
  Sense strand starting at position 2550 of SEQ ID NO: 913795
ggaggagccggcuggaauu

SEQ ID NO: 954593 - RNA, 19 nt, Artificial Sequence
  Description of Artificial Sequence: Synthetic oligonucleotide
  Antisense strand to SEQ ID NO: 954592
aauuccagccggcuccucc

SEQ ID NO: 954594 - RNA, 19 nt, Artificial Sequence
  Description of Artificial Sequence: Synthetic oligonucleotide
  Sense strand starting at position 3663 of SEQ ID NO: 913795
ugugaaccuguggguauau

SEQ ID NO: 954595 - RNA, 19 nt, Artificial Sequence
  Description of Artificial Sequence: Synthetic oligonucleotide
  Antisense strand to SEQ ID NO: 954594
auauacccacagguucaca

SEQ ID NO: 954596 - RNA, 19 nt, Artificial Sequence
  Description of Artificial Sequence: Synthetic oligonucleotide
  Sense strand starting at position 2561 of SEQ ID NO: 913795
cuggaauuagccugccuaa

SEQ ID NO: 954597 - RNA, 19 nt, Artificial Sequence
  Description of Artificial Sequence: Synthetic oligonucleotide
  Antisense strand to SEQ ID NO: 954596
uuaggcaggcuaauuccag

SEQ ID NO: 954598 - RNA, 19 nt, Artificial Sequence
  Description of Artificial Sequence: Synthetic oligonucleotide
  Sense strand starting at position 1010 of SEQ ID NO: 913795
ugucuuuggucucccagaa

SEQ ID NO: 954599 - RNA, 19 nt, Artificial Sequence
  Description of Artificial Sequence: Synthetic oligonucleotide
  Antisense strand to SEQ ID NO: 954598
uucugggagaccaaagaca

SEQ ID NO: 954600 - RNA, 19 nt, Artificial Sequence
  Description of Artificial Sequence: Synthetic oligonucleotide
  Sense strand starting at position 983 of SEQ ID NO: 913795
aagucuuggcuauggcaaa

SEQ ID NO: 954601 - RNA, 19 nt, Artificial Sequence
  Description of Artificial Sequence: Synthetic oligonucleotide
  Antisense strand to SEQ ID NO: 954600
uuugccauagccaagacuu

SEQ ID NO: 954602 - RNA, 19 nt, Artificial Sequence
  Description of Artificial Sequence: Synthetic oligonucleotide
  Sense strand starting at position 3545 of SEQ ID NO: 913795
gggcccgggaucugugaau

SEQ ID NO: 954603 - RNA, 19 nt, Artificial Sequence
  Description of Artificial Sequence: Synthetic oligonucleotide
  Antisense strand to SEQ ID NO: 954602
auucacagaucccgggccc

SEQ ID NO: 954604 - RNA, 19 nt, Artificial Sequence
  Description of Artificial Sequence: Synthetic oligonucleotide
  Sense strand starting at position 1702 of SEQ ID NO: 913795
aguaacuucuccgcacaga

SEQ ID NO: 954605 - RNA, 19 nt, Artificial Sequence
  Description of Artificial Sequence: Synthetic oligonucleotide
  Antisense strand to SEQ ID NO: 954604
ucugugcggagaaguuacu

SEQ ID NO: 954606 - RNA, 19 nt, Artificial Sequence
  Description of Artificial Sequence: Synthetic oligonucleotide
  Sense strand starting at position 25 of SEQ ID NO: 913795
cccgcuauauagguuuaaa

SEQ ID NO: 954607 - RNA, 19 nt, Artificial Sequence
  Description of Artificial Sequence: Synthetic oligonucleotide
  Antisense strand to SEQ ID NO: 954606
uuuaaaccuauauagcggg

SEQ ID NO: 954608 - RNA, 19 nt, Artificial Sequence
  Description of Artificial Sequence: Synthetic oligonucleotide
  Sense strand starting at position 3676 of SEQ ID NO: 913795
guauauagguguguuugaa

SEQ ID NO: 954609 - RNA, 19 nt, Artificial Sequence
  Description of Artificial Sequence: Synthetic oligonucleotide
  Antisense strand to SEQ ID NO: 954608
uucaaacacaccuauauac

SEQ ID NO: 954610 - RNA, 19 nt, Artificial Sequence
  Description of Artificial Sequence: Synthetic oligonucleotide
  Sense strand starting at position 1726 of SEQ ID NO: 913795
uguugaggauguccucgau

SEQ ID NO: 954611 - RNA, 19 nt, Artificial Sequence
  Description of Artificial Sequence: Synthetic oligonucleotide
  Antisense strand to SEQ ID NO: 954610
aucgaggacauccucaaca

SEQ ID NO: 954612 - RNA, 19 nt, Artificial Sequence
  Description of Artificial Sequence: Synthetic oligonucleotide
  Sense strand starting at position 1732 of SEQ ID NO: 913795
ggauguccucgaugcugaa

SEQ ID NO: 954613 - RNA, 19 nt, Artificial Sequence
  Description of Artificial Sequence: Synthetic oligonucleotide
  Antisense strand to SEQ ID NO: 954612
uucagcaucgaggacaucc

SEQ ID NO: 954614 - RNA, 19 nt, Artificial Sequence
  Description of Artificial Sequence: Synthetic oligonucleotide
  Sense strand starting at position 134 of SEQ ID NO: 913795
gguuuauugcuucgagagg

SEQ ID NO: 954615 - RNA, 19 nt, Artificial Sequence
  Description of Artificial Sequence: Synthetic oligonucleotide
  Antisense strand to SEQ ID NO: 954614
ccucucgaagcaauaaacc

SEQ ID NO: 954616 - RNA, 19 nt, Artificial Sequence
  Description of Artificial Sequence: Synthetic oligonucleotide
  Sense strand starting at position 3581 of SEQ ID NO: 913795
ugugcauuguuacuugaag

SEQ ID NO: 954617 - RNA, 19 nt, Artificial Sequence
  Description of Artificial Sequence: Synthetic oligonucleotide
  Antisense strand to SEQ ID NO: 954616
cuucaaguaacaaugcaca

SEQ ID NO: 954618 - RNA, 19 nt, Artificial Sequence
  Description of Artificial Sequence: Synthetic oligonucleotide
  Sense strand starting at position 3675 of SEQ ID NO: 913795
gguauauagguguguuuga

SEQ ID NO: 954619 - RNA, 19 nt, Artificial Sequence
  Description of Artificial Sequence: Synthetic oligonucleotide
  Antisense strand to SEQ ID NO: 954618
ucaaacacaccuauauacc

SEQ ID NO: 954620 - RNA, 19 nt, Artificial Sequence
  Description of Artificial Sequence: Synthetic oligonucleotide
  Sense strand starting at position 1138 of SEQ ID NO: 913795
ugugaauguugguucucca

SEQ ID NO: 954621 - RNA, 19 nt, Artificial Sequence
  Description of Artificial Sequence: Synthetic oligonucleotide
  Antisense strand to SEQ ID NO: 954620
uggagaaccaacauucaca

SEQ ID NO: 954622 - RNA, 19 nt, Artificial Sequence
  Description of Artificial Sequence: Synthetic oligonucleotide
  Sense strand starting at position 3583 of SEQ ID NO: 913795
ugcauuguuacuugaaggu

SEQ ID NO: 954623 - RNA, 19 nt, Artificial Sequence
  Description of Artificial Sequence: Synthetic oligonucleotide
  Antisense strand to SEQ ID NO: 954622
accuucaaguaacaaugca

SEQ ID NO: 954624 - RNA, 19 nt, Artificial Sequence
  Description of Artificial Sequence: Synthetic oligonucleotide
  Sense strand starting at position 132 of SEQ ID NO: 913795
uggguuuauugcuucgaga

SEQ ID NO: 954625 - RNA, 19 nt, Artificial Sequence
  Description of Artificial Sequence: Synthetic oligonucleotide
  Antisense strand to SEQ ID NO: 954624
ucucgaagcaauaaaccca

SEQ ID NO: 954626 - RNA, 19 nt, Artificial Sequence
  Description of Artificial Sequence: Synthetic oligonucleotide
  Sense strand starting at position 981 of SEQ ID NO: 913795
gcaagucuuggcuauggca

SEQ ID NO: 954627 - RNA, 19 nt, Artificial Sequence
  Description of Artificial Sequence: Synthetic oligonucleotide
  Antisense strand to SEQ ID NO: 954626
ugccauagccaagacuugc

SEQ ID NO: 954628 - RNA, 19 nt, Artificial Sequence
  Description of Artificial Sequence: Synthetic oligonucleotide
  Sense strand starting at position 2296 of SEQ ID NO: 913795
uugaucgcgguguaaucaa

SEQ ID NO: 954629 - RNA, 19 nt, Artificial Sequence
  Description of Artificial Sequence: Synthetic oligonucleotide
  Antisense strand to SEQ ID NO: 954628
uugauuacaccgcgaucaa

SEQ ID NO: 954630 - RNA, 19 nt, Artificial Sequence
  Description of Artificial Sequence: Synthetic oligonucleotide
  Sense strand starting at position 3587 of SEQ ID NO: 913795
uuguuacuugaagguguuu

SEQ ID NO: 954631 - RNA, 19 nt, Artificial Sequence
  Description of Artificial Sequence: Synthetic oligonucleotide
  Antisense strand to SEQ ID NO: 954630
aaacaccuucaaguaacaa

SEQ ID NO: 954632 - RNA, 19 nt, Artificial Sequence
  Description of Artificial Sequence: Synthetic oligonucleotide
  Sense strand starting at position 1347 of SEQ ID NO: 913795
agaggucccugggaaauaa

SEQ ID NO: 954633 - RNA, 19 nt, Artificial Sequence
  Description of Artificial Sequence: Synthetic oligonucleotide
  Antisense strand to SEQ ID NO: 954632
uuauuucccagggaccucu

SEQ ID NO: 954634 - RNA, 19 nt, Artificial Sequence
  Description of Artificial Sequence: Synthetic oligonucleotide
  Sense strand starting at position 1729 of SEQ ID NO: 913795
ugaggauguccucgaugcu

SEQ ID NO: 954635 - RNA, 19 nt, Artificial Sequence
  Description of Artificial Sequence: Synthetic oligonucleotide
  Antisense strand to SEQ ID NO: 954634
agcaucgaggacauccuca

SEQ ID NO: 954636 - RNA, 19 nt, Artificial Sequence
  Description of Artificial Sequence: Synthetic oligonucleotide
  Sense strand starting at position 28 of SEQ ID NO: 913796
gguaucagauaccuuaaag

SEQ ID NO: 954637 - RNA, 19 nt, Artificial Sequence
  Description of Artificial Sequence: Synthetic oligonucleotide
  Antisense strand to SEQ ID NO: 954636
cuuuaagguaucugauacc

SEQ ID NO: 954638 - RNA, 19 nt, Artificial Sequence
  Description of Artificial Sequence: Synthetic oligonucleotide
  Sense strand starting at position 58 of SEQ ID NO: 913796
auauuaauuucgguguuac

SEQ ID NO: 954639 - RNA, 19 nt, Artificial Sequence
  Description of Artificial Sequence: Synthetic oligonucleotide
  Antisense strand to SEQ ID NO: 954638
guaacaccgaaauuaauau

SEQ ID NO: 954640 - RNA, 19 nt, Artificial Sequence
  Description of Artificial Sequence: Synthetic oligonucleotide
  Sense strand starting at position 553 of SEQ ID NO: 913796
ccugguucccaagaauauu

SEQ ID NO: 954641 - RNA, 19 nt, Artificial Sequence
  Description of Artificial Sequence: Synthetic oligonucleotide
  Antisense strand to SEQ ID NO: 954640
aauauucuugggaaccagg

SEQ ID NO: 954642 - RNA, 19 nt, Artificial Sequence
  Description of Artificial Sequence: Synthetic oligonucleotide
  Sense strand starting at position 59 of SEQ ID NO: 913796
uauuaauuucgguguuaca

SEQ ID NO: 954643 - RNA, 19 nt, Artificial Sequence
  Description of Artificial Sequence: Synthetic oligonucleotide
  Antisense strand to SEQ ID NO: 954642
uguaacaccgaaauuaaua

SEQ ID NO: 954644 - RNA, 19 nt, Artificial Sequence
  Description of Artificial Sequence: Synthetic oligonucleotide
  Sense strand starting at position 3392 of SEQ ID NO: 913796
aguuucuggguacauaaua

SEQ ID NO: 954645 - RNA, 19 nt, Artificial Sequence
  Description of Artificial Sequence: Synthetic oligonucleotide
  Antisense strand to SEQ ID NO: 954644
uauuauguacccagaaacu

SEQ ID NO: 954646 - RNA, 19 nt, Artificial Sequence
  Description of Artificial Sequence: Synthetic oligonucleotide
  Sense strand starting at position 2528 of SEQ ID NO: 913796
uuauuaagucauugggaga

SEQ ID NO: 954647 - RNA, 19 nt, Artificial Sequence
  Description of Artificial Sequence: Synthetic oligonucleotide
  Antisense strand to SEQ ID NO: 954646
ucucccaaugacuuaauaa

SEQ ID NO: 954648 - RNA, 19 nt, Artificial Sequence
  Description of Artificial Sequence: Synthetic oligonucleotide
  Sense strand starting at position 2541 of SEQ ID NO: 913796
gggagacaucgccaacauu

SEQ ID NO: 954649 - RNA, 19 nt, Artificial Sequence
  Description of Artificial Sequence: Synthetic oligonucleotide
  Antisense strand to SEQ ID NO: 954648
aauguuggcgaugucuccc

SEQ ID NO: 954650 - RNA, 19 nt, Artificial Sequence
  Description of Artificial Sequence: Synthetic oligonucleotide
  Sense strand starting at position 3390 of SEQ ID NO: 913796
ugaguuucuggguacauaa

SEQ ID NO: 954651 - RNA, 19 nt, Artificial Sequence
  Description of Artificial Sequence: Synthetic oligonucleotide
  Antisense strand to SEQ ID NO: 954650
uuauguacccagaaacuca

SEQ ID NO: 954652 - RNA, 19 nt, Artificial Sequence
  Description of Artificial Sequence: Synthetic oligonucleotide
  Sense strand starting at position 3079 of SEQ ID NO: 913796
cguuaaauacuugacauca

SEQ ID NO: 954653 - RNA, 19 nt, Artificial Sequence
  Description of Artificial Sequence: Synthetic oligonucleotide
  Antisense strand to SEQ ID NO: 954652
ugaugucaaguauuuaacg

SEQ ID NO: 954654 - RNA, 19 nt, Artificial Sequence
  Description of Artificial Sequence: Synthetic oligonucleotide
  Sense strand starting at position 3371 of SEQ ID NO: 913796
ugaagacgccaggaaguau

SEQ ID NO: 954655 - RNA, 19 nt, Artificial Sequence
  Description of Artificial Sequence: Synthetic oligonucleotide
  Antisense strand to SEQ ID NO: 954654
auacuuccuggcgucuuca

SEQ ID NO: 954656 - RNA, 19 nt, Artificial Sequence
  Description of Artificial Sequence: Synthetic oligonucleotide
  Sense strand starting at position 3721 of SEQ ID NO: 913796
cucuuagucccagacauau

SEQ ID NO: 954657 - RNA, 19 nt, Artificial Sequence
  Description of Artificial Sequence: Synthetic oligonucleotide
  Antisense strand to SEQ ID NO: 954656
auaugucugggacuaagag

SEQ ID NO: 954658 - RNA, 19 nt, Artificial Sequence
  Description of Artificial Sequence: Synthetic oligonucleotide
  Sense strand starting at position 3871 of SEQ ID NO: 913796
ggagacaaguuucccaauu

SEQ ID NO: 954659 - RNA, 19 nt, Artificial Sequence
  Description of Artificial Sequence: Synthetic oligonucleotide
  Antisense strand to SEQ ID NO: 954658
aauugggaaacuugucucc

SEQ ID NO: 954660 - RNA, 19 nt, Artificial Sequence
  Description of Artificial Sequence: Synthetic oligonucleotide
  Sense strand starting at position 2486 of SEQ ID NO: 913796
ugcacugaccucuaagauu

SEQ ID NO: 954661 - RNA, 19 nt, Artificial Sequence
  Description of Artificial Sequence: Synthetic oligonucleotide
  Antisense strand to SEQ ID NO: 954660
aaucuuagaggucagugca

SEQ ID NO: 954662 - RNA, 19 nt, Artificial Sequence
  Description of Artificial Sequence: Synthetic oligonucleotide
  Sense strand starting at position 3836 of SEQ ID NO: 913796
auaguugcuggguagagaa

SEQ ID NO: 954663 - RNA, 19 nt, Artificial Sequence
  Description of Artificial Sequence: Synthetic oligonucleotide
  Antisense strand to SEQ ID NO: 954662
uucucuacccagcaacuau

SEQ ID NO: 954664 - RNA, 19 nt, Artificial Sequence
  Description of Artificial Sequence: Synthetic oligonucleotide
  Sense strand starting at position 3958 of SEQ ID NO: 913796
gaacuaacucaugguugac

SEQ ID NO: 954665 - RNA, 19 nt, Artificial Sequence
  Description of Artificial Sequence: Synthetic oligonucleotide
  Antisense strand to SEQ ID NO: 954664
gucaaccaugaguuaguuc

SEQ ID NO: 954666 - RNA, 19 nt, Artificial Sequence
  Description of Artificial Sequence: Synthetic oligonucleotide
  Sense strand starting at position 3573 of SEQ ID NO: 913796
cgguguuuggaggaaauac

SEQ ID NO: 954667 - RNA, 19 nt, Artificial Sequence
  Description of Artificial Sequence: Synthetic oligonucleotide
  Antisense strand to SEQ ID NO: 954666
guauuuccuccaaacaccg

SEQ ID NO: 954668 - RNA, 19 nt, Artificial Sequence
  Description of Artificial Sequence: Synthetic oligonucleotide
  Sense strand starting at position 133 of SEQ ID NO: 913796
aauggaaaggcguauauuc

SEQ ID NO: 954669 - RNA, 19 nt, Artificial Sequence
  Description of Artificial Sequence: Synthetic oligonucleotide
  Antisense strand to SEQ ID NO: 954668
gaauauacgccuuuccauu

SEQ ID NO: 954670 - RNA, 19 nt, Artificial Sequence
  Description of Artificial Sequence: Synthetic oligonucleotide
  Sense strand starting at position 3095 of SEQ ID NO: 913796
ucaggaucccauuggagua

SEQ ID NO: 954671 - RNA, 19 nt, Artificial Sequence
  Description of Artificial Sequence: Synthetic oligonucleotide
  Antisense strand to SEQ ID NO: 954670
uacuccaaugggauccuga

SEQ ID NO: 954672 - RNA, 19 nt, Artificial Sequence
  Description of Artificial Sequence: Synthetic oligonucleotide
  Sense strand starting at position 2517 of SEQ ID NO: 913796
guggauacacguuauuaag

SEQ ID NO: 954673 - RNA, 19 nt, Artificial Sequence
  Description of Artificial Sequence: Synthetic oligonucleotide
  Antisense strand to SEQ ID NO: 954672
cuuaauaacguguauccac

SEQ ID NO: 954674 - RNA, 19 nt, Artificial Sequence
  Description of Artificial Sequence: Synthetic oligonucleotide
  Sense strand starting at position 3432 of SEQ ID NO: 913796
gaggacuaauacgagauuu

SEQ ID NO: 954675 - RNA, 19 nt, Artificial Sequence
  Description of Artificial Sequence: Synthetic oligonucleotide
  Antisense strand to SEQ ID NO: 954674
aaaucucguauuaguccuc

SEQ ID NO: 954676 - RNA, 19 nt, Artificial Sequence
  Description of Artificial Sequence: Synthetic oligonucleotide
  Sense strand starting at position 3605 of SEQ ID NO: 913796
auaaaugaacaacguguaa

SEQ ID NO: 954677 - RNA, 19 nt, Artificial Sequence
  Description of Artificial Sequence: Synthetic oligonucleotide
  Antisense strand to SEQ ID NO: 954676
uuacacguuguucauuuau

SEQ ID NO: 954678 - RNA, 19 nt, Artificial Sequence
  Description of Artificial Sequence: Synthetic oligonucleotide
  Sense strand starting at position 155 of SEQ ID NO: 913796
aaguaaagguuaccugauu

SEQ ID NO: 954679 - RNA, 19 nt, Artificial Sequence
  Description of Artificial Sequence: Synthetic oligonucleotide
  Antisense strand to SEQ ID NO: 954678
aaucagguaaccuuuacuu

SEQ ID NO: 954680 - RNA, 19 nt, Artificial Sequence
  Description of Artificial Sequence: Synthetic oligonucleotide
  Sense strand starting at position 520 of SEQ ID NO: 913796
cggauagacucuccuagau

SEQ ID NO: 954681 - RNA, 19 nt, Artificial Sequence
  Description of Artificial Sequence: Synthetic oligonucleotide
  Antisense strand to SEQ ID NO: 954680
aucuaggagagucuauccg

SEQ ID NO: 954682 - RNA, 19 nt, Artificial Sequence
  Description of Artificial Sequence: Synthetic oligonucleotide
  Sense strand starting at position 2619 of SEQ ID NO: 913796
acuagcaagacugaucgua

SEQ ID NO: 954683 - RNA, 19 nt, Artificial Sequence
  Description of Artificial Sequence: Synthetic oligonucleotide
  Antisense strand to SEQ ID NO: 954682
uacgaucagucuugcuagu

SEQ ID NO: 954684 - RNA, 19 nt, Artificial Sequence
  Description of Artificial Sequence: Synthetic oligonucleotide
  Sense strand starting at position 2977 of SEQ ID NO: 913796
accuuugguguuuaagauu

SEQ ID NO: 954685 - RNA, 19 nt, Artificial Sequence
  Description of Artificial Sequence: Synthetic oligonucleotide
  Antisense strand to SEQ ID NO: 954684
aaucuuaaacaccaaaggu

SEQ ID NO: 954686 - RNA, 19 nt, Artificial Sequence
  Description of Artificial Sequence: Synthetic oligonucleotide
  Sense strand starting at position 2742 of SEQ ID NO: 913796
augcuuuaauuugggauuu

SEQ ID NO: 954687 - RNA, 19 nt, Artificial Sequence
  Description of Artificial Sequence: Synthetic oligonucleotide
  Antisense strand to SEQ ID NO: 954686
aaaucccaaauuaaagcau

SEQ ID NO: 954688 - RNA, 19 nt, Artificial Sequence
  Description of Artificial Sequence: Synthetic oligonucleotide
  Sense strand starting at position 2527 of SEQ ID NO: 913796
guuauuaagucauugggag

SEQ ID NO: 954689 - RNA, 19 nt, Artificial Sequence
  Description of Artificial Sequence: Synthetic oligonucleotide
  Antisense strand to SEQ ID NO: 954688
cucccaaugacuuaauaac

SEQ ID NO: 954690 - RNA, 19 nt, Artificial Sequence
  Description of Artificial Sequence: Synthetic oligonucleotide
  Sense strand starting at position 2942 of SEQ ID NO: 913796
ggccuaguacccuaggauu

SEQ ID NO: 954691 - RNA, 19 nt, Artificial Sequence
  Description of Artificial Sequence: Synthetic oligonucleotide
  Antisense strand to SEQ ID NO: 954690
aauccuaggguacuaggcc

SEQ ID NO: 954692 - RNA, 19 nt, Artificial Sequence
  Description of Artificial Sequence: Synthetic oligonucleotide
  Sense strand starting at position 534 of SEQ ID NO: 913796
uagauucugccgggaaaga

SEQ ID NO: 954693 - RNA, 19 nt, Artificial Sequence
  Description of Artificial Sequence: Synthetic oligonucleotide
  Antisense strand to SEQ ID NO: 954692
ucuuucccggcagaaucua

SEQ ID NO: 954694 - RNA, 19 nt, Artificial Sequence
  Description of Artificial Sequence: Synthetic oligonucleotide
  Sense strand starting at position 425 of SEQ ID NO: 913796
gaaauugccgcugaaugga

SEQ ID NO: 954695 - RNA, 19 nt, Artificial Sequence
  Description of Artificial Sequence: Synthetic oligonucleotide
  Antisense strand to SEQ ID NO: 954694
uccauucagcggcaauuuc

SEQ ID NO: 954696 - RNA, 19 nt, Artificial Sequence
  Description of Artificial Sequence: Synthetic oligonucleotide
  Sense strand starting at position 3070 of SEQ ID NO: 913796
aagcaaagucguuaaauac

SEQ ID NO: 954697 - RNA, 19 nt, Artificial Sequence
  Description of Artificial Sequence: Synthetic oligonucleotide
  Antisense strand to SEQ ID NO: 954696
guauuuaacgacuuugcuu

SEQ ID NO: 954698 - RNA, 19 nt, Artificial Sequence
  Description of Artificial Sequence: Synthetic oligonucleotide
  Sense strand starting at position 3698 of SEQ ID NO: 913796
ggguaauaauuccucgaca

SEQ ID NO: 954699 - RNA, 19 nt, Artificial Sequence
  Description of Artificial Sequence: Synthetic oligonucleotide
  Antisense strand to SEQ ID NO: 954698
ugucgaggaauuauuaccc

SEQ ID NO: 954700 - RNA, 19 nt, Artificial Sequence
  Description of Artificial Sequence: Synthetic oligonucleotide
  Sense strand starting at position 3961 of SEQ ID NO: 913796
cuaacucaugguugaccua

SEQ ID NO: 954701 - RNA, 19 nt, Artificial Sequence
  Description of Artificial Sequence: Synthetic oligonucleotide
  Antisense strand to SEQ ID NO: 954700
uaggucaaccaugaguuag

SEQ ID NO: 954702 - RNA, 19 nt, Artificial Sequence
  Description of Artificial Sequence: Synthetic oligonucleotide
  Sense strand starting at position 2658 of SEQ ID NO: 913796
uuggaauauugugccaaag

SEQ ID NO: 954703 - RNA, 19 nt, Artificial Sequence
  Description of Artificial Sequence: Synthetic oligonucleotide
  Antisense strand to SEQ ID NO: 954702
cuuuggcacaauauuccaa

SEQ ID NO: 954704 - RNA, 19 nt, Artificial Sequence
  Description of Artificial Sequence: Synthetic oligonucleotide
  Sense strand starting at position 3482 of SEQ ID NO: 913796
gugugauggcaggacaucu

SEQ ID NO: 954705 - RNA, 19 nt, Artificial Sequence
  Description of Artificial Sequence: Synthetic oligonucleotide
  Antisense strand to SEQ ID NO: 954704
agauguccugccaucacac

SEQ ID NO: 954706 - RNA, 19 nt, Artificial Sequence
  Description of Artificial Sequence: Synthetic oligonucleotide
  Sense strand starting at position 3327 of SEQ ID NO: 913796
gcaaacgucccacaggauu

SEQ ID NO: 954707 - RNA, 19 nt, Artificial Sequence
  Description of Artificial Sequence: Synthetic oligonucleotide
  Antisense strand to SEQ ID NO: 954706
aauccugugggacguuugc

SEQ ID NO: 954708 - RNA, 19 nt, Artificial Sequence
  Description of Artificial Sequence: Synthetic oligonucleotide
  Sense strand starting at position 135 of SEQ ID NO: 913796
uggaaaggcguauauucuu

SEQ ID NO: 954709 - RNA, 19 nt, Artificial Sequence
  Description of Artificial Sequence: Synthetic oligonucleotide
  Antisense strand to SEQ ID NO: 954708
aagaauauacgccuuucca

SEQ ID NO: 954710 - RNA, 19 nt, Artificial Sequence
  Description of Artificial Sequence: Synthetic oligonucleotide
  Sense strand starting at position 3700 of SEQ ID NO: 913796
guaauaauuccucgacaua

SEQ ID NO: 954711 - RNA, 19 nt, Artificial Sequence
  Description of Artificial Sequence: Synthetic oligonucleotide
  Antisense strand to SEQ ID NO: 954710
uaugucgaggaauuauuac

SEQ ID NO: 954712 - RNA, 19 nt, Artificial Sequence
  Description of Artificial Sequence: Synthetic oligonucleotide
  Sense strand starting at position 3403 of SEQ ID NO: 913796
acauaauacuguccugagu

SEQ ID NO: 954713 - RNA, 19 nt, Artificial Sequence
  Description of Artificial Sequence: Synthetic oligonucleotide
  Antisense strand to SEQ ID NO: 954712
acucaggacaguauuaugu

SEQ ID NO: 954714 - RNA, 19 nt, Artificial Sequence
  Description of Artificial Sequence: Synthetic oligonucleotide
  Sense strand starting at position 92 of SEQ ID NO: 913796
cgaaacucacgcuauacau

SEQ ID NO: 954715 - RNA, 19 nt, Artificial Sequence
  Description of Artificial Sequence: Synthetic oligonucleotide
  Antisense strand to SEQ ID NO: 954714
auguauagcgugaguuucg

SEQ ID NO: 954716 - RNA, 19 nt, Artificial Sequence
  Description of Artificial Sequence: Synthetic oligonucleotide
  Sense strand starting at position 723 of SEQ ID NO: 913797
gguaucagauaccuuaaag

SEQ ID NO: 954717 - RNA, 19 nt, Artificial Sequence
  Description of Artificial Sequence: Synthetic oligonucleotide
  Antisense strand to SEQ ID NO: 954716
cuuuaagguaucugauacc

SEQ ID NO: 954718 - RNA, 19 nt, Artificial Sequence
  Description of Artificial Sequence: Synthetic oligonucleotide
  Sense strand starting at position 753 of SEQ ID NO: 913797
auauuaauuucgguguuac

SEQ ID NO: 954719 - RNA, 19 nt, Artificial Sequence
  Description of Artificial Sequence: Synthetic oligonucleotide
  Antisense strand to SEQ ID NO: 954718
guaacaccgaaauuaauau

SEQ ID NO: 954720 - RNA, 19 nt, Artificial Sequence
  Description of Artificial Sequence: Synthetic oligonucleotide
  Sense strand starting at position 1248 of SEQ ID NO: 913797
ccugguucccaagaauauu

SEQ ID NO: 954721 - RNA, 19 nt, Artificial Sequence
  Description of Artificial Sequence: Synthetic oligonucleotide
  Antisense strand to SEQ ID NO: 954720
aauauucuugggaaccagg

SEQ ID NO: 954722 - RNA, 19 nt, Artificial Sequence
  Description of Artificial Sequence: Synthetic oligonucleotide
  Sense strand starting at position 754 of SEQ ID NO: 913797
uauuaauuucgguguuaca

SEQ ID NO: 954723 - RNA, 19 nt, Artificial Sequence
  Description of Artificial Sequence: Synthetic oligonucleotide
  Antisense strand to SEQ ID NO: 954722
uguaacaccgaaauuaaua

SEQ ID NO: 954724 - RNA, 19 nt, Artificial Sequence
  Description of Artificial Sequence: Synthetic oligonucleotide
  Sense strand starting at position 3223 of SEQ ID NO: 913797
uuauuaagucauugggaga

SEQ ID NO: 954725 - RNA, 19 nt, Artificial Sequence
  Description of Artificial Sequence: Synthetic oligonucleotide
  Antisense strand to SEQ ID NO: 954724
ucucccaaugacuuaauaa

SEQ ID NO: 954726 - RNA, 19 nt, Artificial Sequence
  Description of Artificial Sequence: Synthetic oligonucleotide
  Sense strand starting at position 3236 of SEQ ID NO: 913797
gggagacaucgccaacauu

SEQ ID NO: 954727 - RNA, 19 nt, Artificial Sequence
  Description of Artificial Sequence: Synthetic oligonucleotide
  Antisense strand to SEQ ID NO: 954726
aauguuggcgaugucuccc

SEQ ID NO: 954728 - RNA, 19 nt, Artificial Sequence
  Description of Artificial Sequence: Synthetic oligonucleotide
  Sense strand starting at position 3774 of SEQ ID NO: 913797
cguuaaauacuugacauca

SEQ ID NO: 954729 - RNA, 19 nt, Artificial Sequence
  Description of Artificial Sequence: Synthetic oligonucleotide
  Antisense strand to SEQ ID NO: 954728
ugaugucaaguauuuaacg

SEQ ID NO: 954730 - RNA, 19 nt, Artificial Sequence
  Description of Artificial Sequence: Synthetic oligonucleotide
  Sense strand starting at position 3181 of SEQ ID NO: 913797
ugcacugaccucuaagauu

SEQ ID NO: 954731 - RNA, 19 nt, Artificial Sequence
  Description of Artificial Sequence: Synthetic oligonucleotide
  Antisense strand to SEQ ID NO: 954730
aaucuuagaggucagugca

SEQ ID NO: 954732 - RNA, 19 nt, Artificial Sequence
  Description of Artificial Sequence: Synthetic oligonucleotide
  Sense strand starting at position 828 of SEQ ID NO: 913797
aauggaaaggcguauauuc

SEQ ID NO: 954733 - RNA, 19 nt, Artificial Sequence
  Description of Artificial Sequence: Synthetic oligonucleotide
  Antisense strand to SEQ ID NO: 954732
gaauauacgccuuuccauu

SEQ ID NO: 954734 - RNA, 19 nt, Artificial Sequence
  Description of Artificial Sequence: Synthetic oligonucleotide
  Sense strand starting at position 3790 of SEQ ID NO: 913797
ucaggaucccauuggagua

SEQ ID NO: 954735 - RNA, 19 nt, Artificial Sequence
  Description of Artificial Sequence: Synthetic oligonucleotide
  Antisense strand to SEQ ID NO: 954734
uacuccaaugggauccuga

SEQ ID NO: 954736 - RNA, 19 nt, Artificial Sequence
  Description of Artificial Sequence: Synthetic oligonucleotide
  Sense strand starting at position 3212 of SEQ ID NO: 913797
guggauacacguuauuaag

SEQ ID NO: 954737 - RNA, 19 nt, Artificial Sequence
  Description of Artificial Sequence: Synthetic oligonucleotide
  Antisense strand to SEQ ID NO: 954736
cuuaauaacguguauccac

SEQ ID NO: 954738 - RNA, 19 nt, Artificial Sequence
  Description of Artificial Sequence: Synthetic oligonucleotide
  Sense strand starting at position 850 of SEQ ID NO: 913797
aaguaaagguuaccugauu

SEQ ID NO: 954739 - RNA, 19 nt, Artificial Sequence
  Description of Artificial Sequence: Synthetic oligonucleotide
  Antisense strand to SEQ ID NO: 954738
aaucagguaaccuuuacuu

SEQ ID NO: 954740 - RNA, 19 nt, Artificial Sequence
  Description of Artificial Sequence: Synthetic oligonucleotide
  Sense strand starting at position 1215 of SEQ ID NO: 913797
cggauagacucuccuagau

SEQ ID NO: 954741 - RNA, 19 nt, Artificial Sequence
  Description of Artificial Sequence: Synthetic oligonucleotide
  Antisense strand to SEQ ID NO: 954740
aucuaggagagucuauccg

SEQ ID NO: 954742 - RNA, 19 nt, Artificial Sequence
  Description of Artificial Sequence: Synthetic oligonucleotide
  Sense strand starting at position 3314 of SEQ ID NO: 913797
acuagcaagacugaucgua

SEQ ID NO: 954743 - RNA, 19 nt, Artificial Sequence
  Description of Artificial Sequence: Synthetic oligonucleotide
  Antisense strand to SEQ ID NO: 954742
uacgaucagucuugcuagu

SEQ ID NO: 954744 - RNA, 19 nt, Artificial Sequence
  Description of Artificial Sequence: Synthetic oligonucleotide
  Sense strand starting at position 3672 of SEQ ID NO: 913797
accuuugguguuuaagauu

SEQ ID NO: 954745 - RNA, 19 nt, Artificial Sequence
  Description of Artificial Sequence: Synthetic oligonucleotide
  Antisense strand to SEQ ID NO: 954744
aaucuuaaacaccaaaggu

SEQ ID NO: 954746 - RNA, 19 nt, Artificial Sequence
  Description of Artificial Sequence: Synthetic oligonucleotide
  Sense strand starting at position 3437 of SEQ ID NO: 913797
augcuuuaauuugggauuu

SEQ ID NO: 954747 - RNA, 19 nt, Artificial Sequence
  Description of Artificial Sequence: Synthetic oligonucleotide
  Antisense strand to SEQ ID NO: 954746
aaaucccaaauuaaagcau

SEQ ID NO: 954748 - RNA, 19 nt, Artificial Sequence
  Description of Artificial Sequence: Synthetic oligonucleotide
  Sense strand starting at position 3222 of SEQ ID NO: 913797
guuauuaagucauugggag

SEQ ID NO: 954749 - RNA, 19 nt, Artificial Sequence
  Description of Artificial Sequence: Synthetic oligonucleotide
  Antisense strand to SEQ ID NO: 954748
cucccaaugacuuaauaac

SEQ ID NO: 954750 - RNA, 19 nt, Artificial Sequence
  Description of Artificial Sequence: Synthetic oligonucleotide
  Sense strand starting at position 3637 of SEQ ID NO: 913797
ggccuaguacccuaggauu

SEQ ID NO: 954751 - RNA, 19 nt, Artificial Sequence
  Description of Artificial Sequence: Synthetic oligonucleotide
  Antisense strand to SEQ ID NO: 954750
aauccuaggguacuaggcc

SEQ ID NO: 954752 - RNA, 19 nt, Artificial Sequence
  Description of Artificial Sequence: Synthetic oligonucleotide
  Sense strand starting at position 1229 of SEQ ID NO: 913797
uagauucugccgggaaaga

SEQ ID NO: 954753 - RNA, 19 nt, Artificial Sequence
  Description of Artificial Sequence: Synthetic oligonucleotide
  Antisense strand to SEQ ID NO: 954752
ucuuucccggcagaaucua

SEQ ID NO: 954754 - RNA, 19 nt, Artificial Sequence
  Description of Artificial Sequence: Synthetic oligonucleotide
  Sense strand starting at position 1120 of SEQ ID NO: 913797
gaaauugccgcugaaugga

SEQ ID NO: 954755 - RNA, 19 nt, Artificial Sequence
  Description of Artificial Sequence: Synthetic oligonucleotide
  Antisense strand to SEQ ID NO: 954754
uccauucagcggcaauuuc

SEQ ID NO: 954756 - RNA, 19 nt, Artificial Sequence
  Description of Artificial Sequence: Synthetic oligonucleotide
  Sense strand starting at position 3765 of SEQ ID NO: 913797
aagcaaagucguuaaauac

SEQ ID NO: 954757 - RNA, 19 nt, Artificial Sequence
  Description of Artificial Sequence: Synthetic oligonucleotide
  Antisense strand to SEQ ID NO: 954756
guauuuaacgacuuugcuu

SEQ ID NO: 954758 - RNA, 19 nt, Artificial Sequence
  Description of Artificial Sequence: Synthetic oligonucleotide
  Sense strand starting at position 459 of SEQ ID NO: 913797
aguacuuaaaccgacguaa

SEQ ID NO: 954759 - RNA, 19 nt, Artificial Sequence
  Description of Artificial Sequence: Synthetic oligonucleotide
  Antisense strand to SEQ ID NO: 954758
uuacgucgguuuaaguacu

SEQ ID NO: 954760 - RNA, 19 nt, Artificial Sequence
  Description of Artificial Sequence: Synthetic oligonucleotide
  Sense strand starting at position 3353 of SEQ ID NO: 913797
uuggaauauugugccaaag

SEQ ID NO: 954761 - RNA, 19 nt, Artificial Sequence
  Description of Artificial Sequence: Synthetic oligonucleotide
  Antisense strand to SEQ ID NO: 954760
cuuuggcacaauauuccaa

SEQ ID NO: 954762 - RNA, 19 nt, Artificial Sequence
  Description of Artificial Sequence: Synthetic oligonucleotide
  Sense strand starting at position 830 of SEQ ID NO: 913797
uggaaaggcguauauucuu

SEQ ID NO: 954763 - RNA, 19 nt, Artificial Sequence
  Description of Artificial Sequence: Synthetic oligonucleotide
  Antisense strand to SEQ ID NO: 954762
aagaauauacgccuuucca

SEQ ID NO: 954764 - RNA, 19 nt, Artificial Sequence
  Description of Artificial Sequence: Synthetic oligonucleotide
  Sense strand starting at position 787 of SEQ ID NO: 913797
cgaaacucacgcuauacau

SEQ ID NO: 954765 - RNA, 19 nt, Artificial Sequence
  Description of Artificial Sequence: Synthetic oligonucleotide
  Antisense strand to SEQ ID NO: 954764
auguauagcgugaguuucg

SEQ ID NO: 954766 - RNA, 19 nt, Artificial Sequence
  Description of Artificial Sequence: Synthetic oligonucleotide
  Sense strand starting at position 423 of SEQ ID NO: 913797
cuucuaugauaguccgaaa

SEQ ID NO: 954767 - RNA, 19 nt, Artificial Sequence
  Description of Artificial Sequence: Synthetic oligonucleotide
  Antisense strand to SEQ ID NO: 954766
uuucggacuaucauagaag

SEQ ID NO: 954768 - RNA, 19 nt, Artificial Sequence
  Description of Artificial Sequence: Synthetic oligonucleotide
  Sense strand starting at position 1228 of SEQ ID NO: 913797
cuagauucugccgggaaag

SEQ ID NO: 954769 - RNA, 19 nt, Artificial Sequence
  Description of Artificial Sequence: Synthetic oligonucleotide
  Antisense strand to SEQ ID NO: 954768
cuuucccggcagaaucuag

SEQ ID NO: 954770 - RNA, 19 nt, Artificial Sequence
  Description of Artificial Sequence: Synthetic oligonucleotide
  Sense strand starting at position 3127 of SEQ ID NO: 913797
cccagagccuguuuaagaa

SEQ ID NO: 954771 - RNA, 19 nt, Artificial Sequence
  Description of Artificial Sequence: Synthetic oligonucleotide
  Antisense strand to SEQ ID NO: 954770
uucuuaaacaggcucuggg

SEQ ID NO: 954772 - RNA, 19 nt, Artificial Sequence
  Description of Artificial Sequence: Synthetic oligonucleotide
  Sense strand starting at position 3764 of SEQ ID NO: 913797
aaagcaaagucguuaaaua

SEQ ID NO: 954773 - RNA, 19 nt, Artificial Sequence
  Description of Artificial Sequence: Synthetic oligonucleotide
  Antisense strand to SEQ ID NO: 954772
uauuuaacgacuuugcuuu

SEQ ID NO: 954774 - RNA, 19 nt, Artificial Sequence
  Description of Artificial Sequence: Synthetic oligonucleotide
  Sense strand starting at position 461 of SEQ ID NO: 913797
uacuuaaaccgacguaaca

SEQ ID NO: 954775 - RNA, 19 nt, Artificial Sequence
  Description of Artificial Sequence: Synthetic oligonucleotide
  Antisense strand to SEQ ID NO: 954774
uguuacgucgguuuaagua

SEQ ID NO: 954776 - RNA, 19 nt, Artificial Sequence
  Description of Artificial Sequence: Synthetic oligonucleotide
  Sense strand starting at position 1103 of SEQ ID NO: 913797
agaacuucucaccgcauga

SEQ ID NO: 954777 - RNA, 19 nt, Artificial Sequence
  Description of Artificial Sequence: Synthetic oligonucleotide
  Antisense strand to SEQ ID NO: 954776
ucaugcggugagaaguucu

SEQ ID NO: 954778 - RNA, 19 nt, Artificial Sequence
  Description of Artificial Sequence: Synthetic oligonucleotide
  Sense strand starting at position 1102 of SEQ ID NO: 913797
gagaacuucucaccgcaug

SEQ ID NO: 954779 - RNA, 19 nt, Artificial Sequence
  Description of Artificial Sequence: Synthetic oligonucleotide
  Antisense strand to SEQ ID NO: 954778
caugcggugagaaguucuc

SEQ ID NO: 954780 - RNA, 19 nt, Artificial Sequence
  Description of Artificial Sequence: Synthetic oligonucleotide
  Sense strand starting at position 3671 of SEQ ID NO: 913797
caccuuugguguuuaagau

SEQ ID NO: 954781 - RNA, 19 nt, Artificial Sequence
  Description of Artificial Sequence: Synthetic oligonucleotide
  Antisense strand to SEQ ID NO: 954780
aucuuaaacaccaaaggug

SEQ ID NO: 954782 - RNA, 19 nt, Artificial Sequence
  Description of Artificial Sequence: Synthetic oligonucleotide
  Sense strand starting at position 3869 of SEQ ID NO: 913797
ggcggaaugguguaucuac

SEQ ID NO: 954783 - RNA, 19 nt, Artificial Sequence
  Description of Artificial Sequence: Synthetic oligonucleotide
  Antisense strand to SEQ ID NO: 954782
guagauacaccauuccgcc

SEQ ID NO: 954784 - RNA, 19 nt, Artificial Sequence
  Description of Artificial Sequence: Synthetic oligonucleotide
  Sense strand starting at position 565 of SEQ ID NO: 913797
guuuguuuccuggagggca

SEQ ID NO: 954785 - RNA, 19 nt, Artificial Sequence
  Description of Artificial Sequence: Synthetic oligonucleotide
  Antisense strand to SEQ ID NO: 954784
ugcccuccaggaaacaaac

SEQ ID NO: 954786 - RNA, 19 nt, Artificial Sequence
  Description of Artificial Sequence: Synthetic oligonucleotide
  Sense strand starting at position 833 of SEQ ID NO: 913797
aaaggcguauauucuuuaa

SEQ ID NO: 954787 - RNA, 19 nt, Artificial Sequence
  Description of Artificial Sequence: Synthetic oligonucleotide
  Antisense strand to SEQ ID NO: 954786
uuaaagaauauacgccuuu

SEQ ID NO: 954788 - RNA, 19 nt, Artificial Sequence
  Description of Artificial Sequence: Synthetic oligonucleotide
  Sense strand starting at position 673 of SEQ ID NO: 913797
gcacaagcauauguuugaa

SEQ ID NO: 954789 - RNA, 19 nt, Artificial Sequence
  Description of Artificial Sequence: Synthetic oligonucleotide
  Antisense strand to SEQ ID NO: 954788
uucaaacauaugcuugugc

SEQ ID NO: 954790 - RNA, 19 nt, Artificial Sequence
  Description of Artificial Sequence: Synthetic oligonucleotide
  Sense strand starting at position 3772 of SEQ ID NO: 913797
gucguuaaauacuugacau

SEQ ID NO: 954791 - RNA, 19 nt, Artificial Sequence
  Description of Artificial Sequence: Synthetic oligonucleotide
  Antisense strand to SEQ ID NO: 954790
augucaaguauuuaacgac

SEQ ID NO: 954792 - RNA, 19 nt, Artificial Sequence
  Description of Artificial Sequence: Synthetic oligonucleotide
  Sense strand starting at position 3099 of SEQ ID NO: 913797
augaacuucuccgucgaaa

SEQ ID NO: 954793 - RNA, 19 nt, Artificial Sequence
  Description of Artificial Sequence: Synthetic oligonucleotide
  Antisense strand to SEQ ID NO: 954792
uuucgacggagaaguucau

SEQ ID NO: 954794 - RNA, 19 nt, Artificial Sequence
  Description of Artificial Sequence: Synthetic oligonucleotide
  Sense strand starting at position 740 of SEQ ID NO: 913797
agcauuguugccuauauua

SEQ ID NO: 954795 - RNA, 19 nt, Artificial Sequence
  Description of Artificial Sequence: Synthetic oligonucleotide
  Antisense strand to SEQ ID NO: 954794
uaauauaggcaacaaugcu

SEQ ID NO: 954796 - RNA, 19 nt, Artificial Sequence
  Description of Artificial Sequence: Synthetic oligonucleotide
  Sense strand starting at position 3740 of SEQ ID NO: 913798
ugcauucucccagacaaag

SEQ ID NO: 954797 - RNA, 19 nt, Artificial Sequence
  Description of Artificial Sequence: Synthetic oligonucleotide
  Antisense strand to SEQ ID NO: 954796
cuuugucugggagaaugca

SEQ ID NO: 954798 - RNA, 19 nt, Artificial Sequence
  Description of Artificial Sequence: Synthetic oligonucleotide
  Sense strand starting at position 3846 of SEQ ID NO: 913798
uccucaauaccugagugau

SEQ ID NO: 954799 - RNA, 19 nt, Artificial Sequence
  Description of Artificial Sequence: Synthetic oligonucleotide
  Antisense strand to SEQ ID NO: 954798
aucacucagguauugagga

SEQ ID NO: 954800 - RNA, 19 nt, Artificial Sequence
  Description of Artificial Sequence: Synthetic oligonucleotide
  Sense strand starting at position 445 of SEQ ID NO: 913798
cccauacucggauauucua

SEQ ID NO: 954801 - RNA, 19 nt, Artificial Sequence
  Description of Artificial Sequence: Synthetic oligonucleotide
  Antisense strand to SEQ ID NO: 954800
uagaauauccgaguauggg

SEQ ID NO: 954802 - RNA, 19 nt, Artificial Sequence
  Description of Artificial Sequence: Synthetic oligonucleotide
  Sense strand starting at position 2981 of SEQ ID NO: 913798
agaugauguggauggucaa

SEQ ID NO: 954803 - RNA, 19 nt, Artificial Sequence
  Description of Artificial Sequence: Synthetic oligonucleotide
  Antisense strand to SEQ ID NO: 954802
uugaccauccacaucaucu

SEQ ID NO: 954804 - RNA, 19 nt, Artificial Sequence
  Description of Artificial Sequence: Synthetic oligonucleotide
  Sense strand starting at position 3695 of SEQ ID NO: 913798
aaguauuuccuuggcagca

SEQ ID NO: 954805 - RNA, 19 nt, Artificial Sequence
  Description of Artificial Sequence: Synthetic oligonucleotide
  Antisense strand to SEQ ID NO: 954804
ugcugccaaggaaauacuu

SEQ ID NO: 954806 - RNA, 19 nt, Artificial Sequence
  Description of Artificial Sequence: Synthetic oligonucleotide
  Sense strand starting at position 3696 of SEQ ID NO: 913798
aguauuuccuuggcagcau

SEQ ID NO: 954807 - RNA, 19 nt, Artificial Sequence
  Description of Artificial Sequence: Synthetic oligonucleotide
  Antisense strand to SEQ ID NO: 954806
augcugccaaggaaauacu

SEQ ID NO: 954808 - RNA, 19 nt, Artificial Sequence
  Description of Artificial Sequence: Synthetic oligonucleotide
  Sense strand starting at position 2982 of SEQ ID NO: 913798
gaugauguggauggucaau

SEQ ID NO: 954809 - RNA, 19 nt, Artificial Sequence
  Description of Artificial Sequence: Synthetic oligonucleotide
  Antisense strand to SEQ ID NO: 954808
auugaccauccacaucauc

SEQ ID NO: 954810 - RNA, 19 nt, Artificial Sequence
  Description of Artificial Sequence: Synthetic oligonucleotide
  Sense strand starting at position 2766 of SEQ ID NO: 913798
ugacgcaucagucaagaca

SEQ ID NO: 954811 - RNA, 19 nt, Artificial Sequence
  Description of Artificial Sequence: Synthetic oligonucleotide
  Antisense strand to SEQ ID NO: 954810
ugucuugacugaugcguca

SEQ ID NO: 954812 - RNA, 19 nt, Artificial Sequence
  Description of Artificial Sequence: Synthetic oligonucleotide
  Sense strand starting at position 293 of SEQ ID NO: 913798
cccagcaugggucaauuau

SEQ ID NO: 954813 - RNA, 19 nt, Artificial Sequence
  Description of Artificial Sequence: Synthetic oligonucleotide
  Antisense strand to SEQ ID NO: 954812
auaauugacccaugcuggg

SEQ ID NO: 954814 - RNA, 19 nt, Artificial Sequence
  Description of Artificial Sequence: Synthetic oligonucleotide
  Sense strand starting at position 689 of SEQ ID NO: 913798
ggagaaagcugacuccagu

SEQ ID NO: 954815 - RNA, 19 nt, Artificial Sequence
  Description of Artificial Sequence: Synthetic oligonucleotide
  Antisense strand to SEQ ID NO: 954814
acuggagucagcuuucucc

SEQ ID NO: 954816 - RNA, 19 nt, Artificial Sequence
  Description of Artificial Sequence: Synthetic oligonucleotide
  Sense strand starting at position 1319 of SEQ ID NO: 913798
acuucugauuggcuaacaa

SEQ ID NO: 954817 - RNA, 19 nt, Artificial Sequence
  Description of Artificial Sequence: Synthetic oligonucleotide
  Antisense strand to SEQ ID NO: 954816
uuguuagccaaucagaagu

SEQ ID NO: 954818 - RNA, 19 nt, Artificial Sequence
  Description of Artificial Sequence: Synthetic oligonucleotide
  Sense strand starting at position 3446 of SEQ ID NO: 913798
gcuuaaaguguuuaugaga

SEQ ID NO: 954819 - RNA, 19 nt, Artificial Sequence
  Description of Artificial Sequence: Synthetic oligonucleotide
  Antisense strand to SEQ ID NO: 954818
ucucauaaacacuuuaagc

SEQ ID NO: 954820 - RNA, 19 nt, Artificial Sequence
  Description of Artificial Sequence: Synthetic oligonucleotide
  Sense strand starting at position 1339 of SEQ ID NO: 913798
cuggaauucugagaauuuc

SEQ ID NO: 954821 - RNA, 19 nt, Artificial Sequence
  Description of Artificial Sequence: Synthetic oligonucleotide
  Antisense strand to SEQ ID NO: 954820
gaaauucucagaauuccag

SEQ ID NO: 954822 - RNA, 19 nt, Artificial Sequence
  Description of Artificial Sequence: Synthetic oligonucleotide
  Sense strand starting at position 3815 of SEQ ID NO: 913798
guggauaccuagguuugaa

SEQ ID NO: 954823 - RNA, 19 nt, Artificial Sequence
  Description of Artificial Sequence: Synthetic oligonucleotide
  Antisense strand to SEQ ID NO: 954822
uucaaaccuagguauccac

SEQ ID NO: 954824 - RNA, 19 nt, Artificial Sequence
  Description of Artificial Sequence: Synthetic oligonucleotide
  Sense strand starting at position 3918 of SEQ ID NO: 913798
uggcuuggugaguaucaaa

SEQ ID NO: 954825 - RNA, 19 nt, Artificial Sequence
  Description of Artificial Sequence: Synthetic oligonucleotide
  Antisense strand to SEQ ID NO: 954824
uuugauacucaccaagcca

SEQ ID NO: 954826 - RNA, 19 nt, Artificial Sequence
  Description of Artificial Sequence: Synthetic oligonucleotide
  Sense strand starting at position 3518 of SEQ ID NO: 913798
ugcagaguccagggauuga

SEQ ID NO: 954827 - RNA, 19 nt, Artificial Sequence
  Description of Artificial Sequence: Synthetic oligonucleotide
  Antisense strand to SEQ ID NO: 954826
ucaaucccuggacucugca

SEQ ID NO: 954828 - RNA, 19 nt, Artificial Sequence
  Description of Artificial Sequence: Synthetic oligonucleotide
  Sense strand starting at position 3796 of SEQ ID NO: 913798
agaacacuggcccgaaauu

SEQ ID NO: 954829 - RNA, 19 nt, Artificial Sequence
  Description of Artificial Sequence: Synthetic oligonucleotide
  Antisense strand to SEQ ID NO: 954828
aauuucgggccaguguucu

SEQ ID NO: 954830 - RNA, 19 nt, Artificial Sequence
  Description of Artificial Sequence: Synthetic oligonucleotide
  Sense strand starting at position 3976 of SEQ ID NO: 913798
caggcaguccuguaaauac

SEQ ID NO: 954831 - RNA, 19 nt, Artificial Sequence
  Description of Artificial Sequence: Synthetic oligonucleotide
  Antisense strand to SEQ ID NO: 954830
guauuuacaggacugccug

SEQ ID NO: 954832 - RNA, 19 nt, Artificial Sequence
  Description of Artificial Sequence: Synthetic oligonucleotide
  Sense strand starting at position 1550 of SEQ ID NO: 913798
acaaguucucgccaaacac

SEQ ID NO: 954833 - RNA, 19 nt, Artificial Sequence
  Description of Artificial Sequence: Synthetic oligonucleotide
  Antisense strand to SEQ ID NO: 954832
guguuuggcgagaacuugu

SEQ ID NO: 954834 - RNA, 19 nt, Artificial Sequence
  Description of Artificial Sequence: Synthetic oligonucleotide
  Sense strand starting at position 3814 of SEQ ID NO: 913798
uguggauaccuagguuuga

SEQ ID NO: 954835 - RNA, 19 nt, Artificial Sequence
  Description of Artificial Sequence: Synthetic oligonucleotide
  Antisense strand to SEQ ID NO: 954834
ucaaaccuagguauccaca

SEQ ID NO: 954836 - RNA, 19 nt, Artificial Sequence
  Description of Artificial Sequence: Synthetic oligonucleotide
  Sense strand starting at position 458 of SEQ ID NO: 913798
auucuaggauuguuagguu

SEQ ID NO: 954837 - RNA, 19 nt, Artificial Sequence
  Description of Artificial Sequence: Synthetic oligonucleotide
  Antisense strand to SEQ ID NO: 954836
aaccuaacaauccuagaau

SEQ ID NO: 954838 - RNA, 19 nt, Artificial Sequence
  Description of Artificial Sequence: Synthetic oligonucleotide
  Sense strand starting at position 639 of SEQ ID NO: 913798
cugugaaguauguagccaa

SEQ ID NO: 954839 - RNA, 19 nt, Artificial Sequence
  Description of Artificial Sequence: Synthetic oligonucleotide
  Antisense strand to SEQ ID NO: 954838
uuggcuacauacuucacag

SEQ ID NO: 954840 - RNA, 19 nt, Artificial Sequence
  Description of Artificial Sequence: Synthetic oligonucleotide
  Sense strand starting at position 452 of SEQ ID NO: 913798
ucggauauucuaggauugu

SEQ ID NO: 954841 - RNA, 19 nt, Artificial Sequence
  Description of Artificial Sequence: Synthetic oligonucleotide
  Antisense strand to SEQ ID NO: 954840
acaauccuagaauauccga

SEQ ID NO: 954842 - RNA, 19 nt, Artificial Sequence
  Description of Artificial Sequence: Synthetic oligonucleotide
  Sense strand starting at position 2885 of SEQ ID NO: 913798
cuuugagggcuucggagau

SEQ ID NO: 954843 - RNA, 19 nt, Artificial Sequence
  Description of Artificial Sequence: Synthetic oligonucleotide
  Antisense strand to SEQ ID NO: 954842
aucuccgaagcccucaaag

SEQ ID NO: 954844 - RNA, 19 nt, Artificial Sequence
  Description of Artificial Sequence: Synthetic oligonucleotide
  Sense strand starting at position 883 of SEQ ID NO: 913798
uaggcuaucccuggcaaga

SEQ ID NO: 954845 - RNA, 19 nt, Artificial Sequence
  Description of Artificial Sequence: Synthetic oligonucleotide
  Antisense strand to SEQ ID NO: 954844
ucuugccagggauagccua

SEQ ID NO: 954846 - RNA, 19 nt, Artificial Sequence
  Description of Artificial Sequence: Synthetic oligonucleotide
  Sense strand starting at position 3917 of SEQ ID NO: 913798
auggcuuggugaguaucaa

SEQ ID NO: 954847 - RNA, 19 nt, Artificial Sequence
  Description of Artificial Sequence: Synthetic oligonucleotide
  Antisense strand to SEQ ID NO: 954846
uugauacucaccaagccau

SEQ ID NO: 954848 - RNA, 19 nt, Artificial Sequence
  Description of Artificial Sequence: Synthetic oligonucleotide
  Sense strand starting at position 3445 of SEQ ID NO: 913798
ggcuuaaaguguuuaugag

SEQ ID NO: 954849 - RNA, 19 nt, Artificial Sequence
  Description of Artificial Sequence: Synthetic oligonucleotide
  Antisense strand to SEQ ID NO: 954848
cucauaaacacuuuaagcc

SEQ ID NO: 954850 - RNA, 19 nt, Artificial Sequence
  Description of Artificial Sequence: Synthetic oligonucleotide
  Sense strand starting at position 3442 of SEQ ID NO: 913798
ggaggcuuaaaguguuuau

SEQ ID NO: 954851 - RNA, 19 nt, Artificial Sequence
  Description of Artificial Sequence: Synthetic oligonucleotide
  Antisense strand to SEQ ID NO: 954850
auaaacacuuuaagccucc

SEQ ID NO: 954852 - RNA, 19 nt, Artificial Sequence
  Description of Artificial Sequence: Synthetic oligonucleotide
  Sense strand starting at position 1315 of SEQ ID NO: 913798
agucacuucugauuggcua

SEQ ID NO: 954853 - RNA, 19 nt, Artificial Sequence
  Description of Artificial Sequence: Synthetic oligonucleotide
  Antisense strand to SEQ ID NO: 954852
uagccaaucagaagugacu

SEQ ID NO: 954854 - RNA, 19 nt, Artificial Sequence
  Description of Artificial Sequence: Synthetic oligonucleotide
  Sense strand starting at position 442 of SEQ ID NO: 913798
guucccauacucggauauu

SEQ ID NO: 954855 - RNA, 19 nt, Artificial Sequence
  Description of Artificial Sequence: Synthetic oligonucleotide
  Antisense strand to SEQ ID NO: 954854
aauauccgaguaugggaac

SEQ ID NO: 954856 - RNA, 19 nt, Artificial Sequence
  Description of Artificial Sequence: Synthetic oligonucleotide
  Sense strand starting at position 1316 of SEQ ID NO: 913798
gucacuucugauuggcuaa

SEQ ID NO: 954857 - RNA, 19 nt, Artificial Sequence
  Description of Artificial Sequence: Synthetic oligonucleotide
  Antisense strand to SEQ ID NO: 954856
uuagccaaucagaagugac

SEQ ID NO: 954858 - RNA, 19 nt, Artificial Sequence
  Description of Artificial Sequence: Synthetic oligonucleotide
  Sense strand starting at position 3913 of SEQ ID NO: 913798
accuauggcuuggugagua

SEQ ID NO: 954859 - RNA, 19 nt, Artificial Sequence
  Description of Artificial Sequence: Synthetic oligonucleotide
  Antisense strand to SEQ ID NO: 954858
uacucaccaagccauaggu

SEQ ID NO: 954860 - RNA, 19 nt, Artificial Sequence
  Description of Artificial Sequence: Synthetic oligonucleotide
  Sense strand starting at position 3912 of SEQ ID NO: 913798
aaccuauggcuuggugagu

SEQ ID NO: 954861 - RNA, 19 nt, Artificial Sequence
  Description of Artificial Sequence: Synthetic oligonucleotide
  Antisense strand to SEQ ID NO: 954860
acucaccaagccauagguu

SEQ ID NO: 954862 - RNA, 19 nt, Artificial Sequence
  Description of Artificial Sequence: Synthetic oligonucleotide
  Sense strand starting at position 466 of SEQ ID NO: 913798
auuguuagguucucuuauu

SEQ ID NO: 954863 - RNA, 19 nt, Artificial Sequence
  Description of Artificial Sequence: Synthetic oligonucleotide
  Antisense strand to SEQ ID NO: 954862
aauaagagaaccuaacaau

SEQ ID NO: 954864 - RNA, 19 nt, Artificial Sequence
  Description of Artificial Sequence: Synthetic oligonucleotide
  Sense strand starting at position 299 of SEQ ID NO: 913798
augggucaauuauaaagga

SEQ ID NO: 954865 - RNA, 19 nt, Artificial Sequence
  Description of Artificial Sequence: Synthetic oligonucleotide
  Antisense strand to SEQ ID NO: 954864
uccuuuauaauugacccau

SEQ ID NO: 954866 - RNA, 19 nt, Artificial Sequence
  Description of Artificial Sequence: Synthetic oligonucleotide
  Sense strand starting at position 943 of SEQ ID NO: 913798
ucucucaaguucucaguuu

SEQ ID NO: 954867 - RNA, 19 nt, Artificial Sequence
  Description of Artificial Sequence: Synthetic oligonucleotide
  Antisense strand to SEQ ID NO: 954866
aaacugagaacuugagaga

SEQ ID NO: 954868 - RNA, 19 nt, Artificial Sequence
  Description of Artificial Sequence: Synthetic oligonucleotide
  Sense strand starting at position 675 of SEQ ID NO: 913798
gacacugacuuccaggaga

SEQ ID NO: 954869 - RNA, 19 nt, Artificial Sequence
  Description of Artificial Sequence: Synthetic oligonucleotide
  Antisense strand to SEQ ID NO: 954868
ucuccuggaagucaguguc

SEQ ID NO: 954870 - RNA, 19 nt, Artificial Sequence
  Description of Artificial Sequence: Synthetic oligonucleotide
  Sense strand starting at position 467 of SEQ ID NO: 913798
uuguuagguucucuuauuc

SEQ ID NO: 954871 - RNA, 19 nt, Artificial Sequence
  Description of Artificial Sequence: Synthetic oligonucleotide
  Antisense strand to SEQ ID NO: 954870
gaauaagagaaccuaacaa

SEQ ID NO: 954872 - RNA, 19 nt, Artificial Sequence
  Description of Artificial Sequence: Synthetic oligonucleotide
  Sense strand starting at position 2665 of SEQ ID NO: 913798
gggcuugggaucuguguuu

SEQ ID NO: 954873 - RNA, 19 nt, Artificial Sequence
  Description of Artificial Sequence: Synthetic oligonucleotide
  Antisense strand to SEQ ID NO: 954872
aaacacagaucccaagccc

SEQ ID NO: 954874 - RNA, 19 nt, Artificial Sequence
  Description of Artificial Sequence: Synthetic oligonucleotide
  Sense strand starting at position 3516 of SEQ ID NO: 913798
ggugcagaguccagggauu

SEQ ID NO: 954875 - RNA, 19 nt, Artificial Sequence
  Description of Artificial Sequence: Synthetic oligonucleotide
  Antisense strand to SEQ ID NO: 954874
aaucccuggacucugcacc

SEQ ID NO: 954876 - RNA, 19 nt, Artificial Sequence
  Description of Artificial Sequence: Synthetic oligonucleotide
  Sense strand starting at position 3972 of SEQ ID NO: 913799
agcacauagggccaaauau

SEQ ID NO: 954877 - RNA, 19 nt, Artificial Sequence
  Description of Artificial Sequence: Synthetic oligonucleotide
  Antisense strand to SEQ ID NO: 954876
auauuuggcccuaugugcu

SEQ ID NO: 954878 - RNA, 19 nt, Artificial Sequence
  Description of Artificial Sequence: Synthetic oligonucleotide
  Sense strand starting at position 1539 of SEQ ID NO: 913799
gcucaugucccgaguggga

SEQ ID NO: 954879 - RNA, 19 nt, Artificial Sequence
  Description of Artificial Sequence: Synthetic oligonucleotide
  Antisense strand to SEQ ID NO: 954878
ucccacucgggacaugagc

SEQ ID NO: 954880 - RNA, 19 nt, Artificial Sequence
  Description of Artificial Sequence: Synthetic oligonucleotide
  Sense strand starting at position 2519 of SEQ ID NO: 913799
cugacaucagacuguaaac

SEQ ID NO: 954881 - RNA, 19 nt, Artificial Sequence
  Description of Artificial Sequence: Synthetic oligonucleotide
  Antisense strand to SEQ ID NO: 954880
guuuacagucugaugucag

SEQ ID NO: 954882 - RNA, 19 nt, Artificial Sequence
  Description of Artificial Sequence: Synthetic oligonucleotide
  Sense strand starting at position 3757 of SEQ ID NO: 913799
acagccuggccauagaaua

SEQ ID NO: 954883 - RNA, 19 nt, Artificial Sequence
  Description of Artificial Sequence: Synthetic oligonucleotide
  Antisense strand to SEQ ID NO: 954882
uauucuauggccaggcugu

SEQ ID NO: 954884 - RNA, 19 nt, Artificial Sequence
  Description of Artificial Sequence: Synthetic oligonucleotide
  Sense strand starting at position 2908 of SEQ ID NO: 913799
accuuacucguggacaaau

SEQ ID NO: 954885 - RNA, 19 nt, Artificial Sequence
  Description of Artificial Sequence: Synthetic oligonucleotide
  Antisense strand to SEQ ID NO: 954884
auuuguccacgaguaaggu

SEQ ID NO: 954886 - RNA, 19 nt, Artificial Sequence
  Description of Artificial Sequence: Synthetic oligonucleotide
  Sense strand starting at position 3099 of SEQ ID NO: 913799
augacauacucacuaguua

SEQ ID NO: 954887 - RNA, 19 nt, Artificial Sequence
  Description of Artificial Sequence: Synthetic oligonucleotide
  Antisense strand to SEQ ID NO: 954886
uaacuagugaguaugucau

SEQ ID NO: 954888 - RNA, 19 nt, Artificial Sequence
  Description of Artificial Sequence: Synthetic oligonucleotide
  Sense strand starting at position 868 of SEQ ID NO: 913799
gguaaauagcucugaggag

SEQ ID NO: 954889 - RNA, 19 nt, Artificial Sequence
  Description of Artificial Sequence: Synthetic oligonucleotide
  Antisense strand to SEQ ID NO: 954888
cuccucagagcuauuuacc

SEQ ID NO: 954890 - RNA, 19 nt, Artificial Sequence
  Description of Artificial Sequence: Synthetic oligonucleotide
  Sense strand starting at position 3089 of SEQ ID NO: 913799
aggauuucuuaugacauac

SEQ ID NO: 954891 - RNA, 19 nt, Artificial Sequence
  Description of Artificial Sequence: Synthetic oligonucleotide
  Antisense strand to SEQ ID NO: 954890
guaugucauaagaaauccu

SEQ ID NO: 954892 - RNA, 19 nt, Artificial Sequence
  Description of Artificial Sequence: Synthetic oligonucleotide
  Sense strand starting at position 95 of SEQ ID NO: 913799
cuagauuggcuguaucuag

SEQ ID NO: 954893 - RNA, 19 nt, Artificial Sequence
  Description of Artificial Sequence: Synthetic oligonucleotide
  Antisense strand to SEQ ID NO: 954892
cuagauacagccaaucuag

SEQ ID NO: 954894 - RNA, 19 nt, Artificial Sequence
  Description of Artificial Sequence: Synthetic oligonucleotide
  Sense strand starting at position 83 of SEQ ID NO: 913799
uuggaaggguagcuagauu

SEQ ID NO: 954895 - RNA, 19 nt, Artificial Sequence
  Description of Artificial Sequence: Synthetic oligonucleotide
  Antisense strand to SEQ ID NO: 954894
aaucuagcuacccuuccaa

SEQ ID NO: 954896 - RNA, 19 nt, Artificial Sequence
  Description of Artificial Sequence: Synthetic oligonucleotide
  Sense strand starting at position 3694 of SEQ ID NO: 913799
uuuauuaugcaaggacuua

SEQ ID NO: 954897 - RNA, 19 nt, Artificial Sequence
  Description of Artificial Sequence: Synthetic oligonucleotide
  Antisense strand to SEQ ID NO: 954896
uaaguccuugcauaauaaa

SEQ ID NO: 954898 - RNA, 19 nt, Artificial Sequence
  Description of Artificial Sequence: Synthetic oligonucleotide
  Sense strand starting at position 3836 of SEQ ID NO: 913799
agccuaucaccaggacuua

SEQ ID NO: 954899 - RNA, 19 nt, Artificial Sequence
  Description of Artificial Sequence: Synthetic oligonucleotide
  Antisense strand to SEQ ID NO: 954898
uaaguccuggugauaggcu

SEQ ID NO: 954900 - RNA, 19 nt, Artificial Sequence
  Description of Artificial Sequence: Synthetic oligonucleotide
  Sense strand starting at position 2455 of SEQ ID NO: 913799
uggugaaauccuggagcag

SEQ ID NO: 954901 - RNA, 19 nt, Artificial Sequence
  Description of Artificial Sequence: Synthetic oligonucleotide
  Antisense strand to SEQ ID NO: 954900
cugcuccaggauuucacca

SEQ ID NO: 954902 - RNA, 19 nt, Artificial Sequence
  Description of Artificial Sequence: Synthetic oligonucleotide
  Sense strand starting at position 182 of SEQ ID NO: 913799
gugccaacaugugucauuu

SEQ ID NO: 954903 - RNA, 19 nt, Artificial Sequence
  Description of Artificial Sequence: Synthetic oligonucleotide
  Antisense strand to SEQ ID NO: 954902
aaaugacacauguuggcac

SEQ ID NO: 954904 - RNA, 19 nt, Artificial Sequence
  Description of Artificial Sequence: Synthetic oligonucleotide
  Sense strand starting at position 2907 of SEQ ID NO: 913799
gaccuuacucguggacaaa

SEQ ID NO: 954905 - RNA, 19 nt, Artificial Sequence
  Description of Artificial Sequence: Synthetic oligonucleotide
  Antisense strand to SEQ ID NO: 954904
uuuguccacgaguaagguc

SEQ ID NO: 954906 - RNA, 19 nt, Artificial Sequence
  Description of Artificial Sequence: Synthetic oligonucleotide
  Sense strand starting at position 3016 of SEQ ID NO: 913799
uugcaauuugagugucugu

SEQ ID NO: 954907 - RNA, 19 nt, Artificial Sequence
  Description of Artificial Sequence: Synthetic oligonucleotide
  Antisense strand to SEQ ID NO: 954906
acagacacucaaauugcaa

SEQ ID NO: 954908 - RNA, 19 nt, Artificial Sequence
  Description of Artificial Sequence: Synthetic oligonucleotide
  Sense strand starting at position 3115 of SEQ ID NO: 913799
uuaacugugcaguaauauu

SEQ ID NO: 954909 - RNA, 19 nt, Artificial Sequence
  Description of Artificial Sequence: Synthetic oligonucleotide
  Antisense strand to SEQ ID NO: 954908
aauauuacugcacaguuaa

SEQ ID NO: 954910 - RNA, 19 nt, Artificial Sequence
  Description of Artificial Sequence: Synthetic oligonucleotide
  Sense strand starting at position 3512 of SEQ ID NO: 913799
gccaucaaccugugauaua

SEQ ID NO: 954911 - RNA, 19 nt, Artificial Sequence
  Description of Artificial Sequence: Synthetic oligonucleotide
  Antisense strand to SEQ ID NO: 954910
uauaucacagguugauggc

SEQ ID NO: 954912 - RNA, 19 nt, Artificial Sequence
  Description of Artificial Sequence: Synthetic oligonucleotide
  Sense strand starting at position 726 of SEQ ID NO: 913799
ugaaauguguuagcucaag

SEQ ID NO: 954913 - RNA, 19 nt, Artificial Sequence
  Description of Artificial Sequence: Synthetic oligonucleotide
  Antisense strand to SEQ ID NO: 954912
cuugagcuaacacauuuca

SEQ ID NO: 954914 - RNA, 19 nt, Artificial Sequence
  Description of Artificial Sequence: Synthetic oligonucleotide
  Sense strand starting at position 255 of SEQ ID NO: 913799
cugcacagucucugaagau

SEQ ID NO: 954915 - RNA, 19 nt, Artificial Sequence
  Description of Artificial Sequence: Synthetic oligonucleotide
  Antisense strand to SEQ ID NO: 954914
aucuucagagacugugcag

SEQ ID NO: 954916 - RNA, 19 nt, Artificial Sequence
  Description of Artificial Sequence: Synthetic oligonucleotide
  Sense strand starting at position 3112 of SEQ ID NO: 913799
uaguuaacugugcaguaau

SEQ ID NO: 954917 - RNA, 19 nt, Artificial Sequence
  Description of Artificial Sequence: Synthetic oligonucleotide
  Antisense strand to SEQ ID NO: 954916
auuacugcacaguuaacua

SEQ ID NO: 954918 - RNA, 19 nt, Artificial Sequence
  Description of Artificial Sequence: Synthetic oligonucleotide
  Sense strand starting at position 213 of SEQ ID NO: 913799
agagcccuguccucacaau

SEQ ID NO: 954919 - RNA, 19 nt, Artificial Sequence
  Description of Artificial Sequence: Synthetic oligonucleotide
  Antisense strand to SEQ ID NO: 954918
auugugaggacagggcucu

SEQ ID NO: 954920 - RNA, 19 nt, Artificial Sequence
  Description of Artificial Sequence: Synthetic oligonucleotide
  Sense strand starting at position 498 of SEQ ID NO: 913799
gagccugugucuccagaaa

SEQ ID NO: 954921 - RNA, 19 nt, Artificial Sequence
  Description of Artificial Sequence: Synthetic oligonucleotide
  Antisense strand to SEQ ID NO: 954920
uuucuggagacacaggcuc

SEQ ID NO: 954922 - RNA, 19 nt, Artificial Sequence
  Description of Artificial Sequence: Synthetic oligonucleotide
  Sense strand starting at position 719 of SEQ ID NO: 913799
ggccacuugaaauguguua

SEQ ID NO: 954923 - RNA, 19 nt, Artificial Sequence
  Description of Artificial Sequence: Synthetic oligonucleotide
  Antisense strand to SEQ ID NO: 954922
uaacacauuucaaguggcc

SEQ ID NO: 954924 - RNA, 19 nt, Artificial Sequence
  Description of Artificial Sequence: Synthetic oligonucleotide
  Sense strand starting at position 1246 of SEQ ID NO: 913799
uggguauugccaugguaac

SEQ ID NO: 954925 - RNA, 19 nt, Artificial Sequence
  Description of Artificial Sequence: Synthetic oligonucleotide
  Antisense strand to SEQ ID NO: 954924
guuaccauggcaauaccca

SEQ ID NO: 954926 - RNA, 19 nt, Artificial Sequence
  Description of Artificial Sequence: Synthetic oligonucleotide
  Sense strand starting at position 855 of SEQ ID NO: 913799
uugucuaggccuggguaaa

SEQ ID NO: 954927 - RNA, 19 nt, Artificial Sequence
  Description of Artificial Sequence: Synthetic oligonucleotide
  Antisense strand to SEQ ID NO: 954926
uuuacccaggccuagacaa

SEQ ID NO: 954928 - RNA, 19 nt, Artificial Sequence
  Description of Artificial Sequence: Synthetic oligonucleotide
  Sense strand starting at position 854 of SEQ ID NO: 913799
auugucuaggccuggguaa

SEQ ID NO: 954929 - RNA, 19 nt, Artificial Sequence
  Description of Artificial Sequence: Synthetic oligonucleotide
  Antisense strand to SEQ ID NO: 954928
uuacccaggccuagacaau

SEQ ID NO: 954930 - RNA, 19 nt, Artificial Sequence
  Description of Artificial Sequence: Synthetic oligonucleotide
  Sense strand starting at position 856 of SEQ ID NO: 913799
ugucuaggccuggguaaau

SEQ ID NO: 954931 - RNA, 19 nt, Artificial Sequence
  Description of Artificial Sequence: Synthetic oligonucleotide
  Antisense strand to SEQ ID NO: 954930
auuuacccaggccuagaca

SEQ ID NO: 954932 - RNA, 19 nt, Artificial Sequence
  Description of Artificial Sequence: Synthetic oligonucleotide
  Sense strand starting at position 1432 of SEQ ID NO: 913799
agacuuaccugggagaacu

SEQ ID NO: 954933 - RNA, 19 nt, Artificial Sequence
  Description of Artificial Sequence: Synthetic oligonucleotide
  Antisense strand to SEQ ID NO: 954932
aguucucccagguaagucu

SEQ ID NO: 954934 - RNA, 19 nt, Artificial Sequence
  Description of Artificial Sequence: Synthetic oligonucleotide
  Sense strand starting at position 3687 of SEQ ID NO: 913799
ccgaucauuuauuaugcaa

SEQ ID NO: 954935 - RNA, 19 nt, Artificial Sequence
  Description of Artificial Sequence: Synthetic oligonucleotide
  Antisense strand to SEQ ID NO: 954934
uugcauaauaaaugaucgg

SEQ ID NO: 954936 - RNA, 19 nt, Artificial Sequence
  Description of Artificial Sequence: Synthetic oligonucleotide
  Sense strand starting at position 3111 of SEQ ID NO: 913799
cuaguuaacugugcaguaa

SEQ ID NO: 954937 - RNA, 19 nt, Artificial Sequence
  Description of Artificial Sequence: Synthetic oligonucleotide
  Antisense strand to SEQ ID NO: 954936
uuacugcacaguuaacuag

SEQ ID NO: 954938 - RNA, 19 nt, Artificial Sequence
  Description of Artificial Sequence: Synthetic oligonucleotide
  Sense strand starting at position 3134 of SEQ ID NO: 913799
gcaccuggcucugugaaca

SEQ ID NO: 954939 - RNA, 19 nt, Artificial Sequence
  Description of Artificial Sequence: Synthetic oligonucleotide
  Antisense strand to SEQ ID NO: 954938
uguucacagagccaggugc

SEQ ID NO: 954940 - RNA, 19 nt, Artificial Sequence
  Description of Artificial Sequence: Synthetic oligonucleotide
  Sense strand starting at position 3110 of SEQ ID NO: 913799
acuaguuaacugugcagua

SEQ ID NO: 954941 - RNA, 19 nt, Artificial Sequence
  Description of Artificial Sequence: Synthetic oligonucleotide
  Antisense strand to SEQ ID NO: 954940
uacugcacaguuaacuagu

SEQ ID NO: 954942 - RNA, 19 nt, Artificial Sequence
  Description of Artificial Sequence: Synthetic oligonucleotide
  Sense strand starting at position 184 of SEQ ID NO: 913799
gccaacaugugucauuuaa

SEQ ID NO: 954943 - RNA, 19 nt, Artificial Sequence
  Description of Artificial Sequence: Synthetic oligonucleotide
  Antisense strand to SEQ ID NO: 954942
uuaaaugacacauguuggc

SEQ ID NO: 954944 - RNA, 19 nt, Artificial Sequence
  Description of Artificial Sequence: Synthetic oligonucleotide
  Sense strand starting at position 3023 of SEQ ID NO: 913799
uugagugucuguuucucua

SEQ ID NO: 954945 - RNA, 19 nt, Artificial Sequence
  Description of Artificial Sequence: Synthetic oligonucleotide
  Antisense strand to SEQ ID NO: 954944
uagagaaacagacacucaa

SEQ ID NO: 954946 - RNA, 19 nt, Artificial Sequence
  Description of Artificial Sequence: Synthetic oligonucleotide
  Sense strand starting at position 3025 of SEQ ID NO: 913799
gagugucuguuucucuacu

SEQ ID NO: 954947 - RNA, 19 nt, Artificial Sequence
  Description of Artificial Sequence: Synthetic oligonucleotide
  Antisense strand to SEQ ID NO: 954946
aguagagaaacagacacuc

SEQ ID NO: 954948 - RNA, 19 nt, Artificial Sequence
  Description of Artificial Sequence: Synthetic oligonucleotide
  Sense strand starting at position 91 of SEQ ID NO: 913799
guagcuagauuggcuguau

SEQ ID NO: 954949 - RNA, 19 nt, Artificial Sequence
  Description of Artificial Sequence: Synthetic oligonucleotide
  Antisense strand to SEQ ID NO: 954948
auacagccaaucuagcuac

SEQ ID NO: 954950 - RNA, 19 nt, Artificial Sequence
  Description of Artificial Sequence: Synthetic oligonucleotide
  Sense strand starting at position 1729 of SEQ ID NO: 913799
gagccuucuuuguuugcaa

SEQ ID NO: 954951 - RNA, 19 nt, Artificial Sequence
  Description of Artificial Sequence: Synthetic oligonucleotide
  Antisense strand to SEQ ID NO: 954950
uugcaaacaaagaaggcuc

SEQ ID NO: 954952 - RNA, 19 nt, Artificial Sequence
  Description of Artificial Sequence: Synthetic oligonucleotide
  Sense strand starting at position 181 of SEQ ID NO: 913799
ugugccaacaugugucauu

SEQ ID NO: 954953 - RNA, 19 nt, Artificial Sequence
  Description of Artificial Sequence: Synthetic oligonucleotide
  Antisense strand to SEQ ID NO: 954952
aaugacacauguuggcaca

SEQ ID NO: 954954 - RNA, 19 nt, Artificial Sequence
  Description of Artificial Sequence: Synthetic oligonucleotide
  Sense strand starting at position 632 of SEQ ID NO: 913799
agaguagauucucagaccu

SEQ ID NO: 954955 - RNA, 19 nt, Artificial Sequence
  Description of Artificial Sequence: Synthetic oligonucleotide
  Antisense strand to SEQ ID NO: 954954
aggucugagaaucuacucu

SEQ ID NO: 954956 - RNA, 19 nt, Artificial Sequence
  Description of Artificial Sequence: Synthetic oligonucleotide
  Sense strand starting at position 3461 of SEQ ID NO: 913800
aagguaggaucacccauau

SEQ ID NO: 954957 - RNA, 19 nt, Artificial Sequence
  Description of Artificial Sequence: Synthetic oligonucleotide
  Antisense strand to SEQ ID NO: 954956
auaugggugauccuaccuu

SEQ ID NO: 954958 - RNA, 19 nt, Artificial Sequence
  Description of Artificial Sequence: Synthetic oligonucleotide
  Sense strand starting at position 3401 of SEQ ID NO: 913800
gggugugagucauuucuca

SEQ ID NO: 954959 - RNA, 19 nt, Artificial Sequence
  Description of Artificial Sequence: Synthetic oligonucleotide
  Antisense strand to SEQ ID NO: 954958
ugagaaaugacucacaccc

SEQ ID NO: 954960 - RNA, 19 nt, Artificial Sequence
  Description of Artificial Sequence: Synthetic oligonucleotide
  Sense strand starting at position 2794 of SEQ ID NO: 913800
gaaugcaugccagauaaug

SEQ ID NO: 954961 - RNA, 19 nt, Artificial Sequence
  Description of Artificial Sequence: Synthetic oligonucleotide
  Antisense strand to SEQ ID NO: 954960
cauuaucuggcaugcauuc

SEQ ID NO: 954962 - RNA, 19 nt, Artificial Sequence
  Description of Artificial Sequence: Synthetic oligonucleotide
  Sense strand starting at position 3260 of SEQ ID NO: 913800
cuauguggucuggagauag

SEQ ID NO: 954963 - RNA, 19 nt, Artificial Sequence
  Description of Artificial Sequence: Synthetic oligonucleotide
  Antisense strand to SEQ ID NO: 954962
cuaucuccagaccacauag

SEQ ID NO: 954964 - RNA, 19 nt, Artificial Sequence
  Description of Artificial Sequence: Synthetic oligonucleotide
  Sense strand starting at position 3408 of SEQ ID NO: 913800
agucauuucucagcuucua

SEQ ID NO: 954965 - RNA, 19 nt, Artificial Sequence
  Description of Artificial Sequence: Synthetic oligonucleotide
  Antisense strand to SEQ ID NO: 954964
uagaagcugagaaaugacu

SEQ ID NO: 954966 - RNA, 19 nt, Artificial Sequence
  Description of Artificial Sequence: Synthetic oligonucleotide
  Sense strand starting at position 1520 of SEQ ID NO: 913800
uagggaaaugcucaaggcu

SEQ ID NO: 954967 - RNA, 19 nt, Artificial Sequence
  Description of Artificial Sequence: Synthetic oligonucleotide
  Antisense strand to SEQ ID NO: 954966
agccuugagcauuucccua

SEQ ID NO: 954968 - RNA, 19 nt, Artificial Sequence
  Description of Artificial Sequence: Synthetic oligonucleotide
  Sense strand starting at position 1484 of SEQ ID NO: 913800
ugggaauacucccuuccca

SEQ ID NO: 954969 - RNA, 19 nt, Artificial Sequence
  Description of Artificial Sequence: Synthetic oligonucleotide
  Antisense strand to SEQ ID NO: 954968
ugggaagggaguauuccca

SEQ ID NO: 954970 - RNA, 19 nt, Artificial Sequence
  Description of Artificial Sequence: Synthetic oligonucleotide
  Sense strand starting at position 2707 of SEQ ID NO: 913800
gacaaagcucagggagguu

SEQ ID NO: 954971 - RNA, 19 nt, Artificial Sequence
  Description of Artificial Sequence: Synthetic oligonucleotide
  Antisense strand to SEQ ID NO: 954970
aaccucccugagcuuuguc

SEQ ID NO: 954972 - RNA, 19 nt, Artificial Sequence
  Description of Artificial Sequence: Synthetic oligonucleotide
  Sense strand starting at position 1510 of SEQ ID NO: 913800
ugcccauaucuagggaaau

SEQ ID NO: 954973 - RNA, 19 nt, Artificial Sequence
  Description of Artificial Sequence: Synthetic oligonucleotide
  Antisense strand to SEQ ID NO: 954972
auuucccuagauaugggca

SEQ ID NO: 954974 - RNA, 19 nt, Artificial Sequence
  Description of Artificial Sequence: Synthetic oligonucleotide
  Sense strand starting at position 3405 of SEQ ID NO: 913800
gugagucauuucucagcuu

SEQ ID NO: 954975 - RNA, 19 nt, Artificial Sequence
  Description of Artificial Sequence: Synthetic oligonucleotide
  Antisense strand to SEQ ID NO: 954974
aagcugagaaaugacucac

SEQ ID NO: 954976 - RNA, 19 nt, Artificial Sequence
  Description of Artificial Sequence: Synthetic oligonucleotide
  Sense strand starting at position 290 of SEQ ID NO: 913800
gaaggaguccugcaagcau

SEQ ID NO: 954977 - RNA, 19 nt, Artificial Sequence
  Description of Artificial Sequence: Synthetic oligonucleotide
  Antisense strand to SEQ ID NO: 954976
augcuugcaggacuccuuc

SEQ ID NO: 954978 - RNA, 19 nt, Artificial Sequence
  Description of Artificial Sequence: Synthetic oligonucleotide
  Sense strand starting at position 446 of SEQ ID NO: 913800
guggaaucuccagguuaga

SEQ ID NO: 954979 - RNA, 19 nt, Artificial Sequence
  Description of Artificial Sequence: Synthetic oligonucleotide
  Antisense strand to SEQ ID NO: 954978
ucuaaccuggagauuccac

SEQ ID NO: 954980 - RNA, 19 nt, Artificial Sequence
  Description of Artificial Sequence: Synthetic oligonucleotide
  Sense strand starting at position 1355 of SEQ ID NO: 913800
ucaaguuugggauggagca

SEQ ID NO: 954981 - RNA, 19 nt, Artificial Sequence
  Description of Artificial Sequence: Synthetic oligonucleotide
  Antisense strand to SEQ ID NO: 954980
ugcuccaucccaaacuuga

SEQ ID NO: 954982 - RNA, 19 nt, Artificial Sequence
  Description of Artificial Sequence: Synthetic oligonucleotide
  Sense strand starting at position 2777 of SEQ ID NO: 913800
cugggcugauuccuacaga

SEQ ID NO: 954983 - RNA, 19 nt, Artificial Sequence
  Description of Artificial Sequence: Synthetic oligonucleotide
  Antisense strand to SEQ ID NO: 954982
ucuguaggaaucagcccag

SEQ ID NO: 954984 - RNA, 19 nt, Artificial Sequence
  Description of Artificial Sequence: Synthetic oligonucleotide
  Sense strand starting at position 3294 of SEQ ID NO: 913800
ggcuccuugguuggagaaa

SEQ ID NO: 954985 - RNA, 19 nt, Artificial Sequence
  Description of Artificial Sequence: Synthetic oligonucleotide
  Antisense strand to SEQ ID NO: 954984
uuucuccaaccaaggagcc

SEQ ID NO: 954986 - RNA, 19 nt, Artificial Sequence
  Description of Artificial Sequence: Synthetic oligonucleotide
  Sense strand starting at position 1473 of SEQ ID NO: 913800
ccucuccaugcugggaaua

SEQ ID NO: 954987 - RNA, 19 nt, Artificial Sequence
  Description of Artificial Sequence: Synthetic oligonucleotide
  Antisense strand to SEQ ID NO: 954986
uauucccagcauggagagg

SEQ ID NO: 954988 - RNA, 19 nt, Artificial Sequence
  Description of Artificial Sequence: Synthetic oligonucleotide
  Sense strand starting at position 550 of SEQ ID NO: 913800
ggccucuauggcuauuaua

SEQ ID NO: 954989 - RNA, 19 nt, Artificial Sequence
  Description of Artificial Sequence: Synthetic oligonucleotide
  Antisense strand to SEQ ID NO: 954988
uauaauagccauagaggcc

SEQ ID NO: 954990 - RNA, 19 nt, Artificial Sequence
  Description of Artificial Sequence: Synthetic oligonucleotide
  Sense strand starting at position 616 of SEQ ID NO: 913800
ucaaguacccguggaacaa

SEQ ID NO: 954991 - RNA, 19 nt, Artificial Sequence
  Description of Artificial Sequence: Synthetic oligonucleotide
  Antisense strand to SEQ ID NO: 954990
uuguuccacggguacuuga

SEQ ID NO: 954992 - RNA, 19 nt, Artificial Sequence
  Description of Artificial Sequence: Synthetic oligonucleotide
  Sense strand starting at position 3755 of SEQ ID NO: 913800
gggcauaaccaguguggga

SEQ ID NO: 954993 - RNA, 19 nt, Artificial Sequence
  Description of Artificial Sequence: Synthetic oligonucleotide
  Antisense strand to SEQ ID NO: 954992
ucccacacugguuaugccc

SEQ ID NO: 954994 - RNA, 19 nt, Artificial Sequence
  Description of Artificial Sequence: Synthetic oligonucleotide
  Sense strand starting at position 1877 of SEQ ID NO: 913800
ugcacucacccgggagaua

SEQ ID NO: 954995 - RNA, 19 nt, Artificial Sequence
  Description of Artificial Sequence: Synthetic oligonucleotide
  Antisense strand to SEQ ID NO: 954994
uaucucccgggugagugca

SEQ ID NO: 954996 - RNA, 19 nt, Artificial Sequence
  Description of Artificial Sequence: Synthetic oligonucleotide
  Sense strand starting at position 3165 of SEQ ID NO: 913800
gagacaguguguucuggau

SEQ ID NO: 954997 - RNA, 19 nt, Artificial Sequence
  Description of Artificial Sequence: Synthetic oligonucleotide
  Antisense strand to SEQ ID NO: 954996
auccagaacacacugucuc

SEQ ID NO: 954998 - RNA, 19 nt, Artificial Sequence
  Description of Artificial Sequence: Synthetic oligonucleotide
  Sense strand starting at position 3258 of SEQ ID NO: 913800
cccuauguggucuggagau

SEQ ID NO: 954999 - RNA, 19 nt, Artificial Sequence
  Description of Artificial Sequence: Synthetic oligonucleotide
  Antisense strand to SEQ ID NO: 954998
aucuccagaccacauaggg

SEQ ID NO: 955000 - RNA, 19 nt, Artificial Sequence
  Description of Artificial Sequence: Synthetic oligonucleotide
  Sense strand starting at position 1295 of SEQ ID NO: 913800
caaagcagccauggugaau

SEQ ID NO: 955001 - RNA, 19 nt, Artificial Sequence
  Description of Artificial Sequence: Synthetic oligonucleotide
  Antisense strand to SEQ ID NO: 955000
auucaccauggcugcuuug

SEQ ID NO: 955002 - RNA, 19 nt, Artificial Sequence
  Description of Artificial Sequence: Synthetic oligonucleotide
  Sense strand starting at position 3896 of SEQ ID NO: 913800
gcaggagagugcucuuaaa

SEQ ID NO: 955003 - RNA, 19 nt, Artificial Sequence
  Description of Artificial Sequence: Synthetic oligonucleotide
  Antisense strand to SEQ ID NO: 955002
uuuaagagcacucuccugc

SEQ ID NO: 955004 - RNA, 19 nt, Artificial Sequence
  Description of Artificial Sequence: Synthetic oligonucleotide
  Sense strand starting at position 1019 of SEQ ID NO: 913800
agucucuuuguuugacaga

SEQ ID NO: 955005 - RNA, 19 nt, Artificial Sequence
  Description of Artificial Sequence: Synthetic oligonucleotide
  Antisense strand to SEQ ID NO: 955004
ucugucaaacaaagagacu

SEQ ID NO: 955006 - RNA, 19 nt, Artificial Sequence
  Description of Artificial Sequence: Synthetic oligonucleotide
  Sense strand starting at position 1017 of SEQ ID NO: 913800
ggagucucuuuguuugaca

SEQ ID NO: 955007 - RNA, 19 nt, Artificial Sequence
  Description of Artificial Sequence: Synthetic oligonucleotide
  Antisense strand to SEQ ID NO: 955006
ugucaaacaaagagacucc

SEQ ID NO: 955008 - RNA, 19 nt, Artificial Sequence
  Description of Artificial Sequence: Synthetic oligonucleotide
  Sense strand starting at position 1016 of SEQ ID NO: 913800
gggagucucuuuguuugac

SEQ ID NO: 955009 - RNA, 19 nt, Artificial Sequence
  Description of Artificial Sequence: Synthetic oligonucleotide
  Antisense strand to SEQ ID NO: 955008
gucaaacaaagagacuccc

SEQ ID NO: 955010 - RNA, 19 nt, Artificial Sequence
  Description of Artificial Sequence: Synthetic oligonucleotide
  Sense strand starting at position 104 of SEQ ID NO: 913800
gggugaggucauuggcuau

SEQ ID NO: 955011 - RNA, 19 nt, Artificial Sequence
  Description of Artificial Sequence: Synthetic oligonucleotide
  Antisense strand to SEQ ID NO: 955010
auagccaaugaccucaccc

SEQ ID NO: 955012 - RNA, 19 nt, Artificial Sequence
  Description of Artificial Sequence: Synthetic oligonucleotide
  Sense strand starting at position 1675 of SEQ ID NO: 913800
ugcucaugaugucucacau

SEQ ID NO: 955013 - RNA, 19 nt, Artificial Sequence
  Description of Artificial Sequence: Synthetic oligonucleotide
  Antisense strand to SEQ ID NO: 955012
augugagacaucaugagca

SEQ ID NO: 955014 - RNA, 19 nt, Artificial Sequence
  Description of Artificial Sequence: Synthetic oligonucleotide
  Sense strand starting at position 3084 of SEQ ID NO: 913800
gccauuugcucagcugcua

SEQ ID NO: 955015 - RNA, 19 nt, Artificial Sequence
  Description of Artificial Sequence: Synthetic oligonucleotide
  Antisense strand to SEQ ID NO: 955014
uagcagcugagcaaauggc

SEQ ID NO: 955016 - RNA, 19 nt, Artificial Sequence
  Description of Artificial Sequence: Synthetic oligonucleotide
  Sense strand starting at position 948 of SEQ ID NO: 913800
cccuguaugccucacaguu

SEQ ID NO: 955017 - RNA, 19 nt, Artificial Sequence
  Description of Artificial Sequence: Synthetic oligonucleotide
  Antisense strand to SEQ ID NO: 955016
aacugugaggcauacaggg

SEQ ID NO: 955018 - RNA, 19 nt, Artificial Sequence
  Description of Artificial Sequence: Synthetic oligonucleotide
  Sense strand starting at position 501 of SEQ ID NO: 913800
gccuguucccugcaccaga

SEQ ID NO: 955019 - RNA, 19 nt, Artificial Sequence
  Description of Artificial Sequence: Synthetic oligonucleotide
  Antisense strand to SEQ ID NO: 955018
ucuggugcagggaacaggc

SEQ ID NO: 955020 - RNA, 19 nt, Artificial Sequence
  Description of Artificial Sequence: Synthetic oligonucleotide
  Sense strand starting at position 3850 of SEQ ID NO: 913800
cuggcuccugccugaugaa

SEQ ID NO: 955021 - RNA, 19 nt, Artificial Sequence
  Description of Artificial Sequence: Synthetic oligonucleotide
  Antisense strand to SEQ ID NO: 955020
uucaucaggcaggagccag

SEQ ID NO: 955022 - RNA, 19 nt, Artificial Sequence
  Description of Artificial Sequence: Synthetic oligonucleotide
  Sense strand starting at position 549 of SEQ ID NO: 913800
uggccucuauggcuauuau

SEQ ID NO: 955023 - RNA, 19 nt, Artificial Sequence
  Description of Artificial Sequence: Synthetic oligonucleotide
  Antisense strand to SEQ ID NO: 955022
auaauagccauagaggcca

SEQ ID NO: 955024 - RNA, 19 nt, Artificial Sequence
  Description of Artificial Sequence: Synthetic oligonucleotide
  Sense strand starting at position 2357 of SEQ ID NO: 913800
gugagaaugcucuggucuc

SEQ ID NO: 955025 - RNA, 19 nt, Artificial Sequence
  Description of Artificial Sequence: Synthetic oligonucleotide
  Antisense strand to SEQ ID NO: 955024
gagaccagagcauucucac

SEQ ID NO: 955026 - RNA, 19 nt, Artificial Sequence
  Description of Artificial Sequence: Synthetic oligonucleotide
  Sense strand starting at position 111 of SEQ ID NO: 913800
gucauuggcuauccugagu

SEQ ID NO: 955027 - RNA, 19 nt, Artificial Sequence
  Description of Artificial Sequence: Synthetic oligonucleotide
  Antisense strand to SEQ ID NO: 955026
acucaggauagccaaugac

SEQ ID NO: 955028 - RNA, 19 nt, Artificial Sequence
  Description of Artificial Sequence: Synthetic oligonucleotide
  Sense strand starting at position 1342 of SEQ ID NO: 913800
gggucuuggugucucaagu

SEQ ID NO: 955029 - RNA, 19 nt, Artificial Sequence
  Description of Artificial Sequence: Synthetic oligonucleotide
  Antisense strand to SEQ ID NO: 955028
acuugagacaccaagaccc

SEQ ID NO: 955030 - RNA, 19 nt, Artificial Sequence
  Description of Artificial Sequence: Synthetic oligonucleotide
  Sense strand starting at position 1179 of SEQ ID NO: 913800
cccugauguucugugucau

SEQ ID NO: 955031 - RNA, 19 nt, Artificial Sequence
  Description of Artificial Sequence: Synthetic oligonucleotide
  Antisense strand to SEQ ID NO: 955030
augacacagaacaucaggg

SEQ ID NO: 955032 - RNA, 19 nt, Artificial Sequence
  Description of Artificial Sequence: Synthetic oligonucleotide
  Sense strand starting at position 2965 of SEQ ID NO: 913800
cugucuuugugcucuggaa

SEQ ID NO: 955033 - RNA, 19 nt, Artificial Sequence
  Description of Artificial Sequence: Synthetic oligonucleotide
  Antisense strand to SEQ ID NO: 955032
uuccagagcacaaagacag

SEQ ID NO: 955034 - RNA, 19 nt, Artificial Sequence
  Description of Artificial Sequence: Synthetic oligonucleotide
  Sense strand starting at position 540 of SEQ ID NO: 913800
guaagcauguggccucuau

SEQ ID NO: 955035 - RNA, 19 nt, Artificial Sequence
  Description of Artificial Sequence: Synthetic oligonucleotide
  Antisense strand to SEQ ID NO: 955034
auagaggccacaugcuuac

SEQ ID NO: 955036 - RNA, 19 nt, Artificial Sequence
  Description of Artificial Sequence: Synthetic oligonucleotide
  Sense strand starting at position 3356 of SEQ ID NO: 913801
aagguaggaucacccauau

SEQ ID NO: 955037 - RNA, 19 nt, Artificial Sequence
  Description of Artificial Sequence: Synthetic oligonucleotide
  Antisense strand to SEQ ID NO: 955036
auaugggugauccuaccuu

SEQ ID NO: 955038 - RNA, 19 nt, Artificial Sequence
  Description of Artificial Sequence: Synthetic oligonucleotide
  Sense strand starting at position 3296 of SEQ ID NO: 913801
gggugugagucauuucuca

SEQ ID NO: 955039 - RNA, 19 nt, Artificial Sequence
  Description of Artificial Sequence: Synthetic oligonucleotide
  Antisense strand to SEQ ID NO: 955038
ugagaaaugacucacaccc

SEQ ID NO: 955040 - RNA, 19 nt, Artificial Sequence
  Description of Artificial Sequence: Synthetic oligonucleotide
  Sense strand starting at position 2689 of SEQ ID NO: 913801
gaaugcaugccagauaaug

SEQ ID NO: 955041 - RNA, 19 nt, Artificial Sequence
  Description of Artificial Sequence: Synthetic oligonucleotide
  Antisense strand to SEQ ID NO: 955040
cauuaucuggcaugcauuc

SEQ ID NO: 955042 - RNA, 19 nt, Artificial Sequence
  Description of Artificial Sequence: Synthetic oligonucleotide
  Sense strand starting at position 3155 of SEQ ID NO: 913801
cuauguggucuggagauag

SEQ ID NO: 955043 - RNA, 19 nt, Artificial Sequence
  Description of Artificial Sequence: Synthetic oligonucleotide
  Antisense strand to SEQ ID NO: 955042
cuaucuccagaccacauag

SEQ ID NO: 955044 - RNA, 19 nt, Artificial Sequence
  Description of Artificial Sequence: Synthetic oligonucleotide
  Sense strand starting at position 3303 of SEQ ID NO: 913801
agucauuucucagcuucua

SEQ ID NO: 955045 - RNA, 19 nt, Artificial Sequence
  Description of Artificial Sequence: Synthetic oligonucleotide
  Antisense strand to SEQ ID NO: 955044
uagaagcugagaaaugacu

SEQ ID NO: 955046 - RNA, 19 nt, Artificial Sequence
  Description of Artificial Sequence: Synthetic oligonucleotide
  Sense strand starting at position 1415 of SEQ ID NO: 913801
uagggaaaugcucaaggcu

SEQ ID NO: 955047 - RNA, 19 nt, Artificial Sequence
  Description of Artificial Sequence: Synthetic oligonucleotide
  Antisense strand to SEQ ID NO: 955046
agccuugagcauuucccua

SEQ ID NO: 955048 - RNA, 19 nt, Artificial Sequence
  Description of Artificial Sequence: Synthetic oligonucleotide
  Sense strand starting at position 3957 of SEQ ID NO: 913801
gcuguacuccuugcaguuu

SEQ ID NO: 955049 - RNA, 19 nt, Artificial Sequence
  Description of Artificial Sequence: Synthetic oligonucleotide
  Antisense strand to SEQ ID NO: 955048
aaacugcaaggaguacagc

SEQ ID NO: 955050 - RNA, 19 nt, Artificial Sequence
  Description of Artificial Sequence: Synthetic oligonucleotide
  Sense strand starting at position 1379 of SEQ ID NO: 913801
ugggaauacucccuuccca

SEQ ID NO: 955051 - RNA, 19 nt, Artificial Sequence
  Description of Artificial Sequence: Synthetic oligonucleotide
  Antisense strand to SEQ ID NO: 955050
ugggaagggaguauuccca

SEQ ID NO: 955052 - RNA, 19 nt, Artificial Sequence
  Description of Artificial Sequence: Synthetic oligonucleotide
  Sense strand starting at position 2602 of SEQ ID NO: 913801
gacaaagcucagggagguu

SEQ ID NO: 955053 - RNA, 19 nt, Artificial Sequence
  Description of Artificial Sequence: Synthetic oligonucleotide
  Antisense strand to SEQ ID NO: 955052
aaccucccugagcuuuguc

SEQ ID NO: 955054 - RNA, 19 nt, Artificial Sequence
  Description of Artificial Sequence: Synthetic oligonucleotide
  Sense strand starting at position 1405 of SEQ ID NO: 913801
ugcccauaucuagggaaau

SEQ ID NO: 955055 - RNA, 19 nt, Artificial Sequence
  Description of Artificial Sequence: Synthetic oligonucleotide
  Antisense strand to SEQ ID NO: 955054
auuucccuagauaugggca

SEQ ID NO: 955056 - RNA, 19 nt, Artificial Sequence
  Description of Artificial Sequence: Synthetic oligonucleotide
  Sense strand starting at position 3300 of SEQ ID NO: 913801
gugagucauuucucagcuu

SEQ ID NO: 955057 - RNA, 19 nt, Artificial Sequence
  Description of Artificial Sequence: Synthetic oligonucleotide
  Antisense strand to SEQ ID NO: 955056
aagcugagaaaugacucac

SEQ ID NO: 955058 - RNA, 19 nt, Artificial Sequence
  Description of Artificial Sequence: Synthetic oligonucleotide
  Sense strand starting at position 185 of SEQ ID NO: 913801
gaaggaguccugcaagcau

SEQ ID NO: 955059 - RNA, 19 nt, Artificial Sequence
  Description of Artificial Sequence: Synthetic oligonucleotide
  Antisense strand to SEQ ID NO: 955058
augcuugcaggacuccuuc

SEQ ID NO: 955060 - RNA, 19 nt, Artificial Sequence
  Description of Artificial Sequence: Synthetic oligonucleotide
  Sense strand starting at position 341 of SEQ ID NO: 913801
guggaaucuccagguuaga

SEQ ID NO: 955061 - RNA, 19 nt, Artificial Sequence
  Description of Artificial Sequence: Synthetic oligonucleotide
  Antisense strand to SEQ ID NO: 955060
ucuaaccuggagauuccac

SEQ ID NO: 955062 - RNA, 19 nt, Artificial Sequence
  Description of Artificial Sequence: Synthetic oligonucleotide
  Sense strand starting at position 1250 of SEQ ID NO: 913801
ucaaguuugggauggagca

SEQ ID NO: 955063 - RNA, 19 nt, Artificial Sequence
  Description of Artificial Sequence: Synthetic oligonucleotide
  Antisense strand to SEQ ID NO: 955062
ugcuccaucccaaacuuga

SEQ ID NO: 955064 - RNA, 19 nt, Artificial Sequence
  Description of Artificial Sequence: Synthetic oligonucleotide
  Sense strand starting at position 2672 of SEQ ID NO: 913801
cugggcugauuccuacaga

SEQ ID NO: 955065 - RNA, 19 nt, Artificial Sequence
  Description of Artificial Sequence: Synthetic oligonucleotide
  Antisense strand to SEQ ID NO: 955064
ucuguaggaaucagcccag

SEQ ID NO: 955066 - RNA, 19 nt, Artificial Sequence
  Description of Artificial Sequence: Synthetic oligonucleotide
  Sense strand starting at position 3189 of SEQ ID NO: 913801
ggcuccuugguuggagaaa

SEQ ID NO: 955067 - RNA, 19 nt, Artificial Sequence
  Description of Artificial Sequence: Synthetic oligonucleotide
  Antisense strand to SEQ ID NO: 955066
uuucuccaaccaaggagcc

SEQ ID NO: 955068 - RNA, 19 nt, Artificial Sequence
  Description of Artificial Sequence: Synthetic oligonucleotide
  Sense strand starting at position 1368 of SEQ ID NO: 913801
ccucuccaugcugggaaua

SEQ ID NO: 955069 - RNA, 19 nt, Artificial Sequence
  Description of Artificial Sequence: Synthetic oligonucleotide
  Antisense strand to SEQ ID NO: 955068
uauucccagcauggagagg

SEQ ID NO: 955070 - RNA, 19 nt, Artificial Sequence
  Description of Artificial Sequence: Synthetic oligonucleotide
  Sense strand starting at position 445 of SEQ ID NO: 913801
ggccucuauggcuauuaua

SEQ ID NO: 955071 - RNA, 19 nt, Artificial Sequence
  Description of Artificial Sequence: Synthetic oligonucleotide
  Antisense strand to SEQ ID NO: 955070
uauaauagccauagaggcc

SEQ ID NO: 955072 - RNA, 19 nt, Artificial Sequence
  Description of Artificial Sequence: Synthetic oligonucleotide
  Sense strand starting at position 511 of SEQ ID NO: 913801
ucaaguacccguggaacaa

SEQ ID NO: 955073 - RNA, 19 nt, Artificial Sequence
  Description of Artificial Sequence: Synthetic oligonucleotide
  Antisense strand to SEQ ID NO: 955072
uuguuccacggguacuuga

SEQ ID NO: 955074 - RNA, 19 nt, Artificial Sequence
  Description of Artificial Sequence: Synthetic oligonucleotide
  Sense strand starting at position 3650 of SEQ ID NO: 913801
gggcauaaccaguguggga

SEQ ID NO: 955075 - RNA, 19 nt, Artificial Sequence
  Description of Artificial Sequence: Synthetic oligonucleotide
  Antisense strand to SEQ ID NO: 955074
ucccacacugguuaugccc

SEQ ID NO: 955076 - RNA, 19 nt, Artificial Sequence
  Description of Artificial Sequence: Synthetic oligonucleotide
  Sense strand starting at position 1772 of SEQ ID NO: 913801
ugcacucacccgggagaua

SEQ ID NO: 955077 - RNA, 19 nt, Artificial Sequence
  Description of Artificial Sequence: Synthetic oligonucleotide
  Antisense strand to SEQ ID NO: 955076
uaucucccgggugagugca

SEQ ID NO: 955078 - RNA, 19 nt, Artificial Sequence
  Description of Artificial Sequence: Synthetic oligonucleotide
  Sense strand starting at position 3060 of SEQ ID NO: 913801
gagacaguguguucuggau

SEQ ID NO: 955079 - RNA, 19 nt, Artificial Sequence
  Description of Artificial Sequence: Synthetic oligonucleotide
  Antisense strand to SEQ ID NO: 955078
auccagaacacacugucuc

SEQ ID NO: 955080 - RNA, 19 nt, Artificial Sequence
  Description of Artificial Sequence: Synthetic oligonucleotide
  Sense strand starting at position 3153 of SEQ ID NO: 913801
cccuauguggucuggagau

SEQ ID NO: 955081 - RNA, 19 nt, Artificial Sequence
  Description of Artificial Sequence: Synthetic oligonucleotide
  Antisense strand to SEQ ID NO: 955080
aucuccagaccacauaggg

SEQ ID NO: 955082 - RNA, 19 nt, Artificial Sequence
  Description of Artificial Sequence: Synthetic oligonucleotide
  Sense strand starting at position 1190 of SEQ ID NO: 913801
caaagcagccauggugaau

SEQ ID NO: 955083 - RNA, 19 nt, Artificial Sequence
  Description of Artificial Sequence: Synthetic oligonucleotide
  Antisense strand to SEQ ID NO: 955082
auucaccauggcugcuuug

SEQ ID NO: 955084 - RNA, 19 nt, Artificial Sequence
  Description of Artificial Sequence: Synthetic oligonucleotide
  Sense strand starting at position 3791 of SEQ ID NO: 913801
gcaggagagugcucuuaaa

SEQ ID NO: 955085 - RNA, 19 nt, Artificial Sequence
  Description of Artificial Sequence: Synthetic oligonucleotide
  Antisense strand to SEQ ID NO: 955084
uuuaagagcacucuccugc

SEQ ID NO: 955086 - RNA, 19 nt, Artificial Sequence
  Description of Artificial Sequence: Synthetic oligonucleotide
  Sense strand starting at position 914 of SEQ ID NO: 913801
agucucuuuguuugacaga

SEQ ID NO: 955087 - RNA, 19 nt, Artificial Sequence
  Description of Artificial Sequence: Synthetic oligonucleotide
  Antisense strand to SEQ ID NO: 955086
ucugucaaacaaagagacu

SEQ ID NO: 955088 - RNA, 19 nt, Artificial Sequence
  Description of Artificial Sequence: Synthetic oligonucleotide
  Sense strand starting at position 912 of SEQ ID NO: 913801
ggagucucuuuguuugaca

SEQ ID NO: 955089 - RNA, 19 nt, Artificial Sequence
  Description of Artificial Sequence: Synthetic oligonucleotide
  Antisense strand to SEQ ID NO: 955088
ugucaaacaaagagacucc

SEQ ID NO: 955090 - RNA, 19 nt, Artificial Sequence
  Description of Artificial Sequence: Synthetic oligonucleotide
  Sense strand starting at position 911 of SEQ ID NO: 913801
gggagucucuuuguuugac

SEQ ID NO: 955091 - RNA, 19 nt, Artificial Sequence
  Description of Artificial Sequence: Synthetic oligonucleotide
  Antisense strand to SEQ ID NO: 955090
gucaaacaaagagacuccc

SEQ ID NO: 955092 - RNA, 19 nt, Artificial Sequence
  Description of Artificial Sequence: Synthetic oligonucleotide
  Sense strand starting at position 1570 of SEQ ID NO: 913801
ugcucaugaugucucacau

SEQ ID NO: 955093 - RNA, 19 nt, Artificial Sequence
  Description of Artificial Sequence: Synthetic oligonucleotide
  Antisense strand to SEQ ID NO: 955092
augugagacaucaugagca

SEQ ID NO: 955094 - RNA, 19 nt, Artificial Sequence
  Description of Artificial Sequence: Synthetic oligonucleotide
  Sense strand starting at position 2979 of SEQ ID NO: 913801
gccauuugcucagcugcua

SEQ ID NO: 955095 - RNA, 19 nt, Artificial Sequence
  Description of Artificial Sequence: Synthetic oligonucleotide
  Antisense strand to SEQ ID NO: 955094
uagcagcugagcaaauggc

SEQ ID NO: 955096 - RNA, 19 nt, Artificial Sequence
  Description of Artificial Sequence: Synthetic oligonucleotide
  Sense strand starting at position 843 of SEQ ID NO: 913801
cccuguaugccucacaguu

SEQ ID NO: 955097 - RNA, 19 nt, Artificial Sequence
  Description of Artificial Sequence: Synthetic oligonucleotide
  Antisense strand to SEQ ID NO: 955096
aacugugaggcauacaggg

SEQ ID NO: 955098 - RNA, 19 nt, Artificial Sequence
  Description of Artificial Sequence: Synthetic oligonucleotide
  Sense strand starting at position 396 of SEQ ID NO: 913801
gccuguucccugcaccaga

SEQ ID NO: 955099 - RNA, 19 nt, Artificial Sequence
  Description of Artificial Sequence: Synthetic oligonucleotide
  Antisense strand to SEQ ID NO: 955098
ucuggugcagggaacaggc

SEQ ID NO: 955100 - RNA, 19 nt, Artificial Sequence
  Description of Artificial Sequence: Synthetic oligonucleotide
  Sense strand starting at position 3745 of SEQ ID NO: 913801
cuggcuccugccugaugaa

SEQ ID NO: 955101 - RNA, 19 nt, Artificial Sequence
  Description of Artificial Sequence: Synthetic oligonucleotide
  Antisense strand to SEQ ID NO: 955100
uucaucaggcaggagccag

SEQ ID NO: 955102 - RNA, 19 nt, Artificial Sequence
  Description of Artificial Sequence: Synthetic oligonucleotide
  Sense strand starting at position 444 of SEQ ID NO: 913801
uggccucuauggcuauuau

SEQ ID NO: 955103 - RNA, 19 nt, Artificial Sequence
  Description of Artificial Sequence: Synthetic oligonucleotide
  Antisense strand to SEQ ID NO: 955102
auaauagccauagaggcca

SEQ ID NO: 955104 - RNA, 19 nt, Artificial Sequence
  Description of Artificial Sequence: Synthetic oligonucleotide
  Sense strand starting at position 2252 of SEQ ID NO: 913801
gugagaaugcucuggucuc

SEQ ID NO: 955105 - RNA, 19 nt, Artificial Sequence
  Description of Artificial Sequence: Synthetic oligonucleotide
  Antisense strand to SEQ ID NO: 955104
gagaccagagcauucucac

SEQ ID NO: 955106 - RNA, 19 nt, Artificial Sequence
  Description of Artificial Sequence: Synthetic oligonucleotide
  Sense strand starting at position 6 of SEQ ID NO: 913801
gucauuggcuauccugagu

SEQ ID NO: 955107 - RNA, 19 nt, Artificial Sequence
  Description of Artificial Sequence: Synthetic oligonucleotide
  Antisense strand to SEQ ID NO: 955106
acucaggauagccaaugac

SEQ ID NO: 955108 - RNA, 19 nt, Artificial Sequence
  Description of Artificial Sequence: Synthetic oligonucleotide
  Sense strand starting at position 3889 of SEQ ID NO: 913801
ggcggaguucaauggcuca

SEQ ID NO: 955109 - RNA, 19 nt, Artificial Sequence
  Description of Artificial Sequence: Synthetic oligonucleotide
  Antisense strand to SEQ ID NO: 955108
ugagccauugaacuccgcc

SEQ ID NO: 955110 - RNA, 19 nt, Artificial Sequence
  Description of Artificial Sequence: Synthetic oligonucleotide
  Sense strand starting at position 1237 of SEQ ID NO: 913801
gggucuuggugucucaagu

SEQ ID NO: 955111 - RNA, 19 nt, Artificial Sequence
  Description of Artificial Sequence: Synthetic oligonucleotide
  Antisense strand to SEQ ID NO: 955110
acuugagacaccaagaccc

SEQ ID NO: 955112 - RNA, 19 nt, Artificial Sequence
  Description of Artificial Sequence: Synthetic oligonucleotide
  Sense strand starting at position 1074 of SEQ ID NO: 913801
cccugauguucugugucau

SEQ ID NO: 955113 - RNA, 19 nt, Artificial Sequence
  Description of Artificial Sequence: Synthetic oligonucleotide
  Antisense strand to SEQ ID NO: 955112
augacacagaacaucaggg

SEQ ID NO: 955114 - RNA, 19 nt, Artificial Sequence
  Description of Artificial Sequence: Synthetic oligonucleotide
  Sense strand starting at position 2860 of SEQ ID NO: 913801
cugucuuugugcucuggaa

SEQ ID NO: 955115 - RNA, 19 nt, Artificial Sequence
  Description of Artificial Sequence: Synthetic oligonucleotide
  Antisense strand to SEQ ID NO: 955114
uuccagagcacaaagacag

SEQ ID NO: 955116 - RNA, 19 nt, Artificial Sequence
  Description of Artificial Sequence: Synthetic oligonucleotide
  Sense strand starting at position 3241 of SEQ ID NO: 913802
aagguaggaucacccauau

SEQ ID NO: 955117 - RNA, 19 nt, Artificial Sequence
  Description of Artificial Sequence: Synthetic oligonucleotide
  Antisense strand to SEQ ID NO: 955116
auaugggugauccuaccuu

SEQ ID NO: 955118 - RNA, 19 nt, Artificial Sequence
  Description of Artificial Sequence: Synthetic oligonucleotide
  Sense strand starting at position 3181 of SEQ ID NO: 913802
gggugugagucauuucuca

SEQ ID NO: 955119 - RNA, 19 nt, Artificial Sequence
  Description of Artificial Sequence: Synthetic oligonucleotide
  Antisense strand to SEQ ID NO: 955118
ugagaaaugacucacaccc

SEQ ID NO: 955120 - RNA, 19 nt, Artificial Sequence
  Description of Artificial Sequence: Synthetic oligonucleotide
  Sense strand starting at position 2574 of SEQ ID NO: 913802
gaaugcaugccagauaaug

SEQ ID NO: 955121 - RNA, 19 nt, Artificial Sequence
  Description of Artificial Sequence: Synthetic oligonucleotide
  Antisense strand to SEQ ID NO: 955120
cauuaucuggcaugcauuc

SEQ ID NO: 955122 - RNA, 19 nt, Artificial Sequence
  Description of Artificial Sequence: Synthetic oligonucleotide
  Sense strand starting at position 3040 of SEQ ID NO: 913802
cuauguggucuggagauag

SEQ ID NO: 955123 - RNA, 19 nt, Artificial Sequence
  Description of Artificial Sequence: Synthetic oligonucleotide
  Antisense strand to SEQ ID NO: 955122
cuaucuccagaccacauag

SEQ ID NO: 955124 - RNA, 19 nt, Artificial Sequence
  Description of Artificial Sequence: Synthetic oligonucleotide
  Sense strand starting at position 3188 of SEQ ID NO: 913802
agucauuucucagcuucua

SEQ ID NO: 955125 - RNA, 19 nt, Artificial Sequence
  Description of Artificial Sequence: Synthetic oligonucleotide
  Antisense strand to SEQ ID NO: 955124
uagaagcugagaaaugacu

SEQ ID NO: 955126 - RNA, 19 nt, Artificial Sequence
  Description of Artificial Sequence: Synthetic oligonucleotide
  Sense strand starting at position 1300 of SEQ ID NO: 913802
uagggaaaugcucaaggcu

SEQ ID NO: 955127 - RNA, 19 nt, Artificial Sequence
  Description of Artificial Sequence: Synthetic oligonucleotide
  Antisense strand to SEQ ID NO: 955126
agccuugagcauuucccua

SEQ ID NO: 955128 - RNA, 19 nt, Artificial Sequence
  Description of Artificial Sequence: Synthetic oligonucleotide
  Sense strand starting at position 3842 of SEQ ID NO: 913802
gcuguacuccuugcaguuu

SEQ ID NO: 955129 - RNA, 19 nt, Artificial Sequence
  Description of Artificial Sequence: Synthetic oligonucleotide
  Antisense strand to SEQ ID NO: 955128
aaacugcaaggaguacagc

SEQ ID NO: 955130 - RNA, 19 nt, Artificial Sequence
  Description of Artificial Sequence: Synthetic oligonucleotide
  Sense strand starting at position 1264 of SEQ ID NO: 913802
ugggaauacucccuuccca

SEQ ID NO: 955131 - RNA, 19 nt, Artificial Sequence
  Description of Artificial Sequence: Synthetic oligonucleotide
  Antisense strand to SEQ ID NO: 955130
ugggaagggaguauuccca

SEQ ID NO: 955132 - RNA, 19 nt, Artificial Sequence
  Description of Artificial Sequence: Synthetic oligonucleotide
  Sense strand starting at position 2487 of SEQ ID NO: 913802
gacaaagcucagggagguu

SEQ ID NO: 955133 - RNA, 19 nt, Artificial Sequence
  Description of Artificial Sequence: Synthetic oligonucleotide
  Antisense strand to SEQ ID NO: 955132
aaccucccugagcuuuguc

SEQ ID NO: 955134 - RNA, 19 nt, Artificial Sequence
  Description of Artificial Sequence: Synthetic oligonucleotide
  Sense strand starting at position 1290 of SEQ ID NO: 913802
ugcccauaucuagggaaau

SEQ ID NO: 955135 - RNA, 19 nt, Artificial Sequence
  Description of Artificial Sequence: Synthetic oligonucleotide
  Antisense strand to SEQ ID NO: 955134
auuucccuagauaugggca

SEQ ID NO: 955136 - RNA, 19 nt, Artificial Sequence
  Description of Artificial Sequence: Synthetic oligonucleotide
  Sense strand starting at position 3185 of SEQ ID NO: 913802
gugagucauuucucagcuu

SEQ ID NO: 955137 - RNA, 19 nt, Artificial Sequence
  Description of Artificial Sequence: Synthetic oligonucleotide
  Antisense strand to SEQ ID NO: 955136
aagcugagaaaugacucac

SEQ ID NO: 955138 - RNA, 19 nt, Artificial Sequence
  Description of Artificial Sequence: Synthetic oligonucleotide
  Sense strand starting at position 70 of SEQ ID NO: 913802
gaaggaguccugcaagcau

SEQ ID NO: 955139 - RNA, 19 nt, Artificial Sequence
  Description of Artificial Sequence: Synthetic oligonucleotide
  Antisense strand to SEQ ID NO: 955138
augcuugcaggacuccuuc

SEQ ID NO: 955140 - RNA, 19 nt, Artificial Sequence
  Description of Artificial Sequence: Synthetic oligonucleotide
  Sense strand starting at position 226 of SEQ ID NO: 913802
guggaaucuccagguuaga

SEQ ID NO: 955141 - RNA, 19 nt, Artificial Sequence
  Description of Artificial Sequence: Synthetic oligonucleotide
  Antisense strand to SEQ ID NO: 955140
ucuaaccuggagauuccac

SEQ ID NO: 955142 - RNA, 19 nt, Artificial Sequence
  Description of Artificial Sequence: Synthetic oligonucleotide
  Sense strand starting at position 1135 of SEQ ID NO: 913802
ucaaguuugggauggagca

SEQ ID NO: 955143 - RNA, 19 nt, Artificial Sequence
  Description of Artificial Sequence: Synthetic oligonucleotide
  Antisense strand to SEQ ID NO: 955142
ugcuccaucccaaacuuga

SEQ ID NO: 955144 - RNA, 19 nt, Artificial Sequence
  Description of Artificial Sequence: Synthetic oligonucleotide
  Sense strand starting at position 2557 of SEQ ID NO: 913802
cugggcugauuccuacaga

SEQ ID NO: 955145 - RNA, 19 nt, Artificial Sequence
  Description of Artificial Sequence: Synthetic oligonucleotide
  Antisense strand to SEQ ID NO: 955144
ucuguaggaaucagcccag

SEQ ID NO: 955146 - RNA, 19 nt, Artificial Sequence
  Description of Artificial Sequence: Synthetic oligonucleotide
  Sense strand starting at position 3074 of SEQ ID NO: 913802
ggcuccuugguuggagaaa

SEQ ID NO: 955147 - RNA, 19 nt, Artificial Sequence
  Description of Artificial Sequence: Synthetic oligonucleotide
  Antisense strand to SEQ ID NO: 955146
uuucuccaaccaaggagcc

SEQ ID NO: 955148 - RNA, 19 nt, Artificial Sequence
  Description of Artificial Sequence: Synthetic oligonucleotide
  Sense strand starting at position 1253 of SEQ ID NO: 913802
ccucuccaugcugggaaua

SEQ ID NO: 955149 - RNA, 19 nt, Artificial Sequence
  Description of Artificial Sequence: Synthetic oligonucleotide
  Antisense strand to SEQ ID NO: 955148
uauucccagcauggagagg

SEQ ID NO: 955150 - RNA, 19 nt, Artificial Sequence
  Description of Artificial Sequence: Synthetic oligonucleotide
  Sense strand starting at position 330 of SEQ ID NO: 913802
ggccucuauggcuauuaua

SEQ ID NO: 955151 - RNA, 19 nt, Artificial Sequence
  Description of Artificial Sequence: Synthetic oligonucleotide
  Antisense strand to SEQ ID NO: 955150
uauaauagccauagaggcc

SEQ ID NO: 955152 - RNA, 19 nt, Artificial Sequence
  Description of Artificial Sequence: Synthetic oligonucleotide
  Sense strand starting at position 396 of SEQ ID NO: 913802
ucaaguacccguggaacaa

SEQ ID NO: 955153 - RNA, 19 nt, Artificial Sequence
  Description of Artificial Sequence: Synthetic oligonucleotide
  Antisense strand to SEQ ID NO: 955152
uuguuccacggguacuuga

SEQ ID NO: 955154 - RNA, 19 nt, Artificial Sequence
  Description of Artificial Sequence: Synthetic oligonucleotide
  Sense strand starting at position 3535 of SEQ ID NO: 913802
gggcauaaccaguguggga

SEQ ID NO: 955155 - RNA, 19 nt, Artificial Sequence
  Description of Artificial Sequence: Synthetic oligonucleotide
  Antisense strand to SEQ ID NO: 955154
ucccacacugguuaugccc

SEQ ID NO: 955156 - RNA, 19 nt, Artificial Sequence
  Description of Artificial Sequence: Synthetic oligonucleotide
  Sense strand starting at position 1657 of SEQ ID NO: 913802
ugcacucacccgggagaua

SEQ ID NO: 955157 - RNA, 19 nt, Artificial Sequence
  Description of Artificial Sequence: Synthetic oligonucleotide
  Antisense strand to SEQ ID NO: 955156
uaucucccgggugagugca

SEQ ID NO: 955158 - RNA, 19 nt, Artificial Sequence
  Description of Artificial Sequence: Synthetic oligonucleotide
  Sense strand starting at position 2945 of SEQ ID NO: 913802
gagacaguguguucuggau

SEQ ID NO: 955159 - RNA, 19 nt, Artificial Sequence
  Description of Artificial Sequence: Synthetic oligonucleotide
  Antisense strand to SEQ ID NO: 955158
auccagaacacacugucuc

SEQ ID NO: 955160 - RNA, 19 nt, Artificial Sequence
  Description of Artificial Sequence: Synthetic oligonucleotide
  Sense strand starting at position 3038 of SEQ ID NO: 913802
cccuauguggucuggagau

SEQ ID NO: 955161 - RNA, 19 nt, Artificial Sequence
  Description of Artificial Sequence: Synthetic oligonucleotide
  Antisense strand to SEQ ID NO: 955160
aucuccagaccacauaggg

SEQ ID NO: 955162 - RNA, 19 nt, Artificial Sequence
  Description of Artificial Sequence: Synthetic oligonucleotide
  Sense strand starting at position 1075 of SEQ ID NO: 913802
caaagcagccauggugaau

SEQ ID NO: 955163 - RNA, 19 nt, Artificial Sequence
  Description of Artificial Sequence: Synthetic oligonucleotide
  Antisense strand to SEQ ID NO: 955162
auucaccauggcugcuuug

SEQ ID NO: 955164 - RNA, 19 nt, Artificial Sequence
  Description of Artificial Sequence: Synthetic oligonucleotide
  Sense strand starting at position 3676 of SEQ ID NO: 913802
gcaggagagugcucuuaaa

SEQ ID NO: 955165 - RNA, 19 nt, Artificial Sequence
  Description of Artificial Sequence: Synthetic oligonucleotide
  Antisense strand to SEQ ID NO: 955164
uuuaagagcacucuccugc

SEQ ID NO: 955166 - RNA, 19 nt, Artificial Sequence
  Description of Artificial Sequence: Synthetic oligonucleotide
  Sense strand starting at position 799 of SEQ ID NO: 913802
agucucuuuguuugacaga

SEQ ID NO: 955167 - RNA, 19 nt, Artificial Sequence
  Description of Artificial Sequence: Synthetic oligonucleotide
  Antisense strand to SEQ ID NO: 955166
ucugucaaacaaagagacu

SEQ ID NO: 955168 - RNA, 19 nt, Artificial Sequence
  Description of Artificial Sequence: Synthetic oligonucleotide
  Sense strand starting at position 797 of SEQ ID NO: 913802
ggagucucuuuguuugaca

SEQ ID NO: 955169 - RNA, 19 nt, Artificial Sequence
  Description of Artificial Sequence: Synthetic oligonucleotide
  Antisense strand to SEQ ID NO: 955168
ugucaaacaaagagacucc

SEQ ID NO: 955170 - RNA, 19 nt, Artificial Sequence
  Description of Artificial Sequence: Synthetic oligonucleotide
  Sense strand starting at position 796 of SEQ ID NO: 913802
gggagucucuuuguuugac

SEQ ID NO: 955171 - RNA, 19 nt, Artificial Sequence
  Description of Artificial Sequence: Synthetic oligonucleotide
  Antisense strand to SEQ ID NO: 955170
gucaaacaaagagacuccc

SEQ ID NO: 955172 - RNA, 19 nt, Artificial Sequence
  Description of Artificial Sequence: Synthetic oligonucleotide
  Sense strand starting at position 1455 of SEQ ID NO: 913802
ugcucaugaugucucacau

SEQ ID NO: 955173 - RNA, 19 nt, Artificial Sequence
  Description of Artificial Sequence: Synthetic oligonucleotide
  Antisense strand to SEQ ID NO: 955172
augugagacaucaugagca

SEQ ID NO: 955174 - RNA, 19 nt, Artificial Sequence
  Description of Artificial Sequence: Synthetic oligonucleotide
  Sense strand starting at position 2864 of SEQ ID NO: 913802
gccauuugcucagcugcua

SEQ ID NO: 955175 - RNA, 19 nt, Artificial Sequence
  Description of Artificial Sequence: Synthetic oligonucleotide
  Antisense strand to SEQ ID NO: 955174
uagcagcugagcaaauggc

SEQ ID NO: 955176 - RNA, 19 nt, Artificial Sequence
  Description of Artificial Sequence: Synthetic oligonucleotide
  Sense strand starting at position 728 of SEQ ID NO: 913802
cccuguaugccucacaguu

SEQ ID NO: 955177 - RNA, 19 nt, Artificial Sequence
  Description of Artificial Sequence: Synthetic oligonucleotide
  Antisense strand to SEQ ID NO: 955176
aacugugaggcauacaggg

SEQ ID NO: 955178 - RNA, 19 nt, Artificial Sequence
  Description of Artificial Sequence: Synthetic oligonucleotide
  Sense strand starting at position 281 of SEQ ID NO: 913802
gccuguucccugcaccaga

SEQ ID NO: 955179 - RNA, 19 nt, Artificial Sequence
  Description of Artificial Sequence: Synthetic oligonucleotide
  Antisense strand to SEQ ID NO: 955178
ucuggugcagggaacaggc

SEQ ID NO: 955180 - RNA, 19 nt, Artificial Sequence
  Description of Artificial Sequence: Synthetic oligonucleotide
  Sense strand starting at position 3630 of SEQ ID NO: 913802
cuggcuccugccugaugaa

SEQ ID NO: 955181 - RNA, 19 nt, Artificial Sequence
  Description of Artificial Sequence: Synthetic oligonucleotide
  Antisense strand to SEQ ID NO: 955180
uucaucaggcaggagccag

SEQ ID NO: 955182 - RNA, 19 nt, Artificial Sequence
  Description of Artificial Sequence: Synthetic oligonucleotide
  Sense strand starting at position 329 of SEQ ID NO: 913802
uggccucuauggcuauuau

SEQ ID NO: 955183 - RNA, 19 nt, Artificial Sequence
  Description of Artificial Sequence: Synthetic oligonucleotide
  Antisense strand to SEQ ID NO: 955182
auaauagccauagaggcca

SEQ ID NO: 955184 - RNA, 19 nt, Artificial Sequence
  Description of Artificial Sequence: Synthetic oligonucleotide
  Sense strand starting at position 2137 of SEQ ID NO: 913802
gugagaaugcucuggucuc

SEQ ID NO: 955185 - RNA, 19 nt, Artificial Sequence
  Description of Artificial Sequence: Synthetic oligonucleotide
  Antisense strand to SEQ ID NO: 955184
gagaccagagcauucucac

SEQ ID NO: 955186 - RNA, 19 nt, Artificial Sequence
  Description of Artificial Sequence: Synthetic oligonucleotide
  Sense strand starting at position 3774 of SEQ ID NO: 913802
ggcggaguucaauggcuca

SEQ ID NO: 955187 - RNA, 19 nt, Artificial Sequence
  Description of Artificial Sequence: Synthetic oligonucleotide
  Antisense strand to SEQ ID NO: 955186
ugagccauugaacuccgcc

SEQ ID NO: 955188 - RNA, 19 nt, Artificial Sequence
  Description of Artificial Sequence: Synthetic oligonucleotide
  Sense strand starting at position 1122 of SEQ ID NO: 913802
gggucuuggugucucaagu

SEQ ID NO: 955189 - RNA, 19 nt, Artificial Sequence
  Description of Artificial Sequence: Synthetic oligonucleotide
  Antisense strand to SEQ ID NO: 955188
acuugagacaccaagaccc

SEQ ID NO: 955190 - RNA, 19 nt, Artificial Sequence
  Description of Artificial Sequence: Synthetic oligonucleotide
  Sense strand starting at position 959 of SEQ ID NO: 913802
cccugauguucugugucau

SEQ ID NO: 955191 - RNA, 19 nt, Artificial Sequence
  Description of Artificial Sequence: Synthetic oligonucleotide
  Antisense strand to SEQ ID NO: 955190
augacacagaacaucaggg

SEQ ID NO: 955192 - RNA, 19 nt, Artificial Sequence
  Description of Artificial Sequence: Synthetic oligonucleotide
  Sense strand starting at position 2745 of SEQ ID NO: 913802
cugucuuugugcucuggaa

SEQ ID NO: 955193 - RNA, 19 nt, Artificial Sequence
  Description of Artificial Sequence: Synthetic oligonucleotide
  Antisense strand to SEQ ID NO: 955192
uuccagagcacaaagacag

SEQ ID NO: 955194 - RNA, 19 nt, Artificial Sequence
  Description of Artificial Sequence: Synthetic oligonucleotide
  Sense strand starting at position 320 of SEQ ID NO: 913802
guaagcauguggccucuau

SEQ ID NO: 955195 - RNA, 19 nt, Artificial Sequence
  Description of Artificial Sequence: Synthetic oligonucleotide
  Antisense strand to SEQ ID NO: 955194
auagaggccacaugcuuac

SEQ ID NO: 955196 - RNA, 19 nt, Artificial Sequence
  Description of Artificial Sequence: Synthetic oligonucleotide
  Sense strand starting at position 3390 of SEQ ID NO: 913803
gaucuaaccuagucaagga

SEQ ID NO: 955197 - RNA, 19 nt, Artificial Sequence
  Description of Artificial Sequence: Synthetic oligonucleotide
  Antisense strand to SEQ ID NO: 955196
uccuugacuagguuagauc

SEQ ID NO: 955198 - RNA, 19 nt, Artificial Sequence
  Description of Artificial Sequence: Synthetic oligonucleotide
  Sense strand starting at position 2046 of SEQ ID NO: 913803
gucuuauuagugagugggu

SEQ ID NO: 955199 - RNA, 19 nt, Artificial Sequence
  Description of Artificial Sequence: Synthetic oligonucleotide
  Antisense strand to SEQ ID NO: 955198
acccacucacuaauaagac

SEQ ID NO: 955200 - RNA, 19 nt, Artificial Sequence
  Description of Artificial Sequence: Synthetic oligonucleotide
  Sense strand starting at position 3687 of SEQ ID NO: 913803
aaacucuucguugacaaga

SEQ ID NO: 955201 - RNA, 19 nt, Artificial Sequence
  Description of Artificial Sequence: Synthetic oligonucleotide
  Antisense strand to SEQ ID NO: 955200
ucuugucaacgaagaguuu

SEQ ID NO: 955202 - RNA, 19 nt, Artificial Sequence
  Description of Artificial Sequence: Synthetic oligonucleotide
  Sense strand starting at position 1170 of SEQ ID NO: 913803
uaugaaguacgauacuauu

SEQ ID NO: 955203 - RNA, 19 nt, Artificial Sequence
  Description of Artificial Sequence: Synthetic oligonucleotide
  Antisense strand to SEQ ID NO: 955202
aauaguaucguacuucaua

SEQ ID NO: 955204 - RNA, 19 nt, Artificial Sequence
  Description of Artificial Sequence: Synthetic oligonucleotide
  Sense strand starting at position 2358 of SEQ ID NO: 913803
aacugucaugaaugauuga

SEQ ID NO: 955205 - RNA, 19 nt, Artificial Sequence
  Description of Artificial Sequence: Synthetic oligonucleotide
  Antisense strand to SEQ ID NO: 955204
ucaaucauucaugacaguu

SEQ ID NO: 955206 - RNA, 19 nt, Artificial Sequence
  Description of Artificial Sequence: Synthetic oligonucleotide
  Sense strand starting at position 2322 of SEQ ID NO: 913803
ggaugaaugugaguacaua

SEQ ID NO: 955207 - RNA, 19 nt, Artificial Sequence
  Description of Artificial Sequence: Synthetic oligonucleotide
  Antisense strand to SEQ ID NO: 955206
uauguacucacauucaucc

SEQ ID NO: 955208 - RNA, 19 nt, Artificial Sequence
  Description of Artificial Sequence: Synthetic oligonucleotide
  Sense strand starting at position 3546 of SEQ ID NO: 913803
augggacaccucuguagaa

SEQ ID NO: 955209 - RNA, 19 nt, Artificial Sequence
  Description of Artificial Sequence: Synthetic oligonucleotide
  Antisense strand to SEQ ID NO: 955208
uucuacagaggugucccau

SEQ ID NO: 955210 - RNA, 19 nt, Artificial Sequence
  Description of Artificial Sequence: Synthetic oligonucleotide
  Sense strand starting at position 2847 of SEQ ID NO: 913803
aguuuaguccaagagagua

SEQ ID NO: 955211 - RNA, 19 nt, Artificial Sequence
  Description of Artificial Sequence: Synthetic oligonucleotide
  Antisense strand to SEQ ID NO: 955210
uacucucuuggacuaaacu

SEQ ID NO: 955212 - RNA, 19 nt, Artificial Sequence
  Description of Artificial Sequence: Synthetic oligonucleotide
  Sense strand starting at position 3605 of SEQ ID NO: 913803
ggaccaguagguuauuauc

SEQ ID NO: 955213 - RNA, 19 nt, Artificial Sequence
  Description of Artificial Sequence: Synthetic oligonucleotide
  Antisense strand to SEQ ID NO: 955212
gauaauaaccuacuggucc

SEQ ID NO: 955214 - RNA, 19 nt, Artificial Sequence
  Description of Artificial Sequence: Synthetic oligonucleotide
  Sense strand starting at position 3614 of SEQ ID NO: 913803
gguuauuaucacuaaguca

SEQ ID NO: 955215 - RNA, 19 nt, Artificial Sequence
  Description of Artificial Sequence: Synthetic oligonucleotide
  Antisense strand to SEQ ID NO: 955214
ugacuuagugauaauaacc

SEQ ID NO: 955216 - RNA, 19 nt, Artificial Sequence
  Description of Artificial Sequence: Synthetic oligonucleotide
  Sense strand starting at position 3547 of SEQ ID NO: 913803
ugggacaccucuguagaau

SEQ ID NO: 955217 - RNA, 19 nt, Artificial Sequence
  Description of Artificial Sequence: Synthetic oligonucleotide
  Antisense strand to SEQ ID NO: 955216
auucuacagagguguccca

SEQ ID NO: 955218 - RNA, 19 nt, Artificial Sequence
  Description of Artificial Sequence: Synthetic oligonucleotide
  Sense strand starting at position 918 of SEQ ID NO: 913803
cuagaaggcuuauccaaau

SEQ ID NO: 955219 - RNA, 19 nt, Artificial Sequence
  Description of Artificial Sequence: Synthetic oligonucleotide
  Antisense strand to SEQ ID NO: 955218
auuuggauaagccuucuag

SEQ ID NO: 955220 - RNA, 19 nt, Artificial Sequence
  Description of Artificial Sequence: Synthetic oligonucleotide
  Sense strand starting at position 1210 of SEQ ID NO: 913803
aaaugaaucggcuacaggu

SEQ ID NO: 955221 - RNA, 19 nt, Artificial Sequence
  Description of Artificial Sequence: Synthetic oligonucleotide
  Antisense strand to SEQ ID NO: 955220
accuguagccgauucauuu

SEQ ID NO: 955222 - RNA, 19 nt, Artificial Sequence
  Description of Artificial Sequence: Synthetic oligonucleotide
  Sense strand starting at position 2842 of SEQ ID NO: 913803
gggauaguuuaguccaaga

SEQ ID NO: 955223 - RNA, 19 nt, Artificial Sequence
  Description of Artificial Sequence: Synthetic oligonucleotide
  Antisense strand to SEQ ID NO: 955222
ucuuggacuaaacuauccc

SEQ ID NO: 955224 - RNA, 19 nt, Artificial Sequence
  Description of Artificial Sequence: Synthetic oligonucleotide
  Sense strand starting at position 3416 of SEQ ID NO: 913803
ggccaauucccugaaguag

SEQ ID NO: 955225 - RNA, 19 nt, Artificial Sequence
  Description of Artificial Sequence: Synthetic oligonucleotide
  Antisense strand to SEQ ID NO: 955224
cuacuucagggaauuggcc

SEQ ID NO: 955226 - RNA, 19 nt, Artificial Sequence
  Description of Artificial Sequence: Synthetic oligonucleotide
  Sense strand starting at position 2083 of SEQ ID NO: 913803
agucaucuugcauaggaug

SEQ ID NO: 955227 - RNA, 19 nt, Artificial Sequence
  Description of Artificial Sequence: Synthetic oligonucleotide
  Antisense strand to SEQ ID NO: 955226
cauccuaugcaagaugacu

SEQ ID NO: 955228 - RNA, 19 nt, Artificial Sequence
  Description of Artificial Sequence: Synthetic oligonucleotide
  Sense strand starting at position 623 of SEQ ID NO: 913803
ggguucuguauugacuaau

SEQ ID NO: 955229 - RNA, 19 nt, Artificial Sequence
  Description of Artificial Sequence: Synthetic oligonucleotide
  Antisense strand to SEQ ID NO: 955228
auuagucaauacagaaccc

SEQ ID NO: 955230 - RNA, 19 nt, Artificial Sequence
  Description of Artificial Sequence: Synthetic oligonucleotide
  Sense strand starting at position 2269 of SEQ ID NO: 913803
uaaugccaucagugaaaga

SEQ ID NO: 955231 - RNA, 19 nt, Artificial Sequence
  Description of Artificial Sequence: Synthetic oligonucleotide
  Antisense strand to SEQ ID NO: 955230
ucuuucacugauggcauua

SEQ ID NO: 955232 - RNA, 19 nt, Artificial Sequence
  Description of Artificial Sequence: Synthetic oligonucleotide
  Sense strand starting at position 3529 of SEQ ID NO: 913803
ucaugaucugcagagcaau

SEQ ID NO: 955233 - RNA, 19 nt, Artificial Sequence
  Description of Artificial Sequence: Synthetic oligonucleotide
  Antisense strand to SEQ ID NO: 955232
auugcucugcagaucauga

SEQ ID NO: 955234 - RNA, 19 nt, Artificial Sequence
  Description of Artificial Sequence: Synthetic oligonucleotide
  Sense strand starting at position 3472 of SEQ ID NO: 913803
cagagaggguucgugagaa

SEQ ID NO: 955235 - RNA, 19 nt, Artificial Sequence
  Description of Artificial Sequence: Synthetic oligonucleotide
  Antisense strand to SEQ ID NO: 955234
uucucacgaacccucucug

SEQ ID NO: 955236 - RNA, 19 nt, Artificial Sequence
  Description of Artificial Sequence: Synthetic oligonucleotide
  Sense strand starting at position 2669 of SEQ ID NO: 913803
ugugaacuugcugaaucua

SEQ ID NO: 955237 - RNA, 19 nt, Artificial Sequence
  Description of Artificial Sequence: Synthetic oligonucleotide
  Antisense strand to SEQ ID NO: 955236
uagauucagcaaguucaca

SEQ ID NO: 955238 - RNA, 19 nt, Artificial Sequence
  Description of Artificial Sequence: Synthetic oligonucleotide
  Sense strand starting at position 3518 of SEQ ID NO: 913803
uaaagucuggcucaugauc

SEQ ID NO: 955239 - RNA, 19 nt, Artificial Sequence
  Description of Artificial Sequence: Synthetic oligonucleotide
  Antisense strand to SEQ ID NO: 955238
gaucaugagccagacuuua

SEQ ID NO: 955240 - RNA, 19 nt, Artificial Sequence
  Description of Artificial Sequence: Synthetic oligonucleotide
  Sense strand starting at position 3471 of SEQ ID NO: 913803
acagagaggguucgugaga

SEQ ID NO: 955241 - RNA, 19 nt, Artificial Sequence
  Description of Artificial Sequence: Synthetic oligonucleotide
  Antisense strand to SEQ ID NO: 955240
ucucacgaacccucucugu

SEQ ID NO: 955242 - RNA, 19 nt, Artificial Sequence
  Description of Artificial Sequence: Synthetic oligonucleotide
  Sense strand starting at position 3692 of SEQ ID NO: 913803
cuucguugacaagaaguca

SEQ ID NO: 955243 - RNA, 19 nt, Artificial Sequence
  Description of Artificial Sequence: Synthetic oligonucleotide
  Antisense strand to SEQ ID NO: 955242
ugacuucuugucaacgaag

SEQ ID NO: 955244 - RNA, 19 nt, Artificial Sequence
  Description of Artificial Sequence: Synthetic oligonucleotide
  Sense strand starting at position 3436 of SEQ ID NO: 913803
agugauugagcugaguuca

SEQ ID NO: 955245 - RNA, 19 nt, Artificial Sequence
  Description of Artificial Sequence: Synthetic oligonucleotide
  Antisense strand to SEQ ID NO: 955244
ugaacucagcucaaucacu

SEQ ID NO: 955246 - RNA, 19 nt, Artificial Sequence
  Description of Artificial Sequence: Synthetic oligonucleotide
  Sense strand starting at position 3575 of SEQ ID NO: 913803
gagugauauuaacugguuu

SEQ ID NO: 955247 - RNA, 19 nt, Artificial Sequence
  Description of Artificial Sequence: Synthetic oligonucleotide
  Antisense strand to SEQ ID NO: 955246
aaaccaguuaauaucacuc

SEQ ID NO: 955248 - RNA, 19 nt, Artificial Sequence
  Description of Artificial Sequence: Synthetic oligonucleotide
  Sense strand starting at position 344 of SEQ ID NO: 913803
ucaggcauagacugaguau

SEQ ID NO: 955249 - RNA, 19 nt, Artificial Sequence
  Description of Artificial Sequence: Synthetic oligonucleotide
  Antisense strand to SEQ ID NO: 955248
auacucagucuaugccuga

SEQ ID NO: 955250 - RNA, 19 nt, Artificial Sequence
  Description of Artificial Sequence: Synthetic oligonucleotide
  Sense strand starting at position 1441 of SEQ ID NO: 913803
cgggccuuacaaugagaua

SEQ ID NO: 955251 - RNA, 19 nt, Artificial Sequence
  Description of Artificial Sequence: Synthetic oligonucleotide
  Antisense strand to SEQ ID NO: 955250
uaucucauuguaaggcccg

SEQ ID NO: 955252 - RNA, 19 nt, Artificial Sequence
  Description of Artificial Sequence: Synthetic oligonucleotide
  Sense strand starting at position 2266 of SEQ ID NO: 913803
ggcuaaugccaucagugaa

SEQ ID NO: 955253 - RNA, 19 nt, Artificial Sequence
  Description of Artificial Sequence: Synthetic oligonucleotide
  Antisense strand to SEQ ID NO: 955252
uucacugauggcauuagcc

SEQ ID NO: 955254 - RNA, 19 nt, Artificial Sequence
  Description of Artificial Sequence: Synthetic oligonucleotide
  Sense strand starting at position 3613 of SEQ ID NO: 913803
agguuauuaucacuaaguc

SEQ ID NO: 955255 - RNA, 19 nt, Artificial Sequence
  Description of Artificial Sequence: Synthetic oligonucleotide
  Antisense strand to SEQ ID NO: 955254
gacuuagugauaauaaccu

SEQ ID NO: 955256 - RNA, 19 nt, Artificial Sequence
  Description of Artificial Sequence: Synthetic oligonucleotide
  Sense strand starting at position 1138 of SEQ ID NO: 913803
uuagcauaacagugacuau

SEQ ID NO: 955257 - RNA, 19 nt, Artificial Sequence
  Description of Artificial Sequence: Synthetic oligonucleotide
  Antisense strand to SEQ ID NO: 955256
auagucacuguuaugcuaa

SEQ ID NO: 955258 - RNA, 19 nt, Artificial Sequence
  Description of Artificial Sequence: Synthetic oligonucleotide
  Sense strand starting at position 3516 of SEQ ID NO: 913803
cauaaagucuggcucauga

SEQ ID NO: 955259 - RNA, 19 nt, Artificial Sequence
  Description of Artificial Sequence: Synthetic oligonucleotide
  Antisense strand to SEQ ID NO: 955258
ucaugagccagacuuuaug

SEQ ID NO: 955260 - RNA, 19 nt, Artificial Sequence
  Description of Artificial Sequence: Synthetic oligonucleotide
  Sense strand starting at position 2962 of SEQ ID NO: 913803
gggauaucaguccacguuc

SEQ ID NO: 955261 - RNA, 19 nt, Artificial Sequence
  Description of Artificial Sequence: Synthetic oligonucleotide
  Antisense strand to SEQ ID NO: 955260
gaacguggacugauauccc

SEQ ID NO: 955262 - RNA, 19 nt, Artificial Sequence
  Description of Artificial Sequence: Synthetic oligonucleotide
  Sense strand starting at position 2992 of SEQ ID NO: 913803
agcuucuuagacugaaagu

SEQ ID NO: 955263 - RNA, 19 nt, Artificial Sequence
  Description of Artificial Sequence: Synthetic oligonucleotide
  Antisense strand to SEQ ID NO: 955262
acuuucagucuaagaagcu

SEQ ID NO: 955264 - RNA, 19 nt, Artificial Sequence
  Description of Artificial Sequence: Synthetic oligonucleotide
  Sense strand starting at position 2742 of SEQ ID NO: 913803
aaugauaggcuauguuacu

SEQ ID NO: 955265 - RNA, 19 nt, Artificial Sequence
  Description of Artificial Sequence: Synthetic oligonucleotide
  Antisense strand to SEQ ID NO: 955264
aguaacauagccuaucauu

SEQ ID NO: 955266 - RNA, 19 nt, Artificial Sequence
  Description of Artificial Sequence: Synthetic oligonucleotide
  Sense strand starting at position 3415 of SEQ ID NO: 913803
gggccaauucccugaagua

SEQ ID NO: 955267 - RNA, 19 nt, Artificial Sequence
  Description of Artificial Sequence: Synthetic oligonucleotide
  Antisense strand to SEQ ID NO: 955266
uacuucagggaauuggccc

SEQ ID NO: 955268 - RNA, 19 nt, Artificial Sequence
  Description of Artificial Sequence: Synthetic oligonucleotide
  Sense strand starting at position 710 of SEQ ID NO: 913803
uugggaucauuguugcaag

SEQ ID NO: 955269 - RNA, 19 nt, Artificial Sequence
  Description of Artificial Sequence: Synthetic oligonucleotide
  Antisense strand to SEQ ID NO: 955268
cuugcaacaaugaucccaa

SEQ ID NO: 955270 - RNA, 19 nt, Artificial Sequence
  Description of Artificial Sequence: Synthetic oligonucleotide
  Sense strand starting at position 297 of SEQ ID NO: 913803
gugaacagaucugauuucu

SEQ ID NO: 955271 - RNA, 19 nt, Artificial Sequence
  Description of Artificial Sequence: Synthetic oligonucleotide
  Antisense strand to SEQ ID NO: 955270
agaaaucagaucuguucac

SEQ ID NO: 955272 - RNA, 19 nt, Artificial Sequence
  Description of Artificial Sequence: Synthetic oligonucleotide
  Sense strand starting at position 399 of SEQ ID NO: 913803
agaguaauccuuugcacua

SEQ ID NO: 955273 - RNA, 19 nt, Artificial Sequence
  Description of Artificial Sequence: Synthetic oligonucleotide
  Antisense strand to SEQ ID NO: 955272
uagugcaaaggauuacucu

SEQ ID NO: 955274 - RNA, 19 nt, Artificial Sequence
  Description of Artificial Sequence: Synthetic oligonucleotide
  Sense strand starting at position 286 of SEQ ID NO: 913803
ccauuaugccugugaacag

SEQ ID NO: 955275 - RNA, 19 nt, Artificial Sequence
  Description of Artificial Sequence: Synthetic oligonucleotide
  Antisense strand to SEQ ID NO: 955274
cuguucacaggcauaaugg

SEQ ID NO: 955276 - RNA, 19 nt, Artificial Sequence
  Description of Artificial Sequence: Synthetic oligonucleotide
  Sense strand starting at position 3467 of SEQ ID NO: 913804
gagaaucugcuaggaacau

SEQ ID NO: 955277 - RNA, 19 nt, Artificial Sequence
  Description of Artificial Sequence: Synthetic oligonucleotide
  Antisense strand to SEQ ID NO: 955276
auguuccuagcagauucuc

SEQ ID NO: 955278 - RNA, 19 nt, Artificial Sequence
  Description of Artificial Sequence: Synthetic oligonucleotide
  Sense strand starting at position 2815 of SEQ ID NO: 913804
ggaggaguuuccucaaugg

SEQ ID NO: 955279 - RNA, 19 nt, Artificial Sequence
  Description of Artificial Sequence: Synthetic oligonucleotide
  Antisense strand to SEQ ID NO: 955278
ccauugaggaaacuccucc

SEQ ID NO: 955280 - RNA, 19 nt, Artificial Sequence
  Description of Artificial Sequence: Synthetic oligonucleotide
  Sense strand starting at position 2971 of SEQ ID NO: 913804
gaggaauucguugaaaugu

SEQ ID NO: 955281 - RNA, 19 nt, Artificial Sequence
  Description of Artificial Sequence: Synthetic oligonucleotide
  Antisense strand to SEQ ID NO: 955280
acauuucaacgaauuccuc

SEQ ID NO: 955282 - RNA, 19 nt, Artificial Sequence
  Description of Artificial Sequence: Synthetic oligonucleotide
  Sense strand starting at position 2967 of SEQ ID NO: 913804
ggaugaggaauucguugaa

SEQ ID NO: 955283 - RNA, 19 nt, Artificial Sequence
  Description of Artificial Sequence: Synthetic oligonucleotide
  Antisense strand to SEQ ID NO: 955282
uucaacgaauuccucaucc

SEQ ID NO: 955284 - RNA, 19 nt, Artificial Sequence
  Description of Artificial Sequence: Synthetic oligonucleotide
  Sense strand starting at position 3982 of SEQ ID NO: 913804
ggagauuauccuggauggu

SEQ ID NO: 955285 - RNA, 19 nt, Artificial Sequence
  Description of Artificial Sequence: Synthetic oligonucleotide
  Antisense strand to SEQ ID NO: 955284
accauccaggauaaucucc

SEQ ID NO: 955286 - RNA, 19 nt, Artificial Sequence
  Description of Artificial Sequence: Synthetic oligonucleotide
  Sense strand starting at position 2660 of SEQ ID NO: 913804
auaacagcccugcauagau

SEQ ID NO: 955287 - RNA, 19 nt, Artificial Sequence
  Description of Artificial Sequence: Synthetic oligonucleotide
  Antisense strand to SEQ ID NO: 955286
aucuaugcagggcuguuau

SEQ ID NO: 955288 - RNA, 19 nt, Artificial Sequence
  Description of Artificial Sequence: Synthetic oligonucleotide
  Sense strand starting at position 2970 of SEQ ID NO: 913804
ugaggaauucguugaaaug

SEQ ID NO: 955289 - RNA, 19 nt, Artificial Sequence
  Description of Artificial Sequence: Synthetic oligonucleotide
  Antisense strand to SEQ ID NO: 955288
cauuucaacgaauuccuca

SEQ ID NO: 955290 - RNA, 19 nt, Artificial Sequence
  Description of Artificial Sequence: Synthetic oligonucleotide
  Sense strand starting at position 3128 of SEQ ID NO: 913804
cuuagucgcagacaauaga

SEQ ID NO: 955291 - RNA, 19 nt, Artificial Sequence
  Description of Artificial Sequence: Synthetic oligonucleotide
  Antisense strand to SEQ ID NO: 955290
ucuauugucugcgacuaag

SEQ ID NO: 955292 - RNA, 19 nt, Artificial Sequence
  Description of Artificial Sequence: Synthetic oligonucleotide
  Sense strand starting at position 2727 of SEQ ID NO: 913804
cguuaaacccaggagguuu

SEQ ID NO: 955293 - RNA, 19 nt, Artificial Sequence
  Description of Artificial Sequence: Synthetic oligonucleotide
  Antisense strand to SEQ ID NO: 955292
aaaccuccuggguuuaacg

SEQ ID NO: 955294 - RNA, 19 nt, Artificial Sequence
  Description of Artificial Sequence: Synthetic oligonucleotide
  Sense strand starting at position 3102 of SEQ ID NO: 913804
ggaguaguauaccuuauau

SEQ ID NO: 955295 - RNA, 19 nt, Artificial Sequence
  Description of Artificial Sequence: Synthetic oligonucleotide
  Antisense strand to SEQ ID NO: 955294
auauaagguauacuacucc

SEQ ID NO: 955296 - RNA, 19 nt, Artificial Sequence
  Description of Artificial Sequence: Synthetic oligonucleotide
  Sense strand starting at position 3952 of SEQ ID NO: 913804
uuagaucuugcagagccua

SEQ ID NO: 955297 - RNA, 19 nt, Artificial Sequence
  Description of Artificial Sequence: Synthetic oligonucleotide
  Antisense strand to SEQ ID NO: 955296
uaggcucugcaagaucuaa

SEQ ID NO: 955298 - RNA, 19 nt, Artificial Sequence
  Description of Artificial Sequence: Synthetic oligonucleotide
  Sense strand starting at position 1468 of SEQ ID NO: 913804
uguuaaucgguaugcauuu

SEQ ID NO: 955299 - RNA, 19 nt, Artificial Sequence
  Description of Artificial Sequence: Synthetic oligonucleotide
  Antisense strand to SEQ ID NO: 955298
aaaugcauaccgauuaaca

SEQ ID NO: 955300 - RNA, 19 nt, Artificial Sequence
  Description of Artificial Sequence: Synthetic oligonucleotide
  Sense strand starting at position 3126 of SEQ ID NO: 913804
uucuuagucgcagacaaua

SEQ ID NO: 955301 - RNA, 19 nt, Artificial Sequence
  Description of Artificial Sequence: Synthetic oligonucleotide
  Antisense strand to SEQ ID NO: 955300
uauugucugcgacuaagaa

SEQ ID NO: 955302 - RNA, 19 nt, Artificial Sequence
  Description of Artificial Sequence: Synthetic oligonucleotide
  Sense strand starting at position 3724 of SEQ ID NO: 913804
ggagaauggcugggcuuua

SEQ ID NO: 955303 - RNA, 19 nt, Artificial Sequence
  Description of Artificial Sequence: Synthetic oligonucleotide
  Antisense strand to SEQ ID NO: 955302
uaaagcccagccauucucc

SEQ ID NO: 955304 - RNA, 19 nt, Artificial Sequence
  Description of Artificial Sequence: Synthetic oligonucleotide
  Sense strand starting at position 3450 of SEQ ID NO: 913804
cugagugagucaguuugga

SEQ ID NO: 955305 - RNA, 19 nt, Artificial Sequence
  Description of Artificial Sequence: Synthetic oligonucleotide
  Antisense strand to SEQ ID NO: 955304
uccaaacugacucacucag

SEQ ID NO: 955306 - RNA, 19 nt, Artificial Sequence
  Description of Artificial Sequence: Synthetic oligonucleotide
  Sense strand starting at position 2102 of SEQ ID NO: 913804
gcuuucuucccaggagauc

SEQ ID NO: 955307 - RNA, 19 nt, Artificial Sequence
  Description of Artificial Sequence: Synthetic oligonucleotide
  Antisense strand to SEQ ID NO: 955306
gaucuccugggaagaaagc

SEQ ID NO: 955308 - RNA, 19 nt, Artificial Sequence
  Description of Artificial Sequence: Synthetic oligonucleotide
  Sense strand starting at position 3723 of SEQ ID NO: 913804
uggagaauggcugggcuuu

SEQ ID NO: 955309 - RNA, 19 nt, Artificial Sequence
  Description of Artificial Sequence: Synthetic oligonucleotide
  Antisense strand to SEQ ID NO: 955308
aaagcccagccauucucca

SEQ ID NO: 955310 - RNA, 19 nt, Artificial Sequence
  Description of Artificial Sequence: Synthetic oligonucleotide
  Sense strand starting at position 3066 of SEQ ID NO: 913804
guuccuacccuuugggauu

SEQ ID NO: 955311 - RNA, 19 nt, Artificial Sequence
  Description of Artificial Sequence: Synthetic oligonucleotide
  Antisense strand to SEQ ID NO: 955310
aaucccaaaggguaggaac

SEQ ID NO: 955312 - RNA, 19 nt, Artificial Sequence
  Description of Artificial Sequence: Synthetic oligonucleotide
  Sense strand starting at position 2713 of SEQ ID NO: 913804
ggacuaucacaaugcguua

SEQ ID NO: 955313 - RNA, 19 nt, Artificial Sequence
  Description of Artificial Sequence: Synthetic oligonucleotide
  Antisense strand to SEQ ID NO: 955312
uaacgcauugugauagucc

SEQ ID NO: 955314 - RNA, 19 nt, Artificial Sequence
  Description of Artificial Sequence: Synthetic oligonucleotide
  Sense strand starting at position 2888 of SEQ ID NO: 913804
ccaacauagcuuugagcuu

SEQ ID NO: 955315 - RNA, 19 nt, Artificial Sequence
  Description of Artificial Sequence: Synthetic oligonucleotide
  Antisense strand to SEQ ID NO: 955314
aagcucaaagcuauguugg

SEQ ID NO: 955316 - RNA, 19 nt, Artificial Sequence
  Description of Artificial Sequence: Synthetic oligonucleotide
  Sense strand starting at position 3609 of SEQ ID NO: 913804
gaccaaaugugugccaagu

SEQ ID NO: 955317 - RNA, 19 nt, Artificial Sequence
  Description of Artificial Sequence: Synthetic oligonucleotide
  Antisense strand to SEQ ID NO: 955316
acuuggcacacauuugguc

SEQ ID NO: 955318 - RNA, 19 nt, Artificial Sequence
  Description of Artificial Sequence: Synthetic oligonucleotide
  Sense strand starting at position 1466 of SEQ ID NO: 913804
cuuguuaaucgguaugcau

SEQ ID NO: 955319 - RNA, 19 nt, Artificial Sequence
  Description of Artificial Sequence: Synthetic oligonucleotide
  Antisense strand to SEQ ID NO: 955318
augcauaccgauuaacaag

SEQ ID NO: 955320 - RNA, 19 nt, Artificial Sequence
  Description of Artificial Sequence: Synthetic oligonucleotide
  Sense strand starting at position 3121 of SEQ ID NO: 913804
aaggguucuuagucgcaga

SEQ ID NO: 955321 - RNA, 19 nt, Artificial Sequence
  Description of Artificial Sequence: Synthetic oligonucleotide
  Antisense strand to SEQ ID NO: 955320
ucugcgacuaagaacccuu

SEQ ID NO: 955322 - RNA, 19 nt, Artificial Sequence
  Description of Artificial Sequence: Synthetic oligonucleotide
  Sense strand starting at position 2726 of SEQ ID NO: 913804
gcguuaaacccaggagguu

SEQ ID NO: 955323 - RNA, 19 nt, Artificial Sequence
  Description of Artificial Sequence: Synthetic oligonucleotide
  Antisense strand to SEQ ID NO: 955322
aaccuccuggguuuaacgc

SEQ ID NO: 955324 - RNA, 19 nt, Artificial Sequence
  Description of Artificial Sequence: Synthetic oligonucleotide
  Sense strand starting at position 1462 of SEQ ID NO: 913804
aagucuuguuaaucgguau

SEQ ID NO: 955325 - RNA, 19 nt, Artificial Sequence
  Description of Artificial Sequence: Synthetic oligonucleotide
  Antisense strand to SEQ ID NO: 955324
auaccgauuaacaagacuu

SEQ ID NO: 955326 - RNA, 19 nt, Artificial Sequence
  Description of Artificial Sequence: Synthetic oligonucleotide
  Sense strand starting at position 3785 of SEQ ID NO: 913804
gugugagccuacccauagu

SEQ ID NO: 955327 - RNA, 19 nt, Artificial Sequence
  Description of Artificial Sequence: Synthetic oligonucleotide
  Antisense strand to SEQ ID NO: 955326
acuauggguaggcucacac

SEQ ID NO: 955328 - RNA, 19 nt, Artificial Sequence
  Description of Artificial Sequence: Synthetic oligonucleotide
  Sense strand starting at position 1458 of SEQ ID NO: 913804
ggcuaagucuuguuaaucg

SEQ ID NO: 955329 - RNA, 19 nt, Artificial Sequence
  Description of Artificial Sequence: Synthetic oligonucleotide
  Antisense strand to SEQ ID NO: 955328
cgauuaacaagacuuagcc

SEQ ID NO: 955330 - RNA, 19 nt, Artificial Sequence
  Description of Artificial Sequence: Synthetic oligonucleotide
  Sense strand starting at position 3813 of SEQ ID NO: 913804
ucagucagcucugugggua

SEQ ID NO: 955331 - RNA, 19 nt, Artificial Sequence
  Description of Artificial Sequence: Synthetic oligonucleotide
  Antisense strand to SEQ ID NO: 955330
uacccacagagcugacuga

SEQ ID NO: 955332 - RNA, 19 nt, Artificial Sequence
  Description of Artificial Sequence: Synthetic oligonucleotide
  Sense strand starting at position 3465 of SEQ ID NO: 913804
uggagaaucugcuaggaac

SEQ ID NO: 955333 - RNA, 19 nt, Artificial Sequence
  Description of Artificial Sequence: Synthetic oligonucleotide
  Antisense strand to SEQ ID NO: 955332
guuccuagcagauucucca

SEQ ID NO: 955334 - RNA, 19 nt, Artificial Sequence
  Description of Artificial Sequence: Synthetic oligonucleotide
  Sense strand starting at position 3543 of SEQ ID NO: 913804
gggugugauccuugccuuc

SEQ ID NO: 955335 - RNA, 19 nt, Artificial Sequence
  Description of Artificial Sequence: Synthetic oligonucleotide
  Antisense strand to SEQ ID NO: 955334
gaaggcaaggaucacaccc

SEQ ID NO: 955336 - RNA, 19 nt, Artificial Sequence
  Description of Artificial Sequence: Synthetic oligonucleotide
  Sense strand starting at position 1465 of SEQ ID NO: 913804
ucuuguuaaucgguaugca

SEQ ID NO: 955337 - RNA, 19 nt, Artificial Sequence
  Description of Artificial Sequence: Synthetic oligonucleotide
  Antisense strand to SEQ ID NO: 955336
ugcauaccgauuaacaaga

SEQ ID NO: 955338 - RNA, 19 nt, Artificial Sequence
  Description of Artificial Sequence: Synthetic oligonucleotide
  Sense strand starting at position 3948 of SEQ ID NO: 913804
ggacuuagaucuugcagag

SEQ ID NO: 955339 - RNA, 19 nt, Artificial Sequence
  Description of Artificial Sequence: Synthetic oligonucleotide
  Antisense strand to SEQ ID NO: 955338
cucugcaagaucuaagucc

SEQ ID NO: 955340 - RNA, 19 nt, Artificial Sequence
  Description of Artificial Sequence: Synthetic oligonucleotide
  Sense strand starting at position 3036 of SEQ ID NO: 913804
gggagcuguuuacaaguga

SEQ ID NO: 955341 - RNA, 19 nt, Artificial Sequence
  Description of Artificial Sequence: Synthetic oligonucleotide
  Antisense strand to SEQ ID NO: 955340
ucacuuguaaacagcuccc

SEQ ID NO: 955342 - RNA, 19 nt, Artificial Sequence
  Description of Artificial Sequence: Synthetic oligonucleotide
  Sense strand starting at position 3454 of SEQ ID NO: 913804
gugagucaguuuggagaau

SEQ ID NO: 955343 - RNA, 19 nt, Artificial Sequence
  Description of Artificial Sequence: Synthetic oligonucleotide
  Antisense strand to SEQ ID NO: 955342
auucuccaaacugacucac

SEQ ID NO: 955344 - RNA, 19 nt, Artificial Sequence
  Description of Artificial Sequence: Synthetic oligonucleotide
  Sense strand starting at position 3537 of SEQ ID NO: 913804
guucuagggugugauccuu

SEQ ID NO: 955345 - RNA, 19 nt, Artificial Sequence
  Description of Artificial Sequence: Synthetic oligonucleotide
  Antisense strand to SEQ ID NO: 955344
aaggaucacacccuagaac

SEQ ID NO: 955346 - RNA, 19 nt, Artificial Sequence
  Description of Artificial Sequence: Synthetic oligonucleotide
  Sense strand starting at position 3124 of SEQ ID NO: 913804
gguucuuagucgcagacaa

SEQ ID NO: 955347 - RNA, 19 nt, Artificial Sequence
  Description of Artificial Sequence: Synthetic oligonucleotide
  Antisense strand to SEQ ID NO: 955346
uugucugcgacuaagaacc

SEQ ID NO: 955348 - RNA, 19 nt, Artificial Sequence
  Description of Artificial Sequence: Synthetic oligonucleotide
  Sense strand starting at position 3826 of SEQ ID NO: 913804
uggguacucuugggcaagu

SEQ ID NO: 955349 - RNA, 19 nt, Artificial Sequence
  Description of Artificial Sequence: Synthetic oligonucleotide
  Antisense strand to SEQ ID NO: 955348
acuugcccaagaguaccca

SEQ ID NO: 955350 - RNA, 19 nt, Artificial Sequence
  Description of Artificial Sequence: Synthetic oligonucleotide
  Sense strand starting at position 1456 of SEQ ID NO: 913804
ccggcuaagucuuguuaau

SEQ ID NO: 955351 - RNA, 19 nt, Artificial Sequence
  Description of Artificial Sequence: Synthetic oligonucleotide
  Antisense strand to SEQ ID NO: 955350
auuaacaagacuuagccgg

SEQ ID NO: 955352 - RNA, 19 nt, Artificial Sequence
  Description of Artificial Sequence: Synthetic oligonucleotide
  Sense strand starting at position 948 of SEQ ID NO: 913805
auauuagaugcauaguaca

SEQ ID NO: 955353 - RNA, 19 nt, Artificial Sequence
  Description of Artificial Sequence: Synthetic oligonucleotide
  Antisense strand to SEQ ID NO: 955352
uguacuaugcaucuaauau

SEQ ID NO: 955354 - RNA, 19 nt, Artificial Sequence
  Description of Artificial Sequence: Synthetic oligonucleotide
  Sense strand starting at position 2956 of SEQ ID NO: 913805
gccagaguggugaggucuu

SEQ ID NO: 955355 - RNA, 19 nt, Artificial Sequence
  Description of Artificial Sequence: Synthetic oligonucleotide
  Antisense strand to SEQ ID NO: 955354
aagaccucaccacucuggc

SEQ ID NO: 955356 - RNA, 19 nt, Artificial Sequence
  Description of Artificial Sequence: Synthetic oligonucleotide
  Sense strand starting at position 2416 of SEQ ID NO: 913805
acaugagguggugauaagu

SEQ ID NO: 955357 - RNA, 19 nt, Artificial Sequence
  Description of Artificial Sequence: Synthetic oligonucleotide
  Antisense strand to SEQ ID NO: 955356
acuuaucaccaccucaugu

SEQ ID NO: 955358 - RNA, 19 nt, Artificial Sequence
  Description of Artificial Sequence: Synthetic oligonucleotide
  Sense strand starting at position 2872 of SEQ ID NO: 913805
gccuuagauacuggagaaa

SEQ ID NO: 955359 - RNA, 19 nt, Artificial Sequence
  Description of Artificial Sequence: Synthetic oligonucleotide
  Antisense strand to SEQ ID NO: 955358
uuucuccaguaucuaaggc

SEQ ID NO: 955360 - RNA, 19 nt, Artificial Sequence
  Description of Artificial Sequence: Synthetic oligonucleotide
  Sense strand starting at position 651 of SEQ ID NO: 913805
gaggaagguccaugagagu

SEQ ID NO: 955361 - RNA, 19 nt, Artificial Sequence
  Description of Artificial Sequence: Synthetic oligonucleotide
  Antisense strand to SEQ ID NO: 955360
acucucauggaccuuccuc

SEQ ID NO: 955362 - RNA, 19 nt, Artificial Sequence
  Description of Artificial Sequence: Synthetic oligonucleotide
  Sense strand starting at position 3015 of SEQ ID NO: 913805
caugaaguccuagaagucu

SEQ ID NO: 955363 - RNA, 19 nt, Artificial Sequence
  Description of Artificial Sequence: Synthetic oligonucleotide
  Antisense strand to SEQ ID NO: 955362
agacuucuaggacuucaug

SEQ ID NO: 955364 - RNA, 19 nt, Artificial Sequence
  Description of Artificial Sequence: Synthetic oligonucleotide
  Sense strand starting at position 513 of SEQ ID NO: 913805
aguccauuauuacuagaga

SEQ ID NO: 955365 - RNA, 19 nt, Artificial Sequence
  Description of Artificial Sequence: Synthetic oligonucleotide
  Antisense strand to SEQ ID NO: 955364
ucucuaguaauaauggacu

SEQ ID NO: 955366 - RNA, 19 nt, Artificial Sequence
  Description of Artificial Sequence: Synthetic oligonucleotide
  Sense strand starting at position 2413 of SEQ ID NO: 913805
aauacaugagguggugaua

SEQ ID NO: 955367 - RNA, 19 nt, Artificial Sequence
  Description of Artificial Sequence: Synthetic oligonucleotide
  Antisense strand to SEQ ID NO: 955366
uaucaccaccucauguauu

SEQ ID NO: 955368 - RNA, 19 nt, Artificial Sequence
  Description of Artificial Sequence: Synthetic oligonucleotide
  Sense strand starting at position 2086 of SEQ ID NO: 913805
gcaccuucugcgccugaca

SEQ ID NO: 955369 - RNA, 19 nt, Artificial Sequence
  Description of Artificial Sequence: Synthetic oligonucleotide
  Antisense strand to SEQ ID NO: 955368
ugucaggcgcagaaggugc

SEQ ID NO: 955370 - RNA, 19 nt, Artificial Sequence
  Description of Artificial Sequence: Synthetic oligonucleotide
  Sense strand starting at position 2864 of SEQ ID NO: 913805
aguuaacagccuuagauac

SEQ ID NO: 955371 - RNA, 19 nt, Artificial Sequence
  Description of Artificial Sequence: Synthetic oligonucleotide
  Antisense strand to SEQ ID NO: 955370
guaucuaaggcuguuaacu

SEQ ID NO: 955372 - RNA, 19 nt, Artificial Sequence
  Description of Artificial Sequence: Synthetic oligonucleotide
  Sense strand starting at position 2804 of SEQ ID NO: 913805
uguauaugguaaucaggaa

SEQ ID NO: 955373 - RNA, 19 nt, Artificial Sequence
  Description of Artificial Sequence: Synthetic oligonucleotide
  Antisense strand to SEQ ID NO: 955372
uuccugauuaccauauaca

SEQ ID NO: 955374 - RNA, 19 nt, Artificial Sequence
  Description of Artificial Sequence: Synthetic oligonucleotide
  Sense strand starting at position 3165 of SEQ ID NO: 913805
gacuaauuagaagguguau

SEQ ID NO: 955375 - RNA, 19 nt, Artificial Sequence
  Description of Artificial Sequence: Synthetic oligonucleotide
  Antisense strand to SEQ ID NO: 955374
auacaccuucuaauuaguc

SEQ ID NO: 955376 - RNA, 19 nt, Artificial Sequence
  Description of Artificial Sequence: Synthetic oligonucleotide
  Sense strand starting at position 1936 of SEQ ID NO: 913805
gccguaggcguuucuaaga

SEQ ID NO: 955377 - RNA, 19 nt, Artificial Sequence
  Description of Artificial Sequence: Synthetic oligonucleotide
  Antisense strand to SEQ ID NO: 955376
ucuuagaaacgccuacggc

SEQ ID NO: 955378 - RNA, 19 nt, Artificial Sequence
  Description of Artificial Sequence: Synthetic oligonucleotide
  Sense strand starting at position 1257 of SEQ ID NO: 913805
aggauugaugcccaagucu

SEQ ID NO: 955379 - RNA, 19 nt, Artificial Sequence
  Description of Artificial Sequence: Synthetic oligonucleotide
  Antisense strand to SEQ ID NO: 955378
agacuugggcaucaauccu

SEQ ID NO: 955380 - RNA, 19 nt, Artificial Sequence
  Description of Artificial Sequence: Synthetic oligonucleotide
  Sense strand starting at position 1943 of SEQ ID NO: 913805
gcguuucuaagagauggag

SEQ ID NO: 955381 - RNA, 19 nt, Artificial Sequence
  Description of Artificial Sequence: Synthetic oligonucleotide
  Antisense strand to SEQ ID NO: 955380
cuccaucucuuagaaacgc

SEQ ID NO: 955382 - RNA, 19 nt, Artificial Sequence
  Description of Artificial Sequence: Synthetic oligonucleotide
  Sense strand starting at position 4 of SEQ ID NO: 913805
aguagugaacucugaaauu

SEQ ID NO: 955383 - RNA, 19 nt, Artificial Sequence
  Description of Artificial Sequence: Synthetic oligonucleotide
  Antisense strand to SEQ ID NO: 955382
aauuucagaguucacuacu

SEQ ID NO: 955384 - RNA, 19 nt, Artificial Sequence
  Description of Artificial Sequence: Synthetic oligonucleotide
  Sense strand starting at position 2115 of SEQ ID NO: 913805
gggcucuauaaaugaaagu

SEQ ID NO: 955385 - RNA, 19 nt, Artificial Sequence
  Description of Artificial Sequence: Synthetic oligonucleotide
  Antisense strand to SEQ ID NO: 955384
acuuucauuuauagagccc

SEQ ID NO: 955386 - RNA, 19 nt, Artificial Sequence
  Description of Artificial Sequence: Synthetic oligonucleotide
  Sense strand starting at position 2889 of SEQ ID NO: 913805
aagcacauucugggugaaa

SEQ ID NO: 955387 - RNA, 19 nt, Artificial Sequence
  Description of Artificial Sequence: Synthetic oligonucleotide
  Antisense strand to SEQ ID NO: 955386
uuucacccagaaugugcuu

SEQ ID NO: 955388 - RNA, 19 nt, Artificial Sequence
  Description of Artificial Sequence: Synthetic oligonucleotide
  Sense strand starting at position 3118 of SEQ ID NO: 913805
agcauaaucuaguuuagaa

SEQ ID NO: 955389 - RNA, 19 nt, Artificial Sequence
  Description of Artificial Sequence: Synthetic oligonucleotide
  Antisense strand to SEQ ID NO: 955388
uucuaaacuagauuaugcu

SEQ ID NO: 955390 - RNA, 19 nt, Artificial Sequence
  Description of Artificial Sequence: Synthetic oligonucleotide
  Sense strand starting at position 1026 of SEQ ID NO: 913805
gcagcaugcuauuuaacuu

SEQ ID NO: 955391 - RNA, 19 nt, Artificial Sequence
  Description of Artificial Sequence: Synthetic oligonucleotide
  Antisense strand to SEQ ID NO: 955390
aaguuaaauagcaugcugc

SEQ ID NO: 955392 - RNA, 19 nt, Artificial Sequence
  Description of Artificial Sequence: Synthetic oligonucleotide
  Sense strand starting at position 3046 of SEQ ID NO: 913805
gccacuugucaagaucuua

SEQ ID NO: 955393 - RNA, 19 nt, Artificial Sequence
  Description of Artificial Sequence: Synthetic oligonucleotide
  Antisense strand to SEQ ID NO: 955392
uaagaucuugacaaguggc

SEQ ID NO: 955394 - RNA, 19 nt, Artificial Sequence
  Description of Artificial Sequence: Synthetic oligonucleotide
  Sense strand starting at position 3067 of SEQ ID NO: 913805
gugucuucugaguaagaug

SEQ ID NO: 955395 - RNA, 19 nt, Artificial Sequence
  Description of Artificial Sequence: Synthetic oligonucleotide
  Antisense strand to SEQ ID NO: 955394
caucuuacucagaagacac

SEQ ID NO: 955396 - RNA, 19 nt, Artificial Sequence
  Description of Artificial Sequence: Synthetic oligonucleotide
  Sense strand starting at position 3083 of SEQ ID NO: 913805
augagaagccaguguaaua

SEQ ID NO: 955397 - RNA, 19 nt, Artificial Sequence
  Description of Artificial Sequence: Synthetic oligonucleotide
  Antisense strand to SEQ ID NO: 955396
uauuacacuggcuucucau

SEQ ID NO: 955398 - RNA, 19 nt, Artificial Sequence
  Description of Artificial Sequence: Synthetic oligonucleotide
  Sense strand starting at position 3042 of SEQ ID NO: 913805
gggagccacuugucaagau

SEQ ID NO: 955399 - RNA, 19 nt, Artificial Sequence
  Description of Artificial Sequence: Synthetic oligonucleotide
  Antisense strand to SEQ ID NO: 955398
aucuugacaaguggcuccc

SEQ ID NO: 955400 - RNA, 19 nt, Artificial Sequence
  Description of Artificial Sequence: Synthetic oligonucleotide
  Sense strand starting at position 2131 of SEQ ID NO: 913805
agugaaucaugggcuccau

SEQ ID NO: 955401 - RNA, 19 nt, Artificial Sequence
  Description of Artificial Sequence: Synthetic oligonucleotide
  Antisense strand to SEQ ID NO: 955400
auggagcccaugauucacu

SEQ ID NO: 955402 - RNA, 19 nt, Artificial Sequence
  Description of Artificial Sequence: Synthetic oligonucleotide
  Sense strand starting at position 2109 of SEQ ID NO: 913805
gcaugugggcucuauaaau

SEQ ID NO: 955403 - RNA, 19 nt, Artificial Sequence
  Description of Artificial Sequence: Synthetic oligonucleotide
  Antisense strand to SEQ ID NO: 955402
auuuauagagcccacaugc

SEQ ID NO: 955404 - RNA, 19 nt, Artificial Sequence
  Description of Artificial Sequence: Synthetic oligonucleotide
  Sense strand starting at position 895 of SEQ ID NO: 913805
guaacaaucugacucagcu

SEQ ID NO: 955405 - RNA, 19 nt, Artificial Sequence
  Description of Artificial Sequence: Synthetic oligonucleotide
  Antisense strand to SEQ ID NO: 955404
agcugagucagauuguuac

SEQ ID NO: 955406 - RNA, 19 nt, Artificial Sequence
  Description of Artificial Sequence: Synthetic oligonucleotide
  Sense strand starting at position 1511 of SEQ ID NO: 913805
ggcagaugccuugagccaa

SEQ ID NO: 955407 - RNA, 19 nt, Artificial Sequence
  Description of Artificial Sequence: Synthetic oligonucleotide
  Antisense strand to SEQ ID NO: 955406
uuggcucaaggcaucugcc

SEQ ID NO: 955408 - RNA, 19 nt, Artificial Sequence
  Description of Artificial Sequence: Synthetic oligonucleotide
  Sense strand starting at position 3040 of SEQ ID NO: 913805
uugggagccacuugucaag

SEQ ID NO: 955409 - RNA, 19 nt, Artificial Sequence
  Description of Artificial Sequence: Synthetic oligonucleotide
  Antisense strand to SEQ ID NO: 955408
cuugacaaguggcucccaa

SEQ ID NO: 955410 - RNA, 19 nt, Artificial Sequence
  Description of Artificial Sequence: Synthetic oligonucleotide
  Sense strand starting at position 2161 of SEQ ID NO: 913805
aucauugugccugaugcaa

SEQ ID NO: 955411 - RNA, 19 nt, Artificial Sequence
  Description of Artificial Sequence: Synthetic oligonucleotide
  Antisense strand to SEQ ID NO: 955410
uugcaucaggcacaaugau

SEQ ID NO: 955412 - RNA, 19 nt, Artificial Sequence
  Description of Artificial Sequence: Synthetic oligonucleotide
  Sense strand starting at position 937 of SEQ ID NO: 913805
gugccacguauauauuaga

SEQ ID NO: 955413 - RNA, 19 nt, Artificial Sequence
  Description of Artificial Sequence: Synthetic oligonucleotide
  Antisense strand to SEQ ID NO: 955412
ucuaauauauacguggcac

SEQ ID NO: 955414 - RNA, 19 nt, Artificial Sequence
  Description of Artificial Sequence: Synthetic oligonucleotide
  Sense strand starting at position 2922 of SEQ ID NO: 913805
ggcccugugguaggaauau

SEQ ID NO: 955415 - RNA, 19 nt, Artificial Sequence
  Description of Artificial Sequence: Synthetic oligonucleotide
  Antisense strand to SEQ ID NO: 955414
auauuccuaccacagggcc

SEQ ID NO: 955416 - RNA, 19 nt, Artificial Sequence
  Description of Artificial Sequence: Synthetic oligonucleotide
  Sense strand starting at position 1475 of SEQ ID NO: 913805
cucugaaguugcucucuga

SEQ ID NO: 955417 - RNA, 19 nt, Artificial Sequence
  Description of Artificial Sequence: Synthetic oligonucleotide
  Antisense strand to SEQ ID NO: 955416
ucagagagcaacuucagag

SEQ ID NO: 955418 - RNA, 19 nt, Artificial Sequence
  Description of Artificial Sequence: Synthetic oligonucleotide
  Sense strand starting at position 2998 of SEQ ID NO: 913805
aguagaaaguaauagaaca

SEQ ID NO: 955419 - RNA, 19 nt, Artificial Sequence
  Description of Artificial Sequence: Synthetic oligonucleotide
  Antisense strand to SEQ ID NO: 955418
uguucuauuacuuucuacu

SEQ ID NO: 955420 - RNA, 19 nt, Artificial Sequence
  Description of Artificial Sequence: Synthetic oligonucleotide
  Sense strand starting at position 2963 of SEQ ID NO: 913805
uggugaggucuuugaggcu

SEQ ID NO: 955421 - RNA, 19 nt, Artificial Sequence
  Description of Artificial Sequence: Synthetic oligonucleotide
  Antisense strand to SEQ ID NO: 955420
agccucaaagaccucacca

SEQ ID NO: 955422 - RNA, 19 nt, Artificial Sequence
  Description of Artificial Sequence: Synthetic oligonucleotide
  Sense strand starting at position 1934 of SEQ ID NO: 913805
gcgccguaggcguuucuaa

SEQ ID NO: 955423 - RNA, 19 nt, Artificial Sequence
  Description of Artificial Sequence: Synthetic oligonucleotide
  Antisense strand to SEQ ID NO: 955422
uuagaaacgccuacggcgc

SEQ ID NO: 955424 - RNA, 19 nt, Artificial Sequence
  Description of Artificial Sequence: Synthetic oligonucleotide
  Sense strand starting at position 1466 of SEQ ID NO: 913805
ugggcuucucucugaaguu

SEQ ID NO: 955425 - RNA, 19 nt, Artificial Sequence
  Description of Artificial Sequence: Synthetic oligonucleotide
  Antisense strand to SEQ ID NO: 955424
aacuucagagagaagccca

SEQ ID NO: 955426 - RNA, 19 nt, Artificial Sequence
  Description of Artificial Sequence: Synthetic oligonucleotide
  Sense strand starting at position 2388 of SEQ ID NO: 913805
agagacacaucaugaauaa

SEQ ID NO: 955427 - RNA, 19 nt, Artificial Sequence
  Description of Artificial Sequence: Synthetic oligonucleotide
  Antisense strand to SEQ ID NO: 955426
uuauucaugaugugucucu

SEQ ID NO: 955428 - RNA, 19 nt, Artificial Sequence
  Description of Artificial Sequence: Synthetic oligonucleotide
  Sense strand starting at position 2915 of SEQ ID NO: 913805
guacaaaggcccuguggua

SEQ ID NO: 955429 - RNA, 19 nt, Artificial Sequence
  Description of Artificial Sequence: Synthetic oligonucleotide
  Antisense strand to SEQ ID NO: 955428
uaccacagggccuuuguac

SEQ ID NO: 955430 - RNA, 19 nt, Artificial Sequence
  Description of Artificial Sequence: Synthetic oligonucleotide
  Sense strand starting at position 2790 of SEQ ID NO: 913805
uaaggaggaugauauguau

SEQ ID NO: 955431 - RNA, 19 nt, Artificial Sequence
  Description of Artificial Sequence: Synthetic oligonucleotide
  Antisense strand to SEQ ID NO: 955430
auacauaucauccuccuua

SEQ ID NO: 955432 - RNA, 19 nt, Artificial Sequence
  Description of Artificial Sequence: Synthetic oligonucleotide
  Sense strand starting at position 1079 of SEQ ID NO: 913806
auauuagaugcauaguaca

SEQ ID NO: 955433 - RNA, 19 nt, Artificial Sequence
  Description of Artificial Sequence: Synthetic oligonucleotide
  Antisense strand to SEQ ID NO: 955432
uguacuaugcaucuaauau

SEQ ID NO: 955434 - RNA, 19 nt, Artificial Sequence
  Description of Artificial Sequence: Synthetic oligonucleotide
  Sense strand starting at position 3087 of SEQ ID NO: 913806
gccagaguggugaggucuu

SEQ ID NO: 955435 - RNA, 19 nt, Artificial Sequence
  Description of Artificial Sequence: Synthetic oligonucleotide
  Antisense strand to SEQ ID NO: 955434
aagaccucaccacucuggc

SEQ ID NO: 955436 - RNA, 19 nt, Artificial Sequence
  Description of Artificial Sequence: Synthetic oligonucleotide
  Sense strand starting at position 2547 of SEQ ID NO: 913806
acaugagguggugauaagu

SEQ ID NO: 955437 - RNA, 19 nt, Artificial Sequence
  Description of Artificial Sequence: Synthetic oligonucleotide
  Antisense strand to SEQ ID NO: 955436
acuuaucaccaccucaugu

SEQ ID NO: 955438 - RNA, 19 nt, Artificial Sequence
  Description of Artificial Sequence: Synthetic oligonucleotide
  Sense strand starting at position 3003 of SEQ ID NO: 913806
gccuuagauacuggagaaa

SEQ ID NO: 955439 - RNA, 19 nt, Artificial Sequence
  Description of Artificial Sequence: Synthetic oligonucleotide
  Antisense strand to SEQ ID NO: 955438
uuucuccaguaucuaaggc

SEQ ID NO: 955440 - RNA, 19 nt, Artificial Sequence
  Description of Artificial Sequence: Synthetic oligonucleotide
  Sense strand starting at position 782 of SEQ ID NO: 913806
gaggaagguccaugagagu

SEQ ID NO: 955441 - RNA, 19 nt, Artificial Sequence
  Description of Artificial Sequence: Synthetic oligonucleotide
  Antisense strand to SEQ ID NO: 955440
acucucauggaccuuccuc

SEQ ID NO: 955442 - RNA, 19 nt, Artificial Sequence
  Description of Artificial Sequence: Synthetic oligonucleotide
  Sense strand starting at position 3146 of SEQ ID NO: 913806
caugaaguccuagaagucu

SEQ ID NO: 955443 - RNA, 19 nt, Artificial Sequence
  Description of Artificial Sequence: Synthetic oligonucleotide
  Antisense strand to SEQ ID NO: 955442
agacuucuaggacuucaug

SEQ ID NO: 955444 - RNA, 19 nt, Artificial Sequence
  Description of Artificial Sequence: Synthetic oligonucleotide
  Sense strand starting at position 103 of SEQ ID NO: 913806
ggaauuccuccugggauua

SEQ ID NO: 955445 - RNA, 19 nt, Artificial Sequence
  Description of Artificial Sequence: Synthetic oligonucleotide
  Antisense strand to SEQ ID NO: 955444
uaaucccaggaggaauucc

SEQ ID NO: 955446 - RNA, 19 nt, Artificial Sequence
  Description of Artificial Sequence: Synthetic oligonucleotide
  Sense strand starting at position 644 of SEQ ID NO: 913806
aguccauuauuacuagaga

SEQ ID NO: 955447 - RNA, 19 nt, Artificial Sequence
  Description of Artificial Sequence: Synthetic oligonucleotide
  Antisense strand to SEQ ID NO: 955446
ucucuaguaauaauggacu

SEQ ID NO: 955448 - RNA, 19 nt, Artificial Sequence
  Description of Artificial Sequence: Synthetic oligonucleotide
  Sense strand starting at position 2544 of SEQ ID NO: 913806
aauacaugagguggugaua

SEQ ID NO: 955449 - RNA, 19 nt, Artificial Sequence
  Description of Artificial Sequence: Synthetic oligonucleotide
  Antisense strand to SEQ ID NO: 955448
uaucaccaccucauguauu

SEQ ID NO: 955450 - RNA, 19 nt, Artificial Sequence
  Description of Artificial Sequence: Synthetic oligonucleotide
  Sense strand starting at position 2217 of SEQ ID NO: 913806
gcaccuucugcgccugaca

SEQ ID NO: 955451 - RNA, 19 nt, Artificial Sequence
  Description of Artificial Sequence: Synthetic oligonucleotide
  Antisense strand to SEQ ID NO: 955450
ugucaggcgcagaaggugc

SEQ ID NO: 955452 - RNA, 19 nt, Artificial Sequence
  Description of Artificial Sequence: Synthetic oligonucleotide
  Sense strand starting at position 2995 of SEQ ID NO: 913806
aguuaacagccuuagauac

SEQ ID NO: 955453 - RNA, 19 nt, Artificial Sequence
  Description of Artificial Sequence: Synthetic oligonucleotide
  Antisense strand to SEQ ID NO: 955452
guaucuaaggcuguuaacu

SEQ ID NO: 955454 - RNA, 19 nt, Artificial Sequence
  Description of Artificial Sequence: Synthetic oligonucleotide
  Sense strand starting at position 2935 of SEQ ID NO: 913806
uguauaugguaaucaggaa

SEQ ID NO: 955455 - RNA, 19 nt, Artificial Sequence
  Description of Artificial Sequence: Synthetic oligonucleotide
  Antisense strand to SEQ ID NO: 955454
uuccugauuaccauauaca

SEQ ID NO: 955456 - RNA, 19 nt, Artificial Sequence
  Description of Artificial Sequence: Synthetic oligonucleotide
  Sense strand starting at position 3296 of SEQ ID NO: 913806
gacuaauuagaagguguau

SEQ ID NO: 955457 - RNA, 19 nt, Artificial Sequence
  Description of Artificial Sequence: Synthetic oligonucleotide
  Antisense strand to SEQ ID NO: 955456
auacaccuucuaauuaguc

SEQ ID NO: 955458 - RNA, 19 nt, Artificial Sequence
  Description of Artificial Sequence: Synthetic oligonucleotide
  Sense strand starting at position 2067 of SEQ ID NO: 913806
gccguaggcguuucuaaga

SEQ ID NO: 955459 - RNA, 19 nt, Artificial Sequence
  Description of Artificial Sequence: Synthetic oligonucleotide
  Antisense strand to SEQ ID NO: 955458
ucuuagaaacgccuacggc

SEQ ID NO: 955460 - RNA, 19 nt, Artificial Sequence
  Description of Artificial Sequence: Synthetic oligonucleotide
  Sense strand starting at position 88 of SEQ ID NO: 913806
cucccuucuguugauggaa

SEQ ID NO: 955461 - RNA, 19 nt, Artificial Sequence
  Description of Artificial Sequence: Synthetic oligonucleotide
  Antisense strand to SEQ ID NO: 955460
uuccaucaacagaagggag

SEQ ID NO: 955462 - RNA, 19 nt, Artificial Sequence
  Description of Artificial Sequence: Synthetic oligonucleotide
  Sense strand starting at position 1388 of SEQ ID NO: 913806
aggauugaugcccaagucu

SEQ ID NO: 955463 - RNA, 19 nt, Artificial Sequence
  Description of Artificial Sequence: Synthetic oligonucleotide
  Antisense strand to SEQ ID NO: 955462
agacuugggcaucaauccu

SEQ ID NO: 955464 - RNA, 19 nt, Artificial Sequence
  Description of Artificial Sequence: Synthetic oligonucleotide
  Sense strand starting at position 2074 of SEQ ID NO: 913806
gcguuucuaagagauggag

SEQ ID NO: 955465 - RNA, 19 nt, Artificial Sequence
  Description of Artificial Sequence: Synthetic oligonucleotide
  Antisense strand to SEQ ID NO: 955464
cuccaucucuuagaaacgc

SEQ ID NO: 955466 - RNA, 19 nt, Artificial Sequence
  Description of Artificial Sequence: Synthetic oligonucleotide
  Sense strand starting at position 135 of SEQ ID NO: 913806
aguagugaacucugaaauu

SEQ ID NO: 955467 - RNA, 19 nt, Artificial Sequence
  Description of Artificial Sequence: Synthetic oligonucleotide
  Antisense strand to SEQ ID NO: 955466
aauuucagaguucacuacu

SEQ ID NO: 955468 - RNA, 19 nt, Artificial Sequence
  Description of Artificial Sequence: Synthetic oligonucleotide
  Sense strand starting at position 2246 of SEQ ID NO: 913806
gggcucuauaaaugaaagu

SEQ ID NO: 955469 - RNA, 19 nt, Artificial Sequence
  Description of Artificial Sequence: Synthetic oligonucleotide
  Antisense strand to SEQ ID NO: 955468
acuuucauuuauagagccc

SEQ ID NO: 955470 - RNA, 19 nt, Artificial Sequence
  Description of Artificial Sequence: Synthetic oligonucleotide
  Sense strand starting at position 3020 of SEQ ID NO: 913806
aagcacauucugggugaaa

SEQ ID NO: 955471 - RNA, 19 nt, Artificial Sequence
  Description of Artificial Sequence: Synthetic oligonucleotide
  Antisense strand to SEQ ID NO: 955470
uuucacccagaaugugcuu

SEQ ID NO: 955472 - RNA, 19 nt, Artificial Sequence
  Description of Artificial Sequence: Synthetic oligonucleotide
  Sense strand starting at position 3249 of SEQ ID NO: 913806
agcauaaucuaguuuagaa

SEQ ID NO: 955473 - RNA, 19 nt, Artificial Sequence
  Description of Artificial Sequence: Synthetic oligonucleotide
  Antisense strand to SEQ ID NO: 955472
uucuaaacuagauuaugcu

SEQ ID NO: 955474 - RNA, 19 nt, Artificial Sequence
  Description of Artificial Sequence: Synthetic oligonucleotide
  Sense strand starting at position 1157 of SEQ ID NO: 913806
gcagcaugcuauuuaacuu

SEQ ID NO: 955475 - RNA, 19 nt, Artificial Sequence
  Description of Artificial Sequence: Synthetic oligonucleotide
  Antisense strand to SEQ ID NO: 955474
aaguuaaauagcaugcugc

SEQ ID NO: 955476 - RNA, 19 nt, Artificial Sequence
  Description of Artificial Sequence: Synthetic oligonucleotide
  Sense strand starting at position 3177 of SEQ ID NO: 913806
gccacuugucaagaucuua

SEQ ID NO: 955477 - RNA, 19 nt, Artificial Sequence
  Description of Artificial Sequence: Synthetic oligonucleotide
  Antisense strand to SEQ ID NO: 955476
uaagaucuugacaaguggc

SEQ ID NO: 955478 - RNA, 19 nt, Artificial Sequence
  Description of Artificial Sequence: Synthetic oligonucleotide
  Sense strand starting at position 3198 of SEQ ID NO: 913806
gugucuucugaguaagaug

SEQ ID NO: 955479 - RNA, 19 nt, Artificial Sequence
  Description of Artificial Sequence: Synthetic oligonucleotide
  Antisense strand to SEQ ID NO: 955478
caucuuacucagaagacac

SEQ ID NO: 955480 - RNA, 19 nt, Artificial Sequence
  Description of Artificial Sequence: Synthetic oligonucleotide
  Sense strand starting at position 3214 of SEQ ID NO: 913806
augagaagccaguguaaua

SEQ ID NO: 955481 - RNA, 19 nt, Artificial Sequence
  Description of Artificial Sequence: Synthetic oligonucleotide
  Antisense strand to SEQ ID NO: 955480
uauuacacuggcuucucau

SEQ ID NO: 955482 - RNA, 19 nt, Artificial Sequence
  Description of Artificial Sequence: Synthetic oligonucleotide
  Sense strand starting at position 3173 of SEQ ID NO: 913806
gggagccacuugucaagau

SEQ ID NO: 955483 - RNA, 19 nt, Artificial Sequence
  Description of Artificial Sequence: Synthetic oligonucleotide
  Antisense strand to SEQ ID NO: 955482
aucuugacaaguggcuccc

SEQ ID NO: 955484 - RNA, 19 nt, Artificial Sequence
  Description of Artificial Sequence: Synthetic oligonucleotide
  Sense strand starting at position 2262 of SEQ ID NO: 913806
agugaaucaugggcuccau

SEQ ID NO: 955485 - RNA, 19 nt, Artificial Sequence
  Description of Artificial Sequence: Synthetic oligonucleotide
  Antisense strand to SEQ ID NO: 955484
auggagcccaugauucacu

SEQ ID NO: 955486 - RNA, 19 nt, Artificial Sequence
  Description of Artificial Sequence: Synthetic oligonucleotide
  Sense strand starting at position 2240 of SEQ ID NO: 913806
gcaugugggcucuauaaau

SEQ ID NO: 955487 - RNA, 19 nt, Artificial Sequence
  Description of Artificial Sequence: Synthetic oligonucleotide
  Antisense strand to SEQ ID NO: 955486
auuuauagagcccacaugc

SEQ ID NO: 955488 - RNA, 19 nt, Artificial Sequence
  Description of Artificial Sequence: Synthetic oligonucleotide
  Sense strand starting at position 1026 of SEQ ID NO: 913806
guaacaaucugacucagcu

SEQ ID NO: 955489 - RNA, 19 nt, Artificial Sequence
  Description of Artificial Sequence: Synthetic oligonucleotide
  Antisense strand to SEQ ID NO: 955488
agcugagucagauuguuac

SEQ ID NO: 955490 - RNA, 19 nt, Artificial Sequence
  Description of Artificial Sequence: Synthetic oligonucleotide
  Sense strand starting at position 1642 of SEQ ID NO: 913806
ggcagaugccuugagccaa

SEQ ID NO: 955491 - RNA, 19 nt, Artificial Sequence
  Description of Artificial Sequence: Synthetic oligonucleotide
  Antisense strand to SEQ ID NO: 955490
uuggcucaaggcaucugcc

SEQ ID NO: 955492 - RNA, 19 nt, Artificial Sequence
  Description of Artificial Sequence: Synthetic oligonucleotide
  Sense strand starting at position 3171 of SEQ ID NO: 913806
uugggagccacuugucaag

SEQ ID NO: 955493 - RNA, 19 nt, Artificial Sequence
  Description of Artificial Sequence: Synthetic oligonucleotide
  Antisense strand to SEQ ID NO: 955492
cuugacaaguggcucccaa

SEQ ID NO: 955494 - RNA, 19 nt, Artificial Sequence
  Description of Artificial Sequence: Synthetic oligonucleotide
  Sense strand starting at position 2292 of SEQ ID NO: 913806
aucauugugccugaugcaa

SEQ ID NO: 955495 - RNA, 19 nt, Artificial Sequence
  Description of Artificial Sequence: Synthetic oligonucleotide
  Antisense strand to SEQ ID NO: 955494
uugcaucaggcacaaugau

SEQ ID NO: 955496 - RNA, 19 nt, Artificial Sequence
  Description of Artificial Sequence: Synthetic oligonucleotide
  Sense strand starting at position 1068 of SEQ ID NO: 913806
gugccacguauauauuaga

SEQ ID NO: 955497 - RNA, 19 nt, Artificial Sequence
  Description of Artificial Sequence: Synthetic oligonucleotide
  Antisense strand to SEQ ID NO: 955496
ucuaauauauacguggcac

SEQ ID NO: 955498 - RNA, 19 nt, Artificial Sequence
  Description of Artificial Sequence: Synthetic oligonucleotide
  Sense strand starting at position 3053 of SEQ ID NO: 913806
ggcccugugguaggaauau

SEQ ID NO: 955499 - RNA, 19 nt, Artificial Sequence
  Description of Artificial Sequence: Synthetic oligonucleotide
  Antisense strand to SEQ ID NO: 955498
auauuccuaccacagggcc

SEQ ID NO: 955500 - RNA, 19 nt, Artificial Sequence
  Description of Artificial Sequence: Synthetic oligonucleotide
  Sense strand starting at position 52 of SEQ ID NO: 913806
gaaauugauucucaggaga

SEQ ID NO: 955501 - RNA, 19 nt, Artificial Sequence
  Description of Artificial Sequence: Synthetic oligonucleotide
  Antisense strand to SEQ ID NO: 955500
ucuccugagaaucaauuuc

SEQ ID NO: 955502 - RNA, 19 nt, Artificial Sequence
  Description of Artificial Sequence: Synthetic oligonucleotide
  Sense strand starting at position 1606 of SEQ ID NO: 913806
cucugaaguugcucucuga

SEQ ID NO: 955503 - RNA, 19 nt, Artificial Sequence
  Description of Artificial Sequence: Synthetic oligonucleotide
  Antisense strand to SEQ ID NO: 955502
ucagagagcaacuucagag

SEQ ID NO: 955504 - RNA, 19 nt, Artificial Sequence
  Description of Artificial Sequence: Synthetic oligonucleotide
  Sense strand starting at position 3129 of SEQ ID NO: 913806
aguagaaaguaauagaaca

SEQ ID NO: 955505 - RNA, 19 nt, Artificial Sequence
  Description of Artificial Sequence: Synthetic oligonucleotide
  Antisense strand to SEQ ID NO: 955504
uguucuauuacuuucuacu

SEQ ID NO: 955506 - RNA, 19 nt, Artificial Sequence
  Description of Artificial Sequence: Synthetic oligonucleotide
  Sense strand starting at position 3094 of SEQ ID NO: 913806
uggugaggucuuugaggcu

SEQ ID NO: 955507 - RNA, 19 nt, Artificial Sequence
  Description of Artificial Sequence: Synthetic oligonucleotide
  Antisense strand to SEQ ID NO: 955506
agccucaaagaccucacca

SEQ ID NO: 955508 - RNA, 19 nt, Artificial Sequence
  Description of Artificial Sequence: Synthetic oligonucleotide
  Sense strand starting at position 2065 of SEQ ID NO: 913806
gcgccguaggcguuucuaa

SEQ ID NO: 955509 - RNA, 19 nt, Artificial Sequence
  Description of Artificial Sequence: Synthetic oligonucleotide
  Antisense strand to SEQ ID NO: 955508
uuagaaacgccuacggcgc

SEQ ID NO: 955510 - RNA, 19 nt, Artificial Sequence
  Description of Artificial Sequence: Synthetic oligonucleotide
  Sense strand starting at position 1597 of SEQ ID NO: 913806
ugggcuucucucugaaguu

SEQ ID NO: 955511 - RNA, 19 nt, Artificial Sequence
  Description of Artificial Sequence: Synthetic oligonucleotide
  Antisense strand to SEQ ID NO: 955510
aacuucagagagaagccca

SEQ ID NO: 955512 - RNA, 19 nt, Artificial Sequence
  Description of Artificial Sequence: Synthetic oligonucleotide
  Sense strand starting at position 1230 of SEQ ID NO: 913807
agaggacucgcccaaccaa

SEQ ID NO: 955513 - RNA, 19 nt, Artificial Sequence
  Description of Artificial Sequence: Synthetic oligonucleotide
  Antisense strand to SEQ ID NO: 955512
uugguugggcgaguccucu

SEQ ID NO: 955514 - RNA, 19 nt, Artificial Sequence
  Description of Artificial Sequence: Synthetic oligonucleotide
  Sense strand starting at position 2335 of SEQ ID NO: 913807
uugacuagaugguuagaua

SEQ ID NO: 955515 - RNA, 19 nt, Artificial Sequence
  Description of Artificial Sequence: Synthetic oligonucleotide
  Antisense strand to SEQ ID NO: 955514
uaucuaaccaucuagucaa

SEQ ID NO: 955516 - RNA, 19 nt, Artificial Sequence
  Description of Artificial Sequence: Synthetic oligonucleotide
  Sense strand starting at position 2627 of SEQ ID NO: 913807
aaaucuauggguuauaguu

SEQ ID NO: 955517 - RNA, 19 nt, Artificial Sequence
  Description of Artificial Sequence: Synthetic oligonucleotide
  Antisense strand to SEQ ID NO: 955516
aacuauaacccauagauuu

SEQ ID NO: 955518 - RNA, 19 nt, Artificial Sequence
  Description of Artificial Sequence: Synthetic oligonucleotide
  Sense strand starting at position 3611 of SEQ ID NO: 913807
cuucgucaaauggauagau

SEQ ID NO: 955519 - RNA, 19 nt, Artificial Sequence
  Description of Artificial Sequence: Synthetic oligonucleotide
  Antisense strand to SEQ ID NO: 955518
aucuauccauuugacgaag

SEQ ID NO: 955520 - RNA, 19 nt, Artificial Sequence
  Description of Artificial Sequence: Synthetic oligonucleotide
  Sense strand starting at position 984 of SEQ ID NO: 913807
cgugaaaugaacuaucuug

SEQ ID NO: 955521 - RNA, 19 nt, Artificial Sequence
  Description of Artificial Sequence: Synthetic oligonucleotide
  Antisense strand to SEQ ID NO: 955520
caagauaguucauuucacg

SEQ ID NO: 955522 - RNA, 19 nt, Artificial Sequence
  Description of Artificial Sequence: Synthetic oligonucleotide
  Sense strand starting at position 38 of SEQ ID NO: 913807
gagaaauuguauguuagga

SEQ ID NO: 955523 - RNA, 19 nt, Artificial Sequence
  Description of Artificial Sequence: Synthetic oligonucleotide
  Antisense strand to SEQ ID NO: 955522
uccuaacauacaauuucuc

SEQ ID NO: 955524 - RNA, 19 nt, Artificial Sequence
  Description of Artificial Sequence: Synthetic oligonucleotide
  Sense strand starting at position 1692 of SEQ ID NO: 913807
gucauuccauaauuaagag

SEQ ID NO: 955525 - RNA, 19 nt, Artificial Sequence
  Description of Artificial Sequence: Synthetic oligonucleotide
  Antisense strand to SEQ ID NO: 955524
cucuuaauuauggaaugac

SEQ ID NO: 955526 - RNA, 19 nt, Artificial Sequence
  Description of Artificial Sequence: Synthetic oligonucleotide
  Sense strand starting at position 975 of SEQ ID NO: 913807
caugguauacgugaaauga

SEQ ID NO: 955527 - RNA, 19 nt, Artificial Sequence
  Description of Artificial Sequence: Synthetic oligonucleotide
  Antisense strand to SEQ ID NO: 955526
ucauuucacguauaccaug

SEQ ID NO: 955528 - RNA, 19 nt, Artificial Sequence
  Description of Artificial Sequence: Synthetic oligonucleotide
  Sense strand starting at position 2491 of SEQ ID NO: 913807
cuaagaaaucuaggcuuaa

SEQ ID NO: 955529 - RNA, 19 nt, Artificial Sequence
  Description of Artificial Sequence: Synthetic oligonucleotide
  Antisense strand to SEQ ID NO: 955528
uuaagccuagauuucuuag

SEQ ID NO: 955530 - RNA, 19 nt, Artificial Sequence
  Description of Artificial Sequence: Synthetic oligonucleotide
  Sense strand starting at position 302 of SEQ ID NO: 913807
acugguuuaguauaggauu

SEQ ID NO: 955531 - RNA, 19 nt, Artificial Sequence
  Description of Artificial Sequence: Synthetic oligonucleotide
  Antisense strand to SEQ ID NO: 955530
aauccuauacuaaaccagu

SEQ ID NO: 955532 - RNA, 19 nt, Artificial Sequence
  Description of Artificial Sequence: Synthetic oligonucleotide
  Sense strand starting at position 65 of SEQ ID NO: 913807
ucgagaucauauguagaaa

SEQ ID NO: 955533 - RNA, 19 nt, Artificial Sequence
  Description of Artificial Sequence: Synthetic oligonucleotide
  Antisense strand to SEQ ID NO: 955532
uuucuacauaugaucucga

SEQ ID NO: 955534 - RNA, 19 nt, Artificial Sequence
  Description of Artificial Sequence: Synthetic oligonucleotide
  Sense strand starting at position 57 of SEQ ID NO: 913807
gcaauacuucgagaucaua

SEQ ID NO: 955535 - RNA, 19 nt, Artificial Sequence
  Description of Artificial Sequence: Synthetic oligonucleotide
  Antisense strand to SEQ ID NO: 955534
uaugaucucgaaguauugc

SEQ ID NO: 955536 - RNA, 19 nt, Artificial Sequence
  Description of Artificial Sequence: Synthetic oligonucleotide
  Sense strand starting at position 2449 of SEQ ID NO: 913807
gcccuugaccuuuaagaac

SEQ ID NO: 955537 - RNA, 19 nt, Artificial Sequence
  Description of Artificial Sequence: Synthetic oligonucleotide
  Antisense strand to SEQ ID NO: 955536
guucuuaaaggucaagggc

SEQ ID NO: 955538 - RNA, 19 nt, Artificial Sequence
  Description of Artificial Sequence: Synthetic oligonucleotide
  Sense strand starting at position 790 of SEQ ID NO: 913807
uuaagugauuugccauugu

SEQ ID NO: 955539 - RNA, 19 nt, Artificial Sequence
  Description of Artificial Sequence: Synthetic oligonucleotide
  Antisense strand to SEQ ID NO: 955538
acaauggcaaaucacuuaa

SEQ ID NO: 955540 - RNA, 19 nt, Artificial Sequence
  Description of Artificial Sequence: Synthetic oligonucleotide
  Sense strand starting at position 2417 of SEQ ID NO: 913807
cagauaauggucuagcuau

SEQ ID NO: 955541 - RNA, 19 nt, Artificial Sequence
  Description of Artificial Sequence: Synthetic oligonucleotide
  Antisense strand to SEQ ID NO: 955540
auagcuagaccauuaucug

SEQ ID NO: 955542 - RNA, 19 nt, Artificial Sequence
  Description of Artificial Sequence: Synthetic oligonucleotide
  Sense strand starting at position 715 of SEQ ID NO: 913807
aagacuaaccaguaguguu

SEQ ID NO: 955543 - RNA, 19 nt, Artificial Sequence
  Description of Artificial Sequence: Synthetic oligonucleotide
  Antisense strand to SEQ ID NO: 955542
aacacuacugguuagucuu

SEQ ID NO: 955544 - RNA, 19 nt, Artificial Sequence
  Description of Artificial Sequence: Synthetic oligonucleotide
  Sense strand starting at position 2255 of SEQ ID NO: 913807
uauaguuuggcucagauag

SEQ ID NO: 955545 - RNA, 19 nt, Artificial Sequence
  Description of Artificial Sequence: Synthetic oligonucleotide
  Antisense strand to SEQ ID NO: 955544
cuaucugagccaaacuaua

SEQ ID NO: 955546 - RNA, 19 nt, Artificial Sequence
  Description of Artificial Sequence: Synthetic oligonucleotide
  Sense strand starting at position 495 of SEQ ID NO: 913807
gugugcgcgccuguaauuu

SEQ ID NO: 955547 - RNA, 19 nt, Artificial Sequence
  Description of Artificial Sequence: Synthetic oligonucleotide
  Antisense strand to SEQ ID NO: 955546
aaauuacaggcgcgcacac

SEQ ID NO: 955548 - RNA, 19 nt, Artificial Sequence
  Description of Artificial Sequence: Synthetic oligonucleotide
  Sense strand starting at position 37 of SEQ ID NO: 913807
ugagaaauuguauguuagg

SEQ ID NO: 955549 - RNA, 19 nt, Artificial Sequence
  Description of Artificial Sequence: Synthetic oligonucleotide
  Antisense strand to SEQ ID NO: 955548
ccuaacauacaauuucuca

SEQ ID NO: 955550 - RNA, 19 nt, Artificial Sequence
  Description of Artificial Sequence: Synthetic oligonucleotide
  Sense strand starting at position 1430 of SEQ ID NO: 913807
uuuaauagccuauaagguu

SEQ ID NO: 955551 - RNA, 19 nt, Artificial Sequence
  Description of Artificial Sequence: Synthetic oligonucleotide
  Antisense strand to SEQ ID NO: 955550
aaccuuauaggcuauuaaa

SEQ ID NO: 955552 - RNA, 19 nt, Artificial Sequence
  Description of Artificial Sequence: Synthetic oligonucleotide
  Sense strand starting at position 100 of SEQ ID NO: 913807
agugaagaauguguaauau

SEQ ID NO: 955553 - RNA, 19 nt, Artificial Sequence
  Description of Artificial Sequence: Synthetic oligonucleotide
  Antisense strand to SEQ ID NO: 955552
auauuacacauucuucacu

SEQ ID NO: 955554 - RNA, 19 nt, Artificial Sequence
  Description of Artificial Sequence: Synthetic oligonucleotide
  Sense strand starting at position 2647 of SEQ ID NO: 913807
gaacaauaugaauguguuu

SEQ ID NO: 955555 - RNA, 19 nt, Artificial Sequence
  Description of Artificial Sequence: Synthetic oligonucleotide
  Antisense strand to SEQ ID NO: 955554
aaacacauucauauuguuc

SEQ ID NO: 955556 - RNA, 19 nt, Artificial Sequence
  Description of Artificial Sequence: Synthetic oligonucleotide
  Sense strand starting at position 97 of SEQ ID NO: 913807
uacagugaagaauguguaa

SEQ ID NO: 955557 - RNA, 19 nt, Artificial Sequence
  Description of Artificial Sequence: Synthetic oligonucleotide
  Antisense strand to SEQ ID NO: 955556
uuacacauucuucacugua

SEQ ID NO: 955558 - RNA, 19 nt, Artificial Sequence
  Description of Artificial Sequence: Synthetic oligonucleotide
  Sense strand starting at position 77 of SEQ ID NO: 913807
guagaaauauuugacuuga

SEQ ID NO: 955559 - RNA, 19 nt, Artificial Sequence
  Description of Artificial Sequence: Synthetic oligonucleotide
  Antisense strand to SEQ ID NO: 955558
ucaagucaaauauuucuac

SEQ ID NO: 955560 - RNA, 19 nt, Artificial Sequence
  Description of Artificial Sequence: Synthetic oligonucleotide
  Sense strand starting at position 991 of SEQ ID NO: 913807
ugaacuaucuugcuaagac

SEQ ID NO: 955561 - RNA, 19 nt, Artificial Sequence
  Description of Artificial Sequence: Synthetic oligonucleotide
  Antisense strand to SEQ ID NO: 955560
gucuuagcaagauaguuca

SEQ ID NO: 955562 - RNA, 19 nt, Artificial Sequence
  Description of Artificial Sequence: Synthetic oligonucleotide
  Sense strand starting at position 277 of SEQ ID NO: 913807
gacccucuggucuaauagu

SEQ ID NO: 955563 - RNA, 19 nt, Artificial Sequence
  Description of Artificial Sequence: Synthetic oligonucleotide
  Antisense strand to SEQ ID NO: 955562
acuauuagaccagaggguc

SEQ ID NO: 955564 - RNA, 19 nt, Artificial Sequence
  Description of Artificial Sequence: Synthetic oligonucleotide
  Sense strand starting at position 2634 of SEQ ID NO: 913807
uggguuauaguuugaacaa

SEQ ID NO: 955565 - RNA, 19 nt, Artificial Sequence
  Description of Artificial Sequence: Synthetic oligonucleotide
  Antisense strand to SEQ ID NO: 955564
uuguucaaacuauaaccca

SEQ ID NO: 955566 - RNA, 19 nt, Artificial Sequence
  Description of Artificial Sequence: Synthetic oligonucleotide
  Sense strand starting at position 46 of SEQ ID NO: 913807
guauguuaggagcaauacu

SEQ ID NO: 955567 - RNA, 19 nt, Artificial Sequence
  Description of Artificial Sequence: Synthetic oligonucleotide
  Antisense strand to SEQ ID NO: 955566
aguauugcuccuaacauac

SEQ ID NO: 955568 - RNA, 19 nt, Artificial Sequence
  Description of Artificial Sequence: Synthetic oligonucleotide
  Sense strand starting at position 536 of SEQ ID NO: 913807
gcaagaguccuugaaccga

SEQ ID NO: 955569 - RNA, 19 nt, Artificial Sequence
  Description of Artificial Sequence: Synthetic oligonucleotide
  Antisense strand to SEQ ID NO: 955568
ucgguucaaggacucuugc

SEQ ID NO: 955570 - RNA, 19 nt, Artificial Sequence
  Description of Artificial Sequence: Synthetic oligonucleotide
  Sense strand starting at position 3978 of SEQ ID NO: 913807
gcuugugucagguucguca

SEQ ID NO: 955571 - RNA, 19 nt, Artificial Sequence
  Description of Artificial Sequence: Synthetic oligonucleotide
  Antisense strand to SEQ ID NO: 955570
ugacgaaccugacacaagc

SEQ ID NO: 955572 - RNA, 19 nt, Artificial Sequence
  Description of Artificial Sequence: Synthetic oligonucleotide
  Sense strand starting at position 1109 of SEQ ID NO: 913807
ucucauaaacguuaguuaa

SEQ ID NO: 955573 - RNA, 19 nt, Artificial Sequence
  Description of Artificial Sequence: Synthetic oligonucleotide
  Antisense strand to SEQ ID NO: 955572
uuaacuaacguuuaugaga

SEQ ID NO: 955574 - RNA, 19 nt, Artificial Sequence
  Description of Artificial Sequence: Synthetic oligonucleotide
  Sense strand starting at position 162 of SEQ ID NO: 913807
uucccaguugcugauaaua

SEQ ID NO: 955575 - RNA, 19 nt, Artificial Sequence
  Description of Artificial Sequence: Synthetic oligonucleotide
  Antisense strand to SEQ ID NO: 955574
uauuaucagcaacugggaa

SEQ ID NO: 955576 - RNA, 19 nt, Artificial Sequence
  Description of Artificial Sequence: Synthetic oligonucleotide
  Sense strand starting at position 979 of SEQ ID NO: 913807
guauacgugaaaugaacua

SEQ ID NO: 955577 - RNA, 19 nt, Artificial Sequence
  Description of Artificial Sequence: Synthetic oligonucleotide
  Antisense strand to SEQ ID NO: 955576
uaguucauuucacguauac

SEQ ID NO: 955578 - RNA, 19 nt, Artificial Sequence
  Description of Artificial Sequence: Synthetic oligonucleotide
  Sense strand starting at position 54 of SEQ ID NO: 913807
ggagcaauacuucgagauc

SEQ ID NO: 955579 - RNA, 19 nt, Artificial Sequence
  Description of Artificial Sequence: Synthetic oligonucleotide
  Antisense strand to SEQ ID NO: 955578
gaucucgaaguauugcucc

SEQ ID NO: 955580 - RNA, 19 nt, Artificial Sequence
  Description of Artificial Sequence: Synthetic oligonucleotide
  Sense strand starting at position 2100 of SEQ ID NO: 913807
acauaauacugagugcuca

SEQ ID NO: 955581 - RNA, 19 nt, Artificial Sequence
  Description of Artificial Sequence: Synthetic oligonucleotide
  Antisense strand to SEQ ID NO: 955580
ugagcacucaguauuaugu

SEQ ID NO: 955582 - RNA, 19 nt, Artificial Sequence
  Description of Artificial Sequence: Synthetic oligonucleotide
  Sense strand starting at position 1707 of SEQ ID NO: 913807
agagucucauguccauaca

SEQ ID NO: 955583 - RNA, 19 nt, Artificial Sequence
  Description of Artificial Sequence: Synthetic oligonucleotide
  Antisense strand to SEQ ID NO: 955582
uguauggacaugagacucu

SEQ ID NO: 955584 - RNA, 19 nt, Artificial Sequence
  Description of Artificial Sequence: Synthetic oligonucleotide
  Sense strand starting at position 1993 of SEQ ID NO: 913807
uggucagauuccucaucca

SEQ ID NO: 955585 - RNA, 19 nt, Artificial Sequence
  Description of Artificial Sequence: Synthetic oligonucleotide
  Antisense strand to SEQ ID NO: 955584
uggaugaggaaucugacca

SEQ ID NO: 955586 - RNA, 19 nt, Artificial Sequence
  Description of Artificial Sequence: Synthetic oligonucleotide
  Sense strand starting at position 275 of SEQ ID NO: 913807
cugacccucuggucuaaua

SEQ ID NO: 955587 - RNA, 19 nt, Artificial Sequence
  Description of Artificial Sequence: Synthetic oligonucleotide
  Antisense strand to SEQ ID NO: 955586
uauuagaccagagggucag

SEQ ID NO: 955588 - RNA, 19 nt, Artificial Sequence
  Description of Artificial Sequence: Synthetic oligonucleotide
  Sense strand starting at position 2383 of SEQ ID NO: 913807
uuauuauggucuuugacca

SEQ ID NO: 955589 - RNA, 19 nt, Artificial Sequence
  Description of Artificial Sequence: Synthetic oligonucleotide
  Antisense strand to SEQ ID NO: 955588
uggucaaagaccauaauaa

SEQ ID NO: 955590 - RNA, 19 nt, Artificial Sequence
  Description of Artificial Sequence: Synthetic oligonucleotide
  Sense strand starting at position 2415 of SEQ ID NO: 913807
uacagauaauggucuagcu

SEQ ID NO: 955591 - RNA, 19 nt, Artificial Sequence
  Description of Artificial Sequence: Synthetic oligonucleotide
  Antisense strand to SEQ ID NO: 955590
agcuagaccauuaucugua

SEQ ID NO: 955592 - RNA, 19 nt, Artificial Sequence
  Description of Artificial Sequence: Synthetic oligonucleotide
  Sense strand starting at position 3640 of SEQ ID NO: 913808
auguacuuuccagauugac

SEQ ID NO: 955593 - RNA, 19 nt, Artificial Sequence
  Description of Artificial Sequence: Synthetic oligonucleotide
  Antisense strand to SEQ ID NO: 955592
gucaaucuggaaaguacau

SEQ ID NO: 955594 - RNA, 19 nt, Artificial Sequence
  Description of Artificial Sequence: Synthetic oligonucleotide
  Sense strand starting at position 3620 of SEQ ID NO: 913808
guugaaauagauuacugca

SEQ ID NO: 955595 - RNA, 19 nt, Artificial Sequence
  Description of Artificial Sequence: Synthetic oligonucleotide
  Antisense strand to SEQ ID NO: 955594
ugcaguaaucuauuucaac

SEQ ID NO: 955596 - RNA, 19 nt, Artificial Sequence
  Description of Artificial Sequence: Synthetic oligonucleotide
  Sense strand starting at position 311 of SEQ ID NO: 913808
augaaucaauaugcagauu

SEQ ID NO: 955597 - RNA, 19 nt, Artificial Sequence
  Description of Artificial Sequence: Synthetic oligonucleotide
  Antisense strand to SEQ ID NO: 955596
aaucugcauauugauucau

SEQ ID NO: 955598 - RNA, 19 nt, Artificial Sequence
  Description of Artificial Sequence: Synthetic oligonucleotide
  Sense strand starting at position 1645 of SEQ ID NO: 913808
gauaguuucccgcuagugu

SEQ ID NO: 955599 - RNA, 19 nt, Artificial Sequence
  Description of Artificial Sequence: Synthetic oligonucleotide
  Antisense strand to SEQ ID NO: 955598
acacuagcgggaaacuauc

SEQ ID NO: 955600 - RNA, 19 nt, Artificial Sequence
  Description of Artificial Sequence: Synthetic oligonucleotide
  Sense strand starting at position 947 of SEQ ID NO: 913808
ggagcagguaaucauuauu

SEQ ID NO: 955601 - RNA, 19 nt, Artificial Sequence
  Description of Artificial Sequence: Synthetic oligonucleotide
  Antisense strand to SEQ ID NO: 955600
aauaaugauuaccugcucc

SEQ ID NO: 955602 - RNA, 19 nt, Artificial Sequence
  Description of Artificial Sequence: Synthetic oligonucleotide
  Sense strand starting at position 239 of SEQ ID NO: 913808
acuagacuuuauguugaaa

SEQ ID NO: 955603 - RNA, 19 nt, Artificial Sequence
  Description of Artificial Sequence: Synthetic oligonucleotide
  Antisense strand to SEQ ID NO: 955602
uuucaacauaaagucuagu

SEQ ID NO: 955604 - RNA, 19 nt, Artificial Sequence
  Description of Artificial Sequence: Synthetic oligonucleotide
  Sense strand starting at position 3310 of SEQ ID NO: 913808
aucugaugugacuggauga

SEQ ID NO: 955605 - RNA, 19 nt, Artificial Sequence
  Description of Artificial Sequence: Synthetic oligonucleotide
  Antisense strand to SEQ ID NO: 955604
ucauccagucacaucagau

SEQ ID NO: 955606 - RNA, 19 nt, Artificial Sequence
  Description of Artificial Sequence: Synthetic oligonucleotide
  Sense strand starting at position 2563 of SEQ ID NO: 913808
uuuccauucgaugaccaua

SEQ ID NO: 955607 - RNA, 19 nt, Artificial Sequence
  Description of Artificial Sequence: Synthetic oligonucleotide
  Antisense strand to SEQ ID NO: 955606
uauggucaucgaauggaaa

SEQ ID NO: 955608 - RNA, 19 nt, Artificial Sequence
  Description of Artificial Sequence: Synthetic oligonucleotide
  Sense strand starting at position 2568 of SEQ ID NO: 913808
auucgaugaccauagcaau

SEQ ID NO: 955609 - RNA, 19 nt, Artificial Sequence
  Description of Artificial Sequence: Synthetic oligonucleotide
  Antisense strand to SEQ ID NO: 955608
auugcuauggucaucgaau

SEQ ID NO: 955610 - RNA, 19 nt, Artificial Sequence
  Description of Artificial Sequence: Synthetic oligonucleotide
  Sense strand starting at position 398 of SEQ ID NO: 913808
aauuuagaguugcuuugca

SEQ ID NO: 955611 - RNA, 19 nt, Artificial Sequence
  Description of Artificial Sequence: Synthetic oligonucleotide
  Antisense strand to SEQ ID NO: 955610
ugcaaagcaacucuaaauu

SEQ ID NO: 955612 - RNA, 19 nt, Artificial Sequence
  Description of Artificial Sequence: Synthetic oligonucleotide
  Sense strand starting at position 2736 of SEQ ID NO: 913808
ugccauagauaaguggaaa

SEQ ID NO: 955613 - RNA, 19 nt, Artificial Sequence
  Description of Artificial Sequence: Synthetic oligonucleotide
  Antisense strand to SEQ ID NO: 955612
uuuccacuuaucuauggca

SEQ ID NO: 955614 - RNA, 19 nt, Artificial Sequence
  Description of Artificial Sequence: Synthetic oligonucleotide
  Sense strand starting at position 3429 of SEQ ID NO: 913808
cucauuguccaugaugauc

SEQ ID NO: 955615 - RNA, 19 nt, Artificial Sequence
  Description of Artificial Sequence: Synthetic oligonucleotide
  Antisense strand to SEQ ID NO: 955614
gaucaucauggacaaugag

SEQ ID NO: 955616 - RNA, 19 nt, Artificial Sequence
  Description of Artificial Sequence: Synthetic oligonucleotide
  Sense strand starting at position 446 of SEQ ID NO: 913808
uuaaguugacaugagcuau

SEQ ID NO: 955617 - RNA, 19 nt, Artificial Sequence
  Description of Artificial Sequence: Synthetic oligonucleotide
  Antisense strand to SEQ ID NO: 955616
auagcucaugucaacuuaa

SEQ ID NO: 955618 - RNA, 19 nt, Artificial Sequence
  Description of Artificial Sequence: Synthetic oligonucleotide
  Sense strand starting at position 1769 of SEQ ID NO: 913808
gacuaugcagucuauaaug

SEQ ID NO: 955619 - RNA, 19 nt, Artificial Sequence
  Description of Artificial Sequence: Synthetic oligonucleotide
  Antisense strand to SEQ ID NO: 955618
cauuauagacugcauaguc

SEQ ID NO: 955620 - RNA, 19 nt, Artificial Sequence
  Description of Artificial Sequence: Synthetic oligonucleotide
  Sense strand starting at position 2706 of SEQ ID NO: 913808
cagagaacagcguaaguaa

SEQ ID NO: 955621 - RNA, 19 nt, Artificial Sequence
  Description of Artificial Sequence: Synthetic oligonucleotide
  Antisense strand to SEQ ID NO: 955620
uuacuuacgcuguucucug

SEQ ID NO: 955622 - RNA, 19 nt, Artificial Sequence
  Description of Artificial Sequence: Synthetic oligonucleotide
  Sense strand starting at position 3042 of SEQ ID NO: 913808
gauaguggguuaucagaau

SEQ ID NO: 955623 - RNA, 19 nt, Artificial Sequence
  Description of Artificial Sequence: Synthetic oligonucleotide
  Antisense strand to SEQ ID NO: 955622
auucugauaacccacuauc

SEQ ID NO: 955624 - RNA, 19 nt, Artificial Sequence
  Description of Artificial Sequence: Synthetic oligonucleotide
  Sense strand starting at position 3364 of SEQ ID NO: 913808
gagggcugauagguaucaa

SEQ ID NO: 955625 - RNA, 19 nt, Artificial Sequence
  Description of Artificial Sequence: Synthetic oligonucleotide
  Antisense strand to SEQ ID NO: 955624
uugauaccuaucagcccuc

SEQ ID NO: 955626 - RNA, 19 nt, Artificial Sequence
  Description of Artificial Sequence: Synthetic oligonucleotide
  Sense strand starting at position 1021 of SEQ ID NO: 913808
auacuauuccauggagcaa

SEQ ID NO: 955627 - RNA, 19 nt, Artificial Sequence
  Description of Artificial Sequence: Synthetic oligonucleotide
  Antisense strand to SEQ ID NO: 955626
uugcuccauggaauaguau

SEQ ID NO: 955628 - RNA, 19 nt, Artificial Sequence
  Description of Artificial Sequence: Synthetic oligonucleotide
  Sense strand starting at position 2831 of SEQ ID NO: 913808
gugauaacuguaggaugau

SEQ ID NO: 955629 - RNA, 19 nt, Artificial Sequence
  Description of Artificial Sequence: Synthetic oligonucleotide
  Antisense strand to SEQ ID NO: 955628
aucauccuacaguuaucac

SEQ ID NO: 955630 - RNA, 19 nt, Artificial Sequence
  Description of Artificial Sequence: Synthetic oligonucleotide
  Sense strand starting at position 2508 of SEQ ID NO: 913808
agauguaacccauggaggu

SEQ ID NO: 955631 - RNA, 19 nt, Artificial Sequence
  Description of Artificial Sequence: Synthetic oligonucleotide
  Antisense strand to SEQ ID NO: 955630
accuccauggguuacaucu

SEQ ID NO: 955632 - RNA, 19 nt, Artificial Sequence
  Description of Artificial Sequence: Synthetic oligonucleotide
  Sense strand starting at position 3858 of SEQ ID NO: 913808
guacacuuccaucaguaau

SEQ ID NO: 955633 - RNA, 19 nt, Artificial Sequence
  Description of Artificial Sequence: Synthetic oligonucleotide
  Antisense strand to SEQ ID NO: 955632
auuacugauggaaguguac

SEQ ID NO: 955634 - RNA, 19 nt, Artificial Sequence
  Description of Artificial Sequence: Synthetic oligonucleotide
  Sense strand starting at position 3311 of SEQ ID NO: 913808
ucugaugugacuggaugau

SEQ ID NO: 955635 - RNA, 19 nt, Artificial Sequence
  Description of Artificial Sequence: Synthetic oligonucleotide
  Antisense strand to SEQ ID NO: 955634
aucauccagucacaucaga

SEQ ID NO: 955636 - RNA, 19 nt, Artificial Sequence
  Description of Artificial Sequence: Synthetic oligonucleotide
  Sense strand starting at position 3684 of SEQ ID NO: 913808
ugugaaucacauuaagcuu

SEQ ID NO: 955637 - RNA, 19 nt, Artificial Sequence
  Description of Artificial Sequence: Synthetic oligonucleotide
  Antisense strand to SEQ ID NO: 955636
aagcuuaaugugauucaca

SEQ ID NO: 955638 - RNA, 19 nt, Artificial Sequence
  Description of Artificial Sequence: Synthetic oligonucleotide
  Sense strand starting at position 1020 of SEQ ID NO: 913808
gauacuauuccauggagca

SEQ ID NO: 955639 - RNA, 19 nt, Artificial Sequence
  Description of Artificial Sequence: Synthetic oligonucleotide
  Antisense strand to SEQ ID NO: 955638
ugcuccauggaauaguauc

SEQ ID NO: 955640 - RNA, 19 nt, Artificial Sequence
  Description of Artificial Sequence: Synthetic oligonucleotide
  Sense strand starting at position 3548 of SEQ ID NO: 913808
auagguaaccuugggcaaa

SEQ ID NO: 955641 - RNA, 19 nt, Artificial Sequence
  Description of Artificial Sequence: Synthetic oligonucleotide
  Antisense strand to SEQ ID NO: 955640
uuugcccaagguuaccuau

SEQ ID NO: 955642 - RNA, 19 nt, Artificial Sequence
  Description of Artificial Sequence: Synthetic oligonucleotide
  Sense strand starting at position 3171 of SEQ ID NO: 913808
ggcaauuacucuuugaaau

SEQ ID NO: 955643 - RNA, 19 nt, Artificial Sequence
  Description of Artificial Sequence: Synthetic oligonucleotide
  Antisense strand to SEQ ID NO: 955642
auuucaaagaguaauugcc

SEQ ID NO: 955644 - RNA, 19 nt, Artificial Sequence
  Description of Artificial Sequence: Synthetic oligonucleotide
  Sense strand starting at position 2608 of SEQ ID NO: 913808
uuugaaagagcguaugauc

SEQ ID NO: 955645 - RNA, 19 nt, Artificial Sequence
  Description of Artificial Sequence: Synthetic oligonucleotide
  Antisense strand to SEQ ID NO: 955644
gaucauacgcucuuucaaa

SEQ ID NO: 955646 - RNA, 19 nt, Artificial Sequence
  Description of Artificial Sequence: Synthetic oligonucleotide
  Sense strand starting at position 3038 of SEQ ID NO: 913808
ugaugauaguggguuauca

SEQ ID NO: 955647 - RNA, 19 nt, Artificial Sequence
  Description of Artificial Sequence: Synthetic oligonucleotide
  Antisense strand to SEQ ID NO: 955646
ugauaacccacuaucauca

SEQ ID NO: 955648 - RNA, 19 nt, Artificial Sequence
  Description of Artificial Sequence: Synthetic oligonucleotide
  Sense strand starting at position 1988 of SEQ ID NO: 913808
cccucauagucucugagaa

SEQ ID NO: 955649 - RNA, 19 nt, Artificial Sequence
  Description of Artificial Sequence: Synthetic oligonucleotide
  Antisense strand to SEQ ID NO: 955648
uucucagagacuaugaggg

SEQ ID NO: 955650 - RNA, 19 nt, Artificial Sequence
  Description of Artificial Sequence: Synthetic oligonucleotide
  Sense strand starting at position 2827 of SEQ ID NO: 913808
guaagugauaacuguagga

SEQ ID NO: 955651 - RNA, 19 nt, Artificial Sequence
  Description of Artificial Sequence: Synthetic oligonucleotide
  Antisense strand to SEQ ID NO: 955650
uccuacaguuaucacuuac

SEQ ID NO: 955652 - RNA, 19 nt, Artificial Sequence
  Description of Artificial Sequence: Synthetic oligonucleotide
  Sense strand starting at position 3172 of SEQ ID NO: 913808
gcaauuacucuuugaaaug

SEQ ID NO: 955653 - RNA, 19 nt, Artificial Sequence
  Description of Artificial Sequence: Synthetic oligonucleotide
  Antisense strand to SEQ ID NO: 955652
cauuucaaagaguaauugc

SEQ ID NO: 955654 - RNA, 19 nt, Artificial Sequence
  Description of Artificial Sequence: Synthetic oligonucleotide
  Sense strand starting at position 2221 of SEQ ID NO: 913808
uaggucaagugguuagaga

SEQ ID NO: 955655 - RNA, 19 nt, Artificial Sequence
  Description of Artificial Sequence: Synthetic oligonucleotide
  Antisense strand to SEQ ID NO: 955654
ucucuaaccacuugaccua

SEQ ID NO: 955656 - RNA, 19 nt, Artificial Sequence
  Description of Artificial Sequence: Synthetic oligonucleotide
  Sense strand starting at position 2509 of SEQ ID NO: 913808
gauguaacccauggagguu

SEQ ID NO: 955657 - RNA, 19 nt, Artificial Sequence
  Description of Artificial Sequence: Synthetic oligonucleotide
  Antisense strand to SEQ ID NO: 955656
aaccuccauggguuacauc

SEQ ID NO: 955658 - RNA, 19 nt, Artificial Sequence
  Description of Artificial Sequence: Synthetic oligonucleotide
  Sense strand starting at position 1989 of SEQ ID NO: 913808
ccucauagucucugagaau

SEQ ID NO: 955659 - RNA, 19 nt, Artificial Sequence
  Description of Artificial Sequence: Synthetic oligonucleotide
  Antisense strand to SEQ ID NO: 955658
auucucagagacuaugagg

SEQ ID NO: 955660 - RNA, 19 nt, Artificial Sequence
  Description of Artificial Sequence: Synthetic oligonucleotide
  Sense strand starting at position 946 of SEQ ID NO: 913808
uggagcagguaaucauuau

SEQ ID NO: 955661 - RNA, 19 nt, Artificial Sequence
  Description of Artificial Sequence: Synthetic oligonucleotide
  Antisense strand to SEQ ID NO: 955660
auaaugauuaccugcucca

SEQ ID NO: 955662 - RNA, 19 nt, Artificial Sequence
  Description of Artificial Sequence: Synthetic oligonucleotide
  Sense strand starting at position 2260 of SEQ ID NO: 913808
uuaagcugauuugaaugaa

SEQ ID NO: 955663 - RNA, 19 nt, Artificial Sequence
  Description of Artificial Sequence: Synthetic oligonucleotide
  Antisense strand to SEQ ID NO: 955662
uucauucaaaucagcuuaa

SEQ ID NO: 955664 - RNA, 19 nt, Artificial Sequence
  Description of Artificial Sequence: Synthetic oligonucleotide
  Sense strand starting at position 3780 of SEQ ID NO: 913808
agauaaaugucugcuuuaa

SEQ ID NO: 955665 - RNA, 19 nt, Artificial Sequence
  Description of Artificial Sequence: Synthetic oligonucleotide
  Antisense strand to SEQ ID NO: 955664
uuaaagcagacauuuaucu

SEQ ID NO: 955666 - RNA, 19 nt, Artificial Sequence
  Description of Artificial Sequence: Synthetic oligonucleotide
  Sense strand starting at position 2984 of SEQ ID NO: 913808
uaguuagaaagcuacggua

SEQ ID NO: 955667 - RNA, 19 nt, Artificial Sequence
  Description of Artificial Sequence: Synthetic oligonucleotide
  Antisense strand to SEQ ID NO: 955666
uaccguagcuuucuaacua

SEQ ID NO: 955668 - RNA, 19 nt, Artificial Sequence
  Description of Artificial Sequence: Synthetic oligonucleotide
  Sense strand starting at position 649 of SEQ ID NO: 913808
augugaaacuacucuugua

SEQ ID NO: 955669 - RNA, 19 nt, Artificial Sequence
  Description of Artificial Sequence: Synthetic oligonucleotide
  Antisense strand to SEQ ID NO: 955668
uacaagaguaguuucacau

SEQ ID NO: 955670 - RNA, 19 nt, Artificial Sequence
  Description of Artificial Sequence: Synthetic oligonucleotide
  Sense strand starting at position 3026 of SEQ ID NO: 913808
ccugaacuggugugaugau

SEQ ID NO: 955671 - RNA, 19 nt, Artificial Sequence
  Description of Artificial Sequence: Synthetic oligonucleotide
  Antisense strand to SEQ ID NO: 955670
aucaucacaccaguucagg

SEQ ID NO: 955672 - RNA, 19 nt, Artificial Sequence
  Description of Artificial Sequence: Synthetic oligonucleotide
  Sense strand starting at position 2594 of SEQ ID NO: 913809
agagacuguugaccuaaau

SEQ ID NO: 955673 - RNA, 19 nt, Artificial Sequence
  Description of Artificial Sequence: Synthetic oligonucleotide
  Antisense strand to SEQ ID NO: 955672
auuuaggucaacagucucu

SEQ ID NO: 955674 - RNA, 19 nt, Artificial Sequence
  Description of Artificial Sequence: Synthetic oligonucleotide
  Sense strand starting at position 2085 of SEQ ID NO: 913809
auaacacugcuaugagaga

SEQ ID NO: 955675 - RNA, 19 nt, Artificial Sequence
  Description of Artificial Sequence: Synthetic oligonucleotide
  Antisense strand to SEQ ID NO: 955674
ucucucauagcaguguuau

SEQ ID NO: 955676 - RNA, 19 nt, Artificial Sequence
  Description of Artificial Sequence: Synthetic oligonucleotide
  Sense strand starting at position 2517 of SEQ ID NO: 913809
aaaugacguguauauaaac

SEQ ID NO: 955677 - RNA, 19 nt, Artificial Sequence
  Description of Artificial Sequence: Synthetic oligonucleotide
  Antisense strand to SEQ ID NO: 955676
guuuauauacacgucauuu

SEQ ID NO: 955678 - RNA, 19 nt, Artificial Sequence
  Description of Artificial Sequence: Synthetic oligonucleotide
  Sense strand starting at position 776 of SEQ ID NO: 913809
ggaauuagugauuacuggu

SEQ ID NO: 955679 - RNA, 19 nt, Artificial Sequence
  Description of Artificial Sequence: Synthetic oligonucleotide
  Antisense strand to SEQ ID NO: 955678
accaguaaucacuaauucc

SEQ ID NO: 955680 - RNA, 19 nt, Artificial Sequence
  Description of Artificial Sequence: Synthetic oligonucleotide
  Sense strand starting at position 2266 of SEQ ID NO: 913809
ucaaguuuccaguagauaa

SEQ ID NO: 955681 - RNA, 19 nt, Artificial Sequence
  Description of Artificial Sequence: Synthetic oligonucleotide
  Antisense strand to SEQ ID NO: 955680
uuaucuacuggaaacuuga

SEQ ID NO: 955682 - RNA, 19 nt, Artificial Sequence
  Description of Artificial Sequence: Synthetic oligonucleotide
  Sense strand starting at position 1635 of SEQ ID NO: 913809
guauuaagucaugaaacuu

SEQ ID NO: 955683 - RNA, 19 nt, Artificial Sequence
  Description of Artificial Sequence: Synthetic oligonucleotide
  Antisense strand to SEQ ID NO: 955682
aaguuucaugacuuaauac

SEQ ID NO: 955684 - RNA, 19 nt, Artificial Sequence
  Description of Artificial Sequence: Synthetic oligonucleotide
  Sense strand starting at position 1388 of SEQ ID NO: 913809
ggaguauauuaucugaaug

SEQ ID NO: 955685 - RNA, 19 nt, Artificial Sequence
  Description of Artificial Sequence: Synthetic oligonucleotide
  Antisense strand to SEQ ID NO: 955684
cauucagauaauauacucc

SEQ ID NO: 955686 - RNA, 19 nt, Artificial Sequence
  Description of Artificial Sequence: Synthetic oligonucleotide
  Sense strand starting at position 848 of SEQ ID NO: 913809
uugagauggaauuguacca

SEQ ID NO: 955687 - RNA, 19 nt, Artificial Sequence
  Description of Artificial Sequence: Synthetic oligonucleotide
  Antisense strand to SEQ ID NO: 955686
ugguacaauuccaucucaa

SEQ ID NO: 955688 - RNA, 19 nt, Artificial Sequence
  Description of Artificial Sequence: Synthetic oligonucleotide
  Sense strand starting at position 837 of SEQ ID NO: 913809
auaagaggccuuugagaug

SEQ ID NO: 955689 - RNA, 19 nt, Artificial Sequence
  Description of Artificial Sequence: Synthetic oligonucleotide
  Antisense strand to SEQ ID NO: 955688
caucucaaaggccucuuau

SEQ ID NO: 955690 - RNA, 19 nt, Artificial Sequence
  Description of Artificial Sequence: Synthetic oligonucleotide
  Sense strand starting at position 2793 of SEQ ID NO: 913809
uaguuauaucuagauggug

SEQ ID NO: 955691 - RNA, 19 nt, Artificial Sequence
  Description of Artificial Sequence: Synthetic oligonucleotide
  Antisense strand to SEQ ID NO: 955690
caccaucuagauauaacua

SEQ ID NO: 955692 - RNA, 19 nt, Artificial Sequence
  Description of Artificial Sequence: Synthetic oligonucleotide
  Sense strand starting at position 1478 of SEQ ID NO: 913809
ugaauuccugaauguuaaa

SEQ ID NO: 955693 - RNA, 19 nt, Artificial Sequence
  Description of Artificial Sequence: Synthetic oligonucleotide
  Antisense strand to SEQ ID NO: 955692
uuuaacauucaggaauuca

SEQ ID NO: 955694 - RNA, 19 nt, Artificial Sequence
  Description of Artificial Sequence: Synthetic oligonucleotide
  Sense strand starting at position 2128 of SEQ ID NO: 913809
ugcuuuaaccaguagaaua

SEQ ID NO: 955695 - RNA, 19 nt, Artificial Sequence
  Description of Artificial Sequence: Synthetic oligonucleotide
  Antisense strand to SEQ ID NO: 955694
uauucuacugguuaaagca

SEQ ID NO: 955696 - RNA, 19 nt, Artificial Sequence
  Description of Artificial Sequence: Synthetic oligonucleotide
  Sense strand starting at position 1745 of SEQ ID NO: 913809
auuaguuagccauaucaag

SEQ ID NO: 955697 - RNA, 19 nt, Artificial Sequence
  Description of Artificial Sequence: Synthetic oligonucleotide
  Antisense strand to SEQ ID NO: 955696
cuugauauggcuaacuaau

SEQ ID NO: 955698 - RNA, 19 nt, Artificial Sequence
  Description of Artificial Sequence: Synthetic oligonucleotide
  Sense strand starting at position 1387 of SEQ ID NO: 913809
uggaguauauuaucugaau

SEQ ID NO: 955699 - RNA, 19 nt, Artificial Sequence
  Description of Artificial Sequence: Synthetic oligonucleotide
  Antisense strand to SEQ ID NO: 955698
auucagauaauauacucca

SEQ ID NO: 955700 - RNA, 19 nt, Artificial Sequence
  Description of Artificial Sequence: Synthetic oligonucleotide
  Sense strand starting at position 683 of SEQ ID NO: 913809
gccucuugggcagagagaa

SEQ ID NO: 955701 - RNA, 19 nt, Artificial Sequence
  Description of Artificial Sequence: Synthetic oligonucleotide
  Antisense strand to SEQ ID NO: 955700
uucucucugcccaagaggc

SEQ ID NO: 955702 - RNA, 19 nt, Artificial Sequence
  Description of Artificial Sequence: Synthetic oligonucleotide
  Sense strand starting at position 1233 of SEQ ID NO: 913809
guaggagaucaaggguacu

SEQ ID NO: 955703 - RNA, 19 nt, Artificial Sequence
  Description of Artificial Sequence: Synthetic oligonucleotide
  Antisense strand to SEQ ID NO: 955702
aguacccuugaucuccuac

SEQ ID NO: 955704 - RNA, 19 nt, Artificial Sequence
  Description of Artificial Sequence: Synthetic oligonucleotide
  Sense strand starting at position 2046 of SEQ ID NO: 913809
agauaaauucuacgaagug

SEQ ID NO: 955705 - RNA, 19 nt, Artificial Sequence
  Description of Artificial Sequence: Synthetic oligonucleotide
  Antisense strand to SEQ ID NO: 955704
cacuucguagaauuuaucu

SEQ ID NO: 955706 - RNA, 19 nt, Artificial Sequence
  Description of Artificial Sequence: Synthetic oligonucleotide
  Sense strand starting at position 199 of SEQ ID NO: 913809
guaauauuccuaugaggau

SEQ ID NO: 955707 - RNA, 19 nt, Artificial Sequence
  Description of Artificial Sequence: Synthetic oligonucleotide
  Antisense strand to SEQ ID NO: 955706
auccucauaggaauauuac

SEQ ID NO: 955708 - RNA, 19 nt, Artificial Sequence
  Description of Artificial Sequence: Synthetic oligonucleotide
  Sense strand starting at position 2796 of SEQ ID NO: 913809
uuauaucuagauggugaau

SEQ ID NO: 955709 - RNA, 19 nt, Artificial Sequence
  Description of Artificial Sequence: Synthetic oligonucleotide
  Antisense strand to SEQ ID NO: 955708
auucaccaucuagauauaa

SEQ ID NO: 955710 - RNA, 19 nt, Artificial Sequence
  Description of Artificial Sequence: Synthetic oligonucleotide
  Sense strand starting at position 615 of SEQ ID NO: 913809
uuuccauuggcugaauuga

SEQ ID NO: 955711 - RNA, 19 nt, Artificial Sequence
  Description of Artificial Sequence: Synthetic oligonucleotide
  Antisense strand to SEQ ID NO: 955710
ucaauucagccaauggaaa

SEQ ID NO: 955712 - RNA, 19 nt, Artificial Sequence
  Description of Artificial Sequence: Synthetic oligonucleotide
  Sense strand starting at position 1548 of SEQ ID NO: 913809
agcauauugggauagcuca

SEQ ID NO: 955713 - RNA, 19 nt, Artificial Sequence
  Description of Artificial Sequence: Synthetic oligonucleotide
  Antisense strand to SEQ ID NO: 955712
ugagcuaucccaauaugcu

SEQ ID NO: 955714 - RNA, 19 nt, Artificial Sequence
  Description of Artificial Sequence: Synthetic oligonucleotide
  Sense strand starting at position 3798 of SEQ ID NO: 913809
guugccugacucuaggaaa

SEQ ID NO: 955715 - RNA, 19 nt, Artificial Sequence
  Description of Artificial Sequence: Synthetic oligonucleotide
  Antisense strand to SEQ ID NO: 955714
uuuccuagagucaggcaac

SEQ ID NO: 955716 - RNA, 19 nt, Artificial Sequence
  Description of Artificial Sequence: Synthetic oligonucleotide
  Sense strand starting at position 2955 of SEQ ID NO: 913809
augaguauuucucauuugu

SEQ ID NO: 955717 - RNA, 19 nt, Artificial Sequence
  Description of Artificial Sequence: Synthetic oligonucleotide
  Antisense strand to SEQ ID NO: 955716
acaaaugagaaauacucau

SEQ ID NO: 955718 - RNA, 19 nt, Artificial Sequence
  Description of Artificial Sequence: Synthetic oligonucleotide
  Sense strand starting at position 362 of SEQ ID NO: 913809
auuauauggucaucuaaug

SEQ ID NO: 955719 - RNA, 19 nt, Artificial Sequence
  Description of Artificial Sequence: Synthetic oligonucleotide
  Antisense strand to SEQ ID NO: 955718
cauuagaugaccauauaau

SEQ ID NO: 955720 - RNA, 19 nt, Artificial Sequence
  Description of Artificial Sequence: Synthetic oligonucleotide
  Sense strand starting at position 842 of SEQ ID NO: 913809
aggccuuugagauggaauu

SEQ ID NO: 955721 - RNA, 19 nt, Artificial Sequence
  Description of Artificial Sequence: Synthetic oligonucleotide
  Antisense strand to SEQ ID NO: 955720
aauuccaucucaaaggccu

SEQ ID NO: 955722 - RNA, 19 nt, Artificial Sequence
  Description of Artificial Sequence: Synthetic oligonucleotide
  Sense strand starting at position 3194 of SEQ ID NO: 913809
acucuauggcagcaauaau

SEQ ID NO: 955723 - RNA, 19 nt, Artificial Sequence
  Description of Artificial Sequence: Synthetic oligonucleotide
  Antisense strand to SEQ ID NO: 955722
auuauugcugccauagagu

SEQ ID NO: 955724 - RNA, 19 nt, Artificial Sequence
  Description of Artificial Sequence: Synthetic oligonucleotide
  Sense strand starting at position 1224 of SEQ ID NO: 913809
aacaguuugguaggagauc

SEQ ID NO: 955725 - RNA, 19 nt, Artificial Sequence
  Description of Artificial Sequence: Synthetic oligonucleotide
  Antisense strand to SEQ ID NO: 955724
gaucuccuaccaaacuguu

SEQ ID NO: 955726 - RNA, 19 nt, Artificial Sequence
  Description of Artificial Sequence: Synthetic oligonucleotide
  Sense strand starting at position 844 of SEQ ID NO: 913809
gccuuugagauggaauugu

SEQ ID NO: 955727 - RNA, 19 nt, Artificial Sequence
  Description of Artificial Sequence: Synthetic oligonucleotide
  Antisense strand to SEQ ID NO: 955726
acaauuccaucucaaaggc

SEQ ID NO: 955728 - RNA, 19 nt, Artificial Sequence
  Description of Artificial Sequence: Synthetic oligonucleotide
  Sense strand starting at position 3692 of SEQ ID NO: 913809
ugggaaauauuguccucau

SEQ ID NO: 955729 - RNA, 19 nt, Artificial Sequence
  Description of Artificial Sequence: Synthetic oligonucleotide
  Antisense strand to SEQ ID NO: 955728
augaggacaauauuuccca

SEQ ID NO: 955730 - RNA, 19 nt, Artificial Sequence
  Description of Artificial Sequence: Synthetic oligonucleotide
  Sense strand starting at position 3693 of SEQ ID NO: 913809
gggaaauauuguccucauu

SEQ ID NO: 955731 - RNA, 19 nt, Artificial Sequence
  Description of Artificial Sequence: Synthetic oligonucleotide
  Antisense strand to SEQ ID NO: 955730
aaugaggacaauauuuccc

SEQ ID NO: 955732 - RNA, 19 nt, Artificial Sequence
  Description of Artificial Sequence: Synthetic oligonucleotide
  Sense strand starting at position 2401 of SEQ ID NO: 913809
agaguuaaucauuggcaaa

SEQ ID NO: 955733 - RNA, 19 nt, Artificial Sequence
  Description of Artificial Sequence: Synthetic oligonucleotide
  Antisense strand to SEQ ID NO: 955732
uuugccaaugauuaacucu

SEQ ID NO: 955734 - RNA, 19 nt, Artificial Sequence
  Description of Artificial Sequence: Synthetic oligonucleotide
  Sense strand starting at position 1014 of SEQ ID NO: 913809
cacagagaugcauguauaa

SEQ ID NO: 955735 - RNA, 19 nt, Artificial Sequence
  Description of Artificial Sequence: Synthetic oligonucleotide
  Antisense strand to SEQ ID NO: 955734
uuauacaugcaucucugug

SEQ ID NO: 955736 - RNA, 19 nt, Artificial Sequence
  Description of Artificial Sequence: Synthetic oligonucleotide
  Sense strand starting at position 843 of SEQ ID NO: 913809
ggccuuugagauggaauug

SEQ ID NO: 955737 - RNA, 19 nt, Artificial Sequence
  Description of Artificial Sequence: Synthetic oligonucleotide
  Antisense strand to SEQ ID NO: 955736
caauuccaucucaaaggcc

SEQ ID NO: 955738 - RNA, 19 nt, Artificial Sequence
  Description of Artificial Sequence: Synthetic oligonucleotide
  Sense strand starting at position 2526 of SEQ ID NO: 913809
guauauaaacacuggguau

SEQ ID NO: 955739 - RNA, 19 nt, Artificial Sequence
  Description of Artificial Sequence: Synthetic oligonucleotide
  Antisense strand to SEQ ID NO: 955738
auacccaguguuuauauac

SEQ ID NO: 955740 - RNA, 19 nt, Artificial Sequence
  Description of Artificial Sequence: Synthetic oligonucleotide
  Sense strand starting at position 691 of SEQ ID NO: 913809
ggcagagagaaagguguua

SEQ ID NO: 955741 - RNA, 19 nt, Artificial Sequence
  Description of Artificial Sequence: Synthetic oligonucleotide
  Antisense strand to SEQ ID NO: 955740
uaacaccuuucucucugcc

SEQ ID NO: 955742 - RNA, 19 nt, Artificial Sequence
  Description of Artificial Sequence: Synthetic oligonucleotide
  Sense strand starting at position 3294 of SEQ ID NO: 913809
aauaaugugccggacauau

SEQ ID NO: 955743 - RNA, 19 nt, Artificial Sequence
  Description of Artificial Sequence: Synthetic oligonucleotide
  Antisense strand to SEQ ID NO: 955742
auauguccggcacauuauu

SEQ ID NO: 955744 - RNA, 19 nt, Artificial Sequence
  Description of Artificial Sequence: Synthetic oligonucleotide
  Sense strand starting at position 1115 of SEQ ID NO: 913809
guagaauaaugccuaacau

SEQ ID NO: 955745 - RNA, 19 nt, Artificial Sequence
  Description of Artificial Sequence: Synthetic oligonucleotide
  Antisense strand to SEQ ID NO: 955744
auguuaggcauuauucuac

SEQ ID NO: 955746 - RNA, 19 nt, Artificial Sequence
  Description of Artificial Sequence: Synthetic oligonucleotide
  Sense strand starting at position 2795 of SEQ ID NO: 913809
guuauaucuagauggugaa

SEQ ID NO: 955747 - RNA, 19 nt, Artificial Sequence
  Description of Artificial Sequence: Synthetic oligonucleotide
  Antisense strand to SEQ ID NO: 955746
uucaccaucuagauauaac

SEQ ID NO: 955748 - RNA, 19 nt, Artificial Sequence
  Description of Artificial Sequence: Synthetic oligonucleotide
  Sense strand starting at position 1143 of SEQ ID NO: 913809
auagaugauuguucuuauc

SEQ ID NO: 955749 - RNA, 19 nt, Artificial Sequence
  Description of Artificial Sequence: Synthetic oligonucleotide
  Antisense strand to SEQ ID NO: 955748
gauaagaacaaucaucuau

SEQ ID NO: 955750 - RNA, 19 nt, Artificial Sequence
  Description of Artificial Sequence: Synthetic oligonucleotide
  Sense strand starting at position 1145 of SEQ ID NO: 913809
agaugauuguucuuaucau

SEQ ID NO: 955751 - RNA, 19 nt, Artificial Sequence
  Description of Artificial Sequence: Synthetic oligonucleotide
  Antisense strand to SEQ ID NO: 955750
augauaagaacaaucaucu

SEQ ID NO: 955752 - RNA, 19 nt, Artificial Sequence
  Description of Artificial Sequence: Synthetic oligonucleotide
  Sense strand starting at position 2171 of SEQ ID NO: 913810
ccagguaauaaggagugua

SEQ ID NO: 955753 - RNA, 19 nt, Artificial Sequence
  Description of Artificial Sequence: Synthetic oligonucleotide
  Antisense strand to SEQ ID NO: 955752
uacacuccuuauuaccugg

SEQ ID NO: 955754 - RNA, 19 nt, Artificial Sequence
  Description of Artificial Sequence: Synthetic oligonucleotide
  Sense strand starting at position 1281 of SEQ ID NO: 913810
cccugauagcaagaagcaa

SEQ ID NO: 955755 - RNA, 19 nt, Artificial Sequence
  Description of Artificial Sequence: Synthetic oligonucleotide
  Antisense strand to SEQ ID NO: 955754
uugcuucuugcuaucaggg

SEQ ID NO: 955756 - RNA, 19 nt, Artificial Sequence
  Description of Artificial Sequence: Synthetic oligonucleotide
  Sense strand starting at position 3847 of SEQ ID NO: 913810
ugugaaugucacuaacaca

SEQ ID NO: 955757 - RNA, 19 nt, Artificial Sequence
  Description of Artificial Sequence: Synthetic oligonucleotide
  Antisense strand to SEQ ID NO: 955756
uguguuagugacauucaca

SEQ ID NO: 955758 - RNA, 19 nt, Artificial Sequence
  Description of Artificial Sequence: Synthetic oligonucleotide
  Sense strand starting at position 999 of SEQ ID NO: 913810
guaucucugcuugugucau

SEQ ID NO: 955759 - RNA, 19 nt, Artificial Sequence
  Description of Artificial Sequence: Synthetic oligonucleotide
  Antisense strand to SEQ ID NO: 955758
augacacaagcagagauac

SEQ ID NO: 955760 - RNA, 19 nt, Artificial Sequence
  Description of Artificial Sequence: Synthetic oligonucleotide
  Sense strand starting at position 503 of SEQ ID NO: 913810
gucucagggccagaaggau

SEQ ID NO: 955761 - RNA, 19 nt, Artificial Sequence
  Description of Artificial Sequence: Synthetic oligonucleotide
  Antisense strand to SEQ ID NO: 955760
auccuucuggcccugagac

SEQ ID NO: 955762 - RNA, 19 nt, Artificial Sequence
  Description of Artificial Sequence: Synthetic oligonucleotide
  Sense strand starting at position 944 of SEQ ID NO: 913810
gaaauaugugaaugauccu

SEQ ID NO: 955763 - RNA, 19 nt, Artificial Sequence
  Description of Artificial Sequence: Synthetic oligonucleotide
  Antisense strand to SEQ ID NO: 955762
aggaucauucacauauuuc

SEQ ID NO: 955764 - RNA, 19 nt, Artificial Sequence
  Description of Artificial Sequence: Synthetic oligonucleotide
  Sense strand starting at position 1241 of SEQ ID NO: 913810
aguagauuagaaugguaua

SEQ ID NO: 955765 - RNA, 19 nt, Artificial Sequence
  Description of Artificial Sequence: Synthetic oligonucleotide
  Antisense strand to SEQ ID NO: 955764
uauaccauucuaaucuacu

SEQ ID NO: 955766 - RNA, 19 nt, Artificial Sequence
  Description of Artificial Sequence: Synthetic oligonucleotide
  Sense strand starting at position 3740 of SEQ ID NO: 913810
gaaagauaagucugucaga

SEQ ID NO: 955767 - RNA, 19 nt, Artificial Sequence
  Description of Artificial Sequence: Synthetic oligonucleotide
  Antisense strand to SEQ ID NO: 955766
ucugacagacuuaucuuuc

SEQ ID NO: 955768 - RNA, 19 nt, Artificial Sequence
  Description of Artificial Sequence: Synthetic oligonucleotide
  Sense strand starting at position 1242 of SEQ ID NO: 913810
guagauuagaaugguauaa

SEQ ID NO: 955769 - RNA, 19 nt, Artificial Sequence
  Description of Artificial Sequence: Synthetic oligonucleotide
  Antisense strand to SEQ ID NO: 955768
uuauaccauucuaaucuac

SEQ ID NO: 955770 - RNA, 19 nt, Artificial Sequence
  Description of Artificial Sequence: Synthetic oligonucleotide
  Sense strand starting at position 167 of SEQ ID NO: 913810
ugguuugugcuuguuuauu

SEQ ID NO: 955771 - RNA, 19 nt, Artificial Sequence
  Description of Artificial Sequence: Synthetic oligonucleotide
  Antisense strand to SEQ ID NO: 955770
aauaaacaagcacaaacca

SEQ ID NO: 955772 - RNA, 19 nt, Artificial Sequence
  Description of Artificial Sequence: Synthetic oligonucleotide
  Sense strand starting at position 2500 of SEQ ID NO: 913810
aguuaaucacugggauaug

SEQ ID NO: 955773 - RNA, 19 nt, Artificial Sequence
  Description of Artificial Sequence: Synthetic oligonucleotide
  Antisense strand to SEQ ID NO: 955772
cauaucccagugauuaacu

SEQ ID NO: 955774 - RNA, 19 nt, Artificial Sequence
  Description of Artificial Sequence: Synthetic oligonucleotide
  Sense strand starting at position 2520 of SEQ ID NO: 913810
cuagauggauuaucuagua

SEQ ID NO: 955775 - RNA, 19 nt, Artificial Sequence
  Description of Artificial Sequence: Synthetic oligonucleotide
  Antisense strand to SEQ ID NO: 955774
uacuagauaauccaucuag

SEQ ID NO: 955776 - RNA, 19 nt, Artificial Sequence
  Description of Artificial Sequence: Synthetic oligonucleotide
  Sense strand starting at position 2497 of SEQ ID NO: 913810
acuaguuaaucacugggau

SEQ ID NO: 955777 - RNA, 19 nt, Artificial Sequence
  Description of Artificial Sequence: Synthetic oligonucleotide
  Antisense strand to SEQ ID NO: 955776
aucccagugauuaacuagu

SEQ ID NO: 955778 - RNA, 19 nt, Artificial Sequence
  Description of Artificial Sequence: Synthetic oligonucleotide
  Sense strand starting at position 2254 of SEQ ID NO: 913810
uacagaaagcacugaaagu

SEQ ID NO: 955779 - RNA, 19 nt, Artificial Sequence
  Description of Artificial Sequence: Synthetic oligonucleotide
  Antisense strand to SEQ ID NO: 955778
acuuucagugcuuucugua

SEQ ID NO: 955780 - RNA, 19 nt, Artificial Sequence
  Description of Artificial Sequence: Synthetic oligonucleotide
  Sense strand starting at position 658 of SEQ ID NO: 913810
aaggaagcuucuguagaaa

SEQ ID NO: 955781 - RNA, 19 nt, Artificial Sequence
  Description of Artificial Sequence: Synthetic oligonucleotide
  Antisense strand to SEQ ID NO: 955780
uuucuacagaagcuuccuu

SEQ ID NO: 955782 - RNA, 19 nt, Artificial Sequence
  Description of Artificial Sequence: Synthetic oligonucleotide
  Sense strand starting at position 2004 of SEQ ID NO: 913810
uggaaacauugccuaggau

SEQ ID NO: 955783 - RNA, 19 nt, Artificial Sequence
  Description of Artificial Sequence: Synthetic oligonucleotide
  Antisense strand to SEQ ID NO: 955782
auccuaggcaauguuucca

SEQ ID NO: 955784 - RNA, 19 nt, Artificial Sequence
  Description of Artificial Sequence: Synthetic oligonucleotide
  Sense strand starting at position 486 of SEQ ID NO: 913810
ggaauucaagugggacagu

SEQ ID NO: 955785 - RNA, 19 nt, Artificial Sequence
  Description of Artificial Sequence: Synthetic oligonucleotide
  Antisense strand to SEQ ID NO: 955784
acugucccacuugaauucc

SEQ ID NO: 955786 - RNA, 19 nt, Artificial Sequence
  Description of Artificial Sequence: Synthetic oligonucleotide
  Sense strand starting at position 2498 of SEQ ID NO: 913810
cuaguuaaucacugggaua

SEQ ID NO: 955787 - RNA, 19 nt, Artificial Sequence
  Description of Artificial Sequence: Synthetic oligonucleotide
  Antisense strand to SEQ ID NO: 955786
uaucccagugauuaacuag

SEQ ID NO: 955788 - RNA, 19 nt, Artificial Sequence
  Description of Artificial Sequence: Synthetic oligonucleotide
  Sense strand starting at position 1031 of SEQ ID NO: 913810
ggauaaguguuaccauagg

SEQ ID NO: 955789 - RNA, 19 nt, Artificial Sequence
  Description of Artificial Sequence: Synthetic oligonucleotide
  Antisense strand to SEQ ID NO: 955788
ccuaugguaacacuuaucc

SEQ ID NO: 955790 - RNA, 19 nt, Artificial Sequence
  Description of Artificial Sequence: Synthetic oligonucleotide
  Sense strand starting at position 947 of SEQ ID NO: 913810
auaugugaaugauccuauc

SEQ ID NO: 955791 - RNA, 19 nt, Artificial Sequence
  Description of Artificial Sequence: Synthetic oligonucleotide
  Antisense strand to SEQ ID NO: 955790
gauaggaucauucacauau

SEQ ID NO: 955792 - RNA, 19 nt, Artificial Sequence
  Description of Artificial Sequence: Synthetic oligonucleotide
  Sense strand starting at position 2312 of SEQ ID NO: 913810
uuugguuaaagauaagugu

SEQ ID NO: 955793 - RNA, 19 nt, Artificial Sequence
  Description of Artificial Sequence: Synthetic oligonucleotide
  Antisense strand to SEQ ID NO: 955792
acacuuaucuuuaaccaaa

SEQ ID NO: 955794 - RNA, 19 nt, Artificial Sequence
  Description of Artificial Sequence: Synthetic oligonucleotide
  Sense strand starting at position 1452 of SEQ ID NO: 913810
guguuugaagcucaaagag

SEQ ID NO: 955795 - RNA, 19 nt, Artificial Sequence
  Description of Artificial Sequence: Synthetic oligonucleotide
  Antisense strand to SEQ ID NO: 955794
cucuuugagcuucaaacac

SEQ ID NO: 955796 - RNA, 19 nt, Artificial Sequence
  Description of Artificial Sequence: Synthetic oligonucleotide
  Sense strand starting at position 430 of SEQ ID NO: 913810
ccaggaagaucaucucugu

SEQ ID NO: 955797 - RNA, 19 nt, Artificial Sequence
  Description of Artificial Sequence: Synthetic oligonucleotide
  Antisense strand to SEQ ID NO: 955796
acagagaugaucuuccugg

SEQ ID NO: 955798 - RNA, 19 nt, Artificial Sequence
  Description of Artificial Sequence: Synthetic oligonucleotide
  Sense strand starting at position 2487 of SEQ ID NO: 913810
aguuguaaucacuaguuaa

SEQ ID NO: 955799 - RNA, 19 nt, Artificial Sequence
  Description of Artificial Sequence: Synthetic oligonucleotide
  Antisense strand to SEQ ID NO: 955798
uuaacuagugauuacaacu

SEQ ID NO: 955800 - RNA, 19 nt, Artificial Sequence
  Description of Artificial Sequence: Synthetic oligonucleotide
  Sense strand starting at position 679 of SEQ ID NO: 913810
gucuuaaaucgguauaaau

SEQ ID NO: 955801 - RNA, 19 nt, Artificial Sequence
  Description of Artificial Sequence: Synthetic oligonucleotide
  Antisense strand to SEQ ID NO: 955800
auuuauaccgauuuaagac

SEQ ID NO: 955802 - RNA, 19 nt, Artificial Sequence
  Description of Artificial Sequence: Synthetic oligonucleotide
  Sense strand starting at position 433 of SEQ ID NO: 913810
ggaagaucaucucugucug

SEQ ID NO: 955803 - RNA, 19 nt, Artificial Sequence
  Description of Artificial Sequence: Synthetic oligonucleotide
  Antisense strand to SEQ ID NO: 955802
cagacagagaugaucuucc

SEQ ID NO: 955804 - RNA, 19 nt, Artificial Sequence
  Description of Artificial Sequence: Synthetic oligonucleotide
  Sense strand starting at position 3966 of SEQ ID NO: 913810
ugaguucucccucaaggua

SEQ ID NO: 955805 - RNA, 19 nt, Artificial Sequence
  Description of Artificial Sequence: Synthetic oligonucleotide
  Antisense strand to SEQ ID NO: 955804
uaccuugagggagaacuca

SEQ ID NO: 955806 - RNA, 19 nt, Artificial Sequence
  Description of Artificial Sequence: Synthetic oligonucleotide
  Sense strand starting at position 2109 of SEQ ID NO: 913810
uuugaugugaccuggaauu

SEQ ID NO: 955807 - RNA, 19 nt, Artificial Sequence
  Description of Artificial Sequence: Synthetic oligonucleotide
  Antisense strand to SEQ ID NO: 955806
aauuccaggucacaucaaa

SEQ ID NO: 955808 - RNA, 19 nt, Artificial Sequence
  Description of Artificial Sequence: Synthetic oligonucleotide
  Sense strand starting at position 2418 of SEQ ID NO: 913810
augaaucuuccauguuuag

SEQ ID NO: 955809 - RNA, 19 nt, Artificial Sequence
  Description of Artificial Sequence: Synthetic oligonucleotide
  Antisense strand to SEQ ID NO: 955808
cuaaacauggaagauucau

SEQ ID NO: 955810 - RNA, 19 nt, Artificial Sequence
  Description of Artificial Sequence: Synthetic oligonucleotide
  Sense strand starting at position 1525 of SEQ ID NO: 913810
ugacauccaguuuagcauu

SEQ ID NO: 955811 - RNA, 19 nt, Artificial Sequence
  Description of Artificial Sequence: Synthetic oligonucleotide
  Antisense strand to SEQ ID NO: 955810
aaugcuaaacuggauguca

SEQ ID NO: 955812 - RNA, 19 nt, Artificial Sequence
  Description of Artificial Sequence: Synthetic oligonucleotide
  Sense strand starting at position 2097 of SEQ ID NO: 913810
uguagaacuuucuuugaug

SEQ ID NO: 955813 - RNA, 19 nt, Artificial Sequence
  Description of Artificial Sequence: Synthetic oligonucleotide
  Antisense strand to SEQ ID NO: 955812
caucaaagaaaguucuaca

SEQ ID NO: 955814 - RNA, 19 nt, Artificial Sequence
  Description of Artificial Sequence: Synthetic oligonucleotide
  Sense strand starting at position 969 of SEQ ID NO: 913810
ugcacagggcaaugaaauu

SEQ ID NO: 955815 - RNA, 19 nt, Artificial Sequence
  Description of Artificial Sequence: Synthetic oligonucleotide
  Antisense strand to SEQ ID NO: 955814
aauuucauugcccugugca

SEQ ID NO: 955816 - RNA, 19 nt, Artificial Sequence
  Description of Artificial Sequence: Synthetic oligonucleotide
  Sense strand starting at position 2490 of SEQ ID NO: 913810
uguaaucacuaguuaauca

SEQ ID NO: 955817 - RNA, 19 nt, Artificial Sequence
  Description of Artificial Sequence: Synthetic oligonucleotide
  Antisense strand to SEQ ID NO: 955816
ugauuaacuagugauuaca

SEQ ID NO: 955818 - RNA, 19 nt, Artificial Sequence
  Description of Artificial Sequence: Synthetic oligonucleotide
  Sense strand starting at position 666 of SEQ ID NO: 913810
uucuguagaaagggucuua

SEQ ID NO: 955819 - RNA, 19 nt, Artificial Sequence
  Description of Artificial Sequence: Synthetic oligonucleotide
  Antisense strand to SEQ ID NO: 955818
uaagacccuuucuacagaa

SEQ ID NO: 955820 - RNA, 19 nt, Artificial Sequence
  Description of Artificial Sequence: Synthetic oligonucleotide
  Sense strand starting at position 3541 of SEQ ID NO: 913810
gcauacuaaugauugagca

SEQ ID NO: 955821 - RNA, 19 nt, Artificial Sequence
  Description of Artificial Sequence: Synthetic oligonucleotide
  Antisense strand to SEQ ID NO: 955820
ugcucaaucauuaguaugc

SEQ ID NO: 955822 - RNA, 19 nt, Artificial Sequence
  Description of Artificial Sequence: Synthetic oligonucleotide
  Sense strand starting at position 3487 of SEQ ID NO: 913810
ugaacuaaaugucucaguu

SEQ ID NO: 955823 - RNA, 19 nt, Artificial Sequence
  Description of Artificial Sequence: Synthetic oligonucleotide
  Antisense strand to SEQ ID NO: 955822
aacugagacauuuaguuca

SEQ ID NO: 955824 - RNA, 19 nt, Artificial Sequence
  Description of Artificial Sequence: Synthetic oligonucleotide
  Sense strand starting at position 678 of SEQ ID NO: 913810
ggucuuaaaucgguauaaa

SEQ ID NO: 955825 - RNA, 19 nt, Artificial Sequence
  Description of Artificial Sequence: Synthetic oligonucleotide
  Antisense strand to SEQ ID NO: 955824
uuuauaccgauuuaagacc

SEQ ID NO: 955826 - RNA, 19 nt, Artificial Sequence
  Description of Artificial Sequence: Synthetic oligonucleotide
  Sense strand starting at position 1022 of SEQ ID NO: 913810
ccugcuaugggauaagugu

SEQ ID NO: 955827 - RNA, 19 nt, Artificial Sequence
  Description of Artificial Sequence: Synthetic oligonucleotide
  Antisense strand to SEQ ID NO: 955826
acacuuaucccauagcagg

SEQ ID NO: 955828 - RNA, 19 nt, Artificial Sequence
  Description of Artificial Sequence: Synthetic oligonucleotide
  Sense strand starting at position 532 of SEQ ID NO: 913810
gacugacaccaaugugcua

SEQ ID NO: 955829 - RNA, 19 nt, Artificial Sequence
  Description of Artificial Sequence: Synthetic oligonucleotide
  Antisense strand to SEQ ID NO: 955828
uagcacauuggugucaguc

SEQ ID NO: 955830 - RNA, 19 nt, Artificial Sequence
  Description of Artificial Sequence: Synthetic oligonucleotide
  Sense strand starting at position 1494 of SEQ ID NO: 913810
cuaaauuugugugaggaga

SEQ ID NO: 955831 - RNA, 19 nt, Artificial Sequence
  Description of Artificial Sequence: Synthetic oligonucleotide
  Antisense strand to SEQ ID NO: 955830
ucuccucacacaaauuuag

SEQ ID NO: 955832 - RNA, 19 nt, Artificial Sequence
  Description of Artificial Sequence: Synthetic oligonucleotide
  Sense strand starting at position 3858 of SEQ ID NO: 913811
agcaguauggcagaggaaa

SEQ ID NO: 955833 - RNA, 19 nt, Artificial Sequence
  Description of Artificial Sequence: Synthetic oligonucleotide
  Antisense strand to SEQ ID NO: 955832
uuuccucugccauacugcu

SEQ ID NO: 955834 - RNA, 19 nt, Artificial Sequence
  Description of Artificial Sequence: Synthetic oligonucleotide
  Sense strand starting at position 3603 of SEQ ID NO: 913811
ugggaagacuuagcaacau

SEQ ID NO: 955835 - RNA, 19 nt, Artificial Sequence
  Description of Artificial Sequence: Synthetic oligonucleotide
  Antisense strand to SEQ ID NO: 955834
auguugcuaagucuuccca

SEQ ID NO: 955836 - RNA, 19 nt, Artificial Sequence
  Description of Artificial Sequence: Synthetic oligonucleotide
  Sense strand starting at position 3895 of SEQ ID NO: 913811
ggauuuggguugcugucaa

SEQ ID NO: 955837 - RNA, 19 nt, Artificial Sequence
  Description of Artificial Sequence: Synthetic oligonucleotide
  Antisense strand to SEQ ID NO: 955836
uugacagcaacccaaaucc

SEQ ID NO: 955838 - RNA, 19 nt, Artificial Sequence
  Description of Artificial Sequence: Synthetic oligonucleotide
  Sense strand starting at position 2896 of SEQ ID NO: 913811
ucuagaaaugcagaguuua

SEQ ID NO: 955839 - RNA, 19 nt, Artificial Sequence
  Description of Artificial Sequence: Synthetic oligonucleotide
  Antisense strand to SEQ ID NO: 955838
uaaacucugcauuucuaga

SEQ ID NO: 955840 - RNA, 19 nt, Artificial Sequence
  Description of Artificial Sequence: Synthetic oligonucleotide
  Sense strand starting at position 3453 of SEQ ID NO: 913811
gaagcuuuagacugagaca

SEQ ID NO: 955841 - RNA, 19 nt, Artificial Sequence
  Description of Artificial Sequence: Synthetic oligonucleotide
  Antisense strand to SEQ ID NO: 955840
ugucucagucuaaagcuuc

SEQ ID NO: 955842 - RNA, 19 nt, Artificial Sequence
  Description of Artificial Sequence: Synthetic oligonucleotide
  Sense strand starting at position 2194 of SEQ ID NO: 913811
agaaguugucuugauuaua

SEQ ID NO: 955843 - RNA, 19 nt, Artificial Sequence
  Description of Artificial Sequence: Synthetic oligonucleotide
  Antisense strand to SEQ ID NO: 955842
uauaaucaagacaacuucu

SEQ ID NO: 955844 - RNA, 19 nt, Artificial Sequence
  Description of Artificial Sequence: Synthetic oligonucleotide
  Sense strand starting at position 815 of SEQ ID NO: 913811
ucaguaaugaggugacaaa

SEQ ID NO: 955845 - RNA, 19 nt, Artificial Sequence
  Description of Artificial Sequence: Synthetic oligonucleotide
  Antisense strand to SEQ ID NO: 955844
uuugucaccucauuacuga

SEQ ID NO: 955846 - RNA, 19 nt, Artificial Sequence
  Description of Artificial Sequence: Synthetic oligonucleotide
  Sense strand starting at position 1307 of SEQ ID NO: 913811
gggugaauuaucugaaauu

SEQ ID NO: 955847 - RNA, 19 nt, Artificial Sequence
  Description of Artificial Sequence: Synthetic oligonucleotide
  Antisense strand to SEQ ID NO: 955846
aauuucagauaauucaccc

SEQ ID NO: 955848 - RNA, 19 nt, Artificial Sequence
  Description of Artificial Sequence: Synthetic oligonucleotide
  Sense strand starting at position 636 of SEQ ID NO: 913811
ugcguugucauuuaacuag

SEQ ID NO: 955849 - RNA, 19 nt, Artificial Sequence
  Description of Artificial Sequence: Synthetic oligonucleotide
  Antisense strand to SEQ ID NO: 955848
cuaguuaaaugacaacgca

SEQ ID NO: 955850 - RNA, 19 nt, Artificial Sequence
  Description of Artificial Sequence: Synthetic oligonucleotide
  Sense strand starting at position 2393 of SEQ ID NO: 913811
cccaguaucccacaaagua

SEQ ID NO: 955851 - RNA, 19 nt, Artificial Sequence
  Description of Artificial Sequence: Synthetic oligonucleotide
  Antisense strand to SEQ ID NO: 955850
uacuuugugggauacuggg

SEQ ID NO: 955852 - RNA, 19 nt, Artificial Sequence
  Description of Artificial Sequence: Synthetic oligonucleotide
  Sense strand starting at position 2953 of SEQ ID NO: 913811
gguugaagaucaucuuaua

SEQ ID NO: 955853 - RNA, 19 nt, Artificial Sequence
  Description of Artificial Sequence: Synthetic oligonucleotide
  Antisense strand to SEQ ID NO: 955852
uauaagaugaucuucaacc

SEQ ID NO: 955854 - RNA, 19 nt, Artificial Sequence
  Description of Artificial Sequence: Synthetic oligonucleotide
  Sense strand starting at position 2475 of SEQ ID NO: 913811
augugauuauuucucacgu

SEQ ID NO: 955855 - RNA, 19 nt, Artificial Sequence
  Description of Artificial Sequence: Synthetic oligonucleotide
  Antisense strand to SEQ ID NO: 955854
acgugagaaauaaucacau

SEQ ID NO: 955856 - RNA, 19 nt, Artificial Sequence
  Description of Artificial Sequence: Synthetic oligonucleotide
  Sense strand starting at position 631 of SEQ ID NO: 913811
agaaaugcguugucauuua

SEQ ID NO: 955857 - RNA, 19 nt, Artificial Sequence
  Description of Artificial Sequence: Synthetic oligonucleotide
  Antisense strand to SEQ ID NO: 955856
uaaaugacaacgcauuucu

SEQ ID NO: 955858 - RNA, 19 nt, Artificial Sequence
  Description of Artificial Sequence: Synthetic oligonucleotide
  Sense strand starting at position 2668 of SEQ ID NO: 913811
gaugucuaaccucaggcaa

SEQ ID NO: 955859 - RNA, 19 nt, Artificial Sequence
  Description of Artificial Sequence: Synthetic oligonucleotide
  Antisense strand to SEQ ID NO: 955858
uugccugagguuagacauc

SEQ ID NO: 955860 - RNA, 19 nt, Artificial Sequence
  Description of Artificial Sequence: Synthetic oligonucleotide
  Sense strand starting at position 3391 of SEQ ID NO: 913811
agaugauuacagugacagu

SEQ ID NO: 955861 - RNA, 19 nt, Artificial Sequence
  Description of Artificial Sequence: Synthetic oligonucleotide
  Antisense strand to SEQ ID NO: 955860
acugucacuguaaucaucu

SEQ ID NO: 955862 - RNA, 19 nt, Artificial Sequence
  Description of Artificial Sequence: Synthetic oligonucleotide
  Sense strand starting at position 3525 of SEQ ID NO: 913811
gggaaauaguggucuacau

SEQ ID NO: 955863 - RNA, 19 nt, Artificial Sequence
  Description of Artificial Sequence: Synthetic oligonucleotide
  Antisense strand to SEQ ID NO: 955862
auguagaccacuauuuccc

SEQ ID NO: 955864 - RNA, 19 nt, Artificial Sequence
  Description of Artificial Sequence: Synthetic oligonucleotide
  Sense strand starting at position 2622 of SEQ ID NO: 913811
acagucaaauggucuaaau

SEQ ID NO: 955865 - RNA, 19 nt, Artificial Sequence
  Description of Artificial Sequence: Synthetic oligonucleotide
  Antisense strand to SEQ ID NO: 955864
auuuagaccauuugacugu

SEQ ID NO: 955866 - RNA, 19 nt, Artificial Sequence
  Description of Artificial Sequence: Synthetic oligonucleotide
  Sense strand starting at position 1299 of SEQ ID NO: 913811
gcuuauuagggugaauuau

SEQ ID NO: 955867 - RNA, 19 nt, Artificial Sequence
  Description of Artificial Sequence: Synthetic oligonucleotide
  Antisense strand to SEQ ID NO: 955866
auaauucacccuaauaagc

SEQ ID NO: 955868 - RNA, 19 nt, Artificial Sequence
  Description of Artificial Sequence: Synthetic oligonucleotide
  Sense strand starting at position 2945 of SEQ ID NO: 913811
agcuaucugguugaagauc

SEQ ID NO: 955869 - RNA, 19 nt, Artificial Sequence
  Description of Artificial Sequence: Synthetic oligonucleotide
  Antisense strand to SEQ ID NO: 955868
gaucuucaaccagauagcu

SEQ ID NO: 955870 - RNA, 19 nt, Artificial Sequence
  Description of Artificial Sequence: Synthetic oligonucleotide
  Sense strand starting at position 2611 of SEQ ID NO: 913811
auauaagugcuacagucaa

SEQ ID NO: 955871 - RNA, 19 nt, Artificial Sequence
  Description of Artificial Sequence: Synthetic oligonucleotide
  Antisense strand to SEQ ID NO: 955870
uugacuguagcacuuauau

SEQ ID NO: 955872 - RNA, 19 nt, Artificial Sequence
  Description of Artificial Sequence: Synthetic oligonucleotide
  Sense strand starting at position 1007 of SEQ ID NO: 913811
uugauaaacucuguugaug

SEQ ID NO: 955873 - RNA, 19 nt, Artificial Sequence
  Description of Artificial Sequence: Synthetic oligonucleotide
  Antisense strand to SEQ ID NO: 955872
caucaacagaguuuaucaa

SEQ ID NO: 955874 - RNA, 19 nt, Artificial Sequence
  Description of Artificial Sequence: Synthetic oligonucleotide
  Sense strand starting at position 2197 of SEQ ID NO: 913811
aguugucuugauuauaauc

SEQ ID NO: 955875 - RNA, 19 nt, Artificial Sequence
  Description of Artificial Sequence: Synthetic oligonucleotide
  Antisense strand to SEQ ID NO: 955874
gauuauaaucaagacaacu

SEQ ID NO: 955876 - RNA, 19 nt, Artificial Sequence
  Description of Artificial Sequence: Synthetic oligonucleotide
  Sense strand starting at position 3790 of SEQ ID NO: 913811
uguaacucauuugagaaga

SEQ ID NO: 955877 - RNA, 19 nt, Artificial Sequence
  Description of Artificial Sequence: Synthetic oligonucleotide
  Antisense strand to SEQ ID NO: 955876
ucuucucaaaugaguuaca

SEQ ID NO: 955878 - RNA, 19 nt, Artificial Sequence
  Description of Artificial Sequence: Synthetic oligonucleotide
  Sense strand starting at position 1742 of SEQ ID NO: 913811
agaucuaacuagcuugacu

SEQ ID NO: 955879 - RNA, 19 nt, Artificial Sequence
  Description of Artificial Sequence: Synthetic oligonucleotide
  Antisense strand to SEQ ID NO: 955878
agucaagcuaguuagaucu

SEQ ID NO: 955880 - RNA, 19 nt, Artificial Sequence
  Description of Artificial Sequence: Synthetic oligonucleotide
  Sense strand starting at position 3532 of SEQ ID NO: 913811
aguggucuacaugaugcaa

SEQ ID NO: 955881 - RNA, 19 nt, Artificial Sequence
  Description of Artificial Sequence: Synthetic oligonucleotide
  Antisense strand to SEQ ID NO: 955880
uugcaucauguagaccacu

SEQ ID NO: 955882 - RNA, 19 nt, Artificial Sequence
  Description of Artificial Sequence: Synthetic oligonucleotide
  Sense strand starting at position 1755 of SEQ ID NO: 913811
uugacucuugcagagguua

SEQ ID NO: 955883 - RNA, 19 nt, Artificial Sequence
  Description of Artificial Sequence: Synthetic oligonucleotide
  Antisense strand to SEQ ID NO: 955882
uaaccucugcaagagucaa

SEQ ID NO: 955884 - RNA, 19 nt, Artificial Sequence
  Description of Artificial Sequence: Synthetic oligonucleotide
  Sense strand starting at position 2000 of SEQ ID NO: 913811
auagaaaugccuggcauaa

SEQ ID NO: 955885 - RNA, 19 nt, Artificial Sequence
  Description of Artificial Sequence: Synthetic oligonucleotide
  Antisense strand to SEQ ID NO: 955884
uuaugccaggcauuucuau

SEQ ID NO: 955886 - RNA, 19 nt, Artificial Sequence
  Description of Artificial Sequence: Synthetic oligonucleotide
  Sense strand starting at position 3060 of SEQ ID NO: 913811
cacguauguuauuuaagcu

SEQ ID NO: 955887 - RNA, 19 nt, Artificial Sequence
  Description of Artificial Sequence: Synthetic oligonucleotide
  Antisense strand to SEQ ID NO: 955886
agcuuaaauaacauacgug

SEQ ID NO: 955888 - RNA, 19 nt, Artificial Sequence
  Description of Artificial Sequence: Synthetic oligonucleotide
  Sense strand starting at position 1006 of SEQ ID NO: 913811
uuugauaaacucuguugau

SEQ ID NO: 955889 - RNA, 19 nt, Artificial Sequence
  Description of Artificial Sequence: Synthetic oligonucleotide
  Antisense strand to SEQ ID NO: 955888
aucaacagaguuuaucaaa

SEQ ID NO: 955890 - RNA, 19 nt, Artificial Sequence
  Description of Artificial Sequence: Synthetic oligonucleotide
  Sense strand starting at position 3783 of SEQ ID NO: 913811
gcgugacuguaacucauuu

SEQ ID NO: 955891 - RNA, 19 nt, Artificial Sequence
  Description of Artificial Sequence: Synthetic oligonucleotide
  Antisense strand to SEQ ID NO: 955890
aaaugaguuacagucacgc

SEQ ID NO: 955892 - RNA, 19 nt, Artificial Sequence
  Description of Artificial Sequence: Synthetic oligonucleotide
  Sense strand starting at position 955 of SEQ ID NO: 913811
gugagccucccugauaacu

SEQ ID NO: 955893 - RNA, 19 nt, Artificial Sequence
  Description of Artificial Sequence: Synthetic oligonucleotide
  Antisense strand to SEQ ID NO: 955892
aguuaucagggaggcucac

SEQ ID NO: 955894 - RNA, 19 nt, Artificial Sequence
  Description of Artificial Sequence: Synthetic oligonucleotide
  Sense strand starting at position 1308 of SEQ ID NO: 913811
ggugaauuaucugaaauuu

SEQ ID NO: 955895 - RNA, 19 nt, Artificial Sequence
  Description of Artificial Sequence: Synthetic oligonucleotide
  Antisense strand to SEQ ID NO: 955894
aaauuucagauaauucacc

SEQ ID NO: 955896 - RNA, 19 nt, Artificial Sequence
  Description of Artificial Sequence: Synthetic oligonucleotide
  Sense strand starting at position 1034 of SEQ ID NO: 913811
gcauuaaauuccuccugag

SEQ ID NO: 955897 - RNA, 19 nt, Artificial Sequence
  Description of Artificial Sequence: Synthetic oligonucleotide
  Antisense strand to SEQ ID NO: 955896
cucaggaggaauuuaaugc

SEQ ID NO: 955898 - RNA, 19 nt, Artificial Sequence
  Description of Artificial Sequence: Synthetic oligonucleotide
  Sense strand starting at position 380 of SEQ ID NO: 913811
agcagcugccaauaaauua

SEQ ID NO: 955899 - RNA, 19 nt, Artificial Sequence
  Description of Artificial Sequence: Synthetic oligonucleotide
  Antisense strand to SEQ ID NO: 955898
uaauuuauuggcagcugcu

SEQ ID NO: 955900 - RNA, 19 nt, Artificial Sequence
  Description of Artificial Sequence: Synthetic oligonucleotide
  Sense strand starting at position 2787 of SEQ ID NO: 913811
cauuuagugcaguguaagu

SEQ ID NO: 955901 - RNA, 19 nt, Artificial Sequence
  Description of Artificial Sequence: Synthetic oligonucleotide
  Antisense strand to SEQ ID NO: 955900
acuuacacugcacuaaaug

SEQ ID NO: 955902 - RNA, 19 nt, Artificial Sequence
  Description of Artificial Sequence: Synthetic oligonucleotide
  Sense strand starting at position 2462 of SEQ ID NO: 913811
uuaguuucuagugauguga

SEQ ID NO: 955903 - RNA, 19 nt, Artificial Sequence
  Description of Artificial Sequence: Synthetic oligonucleotide
  Antisense strand to SEQ ID NO: 955902
ucacaucacuagaaacuaa

SEQ ID NO: 955904 - RNA, 19 nt, Artificial Sequence
  Description of Artificial Sequence: Synthetic oligonucleotide
  Sense strand starting at position 582 of SEQ ID NO: 913811
gaucaaaguguauguggau

SEQ ID NO: 955905 - RNA, 19 nt, Artificial Sequence
  Description of Artificial Sequence: Synthetic oligonucleotide
  Antisense strand to SEQ ID NO: 955904
auccacauacacuuugauc

SEQ ID NO: 955906 - RNA, 19 nt, Artificial Sequence
  Description of Artificial Sequence: Synthetic oligonucleotide
  Sense strand starting at position 3592 of SEQ ID NO: 913811
ucugucauuguugggaaga

SEQ ID NO: 955907 - RNA, 19 nt, Artificial Sequence
  Description of Artificial Sequence: Synthetic oligonucleotide
  Antisense strand to SEQ ID NO: 955906
ucuucccaacaaugacaga

SEQ ID NO: 955908 - RNA, 19 nt, Artificial Sequence
  Description of Artificial Sequence: Synthetic oligonucleotide
  Sense strand starting at position 2457 of SEQ ID NO: 913811
uaugauuaguuucuaguga

SEQ ID NO: 955909 - RNA, 19 nt, Artificial Sequence
  Description of Artificial Sequence: Synthetic oligonucleotide
  Antisense strand to SEQ ID NO: 955908
ucacuagaaacuaaucaua

SEQ ID NO: 955910 - RNA, 19 nt, Artificial Sequence
  Description of Artificial Sequence: Synthetic oligonucleotide
  Sense strand starting at position 2943 of SEQ ID NO: 913811
uuagcuaucugguugaaga

SEQ ID NO: 955911 - RNA, 19 nt, Artificial Sequence
  Description of Artificial Sequence: Synthetic oligonucleotide
  Antisense strand to SEQ ID NO: 955910
ucuucaaccagauagcuaa

SEQ ID NO: 955912 - RNA, 19 nt, Artificial Sequence
  Description of Artificial Sequence: Synthetic oligonucleotide
  Sense strand starting at position 2517 of SEQ ID NO: 913812
gaaaguggauacucaguaa

SEQ ID NO: 955913 - RNA, 19 nt, Artificial Sequence
  Description of Artificial Sequence: Synthetic oligonucleotide
  Antisense strand to SEQ ID NO: 955912
uuacugaguauccacuuuc

SEQ ID NO: 955914 - RNA, 19 nt, Artificial Sequence
  Description of Artificial Sequence: Synthetic oligonucleotide
  Sense strand starting at position 3940 of SEQ ID NO: 913812
ugauaacaggcauacugua

SEQ ID NO: 955915 - RNA, 19 nt, Artificial Sequence
  Description of Artificial Sequence: Synthetic oligonucleotide
  Antisense strand to SEQ ID NO: 955914
uacaguaugccuguuauca

SEQ ID NO: 955916 - RNA, 19 nt, Artificial Sequence
  Description of Artificial Sequence: Synthetic oligonucleotide
  Sense strand starting at position 3266 of SEQ ID NO: 913812
cugaaucagugauuaugga

SEQ ID NO: 955917 - RNA, 19 nt, Artificial Sequence
  Description of Artificial Sequence: Synthetic oligonucleotide
  Antisense strand to SEQ ID NO: 955916
uccauaaucacugauucag

SEQ ID NO: 955918 - RNA, 19 nt, Artificial Sequence
  Description of Artificial Sequence: Synthetic oligonucleotide
  Sense strand starting at position 1484 of SEQ ID NO: 913812
gugugauauggguacaaag

SEQ ID NO: 955919 - RNA, 19 nt, Artificial Sequence
  Description of Artificial Sequence: Synthetic oligonucleotide
  Antisense strand to SEQ ID NO: 955918
cuuuguacccauaucacac

SEQ ID NO: 955920 - RNA, 19 nt, Artificial Sequence
  Description of Artificial Sequence: Synthetic oligonucleotide
  Sense strand starting at position 3286 of SEQ ID NO: 913812
agauuuggguuagaggaaa

SEQ ID NO: 955921 - RNA, 19 nt, Artificial Sequence
  Description of Artificial Sequence: Synthetic oligonucleotide
  Antisense strand to SEQ ID NO: 955920
uuuccucuaacccaaaucu

SEQ ID NO: 955922 - RNA, 19 nt, Artificial Sequence
  Description of Artificial Sequence: Synthetic oligonucleotide
  Sense strand starting at position 3802 of SEQ ID NO: 913812
agugauuccaagugagaaa

SEQ ID NO: 955923 - RNA, 19 nt, Artificial Sequence
  Description of Artificial Sequence: Synthetic oligonucleotide
  Antisense strand to SEQ ID NO: 955922
uuucucacuuggaaucacu

SEQ ID NO: 955924 - RNA, 19 nt, Artificial Sequence
  Description of Artificial Sequence: Synthetic oligonucleotide
  Sense strand starting at position 3264 of SEQ ID NO: 913812
agcugaaucagugauuaug

SEQ ID NO: 955925 - RNA, 19 nt, Artificial Sequence
  Description of Artificial Sequence: Synthetic oligonucleotide
  Antisense strand to SEQ ID NO: 955924
cauaaucacugauucagcu

SEQ ID NO: 955926 - RNA, 19 nt, Artificial Sequence
  Description of Artificial Sequence: Synthetic oligonucleotide
  Sense strand starting at position 2815 of SEQ ID NO: 913812
agguccagauacuuauaca

SEQ ID NO: 955927 - RNA, 19 nt, Artificial Sequence
  Description of Artificial Sequence: Synthetic oligonucleotide
  Antisense strand to SEQ ID NO: 955926
uguauaaguaucuggaccu

SEQ ID NO: 955928 - RNA, 19 nt, Artificial Sequence
  Description of Artificial Sequence: Synthetic oligonucleotide
  Sense strand starting at position 2924 of SEQ ID NO: 913812
gaaacagagaguuauucgu

SEQ ID NO: 955929 - RNA, 19 nt, Artificial Sequence
  Description of Artificial Sequence: Synthetic oligonucleotide
  Antisense strand to SEQ ID NO: 955928
acgaauaacucucuguuuc

SEQ ID NO: 955930 - RNA, 19 nt, Artificial Sequence
  Description of Artificial Sequence: Synthetic oligonucleotide
  Sense strand starting at position 3231 of SEQ ID NO: 913812
uuuggaacuucccuagaau

SEQ ID NO: 955931 - RNA, 19 nt, Artificial Sequence
  Description of Artificial Sequence: Synthetic oligonucleotide
  Antisense strand to SEQ ID NO: 955930
auucuagggaaguuccaaa

SEQ ID NO: 955932 - RNA, 19 nt, Artificial Sequence
  Description of Artificial Sequence: Synthetic oligonucleotide
  Sense strand starting at position 2520 of SEQ ID NO: 913812
aguggauacucaguaaaua

SEQ ID NO: 955933 - RNA, 19 nt, Artificial Sequence
  Description of Artificial Sequence: Synthetic oligonucleotide
  Antisense strand to SEQ ID NO: 955932
uauuuacugaguauccacu

SEQ ID NO: 955934 - RNA, 19 nt, Artificial Sequence
  Description of Artificial Sequence: Synthetic oligonucleotide
  Sense strand starting at position 2613 of SEQ ID NO: 913812
uugguaauuccucacuuga

SEQ ID NO: 955935 - RNA, 19 nt, Artificial Sequence
  Description of Artificial Sequence: Synthetic oligonucleotide
  Antisense strand to SEQ ID NO: 955934
ucaagugaggaauuaccaa

SEQ ID NO: 955936 - RNA, 19 nt, Artificial Sequence
  Description of Artificial Sequence: Synthetic oligonucleotide
  Sense strand starting at position 3544 of SEQ ID NO: 913812
ucuuaaugucuggaauagu

SEQ ID NO: 955937 - RNA, 19 nt, Artificial Sequence
  Description of Artificial Sequence: Synthetic oligonucleotide
  Antisense strand to SEQ ID NO: 955936
acuauuccagacauuaaga

SEQ ID NO: 955938 - RNA, 19 nt, Artificial Sequence
  Description of Artificial Sequence: Synthetic oligonucleotide
  Sense strand starting at position 3398 of SEQ ID NO: 913812
guccuaagaguagaagcau

SEQ ID NO: 955939 - RNA, 19 nt, Artificial Sequence
  Description of Artificial Sequence: Synthetic oligonucleotide
  Antisense strand to SEQ ID NO: 955938
augcuucuacucuuaggac

SEQ ID NO: 955940 - RNA, 19 nt, Artificial Sequence
  Description of Artificial Sequence: Synthetic oligonucleotide
  Sense strand starting at position 2615 of SEQ ID NO: 913812
gguaauuccucacuugaaa

SEQ ID NO: 955941 - RNA, 19 nt, Artificial Sequence
  Description of Artificial Sequence: Synthetic oligonucleotide
  Antisense strand to SEQ ID NO: 955940
uuucaagugaggaauuacc

SEQ ID NO: 955942 - RNA, 19 nt, Artificial Sequence
  Description of Artificial Sequence: Synthetic oligonucleotide
  Sense strand starting at position 1469 of SEQ ID NO: 913812
gaagaaauacagugagugu

SEQ ID NO: 955943 - RNA, 19 nt, Artificial Sequence
  Description of Artificial Sequence: Synthetic oligonucleotide
  Antisense strand to SEQ ID NO: 955942
acacucacuguauuucuuc

SEQ ID NO: 955944 - RNA, 19 nt, Artificial Sequence
  Description of Artificial Sequence: Synthetic oligonucleotide
  Sense strand starting at position 3671 of SEQ ID NO: 913812
cugaguagcccauacauca

SEQ ID NO: 955945 - RNA, 19 nt, Artificial Sequence
  Description of Artificial Sequence: Synthetic oligonucleotide
  Antisense strand to SEQ ID NO: 955944
ugauguaugggcuacucag

SEQ ID NO: 955946 - RNA, 19 nt, Artificial Sequence
  Description of Artificial Sequence: Synthetic oligonucleotide
  Sense strand starting at position 3632 of SEQ ID NO: 913812
ccuggauuauaguuugaau

SEQ ID NO: 955947 - RNA, 19 nt, Artificial Sequence
  Description of Artificial Sequence: Synthetic oligonucleotide
  Antisense strand to SEQ ID NO: 955946
auucaaacuauaauccagg

SEQ ID NO: 955948 - RNA, 19 nt, Artificial Sequence
  Description of Artificial Sequence: Synthetic oligonucleotide
  Sense strand starting at position 3726 of SEQ ID NO: 913812
cugacuccuccugaaguuu

SEQ ID NO: 955949 - RNA, 19 nt, Artificial Sequence
  Description of Artificial Sequence: Synthetic oligonucleotide
  Antisense strand to SEQ ID NO: 955948
aaacuucaggaggagucag

SEQ ID NO: 955950 - RNA, 19 nt, Artificial Sequence
  Description of Artificial Sequence: Synthetic oligonucleotide
  Sense strand starting at position 1473 of SEQ ID NO: 913812
aaauacagugagugugaua

SEQ ID NO: 955951 - RNA, 19 nt, Artificial Sequence
  Description of Artificial Sequence: Synthetic oligonucleotide
  Antisense strand to SEQ ID NO: 955950
uaucacacucacuguauuu

SEQ ID NO: 955952 - RNA, 19 nt, Artificial Sequence
  Description of Artificial Sequence: Synthetic oligonucleotide
  Sense strand starting at position 1472 of SEQ ID NO: 913812
gaaauacagugagugugau

SEQ ID NO: 955953 - RNA, 19 nt, Artificial Sequence
  Description of Artificial Sequence: Synthetic oligonucleotide
  Antisense strand to SEQ ID NO: 955952
aucacacucacuguauuuc

SEQ ID NO: 955954 - RNA, 19 nt, Artificial Sequence
  Description of Artificial Sequence: Synthetic oligonucleotide
  Sense strand starting at position 3262 of SEQ ID NO: 913812
acagcugaaucagugauua

SEQ ID NO: 955955 - RNA, 19 nt, Artificial Sequence
  Description of Artificial Sequence: Synthetic oligonucleotide
  Antisense strand to SEQ ID NO: 955954
uaaucacugauucagcugu

SEQ ID NO: 955956 - RNA, 19 nt, Artificial Sequence
  Description of Artificial Sequence: Synthetic oligonucleotide
  Sense strand starting at position 2926 of SEQ ID NO: 913812
aacagagaguuauucguaa

SEQ ID NO: 955957 - RNA, 19 nt, Artificial Sequence
  Description of Artificial Sequence: Synthetic oligonucleotide
  Antisense strand to SEQ ID NO: 955956
uuacgaauaacucucuguu

SEQ ID NO: 955958 - RNA, 19 nt, Artificial Sequence
  Description of Artificial Sequence: Synthetic oligonucleotide
  Sense strand starting at position 3143 of SEQ ID NO: 913812
guugaucuugagggacuuu

SEQ ID NO: 955959 - RNA, 19 nt, Artificial Sequence
  Description of Artificial Sequence: Synthetic oligonucleotide
  Antisense strand to SEQ ID NO: 955958
aaagucccucaagaucaac

SEQ ID NO: 955960 - RNA, 19 nt, Artificial Sequence
  Description of Artificial Sequence: Synthetic oligonucleotide
  Sense strand starting at position 3669 of SEQ ID NO: 913812
uccugaguagcccauacau

SEQ ID NO: 955961 - RNA, 19 nt, Artificial Sequence
  Description of Artificial Sequence: Synthetic oligonucleotide
  Antisense strand to SEQ ID NO: 955960
auguaugggcuacucagga

SEQ ID NO: 955962 - RNA, 19 nt, Artificial Sequence
  Description of Artificial Sequence: Synthetic oligonucleotide
  Sense strand starting at position 1482 of SEQ ID NO: 913812
gagugugauauggguacaa

SEQ ID NO: 955963 - RNA, 19 nt, Artificial Sequence
  Description of Artificial Sequence: Synthetic oligonucleotide
  Antisense strand to SEQ ID NO: 955962
uuguacccauaucacacuc

SEQ ID NO: 955964 - RNA, 19 nt, Artificial Sequence
  Description of Artificial Sequence: Synthetic oligonucleotide
  Sense strand starting at position 2217 of SEQ ID NO: 913812
uccuuuacccagggugaca

SEQ ID NO: 955965 - RNA, 19 nt, Artificial Sequence
  Description of Artificial Sequence: Synthetic oligonucleotide
  Antisense strand to SEQ ID NO: 955964
ugucacccuggguaaagga

SEQ ID NO: 955966 - RNA, 19 nt, Artificial Sequence
  Description of Artificial Sequence: Synthetic oligonucleotide
  Sense strand starting at position 3358 of SEQ ID NO: 913812
auaaauauguugucccaua

SEQ ID NO: 955967 - RNA, 19 nt, Artificial Sequence
  Description of Artificial Sequence: Synthetic oligonucleotide
  Antisense strand to SEQ ID NO: 955966
uaugggacaacauauuuau

SEQ ID NO: 955968 - RNA, 19 nt, Artificial Sequence
  Description of Artificial Sequence: Synthetic oligonucleotide
  Sense strand starting at position 2408 of SEQ ID NO: 913812
accuuauagccuuacaugu

SEQ ID NO: 955969 - RNA, 19 nt, Artificial Sequence
  Description of Artificial Sequence: Synthetic oligonucleotide
  Antisense strand to SEQ ID NO: 955968
acauguaaggcuauaaggu

SEQ ID NO: 955970 - RNA, 19 nt, Artificial Sequence
  Description of Artificial Sequence: Synthetic oligonucleotide
  Sense strand starting at position 2203 of SEQ ID NO: 913812
cgcagagauguacauccuu

SEQ ID NO: 955971 - RNA, 19 nt, Artificial Sequence
  Description of Artificial Sequence: Synthetic oligonucleotide
  Antisense strand to SEQ ID NO: 955970
aaggauguacaucucugcg

SEQ ID NO: 955972 - RNA, 19 nt, Artificial Sequence
  Description of Artificial Sequence: Synthetic oligonucleotide
  Sense strand starting at position 3745 of SEQ ID NO: 913812
auaucaaguugucuaacuu

SEQ ID NO: 955973 - RNA, 19 nt, Artificial Sequence
  Description of Artificial Sequence: Synthetic oligonucleotide
  Antisense strand to SEQ ID NO: 955972
aaguuagacaacuugauau

SEQ ID NO: 955974 - RNA, 19 nt, Artificial Sequence
  Description of Artificial Sequence: Synthetic oligonucleotide
  Sense strand starting at position 2374 of SEQ ID NO: 913812
cuggccagucuguagaauu

SEQ ID NO: 955975 - RNA, 19 nt, Artificial Sequence
  Description of Artificial Sequence: Synthetic oligonucleotide
  Antisense strand to SEQ ID NO: 955974
aauucuacagacuggccag

SEQ ID NO: 955976 - RNA, 19 nt, Artificial Sequence
  Description of Artificial Sequence: Synthetic oligonucleotide
  Sense strand starting at position 2018 of SEQ ID NO: 913812
gccugugacccggauccaa

SEQ ID NO: 955977 - RNA, 19 nt, Artificial Sequence
  Description of Artificial Sequence: Synthetic oligonucleotide
  Antisense strand to SEQ ID NO: 955976
uuggauccgggucacaggc

SEQ ID NO: 955978 - RNA, 19 nt, Artificial Sequence
  Description of Artificial Sequence: Synthetic oligonucleotide
  Sense strand starting at position 2724 of SEQ ID NO: 913812
uuaaguguacaaugcagau

SEQ ID NO: 955979 - RNA, 19 nt, Artificial Sequence
  Description of Artificial Sequence: Synthetic oligonucleotide
  Antisense strand to SEQ ID NO: 955978
aucugcauuguacacuuaa

SEQ ID NO: 955980 - RNA, 19 nt, Artificial Sequence
  Description of Artificial Sequence: Synthetic oligonucleotide
  Sense strand starting at position 3602 of SEQ ID NO: 913812
ucagauuguagugguaauc

SEQ ID NO: 955981 - RNA, 19 nt, Artificial Sequence
  Description of Artificial Sequence: Synthetic oligonucleotide
  Antisense strand to SEQ ID NO: 955980
gauuaccacuacaaucuga

SEQ ID NO: 955982 - RNA, 19 nt, Artificial Sequence
  Description of Artificial Sequence: Synthetic oligonucleotide
  Sense strand starting at position 2864 of SEQ ID NO: 913812
gaauguaggugauucuguu

SEQ ID NO: 955983 - RNA, 19 nt, Artificial Sequence
  Description of Artificial Sequence: Synthetic oligonucleotide
  Antisense strand to SEQ ID NO: 955982
aacagaaucaccuacauuc

SEQ ID NO: 955984 - RNA, 19 nt, Artificial Sequence
  Description of Artificial Sequence: Synthetic oligonucleotide
  Sense strand starting at position 3954 of SEQ ID NO: 913812
cuguacuugucuucugaaa

SEQ ID NO: 955985 - RNA, 19 nt, Artificial Sequence
  Description of Artificial Sequence: Synthetic oligonucleotide
  Antisense strand to SEQ ID NO: 955984
uuucagaagacaaguacag

SEQ ID NO: 955986 - RNA, 19 nt, Artificial Sequence
  Description of Artificial Sequence: Synthetic oligonucleotide
  Sense strand starting at position 2612 of SEQ ID NO: 913812
guugguaauuccucacuug

SEQ ID NO: 955987 - RNA, 19 nt, Artificial Sequence
  Description of Artificial Sequence: Synthetic oligonucleotide
  Antisense strand to SEQ ID NO: 955986
caagugaggaauuaccaac

SEQ ID NO: 955988 - RNA, 19 nt, Artificial Sequence
  Description of Artificial Sequence: Synthetic oligonucleotide
  Sense strand starting at position 18 of SEQ ID NO: 913812
gcaguucuacaucggacaa

SEQ ID NO: 955989 - RNA, 19 nt, Artificial Sequence
  Description of Artificial Sequence: Synthetic oligonucleotide
  Antisense strand to SEQ ID NO: 955988
uuguccgauguagaacugc

SEQ ID NO: 955990 - RNA, 19 nt, Artificial Sequence
  Description of Artificial Sequence: Synthetic oligonucleotide
  Sense strand starting at position 2859 of SEQ ID NO: 913812
aggcggaauguaggugauu

SEQ ID NO: 955991 - RNA, 19 nt, Artificial Sequence
  Description of Artificial Sequence: Synthetic oligonucleotide
  Antisense strand to SEQ ID NO: 955990
aaucaccuacauuccgccu

SEQ ID NO: 955992 - RNA, 19 nt, Artificial Sequence
  Description of Artificial Sequence: Synthetic oligonucleotide
  Sense strand starting at position 3374 of SEQ ID NO: 913813
ucaaccagagcucaguaaa

SEQ ID NO: 955993 - RNA, 19 nt, Artificial Sequence
  Description of Artificial Sequence: Synthetic oligonucleotide
  Antisense strand to SEQ ID NO: 955992
uuuacugagcucugguuga

SEQ ID NO: 955994 - RNA, 19 nt, Artificial Sequence
  Description of Artificial Sequence: Synthetic oligonucleotide
  Sense strand starting at position 2930 of SEQ ID NO: 913813
ccaagacugaguuggaauu

SEQ ID NO: 955995 - RNA, 19 nt, Artificial Sequence
  Description of Artificial Sequence: Synthetic oligonucleotide
  Antisense strand to SEQ ID NO: 955994
aauuccaacucagucuugg

SEQ ID NO: 955996 - RNA, 19 nt, Artificial Sequence
  Description of Artificial Sequence: Synthetic oligonucleotide
  Sense strand starting at position 2229 of SEQ ID NO: 913813
aguuuauuccuagagguag

SEQ ID NO: 955997 - RNA, 19 nt, Artificial Sequence
  Description of Artificial Sequence: Synthetic oligonucleotide
  Antisense strand to SEQ ID NO: 955996
cuaccucuaggaauaaacu

SEQ ID NO: 955998 - RNA, 19 nt, Artificial Sequence
  Description of Artificial Sequence: Synthetic oligonucleotide
  Sense strand starting at position 2406 of SEQ ID NO: 913813
ggcuguucugaugauaaag

SEQ ID NO: 955999 - RNA, 19 nt, Artificial Sequence
  Description of Artificial Sequence: Synthetic oligonucleotide
  Antisense strand to SEQ ID NO: 955998
cuuuaucaucagaacagcc

SEQ ID NO: 956000 - RNA, 19 nt, Artificial Sequence
  Description of Artificial Sequence: Synthetic oligonucleotide
  Sense strand starting at position 3446 of SEQ ID NO: 913813
aaagaugaguuucuaaggu

SEQ ID NO: 956001 - RNA, 19 nt, Artificial Sequence
  Description of Artificial Sequence: Synthetic oligonucleotide
  Antisense strand to SEQ ID NO: 956000
accuuagaaacucaucuuu

SEQ ID NO: 956002 - RNA, 19 nt, Artificial Sequence
  Description of Artificial Sequence: Synthetic oligonucleotide
  Sense strand starting at position 169 of SEQ ID NO: 913813
gcaggcugauuuccaugua

SEQ ID NO: 956003 - RNA, 19 nt, Artificial Sequence
  Description of Artificial Sequence: Synthetic oligonucleotide
  Antisense strand to SEQ ID NO: 956002
uacauggaaaucagccugc

SEQ ID NO: 956004 - RNA, 19 nt, Artificial Sequence
  Description of Artificial Sequence: Synthetic oligonucleotide
  Sense strand starting at position 143 of SEQ ID NO: 913813
ugccaucucaucgaggaga

SEQ ID NO: 956005 - RNA, 19 nt, Artificial Sequence
  Description of Artificial Sequence: Synthetic oligonucleotide
  Antisense strand to SEQ ID NO: 956004
ucuccucgaugagauggca

SEQ ID NO: 956006 - RNA, 19 nt, Artificial Sequence
  Description of Artificial Sequence: Synthetic oligonucleotide
  Sense strand starting at position 2932 of SEQ ID NO: 913813
aagacugaguuggaauuua

SEQ ID NO: 956007 - RNA, 19 nt, Artificial Sequence
  Description of Artificial Sequence: Synthetic oligonucleotide
  Antisense strand to SEQ ID NO: 956006
uaaauuccaacucagucuu

SEQ ID NO: 956008 - RNA, 19 nt, Artificial Sequence
  Description of Artificial Sequence: Synthetic oligonucleotide
  Sense strand starting at position 2442 of SEQ ID NO: 913813
gcagacuuuagugacggaa

SEQ ID NO: 956009 - RNA, 19 nt, Artificial Sequence
  Description of Artificial Sequence: Synthetic oligonucleotide
  Antisense strand to SEQ ID NO: 956008
uuccgucacuaaagucugc

SEQ ID NO: 956010 - RNA, 19 nt, Artificial Sequence
  Description of Artificial Sequence: Synthetic oligonucleotide
  Sense strand starting at position 3299 of SEQ ID NO: 913813
auaucauggccauauguau

SEQ ID NO: 956011 - RNA, 19 nt, Artificial Sequence
  Description of Artificial Sequence: Synthetic oligonucleotide
  Antisense strand to SEQ ID NO: 956010
auacauauggccaugauau

SEQ ID NO: 956012 - RNA, 19 nt, Artificial Sequence
  Description of Artificial Sequence: Synthetic oligonucleotide
  Sense strand starting at position 3207 of SEQ ID NO: 913813
uagacuaugugauucugau

SEQ ID NO: 956013 - RNA, 19 nt, Artificial Sequence
  Description of Artificial Sequence: Synthetic oligonucleotide
  Antisense strand to SEQ ID NO: 956012
aucagaaucacauagucua

SEQ ID NO: 956014 - RNA, 19 nt, Artificial Sequence
  Description of Artificial Sequence: Synthetic oligonucleotide
  Sense strand starting at position 3279 of SEQ ID NO: 913813
cgagauauucuuuaagucu

SEQ ID NO: 956015 - RNA, 19 nt, Artificial Sequence
  Description of Artificial Sequence: Synthetic oligonucleotide
  Antisense strand to SEQ ID NO: 956014
agacuuaaagaauaucucg

SEQ ID NO: 956016 - RNA, 19 nt, Artificial Sequence
  Description of Artificial Sequence: Synthetic oligonucleotide
  Sense strand starting at position 3202 of SEQ ID NO: 913813
acaaguagacuaugugauu

SEQ ID NO: 956017 - RNA, 19 nt, Artificial Sequence
  Description of Artificial Sequence: Synthetic oligonucleotide
  Antisense strand to SEQ ID NO: 956016
aaucacauagucuacuugu

SEQ ID NO: 956018 - RNA, 19 nt, Artificial Sequence
  Description of Artificial Sequence: Synthetic oligonucleotide
  Sense strand starting at position 2928 of SEQ ID NO: 913813
ugccaagacugaguuggaa

SEQ ID NO: 956019 - RNA, 19 nt, Artificial Sequence
  Description of Artificial Sequence: Synthetic oligonucleotide
  Antisense strand to SEQ ID NO: 956018
uuccaacucagucuuggca

SEQ ID NO: 956020 - RNA, 19 nt, Artificial Sequence
  Description of Artificial Sequence: Synthetic oligonucleotide
  Sense strand starting at position 2033 of SEQ ID NO: 913813
gaucaugcccaggguagaa

SEQ ID NO: 956021 - RNA, 19 nt, Artificial Sequence
  Description of Artificial Sequence: Synthetic oligonucleotide
  Antisense strand to SEQ ID NO: 956020
uucuacccugggcaugauc

SEQ ID NO: 956022 - RNA, 19 nt, Artificial Sequence
  Description of Artificial Sequence: Synthetic oligonucleotide
  Sense strand starting at position 2751 of SEQ ID NO: 913813
agacauaccuggccaaagu

SEQ ID NO: 956023 - RNA, 19 nt, Artificial Sequence
  Description of Artificial Sequence: Synthetic oligonucleotide
  Antisense strand to SEQ ID NO: 956022
acuuuggccagguaugucu

SEQ ID NO: 956024 - RNA, 19 nt, Artificial Sequence
  Description of Artificial Sequence: Synthetic oligonucleotide
  Sense strand starting at position 2446 of SEQ ID NO: 913813
acuuuagugacggaauugu

SEQ ID NO: 956025 - RNA, 19 nt, Artificial Sequence
  Description of Artificial Sequence: Synthetic oligonucleotide
  Antisense strand to SEQ ID NO: 956024
acaauuccgucacuaaagu

SEQ ID NO: 956026 - RNA, 19 nt, Artificial Sequence
  Description of Artificial Sequence: Synthetic oligonucleotide
  Sense strand starting at position 138 of SEQ ID NO: 913813
gcgcuugccaucucaucga

SEQ ID NO: 956027 - RNA, 19 nt, Artificial Sequence
  Description of Artificial Sequence: Synthetic oligonucleotide
  Antisense strand to SEQ ID NO: 956026
ucgaugagauggcaagcgc

SEQ ID NO: 956028 - RNA, 19 nt, Artificial Sequence
  Description of Artificial Sequence: Synthetic oligonucleotide
  Sense strand starting at position 2970 of SEQ ID NO: 913813
guuagugccaaugauggau

SEQ ID NO: 956029 - RNA, 19 nt, Artificial Sequence
  Description of Artificial Sequence: Synthetic oligonucleotide
  Antisense strand to SEQ ID NO: 956028
auccaucauuggcacuaac

SEQ ID NO: 956030 - RNA, 19 nt, Artificial Sequence
  Description of Artificial Sequence: Synthetic oligonucleotide
  Sense strand starting at position 2032 of SEQ ID NO: 913813
ggaucaugcccaggguaga

SEQ ID NO: 956031 - RNA, 19 nt, Artificial Sequence
  Description of Artificial Sequence: Synthetic oligonucleotide
  Antisense strand to SEQ ID NO: 956030
ucuacccugggcaugaucc

SEQ ID NO: 956032 - RNA, 19 nt, Artificial Sequence
  Description of Artificial Sequence: Synthetic oligonucleotide
  Sense strand starting at position 2659 of SEQ ID NO: 913813
uuaggugauaccuggcaaa

SEQ ID NO: 956033 - RNA, 19 nt, Artificial Sequence
  Description of Artificial Sequence: Synthetic oligonucleotide
  Antisense strand to SEQ ID NO: 956032
uuugccagguaucaccuaa

SEQ ID NO: 956034 - RNA, 19 nt, Artificial Sequence
  Description of Artificial Sequence: Synthetic oligonucleotide
  Sense strand starting at position 85 of SEQ ID NO: 913813
gcccauggcauguaagaca

SEQ ID NO: 956035 - RNA, 19 nt, Artificial Sequence
  Description of Artificial Sequence: Synthetic oligonucleotide
  Antisense strand to SEQ ID NO: 956034
ugucuuacaugccaugggc

SEQ ID NO: 956036 - RNA, 19 nt, Artificial Sequence
  Description of Artificial Sequence: Synthetic oligonucleotide
  Sense strand starting at position 296 of SEQ ID NO: 913813
ggaugcgcuaaugaucuaa

SEQ ID NO: 956037 - RNA, 19 nt, Artificial Sequence
  Description of Artificial Sequence: Synthetic oligonucleotide
  Antisense strand to SEQ ID NO: 956036
uuagaucauuagcgcaucc

SEQ ID NO: 956038 - RNA, 19 nt, Artificial Sequence
  Description of Artificial Sequence: Synthetic oligonucleotide
  Sense strand starting at position 2678 of SEQ ID NO: 913813
acugaagacugcccaguau

SEQ ID NO: 956039 - RNA, 19 nt, Artificial Sequence
  Description of Artificial Sequence: Synthetic oligonucleotide
  Antisense strand to SEQ ID NO: 956038
auacugggcagucuucagu

SEQ ID NO: 956040 - RNA, 19 nt, Artificial Sequence
  Description of Artificial Sequence: Synthetic oligonucleotide
  Sense strand starting at position 2974 of SEQ ID NO: 913813
gugccaaugauggauguuu

SEQ ID NO: 956041 - RNA, 19 nt, Artificial Sequence
  Description of Artificial Sequence: Synthetic oligonucleotide
  Antisense strand to SEQ ID NO: 956040
aaacauccaucauuggcac

SEQ ID NO: 956042 - RNA, 19 nt, Artificial Sequence
  Description of Artificial Sequence: Synthetic oligonucleotide
  Sense strand starting at position 2400 of SEQ ID NO: 913813
ggaugaggcuguucugaug

SEQ ID NO: 956043 - RNA, 19 nt, Artificial Sequence
  Description of Artificial Sequence: Synthetic oligonucleotide
  Antisense strand to SEQ ID NO: 956042
caucagaacagccucaucc

SEQ ID NO: 956044 - RNA, 19 nt, Artificial Sequence
  Description of Artificial Sequence: Synthetic oligonucleotide
  Sense strand starting at position 3327 of SEQ ID NO: 913813
gaucaauugcuauguuaag

SEQ ID NO: 956045 - RNA, 19 nt, Artificial Sequence
  Description of Artificial Sequence: Synthetic oligonucleotide
  Antisense strand to SEQ ID NO: 956044
cuuaacauagcaauugauc

SEQ ID NO: 956046 - RNA, 19 nt, Artificial Sequence
  Description of Artificial Sequence: Synthetic oligonucleotide
  Sense strand starting at position 258 of SEQ ID NO: 913813
gcuguaagccaagacuacu

SEQ ID NO: 956047 - RNA, 19 nt, Artificial Sequence
  Description of Artificial Sequence: Synthetic oligonucleotide
  Antisense strand to SEQ ID NO: 956046
aguagucuuggcuuacagc

SEQ ID NO: 956048 - RNA, 19 nt, Artificial Sequence
  Description of Artificial Sequence: Synthetic oligonucleotide
  Sense strand starting at position 3393 of SEQ ID NO: 913813
aucuauuugucggcuguca

SEQ ID NO: 956049 - RNA, 19 nt, Artificial Sequence
  Description of Artificial Sequence: Synthetic oligonucleotide
  Antisense strand to SEQ ID NO: 956048
ugacagccgacaaauagau

SEQ ID NO: 956050 - RNA, 19 nt, Artificial Sequence
  Description of Artificial Sequence: Synthetic oligonucleotide
  Sense strand starting at position 3278 of SEQ ID NO: 913813
ucgagauauucuuuaaguc

SEQ ID NO: 956051 - RNA, 19 nt, Artificial Sequence
  Description of Artificial Sequence: Synthetic oligonucleotide
  Antisense strand to SEQ ID NO: 956050
gacuuaaagaauaucucga

SEQ ID NO: 956052 - RNA, 19 nt, Artificial Sequence
  Description of Artificial Sequence: Synthetic oligonucleotide
  Sense strand starting at position 2162 of SEQ ID NO: 913813
auugcuaccuuguuagaag

SEQ ID NO: 956053 - RNA, 19 nt, Artificial Sequence
  Description of Artificial Sequence: Synthetic oligonucleotide
  Antisense strand to SEQ ID NO: 956052
cuucuaacaagguagcaau

SEQ ID NO: 956054 - RNA, 19 nt, Artificial Sequence
  Description of Artificial Sequence: Synthetic oligonucleotide
  Sense strand starting at position 3395 of SEQ ID NO: 913813
cuauuugucggcugucaug

SEQ ID NO: 956055 - RNA, 19 nt, Artificial Sequence
  Description of Artificial Sequence: Synthetic oligonucleotide
  Antisense strand to SEQ ID NO: 956054
caugacagccgacaaauag

SEQ ID NO: 956056 - RNA, 19 nt, Artificial Sequence
  Description of Artificial Sequence: Synthetic oligonucleotide
  Sense strand starting at position 194 of SEQ ID NO: 913813
aagacacagugauagagaa

SEQ ID NO: 956057 - RNA, 19 nt, Artificial Sequence
  Description of Artificial Sequence: Synthetic oligonucleotide
  Antisense strand to SEQ ID NO: 956056
uucucuaucacugugucuu

SEQ ID NO: 956058 - RNA, 19 nt, Artificial Sequence
  Description of Artificial Sequence: Synthetic oligonucleotide
  Sense strand starting at position 2365 of SEQ ID NO: 913813
gccagaacuuguucuacua

SEQ ID NO: 956059 - RNA, 19 nt, Artificial Sequence
  Description of Artificial Sequence: Synthetic oligonucleotide
  Antisense strand to SEQ ID NO: 956058
uaguagaacaaguucuggc

SEQ ID NO: 956060 - RNA, 19 nt, Artificial Sequence
  Description of Artificial Sequence: Synthetic oligonucleotide
  Sense strand starting at position 3294 of SEQ ID NO: 913813
gucucauaucauggccaua

SEQ ID NO: 956061 - RNA, 19 nt, Artificial Sequence
  Description of Artificial Sequence: Synthetic oligonucleotide
  Antisense strand to SEQ ID NO: 956060
uauggccaugauaugagac

SEQ ID NO: 956062 - RNA, 19 nt, Artificial Sequence
  Description of Artificial Sequence: Synthetic oligonucleotide
  Sense strand starting at position 300 of SEQ ID NO: 913813
gcgcuaaugaucuaacagu

SEQ ID NO: 956063 - RNA, 19 nt, Artificial Sequence
  Description of Artificial Sequence: Synthetic oligonucleotide
  Antisense strand to SEQ ID NO: 956062
acuguuagaucauuagcgc

SEQ ID NO: 956064 - RNA, 19 nt, Artificial Sequence
  Description of Artificial Sequence: Synthetic oligonucleotide
  Sense strand starting at position 298 of SEQ ID NO: 913813
augcgcuaaugaucuaaca

SEQ ID NO: 956065 - RNA, 19 nt, Artificial Sequence
  Description of Artificial Sequence: Synthetic oligonucleotide
  Antisense strand to SEQ ID NO: 956064
uguuagaucauuagcgcau

SEQ ID NO: 956066 - RNA, 19 nt, Artificial Sequence
  Description of Artificial Sequence: Synthetic oligonucleotide
  Sense strand starting at position 2866 of SEQ ID NO: 913813
aucucuaugcccugguaca

SEQ ID NO: 956067 - RNA, 19 nt, Artificial Sequence
  Description of Artificial Sequence: Synthetic oligonucleotide
  Antisense strand to SEQ ID NO: 956066
uguaccagggcauagagau

SEQ ID NO: 956068 - RNA, 19 nt, Artificial Sequence
  Description of Artificial Sequence: Synthetic oligonucleotide
  Sense strand starting at position 3749 of SEQ ID NO: 913813
ucugguuauuuaggaacca

SEQ ID NO: 956069 - RNA, 19 nt, Artificial Sequence
  Description of Artificial Sequence: Synthetic oligonucleotide
  Antisense strand to SEQ ID NO: 956068
ugguuccuaaauaaccaga

SEQ ID NO: 956070 - RNA, 19 nt, Artificial Sequence
  Description of Artificial Sequence: Synthetic oligonucleotide
  Sense strand starting at position 170 of SEQ ID NO: 913813
caggcugauuuccauguaa

SEQ ID NO: 956071 - RNA, 19 nt, Artificial Sequence
  Description of Artificial Sequence: Synthetic oligonucleotide
  Antisense strand to SEQ ID NO: 956070
uuacauggaaaucagccug

SEQ ID NO: 956072 - RNA, 19 nt, Artificial Sequence
  Description of Artificial Sequence: Synthetic oligonucleotide
  Sense strand starting at position 1005 of SEQ ID NO: 913814
cccuguucugguggauuua

SEQ ID NO: 956073 - RNA, 19 nt, Artificial Sequence
  Description of Artificial Sequence: Synthetic oligonucleotide
  Antisense strand to SEQ ID NO: 956072
uaaauccaccagaacaggg

SEQ ID NO: 956074 - RNA, 19 nt, Artificial Sequence
  Description of Artificial Sequence: Synthetic oligonucleotide
  Sense strand starting at position 678 of SEQ ID NO: 913814
ugcauccucccucagagaa

SEQ ID NO: 956075 - RNA, 19 nt, Artificial Sequence
  Description of Artificial Sequence: Synthetic oligonucleotide
  Antisense strand to SEQ ID NO: 956074
uucucugagggaggaugca

SEQ ID NO: 956076 - RNA, 19 nt, Artificial Sequence
  Description of Artificial Sequence: Synthetic oligonucleotide
  Sense strand starting at position 3138 of SEQ ID NO: 913814
gugugauagagcuaggaug

SEQ ID NO: 956077 - RNA, 19 nt, Artificial Sequence
  Description of Artificial Sequence: Synthetic oligonucleotide
  Antisense strand to SEQ ID NO: 956076
cauccuagcucuaucacac

SEQ ID NO: 956078 - RNA, 19 nt, Artificial Sequence
  Description of Artificial Sequence: Synthetic oligonucleotide
  Sense strand starting at position 3968 of SEQ ID NO: 913814
ccgagcuucuuauuuaucu

SEQ ID NO: 956079 - RNA, 19 nt, Artificial Sequence
  Description of Artificial Sequence: Synthetic oligonucleotide
  Antisense strand to SEQ ID NO: 956078
agauaaauaagaagcucgg

SEQ ID NO: 956080 - RNA, 19 nt, Artificial Sequence
  Description of Artificial Sequence: Synthetic oligonucleotide
  Sense strand starting at position 595 of SEQ ID NO: 913814
gcacauuguguguuugcuu

SEQ ID NO: 956081 - RNA, 19 nt, Artificial Sequence
  Description of Artificial Sequence: Synthetic oligonucleotide
  Antisense strand to SEQ ID NO: 956080
aagcaaacacacaaugugc

SEQ ID NO: 956082 - RNA, 19 nt, Artificial Sequence
  Description of Artificial Sequence: Synthetic oligonucleotide
  Sense strand starting at position 382 of SEQ ID NO: 913814
cagggagagucccucuuau

SEQ ID NO: 956083 - RNA, 19 nt, Artificial Sequence
  Description of Artificial Sequence: Synthetic oligonucleotide
  Antisense strand to SEQ ID NO: 956082
auaagagggacucucccug

SEQ ID NO: 956084 - RNA, 19 nt, Artificial Sequence
  Description of Artificial Sequence: Synthetic oligonucleotide
  Sense strand starting at position 1066 of SEQ ID NO: 913814
cgcugaaugccgagugaca

SEQ ID NO: 956085 - RNA, 19 nt, Artificial Sequence
  Description of Artificial Sequence: Synthetic oligonucleotide
  Antisense strand to SEQ ID NO: 956084
ugucacucggcauucagcg

SEQ ID NO: 956086 - RNA, 19 nt, Artificial Sequence
  Description of Artificial Sequence: Synthetic oligonucleotide
  Sense strand starting at position 857 of SEQ ID NO: 913814
agguaagguccagggaagu

SEQ ID NO: 956087 - RNA, 19 nt, Artificial Sequence
  Description of Artificial Sequence: Synthetic oligonucleotide
  Antisense strand to SEQ ID NO: 956086
acuucccuggaccuuaccu

SEQ ID NO: 956088 - RNA, 19 nt, Artificial Sequence
  Description of Artificial Sequence: Synthetic oligonucleotide
  Sense strand starting at position 1073 of SEQ ID NO: 913814
ugccgagugacagauccaa

SEQ ID NO: 956089 - RNA, 19 nt, Artificial Sequence
  Description of Artificial Sequence: Synthetic oligonucleotide
  Antisense strand to SEQ ID NO: 956088
uuggaucugucacucggca

SEQ ID NO: 956090 - RNA, 19 nt, Artificial Sequence
  Description of Artificial Sequence: Synthetic oligonucleotide
  Sense strand starting at position 36 of SEQ ID NO: 913814
ugugucuggagucaaauau

SEQ ID NO: 956091 - RNA, 19 nt, Artificial Sequence
  Description of Artificial Sequence: Synthetic oligonucleotide
  Antisense strand to SEQ ID NO: 956090
auauuugacuccagacaca

SEQ ID NO: 956092 - RNA, 19 nt, Artificial Sequence
  Description of Artificial Sequence: Synthetic oligonucleotide
  Sense strand starting at position 3098 of SEQ ID NO: 913814
gaggcagaugugcaaguaa

SEQ ID NO: 956093 - RNA, 19 nt, Artificial Sequence
  Description of Artificial Sequence: Synthetic oligonucleotide
  Antisense strand to SEQ ID NO: 956092
uuacuugcacaucugccuc

SEQ ID NO: 956094 - RNA, 19 nt, Artificial Sequence
  Description of Artificial Sequence: Synthetic oligonucleotide
  Sense strand starting at position 1563 of SEQ ID NO: 913814
ugucuccucccuggaagaa

SEQ ID NO: 956095 - RNA, 19 nt, Artificial Sequence
  Description of Artificial Sequence: Synthetic oligonucleotide
  Antisense strand to SEQ ID NO: 956094
uucuuccagggaggagaca

SEQ ID NO: 956096 - RNA, 19 nt, Artificial Sequence
  Description of Artificial Sequence: Synthetic oligonucleotide
  Sense strand starting at position 1735 of SEQ ID NO: 913814
ggcugaggguccaagggau

SEQ ID NO: 956097 - RNA, 19 nt, Artificial Sequence
  Description of Artificial Sequence: Synthetic oligonucleotide
  Antisense strand to SEQ ID NO: 956096
aucccuuggacccucagcc

SEQ ID NO: 956098 - RNA, 19 nt, Artificial Sequence
  Description of Artificial Sequence: Synthetic oligonucleotide
  Sense strand starting at position 371 of SEQ ID NO: 913814
agaguuagaugcagggaga

SEQ ID NO: 956099 - RNA, 19 nt, Artificial Sequence
  Description of Artificial Sequence: Synthetic oligonucleotide
  Antisense strand to SEQ ID NO: 956098
ucucccugcaucuaacucu

SEQ ID NO: 956100 - RNA, 19 nt, Artificial Sequence
  Description of Artificial Sequence: Synthetic oligonucleotide
  Sense strand starting at position 1358 of SEQ ID NO: 913814
aacaaauggucucugagcu

SEQ ID NO: 956101 - RNA, 19 nt, Artificial Sequence
  Description of Artificial Sequence: Synthetic oligonucleotide
  Antisense strand to SEQ ID NO: 956100
agcucagagaccauuuguu

SEQ ID NO: 956102 - RNA, 19 nt, Artificial Sequence
  Description of Artificial Sequence: Synthetic oligonucleotide
  Sense strand starting at position 1473 of SEQ ID NO: 913814
cggucuggauaguuggaga

SEQ ID NO: 956103 - RNA, 19 nt, Artificial Sequence
  Description of Artificial Sequence: Synthetic oligonucleotide
  Antisense strand to SEQ ID NO: 956102
ucuccaacuauccagaccg

SEQ ID NO: 956104 - RNA, 19 nt, Artificial Sequence
  Description of Artificial Sequence: Synthetic oligonucleotide
  Sense strand starting at position 1562 of SEQ ID NO: 913814
cugucuccucccuggaaga

SEQ ID NO: 956105 - RNA, 19 nt, Artificial Sequence
  Description of Artificial Sequence: Synthetic oligonucleotide
  Antisense strand to SEQ ID NO: 956104
ucuuccagggaggagacag

SEQ ID NO: 956106 - RNA, 19 nt, Artificial Sequence
  Description of Artificial Sequence: Synthetic oligonucleotide
  Sense strand starting at position 179 of SEQ ID NO: 913814
ggcugaagucccugacaca

SEQ ID NO: 956107 - RNA, 19 nt, Artificial Sequence
  Description of Artificial Sequence: Synthetic oligonucleotide
  Antisense strand to SEQ ID NO: 956106
ugugucagggacuucagcc

SEQ ID NO: 956108 - RNA, 19 nt, Artificial Sequence
  Description of Artificial Sequence: Synthetic oligonucleotide
  Sense strand starting at position 1068 of SEQ ID NO: 913814
cugaaugccgagugacaga

SEQ ID NO: 956109 - RNA, 19 nt, Artificial Sequence
  Description of Artificial Sequence: Synthetic oligonucleotide
  Antisense strand to SEQ ID NO: 956108
ucugucacucggcauucag

SEQ ID NO: 956110 - RNA, 19 nt, Artificial Sequence
  Description of Artificial Sequence: Synthetic oligonucleotide
  Sense strand starting at position 2520 of SEQ ID NO: 913814
aggcgagucacccagaguu

SEQ ID NO: 956111 - RNA, 19 nt, Artificial Sequence
  Description of Artificial Sequence: Synthetic oligonucleotide
  Antisense strand to SEQ ID NO: 956110
aacucugggugacucgccu

SEQ ID NO: 956112 - RNA, 19 nt, Artificial Sequence
  Description of Artificial Sequence: Synthetic oligonucleotide
  Sense strand starting at position 2522 of SEQ ID NO: 913814
gcgagucacccagaguuua

SEQ ID NO: 956113 - RNA, 19 nt, Artificial Sequence
  Description of Artificial Sequence: Synthetic oligonucleotide
  Antisense strand to SEQ ID NO: 956112
uaaacucugggugacucgc

SEQ ID NO: 956114 - RNA, 19 nt, Artificial Sequence
  Description of Artificial Sequence: Synthetic oligonucleotide
  Sense strand starting at position 983 of SEQ ID NO: 913814
ccgggagccgacugaaauu

SEQ ID NO: 956115 - RNA, 19 nt, Artificial Sequence
  Description of Artificial Sequence: Synthetic oligonucleotide
  Antisense strand to SEQ ID NO: 956114
aauuucagucggcucccgg

SEQ ID NO: 956116 - RNA, 19 nt, Artificial Sequence
  Description of Artificial Sequence: Synthetic oligonucleotide
  Sense strand starting at position 402 of SEQ ID NO: 913814
ggccuuccugcccacuaua

SEQ ID NO: 956117 - RNA, 19 nt, Artificial Sequence
  Description of Artificial Sequence: Synthetic oligonucleotide
  Antisense strand to SEQ ID NO: 956116
uauagugggcaggaaggcc

SEQ ID NO: 956118 - RNA, 19 nt, Artificial Sequence
  Description of Artificial Sequence: Synthetic oligonucleotide
  Sense strand starting at position 3180 of SEQ ID NO: 913814
gggugacagccaggucuua

SEQ ID NO: 956119 - RNA, 19 nt, Artificial Sequence
  Description of Artificial Sequence: Synthetic oligonucleotide
  Antisense strand to SEQ ID NO: 956118
uaagaccuggcugucaccc

SEQ ID NO: 956120 - RNA, 19 nt, Artificial Sequence
  Description of Artificial Sequence: Synthetic oligonucleotide
  Sense strand starting at position 1188 of SEQ ID NO: 913814
cagcaaaugcccgaguauu

SEQ ID NO: 956121 - RNA, 19 nt, Artificial Sequence
  Description of Artificial Sequence: Synthetic oligonucleotide
  Antisense strand to SEQ ID NO: 956120
aauacucgggcauuugcug

SEQ ID NO: 956122 - RNA, 19 nt, Artificial Sequence
  Description of Artificial Sequence: Synthetic oligonucleotide
  Sense strand starting at position 30 of SEQ ID NO: 913814
ccaaauugugucuggaguc

SEQ ID NO: 956123 - RNA, 19 nt, Artificial Sequence
  Description of Artificial Sequence: Synthetic oligonucleotide
  Antisense strand to SEQ ID NO: 956122
gacuccagacacaauuugg

SEQ ID NO: 956124 - RNA, 19 nt, Artificial Sequence
  Description of Artificial Sequence: Synthetic oligonucleotide
  Sense strand starting at position 3918 of SEQ ID NO: 913814
uuuauauaauggucugugu

SEQ ID NO: 956125 - RNA, 19 nt, Artificial Sequence
  Description of Artificial Sequence: Synthetic oligonucleotide
  Antisense strand to SEQ ID NO: 956124
acacagaccauuauauaaa

SEQ ID NO: 956126 - RNA, 19 nt, Artificial Sequence
  Description of Artificial Sequence: Synthetic oligonucleotide
  Sense strand starting at position 3772 of SEQ ID NO: 913814
cuuaaaugugauugcugua

SEQ ID NO: 956127 - RNA, 19 nt, Artificial Sequence
  Description of Artificial Sequence: Synthetic oligonucleotide
  Antisense strand to SEQ ID NO: 956126
uacagcaaucacauuuaag

SEQ ID NO: 956128 - RNA, 19 nt, Artificial Sequence
  Description of Artificial Sequence: Synthetic oligonucleotide
  Sense strand starting at position 2980 of SEQ ID NO: 913814
gccuaaacguccuuccaaa

SEQ ID NO: 956129 - RNA, 19 nt, Artificial Sequence
  Description of Artificial Sequence: Synthetic oligonucleotide
  Antisense strand to SEQ ID NO: 956128
uuuggaaggacguuuaggc

SEQ ID NO: 956130 - RNA, 19 nt, Artificial Sequence
  Description of Artificial Sequence: Synthetic oligonucleotide
  Sense strand starting at position 3920 of SEQ ID NO: 913814
uauauaauggucugugucu

SEQ ID NO: 956131 - RNA, 19 nt, Artificial Sequence
  Description of Artificial Sequence: Synthetic oligonucleotide
  Antisense strand to SEQ ID NO: 956130
agacacagaccauuauaua

SEQ ID NO: 956132 - RNA, 19 nt, Artificial Sequence
  Description of Artificial Sequence: Synthetic oligonucleotide
  Sense strand starting at position 2634 of SEQ ID NO: 913814
cuugcuccuccaggcaaua

SEQ ID NO: 956133 - RNA, 19 nt, Artificial Sequence
  Description of Artificial Sequence: Synthetic oligonucleotide
  Antisense strand to SEQ ID NO: 956132
uauugccuggaggagcaag

SEQ ID NO: 956134 - RNA, 19 nt, Artificial Sequence
  Description of Artificial Sequence: Synthetic oligonucleotide
  Sense strand starting at position 3725 of SEQ ID NO: 913814
gcguacuaacagugggauu

SEQ ID NO: 956135 - RNA, 19 nt, Artificial Sequence
  Description of Artificial Sequence: Synthetic oligonucleotide
  Antisense strand to SEQ ID NO: 956134
aaucccacuguuaguacgc

SEQ ID NO: 956136 - RNA, 19 nt, Artificial Sequence
  Description of Artificial Sequence: Synthetic oligonucleotide
  Sense strand starting at position 1187 of SEQ ID NO: 913814
acagcaaaugcccgaguau

SEQ ID NO: 956137 - RNA, 19 nt, Artificial Sequence
  Description of Artificial Sequence: Synthetic oligonucleotide
  Antisense strand to SEQ ID NO: 956136
auacucgggcauuugcugu

SEQ ID NO: 956138 - RNA, 19 nt, Artificial Sequence
  Description of Artificial Sequence: Synthetic oligonucleotide
  Sense strand starting at position 3578 of SEQ ID NO: 913814
auggauguugcccggaagu

SEQ ID NO: 956139 - RNA, 19 nt, Artificial Sequence
  Description of Artificial Sequence: Synthetic oligonucleotide
  Antisense strand to SEQ ID NO: 956138
acuuccgggcaacauccau

SEQ ID NO: 956140 - RNA, 19 nt, Artificial Sequence
  Description of Artificial Sequence: Synthetic oligonucleotide
  Sense strand starting at position 716 of SEQ ID NO: 913814
gccguuacuuucccaaaua

SEQ ID NO: 956141 - RNA, 19 nt, Artificial Sequence
  Description of Artificial Sequence: Synthetic oligonucleotide
  Antisense strand to SEQ ID NO: 956140
uauuugggaaaguaacggc

SEQ ID NO: 956142 - RNA, 19 nt, Artificial Sequence
  Description of Artificial Sequence: Synthetic oligonucleotide
  Sense strand starting at position 29 of SEQ ID NO: 913814
gccaaauugugucuggagu

SEQ ID NO: 956143 - RNA, 19 nt, Artificial Sequence
  Description of Artificial Sequence: Synthetic oligonucleotide
  Antisense strand to SEQ ID NO: 956142
acuccagacacaauuuggc

SEQ ID NO: 956144 - RNA, 19 nt, Artificial Sequence
  Description of Artificial Sequence: Synthetic oligonucleotide
  Sense strand starting at position 2694 of SEQ ID NO: 913814
aguccuggcccuugucaga

SEQ ID NO: 956145 - RNA, 19 nt, Artificial Sequence
  Description of Artificial Sequence: Synthetic oligonucleotide
  Antisense strand to SEQ ID NO: 956144
ucugacaagggccaggacu

SEQ ID NO: 956146 - RNA, 19 nt, Artificial Sequence
  Description of Artificial Sequence: Synthetic oligonucleotide
  Sense strand starting at position 1520 of SEQ ID NO: 913814
ccaagucguaagugugaca

SEQ ID NO: 956147 - RNA, 19 nt, Artificial Sequence
  Description of Artificial Sequence: Synthetic oligonucleotide
  Antisense strand to SEQ ID NO: 956146
ugucacacuuacgacuugg

SEQ ID NO: 956148 - RNA, 19 nt, Artificial Sequence
  Description of Artificial Sequence: Synthetic oligonucleotide
  Sense strand starting at position 715 of SEQ ID NO: 913814
ggccguuacuuucccaaau

SEQ ID NO: 956149 - RNA, 19 nt, Artificial Sequence
  Description of Artificial Sequence: Synthetic oligonucleotide
  Antisense strand to SEQ ID NO: 956148
auuugggaaaguaacggcc

SEQ ID NO: 956150 - RNA, 19 nt, Artificial Sequence
  Description of Artificial Sequence: Synthetic oligonucleotide
  Sense strand starting at position 1054 of SEQ ID NO: 913814
cagggugcucuucgcugaa

SEQ ID NO: 956151 - RNA, 19 nt, Artificial Sequence
  Description of Artificial Sequence: Synthetic oligonucleotide
  Antisense strand to SEQ ID NO: 956150
uucagcgaagagcacccug

SEQ ID NO: 956152 - RNA, 19 nt, Artificial Sequence
  Description of Artificial Sequence: Synthetic oligonucleotide
  Sense strand starting at position 1043 of SEQ ID NO: 913815
gucauuaauggauaagcua

SEQ ID NO: 956153 - RNA, 19 nt, Artificial Sequence
  Description of Artificial Sequence: Synthetic oligonucleotide
  Antisense strand to SEQ ID NO: 956152
uagcuuauccauuaaugac

SEQ ID NO: 956154 - RNA, 19 nt, Artificial Sequence
  Description of Artificial Sequence: Synthetic oligonucleotide
  Sense strand starting at position 1193 of SEQ ID NO: 913815
ggugcucugagggaucaga

SEQ ID NO: 956155 - RNA, 19 nt, Artificial Sequence
  Description of Artificial Sequence: Synthetic oligonucleotide
  Antisense strand to SEQ ID NO: 956154
ucugaucccucagagcacc

SEQ ID NO: 956156 - RNA, 19 nt, Artificial Sequence
  Description of Artificial Sequence: Synthetic oligonucleotide
  Sense strand starting at position 61 of SEQ ID NO: 913815
acuuaucuugaacgggaga

SEQ ID NO: 956157 - RNA, 19 nt, Artificial Sequence
  Description of Artificial Sequence: Synthetic oligonucleotide
  Antisense strand to SEQ ID NO: 956156
ucucccguucaagauaagu

SEQ ID NO: 956158 - RNA, 19 nt, Artificial Sequence
  Description of Artificial Sequence: Synthetic oligonucleotide
  Sense strand starting at position 3485 of SEQ ID NO: 913815
gaugauucccagcaguaga

SEQ ID NO: 956159 - RNA, 19 nt, Artificial Sequence
  Description of Artificial Sequence: Synthetic oligonucleotide
  Antisense strand to SEQ ID NO: 956158
ucuacugcugggaaucauc

SEQ ID NO: 956160 - RNA, 19 nt, Artificial Sequence
  Description of Artificial Sequence: Synthetic oligonucleotide
  Sense strand starting at position 1399 of SEQ ID NO: 913815
uaggaaaugccugggauau

SEQ ID NO: 956161 - RNA, 19 nt, Artificial Sequence
  Description of Artificial Sequence: Synthetic oligonucleotide
  Antisense strand to SEQ ID NO: 956160
auaucccaggcauuuccua

SEQ ID NO: 956162 - RNA, 19 nt, Artificial Sequence
  Description of Artificial Sequence: Synthetic oligonucleotide
  Sense strand starting at position 3112 of SEQ ID NO: 913815
gcuuuauagggacaggguu

SEQ ID NO: 956163 - RNA, 19 nt, Artificial Sequence
  Description of Artificial Sequence: Synthetic oligonucleotide
  Antisense strand to SEQ ID NO: 956162
aacccugucccuauaaagc

SEQ ID NO: 956164 - RNA, 19 nt, Artificial Sequence
  Description of Artificial Sequence: Synthetic oligonucleotide
  Sense strand starting at position 3 of SEQ ID NO: 913815
uggguauugcaaggaggaa

SEQ ID NO: 956165 - RNA, 19 nt, Artificial Sequence
  Description of Artificial Sequence: Synthetic oligonucleotide
  Antisense strand to SEQ ID NO: 956164
uuccuccuugcaauaccca

SEQ ID NO: 956166 - RNA, 19 nt, Artificial Sequence
  Description of Artificial Sequence: Synthetic oligonucleotide
  Sense strand starting at position 1015 of SEQ ID NO: 913815
ccaucaguggcucagaaac

SEQ ID NO: 956167 - RNA, 19 nt, Artificial Sequence
  Description of Artificial Sequence: Synthetic oligonucleotide
  Antisense strand to SEQ ID NO: 956166
guuucugagccacugaugg

SEQ ID NO: 956168 - RNA, 19 nt, Artificial Sequence
  Description of Artificial Sequence: Synthetic oligonucleotide
  Sense strand starting at position 1033 of SEQ ID NO: 913815
ccaugcagaggucauuaau

SEQ ID NO: 956169 - RNA, 19 nt, Artificial Sequence
  Description of Artificial Sequence: Synthetic oligonucleotide
  Antisense strand to SEQ ID NO: 956168
auuaaugaccucugcaugg

SEQ ID NO: 956170 - RNA, 19 nt, Artificial Sequence
  Description of Artificial Sequence: Synthetic oligonucleotide
  Sense strand starting at position 24 of SEQ ID NO: 913815
ucuggauguaggugagaga

SEQ ID NO: 956171 - RNA, 19 nt, Artificial Sequence
  Description of Artificial Sequence: Synthetic oligonucleotide
  Antisense strand to SEQ ID NO: 956170
ucucucaccuacauccaga

SEQ ID NO: 956172 - RNA, 19 nt, Artificial Sequence
  Description of Artificial Sequence: Synthetic oligonucleotide
  Sense strand starting at position 1658 of SEQ ID NO: 913815
cugguaccucucgaauaga

SEQ ID NO: 956173 - RNA, 19 nt, Artificial Sequence
  Description of Artificial Sequence: Synthetic oligonucleotide
  Antisense strand to SEQ ID NO: 956172
ucuauucgagagguaccag

SEQ ID NO: 956174 - RNA, 19 nt, Artificial Sequence
  Description of Artificial Sequence: Synthetic oligonucleotide
  Sense strand starting at position 990 of SEQ ID NO: 913815
auaacauuguucccaggau

SEQ ID NO: 956175 - RNA, 19 nt, Artificial Sequence
  Description of Artificial Sequence: Synthetic oligonucleotide
  Antisense strand to SEQ ID NO: 956174
auccugggaacaauguuau

SEQ ID NO: 956176 - RNA, 19 nt, Artificial Sequence
  Description of Artificial Sequence: Synthetic oligonucleotide
  Sense strand starting at position 1405 of SEQ ID NO: 913815
augccugggauaugauuga

SEQ ID NO: 956177 - RNA, 19 nt, Artificial Sequence
  Description of Artificial Sequence: Synthetic oligonucleotide
  Antisense strand to SEQ ID NO: 956176
ucaaucauaucccaggcau

SEQ ID NO: 956178 - RNA, 19 nt, Artificial Sequence
  Description of Artificial Sequence: Synthetic oligonucleotide
  Sense strand starting at position 2178 of SEQ ID NO: 913815
ucacucaguccugagggua

SEQ ID NO: 956179 - RNA, 19 nt, Artificial Sequence
  Description of Artificial Sequence: Synthetic oligonucleotide
  Antisense strand to SEQ ID NO: 956178
uacccucaggacugaguga

SEQ ID NO: 956180 - RNA, 19 nt, Artificial Sequence
  Description of Artificial Sequence: Synthetic oligonucleotide
  Sense strand starting at position 632 of SEQ ID NO: 913815
ccagauaaguguucugaaa

SEQ ID NO: 956181 - RNA, 19 nt, Artificial Sequence
  Description of Artificial Sequence: Synthetic oligonucleotide
  Antisense strand to SEQ ID NO: 956180
uuucagaacacuuaucugg

SEQ ID NO: 956182 - RNA, 19 nt, Artificial Sequence
  Description of Artificial Sequence: Synthetic oligonucleotide
  Sense strand starting at position 1398 of SEQ ID NO: 913815
guaggaaaugccugggaua

SEQ ID NO: 956183 - RNA, 19 nt, Artificial Sequence
  Description of Artificial Sequence: Synthetic oligonucleotide
  Antisense strand to SEQ ID NO: 956182
uaucccaggcauuuccuac

SEQ ID NO: 956184 - RNA, 19 nt, Artificial Sequence
  Description of Artificial Sequence: Synthetic oligonucleotide
  Sense strand starting at position 525 of SEQ ID NO: 913815
gggaaugcccacugacuua

SEQ ID NO: 956185 - RNA, 19 nt, Artificial Sequence
  Description of Artificial Sequence: Synthetic oligonucleotide
  Antisense strand to SEQ ID NO: 956184
uaagucagugggcauuccc

SEQ ID NO: 956186 - RNA, 19 nt, Artificial Sequence
  Description of Artificial Sequence: Synthetic oligonucleotide
  Sense strand starting at position 3648 of SEQ ID NO: 913815
ugagguaugaccugcaaag

SEQ ID NO: 956187 - RNA, 19 nt, Artificial Sequence
  Description of Artificial Sequence: Synthetic oligonucleotide
  Antisense strand to SEQ ID NO: 956186
cuuugcaggucauaccuca

SEQ ID NO: 956188 - RNA, 19 nt, Artificial Sequence
  Description of Artificial Sequence: Synthetic oligonucleotide
  Sense strand starting at position 2413 of SEQ ID NO: 913815
ggaaauucuuuccugugac

SEQ ID NO: 956189 - RNA, 19 nt, Artificial Sequence
  Description of Artificial Sequence: Synthetic oligonucleotide
  Antisense strand to SEQ ID NO: 956188
gucacaggaaagaauuucc

SEQ ID NO: 956190 - RNA, 19 nt, Artificial Sequence
  Description of Artificial Sequence: Synthetic oligonucleotide
  Sense strand starting at position 623 of SEQ ID NO: 913815
gcagcaucaccagauaagu

SEQ ID NO: 956191 - RNA, 19 nt, Artificial Sequence
  Description of Artificial Sequence: Synthetic oligonucleotide
  Antisense strand to SEQ ID NO: 956190
acuuaucuggugaugcugc

SEQ ID NO: 956192 - RNA, 19 nt, Artificial Sequence
  Description of Artificial Sequence: Synthetic oligonucleotide
  Sense strand starting at position 3756 of SEQ ID NO: 913815
caaugcagccaguaggauu

SEQ ID NO: 956193 - RNA, 19 nt, Artificial Sequence
  Description of Artificial Sequence: Synthetic oligonucleotide
  Antisense strand to SEQ ID NO: 956192
aauccuacuggcugcauug

SEQ ID NO: 956194 - RNA, 19 nt, Artificial Sequence
  Description of Artificial Sequence: Synthetic oligonucleotide
  Sense strand starting at position 1661 of SEQ ID NO: 913815
guaccucucgaauagaguc

SEQ ID NO: 956195 - RNA, 19 nt, Artificial Sequence
  Description of Artificial Sequence: Synthetic oligonucleotide
  Antisense strand to SEQ ID NO: 956194
gacucuauucgagagguac

SEQ ID NO: 956196 - RNA, 19 nt, Artificial Sequence
  Description of Artificial Sequence: Synthetic oligonucleotide
  Sense strand starting at position 2460 of SEQ ID NO: 913815
ugaagcaacucuuccugau

SEQ ID NO: 956197 - RNA, 19 nt, Artificial Sequence
  Description of Artificial Sequence: Synthetic oligonucleotide
  Antisense strand to SEQ ID NO: 956196
aucaggaagaguugcuuca

SEQ ID NO: 956198 - RNA, 19 nt, Artificial Sequence
  Description of Artificial Sequence: Synthetic oligonucleotide
  Sense strand starting at position 1639 of SEQ ID NO: 913815
ggcccauguguauagauac

SEQ ID NO: 956199 - RNA, 19 nt, Artificial Sequence
  Description of Artificial Sequence: Synthetic oligonucleotide
  Antisense strand to SEQ ID NO: 956198
guaucuauacacaugggcc

SEQ ID NO: 956200 - RNA, 19 nt, Artificial Sequence
  Description of Artificial Sequence: Synthetic oligonucleotide
  Sense strand starting at position 2303 of SEQ ID NO: 913815
gggacugucaucugcaaag

SEQ ID NO: 956201 - RNA, 19 nt, Artificial Sequence
  Description of Artificial Sequence: Synthetic oligonucleotide
  Antisense strand to SEQ ID NO: 956200
cuuugcagaugacaguccc

SEQ ID NO: 956202 - RNA, 19 nt, Artificial Sequence
  Description of Artificial Sequence: Synthetic oligonucleotide
  Sense strand starting at position 469 of SEQ ID NO: 913815
cauguuagccaugggauag

SEQ ID NO: 956203 - RNA, 19 nt, Artificial Sequence
  Description of Artificial Sequence: Synthetic oligonucleotide
  Antisense strand to SEQ ID NO: 956202
cuaucccauggcuaacaug

SEQ ID NO: 956204 - RNA, 19 nt, Artificial Sequence
  Description of Artificial Sequence: Synthetic oligonucleotide
  Sense strand starting at position 1867 of SEQ ID NO: 913815
ugccaucacccaugauaug

SEQ ID NO: 956205 - RNA, 19 nt, Artificial Sequence
  Description of Artificial Sequence: Synthetic oligonucleotide
  Antisense strand to SEQ ID NO: 956204
cauaucaugggugauggca

SEQ ID NO: 956206 - RNA, 19 nt, Artificial Sequence
  Description of Artificial Sequence: Synthetic oligonucleotide
  Sense strand starting at position 1326 of SEQ ID NO: 913815
cugggaucuggccagcgaa

SEQ ID NO: 956207 - RNA, 19 nt, Artificial Sequence
  Description of Artificial Sequence: Synthetic oligonucleotide
  Antisense strand to SEQ ID NO: 956206
uucgcuggccagaucccag

SEQ ID NO: 956208 - RNA, 19 nt, Artificial Sequence
  Description of Artificial Sequence: Synthetic oligonucleotide
  Sense strand starting at position 1452 of SEQ ID NO: 913815
gcaaguggccugggaaaga

SEQ ID NO: 956209 - RNA, 19 nt, Artificial Sequence
  Description of Artificial Sequence: Synthetic oligonucleotide
  Antisense strand to SEQ ID NO: 956208
ucuuucccaggccacuugc

SEQ ID NO: 956210 - RNA, 19 nt, Artificial Sequence
  Description of Artificial Sequence: Synthetic oligonucleotide
  Sense strand starting at position 2305 of SEQ ID NO: 913815
gacugucaucugcaaagca

SEQ ID NO: 956211 - RNA, 19 nt, Artificial Sequence
  Description of Artificial Sequence: Synthetic oligonucleotide
  Antisense strand to SEQ ID NO: 956210
ugcuuugcagaugacaguc

SEQ ID NO: 956212 - RNA, 19 nt, Artificial Sequence
  Description of Artificial Sequence: Synthetic oligonucleotide
  Sense strand starting at position 2301 of SEQ ID NO: 913815
augggacugucaucugcaa

SEQ ID NO: 956213 - RNA, 19 nt, Artificial Sequence
  Description of Artificial Sequence: Synthetic oligonucleotide
  Antisense strand to SEQ ID NO: 956212
uugcagaugacagucccau

SEQ ID NO: 956214 - RNA, 19 nt, Artificial Sequence
  Description of Artificial Sequence: Synthetic oligonucleotide
  Sense strand starting at position 343 of SEQ ID NO: 913815
aggcuucugacaugcagaa

SEQ ID NO: 956215 - RNA, 19 nt, Artificial Sequence
  Description of Artificial Sequence: Synthetic oligonucleotide
  Antisense strand to SEQ ID NO: 956214
uucugcaugucagaagccu

SEQ ID NO: 956216 - RNA, 19 nt, Artificial Sequence
  Description of Artificial Sequence: Synthetic oligonucleotide
  Sense strand starting at position 2090 of SEQ ID NO: 913815
uccugaggccaucggauaa

SEQ ID NO: 956217 - RNA, 19 nt, Artificial Sequence
  Description of Artificial Sequence: Synthetic oligonucleotide
  Antisense strand to SEQ ID NO: 956216
uuauccgauggccucagga

SEQ ID NO: 956218 - RNA, 19 nt, Artificial Sequence
  Description of Artificial Sequence: Synthetic oligonucleotide
  Sense strand starting at position 2410 of SEQ ID NO: 913815
uuuggaaauucuuuccugu

SEQ ID NO: 956219 - RNA, 19 nt, Artificial Sequence
  Description of Artificial Sequence: Synthetic oligonucleotide
  Antisense strand to SEQ ID NO: 956218
acaggaaagaauuuccaaa

SEQ ID NO: 956220 - RNA, 19 nt, Artificial Sequence
  Description of Artificial Sequence: Synthetic oligonucleotide
  Sense strand starting at position 3636 of SEQ ID NO: 913815
ggccuagaccagugaggua

SEQ ID NO: 956221 - RNA, 19 nt, Artificial Sequence
  Description of Artificial Sequence: Synthetic oligonucleotide
  Antisense strand to SEQ ID NO: 956220
uaccucacuggucuaggcc

SEQ ID NO: 956222 - RNA, 19 nt, Artificial Sequence
  Description of Artificial Sequence: Synthetic oligonucleotide
  Sense strand starting at position 483 of SEQ ID NO: 913815
gauagucaggcggguagaa

SEQ ID NO: 956223 - RNA, 19 nt, Artificial Sequence
  Description of Artificial Sequence: Synthetic oligonucleotide
  Antisense strand to SEQ ID NO: 956222
uucuacccgccugacuauc

SEQ ID NO: 956224 - RNA, 19 nt, Artificial Sequence
  Description of Artificial Sequence: Synthetic oligonucleotide
  Sense strand starting at position 839 of SEQ ID NO: 913815
aguugaugccuuggacacu

SEQ ID NO: 956225 - RNA, 19 nt, Artificial Sequence
  Description of Artificial Sequence: Synthetic oligonucleotide
  Antisense strand to SEQ ID NO: 956224
aguguccaaggcaucaacu

SEQ ID NO: 956226 - RNA, 19 nt, Artificial Sequence
  Description of Artificial Sequence: Synthetic oligonucleotide
  Sense strand starting at position 3005 of SEQ ID NO: 913815
guagcucagagaggucuua

SEQ ID NO: 956227 - RNA, 19 nt, Artificial Sequence
  Description of Artificial Sequence: Synthetic oligonucleotide
  Antisense strand to SEQ ID NO: 956226
uaagaccucucugagcuac

SEQ ID NO: 956228 - RNA, 19 nt, Artificial Sequence
  Description of Artificial Sequence: Synthetic oligonucleotide
  Sense strand starting at position 470 of SEQ ID NO: 913815
auguuagccaugggauagu

SEQ ID NO: 956229 - RNA, 19 nt, Artificial Sequence
  Description of Artificial Sequence: Synthetic oligonucleotide
  Antisense strand to SEQ ID NO: 956228
acuaucccauggcuaacau

SEQ ID NO: 956230 - RNA, 19 nt, Artificial Sequence
  Description of Artificial Sequence: Synthetic oligonucleotide
  Sense strand starting at position 3934 of SEQ ID NO: 913815
ugugaucucgaaggcauga

SEQ ID NO: 956231 - RNA, 19 nt, Artificial Sequence
  Description of Artificial Sequence: Synthetic oligonucleotide
  Antisense strand to SEQ ID NO: 956230
ucaugccuucgagaucaca

SEQ ID NO: 956232 - RNA, 19 nt, Artificial Sequence
  Description of Artificial Sequence: Synthetic oligonucleotide
  Sense strand starting at position 568 of SEQ ID NO: 913816
guggaacacuaccuugaaa

SEQ ID NO: 956233 - RNA, 19 nt, Artificial Sequence
  Description of Artificial Sequence: Synthetic oligonucleotide
  Antisense strand to SEQ ID NO: 956232
uuucaagguaguguuccac

SEQ ID NO: 956234 - RNA, 19 nt, Artificial Sequence
  Description of Artificial Sequence: Synthetic oligonucleotide
  Sense strand starting at position 1148 of SEQ ID NO: 913816
agccuauuggaggauaggu

SEQ ID NO: 956235 - RNA, 19 nt, Artificial Sequence
  Description of Artificial Sequence: Synthetic oligonucleotide
  Antisense strand to SEQ ID NO: 956234
accuauccuccaauaggcu

SEQ ID NO: 956236 - RNA, 19 nt, Artificial Sequence
  Description of Artificial Sequence: Synthetic oligonucleotide
  Sense strand starting at position 1588 of SEQ ID NO: 913816
ugauccuggcauuagacau

SEQ ID NO: 956237 - RNA, 19 nt, Artificial Sequence
  Description of Artificial Sequence: Synthetic oligonucleotide
  Antisense strand to SEQ ID NO: 956236
augucuaaugccaggauca

SEQ ID NO: 956238 - RNA, 19 nt, Artificial Sequence
  Description of Artificial Sequence: Synthetic oligonucleotide
  Sense strand starting at position 2786 of SEQ ID NO: 913816
ucuugagaucuuuggaaug

SEQ ID NO: 956239 - RNA, 19 nt, Artificial Sequence
  Description of Artificial Sequence: Synthetic oligonucleotide
  Antisense strand to SEQ ID NO: 956238
cauuccaaagaucucaaga

SEQ ID NO: 956240 - RNA, 19 nt, Artificial Sequence
  Description of Artificial Sequence: Synthetic oligonucleotide
  Sense strand starting at position 3620 of SEQ ID NO: 913816
ggcuuugucaggcuuguuu

SEQ ID NO: 956241 - RNA, 19 nt, Artificial Sequence
  Description of Artificial Sequence: Synthetic oligonucleotide
  Antisense strand to SEQ ID NO: 956240
aaacaagccugacaaagcc

SEQ ID NO: 956242 - RNA, 19 nt, Artificial Sequence
  Description of Artificial Sequence: Synthetic oligonucleotide
  Sense strand starting at position 929 of SEQ ID NO: 913816
gacagagggcccugacaua

SEQ ID NO: 956243 - RNA, 19 nt, Artificial Sequence
  Description of Artificial Sequence: Synthetic oligonucleotide
  Antisense strand to SEQ ID NO: 956242
uaugucagggcccucuguc

SEQ ID NO: 956244 - RNA, 19 nt, Artificial Sequence
  Description of Artificial Sequence: Synthetic oligonucleotide
  Sense strand starting at position 2791 of SEQ ID NO: 913816
agaucuuuggaauguaauu

SEQ ID NO: 956245 - RNA, 19 nt, Artificial Sequence
  Description of Artificial Sequence: Synthetic oligonucleotide
  Antisense strand to SEQ ID NO: 956244
aauuacauuccaaagaucu

SEQ ID NO: 956246 - RNA, 19 nt, Artificial Sequence
  Description of Artificial Sequence: Synthetic oligonucleotide
  Sense strand starting at position 2004 of SEQ ID NO: 913816
auugguaauccaugaugau

SEQ ID NO: 956247 - RNA, 19 nt, Artificial Sequence
  Description of Artificial Sequence: Synthetic oligonucleotide
  Antisense strand to SEQ ID NO: 956246
aucaucauggauuaccaau

SEQ ID NO: 956248 - RNA, 19 nt, Artificial Sequence
  Description of Artificial Sequence: Synthetic oligonucleotide
  Sense strand starting at position 1350 of SEQ ID NO: 913816
gguggaucacacugauauu

SEQ ID NO: 956249 - RNA, 19 nt, Artificial Sequence
  Description of Artificial Sequence: Synthetic oligonucleotide
  Antisense strand to SEQ ID NO: 956248
aauaucagugugauccacc

SEQ ID NO: 956250 - RNA, 19 nt, Artificial Sequence
  Description of Artificial Sequence: Synthetic oligonucleotide
  Sense strand starting at position 1476 of SEQ ID NO: 913816
aaagguucccagggaucuu

SEQ ID NO: 956251 - RNA, 19 nt, Artificial Sequence
  Description of Artificial Sequence: Synthetic oligonucleotide
  Antisense strand to SEQ ID NO: 956250
aagaucccugggaaccuuu

SEQ ID NO: 956252 - RNA, 19 nt, Artificial Sequence
  Description of Artificial Sequence: Synthetic oligonucleotide
  Sense strand starting at position 1206 of SEQ ID NO: 913816
cagggagugcaucaaucuu

SEQ ID NO: 956253 - RNA, 19 nt, Artificial Sequence
  Description of Artificial Sequence: Synthetic oligonucleotide
  Antisense strand to SEQ ID NO: 956252
aagauugaugcacucccug

SEQ ID NO: 956254 - RNA, 19 nt, Artificial Sequence
  Description of Artificial Sequence: Synthetic oligonucleotide
  Sense strand starting at position 1592 of SEQ ID NO: 913816
ccuggcauuagacauguga

SEQ ID NO: 956255 - RNA, 19 nt, Artificial Sequence
  Description of Artificial Sequence: Synthetic oligonucleotide
  Antisense strand to SEQ ID NO: 956254
ucacaugucuaaugccagg

SEQ ID NO: 956256 - RNA, 19 nt, Artificial Sequence
  Description of Artificial Sequence: Synthetic oligonucleotide
  Sense strand starting at position 3384 of SEQ ID NO: 913816
gagagcuaucggcacaaag

SEQ ID NO: 956257 - RNA, 19 nt, Artificial Sequence
  Description of Artificial Sequence: Synthetic oligonucleotide
  Antisense strand to SEQ ID NO: 956256
cuuugugccgauagcucuc

SEQ ID NO: 956258 - RNA, 19 nt, Artificial Sequence
  Description of Artificial Sequence: Synthetic oligonucleotide
  Sense strand starting at position 531 of SEQ ID NO: 913816
agagaucuguaugcaaaca

SEQ ID NO: 956259 - RNA, 19 nt, Artificial Sequence
  Description of Artificial Sequence: Synthetic oligonucleotide
  Antisense strand to SEQ ID NO: 956258
uguuugcauacagaucucu

SEQ ID NO: 956260 - RNA, 19 nt, Artificial Sequence
  Description of Artificial Sequence: Synthetic oligonucleotide
  Sense strand starting at position 671 of SEQ ID NO: 913816
cucuaaugaggauggguuu

SEQ ID NO: 956261 - RNA, 19 nt, Artificial Sequence
  Description of Artificial Sequence: Synthetic oligonucleotide
  Antisense strand to SEQ ID NO: 956260
aaacccauccucauuagag

SEQ ID NO: 956262 - RNA, 19 nt, Artificial Sequence
  Description of Artificial Sequence: Synthetic oligonucleotide
  Sense strand starting at position 3146 of SEQ ID NO: 913816
auugaaauuccaugaguuc

SEQ ID NO: 956263 - RNA, 19 nt, Artificial Sequence
  Description of Artificial Sequence: Synthetic oligonucleotide
  Antisense strand to SEQ ID NO: 956262
gaacucauggaauuucaau

SEQ ID NO: 956264 - RNA, 19 nt, Artificial Sequence
  Description of Artificial Sequence: Synthetic oligonucleotide
  Sense strand starting at position 257 of SEQ ID NO: 913816
gccaauaaggucugaacaa

SEQ ID NO: 956265 - RNA, 19 nt, Artificial Sequence
  Description of Artificial Sequence: Synthetic oligonucleotide
  Antisense strand to SEQ ID NO: 956264
uuguucagaccuuauuggc

SEQ ID NO: 956266 - RNA, 19 nt, Artificial Sequence
  Description of Artificial Sequence: Synthetic oligonucleotide
  Sense strand starting at position 530 of SEQ ID NO: 913816
aagagaucuguaugcaaac

SEQ ID NO: 956267 - RNA, 19 nt, Artificial Sequence
  Description of Artificial Sequence: Synthetic oligonucleotide
  Antisense strand to SEQ ID NO: 956266
guuugcauacagaucucuu

SEQ ID NO: 956268 - RNA, 19 nt, Artificial Sequence
  Description of Artificial Sequence: Synthetic oligonucleotide
  Sense strand starting at position 1797 of SEQ ID NO: 913816
cuaacaucuggccagcaga

SEQ ID NO: 956269 - RNA, 19 nt, Artificial Sequence
  Description of Artificial Sequence: Synthetic oligonucleotide
  Antisense strand to SEQ ID NO: 956268
ucugcuggccagauguuag

SEQ ID NO: 956270 - RNA, 19 nt, Artificial Sequence
  Description of Artificial Sequence: Synthetic oligonucleotide
  Sense strand starting at position 3242 of SEQ ID NO: 913816
ggaaaugggucaccagcua

SEQ ID NO: 956271 - RNA, 19 nt, Artificial Sequence
  Description of Artificial Sequence: Synthetic oligonucleotide
  Antisense strand to SEQ ID NO: 956270
uagcuggugacccauuucc

SEQ ID NO: 956272 - RNA, 19 nt, Artificial Sequence
  Description of Artificial Sequence: Synthetic oligonucleotide
  Sense strand starting at position 3858 of SEQ ID NO: 913816
agaaucaucuaggccacuu

SEQ ID NO: 956273 - RNA, 19 nt, Artificial Sequence
  Description of Artificial Sequence: Synthetic oligonucleotide
  Antisense strand to SEQ ID NO: 956272
aaguggccuagaugauucu

SEQ ID NO: 956274 - RNA, 19 nt, Artificial Sequence
  Description of Artificial Sequence: Synthetic oligonucleotide
  Sense strand starting at position 1517 of SEQ ID NO: 913816
ugcagaguccuguacaaga

SEQ ID NO: 956275 - RNA, 19 nt, Artificial Sequence
  Description of Artificial Sequence: Synthetic oligonucleotide
  Antisense strand to SEQ ID NO: 956274
ucuuguacaggacucugca

SEQ ID NO: 956276 - RNA, 19 nt, Artificial Sequence
  Description of Artificial Sequence: Synthetic oligonucleotide
  Sense strand starting at position 769 of SEQ ID NO: 913816
gggauaaguccaugcaaug

SEQ ID NO: 956277 - RNA, 19 nt, Artificial Sequence
  Description of Artificial Sequence: Synthetic oligonucleotide
  Antisense strand to SEQ ID NO: 956276
cauugcauggacuuauccc

SEQ ID NO: 956278 - RNA, 19 nt, Artificial Sequence
  Description of Artificial Sequence: Synthetic oligonucleotide
  Sense strand starting at position 2110 of SEQ ID NO: 913816
ggaucaaugucucuuaacu

SEQ ID NO: 956279 - RNA, 19 nt, Artificial Sequence
  Description of Artificial Sequence: Synthetic oligonucleotide
  Antisense strand to SEQ ID NO: 956278
aguuaagagacauugaucc

SEQ ID NO: 956280 - RNA, 19 nt, Artificial Sequence
  Description of Artificial Sequence: Synthetic oligonucleotide
  Sense strand starting at position 1396 of SEQ ID NO: 913816
ggugcucauguugaugaaa

SEQ ID NO: 956281 - RNA, 19 nt, Artificial Sequence
  Description of Artificial Sequence: Synthetic oligonucleotide
  Antisense strand to SEQ ID NO: 956280
uuucaucaacaugagcacc

SEQ ID NO: 956282 - RNA, 19 nt, Artificial Sequence
  Description of Artificial Sequence: Synthetic oligonucleotide
  Sense strand starting at position 3130 of SEQ ID NO: 913816
gcacuuccaguugaauauu

SEQ ID NO: 956283 - RNA, 19 nt, Artificial Sequence
  Description of Artificial Sequence: Synthetic oligonucleotide
  Antisense strand to SEQ ID NO: 956282
aauauucaacuggaagugc

SEQ ID NO: 956284 - RNA, 19 nt, Artificial Sequence
  Description of Artificial Sequence: Synthetic oligonucleotide
  Sense strand starting at position 735 of SEQ ID NO: 913816
guggcuuaccaucaaauuc

SEQ ID NO: 956285 - RNA, 19 nt, Artificial Sequence
  Description of Artificial Sequence: Synthetic oligonucleotide
  Antisense strand to SEQ ID NO: 956284
gaauuugaugguaagccac

SEQ ID NO: 956286 - RNA, 19 nt, Artificial Sequence
  Description of Artificial Sequence: Synthetic oligonucleotide
  Sense strand starting at position 1594 of SEQ ID NO: 913816
uggcauuagacaugugaau

SEQ ID NO: 956287 - RNA, 19 nt, Artificial Sequence
  Description of Artificial Sequence: Synthetic oligonucleotide
  Antisense strand to SEQ ID NO: 956286
auucacaugucuaaugcca

SEQ ID NO: 956288 - RNA, 19 nt, Artificial Sequence
  Description of Artificial Sequence: Synthetic oligonucleotide
  Sense strand starting at position 488 of SEQ ID NO: 913816
ccugaaauauguguuuaua

SEQ ID NO: 956289 - RNA, 19 nt, Artificial Sequence
  Description of Artificial Sequence: Synthetic oligonucleotide
  Antisense strand to SEQ ID NO: 956288
uauaaacacauauuucagg

SEQ ID NO: 956290 - RNA, 19 nt, Artificial Sequence
  Description of Artificial Sequence: Synthetic oligonucleotide
  Sense strand starting at position 3153 of SEQ ID NO: 913816
uuccaugaguuccuuuaag

SEQ ID NO: 956291 - RNA, 19 nt, Artificial Sequence
  Description of Artificial Sequence: Synthetic oligonucleotide
  Antisense strand to SEQ ID NO: 956290
cuuaaaggaacucauggaa

SEQ ID NO: 956292 - RNA, 19 nt, Artificial Sequence
  Description of Artificial Sequence: Synthetic oligonucleotide
  Sense strand starting at position 3845 of SEQ ID NO: 913816
gcaugcuaucucuagaauc

SEQ ID NO: 956293 - RNA, 19 nt, Artificial Sequence
  Description of Artificial Sequence: Synthetic oligonucleotide
  Antisense strand to SEQ ID NO: 956292
gauucuagagauagcaugc

SEQ ID NO: 956294 - RNA, 19 nt, Artificial Sequence
  Description of Artificial Sequence: Synthetic oligonucleotide
  Sense strand starting at position 2152 of SEQ ID NO: 913816
uguaauucuugagucugaa

SEQ ID NO: 956295 - RNA, 19 nt, Artificial Sequence
  Description of Artificial Sequence: Synthetic oligonucleotide
  Antisense strand to SEQ ID NO: 956294
uucagacucaagaauuaca

SEQ ID NO: 956296 - RNA, 19 nt, Artificial Sequence
  Description of Artificial Sequence: Synthetic oligonucleotide
  Sense strand starting at position 2856 of SEQ ID NO: 913816
cucauaguguuuccaggaa

SEQ ID NO: 956297 - RNA, 19 nt, Artificial Sequence
  Description of Artificial Sequence: Synthetic oligonucleotide
  Antisense strand to SEQ ID NO: 956296
uuccuggaaacacuaugag

SEQ ID NO: 956298 - RNA, 19 nt, Artificial Sequence
  Description of Artificial Sequence: Synthetic oligonucleotide
  Sense strand starting at position 677 of SEQ ID NO: 913816
ugaggauggguuugcuaca

SEQ ID NO: 956299 - RNA, 19 nt, Artificial Sequence
  Description of Artificial Sequence: Synthetic oligonucleotide
  Antisense strand to SEQ ID NO: 956298
uguagcaaacccauccuca

SEQ ID NO: 956300 - RNA, 19 nt, Artificial Sequence
  Description of Artificial Sequence: Synthetic oligonucleotide
  Sense strand starting at position 96 of SEQ ID NO: 913816
uugugauaugcccaacccu

SEQ ID NO: 956301 - RNA, 19 nt, Artificial Sequence
  Description of Artificial Sequence: Synthetic oligonucleotide
  Antisense strand to SEQ ID NO: 956300
aggguugggcauaucacaa

SEQ ID NO: 956302 - RNA, 19 nt, Artificial Sequence
  Description of Artificial Sequence: Synthetic oligonucleotide
  Sense strand starting at position 2753 of SEQ ID NO: 913816
caaggagucuucucucuug

SEQ ID NO: 956303 - RNA, 19 nt, Artificial Sequence
  Description of Artificial Sequence: Synthetic oligonucleotide
  Antisense strand to SEQ ID NO: 956302
caagagagaagacuccuug

SEQ ID NO: 956304 - RNA, 19 nt, Artificial Sequence
  Description of Artificial Sequence: Synthetic oligonucleotide
  Sense strand starting at position 3945 of SEQ ID NO: 913816
gggaguggcucucuuggaa

SEQ ID NO: 956305 - RNA, 19 nt, Artificial Sequence
  Description of Artificial Sequence: Synthetic oligonucleotide
  Antisense strand to SEQ ID NO: 956304
uuccaagagagccacuccc

SEQ ID NO: 956306 - RNA, 19 nt, Artificial Sequence
  Description of Artificial Sequence: Synthetic oligonucleotide
  Sense strand starting at position 594 of SEQ ID NO: 913816
uguucuagugagcauaauu

SEQ ID NO: 956307 - RNA, 19 nt, Artificial Sequence
  Description of Artificial Sequence: Synthetic oligonucleotide
  Antisense strand to SEQ ID NO: 956306
aauuaugcucacuagaaca

SEQ ID NO: 956308 - RNA, 19 nt, Artificial Sequence
  Description of Artificial Sequence: Synthetic oligonucleotide
  Sense strand starting at position 3053 of SEQ ID NO: 913816
acaguuggugcccauuaau

SEQ ID NO: 956309 - RNA, 19 nt, Artificial Sequence
  Description of Artificial Sequence: Synthetic oligonucleotide
  Antisense strand to SEQ ID NO: 956308
auuaaugggcaccaacugu

SEQ ID NO: 956310 - RNA, 19 nt, Artificial Sequence
  Description of Artificial Sequence: Synthetic oligonucleotide
  Sense strand starting at position 3382 of SEQ ID NO: 913816
gagagagcuaucggcacaa

SEQ ID NO: 956311 - RNA, 19 nt, Artificial Sequence
  Description of Artificial Sequence: Synthetic oligonucleotide
  Antisense strand to SEQ ID NO: 956310
uugugccgauagcucucuc

SEQ ID NO: 956312 - RNA, 19 nt, Artificial Sequence
  Description of Artificial Sequence: Synthetic oligonucleotide
  Sense strand starting at position 950 of SEQ ID NO: 913817
cagagaaauguguggaaug

SEQ ID NO: 956313 - RNA, 19 nt, Artificial Sequence
  Description of Artificial Sequence: Synthetic oligonucleotide
  Antisense strand to SEQ ID NO: 956312
cauuccacacauuucucug

SEQ ID NO: 956314 - RNA, 19 nt, Artificial Sequence
  Description of Artificial Sequence: Synthetic oligonucleotide
  Sense strand starting at position 2445 of SEQ ID NO: 913817
gagaauaagguggguacua

SEQ ID NO: 956315 - RNA, 19 nt, Artificial Sequence
  Description of Artificial Sequence: Synthetic oligonucleotide
  Antisense strand to SEQ ID NO: 956314
uaguacccaccuuauucuc

SEQ ID NO: 956316 - RNA, 19 nt, Artificial Sequence
  Description of Artificial Sequence: Synthetic oligonucleotide
  Sense strand starting at position 481 of SEQ ID NO: 913817
aauguaauaggaugggagu

SEQ ID NO: 956317 - RNA, 19 nt, Artificial Sequence
  Description of Artificial Sequence: Synthetic oligonucleotide
  Antisense strand to SEQ ID NO: 956316
acucccauccuauuacauu

SEQ ID NO: 956318 - RNA, 19 nt, Artificial Sequence
  Description of Artificial Sequence: Synthetic oligonucleotide
  Sense strand starting at position 1183 of SEQ ID NO: 913817
cauggaauugggugagauc

SEQ ID NO: 956319 - RNA, 19 nt, Artificial Sequence
  Description of Artificial Sequence: Synthetic oligonucleotide
  Antisense strand to SEQ ID NO: 956318
gaucucacccaauuccaug

SEQ ID NO: 956320 - RNA, 19 nt, Artificial Sequence
  Description of Artificial Sequence: Synthetic oligonucleotide
  Sense strand starting at position 2144 of SEQ ID NO: 913817
auagauugucagcaaacug

SEQ ID NO: 956321 - RNA, 19 nt, Artificial Sequence
  Description of Artificial Sequence: Synthetic oligonucleotide
  Antisense strand to SEQ ID NO: 956320
caguuugcugacaaucuau

SEQ ID NO: 956322 - RNA, 19 nt, Artificial Sequence
  Description of Artificial Sequence: Synthetic oligonucleotide
  Sense strand starting at position 3335 of SEQ ID NO: 913817
guugauauagcacaugaau

SEQ ID NO: 956323 - RNA, 19 nt, Artificial Sequence
  Description of Artificial Sequence: Synthetic oligonucleotide
  Antisense strand to SEQ ID NO: 956322
auucaugugcuauaucaac

SEQ ID NO: 956324 - RNA, 19 nt, Artificial Sequence
  Description of Artificial Sequence: Synthetic oligonucleotide
  Sense strand starting at position 136 of SEQ ID NO: 913817
gggaaccuaagcuauguua

SEQ ID NO: 956325 - RNA, 19 nt, Artificial Sequence
  Description of Artificial Sequence: Synthetic oligonucleotide
  Antisense strand to SEQ ID NO: 956324
uaacauagcuuagguuccc

SEQ ID NO: 956326 - RNA, 19 nt, Artificial Sequence
  Description of Artificial Sequence: Synthetic oligonucleotide
  Sense strand starting at position 2767 of SEQ ID NO: 913817
agggaagcagaaugucaau

SEQ ID NO: 956327 - RNA, 19 nt, Artificial Sequence
  Description of Artificial Sequence: Synthetic oligonucleotide
  Antisense strand to SEQ ID NO: 956326
auugacauucugcuucccu

SEQ ID NO: 956328 - RNA, 19 nt, Artificial Sequence
  Description of Artificial Sequence: Synthetic oligonucleotide
  Sense strand starting at position 3544 of SEQ ID NO: 913817
acaguaaaccaaugacagu

SEQ ID NO: 956329 - RNA, 19 nt, Artificial Sequence
  Description of Artificial Sequence: Synthetic oligonucleotide
  Antisense strand to SEQ ID NO: 956328
acugucauugguuuacugu

SEQ ID NO: 956330 - RNA, 19 nt, Artificial Sequence
  Description of Artificial Sequence: Synthetic oligonucleotide
  Sense strand starting at position 876 of SEQ ID NO: 913817
gcaagaguaggauggacau

SEQ ID NO: 956331 - RNA, 19 nt, Artificial Sequence
  Description of Artificial Sequence: Synthetic oligonucleotide
  Antisense strand to SEQ ID NO: 956330
auguccauccuacucuugc

SEQ ID NO: 956332 - RNA, 19 nt, Artificial Sequence
  Description of Artificial Sequence: Synthetic oligonucleotide
  Sense strand starting at position 1698 of SEQ ID NO: 913817
gguucuggaacuuggagau

SEQ ID NO: 956333 - RNA, 19 nt, Artificial Sequence
  Description of Artificial Sequence: Synthetic oligonucleotide
  Antisense strand to SEQ ID NO: 956332
aucuccaaguuccagaacc

SEQ ID NO: 956334 - RNA, 19 nt, Artificial Sequence
  Description of Artificial Sequence: Synthetic oligonucleotide
  Sense strand starting at position 1171 of SEQ ID NO: 913817
ggaguccuuggccauggaa

SEQ ID NO: 956335 - RNA, 19 nt, Artificial Sequence
  Description of Artificial Sequence: Synthetic oligonucleotide
  Antisense strand to SEQ ID NO: 956334
uuccauggccaaggacucc

SEQ ID NO: 956336 - RNA, 19 nt, Artificial Sequence
  Description of Artificial Sequence: Synthetic oligonucleotide
  Sense strand starting at position 3919 of SEQ ID NO: 913817
gaccaaucuggccacaagu

SEQ ID NO: 956337 - RNA, 19 nt, Artificial Sequence
  Description of Artificial Sequence: Synthetic oligonucleotide
  Antisense strand to SEQ ID NO: 956336
acuuguggccagauugguc

SEQ ID NO: 956338 - RNA, 19 nt, Artificial Sequence
  Description of Artificial Sequence: Synthetic oligonucleotide
  Sense strand starting at position 708 of SEQ ID NO: 913817
acaaacucaugcucugaga

SEQ ID NO: 956339 - RNA, 19 nt, Artificial Sequence
  Description of Artificial Sequence: Synthetic oligonucleotide
  Antisense strand to SEQ ID NO: 956338
ucucagagcaugaguuugu

SEQ ID NO: 956340 - RNA, 19 nt, Artificial Sequence
  Description of Artificial Sequence: Synthetic oligonucleotide
  Sense strand starting at position 3400 of SEQ ID NO: 913817
cccagugucaaagggaaau

SEQ ID NO: 956341 - RNA, 19 nt, Artificial Sequence
  Description of Artificial Sequence: Synthetic oligonucleotide
  Antisense strand to SEQ ID NO: 956340
auuucccuuugacacuggg

SEQ ID NO: 956342 - RNA, 19 nt, Artificial Sequence
  Description of Artificial Sequence: Synthetic oligonucleotide
  Sense strand starting at position 1206 of SEQ ID NO: 913817
ugggaaagauggucuuucu

SEQ ID NO: 956343 - RNA, 19 nt, Artificial Sequence
  Description of Artificial Sequence: Synthetic oligonucleotide
  Antisense strand to SEQ ID NO: 956342
agaaagaccaucuuuccca

SEQ ID NO: 956344 - RNA, 19 nt, Artificial Sequence
  Description of Artificial Sequence: Synthetic oligonucleotide
  Sense strand starting at position 801 of SEQ ID NO: 913817
ugaaaugccagugauagug

SEQ ID NO: 956345 - RNA, 19 nt, Artificial Sequence
  Description of Artificial Sequence: Synthetic oligonucleotide
  Antisense strand to SEQ ID NO: 956344
cacuaucacuggcauuuca

SEQ ID NO: 956346 - RNA, 19 nt, Artificial Sequence
  Description of Artificial Sequence: Synthetic oligonucleotide
  Sense strand starting at position 3412 of SEQ ID NO: 913817
gggaaauguguacaagccu

SEQ ID NO: 956347 - RNA, 19 nt, Artificial Sequence
  Description of Artificial Sequence: Synthetic oligonucleotide
  Antisense strand to SEQ ID NO: 956346
aggcuuguacacauuuccc

SEQ ID NO: 956348 - RNA, 19 nt, Artificial Sequence
  Description of Artificial Sequence: Synthetic oligonucleotide
  Sense strand starting at position 1632 of SEQ ID NO: 913817
uggucaucuggccaaugga

SEQ ID NO: 956349 - RNA, 19 nt, Artificial Sequence
  Description of Artificial Sequence: Synthetic oligonucleotide
  Antisense strand to SEQ ID NO: 956348
uccauuggccagaugacca

SEQ ID NO: 956350 - RNA, 19 nt, Artificial Sequence
  Description of Artificial Sequence: Synthetic oligonucleotide
  Sense strand starting at position 536 of SEQ ID NO: 913817
agguuuagccaagaaagcu

SEQ ID NO: 956351 - RNA, 19 nt, Artificial Sequence
  Description of Artificial Sequence: Synthetic oligonucleotide
  Antisense strand to SEQ ID NO: 956350
agcuuucuuggcuaaaccu

SEQ ID NO: 956352 - RNA, 19 nt, Artificial Sequence
  Description of Artificial Sequence: Synthetic oligonucleotide
  Sense strand starting at position 2650 of SEQ ID NO: 913817
ggcaaagcucauggagaau

SEQ ID NO: 956353 - RNA, 19 nt, Artificial Sequence
  Description of Artificial Sequence: Synthetic oligonucleotide
  Antisense strand to SEQ ID NO: 956352
auucuccaugagcuuugcc

SEQ ID NO: 956354 - RNA, 19 nt, Artificial Sequence
  Description of Artificial Sequence: Synthetic oligonucleotide
  Sense strand starting at position 1950 of SEQ ID NO: 913817
uauuguucugauuggauag

SEQ ID NO: 956355 - RNA, 19 nt, Artificial Sequence
  Description of Artificial Sequence: Synthetic oligonucleotide
  Antisense strand to SEQ ID NO: 956354
cuauccaaucagaacaaua

SEQ ID NO: 956356 - RNA, 19 nt, Artificial Sequence
  Description of Artificial Sequence: Synthetic oligonucleotide
  Sense strand starting at position 595 of SEQ ID NO: 913817
uugcuuugggccuaagaag

SEQ ID NO: 956357 - RNA, 19 nt, Artificial Sequence
  Description of Artificial Sequence: Synthetic oligonucleotide
  Antisense strand to SEQ ID NO: 956356
cuucuuaggcccaaagcaa

SEQ ID NO: 956358 - RNA, 19 nt, Artificial Sequence
  Description of Artificial Sequence: Synthetic oligonucleotide
  Sense strand starting at position 3495 of SEQ ID NO: 913817
ugcgaaaggccugauggau

SEQ ID NO: 956359 - RNA, 19 nt, Artificial Sequence
  Description of Artificial Sequence: Synthetic oligonucleotide
  Antisense strand to SEQ ID NO: 956358
auccaucaggccuuucgca

SEQ ID NO: 956360 - RNA, 19 nt, Artificial Sequence
  Description of Artificial Sequence: Synthetic oligonucleotide
  Sense strand starting at position 3531 of SEQ ID NO: 913817
gaugguggucuccacagua

SEQ ID NO: 956361 - RNA, 19 nt, Artificial Sequence
  Description of Artificial Sequence: Synthetic oligonucleotide
  Antisense strand to SEQ ID NO: 956360
uacuguggagaccaccauc

SEQ ID NO: 956362 - RNA, 19 nt, Artificial Sequence
  Description of Artificial Sequence: Synthetic oligonucleotide
  Sense strand starting at position 1927 of SEQ ID NO: 913817
uuaguaagggaguguuaga

SEQ ID NO: 956363 - RNA, 19 nt, Artificial Sequence
  Description of Artificial Sequence: Synthetic oligonucleotide
  Antisense strand to SEQ ID NO: 956362
ucuaacacucccuuacuaa

SEQ ID NO: 956364 - RNA, 19 nt, Artificial Sequence
  Description of Artificial Sequence: Synthetic oligonucleotide
  Sense strand starting at position 1966 of SEQ ID NO: 913817
uagugaucagugugaggaa

SEQ ID NO: 956365 - RNA, 19 nt, Artificial Sequence
  Description of Artificial Sequence: Synthetic oligonucleotide
  Antisense strand to SEQ ID NO: 956364
uuccucacacugaucacua

SEQ ID NO: 956366 - RNA, 19 nt, Artificial Sequence
  Description of Artificial Sequence: Synthetic oligonucleotide
  Sense strand starting at position 1964 of SEQ ID NO: 913817
gauagugaucagugugagg

SEQ ID NO: 956367 - RNA, 19 nt, Artificial Sequence
  Description of Artificial Sequence: Synthetic oligonucleotide
  Antisense strand to SEQ ID NO: 956366
ccucacacugaucacuauc

SEQ ID NO: 956368 - RNA, 19 nt, Artificial Sequence
  Description of Artificial Sequence: Synthetic oligonucleotide
  Sense strand starting at position 3372 of SEQ ID NO: 913817
gugggaauauaguuguaug

SEQ ID NO: 956369 - RNA, 19 nt, Artificial Sequence
  Description of Artificial Sequence: Synthetic oligonucleotide
  Antisense strand to SEQ ID NO: 956368
cauacaacuauauucccac

SEQ ID NO: 956370 - RNA, 19 nt, Artificial Sequence
  Description of Artificial Sequence: Synthetic oligonucleotide
  Sense strand starting at position 1943 of SEQ ID NO: 913817
agaaguuuauuguucugau

SEQ ID NO: 956371 - RNA, 19 nt, Artificial Sequence
  Description of Artificial Sequence: Synthetic oligonucleotide
  Antisense strand to SEQ ID NO: 956370
aucagaacaauaaacuucu

SEQ ID NO: 956372 - RNA, 19 nt, Artificial Sequence
  Description of Artificial Sequence: Synthetic oligonucleotide
  Sense strand starting at position 1768 of SEQ ID NO: 913817
gucacuaaggcgcagaaua

SEQ ID NO: 956373 - RNA, 19 nt, Artificial Sequence
  Description of Artificial Sequence: Synthetic oligonucleotide
  Antisense strand to SEQ ID NO: 956372
uauucugcgccuuagugac

SEQ ID NO: 956374 - RNA, 19 nt, Artificial Sequence
  Description of Artificial Sequence: Synthetic oligonucleotide
  Sense strand starting at position 1237 of SEQ ID NO: 913817
ggccauguucuugauucua

SEQ ID NO: 956375 - RNA, 19 nt, Artificial Sequence
  Description of Artificial Sequence: Synthetic oligonucleotide
  Antisense strand to SEQ ID NO: 956374
uagaaucaagaacauggcc

SEQ ID NO: 956376 - RNA, 19 nt, Artificial Sequence
  Description of Artificial Sequence: Synthetic oligonucleotide
  Sense strand starting at position 1872 of SEQ ID NO: 913817
ccuugagggugaucuucuu

SEQ ID NO: 956377 - RNA, 19 nt, Artificial Sequence
  Description of Artificial Sequence: Synthetic oligonucleotide
  Antisense strand to SEQ ID NO: 956376
aagaagaucacccucaagg

SEQ ID NO: 956378 - RNA, 19 nt, Artificial Sequence
  Description of Artificial Sequence: Synthetic oligonucleotide
  Sense strand starting at position 3820 of SEQ ID NO: 913817
aaguaaagccuugggcaga

SEQ ID NO: 956379 - RNA, 19 nt, Artificial Sequence
  Description of Artificial Sequence: Synthetic oligonucleotide
  Antisense strand to SEQ ID NO: 956378
ucugcccaaggcuuuacuu

SEQ ID NO: 956380 - RNA, 19 nt, Artificial Sequence
  Description of Artificial Sequence: Synthetic oligonucleotide
  Sense strand starting at position 1960 of SEQ ID NO: 913817
auuggauagugaucagugu

SEQ ID NO: 956381 - RNA, 19 nt, Artificial Sequence
  Description of Artificial Sequence: Synthetic oligonucleotide
  Antisense strand to SEQ ID NO: 956380
acacugaucacuauccaau

SEQ ID NO: 956382 - RNA, 19 nt, Artificial Sequence
  Description of Artificial Sequence: Synthetic oligonucleotide
  Sense strand starting at position 1951 of SEQ ID NO: 913817
auuguucugauuggauagu

SEQ ID NO: 956383 - RNA, 19 nt, Artificial Sequence
  Description of Artificial Sequence: Synthetic oligonucleotide
  Antisense strand to SEQ ID NO: 956382
acuauccaaucagaacaau

SEQ ID NO: 956384 - RNA, 19 nt, Artificial Sequence
  Description of Artificial Sequence: Synthetic oligonucleotide
  Sense strand starting at position 2773 of SEQ ID NO: 913817
gcagaaugucaaugugaug

SEQ ID NO: 956385 - RNA, 19 nt, Artificial Sequence
  Description of Artificial Sequence: Synthetic oligonucleotide
  Antisense strand to SEQ ID NO: 956384
caucacauugacauucugc

SEQ ID NO: 956386 - RNA, 19 nt, Artificial Sequence
  Description of Artificial Sequence: Synthetic oligonucleotide
  Sense strand starting at position 1197 of SEQ ID NO: 913817
agaucagauugggaaagau

SEQ ID NO: 956387 - RNA, 19 nt, Artificial Sequence
  Description of Artificial Sequence: Synthetic oligonucleotide
  Antisense strand to SEQ ID NO: 956386
aucuuucccaaucugaucu

SEQ ID NO: 956388 - RNA, 19 nt, Artificial Sequence
  Description of Artificial Sequence: Synthetic oligonucleotide
  Sense strand starting at position 3253 of SEQ ID NO: 913817
cucuguucccugcagggau

SEQ ID NO: 956389 - RNA, 19 nt, Artificial Sequence
  Description of Artificial Sequence: Synthetic oligonucleotide
  Antisense strand to SEQ ID NO: 956388
aucccugcagggaacagag

SEQ ID NO: 956390 - RNA, 19 nt, Artificial Sequence
  Description of Artificial Sequence: Synthetic oligonucleotide
  Sense strand starting at position 2920 of SEQ ID NO: 913817
gggcguaaauuaucuaaua

SEQ ID NO: 956391 - RNA, 19 nt, Artificial Sequence
  Description of Artificial Sequence: Synthetic oligonucleotide
  Antisense strand to SEQ ID NO: 956390
uauuagauaauuuacgccc

SEQ ID NO: 956392 - RNA, 19 nt, Artificial Sequence
  Description of Artificial Sequence: Synthetic oligonucleotide
  Sense strand starting at position 200 of SEQ ID NO: 913818
cuggguaugggcuagaaca

SEQ ID NO: 956393 - RNA, 19 nt, Artificial Sequence
  Description of Artificial Sequence: Synthetic oligonucleotide
  Antisense strand to SEQ ID NO: 956392
uguucuagcccauacccag

SEQ ID NO: 956394 - RNA, 19 nt, Artificial Sequence
  Description of Artificial Sequence: Synthetic oligonucleotide
  Sense strand starting at position 441 of SEQ ID NO: 913818
agcgaacuaagagaaguuu

SEQ ID NO: 956395 - RNA, 19 nt, Artificial Sequence
  Description of Artificial Sequence: Synthetic oligonucleotide
  Antisense strand to SEQ ID NO: 956394
aaacuucucuuaguucgcu

SEQ ID NO: 956396 - RNA, 19 nt, Artificial Sequence
  Description of Artificial Sequence: Synthetic oligonucleotide
  Sense strand starting at position 633 of SEQ ID NO: 913818
accaguagguaaucaaaca

SEQ ID NO: 956397 - RNA, 19 nt, Artificial Sequence
  Description of Artificial Sequence: Synthetic oligonucleotide
  Antisense strand to SEQ ID NO: 956396
uguuugauuaccuacuggu

SEQ ID NO: 956398 - RNA, 19 nt, Artificial Sequence
  Description of Artificial Sequence: Synthetic oligonucleotide
  Sense strand starting at position 1381 of SEQ ID NO: 913818
ggagaauaaagcuggcaga

SEQ ID NO: 956399 - RNA, 19 nt, Artificial Sequence
  Description of Artificial Sequence: Synthetic oligonucleotide
  Antisense strand to SEQ ID NO: 956398
ucugccagcuuuauucucc

SEQ ID NO: 956400 - RNA, 19 nt, Artificial Sequence
  Description of Artificial Sequence: Synthetic oligonucleotide
  Sense strand starting at position 2819 of SEQ ID NO: 913818
gauguuaaggguuacuuau

SEQ ID NO: 956401 - RNA, 19 nt, Artificial Sequence
  Description of Artificial Sequence: Synthetic oligonucleotide
  Antisense strand to SEQ ID NO: 956400
auaaguaacccuuaacauc

SEQ ID NO: 956402 - RNA, 19 nt, Artificial Sequence
  Description of Artificial Sequence: Synthetic oligonucleotide
  Sense strand starting at position 2776 of SEQ ID NO: 913818
ggucuaggcagucaaagaa

SEQ ID NO: 956403 - RNA, 19 nt, Artificial Sequence
  Description of Artificial Sequence: Synthetic oligonucleotide
  Antisense strand to SEQ ID NO: 956402
uucuuugacugccuagacc

SEQ ID NO: 956404 - RNA, 19 nt, Artificial Sequence
  Description of Artificial Sequence: Synthetic oligonucleotide
  Sense strand starting at position 2909 of SEQ ID NO: 913818
gauguaaugaguuaagguc

SEQ ID NO: 956405 - RNA, 19 nt, Artificial Sequence
  Description of Artificial Sequence: Synthetic oligonucleotide
  Antisense strand to SEQ ID NO: 956404
gaccuuaacucauuacauc

SEQ ID NO: 956406 - RNA, 19 nt, Artificial Sequence
  Description of Artificial Sequence: Synthetic oligonucleotide
  Sense strand starting at position 559 of SEQ ID NO: 913818
gugggaaguaacugauaug

SEQ ID NO: 956407 - RNA, 19 nt, Artificial Sequence
  Description of Artificial Sequence: Synthetic oligonucleotide
  Antisense strand to SEQ ID NO: 956406
cauaucaguuacuucccac

SEQ ID NO: 956408 - RNA, 19 nt, Artificial Sequence
  Description of Artificial Sequence: Synthetic oligonucleotide
  Sense strand starting at position 2968 of SEQ ID NO: 913818
gucguuguaagagaagaga

SEQ ID NO: 956409 - RNA, 19 nt, Artificial Sequence
  Description of Artificial Sequence: Synthetic oligonucleotide
  Antisense strand to SEQ ID NO: 956408
ucucuucucuuacaacgac

SEQ ID NO: 956410 - RNA, 19 nt, Artificial Sequence
  Description of Artificial Sequence: Synthetic oligonucleotide
  Sense strand starting at position 2299 of SEQ ID NO: 913818
uagccagaucagggauacu

SEQ ID NO: 956411 - RNA, 19 nt, Artificial Sequence
  Description of Artificial Sequence: Synthetic oligonucleotide
  Antisense strand to SEQ ID NO: 956410
aguaucccugaucuggcua

SEQ ID NO: 956412 - RNA, 19 nt, Artificial Sequence
  Description of Artificial Sequence: Synthetic oligonucleotide
  Sense strand starting at position 626 of SEQ ID NO: 913818
aggcauuaccaguagguaa

SEQ ID NO: 956413 - RNA, 19 nt, Artificial Sequence
  Description of Artificial Sequence: Synthetic oligonucleotide
  Antisense strand to SEQ ID NO: 956412
uuaccuacugguaaugccu

SEQ ID NO: 956414 - RNA, 19 nt, Artificial Sequence
  Description of Artificial Sequence: Synthetic oligonucleotide
  Sense strand starting at position 3030 of SEQ ID NO: 913818
cagggaucagcugaugcau

SEQ ID NO: 956415 - RNA, 19 nt, Artificial Sequence
  Description of Artificial Sequence: Synthetic oligonucleotide
  Antisense strand to SEQ ID NO: 956414
augcaucagcugaucccug

SEQ ID NO: 956416 - RNA, 19 nt, Artificial Sequence
  Description of Artificial Sequence: Synthetic oligonucleotide
  Sense strand starting at position 3726 of SEQ ID NO: 913818
augguaagggcucaguaua

SEQ ID NO: 956417 - RNA, 19 nt, Artificial Sequence
  Description of Artificial Sequence: Synthetic oligonucleotide
  Antisense strand to SEQ ID NO: 956416
uauacugagcccuuaccau

SEQ ID NO: 956418 - RNA, 19 nt, Artificial Sequence
  Description of Artificial Sequence: Synthetic oligonucleotide
  Sense strand starting at position 2289 of SEQ ID NO: 913818
ggaguugaauuagccagau

SEQ ID NO: 956419 - RNA, 19 nt, Artificial Sequence
  Description of Artificial Sequence: Synthetic oligonucleotide
  Antisense strand to SEQ ID NO: 956418
aucuggcuaauucaacucc

SEQ ID NO: 956420 - RNA, 19 nt, Artificial Sequence
  Description of Artificial Sequence: Synthetic oligonucleotide
  Sense strand starting at position 540 of SEQ ID NO: 913818
ccuuccucaccggauuauu

SEQ ID NO: 956421 - RNA, 19 nt, Artificial Sequence
  Description of Artificial Sequence: Synthetic oligonucleotide
  Antisense strand to SEQ ID NO: 956420
aauaauccggugaggaagg

SEQ ID NO: 956422 - RNA, 19 nt, Artificial Sequence
  Description of Artificial Sequence: Synthetic oligonucleotide
  Sense strand starting at position 3178 of SEQ ID NO: 913818
cuuccagagcuguaaguga

SEQ ID NO: 956423 - RNA, 19 nt, Artificial Sequence
  Description of Artificial Sequence: Synthetic oligonucleotide
  Antisense strand to SEQ ID NO: 956422
ucacuuacagcucuggaag

SEQ ID NO: 956424 - RNA, 19 nt, Artificial Sequence
  Description of Artificial Sequence: Synthetic oligonucleotide
  Sense strand starting at position 3316 of SEQ ID NO: 913818
ugaaacugauugcuuagua

SEQ ID NO: 956425 - RNA, 19 nt, Artificial Sequence
  Description of Artificial Sequence: Synthetic oligonucleotide
  Antisense strand to SEQ ID NO: 956424
uacuaagcaaucaguuuca

SEQ ID NO: 956426 - RNA, 19 nt, Artificial Sequence
  Description of Artificial Sequence: Synthetic oligonucleotide
  Sense strand starting at position 3317 of SEQ ID NO: 913818
gaaacugauugcuuaguau

SEQ ID NO: 956427 - RNA, 19 nt, Artificial Sequence
  Description of Artificial Sequence: Synthetic oligonucleotide
  Antisense strand to SEQ ID NO: 956426
auacuaagcaaucaguuuc

SEQ ID NO: 956428 - RNA, 19 nt, Artificial Sequence
  Description of Artificial Sequence: Synthetic oligonucleotide
  Sense strand starting at position 2179 of SEQ ID NO: 913818
gcugcuucuagagggagaa

SEQ ID NO: 956429 - RNA, 19 nt, Artificial Sequence
  Description of Artificial Sequence: Synthetic oligonucleotide
  Antisense strand to SEQ ID NO: 956428
uucucccucuagaagcagc

SEQ ID NO: 956430 - RNA, 19 nt, Artificial Sequence
  Description of Artificial Sequence: Synthetic oligonucleotide
  Sense strand starting at position 3909 of SEQ ID NO: 913818
gagcacuuagugcauuaua

SEQ ID NO: 956431 - RNA, 19 nt, Artificial Sequence
  Description of Artificial Sequence: Synthetic oligonucleotide
  Antisense strand to SEQ ID NO: 956430
uauaaugcacuaagugcuc

SEQ ID NO: 956432 - RNA, 19 nt, Artificial Sequence
  Description of Artificial Sequence: Synthetic oligonucleotide
  Sense strand starting at position 3323 of SEQ ID NO: 913818
gauugcuuaguauaugcaa

SEQ ID NO: 956433 - RNA, 19 nt, Artificial Sequence
  Description of Artificial Sequence: Synthetic oligonucleotide
  Antisense strand to SEQ ID NO: 956432
uugcauauacuaagcaauc

SEQ ID NO: 956434 - RNA, 19 nt, Artificial Sequence
  Description of Artificial Sequence: Synthetic oligonucleotide
  Sense strand starting at position 550 of SEQ ID NO: 913818
cggauuauugugggaagua

SEQ ID NO: 956435 - RNA, 19 nt, Artificial Sequence
  Description of Artificial Sequence: Synthetic oligonucleotide
  Antisense strand to SEQ ID NO: 956434
uacuucccacaauaauccg

SEQ ID NO: 956436 - RNA, 19 nt, Artificial Sequence
  Description of Artificial Sequence: Synthetic oligonucleotide
  Sense strand starting at position 861 of SEQ ID NO: 913818
uccggagaccucugcaaag

SEQ ID NO: 956437 - RNA, 19 nt, Artificial Sequence
  Description of Artificial Sequence: Synthetic oligonucleotide
  Antisense strand to SEQ ID NO: 956436
cuuugcagaggucuccgga

SEQ ID NO: 956438 - RNA, 19 nt, Artificial Sequence
  Description of Artificial Sequence: Synthetic oligonucleotide
  Sense strand starting at position 3966 of SEQ ID NO: 913818
gagagucugccugauugca

SEQ ID NO: 956439 - RNA, 19 nt, Artificial Sequence
  Description of Artificial Sequence: Synthetic oligonucleotide
  Antisense strand to SEQ ID NO: 956438
ugcaaucaggcagacucuc

SEQ ID NO: 956440 - RNA, 19 nt, Artificial Sequence
  Description of Artificial Sequence: Synthetic oligonucleotide
  Sense strand starting at position 1220 of SEQ ID NO: 913818
gcgugcucccucgcuaaca

SEQ ID NO: 956441 - RNA, 19 nt, Artificial Sequence
  Description of Artificial Sequence: Synthetic oligonucleotide
  Antisense strand to SEQ ID NO: 956440
uguuagcgagggagcacgc

SEQ ID NO: 956442 - RNA, 19 nt, Artificial Sequence
  Description of Artificial Sequence: Synthetic oligonucleotide
  Sense strand starting at position 3320 of SEQ ID NO: 913818
acugauugcuuaguauaug

SEQ ID NO: 956443 - RNA, 19 nt, Artificial Sequence
  Description of Artificial Sequence: Synthetic oligonucleotide
  Antisense strand to SEQ ID NO: 956442
cauauacuaagcaaucagu

SEQ ID NO: 956444 - RNA, 19 nt, Artificial Sequence
  Description of Artificial Sequence: Synthetic oligonucleotide
  Sense strand starting at position 130 of SEQ ID NO: 913818
guuuaaauccagcaaacgu

SEQ ID NO: 956445 - RNA, 19 nt, Artificial Sequence
  Description of Artificial Sequence: Synthetic oligonucleotide
  Antisense strand to SEQ ID NO: 956444
acguuugcuggauuuaaac

SEQ ID NO: 956446 - RNA, 19 nt, Artificial Sequence
  Description of Artificial Sequence: Synthetic oligonucleotide
  Sense strand starting at position 95 of SEQ ID NO: 913818
cauuccucagagugagcau

SEQ ID NO: 956447 - RNA, 19 nt, Artificial Sequence
  Description of Artificial Sequence: Synthetic oligonucleotide
  Antisense strand to SEQ ID NO: 956446
augcucacucugaggaaug

SEQ ID NO: 956448 - RNA, 19 nt, Artificial Sequence
  Description of Artificial Sequence: Synthetic oligonucleotide
  Sense strand starting at position 3917 of SEQ ID NO: 913818
agugcauuauacccauuau

SEQ ID NO: 956449 - RNA, 19 nt, Artificial Sequence
  Description of Artificial Sequence: Synthetic oligonucleotide
  Antisense strand to SEQ ID NO: 956448
auaauggguauaaugcacu

SEQ ID NO: 956450 - RNA, 19 nt, Artificial Sequence
  Description of Artificial Sequence: Synthetic oligonucleotide
  Sense strand starting at position 3713 of SEQ ID NO: 913818
uguuucuguacccauggua

SEQ ID NO: 956451 - RNA, 19 nt, Artificial Sequence
  Description of Artificial Sequence: Synthetic oligonucleotide
  Antisense strand to SEQ ID NO: 956450
uaccauggguacagaaaca

SEQ ID NO: 956452 - RNA, 19 nt, Artificial Sequence
  Description of Artificial Sequence: Synthetic oligonucleotide
  Sense strand starting at position 3954 of SEQ ID NO: 913818
gucuuuacucccgagaguc

SEQ ID NO: 956453 - RNA, 19 nt, Artificial Sequence
  Description of Artificial Sequence: Synthetic oligonucleotide
  Antisense strand to SEQ ID NO: 956452
gacucucgggaguaaagac

SEQ ID NO: 956454 - RNA, 19 nt, Artificial Sequence
  Description of Artificial Sequence: Synthetic oligonucleotide
  Sense strand starting at position 235 of SEQ ID NO: 913818
gcaggaugagccugauagu

SEQ ID NO: 956455 - RNA, 19 nt, Artificial Sequence
  Description of Artificial Sequence: Synthetic oligonucleotide
  Antisense strand to SEQ ID NO: 956454
acuaucaggcucauccugc

SEQ ID NO: 956456 - RNA, 19 nt, Artificial Sequence
  Description of Artificial Sequence: Synthetic oligonucleotide
  Sense strand starting at position 3897 of SEQ ID NO: 913818
uuugcuucuccagagcacu

SEQ ID NO: 956457 - RNA, 19 nt, Artificial Sequence
  Description of Artificial Sequence: Synthetic oligonucleotide
  Antisense strand to SEQ ID NO: 956456
agugcucuggagaagcaaa

SEQ ID NO: 956458 - RNA, 19 nt, Artificial Sequence
  Description of Artificial Sequence: Synthetic oligonucleotide
  Sense strand starting at position 936 of SEQ ID NO: 913818
gucaguugggaacguuaga

SEQ ID NO: 956459 - RNA, 19 nt, Artificial Sequence
  Description of Artificial Sequence: Synthetic oligonucleotide
  Antisense strand to SEQ ID NO: 956458
ucuaacguucccaacugac

SEQ ID NO: 956460 - RNA, 19 nt, Artificial Sequence
  Description of Artificial Sequence: Synthetic oligonucleotide
  Sense strand starting at position 3968 of SEQ ID NO: 913818
gagucugccugauugcaaa

SEQ ID NO: 956461 - RNA, 19 nt, Artificial Sequence
  Description of Artificial Sequence: Synthetic oligonucleotide
  Antisense strand to SEQ ID NO: 956460
uuugcaaucaggcagacuc

SEQ ID NO: 956462 - RNA, 19 nt, Artificial Sequence
  Description of Artificial Sequence: Synthetic oligonucleotide
  Sense strand starting at position 3964 of SEQ ID NO: 913818
ccgagagucugccugauug

SEQ ID NO: 956463 - RNA, 19 nt, Artificial Sequence
  Description of Artificial Sequence: Synthetic oligonucleotide
  Antisense strand to SEQ ID NO: 956462
caaucaggcagacucucgg

SEQ ID NO: 956464 - RNA, 19 nt, Artificial Sequence
  Description of Artificial Sequence: Synthetic oligonucleotide
  Sense strand starting at position 930 of SEQ ID NO: 913818
gguguugucaguugggaac

SEQ ID NO: 956465 - RNA, 19 nt, Artificial Sequence
  Description of Artificial Sequence: Synthetic oligonucleotide
  Antisense strand to SEQ ID NO: 956464
guucccaacugacaacacc

SEQ ID NO: 956466 - RNA, 19 nt, Artificial Sequence
  Description of Artificial Sequence: Synthetic oligonucleotide
  Sense strand starting at position 3708 of SEQ ID NO: 913818
uacaguguuucuguaccca

SEQ ID NO: 956467 - RNA, 19 nt, Artificial Sequence
  Description of Artificial Sequence: Synthetic oligonucleotide
  Antisense strand to SEQ ID NO: 956466
uggguacagaaacacugua

SEQ ID NO: 956468 - RNA, 19 nt, Artificial Sequence
  Description of Artificial Sequence: Synthetic oligonucleotide
  Sense strand starting at position 3962 of SEQ ID NO: 913818
ucccgagagucugccugau

SEQ ID NO: 956469 - RNA, 19 nt, Artificial Sequence
  Description of Artificial Sequence: Synthetic oligonucleotide
  Antisense strand to SEQ ID NO: 956468
aucaggcagacucucggga

SEQ ID NO: 956470 - RNA, 19 nt, Artificial Sequence
  Description of Artificial Sequence: Synthetic oligonucleotide
  Sense strand starting at position 3740 of SEQ ID NO: 913818
guauauacugcuggcugau

SEQ ID NO: 956471 - RNA, 19 nt, Artificial Sequence
  Description of Artificial Sequence: Synthetic oligonucleotide
  Antisense strand to SEQ ID NO: 956470
aucagccagcaguauauac

SEQ ID NO: 956472 - RNA, 19 nt, Artificial Sequence
  Description of Artificial Sequence: Synthetic oligonucleotide
  Sense strand starting at position 1074 of SEQ ID NO: 913819
gauuaaaugggaugguuug

SEQ ID NO: 956473 - RNA, 19 nt, Artificial Sequence
  Description of Artificial Sequence: Synthetic oligonucleotide
  Antisense strand to SEQ ID NO: 956472
caaaccaucccauuuaauc

SEQ ID NO: 956474 - RNA, 19 nt, Artificial Sequence
  Description of Artificial Sequence: Synthetic oligonucleotide
  Sense strand starting at position 2464 of SEQ ID NO: 913819
ugaguuuaucugcaagaaa

SEQ ID NO: 956475 - RNA, 19 nt, Artificial Sequence
  Description of Artificial Sequence: Synthetic oligonucleotide
  Antisense strand to SEQ ID NO: 956474
uuucuugcagauaaacuca

SEQ ID NO: 956476 - RNA, 19 nt, Artificial Sequence
  Description of Artificial Sequence: Synthetic oligonucleotide
  Sense strand starting at position 1065 of SEQ ID NO: 913819
gcugaauucgauuaaaugg

SEQ ID NO: 956477 - RNA, 19 nt, Artificial Sequence
  Description of Artificial Sequence: Synthetic oligonucleotide
  Antisense strand to SEQ ID NO: 956476
ccauuuaaucgaauucagc

SEQ ID NO: 956478 - RNA, 19 nt, Artificial Sequence
  Description of Artificial Sequence: Synthetic oligonucleotide
  Sense strand starting at position 1044 of SEQ ID NO: 913819
guggacagucaauaaguau

SEQ ID NO: 956479 - RNA, 19 nt, Artificial Sequence
  Description of Artificial Sequence: Synthetic oligonucleotide
  Antisense strand to SEQ ID NO: 956478
auacuuauugacuguccac

SEQ ID NO: 956480 - RNA, 19 nt, Artificial Sequence
  Description of Artificial Sequence: Synthetic oligonucleotide
  Sense strand starting at position 2045 of SEQ ID NO: 913819
ggaggaucaacauguguga

SEQ ID NO: 956481 - RNA, 19 nt, Artificial Sequence
  Description of Artificial Sequence: Synthetic oligonucleotide
  Antisense strand to SEQ ID NO: 956480
ucacacauguugauccucc

SEQ ID NO: 956482 - RNA, 19 nt, Artificial Sequence
  Description of Artificial Sequence: Synthetic oligonucleotide
  Sense strand starting at position 2058 of SEQ ID NO: 913819
gugugaccucaccagacau

SEQ ID NO: 956483 - RNA, 19 nt, Artificial Sequence
  Description of Artificial Sequence: Synthetic oligonucleotide
  Antisense strand to SEQ ID NO: 956482
augucuggugaggucacac

SEQ ID NO: 956484 - RNA, 19 nt, Artificial Sequence
  Description of Artificial Sequence: Synthetic oligonucleotide
  Sense strand starting at position 3175 of SEQ ID NO: 913819
uugggagaguuucuuaacu

SEQ ID NO: 956485 - RNA, 19 nt, Artificial Sequence
  Description of Artificial Sequence: Synthetic oligonucleotide
  Antisense strand to SEQ ID NO: 956484
aguuaagaaacucucccaa

SEQ ID NO: 956486 - RNA, 19 nt, Artificial Sequence
  Description of Artificial Sequence: Synthetic oligonucleotide
  Sense strand starting at position 2374 of SEQ ID NO: 913819
guggguggucucuaagaau

SEQ ID NO: 956487 - RNA, 19 nt, Artificial Sequence
  Description of Artificial Sequence: Synthetic oligonucleotide
  Antisense strand to SEQ ID NO: 956486
auucuuagagaccacccac

SEQ ID NO: 956488 - RNA, 19 nt, Artificial Sequence
  Description of Artificial Sequence: Synthetic oligonucleotide
  Sense strand starting at position 652 of SEQ ID NO: 913819
ugaucaagcucauccugaa

SEQ ID NO: 956489 - RNA, 19 nt, Artificial Sequence
  Description of Artificial Sequence: Synthetic oligonucleotide
  Antisense strand to SEQ ID NO: 956488
uucaggaugagcuugauca

SEQ ID NO: 956490 - RNA, 19 nt, Artificial Sequence
  Description of Artificial Sequence: Synthetic oligonucleotide
  Sense strand starting at position 3389 of SEQ ID NO: 913819
auacucaugugagucugaa

SEQ ID NO: 956491 - RNA, 19 nt, Artificial Sequence
  Description of Artificial Sequence: Synthetic oligonucleotide
  Antisense strand to SEQ ID NO: 956490
uucagacucacaugaguau

SEQ ID NO: 956492 - RNA, 19 nt, Artificial Sequence
  Description of Artificial Sequence: Synthetic oligonucleotide
  Sense strand starting at position 3048 of SEQ ID NO: 913819
gugugugcauuuccacuaa

SEQ ID NO: 956493 - RNA, 19 nt, Artificial Sequence
  Description of Artificial Sequence: Synthetic oligonucleotide
  Antisense strand to SEQ ID NO: 956492
uuaguggaaaugcacacac

SEQ ID NO: 956494 - RNA, 19 nt, Artificial Sequence
  Description of Artificial Sequence: Synthetic oligonucleotide
  Sense strand starting at position 933 of SEQ ID NO: 913819
gggugacauacaugcacau

SEQ ID NO: 956495 - RNA, 19 nt, Artificial Sequence
  Description of Artificial Sequence: Synthetic oligonucleotide
  Antisense strand to SEQ ID NO: 956494
augugcauguaugucaccc

SEQ ID NO: 956496 - RNA, 19 nt, Artificial Sequence
  Description of Artificial Sequence: Synthetic oligonucleotide
  Sense strand starting at position 2618 of SEQ ID NO: 913819
acucccuguuuauuacaga

SEQ ID NO: 956497 - RNA, 19 nt, Artificial Sequence
  Description of Artificial Sequence: Synthetic oligonucleotide
  Antisense strand to SEQ ID NO: 956496
ucuguaauaaacagggagu

SEQ ID NO: 956498 - RNA, 19 nt, Artificial Sequence
  Description of Artificial Sequence: Synthetic oligonucleotide
  Sense strand starting at position 1080 of SEQ ID NO: 913819
augggaugguuugccuaaa

SEQ ID NO: 956499 - RNA, 19 nt, Artificial Sequence
  Description of Artificial Sequence: Synthetic oligonucleotide
  Antisense strand to SEQ ID NO: 956498
uuuaggcaaaccaucccau

SEQ ID NO: 956500 - RNA, 19 nt, Artificial Sequence
  Description of Artificial Sequence: Synthetic oligonucleotide
  Sense strand starting at position 2443 of SEQ ID NO: 913819
accugauuaucagccugau

SEQ ID NO: 956501 - RNA, 19 nt, Artificial Sequence
  Description of Artificial Sequence: Synthetic oligonucleotide
  Antisense strand to SEQ ID NO: 956500
aucaggcugauaaucaggu

SEQ ID NO: 956502 - RNA, 19 nt, Artificial Sequence
  Description of Artificial Sequence: Synthetic oligonucleotide
  Sense strand starting at position 2463 of SEQ ID NO: 913819
cugaguuuaucugcaagaa

SEQ ID NO: 956503 - RNA, 19 nt, Artificial Sequence
  Description of Artificial Sequence: Synthetic oligonucleotide
  Antisense strand to SEQ ID NO: 956502
uucuugcagauaaacucag

SEQ ID NO: 956504 - RNA, 19 nt, Artificial Sequence
  Description of Artificial Sequence: Synthetic oligonucleotide
  Sense strand starting at position 3347 of SEQ ID NO: 913819
agugcauauguggauguaa

SEQ ID NO: 956505 - RNA, 19 nt, Artificial Sequence
  Description of Artificial Sequence: Synthetic oligonucleotide
  Antisense strand to SEQ ID NO: 956504
uuacauccacauaugcacu

SEQ ID NO: 956506 - RNA, 19 nt, Artificial Sequence
  Description of Artificial Sequence: Synthetic oligonucleotide
  Sense strand starting at position 864 of SEQ ID NO: 913819
gccuaucugcaagaucauc

SEQ ID NO: 956507 - RNA, 19 nt, Artificial Sequence
  Description of Artificial Sequence: Synthetic oligonucleotide
  Antisense strand to SEQ ID NO: 956506
gaugaucuugcagauaggc

SEQ ID NO: 956508 - RNA, 19 nt, Artificial Sequence
  Description of Artificial Sequence: Synthetic oligonucleotide
  Sense strand starting at position 1422 of SEQ ID NO: 913819
cucagucaucagcagucaa

SEQ ID NO: 956509 - RNA, 19 nt, Artificial Sequence
  Description of Artificial Sequence: Synthetic oligonucleotide
  Antisense strand to SEQ ID NO: 956508
uugacugcugaugacugag

SEQ ID NO: 956510 - RNA, 19 nt, Artificial Sequence
  Description of Artificial Sequence: Synthetic oligonucleotide
  Sense strand starting at position 2332 of SEQ ID NO: 913819
aaaucagagcccugugauc

SEQ ID NO: 956511 - RNA, 19 nt, Artificial Sequence
  Description of Artificial Sequence: Synthetic oligonucleotide
  Antisense strand to SEQ ID NO: 956510
gaucacagggcucugauuu

SEQ ID NO: 956512 - RNA, 19 nt, Artificial Sequence
  Description of Artificial Sequence: Synthetic oligonucleotide
  Sense strand starting at position 3337 of SEQ ID NO: 913819
aggauaaagcagugcauau

SEQ ID NO: 956513 - RNA, 19 nt, Artificial Sequence
  Description of Artificial Sequence: Synthetic oligonucleotide
  Antisense strand to SEQ ID NO: 956512
auaugcacugcuuuauccu

SEQ ID NO: 956514 - RNA, 19 nt, Artificial Sequence
  Description of Artificial Sequence: Synthetic oligonucleotide
  Sense strand starting at position 2918 of SEQ ID NO: 913819
agugcuaagagcuaacagu

SEQ ID NO: 956515 - RNA, 19 nt, Artificial Sequence
  Description of Artificial Sequence: Synthetic oligonucleotide
  Antisense strand to SEQ ID NO: 956514
acuguuagcucuuagcacu

SEQ ID NO: 956516 - RNA, 19 nt, Artificial Sequence
  Description of Artificial Sequence: Synthetic oligonucleotide
  Sense strand starting at position 1630 of SEQ ID NO: 913819
aacugcuuccagggaaguu

SEQ ID NO: 956517 - RNA, 19 nt, Artificial Sequence
  Description of Artificial Sequence: Synthetic oligonucleotide
  Antisense strand to SEQ ID NO: 956516
aacuucccuggaagcaguu

SEQ ID NO: 956518 - RNA, 19 nt, Artificial Sequence
  Description of Artificial Sequence: Synthetic oligonucleotide
  Sense strand starting at position 924 of SEQ ID NO: 913819
gcauuccaugggugacaua

SEQ ID NO: 956519 - RNA, 19 nt, Artificial Sequence
  Description of Artificial Sequence: Synthetic oligonucleotide
  Antisense strand to SEQ ID NO: 956518
uaugucacccauggaaugc

SEQ ID NO: 956520 - RNA, 19 nt, Artificial Sequence
  Description of Artificial Sequence: Synthetic oligonucleotide
  Sense strand starting at position 1091 of SEQ ID NO: 913819
ugccuaaaugcuuaggagu

SEQ ID NO: 956521 - RNA, 19 nt, Artificial Sequence
  Description of Artificial Sequence: Synthetic oligonucleotide
  Antisense strand to SEQ ID NO: 956520
acuccuaagcauuuaggca

SEQ ID NO: 956522 - RNA, 19 nt, Artificial Sequence
  Description of Artificial Sequence: Synthetic oligonucleotide
  Sense strand starting at position 1081 of SEQ ID NO: 913819
ugggaugguuugccuaaau

SEQ ID NO: 956523 - RNA, 19 nt, Artificial Sequence
  Description of Artificial Sequence: Synthetic oligonucleotide
  Antisense strand to SEQ ID NO: 956522
auuuaggcaaaccauccca

SEQ ID NO: 956524 - RNA, 19 nt, Artificial Sequence
  Description of Artificial Sequence: Synthetic oligonucleotide
  Sense strand starting at position 3241 of SEQ ID NO: 913819
ccaacuugcuagguuaaua

SEQ ID NO: 956525 - RNA, 19 nt, Artificial Sequence
  Description of Artificial Sequence: Synthetic oligonucleotide
  Antisense strand to SEQ ID NO: 956524
uauuaaccuagcaaguugg

SEQ ID NO: 956526 - RNA, 19 nt, Artificial Sequence
  Description of Artificial Sequence: Synthetic oligonucleotide
  Sense strand starting at position 493 of SEQ ID NO: 913819
uuacaaagugccugacacu

SEQ ID NO: 956527 - RNA, 19 nt, Artificial Sequence
  Description of Artificial Sequence: Synthetic oligonucleotide
  Antisense strand to SEQ ID NO: 956526
agugucaggcacuuuguaa

SEQ ID NO: 956528 - RNA, 19 nt, Artificial Sequence
  Description of Artificial Sequence: Synthetic oligonucleotide
  Sense strand starting at position 2685 of SEQ ID NO: 913819
gugaguaagcggcaagaau

SEQ ID NO: 956529 - RNA, 19 nt, Artificial Sequence
  Description of Artificial Sequence: Synthetic oligonucleotide
  Antisense strand to SEQ ID NO: 956528
auucuugccgcuuacucac

SEQ ID NO: 956530 - RNA, 19 nt, Artificial Sequence
  Description of Artificial Sequence: Synthetic oligonucleotide
  Sense strand starting at position 923 of SEQ ID NO: 913819
ugcauuccaugggugacau

SEQ ID NO: 956531 - RNA, 19 nt, Artificial Sequence
  Description of Artificial Sequence: Synthetic oligonucleotide
  Antisense strand to SEQ ID NO: 956530
augucacccauggaaugca

SEQ ID NO: 956532 - RNA, 19 nt, Artificial Sequence
  Description of Artificial Sequence: Synthetic oligonucleotide
  Sense strand starting at position 3349 of SEQ ID NO: 913819
ugcauauguggauguaaca

SEQ ID NO: 956533 - RNA, 19 nt, Artificial Sequence
  Description of Artificial Sequence: Synthetic oligonucleotide
  Antisense strand to SEQ ID NO: 956532
uguuacauccacauaugca

SEQ ID NO: 956534 - RNA, 19 nt, Artificial Sequence
  Description of Artificial Sequence: Synthetic oligonucleotide
  Sense strand starting at position 922 of SEQ ID NO: 913819
cugcauuccaugggugaca

SEQ ID NO: 956535 - RNA, 19 nt, Artificial Sequence
  Description of Artificial Sequence: Synthetic oligonucleotide
  Antisense strand to SEQ ID NO: 956534
ugucacccauggaaugcag

SEQ ID NO: 956536 - RNA, 19 nt, Artificial Sequence
  Description of Artificial Sequence: Synthetic oligonucleotide
  Sense strand starting at position 2453 of SEQ ID NO: 913819
cagccugaugcugaguuua

SEQ ID NO: 956537 - RNA, 19 nt, Artificial Sequence
  Description of Artificial Sequence: Synthetic oligonucleotide
  Antisense strand to SEQ ID NO: 956536
uaaacucagcaucaggcug

SEQ ID NO: 956538 - RNA, 19 nt, Artificial Sequence
  Description of Artificial Sequence: Synthetic oligonucleotide
  Sense strand starting at position 1051 of SEQ ID NO: 913819
gucaauaaguaucugcuga

SEQ ID NO: 956539 - RNA, 19 nt, Artificial Sequence
  Description of Artificial Sequence: Synthetic oligonucleotide
  Antisense strand to SEQ ID NO: 956538
ucagcagauacuuauugac

SEQ ID NO: 956540 - RNA, 19 nt, Artificial Sequence
  Description of Artificial Sequence: Synthetic oligonucleotide
  Sense strand starting at position 3240 of SEQ ID NO: 913819
cccaacuugcuagguuaau

SEQ ID NO: 956541 - RNA, 19 nt, Artificial Sequence
  Description of Artificial Sequence: Synthetic oligonucleotide
  Antisense strand to SEQ ID NO: 956540
auuaaccuagcaaguuggg

SEQ ID NO: 956542 - RNA, 19 nt, Artificial Sequence
  Description of Artificial Sequence: Synthetic oligonucleotide
  Sense strand starting at position 379 of SEQ ID NO: 913819
gcuuaaggcuccuuccaaa

SEQ ID NO: 956543 - RNA, 19 nt, Artificial Sequence
  Description of Artificial Sequence: Synthetic oligonucleotide
  Antisense strand to SEQ ID NO: 956542
uuuggaaggagccuuaagc

SEQ ID NO: 956544 - RNA, 19 nt, Artificial Sequence
  Description of Artificial Sequence: Synthetic oligonucleotide
  Sense strand starting at position 557 of SEQ ID NO: 913819
gucccugugcucuacagau

SEQ ID NO: 956545 - RNA, 19 nt, Artificial Sequence
  Description of Artificial Sequence: Synthetic oligonucleotide
  Antisense strand to SEQ ID NO: 956544
aucuguagagcacagggac

SEQ ID NO: 956546 - RNA, 19 nt, Artificial Sequence
  Description of Artificial Sequence: Synthetic oligonucleotide
  Sense strand starting at position 1788 of SEQ ID NO: 913819
cuggucugcuucucacaaa

SEQ ID NO: 956547 - RNA, 19 nt, Artificial Sequence
  Description of Artificial Sequence: Synthetic oligonucleotide
  Antisense strand to SEQ ID NO: 956546
uuugugagaagcagaccag

SEQ ID NO: 956548 - RNA, 19 nt, Artificial Sequence
  Description of Artificial Sequence: Synthetic oligonucleotide
  Sense strand starting at position 814 of SEQ ID NO: 913819
ccuaccugccugugaaauu

SEQ ID NO: 956549 - RNA, 19 nt, Artificial Sequence
  Description of Artificial Sequence: Synthetic oligonucleotide
  Antisense strand to SEQ ID NO: 956548
aauuucacaggcagguagg

SEQ ID NO: 956550 - RNA, 19 nt, Artificial Sequence
  Description of Artificial Sequence: Synthetic oligonucleotide
  Sense strand starting at position 2446 of SEQ ID NO: 913819
ugauuaucagccugaugcu

SEQ ID NO: 956551 - RNA, 19 nt, Artificial Sequence
  Description of Artificial Sequence: Synthetic oligonucleotide
  Antisense strand to SEQ ID NO: 956550
agcaucaggcugauaauca

SEQ ID NO: 956552 - RNA, 19 nt, Artificial Sequence
  Description of Artificial Sequence: Synthetic oligonucleotide
  Sense strand starting at position 936 of SEQ ID NO: 913820
cuggguaugggcuagaaca

SEQ ID NO: 956553 - RNA, 19 nt, Artificial Sequence
  Description of Artificial Sequence: Synthetic oligonucleotide
  Antisense strand to SEQ ID NO: 956552
uguucuagcccauacccag

SEQ ID NO: 956554 - RNA, 19 nt, Artificial Sequence
  Description of Artificial Sequence: Synthetic oligonucleotide
  Sense strand starting at position 1177 of SEQ ID NO: 913820
agcgaacuaagagaaguuu

SEQ ID NO: 956555 - RNA, 19 nt, Artificial Sequence
  Description of Artificial Sequence: Synthetic oligonucleotide
  Antisense strand to SEQ ID NO: 956554
aaacuucucuuaguucgcu

SEQ ID NO: 956556 - RNA, 19 nt, Artificial Sequence
  Description of Artificial Sequence: Synthetic oligonucleotide
  Sense strand starting at position 1369 of SEQ ID NO: 913820
accaguagguaaucaaaca

SEQ ID NO: 956557 - RNA, 19 nt, Artificial Sequence
  Description of Artificial Sequence: Synthetic oligonucleotide
  Antisense strand to SEQ ID NO: 956556
uguuugauuaccuacuggu

SEQ ID NO: 956558 - RNA, 19 nt, Artificial Sequence
  Description of Artificial Sequence: Synthetic oligonucleotide
  Sense strand starting at position 2117 of SEQ ID NO: 913820
ggagaauaaagcuggcaga

SEQ ID NO: 956559 - RNA, 19 nt, Artificial Sequence
  Description of Artificial Sequence: Synthetic oligonucleotide
  Antisense strand to SEQ ID NO: 956558
ucugccagcuuuauucucc

SEQ ID NO: 956560 - RNA, 19 nt, Artificial Sequence
  Description of Artificial Sequence: Synthetic oligonucleotide
  Sense strand starting at position 3555 of SEQ ID NO: 913820
gauguuaaggguuacuuau

SEQ ID NO: 956561 - RNA, 19 nt, Artificial Sequence
  Description of Artificial Sequence: Synthetic oligonucleotide
  Antisense strand to SEQ ID NO: 956560
auaaguaacccuuaacauc

SEQ ID NO: 956562 - RNA, 19 nt, Artificial Sequence
  Description of Artificial Sequence: Synthetic oligonucleotide
  Sense strand starting at position 3512 of SEQ ID NO: 913820
ggucuaggcagucaaagaa

SEQ ID NO: 956563 - RNA, 19 nt, Artificial Sequence
  Description of Artificial Sequence: Synthetic oligonucleotide
  Antisense strand to SEQ ID NO: 956562
uucuuugacugccuagacc

SEQ ID NO: 956564 - RNA, 19 nt, Artificial Sequence
  Description of Artificial Sequence: Synthetic oligonucleotide
  Sense strand starting at position 3645 of SEQ ID NO: 913820
gauguaaugaguuaagguc

SEQ ID NO: 956565 - RNA, 19 nt, Artificial Sequence
  Description of Artificial Sequence: Synthetic oligonucleotide
  Antisense strand to SEQ ID NO: 956564
gaccuuaacucauuacauc

SEQ ID NO: 956566 - RNA, 19 nt, Artificial Sequence
  Description of Artificial Sequence: Synthetic oligonucleotide
  Sense strand starting at position 1295 of SEQ ID NO: 913820
gugggaaguaacugauaug

SEQ ID NO: 956567 - RNA, 19 nt, Artificial Sequence
  Description of Artificial Sequence: Synthetic oligonucleotide
  Antisense strand to SEQ ID NO: 956566
cauaucaguuacuucccac

SEQ ID NO: 956568 - RNA, 19 nt, Artificial Sequence
  Description of Artificial Sequence: Synthetic oligonucleotide
  Sense strand starting at position 3704 of SEQ ID NO: 913820
gucguuguaagagaagaga

SEQ ID NO: 956569 - RNA, 19 nt, Artificial Sequence
  Description of Artificial Sequence: Synthetic oligonucleotide
  Antisense strand to SEQ ID NO: 956568
ucucuucucuuacaacgac

SEQ ID NO: 956570 - RNA, 19 nt, Artificial Sequence
  Description of Artificial Sequence: Synthetic oligonucleotide
  Sense strand starting at position 582 of SEQ ID NO: 913820
uggagagucacagaguguu

SEQ ID NO: 956571 - RNA, 19 nt, Artificial Sequence
  Description of Artificial Sequence: Synthetic oligonucleotide
  Antisense strand to SEQ ID NO: 956570
aacacucugugacucucca

SEQ ID NO: 956572 - RNA, 19 nt, Artificial Sequence
  Description of Artificial Sequence: Synthetic oligonucleotide
  Sense strand starting at position 3035 of SEQ ID NO: 913820
uagccagaucagggauacu

SEQ ID NO: 956573 - RNA, 19 nt, Artificial Sequence
  Description of Artificial Sequence: Synthetic oligonucleotide
  Antisense strand to SEQ ID NO: 956572
aguaucccugaucuggcua

SEQ ID NO: 956574 - RNA, 19 nt, Artificial Sequence
  Description of Artificial Sequence: Synthetic oligonucleotide
  Sense strand starting at position 439 of SEQ ID NO: 913820
cuuauuaacuagcuaggaa

SEQ ID NO: 956575 - RNA, 19 nt, Artificial Sequence
  Description of Artificial Sequence: Synthetic oligonucleotide
  Antisense strand to SEQ ID NO: 956574
uuccuagcuaguuaauaag

SEQ ID NO: 956576 - RNA, 19 nt, Artificial Sequence
  Description of Artificial Sequence: Synthetic oligonucleotide
  Sense strand starting at position 1362 of SEQ ID NO: 913820
aggcauuaccaguagguaa

SEQ ID NO: 956577 - RNA, 19 nt, Artificial Sequence
  Description of Artificial Sequence: Synthetic oligonucleotide
  Antisense strand to SEQ ID NO: 956576
uuaccuacugguaaugccu

SEQ ID NO: 956578 - RNA, 19 nt, Artificial Sequence
  Description of Artificial Sequence: Synthetic oligonucleotide
  Sense strand starting at position 3766 of SEQ ID NO: 913820
cagggaucagcugaugcau

SEQ ID NO: 956579 - RNA, 19 nt, Artificial Sequence
  Description of Artificial Sequence: Synthetic oligonucleotide
  Antisense strand to SEQ ID NO: 956578
augcaucagcugaucccug

SEQ ID NO: 956580 - RNA, 19 nt, Artificial Sequence
  Description of Artificial Sequence: Synthetic oligonucleotide
  Sense strand starting at position 189 of SEQ ID NO: 913820
gccuuagaccacugaugaa

SEQ ID NO: 956581 - RNA, 19 nt, Artificial Sequence
  Description of Artificial Sequence: Synthetic oligonucleotide
  Antisense strand to SEQ ID NO: 956580
uucaucaguggucuaaggc

SEQ ID NO: 956582 - RNA, 19 nt, Artificial Sequence
  Description of Artificial Sequence: Synthetic oligonucleotide
  Sense strand starting at position 3025 of SEQ ID NO: 913820
ggaguugaauuagccagau

SEQ ID NO: 956583 - RNA, 19 nt, Artificial Sequence
  Description of Artificial Sequence: Synthetic oligonucleotide
  Antisense strand to SEQ ID NO: 956582
aucuggcuaauucaacucc

SEQ ID NO: 956584 - RNA, 19 nt, Artificial Sequence
  Description of Artificial Sequence: Synthetic oligonucleotide
  Sense strand starting at position 1276 of SEQ ID NO: 913820
ccuuccucaccggauuauu

SEQ ID NO: 956585 - RNA, 19 nt, Artificial Sequence
  Description of Artificial Sequence: Synthetic oligonucleotide
  Antisense strand to SEQ ID NO: 956584
aauaauccggugaggaagg

SEQ ID NO: 956586 - RNA, 19 nt, Artificial Sequence
  Description of Artificial Sequence: Synthetic oligonucleotide
  Sense strand starting at position 364 of SEQ ID NO: 913820
gauggaggaugcucugagu

SEQ ID NO: 956587 - RNA, 19 nt, Artificial Sequence
  Description of Artificial Sequence: Synthetic oligonucleotide
  Antisense strand to SEQ ID NO: 956586
acucagagcauccuccauc

SEQ ID NO: 956588 - RNA, 19 nt, Artificial Sequence
  Description of Artificial Sequence: Synthetic oligonucleotide
  Sense strand starting at position 3914 of SEQ ID NO: 913820
cuuccagagcuguaaguga

SEQ ID NO: 956589 - RNA, 19 nt, Artificial Sequence
  Description of Artificial Sequence: Synthetic oligonucleotide
  Antisense strand to SEQ ID NO: 956588
ucacuuacagcucuggaag

SEQ ID NO: 956590 - RNA, 19 nt, Artificial Sequence
  Description of Artificial Sequence: Synthetic oligonucleotide
  Sense strand starting at position 2915 of SEQ ID NO: 913820
gcugcuucuagagggagaa

SEQ ID NO: 956591 - RNA, 19 nt, Artificial Sequence
  Description of Artificial Sequence: Synthetic oligonucleotide
  Antisense strand to SEQ ID NO: 956590
uucucccucuagaagcagc

SEQ ID NO: 956592 - RNA, 19 nt, Artificial Sequence
  Description of Artificial Sequence: Synthetic oligonucleotide
  Sense strand starting at position 1286 of SEQ ID NO: 913820
cggauuauugugggaagua

SEQ ID NO: 956593 - RNA, 19 nt, Artificial Sequence
  Description of Artificial Sequence: Synthetic oligonucleotide
  Antisense strand to SEQ ID NO: 956592
uacuucccacaauaauccg

SEQ ID NO: 956594 - RNA, 19 nt, Artificial Sequence
  Description of Artificial Sequence: Synthetic oligonucleotide
  Sense strand starting at position 1597 of SEQ ID NO: 913820
uccggagaccucugcaaag

SEQ ID NO: 956595 - RNA, 19 nt, Artificial Sequence
  Description of Artificial Sequence: Synthetic oligonucleotide
  Antisense strand to SEQ ID NO: 956594
cuuugcagaggucuccgga

SEQ ID NO: 956596 - RNA, 19 nt, Artificial Sequence
  Description of Artificial Sequence: Synthetic oligonucleotide
  Sense strand starting at position 1956 of SEQ ID NO: 913820
gcgugcucccucgcuaaca

SEQ ID NO: 956597 - RNA, 19 nt, Artificial Sequence
  Description of Artificial Sequence: Synthetic oligonucleotide
  Antisense strand to SEQ ID NO: 956596
uguuagcgagggagcacgc

SEQ ID NO: 956598 - RNA, 19 nt, Artificial Sequence
  Description of Artificial Sequence: Synthetic oligonucleotide
  Sense strand starting at position 866 of SEQ ID NO: 913820
guuuaaauccagcaaacgu

SEQ ID NO: 956599 - RNA, 19 nt, Artificial Sequence
  Description of Artificial Sequence: Synthetic oligonucleotide
  Antisense strand to SEQ ID NO: 956598
acguuugcuggauuuaaac

SEQ ID NO: 956600 - RNA, 19 nt, Artificial Sequence
  Description of Artificial Sequence: Synthetic oligonucleotide
  Sense strand starting at position 831 of SEQ ID NO: 913820
cauuccucagagugagcau

SEQ ID NO: 956601 - RNA, 19 nt, Artificial Sequence
  Description of Artificial Sequence: Synthetic oligonucleotide
  Antisense strand to SEQ ID NO: 956600
augcucacucugaggaaug

SEQ ID NO: 956602 - RNA, 19 nt, Artificial Sequence
  Description of Artificial Sequence: Synthetic oligonucleotide
  Sense strand starting at position 530 of SEQ ID NO: 913820
gccugagcuccucagggua

SEQ ID NO: 956603 - RNA, 19 nt, Artificial Sequence
  Description of Artificial Sequence: Synthetic oligonucleotide
  Antisense strand to SEQ ID NO: 956602
uacccugaggagcucaggc

SEQ ID NO: 956604 - RNA, 19 nt, Artificial Sequence
  Description of Artificial Sequence: Synthetic oligonucleotide
  Sense strand starting at position 971 of SEQ ID NO: 913820
gcaggaugagccugauagu

SEQ ID NO: 956605 - RNA, 19 nt, Artificial Sequence
  Description of Artificial Sequence: Synthetic oligonucleotide
  Antisense strand to SEQ ID NO: 956604
acuaucaggcucauccugc

SEQ ID NO: 956606 - RNA, 19 nt, Artificial Sequence
  Description of Artificial Sequence: Synthetic oligonucleotide
  Sense strand starting at position 1672 of SEQ ID NO: 913820
gucaguugggaacguuaga

SEQ ID NO: 956607 - RNA, 19 nt, Artificial Sequence
  Description of Artificial Sequence: Synthetic oligonucleotide
  Antisense strand to SEQ ID NO: 956606
ucuaacguucccaacugac

SEQ ID NO: 956608 - RNA, 19 nt, Artificial Sequence
  Description of Artificial Sequence: Synthetic oligonucleotide
  Sense strand starting at position 301 of SEQ ID NO: 913820
auguaaagucuagguguca

SEQ ID NO: 956609 - RNA, 19 nt, Artificial Sequence
  Description of Artificial Sequence: Synthetic oligonucleotide
  Antisense strand to SEQ ID NO: 956608
ugacaccuagacuuuacau

SEQ ID NO: 956610 - RNA, 19 nt, Artificial Sequence
  Description of Artificial Sequence: Synthetic oligonucleotide
  Sense strand starting at position 253 of SEQ ID NO: 913820
uccuauugugugggucaga

SEQ ID NO: 956611 - RNA, 19 nt, Artificial Sequence
  Description of Artificial Sequence: Synthetic oligonucleotide
  Antisense strand to SEQ ID NO: 956610
ucugacccacacaauagga

SEQ ID NO: 956612 - RNA, 19 nt, Artificial Sequence
  Description of Artificial Sequence: Synthetic oligonucleotide
  Sense strand starting at position 1666 of SEQ ID NO: 913820
gguguugucaguugggaac

SEQ ID NO: 956613 - RNA, 19 nt, Artificial Sequence
  Description of Artificial Sequence: Synthetic oligonucleotide
  Antisense strand to SEQ ID NO: 956612
guucccaacugacaacacc

SEQ ID NO: 956614 - RNA, 19 nt, Artificial Sequence
  Description of Artificial Sequence: Synthetic oligonucleotide
  Sense strand starting at position 2135 of SEQ ID NO: 913820
agggaagaaugguagugau

SEQ ID NO: 956615 - RNA, 19 nt, Artificial Sequence
  Description of Artificial Sequence: Synthetic oligonucleotide
  Antisense strand to SEQ ID NO: 956614
aucacuaccauucuucccu

SEQ ID NO: 956616 - RNA, 19 nt, Artificial Sequence
  Description of Artificial Sequence: Synthetic oligonucleotide
  Sense strand starting at position 3700 of SEQ ID NO: 913820
uggugucguuguaagagaa

SEQ ID NO: 956617 - RNA, 19 nt, Artificial Sequence
  Description of Artificial Sequence: Synthetic oligonucleotide
  Antisense strand to SEQ ID NO: 956616
uucucuuacaacgacacca

SEQ ID NO: 956618 - RNA, 19 nt, Artificial Sequence
  Description of Artificial Sequence: Synthetic oligonucleotide
  Sense strand starting at position 1395 of SEQ ID NO: 913820
agaggaaguuuggauguaa

SEQ ID NO: 956619 - RNA, 19 nt, Artificial Sequence
  Description of Artificial Sequence: Synthetic oligonucleotide
  Antisense strand to SEQ ID NO: 956618
uuacauccaaacuuccucu

SEQ ID NO: 956620 - RNA, 19 nt, Artificial Sequence
  Description of Artificial Sequence: Synthetic oligonucleotide
  Sense strand starting at position 1298 of SEQ ID NO: 913820
ggaaguaacugauauguaa

SEQ ID NO: 956621 - RNA, 19 nt, Artificial Sequence
  Description of Artificial Sequence: Synthetic oligonucleotide
  Antisense strand to SEQ ID NO: 956620
uuacauaucaguuacuucc

SEQ ID NO: 956622 - RNA, 19 nt, Artificial Sequence
  Description of Artificial Sequence: Synthetic oligonucleotide
  Sense strand starting at position 410 of SEQ ID NO: 913820
aaagguucccgcugcuuaa

SEQ ID NO: 956623 - RNA, 19 nt, Artificial Sequence
  Description of Artificial Sequence: Synthetic oligonucleotide
  Antisense strand to SEQ ID NO: 956622
uuaagcagcgggaaccuuu

SEQ ID NO: 956624 - RNA, 19 nt, Artificial Sequence
  Description of Artificial Sequence: Synthetic oligonucleotide
  Sense strand starting at position 1954 of SEQ ID NO: 913820
gcgcgugcucccucgcuaa

SEQ ID NO: 956625 - RNA, 19 nt, Artificial Sequence
  Description of Artificial Sequence: Synthetic oligonucleotide
  Antisense strand to SEQ ID NO: 956624
uuagcgagggagcacgcgc

SEQ ID NO: 956626 - RNA, 19 nt, Artificial Sequence
  Description of Artificial Sequence: Synthetic oligonucleotide
  Sense strand starting at position 1287 of SEQ ID NO: 913820
ggauuauugugggaaguaa

SEQ ID NO: 956627 - RNA, 19 nt, Artificial Sequence
  Description of Artificial Sequence: Synthetic oligonucleotide
  Antisense strand to SEQ ID NO: 956626
uuacuucccacaauaaucc

SEQ ID NO: 956628 - RNA, 19 nt, Artificial Sequence
  Description of Artificial Sequence: Synthetic oligonucleotide
  Sense strand starting at position 3958 of SEQ ID NO: 913820
auguccauuuguuauagca

SEQ ID NO: 956629 - RNA, 19 nt, Artificial Sequence
  Description of Artificial Sequence: Synthetic oligonucleotide
  Antisense strand to SEQ ID NO: 956628
ugcuauaacaaauggacau

SEQ ID NO: 956630 - RNA, 19 nt, Artificial Sequence
  Description of Artificial Sequence: Synthetic oligonucleotide
  Sense strand starting at position 1164 of SEQ ID NO: 913820
ucugcuucuguguagcgaa

SEQ ID NO: 956631 - RNA, 19 nt, Artificial Sequence
  Description of Artificial Sequence: Synthetic oligonucleotide
  Antisense strand to SEQ ID NO: 956630
uucgcuacacagaagcaga

SEQ ID NO: 956632 - RNA, 19 nt, Artificial Sequence
  Description of Artificial Sequence: Synthetic oligonucleotide
  Sense strand starting at position 1390 of SEQ ID NO: 913821
aagaaucaacguuggaaug

SEQ ID NO: 956633 - RNA, 19 nt, Artificial Sequence
  Description of Artificial Sequence: Synthetic oligonucleotide
  Antisense strand to SEQ ID NO: 956632
cauuccaacguugauucuu

SEQ ID NO: 956634 - RNA, 19 nt, Artificial Sequence
  Description of Artificial Sequence: Synthetic oligonucleotide
  Sense strand starting at position 2742 of SEQ ID NO: 913821
guccucuuuggagaaguaa

SEQ ID NO: 956635 - RNA, 19 nt, Artificial Sequence
  Description of Artificial Sequence: Synthetic oligonucleotide
  Antisense strand to SEQ ID NO: 956634
uuacuucuccaaagaggac

SEQ ID NO: 956636 - RNA, 19 nt, Artificial Sequence
  Description of Artificial Sequence: Synthetic oligonucleotide
  Sense strand starting at position 1377 of SEQ ID NO: 913821
uuuauucggcaauaagaau

SEQ ID NO: 956637 - RNA, 19 nt, Artificial Sequence
  Description of Artificial Sequence: Synthetic oligonucleotide
  Antisense strand to SEQ ID NO: 956636
auucuuauugccgaauaaa

SEQ ID NO: 956638 - RNA, 19 nt, Artificial Sequence
  Description of Artificial Sequence: Synthetic oligonucleotide
  Sense strand starting at position 3951 of SEQ ID NO: 913821
gagcguauucccucuugcu

SEQ ID NO: 956639 - RNA, 19 nt, Artificial Sequence
  Description of Artificial Sequence: Synthetic oligonucleotide
  Antisense strand to SEQ ID NO: 956638
agcaagagggaauacgcuc

SEQ ID NO: 956640 - RNA, 19 nt, Artificial Sequence
  Description of Artificial Sequence: Synthetic oligonucleotide
  Sense strand starting at position 1038 of SEQ ID NO: 913821
uguaaacagaucggaacau

SEQ ID NO: 956641 - RNA, 19 nt, Artificial Sequence
  Description of Artificial Sequence: Synthetic oligonucleotide
  Antisense strand to SEQ ID NO: 956640
auguuccgaucuguuuaca

SEQ ID NO: 956642 - RNA, 19 nt, Artificial Sequence
  Description of Artificial Sequence: Synthetic oligonucleotide
  Sense strand starting at position 3340 of SEQ ID NO: 913821
cgacauaauuauguggaga

SEQ ID NO: 956643 - RNA, 19 nt, Artificial Sequence
  Description of Artificial Sequence: Synthetic oligonucleotide
  Antisense strand to SEQ ID NO: 956642
ucuccacauaauuaugucg

SEQ ID NO: 956644 - RNA, 19 nt, Artificial Sequence
  Description of Artificial Sequence: Synthetic oligonucleotide
  Sense strand starting at position 30 of SEQ ID NO: 913821
acagaagcuuucucuagaa

SEQ ID NO: 956645 - RNA, 19 nt, Artificial Sequence
  Description of Artificial Sequence: Synthetic oligonucleotide
  Antisense strand to SEQ ID NO: 956644
uucuagagaaagcuucugu

SEQ ID NO: 956646 - RNA, 19 nt, Artificial Sequence
  Description of Artificial Sequence: Synthetic oligonucleotide
  Sense strand starting at position 3878 of SEQ ID NO: 913821
gcacgaugcuauuucuaac

SEQ ID NO: 956647 - RNA, 19 nt, Artificial Sequence
  Description of Artificial Sequence: Synthetic oligonucleotide
  Antisense strand to SEQ ID NO: 956646
guuagaaauagcaucgugc

SEQ ID NO: 956648 - RNA, 19 nt, Artificial Sequence
  Description of Artificial Sequence: Synthetic oligonucleotide
  Sense strand starting at position 3952 of SEQ ID NO: 913821
agcguauucccucuugcuu

SEQ ID NO: 956649 - RNA, 19 nt, Artificial Sequence
  Description of Artificial Sequence: Synthetic oligonucleotide
  Antisense strand to SEQ ID NO: 956648
aagcaagagggaauacgcu

SEQ ID NO: 956650 - RNA, 19 nt, Artificial Sequence
  Description of Artificial Sequence: Synthetic oligonucleotide
  Sense strand starting at position 830 of SEQ ID NO: 913821
gcagaucuacuguaaugua

SEQ ID NO: 956651 - RNA, 19 nt, Artificial Sequence
  Description of Artificial Sequence: Synthetic oligonucleotide
  Antisense strand to SEQ ID NO: 956650
uacauuacaguagaucugc

SEQ ID NO: 956652 - RNA, 19 nt, Artificial Sequence
  Description of Artificial Sequence: Synthetic oligonucleotide
  Sense strand starting at position 1267 of SEQ ID NO: 913821
cuguuaaauuaaucucgaa

SEQ ID NO: 956653 - RNA, 19 nt, Artificial Sequence
  Description of Artificial Sequence: Synthetic oligonucleotide
  Antisense strand to SEQ ID NO: 956652
uucgagauuaauuuaacag

SEQ ID NO: 956654 - RNA, 19 nt, Artificial Sequence
  Description of Artificial Sequence: Synthetic oligonucleotide
  Sense strand starting at position 871 of SEQ ID NO: 913821
uuuccuaagcaguagcaaa

SEQ ID NO: 956655 - RNA, 19 nt, Artificial Sequence
  Description of Artificial Sequence: Synthetic oligonucleotide
  Antisense strand to SEQ ID NO: 956654
uuugcuacugcuuaggaaa

SEQ ID NO: 956656 - RNA, 19 nt, Artificial Sequence
  Description of Artificial Sequence: Synthetic oligonucleotide
  Sense strand starting at position 348 of SEQ ID NO: 913821
ggcguaugaaacuaugagu

SEQ ID NO: 956657 - RNA, 19 nt, Artificial Sequence
  Description of Artificial Sequence: Synthetic oligonucleotide
  Antisense strand to SEQ ID NO: 956656
acucauaguuucauacgcc

SEQ ID NO: 956658 - RNA, 19 nt, Artificial Sequence
  Description of Artificial Sequence: Synthetic oligonucleotide
  Sense strand starting at position 1222 of SEQ ID NO: 913821
cagaacuaagucuggcuua

SEQ ID NO: 956659 - RNA, 19 nt, Artificial Sequence
  Description of Artificial Sequence: Synthetic oligonucleotide
  Antisense strand to SEQ ID NO: 956658
uaagccagacuuaguucug

SEQ ID NO: 956660 - RNA, 19 nt, Artificial Sequence
  Description of Artificial Sequence: Synthetic oligonucleotide
  Sense strand starting at position 161 of SEQ ID NO: 913821
ugcucauguugccugauuu

SEQ ID NO: 956661 - RNA, 19 nt, Artificial Sequence
  Description of Artificial Sequence: Synthetic oligonucleotide
  Antisense strand to SEQ ID NO: 956660
aaaucaggcaacaugagca

SEQ ID NO: 956662 - RNA, 19 nt, Artificial Sequence
  Description of Artificial Sequence: Synthetic oligonucleotide
  Sense strand starting at position 3902 of SEQ ID NO: 913821
ucagcauuccaguaucucu

SEQ ID NO: 956663 - RNA, 19 nt, Artificial Sequence
  Description of Artificial Sequence: Synthetic oligonucleotide
  Antisense strand to SEQ ID NO: 956662
agagauacuggaaugcuga

SEQ ID NO: 956664 - RNA, 19 nt, Artificial Sequence
  Description of Artificial Sequence: Synthetic oligonucleotide
  Sense strand starting at position 214 of SEQ ID NO: 913821
gcguguuuggcaguaguuu

SEQ ID NO: 956665 - RNA, 19 nt, Artificial Sequence
  Description of Artificial Sequence: Synthetic oligonucleotide
  Antisense strand to SEQ ID NO: 956664
aaacuacugccaaacacgc

SEQ ID NO: 956666 - RNA, 19 nt, Artificial Sequence
  Description of Artificial Sequence: Synthetic oligonucleotide
  Sense strand starting at position 340 of SEQ ID NO: 913821
uugugauuggcguaugaaa

SEQ ID NO: 956667 - RNA, 19 nt, Artificial Sequence
  Description of Artificial Sequence: Synthetic oligonucleotide
  Antisense strand to SEQ ID NO: 956666
uuucauacgccaaucacaa

SEQ ID NO: 956668 - RNA, 19 nt, Artificial Sequence
  Description of Artificial Sequence: Synthetic oligonucleotide
  Sense strand starting at position 1440 of SEQ ID NO: 913821
gcccaaugauuggcauaug

SEQ ID NO: 956669 - RNA, 19 nt, Artificial Sequence
  Description of Artificial Sequence: Synthetic oligonucleotide
  Antisense strand to SEQ ID NO: 956668
cauaugccaaucauugggc

SEQ ID NO: 956670 - RNA, 19 nt, Artificial Sequence
  Description of Artificial Sequence: Synthetic oligonucleotide
  Sense strand starting at position 2920 of SEQ ID NO: 913821
ggauccaacugauaaugaa

SEQ ID NO: 956671 - RNA, 19 nt, Artificial Sequence
  Description of Artificial Sequence: Synthetic oligonucleotide
  Antisense strand to SEQ ID NO: 956670
uucauuaucaguuggaucc

SEQ ID NO: 956672 - RNA, 19 nt, Artificial Sequence
  Description of Artificial Sequence: Synthetic oligonucleotide
  Sense strand starting at position 133 of SEQ ID NO: 913821
aaucaugggugagaacaaa

SEQ ID NO: 956673 - RNA, 19 nt, Artificial Sequence
  Description of Artificial Sequence: Synthetic oligonucleotide
  Antisense strand to SEQ ID NO: 956672
uuuguucucacccaugauu

SEQ ID NO: 956674 - RNA, 19 nt, Artificial Sequence
  Description of Artificial Sequence: Synthetic oligonucleotide
  Sense strand starting at position 2982 of SEQ ID NO: 913821
gacaguuuagcuggagucu

SEQ ID NO: 956675 - RNA, 19 nt, Artificial Sequence
  Description of Artificial Sequence: Synthetic oligonucleotide
  Antisense strand to SEQ ID NO: 956674
agacuccagcuaaacuguc

SEQ ID NO: 956676 - RNA, 19 nt, Artificial Sequence
  Description of Artificial Sequence: Synthetic oligonucleotide
  Sense strand starting at position 2738 of SEQ ID NO: 913821
gagcguccucuuuggagaa

SEQ ID NO: 956677 - RNA, 19 nt, Artificial Sequence
  Description of Artificial Sequence: Synthetic oligonucleotide
  Antisense strand to SEQ ID NO: 956676
uucuccaaagaggacgcuc

SEQ ID NO: 956678 - RNA, 19 nt, Artificial Sequence
  Description of Artificial Sequence: Synthetic oligonucleotide
  Sense strand starting at position 816 of SEQ ID NO: 913821
agaauagcuguguggcaga

SEQ ID NO: 956679 - RNA, 19 nt, Artificial Sequence
  Description of Artificial Sequence: Synthetic oligonucleotide
  Antisense strand to SEQ ID NO: 956678
ucugccacacagcuauucu

SEQ ID NO: 956680 - RNA, 19 nt, Artificial Sequence
  Description of Artificial Sequence: Synthetic oligonucleotide
  Sense strand starting at position 3881 of SEQ ID NO: 913821
cgaugcuauuucuaacaag

SEQ ID NO: 956681 - RNA, 19 nt, Artificial Sequence
  Description of Artificial Sequence: Synthetic oligonucleotide
  Antisense strand to SEQ ID NO: 956680
cuuguuagaaauagcaucg

SEQ ID NO: 956682 - RNA, 19 nt, Artificial Sequence
  Description of Artificial Sequence: Synthetic oligonucleotide
  Sense strand starting at position 814 of SEQ ID NO: 913821
acagaauagcuguguggca

SEQ ID NO: 956683 - RNA, 19 nt, Artificial Sequence
  Description of Artificial Sequence: Synthetic oligonucleotide
  Antisense strand to SEQ ID NO: 956682
ugccacacagcuauucugu

SEQ ID NO: 956684 - RNA, 19 nt, Artificial Sequence
  Description of Artificial Sequence: Synthetic oligonucleotide
  Sense strand starting at position 342 of SEQ ID NO: 913821
gugauuggcguaugaaacu

SEQ ID NO: 956685 - RNA, 19 nt, Artificial Sequence
  Description of Artificial Sequence: Synthetic oligonucleotide
  Antisense strand to SEQ ID NO: 956684
aguuucauacgccaaucac

SEQ ID NO: 956686 - RNA, 19 nt, Artificial Sequence
  Description of Artificial Sequence: Synthetic oligonucleotide
  Sense strand starting at position 1107 of SEQ ID NO: 913821
gguggaaauuugcacuguu

SEQ ID NO: 956687 - RNA, 19 nt, Artificial Sequence
  Description of Artificial Sequence: Synthetic oligonucleotide
  Antisense strand to SEQ ID NO: 956686
aacagugcaaauuuccacc

SEQ ID NO: 956688 - RNA, 19 nt, Artificial Sequence
  Description of Artificial Sequence: Synthetic oligonucleotide
  Sense strand starting at position 3342 of SEQ ID NO: 913821
acauaauuauguggagaaa

SEQ ID NO: 956689 - RNA, 19 nt, Artificial Sequence
  Description of Artificial Sequence: Synthetic oligonucleotide
  Antisense strand to SEQ ID NO: 956688
uuucuccacauaauuaugu

SEQ ID NO: 956690 - RNA, 19 nt, Artificial Sequence
  Description of Artificial Sequence: Synthetic oligonucleotide
  Sense strand starting at position 351 of SEQ ID NO: 913821
guaugaaacuaugaguuaa

SEQ ID NO: 956691 - RNA, 19 nt, Artificial Sequence
  Description of Artificial Sequence: Synthetic oligonucleotide
  Antisense strand to SEQ ID NO: 956690
uuaacucauaguuucauac

SEQ ID NO: 956692 - RNA, 19 nt, Artificial Sequence
  Description of Artificial Sequence: Synthetic oligonucleotide
  Sense strand starting at position 1039 of SEQ ID NO: 913821
guaaacagaucggaacauu

SEQ ID NO: 956693 - RNA, 19 nt, Artificial Sequence
  Description of Artificial Sequence: Synthetic oligonucleotide
  Antisense strand to SEQ ID NO: 956692
aauguuccgaucuguuuac

SEQ ID NO: 956694 - RNA, 19 nt, Artificial Sequence
  Description of Artificial Sequence: Synthetic oligonucleotide
  Sense strand starting at position 3958 of SEQ ID NO: 913821
uucccucuugcuuguuauu

SEQ ID NO: 956695 - RNA, 19 nt, Artificial Sequence
  Description of Artificial Sequence: Synthetic oligonucleotide
  Antisense strand to SEQ ID NO: 956694
aauaacaagcaagagggaa

SEQ ID NO: 956696 - RNA, 19 nt, Artificial Sequence
  Description of Artificial Sequence: Synthetic oligonucleotide
  Sense strand starting at position 160 of SEQ ID NO: 913821
cugcucauguugccugauu

SEQ ID NO: 956697 - RNA, 19 nt, Artificial Sequence
  Description of Artificial Sequence: Synthetic oligonucleotide
  Antisense strand to SEQ ID NO: 956696
aaucaggcaacaugagcag

SEQ ID NO: 956698 - RNA, 19 nt, Artificial Sequence
  Description of Artificial Sequence: Synthetic oligonucleotide
  Sense strand starting at position 1441 of SEQ ID NO: 913821
cccaaugauuggcauauga

SEQ ID NO: 956699 - RNA, 19 nt, Artificial Sequence
  Description of Artificial Sequence: Synthetic oligonucleotide
  Antisense strand to SEQ ID NO: 956698
ucauaugccaaucauuggg

SEQ ID NO: 956700 - RNA, 19 nt, Artificial Sequence
  Description of Artificial Sequence: Synthetic oligonucleotide
  Sense strand starting at position 336 of SEQ ID NO: 913821
uuuguugugauuggcguau

SEQ ID NO: 956701 - RNA, 19 nt, Artificial Sequence
  Description of Artificial Sequence: Synthetic oligonucleotide
  Antisense strand to SEQ ID NO: 956700
auacgccaaucacaacaaa

SEQ ID NO: 956702 - RNA, 19 nt, Artificial Sequence
  Description of Artificial Sequence: Synthetic oligonucleotide
  Sense strand starting at position 1139 of SEQ ID NO: 913821
gugguucugugccauuuga

SEQ ID NO: 956703 - RNA, 19 nt, Artificial Sequence
  Description of Artificial Sequence: Synthetic oligonucleotide
  Antisense strand to SEQ ID NO: 956702
ucaaauggcacagaaccac

SEQ ID NO: 956704 - RNA, 19 nt, Artificial Sequence
  Description of Artificial Sequence: Synthetic oligonucleotide
  Sense strand starting at position 1463 of SEQ ID NO: 913821
gcagaucaguuagggaacu

SEQ ID NO: 956705 - RNA, 19 nt, Artificial Sequence
  Description of Artificial Sequence: Synthetic oligonucleotide
  Antisense strand to SEQ ID NO: 956704
aguucccuaacugaucugc

SEQ ID NO: 956706 - RNA, 19 nt, Artificial Sequence
  Description of Artificial Sequence: Synthetic oligonucleotide
  Sense strand starting at position 1011 of SEQ ID NO: 913821
gcacaauaguaaugaucau

SEQ ID NO: 956707 - RNA, 19 nt, Artificial Sequence
  Description of Artificial Sequence: Synthetic oligonucleotide
  Antisense strand to SEQ ID NO: 956706
augaucauuacuauugugc

SEQ ID NO: 956708 - RNA, 19 nt, Artificial Sequence
  Description of Artificial Sequence: Synthetic oligonucleotide
  Sense strand starting at position 3660 of SEQ ID NO: 913821
uuaugauugugccacuuaa

SEQ ID NO: 956709 - RNA, 19 nt, Artificial Sequence
  Description of Artificial Sequence: Synthetic oligonucleotide
  Antisense strand to SEQ ID NO: 956708
uuaaguggcacaaucauaa

SEQ ID NO: 956710 - RNA, 19 nt, Artificial Sequence
  Description of Artificial Sequence: Synthetic oligonucleotide
  Sense strand starting at position 225 of SEQ ID NO: 913821
aguaguuucuaccacaggu

SEQ ID NO: 956711 - RNA, 19 nt, Artificial Sequence
  Description of Artificial Sequence: Synthetic oligonucleotide
  Antisense strand to SEQ ID NO: 956710
accugugguagaaacuacu

SEQ ID NO: 956712 - RNA, 19 nt, Artificial Sequence
  Description of Artificial Sequence: Synthetic oligonucleotide
  Sense strand starting at position 1263 of SEQ ID NO: 913822
aagaaucaacguuggaaug

SEQ ID NO: 956713 - RNA, 19 nt, Artificial Sequence
  Description of Artificial Sequence: Synthetic oligonucleotide
  Antisense strand to SEQ ID NO: 956712
cauuccaacguugauucuu

SEQ ID NO: 956714 - RNA, 19 nt, Artificial Sequence
  Description of Artificial Sequence: Synthetic oligonucleotide
  Sense strand starting at position 2615 of SEQ ID NO: 913822
guccucuuuggagaaguaa

SEQ ID NO: 956715 - RNA, 19 nt, Artificial Sequence
  Description of Artificial Sequence: Synthetic oligonucleotide
  Antisense strand to SEQ ID NO: 956714
uuacuucuccaaagaggac

SEQ ID NO: 956716 - RNA, 19 nt, Artificial Sequence
  Description of Artificial Sequence: Synthetic oligonucleotide
  Sense strand starting at position 1250 of SEQ ID NO: 913822
uuuauucggcaauaagaau

SEQ ID NO: 956717 - RNA, 19 nt, Artificial Sequence
  Description of Artificial Sequence: Synthetic oligonucleotide
  Antisense strand to SEQ ID NO: 956716
auucuuauugccgaauaaa

SEQ ID NO: 956718 - RNA, 19 nt, Artificial Sequence
  Description of Artificial Sequence: Synthetic oligonucleotide
  Sense strand starting at position 3824 of SEQ ID NO: 913822
gagcguauucccucuugcu

SEQ ID NO: 956719 - RNA, 19 nt, Artificial Sequence
  Description of Artificial Sequence: Synthetic oligonucleotide
  Antisense strand to SEQ ID NO: 956718
agcaagagggaauacgcuc

SEQ ID NO: 956720 - RNA, 19 nt, Artificial Sequence
  Description of Artificial Sequence: Synthetic oligonucleotide
  Sense strand starting at position 911 of SEQ ID NO: 913822
uguaaacagaucggaacau

SEQ ID NO: 956721 - RNA, 19 nt, Artificial Sequence
  Description of Artificial Sequence: Synthetic oligonucleotide
  Antisense strand to SEQ ID NO: 956720
auguuccgaucuguuuaca

SEQ ID NO: 956722 - RNA, 19 nt, Artificial Sequence
  Description of Artificial Sequence: Synthetic oligonucleotide
  Sense strand starting at position 3213 of SEQ ID NO: 913822
cgacauaauuauguggaga

SEQ ID NO: 956723 - RNA, 19 nt, Artificial Sequence
  Description of Artificial Sequence: Synthetic oligonucleotide
  Antisense strand to SEQ ID NO: 956722
ucuccacauaauuaugucg

SEQ ID NO: 956724 - RNA, 19 nt, Artificial Sequence
  Description of Artificial Sequence: Synthetic oligonucleotide
  Sense strand starting at position 3751 of SEQ ID NO: 913822
gcacgaugcuauuucuaac

SEQ ID NO: 956725 - RNA, 19 nt, Artificial Sequence
  Description of Artificial Sequence: Synthetic oligonucleotide
  Antisense strand to SEQ ID NO: 956724
guuagaaauagcaucgugc

SEQ ID NO: 956726 - RNA, 19 nt, Artificial Sequence
  Description of Artificial Sequence: Synthetic oligonucleotide
  Sense strand starting at position 3825 of SEQ ID NO: 913822
agcguauucccucuugcuu

SEQ ID NO: 956727 - RNA, 19 nt, Artificial Sequence
  Description of Artificial Sequence: Synthetic oligonucleotide
  Antisense strand to SEQ ID NO: 956726
aagcaagagggaauacgcu

SEQ ID NO: 956728 - RNA, 19 nt, Artificial Sequence
  Description of Artificial Sequence: Synthetic oligonucleotide
  Sense strand starting at position 703 of SEQ ID NO: 913822
gcagaucuacuguaaugua

SEQ ID NO: 956729 - RNA, 19 nt, Artificial Sequence
  Description of Artificial Sequence: Synthetic oligonucleotide
  Antisense strand to SEQ ID NO: 956728
uacauuacaguagaucugc

SEQ ID NO: 956730 - RNA, 19 nt, Artificial Sequence
  Description of Artificial Sequence: Synthetic oligonucleotide
  Sense strand starting at position 1140 of SEQ ID NO: 913822
cuguuaaauuaaucucgaa

SEQ ID NO: 956731 - RNA, 19 nt, Artificial Sequence
  Description of Artificial Sequence: Synthetic oligonucleotide
  Antisense strand to SEQ ID NO: 956730
uucgagauuaauuuaacag

SEQ ID NO: 956732 - RNA, 19 nt, Artificial Sequence
  Description of Artificial Sequence: Synthetic oligonucleotide
  Sense strand starting at position 744 of SEQ ID NO: 913822
uuuccuaagcaguagcaaa

SEQ ID NO: 956733 - RNA, 19 nt, Artificial Sequence
  Description of Artificial Sequence: Synthetic oligonucleotide
  Antisense strand to SEQ ID NO: 956732
uuugcuacugcuuaggaaa

SEQ ID NO: 956734 - RNA, 19 nt, Artificial Sequence
  Description of Artificial Sequence: Synthetic oligonucleotide
  Sense strand starting at position 221 of SEQ ID NO: 913822
ggcguaugaaacuaugagu

SEQ ID NO: 956735 - RNA, 19 nt, Artificial Sequence
  Description of Artificial Sequence: Synthetic oligonucleotide
  Antisense strand to SEQ ID NO: 956734
acucauaguuucauacgcc

SEQ ID NO: 956736 - RNA, 19 nt, Artificial Sequence
  Description of Artificial Sequence: Synthetic oligonucleotide
  Sense strand starting at position 1095 of SEQ ID NO: 913822
cagaacuaagucuggcuua

SEQ ID NO: 956737 - RNA, 19 nt, Artificial Sequence
  Description of Artificial Sequence: Synthetic oligonucleotide
  Antisense strand to SEQ ID NO: 956736
uaagccagacuuaguucug

SEQ ID NO: 956738 - RNA, 19 nt, Artificial Sequence
  Description of Artificial Sequence: Synthetic oligonucleotide
  Sense strand starting at position 34 of SEQ ID NO: 913822
ugcucauguugccugauuu

SEQ ID NO: 956739 - RNA, 19 nt, Artificial Sequence
  Description of Artificial Sequence: Synthetic oligonucleotide
  Antisense strand to SEQ ID NO: 956738
aaaucaggcaacaugagca

SEQ ID NO: 956740 - RNA, 19 nt, Artificial Sequence
  Description of Artificial Sequence: Synthetic oligonucleotide
  Sense strand starting at position 3775 of SEQ ID NO: 913822
ucagcauuccaguaucucu

SEQ ID NO: 956741 - RNA, 19 nt, Artificial Sequence
  Description of Artificial Sequence: Synthetic oligonucleotide
  Antisense strand to SEQ ID NO: 956740
agagauacuggaaugcuga

SEQ ID NO: 956742 - RNA, 19 nt, Artificial Sequence
  Description of Artificial Sequence: Synthetic oligonucleotide
  Sense strand starting at position 87 of SEQ ID NO: 913822
gcguguuuggcaguaguuu

SEQ ID NO: 956743 - RNA, 19 nt, Artificial Sequence
  Description of Artificial Sequence: Synthetic oligonucleotide
  Antisense strand to SEQ ID NO: 956742
aaacuacugccaaacacgc

SEQ ID NO: 956744 - RNA, 19 nt, Artificial Sequence
  Description of Artificial Sequence: Synthetic oligonucleotide
  Sense strand starting at position 213 of SEQ ID NO: 913822
uugugauuggcguaugaaa

SEQ ID NO: 956745 - RNA, 19 nt, Artificial Sequence
  Description of Artificial Sequence: Synthetic oligonucleotide
  Antisense strand to SEQ ID NO: 956744
uuucauacgccaaucacaa

SEQ ID NO: 956746 - RNA, 19 nt, Artificial Sequence
  Description of Artificial Sequence: Synthetic oligonucleotide
  Sense strand starting at position 1313 of SEQ ID NO: 913822
gcccaaugauuggcauaug

SEQ ID NO: 956747 - RNA, 19 nt, Artificial Sequence
  Description of Artificial Sequence: Synthetic oligonucleotide
  Antisense strand to SEQ ID NO: 956746
cauaugccaaucauugggc

SEQ ID NO: 956748 - RNA, 19 nt, Artificial Sequence
  Description of Artificial Sequence: Synthetic oligonucleotide
  Sense strand starting at position 2793 of SEQ ID NO: 913822
ggauccaacugauaaugaa

SEQ ID NO: 956749 - RNA, 19 nt, Artificial Sequence
  Description of Artificial Sequence: Synthetic oligonucleotide
  Antisense strand to SEQ ID NO: 956748
uucauuaucaguuggaucc

SEQ ID NO: 956750 - RNA, 19 nt, Artificial Sequence
  Description of Artificial Sequence: Synthetic oligonucleotide
  Sense strand starting at position 6 of SEQ ID NO: 913822
aaucaugggugagaacaaa

SEQ ID NO: 956751 - RNA, 19 nt, Artificial Sequence
  Description of Artificial Sequence: Synthetic oligonucleotide
  Antisense strand to SEQ ID NO: 956750
uuuguucucacccaugauu

SEQ ID NO: 956752 - RNA, 19 nt, Artificial Sequence
  Description of Artificial Sequence: Synthetic oligonucleotide
  Sense strand starting at position 2855 of SEQ ID NO: 913822
gacaguuuagcuggagucu

SEQ ID NO: 956753 - RNA, 19 nt, Artificial Sequence
  Description of Artificial Sequence: Synthetic oligonucleotide
  Antisense strand to SEQ ID NO: 956752
agacuccagcuaaacuguc

SEQ ID NO: 956754 - RNA, 19 nt, Artificial Sequence
  Description of Artificial Sequence: Synthetic oligonucleotide
  Sense strand starting at position 2611 of SEQ ID NO: 913822
gagcguccucuuuggagaa

SEQ ID NO: 956755 - RNA, 19 nt, Artificial Sequence
  Description of Artificial Sequence: Synthetic oligonucleotide
  Antisense strand to SEQ ID NO: 956754
uucuccaaagaggacgcuc

SEQ ID NO: 956756 - RNA, 19 nt, Artificial Sequence
  Description of Artificial Sequence: Synthetic oligonucleotide
  Sense strand starting at position 3897 of SEQ ID NO: 913822
guagucaguaguuaauugu

SEQ ID NO: 956757 - RNA, 19 nt, Artificial Sequence
  Description of Artificial Sequence: Synthetic oligonucleotide
  Antisense strand to SEQ ID NO: 956756
acaauuaacuacugacuac

SEQ ID NO: 956758 - RNA, 19 nt, Artificial Sequence
  Description of Artificial Sequence: Synthetic oligonucleotide
  Sense strand starting at position 689 of SEQ ID NO: 913822
agaauagcuguguggcaga

SEQ ID NO: 956759 - RNA, 19 nt, Artificial Sequence
  Description of Artificial Sequence: Synthetic oligonucleotide
  Antisense strand to SEQ ID NO: 956758
ucugccacacagcuauucu

SEQ ID NO: 956760 - RNA, 19 nt, Artificial Sequence
  Description of Artificial Sequence: Synthetic oligonucleotide
  Sense strand starting at position 3754 of SEQ ID NO: 913822
cgaugcuauuucuaacaag

SEQ ID NO: 956761 - RNA, 19 nt, Artificial Sequence
  Description of Artificial Sequence: Synthetic oligonucleotide
  Antisense strand to SEQ ID NO: 956760
cuuguuagaaauagcaucg

SEQ ID NO: 956762 - RNA, 19 nt, Artificial Sequence
  Description of Artificial Sequence: Synthetic oligonucleotide
  Sense strand starting at position 3905 of SEQ ID NO: 913822
uaguuaauuguauguacga

SEQ ID NO: 956763 - RNA, 19 nt, Artificial Sequence
  Description of Artificial Sequence: Synthetic oligonucleotide
  Antisense strand to SEQ ID NO: 956762
ucguacauacaauuaacua

SEQ ID NO: 956764 - RNA, 19 nt, Artificial Sequence
  Description of Artificial Sequence: Synthetic oligonucleotide
  Sense strand starting at position 687 of SEQ ID NO: 913822
acagaauagcuguguggca

SEQ ID NO: 956765 - RNA, 19 nt, Artificial Sequence
  Description of Artificial Sequence: Synthetic oligonucleotide
  Antisense strand to SEQ ID NO: 956764
ugccacacagcuauucugu

SEQ ID NO: 956766 - RNA, 19 nt, Artificial Sequence
  Description of Artificial Sequence: Synthetic oligonucleotide
  Sense strand starting at position 215 of SEQ ID NO: 913822
gugauuggcguaugaaacu

SEQ ID NO: 956767 - RNA, 19 nt, Artificial Sequence
  Description of Artificial Sequence: Synthetic oligonucleotide
  Antisense strand to SEQ ID NO: 956766
aguuucauacgccaaucac

SEQ ID NO: 956768 - RNA, 19 nt, Artificial Sequence
  Description of Artificial Sequence: Synthetic oligonucleotide
  Sense strand starting at position 3901 of SEQ ID NO: 913822
ucaguaguuaauuguaugu

SEQ ID NO: 956769 - RNA, 19 nt, Artificial Sequence
  Description of Artificial Sequence: Synthetic oligonucleotide
  Antisense strand to SEQ ID NO: 956768
acauacaauuaacuacuga

SEQ ID NO: 956770 - RNA, 19 nt, Artificial Sequence
  Description of Artificial Sequence: Synthetic oligonucleotide
  Sense strand starting at position 980 of SEQ ID NO: 913822
gguggaaauuugcacuguu

SEQ ID NO: 956771 - RNA, 19 nt, Artificial Sequence
  Description of Artificial Sequence: Synthetic oligonucleotide
  Antisense strand to SEQ ID NO: 956770
aacagugcaaauuuccacc

SEQ ID NO: 956772 - RNA, 19 nt, Artificial Sequence
  Description of Artificial Sequence: Synthetic oligonucleotide
  Sense strand starting at position 3215 of SEQ ID NO: 913822
acauaauuauguggagaaa

SEQ ID NO: 956773 - RNA, 19 nt, Artificial Sequence
  Description of Artificial Sequence: Synthetic oligonucleotide
  Antisense strand to SEQ ID NO: 956772
uuucuccacauaauuaugu

SEQ ID NO: 956774 - RNA, 19 nt, Artificial Sequence
  Description of Artificial Sequence: Synthetic oligonucleotide
  Sense strand starting at position 224 of SEQ ID NO: 913822
guaugaaacuaugaguuaa

SEQ ID NO: 956775 - RNA, 19 nt, Artificial Sequence
  Description of Artificial Sequence: Synthetic oligonucleotide
  Antisense strand to SEQ ID NO: 956774
uuaacucauaguuucauac

SEQ ID NO: 956776 - RNA, 19 nt, Artificial Sequence
  Description of Artificial Sequence: Synthetic oligonucleotide
  Sense strand starting at position 912 of SEQ ID NO: 913822
guaaacagaucggaacauu

SEQ ID NO: 956777 - RNA, 19 nt, Artificial Sequence
  Description of Artificial Sequence: Synthetic oligonucleotide
  Antisense strand to SEQ ID NO: 956776
aauguuccgaucuguuuac

SEQ ID NO: 956778 - RNA, 19 nt, Artificial Sequence
  Description of Artificial Sequence: Synthetic oligonucleotide
  Sense strand starting at position 3935 of SEQ ID NO: 913822
ccuuuacugugcucaguuu

SEQ ID NO: 956779 - RNA, 19 nt, Artificial Sequence
  Description of Artificial Sequence: Synthetic oligonucleotide
  Antisense strand to SEQ ID NO: 956778
aaacugagcacaguaaagg

SEQ ID NO: 956780 - RNA, 19 nt, Artificial Sequence
  Description of Artificial Sequence: Synthetic oligonucleotide
  Sense strand starting at position 3831 of SEQ ID NO: 913822
uucccucuugcuuguuauu

SEQ ID NO: 956781 - RNA, 19 nt, Artificial Sequence
  Description of Artificial Sequence: Synthetic oligonucleotide
  Antisense strand to SEQ ID NO: 956780
aauaacaagcaagagggaa

SEQ ID NO: 956782 - RNA, 19 nt, Artificial Sequence
  Description of Artificial Sequence: Synthetic oligonucleotide
  Sense strand starting at position 33 of SEQ ID NO: 913822
cugcucauguugccugauu

SEQ ID NO: 956783 - RNA, 19 nt, Artificial Sequence
  Description of Artificial Sequence: Synthetic oligonucleotide
  Antisense strand to SEQ ID NO: 956782
aaucaggcaacaugagcag

SEQ ID NO: 956784 - RNA, 19 nt, Artificial Sequence
  Description of Artificial Sequence: Synthetic oligonucleotide
  Sense strand starting at position 1314 of SEQ ID NO: 913822
cccaaugauuggcauauga

SEQ ID NO: 956785 - RNA, 19 nt, Artificial Sequence
  Description of Artificial Sequence: Synthetic oligonucleotide
  Antisense strand to SEQ ID NO: 956784
ucauaugccaaucauuggg

SEQ ID NO: 956786 - RNA, 19 nt, Artificial Sequence
  Description of Artificial Sequence: Synthetic oligonucleotide
  Sense strand starting at position 209 of SEQ ID NO: 913822
uuuguugugauuggcguau

SEQ ID NO: 956787 - RNA, 19 nt, Artificial Sequence
  Description of Artificial Sequence: Synthetic oligonucleotide
  Antisense strand to SEQ ID NO: 956786
auacgccaaucacaacaaa

SEQ ID NO: 956788 - RNA, 19 nt, Artificial Sequence
  Description of Artificial Sequence: Synthetic oligonucleotide
  Sense strand starting at position 1012 of SEQ ID NO: 913822
gugguucugugccauuuga

SEQ ID NO: 956789 - RNA, 19 nt, Artificial Sequence
  Description of Artificial Sequence: Synthetic oligonucleotide
  Antisense strand to SEQ ID NO: 956788
ucaaauggcacagaaccac

SEQ ID NO: 956790 - RNA, 19 nt, Artificial Sequence
  Description of Artificial Sequence: Synthetic oligonucleotide
  Sense strand starting at position 1336 of SEQ ID NO: 913822
gcagaucaguuagggaacu

SEQ ID NO: 956791 - RNA, 19 nt, Artificial Sequence
  Description of Artificial Sequence: Synthetic oligonucleotide
  Antisense strand to SEQ ID NO: 956790
aguucccuaacugaucugc

SEQ ID NO: 956792 - RNA, 19 nt, Artificial Sequence
  Description of Artificial Sequence: Synthetic oligonucleotide
  Sense strand starting at position 3534 of SEQ ID NO: 913823
uguggaucaugacuaauaa

SEQ ID NO: 956793 - RNA, 19 nt, Artificial Sequence
  Description of Artificial Sequence: Synthetic oligonucleotide
  Antisense strand to SEQ ID NO: 956792
uuauuagucaugauccaca

SEQ ID NO: 956794 - RNA, 19 nt, Artificial Sequence
  Description of Artificial Sequence: Synthetic oligonucleotide
  Sense strand starting at position 1255 of SEQ ID NO: 913823
uaaagagaauugucuuuag

SEQ ID NO: 956795 - RNA, 19 nt, Artificial Sequence
  Description of Artificial Sequence: Synthetic oligonucleotide
  Antisense strand to SEQ ID NO: 956794
cuaaagacaauucucuuua

SEQ ID NO: 956796 - RNA, 19 nt, Artificial Sequence
  Description of Artificial Sequence: Synthetic oligonucleotide
  Sense strand starting at position 2416 of SEQ ID NO: 913823
agucacagugauuauauua

SEQ ID NO: 956797 - RNA, 19 nt, Artificial Sequence
  Description of Artificial Sequence: Synthetic oligonucleotide
  Antisense strand to SEQ ID NO: 956796
uaauauaaucacugugacu

SEQ ID NO: 956798 - RNA, 19 nt, Artificial Sequence
  Description of Artificial Sequence: Synthetic oligonucleotide
  Sense strand starting at position 2160 of SEQ ID NO: 913823
caccgugaucaauaacuag

SEQ ID NO: 956799 - RNA, 19 nt, Artificial Sequence
  Description of Artificial Sequence: Synthetic oligonucleotide
  Antisense strand to SEQ ID NO: 956798
cuaguuauugaucacggug

SEQ ID NO: 956800 - RNA, 19 nt, Artificial Sequence
  Description of Artificial Sequence: Synthetic oligonucleotide
  Sense strand starting at position 3721 of SEQ ID NO: 913823
uuugauaaaggcuaguaau

SEQ ID NO: 956801 - RNA, 19 nt, Artificial Sequence
  Description of Artificial Sequence: Synthetic oligonucleotide
  Antisense strand to SEQ ID NO: 956800
auuacuagccuuuaucaaa

SEQ ID NO: 956802 - RNA, 19 nt, Artificial Sequence
  Description of Artificial Sequence: Synthetic oligonucleotide
  Sense strand starting at position 3462 of SEQ ID NO: 913823
gccuucuuugaugagauaa

SEQ ID NO: 956803 - RNA, 19 nt, Artificial Sequence
  Description of Artificial Sequence: Synthetic oligonucleotide
  Antisense strand to SEQ ID NO: 956802
uuaucucaucaaagaaggc

SEQ ID NO: 956804 - RNA, 19 nt, Artificial Sequence
  Description of Artificial Sequence: Synthetic oligonucleotide
  Sense strand starting at position 3350 of SEQ ID NO: 913823
ggauuacguacugaauauu

SEQ ID NO: 956805 - RNA, 19 nt, Artificial Sequence
  Description of Artificial Sequence: Synthetic oligonucleotide
  Antisense strand to SEQ ID NO: 956804
aauauucaguacguaaucc

SEQ ID NO: 956806 - RNA, 19 nt, Artificial Sequence
  Description of Artificial Sequence: Synthetic oligonucleotide
  Sense strand starting at position 3158 of SEQ ID NO: 913823
accuuaagcgcguuacuua

SEQ ID NO: 956807 - RNA, 19 nt, Artificial Sequence
  Description of Artificial Sequence: Synthetic oligonucleotide
  Antisense strand to SEQ ID NO: 956806
uaaguaacgcgcuuaaggu

SEQ ID NO: 956808 - RNA, 19 nt, Artificial Sequence
  Description of Artificial Sequence: Synthetic oligonucleotide
  Sense strand starting at position 3473 of SEQ ID NO: 913823
ugagauaacuuccuuuaug

SEQ ID NO: 956809 - RNA, 19 nt, Artificial Sequence
  Description of Artificial Sequence: Synthetic oligonucleotide
  Antisense strand to SEQ ID NO: 956808
cauaaaggaaguuaucuca

SEQ ID NO: 956810 - RNA, 19 nt, Artificial Sequence
  Description of Artificial Sequence: Synthetic oligonucleotide
  Sense strand starting at position 3904 of SEQ ID NO: 913823
ccaggauucucauucuagg

SEQ ID NO: 956811 - RNA, 19 nt, Artificial Sequence
  Description of Artificial Sequence: Synthetic oligonucleotide
  Antisense strand to SEQ ID NO: 956810
ccuagaaugagaauccugg

SEQ ID NO: 956812 - RNA, 19 nt, Artificial Sequence
  Description of Artificial Sequence: Synthetic oligonucleotide
  Sense strand starting at position 2989 of SEQ ID NO: 913823
ggaagcugugauuagcaaa

SEQ ID NO: 956813 - RNA, 19 nt, Artificial Sequence
  Description of Artificial Sequence: Synthetic oligonucleotide
  Antisense strand to SEQ ID NO: 956812
uuugcuaaucacagcuucc

SEQ ID NO: 956814 - RNA, 19 nt, Artificial Sequence
  Description of Artificial Sequence: Synthetic oligonucleotide
  Sense strand starting at position 1343 of SEQ ID NO: 913823
agagcaagguaaucucuaa

SEQ ID NO: 956815 - RNA, 19 nt, Artificial Sequence
  Description of Artificial Sequence: Synthetic oligonucleotide
  Antisense strand to SEQ ID NO: 956814
uuagagauuaccuugcucu

SEQ ID NO: 956816 - RNA, 19 nt, Artificial Sequence
  Description of Artificial Sequence: Synthetic oligonucleotide
  Sense strand starting at position 2500 of SEQ ID NO: 913823
gaauuaauguguccaauag

SEQ ID NO: 956817 - RNA, 19 nt, Artificial Sequence
  Description of Artificial Sequence: Synthetic oligonucleotide
  Antisense strand to SEQ ID NO: 956816
cuauuggacacauuaauuc

SEQ ID NO: 956818 - RNA, 19 nt, Artificial Sequence
  Description of Artificial Sequence: Synthetic oligonucleotide
  Sense strand starting at position 3529 of SEQ ID NO: 913823
gguucuguggaucaugacu

SEQ ID NO: 956819 - RNA, 19 nt, Artificial Sequence
  Description of Artificial Sequence: Synthetic oligonucleotide
  Antisense strand to SEQ ID NO: 956818
agucaugauccacagaacc

SEQ ID NO: 956820 - RNA, 19 nt, Artificial Sequence
  Description of Artificial Sequence: Synthetic oligonucleotide
  Sense strand starting at position 2154 of SEQ ID NO: 913823
aauggucaccgugaucaau

SEQ ID NO: 956821 - RNA, 19 nt, Artificial Sequence
  Description of Artificial Sequence: Synthetic oligonucleotide
  Antisense strand to SEQ ID NO: 956820
auugaucacggugaccauu

SEQ ID NO: 956822 - RNA, 19 nt, Artificial Sequence
  Description of Artificial Sequence: Synthetic oligonucleotide
  Sense strand starting at position 2415 of SEQ ID NO: 913823
gagucacagugauuauauu

SEQ ID NO: 956823 - RNA, 19 nt, Artificial Sequence
  Description of Artificial Sequence: Synthetic oligonucleotide
  Antisense strand to SEQ ID NO: 956822
aauauaaucacugugacuc

SEQ ID NO: 956824 - RNA, 19 nt, Artificial Sequence
  Description of Artificial Sequence: Synthetic oligonucleotide
  Sense strand starting at position 3855 of SEQ ID NO: 913823
ugaaacauccagugaguuu

SEQ ID NO: 956825 - RNA, 19 nt, Artificial Sequence
  Description of Artificial Sequence: Synthetic oligonucleotide
  Antisense strand to SEQ ID NO: 956824
aaacucacuggauguuuca

SEQ ID NO: 956826 - RNA, 19 nt, Artificial Sequence
  Description of Artificial Sequence: Synthetic oligonucleotide
  Sense strand starting at position 2819 of SEQ ID NO: 913823
gagguaacuuucucaaggu

SEQ ID NO: 956827 - RNA, 19 nt, Artificial Sequence
  Description of Artificial Sequence: Synthetic oligonucleotide
  Antisense strand to SEQ ID NO: 956826
accuugagaaaguuaccuc

SEQ ID NO: 956828 - RNA, 19 nt, Artificial Sequence
  Description of Artificial Sequence: Synthetic oligonucleotide
  Sense strand starting at position 2628 of SEQ ID NO: 913823
aguguuaggauacgaauca

SEQ ID NO: 956829 - RNA, 19 nt, Artificial Sequence
  Description of Artificial Sequence: Synthetic oligonucleotide
  Antisense strand to SEQ ID NO: 956828
ugauucguauccuaacacu

SEQ ID NO: 956830 - RNA, 19 nt, Artificial Sequence
  Description of Artificial Sequence: Synthetic oligonucleotide
  Sense strand starting at position 3264 of SEQ ID NO: 913823
aucuguauguuacuuagaa

SEQ ID NO: 956831 - RNA, 19 nt, Artificial Sequence
  Description of Artificial Sequence: Synthetic oligonucleotide
  Antisense strand to SEQ ID NO: 956830
uucuaaguaacauacagau

SEQ ID NO: 956832 - RNA, 19 nt, Artificial Sequence
  Description of Artificial Sequence: Synthetic oligonucleotide
  Sense strand starting at position 3544 of SEQ ID NO: 913823
gacuaauaauguucgauuc

SEQ ID NO: 956833 - RNA, 19 nt, Artificial Sequence
  Description of Artificial Sequence: Synthetic oligonucleotide
  Antisense strand to SEQ ID NO: 956832
gaaucgaacauuauuaguc

SEQ ID NO: 956834 - RNA, 19 nt, Artificial Sequence
  Description of Artificial Sequence: Synthetic oligonucleotide
  Sense strand starting at position 2424 of SEQ ID NO: 913823
ugauuauauuaugcaaggu

SEQ ID NO: 956835 - RNA, 19 nt, Artificial Sequence
  Description of Artificial Sequence: Synthetic oligonucleotide
  Antisense strand to SEQ ID NO: 956834
accuugcauaauauaauca

SEQ ID NO: 956836 - RNA, 19 nt, Artificial Sequence
  Description of Artificial Sequence: Synthetic oligonucleotide
  Sense strand starting at position 1259 of SEQ ID NO: 913823
gagaauugucuuuaguguu

SEQ ID NO: 956837 - RNA, 19 nt, Artificial Sequence
  Description of Artificial Sequence: Synthetic oligonucleotide
  Antisense strand to SEQ ID NO: 956836
aacacuaaagacaauucuc

SEQ ID NO: 956838 - RNA, 19 nt, Artificial Sequence
  Description of Artificial Sequence: Synthetic oligonucleotide
  Sense strand starting at position 3665 of SEQ ID NO: 913823
ggugaacugucuguggaaa

SEQ ID NO: 956839 - RNA, 19 nt, Artificial Sequence
  Description of Artificial Sequence: Synthetic oligonucleotide
  Antisense strand to SEQ ID NO: 956838
uuuccacagacaguucacc

SEQ ID NO: 956840 - RNA, 19 nt, Artificial Sequence
  Description of Artificial Sequence: Synthetic oligonucleotide
  Sense strand starting at position 3588 of SEQ ID NO: 913823
uaacaucugccauguagag

SEQ ID NO: 956841 - RNA, 19 nt, Artificial Sequence
  Description of Artificial Sequence: Synthetic oligonucleotide
  Antisense strand to SEQ ID NO: 956840
cucuacauggcagauguua

SEQ ID NO: 956842 - RNA, 19 nt, Artificial Sequence
  Description of Artificial Sequence: Synthetic oligonucleotide
  Sense strand starting at position 3664 of SEQ ID NO: 913823
aggugaacugucuguggaa

SEQ ID NO: 956843 - RNA, 19 nt, Artificial Sequence
  Description of Artificial Sequence: Synthetic oligonucleotide
  Antisense strand to SEQ ID NO: 956842
uuccacagacaguucaccu

SEQ ID NO: 956844 - RNA, 19 nt, Artificial Sequence
  Description of Artificial Sequence: Synthetic oligonucleotide
  Sense strand starting at position 3085 of SEQ ID NO: 913823
guaguuuagugauuaacag

SEQ ID NO: 956845 - RNA, 19 nt, Artificial Sequence
  Description of Artificial Sequence: Synthetic oligonucleotide
  Antisense strand to SEQ ID NO: 956844
cuguuaaucacuaaacuac

SEQ ID NO: 956846 - RNA, 19 nt, Artificial Sequence
  Description of Artificial Sequence: Synthetic oligonucleotide
  Sense strand starting at position 2868 of SEQ ID NO: 913823
ucagaagcgagucauucuu

SEQ ID NO: 956847 - RNA, 19 nt, Artificial Sequence
  Description of Artificial Sequence: Synthetic oligonucleotide
  Antisense strand to SEQ ID NO: 956846
aagaaugacucgcuucuga

SEQ ID NO: 956848 - RNA, 19 nt, Artificial Sequence
  Description of Artificial Sequence: Synthetic oligonucleotide
  Sense strand starting at position 2163 of SEQ ID NO: 913823
cgugaucaauaacuagcaa

SEQ ID NO: 956849 - RNA, 19 nt, Artificial Sequence
  Description of Artificial Sequence: Synthetic oligonucleotide
  Antisense strand to SEQ ID NO: 956848
uugcuaguuauugaucacg

SEQ ID NO: 956850 - RNA, 19 nt, Artificial Sequence
  Description of Artificial Sequence: Synthetic oligonucleotide
  Sense strand starting at position 3545 of SEQ ID NO: 913823
acuaauaauguucgauucu

SEQ ID NO: 956851 - RNA, 19 nt, Artificial Sequence
  Description of Artificial Sequence: Synthetic oligonucleotide
  Antisense strand to SEQ ID NO: 956850
agaaucgaacauuauuagu

SEQ ID NO: 956852 - RNA, 19 nt, Artificial Sequence
  Description of Artificial Sequence: Synthetic oligonucleotide
  Sense strand starting at position 3265 of SEQ ID NO: 913823
ucuguauguuacuuagaac

SEQ ID NO: 956853 - RNA, 19 nt, Artificial Sequence
  Description of Artificial Sequence: Synthetic oligonucleotide
  Antisense strand to SEQ ID NO: 956852
guucuaaguaacauacaga

SEQ ID NO: 956854 - RNA, 19 nt, Artificial Sequence
  Description of Artificial Sequence: Synthetic oligonucleotide
  Sense strand starting at position 3297 of SEQ ID NO: 913823
caauaagccuguguaagau

SEQ ID NO: 956855 - RNA, 19 nt, Artificial Sequence
  Description of Artificial Sequence: Synthetic oligonucleotide
  Antisense strand to SEQ ID NO: 956854
aucuuacacaggcuuauug

SEQ ID NO: 956856 - RNA, 19 nt, Artificial Sequence
  Description of Artificial Sequence: Synthetic oligonucleotide
  Sense strand starting at position 2498 of SEQ ID NO: 913823
gugaauuaauguguccaau

SEQ ID NO: 956857 - RNA, 19 nt, Artificial Sequence
  Description of Artificial Sequence: Synthetic oligonucleotide
  Antisense strand to SEQ ID NO: 956856
auuggacacauuaauucac

SEQ ID NO: 956858 - RNA, 19 nt, Artificial Sequence
  Description of Artificial Sequence: Synthetic oligonucleotide
  Sense strand starting at position 2156 of SEQ ID NO: 913823
uggucaccgugaucaauaa

SEQ ID NO: 956859 - RNA, 19 nt, Artificial Sequence
  Description of Artificial Sequence: Synthetic oligonucleotide
  Antisense strand to SEQ ID NO: 956858
uuauugaucacggugacca

SEQ ID NO: 956860 - RNA, 19 nt, Artificial Sequence
  Description of Artificial Sequence: Synthetic oligonucleotide
  Sense strand starting at position 2059 of SEQ ID NO: 913823
ugggcaugugcagaaaugu

SEQ ID NO: 956861 - RNA, 19 nt, Artificial Sequence
  Description of Artificial Sequence: Synthetic oligonucleotide
  Antisense strand to SEQ ID NO: 956860
acauuucugcacaugccca

SEQ ID NO: 956862 - RNA, 19 nt, Artificial Sequence
  Description of Artificial Sequence: Synthetic oligonucleotide
  Sense strand starting at position 3829 of SEQ ID NO: 913823
agaguuaccuaagcuguga

SEQ ID NO: 956863 - RNA, 19 nt, Artificial Sequence
  Description of Artificial Sequence: Synthetic oligonucleotide
  Antisense strand to SEQ ID NO: 956862
ucacagcuuagguaacucu

SEQ ID NO: 956864 - RNA, 19 nt, Artificial Sequence
  Description of Artificial Sequence: Synthetic oligonucleotide
  Sense strand starting at position 2983 of SEQ ID NO: 913823
gggcaaggaagcugugauu

SEQ ID NO: 956865 - RNA, 19 nt, Artificial Sequence
  Description of Artificial Sequence: Synthetic oligonucleotide
  Antisense strand to SEQ ID NO: 956864
aaucacagcuuccuugccc

SEQ ID NO: 956866 - RNA, 19 nt, Artificial Sequence
  Description of Artificial Sequence: Synthetic oligonucleotide
  Sense strand starting at position 2440 of SEQ ID NO: 913823
ggugucucaggauguuaga

SEQ ID NO: 956867 - RNA, 19 nt, Artificial Sequence
  Description of Artificial Sequence: Synthetic oligonucleotide
  Antisense strand to SEQ ID NO: 956866
ucuaacauccugagacacc

SEQ ID NO: 956868 - RNA, 19 nt, Artificial Sequence
  Description of Artificial Sequence: Synthetic oligonucleotide
  Sense strand starting at position 2230 of SEQ ID NO: 913823
auugucuguguccacuuaa

SEQ ID NO: 956869 - RNA, 19 nt, Artificial Sequence
  Description of Artificial Sequence: Synthetic oligonucleotide
  Antisense strand to SEQ ID NO: 956868
uuaaguggacacagacaau

SEQ ID NO: 956870 - RNA, 19 nt, Artificial Sequence
  Description of Artificial Sequence: Synthetic oligonucleotide
  Sense strand starting at position 1258 of SEQ ID NO: 913823
agagaauugucuuuagugu

SEQ ID NO: 956871 - RNA, 19 nt, Artificial Sequence
  Description of Artificial Sequence: Synthetic oligonucleotide
  Antisense strand to SEQ ID NO: 956870
acacuaaagacaauucucu

SEQ ID NO: 956872 - RNA, 19 nt, Artificial Sequence
  Description of Artificial Sequence: Synthetic oligonucleotide
  Sense strand starting at position 3096 of SEQ ID NO: 913824
uugugaacagucuauaaua

SEQ ID NO: 956873 - RNA, 19 nt, Artificial Sequence
  Description of Artificial Sequence: Synthetic oligonucleotide
  Antisense strand to SEQ ID NO: 956872
uauuauagacuguucacaa

SEQ ID NO: 956874 - RNA, 19 nt, Artificial Sequence
  Description of Artificial Sequence: Synthetic oligonucleotide
  Sense strand starting at position 1014 of SEQ ID NO: 913824
cuuuaaggugacuaagcaa

SEQ ID NO: 956875 - RNA, 19 nt, Artificial Sequence
  Description of Artificial Sequence: Synthetic oligonucleotide
  Antisense strand to SEQ ID NO: 956874
uugcuuagucaccuuaaag

SEQ ID NO: 956876 - RNA, 19 nt, Artificial Sequence
  Description of Artificial Sequence: Synthetic oligonucleotide
  Sense strand starting at position 104 of SEQ ID NO: 913824
ggguuuaucgaagagugaa

SEQ ID NO: 956877 - RNA, 19 nt, Artificial Sequence
  Description of Artificial Sequence: Synthetic oligonucleotide
  Antisense strand to SEQ ID NO: 956876
uucacucuucgauaaaccc

SEQ ID NO: 956878 - RNA, 19 nt, Artificial Sequence
  Description of Artificial Sequence: Synthetic oligonucleotide
  Sense strand starting at position 1021 of SEQ ID NO: 913824
gugacuaagcaauaaggua

SEQ ID NO: 956879 - RNA, 19 nt, Artificial Sequence
  Description of Artificial Sequence: Synthetic oligonucleotide
  Antisense strand to SEQ ID NO: 956878
uaccuuauugcuuagucac

SEQ ID NO: 956880 - RNA, 19 nt, Artificial Sequence
  Description of Artificial Sequence: Synthetic oligonucleotide
  Sense strand starting at position 3073 of SEQ ID NO: 913824
uuuagaagccauuagugga

SEQ ID NO: 956881 - RNA, 19 nt, Artificial Sequence
  Description of Artificial Sequence: Synthetic oligonucleotide
  Antisense strand to SEQ ID NO: 956880
uccacuaauggcuucuaaa

SEQ ID NO: 956882 - RNA, 19 nt, Artificial Sequence
  Description of Artificial Sequence: Synthetic oligonucleotide
  Sense strand starting at position 2609 of SEQ ID NO: 913824
ucauuagaauauguagauc

SEQ ID NO: 956883 - RNA, 19 nt, Artificial Sequence
  Description of Artificial Sequence: Synthetic oligonucleotide
  Antisense strand to SEQ ID NO: 956882
gaucuacauauucuaauga

SEQ ID NO: 956884 - RNA, 19 nt, Artificial Sequence
  Description of Artificial Sequence: Synthetic oligonucleotide
  Sense strand starting at position 2620 of SEQ ID NO: 913824
uguagaucuaaguagaagu

SEQ ID NO: 956885 - RNA, 19 nt, Artificial Sequence
  Description of Artificial Sequence: Synthetic oligonucleotide
  Antisense strand to SEQ ID NO: 956884
acuucuacuuagaucuaca

SEQ ID NO: 956886 - RNA, 19 nt, Artificial Sequence
  Description of Artificial Sequence: Synthetic oligonucleotide
  Sense strand starting at position 3975 of SEQ ID NO: 913824
gugugaaacgaugaaauuc

SEQ ID NO: 956887 - RNA, 19 nt, Artificial Sequence
  Description of Artificial Sequence: Synthetic oligonucleotide
  Antisense strand to SEQ ID NO: 956886
gaauuucaucguuucacac

SEQ ID NO: 956888 - RNA, 19 nt, Artificial Sequence
  Description of Artificial Sequence: Synthetic oligonucleotide
  Sense strand starting at position 1357 of SEQ ID NO: 913824
gggugauaccuguaaucca

SEQ ID NO: 956889 - RNA, 19 nt, Artificial Sequence
  Description of Artificial Sequence: Synthetic oligonucleotide
  Antisense strand to SEQ ID NO: 956888
uggauuacagguaucaccc

SEQ ID NO: 956890 - RNA, 19 nt, Artificial Sequence
  Description of Artificial Sequence: Synthetic oligonucleotide
  Sense strand starting at position 2733 of SEQ ID NO: 913824
auaguauugcauuauacag

SEQ ID NO: 956891 - RNA, 19 nt, Artificial Sequence
  Description of Artificial Sequence: Synthetic oligonucleotide
  Antisense strand to SEQ ID NO: 956890
cuguauaaugcaauacuau

SEQ ID NO: 956892 - RNA, 19 nt, Artificial Sequence
  Description of Artificial Sequence: Synthetic oligonucleotide
  Sense strand starting at position 13 of SEQ ID NO: 913824
ucaacuggauguguagaaa

SEQ ID NO: 956893 - RNA, 19 nt, Artificial Sequence
  Description of Artificial Sequence: Synthetic oligonucleotide
  Antisense strand to SEQ ID NO: 956892
uuucuacacauccaguuga

SEQ ID NO: 956894 - RNA, 19 nt, Artificial Sequence
  Description of Artificial Sequence: Synthetic oligonucleotide
  Sense strand starting at position 82 of SEQ ID NO: 913824
aacuuuaaggguuauuguu

SEQ ID NO: 956895 - RNA, 19 nt, Artificial Sequence
  Description of Artificial Sequence: Synthetic oligonucleotide
  Antisense strand to SEQ ID NO: 956894
aacaauaacccuuaaaguu

SEQ ID NO: 956896 - RNA, 19 nt, Artificial Sequence
  Description of Artificial Sequence: Synthetic oligonucleotide
  Sense strand starting at position 107 of SEQ ID NO: 913824
uuuaucgaagagugaagau

SEQ ID NO: 956897 - RNA, 19 nt, Artificial Sequence
  Description of Artificial Sequence: Synthetic oligonucleotide
  Antisense strand to SEQ ID NO: 956896
aucuucacucuucgauaaa

SEQ ID NO: 956898 - RNA, 19 nt, Artificial Sequence
  Description of Artificial Sequence: Synthetic oligonucleotide
  Sense strand starting at position 2874 of SEQ ID NO: 913824
gcuggaucaaaggguauaa

SEQ ID NO: 956899 - RNA, 19 nt, Artificial Sequence
  Description of Artificial Sequence: Synthetic oligonucleotide
  Antisense strand to SEQ ID NO: 956898
uuauacccuuugauccagc

SEQ ID NO: 956900 - RNA, 19 nt, Artificial Sequence
  Description of Artificial Sequence: Synthetic oligonucleotide
  Sense strand starting at position 2279 of SEQ ID NO: 913824
aaagaaaguuaagcaugua

SEQ ID NO: 956901 - RNA, 19 nt, Artificial Sequence
  Description of Artificial Sequence: Synthetic oligonucleotide
  Antisense strand to SEQ ID NO: 956900
uacaugcuuaacuuucuuu

SEQ ID NO: 956902 - RNA, 19 nt, Artificial Sequence
  Description of Artificial Sequence: Synthetic oligonucleotide
  Sense strand starting at position 2307 of SEQ ID NO: 913824
gauguacauugaguuauaa

SEQ ID NO: 956903 - RNA, 19 nt, Artificial Sequence
  Description of Artificial Sequence: Synthetic oligonucleotide
  Antisense strand to SEQ ID NO: 956902
uuauaacucaauguacauc

SEQ ID NO: 956904 - RNA, 19 nt, Artificial Sequence
  Description of Artificial Sequence: Synthetic oligonucleotide
  Sense strand starting at position 3091 of SEQ ID NO: 913824
acuucuugugaacagucua

SEQ ID NO: 956905 - RNA, 19 nt, Artificial Sequence
  Description of Artificial Sequence: Synthetic oligonucleotide
  Antisense strand to SEQ ID NO: 956904
uagacuguucacaagaagu

SEQ ID NO: 956906 - RNA, 19 nt, Artificial Sequence
  Description of Artificial Sequence: Synthetic oligonucleotide
  Sense strand starting at position 1325 of SEQ ID NO: 913824
guuuaagaugcagagcuaa

SEQ ID NO: 956907 - RNA, 19 nt, Artificial Sequence
  Description of Artificial Sequence: Synthetic oligonucleotide
  Antisense strand to SEQ ID NO: 956906
uuagcucugcaucuuaaac

SEQ ID NO: 956908 - RNA, 19 nt, Artificial Sequence
  Description of Artificial Sequence: Synthetic oligonucleotide
  Sense strand starting at position 836 of SEQ ID NO: 913824
ggauccugaacuugauguu

SEQ ID NO: 956909 - RNA, 19 nt, Artificial Sequence
  Description of Artificial Sequence: Synthetic oligonucleotide
  Antisense strand to SEQ ID NO: 956908
aacaucaaguucaggaucc

SEQ ID NO: 956910 - RNA, 19 nt, Artificial Sequence
  Description of Artificial Sequence: Synthetic oligonucleotide
  Sense strand starting at position 1010 of SEQ ID NO: 913824
agggcuuuaaggugacuaa

SEQ ID NO: 956911 - RNA, 19 nt, Artificial Sequence
  Description of Artificial Sequence: Synthetic oligonucleotide
  Antisense strand to SEQ ID NO: 956910
uuagucaccuuaaagcccu

SEQ ID NO: 956912 - RNA, 19 nt, Artificial Sequence
  Description of Artificial Sequence: Synthetic oligonucleotide
  Sense strand starting at position 842 of SEQ ID NO: 913824
ugaacuugauguucuuaca

SEQ ID NO: 956913 - RNA, 19 nt, Artificial Sequence
  Description of Artificial Sequence: Synthetic oligonucleotide
  Antisense strand to SEQ ID NO: 956912
uguaagaacaucaaguuca

SEQ ID NO: 956914 - RNA, 19 nt, Artificial Sequence
  Description of Artificial Sequence: Synthetic oligonucleotide
  Sense strand starting at position 378 of SEQ ID NO: 913824
guguuucuaguauagauga

SEQ ID NO: 956915 - RNA, 19 nt, Artificial Sequence
  Description of Artificial Sequence: Synthetic oligonucleotide
  Antisense strand to SEQ ID NO: 956914
ucaucuauacuagaaacac

SEQ ID NO: 956916 - RNA, 19 nt, Artificial Sequence
  Description of Artificial Sequence: Synthetic oligonucleotide
  Sense strand starting at position 2334 of SEQ ID NO: 913824
ucuguaccucaguacuaau

SEQ ID NO: 956917 - RNA, 19 nt, Artificial Sequence
  Description of Artificial Sequence: Synthetic oligonucleotide
  Antisense strand to SEQ ID NO: 956916
auuaguacugagguacaga

SEQ ID NO: 956918 - RNA, 19 nt, Artificial Sequence
  Description of Artificial Sequence: Synthetic oligonucleotide
  Sense strand starting at position 1678 of SEQ ID NO: 913824
caaauagaguugguuucca

SEQ ID NO: 956919 - RNA, 19 nt, Artificial Sequence
  Description of Artificial Sequence: Synthetic oligonucleotide
  Antisense strand to SEQ ID NO: 956918
uggaaaccaacucuauuug

SEQ ID NO: 956920 - RNA, 19 nt, Artificial Sequence
  Description of Artificial Sequence: Synthetic oligonucleotide
  Sense strand starting at position 812 of SEQ ID NO: 913824
agugaaauuucugacaacu

SEQ ID NO: 956921 - RNA, 19 nt, Artificial Sequence
  Description of Artificial Sequence: Synthetic oligonucleotide
  Antisense strand to SEQ ID NO: 956920
aguugucagaaauuucacu

SEQ ID NO: 956922 - RNA, 19 nt, Artificial Sequence
  Description of Artificial Sequence: Synthetic oligonucleotide
  Sense strand starting at position 2293 of SEQ ID NO: 913824
auguauccucuuuagaugu

SEQ ID NO: 956923 - RNA, 19 nt, Artificial Sequence
  Description of Artificial Sequence: Synthetic oligonucleotide
  Antisense strand to SEQ ID NO: 956922
acaucuaaagaggauacau

SEQ ID NO: 956924 - RNA, 19 nt, Artificial Sequence
  Description of Artificial Sequence: Synthetic oligonucleotide
  Sense strand starting at position 2304 of SEQ ID NO: 913824
uuagauguacauugaguua

SEQ ID NO: 956925 - RNA, 19 nt, Artificial Sequence
  Description of Artificial Sequence: Synthetic oligonucleotide
  Antisense strand to SEQ ID NO: 956924
uaacucaauguacaucuaa

SEQ ID NO: 956926 - RNA, 19 nt, Artificial Sequence
  Description of Artificial Sequence: Synthetic oligonucleotide
  Sense strand starting at position 683 of SEQ ID NO: 913824
ugcggaaucaucugaaaug

SEQ ID NO: 956927 - RNA, 19 nt, Artificial Sequence
  Description of Artificial Sequence: Synthetic oligonucleotide
  Antisense strand to SEQ ID NO: 956926
cauuucagaugauuccgca

SEQ ID NO: 956928 - RNA, 19 nt, Artificial Sequence
  Description of Artificial Sequence: Synthetic oligonucleotide
  Sense strand starting at position 930 of SEQ ID NO: 913824
gcuggauuccugcauugaa

SEQ ID NO: 956929 - RNA, 19 nt, Artificial Sequence
  Description of Artificial Sequence: Synthetic oligonucleotide
  Antisense strand to SEQ ID NO: 956928
uucaaugcaggaauccagc

SEQ ID NO: 956930 - RNA, 19 nt, Artificial Sequence
  Description of Artificial Sequence: Synthetic oligonucleotide
  Sense strand starting at position 3758 of SEQ ID NO: 913824
acacauauguagucaagua

SEQ ID NO: 956931 - RNA, 19 nt, Artificial Sequence
  Description of Artificial Sequence: Synthetic oligonucleotide
  Antisense strand to SEQ ID NO: 956930
uacuugacuacauaugugu

SEQ ID NO: 956932 - RNA, 19 nt, Artificial Sequence
  Description of Artificial Sequence: Synthetic oligonucleotide
  Sense strand starting at position 3983 of SEQ ID NO: 913824
cgaugaaauucuuuaaguu

SEQ ID NO: 956933 - RNA, 19 nt, Artificial Sequence
  Description of Artificial Sequence: Synthetic oligonucleotide
  Antisense strand to SEQ ID NO: 956932
aacuuaaagaauuucaucg

SEQ ID NO: 956934 - RNA, 19 nt, Artificial Sequence
  Description of Artificial Sequence: Synthetic oligonucleotide
  Sense strand starting at position 1186 of SEQ ID NO: 913824
aguggcagaguucaguaau

SEQ ID NO: 956935 - RNA, 19 nt, Artificial Sequence
  Description of Artificial Sequence: Synthetic oligonucleotide
  Antisense strand to SEQ ID NO: 956934
auuacugaacucugccacu

SEQ ID NO: 956936 - RNA, 19 nt, Artificial Sequence
  Description of Artificial Sequence: Synthetic oligonucleotide
  Sense strand starting at position 884 of SEQ ID NO: 913824
ugcacuugccuagaaacuu

SEQ ID NO: 956937 - RNA, 19 nt, Artificial Sequence
  Description of Artificial Sequence: Synthetic oligonucleotide
  Antisense strand to SEQ ID NO: 956936
aaguuucuaggcaagugca

SEQ ID NO: 956938 - RNA, 19 nt, Artificial Sequence
  Description of Artificial Sequence: Synthetic oligonucleotide
  Sense strand starting at position 3638 of SEQ ID NO: 913824
ggacucauauugcuugauu

SEQ ID NO: 956939 - RNA, 19 nt, Artificial Sequence
  Description of Artificial Sequence: Synthetic oligonucleotide
  Antisense strand to SEQ ID NO: 956938
aaucaagcaauaugagucc

SEQ ID NO: 956940 - RNA, 19 nt, Artificial Sequence
  Description of Artificial Sequence: Synthetic oligonucleotide
  Sense strand starting at position 1398 of SEQ ID NO: 913824
agcagauugcuugaagcca

SEQ ID NO: 956941 - RNA, 19 nt, Artificial Sequence
  Description of Artificial Sequence: Synthetic oligonucleotide
  Antisense strand to SEQ ID NO: 956940
uggcuucaagcaaucugcu

SEQ ID NO: 956942 - RNA, 19 nt, Artificial Sequence
  Description of Artificial Sequence: Synthetic oligonucleotide
  Sense strand starting at position 3693 of SEQ ID NO: 913824
gaugauauuuguggaaaca

SEQ ID NO: 956943 - RNA, 19 nt, Artificial Sequence
  Description of Artificial Sequence: Synthetic oligonucleotide
  Antisense strand to SEQ ID NO: 956942
uguuuccacaaauaucauc

SEQ ID NO: 956944 - RNA, 19 nt, Artificial Sequence
  Description of Artificial Sequence: Synthetic oligonucleotide
  Sense strand starting at position 3846 of SEQ ID NO: 913824
aagacugucuaugugcaaa

SEQ ID NO: 956945 - RNA, 19 nt, Artificial Sequence
  Description of Artificial Sequence: Synthetic oligonucleotide
  Antisense strand to SEQ ID NO: 956944
uuugcacauagacagucuu

SEQ ID NO: 956946 - RNA, 19 nt, Artificial Sequence
  Description of Artificial Sequence: Synthetic oligonucleotide
  Sense strand starting at position 3692 of SEQ ID NO: 913824
ggaugauauuuguggaaac

SEQ ID NO: 956947 - RNA, 19 nt, Artificial Sequence
  Description of Artificial Sequence: Synthetic oligonucleotide
  Antisense strand to SEQ ID NO: 956946
guuuccacaaauaucaucc

SEQ ID NO: 956948 - RNA, 19 nt, Artificial Sequence
  Description of Artificial Sequence: Synthetic oligonucleotide
  Sense strand starting at position 2949 of SEQ ID NO: 913824
aagauagcacacuguguua

SEQ ID NO: 956949 - RNA, 19 nt, Artificial Sequence
  Description of Artificial Sequence: Synthetic oligonucleotide
  Antisense strand to SEQ ID NO: 956948
uaacacagugugcuaucuu

SEQ ID NO: 956950 - RNA, 19 nt, Artificial Sequence
  Description of Artificial Sequence: Synthetic oligonucleotide
  Sense strand starting at position 2906 of SEQ ID NO: 913824
cuagauauuugccaaauug

SEQ ID NO: 956951 - RNA, 19 nt, Artificial Sequence
  Description of Artificial Sequence: Synthetic oligonucleotide
  Antisense strand to SEQ ID NO: 956950
caauuuggcaaauaucuag

SEQ ID NO: 956952 - RNA, 19 nt, Artificial Sequence
  Description of Artificial Sequence: Synthetic oligonucleotide
  Sense strand starting at position 1690 of SEQ ID NO: 913825
agaugcagagcuuacaaau

SEQ ID NO: 956953 - RNA, 19 nt, Artificial Sequence
  Description of Artificial Sequence: Synthetic oligonucleotide
  Antisense strand to SEQ ID NO: 956952
auuuguaagcucugcaucu

SEQ ID NO: 956954 - RNA, 19 nt, Artificial Sequence
  Description of Artificial Sequence: Synthetic oligonucleotide
  Sense strand starting at position 940 of SEQ ID NO: 913825
uggaaacuucucuagucau

SEQ ID NO: 956955 - RNA, 19 nt, Artificial Sequence
  Description of Artificial Sequence: Synthetic oligonucleotide
  Antisense strand to SEQ ID NO: 956954
augacuagagaaguuucca

SEQ ID NO: 956956 - RNA, 19 nt, Artificial Sequence
  Description of Artificial Sequence: Synthetic oligonucleotide
  Sense strand starting at position 1060 of SEQ ID NO: 913825
cuuuaaggugacuaagcaa

SEQ ID NO: 956957 - RNA, 19 nt, Artificial Sequence
  Description of Artificial Sequence: Synthetic oligonucleotide
  Antisense strand to SEQ ID NO: 956956
uugcuuagucaccuuaaag

SEQ ID NO: 956958 - RNA, 19 nt, Artificial Sequence
  Description of Artificial Sequence: Synthetic oligonucleotide
  Sense strand starting at position 2479 of SEQ ID NO: 913825
gcacauuucuuugcuauag

SEQ ID NO: 956959 - RNA, 19 nt, Artificial Sequence
  Description of Artificial Sequence: Synthetic oligonucleotide
  Antisense strand to SEQ ID NO: 956958
cuauagcaaagaaaugugc

SEQ ID NO: 956960 - RNA, 19 nt, Artificial Sequence
  Description of Artificial Sequence: Synthetic oligonucleotide
  Sense strand starting at position 3489 of SEQ ID NO: 913825
cugaaauuauaggcaugau

SEQ ID NO: 956961 - RNA, 19 nt, Artificial Sequence
  Description of Artificial Sequence: Synthetic oligonucleotide
  Antisense strand to SEQ ID NO: 956960
aucaugccuauaauuucag

SEQ ID NO: 956962 - RNA, 19 nt, Artificial Sequence
  Description of Artificial Sequence: Synthetic oligonucleotide
  Sense strand starting at position 467 of SEQ ID NO: 913825
ggguuuauugaagggugaa

SEQ ID NO: 956963 - RNA, 19 nt, Artificial Sequence
  Description of Artificial Sequence: Synthetic oligonucleotide
  Antisense strand to SEQ ID NO: 956962
uucacccuucaauaaaccc

SEQ ID NO: 956964 - RNA, 19 nt, Artificial Sequence
  Description of Artificial Sequence: Synthetic oligonucleotide
  Sense strand starting at position 468 of SEQ ID NO: 913825
gguuuauugaagggugaag

SEQ ID NO: 956965 - RNA, 19 nt, Artificial Sequence
  Description of Artificial Sequence: Synthetic oligonucleotide
  Antisense strand to SEQ ID NO: 956964
cuucacccuucaauaaacc

SEQ ID NO: 956966 - RNA, 19 nt, Artificial Sequence
  Description of Artificial Sequence: Synthetic oligonucleotide
  Sense strand starting at position 3048 of SEQ ID NO: 913825
gacgaagauggcuagcaua

SEQ ID NO: 956967 - RNA, 19 nt, Artificial Sequence
  Description of Artificial Sequence: Synthetic oligonucleotide
  Antisense strand to SEQ ID NO: 956966
uaugcuagccaucuucguc

SEQ ID NO: 956968 - RNA, 19 nt, Artificial Sequence
  Description of Artificial Sequence: Synthetic oligonucleotide
  Sense strand starting at position 1732 of SEQ ID NO: 913825
uuagaauguuaacugaucu

SEQ ID NO: 956969 - RNA, 19 nt, Artificial Sequence
  Description of Artificial Sequence: Synthetic oligonucleotide
  Antisense strand to SEQ ID NO: 956968
agaucaguuaacauucuaa

SEQ ID NO: 956970 - RNA, 19 nt, Artificial Sequence
  Description of Artificial Sequence: Synthetic oligonucleotide
  Sense strand starting at position 480 of SEQ ID NO: 913825
ggugaagauuaagcaccua

SEQ ID NO: 956971 - RNA, 19 nt, Artificial Sequence
  Description of Artificial Sequence: Synthetic oligonucleotide
  Antisense strand to SEQ ID NO: 956970
uaggugcuuaaucuucacc

SEQ ID NO: 956972 - RNA, 19 nt, Artificial Sequence
  Description of Artificial Sequence: Synthetic oligonucleotide
  Sense strand starting at position 3074 of SEQ ID NO: 913825
accaaagguuaagauauuu

SEQ ID NO: 956973 - RNA, 19 nt, Artificial Sequence
  Description of Artificial Sequence: Synthetic oligonucleotide
  Antisense strand to SEQ ID NO: 956972
aaauaucuuaaccuuuggu

SEQ ID NO: 956974 - RNA, 19 nt, Artificial Sequence
  Description of Artificial Sequence: Synthetic oligonucleotide
  Sense strand starting at position 729 of SEQ ID NO: 913825
cauagaaucgucugaaaug

SEQ ID NO: 956975 - RNA, 19 nt, Artificial Sequence
  Description of Artificial Sequence: Synthetic oligonucleotide
  Antisense strand to SEQ ID NO: 956974
cauuucagacgauucuaug

SEQ ID NO: 956976 - RNA, 19 nt, Artificial Sequence
  Description of Artificial Sequence: Synthetic oligonucleotide
  Sense strand starting at position 2009 of SEQ ID NO: 913825
cuaacaaggcucgaguaau

SEQ ID NO: 956977 - RNA, 19 nt, Artificial Sequence
  Description of Artificial Sequence: Synthetic oligonucleotide
  Antisense strand to SEQ ID NO: 956976
auuacucgagccuuguuag

SEQ ID NO: 956978 - RNA, 19 nt, Artificial Sequence
  Description of Artificial Sequence: Synthetic oligonucleotide
  Sense strand starting at position 2698 of SEQ ID NO: 913825
uguagaucucaguauaagu

SEQ ID NO: 956979 - RNA, 19 nt, Artificial Sequence
  Description of Artificial Sequence: Synthetic oligonucleotide
  Antisense strand to SEQ ID NO: 956978
acuuauacugagaucuaca

SEQ ID NO: 956980 - RNA, 19 nt, Artificial Sequence
  Description of Artificial Sequence: Synthetic oligonucleotide
  Sense strand starting at position 3538 of SEQ ID NO: 913825
gugaauugucuauaauacg

SEQ ID NO: 956981 - RNA, 19 nt, Artificial Sequence
  Description of Artificial Sequence: Synthetic oligonucleotide
  Antisense strand to SEQ ID NO: 956980
cguauuauagacaauucac

SEQ ID NO: 956982 - RNA, 19 nt, Artificial Sequence
  Description of Artificial Sequence: Synthetic oligonucleotide
  Sense strand starting at position 882 of SEQ ID NO: 913825
ggauccugaacuugauguu

SEQ ID NO: 956983 - RNA, 19 nt, Artificial Sequence
  Description of Artificial Sequence: Synthetic oligonucleotide
  Antisense strand to SEQ ID NO: 956982
aacaucaaguucaggaucc

SEQ ID NO: 956984 - RNA, 19 nt, Artificial Sequence
  Description of Artificial Sequence: Synthetic oligonucleotide
  Sense strand starting at position 727 of SEQ ID NO: 913825
cccauagaaucgucugaaa

SEQ ID NO: 956985 - RNA, 19 nt, Artificial Sequence
  Description of Artificial Sequence: Synthetic oligonucleotide
  Antisense strand to SEQ ID NO: 956984
uuucagacgauucuauggg

SEQ ID NO: 956986 - RNA, 19 nt, Artificial Sequence
  Description of Artificial Sequence: Synthetic oligonucleotide
  Sense strand starting at position 1056 of SEQ ID NO: 913825
agggcuuuaaggugacuaa

SEQ ID NO: 956987 - RNA, 19 nt, Artificial Sequence
  Description of Artificial Sequence: Synthetic oligonucleotide
  Antisense strand to SEQ ID NO: 956986
uuagucaccuuaaagcccu

SEQ ID NO: 956988 - RNA, 19 nt, Artificial Sequence
  Description of Artificial Sequence: Synthetic oligonucleotide
  Sense strand starting at position 939 of SEQ ID NO: 913825
cuggaaacuucucuaguca

SEQ ID NO: 956989 - RNA, 19 nt, Artificial Sequence
  Description of Artificial Sequence: Synthetic oligonucleotide
  Antisense strand to SEQ ID NO: 956988
ugacuagagaaguuuccag

SEQ ID NO: 956990 - RNA, 19 nt, Artificial Sequence
  Description of Artificial Sequence: Synthetic oligonucleotide
  Sense strand starting at position 888 of SEQ ID NO: 913825
ugaacuugauguucuuaca

SEQ ID NO: 956991 - RNA, 19 nt, Artificial Sequence
  Description of Artificial Sequence: Synthetic oligonucleotide
  Antisense strand to SEQ ID NO: 956990
uguaagaacaucaaguuca

SEQ ID NO: 956992 - RNA, 19 nt, Artificial Sequence
  Description of Artificial Sequence: Synthetic oligonucleotide
  Sense strand starting at position 1837 of SEQ ID NO: 913825
agggacagguggcuucaua

SEQ ID NO: 956993 - RNA, 19 nt, Artificial Sequence
  Description of Artificial Sequence: Synthetic oligonucleotide
  Antisense strand to SEQ ID NO: 956992
uaugaagccaccugucccu

SEQ ID NO: 956994 - RNA, 19 nt, Artificial Sequence
  Description of Artificial Sequence: Synthetic oligonucleotide
  Sense strand starting at position 2980 of SEQ ID NO: 913825
uggguuaaggacuguaauu

SEQ ID NO: 956995 - RNA, 19 nt, Artificial Sequence
  Description of Artificial Sequence: Synthetic oligonucleotide
  Antisense strand to SEQ ID NO: 956994
aauuacaguccuuaaccca

SEQ ID NO: 956996 - RNA, 19 nt, Artificial Sequence
  Description of Artificial Sequence: Synthetic oligonucleotide
  Sense strand starting at position 1705 of SEQ ID NO: 913825
aaauaagguugguuuccau

SEQ ID NO: 956997 - RNA, 19 nt, Artificial Sequence
  Description of Artificial Sequence: Synthetic oligonucleotide
  Antisense strand to SEQ ID NO: 956996
auggaaaccaaccuuauuu

SEQ ID NO: 956998 - RNA, 19 nt, Artificial Sequence
  Description of Artificial Sequence: Synthetic oligonucleotide
  Sense strand starting at position 2273 of SEQ ID NO: 913825
agagcucuucucuaaggca

SEQ ID NO: 956999 - RNA, 19 nt, Artificial Sequence
  Description of Artificial Sequence: Synthetic oligonucleotide
  Antisense strand to SEQ ID NO: 956998
ugccuuagagaagagcucu

SEQ ID NO: 957000 - RNA, 19 nt, Artificial Sequence
  Description of Artificial Sequence: Synthetic oligonucleotide
  Sense strand starting at position 858 of SEQ ID NO: 913825
agugaaauuucugacaacu

SEQ ID NO: 957001 - RNA, 19 nt, Artificial Sequence
  Description of Artificial Sequence: Synthetic oligonucleotide
  Antisense strand to SEQ ID NO: 957000
aguugucagaaauuucacu

SEQ ID NO: 957002 - RNA, 19 nt, Artificial Sequence
  Description of Artificial Sequence: Synthetic oligonucleotide
  Sense strand starting at position 2336 of SEQ ID NO: 913825
auguauccucuuuagaugu

SEQ ID NO: 957003 - RNA, 19 nt, Artificial Sequence
  Description of Artificial Sequence: Synthetic oligonucleotide
  Antisense strand to SEQ ID NO: 957002
acaucuaaagaggauacau

SEQ ID NO: 957004 - RNA, 19 nt, Artificial Sequence
  Description of Artificial Sequence: Synthetic oligonucleotide
  Sense strand starting at position 2725 of SEQ ID NO: 913825
aguuguaccuaacuaauua

SEQ ID NO: 957005 - RNA, 19 nt, Artificial Sequence
  Description of Artificial Sequence: Synthetic oligonucleotide
  Antisense strand to SEQ ID NO: 957004
uaauuaguuagguacaacu

SEQ ID NO: 957006 - RNA, 19 nt, Artificial Sequence
  Description of Artificial Sequence: Synthetic oligonucleotide
  Sense strand starting at position 1374 of SEQ ID NO: 913825
guuuaagaugcagagcuua

SEQ ID NO: 957007 - RNA, 19 nt, Artificial Sequence
  Description of Artificial Sequence: Synthetic oligonucleotide
  Antisense strand to SEQ ID NO: 957006
uaagcucugcaucuuaaac

SEQ ID NO: 957008 - RNA, 19 nt, Artificial Sequence
  Description of Artificial Sequence: Synthetic oligonucleotide
  Sense strand starting at position 976 of SEQ ID NO: 913825
gcuggauuccugcauugaa

SEQ ID NO: 957009 - RNA, 19 nt, Artificial Sequence
  Description of Artificial Sequence: Synthetic oligonucleotide
  Antisense strand to SEQ ID NO: 957008
uucaaugcaggaauccagc

SEQ ID NO: 957010 - RNA, 19 nt, Artificial Sequence
  Description of Artificial Sequence: Synthetic oligonucleotide
  Sense strand starting at position 70 of SEQ ID NO: 913825
ucaacuggguguguagaaa

SEQ ID NO: 957011 - RNA, 19 nt, Artificial Sequence
  Description of Artificial Sequence: Synthetic oligonucleotide
  Antisense strand to SEQ ID NO: 957010
uuucuacacacccaguuga

SEQ ID NO: 957012 - RNA, 19 nt, Artificial Sequence
  Description of Artificial Sequence: Synthetic oligonucleotide
  Sense strand starting at position 2970 of SEQ ID NO: 913825
auugaauugcuggguuaag

SEQ ID NO: 957013 - RNA, 19 nt, Artificial Sequence
  Description of Artificial Sequence: Synthetic oligonucleotide
  Antisense strand to SEQ ID NO: 957012
cuuaacccagcaauucaau

SEQ ID NO: 957014 - RNA, 19 nt, Artificial Sequence
  Description of Artificial Sequence: Synthetic oligonucleotide
  Sense strand starting at position 938 of SEQ ID NO: 913825
ccuggaaacuucucuaguc

SEQ ID NO: 957015 - RNA, 19 nt, Artificial Sequence
  Description of Artificial Sequence: Synthetic oligonucleotide
  Antisense strand to SEQ ID NO: 957014
gacuagagaaguuuccagg

SEQ ID NO: 957016 - RNA, 19 nt, Artificial Sequence
  Description of Artificial Sequence: Synthetic oligonucleotide
  Sense strand starting at position 2377 of SEQ ID NO: 913825
ucuguaccucuguacuaau

SEQ ID NO: 957017 - RNA, 19 nt, Artificial Sequence
  Description of Artificial Sequence: Synthetic oligonucleotide
  Antisense strand to SEQ ID NO: 957016
auuaguacagagguacaga

SEQ ID NO: 957018 - RNA, 19 nt, Artificial Sequence
  Description of Artificial Sequence: Synthetic oligonucleotide
  Sense strand starting at position 2288 of SEQ ID NO: 913825
ggcaacagucugcaaacuu

SEQ ID NO: 957019 - RNA, 19 nt, Artificial Sequence
  Description of Artificial Sequence: Synthetic oligonucleotide
  Antisense strand to SEQ ID NO: 957018
aaguuugcagacuguugcc

SEQ ID NO: 957020 - RNA, 19 nt, Artificial Sequence
  Description of Artificial Sequence: Synthetic oligonucleotide
  Sense strand starting at position 930 of SEQ ID NO: 913825
ugcacuugccuggaaacuu

SEQ ID NO: 957021 - RNA, 19 nt, Artificial Sequence
  Description of Artificial Sequence: Synthetic oligonucleotide
  Antisense strand to SEQ ID NO: 957020
aaguuuccaggcaagugca

SEQ ID NO: 957022 - RNA, 19 nt, Artificial Sequence
  Description of Artificial Sequence: Synthetic oligonucleotide
  Sense strand starting at position 1447 of SEQ ID NO: 913825
ggcaaauugcuugaagcca

SEQ ID NO: 957023 - RNA, 19 nt, Artificial Sequence
  Description of Artificial Sequence: Synthetic oligonucleotide
  Antisense strand to SEQ ID NO: 957022
uggcuucaagcaauuugcc

SEQ ID NO: 957024 - RNA, 19 nt, Artificial Sequence
  Description of Artificial Sequence: Synthetic oligonucleotide
  Sense strand starting at position 1492 of SEQ ID NO: 913825
aagguagaccucugucacu

SEQ ID NO: 957025 - RNA, 19 nt, Artificial Sequence
  Description of Artificial Sequence: Synthetic oligonucleotide
  Antisense strand to SEQ ID NO: 957024
agugacagaggucuaccuu

SEQ ID NO: 957026 - RNA, 19 nt, Artificial Sequence
  Description of Artificial Sequence: Synthetic oligonucleotide
  Sense strand starting at position 3534 of SEQ ID NO: 913825
ucuugugaauugucuauaa

SEQ ID NO: 957027 - RNA, 19 nt, Artificial Sequence
  Description of Artificial Sequence: Synthetic oligonucleotide
  Antisense strand to SEQ ID NO: 957026
uuauagacaauucacaaga

SEQ ID NO: 957028 - RNA, 19 nt, Artificial Sequence
  Description of Artificial Sequence: Synthetic oligonucleotide
  Sense strand starting at position 2814 of SEQ ID NO: 913825
guauuacauuguguagaua

SEQ ID NO: 957029 - RNA, 19 nt, Artificial Sequence
  Description of Artificial Sequence: Synthetic oligonucleotide
  Antisense strand to SEQ ID NO: 957028
uaucuacacaauguaauac

SEQ ID NO: 957030 - RNA, 19 nt, Artificial Sequence
  Description of Artificial Sequence: Synthetic oligonucleotide
  Sense strand starting at position 1426 of SEQ ID NO: 913825
gcacuuugugagggugaaa

SEQ ID NO: 957031 - RNA, 19 nt, Artificial Sequence
  Description of Artificial Sequence: Synthetic oligonucleotide
  Antisense strand to SEQ ID NO: 957030
uuucacccucacaaagugc

SEQ ID NO: 957032 - RNA, 19 nt, Artificial Sequence
  Description of Artificial Sequence: Synthetic oligonucleotide
  Sense strand starting at position 963 of SEQ ID NO: 913826
ugguauugagggagcguuu

SEQ ID NO: 957033 - RNA, 19 nt, Artificial Sequence
  Description of Artificial Sequence: Synthetic oligonucleotide
  Antisense strand to SEQ ID NO: 957032
aaacgcucccucaauacca

SEQ ID NO: 957034 - RNA, 19 nt, Artificial Sequence
  Description of Artificial Sequence: Synthetic oligonucleotide
  Sense strand starting at position 3184 of SEQ ID NO: 913826
gugagucagggagauucuu

SEQ ID NO: 957035 - RNA, 19 nt, Artificial Sequence
  Description of Artificial Sequence: Synthetic oligonucleotide
  Antisense strand to SEQ ID NO: 957034
aagaaucucccugacucac

SEQ ID NO: 957036 - RNA, 19 nt, Artificial Sequence
  Description of Artificial Sequence: Synthetic oligonucleotide
  Sense strand starting at position 2986 of SEQ ID NO: 913826
ggccgaguuguuucuucuu

SEQ ID NO: 957037 - RNA, 19 nt, Artificial Sequence
  Description of Artificial Sequence: Synthetic oligonucleotide
  Antisense strand to SEQ ID NO: 957036
aagaagaaacaacucggcc

SEQ ID NO: 957038 - RNA, 19 nt, Artificial Sequence
  Description of Artificial Sequence: Synthetic oligonucleotide
  Sense strand starting at position 3839 of SEQ ID NO: 913826
ggagacauuugugaccaga

SEQ ID NO: 957039 - RNA, 19 nt, Artificial Sequence
  Description of Artificial Sequence: Synthetic oligonucleotide
  Antisense strand to SEQ ID NO: 957038
ucuggucacaaaugucucc

SEQ ID NO: 957040 - RNA, 19 nt, Artificial Sequence
  Description of Artificial Sequence: Synthetic oligonucleotide
  Sense strand starting at position 3639 of SEQ ID NO: 913826
ugccguucagcguuacaga

SEQ ID NO: 957041 - RNA, 19 nt, Artificial Sequence
  Description of Artificial Sequence: Synthetic oligonucleotide
  Antisense strand to SEQ ID NO: 957040
ucuguaacgcugaacggca

SEQ ID NO: 957042 - RNA, 19 nt, Artificial Sequence
  Description of Artificial Sequence: Synthetic oligonucleotide
  Sense strand starting at position 3229 of SEQ ID NO: 913826
aguccuaucccagggaauc

SEQ ID NO: 957043 - RNA, 19 nt, Artificial Sequence
  Description of Artificial Sequence: Synthetic oligonucleotide
  Antisense strand to SEQ ID NO: 957042
gauucccugggauaggacu

SEQ ID NO: 957044 - RNA, 19 nt, Artificial Sequence
  Description of Artificial Sequence: Synthetic oligonucleotide
  Sense strand starting at position 2542 of SEQ ID NO: 913826
gggcuucucgaagacucau

SEQ ID NO: 957045 - RNA, 19 nt, Artificial Sequence
  Description of Artificial Sequence: Synthetic oligonucleotide
  Antisense strand to SEQ ID NO: 957044
augagucuucgagaagccc

SEQ ID NO: 957046 - RNA, 19 nt, Artificial Sequence
  Description of Artificial Sequence: Synthetic oligonucleotide
  Sense strand starting at position 3850 of SEQ ID NO: 913826
ugaccagaguucucacacu

SEQ ID NO: 957047 - RNA, 19 nt, Artificial Sequence
  Description of Artificial Sequence: Synthetic oligonucleotide
  Antisense strand to SEQ ID NO: 957046
agugugagaacucugguca

SEQ ID NO: 957048 - RNA, 19 nt, Artificial Sequence
  Description of Artificial Sequence: Synthetic oligonucleotide
  Sense strand starting at position 3600 of SEQ ID NO: 913826
guaugacugauaugguauu

SEQ ID NO: 957049 - RNA, 19 nt, Artificial Sequence
  Description of Artificial Sequence: Synthetic oligonucleotide
  Antisense strand to SEQ ID NO: 957048
aauaccauaucagucauac

SEQ ID NO: 957050 - RNA, 19 nt, Artificial Sequence
  Description of Artificial Sequence: Synthetic oligonucleotide
  Sense strand starting at position 3693 of SEQ ID NO: 913826
augauuacugcgggauuag

SEQ ID NO: 957051 - RNA, 19 nt, Artificial Sequence
  Description of Artificial Sequence: Synthetic oligonucleotide
  Antisense strand to SEQ ID NO: 957050
cuaaucccgcaguaaucau

SEQ ID NO: 957052 - RNA, 19 nt, Artificial Sequence
  Description of Artificial Sequence: Synthetic oligonucleotide
  Sense strand starting at position 3691 of SEQ ID NO: 913826
gaaugauuacugcgggauu

SEQ ID NO: 957053 - RNA, 19 nt, Artificial Sequence
  Description of Artificial Sequence: Synthetic oligonucleotide
  Antisense strand to SEQ ID NO: 957052
aaucccgcaguaaucauuc

SEQ ID NO: 957054 - RNA, 19 nt, Artificial Sequence
  Description of Artificial Sequence: Synthetic oligonucleotide
  Sense strand starting at position 3784 of SEQ ID NO: 913826
ccagguucuuccucacaga

SEQ ID NO: 957055 - RNA, 19 nt, Artificial Sequence
  Description of Artificial Sequence: Synthetic oligonucleotide
  Antisense strand to SEQ ID NO: 957054
ucugugaggaagaaccugg

SEQ ID NO: 957056 - RNA, 19 nt, Artificial Sequence
  Description of Artificial Sequence: Synthetic oligonucleotide
  Sense strand starting at position 2688 of SEQ ID NO: 913826
acaggagaccucggugagu

SEQ ID NO: 957057 - RNA, 19 nt, Artificial Sequence
  Description of Artificial Sequence: Synthetic oligonucleotide
  Antisense strand to SEQ ID NO: 957056
acucaccgaggucuccugu

SEQ ID NO: 957058 - RNA, 19 nt, Artificial Sequence
  Description of Artificial Sequence: Synthetic oligonucleotide
  Sense strand starting at position 3339 of SEQ ID NO: 913826
uauggaauagaacguguuu

SEQ ID NO: 957059 - RNA, 19 nt, Artificial Sequence
  Description of Artificial Sequence: Synthetic oligonucleotide
  Antisense strand to SEQ ID NO: 957058
aaacacguucuauuccaua

SEQ ID NO: 957060 - RNA, 19 nt, Artificial Sequence
  Description of Artificial Sequence: Synthetic oligonucleotide
  Sense strand starting at position 2664 of SEQ ID NO: 913826
acagguaucuggcccauau

SEQ ID NO: 957061 - RNA, 19 nt, Artificial Sequence
  Description of Artificial Sequence: Synthetic oligonucleotide
  Antisense strand to SEQ ID NO: 957060
auaugggccagauaccugu

SEQ ID NO: 957062 - RNA, 19 nt, Artificial Sequence
  Description of Artificial Sequence: Synthetic oligonucleotide
  Sense strand starting at position 3428 of SEQ ID NO: 913826
gggugucugcuagaagggu

SEQ ID NO: 957063 - RNA, 19 nt, Artificial Sequence
  Description of Artificial Sequence: Synthetic oligonucleotide
  Antisense strand to SEQ ID NO: 957062
acccuucuagcagacaccc

SEQ ID NO: 957064 - RNA, 19 nt, Artificial Sequence
  Description of Artificial Sequence: Synthetic oligonucleotide
  Sense strand starting at position 2583 of SEQ ID NO: 913826
acaggaaguuggccuguau

SEQ ID NO: 957065 - RNA, 19 nt, Artificial Sequence
  Description of Artificial Sequence: Synthetic oligonucleotide
  Antisense strand to SEQ ID NO: 957064
auacaggccaacuuccugu

SEQ ID NO: 957066 - RNA, 19 nt, Artificial Sequence
  Description of Artificial Sequence: Synthetic oligonucleotide
  Sense strand starting at position 1644 of SEQ ID NO: 913826
guguguucgcgugucccaa

SEQ ID NO: 957067 - RNA, 19 nt, Artificial Sequence
  Description of Artificial Sequence: Synthetic oligonucleotide
  Antisense strand to SEQ ID NO: 957066
uugggacacgcgaacacac

SEQ ID NO: 957068 - RNA, 19 nt, Artificial Sequence
  Description of Artificial Sequence: Synthetic oligonucleotide
  Sense strand starting at position 2587 of SEQ ID NO: 913826
gaaguuggccuguauugca

SEQ ID NO: 957069 - RNA, 19 nt, Artificial Sequence
  Description of Artificial Sequence: Synthetic oligonucleotide
  Antisense strand to SEQ ID NO: 957068
ugcaauacaggccaacuuc

SEQ ID NO: 957070 - RNA, 19 nt, Artificial Sequence
  Description of Artificial Sequence: Synthetic oligonucleotide
  Sense strand starting at position 3341 of SEQ ID NO: 913826
uggaauagaacguguuugu

SEQ ID NO: 957071 - RNA, 19 nt, Artificial Sequence
  Description of Artificial Sequence: Synthetic oligonucleotide
  Antisense strand to SEQ ID NO: 957070
acaaacacguucuauucca

SEQ ID NO: 957072 - RNA, 19 nt, Artificial Sequence
  Description of Artificial Sequence: Synthetic oligonucleotide
  Sense strand starting at position 2227 of SEQ ID NO: 913826
gcaucacgugaccgagaau

SEQ ID NO: 957073 - RNA, 19 nt, Artificial Sequence
  Description of Artificial Sequence: Synthetic oligonucleotide
  Antisense strand to SEQ ID NO: 957072
auucucggucacgugaugc

SEQ ID NO: 957074 - RNA, 19 nt, Artificial Sequence
  Description of Artificial Sequence: Synthetic oligonucleotide
  Sense strand starting at position 3467 of SEQ ID NO: 913826
gucuguaucuaucccucua

SEQ ID NO: 957075 - RNA, 19 nt, Artificial Sequence
  Description of Artificial Sequence: Synthetic oligonucleotide
  Antisense strand to SEQ ID NO: 957074
uagagggauagauacagac

SEQ ID NO: 957076 - RNA, 19 nt, Artificial Sequence
  Description of Artificial Sequence: Synthetic oligonucleotide
  Sense strand starting at position 2989 of SEQ ID NO: 913826
cgaguuguuucuucuuaaa

SEQ ID NO: 957077 - RNA, 19 nt, Artificial Sequence
  Description of Artificial Sequence: Synthetic oligonucleotide
  Antisense strand to SEQ ID NO: 957076
uuuaagaagaaacaacucg

SEQ ID NO: 957078 - RNA, 19 nt, Artificial Sequence
  Description of Artificial Sequence: Synthetic oligonucleotide
  Sense strand starting at position 1801 of SEQ ID NO: 913826
gcggaaaguucguucagga

SEQ ID NO: 957079 - RNA, 19 nt, Artificial Sequence
  Description of Artificial Sequence: Synthetic oligonucleotide
  Antisense strand to SEQ ID NO: 957078
uccugaacgaacuuuccgc

SEQ ID NO: 957080 - RNA, 19 nt, Artificial Sequence
  Description of Artificial Sequence: Synthetic oligonucleotide
  Sense strand starting at position 2988 of SEQ ID NO: 913826
ccgaguuguuucuucuuaa

SEQ ID NO: 957081 - RNA, 19 nt, Artificial Sequence
  Description of Artificial Sequence: Synthetic oligonucleotide
  Antisense strand to SEQ ID NO: 957080
uuaagaagaaacaacucgg

SEQ ID NO: 957082 - RNA, 19 nt, Artificial Sequence
  Description of Artificial Sequence: Synthetic oligonucleotide
  Sense strand starting at position 3344 of SEQ ID NO: 913826
aauagaacguguuugugca

SEQ ID NO: 957083 - RNA, 19 nt, Artificial Sequence
  Description of Artificial Sequence: Synthetic oligonucleotide
  Antisense strand to SEQ ID NO: 957082
ugcacaaacacguucuauu

SEQ ID NO: 957084 - RNA, 19 nt, Artificial Sequence
  Description of Artificial Sequence: Synthetic oligonucleotide
  Sense strand starting at position 3818 of SEQ ID NO: 913826
agccuugcuccggauguuu

SEQ ID NO: 957085 - RNA, 19 nt, Artificial Sequence
  Description of Artificial Sequence: Synthetic oligonucleotide
  Antisense strand to SEQ ID NO: 957084
aaacauccggagcaaggcu

SEQ ID NO: 957086 - RNA, 19 nt, Artificial Sequence
  Description of Artificial Sequence: Synthetic oligonucleotide
  Sense strand starting at position 3598 of SEQ ID NO: 913826
agguaugacugauauggua

SEQ ID NO: 957087 - RNA, 19 nt, Artificial Sequence
  Description of Artificial Sequence: Synthetic oligonucleotide
  Antisense strand to SEQ ID NO: 957086
uaccauaucagucauaccu

SEQ ID NO: 957088 - RNA, 19 nt, Artificial Sequence
  Description of Artificial Sequence: Synthetic oligonucleotide
  Sense strand starting at position 3787 of SEQ ID NO: 913826
gguucuuccucacagagag

SEQ ID NO: 957089 - RNA, 19 nt, Artificial Sequence
  Description of Artificial Sequence: Synthetic oligonucleotide
  Antisense strand to SEQ ID NO: 957088
cucucugugaggaagaacc

SEQ ID NO: 957090 - RNA, 19 nt, Artificial Sequence
  Description of Artificial Sequence: Synthetic oligonucleotide
  Sense strand starting at position 2548 of SEQ ID NO: 913826
cucgaagacucauaaaguc

SEQ ID NO: 957091 - RNA, 19 nt, Artificial Sequence
  Description of Artificial Sequence: Synthetic oligonucleotide
  Antisense strand to SEQ ID NO: 957090
gacuuuaugagucuucgag

SEQ ID NO: 957092 - RNA, 19 nt, Artificial Sequence
  Description of Artificial Sequence: Synthetic oligonucleotide
  Sense strand starting at position 3555 of SEQ ID NO: 913826
caggcauucuagggagaca

SEQ ID NO: 957093 - RNA, 19 nt, Artificial Sequence
  Description of Artificial Sequence: Synthetic oligonucleotide
  Antisense strand to SEQ ID NO: 957092
ugucucccuagaaugccug

SEQ ID NO: 957094 - RNA, 19 nt, Artificial Sequence
  Description of Artificial Sequence: Synthetic oligonucleotide
  Sense strand starting at position 3585 of SEQ ID NO: 913826
cccacauccuuacagguau

SEQ ID NO: 957095 - RNA, 19 nt, Artificial Sequence
  Description of Artificial Sequence: Synthetic oligonucleotide
  Antisense strand to SEQ ID NO: 957094
auaccuguaaggauguggg

SEQ ID NO: 957096 - RNA, 19 nt, Artificial Sequence
  Description of Artificial Sequence: Synthetic oligonucleotide
  Sense strand starting at position 208 of SEQ ID NO: 913826
cgcguuccuucuuuccaua

SEQ ID NO: 957097 - RNA, 19 nt, Artificial Sequence
  Description of Artificial Sequence: Synthetic oligonucleotide
  Antisense strand to SEQ ID NO: 957096
uauggaaagaaggaacgcg

SEQ ID NO: 957098 - RNA, 19 nt, Artificial Sequence
  Description of Artificial Sequence: Synthetic oligonucleotide
  Sense strand starting at position 1627 of SEQ ID NO: 913826
guccuuuccgagugcaugu

SEQ ID NO: 957099 - RNA, 19 nt, Artificial Sequence
  Description of Artificial Sequence: Synthetic oligonucleotide
  Antisense strand to SEQ ID NO: 957098
acaugcacucggaaaggac

SEQ ID NO: 957100 - RNA, 19 nt, Artificial Sequence
  Description of Artificial Sequence: Synthetic oligonucleotide
  Sense strand starting at position 3180 of SEQ ID NO: 913826
accugugagucagggagau

SEQ ID NO: 957101 - RNA, 19 nt, Artificial Sequence
  Description of Artificial Sequence: Synthetic oligonucleotide
  Antisense strand to SEQ ID NO: 957100
aucucccugacucacaggu

SEQ ID NO: 957102 - RNA, 19 nt, Artificial Sequence
  Description of Artificial Sequence: Synthetic oligonucleotide
  Sense strand starting at position 3689 of SEQ ID NO: 913826
gggaaugauuacugcggga

SEQ ID NO: 957103 - RNA, 19 nt, Artificial Sequence
  Description of Artificial Sequence: Synthetic oligonucleotide
  Antisense strand to SEQ ID NO: 957102
ucccgcaguaaucauuccc

SEQ ID NO: 957104 - RNA, 19 nt, Artificial Sequence
  Description of Artificial Sequence: Synthetic oligonucleotide
  Sense strand starting at position 3127 of SEQ ID NO: 913826
ggccuuuccugagaucuca

SEQ ID NO: 957105 - RNA, 19 nt, Artificial Sequence
  Description of Artificial Sequence: Synthetic oligonucleotide
  Antisense strand to SEQ ID NO: 957104
ugagaucucaggaaaggcc

SEQ ID NO: 957106 - RNA, 19 nt, Artificial Sequence
  Description of Artificial Sequence: Synthetic oligonucleotide
  Sense strand starting at position 3059 of SEQ ID NO: 913826
ggccaagugugacauacau

SEQ ID NO: 957107 - RNA, 19 nt, Artificial Sequence
  Description of Artificial Sequence: Synthetic oligonucleotide
  Antisense strand to SEQ ID NO: 957106
auguaugucacacuuggcc

SEQ ID NO: 957108 - RNA, 19 nt, Artificial Sequence
  Description of Artificial Sequence: Synthetic oligonucleotide
  Sense strand starting at position 3827 of SEQ ID NO: 913826
ccggauguuucaggagaca

SEQ ID NO: 957109 - RNA, 19 nt, Artificial Sequence
  Description of Artificial Sequence: Synthetic oligonucleotide
  Antisense strand to SEQ ID NO: 957108
ugucuccugaaacauccgg

SEQ ID NO: 957110 - RNA, 19 nt, Artificial Sequence
  Description of Artificial Sequence: Synthetic oligonucleotide
  Sense strand starting at position 977 of SEQ ID NO: 913826
cguuuacacucaugcauuu

SEQ ID NO: 957111 - RNA, 19 nt, Artificial Sequence
  Description of Artificial Sequence: Synthetic oligonucleotide
  Antisense strand to SEQ ID NO: 957110
aaaugcaugaguguaaacg

SEQ ID NO: 957112 - RNA, 19 nt, Artificial Sequence
  Description of Artificial Sequence: Synthetic oligonucleotide
  Sense strand starting at position 3943 of SEQ ID NO: 913827
uuaggagacuuccucuaag

SEQ ID NO: 957113 - RNA, 19 nt, Artificial Sequence
  Description of Artificial Sequence: Synthetic oligonucleotide
  Antisense strand to SEQ ID NO: 957112
cuuagaggaagucuccuaa

SEQ ID NO: 957114 - RNA, 19 nt, Artificial Sequence
  Description of Artificial Sequence: Synthetic oligonucleotide
  Sense strand starting at position 2786 of SEQ ID NO: 913827
uugaauguucuauacauug

SEQ ID NO: 957115 - RNA, 19 nt, Artificial Sequence
  Description of Artificial Sequence: Synthetic oligonucleotide
  Antisense strand to SEQ ID NO: 957114
caauguauagaacauucaa

SEQ ID NO: 957116 - RNA, 19 nt, Artificial Sequence
  Description of Artificial Sequence: Synthetic oligonucleotide
  Sense strand starting at position 860 of SEQ ID NO: 913827
uauggugaacccugaagau

SEQ ID NO: 957117 - RNA, 19 nt, Artificial Sequence
  Description of Artificial Sequence: Synthetic oligonucleotide
  Antisense strand to SEQ ID NO: 957116
aucuucaggguucaccaua

SEQ ID NO: 957118 - RNA, 19 nt, Artificial Sequence
  Description of Artificial Sequence: Synthetic oligonucleotide
  Sense strand starting at position 825 of SEQ ID NO: 913827
guguguaagaaugacacua

SEQ ID NO: 957119 - RNA, 19 nt, Artificial Sequence
  Description of Artificial Sequence: Synthetic oligonucleotide
  Antisense strand to SEQ ID NO: 957118
uagugucauucuuacacac

SEQ ID NO: 957120 - RNA, 19 nt, Artificial Sequence
  Description of Artificial Sequence: Synthetic oligonucleotide
  Sense strand starting at position 3681 of SEQ ID NO: 913827
agucuuagaguagagugau

SEQ ID NO: 957121 - RNA, 19 nt, Artificial Sequence
  Description of Artificial Sequence: Synthetic oligonucleotide
  Antisense strand to SEQ ID NO: 957120
aucacucuacucuaagacu

SEQ ID NO: 957122 - RNA, 19 nt, Artificial Sequence
  Description of Artificial Sequence: Synthetic oligonucleotide
  Sense strand starting at position 2127 of SEQ ID NO: 913827
uugcuaucuccugaaagac

SEQ ID NO: 957123 - RNA, 19 nt, Artificial Sequence
  Description of Artificial Sequence: Synthetic oligonucleotide
  Antisense strand to SEQ ID NO: 957122
gucuuucaggagauagcaa

SEQ ID NO: 957124 - RNA, 19 nt, Artificial Sequence
  Description of Artificial Sequence: Synthetic oligonucleotide
  Sense strand starting at position 1085 of SEQ ID NO: 913827
gacauaaaucuaggucuug

SEQ ID NO: 957125 - RNA, 19 nt, Artificial Sequence
  Description of Artificial Sequence: Synthetic oligonucleotide
  Antisense strand to SEQ ID NO: 957124
caagaccuagauuuauguc

SEQ ID NO: 957126 - RNA, 19 nt, Artificial Sequence
  Description of Artificial Sequence: Synthetic oligonucleotide
  Sense strand starting at position 695 of SEQ ID NO: 913827
auauguuugaguuaaguga

SEQ ID NO: 957127 - RNA, 19 nt, Artificial Sequence
  Description of Artificial Sequence: Synthetic oligonucleotide
  Antisense strand to SEQ ID NO: 957126
ucacuuaacucaaacauau

SEQ ID NO: 957128 - RNA, 19 nt, Artificial Sequence
  Description of Artificial Sequence: Synthetic oligonucleotide
  Sense strand starting at position 140 of SEQ ID NO: 913827
augguuacugaguaguaac

SEQ ID NO: 957129 - RNA, 19 nt, Artificial Sequence
  Description of Artificial Sequence: Synthetic oligonucleotide
  Antisense strand to SEQ ID NO: 957128
guuacuacucaguaaccau

SEQ ID NO: 957130 - RNA, 19 nt, Artificial Sequence
  Description of Artificial Sequence: Synthetic oligonucleotide
  Sense strand starting at position 702 of SEQ ID NO: 913827
ugaguuaagugaccuacaa

SEQ ID NO: 957131 - RNA, 19 nt, Artificial Sequence
  Description of Artificial Sequence: Synthetic oligonucleotide
  Antisense strand to SEQ ID NO: 957130
uuguaggucacuuaacuca

SEQ ID NO: 957132 - RNA, 19 nt, Artificial Sequence
  Description of Artificial Sequence: Synthetic oligonucleotide
  Sense strand starting at position 3621 of SEQ ID NO: 913827
cguugaagacucuauccau

SEQ ID NO: 957133 - RNA, 19 nt, Artificial Sequence
  Description of Artificial Sequence: Synthetic oligonucleotide
  Antisense strand to SEQ ID NO: 957132
auggauagagucuucaacg

SEQ ID NO: 957134 - RNA, 19 nt, Artificial Sequence
  Description of Artificial Sequence: Synthetic oligonucleotide
  Sense strand starting at position 690 of SEQ ID NO: 913827
aagacauauguuugaguua

SEQ ID NO: 957135 - RNA, 19 nt, Artificial Sequence
  Description of Artificial Sequence: Synthetic oligonucleotide
  Antisense strand to SEQ ID NO: 957134
uaacucaaacauaugucuu

SEQ ID NO: 957136 - RNA, 19 nt, Artificial Sequence
  Description of Artificial Sequence: Synthetic oligonucleotide
  Sense strand starting at position 689 of SEQ ID NO: 913827
gaagacauauguuugaguu

SEQ ID NO: 957137 - RNA, 19 nt, Artificial Sequence
  Description of Artificial Sequence: Synthetic oligonucleotide
  Antisense strand to SEQ ID NO: 957136
aacucaaacauaugucuuc

SEQ ID NO: 957138 - RNA, 19 nt, Artificial Sequence
  Description of Artificial Sequence: Synthetic oligonucleotide
  Sense strand starting at position 3687 of SEQ ID NO: 913827
agaguagagugaucauucu

SEQ ID NO: 957139 - RNA, 19 nt, Artificial Sequence
  Description of Artificial Sequence: Synthetic oligonucleotide
  Antisense strand to SEQ ID NO: 957138
agaaugaucacucuacucu

SEQ ID NO: 957140 - RNA, 19 nt, Artificial Sequence
  Description of Artificial Sequence: Synthetic oligonucleotide
  Sense strand starting at position 135 of SEQ ID NO: 913827
auugaaugguuacugagua

SEQ ID NO: 957141 - RNA, 19 nt, Artificial Sequence
  Description of Artificial Sequence: Synthetic oligonucleotide
  Antisense strand to SEQ ID NO: 957140
uacucaguaaccauucaau

SEQ ID NO: 957142 - RNA, 19 nt, Artificial Sequence
  Description of Artificial Sequence: Synthetic oligonucleotide
  Sense strand starting at position 818 of SEQ ID NO: 913827
ggugaauguguguaagaau

SEQ ID NO: 957143 - RNA, 19 nt, Artificial Sequence
  Description of Artificial Sequence: Synthetic oligonucleotide
  Antisense strand to SEQ ID NO: 957142
auucuuacacacauucacc

SEQ ID NO: 957144 - RNA, 19 nt, Artificial Sequence
  Description of Artificial Sequence: Synthetic oligonucleotide
  Sense strand starting at position 3684 of SEQ ID NO: 913827
cuuagaguagagugaucau

SEQ ID NO: 957145 - RNA, 19 nt, Artificial Sequence
  Description of Artificial Sequence: Synthetic oligonucleotide
  Antisense strand to SEQ ID NO: 957144
augaucacucuacucuaag

SEQ ID NO: 957146 - RNA, 19 nt, Artificial Sequence
  Description of Artificial Sequence: Synthetic oligonucleotide
  Sense strand starting at position 132 of SEQ ID NO: 913827
gguauugaaugguuacuga

SEQ ID NO: 957147 - RNA, 19 nt, Artificial Sequence
  Description of Artificial Sequence: Synthetic oligonucleotide
  Antisense strand to SEQ ID NO: 957146
ucaguaaccauucaauacc

SEQ ID NO: 957148 - RNA, 19 nt, Artificial Sequence
  Description of Artificial Sequence: Synthetic oligonucleotide
  Sense strand starting at position 1464 of SEQ ID NO: 913827
ggacucaucucuuuaguaa

SEQ ID NO: 957149 - RNA, 19 nt, Artificial Sequence
  Description of Artificial Sequence: Synthetic oligonucleotide
  Antisense strand to SEQ ID NO: 957148
uuacuaaagagaugagucc

SEQ ID NO: 957150 - RNA, 19 nt, Artificial Sequence
  Description of Artificial Sequence: Synthetic oligonucleotide
  Sense strand starting at position 844 of SEQ ID NO: 913827
gucuccauugcugaaauau

SEQ ID NO: 957151 - RNA, 19 nt, Artificial Sequence
  Description of Artificial Sequence: Synthetic oligonucleotide
  Antisense strand to SEQ ID NO: 957150
auauuucagcaauggagac

SEQ ID NO: 957152 - RNA, 19 nt, Artificial Sequence
  Description of Artificial Sequence: Synthetic oligonucleotide
  Sense strand starting at position 1988 of SEQ ID NO: 913827
ggcaguuaauuugcucuuu

SEQ ID NO: 957153 - RNA, 19 nt, Artificial Sequence
  Description of Artificial Sequence: Synthetic oligonucleotide
  Antisense strand to SEQ ID NO: 957152
aaagagcaaauuaacugcc

SEQ ID NO: 957154 - RNA, 19 nt, Artificial Sequence
  Description of Artificial Sequence: Synthetic oligonucleotide
  Sense strand starting at position 3957 of SEQ ID NO: 913827
cuaagauaucuuggcugau

SEQ ID NO: 957155 - RNA, 19 nt, Artificial Sequence
  Description of Artificial Sequence: Synthetic oligonucleotide
  Antisense strand to SEQ ID NO: 957154
aucagccaagauaucuuag

SEQ ID NO: 957156 - RNA, 19 nt, Artificial Sequence
  Description of Artificial Sequence: Synthetic oligonucleotide
  Sense strand starting at position 139 of SEQ ID NO: 913827
aaugguuacugaguaguaa

SEQ ID NO: 957157 - RNA, 19 nt, Artificial Sequence
  Description of Artificial Sequence: Synthetic oligonucleotide
  Antisense strand to SEQ ID NO: 957156
uuacuacucaguaaccauu

SEQ ID NO: 957158 - RNA, 19 nt, Artificial Sequence
  Description of Artificial Sequence: Synthetic oligonucleotide
  Sense strand starting at position 3552 of SEQ ID NO: 913827
uagauuguuccuggacuac

SEQ ID NO: 957159 - RNA, 19 nt, Artificial Sequence
  Description of Artificial Sequence: Synthetic oligonucleotide
  Antisense strand to SEQ ID NO: 957158
guaguccaggaacaaucua

SEQ ID NO: 957160 - RNA, 19 nt, Artificial Sequence
  Description of Artificial Sequence: Synthetic oligonucleotide
  Sense strand starting at position 805 of SEQ ID NO: 913827
gugguuuaugaagggugaa

SEQ ID NO: 957161 - RNA, 19 nt, Artificial Sequence
  Description of Artificial Sequence: Synthetic oligonucleotide
  Antisense strand to SEQ ID NO: 957160
uucacccuucauaaaccac

SEQ ID NO: 957162 - RNA, 19 nt, Artificial Sequence
  Description of Artificial Sequence: Synthetic oligonucleotide
  Sense strand starting at position 3361 of SEQ ID NO: 913827
augcacuucuuccugagaa

SEQ ID NO: 957163 - RNA, 19 nt, Artificial Sequence
  Description of Artificial Sequence: Synthetic oligonucleotide
  Antisense strand to SEQ ID NO: 957162
uucucaggaagaagugcau

SEQ ID NO: 957164 - RNA, 19 nt, Artificial Sequence
  Description of Artificial Sequence: Synthetic oligonucleotide
  Sense strand starting at position 2313 of SEQ ID NO: 913827
uuauuagaauugcucuaug

SEQ ID NO: 957165 - RNA, 19 nt, Artificial Sequence
  Description of Artificial Sequence: Synthetic oligonucleotide
  Antisense strand to SEQ ID NO: 957164
cauagagcaauucuaauaa

SEQ ID NO: 957166 - RNA, 19 nt, Artificial Sequence
  Description of Artificial Sequence: Synthetic oligonucleotide
  Sense strand starting at position 1462 of SEQ ID NO: 913827
auggacucaucucuuuagu

SEQ ID NO: 957167 - RNA, 19 nt, Artificial Sequence
  Description of Artificial Sequence: Synthetic oligonucleotide
  Antisense strand to SEQ ID NO: 957166
acuaaagagaugaguccau

SEQ ID NO: 957168 - RNA, 19 nt, Artificial Sequence
  Description of Artificial Sequence: Synthetic oligonucleotide
  Sense strand starting at position 2776 of SEQ ID NO: 913827
uuaugugauguugaauguu

SEQ ID NO: 957169 - RNA, 19 nt, Artificial Sequence
  Description of Artificial Sequence: Synthetic oligonucleotide
  Antisense strand to SEQ ID NO: 957168
aacauucaacaucacauaa

SEQ ID NO: 957170 - RNA, 19 nt, Artificial Sequence
  Description of Artificial Sequence: Synthetic oligonucleotide
  Sense strand starting at position 1159 of SEQ ID NO: 913827
aguuguaucccacaugcaa

SEQ ID NO: 957171 - RNA, 19 nt, Artificial Sequence
  Description of Artificial Sequence: Synthetic oligonucleotide
  Antisense strand to SEQ ID NO: 957170
uugcaugugggauacaacu

SEQ ID NO: 957172 - RNA, 19 nt, Artificial Sequence
  Description of Artificial Sequence: Synthetic oligonucleotide
  Sense strand starting at position 2782 of SEQ ID NO: 913827
gauguugaauguucuauac

SEQ ID NO: 957173 - RNA, 19 nt, Artificial Sequence
  Description of Artificial Sequence: Synthetic oligonucleotide
  Antisense strand to SEQ ID NO: 957172
guauagaacauucaacauc

SEQ ID NO: 957174 - RNA, 19 nt, Artificial Sequence
  Description of Artificial Sequence: Synthetic oligonucleotide
  Sense strand starting at position 3216 of SEQ ID NO: 913827
gcugacuauccuuauaguu

SEQ ID NO: 957175 - RNA, 19 nt, Artificial Sequence
  Description of Artificial Sequence: Synthetic oligonucleotide
  Antisense strand to SEQ ID NO: 957174
aacuauaaggauagucagc

SEQ ID NO: 957176 - RNA, 19 nt, Artificial Sequence
  Description of Artificial Sequence: Synthetic oligonucleotide
  Sense strand starting at position 817 of SEQ ID NO: 913827
gggugaauguguguaagaa

SEQ ID NO: 957177 - RNA, 19 nt, Artificial Sequence
  Description of Artificial Sequence: Synthetic oligonucleotide
  Antisense strand to SEQ ID NO: 957176
uucuuacacacauucaccc

SEQ ID NO: 957178 - RNA, 19 nt, Artificial Sequence
  Description of Artificial Sequence: Synthetic oligonucleotide
  Sense strand starting at position 808 of SEQ ID NO: 913827
guuuaugaagggugaaugu

SEQ ID NO: 957179 - RNA, 19 nt, Artificial Sequence
  Description of Artificial Sequence: Synthetic oligonucleotide
  Antisense strand to SEQ ID NO: 957178
acauucacccuucauaaac

SEQ ID NO: 957180 - RNA, 19 nt, Artificial Sequence
  Description of Artificial Sequence: Synthetic oligonucleotide
  Sense strand starting at position 731 of SEQ ID NO: 913827
cgugccucuggauaauuaa

SEQ ID NO: 957181 - RNA, 19 nt, Artificial Sequence
  Description of Artificial Sequence: Synthetic oligonucleotide
  Antisense strand to SEQ ID NO: 957180
uuaauuauccagaggcacg

SEQ ID NO: 957182 - RNA, 19 nt, Artificial Sequence
  Description of Artificial Sequence: Synthetic oligonucleotide
  Sense strand starting at position 2750 of SEQ ID NO: 913827
ucuuaugagcgugaauauu

SEQ ID NO: 957183 - RNA, 19 nt, Artificial Sequence
  Description of Artificial Sequence: Synthetic oligonucleotide
  Antisense strand to SEQ ID NO: 957182
aauauucacgcucauaaga

SEQ ID NO: 957184 - RNA, 19 nt, Artificial Sequence
  Description of Artificial Sequence: Synthetic oligonucleotide
  Sense strand starting at position 1492 of SEQ ID NO: 913827
cuuaguuucugaucuacac

SEQ ID NO: 957185 - RNA, 19 nt, Artificial Sequence
  Description of Artificial Sequence: Synthetic oligonucleotide
  Antisense strand to SEQ ID NO: 957184
guguagaucagaaacuaag

SEQ ID NO: 957186 - RNA, 19 nt, Artificial Sequence
  Description of Artificial Sequence: Synthetic oligonucleotide
  Sense strand starting at position 3760 of SEQ ID NO: 913827
cucugaauguagcuuacaa

SEQ ID NO: 957187 - RNA, 19 nt, Artificial Sequence
  Description of Artificial Sequence: Synthetic oligonucleotide
  Antisense strand to SEQ ID NO: 957186
uuguaagcuacauucagag

SEQ ID NO: 957188 - RNA, 19 nt, Artificial Sequence
  Description of Artificial Sequence: Synthetic oligonucleotide
  Sense strand starting at position 1198 of SEQ ID NO: 913827
agcaguguucuguaaauga

SEQ ID NO: 957189 - RNA, 19 nt, Artificial Sequence
  Description of Artificial Sequence: Synthetic oligonucleotide
  Antisense strand to SEQ ID NO: 957188
ucauuuacagaacacugcu

SEQ ID NO: 957190 - RNA, 19 nt, Artificial Sequence
  Description of Artificial Sequence: Synthetic oligonucleotide
  Sense strand starting at position 130 of SEQ ID NO: 913827
uugguauugaaugguuacu

SEQ ID NO: 957191 - RNA, 19 nt, Artificial Sequence
  Description of Artificial Sequence: Synthetic oligonucleotide
  Antisense strand to SEQ ID NO: 957190
aguaaccauucaauaccaa

SEQ ID NO: 957192 - RNA, 19 nt, Artificial Sequence
  Description of Artificial Sequence: Synthetic oligonucleotide
  Sense strand starting at position 521 of SEQ ID NO: 913828
gcacauuucugacuauguu

SEQ ID NO: 957193 - RNA, 19 nt, Artificial Sequence
  Description of Artificial Sequence: Synthetic oligonucleotide
  Antisense strand to SEQ ID NO: 957192
aacauagucagaaaugugc

SEQ ID NO: 957194 - RNA, 19 nt, Artificial Sequence
  Description of Artificial Sequence: Synthetic oligonucleotide
  Sense strand starting at position 143 of SEQ ID NO: 913828
uuacuuguguuauuucuca

SEQ ID NO: 957195 - RNA, 19 nt, Artificial Sequence
  Description of Artificial Sequence: Synthetic oligonucleotide
  Antisense strand to SEQ ID NO: 957194
ugagaaauaacacaaguaa

SEQ ID NO: 957196 - RNA, 19 nt, Artificial Sequence
  Description of Artificial Sequence: Synthetic oligonucleotide
  Sense strand starting at position 1075 of SEQ ID NO: 913828
ucuuuagucaugggauaga

SEQ ID NO: 957197 - RNA, 19 nt, Artificial Sequence
  Description of Artificial Sequence: Synthetic oligonucleotide
  Antisense strand to SEQ ID NO: 957196
ucuaucccaugacuaaaga

SEQ ID NO: 957198 - RNA, 19 nt, Artificial Sequence
  Description of Artificial Sequence: Synthetic oligonucleotide
  Sense strand starting at position 2984 of SEQ ID NO: 913828
agagcuaggagccauguaa

SEQ ID NO: 957199 - RNA, 19 nt, Artificial Sequence
  Description of Artificial Sequence: Synthetic oligonucleotide
  Antisense strand to SEQ ID NO: 957198
uuacauggcuccuagcucu

SEQ ID NO: 957200 - RNA, 19 nt, Artificial Sequence
  Description of Artificial Sequence: Synthetic oligonucleotide
  Sense strand starting at position 1067 of SEQ ID NO: 913828
cuaugaccucuuuagucau

SEQ ID NO: 957201 - RNA, 19 nt, Artificial Sequence
  Description of Artificial Sequence: Synthetic oligonucleotide
  Antisense strand to SEQ ID NO: 957200
augacuaaagaggucauag

SEQ ID NO: 957202 - RNA, 19 nt, Artificial Sequence
  Description of Artificial Sequence: Synthetic oligonucleotide
  Sense strand starting at position 901 of SEQ ID NO: 913828
cccuguuaacuauggagac

SEQ ID NO: 957203 - RNA, 19 nt, Artificial Sequence
  Description of Artificial Sequence: Synthetic oligonucleotide
  Antisense strand to SEQ ID NO: 957202
gucuccauaguuaacaggg

SEQ ID NO: 957204 - RNA, 19 nt, Artificial Sequence
  Description of Artificial Sequence: Synthetic oligonucleotide
  Sense strand starting at position 1074 of SEQ ID NO: 913828
cucuuuagucaugggauag

SEQ ID NO: 957205 - RNA, 19 nt, Artificial Sequence
  Description of Artificial Sequence: Synthetic oligonucleotide
  Antisense strand to SEQ ID NO: 957204
cuaucccaugacuaaagag

SEQ ID NO: 957206 - RNA, 19 nt, Artificial Sequence
  Description of Artificial Sequence: Synthetic oligonucleotide
  Sense strand starting at position 1 of SEQ ID NO: 913828
cgaggaaauucucuuccua

SEQ ID NO: 957207 - RNA, 19 nt, Artificial Sequence
  Description of Artificial Sequence: Synthetic oligonucleotide
  Antisense strand to SEQ ID NO: 957206
uaggaagagaauuuccucg

SEQ ID NO: 957208 - RNA, 19 nt, Artificial Sequence
  Description of Artificial Sequence: Synthetic oligonucleotide
  Sense strand starting at position 3884 of SEQ ID NO: 913828
gagauagguuaguugaggu

SEQ ID NO: 957209 - RNA, 19 nt, Artificial Sequence
  Description of Artificial Sequence: Synthetic oligonucleotide
  Antisense strand to SEQ ID NO: 957208
accucaacuaaccuaucuc

SEQ ID NO: 957210 - RNA, 19 nt, Artificial Sequence
  Description of Artificial Sequence: Synthetic oligonucleotide
  Sense strand starting at position 1024 of SEQ ID NO: 913828
cuaguauucuuucuuagac

SEQ ID NO: 957211 - RNA, 19 nt, Artificial Sequence
  Description of Artificial Sequence: Synthetic oligonucleotide
  Antisense strand to SEQ ID NO: 957210
gucuaagaaagaauacuag

SEQ ID NO: 957212 - RNA, 19 nt, Artificial Sequence
  Description of Artificial Sequence: Synthetic oligonucleotide
  Sense strand starting at position 1085 of SEQ ID NO: 913828
ugggauagaguccggguua

SEQ ID NO: 957213 - RNA, 19 nt, Artificial Sequence
  Description of Artificial Sequence: Synthetic oligonucleotide
  Antisense strand to SEQ ID NO: 957212
uaacccggacucuauccca

SEQ ID NO: 957214 - RNA, 19 nt, Artificial Sequence
  Description of Artificial Sequence: Synthetic oligonucleotide
  Sense strand starting at position 3694 of SEQ ID NO: 913828
ccgauaucaggugauucgu

SEQ ID NO: 957215 - RNA, 19 nt, Artificial Sequence
  Description of Artificial Sequence: Synthetic oligonucleotide
  Antisense strand to SEQ ID NO: 957214
acgaaucaccugauaucgg

SEQ ID NO: 957216 - RNA, 19 nt, Artificial Sequence
  Description of Artificial Sequence: Synthetic oligonucleotide
  Sense strand starting at position 2846 of SEQ ID NO: 913828
ggaagagaguucuagagaa

SEQ ID NO: 957217 - RNA, 19 nt, Artificial Sequence
  Description of Artificial Sequence: Synthetic oligonucleotide
  Antisense strand to SEQ ID NO: 957216
uucucuagaacucucuucc

SEQ ID NO: 957218 - RNA, 19 nt, Artificial Sequence
  Description of Artificial Sequence: Synthetic oligonucleotide
  Sense strand starting at position 3818 of SEQ ID NO: 913828
ccacauuucugcuauggaa

SEQ ID NO: 957219 - RNA, 19 nt, Artificial Sequence
  Description of Artificial Sequence: Synthetic oligonucleotide
  Antisense strand to SEQ ID NO: 957218
uuccauagcagaaaugugg

SEQ ID NO: 957220 - RNA, 19 nt, Artificial Sequence
  Description of Artificial Sequence: Synthetic oligonucleotide
  Sense strand starting at position 74 of SEQ ID NO: 913828
uuuccuggcaagugugaau

SEQ ID NO: 957221 - RNA, 19 nt, Artificial Sequence
  Description of Artificial Sequence: Synthetic oligonucleotide
  Antisense strand to SEQ ID NO: 957220
auucacacuugccaggaaa

SEQ ID NO: 957222 - RNA, 19 nt, Artificial Sequence
  Description of Artificial Sequence: Synthetic oligonucleotide
  Sense strand starting at position 1110 of SEQ ID NO: 913828
ugaauuuaguuccagccau

SEQ ID NO: 957223 - RNA, 19 nt, Artificial Sequence
  Description of Artificial Sequence: Synthetic oligonucleotide
  Antisense strand to SEQ ID NO: 957222
auggcuggaacuaaauuca

SEQ ID NO: 957224 - RNA, 19 nt, Artificial Sequence
  Description of Artificial Sequence: Synthetic oligonucleotide
  Sense strand starting at position 518 of SEQ ID NO: 913828
agggcacauuucugacuau

SEQ ID NO: 957225 - RNA, 19 nt, Artificial Sequence
  Description of Artificial Sequence: Synthetic oligonucleotide
  Antisense strand to SEQ ID NO: 957224
auagucagaaaugugcccu

SEQ ID NO: 957226 - RNA, 19 nt, Artificial Sequence
  Description of Artificial Sequence: Synthetic oligonucleotide
  Sense strand starting at position 3438 of SEQ ID NO: 913828
gaggccuugucucaaauuu

SEQ ID NO: 957227 - RNA, 19 nt, Artificial Sequence
  Description of Artificial Sequence: Synthetic oligonucleotide
  Antisense strand to SEQ ID NO: 957226
aaauuugagacaaggccuc

SEQ ID NO: 957228 - RNA, 19 nt, Artificial Sequence
  Description of Artificial Sequence: Synthetic oligonucleotide
  Sense strand starting at position 3387 of SEQ ID NO: 913828
ucugccgugagcuaugauu

SEQ ID NO: 957229 - RNA, 19 nt, Artificial Sequence
  Description of Artificial Sequence: Synthetic oligonucleotide
  Antisense strand to SEQ ID NO: 957228
aaucauagcucacggcaga

SEQ ID NO: 957230 - RNA, 19 nt, Artificial Sequence
  Description of Artificial Sequence: Synthetic oligonucleotide
  Sense strand starting at position 973 of SEQ ID NO: 913828
caugcacuaucgcucgaaa

SEQ ID NO: 957231 - RNA, 19 nt, Artificial Sequence
  Description of Artificial Sequence: Synthetic oligonucleotide
  Antisense strand to SEQ ID NO: 957230
uuucgagcgauagugcaug

SEQ ID NO: 957232 - RNA, 19 nt, Artificial Sequence
  Description of Artificial Sequence: Synthetic oligonucleotide
  Sense strand starting at position 65 of SEQ ID NO: 913828
augugaguguuuccuggca

SEQ ID NO: 957233 - RNA, 19 nt, Artificial Sequence
  Description of Artificial Sequence: Synthetic oligonucleotide
  Antisense strand to SEQ ID NO: 957232
ugccaggaaacacucacau

SEQ ID NO: 957234 - RNA, 19 nt, Artificial Sequence
  Description of Artificial Sequence: Synthetic oligonucleotide
  Sense strand starting at position 2925 of SEQ ID NO: 913828
cccuacauuucccacguau

SEQ ID NO: 957235 - RNA, 19 nt, Artificial Sequence
  Description of Artificial Sequence: Synthetic oligonucleotide
  Antisense strand to SEQ ID NO: 957234
auacgugggaaauguaggg

SEQ ID NO: 957236 - RNA, 19 nt, Artificial Sequence
  Description of Artificial Sequence: Synthetic oligonucleotide
  Sense strand starting at position 2271 of SEQ ID NO: 913828
ucguauaucuuaguguacu

SEQ ID NO: 957237 - RNA, 19 nt, Artificial Sequence
  Description of Artificial Sequence: Synthetic oligonucleotide
  Antisense strand to SEQ ID NO: 957236
aguacacuaagauauacga

SEQ ID NO: 957238 - RNA, 19 nt, Artificial Sequence
  Description of Artificial Sequence: Synthetic oligonucleotide
  Sense strand starting at position 566 of SEQ ID NO: 913828
gcguuucaggcguauggaa

SEQ ID NO: 957239 - RNA, 19 nt, Artificial Sequence
  Description of Artificial Sequence: Synthetic oligonucleotide
  Antisense strand to SEQ ID NO: 957238
uuccauacgccugaaacgc

SEQ ID NO: 957240 - RNA, 19 nt, Artificial Sequence
  Description of Artificial Sequence: Synthetic oligonucleotide
  Sense strand starting at position 3383 of SEQ ID NO: 913828
cgagucugccgugagcuau

SEQ ID NO: 957241 - RNA, 19 nt, Artificial Sequence
  Description of Artificial Sequence: Synthetic oligonucleotide
  Antisense strand to SEQ ID NO: 957240
auagcucacggcagacucg

SEQ ID NO: 957242 - RNA, 19 nt, Artificial Sequence
  Description of Artificial Sequence: Synthetic oligonucleotide
  Sense strand starting at position 1436 of SEQ ID NO: 913828
ccgugagacccuugcgcaa

SEQ ID NO: 957243 - RNA, 19 nt, Artificial Sequence
  Description of Artificial Sequence: Synthetic oligonucleotide
  Antisense strand to SEQ ID NO: 957242
uugcgcaagggucucacgg

SEQ ID NO: 957244 - RNA, 19 nt, Artificial Sequence
  Description of Artificial Sequence: Synthetic oligonucleotide
  Sense strand starting at position 863 of SEQ ID NO: 913828
ucgcaacguuucucucuua

SEQ ID NO: 957245 - RNA, 19 nt, Artificial Sequence
  Description of Artificial Sequence: Synthetic oligonucleotide
  Antisense strand to SEQ ID NO: 957244
uaagagagaaacguugcga

SEQ ID NO: 957246 - RNA, 19 nt, Artificial Sequence
  Description of Artificial Sequence: Synthetic oligonucleotide
  Sense strand starting at position 1026 of SEQ ID NO: 913828
aguauucuuucuuagacca

SEQ ID NO: 957247 - RNA, 19 nt, Artificial Sequence
  Description of Artificial Sequence: Synthetic oligonucleotide
  Antisense strand to SEQ ID NO: 957246
uggucuaagaaagaauacu

SEQ ID NO: 957248 - RNA, 19 nt, Artificial Sequence
  Description of Artificial Sequence: Synthetic oligonucleotide
  Sense strand starting at position 902 of SEQ ID NO: 913828
ccuguuaacuauggagaca

SEQ ID NO: 957249 - RNA, 19 nt, Artificial Sequence
  Description of Artificial Sequence: Synthetic oligonucleotide
  Antisense strand to SEQ ID NO: 957248
ugucuccauaguuaacagg

SEQ ID NO: 957250 - RNA, 19 nt, Artificial Sequence
  Description of Artificial Sequence: Synthetic oligonucleotide
  Sense strand starting at position 77 of SEQ ID NO: 913828
ccuggcaagugugaaugaa

SEQ ID NO: 957251 - RNA, 19 nt, Artificial Sequence
  Description of Artificial Sequence: Synthetic oligonucleotide
  Antisense strand to SEQ ID NO: 957250
uucauucacacuugccagg

SEQ ID NO: 957252 - RNA, 19 nt, Artificial Sequence
  Description of Artificial Sequence: Synthetic oligonucleotide
  Sense strand starting at position 2262 of SEQ ID NO: 913828
cagggaaggucguauaucu

SEQ ID NO: 957253 - RNA, 19 nt, Artificial Sequence
  Description of Artificial Sequence: Synthetic oligonucleotide
  Antisense strand to SEQ ID NO: 957252
agauauacgaccuucccug

SEQ ID NO: 957254 - RNA, 19 nt, Artificial Sequence
  Description of Artificial Sequence: Synthetic oligonucleotide
  Sense strand starting at position 3382 of SEQ ID NO: 913828
ucgagucugccgugagcua

SEQ ID NO: 957255 - RNA, 19 nt, Artificial Sequence
  Description of Artificial Sequence: Synthetic oligonucleotide
  Antisense strand to SEQ ID NO: 957254
uagcucacggcagacucga

SEQ ID NO: 957256 - RNA, 19 nt, Artificial Sequence
  Description of Artificial Sequence: Synthetic oligonucleotide
  Sense strand starting at position 1051 of SEQ ID NO: 913828
cagccuucguguucugcua

SEQ ID NO: 957257 - RNA, 19 nt, Artificial Sequence
  Description of Artificial Sequence: Synthetic oligonucleotide
  Antisense strand to SEQ ID NO: 957256
uagcagaacacgaaggcug

SEQ ID NO: 957258 - RNA, 19 nt, Artificial Sequence
  Description of Artificial Sequence: Synthetic oligonucleotide
  Sense strand starting at position 1073 of SEQ ID NO: 913828
ccucuuuagucaugggaua

SEQ ID NO: 957259 - RNA, 19 nt, Artificial Sequence
  Description of Artificial Sequence: Synthetic oligonucleotide
  Antisense strand to SEQ ID NO: 957258
uaucccaugacuaaagagg

SEQ ID NO: 957260 - RNA, 19 nt, Artificial Sequence
  Description of Artificial Sequence: Synthetic oligonucleotide
  Sense strand starting at position 3888 of SEQ ID NO: 913828
uagguuaguugaggugaca

SEQ ID NO: 957261 - RNA, 19 nt, Artificial Sequence
  Description of Artificial Sequence: Synthetic oligonucleotide
  Antisense strand to SEQ ID NO: 957260
ugucaccucaacuaaccua

SEQ ID NO: 957262 - RNA, 19 nt, Artificial Sequence
  Description of Artificial Sequence: Synthetic oligonucleotide
  Sense strand starting at position 963 of SEQ ID NO: 913828
gaguccugaucaugcacua

SEQ ID NO: 957263 - RNA, 19 nt, Artificial Sequence
  Description of Artificial Sequence: Synthetic oligonucleotide
  Antisense strand to SEQ ID NO: 957262
uagugcaugaucaggacuc

SEQ ID NO: 957264 - RNA, 19 nt, Artificial Sequence
  Description of Artificial Sequence: Synthetic oligonucleotide
  Sense strand starting at position 2810 of SEQ ID NO: 913828
cuucuagagugucaagcuu

SEQ ID NO: 957265 - RNA, 19 nt, Artificial Sequence
  Description of Artificial Sequence: Synthetic oligonucleotide
  Antisense strand to SEQ ID NO: 957264
aagcuugacacucuagaag

SEQ ID NO: 957266 - RNA, 19 nt, Artificial Sequence
  Description of Artificial Sequence: Synthetic oligonucleotide
  Sense strand starting at position 2269 of SEQ ID NO: 913828
ggucguauaucuuagugua

SEQ ID NO: 957267 - RNA, 19 nt, Artificial Sequence
  Description of Artificial Sequence: Synthetic oligonucleotide
  Antisense strand to SEQ ID NO: 957266
uacacuaagauauacgacc

SEQ ID NO: 957268 - RNA, 19 nt, Artificial Sequence
  Description of Artificial Sequence: Synthetic oligonucleotide
  Sense strand starting at position 70 of SEQ ID NO: 913828
aguguuuccuggcaagugu

SEQ ID NO: 957269 - RNA, 19 nt, Artificial Sequence
  Description of Artificial Sequence: Synthetic oligonucleotide
  Antisense strand to SEQ ID NO: 957268
acacuugccaggaaacacu

SEQ ID NO: 957270 - RNA, 19 nt, Artificial Sequence
  Description of Artificial Sequence: Synthetic oligonucleotide
  Sense strand starting at position 67 of SEQ ID NO: 913828
gugaguguuuccuggcaag

SEQ ID NO: 957271 - RNA, 19 nt, Artificial Sequence
  Description of Artificial Sequence: Synthetic oligonucleotide
  Antisense strand to SEQ ID NO: 957270
cuugccaggaaacacucac

SEQ ID NO: 957272 - RNA, 19 nt, Artificial Sequence
  Description of Artificial Sequence: Synthetic oligonucleotide
  Sense strand starting at position 2680 of SEQ ID NO: 913829
caccauucgguagaauaca

SEQ ID NO: 957273 - RNA, 19 nt, Artificial Sequence
  Description of Artificial Sequence: Synthetic oligonucleotide
  Antisense strand to SEQ ID NO: 957272
uguauucuaccgaauggug

SEQ ID NO: 957274 - RNA, 19 nt, Artificial Sequence
  Description of Artificial Sequence: Synthetic oligonucleotide
  Sense strand starting at position 2678 of SEQ ID NO: 913829
uacaccauucgguagaaua

SEQ ID NO: 957275 - RNA, 19 nt, Artificial Sequence
  Description of Artificial Sequence: Synthetic oligonucleotide
  Antisense strand to SEQ ID NO: 957274
uauucuaccgaauggugua

SEQ ID NO: 957276 - RNA, 19 nt, Artificial Sequence
  Description of Artificial Sequence: Synthetic oligonucleotide
  Sense strand starting at position 3402 of SEQ ID NO: 913829
ugggaauagguuugacuag

SEQ ID NO: 957277 - RNA, 19 nt, Artificial Sequence
  Description of Artificial Sequence: Synthetic oligonucleotide
  Antisense strand to SEQ ID NO: 957276
cuagucaaaccuauuccca

SEQ ID NO: 957278 - RNA, 19 nt, Artificial Sequence
  Description of Artificial Sequence: Synthetic oligonucleotide
  Sense strand starting at position 2373 of SEQ ID NO: 913829
cacacaccugagugaugaa

SEQ ID NO: 957279 - RNA, 19 nt, Artificial Sequence
  Description of Artificial Sequence: Synthetic oligonucleotide
  Antisense strand to SEQ ID NO: 957278
uucaucacucaggugugug

SEQ ID NO: 957280 - RNA, 19 nt, Artificial Sequence
  Description of Artificial Sequence: Synthetic oligonucleotide
  Sense strand starting at position 3759 of SEQ ID NO: 913829
ggugauggucauggaaaua

SEQ ID NO: 957281 - RNA, 19 nt, Artificial Sequence
  Description of Artificial Sequence: Synthetic oligonucleotide
  Antisense strand to SEQ ID NO: 957280
uauuuccaugaccaucacc

SEQ ID NO: 957282 - RNA, 19 nt, Artificial Sequence
  Description of Artificial Sequence: Synthetic oligonucleotide
  Sense strand starting at position 2707 of SEQ ID NO: 913829
auuuaaaugccauguguuc

SEQ ID NO: 957283 - RNA, 19 nt, Artificial Sequence
  Description of Artificial Sequence: Synthetic oligonucleotide
  Antisense strand to SEQ ID NO: 957282
gaacacauggcauuuaaau

SEQ ID NO: 957284 - RNA, 19 nt, Artificial Sequence
  Description of Artificial Sequence: Synthetic oligonucleotide
  Sense strand starting at position 788 of SEQ ID NO: 913829
aucugaguacgguacuaaa

SEQ ID NO: 957285 - RNA, 19 nt, Artificial Sequence
  Description of Artificial Sequence: Synthetic oligonucleotide
  Antisense strand to SEQ ID NO: 957284
uuuaguaccguacucagau

SEQ ID NO: 957286 - RNA, 19 nt, Artificial Sequence
  Description of Artificial Sequence: Synthetic oligonucleotide
  Sense strand starting at position 3226 of SEQ ID NO: 913829
ggcaauacaguagaguuua

SEQ ID NO: 957287 - RNA, 19 nt, Artificial Sequence
  Description of Artificial Sequence: Synthetic oligonucleotide
  Antisense strand to SEQ ID NO: 957286
uaaacucuacuguauugcc

SEQ ID NO: 957288 - RNA, 19 nt, Artificial Sequence
  Description of Artificial Sequence: Synthetic oligonucleotide
  Sense strand starting at position 149 of SEQ ID NO: 913829
gugaaugaccuacacguga

SEQ ID NO: 957289 - RNA, 19 nt, Artificial Sequence
  Description of Artificial Sequence: Synthetic oligonucleotide
  Antisense strand to SEQ ID NO: 957288
ucacguguaggucauucac

SEQ ID NO: 957290 - RNA, 19 nt, Artificial Sequence
  Description of Artificial Sequence: Synthetic oligonucleotide
  Sense strand starting at position 985 of SEQ ID NO: 913829
uuaaauucgcaguaaagac

SEQ ID NO: 957291 - RNA, 19 nt, Artificial Sequence
  Description of Artificial Sequence: Synthetic oligonucleotide
  Antisense strand to SEQ ID NO: 957290
gucuuuacugcgaauuuaa

SEQ ID NO: 957292 - RNA, 19 nt, Artificial Sequence
  Description of Artificial Sequence: Synthetic oligonucleotide
  Sense strand starting at position 3533 of SEQ ID NO: 913829
ggagcuaugagaugaaguc

SEQ ID NO: 957293 - RNA, 19 nt, Artificial Sequence
  Description of Artificial Sequence: Synthetic oligonucleotide
  Antisense strand to SEQ ID NO: 957292
gacuucaucucauagcucc

SEQ ID NO: 957294 - RNA, 19 nt, Artificial Sequence
  Description of Artificial Sequence: Synthetic oligonucleotide
  Sense strand starting at position 2603 of SEQ ID NO: 913829
guaaauguuacagaagcga

SEQ ID NO: 957295 - RNA, 19 nt, Artificial Sequence
  Description of Artificial Sequence: Synthetic oligonucleotide
  Antisense strand to SEQ ID NO: 957294
ucgcuucuguaacauuuac

SEQ ID NO: 957296 - RNA, 19 nt, Artificial Sequence
  Description of Artificial Sequence: Synthetic oligonucleotide
  Sense strand starting at position 3253 of SEQ ID NO: 913829
aucacuguacuaugaaagu

SEQ ID NO: 957297 - RNA, 19 nt, Artificial Sequence
  Description of Artificial Sequence: Synthetic oligonucleotide
  Antisense strand to SEQ ID NO: 957296
acuuucauaguacagugau

SEQ ID NO: 957298 - RNA, 19 nt, Artificial Sequence
  Description of Artificial Sequence: Synthetic oligonucleotide
  Sense strand starting at position 2607 of SEQ ID NO: 913829
auguuacagaagcgauaaa

SEQ ID NO: 957299 - RNA, 19 nt, Artificial Sequence
  Description of Artificial Sequence: Synthetic oligonucleotide
  Antisense strand to SEQ ID NO: 957298
uuuaucgcuucuguaacau

SEQ ID NO: 957300 - RNA, 19 nt, Artificial Sequence
  Description of Artificial Sequence: Synthetic oligonucleotide
  Sense strand starting at position 966 of SEQ ID NO: 913829
ccauguagucaacauguua

SEQ ID NO: 957301 - RNA, 19 nt, Artificial Sequence
  Description of Artificial Sequence: Synthetic oligonucleotide
  Antisense strand to SEQ ID NO: 957300
uaacauguugacuacaugg

SEQ ID NO: 957302 - RNA, 19 nt, Artificial Sequence
  Description of Artificial Sequence: Synthetic oligonucleotide
  Sense strand starting at position 845 of SEQ ID NO: 913829
ucuaauugccaaggaggua

SEQ ID NO: 957303 - RNA, 19 nt, Artificial Sequence
  Description of Artificial Sequence: Synthetic oligonucleotide
  Antisense strand to SEQ ID NO: 957302
uaccuccuuggcaauuaga

SEQ ID NO: 957304 - RNA, 19 nt, Artificial Sequence
  Description of Artificial Sequence: Synthetic oligonucleotide
  Sense strand starting at position 915 of SEQ ID NO: 913829
cuggaaagaucgcuggauu

SEQ ID NO: 957305 - RNA, 19 nt, Artificial Sequence
  Description of Artificial Sequence: Synthetic oligonucleotide
  Antisense strand to SEQ ID NO: 957304
aauccagcgaucuuuccag

SEQ ID NO: 957306 - RNA, 19 nt, Artificial Sequence
  Description of Artificial Sequence: Synthetic oligonucleotide
  Sense strand starting at position 2677 of SEQ ID NO: 913829
cuacaccauucgguagaau

SEQ ID NO: 957307 - RNA, 19 nt, Artificial Sequence
  Description of Artificial Sequence: Synthetic oligonucleotide
  Antisense strand to SEQ ID NO: 957306
auucuaccgaaugguguag

SEQ ID NO: 957308 - RNA, 19 nt, Artificial Sequence
  Description of Artificial Sequence: Synthetic oligonucleotide
  Sense strand starting at position 3391 of SEQ ID NO: 913829
gucacuugagcugggaaua

SEQ ID NO: 957309 - RNA, 19 nt, Artificial Sequence
  Description of Artificial Sequence: Synthetic oligonucleotide
  Antisense strand to SEQ ID NO: 957308
uauucccagcucaagugac

SEQ ID NO: 957310 - RNA, 19 nt, Artificial Sequence
  Description of Artificial Sequence: Synthetic oligonucleotide
  Sense strand starting at position 3746 of SEQ ID NO: 913829
aagcuugaucuagggugau

SEQ ID NO: 957311 - RNA, 19 nt, Artificial Sequence
  Description of Artificial Sequence: Synthetic oligonucleotide
  Antisense strand to SEQ ID NO: 957310
aucacccuagaucaagcuu

SEQ ID NO: 957312 - RNA, 19 nt, Artificial Sequence
  Description of Artificial Sequence: Synthetic oligonucleotide
  Sense strand starting at position 3841 of SEQ ID NO: 913829
cuccaagugauggguuaug

SEQ ID NO: 957313 - RNA, 19 nt, Artificial Sequence
  Description of Artificial Sequence: Synthetic oligonucleotide
  Antisense strand to SEQ ID NO: 957312
cauaacccaucacuuggag

SEQ ID NO: 957314 - RNA, 19 nt, Artificial Sequence
  Description of Artificial Sequence: Synthetic oligonucleotide
  Sense strand starting at position 468 of SEQ ID NO: 913829
ucugaccuccuagguuuaa

SEQ ID NO: 957315 - RNA, 19 nt, Artificial Sequence
  Description of Artificial Sequence: Synthetic oligonucleotide
  Antisense strand to SEQ ID NO: 957314
uuaaaccuaggaggucaga

SEQ ID NO: 957316 - RNA, 19 nt, Artificial Sequence
  Description of Artificial Sequence: Synthetic oligonucleotide
  Sense strand starting at position 2397 of SEQ ID NO: 913829
gguuaccuugaccgacaau

SEQ ID NO: 957317 - RNA, 19 nt, Artificial Sequence
  Description of Artificial Sequence: Synthetic oligonucleotide
  Antisense strand to SEQ ID NO: 957316
auugucggucaagguaacc

SEQ ID NO: 957318 - RNA, 19 nt, Artificial Sequence
  Description of Artificial Sequence: Synthetic oligonucleotide
  Sense strand starting at position 3840 of SEQ ID NO: 913829
ucuccaagugauggguuau

SEQ ID NO: 957319 - RNA, 19 nt, Artificial Sequence
  Description of Artificial Sequence: Synthetic oligonucleotide
  Antisense strand to SEQ ID NO: 957318
auaacccaucacuuggaga

SEQ ID NO: 957320 - RNA, 19 nt, Artificial Sequence
  Description of Artificial Sequence: Synthetic oligonucleotide
  Sense strand starting at position 3373 of SEQ ID NO: 913829
agauuucccugaggaacug

SEQ ID NO: 957321 - RNA, 19 nt, Artificial Sequence
  Description of Artificial Sequence: Synthetic oligonucleotide
  Antisense strand to SEQ ID NO: 957320
caguuccucagggaaaucu

SEQ ID NO: 957322 - RNA, 19 nt, Artificial Sequence
  Description of Artificial Sequence: Synthetic oligonucleotide
  Sense strand starting at position 2657 of SEQ ID NO: 913829
uggaaaggcguuugaacua

SEQ ID NO: 957323 - RNA, 19 nt, Artificial Sequence
  Description of Artificial Sequence: Synthetic oligonucleotide
  Antisense strand to SEQ ID NO: 957322
uaguucaaacgccuuucca

SEQ ID NO: 957324 - RNA, 19 nt, Artificial Sequence
  Description of Artificial Sequence: Synthetic oligonucleotide
  Sense strand starting at position 3586 of SEQ ID NO: 913829
ccauauuggccauguugaa

SEQ ID NO: 957325 - RNA, 19 nt, Artificial Sequence
  Description of Artificial Sequence: Synthetic oligonucleotide
  Antisense strand to SEQ ID NO: 957324
uucaacauggccaauaugg

SEQ ID NO: 957326 - RNA, 19 nt, Artificial Sequence
  Description of Artificial Sequence: Synthetic oligonucleotide
  Sense strand starting at position 581 of SEQ ID NO: 913829
guuguauauuuagaccaaa

SEQ ID NO: 957327 - RNA, 19 nt, Artificial Sequence
  Description of Artificial Sequence: Synthetic oligonucleotide
  Antisense strand to SEQ ID NO: 957326
uuuggucuaaauauacaac

SEQ ID NO: 957328 - RNA, 19 nt, Artificial Sequence
  Description of Artificial Sequence: Synthetic oligonucleotide
  Sense strand starting at position 1294 of SEQ ID NO: 913829
gcguucgcccagaacguua

SEQ ID NO: 957329 - RNA, 19 nt, Artificial Sequence
  Description of Artificial Sequence: Synthetic oligonucleotide
  Antisense strand to SEQ ID NO: 957328
uaacguucugggcgaacgc

SEQ ID NO: 957330 - RNA, 19 nt, Artificial Sequence
  Description of Artificial Sequence: Synthetic oligonucleotide
  Sense strand starting at position 3075 of SEQ ID NO: 913829
uguuucuggugauucugaa

SEQ ID NO: 957331 - RNA, 19 nt, Artificial Sequence
  Description of Artificial Sequence: Synthetic oligonucleotide
  Antisense strand to SEQ ID NO: 957330
uucagaaucaccagaaaca

SEQ ID NO: 957332 - RNA, 19 nt, Artificial Sequence
  Description of Artificial Sequence: Synthetic oligonucleotide
  Sense strand starting at position 2525 of SEQ ID NO: 913829
cuccgagauuccuugcaaa

SEQ ID NO: 957333 - RNA, 19 nt, Artificial Sequence
  Description of Artificial Sequence: Synthetic oligonucleotide
  Antisense strand to SEQ ID NO: 957332
uuugcaaggaaucucggag

SEQ ID NO: 957334 - RNA, 19 nt, Artificial Sequence
  Description of Artificial Sequence: Synthetic oligonucleotide
  Sense strand starting at position 867 of SEQ ID NO: 913829
gcuggaugcuuaucucaaa

SEQ ID NO: 957335 - RNA, 19 nt, Artificial Sequence
  Description of Artificial Sequence: Synthetic oligonucleotide
  Antisense strand to SEQ ID NO: 957334
uuugagauaagcauccagc

SEQ ID NO: 957336 - RNA, 19 nt, Artificial Sequence
  Description of Artificial Sequence: Synthetic oligonucleotide
  Sense strand starting at position 3932 of SEQ ID NO: 913829
agugcugguuuaccaagau

SEQ ID NO: 957337 - RNA, 19 nt, Artificial Sequence
  Description of Artificial Sequence: Synthetic oligonucleotide
  Antisense strand to SEQ ID NO: 957336
aucuugguaaaccagcacu

SEQ ID NO: 957338 - RNA, 19 nt, Artificial Sequence
  Description of Artificial Sequence: Synthetic oligonucleotide
  Sense strand starting at position 3449 of SEQ ID NO: 913829
acgcaaagguccucugaug

SEQ ID NO: 957339 - RNA, 19 nt, Artificial Sequence
  Description of Artificial Sequence: Synthetic oligonucleotide
  Antisense strand to SEQ ID NO: 957338
caucagaggaccuuugcgu

SEQ ID NO: 957340 - RNA, 19 nt, Artificial Sequence
  Description of Artificial Sequence: Synthetic oligonucleotide
  Sense strand starting at position 2592 of SEQ ID NO: 913829
ccacaaagcguguaaaugu

SEQ ID NO: 957341 - RNA, 19 nt, Artificial Sequence
  Description of Artificial Sequence: Synthetic oligonucleotide
  Antisense strand to SEQ ID NO: 957340
acauuuacacgcuuugugg

SEQ ID NO: 957342 - RNA, 19 nt, Artificial Sequence
  Description of Artificial Sequence: Synthetic oligonucleotide
  Sense strand starting at position 957 of SEQ ID NO: 913829
uggacaaugccauguaguc

SEQ ID NO: 957343 - RNA, 19 nt, Artificial Sequence
  Description of Artificial Sequence: Synthetic oligonucleotide
  Antisense strand to SEQ ID NO: 957342
gacuacauggcauugucca

SEQ ID NO: 957344 - RNA, 19 nt, Artificial Sequence
  Description of Artificial Sequence: Synthetic oligonucleotide
  Sense strand starting at position 2784 of SEQ ID NO: 913829
agaaacaagucauauauag

SEQ ID NO: 957345 - RNA, 19 nt, Artificial Sequence
  Description of Artificial Sequence: Synthetic oligonucleotide
  Antisense strand to SEQ ID NO: 957344
cuauauaugacuuguuucu

SEQ ID NO: 957346 - RNA, 19 nt, Artificial Sequence
  Description of Artificial Sequence: Synthetic oligonucleotide
  Sense strand starting at position 694 of SEQ ID NO: 913829
auguaacugucucauuuaa

SEQ ID NO: 957347 - RNA, 19 nt, Artificial Sequence
  Description of Artificial Sequence: Synthetic oligonucleotide
  Antisense strand to SEQ ID NO: 957346
uuaaaugagacaguuacau

SEQ ID NO: 957348 - RNA, 19 nt, Artificial Sequence
  Description of Artificial Sequence: Synthetic oligonucleotide
  Sense strand starting at position 2760 of SEQ ID NO: 913829
auguaucauuaagagaaag

SEQ ID NO: 957349 - RNA, 19 nt, Artificial Sequence
  Description of Artificial Sequence: Synthetic oligonucleotide
  Antisense strand to SEQ ID NO: 957348
cuuucucuuaaugauacau

SEQ ID NO: 957350 - RNA, 19 nt, Artificial Sequence
  Description of Artificial Sequence: Synthetic oligonucleotide
  Sense strand starting at position 2910 of SEQ ID NO: 913829
uugguucucguuuauacuu

SEQ ID NO: 957351 - RNA, 19 nt, Artificial Sequence
  Description of Artificial Sequence: Synthetic oligonucleotide
  Antisense strand to SEQ ID NO: 957350
aaguauaaacgagaaccaa

SEQ ID NO: 957352 - RNA, 19 nt, Artificial Sequence
  Description of Artificial Sequence: Synthetic oligonucleotide
  Sense strand starting at position 3780 of SEQ ID NO: 913830
ucagacuaccugcagauua

SEQ ID NO: 957353 - RNA, 19 nt, Artificial Sequence
  Description of Artificial Sequence: Synthetic oligonucleotide
  Antisense strand to SEQ ID NO: 957352
uaaucugcagguagucuga

SEQ ID NO: 957354 - RNA, 19 nt, Artificial Sequence
  Description of Artificial Sequence: Synthetic oligonucleotide
  Sense strand starting at position 2582 of SEQ ID NO: 913830
gagacuguaaugggugaaa

SEQ ID NO: 957355 - RNA, 19 nt, Artificial Sequence
  Description of Artificial Sequence: Synthetic oligonucleotide
  Antisense strand to SEQ ID NO: 957354
uuucacccauuacagucuc

SEQ ID NO: 957356 - RNA, 19 nt, Artificial Sequence
  Description of Artificial Sequence: Synthetic oligonucleotide
  Sense strand starting at position 2887 of SEQ ID NO: 913830
accaauuaggucuaaaguu

SEQ ID NO: 957357 - RNA, 19 nt, Artificial Sequence
  Description of Artificial Sequence: Synthetic oligonucleotide
  Antisense strand to SEQ ID NO: 957356
aacuuuagaccuaauuggu

SEQ ID NO: 957358 - RNA, 19 nt, Artificial Sequence
  Description of Artificial Sequence: Synthetic oligonucleotide
  Sense strand starting at position 2629 of SEQ ID NO: 913830
gagagaaguaguuaggcau

SEQ ID NO: 957359 - RNA, 19 nt, Artificial Sequence
  Description of Artificial Sequence: Synthetic oligonucleotide
  Antisense strand to SEQ ID NO: 957358
augccuaacuacuucucuc

SEQ ID NO: 957360 - RNA, 19 nt, Artificial Sequence
  Description of Artificial Sequence: Synthetic oligonucleotide
  Sense strand starting at position 521 of SEQ ID NO: 913830
uaaguuugguauuuaugca

SEQ ID NO: 957361 - RNA, 19 nt, Artificial Sequence
  Description of Artificial Sequence: Synthetic oligonucleotide
  Antisense strand to SEQ ID NO: 957360
ugcauaaauaccaaacuua

SEQ ID NO: 957362 - RNA, 19 nt, Artificial Sequence
  Description of Artificial Sequence: Synthetic oligonucleotide
  Sense strand starting at position 3128 of SEQ ID NO: 913830
gggagcaagaguggaauau

SEQ ID NO: 957363 - RNA, 19 nt, Artificial Sequence
  Description of Artificial Sequence: Synthetic oligonucleotide
  Antisense strand to SEQ ID NO: 957362
auauuccacucuugcuccc

SEQ ID NO: 957364 - RNA, 19 nt, Artificial Sequence
  Description of Artificial Sequence: Synthetic oligonucleotide
  Sense strand starting at position 2775 of SEQ ID NO: 913830
gugaauacugguuauuaac

SEQ ID NO: 957365 - RNA, 19 nt, Artificial Sequence
  Description of Artificial Sequence: Synthetic oligonucleotide
  Antisense strand to SEQ ID NO: 957364
guuaauaaccaguauucac

SEQ ID NO: 957366 - RNA, 19 nt, Artificial Sequence
  Description of Artificial Sequence: Synthetic oligonucleotide
  Sense strand starting at position 3745 of SEQ ID NO: 913830
caccuuugggaagguuaaa

SEQ ID NO: 957367 - RNA, 19 nt, Artificial Sequence
  Description of Artificial Sequence: Synthetic oligonucleotide
  Antisense strand to SEQ ID NO: 957366
uuuaaccuucccaaaggug

SEQ ID NO: 957368 - RNA, 19 nt, Artificial Sequence
  Description of Artificial Sequence: Synthetic oligonucleotide
  Sense strand starting at position 1251 of SEQ ID NO: 913830
ugaugacuaagugaagcuu

SEQ ID NO: 957369 - RNA, 19 nt, Artificial Sequence
  Description of Artificial Sequence: Synthetic oligonucleotide
  Antisense strand to SEQ ID NO: 957368
aagcuucacuuagucauca

SEQ ID NO: 957370 - RNA, 19 nt, Artificial Sequence
  Description of Artificial Sequence: Synthetic oligonucleotide
  Sense strand starting at position 1032 of SEQ ID NO: 913830
aucugcaaucaguaucaga

SEQ ID NO: 957371 - RNA, 19 nt, Artificial Sequence
  Description of Artificial Sequence: Synthetic oligonucleotide
  Antisense strand to SEQ ID NO: 957370
ucugauacugauugcagau

SEQ ID NO: 957372 - RNA, 19 nt, Artificial Sequence
  Description of Artificial Sequence: Synthetic oligonucleotide
  Sense strand starting at position 734 of SEQ ID NO: 913830
acagcaugacuguaucaca

SEQ ID NO: 957373 - RNA, 19 nt, Artificial Sequence
  Description of Artificial Sequence: Synthetic oligonucleotide
  Antisense strand to SEQ ID NO: 957372
ugugauacagucaugcugu

SEQ ID NO: 957374 - RNA, 19 nt, Artificial Sequence
  Description of Artificial Sequence: Synthetic oligonucleotide
  Sense strand starting at position 1240 of SEQ ID NO: 913830
uagugugaaagugaugacu

SEQ ID NO: 957375 - RNA, 19 nt, Artificial Sequence
  Description of Artificial Sequence: Synthetic oligonucleotide
  Antisense strand to SEQ ID NO: 957374
agucaucacuuucacacua

SEQ ID NO: 957376 - RNA, 19 nt, Artificial Sequence
  Description of Artificial Sequence: Synthetic oligonucleotide
  Sense strand starting at position 2170 of SEQ ID NO: 913830
augccauaugaaugacuga

SEQ ID NO: 957377 - RNA, 19 nt, Artificial Sequence
  Description of Artificial Sequence: Synthetic oligonucleotide
  Antisense strand to SEQ ID NO: 957376
ucagucauucauauggcau

SEQ ID NO: 957378 - RNA, 19 nt, Artificial Sequence
  Description of Artificial Sequence: Synthetic oligonucleotide
  Sense strand starting at position 3442 of SEQ ID NO: 913830
aaaggagcuuugguaauga

SEQ ID NO: 957379 - RNA, 19 nt, Artificial Sequence
  Description of Artificial Sequence: Synthetic oligonucleotide
  Antisense strand to SEQ ID NO: 957378
ucauuaccaaagcuccuuu

SEQ ID NO: 957380 - RNA, 19 nt, Artificial Sequence
  Description of Artificial Sequence: Synthetic oligonucleotide
  Sense strand starting at position 1328 of SEQ ID NO: 913830
uuauucuuugcugauagag

SEQ ID NO: 957381 - RNA, 19 nt, Artificial Sequence
  Description of Artificial Sequence: Synthetic oligonucleotide
  Antisense strand to SEQ ID NO: 957380
cucuaucagcaaagaauaa

SEQ ID NO: 957382 - RNA, 19 nt, Artificial Sequence
  Description of Artificial Sequence: Synthetic oligonucleotide
  Sense strand starting at position 976 of SEQ ID NO: 913830
uugagugaggcuuauaauu

SEQ ID NO: 957383 - RNA, 19 nt, Artificial Sequence
  Description of Artificial Sequence: Synthetic oligonucleotide
  Antisense strand to SEQ ID NO: 957382
aauuauaagccucacucaa

SEQ ID NO: 957384 - RNA, 19 nt, Artificial Sequence
  Description of Artificial Sequence: Synthetic oligonucleotide
  Sense strand starting at position 3107 of SEQ ID NO: 913830
gauuguacugcaggagaaa

SEQ ID NO: 957385 - RNA, 19 nt, Artificial Sequence
  Description of Artificial Sequence: Synthetic oligonucleotide
  Antisense strand to SEQ ID NO: 957384
uuucuccugcaguacaauc

SEQ ID NO: 957386 - RNA, 19 nt, Artificial Sequence
  Description of Artificial Sequence: Synthetic oligonucleotide
  Sense strand starting at position 2465 of SEQ ID NO: 913830
gaaauaaguugacuagcau

SEQ ID NO: 957387 - RNA, 19 nt, Artificial Sequence
  Description of Artificial Sequence: Synthetic oligonucleotide
  Antisense strand to SEQ ID NO: 957386
augcuagucaacuuauuuc

SEQ ID NO: 957388 - RNA, 19 nt, Artificial Sequence
  Description of Artificial Sequence: Synthetic oligonucleotide
  Sense strand starting at position 2633 of SEQ ID NO: 913830
gaaguaguuaggcauauug

SEQ ID NO: 957389 - RNA, 19 nt, Artificial Sequence
  Description of Artificial Sequence: Synthetic oligonucleotide
  Antisense strand to SEQ ID NO: 957388
caauaugccuaacuacuuc

SEQ ID NO: 957390 - RNA, 19 nt, Artificial Sequence
  Description of Artificial Sequence: Synthetic oligonucleotide
  Sense strand starting at position 2729 of SEQ ID NO: 913830
uuacuacuuguaggauuaa

SEQ ID NO: 957391 - RNA, 19 nt, Artificial Sequence
  Description of Artificial Sequence: Synthetic oligonucleotide
  Antisense strand to SEQ ID NO: 957390
uuaauccuacaaguaguaa

SEQ ID NO: 957392 - RNA, 19 nt, Artificial Sequence
  Description of Artificial Sequence: Synthetic oligonucleotide
  Sense strand starting at position 2152 of SEQ ID NO: 913830
cagagccuugauuagcaua

SEQ ID NO: 957393 - RNA, 19 nt, Artificial Sequence
  Description of Artificial Sequence: Synthetic oligonucleotide
  Antisense strand to SEQ ID NO: 957392
uaugcuaaucaaggcucug

SEQ ID NO: 957394 - RNA, 19 nt, Artificial Sequence
  Description of Artificial Sequence: Synthetic oligonucleotide
  Sense strand starting at position 1025 of SEQ ID NO: 913830
uuuagugaucugcaaucag

SEQ ID NO: 957395 - RNA, 19 nt, Artificial Sequence
  Description of Artificial Sequence: Synthetic oligonucleotide
  Antisense strand to SEQ ID NO: 957394
cugauugcagaucacuaaa

SEQ ID NO: 957396 - RNA, 19 nt, Artificial Sequence
  Description of Artificial Sequence: Synthetic oligonucleotide
  Sense strand starting at position 3068 of SEQ ID NO: 913830
augagaaugccuugaccug

SEQ ID NO: 957397 - RNA, 19 nt, Artificial Sequence
  Description of Artificial Sequence: Synthetic oligonucleotide
  Antisense strand to SEQ ID NO: 957396
caggucaaggcauucucau

SEQ ID NO: 957398 - RNA, 19 nt, Artificial Sequence
  Description of Artificial Sequence: Synthetic oligonucleotide
  Sense strand starting at position 3365 of SEQ ID NO: 913830
cauguagugcuccagggaa

SEQ ID NO: 957399 - RNA, 19 nt, Artificial Sequence
  Description of Artificial Sequence: Synthetic oligonucleotide
  Antisense strand to SEQ ID NO: 957398
uucccuggagcacuacaug

SEQ ID NO: 957400 - RNA, 19 nt, Artificial Sequence
  Description of Artificial Sequence: Synthetic oligonucleotide
  Sense strand starting at position 2774 of SEQ ID NO: 913830
ugugaauacugguuauuaa

SEQ ID NO: 957401 - RNA, 19 nt, Artificial Sequence
  Description of Artificial Sequence: Synthetic oligonucleotide
  Antisense strand to SEQ ID NO: 957400
uuaauaaccaguauucaca

SEQ ID NO: 957402 - RNA, 19 nt, Artificial Sequence
  Description of Artificial Sequence: Synthetic oligonucleotide
  Sense strand starting at position 3891 of SEQ ID NO: 913830
ggugauauauuguuaccaa

SEQ ID NO: 957403 - RNA, 19 nt, Artificial Sequence
  Description of Artificial Sequence: Synthetic oligonucleotide
  Antisense strand to SEQ ID NO: 957402
uugguaacaauauaucacc

SEQ ID NO: 957404 - RNA, 19 nt, Artificial Sequence
  Description of Artificial Sequence: Synthetic oligonucleotide
  Sense strand starting at position 678 of SEQ ID NO: 913830
guuauccuuguugacacau

SEQ ID NO: 957405 - RNA, 19 nt, Artificial Sequence
  Description of Artificial Sequence: Synthetic oligonucleotide
  Antisense strand to SEQ ID NO: 957404
augugucaacaaggauaac

SEQ ID NO: 957406 - RNA, 19 nt, Artificial Sequence
  Description of Artificial Sequence: Synthetic oligonucleotide
  Sense strand starting at position 1096 of SEQ ID NO: 913830
cugauauagccugaggcuu

SEQ ID NO: 957407 - RNA, 19 nt, Artificial Sequence
  Description of Artificial Sequence: Synthetic oligonucleotide
  Antisense strand to SEQ ID NO: 957406
aagccucaggcuauaucag

SEQ ID NO: 957408 - RNA, 19 nt, Artificial Sequence
  Description of Artificial Sequence: Synthetic oligonucleotide
  Sense strand starting at position 970 of SEQ ID NO: 913830
uuauucuugagugaggcuu

SEQ ID NO: 957409 - RNA, 19 nt, Artificial Sequence
  Description of Artificial Sequence: Synthetic oligonucleotide
  Antisense strand to SEQ ID NO: 957408
aagccucacucaagaauaa

SEQ ID NO: 957410 - RNA, 19 nt, Artificial Sequence
  Description of Artificial Sequence: Synthetic oligonucleotide
  Sense strand starting at position 1056 of SEQ ID NO: 913830
cccaaagagugaucugcau

SEQ ID NO: 957411 - RNA, 19 nt, Artificial Sequence
  Description of Artificial Sequence: Synthetic oligonucleotide
  Antisense strand to SEQ ID NO: 957410
augcagaucacucuuuggg

SEQ ID NO: 957412 - RNA, 19 nt, Artificial Sequence
  Description of Artificial Sequence: Synthetic oligonucleotide
  Sense strand starting at position 2157 of SEQ ID NO: 913830
ccuugauuagcauaugcca

SEQ ID NO: 957413 - RNA, 19 nt, Artificial Sequence
  Description of Artificial Sequence: Synthetic oligonucleotide
  Antisense strand to SEQ ID NO: 957412
uggcauaugcuaaucaagg

SEQ ID NO: 957414 - RNA, 19 nt, Artificial Sequence
  Description of Artificial Sequence: Synthetic oligonucleotide
  Sense strand starting at position 3817 of SEQ ID NO: 913830
ggaggagucauaugucucu

SEQ ID NO: 957415 - RNA, 19 nt, Artificial Sequence
  Description of Artificial Sequence: Synthetic oligonucleotide
  Antisense strand to SEQ ID NO: 957414
agagacauaugacuccucc

SEQ ID NO: 957416 - RNA, 19 nt, Artificial Sequence
  Description of Artificial Sequence: Synthetic oligonucleotide
  Sense strand starting at position 2632 of SEQ ID NO: 913830
agaaguaguuaggcauauu

SEQ ID NO: 957417 - RNA, 19 nt, Artificial Sequence
  Description of Artificial Sequence: Synthetic oligonucleotide
  Antisense strand to SEQ ID NO: 957416
aauaugccuaacuacuucu

SEQ ID NO: 957418 - RNA, 19 nt, Artificial Sequence
  Description of Artificial Sequence: Synthetic oligonucleotide
  Sense strand starting at position 1359 of SEQ ID NO: 913830
aauggcuaugcccaaguau

SEQ ID NO: 957419 - RNA, 19 nt, Artificial Sequence
  Description of Artificial Sequence: Synthetic oligonucleotide
  Antisense strand to SEQ ID NO: 957418
auacuugggcauagccauu

SEQ ID NO: 957420 - RNA, 19 nt, Artificial Sequence
  Description of Artificial Sequence: Synthetic oligonucleotide
  Sense strand starting at position 1175 of SEQ ID NO: 913830
gugagauauuagcugacuu

SEQ ID NO: 957421 - RNA, 19 nt, Artificial Sequence
  Description of Artificial Sequence: Synthetic oligonucleotide
  Antisense strand to SEQ ID NO: 957420
aagucagcuaauaucucac

SEQ ID NO: 957422 - RNA, 19 nt, Artificial Sequence
  Description of Artificial Sequence: Synthetic oligonucleotide
  Sense strand starting at position 2982 of SEQ ID NO: 913830
agcagauauuaauugccua

SEQ ID NO: 957423 - RNA, 19 nt, Artificial Sequence
  Description of Artificial Sequence: Synthetic oligonucleotide
  Antisense strand to SEQ ID NO: 957422
uaggcaauuaauaucugcu

SEQ ID NO: 957424 - RNA, 19 nt, Artificial Sequence
  Description of Artificial Sequence: Synthetic oligonucleotide
  Sense strand starting at position 429 of SEQ ID NO: 913830
cccggcuugcucugaauuu

SEQ ID NO: 957425 - RNA, 19 nt, Artificial Sequence
  Description of Artificial Sequence: Synthetic oligonucleotide
  Antisense strand to SEQ ID NO: 957424
aaauucagagcaagccggg

SEQ ID NO: 957426 - RNA, 19 nt, Artificial Sequence
  Description of Artificial Sequence: Synthetic oligonucleotide
  Sense strand starting at position 1750 of SEQ ID NO: 913830
uugccaagguaucuaaauu

SEQ ID NO: 957427 - RNA, 19 nt, Artificial Sequence
  Description of Artificial Sequence: Synthetic oligonucleotide
  Antisense strand to SEQ ID NO: 957426
aauuuagauaccuuggcaa

SEQ ID NO: 957428 - RNA, 19 nt, Artificial Sequence
  Description of Artificial Sequence: Synthetic oligonucleotide
  Sense strand starting at position 639 of SEQ ID NO: 913830
ucuacaucuugcuuugaag

SEQ ID NO: 957429 - RNA, 19 nt, Artificial Sequence
  Description of Artificial Sequence: Synthetic oligonucleotide
  Antisense strand to SEQ ID NO: 957428
cuucaaagcaagauguaga

SEQ ID NO: 957430 - RNA, 19 nt, Artificial Sequence
  Description of Artificial Sequence: Synthetic oligonucleotide
  Sense strand starting at position 2351 of SEQ ID NO: 913830
uucucaugugcuuauuaua

SEQ ID NO: 957431 - RNA, 19 nt, Artificial Sequence
  Description of Artificial Sequence: Synthetic oligonucleotide
  Antisense strand to SEQ ID NO: 957430
uauaauaagcacaugagaa

SEQ ID NO: 957432 - RNA, 19 nt, Artificial Sequence
  Description of Artificial Sequence: Synthetic oligonucleotide
  Sense strand starting at position 451 of SEQ ID NO: 913831
ucaggauguugaccugaaa

SEQ ID NO: 957433 - RNA, 19 nt, Artificial Sequence
  Description of Artificial Sequence: Synthetic oligonucleotide
  Antisense strand to SEQ ID NO: 957432
uuucaggucaacauccuga

SEQ ID NO: 957434 - RNA, 19 nt, Artificial Sequence
  Description of Artificial Sequence: Synthetic oligonucleotide
  Sense strand starting at position 3007 of SEQ ID NO: 913831
gcuacaagguguuugauuu

SEQ ID NO: 957435 - RNA, 19 nt, Artificial Sequence
  Description of Artificial Sequence: Synthetic oligonucleotide
  Antisense strand to SEQ ID NO: 957434
aaaucaaacaccuuguagc

SEQ ID NO: 957436 - RNA, 19 nt, Artificial Sequence
  Description of Artificial Sequence: Synthetic oligonucleotide
  Sense strand starting at position 439 of SEQ ID NO: 913831
ucaauacaauugucaggau

SEQ ID NO: 957437 - RNA, 19 nt, Artificial Sequence
  Description of Artificial Sequence: Synthetic oligonucleotide
  Antisense strand to SEQ ID NO: 957436
auccugacaauuguauuga

SEQ ID NO: 957438 - RNA, 19 nt, Artificial Sequence
  Description of Artificial Sequence: Synthetic oligonucleotide
  Sense strand starting at position 476 of SEQ ID NO: 913831
cuggaugaaucaccaguua

SEQ ID NO: 957439 - RNA, 19 nt, Artificial Sequence
  Description of Artificial Sequence: Synthetic oligonucleotide
  Antisense strand to SEQ ID NO: 957438
uaacuggugauucauccag

SEQ ID NO: 957440 - RNA, 19 nt, Artificial Sequence
  Description of Artificial Sequence: Synthetic oligonucleotide
  Sense strand starting at position 754 of SEQ ID NO: 913831
ugagaauuguaagcaacca

SEQ ID NO: 957441 - RNA, 19 nt, Artificial Sequence
  Description of Artificial Sequence: Synthetic oligonucleotide
  Antisense strand to SEQ ID NO: 957440
ugguugcuuacaauucuca

SEQ ID NO: 957442 - RNA, 19 nt, Artificial Sequence
  Description of Artificial Sequence: Synthetic oligonucleotide
  Sense strand starting at position 1283 of SEQ ID NO: 913831
agugacaucgcugacaaac

SEQ ID NO: 957443 - RNA, 19 nt, Artificial Sequence
  Description of Artificial Sequence: Synthetic oligonucleotide
  Antisense strand to SEQ ID NO: 957442
guuugucagcgaugucacu

SEQ ID NO: 957444 - RNA, 19 nt, Artificial Sequence
  Description of Artificial Sequence: Synthetic oligonucleotide
  Sense strand starting at position 2881 of SEQ ID NO: 913831
uagcuuuggcgggaggaaa

SEQ ID NO: 957445 - RNA, 19 nt, Artificial Sequence
  Description of Artificial Sequence: Synthetic oligonucleotide
  Antisense strand to SEQ ID NO: 957444
uuuccucccgccaaagcua

SEQ ID NO: 957446 - RNA, 19 nt, Artificial Sequence
  Description of Artificial Sequence: Synthetic oligonucleotide
  Sense strand starting at position 2768 of SEQ ID NO: 913831
guuucuagucgcguugaca

SEQ ID NO: 957447 - RNA, 19 nt, Artificial Sequence
  Description of Artificial Sequence: Synthetic oligonucleotide
  Antisense strand to SEQ ID NO: 957446
ugucaacgcgacuagaaac

SEQ ID NO: 957448 - RNA, 19 nt, Artificial Sequence
  Description of Artificial Sequence: Synthetic oligonucleotide
  Sense strand starting at position 1090 of SEQ ID NO: 913831
cggauacucugaccuuaca

SEQ ID NO: 957449 - RNA, 19 nt, Artificial Sequence
  Description of Artificial Sequence: Synthetic oligonucleotide
  Antisense strand to SEQ ID NO: 957448
uguaaggucagaguauccg

SEQ ID NO: 957450 - RNA, 19 nt, Artificial Sequence
  Description of Artificial Sequence: Synthetic oligonucleotide
  Sense strand starting at position 1261 of SEQ ID NO: 913831
gaaagauaacccgguucuu

SEQ ID NO: 957451 - RNA, 19 nt, Artificial Sequence
  Description of Artificial Sequence: Synthetic oligonucleotide
  Antisense strand to SEQ ID NO: 957450
aagaaccggguuaucuuuc

SEQ ID NO: 957452 - RNA, 19 nt, Artificial Sequence
  Description of Artificial Sequence: Synthetic oligonucleotide
  Sense strand starting at position 800 of SEQ ID NO: 913831
uugcuaugccaggaaguaa

SEQ ID NO: 957453 - RNA, 19 nt, Artificial Sequence
  Description of Artificial Sequence: Synthetic oligonucleotide
  Antisense strand to SEQ ID NO: 957452
uuacuuccuggcauagcaa

SEQ ID NO: 957454 - RNA, 19 nt, Artificial Sequence
  Description of Artificial Sequence: Synthetic oligonucleotide
  Sense strand starting at position 3561 of SEQ ID NO: 913831
gugaccagugucuaauauu

SEQ ID NO: 957455 - RNA, 19 nt, Artificial Sequence
  Description of Artificial Sequence: Synthetic oligonucleotide
  Antisense strand to SEQ ID NO: 957454
aauauuagacacuggucac

SEQ ID NO: 957456 - RNA, 19 nt, Artificial Sequence
  Description of Artificial Sequence: Synthetic oligonucleotide
  Sense strand starting at position 2675 of SEQ ID NO: 913831
uggaacacguuggugaaua

SEQ ID NO: 957457 - RNA, 19 nt, Artificial Sequence
  Description of Artificial Sequence: Synthetic oligonucleotide
  Antisense strand to SEQ ID NO: 957456
uauucaccaacguguucca

SEQ ID NO: 957458 - RNA, 19 nt, Artificial Sequence
  Description of Artificial Sequence: Synthetic oligonucleotide
  Sense strand starting at position 2717 of SEQ ID NO: 913831
uggguugucagggauguuu

SEQ ID NO: 957459 - RNA, 19 nt, Artificial Sequence
  Description of Artificial Sequence: Synthetic oligonucleotide
  Antisense strand to SEQ ID NO: 957458
aaacaucccugacaaccca

SEQ ID NO: 957460 - RNA, 19 nt, Artificial Sequence
  Description of Artificial Sequence: Synthetic oligonucleotide
  Sense strand starting at position 2389 of SEQ ID NO: 913831
ggcagaaacuccuuccgaa

SEQ ID NO: 957461 - RNA, 19 nt, Artificial Sequence
  Description of Artificial Sequence: Synthetic oligonucleotide
  Antisense strand to SEQ ID NO: 957460
uucggaaggaguuucugcc

SEQ ID NO: 957462 - RNA, 19 nt, Artificial Sequence
  Description of Artificial Sequence: Synthetic oligonucleotide
  Sense strand starting at position 2674 of SEQ ID NO: 913831
auggaacacguuggugaau

SEQ ID NO: 957463 - RNA, 19 nt, Artificial Sequence
  Description of Artificial Sequence: Synthetic oligonucleotide
  Antisense strand to SEQ ID NO: 957462
auucaccaacguguuccau

SEQ ID NO: 957464 - RNA, 19 nt, Artificial Sequence
  Description of Artificial Sequence: Synthetic oligonucleotide
  Sense strand starting at position 1004 of SEQ ID NO: 913831
cgucaaguacacuaaaugu

SEQ ID NO: 957465 - RNA, 19 nt, Artificial Sequence
  Description of Artificial Sequence: Synthetic oligonucleotide
  Antisense strand to SEQ ID NO: 957464
acauuuaguguacuugacg

SEQ ID NO: 957466 - RNA, 19 nt, Artificial Sequence
  Description of Artificial Sequence: Synthetic oligonucleotide
  Sense strand starting at position 1065 of SEQ ID NO: 913831
uggucugaccguuaaaucu

SEQ ID NO: 957467 - RNA, 19 nt, Artificial Sequence
  Description of Artificial Sequence: Synthetic oligonucleotide
  Antisense strand to SEQ ID NO: 957466
agauuuaacggucagacca

SEQ ID NO: 957468 - RNA, 19 nt, Artificial Sequence
  Description of Artificial Sequence: Synthetic oligonucleotide
  Sense strand starting at position 281 of SEQ ID NO: 913831
gacaaauaaguuugugcau

SEQ ID NO: 957469 - RNA, 19 nt, Artificial Sequence
  Description of Artificial Sequence: Synthetic oligonucleotide
  Antisense strand to SEQ ID NO: 957468
augcacaaacuuauuuguc

SEQ ID NO: 957470 - RNA, 19 nt, Artificial Sequence
  Description of Artificial Sequence: Synthetic oligonucleotide
  Sense strand starting at position 1282 of SEQ ID NO: 913831
cagugacaucgcugacaaa

SEQ ID NO: 957471 - RNA, 19 nt, Artificial Sequence
  Description of Artificial Sequence: Synthetic oligonucleotide
  Antisense strand to SEQ ID NO: 957470
uuugucagcgaugucacug

SEQ ID NO: 957472 - RNA, 19 nt, Artificial Sequence
  Description of Artificial Sequence: Synthetic oligonucleotide
  Sense strand starting at position 2880 of SEQ ID NO: 913831
auagcuuuggcgggaggaa

SEQ ID NO: 957473 - RNA, 19 nt, Artificial Sequence
  Description of Artificial Sequence: Synthetic oligonucleotide
  Antisense strand to SEQ ID NO: 957472
uuccucccgccaaagcuau

SEQ ID NO: 957474 - RNA, 19 nt, Artificial Sequence
  Description of Artificial Sequence: Synthetic oligonucleotide
  Sense strand starting at position 739 of SEQ ID NO: 913831
gcaaguggugucuauugag

SEQ ID NO: 957475 - RNA, 19 nt, Artificial Sequence
  Description of Artificial Sequence: Synthetic oligonucleotide
  Antisense strand to SEQ ID NO: 957474
cucaauagacaccacuugc

SEQ ID NO: 957476 - RNA, 19 nt, Artificial Sequence
  Description of Artificial Sequence: Synthetic oligonucleotide
  Sense strand starting at position 282 of SEQ ID NO: 913831
acaaauaaguuugugcauu

SEQ ID NO: 957477 - RNA, 19 nt, Artificial Sequence
  Description of Artificial Sequence: Synthetic oligonucleotide
  Antisense strand to SEQ ID NO: 957476
aaugcacaaacuuauuugu

SEQ ID NO: 957478 - RNA, 19 nt, Artificial Sequence
  Description of Artificial Sequence: Synthetic oligonucleotide
  Sense strand starting at position 3560 of SEQ ID NO: 913831
ugugaccagugucuaauau

SEQ ID NO: 957479 - RNA, 19 nt, Artificial Sequence
  Description of Artificial Sequence: Synthetic oligonucleotide
  Antisense strand to SEQ ID NO: 957478
auauuagacacuggucaca

SEQ ID NO: 957480 - RNA, 19 nt, Artificial Sequence
  Description of Artificial Sequence: Synthetic oligonucleotide
  Sense strand starting at position 2725 of SEQ ID NO: 913831
cagggauguuuguuucucu

SEQ ID NO: 957481 - RNA, 19 nt, Artificial Sequence
  Description of Artificial Sequence: Synthetic oligonucleotide
  Antisense strand to SEQ ID NO: 957480
agagaaacaaacaucccug

SEQ ID NO: 957482 - RNA, 19 nt, Artificial Sequence
  Description of Artificial Sequence: Synthetic oligonucleotide
  Sense strand starting at position 994 of SEQ ID NO: 913831
acucaacgaucgucaagua

SEQ ID NO: 957483 - RNA, 19 nt, Artificial Sequence
  Description of Artificial Sequence: Synthetic oligonucleotide
  Antisense strand to SEQ ID NO: 957482
uacuugacgaucguugagu

SEQ ID NO: 957484 - RNA, 19 nt, Artificial Sequence
  Description of Artificial Sequence: Synthetic oligonucleotide
  Sense strand starting at position 343 of SEQ ID NO: 913831
ggcucuguucugggauuca

SEQ ID NO: 957485 - RNA, 19 nt, Artificial Sequence
  Description of Artificial Sequence: Synthetic oligonucleotide
  Antisense strand to SEQ ID NO: 957484
ugaaucccagaacagagcc

SEQ ID NO: 957486 - RNA, 19 nt, Artificial Sequence
  Description of Artificial Sequence: Synthetic oligonucleotide
  Sense strand starting at position 1076 of SEQ ID NO: 913831
uuaaaucucccuugcggau

SEQ ID NO: 957487 - RNA, 19 nt, Artificial Sequence
  Description of Artificial Sequence: Synthetic oligonucleotide
  Antisense strand to SEQ ID NO: 957486
auccgcaagggagauuuaa

SEQ ID NO: 957488 - RNA, 19 nt, Artificial Sequence
  Description of Artificial Sequence: Synthetic oligonucleotide
  Sense strand starting at position 182 of SEQ ID NO: 913831
gguuuccucugggcauauu

SEQ ID NO: 957489 - RNA, 19 nt, Artificial Sequence
  Description of Artificial Sequence: Synthetic oligonucleotide
  Antisense strand to SEQ ID NO: 957488
aauaugcccagaggaaacc

SEQ ID NO: 957490 - RNA, 19 nt, Artificial Sequence
  Description of Artificial Sequence: Synthetic oligonucleotide
  Sense strand starting at position 799 of SEQ ID NO: 913831
cuugcuaugccaggaagua

SEQ ID NO: 957491 - RNA, 19 nt, Artificial Sequence
  Description of Artificial Sequence: Synthetic oligonucleotide
  Antisense strand to SEQ ID NO: 957490
uacuuccuggcauagcaag

SEQ ID NO: 957492 - RNA, 19 nt, Artificial Sequence
  Description of Artificial Sequence: Synthetic oligonucleotide
  Sense strand starting at position 2896 of SEQ ID NO: 913831
gaaagagcugucggcucaa

SEQ ID NO: 957493 - RNA, 19 nt, Artificial Sequence
  Description of Artificial Sequence: Synthetic oligonucleotide
  Antisense strand to SEQ ID NO: 957492
uugagccgacagcucuuuc

SEQ ID NO: 957494 - RNA, 19 nt, Artificial Sequence
  Description of Artificial Sequence: Synthetic oligonucleotide
  Sense strand starting at position 181 of SEQ ID NO: 913831
ugguuuccucugggcauau

SEQ ID NO: 957495 - RNA, 19 nt, Artificial Sequence
  Description of Artificial Sequence: Synthetic oligonucleotide
  Antisense strand to SEQ ID NO: 957494
auaugcccagaggaaacca

SEQ ID NO: 957496 - RNA, 19 nt, Artificial Sequence
  Description of Artificial Sequence: Synthetic oligonucleotide
  Sense strand starting at position 2946 of SEQ ID NO: 913831
uuucucuagggcugugauu

SEQ ID NO: 957497 - RNA, 19 nt, Artificial Sequence
  Description of Artificial Sequence: Synthetic oligonucleotide
  Antisense strand to SEQ ID NO: 957496
aaucacagcccuagagaaa

SEQ ID NO: 957498 - RNA, 19 nt, Artificial Sequence
  Description of Artificial Sequence: Synthetic oligonucleotide
  Sense strand starting at position 1206 of SEQ ID NO: 913831
ugcuuaucauugguucuca

SEQ ID NO: 957499 - RNA, 19 nt, Artificial Sequence
  Description of Artificial Sequence: Synthetic oligonucleotide
  Antisense strand to SEQ ID NO: 957498
ugagaaccaaugauaagca

SEQ ID NO: 957500 - RNA, 19 nt, Artificial Sequence
  Description of Artificial Sequence: Synthetic oligonucleotide
  Sense strand starting at position 586 of SEQ ID NO: 913831
auguguacccuugggucau

SEQ ID NO: 957501 - RNA, 19 nt, Artificial Sequence
  Description of Artificial Sequence: Synthetic oligonucleotide
  Antisense strand to SEQ ID NO: 957500
augacccaaggguacacau

SEQ ID NO: 957502 - RNA, 19 nt, Artificial Sequence
  Description of Artificial Sequence: Synthetic oligonucleotide
  Sense strand starting at position 2716 of SEQ ID NO: 913831
guggguugucagggauguu

SEQ ID NO: 957503 - RNA, 19 nt, Artificial Sequence
  Description of Artificial Sequence: Synthetic oligonucleotide
  Antisense strand to SEQ ID NO: 957502
aacaucccugacaacccac

SEQ ID NO: 957504 - RNA, 19 nt, Artificial Sequence
  Description of Artificial Sequence: Synthetic oligonucleotide
  Sense strand starting at position 374 of SEQ ID NO: 913831
guaaguuucugcuuccaag

SEQ ID NO: 957505 - RNA, 19 nt, Artificial Sequence
  Description of Artificial Sequence: Synthetic oligonucleotide
  Antisense strand to SEQ ID NO: 957504
cuuggaagcagaaacuuac

SEQ ID NO: 957506 - RNA, 19 nt, Artificial Sequence
  Description of Artificial Sequence: Synthetic oligonucleotide
  Sense strand starting at position 3557 of SEQ ID NO: 913831
gcaugugaccagugucuaa

SEQ ID NO: 957507 - RNA, 19 nt, Artificial Sequence
  Description of Artificial Sequence: Synthetic oligonucleotide
  Antisense strand to SEQ ID NO: 957506
uuagacacuggucacaugc

SEQ ID NO: 957508 - RNA, 19 nt, Artificial Sequence
  Description of Artificial Sequence: Synthetic oligonucleotide
  Sense strand starting at position 1015 of SEQ ID NO: 913831
cuaaauguucagcguugga

SEQ ID NO: 957509 - RNA, 19 nt, Artificial Sequence
  Description of Artificial Sequence: Synthetic oligonucleotide
  Antisense strand to SEQ ID NO: 957508
uccaacgcugaacauuuag

SEQ ID NO: 957510 - RNA, 19 nt, Artificial Sequence
  Description of Artificial Sequence: Synthetic oligonucleotide
  Sense strand starting at position 1273 of SEQ ID NO: 913831
gguucuugccagugacauc

SEQ ID NO: 957511 - RNA, 19 nt, Artificial Sequence
  Description of Artificial Sequence: Synthetic oligonucleotide
  Antisense strand to SEQ ID NO: 957510
gaugucacuggcaagaacc

SEQ ID NO: 957512 - RNA, 19 nt, Artificial Sequence
  Description of Artificial Sequence: Synthetic oligonucleotide
  Sense strand starting at position 2186 of SEQ ID NO: 913832
auaaguuugccugaaacaa

SEQ ID NO: 957513 - RNA, 19 nt, Artificial Sequence
  Description of Artificial Sequence: Synthetic oligonucleotide
  Antisense strand to SEQ ID NO: 957512
uuguuucaggcaaacuuau

SEQ ID NO: 957514 - RNA, 19 nt, Artificial Sequence
  Description of Artificial Sequence: Synthetic oligonucleotide
  Sense strand starting at position 1817 of SEQ ID NO: 913832
ugcggagcugccuuauacu

SEQ ID NO: 957515 - RNA, 19 nt, Artificial Sequence
  Description of Artificial Sequence: Synthetic oligonucleotide
  Antisense strand to SEQ ID NO: 957514
aguauaaggcagcuccgca

SEQ ID NO: 957516 - RNA, 19 nt, Artificial Sequence
  Description of Artificial Sequence: Synthetic oligonucleotide
  Sense strand starting at position 826 of SEQ ID NO: 913832
caugaaugagcauaguuau

SEQ ID NO: 957517 - RNA, 19 nt, Artificial Sequence
  Description of Artificial Sequence: Synthetic oligonucleotide
  Antisense strand to SEQ ID NO: 957516
auaacuaugcucauucaug

SEQ ID NO: 957518 - RNA, 19 nt, Artificial Sequence
  Description of Artificial Sequence: Synthetic oligonucleotide
  Sense strand starting at position 3828 of SEQ ID NO: 913832
guggaaauaaccuaaacgu

SEQ ID NO: 957519 - RNA, 19 nt, Artificial Sequence
  Description of Artificial Sequence: Synthetic oligonucleotide
  Antisense strand to SEQ ID NO: 957518
acguuuagguuauuuccac

SEQ ID NO: 957520 - RNA, 19 nt, Artificial Sequence
  Description of Artificial Sequence: Synthetic oligonucleotide
  Sense strand starting at position 1937 of SEQ ID NO: 913832
cuuggucaaacugacgaua

SEQ ID NO: 957521 - RNA, 19 nt, Artificial Sequence
  Description of Artificial Sequence: Synthetic oligonucleotide
  Antisense strand to SEQ ID NO: 957520
uaucgucaguuugaccaag

SEQ ID NO: 957522 - RNA, 19 nt, Artificial Sequence
  Description of Artificial Sequence: Synthetic oligonucleotide
  Sense strand starting at position 816 of SEQ ID NO: 913832
agaguauguacaugaauga

SEQ ID NO: 957523 - RNA, 19 nt, Artificial Sequence
  Description of Artificial Sequence: Synthetic oligonucleotide
  Antisense strand to SEQ ID NO: 957522
ucauucauguacauacucu

SEQ ID NO: 957524 - RNA, 19 nt, Artificial Sequence
  Description of Artificial Sequence: Synthetic oligonucleotide
  Sense strand starting at position 2525 of SEQ ID NO: 913832
auuggaaauggauguccau

SEQ ID NO: 957525 - RNA, 19 nt, Artificial Sequence
  Description of Artificial Sequence: Synthetic oligonucleotide
  Antisense strand to SEQ ID NO: 957524
auggacauccauuuccaau

SEQ ID NO: 957526 - RNA, 19 nt, Artificial Sequence
  Description of Artificial Sequence: Synthetic oligonucleotide
  Sense strand starting at position 3527 of SEQ ID NO: 913832
auuagccaucauggaaaua

SEQ ID NO: 957527 - RNA, 19 nt, Artificial Sequence
  Description of Artificial Sequence: Synthetic oligonucleotide
  Antisense strand to SEQ ID NO: 957526
uauuuccaugauggcuaau

SEQ ID NO: 957528 - RNA, 19 nt, Artificial Sequence
  Description of Artificial Sequence: Synthetic oligonucleotide
  Sense strand starting at position 2653 of SEQ ID NO: 913832
uugacaagcugaucugaaa

SEQ ID NO: 957529 - RNA, 19 nt, Artificial Sequence
  Description of Artificial Sequence: Synthetic oligonucleotide
  Antisense strand to SEQ ID NO: 957528
uuucagaucagcuugucaa

SEQ ID NO: 957530 - RNA, 19 nt, Artificial Sequence
  Description of Artificial Sequence: Synthetic oligonucleotide
  Sense strand starting at position 118 of SEQ ID NO: 913832
guacauguauaaucagaga

SEQ ID NO: 957531 - RNA, 19 nt, Artificial Sequence
  Description of Artificial Sequence: Synthetic oligonucleotide
  Antisense strand to SEQ ID NO: 957530
ucucugauuauacauguac

SEQ ID NO: 957532 - RNA, 19 nt, Artificial Sequence
  Description of Artificial Sequence: Synthetic oligonucleotide
  Sense strand starting at position 2013 of SEQ ID NO: 913832
ucauuauuacaucauuggu

SEQ ID NO: 957533 - RNA, 19 nt, Artificial Sequence
  Description of Artificial Sequence: Synthetic oligonucleotide
  Antisense strand to SEQ ID NO: 957532
accaaugauguaauaauga

SEQ ID NO: 957534 - RNA, 19 nt, Artificial Sequence
  Description of Artificial Sequence: Synthetic oligonucleotide
  Sense strand starting at position 2175 of SEQ ID NO: 913832
gcaacagaccuauaaguuu

SEQ ID NO: 957535 - RNA, 19 nt, Artificial Sequence
  Description of Artificial Sequence: Synthetic oligonucleotide
  Antisense strand to SEQ ID NO: 957534
aaacuuauaggucuguugc

SEQ ID NO: 957536 - RNA, 19 nt, Artificial Sequence
  Description of Artificial Sequence: Synthetic oligonucleotide
  Sense strand starting at position 1930 of SEQ ID NO: 913832
uggaauacuuggucaaacu

SEQ ID NO: 957537 - RNA, 19 nt, Artificial Sequence
  Description of Artificial Sequence: Synthetic oligonucleotide
  Antisense strand to SEQ ID NO: 957536
aguuugaccaaguauucca

SEQ ID NO: 957538 - RNA, 19 nt, Artificial Sequence
  Description of Artificial Sequence: Synthetic oligonucleotide
  Sense strand starting at position 1929 of SEQ ID NO: 913832
uuggaauacuuggucaaac

SEQ ID NO: 957539 - RNA, 19 nt, Artificial Sequence
  Description of Artificial Sequence: Synthetic oligonucleotide
  Antisense strand to SEQ ID NO: 957538
guuugaccaaguauuccaa

SEQ ID NO: 957540 - RNA, 19 nt, Artificial Sequence
  Description of Artificial Sequence: Synthetic oligonucleotide
  Sense strand starting at position 1759 of SEQ ID NO: 913832
caagaaacagucugaaugu

SEQ ID NO: 957541 - RNA, 19 nt, Artificial Sequence
  Description of Artificial Sequence: Synthetic oligonucleotide
  Antisense strand to SEQ ID NO: 957540
acauucagacuguuucuug

SEQ ID NO: 957542 - RNA, 19 nt, Artificial Sequence
  Description of Artificial Sequence: Synthetic oligonucleotide
  Sense strand starting at position 1928 of SEQ ID NO: 913832
cuuggaauacuuggucaaa

SEQ ID NO: 957543 - RNA, 19 nt, Artificial Sequence
  Description of Artificial Sequence: Synthetic oligonucleotide
  Antisense strand to SEQ ID NO: 957542
uuugaccaaguauuccaag

SEQ ID NO: 957544 - RNA, 19 nt, Artificial Sequence
  Description of Artificial Sequence: Synthetic oligonucleotide
  Sense strand starting at position 1828 of SEQ ID NO: 913832
cuuauacucccugggagau

SEQ ID NO: 957545 - RNA, 19 nt, Artificial Sequence
  Description of Artificial Sequence: Synthetic oligonucleotide
  Antisense strand to SEQ ID NO: 957544
aucucccagggaguauaag

SEQ ID NO: 957546 - RNA, 19 nt, Artificial Sequence
  Description of Artificial Sequence: Synthetic oligonucleotide
  Sense strand starting at position 1827 of SEQ ID NO: 913832
ccuuauacucccugggaga

SEQ ID NO: 957547 - RNA, 19 nt, Artificial Sequence
  Description of Artificial Sequence: Synthetic oligonucleotide
  Antisense strand to SEQ ID NO: 957546
ucucccagggaguauaagg

SEQ ID NO: 957548 - RNA, 19 nt, Artificial Sequence
  Description of Artificial Sequence: Synthetic oligonucleotide
  Sense strand starting at position 2689 of SEQ ID NO: 913832
gggacucagaucugccaaa

SEQ ID NO: 957549 - RNA, 19 nt, Artificial Sequence
  Description of Artificial Sequence: Synthetic oligonucleotide
  Antisense strand to SEQ ID NO: 957548
uuuggcagaucugaguccc

SEQ ID NO: 957550 - RNA, 19 nt, Artificial Sequence
  Description of Artificial Sequence: Synthetic oligonucleotide
  Sense strand starting at position 3148 of SEQ ID NO: 913832
aagaaaggccugggcaaua

SEQ ID NO: 957551 - RNA, 19 nt, Artificial Sequence
  Description of Artificial Sequence: Synthetic oligonucleotide
  Antisense strand to SEQ ID NO: 957550
uauugcccaggccuuucuu

SEQ ID NO: 957552 - RNA, 19 nt, Artificial Sequence
  Description of Artificial Sequence: Synthetic oligonucleotide
  Sense strand starting at position 2283 of SEQ ID NO: 913832
ugugaagauuuacaugaaa

SEQ ID NO: 957553 - RNA, 19 nt, Artificial Sequence
  Description of Artificial Sequence: Synthetic oligonucleotide
  Antisense strand to SEQ ID NO: 957552
uuucauguaaaucuucaca

SEQ ID NO: 957554 - RNA, 19 nt, Artificial Sequence
  Description of Artificial Sequence: Synthetic oligonucleotide
  Sense strand starting at position 3639 of SEQ ID NO: 913832
acugcuagugaggaucuau

SEQ ID NO: 957555 - RNA, 19 nt, Artificial Sequence
  Description of Artificial Sequence: Synthetic oligonucleotide
  Antisense strand to SEQ ID NO: 957554
auagauccucacuagcagu

SEQ ID NO: 957556 - RNA, 19 nt, Artificial Sequence
  Description of Artificial Sequence: Synthetic oligonucleotide
  Sense strand starting at position 335 of SEQ ID NO: 913832
agguaucuaugauccauac

SEQ ID NO: 957557 - RNA, 19 nt, Artificial Sequence
  Description of Artificial Sequence: Synthetic oligonucleotide
  Antisense strand to SEQ ID NO: 957556
guauggaucauagauaccu

SEQ ID NO: 957558 - RNA, 19 nt, Artificial Sequence
  Description of Artificial Sequence: Synthetic oligonucleotide
  Sense strand starting at position 3147 of SEQ ID NO: 913832
caagaaaggccugggcaau

SEQ ID NO: 957559 - RNA, 19 nt, Artificial Sequence
  Description of Artificial Sequence: Synthetic oligonucleotide
  Antisense strand to SEQ ID NO: 957558
auugcccaggccuuucuug

SEQ ID NO: 957560 - RNA, 19 nt, Artificial Sequence
  Description of Artificial Sequence: Synthetic oligonucleotide
  Sense strand starting at position 1627 of SEQ ID NO: 913832
gugagugaccauugauaau

SEQ ID NO: 957561 - RNA, 19 nt, Artificial Sequence
  Description of Artificial Sequence: Synthetic oligonucleotide
  Antisense strand to SEQ ID NO: 957560
auuaucaauggucacucac

SEQ ID NO: 957562 - RNA, 19 nt, Artificial Sequence
  Description of Artificial Sequence: Synthetic oligonucleotide
  Sense strand starting at position 2528 of SEQ ID NO: 913832
ggaaauggauguccauguu

SEQ ID NO: 957563 - RNA, 19 nt, Artificial Sequence
  Description of Artificial Sequence: Synthetic oligonucleotide
  Antisense strand to SEQ ID NO: 957562
aacauggacauccauuucc

SEQ ID NO: 957564 - RNA, 19 nt, Artificial Sequence
  Description of Artificial Sequence: Synthetic oligonucleotide
  Sense strand starting at position 2016 of SEQ ID NO: 913832
uuauuacaucauugguaca

SEQ ID NO: 957565 - RNA, 19 nt, Artificial Sequence
  Description of Artificial Sequence: Synthetic oligonucleotide
  Antisense strand to SEQ ID NO: 957564
uguaccaaugauguaauaa

SEQ ID NO: 957566 - RNA, 19 nt, Artificial Sequence
  Description of Artificial Sequence: Synthetic oligonucleotide
  Sense strand starting at position 246 of SEQ ID NO: 913832
ugaaauaagcagugaucuu

SEQ ID NO: 957567 - RNA, 19 nt, Artificial Sequence
  Description of Artificial Sequence: Synthetic oligonucleotide
  Antisense strand to SEQ ID NO: 957566
aagaucacugcuuauuuca

SEQ ID NO: 957568 - RNA, 19 nt, Artificial Sequence
  Description of Artificial Sequence: Synthetic oligonucleotide
  Sense strand starting at position 2029 of SEQ ID NO: 913832
gguacaugcccaugacaag

SEQ ID NO: 957569 - RNA, 19 nt, Artificial Sequence
  Description of Artificial Sequence: Synthetic oligonucleotide
  Antisense strand to SEQ ID NO: 957568
cuugucaugggcauguacc

SEQ ID NO: 957570 - RNA, 19 nt, Artificial Sequence
  Description of Artificial Sequence: Synthetic oligonucleotide
  Sense strand starting at position 1001 of SEQ ID NO: 913832
auaacaguguaugcauaaa

SEQ ID NO: 957571 - RNA, 19 nt, Artificial Sequence
  Description of Artificial Sequence: Synthetic oligonucleotide
  Antisense strand to SEQ ID NO: 957570
uuuaugcauacacuguuau

SEQ ID NO: 957572 - RNA, 19 nt, Artificial Sequence
  Description of Artificial Sequence: Synthetic oligonucleotide
  Sense strand starting at position 981 of SEQ ID NO: 913832
aaaggcugccuuuagguaa

SEQ ID NO: 957573 - RNA, 19 nt, Artificial Sequence
  Description of Artificial Sequence: Synthetic oligonucleotide
  Antisense strand to SEQ ID NO: 957572
uuaccuaaaggcagccuuu

SEQ ID NO: 957574 - RNA, 19 nt, Artificial Sequence
  Description of Artificial Sequence: Synthetic oligonucleotide
  Sense strand starting at position 1847 of SEQ ID NO: 913832
cacaauagucagugguaag

SEQ ID NO: 957575 - RNA, 19 nt, Artificial Sequence
  Description of Artificial Sequence: Synthetic oligonucleotide
  Antisense strand to SEQ ID NO: 957574
cuuaccacugacuauugug

SEQ ID NO: 957576 - RNA, 19 nt, Artificial Sequence
  Description of Artificial Sequence: Synthetic oligonucleotide
  Sense strand starting at position 1620 of SEQ ID NO: 913832
acaguaagugagugaccau

SEQ ID NO: 957577 - RNA, 19 nt, Artificial Sequence
  Description of Artificial Sequence: Synthetic oligonucleotide
  Antisense strand to SEQ ID NO: 957576
auggucacucacuuacugu

SEQ ID NO: 957578 - RNA, 19 nt, Artificial Sequence
  Description of Artificial Sequence: Synthetic oligonucleotide
  Sense strand starting at position 1623 of SEQ ID NO: 913832
guaagugagugaccauuga

SEQ ID NO: 957579 - RNA, 19 nt, Artificial Sequence
  Description of Artificial Sequence: Synthetic oligonucleotide
  Antisense strand to SEQ ID NO: 957578
ucaauggucacucacuuac

SEQ ID NO: 957580 - RNA, 19 nt, Artificial Sequence
  Description of Artificial Sequence: Synthetic oligonucleotide
  Sense strand starting at position 2630 of SEQ ID NO: 913832
ugagcugacuucuuuacag

SEQ ID NO: 957581 - RNA, 19 nt, Artificial Sequence
  Description of Artificial Sequence: Synthetic oligonucleotide
  Antisense strand to SEQ ID NO: 957580
cuguaaagaagucagcuca

SEQ ID NO: 957582 - RNA, 19 nt, Artificial Sequence
  Description of Artificial Sequence: Synthetic oligonucleotide
  Sense strand starting at position 1846 of SEQ ID NO: 913832
ucacaauagucagugguaa

SEQ ID NO: 957583 - RNA, 19 nt, Artificial Sequence
  Description of Artificial Sequence: Synthetic oligonucleotide
  Antisense strand to SEQ ID NO: 957582
uuaccacugacuauuguga

SEQ ID NO: 957584 - RNA, 19 nt, Artificial Sequence
  Description of Artificial Sequence: Synthetic oligonucleotide
  Sense strand starting at position 823 of SEQ ID NO: 913832
guacaugaaugagcauagu

SEQ ID NO: 957585 - RNA, 19 nt, Artificial Sequence
  Description of Artificial Sequence: Synthetic oligonucleotide
  Antisense strand to SEQ ID NO: 957584
acuaugcucauucauguac

SEQ ID NO: 957586 - RNA, 19 nt, Artificial Sequence
  Description of Artificial Sequence: Synthetic oligonucleotide
  Sense strand starting at position 2776 of SEQ ID NO: 913832
aguaaucaagacuguguca

SEQ ID NO: 957587 - RNA, 19 nt, Artificial Sequence
  Description of Artificial Sequence: Synthetic oligonucleotide
  Antisense strand to SEQ ID NO: 957586
ugacacagucuugauuacu

SEQ ID NO: 957588 - RNA, 19 nt, Artificial Sequence
  Description of Artificial Sequence: Synthetic oligonucleotide
  Sense strand starting at position 111 of SEQ ID NO: 913832
ggaucacguacauguauaa

SEQ ID NO: 957589 - RNA, 19 nt, Artificial Sequence
  Description of Artificial Sequence: Synthetic oligonucleotide
  Antisense strand to SEQ ID NO: 957588
uuauacauguacgugaucc

SEQ ID NO: 957590 - RNA, 19 nt, Artificial Sequence
  Description of Artificial Sequence: Synthetic oligonucleotide
  Sense strand starting at position 2505 of SEQ ID NO: 913832
caaagcugguuguugaaga

SEQ ID NO: 957591 - RNA, 19 nt, Artificial Sequence
  Description of Artificial Sequence: Synthetic oligonucleotide
  Antisense strand to SEQ ID NO: 957590
ucuucaacaaccagcuuug

SEQ ID NO: 957592 - RNA, 19 nt, Artificial Sequence
  Description of Artificial Sequence: Synthetic oligonucleotide
  Sense strand starting at position 1061 of SEQ ID NO: 913833
ggguggugagaauagugau

SEQ ID NO: 957593 - RNA, 19 nt, Artificial Sequence
  Description of Artificial Sequence: Synthetic oligonucleotide
  Antisense strand to SEQ ID NO: 957592
aucacuauucucaccaccc

SEQ ID NO: 957594 - RNA, 19 nt, Artificial Sequence
  Description of Artificial Sequence: Synthetic oligonucleotide
  Sense strand starting at position 2313 of SEQ ID NO: 913833
cuuaccugaggcuaucaaa

SEQ ID NO: 957595 - RNA, 19 nt, Artificial Sequence
  Description of Artificial Sequence: Synthetic oligonucleotide
  Antisense strand to SEQ ID NO: 957594
uuugauagccucagguaag

SEQ ID NO: 957596 - RNA, 19 nt, Artificial Sequence
  Description of Artificial Sequence: Synthetic oligonucleotide
  Sense strand starting at position 3859 of SEQ ID NO: 913833
uggaguguaguucaagaag

SEQ ID NO: 957597 - RNA, 19 nt, Artificial Sequence
  Description of Artificial Sequence: Synthetic oligonucleotide
  Antisense strand to SEQ ID NO: 957596
cuucuugaacuacacucca

SEQ ID NO: 957598 - RNA, 19 nt, Artificial Sequence
  Description of Artificial Sequence: Synthetic oligonucleotide
  Sense strand starting at position 3554 of SEQ ID NO: 913833
gcagcacucauggagacaa

SEQ ID NO: 957599 - RNA, 19 nt, Artificial Sequence
  Description of Artificial Sequence: Synthetic oligonucleotide
  Antisense strand to SEQ ID NO: 957598
uugucuccaugagugcugc

SEQ ID NO: 957600 - RNA, 19 nt, Artificial Sequence
  Description of Artificial Sequence: Synthetic oligonucleotide
  Sense strand starting at position 2387 of SEQ ID NO: 913833
uuugcuuucgcucccuaau

SEQ ID NO: 957601 - RNA, 19 nt, Artificial Sequence
  Description of Artificial Sequence: Synthetic oligonucleotide
  Antisense strand to SEQ ID NO: 957600
auuagggagcgaaagcaaa

SEQ ID NO: 957602 - RNA, 19 nt, Artificial Sequence
  Description of Artificial Sequence: Synthetic oligonucleotide
  Sense strand starting at position 178 of SEQ ID NO: 913833
gccaaagaucagggaagua

SEQ ID NO: 957603 - RNA, 19 nt, Artificial Sequence
  Description of Artificial Sequence: Synthetic oligonucleotide
  Antisense strand to SEQ ID NO: 957602
uacuucccugaucuuuggc

SEQ ID NO: 957604 - RNA, 19 nt, Artificial Sequence
  Description of Artificial Sequence: Synthetic oligonucleotide
  Sense strand starting at position 3775 of SEQ ID NO: 913833
auuaguauaggaggucaga

SEQ ID NO: 957605 - RNA, 19 nt, Artificial Sequence
  Description of Artificial Sequence: Synthetic oligonucleotide
  Antisense strand to SEQ ID NO: 957604
ucugaccuccuauacuaau

SEQ ID NO: 957606 - RNA, 19 nt, Artificial Sequence
  Description of Artificial Sequence: Synthetic oligonucleotide
  Sense strand starting at position 3663 of SEQ ID NO: 913833
ugaauagagugguuaugag

SEQ ID NO: 957607 - RNA, 19 nt, Artificial Sequence
  Description of Artificial Sequence: Synthetic oligonucleotide
  Antisense strand to SEQ ID NO: 957606
cucauaaccacucuauuca

SEQ ID NO: 957608 - RNA, 19 nt, Artificial Sequence
  Description of Artificial Sequence: Synthetic oligonucleotide
  Sense strand starting at position 3044 of SEQ ID NO: 913833
agugaauuauaagcaaauc

SEQ ID NO: 957609 - RNA, 19 nt, Artificial Sequence
  Description of Artificial Sequence: Synthetic oligonucleotide
  Antisense strand to SEQ ID NO: 957608
gauuugcuuauaauucacu

SEQ ID NO: 957610 - RNA, 19 nt, Artificial Sequence
  Description of Artificial Sequence: Synthetic oligonucleotide
  Sense strand starting at position 1256 of SEQ ID NO: 913833
auacgaaucguuuaagaug

SEQ ID NO: 957611 - RNA, 19 nt, Artificial Sequence
  Description of Artificial Sequence: Synthetic oligonucleotide
  Antisense strand to SEQ ID NO: 957610
caucuuaaacgauucguau

SEQ ID NO: 957612 - RNA, 19 nt, Artificial Sequence
  Description of Artificial Sequence: Synthetic oligonucleotide
  Sense strand starting at position 1361 of SEQ ID NO: 913833
caggucucucgagaucaca

SEQ ID NO: 957613 - RNA, 19 nt, Artificial Sequence
  Description of Artificial Sequence: Synthetic oligonucleotide
  Antisense strand to SEQ ID NO: 957612
ugugaucucgagagaccug

SEQ ID NO: 957614 - RNA, 19 nt, Artificial Sequence
  Description of Artificial Sequence: Synthetic oligonucleotide
  Sense strand starting at position 3093 of SEQ ID NO: 913833
cccggagugaucuaucaua

SEQ ID NO: 957615 - RNA, 19 nt, Artificial Sequence
  Description of Artificial Sequence: Synthetic oligonucleotide
  Antisense strand to SEQ ID NO: 957614
uaugauagaucacuccggg

SEQ ID NO: 957616 - RNA, 19 nt, Artificial Sequence
  Description of Artificial Sequence: Synthetic oligonucleotide
  Sense strand starting at position 3500 of SEQ ID NO: 913833
gcggcagaaccuucguagu

SEQ ID NO: 957617 - RNA, 19 nt, Artificial Sequence
  Description of Artificial Sequence: Synthetic oligonucleotide
  Antisense strand to SEQ ID NO: 957616
acuacgaagguucugccgc

SEQ ID NO: 957618 - RNA, 19 nt, Artificial Sequence
  Description of Artificial Sequence: Synthetic oligonucleotide
  Sense strand starting at position 3738 of SEQ ID NO: 913833
gguaaauguuaaccaauau

SEQ ID NO: 957619 - RNA, 19 nt, Artificial Sequence
  Description of Artificial Sequence: Synthetic oligonucleotide
  Antisense strand to SEQ ID NO: 957618
auauugguuaacauuuacc

SEQ ID NO: 957620 - RNA, 19 nt, Artificial Sequence
  Description of Artificial Sequence: Synthetic oligonucleotide
  Sense strand starting at position 2386 of SEQ ID NO: 913833
guuugcuuucgcucccuaa

SEQ ID NO: 957621 - RNA, 19 nt, Artificial Sequence
  Description of Artificial Sequence: Synthetic oligonucleotide
  Antisense strand to SEQ ID NO: 957620
uuagggagcgaaagcaaac

SEQ ID NO: 957622 - RNA, 19 nt, Artificial Sequence
  Description of Artificial Sequence: Synthetic oligonucleotide
  Sense strand starting at position 3661 of SEQ ID NO: 913833
acugaauagagugguuaug

SEQ ID NO: 957623 - RNA, 19 nt, Artificial Sequence
  Description of Artificial Sequence: Synthetic oligonucleotide
  Antisense strand to SEQ ID NO: 957622
cauaaccacucuauucagu

SEQ ID NO: 957624 - RNA, 19 nt, Artificial Sequence
  Description of Artificial Sequence: Synthetic oligonucleotide
  Sense strand starting at position 3066 of SEQ ID NO: 913833
ucaaauauuccauaguugu

SEQ ID NO: 957625 - RNA, 19 nt, Artificial Sequence
  Description of Artificial Sequence: Synthetic oligonucleotide
  Antisense strand to SEQ ID NO: 957624
acaacuauggaauauuuga

SEQ ID NO: 957626 - RNA, 19 nt, Artificial Sequence
  Description of Artificial Sequence: Synthetic oligonucleotide
  Sense strand starting at position 803 of SEQ ID NO: 913833
agagaaacgucuuuaucag

SEQ ID NO: 957627 - RNA, 19 nt, Artificial Sequence
  Description of Artificial Sequence: Synthetic oligonucleotide
  Antisense strand to SEQ ID NO: 957626
cugauaaagacguuucucu

SEQ ID NO: 957628 - RNA, 19 nt, Artificial Sequence
  Description of Artificial Sequence: Synthetic oligonucleotide
  Sense strand starting at position 3595 of SEQ ID NO: 913833
accauuacugucuaggcaa

SEQ ID NO: 957629 - RNA, 19 nt, Artificial Sequence
  Description of Artificial Sequence: Synthetic oligonucleotide
  Antisense strand to SEQ ID NO: 957628
uugccuagacaguaauggu

SEQ ID NO: 957630 - RNA, 19 nt, Artificial Sequence
  Description of Artificial Sequence: Synthetic oligonucleotide
  Sense strand starting at position 2308 of SEQ ID NO: 913833
acuuucuuaccugaggcua

SEQ ID NO: 957631 - RNA, 19 nt, Artificial Sequence
  Description of Artificial Sequence: Synthetic oligonucleotide
  Antisense strand to SEQ ID NO: 957630
uagccucagguaagaaagu

SEQ ID NO: 957632 - RNA, 19 nt, Artificial Sequence
  Description of Artificial Sequence: Synthetic oligonucleotide
  Sense strand starting at position 715 of SEQ ID NO: 913833
gcaacuaaaucagcaauga

SEQ ID NO: 957633 - RNA, 19 nt, Artificial Sequence
  Description of Artificial Sequence: Synthetic oligonucleotide
  Antisense strand to SEQ ID NO: 957632
ucauugcugauuuaguugc

SEQ ID NO: 957634 - RNA, 19 nt, Artificial Sequence
  Description of Artificial Sequence: Synthetic oligonucleotide
  Sense strand starting at position 3690 of SEQ ID NO: 913833
agguaaugccuguauaaca

SEQ ID NO: 957635 - RNA, 19 nt, Artificial Sequence
  Description of Artificial Sequence: Synthetic oligonucleotide
  Antisense strand to SEQ ID NO: 957634
uguuauacaggcauuaccu

SEQ ID NO: 957636 - RNA, 19 nt, Artificial Sequence
  Description of Artificial Sequence: Synthetic oligonucleotide
  Sense strand starting at position 3210 of SEQ ID NO: 913833
cuggaucagcaaggucaaa

SEQ ID NO: 957637 - RNA, 19 nt, Artificial Sequence
  Description of Artificial Sequence: Synthetic oligonucleotide
  Antisense strand to SEQ ID NO: 957636
uuugaccuugcugauccag

SEQ ID NO: 957638 - RNA, 19 nt, Artificial Sequence
  Description of Artificial Sequence: Synthetic oligonucleotide
  Sense strand starting at position 1388 of SEQ ID NO: 913833
guggaagguccucacggau

SEQ ID NO: 957639 - RNA, 19 nt, Artificial Sequence
  Description of Artificial Sequence: Synthetic oligonucleotide
  Antisense strand to SEQ ID NO: 957638
auccgugaggaccuuccac

SEQ ID NO: 957640 - RNA, 19 nt, Artificial Sequence
  Description of Artificial Sequence: Synthetic oligonucleotide
  Sense strand starting at position 3511 of SEQ ID NO: 913833
uucguaguucaacagggau

SEQ ID NO: 957641 - RNA, 19 nt, Artificial Sequence
  Description of Artificial Sequence: Synthetic oligonucleotide
  Antisense strand to SEQ ID NO: 957640
aucccuguugaacuacgaa

SEQ ID NO: 957642 - RNA, 19 nt, Artificial Sequence
  Description of Artificial Sequence: Synthetic oligonucleotide
  Sense strand starting at position 3413 of SEQ ID NO: 913833
auagcuuaugccuagacca

SEQ ID NO: 957643 - RNA, 19 nt, Artificial Sequence
  Description of Artificial Sequence: Synthetic oligonucleotide
  Antisense strand to SEQ ID NO: 957642
uggucuaggcauaagcuau

SEQ ID NO: 957644 - RNA, 19 nt, Artificial Sequence
  Description of Artificial Sequence: Synthetic oligonucleotide
  Sense strand starting at position 1254 of SEQ ID NO: 913833
gaauacgaaucguuuaaga

SEQ ID NO: 957645 - RNA, 19 nt, Artificial Sequence
  Description of Artificial Sequence: Synthetic oligonucleotide
  Antisense strand to SEQ ID NO: 957644
ucuuaaacgauucguauuc

SEQ ID NO: 957646 - RNA, 19 nt, Artificial Sequence
  Description of Artificial Sequence: Synthetic oligonucleotide
  Sense strand starting at position 1252 of SEQ ID NO: 913833
aggaauacgaaucguuuaa

SEQ ID NO: 957647 - RNA, 19 nt, Artificial Sequence
  Description of Artificial Sequence: Synthetic oligonucleotide
  Antisense strand to SEQ ID NO: 957646
uuaaacgauucguauuccu

SEQ ID NO: 957648 - RNA, 19 nt, Artificial Sequence
  Description of Artificial Sequence: Synthetic oligonucleotide
  Sense strand starting at position 704 of SEQ ID NO: 913833
ucuguaucggagcaacuaa

SEQ ID NO: 957649 - RNA, 19 nt, Artificial Sequence
  Description of Artificial Sequence: Synthetic oligonucleotide
  Antisense strand to SEQ ID NO: 957648
uuaguugcuccgauacaga

SEQ ID NO: 957650 - RNA, 19 nt, Artificial Sequence
  Description of Artificial Sequence: Synthetic oligonucleotide
  Sense strand starting at position 3725 of SEQ ID NO: 913833
acauacaguguuggguaaa

SEQ ID NO: 957651 - RNA, 19 nt, Artificial Sequence
  Description of Artificial Sequence: Synthetic oligonucleotide
  Antisense strand to SEQ ID NO: 957650
uuuacccaacacuguaugu

SEQ ID NO: 957652 - RNA, 19 nt, Artificial Sequence
  Description of Artificial Sequence: Synthetic oligonucleotide
  Sense strand starting at position 2509 of SEQ ID NO: 913833
ggaaucaucucuguguaca

SEQ ID NO: 957653 - RNA, 19 nt, Artificial Sequence
  Description of Artificial Sequence: Synthetic oligonucleotide
  Antisense strand to SEQ ID NO: 957652
uguacacagagaugauucc

SEQ ID NO: 957654 - RNA, 19 nt, Artificial Sequence
  Description of Artificial Sequence: Synthetic oligonucleotide
  Sense strand starting at position 3728 of SEQ ID NO: 913833
uacaguguuggguaaaugu

SEQ ID NO: 957655 - RNA, 19 nt, Artificial Sequence
  Description of Artificial Sequence: Synthetic oligonucleotide
  Antisense strand to SEQ ID NO: 957654
acauuuacccaacacugua

SEQ ID NO: 957656 - RNA, 19 nt, Artificial Sequence
  Description of Artificial Sequence: Synthetic oligonucleotide
  Sense strand starting at position 3402 of SEQ ID NO: 913833
cuuccauugguauagcuua

SEQ ID NO: 957657 - RNA, 19 nt, Artificial Sequence
  Description of Artificial Sequence: Synthetic oligonucleotide
  Antisense strand to SEQ ID NO: 957656
uaagcuauaccaauggaag

SEQ ID NO: 957658 - RNA, 19 nt, Artificial Sequence
  Description of Artificial Sequence: Synthetic oligonucleotide
  Sense strand starting at position 3526 of SEQ ID NO: 913833
ggaucugugagcuaugcag

SEQ ID NO: 957659 - RNA, 19 nt, Artificial Sequence
  Description of Artificial Sequence: Synthetic oligonucleotide
  Antisense strand to SEQ ID NO: 957658
cugcauagcucacagaucc

SEQ ID NO: 957660 - RNA, 19 nt, Artificial Sequence
  Description of Artificial Sequence: Synthetic oligonucleotide
  Sense strand starting at position 851 of SEQ ID NO: 913833
augguaugugaggguuaug

SEQ ID NO: 957661 - RNA, 19 nt, Artificial Sequence
  Description of Artificial Sequence: Synthetic oligonucleotide
  Antisense strand to SEQ ID NO: 957660
cauaacccucacauaccau

SEQ ID NO: 957662 - RNA, 19 nt, Artificial Sequence
  Description of Artificial Sequence: Synthetic oligonucleotide
  Sense strand starting at position 3857 of SEQ ID NO: 913833
ccuggaguguaguucaaga

SEQ ID NO: 957663 - RNA, 19 nt, Artificial Sequence
  Description of Artificial Sequence: Synthetic oligonucleotide
  Antisense strand to SEQ ID NO: 957662
ucuugaacuacacuccagg

SEQ ID NO: 957664 - RNA, 19 nt, Artificial Sequence
  Description of Artificial Sequence: Synthetic oligonucleotide
  Sense strand starting at position 2508 of SEQ ID NO: 913833
gggaaucaucucuguguac

SEQ ID NO: 957665 - RNA, 19 nt, Artificial Sequence
  Description of Artificial Sequence: Synthetic oligonucleotide
  Antisense strand to SEQ ID NO: 957664
guacacagagaugauuccc

SEQ ID NO: 957666 - RNA, 19 nt, Artificial Sequence
  Description of Artificial Sequence: Synthetic oligonucleotide
  Sense strand starting at position 854 of SEQ ID NO: 913833
guaugugaggguuaugcua

SEQ ID NO: 957667 - RNA, 19 nt, Artificial Sequence
  Description of Artificial Sequence: Synthetic oligonucleotide
  Antisense strand to SEQ ID NO: 957666
uagcauaacccucacauac

SEQ ID NO: 957668 - RNA, 19 nt, Artificial Sequence
  Description of Artificial Sequence: Synthetic oligonucleotide
  Sense strand starting at position 3688 of SEQ ID NO: 913833
ugagguaaugccuguauaa

SEQ ID NO: 957669 - RNA, 19 nt, Artificial Sequence
  Description of Artificial Sequence: Synthetic oligonucleotide
  Antisense strand to SEQ ID NO: 957668
uuauacaggcauuaccuca

SEQ ID NO: 957670 - RNA, 19 nt, Artificial Sequence
  Description of Artificial Sequence: Synthetic oligonucleotide
  Sense strand starting at position 3319 of SEQ ID NO: 913833
auagguuaucaaggccagu

SEQ ID NO: 957671 - RNA, 19 nt, Artificial Sequence
  Description of Artificial Sequence: Synthetic oligonucleotide
  Antisense strand to SEQ ID NO: 957670
acuggccuugauaaccuau

SEQ ID NO: 957672 - RNA, 19 nt, Artificial Sequence
  Description of Artificial Sequence: Synthetic oligonucleotide
  Sense strand starting at position 3592 of SEQ ID NO: 913834
agcaguguugagucggcua

SEQ ID NO: 957673 - RNA, 19 nt, Artificial Sequence
  Description of Artificial Sequence: Synthetic oligonucleotide
  Antisense strand to SEQ ID NO: 957672
uagccgacucaacacugcu

SEQ ID NO: 957674 - RNA, 19 nt, Artificial Sequence
  Description of Artificial Sequence: Synthetic oligonucleotide
  Sense strand starting at position 3803 of SEQ ID NO: 913834
ucaucucccggucauaaga

SEQ ID NO: 957675 - RNA, 19 nt, Artificial Sequence
  Description of Artificial Sequence: Synthetic oligonucleotide
  Antisense strand to SEQ ID NO: 957674
ucuuaugaccgggagauga

SEQ ID NO: 957676 - RNA, 19 nt, Artificial Sequence
  Description of Artificial Sequence: Synthetic oligonucleotide
  Sense strand starting at position 3943 of SEQ ID NO: 913834
uggagaaggcucugaaugu

SEQ ID NO: 957677 - RNA, 19 nt, Artificial Sequence
  Description of Artificial Sequence: Synthetic oligonucleotide
  Antisense strand to SEQ ID NO: 957676
acauucagagccuucucca

SEQ ID NO: 957678 - RNA, 19 nt, Artificial Sequence
  Description of Artificial Sequence: Synthetic oligonucleotide
  Sense strand starting at position 3947 of SEQ ID NO: 913834
gaaggcucugaauguauua

SEQ ID NO: 957679 - RNA, 19 nt, Artificial Sequence
  Description of Artificial Sequence: Synthetic oligonucleotide
  Antisense strand to SEQ ID NO: 957678
uaauacauucagagccuuc

SEQ ID NO: 957680 - RNA, 19 nt, Artificial Sequence
  Description of Artificial Sequence: Synthetic oligonucleotide
  Sense strand starting at position 3270 of SEQ ID NO: 913834
agaccugauguuuguuaca

SEQ ID NO: 957681 - RNA, 19 nt, Artificial Sequence
  Description of Artificial Sequence: Synthetic oligonucleotide
  Antisense strand to SEQ ID NO: 957680
uguaacaaacaucaggucu

SEQ ID NO: 957682 - RNA, 19 nt, Artificial Sequence
  Description of Artificial Sequence: Synthetic oligonucleotide
  Sense strand starting at position 3599 of SEQ ID NO: 913834
uugagucggcuacaucaua

SEQ ID NO: 957683 - RNA, 19 nt, Artificial Sequence
  Description of Artificial Sequence: Synthetic oligonucleotide
  Antisense strand to SEQ ID NO: 957682
uaugauguagccgacucaa

SEQ ID NO: 957684 - RNA, 19 nt, Artificial Sequence
  Description of Artificial Sequence: Synthetic oligonucleotide
  Sense strand starting at position 3402 of SEQ ID NO: 913834
gcugucacccagcauacaa

SEQ ID NO: 957685 - RNA, 19 nt, Artificial Sequence
  Description of Artificial Sequence: Synthetic oligonucleotide
  Antisense strand to SEQ ID NO: 957684
uuguaugcugggugacagc

SEQ ID NO: 957686 - RNA, 19 nt, Artificial Sequence
  Description of Artificial Sequence: Synthetic oligonucleotide
  Sense strand starting at position 3272 of SEQ ID NO: 913834
accugauguuuguuacacu

SEQ ID NO: 957687 - RNA, 19 nt, Artificial Sequence
  Description of Artificial Sequence: Synthetic oligonucleotide
  Antisense strand to SEQ ID NO: 957686
aguguaacaaacaucaggu

SEQ ID NO: 957688 - RNA, 19 nt, Artificial Sequence
  Description of Artificial Sequence: Synthetic oligonucleotide
  Sense strand starting at position 3310 of SEQ ID NO: 913834
gacagaagcugucucuucu

SEQ ID NO: 957689 - RNA, 19 nt, Artificial Sequence
  Description of Artificial Sequence: Synthetic oligonucleotide
  Antisense strand to SEQ ID NO: 957688
agaagagacagcuucuguc

SEQ ID NO: 957690 - RNA, 19 nt, Artificial Sequence
  Description of Artificial Sequence: Synthetic oligonucleotide
  Sense strand starting at position 3978 of SEQ ID NO: 913834
gacggaaucuugccaucuu

SEQ ID NO: 957691 - RNA, 19 nt, Artificial Sequence
  Description of Artificial Sequence: Synthetic oligonucleotide
  Antisense strand to SEQ ID NO: 957690
aagauggcaagauuccguc

SEQ ID NO: 957692 - RNA, 19 nt, Artificial Sequence
  Description of Artificial Sequence: Synthetic oligonucleotide
  Sense strand starting at position 3819 of SEQ ID NO: 913834
agaugaguccucuggccuu

SEQ ID NO: 957693 - RNA, 19 nt, Artificial Sequence
  Description of Artificial Sequence: Synthetic oligonucleotide
  Antisense strand to SEQ ID NO: 957692
aaggccagaggacucaucu

SEQ ID NO: 957694 - RNA, 19 nt, Artificial Sequence
  Description of Artificial Sequence: Synthetic oligonucleotide
  Sense strand starting at position 2704 of SEQ ID NO: 913834
ggaggcuaacgaugcuuua

SEQ ID NO: 957695 - RNA, 19 nt, Artificial Sequence
  Description of Artificial Sequence: Synthetic oligonucleotide
  Antisense strand to SEQ ID NO: 957694
uaaagcaucguuagccucc

SEQ ID NO: 957696 - RNA, 19 nt, Artificial Sequence
  Description of Artificial Sequence: Synthetic oligonucleotide
  Sense strand starting at position 3597 of SEQ ID NO: 913834
uguugagucggcuacauca

SEQ ID NO: 957697 - RNA, 19 nt, Artificial Sequence
  Description of Artificial Sequence: Synthetic oligonucleotide
  Antisense strand to SEQ ID NO: 957696
ugauguagccgacucaaca

SEQ ID NO: 957698 - RNA, 19 nt, Artificial Sequence
  Description of Artificial Sequence: Synthetic oligonucleotide
  Sense strand starting at position 2688 of SEQ ID NO: 913834
ccgaacugccugugaugga

SEQ ID NO: 957699 - RNA, 19 nt, Artificial Sequence
  Description of Artificial Sequence: Synthetic oligonucleotide
  Antisense strand to SEQ ID NO: 957698
uccaucacaggcaguucgg

SEQ ID NO: 957700 - RNA, 19 nt, Artificial Sequence
  Description of Artificial Sequence: Synthetic oligonucleotide
  Sense strand starting at position 2707 of SEQ ID NO: 913834
ggcuaacgaugcuuuacau

SEQ ID NO: 957701 - RNA, 19 nt, Artificial Sequence
  Description of Artificial Sequence: Synthetic oligonucleotide
  Antisense strand to SEQ ID NO: 957700
auguaaagcaucguuagcc

SEQ ID NO: 957702 - RNA, 19 nt, Artificial Sequence
  Description of Artificial Sequence: Synthetic oligonucleotide
  Sense strand starting at position 2476 of SEQ ID NO: 913834
ccgaguuacccaugucgga

SEQ ID NO: 957703 - RNA, 19 nt, Artificial Sequence
  Description of Artificial Sequence: Synthetic oligonucleotide
  Antisense strand to SEQ ID NO: 957702
uccgacauggguaacucgg

SEQ ID NO: 957704 - RNA, 19 nt, Artificial Sequence
  Description of Artificial Sequence: Synthetic oligonucleotide
  Sense strand starting at position 2465 of SEQ ID NO: 913834
uccaaagcuguccgaguua

SEQ ID NO: 957705 - RNA, 19 nt, Artificial Sequence
  Description of Artificial Sequence: Synthetic oligonucleotide
  Antisense strand to SEQ ID NO: 957704
uaacucggacagcuuugga

SEQ ID NO: 957706 - RNA, 19 nt, Artificial Sequence
  Description of Artificial Sequence: Synthetic oligonucleotide
  Sense strand starting at position 2745 of SEQ ID NO: 913834
cgcuuuaccugaguucuca

SEQ ID NO: 957707 - RNA, 19 nt, Artificial Sequence
  Description of Artificial Sequence: Synthetic oligonucleotide
  Antisense strand to SEQ ID NO: 957706
ugagaacucagguaaagcg

SEQ ID NO: 957708 - RNA, 19 nt, Artificial Sequence
  Description of Artificial Sequence: Synthetic oligonucleotide
  Sense strand starting at position 3595 of SEQ ID NO: 913834
aguguugagucggcuacau

SEQ ID NO: 957709 - RNA, 19 nt, Artificial Sequence
  Description of Artificial Sequence: Synthetic oligonucleotide
  Antisense strand to SEQ ID NO: 957708
auguagccgacucaacacu

SEQ ID NO: 957710 - RNA, 19 nt, Artificial Sequence
  Description of Artificial Sequence: Synthetic oligonucleotide
  Sense strand starting at position 3899 of SEQ ID NO: 913834
uggcuucucagcggguaau

SEQ ID NO: 957711 - RNA, 19 nt, Artificial Sequence
  Description of Artificial Sequence: Synthetic oligonucleotide
  Antisense strand to SEQ ID NO: 957710
auuacccgcugagaagcca

SEQ ID NO: 957712 - RNA, 19 nt, Artificial Sequence
  Description of Artificial Sequence: Synthetic oligonucleotide
  Sense strand starting at position 3594 of SEQ ID NO: 913834
caguguugagucggcuaca

SEQ ID NO: 957713 - RNA, 19 nt, Artificial Sequence
  Description of Artificial Sequence: Synthetic oligonucleotide
  Antisense strand to SEQ ID NO: 957712
uguagccgacucaacacug

SEQ ID NO: 957714 - RNA, 19 nt, Artificial Sequence
  Description of Artificial Sequence: Synthetic oligonucleotide
  Sense strand starting at position 3944 of SEQ ID NO: 913834
ggagaaggcucugaaugua

SEQ ID NO: 957715 - RNA, 19 nt, Artificial Sequence
  Description of Artificial Sequence: Synthetic oligonucleotide
  Antisense strand to SEQ ID NO: 957714
uacauucagagccuucucc

SEQ ID NO: 957716 - RNA, 19 nt, Artificial Sequence
  Description of Artificial Sequence: Synthetic oligonucleotide
  Sense strand starting at position 2464 of SEQ ID NO: 913834
guccaaagcuguccgaguu

SEQ ID NO: 957717 - RNA, 19 nt, Artificial Sequence
  Description of Artificial Sequence: Synthetic oligonucleotide
  Antisense strand to SEQ ID NO: 957716
aacucggacagcuuuggac

SEQ ID NO: 957718 - RNA, 19 nt, Artificial Sequence
  Description of Artificial Sequence: Synthetic oligonucleotide
  Sense strand starting at position 3898 of SEQ ID NO: 913834
guggcuucucagcggguaa

SEQ ID NO: 957719 - RNA, 19 nt, Artificial Sequence
  Description of Artificial Sequence: Synthetic oligonucleotide
  Antisense strand to SEQ ID NO: 957718
uuacccgcugagaagccac

SEQ ID NO: 957720 - RNA, 19 nt, Artificial Sequence
  Description of Artificial Sequence: Synthetic oligonucleotide
  Sense strand starting at position 3604 of SEQ ID NO: 913834
ucggcuacaucauaacuau

SEQ ID NO: 957721 - RNA, 19 nt, Artificial Sequence
  Description of Artificial Sequence: Synthetic oligonucleotide
  Antisense strand to SEQ ID NO: 957720
auaguuaugauguagccga

SEQ ID NO: 957722 - RNA, 19 nt, Artificial Sequence
  Description of Artificial Sequence: Synthetic oligonucleotide
  Sense strand starting at position 3968 of SEQ ID NO: 913835
gcaagaguggaagauguua

SEQ ID NO: 957723 - RNA, 19 nt, Artificial Sequence
  Description of Artificial Sequence: Synthetic oligonucleotide
  Antisense strand to SEQ ID NO: 957722
uaacaucuuccacucuugc

SEQ ID NO: 957724 - RNA, 19 nt, Artificial Sequence
  Description of Artificial Sequence: Synthetic oligonucleotide
  Sense strand starting at position 2741 of SEQ ID NO: 913835
cuagaaaugaagugaugua

SEQ ID NO: 957725 - RNA, 19 nt, Artificial Sequence
  Description of Artificial Sequence: Synthetic oligonucleotide
  Antisense strand to SEQ ID NO: 957724
uacaucacuucauuucuag

SEQ ID NO: 957726 - RNA, 19 nt, Artificial Sequence
  Description of Artificial Sequence: Synthetic oligonucleotide
  Sense strand starting at position 2765 of SEQ ID NO: 913835
ugcgaaucccaggauugag

SEQ ID NO: 957727 - RNA, 19 nt, Artificial Sequence
  Description of Artificial Sequence: Synthetic oligonucleotide
  Antisense strand to SEQ ID NO: 957726
cucaauccugggauucgca

SEQ ID NO: 957728 - RNA, 19 nt, Artificial Sequence
  Description of Artificial Sequence: Synthetic oligonucleotide
  Sense strand starting at position 3718 of SEQ ID NO: 913835
ugaguuaggaaaggguuua

SEQ ID NO: 957729 - RNA, 19 nt, Artificial Sequence
  Description of Artificial Sequence: Synthetic oligonucleotide
  Antisense strand to SEQ ID NO: 957728
uaaacccuuuccuaacuca

SEQ ID NO: 957730 - RNA, 19 nt, Artificial Sequence
  Description of Artificial Sequence: Synthetic oligonucleotide
  Sense strand starting at position 344 of SEQ ID NO: 913835
cuuucuucugguuaagaau

SEQ ID NO: 957731 - RNA, 19 nt, Artificial Sequence
  Description of Artificial Sequence: Synthetic oligonucleotide
  Antisense strand to SEQ ID NO: 957730
auucuuaaccagaagaaag

SEQ ID NO: 957732 - RNA, 19 nt, Artificial Sequence
  Description of Artificial Sequence: Synthetic oligonucleotide
  Sense strand starting at position 2055 of SEQ ID NO: 913835
ucauaaggaagcuguagaa

SEQ ID NO: 957733 - RNA, 19 nt, Artificial Sequence
  Description of Artificial Sequence: Synthetic oligonucleotide
  Antisense strand to SEQ ID NO: 957732
uucuacagcuuccuuauga

SEQ ID NO: 957734 - RNA, 19 nt, Artificial Sequence
  Description of Artificial Sequence: Synthetic oligonucleotide
  Sense strand starting at position 2399 of SEQ ID NO: 913835
ggaaguacuguugaguuag

SEQ ID NO: 957735 - RNA, 19 nt, Artificial Sequence
  Description of Artificial Sequence: Synthetic oligonucleotide
  Antisense strand to SEQ ID NO: 957734
cuaacucaacaguacuucc

SEQ ID NO: 957736 - RNA, 19 nt, Artificial Sequence
  Description of Artificial Sequence: Synthetic oligonucleotide
  Sense strand starting at position 878 of SEQ ID NO: 913835
uguacuaagaccgauguaa

SEQ ID NO: 957737 - RNA, 19 nt, Artificial Sequence
  Description of Artificial Sequence: Synthetic oligonucleotide
  Antisense strand to SEQ ID NO: 957736
uuacaucggucuuaguaca

SEQ ID NO: 957738 - RNA, 19 nt, Artificial Sequence
  Description of Artificial Sequence: Synthetic oligonucleotide
  Sense strand starting at position 3828 of SEQ ID NO: 913835
gcagaucauacagggagua

SEQ ID NO: 957739 - RNA, 19 nt, Artificial Sequence
  Description of Artificial Sequence: Synthetic oligonucleotide
  Antisense strand to SEQ ID NO: 957738
uacucccuguaugaucugc

SEQ ID NO: 957740 - RNA, 19 nt, Artificial Sequence
  Description of Artificial Sequence: Synthetic oligonucleotide
  Sense strand starting at position 2973 of SEQ ID NO: 913835
augucuguaccauacauua

SEQ ID NO: 957741 - RNA, 19 nt, Artificial Sequence
  Description of Artificial Sequence: Synthetic oligonucleotide
  Antisense strand to SEQ ID NO: 957740
uaauguaugguacagacau

SEQ ID NO: 957742 - RNA, 19 nt, Artificial Sequence
  Description of Artificial Sequence: Synthetic oligonucleotide
  Sense strand starting at position 3926 of SEQ ID NO: 913835
uuaagagaugacuggcuuu

SEQ ID NO: 957743 - RNA, 19 nt, Artificial Sequence
  Description of Artificial Sequence: Synthetic oligonucleotide
  Antisense strand to SEQ ID NO: 957742
aaagccagucaucucuuaa

SEQ ID NO: 957744 - RNA, 19 nt, Artificial Sequence
  Description of Artificial Sequence: Synthetic oligonucleotide
  Sense strand starting at position 2342 of SEQ ID NO: 913835
cuacuuccgcgggaaagaa

SEQ ID NO: 957745 - RNA, 19 nt, Artificial Sequence
  Description of Artificial Sequence: Synthetic oligonucleotide
  Antisense strand to SEQ ID NO: 957744
uucuuucccgcggaaguag

SEQ ID NO: 957746 - RNA, 19 nt, Artificial Sequence
  Description of Artificial Sequence: Synthetic oligonucleotide
  Sense strand starting at position 3614 of SEQ ID NO: 913835
guggaaucuucucuuaaua

SEQ ID NO: 957747 - RNA, 19 nt, Artificial Sequence
  Description of Artificial Sequence: Synthetic oligonucleotide
  Antisense strand to SEQ ID NO: 957746
uauuaagagaagauuccac

SEQ ID NO: 957748 - RNA, 19 nt, Artificial Sequence
  Description of Artificial Sequence: Synthetic oligonucleotide
  Sense strand starting at position 880 of SEQ ID NO: 913835
uacuaagaccgauguaauc

SEQ ID NO: 957749 - RNA, 19 nt, Artificial Sequence
  Description of Artificial Sequence: Synthetic oligonucleotide
  Antisense strand to SEQ ID NO: 957748
gauuacaucggucuuagua

SEQ ID NO: 957750 - RNA, 19 nt, Artificial Sequence
  Description of Artificial Sequence: Synthetic oligonucleotide
  Sense strand starting at position 3539 of SEQ ID NO: 913835
gcuaguacuggcuaacaaa

SEQ ID NO: 957751 - RNA, 19 nt, Artificial Sequence
  Description of Artificial Sequence: Synthetic oligonucleotide
  Antisense strand to SEQ ID NO: 957750
uuuguuagccaguacuagc

SEQ ID NO: 957752 - RNA, 19 nt, Artificial Sequence
  Description of Artificial Sequence: Synthetic oligonucleotide
  Sense strand starting at position 2764 of SEQ ID NO: 913835
augcgaaucccaggauuga

SEQ ID NO: 957753 - RNA, 19 nt, Artificial Sequence
  Description of Artificial Sequence: Synthetic oligonucleotide
  Antisense strand to SEQ ID NO: 957752
ucaauccugggauucgcau

SEQ ID NO: 957754 - RNA, 19 nt, Artificial Sequence
  Description of Artificial Sequence: Synthetic oligonucleotide
  Sense strand starting at position 3174 of SEQ ID NO: 913835
guauuuccgagucguaaac

SEQ ID NO: 957755 - RNA, 19 nt, Artificial Sequence
  Description of Artificial Sequence: Synthetic oligonucleotide
  Antisense strand to SEQ ID NO: 957754
guuuacgacucggaaauac

SEQ ID NO: 957756 - RNA, 19 nt, Artificial Sequence
  Description of Artificial Sequence: Synthetic oligonucleotide
  Sense strand starting at position 2911 of SEQ ID NO: 913835
uggaauuucugcuagagaa

SEQ ID NO: 957757 - RNA, 19 nt, Artificial Sequence
  Description of Artificial Sequence: Synthetic oligonucleotide
  Antisense strand to SEQ ID NO: 957756
uucucuagcagaaauucca

SEQ ID NO: 957758 - RNA, 19 nt, Artificial Sequence
  Description of Artificial Sequence: Synthetic oligonucleotide
  Sense strand starting at position 3613 of SEQ ID NO: 913835
uguggaaucuucucuuaau

SEQ ID NO: 957759 - RNA, 19 nt, Artificial Sequence
  Description of Artificial Sequence: Synthetic oligonucleotide
  Antisense strand to SEQ ID NO: 957758
auuaagagaagauuccaca

SEQ ID NO: 957760 - RNA, 19 nt, Artificial Sequence
  Description of Artificial Sequence: Synthetic oligonucleotide
  Sense strand starting at position 343 of SEQ ID NO: 913835
ucuuucuucugguuaagaa

SEQ ID NO: 957761 - RNA, 19 nt, Artificial Sequence
  Description of Artificial Sequence: Synthetic oligonucleotide
  Antisense strand to SEQ ID NO: 957760
uucuuaaccagaagaaaga

SEQ ID NO: 957762 - RNA, 19 nt, Artificial Sequence
  Description of Artificial Sequence: Synthetic oligonucleotide
  Sense strand starting at position 3728 of SEQ ID NO: 913835
aaggguuuagcagguugaa

SEQ ID NO: 957763 - RNA, 19 nt, Artificial Sequence
  Description of Artificial Sequence: Synthetic oligonucleotide
  Antisense strand to SEQ ID NO: 957762
uucaaccugcuaaacccuu

SEQ ID NO: 957764 - RNA, 19 nt, Artificial Sequence
  Description of Artificial Sequence: Synthetic oligonucleotide
  Sense strand starting at position 375 of SEQ ID NO: 913835
guuaucagugccuacagau

SEQ ID NO: 957765 - RNA, 19 nt, Artificial Sequence
  Description of Artificial Sequence: Synthetic oligonucleotide
  Antisense strand to SEQ ID NO: 957764
aucuguaggcacugauaac

SEQ ID NO: 957766 - RNA, 19 nt, Artificial Sequence
  Description of Artificial Sequence: Synthetic oligonucleotide
  Sense strand starting at position 3292 of SEQ ID NO: 913835
ugggcaaucacuugugaca

SEQ ID NO: 957767 - RNA, 19 nt, Artificial Sequence
  Description of Artificial Sequence: Synthetic oligonucleotide
  Antisense strand to SEQ ID NO: 957766
ugucacaagugauugccca

SEQ ID NO: 957768 - RNA, 19 nt, Artificial Sequence
  Description of Artificial Sequence: Synthetic oligonucleotide
  Sense strand starting at position 3573 of SEQ ID NO: 913835
guuauugggcaucaguuau

SEQ ID NO: 957769 - RNA, 19 nt, Artificial Sequence
  Description of Artificial Sequence: Synthetic oligonucleotide
  Antisense strand to SEQ ID NO: 957768
auaacugaugcccaauaac

SEQ ID NO: 957770 - RNA, 19 nt, Artificial Sequence
  Description of Artificial Sequence: Synthetic oligonucleotide
  Sense strand starting at position 2862 of SEQ ID NO: 913835
augugagcucagugauaga

SEQ ID NO: 957771 - RNA, 19 nt, Artificial Sequence
  Description of Artificial Sequence: Synthetic oligonucleotide
  Antisense strand to SEQ ID NO: 957770
ucuaucacugagcucacau

SEQ ID NO: 957772 - RNA, 19 nt, Artificial Sequence
  Description of Artificial Sequence: Synthetic oligonucleotide
  Sense strand starting at position 2720 of SEQ ID NO: 913835
agcgauuucucagaaggga

SEQ ID NO: 957773 - RNA, 19 nt, Artificial Sequence
  Description of Artificial Sequence: Synthetic oligonucleotide
  Antisense strand to SEQ ID NO: 957772
ucccuucugagaaaucgcu

SEQ ID NO: 957774 - RNA, 19 nt, Artificial Sequence
  Description of Artificial Sequence: Synthetic oligonucleotide
  Sense strand starting at position 396 of SEQ ID NO: 913835
aucacucuucugugguaga

SEQ ID NO: 957775 - RNA, 19 nt, Artificial Sequence
  Description of Artificial Sequence: Synthetic oligonucleotide
  Antisense strand to SEQ ID NO: 957774
ucuaccacagaagagugau

SEQ ID NO: 957776 - RNA, 19 nt, Artificial Sequence
  Description of Artificial Sequence: Synthetic oligonucleotide
  Sense strand starting at position 3588 of SEQ ID NO: 913835
uuauguaccaggugagcaa

SEQ ID NO: 957777 - RNA, 19 nt, Artificial Sequence
  Description of Artificial Sequence: Synthetic oligonucleotide
  Antisense strand to SEQ ID NO: 957776
uugcucaccugguacauaa

SEQ ID NO: 957778 - RNA, 19 nt, Artificial Sequence
  Description of Artificial Sequence: Synthetic oligonucleotide
  Sense strand starting at position 2341 of SEQ ID NO: 913835
acuacuuccgcgggaaaga

SEQ ID NO: 957779 - RNA, 19 nt, Artificial Sequence
  Description of Artificial Sequence: Synthetic oligonucleotide
  Antisense strand to SEQ ID NO: 957778
ucuuucccgcggaaguagu

SEQ ID NO: 957780 - RNA, 19 nt, Artificial Sequence
  Description of Artificial Sequence: Synthetic oligonucleotide
  Sense strand starting at position 2481 of SEQ ID NO: 913835
ccguuucugggaggaguga

SEQ ID NO: 957781 - RNA, 19 nt, Artificial Sequence
  Description of Artificial Sequence: Synthetic oligonucleotide
  Antisense strand to SEQ ID NO: 957780
ucacuccucccagaaacgg

SEQ ID NO: 957782 - RNA, 19 nt, Artificial Sequence
  Description of Artificial Sequence: Synthetic oligonucleotide
  Sense strand starting at position 3570 of SEQ ID NO: 913835
cuuguuauugggcaucagu

SEQ ID NO: 957783 - RNA, 19 nt, Artificial Sequence
  Description of Artificial Sequence: Synthetic oligonucleotide
  Antisense strand to SEQ ID NO: 957782
acugaugcccaauaacaag

SEQ ID NO: 957784 - RNA, 19 nt, Artificial Sequence
  Description of Artificial Sequence: Synthetic oligonucleotide
  Sense strand starting at position 374 of SEQ ID NO: 913835
aguuaucagugccuacaga

SEQ ID NO: 957785 - RNA, 19 nt, Artificial Sequence
  Description of Artificial Sequence: Synthetic oligonucleotide
  Antisense strand to SEQ ID NO: 957784
ucuguaggcacugauaacu

SEQ ID NO: 957786 - RNA, 19 nt, Artificial Sequence
  Description of Artificial Sequence: Synthetic oligonucleotide
  Sense strand starting at position 891 of SEQ ID NO: 913835
auguaaucaccucggucaa

SEQ ID NO: 957787 - RNA, 19 nt, Artificial Sequence
  Description of Artificial Sequence: Synthetic oligonucleotide
  Antisense strand to SEQ ID NO: 957786
uugaccgaggugauuacau

SEQ ID NO: 957788 - RNA, 19 nt, Artificial Sequence
  Description of Artificial Sequence: Synthetic oligonucleotide
  Sense strand starting at position 3475 of SEQ ID NO: 913835
auaugauuguguuccuuug

SEQ ID NO: 957789 - RNA, 19 nt, Artificial Sequence
  Description of Artificial Sequence: Synthetic oligonucleotide
  Antisense strand to SEQ ID NO: 957788
caaaggaacacaaucauau

SEQ ID NO: 957790 - RNA, 19 nt, Artificial Sequence
  Description of Artificial Sequence: Synthetic oligonucleotide
  Sense strand starting at position 2753 of SEQ ID NO: 913835
ugauguacucaaugcgaau

SEQ ID NO: 957791 - RNA, 19 nt, Artificial Sequence
  Description of Artificial Sequence: Synthetic oligonucleotide
  Antisense strand to SEQ ID NO: 957790
auucgcauugaguacauca

SEQ ID NO: 957792 - RNA, 19 nt, Artificial Sequence
  Description of Artificial Sequence: Synthetic oligonucleotide
  Sense strand starting at position 2339 of SEQ ID NO: 913835
caacuacuuccgcgggaaa

SEQ ID NO: 957793 - RNA, 19 nt, Artificial Sequence
  Description of Artificial Sequence: Synthetic oligonucleotide
  Antisense strand to SEQ ID NO: 957792
uuucccgcggaaguaguug

SEQ ID NO: 957794 - RNA, 19 nt, Artificial Sequence
  Description of Artificial Sequence: Synthetic oligonucleotide
  Sense strand starting at position 338 of SEQ ID NO: 913835
aguaaucuuucuucugguu

SEQ ID NO: 957795 - RNA, 19 nt, Artificial Sequence
  Description of Artificial Sequence: Synthetic oligonucleotide
  Antisense strand to SEQ ID NO: 957794
aaccagaagaaagauuacu

SEQ ID NO: 957796 - RNA, 19 nt, Artificial Sequence
  Description of Artificial Sequence: Synthetic oligonucleotide
  Sense strand starting at position 2338 of SEQ ID NO: 913835
ucaacuacuuccgcgggaa

SEQ ID NO: 957797 - RNA, 19 nt, Artificial Sequence
  Description of Artificial Sequence: Synthetic oligonucleotide
  Antisense strand to SEQ ID NO: 957796
uucccgcggaaguaguuga

SEQ ID NO: 957798 - RNA, 19 nt, Artificial Sequence
  Description of Artificial Sequence: Synthetic oligonucleotide
  Sense strand starting at position 3484 of SEQ ID NO: 913835
uguuccuuuguguaacuuu

SEQ ID NO: 957799 - RNA, 19 nt, Artificial Sequence
  Description of Artificial Sequence: Synthetic oligonucleotide
  Antisense strand to SEQ ID NO: 957798
aaaguuacacaaaggaaca

SEQ ID NO: 957800 - RNA, 19 nt, Artificial Sequence
  Description of Artificial Sequence: Synthetic oligonucleotide
  Sense strand starting at position 2898 of SEQ ID NO: 913835
cgaacugauugcguggaau

SEQ ID NO: 957801 - RNA, 19 nt, Artificial Sequence
  Description of Artificial Sequence: Synthetic oligonucleotide
  Antisense strand to SEQ ID NO: 957800
auuccacgcaaucaguucg

SEQ ID NO: 957802 - RNA, 19 nt, Artificial Sequence
  Description of Artificial Sequence: Synthetic oligonucleotide
  Sense strand starting at position 501 of SEQ ID NO: 913836
cagacuuggcaauaaguua

SEQ ID NO: 957803 - RNA, 19 nt, Artificial Sequence
  Description of Artificial Sequence: Synthetic oligonucleotide
  Antisense strand to SEQ ID NO: 957802
uaacuuauugccaagucug

SEQ ID NO: 957804 - RNA, 19 nt, Artificial Sequence
  Description of Artificial Sequence: Synthetic oligonucleotide
  Sense strand starting at position 3202 of SEQ ID NO: 913836
uaaaguaagggauguuaca

SEQ ID NO: 957805 - RNA, 19 nt, Artificial Sequence
  Description of Artificial Sequence: Synthetic oligonucleotide
  Antisense strand to SEQ ID NO: 957804
uguaacaucccuuacuuua

SEQ ID NO: 957806 - RNA, 19 nt, Artificial Sequence
  Description of Artificial Sequence: Synthetic oligonucleotide
  Sense strand starting at position 3209 of SEQ ID NO: 913836
agggauguuacauaugcau

SEQ ID NO: 957807 - RNA, 19 nt, Artificial Sequence
  Description of Artificial Sequence: Synthetic oligonucleotide
  Antisense strand to SEQ ID NO: 957806
augcauauguaacaucccu

SEQ ID NO: 957808 - RNA, 19 nt, Artificial Sequence
  Description of Artificial Sequence: Synthetic oligonucleotide
  Sense strand starting at position 1352 of SEQ ID NO: 913836
cgaaguuacagucagauag

SEQ ID NO: 957809 - RNA, 19 nt, Artificial Sequence
  Description of Artificial Sequence: Synthetic oligonucleotide
  Antisense strand to SEQ ID NO: 957808
cuaucugacuguaacuucg

SEQ ID NO: 957810 - RNA, 19 nt, Artificial Sequence
  Description of Artificial Sequence: Synthetic oligonucleotide
  Sense strand starting at position 3599 of SEQ ID NO: 913836
uuccuagaguuaucaggaa

SEQ ID NO: 957811 - RNA, 19 nt, Artificial Sequence
  Description of Artificial Sequence: Synthetic oligonucleotide
  Antisense strand to SEQ ID NO: 957810
uuccugauaacucuaggaa

SEQ ID NO: 957812 - RNA, 19 nt, Artificial Sequence
  Description of Artificial Sequence: Synthetic oligonucleotide
  Sense strand starting at position 97 of SEQ ID NO: 913836
aguuaugcacaaugaaaga

SEQ ID NO: 957813 - RNA, 19 nt, Artificial Sequence
  Description of Artificial Sequence: Synthetic oligonucleotide
  Antisense strand to SEQ ID NO: 957812
ucuuucauugugcauaacu

SEQ ID NO: 957814 - RNA, 19 nt, Artificial Sequence
  Description of Artificial Sequence: Synthetic oligonucleotide
  Sense strand starting at position 1069 of SEQ ID NO: 913836
uuaaauuggccauggauaa

SEQ ID NO: 957815 - RNA, 19 nt, Artificial Sequence
  Description of Artificial Sequence: Synthetic oligonucleotide
  Antisense strand to SEQ ID NO: 957814
uuauccauggccaauuuaa

SEQ ID NO: 957816 - RNA, 19 nt, Artificial Sequence
  Description of Artificial Sequence: Synthetic oligonucleotide
  Sense strand starting at position 202 of SEQ ID NO: 913836
gccagauaauucuugagag

SEQ ID NO: 957817 - RNA, 19 nt, Artificial Sequence
  Description of Artificial Sequence: Synthetic oligonucleotide
  Antisense strand to SEQ ID NO: 957816
cucucaagaauuaucuggc

SEQ ID NO: 957818 - RNA, 19 nt, Artificial Sequence
  Description of Artificial Sequence: Synthetic oligonucleotide
  Sense strand starting at position 1066 of SEQ ID NO: 913836
gacuuaaauuggccaugga

SEQ ID NO: 957819 - RNA, 19 nt, Artificial Sequence
  Description of Artificial Sequence: Synthetic oligonucleotide
  Antisense strand to SEQ ID NO: 957818
uccauggccaauuuaaguc

SEQ ID NO: 957820 - RNA, 19 nt, Artificial Sequence
  Description of Artificial Sequence: Synthetic oligonucleotide
  Sense strand starting at position 39 of SEQ ID NO: 913836
gucagaaaucagcaaugua

SEQ ID NO: 957821 - RNA, 19 nt, Artificial Sequence
  Description of Artificial Sequence: Synthetic oligonucleotide
  Antisense strand to SEQ ID NO: 957820
uacauugcugauuucugac

SEQ ID NO: 957822 - RNA, 19 nt, Artificial Sequence
  Description of Artificial Sequence: Synthetic oligonucleotide
  Sense strand starting at position 27 of SEQ ID NO: 913836
ugaucagaaugugucagaa

SEQ ID NO: 957823 - RNA, 19 nt, Artificial Sequence
  Description of Artificial Sequence: Synthetic oligonucleotide
  Antisense strand to SEQ ID NO: 957822
uucugacacauucugauca

SEQ ID NO: 957824 - RNA, 19 nt, Artificial Sequence
  Description of Artificial Sequence: Synthetic oligonucleotide
  Sense strand starting at position 318 of SEQ ID NO: 913836
ugcaaaugucuccagacag

SEQ ID NO: 957825 - RNA, 19 nt, Artificial Sequence
  Description of Artificial Sequence: Synthetic oligonucleotide
  Antisense strand to SEQ ID NO: 957824
cugucuggagacauuugca

SEQ ID NO: 957826 - RNA, 19 nt, Artificial Sequence
  Description of Artificial Sequence: Synthetic oligonucleotide
  Sense strand starting at position 1994 of SEQ ID NO: 913836
gcgacuccuauauauggaa

SEQ ID NO: 957827 - RNA, 19 nt, Artificial Sequence
  Description of Artificial Sequence: Synthetic oligonucleotide
  Antisense strand to SEQ ID NO: 957826
uuccauauauaggagucgc

SEQ ID NO: 957828 - RNA, 19 nt, Artificial Sequence
  Description of Artificial Sequence: Synthetic oligonucleotide
  Sense strand starting at position 2146 of SEQ ID NO: 913836
uaaagaaggcuguauaguu

SEQ ID NO: 957829 - RNA, 19 nt, Artificial Sequence
  Description of Artificial Sequence: Synthetic oligonucleotide
  Antisense strand to SEQ ID NO: 957828
aacuauacagccuucuuua

SEQ ID NO: 957830 - RNA, 19 nt, Artificial Sequence
  Description of Artificial Sequence: Synthetic oligonucleotide
  Sense strand starting at position 2310 of SEQ ID NO: 913836
uaugguuuaggcuaagauu

SEQ ID NO: 957831 - RNA, 19 nt, Artificial Sequence
  Description of Artificial Sequence: Synthetic oligonucleotide
  Antisense strand to SEQ ID NO: 957830
aaucuuagccuaaaccaua

SEQ ID NO: 957832 - RNA, 19 nt, Artificial Sequence
  Description of Artificial Sequence: Synthetic oligonucleotide
  Sense strand starting at position 2813 of SEQ ID NO: 913836
acaggauuauaucuuuagu

SEQ ID NO: 957833 - RNA, 19 nt, Artificial Sequence
  Description of Artificial Sequence: Synthetic oligonucleotide
  Antisense strand to SEQ ID NO: 957832
acuaaagauauaauccugu

SEQ ID NO: 957834 - RNA, 19 nt, Artificial Sequence
  Description of Artificial Sequence: Synthetic oligonucleotide
  Sense strand starting at position 497 of SEQ ID NO: 913836
aaggcagacuuggcaauaa

SEQ ID NO: 957835 - RNA, 19 nt, Artificial Sequence
  Description of Artificial Sequence: Synthetic oligonucleotide
  Antisense strand to SEQ ID NO: 957834
uuauugccaagucugccuu

SEQ ID NO: 957836 - RNA, 19 nt, Artificial Sequence
  Description of Artificial Sequence: Synthetic oligonucleotide
  Sense strand starting at position 1510 of SEQ ID NO: 913836
uguuauacucauggaucaa

SEQ ID NO: 957837 - RNA, 19 nt, Artificial Sequence
  Description of Artificial Sequence: Synthetic oligonucleotide
  Antisense strand to SEQ ID NO: 957836
uugauccaugaguauaaca

SEQ ID NO: 957838 - RNA, 19 nt, Artificial Sequence
  Description of Artificial Sequence: Synthetic oligonucleotide
  Sense strand starting at position 1049 of SEQ ID NO: 913836
caggaacauucccuguuga

SEQ ID NO: 957839 - RNA, 19 nt, Artificial Sequence
  Description of Artificial Sequence: Synthetic oligonucleotide
  Antisense strand to SEQ ID NO: 957838
ucaacagggaauguuccug

SEQ ID NO: 957840 - RNA, 19 nt, Artificial Sequence
  Description of Artificial Sequence: Synthetic oligonucleotide
  Sense strand starting at position 2171 of SEQ ID NO: 913836
aauugaagcuccuuuggga

SEQ ID NO: 957841 - RNA, 19 nt, Artificial Sequence
  Description of Artificial Sequence: Synthetic oligonucleotide
  Antisense strand to SEQ ID NO: 957840
ucccaaaggagcuucaauu

SEQ ID NO: 957842 - RNA, 19 nt, Artificial Sequence
  Description of Artificial Sequence: Synthetic oligonucleotide
  Sense strand starting at position 3957 of SEQ ID NO: 913836
ggagaaggcuuccuaaccu

SEQ ID NO: 957843 - RNA, 19 nt, Artificial Sequence
  Description of Artificial Sequence: Synthetic oligonucleotide
  Antisense strand to SEQ ID NO: 957842
agguuaggaagccuucucc

SEQ ID NO: 957844 - RNA, 19 nt, Artificial Sequence
  Description of Artificial Sequence: Synthetic oligonucleotide
  Sense strand starting at position 3563 of SEQ ID NO: 913836
acaagaugauguguaagua

SEQ ID NO: 957845 - RNA, 19 nt, Artificial Sequence
  Description of Artificial Sequence: Synthetic oligonucleotide
  Antisense strand to SEQ ID NO: 957844
uacuuacacaucaucuugu

SEQ ID NO: 957846 - RNA, 19 nt, Artificial Sequence
  Description of Artificial Sequence: Synthetic oligonucleotide
  Sense strand starting at position 1705 of SEQ ID NO: 913836
cuuagagaguggucacaca

SEQ ID NO: 957847 - RNA, 19 nt, Artificial Sequence
  Description of Artificial Sequence: Synthetic oligonucleotide
  Antisense strand to SEQ ID NO: 957846
ugugugaccacucucuaag

SEQ ID NO: 957848 - RNA, 19 nt, Artificial Sequence
  Description of Artificial Sequence: Synthetic oligonucleotide
  Sense strand starting at position 3832 of SEQ ID NO: 913836
auacuaggaugccuuauau

SEQ ID NO: 957849 - RNA, 19 nt, Artificial Sequence
  Description of Artificial Sequence: Synthetic oligonucleotide
  Antisense strand to SEQ ID NO: 957848
auauaaggcauccuaguau

SEQ ID NO: 957850 - RNA, 19 nt, Artificial Sequence
  Description of Artificial Sequence: Synthetic oligonucleotide
  Sense strand starting at position 26 of SEQ ID NO: 913836
cugaucagaaugugucaga

SEQ ID NO: 957851 - RNA, 19 nt, Artificial Sequence
  Description of Artificial Sequence: Synthetic oligonucleotide
  Antisense strand to SEQ ID NO: 957850
ucugacacauucugaucag

SEQ ID NO: 957852 - RNA, 19 nt, Artificial Sequence
  Description of Artificial Sequence: Synthetic oligonucleotide
  Sense strand starting at position 3692 of SEQ ID NO: 913836
gggagacgaucuguuacac

SEQ ID NO: 957853 - RNA, 19 nt, Artificial Sequence
  Description of Artificial Sequence: Synthetic oligonucleotide
  Antisense strand to SEQ ID NO: 957852
guguaacagaucgucuccc

SEQ ID NO: 957854 - RNA, 19 nt, Artificial Sequence
  Description of Artificial Sequence: Synthetic oligonucleotide
  Sense strand starting at position 2074 of SEQ ID NO: 913836
gucuucuuaccuggaggaa

SEQ ID NO: 957855 - RNA, 19 nt, Artificial Sequence
  Description of Artificial Sequence: Synthetic oligonucleotide
  Antisense strand to SEQ ID NO: 957854
uuccuccagguaagaagac

SEQ ID NO: 957856 - RNA, 19 nt, Artificial Sequence
  Description of Artificial Sequence: Synthetic oligonucleotide
  Sense strand starting at position 1602 of SEQ ID NO: 913836
caguauaggcuuggaauga

SEQ ID NO: 957857 - RNA, 19 nt, Artificial Sequence
  Description of Artificial Sequence: Synthetic oligonucleotide
  Antisense strand to SEQ ID NO: 957856
ucauuccaagccuauacug

SEQ ID NO: 957858 - RNA, 19 nt, Artificial Sequence
  Description of Artificial Sequence: Synthetic oligonucleotide
  Sense strand starting at position 2815 of SEQ ID NO: 913836
aggauuauaucuuuaguuc

SEQ ID NO: 957859 - RNA, 19 nt, Artificial Sequence
  Description of Artificial Sequence: Synthetic oligonucleotide
  Antisense strand to SEQ ID NO: 957858
gaacuaaagauauaauccu

SEQ ID NO: 957860 - RNA, 19 nt, Artificial Sequence
  Description of Artificial Sequence: Synthetic oligonucleotide
  Sense strand starting at position 42 of SEQ ID NO: 913836
agaaaucagcaauguaucu

SEQ ID NO: 957861 - RNA, 19 nt, Artificial Sequence
  Description of Artificial Sequence: Synthetic oligonucleotide
  Antisense strand to SEQ ID NO: 957860
agauacauugcugauuucu

SEQ ID NO: 957862 - RNA, 19 nt, Artificial Sequence
  Description of Artificial Sequence: Synthetic oligonucleotide
  Sense strand starting at position 554 of SEQ ID NO: 913836
acuauagaagucuguacau

SEQ ID NO: 957863 - RNA, 19 nt, Artificial Sequence
  Description of Artificial Sequence: Synthetic oligonucleotide
  Antisense strand to SEQ ID NO: 957862
auguacagacuucuauagu

SEQ ID NO: 957864 - RNA, 19 nt, Artificial Sequence
  Description of Artificial Sequence: Synthetic oligonucleotide
  Sense strand starting at position 2073 of SEQ ID NO: 913836
ggucuucuuaccuggagga

SEQ ID NO: 957865 - RNA, 19 nt, Artificial Sequence
  Description of Artificial Sequence: Synthetic oligonucleotide
  Antisense strand to SEQ ID NO: 957864
uccuccagguaagaagacc

SEQ ID NO: 957866 - RNA, 19 nt, Artificial Sequence
  Description of Artificial Sequence: Synthetic oligonucleotide
  Sense strand starting at position 1671 of SEQ ID NO: 913836
cacagacuccgaugugaac

SEQ ID NO: 957867 - RNA, 19 nt, Artificial Sequence
  Description of Artificial Sequence: Synthetic oligonucleotide
  Antisense strand to SEQ ID NO: 957866
guucacaucggagucugug

SEQ ID NO: 957868 - RNA, 19 nt, Artificial Sequence
  Description of Artificial Sequence: Synthetic oligonucleotide
  Sense strand starting at position 308 of SEQ ID NO: 913836
uugugauaacugcaaaugu

SEQ ID NO: 957869 - RNA, 19 nt, Artificial Sequence
  Description of Artificial Sequence: Synthetic oligonucleotide
  Antisense strand to SEQ ID NO: 957868
acauuugcaguuaucacaa

SEQ ID NO: 957870 - RNA, 19 nt, Artificial Sequence
  Description of Artificial Sequence: Synthetic oligonucleotide
  Sense strand starting at position 113 of SEQ ID NO: 913836
agaggcuauuuacauugaa

SEQ ID NO: 957871 - RNA, 19 nt, Artificial Sequence
  Description of Artificial Sequence: Synthetic oligonucleotide
  Antisense strand to SEQ ID NO: 957870
uucaauguaaauagccucu

SEQ ID NO: 957872 - RNA, 19 nt, Artificial Sequence
  Description of Artificial Sequence: Synthetic oligonucleotide
  Sense strand starting at position 1477 of SEQ ID NO: 913836
ggguaugcccauuauccua

SEQ ID NO: 957873 - RNA, 19 nt, Artificial Sequence
  Description of Artificial Sequence: Synthetic oligonucleotide
  Antisense strand to SEQ ID NO: 957872
uaggauaaugggcauaccc

SEQ ID NO: 957874 - RNA, 19 nt, Artificial Sequence
  Description of Artificial Sequence: Synthetic oligonucleotide
  Sense strand starting at position 3211 of SEQ ID NO: 913836
ggauguuacauaugcauag

SEQ ID NO: 957875 - RNA, 19 nt, Artificial Sequence
  Description of Artificial Sequence: Synthetic oligonucleotide
  Antisense strand to SEQ ID NO: 957874
cuaugcauauguaacaucc

SEQ ID NO: 957876 - RNA, 19 nt, Artificial Sequence
  Description of Artificial Sequence: Synthetic oligonucleotide
  Sense strand starting at position 1316 of SEQ ID NO: 913836
ucugaagagcucugguaaa

SEQ ID NO: 957877 - RNA, 19 nt, Artificial Sequence
  Description of Artificial Sequence: Synthetic oligonucleotide
  Antisense strand to SEQ ID NO: 957876
uuuaccagagcucuucaga

SEQ ID NO: 957878 - RNA, 19 nt, Artificial Sequence
  Description of Artificial Sequence: Synthetic oligonucleotide
  Sense strand starting at position 3466 of SEQ ID NO: 913836
ggcaauaugagcuaauguu

SEQ ID NO: 957879 - RNA, 19 nt, Artificial Sequence
  Description of Artificial Sequence: Synthetic oligonucleotide
  Antisense strand to SEQ ID NO: 957878
aacauuagcucauauugcc

SEQ ID NO: 957880 - RNA, 19 nt, Artificial Sequence
  Description of Artificial Sequence: Synthetic oligonucleotide
  Sense strand starting at position 3263 of SEQ ID NO: 913836
agugcuuaggcacaagacu

SEQ ID NO: 957881 - RNA, 19 nt, Artificial Sequence
  Description of Artificial Sequence: Synthetic oligonucleotide
  Antisense strand to SEQ ID NO: 957880
agucuugugccuaagcacu

SEQ ID NO: 957882 - RNA, 19 nt, Artificial Sequence
  Description of Artificial Sequence: Synthetic oligonucleotide
  Sense strand starting at position 808 of SEQ ID NO: 913837
ucccuaaggcucuaagaau

SEQ ID NO: 957883 - RNA, 19 nt, Artificial Sequence
  Description of Artificial Sequence: Synthetic oligonucleotide
  Antisense strand to SEQ ID NO: 957882
auucuuagagccuuaggga

SEQ ID NO: 957884 - RNA, 19 nt, Artificial Sequence
  Description of Artificial Sequence: Synthetic oligonucleotide
  Sense strand starting at position 3256 of SEQ ID NO: 913837
ggcagcugucugcuuuaau

SEQ ID NO: 957885 - RNA, 19 nt, Artificial Sequence
  Description of Artificial Sequence: Synthetic oligonucleotide
  Antisense strand to SEQ ID NO: 957884
auuaaagcagacagcugcc

SEQ ID NO: 957886 - RNA, 19 nt, Artificial Sequence
  Description of Artificial Sequence: Synthetic oligonucleotide
  Sense strand starting at position 199 of SEQ ID NO: 913837
gcauuaagacaugagucua

SEQ ID NO: 957887 - RNA, 19 nt, Artificial Sequence
  Description of Artificial Sequence: Synthetic oligonucleotide
  Antisense strand to SEQ ID NO: 957886
uagacucaugucuuaaugc

SEQ ID NO: 957888 - RNA, 19 nt, Artificial Sequence
  Description of Artificial Sequence: Synthetic oligonucleotide
  Sense strand starting at position 81 of SEQ ID NO: 913837
ucuguuagucaggaaacca

SEQ ID NO: 957889 - RNA, 19 nt, Artificial Sequence
  Description of Artificial Sequence: Synthetic oligonucleotide
  Antisense strand to SEQ ID NO: 957888
ugguuuccugacuaacaga

SEQ ID NO: 957890 - RNA, 19 nt, Artificial Sequence
  Description of Artificial Sequence: Synthetic oligonucleotide
  Sense strand starting at position 2446 of SEQ ID NO: 913837
cugaaagcuggugauccaa

SEQ ID NO: 957891 - RNA, 19 nt, Artificial Sequence
  Description of Artificial Sequence: Synthetic oligonucleotide
  Antisense strand to SEQ ID NO: 957890
uuggaucaccagcuuucag

SEQ ID NO: 957892 - RNA, 19 nt, Artificial Sequence
  Description of Artificial Sequence: Synthetic oligonucleotide
  Sense strand starting at position 1590 of SEQ ID NO: 913837
ggaauucugagaugccaga

SEQ ID NO: 957893 - RNA, 19 nt, Artificial Sequence
  Description of Artificial Sequence: Synthetic oligonucleotide
  Antisense strand to SEQ ID NO: 957892
ucuggcaucucagaauucc

SEQ ID NO: 957894 - RNA, 19 nt, Artificial Sequence
  Description of Artificial Sequence: Synthetic oligonucleotide
  Sense strand starting at position 604 of SEQ ID NO: 913837
augacauaccaugguuaca

SEQ ID NO: 957895 - RNA, 19 nt, Artificial Sequence
  Description of Artificial Sequence: Synthetic oligonucleotide
  Antisense strand to SEQ ID NO: 957894
uguaaccaugguaugucau

SEQ ID NO: 957896 - RNA, 19 nt, Artificial Sequence
  Description of Artificial Sequence: Synthetic oligonucleotide
  Sense strand starting at position 2264 of SEQ ID NO: 913837
ggcuuaugccuguuagcuu

SEQ ID NO: 957897 - RNA, 19 nt, Artificial Sequence
  Description of Artificial Sequence: Synthetic oligonucleotide
  Antisense strand to SEQ ID NO: 957896
aagcuaacaggcauaagcc

SEQ ID NO: 957898 - RNA, 19 nt, Artificial Sequence
  Description of Artificial Sequence: Synthetic oligonucleotide
  Sense strand starting at position 2263 of SEQ ID NO: 913837
uggcuuaugccuguuagcu

SEQ ID NO: 957899 - RNA, 19 nt, Artificial Sequence
  Description of Artificial Sequence: Synthetic oligonucleotide
  Antisense strand to SEQ ID NO: 957898
agcuaacaggcauaagcca

SEQ ID NO: 957900 - RNA, 19 nt, Artificial Sequence
  Description of Artificial Sequence: Synthetic oligonucleotide
  Sense strand starting at position 3155 of SEQ ID NO: 913837
ccuugugaacaaggauauc

SEQ ID NO: 957901 - RNA, 19 nt, Artificial Sequence
  Description of Artificial Sequence: Synthetic oligonucleotide
  Antisense strand to SEQ ID NO: 957900
gauauccuuguucacaagg

SEQ ID NO: 957902 - RNA, 19 nt, Artificial Sequence
  Description of Artificial Sequence: Synthetic oligonucleotide
  Sense strand starting at position 507 of SEQ ID NO: 913837
agagaaaucacauggccga

SEQ ID NO: 957903 - RNA, 19 nt, Artificial Sequence
  Description of Artificial Sequence: Synthetic oligonucleotide
  Antisense strand to SEQ ID NO: 957902
ucggccaugugauuucucu

SEQ ID NO: 957904 - RNA, 19 nt, Artificial Sequence
  Description of Artificial Sequence: Synthetic oligonucleotide
  Sense strand starting at position 378 of SEQ ID NO: 913837
gaugaugagagaugugguu

SEQ ID NO: 957905 - RNA, 19 nt, Artificial Sequence
  Description of Artificial Sequence: Synthetic oligonucleotide
  Antisense strand to SEQ ID NO: 957904
aaccacaucucucaucauc

SEQ ID NO: 957906 - RNA, 19 nt, Artificial Sequence
  Description of Artificial Sequence: Synthetic oligonucleotide
  Sense strand starting at position 471 of SEQ ID NO: 913837
accacagacauguggguaa

SEQ ID NO: 957907 - RNA, 19 nt, Artificial Sequence
  Description of Artificial Sequence: Synthetic oligonucleotide
  Antisense strand to SEQ ID NO: 957906
uuacccacaugucuguggu

SEQ ID NO: 957908 - RNA, 19 nt, Artificial Sequence
  Description of Artificial Sequence: Synthetic oligonucleotide
  Sense strand starting at position 1963 of SEQ ID NO: 913837
agggaagguuaaucucagu

SEQ ID NO: 957909 - RNA, 19 nt, Artificial Sequence
  Description of Artificial Sequence: Synthetic oligonucleotide
  Antisense strand to SEQ ID NO: 957908
acugagauuaaccuucccu

SEQ ID NO: 957910 - RNA, 19 nt, Artificial Sequence
  Description of Artificial Sequence: Synthetic oligonucleotide
  Sense strand starting at position 450 of SEQ ID NO: 913837
gagacuauuggccaucagu

SEQ ID NO: 957911 - RNA, 19 nt, Artificial Sequence
  Description of Artificial Sequence: Synthetic oligonucleotide
  Antisense strand to SEQ ID NO: 957910
acugauggccaauagucuc

SEQ ID NO: 957912 - RNA, 19 nt, Artificial Sequence
  Description of Artificial Sequence: Synthetic oligonucleotide
  Sense strand starting at position 1632 of SEQ ID NO: 913837
ugaguuacaguauaguuga

SEQ ID NO: 957913 - RNA, 19 nt, Artificial Sequence
  Description of Artificial Sequence: Synthetic oligonucleotide
  Antisense strand to SEQ ID NO: 957912
ucaacuauacuguaacuca

SEQ ID NO: 957914 - RNA, 19 nt, Artificial Sequence
  Description of Artificial Sequence: Synthetic oligonucleotide
  Sense strand starting at position 1696 of SEQ ID NO: 913837
caguuuccucuggaaggua

SEQ ID NO: 957915 - RNA, 19 nt, Artificial Sequence
  Description of Artificial Sequence: Synthetic oligonucleotide
  Antisense strand to SEQ ID NO: 957914
uaccuuccagaggaaacug

SEQ ID NO: 957916 - RNA, 19 nt, Artificial Sequence
  Description of Artificial Sequence: Synthetic oligonucleotide
  Sense strand starting at position 2026 of SEQ ID NO: 913837
gggugcaggcuauauagaa

SEQ ID NO: 957917 - RNA, 19 nt, Artificial Sequence
  Description of Artificial Sequence: Synthetic oligonucleotide
  Antisense strand to SEQ ID NO: 957916
uucuauauagccugcaccc

SEQ ID NO: 957918 - RNA, 19 nt, Artificial Sequence
  Description of Artificial Sequence: Synthetic oligonucleotide
  Sense strand starting at position 867 of SEQ ID NO: 913837
gguaucuuccuuugaagga

SEQ ID NO: 957919 - RNA, 19 nt, Artificial Sequence
  Description of Artificial Sequence: Synthetic oligonucleotide
  Antisense strand to SEQ ID NO: 957918
uccuucaaaggaagauacc

SEQ ID NO: 957920 - RNA, 19 nt, Artificial Sequence
  Description of Artificial Sequence: Synthetic oligonucleotide
  Sense strand starting at position 1669 of SEQ ID NO: 913837
ggacaucagucuccucaua

SEQ ID NO: 957921 - RNA, 19 nt, Artificial Sequence
  Description of Artificial Sequence: Synthetic oligonucleotide
  Antisense strand to SEQ ID NO: 957920
uaugaggagacugaugucc

SEQ ID NO: 957922 - RNA, 19 nt, Artificial Sequence
  Description of Artificial Sequence: Synthetic oligonucleotide
  Sense strand starting at position 280 of SEQ ID NO: 913837
aaaugauaaugugcucuga

SEQ ID NO: 957923 - RNA, 19 nt, Artificial Sequence
  Description of Artificial Sequence: Synthetic oligonucleotide
  Antisense strand to SEQ ID NO: 957922
ucagagcacauuaucauuu

SEQ ID NO: 957924 - RNA, 19 nt, Artificial Sequence
  Description of Artificial Sequence: Synthetic oligonucleotide
  Sense strand starting at position 78 of SEQ ID NO: 913837
uguucuguuagucaggaaa

SEQ ID NO: 957925 - RNA, 19 nt, Artificial Sequence
  Description of Artificial Sequence: Synthetic oligonucleotide
  Antisense strand to SEQ ID NO: 957924
uuuccugacuaacagaaca

SEQ ID NO: 957926 - RNA, 19 nt, Artificial Sequence
  Description of Artificial Sequence: Synthetic oligonucleotide
  Sense strand starting at position 896 of SEQ ID NO: 913837
gggcaccucuuaccagaua

SEQ ID NO: 957927 - RNA, 19 nt, Artificial Sequence
  Description of Artificial Sequence: Synthetic oligonucleotide
  Antisense strand to SEQ ID NO: 957926
uaucugguaagaggugccc

SEQ ID NO: 957928 - RNA, 19 nt, Artificial Sequence
  Description of Artificial Sequence: Synthetic oligonucleotide
  Sense strand starting at position 1867 of SEQ ID NO: 913837
cacaguuucugaguaagac

SEQ ID NO: 957929 - RNA, 19 nt, Artificial Sequence
  Description of Artificial Sequence: Synthetic oligonucleotide
  Antisense strand to SEQ ID NO: 957928
gucuuacucagaaacugug

SEQ ID NO: 957930 - RNA, 19 nt, Artificial Sequence
  Description of Artificial Sequence: Synthetic oligonucleotide
  Sense strand starting at position 1968 of SEQ ID NO: 913837
agguuaaucucaguuaaug

SEQ ID NO: 957931 - RNA, 19 nt, Artificial Sequence
  Description of Artificial Sequence: Synthetic oligonucleotide
  Antisense strand to SEQ ID NO: 957930
cauuaacugagauuaaccu

SEQ ID NO: 957932 - RNA, 19 nt, Artificial Sequence
  Description of Artificial Sequence: Synthetic oligonucleotide
  Sense strand starting at position 109 of SEQ ID NO: 913837
ugaguugcccauuauccaa

SEQ ID NO: 957933 - RNA, 19 nt, Artificial Sequence
  Description of Artificial Sequence: Synthetic oligonucleotide
  Antisense strand to SEQ ID NO: 957932
uuggauaaugggcaacuca

SEQ ID NO: 957934 - RNA, 19 nt, Artificial Sequence
  Description of Artificial Sequence: Synthetic oligonucleotide
  Sense strand starting at position 17 of SEQ ID NO: 913837
uuugucuuuggagagguuu

SEQ ID NO: 957935 - RNA, 19 nt, Artificial Sequence
  Description of Artificial Sequence: Synthetic oligonucleotide
  Antisense strand to SEQ ID NO: 957934
aaaccucuccaaagacaaa

SEQ ID NO: 957936 - RNA, 19 nt, Artificial Sequence
  Description of Artificial Sequence: Synthetic oligonucleotide
  Sense strand starting at position 1635 of SEQ ID NO: 913837
guuacaguauaguugagaa

SEQ ID NO: 957937 - RNA, 19 nt, Artificial Sequence
  Description of Artificial Sequence: Synthetic oligonucleotide
  Antisense strand to SEQ ID NO: 957936
uucucaacuauacuguaac

SEQ ID NO: 957938 - RNA, 19 nt, Artificial Sequence
  Description of Artificial Sequence: Synthetic oligonucleotide
  Sense strand starting at position 196 of SEQ ID NO: 913837
cucgcauuaagacaugagu

SEQ ID NO: 957939 - RNA, 19 nt, Artificial Sequence
  Description of Artificial Sequence: Synthetic oligonucleotide
  Antisense strand to SEQ ID NO: 957938
acucaugucuuaaugcgag

SEQ ID NO: 957940 - RNA, 19 nt, Artificial Sequence
  Description of Artificial Sequence: Synthetic oligonucleotide
  Sense strand starting at position 865 of SEQ ID NO: 913837
uggguaucuuccuuugaag

SEQ ID NO: 957941 - RNA, 19 nt, Artificial Sequence
  Description of Artificial Sequence: Synthetic oligonucleotide
  Antisense strand to SEQ ID NO: 957940
cuucaaaggaagauaccca

SEQ ID NO: 957942 - RNA, 19 nt, Artificial Sequence
  Description of Artificial Sequence: Synthetic oligonucleotide
  Sense strand starting at position 1929 of SEQ ID NO: 913837
gggacaugguccucaccuu

SEQ ID NO: 957943 - RNA, 19 nt, Artificial Sequence
  Description of Artificial Sequence: Synthetic oligonucleotide
  Antisense strand to SEQ ID NO: 957942
aaggugaggaccauguccc

SEQ ID NO: 957944 - RNA, 19 nt, Artificial Sequence
  Description of Artificial Sequence: Synthetic oligonucleotide
  Sense strand starting at position 3619 of SEQ ID NO: 913837
ucaguaccuugaucacuua

SEQ ID NO: 957945 - RNA, 19 nt, Artificial Sequence
  Description of Artificial Sequence: Synthetic oligonucleotide
  Antisense strand to SEQ ID NO: 957944
uaagugaucaagguacuga

SEQ ID NO: 957946 - RNA, 19 nt, Artificial Sequence
  Description of Artificial Sequence: Synthetic oligonucleotide
  Sense strand starting at position 1940 of SEQ ID NO: 913837
cucaccuuggugugagaaa

SEQ ID NO: 957947 - RNA, 19 nt, Artificial Sequence
  Description of Artificial Sequence: Synthetic oligonucleotide
  Antisense strand to SEQ ID NO: 957946
uuucucacaccaaggugag

SEQ ID NO: 957948 - RNA, 19 nt, Artificial Sequence
  Description of Artificial Sequence: Synthetic oligonucleotide
  Sense strand starting at position 2086 of SEQ ID NO: 913837
aguaaacauuccuugugac

SEQ ID NO: 957949 - RNA, 19 nt, Artificial Sequence
  Description of Artificial Sequence: Synthetic oligonucleotide
  Antisense strand to SEQ ID NO: 957948
gucacaaggaauguuuacu

SEQ ID NO: 957950 - RNA, 19 nt, Artificial Sequence
  Description of Artificial Sequence: Synthetic oligonucleotide
  Sense strand starting at position 3835 of SEQ ID NO: 913837
uugugcuaucaucaccaca

SEQ ID NO: 957951 - RNA, 19 nt, Artificial Sequence
  Description of Artificial Sequence: Synthetic oligonucleotide
  Antisense strand to SEQ ID NO: 957950
uguggugaugauagcacaa

SEQ ID NO: 957952 - RNA, 19 nt, Artificial Sequence
  Description of Artificial Sequence: Synthetic oligonucleotide
  Sense strand starting at position 2087 of SEQ ID NO: 913837
guaaacauuccuugugaca

SEQ ID NO: 957953 - RNA, 19 nt, Artificial Sequence
  Description of Artificial Sequence: Synthetic oligonucleotide
  Antisense strand to SEQ ID NO: 957952
ugucacaaggaauguuuac

SEQ ID NO: 957954 - RNA, 19 nt, Artificial Sequence
  Description of Artificial Sequence: Synthetic oligonucleotide
  Sense strand starting at position 864 of SEQ ID NO: 913837
uuggguaucuuccuuugaa

SEQ ID NO: 957955 - RNA, 19 nt, Artificial Sequence
  Description of Artificial Sequence: Synthetic oligonucleotide
  Antisense strand to SEQ ID NO: 957954
uucaaaggaagauacccaa

SEQ ID NO: 957956 - RNA, 19 nt, Artificial Sequence
  Description of Artificial Sequence: Synthetic oligonucleotide
  Sense strand starting at position 448 of SEQ ID NO: 913837
gugagacuauuggccauca

SEQ ID NO: 957957 - RNA, 19 nt, Artificial Sequence
  Description of Artificial Sequence: Synthetic oligonucleotide
  Antisense strand to SEQ ID NO: 957956
ugauggccaauagucucac

SEQ ID NO: 957958 - RNA, 19 nt, Artificial Sequence
  Description of Artificial Sequence: Synthetic oligonucleotide
  Sense strand starting at position 543 of SEQ ID NO: 913837
uaaauugacggcuauguuu

SEQ ID NO: 957959 - RNA, 19 nt, Artificial Sequence
  Description of Artificial Sequence: Synthetic oligonucleotide
  Antisense strand to SEQ ID NO: 957958
aaacauagccgucaauuua

SEQ ID NO: 957960 - RNA, 19 nt, Artificial Sequence
  Description of Artificial Sequence: Synthetic oligonucleotide
  Sense strand starting at position 3622 of SEQ ID NO: 913837
guaccuugaucacuuauuc

SEQ ID NO: 957961 - RNA, 19 nt, Artificial Sequence
  Description of Artificial Sequence: Synthetic oligonucleotide
  Antisense strand to SEQ ID NO: 957960
gaauaagugaucaagguac

SEQ ID NO: 957962 - RNA, 19 nt, Artificial Sequence
  Description of Artificial Sequence: Synthetic oligonucleotide
  Sense strand starting at position 2569 of SEQ ID NO: 913838
aggccucuuuauguauuua

SEQ ID NO: 957963 - RNA, 19 nt, Artificial Sequence
  Description of Artificial Sequence: Synthetic oligonucleotide
  Antisense strand to SEQ ID NO: 957962
uaaauacauaaagaggccu

SEQ ID NO: 957964 - RNA, 19 nt, Artificial Sequence
  Description of Artificial Sequence: Synthetic oligonucleotide
  Sense strand starting at position 1064 of SEQ ID NO: 913838
cuguguuagcuuucuaugu

SEQ ID NO: 957965 - RNA, 19 nt, Artificial Sequence
  Description of Artificial Sequence: Synthetic oligonucleotide
  Antisense strand to SEQ ID NO: 957964
acauagaaagcuaacacag

SEQ ID NO: 957966 - RNA, 19 nt, Artificial Sequence
  Description of Artificial Sequence: Synthetic oligonucleotide
  Sense strand starting at position 2780 of SEQ ID NO: 913838
aucccuuugguauaagauc

SEQ ID NO: 957967 - RNA, 19 nt, Artificial Sequence
  Description of Artificial Sequence: Synthetic oligonucleotide
  Antisense strand to SEQ ID NO: 957966
gaucuuauaccaaagggau

SEQ ID NO: 957968 - RNA, 19 nt, Artificial Sequence
  Description of Artificial Sequence: Synthetic oligonucleotide
  Sense strand starting at position 2956 of SEQ ID NO: 913838
ccuauauuggcucaggaau

SEQ ID NO: 957969 - RNA, 19 nt, Artificial Sequence
  Description of Artificial Sequence: Synthetic oligonucleotide
  Antisense strand to SEQ ID NO: 957968
auuccugagccaauauagg

SEQ ID NO: 957970 - RNA, 19 nt, Artificial Sequence
  Description of Artificial Sequence: Synthetic oligonucleotide
  Sense strand starting at position 3849 of SEQ ID NO: 913838
ggagaaggauucucuguau

SEQ ID NO: 957971 - RNA, 19 nt, Artificial Sequence
  Description of Artificial Sequence: Synthetic oligonucleotide
  Antisense strand to SEQ ID NO: 957970
auacagagaauccuucucc

SEQ ID NO: 957972 - RNA, 19 nt, Artificial Sequence
  Description of Artificial Sequence: Synthetic oligonucleotide
  Sense strand starting at position 1527 of SEQ ID NO: 913838
cugcucgugccuuuaaacu

SEQ ID NO: 957973 - RNA, 19 nt, Artificial Sequence
  Description of Artificial Sequence: Synthetic oligonucleotide
  Antisense strand to SEQ ID NO: 957972
aguuuaaaggcacgagcag

SEQ ID NO: 957974 - RNA, 19 nt, Artificial Sequence
  Description of Artificial Sequence: Synthetic oligonucleotide
  Sense strand starting at position 3744 of SEQ ID NO: 913838
ugccgauagcgcucacaca

SEQ ID NO: 957975 - RNA, 19 nt, Artificial Sequence
  Description of Artificial Sequence: Synthetic oligonucleotide
  Antisense strand to SEQ ID NO: 957974
ugugugagcgcuaucggca

SEQ ID NO: 957976 - RNA, 19 nt, Artificial Sequence
  Description of Artificial Sequence: Synthetic oligonucleotide
  Sense strand starting at position 2987 of SEQ ID NO: 913838
auuucugagagcugcuagu

SEQ ID NO: 957977 - RNA, 19 nt, Artificial Sequence
  Description of Artificial Sequence: Synthetic oligonucleotide
  Antisense strand to SEQ ID NO: 957976
acuagcagcucucagaaau

SEQ ID NO: 957978 - RNA, 19 nt, Artificial Sequence
  Description of Artificial Sequence: Synthetic oligonucleotide
  Sense strand starting at position 3483 of SEQ ID NO: 913838
gcagaaauuccuugacuaa

SEQ ID NO: 957979 - RNA, 19 nt, Artificial Sequence
  Description of Artificial Sequence: Synthetic oligonucleotide
  Antisense strand to SEQ ID NO: 957978
uuagucaaggaauuucugc

SEQ ID NO: 957980 - RNA, 19 nt, Artificial Sequence
  Description of Artificial Sequence: Synthetic oligonucleotide
  Sense strand starting at position 3474 of SEQ ID NO: 913838
agccauuaugcagaaauuc

SEQ ID NO: 957981 - RNA, 19 nt, Artificial Sequence
  Description of Artificial Sequence: Synthetic oligonucleotide
  Antisense strand to SEQ ID NO: 957980
gaauuucugcauaauggcu

SEQ ID NO: 957982 - RNA, 19 nt, Artificial Sequence
  Description of Artificial Sequence: Synthetic oligonucleotide
  Sense strand starting at position 3604 of SEQ ID NO: 913838
gcaaaccuuccuuaaguga

SEQ ID NO: 957983 - RNA, 19 nt, Artificial Sequence
  Description of Artificial Sequence: Synthetic oligonucleotide
  Antisense strand to SEQ ID NO: 957982
ucacuuaaggaagguuugc

SEQ ID NO: 957984 - RNA, 19 nt, Artificial Sequence
  Description of Artificial Sequence: Synthetic oligonucleotide
  Sense strand starting at position 3482 of SEQ ID NO: 913838
ugcagaaauuccuugacua

SEQ ID NO: 957985 - RNA, 19 nt, Artificial Sequence
  Description of Artificial Sequence: Synthetic oligonucleotide
  Antisense strand to SEQ ID NO: 957984
uagucaaggaauuucugca

SEQ ID NO: 957986 - RNA, 19 nt, Artificial Sequence
  Description of Artificial Sequence: Synthetic oligonucleotide
  Sense strand starting at position 1406 of SEQ ID NO: 913838
ucaggcucugucgaagaaa

SEQ ID NO: 957987 - RNA, 19 nt, Artificial Sequence
  Description of Artificial Sequence: Synthetic oligonucleotide
  Antisense strand to SEQ ID NO: 957986
uuucuucgacagagccuga

SEQ ID NO: 957988 - RNA, 19 nt, Artificial Sequence
  Description of Artificial Sequence: Synthetic oligonucleotide
  Sense strand starting at position 3320 of SEQ ID NO: 913838
cagugaugagccgagaucu

SEQ ID NO: 957989 - RNA, 19 nt, Artificial Sequence
  Description of Artificial Sequence: Synthetic oligonucleotide
  Antisense strand to SEQ ID NO: 957988
agaucucggcucaucacug

SEQ ID NO: 957990 - RNA, 19 nt, Artificial Sequence
  Description of Artificial Sequence: Synthetic oligonucleotide
  Sense strand starting at position 427 of SEQ ID NO: 913838
gaugucaagugauccauca

SEQ ID NO: 957991 - RNA, 19 nt, Artificial Sequence
  Description of Artificial Sequence: Synthetic oligonucleotide
  Antisense strand to SEQ ID NO: 957990
ugauggaucacuugacauc

SEQ ID NO: 957992 - RNA, 19 nt, Artificial Sequence
  Description of Artificial Sequence: Synthetic oligonucleotide
  Sense strand starting at position 183 of SEQ ID NO: 913838
uaauuacagugauuauggu

SEQ ID NO: 957993 - RNA, 19 nt, Artificial Sequence
  Description of Artificial Sequence: Synthetic oligonucleotide
  Antisense strand to SEQ ID NO: 957992
accauaaucacuguaauua

SEQ ID NO: 957994 - RNA, 19 nt, Artificial Sequence
  Description of Artificial Sequence: Synthetic oligonucleotide
  Sense strand starting at position 2370 of SEQ ID NO: 913838
ggaagugacuuaucucucu

SEQ ID NO: 957995 - RNA, 19 nt, Artificial Sequence
  Description of Artificial Sequence: Synthetic oligonucleotide
  Antisense strand to SEQ ID NO: 957994
agagagauaagucacuucc

SEQ ID NO: 957996 - RNA, 19 nt, Artificial Sequence
  Description of Artificial Sequence: Synthetic oligonucleotide
  Sense strand starting at position 2098 of SEQ ID NO: 913838
auugguuuacgucauugga

SEQ ID NO: 957997 - RNA, 19 nt, Artificial Sequence
  Description of Artificial Sequence: Synthetic oligonucleotide
  Antisense strand to SEQ ID NO: 957996
uccaaugacguaaaccaau

SEQ ID NO: 957998 - RNA, 19 nt, Artificial Sequence
  Description of Artificial Sequence: Synthetic oligonucleotide
  Sense strand starting at position 33 of SEQ ID NO: 913838
agcguagcuaauuaagaca

SEQ ID NO: 957999 - RNA, 19 nt, Artificial Sequence
  Description of Artificial Sequence: Synthetic oligonucleotide
  Antisense strand to SEQ ID NO: 957998
ugucuuaauuagcuacgcu

SEQ ID NO: 958000 - RNA, 19 nt, Artificial Sequence
  Description of Artificial Sequence: Synthetic oligonucleotide
  Sense strand starting at position 3505 of SEQ ID NO: 913838
ugaucaguacucugaaguu

SEQ ID NO: 958001 - RNA, 19 nt, Artificial Sequence
  Description of Artificial Sequence: Synthetic oligonucleotide
  Antisense strand to SEQ ID NO: 958000
aacuucagaguacugauca

SEQ ID NO: 958002 - RNA, 19 nt, Artificial Sequence
  Description of Artificial Sequence: Synthetic oligonucleotide
  Sense strand starting at position 3471 of SEQ ID NO: 913838
cuuagccauuaugcagaaa

SEQ ID NO: 958003 - RNA, 19 nt, Artificial Sequence
  Description of Artificial Sequence: Synthetic oligonucleotide
  Antisense strand to SEQ ID NO: 958002
uuucugcauaauggcuaag

SEQ ID NO: 958004 - RNA, 19 nt, Artificial Sequence
  Description of Artificial Sequence: Synthetic oligonucleotide
  Sense strand starting at position 1566 of SEQ ID NO: 913838
ggaaaugugauccgagcca

SEQ ID NO: 958005 - RNA, 19 nt, Artificial Sequence
  Description of Artificial Sequence: Synthetic oligonucleotide
  Antisense strand to SEQ ID NO: 958004
uggcucggaucacauuucc

SEQ ID NO: 958006 - RNA, 19 nt, Artificial Sequence
  Description of Artificial Sequence: Synthetic oligonucleotide
  Sense strand starting at position 2464 of SEQ ID NO: 913838
aguaauuccuguuccauag

SEQ ID NO: 958007 - RNA, 19 nt, Artificial Sequence
  Description of Artificial Sequence: Synthetic oligonucleotide
  Antisense strand to SEQ ID NO: 958006
cuauggaacaggaauuacu

SEQ ID NO: 958008 - RNA, 19 nt, Artificial Sequence
  Description of Artificial Sequence: Synthetic oligonucleotide
  Sense strand starting at position 2375 of SEQ ID NO: 913838
ugacuuaucucucugaguu

SEQ ID NO: 958009 - RNA, 19 nt, Artificial Sequence
  Description of Artificial Sequence: Synthetic oligonucleotide
  Antisense strand to SEQ ID NO: 958008
aacucagagagauaaguca

SEQ ID NO: 958010 - RNA, 19 nt, Artificial Sequence
  Description of Artificial Sequence: Synthetic oligonucleotide
  Sense strand starting at position 2933 of SEQ ID NO: 913838
ugagcucagcccuauuacu

SEQ ID NO: 958011 - RNA, 19 nt, Artificial Sequence
  Description of Artificial Sequence: Synthetic oligonucleotide
  Antisense strand to SEQ ID NO: 958010
aguaauagggcugagcuca

SEQ ID NO: 958012 - RNA, 19 nt, Artificial Sequence
  Description of Artificial Sequence: Synthetic oligonucleotide
  Sense strand starting at position 1104 of SEQ ID NO: 913838
aucuguucugcauacgaca

SEQ ID NO: 958013 - RNA, 19 nt, Artificial Sequence
  Description of Artificial Sequence: Synthetic oligonucleotide
  Antisense strand to SEQ ID NO: 958012
ugucguaugcagaacagau

SEQ ID NO: 958014 - RNA, 19 nt, Artificial Sequence
  Description of Artificial Sequence: Synthetic oligonucleotide
  Sense strand starting at position 1102 of SEQ ID NO: 913838
caaucuguucugcauacga

SEQ ID NO: 958015 - RNA, 19 nt, Artificial Sequence
  Description of Artificial Sequence: Synthetic oligonucleotide
  Antisense strand to SEQ ID NO: 958014
ucguaugcagaacagauug

SEQ ID NO: 958016 - RNA, 19 nt, Artificial Sequence
  Description of Artificial Sequence: Synthetic oligonucleotide
  Sense strand starting at position 2981 of SEQ ID NO: 913838
acaaccauuucugagagcu

SEQ ID NO: 958017 - RNA, 19 nt, Artificial Sequence
  Description of Artificial Sequence: Synthetic oligonucleotide
  Antisense strand to SEQ ID NO: 958016
agcucucagaaaugguugu

SEQ ID NO: 958018 - RNA, 19 nt, Artificial Sequence
  Description of Artificial Sequence: Synthetic oligonucleotide
  Sense strand starting at position 3449 of SEQ ID NO: 913838
aaagauucgucauagauuu

SEQ ID NO: 958019 - RNA, 19 nt, Artificial Sequence
  Description of Artificial Sequence: Synthetic oligonucleotide
  Antisense strand to SEQ ID NO: 958018
aaaucuaugacgaaucuuu

SEQ ID NO: 958020 - RNA, 19 nt, Artificial Sequence
  Description of Artificial Sequence: Synthetic oligonucleotide
  Sense strand starting at position 2159 of SEQ ID NO: 913838
gccagucuccuuuagguaa

SEQ ID NO: 958021 - RNA, 19 nt, Artificial Sequence
  Description of Artificial Sequence: Synthetic oligonucleotide
  Antisense strand to SEQ ID NO: 958020
uuaccuaaaggagacuggc

SEQ ID NO: 958022 - RNA, 19 nt, Artificial Sequence
  Description of Artificial Sequence: Synthetic oligonucleotide
  Sense strand starting at position 3786 of SEQ ID NO: 913838
ccgccagacuuucuauaag

SEQ ID NO: 958023 - RNA, 19 nt, Artificial Sequence
  Description of Artificial Sequence: Synthetic oligonucleotide
  Antisense strand to SEQ ID NO: 958022
cuuauagaaagucuggcgg

SEQ ID NO: 958024 - RNA, 19 nt, Artificial Sequence
  Description of Artificial Sequence: Synthetic oligonucleotide
  Sense strand starting at position 2088 of SEQ ID NO: 913838
gagcaaucggauugguuua

SEQ ID NO: 958025 - RNA, 19 nt, Artificial Sequence
  Description of Artificial Sequence: Synthetic oligonucleotide
  Antisense strand to SEQ ID NO: 958024
uaaaccaauccgauugcuc

SEQ ID NO: 958026 - RNA, 19 nt, Artificial Sequence
  Description of Artificial Sequence: Synthetic oligonucleotide
  Sense strand starting at position 3904 of SEQ ID NO: 913838
ggcuaucgugggcaaauua

SEQ ID NO: 958027 - RNA, 19 nt, Artificial Sequence
  Description of Artificial Sequence: Synthetic oligonucleotide
  Antisense strand to SEQ ID NO: 958026
uaauuugcccacgauagcc

SEQ ID NO: 958028 - RNA, 19 nt, Artificial Sequence
  Description of Artificial Sequence: Synthetic oligonucleotide
  Sense strand starting at position 1409 of SEQ ID NO: 913838
ggcucugucgaagaaagcu

SEQ ID NO: 958029 - RNA, 19 nt, Artificial Sequence
  Description of Artificial Sequence: Synthetic oligonucleotide
  Antisense strand to SEQ ID NO: 958028
agcuuucuucgacagagcc

SEQ ID NO: 958030 - RNA, 19 nt, Artificial Sequence
  Description of Artificial Sequence: Synthetic oligonucleotide
  Sense strand starting at position 2093 of SEQ ID NO: 913838
aucggauugguuuacguca

SEQ ID NO: 958031 - RNA, 19 nt, Artificial Sequence
  Description of Artificial Sequence: Synthetic oligonucleotide
  Antisense strand to SEQ ID NO: 958030
ugacguaaaccaauccgau

SEQ ID NO: 958032 - RNA, 19 nt, Artificial Sequence
  Description of Artificial Sequence: Synthetic oligonucleotide
  Sense strand starting at position 2294 of SEQ ID NO: 913838
cagccuuauguccauucga

SEQ ID NO: 958033 - RNA, 19 nt, Artificial Sequence
  Description of Artificial Sequence: Synthetic oligonucleotide
  Antisense strand to SEQ ID NO: 958032
ucgaauggacauaaggcug

SEQ ID NO: 958034 - RNA, 19 nt, Artificial Sequence
  Description of Artificial Sequence: Synthetic oligonucleotide
  Sense strand starting at position 260 of SEQ ID NO: 913838
gugcuauuggcucacuaca

SEQ ID NO: 958035 - RNA, 19 nt, Artificial Sequence
  Description of Artificial Sequence: Synthetic oligonucleotide
  Antisense strand to SEQ ID NO: 958034
uguagugagccaauagcac

SEQ ID NO: 958036 - RNA, 19 nt, Artificial Sequence
  Description of Artificial Sequence: Synthetic oligonucleotide
  Sense strand starting at position 28 of SEQ ID NO: 913838
gaaacagcguagcuaauua

SEQ ID NO: 958037 - RNA, 19 nt, Artificial Sequence
  Description of Artificial Sequence: Synthetic oligonucleotide
  Antisense strand to SEQ ID NO: 958036
uaauuagcuacgcuguuuc

SEQ ID NO: 958038 - RNA, 19 nt, Artificial Sequence
  Description of Artificial Sequence: Synthetic oligonucleotide
  Sense strand starting at position 2140 of SEQ ID NO: 913838
gaccuuccugucgguagaa

SEQ ID NO: 958039 - RNA, 19 nt, Artificial Sequence
  Description of Artificial Sequence: Synthetic oligonucleotide
  Antisense strand to SEQ ID NO: 958038
uucuaccgacaggaagguc

SEQ ID NO: 958040 - RNA, 19 nt, Artificial Sequence
  Description of Artificial Sequence: Synthetic oligonucleotide
  Sense strand starting at position 3311 of SEQ ID NO: 913838
uggcgauugcagugaugag

SEQ ID NO: 958041 - RNA, 19 nt, Artificial Sequence
  Description of Artificial Sequence: Synthetic oligonucleotide
  Antisense strand to SEQ ID NO: 958040
cucaucacugcaaucgcca

SEQ ID NO: 958042 - RNA, 19 nt, Artificial Sequence
  Description of Artificial Sequence: Synthetic oligonucleotide
  Sense strand starting at position 3272 of SEQ ID NO: 913839
guaguuacagguagugagu

SEQ ID NO: 958043 - RNA, 19 nt, Artificial Sequence
  Description of Artificial Sequence: Synthetic oligonucleotide
  Antisense strand to SEQ ID NO: 958042
acucacuaccuguaacuac

SEQ ID NO: 958044 - RNA, 19 nt, Artificial Sequence
  Description of Artificial Sequence: Synthetic oligonucleotide
  Sense strand starting at position 81 of SEQ ID NO: 913839
gucccuuaggaucauacau

SEQ ID NO: 958045 - RNA, 19 nt, Artificial Sequence
  Description of Artificial Sequence: Synthetic oligonucleotide
  Antisense strand to SEQ ID NO: 958044
auguaugauccuaagggac

SEQ ID NO: 958046 - RNA, 19 nt, Artificial Sequence
  Description of Artificial Sequence: Synthetic oligonucleotide
  Sense strand starting at position 1069 of SEQ ID NO: 913839
cagacuagauggguucuaa

SEQ ID NO: 958047 - RNA, 19 nt, Artificial Sequence
  Description of Artificial Sequence: Synthetic oligonucleotide
  Antisense strand to SEQ ID NO: 958046
uuagaacccaucuagucug

SEQ ID NO: 958048 - RNA, 19 nt, Artificial Sequence
  Description of Artificial Sequence: Synthetic oligonucleotide
  Sense strand starting at position 2848 of SEQ ID NO: 913839
gggccugaaauguaccuaa

SEQ ID NO: 958049 - RNA, 19 nt, Artificial Sequence
  Description of Artificial Sequence: Synthetic oligonucleotide
  Antisense strand to SEQ ID NO: 958048
uuagguacauuucaggccc

SEQ ID NO: 958050 - RNA, 19 nt, Artificial Sequence
  Description of Artificial Sequence: Synthetic oligonucleotide
  Sense strand starting at position 3887 of SEQ ID NO: 913839
ugcaaacaugcucagaaca

SEQ ID NO: 958051 - RNA, 19 nt, Artificial Sequence
  Description of Artificial Sequence: Synthetic oligonucleotide
  Antisense strand to SEQ ID NO: 958050
uguucugagcauguuugca

SEQ ID NO: 958052 - RNA, 19 nt, Artificial Sequence
  Description of Artificial Sequence: Synthetic oligonucleotide
  Sense strand starting at position 353 of SEQ ID NO: 913839
uugaccaucgauuaucauu

SEQ ID NO: 958053 - RNA, 19 nt, Artificial Sequence
  Description of Artificial Sequence: Synthetic oligonucleotide
  Antisense strand to SEQ ID NO: 958052
aaugauaaucgauggucaa

SEQ ID NO: 958054 - RNA, 19 nt, Artificial Sequence
  Description of Artificial Sequence: Synthetic oligonucleotide
  Sense strand starting at position 1645 of SEQ ID NO: 913839
gaagaaucccugcacgauu

SEQ ID NO: 958055 - RNA, 19 nt, Artificial Sequence
  Description of Artificial Sequence: Synthetic oligonucleotide
  Antisense strand to SEQ ID NO: 958054
aaucgugcagggauucuuc

SEQ ID NO: 958056 - RNA, 19 nt, Artificial Sequence
  Description of Artificial Sequence: Synthetic oligonucleotide
  Sense strand starting at position 3845 of SEQ ID NO: 913839
auguguuuaauacacggaa

SEQ ID NO: 958057 - RNA, 19 nt, Artificial Sequence
  Description of Artificial Sequence: Synthetic oligonucleotide
  Antisense strand to SEQ ID NO: 958056
uuccguguauuaaacacau

SEQ ID NO: 958058 - RNA, 19 nt, Artificial Sequence
  Description of Artificial Sequence: Synthetic oligonucleotide
  Sense strand starting at position 3477 of SEQ ID NO: 913839
ucuacuuaggauggaguua

SEQ ID NO: 958059 - RNA, 19 nt, Artificial Sequence
  Description of Artificial Sequence: Synthetic oligonucleotide
  Antisense strand to SEQ ID NO: 958058
uaacuccauccuaaguaga

SEQ ID NO: 958060 - RNA, 19 nt, Artificial Sequence
  Description of Artificial Sequence: Synthetic oligonucleotide
  Sense strand starting at position 2225 of SEQ ID NO: 913839
gggcuuauaagagggcaaa

SEQ ID NO: 958061 - RNA, 19 nt, Artificial Sequence
  Description of Artificial Sequence: Synthetic oligonucleotide
  Antisense strand to SEQ ID NO: 958060
uuugcccucuuauaagccc

SEQ ID NO: 958062 - RNA, 19 nt, Artificial Sequence
  Description of Artificial Sequence: Synthetic oligonucleotide
  Sense strand starting at position 75 of SEQ ID NO: 913839
agaugugucccuuaggauc

SEQ ID NO: 958063 - RNA, 19 nt, Artificial Sequence
  Description of Artificial Sequence: Synthetic oligonucleotide
  Antisense strand to SEQ ID NO: 958062
gauccuaagggacacaucu

SEQ ID NO: 958064 - RNA, 19 nt, Artificial Sequence
  Description of Artificial Sequence: Synthetic oligonucleotide
  Sense strand starting at position 3275 of SEQ ID NO: 913839
guuacagguagugaguaaa

SEQ ID NO: 958065 - RNA, 19 nt, Artificial Sequence
  Description of Artificial Sequence: Synthetic oligonucleotide
  Antisense strand to SEQ ID NO: 958064
uuuacucacuaccuguaac

SEQ ID NO: 958066 - RNA, 19 nt, Artificial Sequence
  Description of Artificial Sequence: Synthetic oligonucleotide
  Sense strand starting at position 629 of SEQ ID NO: 913839
aggacuuccugaguaagca

SEQ ID NO: 958067 - RNA, 19 nt, Artificial Sequence
  Description of Artificial Sequence: Synthetic oligonucleotide
  Antisense strand to SEQ ID NO: 958066
ugcuuacucaggaaguccu

SEQ ID NO: 958068 - RNA, 19 nt, Artificial Sequence
  Description of Artificial Sequence: Synthetic oligonucleotide
  Sense strand starting at position 1148 of SEQ ID NO: 913839
gaggguagcacaggaguua

SEQ ID NO: 958069 - RNA, 19 nt, Artificial Sequence
  Description of Artificial Sequence: Synthetic oligonucleotide
  Antisense strand to SEQ ID NO: 958068
uaacuccugugcuacccuc

SEQ ID NO: 958070 - RNA, 19 nt, Artificial Sequence
  Description of Artificial Sequence: Synthetic oligonucleotide
  Sense strand starting at position 3259 of SEQ ID NO: 913839
cgagaaacuaaugguaguu

SEQ ID NO: 958071 - RNA, 19 nt, Artificial Sequence
  Description of Artificial Sequence: Synthetic oligonucleotide
  Antisense strand to SEQ ID NO: 958070
aacuaccauuaguuucucg

SEQ ID NO: 958072 - RNA, 19 nt, Artificial Sequence
  Description of Artificial Sequence: Synthetic oligonucleotide
  Sense strand starting at position 3348 of SEQ ID NO: 913839
gucucuggugacuaacuuu

SEQ ID NO: 958073 - RNA, 19 nt, Artificial Sequence
  Description of Artificial Sequence: Synthetic oligonucleotide
  Antisense strand to SEQ ID NO: 958072
aaaguuagucaccagagac

SEQ ID NO: 958074 - RNA, 19 nt, Artificial Sequence
  Description of Artificial Sequence: Synthetic oligonucleotide
  Sense strand starting at position 73 of SEQ ID NO: 913839
ugagaugugucccuuagga

SEQ ID NO: 958075 - RNA, 19 nt, Artificial Sequence
  Description of Artificial Sequence: Synthetic oligonucleotide
  Antisense strand to SEQ ID NO: 958074
uccuaagggacacaucuca

SEQ ID NO: 958076 - RNA, 19 nt, Artificial Sequence
  Description of Artificial Sequence: Synthetic oligonucleotide
  Sense strand starting at position 3316 of SEQ ID NO: 913839
gcgccaucgcuggcugaua

SEQ ID NO: 958077 - RNA, 19 nt, Artificial Sequence
  Description of Artificial Sequence: Synthetic oligonucleotide
  Antisense strand to SEQ ID NO: 958076
uaucagccagcgauggcgc

SEQ ID NO: 958078 - RNA, 19 nt, Artificial Sequence
  Description of Artificial Sequence: Synthetic oligonucleotide
  Sense strand starting at position 1081 of SEQ ID NO: 913839
guucuaaagucaucccaac

SEQ ID NO: 958079 - RNA, 19 nt, Artificial Sequence
  Description of Artificial Sequence: Synthetic oligonucleotide
  Antisense strand to SEQ ID NO: 958078
guugggaugacuuuagaac

SEQ ID NO: 958080 - RNA, 19 nt, Artificial Sequence
  Description of Artificial Sequence: Synthetic oligonucleotide
  Sense strand starting at position 2287 of SEQ ID NO: 913839
cagagucaucucugggcaa

SEQ ID NO: 958081 - RNA, 19 nt, Artificial Sequence
  Description of Artificial Sequence: Synthetic oligonucleotide
  Antisense strand to SEQ ID NO: 958080
uugcccagagaugacucug

SEQ ID NO: 958082 - RNA, 19 nt, Artificial Sequence
  Description of Artificial Sequence: Synthetic oligonucleotide
  Sense strand starting at position 346 of SEQ ID NO: 913839
cauuguguugaccaucgau

SEQ ID NO: 958083 - RNA, 19 nt, Artificial Sequence
  Description of Artificial Sequence: Synthetic oligonucleotide
  Antisense strand to SEQ ID NO: 958082
aucgauggucaacacaaug

SEQ ID NO: 958084 - RNA, 19 nt, Artificial Sequence
  Description of Artificial Sequence: Synthetic oligonucleotide
  Sense strand starting at position 3064 of SEQ ID NO: 913839
caaagcucggauuggcaaa

SEQ ID NO: 958085 - RNA, 19 nt, Artificial Sequence
  Description of Artificial Sequence: Synthetic oligonucleotide
  Antisense strand to SEQ ID NO: 958084
uuugccaauccgagcuuug

SEQ ID NO: 958086 - RNA, 19 nt, Artificial Sequence
  Description of Artificial Sequence: Synthetic oligonucleotide
  Sense strand starting at position 2796 of SEQ ID NO: 913839
ucaggaggcuguccgauaa

SEQ ID NO: 958087 - RNA, 19 nt, Artificial Sequence
  Description of Artificial Sequence: Synthetic oligonucleotide
  Antisense strand to SEQ ID NO: 958086
uuaucggacagccuccuga

SEQ ID NO: 958088 - RNA, 19 nt, Artificial Sequence
  Description of Artificial Sequence: Synthetic oligonucleotide
  Sense strand starting at position 1214 of SEQ ID NO: 913839
ugaaauauccugugggcuu

SEQ ID NO: 958089 - RNA, 19 nt, Artificial Sequence
  Description of Artificial Sequence: Synthetic oligonucleotide
  Antisense strand to SEQ ID NO: 958088
aagcccacaggauauuuca

SEQ ID NO: 958090 - RNA, 19 nt, Artificial Sequence
  Description of Artificial Sequence: Synthetic oligonucleotide
  Sense strand starting at position 2215 of SEQ ID NO: 913839
cucccauagugggcuuaua

SEQ ID NO: 958091 - RNA, 19 nt, Artificial Sequence
  Description of Artificial Sequence: Synthetic oligonucleotide
  Antisense strand to SEQ ID NO: 958090
uauaagcccacuaugggag

SEQ ID NO: 958092 - RNA, 19 nt, Artificial Sequence
  Description of Artificial Sequence: Synthetic oligonucleotide
  Sense strand starting at position 939 of SEQ ID NO: 913839
uacccuucgcaguaaagua

SEQ ID NO: 958093 - RNA, 19 nt, Artificial Sequence
  Description of Artificial Sequence: Synthetic oligonucleotide
  Antisense strand to SEQ ID NO: 958092
uacuuuacugcgaagggua

SEQ ID NO: 958094 - RNA, 19 nt, Artificial Sequence
  Description of Artificial Sequence: Synthetic oligonucleotide
  Sense strand starting at position 1953 of SEQ ID NO: 913839
cgcacaauggcgggaaaua

SEQ ID NO: 958095 - RNA, 19 nt, Artificial Sequence
  Description of Artificial Sequence: Synthetic oligonucleotide
  Antisense strand to SEQ ID NO: 958094
uauuucccgccauugugcg

SEQ ID NO: 958096 - RNA, 19 nt, Artificial Sequence
  Description of Artificial Sequence: Synthetic oligonucleotide
  Sense strand starting at position 3412 of SEQ ID NO: 913839
uccugcucuuagguacaua

SEQ ID NO: 958097 - RNA, 19 nt, Artificial Sequence
  Description of Artificial Sequence: Synthetic oligonucleotide
  Antisense strand to SEQ ID NO: 958096
uauguaccuaagagcagga

SEQ ID NO: 958098 - RNA, 19 nt, Artificial Sequence
  Description of Artificial Sequence: Synthetic oligonucleotide
  Sense strand starting at position 3341 of SEQ ID NO: 913839
uaaaguugucucuggugac

SEQ ID NO: 958099 - RNA, 19 nt, Artificial Sequence
  Description of Artificial Sequence: Synthetic oligonucleotide
  Antisense strand to SEQ ID NO: 958098
gucaccagagacaacuuua

SEQ ID NO: 958100 - RNA, 19 nt, Artificial Sequence
  Description of Artificial Sequence: Synthetic oligonucleotide
  Sense strand starting at position 1170 of SEQ ID NO: 913839
ccaacuucugugcaagcga

SEQ ID NO: 958101 - RNA, 19 nt, Artificial Sequence
  Description of Artificial Sequence: Synthetic oligonucleotide
  Antisense strand to SEQ ID NO: 958100
ucgcuugcacagaaguugg

SEQ ID NO: 958102 - RNA, 19 nt, Artificial Sequence
  Description of Artificial Sequence: Synthetic oligonucleotide
  Sense strand starting at position 349 of SEQ ID NO: 913839
uguguugaccaucgauuau

SEQ ID NO: 958103 - RNA, 19 nt, Artificial Sequence
  Description of Artificial Sequence: Synthetic oligonucleotide
  Antisense strand to SEQ ID NO: 958102
auaaucgauggucaacaca

SEQ ID NO: 958104 - RNA, 19 nt, Artificial Sequence
  Description of Artificial Sequence: Synthetic oligonucleotide
  Sense strand starting at position 50 of SEQ ID NO: 913839
guuacauccuuccuguacu

SEQ ID NO: 958105 - RNA, 19 nt, Artificial Sequence
  Description of Artificial Sequence: Synthetic oligonucleotide
  Antisense strand to SEQ ID NO: 958104
aguacaggaaggauguaac

SEQ ID NO: 958106 - RNA, 19 nt, Artificial Sequence
  Description of Artificial Sequence: Synthetic oligonucleotide
  Sense strand starting at position 3283 of SEQ ID NO: 913839
uagugaguaaaguguguua

SEQ ID NO: 958107 - RNA, 19 nt, Artificial Sequence
  Description of Artificial Sequence: Synthetic oligonucleotide
  Antisense strand to SEQ ID NO: 958106
uaacacacuuuacucacua

SEQ ID NO: 958108 - RNA, 19 nt, Artificial Sequence
  Description of Artificial Sequence: Synthetic oligonucleotide
  Sense strand starting at position 1537 of SEQ ID NO: 913839
gcgagcccucgagauggua

SEQ ID NO: 958109 - RNA, 19 nt, Artificial Sequence
  Description of Artificial Sequence: Synthetic oligonucleotide
  Antisense strand to SEQ ID NO: 958108
uaccaucucgagggcucgc

SEQ ID NO: 958110 - RNA, 19 nt, Artificial Sequence
  Description of Artificial Sequence: Synthetic oligonucleotide
  Sense strand starting at position 3285 of SEQ ID NO: 913839
gugaguaaaguguguuaug

SEQ ID NO: 958111 - RNA, 19 nt, Artificial Sequence
  Description of Artificial Sequence: Synthetic oligonucleotide
  Antisense strand to SEQ ID NO: 958110
cauaacacacuuuacucac

SEQ ID NO: 958112 - RNA, 19 nt, Artificial Sequence
  Description of Artificial Sequence: Synthetic oligonucleotide
  Sense strand starting at position 850 of SEQ ID NO: 913839
gccacucauuacguguaaa

SEQ ID NO: 958113 - RNA, 19 nt, Artificial Sequence
  Description of Artificial Sequence: Synthetic oligonucleotide
  Antisense strand to SEQ ID NO: 958112
uuuacacguaaugaguggc

SEQ ID NO: 958114 - RNA, 19 nt, Artificial Sequence
  Description of Artificial Sequence: Synthetic oligonucleotide
  Sense strand starting at position 2315 of SEQ ID NO: 913839
gcgaaaccgccuugggaau

SEQ ID NO: 958115 - RNA, 19 nt, Artificial Sequence
  Description of Artificial Sequence: Synthetic oligonucleotide
  Antisense strand to SEQ ID NO: 958114
auucccaaggcgguuucgc

SEQ ID NO: 958116 - RNA, 19 nt, Artificial Sequence
  Description of Artificial Sequence: Synthetic oligonucleotide
  Sense strand starting at position 3286 of SEQ ID NO: 913839
ugaguaaaguguguuaugu

SEQ ID NO: 958117 - RNA, 19 nt, Artificial Sequence
  Description of Artificial Sequence: Synthetic oligonucleotide
  Antisense strand to SEQ ID NO: 958116
acauaacacacuuuacuca

SEQ ID NO: 958118 - RNA, 19 nt, Artificial Sequence
  Description of Artificial Sequence: Synthetic oligonucleotide
  Sense strand starting at position 1002 of SEQ ID NO: 913839
uucucagcccuguguacaa

SEQ ID NO: 958119 - RNA, 19 nt, Artificial Sequence
  Description of Artificial Sequence: Synthetic oligonucleotide
  Antisense strand to SEQ ID NO: 958118
uuguacacagggcugagaa

SEQ ID NO: 958120 - RNA, 19 nt, Artificial Sequence
  Description of Artificial Sequence: Synthetic oligonucleotide
  Sense strand starting at position 996 of SEQ ID NO: 913839
gcaggauucucagcccugu

SEQ ID NO: 958121 - RNA, 19 nt, Artificial Sequence
  Description of Artificial Sequence: Synthetic oligonucleotide
  Antisense strand to SEQ ID NO: 958120
acagggcugagaauccugc

SEQ ID NO: 958122 - RNA, 19 nt, Artificial Sequence
  Description of Artificial Sequence: Synthetic oligonucleotide
  Sense strand starting at position 2527 of SEQ ID NO: 913840
guaguuacagguagugagu

SEQ ID NO: 958123 - RNA, 19 nt, Artificial Sequence
  Description of Artificial Sequence: Synthetic oligonucleotide
  Antisense strand to SEQ ID NO: 958122
acucacuaccuguaacuac

SEQ ID NO: 958124 - RNA, 19 nt, Artificial Sequence
  Description of Artificial Sequence: Synthetic oligonucleotide
  Sense strand starting at position 324 of SEQ ID NO: 913840
cagacuagauggguucuaa

SEQ ID NO: 958125 - RNA, 19 nt, Artificial Sequence
  Description of Artificial Sequence: Synthetic oligonucleotide
  Antisense strand to SEQ ID NO: 958124
uuagaacccaucuagucug

SEQ ID NO: 958126 - RNA, 19 nt, Artificial Sequence
  Description of Artificial Sequence: Synthetic oligonucleotide
  Sense strand starting at position 3508 of SEQ ID NO: 913840
uuguauuucuuaguguaag

SEQ ID NO: 958127 - RNA, 19 nt, Artificial Sequence
  Description of Artificial Sequence: Synthetic oligonucleotide
  Antisense strand to SEQ ID NO: 958126
cuuacacuaagaaauacaa

SEQ ID NO: 958128 - RNA, 19 nt, Artificial Sequence
  Description of Artificial Sequence: Synthetic oligonucleotide
  Sense strand starting at position 2103 of SEQ ID NO: 913840
gggccugaaauguaccuaa

SEQ ID NO: 958129 - RNA, 19 nt, Artificial Sequence
  Description of Artificial Sequence: Synthetic oligonucleotide
  Antisense strand to SEQ ID NO: 958128
uuagguacauuucaggccc

SEQ ID NO: 958130 - RNA, 19 nt, Artificial Sequence
  Description of Artificial Sequence: Synthetic oligonucleotide
  Sense strand starting at position 3520 of SEQ ID NO: 913840
guguaagguaauuaauuga

SEQ ID NO: 958131 - RNA, 19 nt, Artificial Sequence
  Description of Artificial Sequence: Synthetic oligonucleotide
  Antisense strand to SEQ ID NO: 958130
ucaauuaauuaccuuacac

SEQ ID NO: 958132 - RNA, 19 nt, Artificial Sequence
  Description of Artificial Sequence: Synthetic oligonucleotide
  Sense strand starting at position 3142 of SEQ ID NO: 913840
ugcaaacaugcucagaaca

SEQ ID NO: 958133 - RNA, 19 nt, Artificial Sequence
  Description of Artificial Sequence: Synthetic oligonucleotide
  Antisense strand to SEQ ID NO: 958132
uguucugagcauguuugca

SEQ ID NO: 958134 - RNA, 19 nt, Artificial Sequence
  Description of Artificial Sequence: Synthetic oligonucleotide
  Sense strand starting at position 3606 of SEQ ID NO: 913840
ggucauuaccaccauucca

SEQ ID NO: 958135 - RNA, 19 nt, Artificial Sequence
  Description of Artificial Sequence: Synthetic oligonucleotide
  Antisense strand to SEQ ID NO: 958134
uggaauggugguaaugacc

SEQ ID NO: 958136 - RNA, 19 nt, Artificial Sequence
  Description of Artificial Sequence: Synthetic oligonucleotide
  Sense strand starting at position 900 of SEQ ID NO: 913840
gaagaaucccugcacgauu

SEQ ID NO: 958137 - RNA, 19 nt, Artificial Sequence
  Description of Artificial Sequence: Synthetic oligonucleotide
  Antisense strand to SEQ ID NO: 958136
aaucgugcagggauucuuc

SEQ ID NO: 958138 - RNA, 19 nt, Artificial Sequence
  Description of Artificial Sequence: Synthetic oligonucleotide
  Sense strand starting at position 3283 of SEQ ID NO: 913840
ggguaauugaaguaugguu

SEQ ID NO: 958139 - RNA, 19 nt, Artificial Sequence
  Description of Artificial Sequence: Synthetic oligonucleotide
  Antisense strand to SEQ ID NO: 958138
aaccauacuucaauuaccc

SEQ ID NO: 958140 - RNA, 19 nt, Artificial Sequence
  Description of Artificial Sequence: Synthetic oligonucleotide
  Sense strand starting at position 3100 of SEQ ID NO: 913840
auguguuuaauacacggaa

SEQ ID NO: 958141 - RNA, 19 nt, Artificial Sequence
  Description of Artificial Sequence: Synthetic oligonucleotide
  Antisense strand to SEQ ID NO: 958140
uuccguguauuaaacacau

SEQ ID NO: 958142 - RNA, 19 nt, Artificial Sequence
  Description of Artificial Sequence: Synthetic oligonucleotide
  Sense strand starting at position 2732 of SEQ ID NO: 913840
ucuacuuaggauggaguua

SEQ ID NO: 958143 - RNA, 19 nt, Artificial Sequence
  Description of Artificial Sequence: Synthetic oligonucleotide
  Antisense strand to SEQ ID NO: 958142
uaacuccauccuaaguaga

SEQ ID NO: 958144 - RNA, 19 nt, Artificial Sequence
  Description of Artificial Sequence: Synthetic oligonucleotide
  Sense strand starting at position 1480 of SEQ ID NO: 913840
gggcuuauaagagggcaaa

SEQ ID NO: 958145 - RNA, 19 nt, Artificial Sequence
  Description of Artificial Sequence: Synthetic oligonucleotide
  Antisense strand to SEQ ID NO: 958144
uuugcccucuuauaagccc

SEQ ID NO: 958146 - RNA, 19 nt, Artificial Sequence
  Description of Artificial Sequence: Synthetic oligonucleotide
  Sense strand starting at position 2530 of SEQ ID NO: 913840
guuacagguagugaguaaa

SEQ ID NO: 958147 - RNA, 19 nt, Artificial Sequence
  Description of Artificial Sequence: Synthetic oligonucleotide
  Antisense strand to SEQ ID NO: 958146
uuuacucacuaccuguaac

SEQ ID NO: 958148 - RNA, 19 nt, Artificial Sequence
  Description of Artificial Sequence: Synthetic oligonucleotide
  Sense strand starting at position 403 of SEQ ID NO: 913840
gaggguagcacaggaguua

SEQ ID NO: 958149 - RNA, 19 nt, Artificial Sequence
  Description of Artificial Sequence: Synthetic oligonucleotide
  Antisense strand to SEQ ID NO: 958148
uaacuccugugcuacccuc

SEQ ID NO: 958150 - RNA, 19 nt, Artificial Sequence
  Description of Artificial Sequence: Synthetic oligonucleotide
  Sense strand starting at position 2514 of SEQ ID NO: 913840
cgagaaacuaaugguaguu

SEQ ID NO: 958151 - RNA, 19 nt, Artificial Sequence
  Description of Artificial Sequence: Synthetic oligonucleotide
  Antisense strand to SEQ ID NO: 958150
aacuaccauuaguuucucg

SEQ ID NO: 958152 - RNA, 19 nt, Artificial Sequence
  Description of Artificial Sequence: Synthetic oligonucleotide
  Sense strand starting at position 2603 of SEQ ID NO: 913840
gucucuggugacuaacuuu

SEQ ID NO: 958153 - RNA, 19 nt, Artificial Sequence
  Description of Artificial Sequence: Synthetic oligonucleotide
  Antisense strand to SEQ ID NO: 958152
aaaguuagucaccagagac

SEQ ID NO: 958154 - RNA, 19 nt, Artificial Sequence
  Description of Artificial Sequence: Synthetic oligonucleotide
  Sense strand starting at position 3728 of SEQ ID NO: 913840
ggaaaugucugcucuuaaa

SEQ ID NO: 958155 - RNA, 19 nt, Artificial Sequence
  Description of Artificial Sequence: Synthetic oligonucleotide
  Antisense strand to SEQ ID NO: 958154
uuuaagagcagacauuucc

SEQ ID NO: 958156 - RNA, 19 nt, Artificial Sequence
  Description of Artificial Sequence: Synthetic oligonucleotide
  Sense strand starting at position 2571 of SEQ ID NO: 913840
gcgccaucgcuggcugaua

SEQ ID NO: 958157 - RNA, 19 nt, Artificial Sequence
  Description of Artificial Sequence: Synthetic oligonucleotide
  Antisense strand to SEQ ID NO: 958156
uaucagccagcgauggcgc

SEQ ID NO: 958158 - RNA, 19 nt, Artificial Sequence
  Description of Artificial Sequence: Synthetic oligonucleotide
  Sense strand starting at position 336 of SEQ ID NO: 913840
guucuaaagucaucccaac

SEQ ID NO: 958159 - RNA, 19 nt, Artificial Sequence
  Description of Artificial Sequence: Synthetic oligonucleotide
  Antisense strand to SEQ ID NO: 958158
guugggaugacuuuagaac

SEQ ID NO: 958160 - RNA, 19 nt, Artificial Sequence
  Description of Artificial Sequence: Synthetic oligonucleotide
  Sense strand starting at position 1542 of SEQ ID NO: 913840
cagagucaucucugggcaa

SEQ ID NO: 958161 - RNA, 19 nt, Artificial Sequence
  Description of Artificial Sequence: Synthetic oligonucleotide
  Antisense strand to SEQ ID NO: 958160
uugcccagagaugacucug

SEQ ID NO: 958162 - RNA, 19 nt, Artificial Sequence
  Description of Artificial Sequence: Synthetic oligonucleotide
  Sense strand starting at position 3726 of SEQ ID NO: 913840
auggaaaugucugcucuua

SEQ ID NO: 958163 - RNA, 19 nt, Artificial Sequence
  Description of Artificial Sequence: Synthetic oligonucleotide
  Antisense strand to SEQ ID NO: 958162
uaagagcagacauuuccau

SEQ ID NO: 958164 - RNA, 19 nt, Artificial Sequence
  Description of Artificial Sequence: Synthetic oligonucleotide
  Sense strand starting at position 2319 of SEQ ID NO: 913840
caaagcucggauuggcaaa

SEQ ID NO: 958165 - RNA, 19 nt, Artificial Sequence
  Description of Artificial Sequence: Synthetic oligonucleotide
  Antisense strand to SEQ ID NO: 958164
uuugccaauccgagcuuug

SEQ ID NO: 958166 - RNA, 19 nt, Artificial Sequence
  Description of Artificial Sequence: Synthetic oligonucleotide
  Sense strand starting at position 2051 of SEQ ID NO: 913840
ucaggaggcuguccgauaa

SEQ ID NO: 958167 - RNA, 19 nt, Artificial Sequence
  Description of Artificial Sequence: Synthetic oligonucleotide
  Antisense strand to SEQ ID NO: 958166
uuaucggacagccuccuga

SEQ ID NO: 958168 - RNA, 19 nt, Artificial Sequence
  Description of Artificial Sequence: Synthetic oligonucleotide
  Sense strand starting at position 469 of SEQ ID NO: 913840
ugaaauauccugugggcuu

SEQ ID NO: 958169 - RNA, 19 nt, Artificial Sequence
  Description of Artificial Sequence: Synthetic oligonucleotide
  Antisense strand to SEQ ID NO: 958168
aagcccacaggauauuuca

SEQ ID NO: 958170 - RNA, 19 nt, Artificial Sequence
  Description of Artificial Sequence: Synthetic oligonucleotide
  Sense strand starting at position 1470 of SEQ ID NO: 913840
cucccauagugggcuuaua

SEQ ID NO: 958171 - RNA, 19 nt, Artificial Sequence
  Description of Artificial Sequence: Synthetic oligonucleotide
  Antisense strand to SEQ ID NO: 958170
uauaagcccacuaugggag

SEQ ID NO: 958172 - RNA, 19 nt, Artificial Sequence
  Description of Artificial Sequence: Synthetic oligonucleotide
  Sense strand starting at position 194 of SEQ ID NO: 913840
uacccuucgcaguaaagua

SEQ ID NO: 958173 - RNA, 19 nt, Artificial Sequence
  Description of Artificial Sequence: Synthetic oligonucleotide
  Antisense strand to SEQ ID NO: 958172
uacuuuacugcgaagggua

SEQ ID NO: 958174 - RNA, 19 nt, Artificial Sequence
  Description of Artificial Sequence: Synthetic oligonucleotide
  Sense strand starting at position 3470 of SEQ ID NO: 913840
gugacauucugguuuacuu

SEQ ID NO: 958175 - RNA, 19 nt, Artificial Sequence
  Description of Artificial Sequence: Synthetic oligonucleotide
  Antisense strand to SEQ ID NO: 958174
aaguaaaccagaaugucac

SEQ ID NO: 958176 - RNA, 19 nt, Artificial Sequence
  Description of Artificial Sequence: Synthetic oligonucleotide
  Sense strand starting at position 3725 of SEQ ID NO: 913840
uauggaaaugucugcucuu

SEQ ID NO: 958177 - RNA, 19 nt, Artificial Sequence
  Description of Artificial Sequence: Synthetic oligonucleotide
  Antisense strand to SEQ ID NO: 958176
aagagcagacauuuccaua

SEQ ID NO: 958178 - RNA, 19 nt, Artificial Sequence
  Description of Artificial Sequence: Synthetic oligonucleotide
  Sense strand starting at position 3567 of SEQ ID NO: 913840
gaguuuggguacguugaga

SEQ ID NO: 958179 - RNA, 19 nt, Artificial Sequence
  Description of Artificial Sequence: Synthetic oligonucleotide
  Antisense strand to SEQ ID NO: 958178
ucucaacguacccaaacuc

SEQ ID NO: 958180 - RNA, 19 nt, Artificial Sequence
  Description of Artificial Sequence: Synthetic oligonucleotide
  Sense strand starting at position 1208 of SEQ ID NO: 913840
cgcacaauggcgggaaaua

SEQ ID NO: 958181 - RNA, 19 nt, Artificial Sequence
  Description of Artificial Sequence: Synthetic oligonucleotide
  Antisense strand to SEQ ID NO: 958180
uauuucccgccauugugcg

SEQ ID NO: 958182 - RNA, 19 nt, Artificial Sequence
  Description of Artificial Sequence: Synthetic oligonucleotide
  Sense strand starting at position 2667 of SEQ ID NO: 913840
uccugcucuuagguacaua

SEQ ID NO: 958183 - RNA, 19 nt, Artificial Sequence
  Description of Artificial Sequence: Synthetic oligonucleotide
  Antisense strand to SEQ ID NO: 958182
uauguaccuaagagcagga

SEQ ID NO: 958184 - RNA, 19 nt, Artificial Sequence
  Description of Artificial Sequence: Synthetic oligonucleotide
  Sense strand starting at position 2596 of SEQ ID NO: 913840
uaaaguugucucuggugac

SEQ ID NO: 958185 - RNA, 19 nt, Artificial Sequence
  Description of Artificial Sequence: Synthetic oligonucleotide
  Antisense strand to SEQ ID NO: 958184
gucaccagagacaacuuua

SEQ ID NO: 958186 - RNA, 19 nt, Artificial Sequence
  Description of Artificial Sequence: Synthetic oligonucleotide
  Sense strand starting at position 3277 of SEQ ID NO: 913840
cuguguggguaauugaagu

SEQ ID NO: 958187 - RNA, 19 nt, Artificial Sequence
  Description of Artificial Sequence: Synthetic oligonucleotide
  Antisense strand to SEQ ID NO: 958186
acuucaauuacccacacag

SEQ ID NO: 958188 - RNA, 19 nt, Artificial Sequence
  Description of Artificial Sequence: Synthetic oligonucleotide
  Sense strand starting at position 425 of SEQ ID NO: 913840
ccaacuucugugcaagcga

SEQ ID NO: 958189 - RNA, 19 nt, Artificial Sequence
  Description of Artificial Sequence: Synthetic oligonucleotide
  Antisense strand to SEQ ID NO: 958188
ucgcuugcacagaaguugg

SEQ ID NO: 958190 - RNA, 19 nt, Artificial Sequence
  Description of Artificial Sequence: Synthetic oligonucleotide
  Sense strand starting at position 2538 of SEQ ID NO: 913840
uagugaguaaaguguguua

SEQ ID NO: 958191 - RNA, 19 nt, Artificial Sequence
  Description of Artificial Sequence: Synthetic oligonucleotide
  Antisense strand to SEQ ID NO: 958190
uaacacacuuuacucacua

SEQ ID NO: 958192 - RNA, 19 nt, Artificial Sequence
  Description of Artificial Sequence: Synthetic oligonucleotide
  Sense strand starting at position 3272 of SEQ ID NO: 913840
aauggcuguguggguaauu

SEQ ID NO: 958193 - RNA, 19 nt, Artificial Sequence
  Description of Artificial Sequence: Synthetic oligonucleotide
  Antisense strand to SEQ ID NO: 958192
aauuacccacacagccauu

SEQ ID NO: 958194 - RNA, 19 nt, Artificial Sequence
  Description of Artificial Sequence: Synthetic oligonucleotide
  Sense strand starting at position 792 of SEQ ID NO: 913840
gcgagcccucgagauggua

SEQ ID NO: 958195 - RNA, 19 nt, Artificial Sequence
  Description of Artificial Sequence: Synthetic oligonucleotide
  Antisense strand to SEQ ID NO: 958194
uaccaucucgagggcucgc

SEQ ID NO: 958196 - RNA, 19 nt, Artificial Sequence
  Description of Artificial Sequence: Synthetic oligonucleotide
  Sense strand starting at position 2540 of SEQ ID NO: 913840
gugaguaaaguguguuaug

SEQ ID NO: 958197 - RNA, 19 nt, Artificial Sequence
  Description of Artificial Sequence: Synthetic oligonucleotide
  Antisense strand to SEQ ID NO: 958196
cauaacacacuuuacucac

SEQ ID NO: 958198 - RNA, 19 nt, Artificial Sequence
  Description of Artificial Sequence: Synthetic oligonucleotide
  Sense strand starting at position 105 of SEQ ID NO: 913840
gccacucauuacguguaaa

SEQ ID NO: 958199 - RNA, 19 nt, Artificial Sequence
  Description of Artificial Sequence: Synthetic oligonucleotide
  Antisense strand to SEQ ID NO: 958198
uuuacacguaaugaguggc

SEQ ID NO: 958200 - RNA, 19 nt, Artificial Sequence
  Description of Artificial Sequence: Synthetic oligonucleotide
  Sense strand starting at position 1570 of SEQ ID NO: 913840
gcgaaaccgccuugggaau

SEQ ID NO: 958201 - RNA, 19 nt, Artificial Sequence
  Description of Artificial Sequence: Synthetic oligonucleotide
  Antisense strand to SEQ ID NO: 958200
auucccaaggcgguuucgc

SEQ ID NO: 958202 - RNA, 19 nt, Artificial Sequence
  Description of Artificial Sequence: Synthetic oligonucleotide
  Sense strand starting at position 3753 of SEQ ID NO: 913841
ugauguauuuacccaugcu

SEQ ID NO: 958203 - RNA, 19 nt, Artificial Sequence
  Description of Artificial Sequence: Synthetic oligonucleotide
  Antisense strand to SEQ ID NO: 958202
agcauggguaaauacauca

SEQ ID NO: 958204 - RNA, 19 nt, Artificial Sequence
  Description of Artificial Sequence: Synthetic oligonucleotide
  Sense strand starting at position 1014 of SEQ ID NO: 913841
gcaacaacugguuaauaca

SEQ ID NO: 958205 - RNA, 19 nt, Artificial Sequence
  Description of Artificial Sequence: Synthetic oligonucleotide
  Antisense strand to SEQ ID NO: 958204
uguauuaaccaguuguugc

SEQ ID NO: 958206 - RNA, 19 nt, Artificial Sequence
  Description of Artificial Sequence: Synthetic oligonucleotide
  Sense strand starting at position 3250 of SEQ ID NO: 913841
uuaugagcugauuaaauuc

SEQ ID NO: 958207 - RNA, 19 nt, Artificial Sequence
  Description of Artificial Sequence: Synthetic oligonucleotide
  Antisense strand to SEQ ID NO: 958206
gaauuuaaucagcucauaa

SEQ ID NO: 958208 - RNA, 19 nt, Artificial Sequence
  Description of Artificial Sequence: Synthetic oligonucleotide
  Sense strand starting at position 2494 of SEQ ID NO: 913841
gagugaucuaaugacugug

SEQ ID NO: 958209 - RNA, 19 nt, Artificial Sequence
  Description of Artificial Sequence: Synthetic oligonucleotide
  Antisense strand to SEQ ID NO: 958208
cacagucauuagaucacuc

SEQ ID NO: 958210 - RNA, 19 nt, Artificial Sequence
  Description of Artificial Sequence: Synthetic oligonucleotide
  Sense strand starting at position 3358 of SEQ ID NO: 913841
guagccuuagaugauaaau

SEQ ID NO: 958211 - RNA, 19 nt, Artificial Sequence
  Description of Artificial Sequence: Synthetic oligonucleotide
  Antisense strand to SEQ ID NO: 958210
auuuaucaucuaaggcuac

SEQ ID NO: 958212 - RNA, 19 nt, Artificial Sequence
  Description of Artificial Sequence: Synthetic oligonucleotide
  Sense strand starting at position 268 of SEQ ID NO: 913841
uugggaagccuuuaaguag

SEQ ID NO: 958213 - RNA, 19 nt, Artificial Sequence
  Description of Artificial Sequence: Synthetic oligonucleotide
  Antisense strand to SEQ ID NO: 958212
cuacuuaaaggcuucccaa

SEQ ID NO: 958214 - RNA, 19 nt, Artificial Sequence
  Description of Artificial Sequence: Synthetic oligonucleotide
  Sense strand starting at position 2164 of SEQ ID NO: 913841
uuaccuauagugggacaua

SEQ ID NO: 958215 - RNA, 19 nt, Artificial Sequence
  Description of Artificial Sequence: Synthetic oligonucleotide
  Antisense strand to SEQ ID NO: 958214
uaugucccacuauagguaa

SEQ ID NO: 958216 - RNA, 19 nt, Artificial Sequence
  Description of Artificial Sequence: Synthetic oligonucleotide
  Sense strand starting at position 3675 of SEQ ID NO: 913841
guuggaaauccaugacauu

SEQ ID NO: 958217 - RNA, 19 nt, Artificial Sequence
  Description of Artificial Sequence: Synthetic oligonucleotide
  Antisense strand to SEQ ID NO: 958216
aaugucauggauuuccaac

SEQ ID NO: 958218 - RNA, 19 nt, Artificial Sequence
  Description of Artificial Sequence: Synthetic oligonucleotide
  Sense strand starting at position 855 of SEQ ID NO: 913841
gguuaagaacuccaugcca

SEQ ID NO: 958219 - RNA, 19 nt, Artificial Sequence
  Description of Artificial Sequence: Synthetic oligonucleotide
  Antisense strand to SEQ ID NO: 958218
uggcauggaguucuuaacc

SEQ ID NO: 958220 - RNA, 19 nt, Artificial Sequence
  Description of Artificial Sequence: Synthetic oligonucleotide
  Sense strand starting at position 3176 of SEQ ID NO: 913841
cuugaauacugccuaagaa

SEQ ID NO: 958221 - RNA, 19 nt, Artificial Sequence
  Description of Artificial Sequence: Synthetic oligonucleotide
  Antisense strand to SEQ ID NO: 958220
uucuuaggcaguauucaag

SEQ ID NO: 958222 - RNA, 19 nt, Artificial Sequence
  Description of Artificial Sequence: Synthetic oligonucleotide
  Sense strand starting at position 2482 of SEQ ID NO: 913841
cucuacaucacggagugau

SEQ ID NO: 958223 - RNA, 19 nt, Artificial Sequence
  Description of Artificial Sequence: Synthetic oligonucleotide
  Antisense strand to SEQ ID NO: 958222
aucacuccgugauguagag

SEQ ID NO: 958224 - RNA, 19 nt, Artificial Sequence
  Description of Artificial Sequence: Synthetic oligonucleotide
  Sense strand starting at position 2497 of SEQ ID NO: 913841
ugaucuaaugacugugaug

SEQ ID NO: 958225 - RNA, 19 nt, Artificial Sequence
  Description of Artificial Sequence: Synthetic oligonucleotide
  Antisense strand to SEQ ID NO: 958224
caucacagucauuagauca

SEQ ID NO: 958226 - RNA, 19 nt, Artificial Sequence
  Description of Artificial Sequence: Synthetic oligonucleotide
  Sense strand starting at position 3088 of SEQ ID NO: 913841
ccgaaauaguuaucagaau

SEQ ID NO: 958227 - RNA, 19 nt, Artificial Sequence
  Description of Artificial Sequence: Synthetic oligonucleotide
  Antisense strand to SEQ ID NO: 958226
auucugauaacuauuucgg

SEQ ID NO: 958228 - RNA, 19 nt, Artificial Sequence
  Description of Artificial Sequence: Synthetic oligonucleotide
  Sense strand starting at position 2425 of SEQ ID NO: 913841
acuacacgccuagaauuau

SEQ ID NO: 958229 - RNA, 19 nt, Artificial Sequence
  Description of Artificial Sequence: Synthetic oligonucleotide
  Antisense strand to SEQ ID NO: 958228
auaauucuaggcguguagu

SEQ ID NO: 958230 - RNA, 19 nt, Artificial Sequence
  Description of Artificial Sequence: Synthetic oligonucleotide
  Sense strand starting at position 460 of SEQ ID NO: 913841
gguacaaucuucucacaag

SEQ ID NO: 958231 - RNA, 19 nt, Artificial Sequence
  Description of Artificial Sequence: Synthetic oligonucleotide
  Antisense strand to SEQ ID NO: 958230
cuugugagaagauuguacc

SEQ ID NO: 958232 - RNA, 19 nt, Artificial Sequence
  Description of Artificial Sequence: Synthetic oligonucleotide
  Sense strand starting at position 490 of SEQ ID NO: 913841
gguccauaccuaugacuaa

SEQ ID NO: 958233 - RNA, 19 nt, Artificial Sequence
  Description of Artificial Sequence: Synthetic oligonucleotide
  Antisense strand to SEQ ID NO: 958232
uuagucauagguauggacc

SEQ ID NO: 958234 - RNA, 19 nt, Artificial Sequence
  Description of Artificial Sequence: Synthetic oligonucleotide
  Sense strand starting at position 2689 of SEQ ID NO: 913841
uugacuuugugugcauuua

SEQ ID NO: 958235 - RNA, 19 nt, Artificial Sequence
  Description of Artificial Sequence: Synthetic oligonucleotide
  Antisense strand to SEQ ID NO: 958234
uaaaugcacacaaagucaa

SEQ ID NO: 958236 - RNA, 19 nt, Artificial Sequence
  Description of Artificial Sequence: Synthetic oligonucleotide
  Sense strand starting at position 3086 of SEQ ID NO: 913841
ugccgaaauaguuaucaga

SEQ ID NO: 958237 - RNA, 19 nt, Artificial Sequence
  Description of Artificial Sequence: Synthetic oligonucleotide
  Antisense strand to SEQ ID NO: 958236
ucugauaacuauuucggca

SEQ ID NO: 958238 - RNA, 19 nt, Artificial Sequence
  Description of Artificial Sequence: Synthetic oligonucleotide
  Sense strand starting at position 3222 of SEQ ID NO: 913841
agaguauuuccuugcuagc

SEQ ID NO: 958239 - RNA, 19 nt, Artificial Sequence
  Description of Artificial Sequence: Synthetic oligonucleotide
  Antisense strand to SEQ ID NO: 958238
gcuagcaaggaaauacucu

SEQ ID NO: 958240 - RNA, 19 nt, Artificial Sequence
  Description of Artificial Sequence: Synthetic oligonucleotide
  Sense strand starting at position 91 of SEQ ID NO: 913841
gaacaccuucgugaaguau

SEQ ID NO: 958241 - RNA, 19 nt, Artificial Sequence
  Description of Artificial Sequence: Synthetic oligonucleotide
  Antisense strand to SEQ ID NO: 958240
auacuucacgaagguguuc

SEQ ID NO: 958242 - RNA, 19 nt, Artificial Sequence
  Description of Artificial Sequence: Synthetic oligonucleotide
  Sense strand starting at position 1497 of SEQ ID NO: 913841
ggcuguuaagaacgaagaa

SEQ ID NO: 958243 - RNA, 19 nt, Artificial Sequence
  Description of Artificial Sequence: Synthetic oligonucleotide
  Antisense strand to SEQ ID NO: 958242
uucuucguucuuaacagcc

SEQ ID NO: 958244 - RNA, 19 nt, Artificial Sequence
  Description of Artificial Sequence: Synthetic oligonucleotide
  Sense strand starting at position 228 of SEQ ID NO: 913841
gucagaagaugucuuauca

SEQ ID NO: 958245 - RNA, 19 nt, Artificial Sequence
  Description of Artificial Sequence: Synthetic oligonucleotide
  Antisense strand to SEQ ID NO: 958244
ugauaagacaucuucugac

SEQ ID NO: 958246 - RNA, 19 nt, Artificial Sequence
  Description of Artificial Sequence: Synthetic oligonucleotide
  Sense strand starting at position 3440 of SEQ ID NO: 913841
uucuuuaaaguuugacuga

SEQ ID NO: 958247 - RNA, 19 nt, Artificial Sequence
  Description of Artificial Sequence: Synthetic oligonucleotide
  Antisense strand to SEQ ID NO: 958246
ucagucaaacuuuaaagaa

SEQ ID NO: 958248 - RNA, 19 nt, Artificial Sequence
  Description of Artificial Sequence: Synthetic oligonucleotide
  Sense strand starting at position 3101 of SEQ ID NO: 913841
cagaauacgcuuuggaaua

SEQ ID NO: 958249 - RNA, 19 nt, Artificial Sequence
  Description of Artificial Sequence: Synthetic oligonucleotide
  Antisense strand to SEQ ID NO: 958248
uauuccaaagcguauucug

SEQ ID NO: 958250 - RNA, 19 nt, Artificial Sequence
  Description of Artificial Sequence: Synthetic oligonucleotide
  Sense strand starting at position 2590 of SEQ ID NO: 913841
uuaacugacguguauacau

SEQ ID NO: 958251 - RNA, 19 nt, Artificial Sequence
  Description of Artificial Sequence: Synthetic oligonucleotide
  Antisense strand to SEQ ID NO: 958250
auguauacacgucaguuaa

SEQ ID NO: 958252 - RNA, 19 nt, Artificial Sequence
  Description of Artificial Sequence: Synthetic oligonucleotide
  Sense strand starting at position 2485 of SEQ ID NO: 913841
uacaucacggagugaucua

SEQ ID NO: 958253 - RNA, 19 nt, Artificial Sequence
  Description of Artificial Sequence: Synthetic oligonucleotide
  Antisense strand to SEQ ID NO: 958252
uagaucacuccgugaugua

SEQ ID NO: 958254 - RNA, 19 nt, Artificial Sequence
  Description of Artificial Sequence: Synthetic oligonucleotide
  Sense strand starting at position 844 of SEQ ID NO: 913841
cugacuuguuagguuaaga

SEQ ID NO: 958255 - RNA, 19 nt, Artificial Sequence
  Description of Artificial Sequence: Synthetic oligonucleotide
  Antisense strand to SEQ ID NO: 958254
ucuuaaccuaacaagucag

SEQ ID NO: 958256 - RNA, 19 nt, Artificial Sequence
  Description of Artificial Sequence: Synthetic oligonucleotide
  Sense strand starting at position 2496 of SEQ ID NO: 913841
gugaucuaaugacugugau

SEQ ID NO: 958257 - RNA, 19 nt, Artificial Sequence
  Description of Artificial Sequence: Synthetic oligonucleotide
  Antisense strand to SEQ ID NO: 958256
aucacagucauuagaucac

SEQ ID NO: 958258 - RNA, 19 nt, Artificial Sequence
  Description of Artificial Sequence: Synthetic oligonucleotide
  Sense strand starting at position 597 of SEQ ID NO: 913841
ggaguauccucuccgaaga

SEQ ID NO: 958259 - RNA, 19 nt, Artificial Sequence
  Description of Artificial Sequence: Synthetic oligonucleotide
  Antisense strand to SEQ ID NO: 958258
ucuucggagaggauacucc

SEQ ID NO: 958260 - RNA, 19 nt, Artificial Sequence
  Description of Artificial Sequence: Synthetic oligonucleotide
  Sense strand starting at position 3208 of SEQ ID NO: 913841
ugaauuuccuuagaagagu

SEQ ID NO: 958261 - RNA, 19 nt, Artificial Sequence
  Description of Artificial Sequence: Synthetic oligonucleotide
  Antisense strand to SEQ ID NO: 958260
acucuucuaaggaaauuca

SEQ ID NO: 958262 - RNA, 19 nt, Artificial Sequence
  Description of Artificial Sequence: Synthetic oligonucleotide
  Sense strand starting at position 598 of SEQ ID NO: 913841
gaguauccucuccgaagag

SEQ ID NO: 958263 - RNA, 19 nt, Artificial Sequence
  Description of Artificial Sequence: Synthetic oligonucleotide
  Antisense strand to SEQ ID NO: 958262
cucuucggagaggauacuc

SEQ ID NO: 958264 - RNA, 19 nt, Artificial Sequence
  Description of Artificial Sequence: Synthetic oligonucleotide
  Sense strand starting at position 2584 of SEQ ID NO: 913841
agugaauuaacugacgugu

SEQ ID NO: 958265 - RNA, 19 nt, Artificial Sequence
  Description of Artificial Sequence: Synthetic oligonucleotide
  Antisense strand to SEQ ID NO: 958264
acacgucaguuaauucacu

SEQ ID NO: 958266 - RNA, 19 nt, Artificial Sequence
  Description of Artificial Sequence: Synthetic oligonucleotide
  Sense strand starting at position 2583 of SEQ ID NO: 913841
gagugaauuaacugacgug

SEQ ID NO: 958267 - RNA, 19 nt, Artificial Sequence
  Description of Artificial Sequence: Synthetic oligonucleotide
  Antisense strand to SEQ ID NO: 958266
cacgucaguuaauucacuc

SEQ ID NO: 958268 - RNA, 19 nt, Artificial Sequence
  Description of Artificial Sequence: Synthetic oligonucleotide
  Sense strand starting at position 3094 of SEQ ID NO: 913841
uaguuaucagaauacgcuu

SEQ ID NO: 958269 - RNA, 19 nt, Artificial Sequence
  Description of Artificial Sequence: Synthetic oligonucleotide
  Antisense strand to SEQ ID NO: 958268
aagcguauucugauaacua

SEQ ID NO: 958270 - RNA, 19 nt, Artificial Sequence
  Description of Artificial Sequence: Synthetic oligonucleotide
  Sense strand starting at position 3360 of SEQ ID NO: 913841
agccuuagaugauaaauuu

SEQ ID NO: 958271 - RNA, 19 nt, Artificial Sequence
  Description of Artificial Sequence: Synthetic oligonucleotide
  Antisense strand to SEQ ID NO: 958270
aaauuuaucaucuaaggcu

SEQ ID NO: 958272 - RNA, 19 nt, Artificial Sequence
  Description of Artificial Sequence: Synthetic oligonucleotide
  Sense strand starting at position 89 of SEQ ID NO: 913841
gagaacaccuucgugaagu

SEQ ID NO: 958273 - RNA, 19 nt, Artificial Sequence
  Description of Artificial Sequence: Synthetic oligonucleotide
  Antisense strand to SEQ ID NO: 958272
acuucacgaagguguucuc

SEQ ID NO: 958274 - RNA, 19 nt, Artificial Sequence
  Description of Artificial Sequence: Synthetic oligonucleotide
  Sense strand starting at position 280 of SEQ ID NO: 913841
uaaguaguucgacggaaag

SEQ ID NO: 958275 - RNA, 19 nt, Artificial Sequence
  Description of Artificial Sequence: Synthetic oligonucleotide
  Antisense strand to SEQ ID NO: 958274
cuuuccgucgaacuacuua

SEQ ID NO: 958276 - RNA, 19 nt, Artificial Sequence
  Description of Artificial Sequence: Synthetic oligonucleotide
  Sense strand starting at position 3463 of SEQ ID NO: 913841
guaccuucuuggccaagaa

SEQ ID NO: 958277 - RNA, 19 nt, Artificial Sequence
  Description of Artificial Sequence: Synthetic oligonucleotide
  Antisense strand to SEQ ID NO: 958276
uucuuggccaagaagguac

SEQ ID NO: 958278 - RNA, 19 nt, Artificial Sequence
  Description of Artificial Sequence: Synthetic oligonucleotide
  Sense strand starting at position 583 of SEQ ID NO: 913841
ugucauuggccuuaggagu

SEQ ID NO: 958279 - RNA, 19 nt, Artificial Sequence
  Description of Artificial Sequence: Synthetic oligonucleotide
  Antisense strand to SEQ ID NO: 958278
acuccuaaggccaaugaca

SEQ ID NO: 958280 - RNA, 19 nt, Artificial Sequence
  Description of Artificial Sequence: Synthetic oligonucleotide
  Sense strand starting at position 594 of SEQ ID NO: 913841
uuaggaguauccucuccga

SEQ ID NO: 958281 - RNA, 19 nt, Artificial Sequence
  Description of Artificial Sequence: Synthetic oligonucleotide
  Antisense strand to SEQ ID NO: 958280
ucggagaggauacuccuaa

SEQ ID NO: 958282 - RNA, 19 nt, Artificial Sequence
  Description of Artificial Sequence: Synthetic oligonucleotide
  Sense strand starting at position 1502 of SEQ ID NO: 913842
gcaacaacugguuaauaca

SEQ ID NO: 958283 - RNA, 19 nt, Artificial Sequence
  Description of Artificial Sequence: Synthetic oligonucleotide
  Antisense strand to SEQ ID NO: 958282
uguauuaaccaguuguugc

SEQ ID NO: 958284 - RNA, 19 nt, Artificial Sequence
  Description of Artificial Sequence: Synthetic oligonucleotide
  Sense strand starting at position 3738 of SEQ ID NO: 913842
uuaugagcugauuaaauuc

SEQ ID NO: 958285 - RNA, 19 nt, Artificial Sequence
  Description of Artificial Sequence: Synthetic oligonucleotide
  Antisense strand to SEQ ID NO: 958284
gaauuuaaucagcucauaa

SEQ ID NO: 958286 - RNA, 19 nt, Artificial Sequence
  Description of Artificial Sequence: Synthetic oligonucleotide
  Sense strand starting at position 2982 of SEQ ID NO: 913842
gagugaucuaaugacugug

SEQ ID NO: 958287 - RNA, 19 nt, Artificial Sequence
  Description of Artificial Sequence: Synthetic oligonucleotide
  Antisense strand to SEQ ID NO: 958286
cacagucauuagaucacuc

SEQ ID NO: 958288 - RNA, 19 nt, Artificial Sequence
  Description of Artificial Sequence: Synthetic oligonucleotide
  Sense strand starting at position 3846 of SEQ ID NO: 913842
guagccuuagaugauaaau

SEQ ID NO: 958289 - RNA, 19 nt, Artificial Sequence
  Description of Artificial Sequence: Synthetic oligonucleotide
  Antisense strand to SEQ ID NO: 958288
auuuaucaucuaaggcuac

SEQ ID NO: 958290 - RNA, 19 nt, Artificial Sequence
  Description of Artificial Sequence: Synthetic oligonucleotide
  Sense strand starting at position 351 of SEQ ID NO: 913842
uggaaacagcuguauacau

SEQ ID NO: 958291 - RNA, 19 nt, Artificial Sequence
  Description of Artificial Sequence: Synthetic oligonucleotide
  Antisense strand to SEQ ID NO: 958290
auguauacagcuguuucca

SEQ ID NO: 958292 - RNA, 19 nt, Artificial Sequence
  Description of Artificial Sequence: Synthetic oligonucleotide
  Sense strand starting at position 756 of SEQ ID NO: 913842
uugggaagccuuuaaguag

SEQ ID NO: 958293 - RNA, 19 nt, Artificial Sequence
  Description of Artificial Sequence: Synthetic oligonucleotide
  Antisense strand to SEQ ID NO: 958292
cuacuuaaaggcuucccaa

SEQ ID NO: 958294 - RNA, 19 nt, Artificial Sequence
  Description of Artificial Sequence: Synthetic oligonucleotide
  Sense strand starting at position 2652 of SEQ ID NO: 913842
uuaccuauagugggacaua

SEQ ID NO: 958295 - RNA, 19 nt, Artificial Sequence
  Description of Artificial Sequence: Synthetic oligonucleotide
  Antisense strand to SEQ ID NO: 958294
uaugucccacuauagguaa

SEQ ID NO: 958296 - RNA, 19 nt, Artificial Sequence
  Description of Artificial Sequence: Synthetic oligonucleotide
  Sense strand starting at position 1343 of SEQ ID NO: 913842
gguuaagaacuccaugcca

SEQ ID NO: 958297 - RNA, 19 nt, Artificial Sequence
  Description of Artificial Sequence: Synthetic oligonucleotide
  Antisense strand to SEQ ID NO: 958296
uggcauggaguucuuaacc

SEQ ID NO: 958298 - RNA, 19 nt, Artificial Sequence
  Description of Artificial Sequence: Synthetic oligonucleotide
  Sense strand starting at position 3664 of SEQ ID NO: 913842
cuugaauacugccuaagaa

SEQ ID NO: 958299 - RNA, 19 nt, Artificial Sequence
  Description of Artificial Sequence: Synthetic oligonucleotide
  Antisense strand to SEQ ID NO: 958298
uucuuaggcaguauucaag

SEQ ID NO: 958300 - RNA, 19 nt, Artificial Sequence
  Description of Artificial Sequence: Synthetic oligonucleotide
  Sense strand starting at position 2970 of SEQ ID NO: 913842
cucuacaucacggagugau

SEQ ID NO: 958301 - RNA, 19 nt, Artificial Sequence
  Description of Artificial Sequence: Synthetic oligonucleotide
  Antisense strand to SEQ ID NO: 958300
aucacuccgugauguagag

SEQ ID NO: 958302 - RNA, 19 nt, Artificial Sequence
  Description of Artificial Sequence: Synthetic oligonucleotide
  Sense strand starting at position 2985 of SEQ ID NO: 913842
ugaucuaaugacugugaug

SEQ ID NO: 958303 - RNA, 19 nt, Artificial Sequence
  Description of Artificial Sequence: Synthetic oligonucleotide
  Antisense strand to SEQ ID NO: 958302
caucacagucauuagauca

SEQ ID NO: 958304 - RNA, 19 nt, Artificial Sequence
  Description of Artificial Sequence: Synthetic oligonucleotide
  Sense strand starting at position 3576 of SEQ ID NO: 913842
ccgaaauaguuaucagaau

SEQ ID NO: 958305 - RNA, 19 nt, Artificial Sequence
  Description of Artificial Sequence: Synthetic oligonucleotide
  Antisense strand to SEQ ID NO: 958304
auucugauaacuauuucgg

SEQ ID NO: 958306 - RNA, 19 nt, Artificial Sequence
  Description of Artificial Sequence: Synthetic oligonucleotide
  Sense strand starting at position 2913 of SEQ ID NO: 913842
acuacacgccuagaauuau

SEQ ID NO: 958307 - RNA, 19 nt, Artificial Sequence
  Description of Artificial Sequence: Synthetic oligonucleotide
  Antisense strand to SEQ ID NO: 958306
auaauucuaggcguguagu

SEQ ID NO: 958308 - RNA, 19 nt, Artificial Sequence
  Description of Artificial Sequence: Synthetic oligonucleotide
  Sense strand starting at position 948 of SEQ ID NO: 913842
gguacaaucuucucacaag

SEQ ID NO: 958309 - RNA, 19 nt, Artificial Sequence
  Description of Artificial Sequence: Synthetic oligonucleotide
  Antisense strand to SEQ ID NO: 958308
cuugugagaagauuguacc

SEQ ID NO: 958310 - RNA, 19 nt, Artificial Sequence
  Description of Artificial Sequence: Synthetic oligonucleotide
  Sense strand starting at position 978 of SEQ ID NO: 913842
gguccauaccuaugacuaa

SEQ ID NO: 958311 - RNA, 19 nt, Artificial Sequence
  Description of Artificial Sequence: Synthetic oligonucleotide
  Antisense strand to SEQ ID NO: 958310
uuagucauagguauggacc

SEQ ID NO: 958312 - RNA, 19 nt, Artificial Sequence
  Description of Artificial Sequence: Synthetic oligonucleotide
  Sense strand starting at position 3177 of SEQ ID NO: 913842
uugacuuugugugcauuua

SEQ ID NO: 958313 - RNA, 19 nt, Artificial Sequence
  Description of Artificial Sequence: Synthetic oligonucleotide
  Antisense strand to SEQ ID NO: 958312
uaaaugcacacaaagucaa

SEQ ID NO: 958314 - RNA, 19 nt, Artificial Sequence
  Description of Artificial Sequence: Synthetic oligonucleotide
  Sense strand starting at position 3574 of SEQ ID NO: 913842
ugccgaaauaguuaucaga

SEQ ID NO: 958315 - RNA, 19 nt, Artificial Sequence
  Description of Artificial Sequence: Synthetic oligonucleotide
  Antisense strand to SEQ ID NO: 958314
ucugauaacuauuucggca

SEQ ID NO: 958316 - RNA, 19 nt, Artificial Sequence
  Description of Artificial Sequence: Synthetic oligonucleotide
  Sense strand starting at position 3710 of SEQ ID NO: 913842
agaguauuuccuugcuagc

SEQ ID NO: 958317 - RNA, 19 nt, Artificial Sequence
  Description of Artificial Sequence: Synthetic oligonucleotide
  Antisense strand to SEQ ID NO: 958316
gcuagcaaggaaauacucu

SEQ ID NO: 958318 - RNA, 19 nt, Artificial Sequence
  Description of Artificial Sequence: Synthetic oligonucleotide
  Sense strand starting at position 579 of SEQ ID NO: 913842
gaacaccuucgugaaguau

SEQ ID NO: 958319 - RNA, 19 nt, Artificial Sequence
  Description of Artificial Sequence: Synthetic oligonucleotide
  Antisense strand to SEQ ID NO: 958318
auacuucacgaagguguuc

SEQ ID NO: 958320 - RNA, 19 nt, Artificial Sequence
  Description of Artificial Sequence: Synthetic oligonucleotide
  Sense strand starting at position 317 of SEQ ID NO: 913842
uggaauuucuuguaaagaa

SEQ ID NO: 958321 - RNA, 19 nt, Artificial Sequence
  Description of Artificial Sequence: Synthetic oligonucleotide
  Antisense strand to SEQ ID NO: 958320
uucuuuacaagaaauucca

SEQ ID NO: 958322 - RNA, 19 nt, Artificial Sequence
  Description of Artificial Sequence: Synthetic oligonucleotide
  Sense strand starting at position 1985 of SEQ ID NO: 913842
ggcuguuaagaacgaagaa

SEQ ID NO: 958323 - RNA, 19 nt, Artificial Sequence
  Description of Artificial Sequence: Synthetic oligonucleotide
  Antisense strand to SEQ ID NO: 958322
uucuucguucuuaacagcc

SEQ ID NO: 958324 - RNA, 19 nt, Artificial Sequence
  Description of Artificial Sequence: Synthetic oligonucleotide
  Sense strand starting at position 716 of SEQ ID NO: 913842
gucagaagaugucuuauca

SEQ ID NO: 958325 - RNA, 19 nt, Artificial Sequence
  Description of Artificial Sequence: Synthetic oligonucleotide
  Antisense strand to SEQ ID NO: 958324
ugauaagacaucuucugac

SEQ ID NO: 958326 - RNA, 19 nt, Artificial Sequence
  Description of Artificial Sequence: Synthetic oligonucleotide
  Sense strand starting at position 3928 of SEQ ID NO: 913842
uucuuuaaaguuugacuga

SEQ ID NO: 958327 - RNA, 19 nt, Artificial Sequence
  Description of Artificial Sequence: Synthetic oligonucleotide
  Antisense strand to SEQ ID NO: 958326
ucagucaaacuuuaaagaa

SEQ ID NO: 958328 - RNA, 19 nt, Artificial Sequence
  Description of Artificial Sequence: Synthetic oligonucleotide
  Sense strand starting at position 3589 of SEQ ID NO: 913842
cagaauacgcuuuggaaua

SEQ ID NO: 958329 - RNA, 19 nt, Artificial Sequence
  Description of Artificial Sequence: Synthetic oligonucleotide
  Antisense strand to SEQ ID NO: 958328
uauuccaaagcguauucug

SEQ ID NO: 958330 - RNA, 19 nt, Artificial Sequence
  Description of Artificial Sequence: Synthetic oligonucleotide
  Sense strand starting at position 3078 of SEQ ID NO: 913842
uuaacugacguguauacau

SEQ ID NO: 958331 - RNA, 19 nt, Artificial Sequence
  Description of Artificial Sequence: Synthetic oligonucleotide
  Antisense strand to SEQ ID NO: 958330
auguauacacgucaguuaa

SEQ ID NO: 958332 - RNA, 19 nt, Artificial Sequence
  Description of Artificial Sequence: Synthetic oligonucleotide
  Sense strand starting at position 2973 of SEQ ID NO: 913842
uacaucacggagugaucua

SEQ ID NO: 958333 - RNA, 19 nt, Artificial Sequence
  Description of Artificial Sequence: Synthetic oligonucleotide
  Antisense strand to SEQ ID NO: 958332
uagaucacuccgugaugua

SEQ ID NO: 958334 - RNA, 19 nt, Artificial Sequence
  Description of Artificial Sequence: Synthetic oligonucleotide
  Sense strand starting at position 1332 of SEQ ID NO: 913842
cugacuuguuagguuaaga

SEQ ID NO: 958335 - RNA, 19 nt, Artificial Sequence
  Description of Artificial Sequence: Synthetic oligonucleotide
  Antisense strand to SEQ ID NO: 958334
ucuuaaccuaacaagucag

SEQ ID NO: 958336 - RNA, 19 nt, Artificial Sequence
  Description of Artificial Sequence: Synthetic oligonucleotide
  Sense strand starting at position 2984 of SEQ ID NO: 913842
gugaucuaaugacugugau

SEQ ID NO: 958337 - RNA, 19 nt, Artificial Sequence
  Description of Artificial Sequence: Synthetic oligonucleotide
  Antisense strand to SEQ ID NO: 958336
aucacagucauuagaucac

SEQ ID NO: 958338 - RNA, 19 nt, Artificial Sequence
  Description of Artificial Sequence: Synthetic oligonucleotide
  Sense strand starting at position 1085 of SEQ ID NO: 913842
ggaguauccucuccgaaga

SEQ ID NO: 958339 - RNA, 19 nt, Artificial Sequence
  Description of Artificial Sequence: Synthetic oligonucleotide
  Antisense strand to SEQ ID NO: 958338
ucuucggagaggauacucc

SEQ ID NO: 958340 - RNA, 19 nt, Artificial Sequence
  Description of Artificial Sequence: Synthetic oligonucleotide
  Sense strand starting at position 3696 of SEQ ID NO: 913842
ugaauuuccuuagaagagu

SEQ ID NO: 958341 - RNA, 19 nt, Artificial Sequence
  Description of Artificial Sequence: Synthetic oligonucleotide
  Antisense strand to SEQ ID NO: 958340
acucuucuaaggaaauuca

SEQ ID NO: 958342 - RNA, 19 nt, Artificial Sequence
  Description of Artificial Sequence: Synthetic oligonucleotide
  Sense strand starting at position 1086 of SEQ ID NO: 913842
gaguauccucuccgaagag

SEQ ID NO: 958343 - RNA, 19 nt, Artificial Sequence
  Description of Artificial Sequence: Synthetic oligonucleotide
  Antisense strand to SEQ ID NO: 958342
cucuucggagaggauacuc

SEQ ID NO: 958344 - RNA, 19 nt, Artificial Sequence
  Description of Artificial Sequence: Synthetic oligonucleotide
  Sense strand starting at position 3072 of SEQ ID NO: 913842
agugaauuaacugacgugu

SEQ ID NO: 958345 - RNA, 19 nt, Artificial Sequence
  Description of Artificial Sequence: Synthetic oligonucleotide
  Antisense strand to SEQ ID NO: 958344
acacgucaguuaauucacu

SEQ ID NO: 958346 - RNA, 19 nt, Artificial Sequence
  Description of Artificial Sequence: Synthetic oligonucleotide
  Sense strand starting at position 3071 of SEQ ID NO: 913842
gagugaauuaacugacgug

SEQ ID NO: 958347 - RNA, 19 nt, Artificial Sequence
  Description of Artificial Sequence: Synthetic oligonucleotide
  Antisense strand to SEQ ID NO: 958346
cacgucaguuaauucacuc

SEQ ID NO: 958348 - RNA, 19 nt, Artificial Sequence
  Description of Artificial Sequence: Synthetic oligonucleotide
  Sense strand starting at position 3582 of SEQ ID NO: 913842
uaguuaucagaauacgcuu

SEQ ID NO: 958349 - RNA, 19 nt, Artificial Sequence
  Description of Artificial Sequence: Synthetic oligonucleotide
  Antisense strand to SEQ ID NO: 958348
aagcguauucugauaacua

SEQ ID NO: 958350 - RNA, 19 nt, Artificial Sequence
  Description of Artificial Sequence: Synthetic oligonucleotide
  Sense strand starting at position 3848 of SEQ ID NO: 913842
agccuuagaugauaaauuu

SEQ ID NO: 958351 - RNA, 19 nt, Artificial Sequence
  Description of Artificial Sequence: Synthetic oligonucleotide
  Antisense strand to SEQ ID NO: 958350
aaauuuaucaucuaaggcu

SEQ ID NO: 958352 - RNA, 19 nt, Artificial Sequence
  Description of Artificial Sequence: Synthetic oligonucleotide
  Sense strand starting at position 577 of SEQ ID NO: 913842
gagaacaccuucgugaagu

SEQ ID NO: 958353 - RNA, 19 nt, Artificial Sequence
  Description of Artificial Sequence: Synthetic oligonucleotide
  Antisense strand to SEQ ID NO: 958352
acuucacgaagguguucuc

SEQ ID NO: 958354 - RNA, 19 nt, Artificial Sequence
  Description of Artificial Sequence: Synthetic oligonucleotide
  Sense strand starting at position 768 of SEQ ID NO: 913842
uaaguaguucgacggaaag

SEQ ID NO: 958355 - RNA, 19 nt, Artificial Sequence
  Description of Artificial Sequence: Synthetic oligonucleotide
  Antisense strand to SEQ ID NO: 958354
cuuuccgucgaacuacuua

SEQ ID NO: 958356 - RNA, 19 nt, Artificial Sequence
  Description of Artificial Sequence: Synthetic oligonucleotide
  Sense strand starting at position 3951 of SEQ ID NO: 913842
guaccuucuuggccaagaa

SEQ ID NO: 958357 - RNA, 19 nt, Artificial Sequence
  Description of Artificial Sequence: Synthetic oligonucleotide
  Antisense strand to SEQ ID NO: 958356
uucuuggccaagaagguac

SEQ ID NO: 958358 - RNA, 19 nt, Artificial Sequence
  Description of Artificial Sequence: Synthetic oligonucleotide
  Sense strand starting at position 1071 of SEQ ID NO: 913842
ugucauuggccuuaggagu

SEQ ID NO: 958359 - RNA, 19 nt, Artificial Sequence
  Description of Artificial Sequence: Synthetic oligonucleotide
  Antisense strand to SEQ ID NO: 958358
acuccuaaggccaaugaca

SEQ ID NO: 958360 - RNA, 19 nt, Artificial Sequence
  Description of Artificial Sequence: Synthetic oligonucleotide
  Sense strand starting at position 1082 of SEQ ID NO: 913842
uuaggaguauccucuccga

SEQ ID NO: 958361 - RNA, 19 nt, Artificial Sequence
  Description of Artificial Sequence: Synthetic oligonucleotide
  Antisense strand to SEQ ID NO: 958360
ucggagaggauacuccuaa

SEQ ID NO: 958362 - RNA, 19 nt, Artificial Sequence
  Description of Artificial Sequence: Synthetic oligonucleotide
  Sense strand starting at position 2419 of SEQ ID NO: 913843
agaugauaucuauagcuuu

SEQ ID NO: 958363 - RNA, 19 nt, Artificial Sequence
  Description of Artificial Sequence: Synthetic oligonucleotide
  Antisense strand to SEQ ID NO: 958362
aaagcuauagauaucaucu

SEQ ID NO: 958364 - RNA, 19 nt, Artificial Sequence
  Description of Artificial Sequence: Synthetic oligonucleotide
  Sense strand starting at position 339 of SEQ ID NO: 913843
gguguauugggacauaauc

SEQ ID NO: 958365 - RNA, 19 nt, Artificial Sequence
  Description of Artificial Sequence: Synthetic oligonucleotide
  Antisense strand to SEQ ID NO: 958364
gauuaugucccaauacacc

SEQ ID NO: 958366 - RNA, 19 nt, Artificial Sequence
  Description of Artificial Sequence: Synthetic oligonucleotide
  Sense strand starting at position 2920 of SEQ ID NO: 913843
ucuggagacucaguaauua

SEQ ID NO: 958367 - RNA, 19 nt, Artificial Sequence
  Description of Artificial Sequence: Synthetic oligonucleotide
  Antisense strand to SEQ ID NO: 958366
uaauuacugagucuccaga

SEQ ID NO: 958368 - RNA, 19 nt, Artificial Sequence
  Description of Artificial Sequence: Synthetic oligonucleotide
  Sense strand starting at position 62 of SEQ ID NO: 913843
gguuuauaugcauacagau

SEQ ID NO: 958369 - RNA, 19 nt, Artificial Sequence
  Description of Artificial Sequence: Synthetic oligonucleotide
  Antisense strand to SEQ ID NO: 958368
aucuguaugcauauaaacc

SEQ ID NO: 958370 - RNA, 19 nt, Artificial Sequence
  Description of Artificial Sequence: Synthetic oligonucleotide
  Sense strand starting at position 1649 of SEQ ID NO: 913843
cggaaacuuccgggagaac

SEQ ID NO: 958371 - RNA, 19 nt, Artificial Sequence
  Description of Artificial Sequence: Synthetic oligonucleotide
  Antisense strand to SEQ ID NO: 958370
guucucccggaaguuuccg

SEQ ID NO: 958372 - RNA, 19 nt, Artificial Sequence
  Description of Artificial Sequence: Synthetic oligonucleotide
  Sense strand starting at position 1523 of SEQ ID NO: 913843
cugugugggagaugaaauc

SEQ ID NO: 958373 - RNA, 19 nt, Artificial Sequence
  Description of Artificial Sequence: Synthetic oligonucleotide
  Antisense strand to SEQ ID NO: 958372
gauuucaucucccacacag

SEQ ID NO: 958374 - RNA, 19 nt, Artificial Sequence
  Description of Artificial Sequence: Synthetic oligonucleotide
  Sense strand starting at position 3885 of SEQ ID NO: 913843
gcuauacauggugagcaaa

SEQ ID NO: 958375 - RNA, 19 nt, Artificial Sequence
  Description of Artificial Sequence: Synthetic oligonucleotide
  Antisense strand to SEQ ID NO: 958374
uuugcucaccauguauagc

SEQ ID NO: 958376 - RNA, 19 nt, Artificial Sequence
  Description of Artificial Sequence: Synthetic oligonucleotide
  Sense strand starting at position 2910 of SEQ ID NO: 913843
ucauuagagcucuggagac

SEQ ID NO: 958377 - RNA, 19 nt, Artificial Sequence
  Description of Artificial Sequence: Synthetic oligonucleotide
  Antisense strand to SEQ ID NO: 958376
gucuccagagcucuaauga

SEQ ID NO: 958378 - RNA, 19 nt, Artificial Sequence
  Description of Artificial Sequence: Synthetic oligonucleotide
  Sense strand starting at position 86 of SEQ ID NO: 913843
cguggaaugguucaacuca

SEQ ID NO: 958379 - RNA, 19 nt, Artificial Sequence
  Description of Artificial Sequence: Synthetic oligonucleotide
  Antisense strand to SEQ ID NO: 958378
ugaguugaaccauuccacg

SEQ ID NO: 958380 - RNA, 19 nt, Artificial Sequence
  Description of Artificial Sequence: Synthetic oligonucleotide
  Sense strand starting at position 1516 of SEQ ID NO: 913843
ucacuaacugugugggaga

SEQ ID NO: 958381 - RNA, 19 nt, Artificial Sequence
  Description of Artificial Sequence: Synthetic oligonucleotide
  Antisense strand to SEQ ID NO: 958380
ucucccacacaguuaguga

SEQ ID NO: 958382 - RNA, 19 nt, Artificial Sequence
  Description of Artificial Sequence: Synthetic oligonucleotide
  Sense strand starting at position 3898 of SEQ ID NO: 913843
agcaaagcccuguaagauu

SEQ ID NO: 958383 - RNA, 19 nt, Artificial Sequence
  Description of Artificial Sequence: Synthetic oligonucleotide
  Antisense strand to SEQ ID NO: 958382
aaucuuacagggcuuugcu

SEQ ID NO: 958384 - RNA, 19 nt, Artificial Sequence
  Description of Artificial Sequence: Synthetic oligonucleotide
  Sense strand starting at position 3445 of SEQ ID NO: 913843
gucuguugucaacacaaca

SEQ ID NO: 958385 - RNA, 19 nt, Artificial Sequence
  Description of Artificial Sequence: Synthetic oligonucleotide
  Antisense strand to SEQ ID NO: 958384
uguuguguugacaacagac

SEQ ID NO: 958386 - RNA, 19 nt, Artificial Sequence
  Description of Artificial Sequence: Synthetic oligonucleotide
  Sense strand starting at position 143 of SEQ ID NO: 913843
caguaauucgaguacccac

SEQ ID NO: 958387 - RNA, 19 nt, Artificial Sequence
  Description of Artificial Sequence: Synthetic oligonucleotide
  Antisense strand to SEQ ID NO: 958386
guggguacucgaauuacug

SEQ ID NO: 958388 - RNA, 19 nt, Artificial Sequence
  Description of Artificial Sequence: Synthetic oligonucleotide
  Sense strand starting at position 367 of SEQ ID NO: 913843
aauugaggagcauguuauu

SEQ ID NO: 958389 - RNA, 19 nt, Artificial Sequence
  Description of Artificial Sequence: Synthetic oligonucleotide
  Antisense strand to SEQ ID NO: 958388
aauaacaugcuccucaauu

SEQ ID NO: 958390 - RNA, 19 nt, Artificial Sequence
  Description of Artificial Sequence: Synthetic oligonucleotide
  Sense strand starting at position 59 of SEQ ID NO: 913843
uaggguuuauaugcauaca

SEQ ID NO: 958391 - RNA, 19 nt, Artificial Sequence
  Description of Artificial Sequence: Synthetic oligonucleotide
  Antisense strand to SEQ ID NO: 958390
uguaugcauauaaacccua

SEQ ID NO: 958392 - RNA, 19 nt, Artificial Sequence
  Description of Artificial Sequence: Synthetic oligonucleotide
  Sense strand starting at position 1740 of SEQ ID NO: 913843
acgggaucucccuggcaaa

SEQ ID NO: 958393 - RNA, 19 nt, Artificial Sequence
  Description of Artificial Sequence: Synthetic oligonucleotide
  Antisense strand to SEQ ID NO: 958392
uuugccagggagaucccgu

SEQ ID NO: 958394 - RNA, 19 nt, Artificial Sequence
  Description of Artificial Sequence: Synthetic oligonucleotide
  Sense strand starting at position 2318 of SEQ ID NO: 913843
uuuguaguuccugauagua

SEQ ID NO: 958395 - RNA, 19 nt, Artificial Sequence
  Description of Artificial Sequence: Synthetic oligonucleotide
  Antisense strand to SEQ ID NO: 958394
uacuaucaggaacuacaaa

SEQ ID NO: 958396 - RNA, 19 nt, Artificial Sequence
  Description of Artificial Sequence: Synthetic oligonucleotide
  Sense strand starting at position 278 of SEQ ID NO: 913843
aaguguucugaggacguuu

SEQ ID NO: 958397 - RNA, 19 nt, Artificial Sequence
  Description of Artificial Sequence: Synthetic oligonucleotide
  Antisense strand to SEQ ID NO: 958396
aaacguccucagaacacuu

SEQ ID NO: 958398 - RNA, 19 nt, Artificial Sequence
  Description of Artificial Sequence: Synthetic oligonucleotide
  Sense strand starting at position 2386 of SEQ ID NO: 913843
gccauagugccugacaauc

SEQ ID NO: 958399 - RNA, 19 nt, Artificial Sequence
  Description of Artificial Sequence: Synthetic oligonucleotide
  Antisense strand to SEQ ID NO: 958398
gauugucaggcacuauggc

SEQ ID NO: 958400 - RNA, 19 nt, Artificial Sequence
  Description of Artificial Sequence: Synthetic oligonucleotide
  Sense strand starting at position 3896 of SEQ ID NO: 913843
ugagcaaagcccuguaaga

SEQ ID NO: 958401 - RNA, 19 nt, Artificial Sequence
  Description of Artificial Sequence: Synthetic oligonucleotide
  Antisense strand to SEQ ID NO: 958400
ucuuacagggcuuugcuca

SEQ ID NO: 958402 - RNA, 19 nt, Artificial Sequence
  Description of Artificial Sequence: Synthetic oligonucleotide
  Sense strand starting at position 1534 of SEQ ID NO: 913843
augaaauccgccuggugaa

SEQ ID NO: 958403 - RNA, 19 nt, Artificial Sequence
  Description of Artificial Sequence: Synthetic oligonucleotide
  Antisense strand to SEQ ID NO: 958402
uucaccaggcggauuucau

SEQ ID NO: 958404 - RNA, 19 nt, Artificial Sequence
  Description of Artificial Sequence: Synthetic oligonucleotide
  Sense strand starting at position 1690 of SEQ ID NO: 913843
gccaaauagugacccucuu

SEQ ID NO: 958405 - RNA, 19 nt, Artificial Sequence
  Description of Artificial Sequence: Synthetic oligonucleotide
  Antisense strand to SEQ ID NO: 958404
aagagggucacuauuuggc

SEQ ID NO: 958406 - RNA, 19 nt, Artificial Sequence
  Description of Artificial Sequence: Synthetic oligonucleotide
  Sense strand starting at position 300 of SEQ ID NO: 913843
guuggcuaggugcauuaaa

SEQ ID NO: 958407 - RNA, 19 nt, Artificial Sequence
  Description of Artificial Sequence: Synthetic oligonucleotide
  Antisense strand to SEQ ID NO: 958406
uuuaaugcaccuagccaac

SEQ ID NO: 958408 - RNA, 19 nt, Artificial Sequence
  Description of Artificial Sequence: Synthetic oligonucleotide
  Sense strand starting at position 21 of SEQ ID NO: 913843
gaguuucugguuugugaaa

SEQ ID NO: 958409 - RNA, 19 nt, Artificial Sequence
  Description of Artificial Sequence: Synthetic oligonucleotide
  Antisense strand to SEQ ID NO: 958408
uuucacaaaccagaaacuc

SEQ ID NO: 958410 - RNA, 19 nt, Artificial Sequence
  Description of Artificial Sequence: Synthetic oligonucleotide
  Sense strand starting at position 3181 of SEQ ID NO: 913843
cucugaacuuuagauuugu

SEQ ID NO: 958411 - RNA, 19 nt, Artificial Sequence
  Description of Artificial Sequence: Synthetic oligonucleotide
  Antisense strand to SEQ ID NO: 958410
acaaaucuaaaguucagag

SEQ ID NO: 958412 - RNA, 19 nt, Artificial Sequence
  Description of Artificial Sequence: Synthetic oligonucleotide
  Sense strand starting at position 1167 of SEQ ID NO: 913843
gcauuagccucccuaauag

SEQ ID NO: 958413 - RNA, 19 nt, Artificial Sequence
  Description of Artificial Sequence: Synthetic oligonucleotide
  Antisense strand to SEQ ID NO: 958412
cuauuagggaggcuaaugc

SEQ ID NO: 958414 - RNA, 19 nt, Artificial Sequence
  Description of Artificial Sequence: Synthetic oligonucleotide
  Sense strand starting at position 2305 of SEQ ID NO: 913843
cacggagacuguguuugua

SEQ ID NO: 958415 - RNA, 19 nt, Artificial Sequence
  Description of Artificial Sequence: Synthetic oligonucleotide
  Antisense strand to SEQ ID NO: 958414
uacaaacacagucuccgug

SEQ ID NO: 958416 - RNA, 19 nt, Artificial Sequence
  Description of Artificial Sequence: Synthetic oligonucleotide
  Sense strand starting at position 19 of SEQ ID NO: 913843
cugaguuucugguuuguga

SEQ ID NO: 958417 - RNA, 19 nt, Artificial Sequence
  Description of Artificial Sequence: Synthetic oligonucleotide
  Antisense strand to SEQ ID NO: 958416
ucacaaaccagaaacucag

SEQ ID NO: 958418 - RNA, 19 nt, Artificial Sequence
  Description of Artificial Sequence: Synthetic oligonucleotide
  Sense strand starting at position 2886 of SEQ ID NO: 913843
gagcaauugugugcuggag

SEQ ID NO: 958419 - RNA, 19 nt, Artificial Sequence
  Description of Artificial Sequence: Synthetic oligonucleotide
  Antisense strand to SEQ ID NO: 958418
cuccagcacacaauugcuc

SEQ ID NO: 958420 - RNA, 19 nt, Artificial Sequence
  Description of Artificial Sequence: Synthetic oligonucleotide
  Sense strand starting at position 280 of SEQ ID NO: 913843
guguucugaggacguuuaa

SEQ ID NO: 958421 - RNA, 19 nt, Artificial Sequence
  Description of Artificial Sequence: Synthetic oligonucleotide
  Antisense strand to SEQ ID NO: 958420
uuaaacguccucagaacac

SEQ ID NO: 958422 - RNA, 19 nt, Artificial Sequence
  Description of Artificial Sequence: Synthetic oligonucleotide
  Sense strand starting at position 1358 of SEQ ID NO: 913843
gggcguucauuugaaagac

SEQ ID NO: 958423 - RNA, 19 nt, Artificial Sequence
  Description of Artificial Sequence: Synthetic oligonucleotide
  Antisense strand to SEQ ID NO: 958422
gucuuucaaaugaacgccc

SEQ ID NO: 958424 - RNA, 19 nt, Artificial Sequence
  Description of Artificial Sequence: Synthetic oligonucleotide
  Sense strand starting at position 2045 of SEQ ID NO: 913843
cucuuaguaacgcgaugaa

SEQ ID NO: 958425 - RNA, 19 nt, Artificial Sequence
  Description of Artificial Sequence: Synthetic oligonucleotide
  Antisense strand to SEQ ID NO: 958424
uucaucgcguuacuaagag

SEQ ID NO: 958426 - RNA, 19 nt, Artificial Sequence
  Description of Artificial Sequence: Synthetic oligonucleotide
  Sense strand starting at position 3172 of SEQ ID NO: 913843
ccggucuuucucugaacuu

SEQ ID NO: 958427 - RNA, 19 nt, Artificial Sequence
  Description of Artificial Sequence: Synthetic oligonucleotide
  Antisense strand to SEQ ID NO: 958426
aaguucagagaaagaccgg

SEQ ID NO: 958428 - RNA, 19 nt, Artificial Sequence
  Description of Artificial Sequence: Synthetic oligonucleotide
  Sense strand starting at position 2375 of SEQ ID NO: 913843
uccagagagucgccauagu

SEQ ID NO: 958429 - RNA, 19 nt, Artificial Sequence
  Description of Artificial Sequence: Synthetic oligonucleotide
  Antisense strand to SEQ ID NO: 958428
acuauggcgacucucugga

SEQ ID NO: 958430 - RNA, 19 nt, Artificial Sequence
  Description of Artificial Sequence: Synthetic oligonucleotide
  Sense strand starting at position 2885 of SEQ ID NO: 913843
ggagcaauugugugcugga

SEQ ID NO: 958431 - RNA, 19 nt, Artificial Sequence
  Description of Artificial Sequence: Synthetic oligonucleotide
  Antisense strand to SEQ ID NO: 958430
uccagcacacaauugcucc

SEQ ID NO: 958432 - RNA, 19 nt, Artificial Sequence
  Description of Artificial Sequence: Synthetic oligonucleotide
  Sense strand starting at position 2308 of SEQ ID NO: 913843
ggagacuguguuuguaguu

SEQ ID NO: 958433 - RNA, 19 nt, Artificial Sequence
  Description of Artificial Sequence: Synthetic oligonucleotide
  Antisense strand to SEQ ID NO: 958432
aacuacaaacacagucucc

SEQ ID NO: 958434 - RNA, 19 nt, Artificial Sequence
  Description of Artificial Sequence: Synthetic oligonucleotide
  Sense strand starting at position 2956 of SEQ ID NO: 913843
cugagcucguuguuaaaua

SEQ ID NO: 958435 - RNA, 19 nt, Artificial Sequence
  Description of Artificial Sequence: Synthetic oligonucleotide
  Antisense strand to SEQ ID NO: 958434
uauuuaacaacgagcucag

SEQ ID NO: 958436 - RNA, 19 nt, Artificial Sequence
  Description of Artificial Sequence: Synthetic oligonucleotide
  Sense strand starting at position 3081 of SEQ ID NO: 913843
auaaacgagucauacuaaa

SEQ ID NO: 958437 - RNA, 19 nt, Artificial Sequence
  Description of Artificial Sequence: Synthetic oligonucleotide
  Antisense strand to SEQ ID NO: 958436
uuuaguaugacucguuuau

SEQ ID NO: 958438 - RNA, 19 nt, Artificial Sequence
  Description of Artificial Sequence: Synthetic oligonucleotide
  Sense strand starting at position 2384 of SEQ ID NO: 913843
ucgccauagugccugacaa

SEQ ID NO: 958439 - RNA, 19 nt, Artificial Sequence
  Description of Artificial Sequence: Synthetic oligonucleotide
  Antisense strand to SEQ ID NO: 958438
uugucaggcacuauggcga

SEQ ID NO: 958440 - RNA, 19 nt, Artificial Sequence
  Description of Artificial Sequence: Synthetic oligonucleotide
  Sense strand starting at position 2307 of SEQ ID NO: 913843
cggagacuguguuuguagu

SEQ ID NO: 958441 - RNA, 19 nt, Artificial Sequence
  Description of Artificial Sequence: Synthetic oligonucleotide
  Antisense strand to SEQ ID NO: 958440
acuacaaacacagucuccg

SEQ ID NO: 958442 - RNA, 19 nt, Artificial Sequence
  Description of Artificial Sequence: Synthetic oligonucleotide
  Sense strand starting at position 3398 of SEQ ID NO: 913844
agaucugcaguauaauaca

SEQ ID NO: 958443 - RNA, 19 nt, Artificial Sequence
  Description of Artificial Sequence: Synthetic oligonucleotide
  Antisense strand to SEQ ID NO: 958442
uguauuauacugcagaucu

SEQ ID NO: 958444 - RNA, 19 nt, Artificial Sequence
  Description of Artificial Sequence: Synthetic oligonucleotide
  Sense strand starting at position 6 of SEQ ID NO: 913844
guauaagcacuugaauaua

SEQ ID NO: 958445 - RNA, 19 nt, Artificial Sequence
  Description of Artificial Sequence: Synthetic oligonucleotide
  Antisense strand to SEQ ID NO: 958444
uauauucaagugcuuauac

SEQ ID NO: 958446 - RNA, 19 nt, Artificial Sequence
  Description of Artificial Sequence: Synthetic oligonucleotide
  Sense strand starting at position 3417 of SEQ ID NO: 913844
agagaucuuaugggccaaa

SEQ ID NO: 958447 - RNA, 19 nt, Artificial Sequence
  Description of Artificial Sequence: Synthetic oligonucleotide
  Antisense strand to SEQ ID NO: 958446
uuuggcccauaagaucucu

SEQ ID NO: 958448 - RNA, 19 nt, Artificial Sequence
  Description of Artificial Sequence: Synthetic oligonucleotide
  Sense strand starting at position 3285 of SEQ ID NO: 913844
guguguuuccucccuguac

SEQ ID NO: 958449 - RNA, 19 nt, Artificial Sequence
  Description of Artificial Sequence: Synthetic oligonucleotide
  Antisense strand to SEQ ID NO: 958448
guacagggaggaaacacac

SEQ ID NO: 958450 - RNA, 19 nt, Artificial Sequence
  Description of Artificial Sequence: Synthetic oligonucleotide
  Sense strand starting at position 3583 of SEQ ID NO: 913844
aguaacaagucccuaaaga

SEQ ID NO: 958451 - RNA, 19 nt, Artificial Sequence
  Description of Artificial Sequence: Synthetic oligonucleotide
  Antisense strand to SEQ ID NO: 958450
ucuuuagggacuuguuacu

SEQ ID NO: 958452 - RNA, 19 nt, Artificial Sequence
  Description of Artificial Sequence: Synthetic oligonucleotide
  Sense strand starting at position 1684 of SEQ ID NO: 913844
ggauuccacucuuugaaau

SEQ ID NO: 958453 - RNA, 19 nt, Artificial Sequence
  Description of Artificial Sequence: Synthetic oligonucleotide
  Antisense strand to SEQ ID NO: 958452
auuucaaagaguggaaucc

SEQ ID NO: 958454 - RNA, 19 nt, Artificial Sequence
  Description of Artificial Sequence: Synthetic oligonucleotide
  Sense strand starting at position 2381 of SEQ ID NO: 913844
uuauuuggcuccuuggcaa

SEQ ID NO: 958455 - RNA, 19 nt, Artificial Sequence
  Description of Artificial Sequence: Synthetic oligonucleotide
  Antisense strand to SEQ ID NO: 958454
uugccaaggagccaaauaa

SEQ ID NO: 958456 - RNA, 19 nt, Artificial Sequence
  Description of Artificial Sequence: Synthetic oligonucleotide
  Sense strand starting at position 319 of SEQ ID NO: 913844
ggcgaauauauacguauuu

SEQ ID NO: 958457 - RNA, 19 nt, Artificial Sequence
  Description of Artificial Sequence: Synthetic oligonucleotide
  Antisense strand to SEQ ID NO: 958456
aaauacguauauauucgcc

SEQ ID NO: 958458 - RNA, 19 nt, Artificial Sequence
  Description of Artificial Sequence: Synthetic oligonucleotide
  Sense strand starting at position 569 of SEQ ID NO: 913844
uuuaaacaucacuaguguu

SEQ ID NO: 958459 - RNA, 19 nt, Artificial Sequence
  Description of Artificial Sequence: Synthetic oligonucleotide
  Antisense strand to SEQ ID NO: 958458
aacacuagugauguuuaaa

SEQ ID NO: 958460 - RNA, 19 nt, Artificial Sequence
  Description of Artificial Sequence: Synthetic oligonucleotide
  Sense strand starting at position 3396 of SEQ ID NO: 913844
guagaucugcaguauaaua

SEQ ID NO: 958461 - RNA, 19 nt, Artificial Sequence
  Description of Artificial Sequence: Synthetic oligonucleotide
  Antisense strand to SEQ ID NO: 958460
uauuauacugcagaucuac

SEQ ID NO: 958462 - RNA, 19 nt, Artificial Sequence
  Description of Artificial Sequence: Synthetic oligonucleotide
  Sense strand starting at position 2365 of SEQ ID NO: 913844
gcgagcguccauccaguua

SEQ ID NO: 958463 - RNA, 19 nt, Artificial Sequence
  Description of Artificial Sequence: Synthetic oligonucleotide
  Antisense strand to SEQ ID NO: 958462
uaacuggauggacgcucgc

SEQ ID NO: 958464 - RNA, 19 nt, Artificial Sequence
  Description of Artificial Sequence: Synthetic oligonucleotide
  Sense strand starting at position 2545 of SEQ ID NO: 913844
caguguguuguggaagaaa

SEQ ID NO: 958465 - RNA, 19 nt, Artificial Sequence
  Description of Artificial Sequence: Synthetic oligonucleotide
  Antisense strand to SEQ ID NO: 958464
uuucuuccacaacacacug

SEQ ID NO: 958466 - RNA, 19 nt, Artificial Sequence
  Description of Artificial Sequence: Synthetic oligonucleotide
  Sense strand starting at position 417 of SEQ ID NO: 913844
aucuccauauucucggaaa

SEQ ID NO: 958467 - RNA, 19 nt, Artificial Sequence
  Description of Artificial Sequence: Synthetic oligonucleotide
  Antisense strand to SEQ ID NO: 958466
uuuccgagaauauggagau

SEQ ID NO: 958468 - RNA, 19 nt, Artificial Sequence
  Description of Artificial Sequence: Synthetic oligonucleotide
  Sense strand starting at position 2442 of SEQ ID NO: 913844
gcguucuggccucuuguga

SEQ ID NO: 958469 - RNA, 19 nt, Artificial Sequence
  Description of Artificial Sequence: Synthetic oligonucleotide
  Antisense strand to SEQ ID NO: 958468
ucacaagaggccagaacgc

SEQ ID NO: 958470 - RNA, 19 nt, Artificial Sequence
  Description of Artificial Sequence: Synthetic oligonucleotide
  Sense strand starting at position 841 of SEQ ID NO: 913844
cuauuugucucugccuauu

SEQ ID NO: 958471 - RNA, 19 nt, Artificial Sequence
  Description of Artificial Sequence: Synthetic oligonucleotide
  Antisense strand to SEQ ID NO: 958470
aauaggcagagacaaauag

SEQ ID NO: 958472 - RNA, 19 nt, Artificial Sequence
  Description of Artificial Sequence: Synthetic oligonucleotide
  Sense strand starting at position 1635 of SEQ ID NO: 913844
gggcuccaaucccuugaaa

SEQ ID NO: 958473 - RNA, 19 nt, Artificial Sequence
  Description of Artificial Sequence: Synthetic oligonucleotide
  Antisense strand to SEQ ID NO: 958472
uuucaagggauuggagccc

SEQ ID NO: 958474 - RNA, 19 nt, Artificial Sequence
  Description of Artificial Sequence: Synthetic oligonucleotide
  Sense strand starting at position 3560 of SEQ ID NO: 913844
guugucuuggcagacagaa

SEQ ID NO: 958475 - RNA, 19 nt, Artificial Sequence
  Description of Artificial Sequence: Synthetic oligonucleotide
  Antisense strand to SEQ ID NO: 958474
uucugucugccaagacaac

SEQ ID NO: 958476 - RNA, 19 nt, Artificial Sequence
  Description of Artificial Sequence: Synthetic oligonucleotide
  Sense strand starting at position 1638 of SEQ ID NO: 913844
cuccaaucccuugaaacgu

SEQ ID NO: 958477 - RNA, 19 nt, Artificial Sequence
  Description of Artificial Sequence: Synthetic oligonucleotide
  Antisense strand to SEQ ID NO: 958476
acguuucaagggauuggag

SEQ ID NO: 958478 - RNA, 19 nt, Artificial Sequence
  Description of Artificial Sequence: Synthetic oligonucleotide
  Sense strand starting at position 663 of SEQ ID NO: 913844
guuuauacuguacauguaa

SEQ ID NO: 958479 - RNA, 19 nt, Artificial Sequence
  Description of Artificial Sequence: Synthetic oligonucleotide
  Antisense strand to SEQ ID NO: 958478
uuacauguacaguauaaac

SEQ ID NO: 958480 - RNA, 19 nt, Artificial Sequence
  Description of Artificial Sequence: Synthetic oligonucleotide
  Sense strand starting at position 654 of SEQ ID NO: 913844
gcagaauacguuuauacug

SEQ ID NO: 958481 - RNA, 19 nt, Artificial Sequence
  Description of Artificial Sequence: Synthetic oligonucleotide
  Antisense strand to SEQ ID NO: 958480
caguauaaacguauucugc

SEQ ID NO: 958482 - RNA, 19 nt, Artificial Sequence
  Description of Artificial Sequence: Synthetic oligonucleotide
  Sense strand starting at position 3393 of SEQ ID NO: 913844
uugguagaucugcaguaua

SEQ ID NO: 958483 - RNA, 19 nt, Artificial Sequence
  Description of Artificial Sequence: Synthetic oligonucleotide
  Antisense strand to SEQ ID NO: 958482
uauacugcagaucuaccaa

SEQ ID NO: 958484 - RNA, 19 nt, Artificial Sequence
  Description of Artificial Sequence: Synthetic oligonucleotide
  Sense strand starting at position 3647 of SEQ ID NO: 913844
uauagaugcuguucugaga

SEQ ID NO: 958485 - RNA, 19 nt, Artificial Sequence
  Description of Artificial Sequence: Synthetic oligonucleotide
  Antisense strand to SEQ ID NO: 958484
ucucagaacagcaucuaua

SEQ ID NO: 958486 - RNA, 19 nt, Artificial Sequence
  Description of Artificial Sequence: Synthetic oligonucleotide
  Sense strand starting at position 614 of SEQ ID NO: 913844
uuuaacguccuugaguuaa

SEQ ID NO: 958487 - RNA, 19 nt, Artificial Sequence
  Description of Artificial Sequence: Synthetic oligonucleotide
  Antisense strand to SEQ ID NO: 958486
uuaacucaaggacguuaaa

SEQ ID NO: 958488 - RNA, 19 nt, Artificial Sequence
  Description of Artificial Sequence: Synthetic oligonucleotide
  Sense strand starting at position 651 of SEQ ID NO: 913844
caagcagaauacguuuaua

SEQ ID NO: 958489 - RNA, 19 nt, Artificial Sequence
  Description of Artificial Sequence: Synthetic oligonucleotide
  Antisense strand to SEQ ID NO: 958488
uauaaacguauucugcuug

SEQ ID NO: 958490 - RNA, 19 nt, Artificial Sequence
  Description of Artificial Sequence: Synthetic oligonucleotide
  Sense strand starting at position 839 of SEQ ID NO: 913844
ugcuauuugucucugccua

SEQ ID NO: 958491 - RNA, 19 nt, Artificial Sequence
  Description of Artificial Sequence: Synthetic oligonucleotide
  Antisense strand to SEQ ID NO: 958490
uaggcagagacaaauagca

SEQ ID NO: 958492 - RNA, 19 nt, Artificial Sequence
  Description of Artificial Sequence: Synthetic oligonucleotide
  Sense strand starting at position 419 of SEQ ID NO: 913844
cuccauauucucggaaagu

SEQ ID NO: 958493 - RNA, 19 nt, Artificial Sequence
  Description of Artificial Sequence: Synthetic oligonucleotide
  Antisense strand to SEQ ID NO: 958492
acuuuccgagaauauggag

SEQ ID NO: 958494 - RNA, 19 nt, Artificial Sequence
  Description of Artificial Sequence: Synthetic oligonucleotide
  Sense strand starting at position 1325 of SEQ ID NO: 913844
uuaauaauuccugagcguc

SEQ ID NO: 958495 - RNA, 19 nt, Artificial Sequence
  Description of Artificial Sequence: Synthetic oligonucleotide
  Antisense strand to SEQ ID NO: 958494
gacgcucaggaauuauuaa

SEQ ID NO: 958496 - RNA, 19 nt, Artificial Sequence
  Description of Artificial Sequence: Synthetic oligonucleotide
  Sense strand starting at position 840 of SEQ ID NO: 913844
gcuauuugucucugccuau

SEQ ID NO: 958497 - RNA, 19 nt, Artificial Sequence
  Description of Artificial Sequence: Synthetic oligonucleotide
  Antisense strand to SEQ ID NO: 958496
auaggcagagacaaauagc

SEQ ID NO: 958498 - RNA, 19 nt, Artificial Sequence
  Description of Artificial Sequence: Synthetic oligonucleotide
  Sense strand starting at position 3462 of SEQ ID NO: 913844
ugaaauacugcugguccua

SEQ ID NO: 958499 - RNA, 19 nt, Artificial Sequence
  Description of Artificial Sequence: Synthetic oligonucleotide
  Antisense strand to SEQ ID NO: 958498
uaggaccagcaguauuuca

SEQ ID NO: 958500 - RNA, 19 nt, Artificial Sequence
  Description of Artificial Sequence: Synthetic oligonucleotide
  Sense strand starting at position 3310 of SEQ ID NO: 913844
agaacuagacggugucuuu

SEQ ID NO: 958501 - RNA, 19 nt, Artificial Sequence
  Description of Artificial Sequence: Synthetic oligonucleotide
  Antisense strand to SEQ ID NO: 958500
aaagacaccgucuaguucu

SEQ ID NO: 958502 - RNA, 19 nt, Artificial Sequence
  Description of Artificial Sequence: Synthetic oligonucleotide
  Sense strand starting at position 2460 of SEQ ID NO: 913844
acuugaugucaccgguaga

SEQ ID NO: 958503 - RNA, 19 nt, Artificial Sequence
  Description of Artificial Sequence: Synthetic oligonucleotide
  Antisense strand to SEQ ID NO: 958502
ucuaccggugacaucaagu

SEQ ID NO: 958504 - RNA, 19 nt, Artificial Sequence
  Description of Artificial Sequence: Synthetic oligonucleotide
  Sense strand starting at position 568 of SEQ ID NO: 913844
guuuaaacaucacuagugu

SEQ ID NO: 958505 - RNA, 19 nt, Artificial Sequence
  Description of Artificial Sequence: Synthetic oligonucleotide
  Antisense strand to SEQ ID NO: 958504
acacuagugauguuuaaac

SEQ ID NO: 958506 - RNA, 19 nt, Artificial Sequence
  Description of Artificial Sequence: Synthetic oligonucleotide
  Sense strand starting at position 2470 of SEQ ID NO: 913844
accgguagacguggaaauu

SEQ ID NO: 958507 - RNA, 19 nt, Artificial Sequence
  Description of Artificial Sequence: Synthetic oligonucleotide
  Antisense strand to SEQ ID NO: 958506
aauuuccacgucuaccggu

SEQ ID NO: 958508 - RNA, 19 nt, Artificial Sequence
  Description of Artificial Sequence: Synthetic oligonucleotide
  Sense strand starting at position 3294 of SEQ ID NO: 913844
cucccuguaccaugucaga

SEQ ID NO: 958509 - RNA, 19 nt, Artificial Sequence
  Description of Artificial Sequence: Synthetic oligonucleotide
  Antisense strand to SEQ ID NO: 958508
ucugacaugguacagggag

SEQ ID NO: 958510 - RNA, 19 nt, Artificial Sequence
  Description of Artificial Sequence: Synthetic oligonucleotide
  Sense strand starting at position 3392 of SEQ ID NO: 913844
auugguagaucugcaguau

SEQ ID NO: 958511 - RNA, 19 nt, Artificial Sequence
  Description of Artificial Sequence: Synthetic oligonucleotide
  Antisense strand to SEQ ID NO: 958510
auacugcagaucuaccaau

SEQ ID NO: 958512 - RNA, 19 nt, Artificial Sequence
  Description of Artificial Sequence: Synthetic oligonucleotide
  Sense strand starting at position 548 of SEQ ID NO: 913844
cagagcuauuuaugacaga

SEQ ID NO: 958513 - RNA, 19 nt, Artificial Sequence
  Description of Artificial Sequence: Synthetic oligonucleotide
  Antisense strand to SEQ ID NO: 958512
ucugucauaaauagcucug

SEQ ID NO: 958514 - RNA, 19 nt, Artificial Sequence
  Description of Artificial Sequence: Synthetic oligonucleotide
  Sense strand starting at position 2409 of SEQ ID NO: 913844
uucguuucuggcuaagauu

SEQ ID NO: 958515 - RNA, 19 nt, Artificial Sequence
  Description of Artificial Sequence: Synthetic oligonucleotide
  Antisense strand to SEQ ID NO: 958514
aaucuuagccagaaacgaa

SEQ ID NO: 958516 - RNA, 19 nt, Artificial Sequence
  Description of Artificial Sequence: Synthetic oligonucleotide
  Sense strand starting at position 3261 of SEQ ID NO: 913844
ccucuugucuaagucuuaa

SEQ ID NO: 958517 - RNA, 19 nt, Artificial Sequence
  Description of Artificial Sequence: Synthetic oligonucleotide
  Antisense strand to SEQ ID NO: 958516
uuaagacuuagacaagagg

SEQ ID NO: 958518 - RNA, 19 nt, Artificial Sequence
  Description of Artificial Sequence: Synthetic oligonucleotide
  Sense strand starting at position 2461 of SEQ ID NO: 913844
cuugaugucaccgguagac

SEQ ID NO: 958519 - RNA, 19 nt, Artificial Sequence
  Description of Artificial Sequence: Synthetic oligonucleotide
  Antisense strand to SEQ ID NO: 958518
gucuaccggugacaucaag

SEQ ID NO: 958520 - RNA, 19 nt, Artificial Sequence
  Description of Artificial Sequence: Synthetic oligonucleotide
  Sense strand starting at position 3383 of SEQ ID NO: 913844
cugagugccauugguagau

SEQ ID NO: 958521 - RNA, 19 nt, Artificial Sequence
  Description of Artificial Sequence: Synthetic oligonucleotide
  Antisense strand to SEQ ID NO: 958520
aucuaccaauggcacucag

SEQ ID NO: 958522 - RNA, 19 nt, Artificial Sequence
  Description of Artificial Sequence: Synthetic oligonucleotide
  Sense strand starting at position 2506 of SEQ ID NO: 913845
aguagacaucuauagagcu

SEQ ID NO: 958523 - RNA, 19 nt, Artificial Sequence
  Description of Artificial Sequence: Synthetic oligonucleotide
  Antisense strand to SEQ ID NO: 958522
agcucuauagaugucuacu

SEQ ID NO: 958524 - RNA, 19 nt, Artificial Sequence
  Description of Artificial Sequence: Synthetic oligonucleotide
  Sense strand starting at position 320 of SEQ ID NO: 913845
ucgaaagaauacucuaauu

SEQ ID NO: 958525 - RNA, 19 nt, Artificial Sequence
  Description of Artificial Sequence: Synthetic oligonucleotide
  Antisense strand to SEQ ID NO: 958524
aauuagaguauucuuucga

SEQ ID NO: 958526 - RNA, 19 nt, Artificial Sequence
  Description of Artificial Sequence: Synthetic oligonucleotide
  Sense strand starting at position 2310 of SEQ ID NO: 913845
cucguucuuaaagagauag

SEQ ID NO: 958527 - RNA, 19 nt, Artificial Sequence
  Description of Artificial Sequence: Synthetic oligonucleotide
  Antisense strand to SEQ ID NO: 958526
cuaucucuuuaagaacgag

SEQ ID NO: 958528 - RNA, 19 nt, Artificial Sequence
  Description of Artificial Sequence: Synthetic oligonucleotide
  Sense strand starting at position 2546 of SEQ ID NO: 913845
acacuaugagcucacagua

SEQ ID NO: 958529 - RNA, 19 nt, Artificial Sequence
  Description of Artificial Sequence: Synthetic oligonucleotide
  Antisense strand to SEQ ID NO: 958528
uacugugagcucauagugu

SEQ ID NO: 958530 - RNA, 19 nt, Artificial Sequence
  Description of Artificial Sequence: Synthetic oligonucleotide
  Sense strand starting at position 2339 of SEQ ID NO: 913845
accuacuuucuauggagau

SEQ ID NO: 958531 - RNA, 19 nt, Artificial Sequence
  Description of Artificial Sequence: Synthetic oligonucleotide
  Antisense strand to SEQ ID NO: 958530
aucuccauagaaaguaggu

SEQ ID NO: 958532 - RNA, 19 nt, Artificial Sequence
  Description of Artificial Sequence: Synthetic oligonucleotide
  Sense strand starting at position 1195 of SEQ ID NO: 913845
aggagauucgcccaacauc

SEQ ID NO: 958533 - RNA, 19 nt, Artificial Sequence
  Description of Artificial Sequence: Synthetic oligonucleotide
  Antisense strand to SEQ ID NO: 958532
gauguugggcgaaucuccu

SEQ ID NO: 958534 - RNA, 19 nt, Artificial Sequence
  Description of Artificial Sequence: Synthetic oligonucleotide
  Sense strand starting at position 1828 of SEQ ID NO: 913845
ucucguucccuggaagaag

SEQ ID NO: 958535 - RNA, 19 nt, Artificial Sequence
  Description of Artificial Sequence: Synthetic oligonucleotide
  Antisense strand to SEQ ID NO: 958534
cuucuuccagggaacgaga

SEQ ID NO: 958536 - RNA, 19 nt, Artificial Sequence
  Description of Artificial Sequence: Synthetic oligonucleotide
  Sense strand starting at position 3032 of SEQ ID NO: 913845
gauuaagacuuaguaaugu

SEQ ID NO: 958537 - RNA, 19 nt, Artificial Sequence
  Description of Artificial Sequence: Synthetic oligonucleotide
  Antisense strand to SEQ ID NO: 958536
acauuacuaagucuuaauc

SEQ ID NO: 958538 - RNA, 19 nt, Artificial Sequence
  Description of Artificial Sequence: Synthetic oligonucleotide
  Sense strand starting at position 713 of SEQ ID NO: 913845
ccgcuucugcggucacuaa

SEQ ID NO: 958539 - RNA, 19 nt, Artificial Sequence
  Description of Artificial Sequence: Synthetic oligonucleotide
  Antisense strand to SEQ ID NO: 958538
uuagugaccgcagaagcgg

SEQ ID NO: 958540 - RNA, 19 nt, Artificial Sequence
  Description of Artificial Sequence: Synthetic oligonucleotide
  Sense strand starting at position 2303 of SEQ ID NO: 913845
gcggccucucguucuuaaa

SEQ ID NO: 958541 - RNA, 19 nt, Artificial Sequence
  Description of Artificial Sequence: Synthetic oligonucleotide
  Antisense strand to SEQ ID NO: 958540
uuuaagaacgagaggccgc

SEQ ID NO: 958542 - RNA, 19 nt, Artificial Sequence
  Description of Artificial Sequence: Synthetic oligonucleotide
  Sense strand starting at position 759 of SEQ ID NO: 913845
gagaaucugugauuaaagc

SEQ ID NO: 958543 - RNA, 19 nt, Artificial Sequence
  Description of Artificial Sequence: Synthetic oligonucleotide
  Antisense strand to SEQ ID NO: 958542
gcuuuaaucacagauucuc

SEQ ID NO: 958544 - RNA, 19 nt, Artificial Sequence
  Description of Artificial Sequence: Synthetic oligonucleotide
  Sense strand starting at position 3964 of SEQ ID NO: 913845
gcaauauugccagacccag

SEQ ID NO: 958545 - RNA, 19 nt, Artificial Sequence
  Description of Artificial Sequence: Synthetic oligonucleotide
  Antisense strand to SEQ ID NO: 958544
cugggucuggcaauauugc

SEQ ID NO: 958546 - RNA, 19 nt, Artificial Sequence
  Description of Artificial Sequence: Synthetic oligonucleotide
  Sense strand starting at position 1193 of SEQ ID NO: 913845
caaggagauucgcccaaca

SEQ ID NO: 958547 - RNA, 19 nt, Artificial Sequence
  Description of Artificial Sequence: Synthetic oligonucleotide
  Antisense strand to SEQ ID NO: 958546
uguugggcgaaucuccuug

SEQ ID NO: 958548 - RNA, 19 nt, Artificial Sequence
  Description of Artificial Sequence: Synthetic oligonucleotide
  Sense strand starting at position 3040 of SEQ ID NO: 913845
cuuaguaauguccaucuua

SEQ ID NO: 958549 - RNA, 19 nt, Artificial Sequence
  Description of Artificial Sequence: Synthetic oligonucleotide
  Antisense strand to SEQ ID NO: 958548
uaagauggacauuacuaag

SEQ ID NO: 958550 - RNA, 19 nt, Artificial Sequence
  Description of Artificial Sequence: Synthetic oligonucleotide
  Sense strand starting at position 1716 of SEQ ID NO: 913845
cccgaaugcccggaugaga

SEQ ID NO: 958551 - RNA, 19 nt, Artificial Sequence
  Description of Artificial Sequence: Synthetic oligonucleotide
  Antisense strand to SEQ ID NO: 958550
ucucauccgggcauucggg

SEQ ID NO: 958552 - RNA, 19 nt, Artificial Sequence
  Description of Artificial Sequence: Synthetic oligonucleotide
  Sense strand starting at position 3138 of SEQ ID NO: 913845
aguccuggauuguugagau

SEQ ID NO: 958553 - RNA, 19 nt, Artificial Sequence
  Description of Artificial Sequence: Synthetic oligonucleotide
  Antisense strand to SEQ ID NO: 958552
aucucaacaauccaggacu

SEQ ID NO: 958554 - RNA, 19 nt, Artificial Sequence
  Description of Artificial Sequence: Synthetic oligonucleotide
  Sense strand starting at position 3631 of SEQ ID NO: 913845
gcaaucauagcuuaaguau

SEQ ID NO: 958555 - RNA, 19 nt, Artificial Sequence
  Description of Artificial Sequence: Synthetic oligonucleotide
  Antisense strand to SEQ ID NO: 958554
auacuuaagcuaugauugc

SEQ ID NO: 958556 - RNA, 19 nt, Artificial Sequence
  Description of Artificial Sequence: Synthetic oligonucleotide
  Sense strand starting at position 755 of SEQ ID NO: 913845
cuucgagaaucugugauua

SEQ ID NO: 958557 - RNA, 19 nt, Artificial Sequence
  Description of Artificial Sequence: Synthetic oligonucleotide
  Antisense strand to SEQ ID NO: 958556
uaaucacagauucucgaag

SEQ ID NO: 958558 - RNA, 19 nt, Artificial Sequence
  Description of Artificial Sequence: Synthetic oligonucleotide
  Sense strand starting at position 2998 of SEQ ID NO: 913845
uaucucaaccugugaggua

SEQ ID NO: 958559 - RNA, 19 nt, Artificial Sequence
  Description of Artificial Sequence: Synthetic oligonucleotide
  Antisense strand to SEQ ID NO: 958558
uaccucacagguugagaua

SEQ ID NO: 958560 - RNA, 19 nt, Artificial Sequence
  Description of Artificial Sequence: Synthetic oligonucleotide
  Sense strand starting at position 25 of SEQ ID NO: 913845
uccuuagacucauuccagu

SEQ ID NO: 958561 - RNA, 19 nt, Artificial Sequence
  Description of Artificial Sequence: Synthetic oligonucleotide
  Antisense strand to SEQ ID NO: 958560
acuggaaugagucuaagga

SEQ ID NO: 958562 - RNA, 19 nt, Artificial Sequence
  Description of Artificial Sequence: Synthetic oligonucleotide
  Sense strand starting at position 286 of SEQ ID NO: 913845
uguuauggucuguaccaua

SEQ ID NO: 958563 - RNA, 19 nt, Artificial Sequence
  Description of Artificial Sequence: Synthetic oligonucleotide
  Antisense strand to SEQ ID NO: 958562
uaugguacagaccauaaca

SEQ ID NO: 958564 - RNA, 19 nt, Artificial Sequence
  Description of Artificial Sequence: Synthetic oligonucleotide
  Sense strand starting at position 5 of SEQ ID NO: 913845
guauaauggacuggcaagu

SEQ ID NO: 958565 - RNA, 19 nt, Artificial Sequence
  Description of Artificial Sequence: Synthetic oligonucleotide
  Antisense strand to SEQ ID NO: 958564
acuugccaguccauuauac

SEQ ID NO: 958566 - RNA, 19 nt, Artificial Sequence
  Description of Artificial Sequence: Synthetic oligonucleotide
  Sense strand starting at position 14 of SEQ ID NO: 913845
acuggcaaguuuccuuaga

SEQ ID NO: 958567 - RNA, 19 nt, Artificial Sequence
  Description of Artificial Sequence: Synthetic oligonucleotide
  Antisense strand to SEQ ID NO: 958566
ucuaaggaaacuugccagu

SEQ ID NO: 958568 - RNA, 19 nt, Artificial Sequence
  Description of Artificial Sequence: Synthetic oligonucleotide
  Sense strand starting at position 2266 of SEQ ID NO: 913845
agagguguuuauucucuca

SEQ ID NO: 958569 - RNA, 19 nt, Artificial Sequence
  Description of Artificial Sequence: Synthetic oligonucleotide
  Antisense strand to SEQ ID NO: 958568
ugagagaauaaacaccucu

SEQ ID NO: 958570 - RNA, 19 nt, Artificial Sequence
  Description of Artificial Sequence: Synthetic oligonucleotide
  Sense strand starting at position 445 of SEQ ID NO: 913845
cgccauuacauacgagaga

SEQ ID NO: 958571 - RNA, 19 nt, Artificial Sequence
  Description of Artificial Sequence: Synthetic oligonucleotide
  Antisense strand to SEQ ID NO: 958570
ucucucguauguaauggcg

SEQ ID NO: 958572 - RNA, 19 nt, Artificial Sequence
  Description of Artificial Sequence: Synthetic oligonucleotide
  Sense strand starting at position 1309 of SEQ ID NO: 913845
gaggacagaacguguuagu

SEQ ID NO: 958573 - RNA, 19 nt, Artificial Sequence
  Description of Artificial Sequence: Synthetic oligonucleotide
  Antisense strand to SEQ ID NO: 958572
acuaacacguucuguccuc

SEQ ID NO: 958574 - RNA, 19 nt, Artificial Sequence
  Description of Artificial Sequence: Synthetic oligonucleotide
  Sense strand starting at position 371 of SEQ ID NO: 913845
ucucaacgucgagagcaau

SEQ ID NO: 958575 - RNA, 19 nt, Artificial Sequence
  Description of Artificial Sequence: Synthetic oligonucleotide
  Antisense strand to SEQ ID NO: 958574
auugcucucgacguugaga

SEQ ID NO: 958576 - RNA, 19 nt, Artificial Sequence
  Description of Artificial Sequence: Synthetic oligonucleotide
  Sense strand starting at position 585 of SEQ ID NO: 913845
gguggacuaucuguccauu

SEQ ID NO: 958577 - RNA, 19 nt, Artificial Sequence
  Description of Artificial Sequence: Synthetic oligonucleotide
  Antisense strand to SEQ ID NO: 958576
aauggacagauaguccacc

SEQ ID NO: 958578 - RNA, 19 nt, Artificial Sequence
  Description of Artificial Sequence: Synthetic oligonucleotide
  Sense strand starting at position 1882 of SEQ ID NO: 913845
cugcccucccgauaaucuu

SEQ ID NO: 958579 - RNA, 19 nt, Artificial Sequence
  Description of Artificial Sequence: Synthetic oligonucleotide
  Antisense strand to SEQ ID NO: 958578
aagauuaucgggagggcag

SEQ ID NO: 958580 - RNA, 19 nt, Artificial Sequence
  Description of Artificial Sequence: Synthetic oligonucleotide
  Sense strand starting at position 16 of SEQ ID NO: 913845
uggcaaguuuccuuagacu

SEQ ID NO: 958581 - RNA, 19 nt, Artificial Sequence
  Description of Artificial Sequence: Synthetic oligonucleotide
  Antisense strand to SEQ ID NO: 958580
agucuaaggaaacuugcca

SEQ ID NO: 958582 - RNA, 19 nt, Artificial Sequence
  Description of Artificial Sequence: Synthetic oligonucleotide
  Sense strand starting at position 233 of SEQ ID NO: 913845
gacaguuaacuucgcugaa

SEQ ID NO: 958583 - RNA, 19 nt, Artificial Sequence
  Description of Artificial Sequence: Synthetic oligonucleotide
  Antisense strand to SEQ ID NO: 958582
uucagcgaaguuaacuguc

SEQ ID NO: 958584 - RNA, 19 nt, Artificial Sequence
  Description of Artificial Sequence: Synthetic oligonucleotide
  Sense strand starting at position 1826 of SEQ ID NO: 913845
ccucucguucccuggaaga

SEQ ID NO: 958585 - RNA, 19 nt, Artificial Sequence
  Description of Artificial Sequence: Synthetic oligonucleotide
  Antisense strand to SEQ ID NO: 958584
ucuuccagggaacgagagg

SEQ ID NO: 958586 - RNA, 19 nt, Artificial Sequence
  Description of Artificial Sequence: Synthetic oligonucleotide
  Sense strand starting at position 2361 of SEQ ID NO: 913845
uguaauaggugggcucauu

SEQ ID NO: 958587 - RNA, 19 nt, Artificial Sequence
  Description of Artificial Sequence: Synthetic oligonucleotide
  Antisense strand to SEQ ID NO: 958586
aaugagcccaccuauuaca

SEQ ID NO: 958588 - RNA, 19 nt, Artificial Sequence
  Description of Artificial Sequence: Synthetic oligonucleotide
  Sense strand starting at position 234 of SEQ ID NO: 913845
acaguuaacuucgcugaac

SEQ ID NO: 958589 - RNA, 19 nt, Artificial Sequence
  Description of Artificial Sequence: Synthetic oligonucleotide
  Antisense strand to SEQ ID NO: 958588
guucagcgaaguuaacugu

SEQ ID NO: 958590 - RNA, 19 nt, Artificial Sequence
  Description of Artificial Sequence: Synthetic oligonucleotide
  Sense strand starting at position 2118 of SEQ ID NO: 913845
aguggaauguaccauuucu

SEQ ID NO: 958591 - RNA, 19 nt, Artificial Sequence
  Description of Artificial Sequence: Synthetic oligonucleotide
  Antisense strand to SEQ ID NO: 958590
agaaaugguacauuccacu

SEQ ID NO: 958592 - RNA, 19 nt, Artificial Sequence
  Description of Artificial Sequence: Synthetic oligonucleotide
  Sense strand starting at position 2052 of SEQ ID NO: 913845
cuauuaagcuucuuuaggu

SEQ ID NO: 958593 - RNA, 19 nt, Artificial Sequence
  Description of Artificial Sequence: Synthetic oligonucleotide
  Antisense strand to SEQ ID NO: 958592
accuaaagaagcuuaauag

SEQ ID NO: 958594 - RNA, 19 nt, Artificial Sequence
  Description of Artificial Sequence: Synthetic oligonucleotide
  Sense strand starting at position 2395 of SEQ ID NO: 913845
aggcuugguucgguaaaga

SEQ ID NO: 958595 - RNA, 19 nt, Artificial Sequence
  Description of Artificial Sequence: Synthetic oligonucleotide
  Antisense strand to SEQ ID NO: 958594
ucuuuaccgaaccaagccu

SEQ ID NO: 958596 - RNA, 19 nt, Artificial Sequence
  Description of Artificial Sequence: Synthetic oligonucleotide
  Sense strand starting at position 2530 of SEQ ID NO: 913845
cgugcugggcucuagaaca

SEQ ID NO: 958597 - RNA, 19 nt, Artificial Sequence
  Description of Artificial Sequence: Synthetic oligonucleotide
  Antisense strand to SEQ ID NO: 958596
uguucuagagcccagcacg

SEQ ID NO: 958598 - RNA, 19 nt, Artificial Sequence
  Description of Artificial Sequence: Synthetic oligonucleotide
  Sense strand starting at position 3649 of SEQ ID NO: 913845
ucgaauuccugggcucuca

SEQ ID NO: 958599 - RNA, 19 nt, Artificial Sequence
  Description of Artificial Sequence: Synthetic oligonucleotide
  Antisense strand to SEQ ID NO: 958598
ugagagcccaggaauucga

SEQ ID NO: 958600 - RNA, 19 nt, Artificial Sequence
  Description of Artificial Sequence: Synthetic oligonucleotide
  Sense strand starting at position 3647 of SEQ ID NO: 913845
uaucgaauuccugggcucu

SEQ ID NO: 958601 - RNA, 19 nt, Artificial Sequence
  Description of Artificial Sequence: Synthetic oligonucleotide
  Antisense strand to SEQ ID NO: 958600
agagcccaggaauucgaua

SEQ ID NO: 958602 - RNA, 19 nt, Artificial Sequence
  Description of Artificial Sequence: Synthetic oligonucleotide
  Sense strand starting at position 3353 of SEQ ID NO: 913846
guauuugugacuugcagga

SEQ ID NO: 958603 - RNA, 19 nt, Artificial Sequence
  Description of Artificial Sequence: Synthetic oligonucleotide
  Antisense strand to SEQ ID NO: 958602
uccugcaagucacaaauac

SEQ ID NO: 958604 - RNA, 19 nt, Artificial Sequence
  Description of Artificial Sequence: Synthetic oligonucleotide
  Sense strand starting at position 3549 of SEQ ID NO: 913846
cccugaguacacgauauaa

SEQ ID NO: 958605 - RNA, 19 nt, Artificial Sequence
  Description of Artificial Sequence: Synthetic oligonucleotide
  Antisense strand to SEQ ID NO: 958604
uuauaucguguacucaggg

SEQ ID NO: 958606 - RNA, 19 nt, Artificial Sequence
  Description of Artificial Sequence: Synthetic oligonucleotide
  Sense strand starting at position 3721 of SEQ ID NO: 913846
ucuauaagacuucgggaaa

SEQ ID NO: 958607 - RNA, 19 nt, Artificial Sequence
  Description of Artificial Sequence: Synthetic oligonucleotide
  Antisense strand to SEQ ID NO: 958606
uuucccgaagucuuauaga

SEQ ID NO: 958608 - RNA, 19 nt, Artificial Sequence
  Description of Artificial Sequence: Synthetic oligonucleotide
  Sense strand starting at position 3376 of SEQ ID NO: 913846
acauauuagcaugagugau

SEQ ID NO: 958609 - RNA, 19 nt, Artificial Sequence
  Description of Artificial Sequence: Synthetic oligonucleotide
  Antisense strand to SEQ ID NO: 958608
aucacucaugcuaauaugu

SEQ ID NO: 958610 - RNA, 19 nt, Artificial Sequence
  Description of Artificial Sequence: Synthetic oligonucleotide
  Sense strand starting at position 1193 of SEQ ID NO: 913846
ucugcuuuccaggacagaa

SEQ ID NO: 958611 - RNA, 19 nt, Artificial Sequence
  Description of Artificial Sequence: Synthetic oligonucleotide
  Antisense strand to SEQ ID NO: 958610
uucuguccuggaaagcaga

SEQ ID NO: 958612 - RNA, 19 nt, Artificial Sequence
  Description of Artificial Sequence: Synthetic oligonucleotide
  Sense strand starting at position 1015 of SEQ ID NO: 913846
gggagagccugacuuaaca

SEQ ID NO: 958613 - RNA, 19 nt, Artificial Sequence
  Description of Artificial Sequence: Synthetic oligonucleotide
  Antisense strand to SEQ ID NO: 958612
uguuaagucaggcucuccc

SEQ ID NO: 958614 - RNA, 19 nt, Artificial Sequence
  Description of Artificial Sequence: Synthetic oligonucleotide
  Sense strand starting at position 1372 of SEQ ID NO: 913846
acucuaaguguugaugaau

SEQ ID NO: 958615 - RNA, 19 nt, Artificial Sequence
  Description of Artificial Sequence: Synthetic oligonucleotide
  Antisense strand to SEQ ID NO: 958614
auucaucaacacuuagagu

SEQ ID NO: 958616 - RNA, 19 nt, Artificial Sequence
  Description of Artificial Sequence: Synthetic oligonucleotide
  Sense strand starting at position 2721 of SEQ ID NO: 913846
uuauuaggaguugaauugu

SEQ ID NO: 958617 - RNA, 19 nt, Artificial Sequence
  Description of Artificial Sequence: Synthetic oligonucleotide
  Antisense strand to SEQ ID NO: 958616
acaauucaacuccuaauaa

SEQ ID NO: 958618 - RNA, 19 nt, Artificial Sequence
  Description of Artificial Sequence: Synthetic oligonucleotide
  Sense strand starting at position 2731 of SEQ ID NO: 913846
uugaauuguguccaccaga

SEQ ID NO: 958619 - RNA, 19 nt, Artificial Sequence
  Description of Artificial Sequence: Synthetic oligonucleotide
  Antisense strand to SEQ ID NO: 958618
ucugguggacacaauucaa

SEQ ID NO: 958620 - RNA, 19 nt, Artificial Sequence
  Description of Artificial Sequence: Synthetic oligonucleotide
  Sense strand starting at position 3559 of SEQ ID NO: 913846
acgauauaauggucaaauc

SEQ ID NO: 958621 - RNA, 19 nt, Artificial Sequence
  Description of Artificial Sequence: Synthetic oligonucleotide
  Antisense strand to SEQ ID NO: 958620
gauuugaccauuauaucgu

SEQ ID NO: 958622 - RNA, 19 nt, Artificial Sequence
  Description of Artificial Sequence: Synthetic oligonucleotide
  Sense strand starting at position 3378 of SEQ ID NO: 913846
auauuagcaugagugauaa

SEQ ID NO: 958623 - RNA, 19 nt, Artificial Sequence
  Description of Artificial Sequence: Synthetic oligonucleotide
  Antisense strand to SEQ ID NO: 958622
uuaucacucaugcuaauau

SEQ ID NO: 958624 - RNA, 19 nt, Artificial Sequence
  Description of Artificial Sequence: Synthetic oligonucleotide
  Sense strand starting at position 1378 of SEQ ID NO: 913846
aguguugaugaauacaguu

SEQ ID NO: 958625 - RNA, 19 nt, Artificial Sequence
  Description of Artificial Sequence: Synthetic oligonucleotide
  Antisense strand to SEQ ID NO: 958624
aacuguauucaucaacacu

SEQ ID NO: 958626 - RNA, 19 nt, Artificial Sequence
  Description of Artificial Sequence: Synthetic oligonucleotide
  Sense strand starting at position 3391 of SEQ ID NO: 913846
ugauaaggguuguucagag

SEQ ID NO: 958627 - RNA, 19 nt, Artificial Sequence
  Description of Artificial Sequence: Synthetic oligonucleotide
  Antisense strand to SEQ ID NO: 958626
cucugaacaacccuuauca

SEQ ID NO: 958628 - RNA, 19 nt, Artificial Sequence
  Description of Artificial Sequence: Synthetic oligonucleotide
  Sense strand starting at position 3375 of SEQ ID NO: 913846
aacauauuagcaugaguga

SEQ ID NO: 958629 - RNA, 19 nt, Artificial Sequence
  Description of Artificial Sequence: Synthetic oligonucleotide
  Antisense strand to SEQ ID NO: 958628
ucacucaugcuaauauguu

SEQ ID NO: 958630 - RNA, 19 nt, Artificial Sequence
  Description of Artificial Sequence: Synthetic oligonucleotide
  Sense strand starting at position 1314 of SEQ ID NO: 913846
gguguuauaaccgacauua

SEQ ID NO: 958631 - RNA, 19 nt, Artificial Sequence
  Description of Artificial Sequence: Synthetic oligonucleotide
  Antisense strand to SEQ ID NO: 958630
uaaugucgguuauaacacc

SEQ ID NO: 958632 - RNA, 19 nt, Artificial Sequence
  Description of Artificial Sequence: Synthetic oligonucleotide
  Sense strand starting at position 816 of SEQ ID NO: 913846
cugaguuaacgugauauua

SEQ ID NO: 958633 - RNA, 19 nt, Artificial Sequence
  Description of Artificial Sequence: Synthetic oligonucleotide
  Antisense strand to SEQ ID NO: 958632
uaauaucacguuaacucag

SEQ ID NO: 958634 - RNA, 19 nt, Artificial Sequence
  Description of Artificial Sequence: Synthetic oligonucleotide
  Sense strand starting at position 1151 of SEQ ID NO: 913846
ugaugaucucagcaggcau

SEQ ID NO: 958635 - RNA, 19 nt, Artificial Sequence
  Description of Artificial Sequence: Synthetic oligonucleotide
  Antisense strand to SEQ ID NO: 958634
augccugcugagaucauca

SEQ ID NO: 958636 - RNA, 19 nt, Artificial Sequence
  Description of Artificial Sequence: Synthetic oligonucleotide
  Sense strand starting at position 2720 of SEQ ID NO: 913846
guuauuaggaguugaauug

SEQ ID NO: 958637 - RNA, 19 nt, Artificial Sequence
  Description of Artificial Sequence: Synthetic oligonucleotide
  Antisense strand to SEQ ID NO: 958636
caauucaacuccuaauaac

SEQ ID NO: 958638 - RNA, 19 nt, Artificial Sequence
  Description of Artificial Sequence: Synthetic oligonucleotide
  Sense strand starting at position 1054 of SEQ ID NO: 913846
uuggaugucuauguaaaua

SEQ ID NO: 958639 - RNA, 19 nt, Artificial Sequence
  Description of Artificial Sequence: Synthetic oligonucleotide
  Antisense strand to SEQ ID NO: 958638
uauuuacauagacauccaa

SEQ ID NO: 958640 - RNA, 19 nt, Artificial Sequence
  Description of Artificial Sequence: Synthetic oligonucleotide
  Sense strand starting at position 3613 of SEQ ID NO: 913846
ucggaauccuucucaacac

SEQ ID NO: 958641 - RNA, 19 nt, Artificial Sequence
  Description of Artificial Sequence: Synthetic oligonucleotide
  Antisense strand to SEQ ID NO: 958640
guguugagaaggauuccga

SEQ ID NO: 958642 - RNA, 19 nt, Artificial Sequence
  Description of Artificial Sequence: Synthetic oligonucleotide
  Sense strand starting at position 3934 of SEQ ID NO: 913846
caguuagaaccgggaucuu

SEQ ID NO: 958643 - RNA, 19 nt, Artificial Sequence
  Description of Artificial Sequence: Synthetic oligonucleotide
  Antisense strand to SEQ ID NO: 958642
aagaucccgguucuaacug

SEQ ID NO: 958644 - RNA, 19 nt, Artificial Sequence
  Description of Artificial Sequence: Synthetic oligonucleotide
  Sense strand starting at position 114 of SEQ ID NO: 913846
aaguaaggcccaggugaua

SEQ ID NO: 958645 - RNA, 19 nt, Artificial Sequence
  Description of Artificial Sequence: Synthetic oligonucleotide
  Antisense strand to SEQ ID NO: 958644
uaucaccugggccuuacuu

SEQ ID NO: 958646 - RNA, 19 nt, Artificial Sequence
  Description of Artificial Sequence: Synthetic oligonucleotide
  Sense strand starting at position 3171 of SEQ ID NO: 913846
guaucaucccuggaggcuu

SEQ ID NO: 958647 - RNA, 19 nt, Artificial Sequence
  Description of Artificial Sequence: Synthetic oligonucleotide
  Antisense strand to SEQ ID NO: 958646
aagccuccagggaugauac

SEQ ID NO: 958648 - RNA, 19 nt, Artificial Sequence
  Description of Artificial Sequence: Synthetic oligonucleotide
  Sense strand starting at position 1391 of SEQ ID NO: 913846
acaguuaggguaugaugua

SEQ ID NO: 958649 - RNA, 19 nt, Artificial Sequence
  Description of Artificial Sequence: Synthetic oligonucleotide
  Antisense strand to SEQ ID NO: 958648
uacaucauacccuaacugu

SEQ ID NO: 958650 - RNA, 19 nt, Artificial Sequence
  Description of Artificial Sequence: Synthetic oligonucleotide
  Sense strand starting at position 3340 of SEQ ID NO: 913846
ugcucauaccuucguauuu

SEQ ID NO: 958651 - RNA, 19 nt, Artificial Sequence
  Description of Artificial Sequence: Synthetic oligonucleotide
  Antisense strand to SEQ ID NO: 958650
aaauacgaagguaugagca

SEQ ID NO: 958652 - RNA, 19 nt, Artificial Sequence
  Description of Artificial Sequence: Synthetic oligonucleotide
  Sense strand starting at position 1472 of SEQ ID NO: 913846
augggacucugccuaagua

SEQ ID NO: 958653 - RNA, 19 nt, Artificial Sequence
  Description of Artificial Sequence: Synthetic oligonucleotide
  Antisense strand to SEQ ID NO: 958652
uacuuaggcagagucccau

SEQ ID NO: 958654 - RNA, 19 nt, Artificial Sequence
  Description of Artificial Sequence: Synthetic oligonucleotide
  Sense strand starting at position 3386 of SEQ ID NO: 913846
augagugauaaggguuguu

SEQ ID NO: 958655 - RNA, 19 nt, Artificial Sequence
  Description of Artificial Sequence: Synthetic oligonucleotide
  Antisense strand to SEQ ID NO: 958654
aacaacccuuaucacucau

SEQ ID NO: 958656 - RNA, 19 nt, Artificial Sequence
  Description of Artificial Sequence: Synthetic oligonucleotide
  Sense strand starting at position 3389 of SEQ ID NO: 913846
agugauaaggguuguucag

SEQ ID NO: 958657 - RNA, 19 nt, Artificial Sequence
  Description of Artificial Sequence: Synthetic oligonucleotide
  Antisense strand to SEQ ID NO: 958656
cugaacaacccuuaucacu

SEQ ID NO: 958658 - RNA, 19 nt, Artificial Sequence
  Description of Artificial Sequence: Synthetic oligonucleotide
  Sense strand starting at position 1053 of SEQ ID NO: 913846
uuuggaugucuauguaaau

SEQ ID NO: 958659 - RNA, 19 nt, Artificial Sequence
  Description of Artificial Sequence: Synthetic oligonucleotide
  Antisense strand to SEQ ID NO: 958658
auuuacauagacauccaaa

SEQ ID NO: 958660 - RNA, 19 nt, Artificial Sequence
  Description of Artificial Sequence: Synthetic oligonucleotide
  Sense strand starting at position 3734 of SEQ ID NO: 913846
gggaaacucgucugacuuc

SEQ ID NO: 958661 - RNA, 19 nt, Artificial Sequence
  Description of Artificial Sequence: Synthetic oligonucleotide
  Antisense strand to SEQ ID NO: 958660
gaagucagacgaguuuccc

SEQ ID NO: 958662 - RNA, 19 nt, Artificial Sequence
  Description of Artificial Sequence: Synthetic oligonucleotide
  Sense strand starting at position 3623 of SEQ ID NO: 913846
ucucaacacuguguuccaa

SEQ ID NO: 958663 - RNA, 19 nt, Artificial Sequence
  Description of Artificial Sequence: Synthetic oligonucleotide
  Antisense strand to SEQ ID NO: 958662
uuggaacacaguguugaga

SEQ ID NO: 958664 - RNA, 19 nt, Artificial Sequence
  Description of Artificial Sequence: Synthetic oligonucleotide
  Sense strand starting at position 3325 of SEQ ID NO: 913846
uugggauucggccaaugcu

SEQ ID NO: 958665 - RNA, 19 nt, Artificial Sequence
  Description of Artificial Sequence: Synthetic oligonucleotide
  Antisense strand to SEQ ID NO: 958664
agcauuggccgaaucccaa

SEQ ID NO: 958666 - RNA, 19 nt, Artificial Sequence
  Description of Artificial Sequence: Synthetic oligonucleotide
  Sense strand starting at position 2730 of SEQ ID NO: 913846
guugaauuguguccaccag

SEQ ID NO: 958667 - RNA, 19 nt, Artificial Sequence
  Description of Artificial Sequence: Synthetic oligonucleotide
  Antisense strand to SEQ ID NO: 958666
cugguggacacaauucaac

SEQ ID NO: 958668 - RNA, 19 nt, Artificial Sequence
  Description of Artificial Sequence: Synthetic oligonucleotide
  Sense strand starting at position 3732 of SEQ ID NO: 913846
ucgggaaacucgucugacu

SEQ ID NO: 958669 - RNA, 19 nt, Artificial Sequence
  Description of Artificial Sequence: Synthetic oligonucleotide
  Antisense strand to SEQ ID NO: 958668
agucagacgaguuucccga

SEQ ID NO: 958670 - RNA, 19 nt, Artificial Sequence
  Description of Artificial Sequence: Synthetic oligonucleotide
  Sense strand starting at position 3270 of SEQ ID NO: 913846
ucuguuuguuaucuuaaug

SEQ ID NO: 958671 - RNA, 19 nt, Artificial Sequence
  Description of Artificial Sequence: Synthetic oligonucleotide
  Antisense strand to SEQ ID NO: 958670
cauuaagauaacaaacaga

SEQ ID NO: 958672 - RNA, 19 nt, Artificial Sequence
  Description of Artificial Sequence: Synthetic oligonucleotide
  Sense strand starting at position 1364 of SEQ ID NO: 913846
ccuugcuuacucuaagugu

SEQ ID NO: 958673 - RNA, 19 nt, Artificial Sequence
  Description of Artificial Sequence: Synthetic oligonucleotide
  Antisense strand to SEQ ID NO: 958672
acacuuagaguaagcaagg

SEQ ID NO: 958674 - RNA, 19 nt, Artificial Sequence
  Description of Artificial Sequence: Synthetic oligonucleotide
  Sense strand starting at position 180 of SEQ ID NO: 913846
ggugcuacccaauguauac

SEQ ID NO: 958675 - RNA, 19 nt, Artificial Sequence
  Description of Artificial Sequence: Synthetic oligonucleotide
  Antisense strand to SEQ ID NO: 958674
guauacauuggguagcacc

SEQ ID NO: 958676 - RNA, 19 nt, Artificial Sequence
  Description of Artificial Sequence: Synthetic oligonucleotide
  Sense strand starting at position 3422 of SEQ ID NO: 913846
aggauuugcuuugggauga

SEQ ID NO: 958677 - RNA, 19 nt, Artificial Sequence
  Description of Artificial Sequence: Synthetic oligonucleotide
  Antisense strand to SEQ ID NO: 958676
ucaucccaaagcaaauccu

SEQ ID NO: 958678 - RNA, 19 nt, Artificial Sequence
  Description of Artificial Sequence: Synthetic oligonucleotide
  Sense strand starting at position 3423 of SEQ ID NO: 913846
ggauuugcuuugggaugag

SEQ ID NO: 958679 - RNA, 19 nt, Artificial Sequence
  Description of Artificial Sequence: Synthetic oligonucleotide
  Antisense strand to SEQ ID NO: 958678
cucaucccaaagcaaaucc

SEQ ID NO: 958680 - RNA, 19 nt, Artificial Sequence
  Description of Artificial Sequence: Synthetic oligonucleotide
  Sense strand starting at position 3741 of SEQ ID NO: 913846
ucgucugacuucucuaauc

SEQ ID NO: 958681 - RNA, 19 nt, Artificial Sequence
  Description of Artificial Sequence: Synthetic oligonucleotide
  Antisense strand to SEQ ID NO: 958680
gauuagagaagucagacga

SEQ ID NO: 958682 - RNA, 19 nt, Artificial Sequence
  Description of Artificial Sequence: Synthetic oligonucleotide
  Sense strand starting at position 535 of SEQ ID NO: 913847
agacacuugcuugauauau

SEQ ID NO: 958683 - RNA, 19 nt, Artificial Sequence
  Description of Artificial Sequence: Synthetic oligonucleotide
  Antisense strand to SEQ ID NO: 958682
auauaucaagcaagugucu

SEQ ID NO: 958684 - RNA, 19 nt, Artificial Sequence
  Description of Artificial Sequence: Synthetic oligonucleotide
  Sense strand starting at position 2177 of SEQ ID NO: 913847
aauuuacuguggcuuguaa

SEQ ID NO: 958685 - RNA, 19 nt, Artificial Sequence
  Description of Artificial Sequence: Synthetic oligonucleotide
  Antisense strand to SEQ ID NO: 958684
uuacaagccacaguaaauu

SEQ ID NO: 958686 - RNA, 19 nt, Artificial Sequence
  Description of Artificial Sequence: Synthetic oligonucleotide
  Sense strand starting at position 2418 of SEQ ID NO: 913847
agacuaauauuauugcaga

SEQ ID NO: 958687 - RNA, 19 nt, Artificial Sequence
  Description of Artificial Sequence: Synthetic oligonucleotide
  Antisense strand to SEQ ID NO: 958686
ucugcaauaauauuagucu

SEQ ID NO: 958688 - RNA, 19 nt, Artificial Sequence
  Description of Artificial Sequence: Synthetic oligonucleotide
  Sense strand starting at position 788 of SEQ ID NO: 913847
ugucauaugguccaaugaa

SEQ ID NO: 958689 - RNA, 19 nt, Artificial Sequence
  Description of Artificial Sequence: Synthetic oligonucleotide
  Antisense strand to SEQ ID NO: 958688
uucauuggaccauaugaca

SEQ ID NO: 958690 - RNA, 19 nt, Artificial Sequence
  Description of Artificial Sequence: Synthetic oligonucleotide
  Sense strand starting at position 1413 of SEQ ID NO: 913847
agaaauccaucugugaacu

SEQ ID NO: 958691 - RNA, 19 nt, Artificial Sequence
  Description of Artificial Sequence: Synthetic oligonucleotide
  Antisense strand to SEQ ID NO: 958690
aguucacagauggauuucu

SEQ ID NO: 958692 - RNA, 19 nt, Artificial Sequence
  Description of Artificial Sequence: Synthetic oligonucleotide
  Sense strand starting at position 2436 of SEQ ID NO: 913847
aguuuauaaucucuagaag

SEQ ID NO: 958693 - RNA, 19 nt, Artificial Sequence
  Description of Artificial Sequence: Synthetic oligonucleotide
  Antisense strand to SEQ ID NO: 958692
cuucuagagauuauaaacu

SEQ ID NO: 958694 - RNA, 19 nt, Artificial Sequence
  Description of Artificial Sequence: Synthetic oligonucleotide
  Sense strand starting at position 303 of SEQ ID NO: 913847
acaggaaaguuagucucaa

SEQ ID NO: 958695 - RNA, 19 nt, Artificial Sequence
  Description of Artificial Sequence: Synthetic oligonucleotide
  Antisense strand to SEQ ID NO: 958694
uugagacuaacuuuccugu

SEQ ID NO: 958696 - RNA, 19 nt, Artificial Sequence
  Description of Artificial Sequence: Synthetic oligonucleotide
  Sense strand starting at position 327 of SEQ ID NO: 913847
acuucuuaggaauguaaac

SEQ ID NO: 958697 - RNA, 19 nt, Artificial Sequence
  Description of Artificial Sequence: Synthetic oligonucleotide
  Antisense strand to SEQ ID NO: 958696
guuuacauuccuaagaagu

SEQ ID NO: 958698 - RNA, 19 nt, Artificial Sequence
  Description of Artificial Sequence: Synthetic oligonucleotide
  Sense strand starting at position 256 of SEQ ID NO: 913847
ggauuaugggccugagaca

SEQ ID NO: 958699 - RNA, 19 nt, Artificial Sequence
  Description of Artificial Sequence: Synthetic oligonucleotide
  Antisense strand to SEQ ID NO: 958698
ugucucaggcccauaaucc

SEQ ID NO: 958700 - RNA, 19 nt, Artificial Sequence
  Description of Artificial Sequence: Synthetic oligonucleotide
  Sense strand starting at position 1392 of SEQ ID NO: 913847
ugguuaauauuucuccgua

SEQ ID NO: 958701 - RNA, 19 nt, Artificial Sequence
  Description of Artificial Sequence: Synthetic oligonucleotide
  Antisense strand to SEQ ID NO: 958700
uacggagaaauauuaacca

SEQ ID NO: 958702 - RNA, 19 nt, Artificial Sequence
  Description of Artificial Sequence: Synthetic oligonucleotide
  Sense strand starting at position 774 of SEQ ID NO: 913847
ugacguuuauuauuuguca

SEQ ID NO: 958703 - RNA, 19 nt, Artificial Sequence
  Description of Artificial Sequence: Synthetic oligonucleotide
  Antisense strand to SEQ ID NO: 958702
ugacaaauaauaaacguca

SEQ ID NO: 958704 - RNA, 19 nt, Artificial Sequence
  Description of Artificial Sequence: Synthetic oligonucleotide
  Sense strand starting at position 775 of SEQ ID NO: 913847
gacguuuauuauuugucau

SEQ ID NO: 958705 - RNA, 19 nt, Artificial Sequence
  Description of Artificial Sequence: Synthetic oligonucleotide
  Antisense strand to SEQ ID NO: 958704
augacaaauaauaaacguc

SEQ ID NO: 958706 - RNA, 19 nt, Artificial Sequence
  Description of Artificial Sequence: Synthetic oligonucleotide
  Sense strand starting at position 1393 of SEQ ID NO: 913847
gguuaauauuucuccguau

SEQ ID NO: 958707 - RNA, 19 nt, Artificial Sequence
  Description of Artificial Sequence: Synthetic oligonucleotide
  Antisense strand to SEQ ID NO: 958706
auacggagaaauauuaacc

SEQ ID NO: 958708 - RNA, 19 nt, Artificial Sequence
  Description of Artificial Sequence: Synthetic oligonucleotide
  Sense strand starting at position 1342 of SEQ ID NO: 913847
uuguauuucuccuuugagu

SEQ ID NO: 958709 - RNA, 19 nt, Artificial Sequence
  Description of Artificial Sequence: Synthetic oligonucleotide
  Antisense strand to SEQ ID NO: 958708
acucaaaggagaaauacaa

SEQ ID NO: 958710 - RNA, 19 nt, Artificial Sequence
  Description of Artificial Sequence: Synthetic oligonucleotide
  Sense strand starting at position 304 of SEQ ID NO: 913847
caggaaaguuagucucaag

SEQ ID NO: 958711 - RNA, 19 nt, Artificial Sequence
  Description of Artificial Sequence: Synthetic oligonucleotide
  Antisense strand to SEQ ID NO: 958710
cuugagacuaacuuuccug

SEQ ID NO: 958712 - RNA, 19 nt, Artificial Sequence
  Description of Artificial Sequence: Synthetic oligonucleotide
  Sense strand starting at position 2268 of SEQ ID NO: 913847
accacagugaguuggaaau

SEQ ID NO: 958713 - RNA, 19 nt, Artificial Sequence
  Description of Artificial Sequence: Synthetic oligonucleotide
  Antisense strand to SEQ ID NO: 958712
auuuccaacucacuguggu

SEQ ID NO: 958714 - RNA, 19 nt, Artificial Sequence
  Description of Artificial Sequence: Synthetic oligonucleotide
  Sense strand starting at position 1394 of SEQ ID NO: 913847
guuaauauuucuccguauu

SEQ ID NO: 958715 - RNA, 19 nt, Artificial Sequence
  Description of Artificial Sequence: Synthetic oligonucleotide
  Antisense strand to SEQ ID NO: 958714
aauacggagaaauauuaac

SEQ ID NO: 958716 - RNA, 19 nt, Artificial Sequence
  Description of Artificial Sequence: Synthetic oligonucleotide
  Sense strand starting at position 3417 of SEQ ID NO: 913847
ugugcuagcgcuuuacaua

SEQ ID NO: 958717 - RNA, 19 nt, Artificial Sequence
  Description of Artificial Sequence: Synthetic oligonucleotide
  Antisense strand to SEQ ID NO: 958716
uauguaaagcgcuagcaca

SEQ ID NO: 958718 - RNA, 19 nt, Artificial Sequence
  Description of Artificial Sequence: Synthetic oligonucleotide
  Sense strand starting at position 533 of SEQ ID NO: 913847
agagacacuugcuugauau

SEQ ID NO: 958719 - RNA, 19 nt, Artificial Sequence
  Description of Artificial Sequence: Synthetic oligonucleotide
  Antisense strand to SEQ ID NO: 958718
auaucaagcaagugucucu

SEQ ID NO: 958720 - RNA, 19 nt, Artificial Sequence
  Description of Artificial Sequence: Synthetic oligonucleotide
  Sense strand starting at position 532 of SEQ ID NO: 913847
cagagacacuugcuugaua

SEQ ID NO: 958721 - RNA, 19 nt, Artificial Sequence
  Description of Artificial Sequence: Synthetic oligonucleotide
  Antisense strand to SEQ ID NO: 958720
uaucaagcaagugucucug

SEQ ID NO: 958722 - RNA, 19 nt, Artificial Sequence
  Description of Artificial Sequence: Synthetic oligonucleotide
  Sense strand starting at position 2379 of SEQ ID NO: 913847
cuuccucugguggaugauu

SEQ ID NO: 958723 - RNA, 19 nt, Artificial Sequence
  Description of Artificial Sequence: Synthetic oligonucleotide
  Antisense strand to SEQ ID NO: 958722
aaucauccaccagaggaag

SEQ ID NO: 958724 - RNA, 19 nt, Artificial Sequence
  Description of Artificial Sequence: Synthetic oligonucleotide
  Sense strand starting at position 1039 of SEQ ID NO: 913847
gucccuuagcuauaagaua

SEQ ID NO: 958725 - RNA, 19 nt, Artificial Sequence
  Description of Artificial Sequence: Synthetic oligonucleotide
  Antisense strand to SEQ ID NO: 958724
uaucuuauagcuaagggac

SEQ ID NO: 958726 - RNA, 19 nt, Artificial Sequence
  Description of Artificial Sequence: Synthetic oligonucleotide
  Sense strand starting at position 2437 of SEQ ID NO: 913847
guuuauaaucucuagaagc

SEQ ID NO: 958727 - RNA, 19 nt, Artificial Sequence
  Description of Artificial Sequence: Synthetic oligonucleotide
  Antisense strand to SEQ ID NO: 958726
gcuucuagagauuauaaac

SEQ ID NO: 958728 - RNA, 19 nt, Artificial Sequence
  Description of Artificial Sequence: Synthetic oligonucleotide
  Sense strand starting at position 534 of SEQ ID NO: 913847
gagacacuugcuugauaua

SEQ ID NO: 958729 - RNA, 19 nt, Artificial Sequence
  Description of Artificial Sequence: Synthetic oligonucleotide
  Antisense strand to SEQ ID NO: 958728
uauaucaagcaagugucuc

SEQ ID NO: 958730 - RNA, 19 nt, Artificial Sequence
  Description of Artificial Sequence: Synthetic oligonucleotide
  Sense strand starting at position 769 of SEQ ID NO: 913847
gauacugacguuuauuauu

SEQ ID NO: 958731 - RNA, 19 nt, Artificial Sequence
  Description of Artificial Sequence: Synthetic oligonucleotide
  Antisense strand to SEQ ID NO: 958730
aauaauaaacgucaguauc

SEQ ID NO: 958732 - RNA, 19 nt, Artificial Sequence
  Description of Artificial Sequence: Synthetic oligonucleotide
  Sense strand starting at position 1548 of SEQ ID NO: 913847
gggagaaguucucccggga

SEQ ID NO: 958733 - RNA, 19 nt, Artificial Sequence
  Description of Artificial Sequence: Synthetic oligonucleotide
  Antisense strand to SEQ ID NO: 958732
ucccgggagaacuucuccc

SEQ ID NO: 958734 - RNA, 19 nt, Artificial Sequence
  Description of Artificial Sequence: Synthetic oligonucleotide
  Sense strand starting at position 3214 of SEQ ID NO: 913847
gcuggucccagagaacuuu

SEQ ID NO: 958735 - RNA, 19 nt, Artificial Sequence
  Description of Artificial Sequence: Synthetic oligonucleotide
  Antisense strand to SEQ ID NO: 958734
aaaguucucugggaccagc

SEQ ID NO: 958736 - RNA, 19 nt, Artificial Sequence
  Description of Artificial Sequence: Synthetic oligonucleotide
  Sense strand starting at position 2281 of SEQ ID NO: 913847
ggaaauuguuucuuuccaa

SEQ ID NO: 958737 - RNA, 19 nt, Artificial Sequence
  Description of Artificial Sequence: Synthetic oligonucleotide
  Antisense strand to SEQ ID NO: 958736
uuggaaagaaacaauuucc

SEQ ID NO: 958738 - RNA, 19 nt, Artificial Sequence
  Description of Artificial Sequence: Synthetic oligonucleotide
  Sense strand starting at position 3416 of SEQ ID NO: 913847
cugugcuagcgcuuuacau

SEQ ID NO: 958739 - RNA, 19 nt, Artificial Sequence
  Description of Artificial Sequence: Synthetic oligonucleotide
  Antisense strand to SEQ ID NO: 958738
auguaaagcgcuagcacag

SEQ ID NO: 958740 - RNA, 19 nt, Artificial Sequence
  Description of Artificial Sequence: Synthetic oligonucleotide
  Sense strand starting at position 2280 of SEQ ID NO: 913847
uggaaauuguuucuuucca

SEQ ID NO: 958741 - RNA, 19 nt, Artificial Sequence
  Description of Artificial Sequence: Synthetic oligonucleotide
  Antisense strand to SEQ ID NO: 958740
uggaaagaaacaauuucca

SEQ ID NO: 958742 - RNA, 19 nt, Artificial Sequence
  Description of Artificial Sequence: Synthetic oligonucleotide
  Sense strand starting at position 545 of SEQ ID NO: 913847
uugauauauuagguagcca

SEQ ID NO: 958743 - RNA, 19 nt, Artificial Sequence
  Description of Artificial Sequence: Synthetic oligonucleotide
  Antisense strand to SEQ ID NO: 958742
uggcuaccuaauauaucaa

SEQ ID NO: 958744 - RNA, 19 nt, Artificial Sequence
  Description of Artificial Sequence: Synthetic oligonucleotide
  Sense strand starting at position 2319 of SEQ ID NO: 913847
gagauuaaauguuccuguu

SEQ ID NO: 958745 - RNA, 19 nt, Artificial Sequence
  Description of Artificial Sequence: Synthetic oligonucleotide
  Antisense strand to SEQ ID NO: 958744
aacaggaacauuuaaucuc

SEQ ID NO: 958746 - RNA, 19 nt, Artificial Sequence
  Description of Artificial Sequence: Synthetic oligonucleotide
  Sense strand starting at position 530 of SEQ ID NO: 913847
gucagagacacuugcuuga

SEQ ID NO: 958747 - RNA, 19 nt, Artificial Sequence
  Description of Artificial Sequence: Synthetic oligonucleotide
  Antisense strand to SEQ ID NO: 958746
ucaagcaagugucucugac

SEQ ID NO: 958748 - RNA, 19 nt, Artificial Sequence
  Description of Artificial Sequence: Synthetic oligonucleotide
  Sense strand starting at position 1033 of SEQ ID NO: 913847
acucuagucccuuagcuau

SEQ ID NO: 958749 - RNA, 19 nt, Artificial Sequence
  Description of Artificial Sequence: Synthetic oligonucleotide
  Antisense strand to SEQ ID NO: 958748
auagcuaagggacuagagu

SEQ ID NO: 958750 - RNA, 19 nt, Artificial Sequence
  Description of Artificial Sequence: Synthetic oligonucleotide
  Sense strand starting at position 871 of SEQ ID NO: 913847
cuuauacugcucgaucacu

SEQ ID NO: 958751 - RNA, 19 nt, Artificial Sequence
  Description of Artificial Sequence: Synthetic oligonucleotide
  Antisense strand to SEQ ID NO: 958750
agugaucgagcaguauaag

SEQ ID NO: 958752 - RNA, 19 nt, Artificial Sequence
  Description of Artificial Sequence: Synthetic oligonucleotide
  Sense strand starting at position 1351 of SEQ ID NO: 913847
uccuuugaguccucacuga

SEQ ID NO: 958753 - RNA, 19 nt, Artificial Sequence
  Description of Artificial Sequence: Synthetic oligonucleotide
  Antisense strand to SEQ ID NO: 958752
ucagugaggacucaaagga

SEQ ID NO: 958754 - RNA, 19 nt, Artificial Sequence
  Description of Artificial Sequence: Synthetic oligonucleotide
  Sense strand starting at position 549 of SEQ ID NO: 913847
uauauuagguagccagagu

SEQ ID NO: 958755 - RNA, 19 nt, Artificial Sequence
  Description of Artificial Sequence: Synthetic oligonucleotide
  Antisense strand to SEQ ID NO: 958754
acucuggcuaccuaauaua

SEQ ID NO: 958756 - RNA, 19 nt, Artificial Sequence
  Description of Artificial Sequence: Synthetic oligonucleotide
  Sense strand starting at position 739 of SEQ ID NO: 913847
gggucauucuggccaacac

SEQ ID NO: 958757 - RNA, 19 nt, Artificial Sequence
  Description of Artificial Sequence: Synthetic oligonucleotide
  Antisense strand to SEQ ID NO: 958756
guguuggccagaaugaccc

SEQ ID NO: 958758 - RNA, 19 nt, Artificial Sequence
  Description of Artificial Sequence: Synthetic oligonucleotide
  Sense strand starting at position 2473 of SEQ ID NO: 913847
ucccuugaagaauguguuu

SEQ ID NO: 958759 - RNA, 19 nt, Artificial Sequence
  Description of Artificial Sequence: Synthetic oligonucleotide
  Antisense strand to SEQ ID NO: 958758
aaacacauucuucaaggga

SEQ ID NO: 958760 - RNA, 19 nt, Artificial Sequence
  Description of Artificial Sequence: Synthetic oligonucleotide
  Sense strand starting at position 1246 of SEQ ID NO: 913847
ccagaaugcgacggugaaa

SEQ ID NO: 958761 - RNA, 19 nt, Artificial Sequence
  Description of Artificial Sequence: Synthetic oligonucleotide
  Antisense strand to SEQ ID NO: 958760
uuucaccgucgcauucugg

SEQ ID NO: 958762 - RNA, 19 nt, Artificial Sequence
  Description of Artificial Sequence: Synthetic oligonucleotide
  Sense strand starting at position 265 of SEQ ID NO: 913848
ugaagaaaguucucugaua

SEQ ID NO: 958763 - RNA, 19 nt, Artificial Sequence
  Description of Artificial Sequence: Synthetic oligonucleotide
  Antisense strand to SEQ ID NO: 958762
uaucagagaacuuucuuca

SEQ ID NO: 958764 - RNA, 19 nt, Artificial Sequence
  Description of Artificial Sequence: Synthetic oligonucleotide
  Sense strand starting at position 3532 of SEQ ID NO: 913848
guuaauggacucgguauuu

SEQ ID NO: 958765 - RNA, 19 nt, Artificial Sequence
  Description of Artificial Sequence: Synthetic oligonucleotide
  Antisense strand to SEQ ID NO: 958764
aaauaccgaguccauuaac

SEQ ID NO: 958766 - RNA, 19 nt, Artificial Sequence
  Description of Artificial Sequence: Synthetic oligonucleotide
  Sense strand starting at position 716 of SEQ ID NO: 913848
ccagacuuuccacaggcaa

SEQ ID NO: 958767 - RNA, 19 nt, Artificial Sequence
  Description of Artificial Sequence: Synthetic oligonucleotide
  Antisense strand to SEQ ID NO: 958766
uugccuguggaaagucugg

SEQ ID NO: 958768 - RNA, 19 nt, Artificial Sequence
  Description of Artificial Sequence: Synthetic oligonucleotide
  Sense strand starting at position 1820 of SEQ ID NO: 913848
aggaguguccuugaagauc

SEQ ID NO: 958769 - RNA, 19 nt, Artificial Sequence
  Description of Artificial Sequence: Synthetic oligonucleotide
  Antisense strand to SEQ ID NO: 958768
gaucuucaaggacacuccu

SEQ ID NO: 958770 - RNA, 19 nt, Artificial Sequence
  Description of Artificial Sequence: Synthetic oligonucleotide
  Sense strand starting at position 3469 of SEQ ID NO: 913848
gaugaaucacugugaacac

SEQ ID NO: 958771 - RNA, 19 nt, Artificial Sequence
  Description of Artificial Sequence: Synthetic oligonucleotide
  Antisense strand to SEQ ID NO: 958770
guguucacagugauucauc

SEQ ID NO: 958772 - RNA, 19 nt, Artificial Sequence
  Description of Artificial Sequence: Synthetic oligonucleotide
  Sense strand starting at position 458 of SEQ ID NO: 913848
uuaauaggagucugaauau

SEQ ID NO: 958773 - RNA, 19 nt, Artificial Sequence
  Description of Artificial Sequence: Synthetic oligonucleotide
  Antisense strand to SEQ ID NO: 958772
auauucagacuccuauuaa

SEQ ID NO: 958774 - RNA, 19 nt, Artificial Sequence
  Description of Artificial Sequence: Synthetic oligonucleotide
  Sense strand starting at position 3045 of SEQ ID NO: 913848
aucaaauauggaugaguuc

SEQ ID NO: 958775 - RNA, 19 nt, Artificial Sequence
  Description of Artificial Sequence: Synthetic oligonucleotide
  Antisense strand to SEQ ID NO: 958774
gaacucauccauauuugau

SEQ ID NO: 958776 - RNA, 19 nt, Artificial Sequence
  Description of Artificial Sequence: Synthetic oligonucleotide
  Sense strand starting at position 2535 of SEQ ID NO: 913848
aaucaugcuggguaucaaa

SEQ ID NO: 958777 - RNA, 19 nt, Artificial Sequence
  Description of Artificial Sequence: Synthetic oligonucleotide
  Antisense strand to SEQ ID NO: 958776
uuugauacccagcaugauu

SEQ ID NO: 958778 - RNA, 19 nt, Artificial Sequence
  Description of Artificial Sequence: Synthetic oligonucleotide
  Sense strand starting at position 2461 of SEQ ID NO: 913848
uaugcuuaacaagagugau

SEQ ID NO: 958779 - RNA, 19 nt, Artificial Sequence
  Description of Artificial Sequence: Synthetic oligonucleotide
  Antisense strand to SEQ ID NO: 958778
aucacucuuguuaagcaua

SEQ ID NO: 958780 - RNA, 19 nt, Artificial Sequence
  Description of Artificial Sequence: Synthetic oligonucleotide
  Sense strand starting at position 3223 of SEQ ID NO: 913848
uagcuaauuuagcugggua

SEQ ID NO: 958781 - RNA, 19 nt, Artificial Sequence
  Description of Artificial Sequence: Synthetic oligonucleotide
  Antisense strand to SEQ ID NO: 958780
uacccagcuaaauuagcua

SEQ ID NO: 958782 - RNA, 19 nt, Artificial Sequence
  Description of Artificial Sequence: Synthetic oligonucleotide
  Sense strand starting at position 3147 of SEQ ID NO: 913848
aagugauacccacauuggu

SEQ ID NO: 958783 - RNA, 19 nt, Artificial Sequence
  Description of Artificial Sequence: Synthetic oligonucleotide
  Antisense strand to SEQ ID NO: 958782
accaauguggguaucacuu

SEQ ID NO: 958784 - RNA, 19 nt, Artificial Sequence
  Description of Artificial Sequence: Synthetic oligonucleotide
  Sense strand starting at position 3634 of SEQ ID NO: 913848
aacaauuacgcagagggua

SEQ ID NO: 958785 - RNA, 19 nt, Artificial Sequence
  Description of Artificial Sequence: Synthetic oligonucleotide
  Antisense strand to SEQ ID NO: 958784
uacccucugcguaauuguu

SEQ ID NO: 958786 - RNA, 19 nt, Artificial Sequence
  Description of Artificial Sequence: Synthetic oligonucleotide
  Sense strand starting at position 3421 of SEQ ID NO: 913848
cuggaacuuaugugacaga

SEQ ID NO: 958787 - RNA, 19 nt, Artificial Sequence
  Description of Artificial Sequence: Synthetic oligonucleotide
  Antisense strand to SEQ ID NO: 958786
ucugucacauaaguuccag

SEQ ID NO: 958788 - RNA, 19 nt, Artificial Sequence
  Description of Artificial Sequence: Synthetic oligonucleotide
  Sense strand starting at position 1244 of SEQ ID NO: 913848
guccuaccauaaucagaga

SEQ ID NO: 958789 - RNA, 19 nt, Artificial Sequence
  Description of Artificial Sequence: Synthetic oligonucleotide
  Antisense strand to SEQ ID NO: 958788
ucucugauuaugguaggac

SEQ ID NO: 958790 - RNA, 19 nt, Artificial Sequence
  Description of Artificial Sequence: Synthetic oligonucleotide
  Sense strand starting at position 3215 of SEQ ID NO: 913848
guuguuguuagcuaauuua

SEQ ID NO: 958791 - RNA, 19 nt, Artificial Sequence
  Description of Artificial Sequence: Synthetic oligonucleotide
  Antisense strand to SEQ ID NO: 958790
uaaauuagcuaacaacaac

SEQ ID NO: 958792 - RNA, 19 nt, Artificial Sequence
  Description of Artificial Sequence: Synthetic oligonucleotide
  Sense strand starting at position 469 of SEQ ID NO: 913848
cugaauauuugagacaacu

SEQ ID NO: 958793 - RNA, 19 nt, Artificial Sequence
  Description of Artificial Sequence: Synthetic oligonucleotide
  Antisense strand to SEQ ID NO: 958792
aguugucucaaauauucag

SEQ ID NO: 958794 - RNA, 19 nt, Artificial Sequence
  Description of Artificial Sequence: Synthetic oligonucleotide
  Sense strand starting at position 2545 of SEQ ID NO: 913848
gguaucaaauucucuggga

SEQ ID NO: 958795 - RNA, 19 nt, Artificial Sequence
  Description of Artificial Sequence: Synthetic oligonucleotide
  Antisense strand to SEQ ID NO: 958794
ucccagagaauuugauacc

SEQ ID NO: 958796 - RNA, 19 nt, Artificial Sequence
  Description of Artificial Sequence: Synthetic oligonucleotide
  Sense strand starting at position 337 of SEQ ID NO: 913848
uaagaaaugcaaugguuag

SEQ ID NO: 958797 - RNA, 19 nt, Artificial Sequence
  Description of Artificial Sequence: Synthetic oligonucleotide
  Antisense strand to SEQ ID NO: 958796
cuaaccauugcauuucuua

SEQ ID NO: 958798 - RNA, 19 nt, Artificial Sequence
  Description of Artificial Sequence: Synthetic oligonucleotide
  Sense strand starting at position 1716 of SEQ ID NO: 913848
ccaccagaaaugugagagu

SEQ ID NO: 958799 - RNA, 19 nt, Artificial Sequence
  Description of Artificial Sequence: Synthetic oligonucleotide
  Antisense strand to SEQ ID NO: 958798
acucucacauuucuggugg

SEQ ID NO: 958800 - RNA, 19 nt, Artificial Sequence
  Description of Artificial Sequence: Synthetic oligonucleotide
  Sense strand starting at position 2793 of SEQ ID NO: 913848
gacauuguuugauuauaug

SEQ ID NO: 958801 - RNA, 19 nt, Artificial Sequence
  Description of Artificial Sequence: Synthetic oligonucleotide
  Antisense strand to SEQ ID NO: 958800
cauauaaucaaacaauguc

SEQ ID NO: 958802 - RNA, 19 nt, Artificial Sequence
  Description of Artificial Sequence: Synthetic oligonucleotide
  Sense strand starting at position 3859 of SEQ ID NO: 913848
aguuaugugggagagccua

SEQ ID NO: 958803 - RNA, 19 nt, Artificial Sequence
  Description of Artificial Sequence: Synthetic oligonucleotide
  Antisense strand to SEQ ID NO: 958802
uaggcucucccacauaacu

SEQ ID NO: 958804 - RNA, 19 nt, Artificial Sequence
  Description of Artificial Sequence: Synthetic oligonucleotide
  Sense strand starting at position 341 of SEQ ID NO: 913848
aaaugcaaugguuagucau

SEQ ID NO: 958805 - RNA, 19 nt, Artificial Sequence
  Description of Artificial Sequence: Synthetic oligonucleotide
  Antisense strand to SEQ ID NO: 958804
augacuaaccauugcauuu

SEQ ID NO: 958806 - RNA, 19 nt, Artificial Sequence
  Description of Artificial Sequence: Synthetic oligonucleotide
  Sense strand starting at position 3765 of SEQ ID NO: 913848
uuuguagagcuagauacuu

SEQ ID NO: 958807 - RNA, 19 nt, Artificial Sequence
  Description of Artificial Sequence: Synthetic oligonucleotide
  Antisense strand to SEQ ID NO: 958806
aaguaucuagcucuacaaa

SEQ ID NO: 958808 - RNA, 19 nt, Artificial Sequence
  Description of Artificial Sequence: Synthetic oligonucleotide
  Sense strand starting at position 467 of SEQ ID NO: 913848
gucugaauauuugagacaa

SEQ ID NO: 958809 - RNA, 19 nt, Artificial Sequence
  Description of Artificial Sequence: Synthetic oligonucleotide
  Antisense strand to SEQ ID NO: 958808
uugucucaaauauucagac

SEQ ID NO: 958810 - RNA, 19 nt, Artificial Sequence
  Description of Artificial Sequence: Synthetic oligonucleotide
  Sense strand starting at position 1818 of SEQ ID NO: 913848
uuaggaguguccuugaaga

SEQ ID NO: 958811 - RNA, 19 nt, Artificial Sequence
  Description of Artificial Sequence: Synthetic oligonucleotide
  Antisense strand to SEQ ID NO: 958810
ucuucaaggacacuccuaa

SEQ ID NO: 958812 - RNA, 19 nt, Artificial Sequence
  Description of Artificial Sequence: Synthetic oligonucleotide
  Sense strand starting at position 321 of SEQ ID NO: 913848
gcuaaagaugaagguguaa

SEQ ID NO: 958813 - RNA, 19 nt, Artificial Sequence
  Description of Artificial Sequence: Synthetic oligonucleotide
  Antisense strand to SEQ ID NO: 958812
uuacaccuucaucuuuagc

SEQ ID NO: 958814 - RNA, 19 nt, Artificial Sequence
  Description of Artificial Sequence: Synthetic oligonucleotide
  Sense strand starting at position 2534 of SEQ ID NO: 913848
aaaucaugcuggguaucaa

SEQ ID NO: 958815 - RNA, 19 nt, Artificial Sequence
  Description of Artificial Sequence: Synthetic oligonucleotide
  Antisense strand to SEQ ID NO: 958814
uugauacccagcaugauuu

SEQ ID NO: 958816 - RNA, 19 nt, Artificial Sequence
  Description of Artificial Sequence: Synthetic oligonucleotide
  Sense strand starting at position 3545 of SEQ ID NO: 913848
guauuuaacccgggcuagu

SEQ ID NO: 958817 - RNA, 19 nt, Artificial Sequence
  Description of Artificial Sequence: Synthetic oligonucleotide
  Antisense strand to SEQ ID NO: 958816
acuagcccggguuaaauac

SEQ ID NO: 958818 - RNA, 19 nt, Artificial Sequence
  Description of Artificial Sequence: Synthetic oligonucleotide
  Sense strand starting at position 3543 of SEQ ID NO: 913848
cgguauuuaacccgggcua

SEQ ID NO: 958819 - RNA, 19 nt, Artificial Sequence
  Description of Artificial Sequence: Synthetic oligonucleotide
  Antisense strand to SEQ ID NO: 958818
uagcccggguuaaauaccg

SEQ ID NO: 958820 - RNA, 19 nt, Artificial Sequence
  Description of Artificial Sequence: Synthetic oligonucleotide
  Sense strand starting at position 3854 of SEQ ID NO: 913848
ccaucaguuaugugggaga

SEQ ID NO: 958821 - RNA, 19 nt, Artificial Sequence
  Description of Artificial Sequence: Synthetic oligonucleotide
  Antisense strand to SEQ ID NO: 958820
ucucccacauaacugaugg

SEQ ID NO: 958822 - RNA, 19 nt, Artificial Sequence
  Description of Artificial Sequence: Synthetic oligonucleotide
  Sense strand starting at position 267 of SEQ ID NO: 913848
aagaaaguucucugauagc

SEQ ID NO: 958823 - RNA, 19 nt, Artificial Sequence
  Description of Artificial Sequence: Synthetic oligonucleotide
  Antisense strand to SEQ ID NO: 958822
gcuaucagagaacuuucuu

SEQ ID NO: 958824 - RNA, 19 nt, Artificial Sequence
  Description of Artificial Sequence: Synthetic oligonucleotide
  Sense strand starting at position 2464 of SEQ ID NO: 913848
gcuuaacaagagugauuac

SEQ ID NO: 958825 - RNA, 19 nt, Artificial Sequence
  Description of Artificial Sequence: Synthetic oligonucleotide
  Antisense strand to SEQ ID NO: 958824
guaaucacucuuguuaagc

SEQ ID NO: 958826 - RNA, 19 nt, Artificial Sequence
  Description of Artificial Sequence: Synthetic oligonucleotide
  Sense strand starting at position 3214 of SEQ ID NO: 913848
aguuguuguuagcuaauuu

SEQ ID NO: 958827 - RNA, 19 nt, Artificial Sequence
  Description of Artificial Sequence: Synthetic oligonucleotide
  Antisense strand to SEQ ID NO: 958826
aaauuagcuaacaacaacu

SEQ ID NO: 958828 - RNA, 19 nt, Artificial Sequence
  Description of Artificial Sequence: Synthetic oligonucleotide
  Sense strand starting at position 1379 of SEQ ID NO: 913848
ugauaauggaaucgucuau

SEQ ID NO: 958829 - RNA, 19 nt, Artificial Sequence
  Description of Artificial Sequence: Synthetic oligonucleotide
  Antisense strand to SEQ ID NO: 958828
auagacgauuccauuauca

SEQ ID NO: 958830 - RNA, 19 nt, Artificial Sequence
  Description of Artificial Sequence: Synthetic oligonucleotide
  Sense strand starting at position 2926 of SEQ ID NO: 913848
uuuagauauuaucugcuag

SEQ ID NO: 958831 - RNA, 19 nt, Artificial Sequence
  Description of Artificial Sequence: Synthetic oligonucleotide
  Antisense strand to SEQ ID NO: 958830
cuagcagauaauaucuaaa

SEQ ID NO: 958832 - RNA, 19 nt, Artificial Sequence
  Description of Artificial Sequence: Synthetic oligonucleotide
  Sense strand starting at position 1912 of SEQ ID NO: 913848
gucauugauuagcucagaa

SEQ ID NO: 958833 - RNA, 19 nt, Artificial Sequence
  Description of Artificial Sequence: Synthetic oligonucleotide
  Antisense strand to SEQ ID NO: 958832
uucugagcuaaucaaugac

SEQ ID NO: 958834 - RNA, 19 nt, Artificial Sequence
  Description of Artificial Sequence: Synthetic oligonucleotide
  Sense strand starting at position 1911 of SEQ ID NO: 913848
agucauugauuagcucaga

SEQ ID NO: 958835 - RNA, 19 nt, Artificial Sequence
  Description of Artificial Sequence: Synthetic oligonucleotide
  Antisense strand to SEQ ID NO: 958834
ucugagcuaaucaaugacu

SEQ ID NO: 958836 - RNA, 19 nt, Artificial Sequence
  Description of Artificial Sequence: Synthetic oligonucleotide
  Sense strand starting at position 580 of SEQ ID NO: 913848
aacuuuaguagugguggaa

SEQ ID NO: 958837 - RNA, 19 nt, Artificial Sequence
  Description of Artificial Sequence: Synthetic oligonucleotide
  Antisense strand to SEQ ID NO: 958836
uuccaccacuacuaaaguu

SEQ ID NO: 958838 - RNA, 19 nt, Artificial Sequence
  Description of Artificial Sequence: Synthetic oligonucleotide
  Sense strand starting at position 632 of SEQ ID NO: 913848
cucacagcagucuaaguau

SEQ ID NO: 958839 - RNA, 19 nt, Artificial Sequence
  Description of Artificial Sequence: Synthetic oligonucleotide
  Antisense strand to SEQ ID NO: 958838
auacuuagacugcugugag

SEQ ID NO: 958840 - RNA, 19 nt, Artificial Sequence
  Description of Artificial Sequence: Synthetic oligonucleotide
  Sense strand starting at position 2959 of SEQ ID NO: 913848
aaggaugucucauuacugu

SEQ ID NO: 958841 - RNA, 19 nt, Artificial Sequence
  Description of Artificial Sequence: Synthetic oligonucleotide
  Antisense strand to SEQ ID NO: 958840
acaguaaugagacauccuu

SEQ ID NO: 958842 - RNA, 19 nt, Artificial Sequence
  Description of Artificial Sequence: Synthetic oligonucleotide
  Sense strand starting at position 3378 of SEQ ID NO: 913849
auguuaugccaagauaaca

SEQ ID NO: 958843 - RNA, 19 nt, Artificial Sequence
  Description of Artificial Sequence: Synthetic oligonucleotide
  Antisense strand to SEQ ID NO: 958842
uguuaucuuggcauaacau

SEQ ID NO: 958844 - RNA, 19 nt, Artificial Sequence
  Description of Artificial Sequence: Synthetic oligonucleotide
  Sense strand starting at position 2796 of SEQ ID NO: 913849
aguuuaggcgugccucuaa

SEQ ID NO: 958845 - RNA, 19 nt, Artificial Sequence
  Description of Artificial Sequence: Synthetic oligonucleotide
  Antisense strand to SEQ ID NO: 958844
uuagaggcacgccuaaacu

SEQ ID NO: 958846 - RNA, 19 nt, Artificial Sequence
  Description of Artificial Sequence: Synthetic oligonucleotide
  Sense strand starting at position 356 of SEQ ID NO: 913849
gacacaaaggcuugagauc

SEQ ID NO: 958847 - RNA, 19 nt, Artificial Sequence
  Description of Artificial Sequence: Synthetic oligonucleotide
  Antisense strand to SEQ ID NO: 958846
gaucucaagccuuuguguc

SEQ ID NO: 958848 - RNA, 19 nt, Artificial Sequence
  Description of Artificial Sequence: Synthetic oligonucleotide
  Sense strand starting at position 2334 of SEQ ID NO: 913849
cgaguagagacauagcaau

SEQ ID NO: 958849 - RNA, 19 nt, Artificial Sequence
  Description of Artificial Sequence: Synthetic oligonucleotide
  Antisense strand to SEQ ID NO: 958848
auugcuaugucucuacucg

SEQ ID NO: 958850 - RNA, 19 nt, Artificial Sequence
  Description of Artificial Sequence: Synthetic oligonucleotide
  Sense strand starting at position 308 of SEQ ID NO: 913849
augggaacgcuacaguaaa

SEQ ID NO: 958851 - RNA, 19 nt, Artificial Sequence
  Description of Artificial Sequence: Synthetic oligonucleotide
  Antisense strand to SEQ ID NO: 958850
uuuacuguagcguucccau

SEQ ID NO: 958852 - RNA, 19 nt, Artificial Sequence
  Description of Artificial Sequence: Synthetic oligonucleotide
  Sense strand starting at position 2372 of SEQ ID NO: 913849
ugagucauggcccaacaga

SEQ ID NO: 958853 - RNA, 19 nt, Artificial Sequence
  Description of Artificial Sequence: Synthetic oligonucleotide
  Antisense strand to SEQ ID NO: 958852
ucuguugggccaugacuca

SEQ ID NO: 958854 - RNA, 19 nt, Artificial Sequence
  Description of Artificial Sequence: Synthetic oligonucleotide
  Sense strand starting at position 258 of SEQ ID NO: 913849
uggaauaaaugaguuguua

SEQ ID NO: 958855 - RNA, 19 nt, Artificial Sequence
  Description of Artificial Sequence: Synthetic oligonucleotide
  Antisense strand to SEQ ID NO: 958854
uaacaacucauuuauucca

SEQ ID NO: 958856 - RNA, 19 nt, Artificial Sequence
  Description of Artificial Sequence: Synthetic oligonucleotide
  Sense strand starting at position 32 of SEQ ID NO: 913849
gcauaccuggcauacaaua

SEQ ID NO: 958857 - RNA, 19 nt, Artificial Sequence
  Description of Artificial Sequence: Synthetic oligonucleotide
  Antisense strand to SEQ ID NO: 958856
uauuguaugccagguaugc

SEQ ID NO: 958858 - RNA, 19 nt, Artificial Sequence
  Description of Artificial Sequence: Synthetic oligonucleotide
  Sense strand starting at position 3915 of SEQ ID NO: 913849
ccagaccaugucugaauua

SEQ ID NO: 958859 - RNA, 19 nt, Artificial Sequence
  Description of Artificial Sequence: Synthetic oligonucleotide
  Antisense strand to SEQ ID NO: 958858
uaauucagacauggucugg

SEQ ID NO: 958860 - RNA, 19 nt, Artificial Sequence
  Description of Artificial Sequence: Synthetic oligonucleotide
  Sense strand starting at position 3510 of SEQ ID NO: 913849
uuauuaauugagugaccca

SEQ ID NO: 958861 - RNA, 19 nt, Artificial Sequence
  Description of Artificial Sequence: Synthetic oligonucleotide
  Antisense strand to SEQ ID NO: 958860
ugggucacucaauuaauaa

SEQ ID NO: 958862 - RNA, 19 nt, Artificial Sequence
  Description of Artificial Sequence: Synthetic oligonucleotide
  Sense strand starting at position 2930 of SEQ ID NO: 913849
augucaaugccugaauauu

SEQ ID NO: 958863 - RNA, 19 nt, Artificial Sequence
  Description of Artificial Sequence: Synthetic oligonucleotide
  Antisense strand to SEQ ID NO: 958862
aauauucaggcauugacau

SEQ ID NO: 958864 - RNA, 19 nt, Artificial Sequence
  Description of Artificial Sequence: Synthetic oligonucleotide
  Sense strand starting at position 2431 of SEQ ID NO: 913849
gcaaacaugcucuguauuu

SEQ ID NO: 958865 - RNA, 19 nt, Artificial Sequence
  Description of Artificial Sequence: Synthetic oligonucleotide
  Antisense strand to SEQ ID NO: 958864
aaauacagagcauguuugc

SEQ ID NO: 958866 - RNA, 19 nt, Artificial Sequence
  Description of Artificial Sequence: Synthetic oligonucleotide
  Sense strand starting at position 2243 of SEQ ID NO: 913849
guauaaucuugaccuggac

SEQ ID NO: 958867 - RNA, 19 nt, Artificial Sequence
  Description of Artificial Sequence: Synthetic oligonucleotide
  Antisense strand to SEQ ID NO: 958866
guccaggucaagauuauac

SEQ ID NO: 958868 - RNA, 19 nt, Artificial Sequence
  Description of Artificial Sequence: Synthetic oligonucleotide
  Sense strand starting at position 3981 of SEQ ID NO: 913849
gguccaaucauguaguaca

SEQ ID NO: 958869 - RNA, 19 nt, Artificial Sequence
  Description of Artificial Sequence: Synthetic oligonucleotide
  Antisense strand to SEQ ID NO: 958868
uguacuacaugauuggacc

SEQ ID NO: 958870 - RNA, 19 nt, Artificial Sequence
  Description of Artificial Sequence: Synthetic oligonucleotide
  Sense strand starting at position 2231 of SEQ ID NO: 913849
ccugaaucuuugguauaau

SEQ ID NO: 958871 - RNA, 19 nt, Artificial Sequence
  Description of Artificial Sequence: Synthetic oligonucleotide
  Antisense strand to SEQ ID NO: 958870
auuauaccaaagauucagg

SEQ ID NO: 958872 - RNA, 19 nt, Artificial Sequence
  Description of Artificial Sequence: Synthetic oligonucleotide
  Sense strand starting at position 3513 of SEQ ID NO: 913849
uuaauugagugacccaagu

SEQ ID NO: 958873 - RNA, 19 nt, Artificial Sequence
  Description of Artificial Sequence: Synthetic oligonucleotide
  Antisense strand to SEQ ID NO: 958872
acuugggucacucaauuaa

SEQ ID NO: 958874 - RNA, 19 nt, Artificial Sequence
  Description of Artificial Sequence: Synthetic oligonucleotide
  Sense strand starting at position 3836 of SEQ ID NO: 913849
auggauaucuuguucuuag

SEQ ID NO: 958875 - RNA, 19 nt, Artificial Sequence
  Description of Artificial Sequence: Synthetic oligonucleotide
  Antisense strand to SEQ ID NO: 958874
cuaagaacaagauauccau

SEQ ID NO: 958876 - RNA, 19 nt, Artificial Sequence
  Description of Artificial Sequence: Synthetic oligonucleotide
  Sense strand starting at position 3837 of SEQ ID NO: 913849
uggauaucuuguucuuaga

SEQ ID NO: 958877 - RNA, 19 nt, Artificial Sequence
  Description of Artificial Sequence: Synthetic oligonucleotide
  Antisense strand to SEQ ID NO: 958876
ucuaagaacaagauaucca

SEQ ID NO: 958878 - RNA, 19 nt, Artificial Sequence
  Description of Artificial Sequence: Synthetic oligonucleotide
  Sense strand starting at position 3630 of SEQ ID NO: 913849
augauaggccgcuauaaau

SEQ ID NO: 958879 - RNA, 19 nt, Artificial Sequence
  Description of Artificial Sequence: Synthetic oligonucleotide
  Antisense strand to SEQ ID NO: 958878
auuuauagcggccuaucau

SEQ ID NO: 958880 - RNA, 19 nt, Artificial Sequence
  Description of Artificial Sequence: Synthetic oligonucleotide
  Sense strand starting at position 2206 of SEQ ID NO: 913849
gcuuacauucugcaggaau

SEQ ID NO: 958881 - RNA, 19 nt, Artificial Sequence
  Description of Artificial Sequence: Synthetic oligonucleotide
  Antisense strand to SEQ ID NO: 958880
auuccugcagaauguaagc

SEQ ID NO: 958882 - RNA, 19 nt, Artificial Sequence
  Description of Artificial Sequence: Synthetic oligonucleotide
  Sense strand starting at position 2058 of SEQ ID NO: 913849
augaaaucugccugagacg

SEQ ID NO: 958883 - RNA, 19 nt, Artificial Sequence
  Description of Artificial Sequence: Synthetic oligonucleotide
  Antisense strand to SEQ ID NO: 958882
cgucucaggcagauuucau

SEQ ID NO: 958884 - RNA, 19 nt, Artificial Sequence
  Description of Artificial Sequence: Synthetic oligonucleotide
  Sense strand starting at position 3075 of SEQ ID NO: 913849
gcauucagcgagcauuugu

SEQ ID NO: 958885 - RNA, 19 nt, Artificial Sequence
  Description of Artificial Sequence: Synthetic oligonucleotide
  Antisense strand to SEQ ID NO: 958884
acaaaugcucgcugaaugc

SEQ ID NO: 958886 - RNA, 19 nt, Artificial Sequence
  Description of Artificial Sequence: Synthetic oligonucleotide
  Sense strand starting at position 2864 of SEQ ID NO: 913849
agacguucugugcaggaaa

SEQ ID NO: 958887 - RNA, 19 nt, Artificial Sequence
  Description of Artificial Sequence: Synthetic oligonucleotide
  Antisense strand to SEQ ID NO: 958886
uuuccugcacagaacgucu

SEQ ID NO: 958888 - RNA, 19 nt, Artificial Sequence
  Description of Artificial Sequence: Synthetic oligonucleotide
  Sense strand starting at position 3927 of SEQ ID NO: 913849
ugaauuaucugggcacucu

SEQ ID NO: 958889 - RNA, 19 nt, Artificial Sequence
  Description of Artificial Sequence: Synthetic oligonucleotide
  Antisense strand to SEQ ID NO: 958888
agagugcccagauaauuca

SEQ ID NO: 958890 - RNA, 19 nt, Artificial Sequence
  Description of Artificial Sequence: Synthetic oligonucleotide
  Sense strand starting at position 3973 of SEQ ID NO: 913849
gcccacuugguccaaucau

SEQ ID NO: 958891 - RNA, 19 nt, Artificial Sequence
  Description of Artificial Sequence: Synthetic oligonucleotide
  Antisense strand to SEQ ID NO: 958890
augauuggaccaagugggc

SEQ ID NO: 958892 - RNA, 19 nt, Artificial Sequence
  Description of Artificial Sequence: Synthetic oligonucleotide
  Sense strand starting at position 3951 of SEQ ID NO: 913849
uuggaugcccuuugacaua

SEQ ID NO: 958893 - RNA, 19 nt, Artificial Sequence
  Description of Artificial Sequence: Synthetic oligonucleotide
  Antisense strand to SEQ ID NO: 958892
uaugucaaagggcauccaa

SEQ ID NO: 958894 - RNA, 19 nt, Artificial Sequence
  Description of Artificial Sequence: Synthetic oligonucleotide
  Sense strand starting at position 3926 of SEQ ID NO: 913849
cugaauuaucugggcacuc

SEQ ID NO: 958895 - RNA, 19 nt, Artificial Sequence
  Description of Artificial Sequence: Synthetic oligonucleotide
  Antisense strand to SEQ ID NO: 958894
gagugcccagauaauucag

SEQ ID NO: 958896 - RNA, 19 nt, Artificial Sequence
  Description of Artificial Sequence: Synthetic oligonucleotide
  Sense strand starting at position 750 of SEQ ID NO: 913849
uguaauaucccucgacagg

SEQ ID NO: 958897 - RNA, 19 nt, Artificial Sequence
  Description of Artificial Sequence: Synthetic oligonucleotide
  Antisense strand to SEQ ID NO: 958896
ccugucgagggauauuaca

SEQ ID NO: 958898 - RNA, 19 nt, Artificial Sequence
  Description of Artificial Sequence: Synthetic oligonucleotide
  Sense strand starting at position 2035 of SEQ ID NO: 913849
aguuuagugccugaaccau

SEQ ID NO: 958899 - RNA, 19 nt, Artificial Sequence
  Description of Artificial Sequence: Synthetic oligonucleotide
  Antisense strand to SEQ ID NO: 958898
augguucaggcacuaaacu

SEQ ID NO: 958900 - RNA, 19 nt, Artificial Sequence
  Description of Artificial Sequence: Synthetic oligonucleotide
  Sense strand starting at position 2968 of SEQ ID NO: 913849
guagaacuuugcucaaauu

SEQ ID NO: 958901 - RNA, 19 nt, Artificial Sequence
  Description of Artificial Sequence: Synthetic oligonucleotide
  Antisense strand to SEQ ID NO: 958900
aauuugagcaaaguucuac

SEQ ID NO: 958902 - RNA, 19 nt, Artificial Sequence
  Description of Artificial Sequence: Synthetic oligonucleotide
  Sense strand starting at position 2967 of SEQ ID NO: 913849
uguagaacuuugcucaaau

SEQ ID NO: 958903 - RNA, 19 nt, Artificial Sequence
  Description of Artificial Sequence: Synthetic oligonucleotide
  Antisense strand to SEQ ID NO: 958902
auuugagcaaaguucuaca

SEQ ID NO: 958904 - RNA, 19 nt, Artificial Sequence
  Description of Artificial Sequence: Synthetic oligonucleotide
  Sense strand starting at position 2003 of SEQ ID NO: 913849
ccaucccuacucugugaua

SEQ ID NO: 958905 - RNA, 19 nt, Artificial Sequence
  Description of Artificial Sequence: Synthetic oligonucleotide
  Antisense strand to SEQ ID NO: 958904
uaucacagaguagggaugg

SEQ ID NO: 958906 - RNA, 19 nt, Artificial Sequence
  Description of Artificial Sequence: Synthetic oligonucleotide
  Sense strand starting at position 2005 of SEQ ID NO: 913849
aucccuacucugugauacu

SEQ ID NO: 958907 - RNA, 19 nt, Artificial Sequence
  Description of Artificial Sequence: Synthetic oligonucleotide
  Antisense strand to SEQ ID NO: 958906
aguaucacagaguagggau

SEQ ID NO: 958908 - RNA, 19 nt, Artificial Sequence
  Description of Artificial Sequence: Synthetic oligonucleotide
  Sense strand starting at position 3679 of SEQ ID NO: 913849
gauuauuccugugcuaaga

SEQ ID NO: 958909 - RNA, 19 nt, Artificial Sequence
  Description of Artificial Sequence: Synthetic oligonucleotide
  Antisense strand to SEQ ID NO: 958908
ucuuagcacaggaauaauc

SEQ ID NO: 958910 - RNA, 19 nt, Artificial Sequence
  Description of Artificial Sequence: Synthetic oligonucleotide
  Sense strand starting at position 3914 of SEQ ID NO: 913849
gccagaccaugucugaauu

SEQ ID NO: 958911 - RNA, 19 nt, Artificial Sequence
  Description of Artificial Sequence: Synthetic oligonucleotide
  Antisense strand to SEQ ID NO: 958910
aauucagacauggucuggc

SEQ ID NO: 958912 - RNA, 19 nt, Artificial Sequence
  Description of Artificial Sequence: Synthetic oligonucleotide
  Sense strand starting at position 2205 of SEQ ID NO: 913849
ggcuuacauucugcaggaa

SEQ ID NO: 958913 - RNA, 19 nt, Artificial Sequence
  Description of Artificial Sequence: Synthetic oligonucleotide
  Antisense strand to SEQ ID NO: 958912
uuccugcagaauguaagcc

SEQ ID NO: 958914 - RNA, 19 nt, Artificial Sequence
  Description of Artificial Sequence: Synthetic oligonucleotide
  Sense strand starting at position 50 of SEQ ID NO: 913849
aggcaugagguguaugcua

SEQ ID NO: 958915 - RNA, 19 nt, Artificial Sequence
  Description of Artificial Sequence: Synthetic oligonucleotide
  Antisense strand to SEQ ID NO: 958914
uagcauacaccucaugccu

SEQ ID NO: 958916 - RNA, 19 nt, Artificial Sequence
  Description of Artificial Sequence: Synthetic oligonucleotide
  Sense strand starting at position 2228 of SEQ ID NO: 913849
aguccugaaucuuugguau

SEQ ID NO: 958917 - RNA, 19 nt, Artificial Sequence
  Description of Artificial Sequence: Synthetic oligonucleotide
  Antisense strand to SEQ ID NO: 958916
auaccaaagauucaggacu

SEQ ID NO: 958918 - RNA, 19 nt, Artificial Sequence
  Description of Artificial Sequence: Synthetic oligonucleotide
  Sense strand starting at position 738 of SEQ ID NO: 913849
gauagccaagucuguaaua

SEQ ID NO: 958919 - RNA, 19 nt, Artificial Sequence
  Description of Artificial Sequence: Synthetic oligonucleotide
  Antisense strand to SEQ ID NO: 958918
uauuacagacuuggcuauc

SEQ ID NO: 958920 - RNA, 19 nt, Artificial Sequence
  Description of Artificial Sequence: Synthetic oligonucleotide
  Sense strand starting at position 748 of SEQ ID NO: 913849
ucuguaauaucccucgaca

SEQ ID NO: 958921 - RNA, 19 nt, Artificial Sequence
  Description of Artificial Sequence: Synthetic oligonucleotide
  Antisense strand to SEQ ID NO: 958920
ugucgagggauauuacaga

SEQ ID NO: 958922 - RNA, 19 nt, Artificial Sequence
  Description of Artificial Sequence: Synthetic oligonucleotide
  Sense strand starting at position 3723 of SEQ ID NO: 913850
gacacaaaggcuugagauc

SEQ ID NO: 958923 - RNA, 19 nt, Artificial Sequence
  Description of Artificial Sequence: Synthetic oligonucleotide
  Antisense strand to SEQ ID NO: 958922
gaucucaagccuuuguguc

SEQ ID NO: 958924 - RNA, 19 nt, Artificial Sequence
  Description of Artificial Sequence: Synthetic oligonucleotide
  Sense strand starting at position 3675 of SEQ ID NO: 913850
augggaacgcuacaguaaa

SEQ ID NO: 958925 - RNA, 19 nt, Artificial Sequence
  Description of Artificial Sequence: Synthetic oligonucleotide
  Antisense strand to SEQ ID NO: 958924
uuuacuguagcguucccau

SEQ ID NO: 958926 - RNA, 19 nt, Artificial Sequence
  Description of Artificial Sequence: Synthetic oligonucleotide
  Sense strand starting at position 3625 of SEQ ID NO: 913850
uggaauaaaugaguuguua

SEQ ID NO: 958927 - RNA, 19 nt, Artificial Sequence
  Description of Artificial Sequence: Synthetic oligonucleotide
  Antisense strand to SEQ ID NO: 958926
uaacaacucauuuauucca

SEQ ID NO: 958928 - RNA, 19 nt, Artificial Sequence
  Description of Artificial Sequence: Synthetic oligonucleotide
  Sense strand starting at position 3191 of SEQ ID NO: 913850
agguauguuauuggacaaa

SEQ ID NO: 958929 - RNA, 19 nt, Artificial Sequence
  Description of Artificial Sequence: Synthetic oligonucleotide
  Antisense strand to SEQ ID NO: 958928
uuuguccaauaacauaccu

SEQ ID NO: 958930 - RNA, 19 nt, Artificial Sequence
  Description of Artificial Sequence: Synthetic oligonucleotide
  Sense strand starting at position 3220 of SEQ ID NO: 913850
auagcauaauggcuaagaa

SEQ ID NO: 958931 - RNA, 19 nt, Artificial Sequence
  Description of Artificial Sequence: Synthetic oligonucleotide
  Antisense strand to SEQ ID NO: 958930
uucuuagccauuaugcuau

SEQ ID NO: 958932 - RNA, 19 nt, Artificial Sequence
  Description of Artificial Sequence: Synthetic oligonucleotide
  Sense strand starting at position 493 of SEQ ID NO: 913850
ggcccugugacugauaaau

SEQ ID NO: 958933 - RNA, 19 nt, Artificial Sequence
  Description of Artificial Sequence: Synthetic oligonucleotide
  Antisense strand to SEQ ID NO: 958932
auuuaucagucacagggcc

SEQ ID NO: 958934 - RNA, 19 nt, Artificial Sequence
  Description of Artificial Sequence: Synthetic oligonucleotide
  Sense strand starting at position 3399 of SEQ ID NO: 913850
gcauaccuggcauacaaua

SEQ ID NO: 958935 - RNA, 19 nt, Artificial Sequence
  Description of Artificial Sequence: Synthetic oligonucleotide
  Antisense strand to SEQ ID NO: 958934
uauuguaugccagguaugc

SEQ ID NO: 958936 - RNA, 19 nt, Artificial Sequence
  Description of Artificial Sequence: Synthetic oligonucleotide
  Sense strand starting at position 1195 of SEQ ID NO: 913850
gaucaauuaugggucuuua

SEQ ID NO: 958937 - RNA, 19 nt, Artificial Sequence
  Description of Artificial Sequence: Synthetic oligonucleotide
  Antisense strand to SEQ ID NO: 958936
uaaagacccauaauugauc

SEQ ID NO: 958938 - RNA, 19 nt, Artificial Sequence
  Description of Artificial Sequence: Synthetic oligonucleotide
  Sense strand starting at position 810 of SEQ ID NO: 913850
gauagacaugacugcucau

SEQ ID NO: 958939 - RNA, 19 nt, Artificial Sequence
  Description of Artificial Sequence: Synthetic oligonucleotide
  Antisense strand to SEQ ID NO: 958938
augagcagucaugucuauc

SEQ ID NO: 958940 - RNA, 19 nt, Artificial Sequence
  Description of Artificial Sequence: Synthetic oligonucleotide
  Sense strand starting at position 2860 of SEQ ID NO: 913850
uuaacagauuuaugaggaa

SEQ ID NO: 958941 - RNA, 19 nt, Artificial Sequence
  Description of Artificial Sequence: Synthetic oligonucleotide
  Antisense strand to SEQ ID NO: 958940
uuccucauaaaucuguuaa

SEQ ID NO: 958942 - RNA, 19 nt, Artificial Sequence
  Description of Artificial Sequence: Synthetic oligonucleotide
  Sense strand starting at position 2796 of SEQ ID NO: 913850
ccaggaagucgcuauagau

SEQ ID NO: 958943 - RNA, 19 nt, Artificial Sequence
  Description of Artificial Sequence: Synthetic oligonucleotide
  Antisense strand to SEQ ID NO: 958942
aucuauagcgacuuccugg

SEQ ID NO: 958944 - RNA, 19 nt, Artificial Sequence
  Description of Artificial Sequence: Synthetic oligonucleotide
  Sense strand starting at position 3268 of SEQ ID NO: 913850
cacagcuagcuguaugaaa

SEQ ID NO: 958945 - RNA, 19 nt, Artificial Sequence
  Description of Artificial Sequence: Synthetic oligonucleotide
  Antisense strand to SEQ ID NO: 958944
uuucauacagcuagcugug

SEQ ID NO: 958946 - RNA, 19 nt, Artificial Sequence
  Description of Artificial Sequence: Synthetic oligonucleotide
  Sense strand starting at position 3189 of SEQ ID NO: 913850
uuagguauguuauuggaca

SEQ ID NO: 958947 - RNA, 19 nt, Artificial Sequence
  Description of Artificial Sequence: Synthetic oligonucleotide
  Antisense strand to SEQ ID NO: 958946
uguccaauaacauaccuaa

SEQ ID NO: 958948 - RNA, 19 nt, Artificial Sequence
  Description of Artificial Sequence: Synthetic oligonucleotide
  Sense strand starting at position 492 of SEQ ID NO: 913850
aggcccugugacugauaaa

SEQ ID NO: 958949 - RNA, 19 nt, Artificial Sequence
  Description of Artificial Sequence: Synthetic oligonucleotide
  Antisense strand to SEQ ID NO: 958948
uuuaucagucacagggccu

SEQ ID NO: 958950 - RNA, 19 nt, Artificial Sequence
  Description of Artificial Sequence: Synthetic oligonucleotide
  Sense strand starting at position 813 of SEQ ID NO: 913850
agacaugacugcucaucuu

SEQ ID NO: 958951 - RNA, 19 nt, Artificial Sequence
  Description of Artificial Sequence: Synthetic oligonucleotide
  Antisense strand to SEQ ID NO: 958950
aagaugagcagucaugucu

SEQ ID NO: 958952 - RNA, 19 nt, Artificial Sequence
  Description of Artificial Sequence: Synthetic oligonucleotide
  Sense strand starting at position 2042 of SEQ ID NO: 913850
ugugaauugguuuaucuuu

SEQ ID NO: 958953 - RNA, 19 nt, Artificial Sequence
  Description of Artificial Sequence: Synthetic oligonucleotide
  Antisense strand to SEQ ID NO: 958952
aaagauaaaccaauucaca

SEQ ID NO: 958954 - RNA, 19 nt, Artificial Sequence
  Description of Artificial Sequence: Synthetic oligonucleotide
  Sense strand starting at position 3297 of SEQ ID NO: 913850
uauuuaauguguucgugua

SEQ ID NO: 958955 - RNA, 19 nt, Artificial Sequence
  Description of Artificial Sequence: Synthetic oligonucleotide
  Antisense strand to SEQ ID NO: 958954
uacacgaacacauuaaaua

SEQ ID NO: 958956 - RNA, 19 nt, Artificial Sequence
  Description of Artificial Sequence: Synthetic oligonucleotide
  Sense strand starting at position 2367 of SEQ ID NO: 913850
ggauaauucugcccacuuu

SEQ ID NO: 958957 - RNA, 19 nt, Artificial Sequence
  Description of Artificial Sequence: Synthetic oligonucleotide
  Antisense strand to SEQ ID NO: 958956
aaagugggcagaauuaucc

SEQ ID NO: 958958 - RNA, 19 nt, Artificial Sequence
  Description of Artificial Sequence: Synthetic oligonucleotide
  Sense strand starting at position 3298 of SEQ ID NO: 913850
auuuaauguguucguguau

SEQ ID NO: 958959 - RNA, 19 nt, Artificial Sequence
  Description of Artificial Sequence: Synthetic oligonucleotide
  Antisense strand to SEQ ID NO: 958958
auacacgaacacauuaaau

SEQ ID NO: 958960 - RNA, 19 nt, Artificial Sequence
  Description of Artificial Sequence: Synthetic oligonucleotide
  Sense strand starting at position 758 of SEQ ID NO: 913850
accaguuuggaugguaagu

SEQ ID NO: 958961 - RNA, 19 nt, Artificial Sequence
  Description of Artificial Sequence: Synthetic oligonucleotide
  Antisense strand to SEQ ID NO: 958960
acuuaccauccaaacuggu

SEQ ID NO: 958962 - RNA, 19 nt, Artificial Sequence
  Description of Artificial Sequence: Synthetic oligonucleotide
  Sense strand starting at position 3417 of SEQ ID NO: 913850
aggcaugagguguaugcua

SEQ ID NO: 958963 - RNA, 19 nt, Artificial Sequence
  Description of Artificial Sequence: Synthetic oligonucleotide
  Antisense strand to SEQ ID NO: 958962
uagcauacaccucaugccu

SEQ ID NO: 958964 - RNA, 19 nt, Artificial Sequence
  Description of Artificial Sequence: Synthetic oligonucleotide
  Sense strand starting at position 2385 of SEQ ID NO: 913850
ugucaacuggauugcaauu

SEQ ID NO: 958965 - RNA, 19 nt, Artificial Sequence
  Description of Artificial Sequence: Synthetic oligonucleotide
  Antisense strand to SEQ ID NO: 958964
aauugcaauccaguugaca

SEQ ID NO: 958966 - RNA, 19 nt, Artificial Sequence
  Description of Artificial Sequence: Synthetic oligonucleotide
  Sense strand starting at position 2787 of SEQ ID NO: 913850
ucacuuguuccaggaaguc

SEQ ID NO: 958967 - RNA, 19 nt, Artificial Sequence
  Description of Artificial Sequence: Synthetic oligonucleotide
  Antisense strand to SEQ ID NO: 958966
gacuuccuggaacaaguga

SEQ ID NO: 958968 - RNA, 19 nt, Artificial Sequence
  Description of Artificial Sequence: Synthetic oligonucleotide
  Sense strand starting at position 3358 of SEQ ID NO: 913850
uccagauugugguuguaag

SEQ ID NO: 958969 - RNA, 19 nt, Artificial Sequence
  Description of Artificial Sequence: Synthetic oligonucleotide
  Antisense strand to SEQ ID NO: 958968
cuuacaaccacaaucugga

SEQ ID NO: 958970 - RNA, 19 nt, Artificial Sequence
  Description of Artificial Sequence: Synthetic oligonucleotide
  Sense strand starting at position 2347 of SEQ ID NO: 913850
auguuuguuucucuugaaa

SEQ ID NO: 958971 - RNA, 19 nt, Artificial Sequence
  Description of Artificial Sequence: Synthetic oligonucleotide
  Antisense strand to SEQ ID NO: 958970
uuucaagagaaacaaacau

SEQ ID NO: 958972 - RNA, 19 nt, Artificial Sequence
  Description of Artificial Sequence: Synthetic oligonucleotide
  Sense strand starting at position 3495 of SEQ ID NO: 913850
acagaagacuuggauacua

SEQ ID NO: 958973 - RNA, 19 nt, Artificial Sequence
  Description of Artificial Sequence: Synthetic oligonucleotide
  Antisense strand to SEQ ID NO: 958972
uaguauccaagucuucugu

SEQ ID NO: 958974 - RNA, 19 nt, Artificial Sequence
  Description of Artificial Sequence: Synthetic oligonucleotide
  Sense strand starting at position 2663 of SEQ ID NO: 913850
ggguuugcuaucugacacu

SEQ ID NO: 958975 - RNA, 19 nt, Artificial Sequence
  Description of Artificial Sequence: Synthetic oligonucleotide
  Antisense strand to SEQ ID NO: 958974
agugucagauagcaaaccc

SEQ ID NO: 958976 - RNA, 19 nt, Artificial Sequence
  Description of Artificial Sequence: Synthetic oligonucleotide
  Sense strand starting at position 2037 of SEQ ID NO: 913850
gggccugugaauugguuua

SEQ ID NO: 958977 - RNA, 19 nt, Artificial Sequence
  Description of Artificial Sequence: Synthetic oligonucleotide
  Antisense strand to SEQ ID NO: 958976
uaaaccaauucacaggccc

SEQ ID NO: 958978 - RNA, 19 nt, Artificial Sequence
  Description of Artificial Sequence: Synthetic oligonucleotide
  Sense strand starting at position 590 of SEQ ID NO: 913850
gcauguaucuuugucaaca

SEQ ID NO: 958979 - RNA, 19 nt, Artificial Sequence
  Description of Artificial Sequence: Synthetic oligonucleotide
  Antisense strand to SEQ ID NO: 958978
uguugacaaagauacaugc

SEQ ID NO: 958980 - RNA, 19 nt, Artificial Sequence
  Description of Artificial Sequence: Synthetic oligonucleotide
  Sense strand starting at position 2432 of SEQ ID NO: 913850
aagcgaacuuugucaccuu

SEQ ID NO: 958981 - RNA, 19 nt, Artificial Sequence
  Description of Artificial Sequence: Synthetic oligonucleotide
  Antisense strand to SEQ ID NO: 958980
aaggugacaaaguucgcuu

SEQ ID NO: 958982 - RNA, 19 nt, Artificial Sequence
  Description of Artificial Sequence: Synthetic oligonucleotide
  Sense strand starting at position 342 of SEQ ID NO: 913850
uaucuucguguuugaauua

SEQ ID NO: 958983 - RNA, 19 nt, Artificial Sequence
  Description of Artificial Sequence: Synthetic oligonucleotide
  Antisense strand to SEQ ID NO: 958982
uaauucaaacacgaagaua

SEQ ID NO: 958984 - RNA, 19 nt, Artificial Sequence
  Description of Artificial Sequence: Synthetic oligonucleotide
  Sense strand starting at position 2039 of SEQ ID NO: 913850
gccugugaauugguuuauc

SEQ ID NO: 958985 - RNA, 19 nt, Artificial Sequence
  Description of Artificial Sequence: Synthetic oligonucleotide
  Antisense strand to SEQ ID NO: 958984
gauaaaccaauucacaggc

SEQ ID NO: 958986 - RNA, 19 nt, Artificial Sequence
  Description of Artificial Sequence: Synthetic oligonucleotide
  Sense strand starting at position 588 of SEQ ID NO: 913850
uugcauguaucuuugucaa

SEQ ID NO: 958987 - RNA, 19 nt, Artificial Sequence
  Description of Artificial Sequence: Synthetic oligonucleotide
  Antisense strand to SEQ ID NO: 958986
uugacaaagauacaugcaa

SEQ ID NO: 958988 - RNA, 19 nt, Artificial Sequence
  Description of Artificial Sequence: Synthetic oligonucleotide
  Sense strand starting at position 341 of SEQ ID NO: 913850
uuaucuucguguuugaauu

SEQ ID NO: 958989 - RNA, 19 nt, Artificial Sequence
  Description of Artificial Sequence: Synthetic oligonucleotide
  Antisense strand to SEQ ID NO: 958988
aauucaaacacgaagauaa

SEQ ID NO: 958990 - RNA, 19 nt, Artificial Sequence
  Description of Artificial Sequence: Synthetic oligonucleotide
  Sense strand starting at position 20 of SEQ ID NO: 913850
ggacuagaauugcaaacau

SEQ ID NO: 958991 - RNA, 19 nt, Artificial Sequence
  Description of Artificial Sequence: Synthetic oligonucleotide
  Antisense strand to SEQ ID NO: 958990
auguuugcaauucuagucc

SEQ ID NO: 958992 - RNA, 19 nt, Artificial Sequence
  Description of Artificial Sequence: Synthetic oligonucleotide
  Sense strand starting at position 2345 of SEQ ID NO: 913850
guauguuuguuucucuuga

SEQ ID NO: 958993 - RNA, 19 nt, Artificial Sequence
  Description of Artificial Sequence: Synthetic oligonucleotide
  Antisense strand to SEQ ID NO: 958992
ucaagagaaacaaacauac

SEQ ID NO: 958994 - RNA, 19 nt, Artificial Sequence
  Description of Artificial Sequence: Synthetic oligonucleotide
  Sense strand starting at position 3145 of SEQ ID NO: 913850
ugcucaucucugugguaca

SEQ ID NO: 958995 - RNA, 19 nt, Artificial Sequence
  Description of Artificial Sequence: Synthetic oligonucleotide
  Antisense strand to SEQ ID NO: 958994
uguaccacagagaugagca

SEQ ID NO: 958996 - RNA, 19 nt, Artificial Sequence
  Description of Artificial Sequence: Synthetic oligonucleotide
  Sense strand starting at position 2749 of SEQ ID NO: 913850
aaaugccagucuucgcaau

SEQ ID NO: 958997 - RNA, 19 nt, Artificial Sequence
  Description of Artificial Sequence: Synthetic oligonucleotide
  Antisense strand to SEQ ID NO: 958996
auugcgaagacuggcauuu

SEQ ID NO: 958998 - RNA, 19 nt, Artificial Sequence
  Description of Artificial Sequence: Synthetic oligonucleotide
  Sense strand starting at position 3419 of SEQ ID NO: 913850
gcaugagguguaugcuauc

SEQ ID NO: 958999 - RNA, 19 nt, Artificial Sequence
  Description of Artificial Sequence: Synthetic oligonucleotide
  Antisense strand to SEQ ID NO: 958998
gauagcauacaccucaugc

SEQ ID NO: 959000 - RNA, 19 nt, Artificial Sequence
  Description of Artificial Sequence: Synthetic oligonucleotide
  Sense strand starting at position 798 of SEQ ID NO: 913850
gcaauaacuuaugauagac

SEQ ID NO: 959001 - RNA, 19 nt, Artificial Sequence
  Description of Artificial Sequence: Synthetic oligonucleotide
  Antisense strand to SEQ ID NO: 959000
gucuaucauaaguuauugc

SEQ ID NO: 959002 - RNA, 19 nt, Artificial Sequence
  Description of Artificial Sequence: Synthetic oligonucleotide
  Sense strand starting at position 3055 of SEQ ID NO: 913851
uuuaaauauccugaggcua

SEQ ID NO: 959003 - RNA, 19 nt, Artificial Sequence
  Description of Artificial Sequence: Synthetic oligonucleotide
  Antisense strand to SEQ ID NO: 959002
uagccucaggauauuuaaa

SEQ ID NO: 959004 - RNA, 19 nt, Artificial Sequence
  Description of Artificial Sequence: Synthetic oligonucleotide
  Sense strand starting at position 1291 of SEQ ID NO: 913851
cgcguuucuggacuuuauu

SEQ ID NO: 959005 - RNA, 19 nt, Artificial Sequence
  Description of Artificial Sequence: Synthetic oligonucleotide
  Antisense strand to SEQ ID NO: 959004
aauaaaguccagaaacgcg

SEQ ID NO: 959006 - RNA, 19 nt, Artificial Sequence
  Description of Artificial Sequence: Synthetic oligonucleotide
  Sense strand starting at position 3712 of SEQ ID NO: 913851
augaaauaggugcaucacu

SEQ ID NO: 959007 - RNA, 19 nt, Artificial Sequence
  Description of Artificial Sequence: Synthetic oligonucleotide
  Antisense strand to SEQ ID NO: 959006
agugaugcaccuauuucau

SEQ ID NO: 959008 - RNA, 19 nt, Artificial Sequence
  Description of Artificial Sequence: Synthetic oligonucleotide
  Sense strand starting at position 3066 of SEQ ID NO: 913851
ugaggcuaucuccacugaa

SEQ ID NO: 959009 - RNA, 19 nt, Artificial Sequence
  Description of Artificial Sequence: Synthetic oligonucleotide
  Antisense strand to SEQ ID NO: 959008
uucaguggagauagccuca

SEQ ID NO: 959010 - RNA, 19 nt, Artificial Sequence
  Description of Artificial Sequence: Synthetic oligonucleotide
  Sense strand starting at position 1233 of SEQ ID NO: 913851
cuuaguaacgaaugggaga

SEQ ID NO: 959011 - RNA, 19 nt, Artificial Sequence
  Description of Artificial Sequence: Synthetic oligonucleotide
  Antisense strand to SEQ ID NO: 959010
ucucccauucguuacuaag

SEQ ID NO: 959012 - RNA, 19 nt, Artificial Sequence
  Description of Artificial Sequence: Synthetic oligonucleotide
  Sense strand starting at position 300 of SEQ ID NO: 913851
gaaccacuguucucaagag

SEQ ID NO: 959013 - RNA, 19 nt, Artificial Sequence
  Description of Artificial Sequence: Synthetic oligonucleotide
  Antisense strand to SEQ ID NO: 959012
cucuugagaacagugguuc

SEQ ID NO: 959014 - RNA, 19 nt, Artificial Sequence
  Description of Artificial Sequence: Synthetic oligonucleotide
  Sense strand starting at position 1472 of SEQ ID NO: 913851
caguaaguugaguauaauc

SEQ ID NO: 959015 - RNA, 19 nt, Artificial Sequence
  Description of Artificial Sequence: Synthetic oligonucleotide
  Antisense strand to SEQ ID NO: 959014
gauuauacucaacuuacug

SEQ ID NO: 959016 - RNA, 19 nt, Artificial Sequence
  Description of Artificial Sequence: Synthetic oligonucleotide
  Sense strand starting at position 1305 of SEQ ID NO: 913851
uuauucugugacuaaggua

SEQ ID NO: 959017 - RNA, 19 nt, Artificial Sequence
  Description of Artificial Sequence: Synthetic oligonucleotide
  Antisense strand to SEQ ID NO: 959016
uaccuuagucacagaauaa

SEQ ID NO: 959018 - RNA, 19 nt, Artificial Sequence
  Description of Artificial Sequence: Synthetic oligonucleotide
  Sense strand starting at position 618 of SEQ ID NO: 913851
cuuccaaguguguaagaag

SEQ ID NO: 959019 - RNA, 19 nt, Artificial Sequence
  Description of Artificial Sequence: Synthetic oligonucleotide
  Antisense strand to SEQ ID NO: 959018
cuucuuacacacuuggaag

SEQ ID NO: 959020 - RNA, 19 nt, Artificial Sequence
  Description of Artificial Sequence: Synthetic oligonucleotide
  Sense strand starting at position 3702 of SEQ ID NO: 913851
ugguguuagcaugaaauag

SEQ ID NO: 959021 - RNA, 19 nt, Artificial Sequence
  Description of Artificial Sequence: Synthetic oligonucleotide
  Antisense strand to SEQ ID NO: 959020
cuauuucaugcuaacacca

SEQ ID NO: 959022 - RNA, 19 nt, Artificial Sequence
  Description of Artificial Sequence: Synthetic oligonucleotide
  Sense strand starting at position 596 of SEQ ID NO: 913851
gggagaacuuucccauugu

SEQ ID NO: 959023 - RNA, 19 nt, Artificial Sequence
  Description of Artificial Sequence: Synthetic oligonucleotide
  Antisense strand to SEQ ID NO: 959022
acaaugggaaaguucuccc

SEQ ID NO: 959024 - RNA, 19 nt, Artificial Sequence
  Description of Artificial Sequence: Synthetic oligonucleotide
  Sense strand starting at position 3164 of SEQ ID NO: 913851
ccacauacuuagguuuaca

SEQ ID NO: 959025 - RNA, 19 nt, Artificial Sequence
  Description of Artificial Sequence: Synthetic oligonucleotide
  Antisense strand to SEQ ID NO: 959024
uguaaaccuaaguaugugg

SEQ ID NO: 959026 - RNA, 19 nt, Artificial Sequence
  Description of Artificial Sequence: Synthetic oligonucleotide
  Sense strand starting at position 3835 of SEQ ID NO: 913851
ggugguucucaauaauucu

SEQ ID NO: 959027 - RNA, 19 nt, Artificial Sequence
  Description of Artificial Sequence: Synthetic oligonucleotide
  Antisense strand to SEQ ID NO: 959026
agaauuauugagaaccacc

SEQ ID NO: 959028 - RNA, 19 nt, Artificial Sequence
  Description of Artificial Sequence: Synthetic oligonucleotide
  Sense strand starting at position 1471 of SEQ ID NO: 913851
acaguaaguugaguauaau

SEQ ID NO: 959029 - RNA, 19 nt, Artificial Sequence
  Description of Artificial Sequence: Synthetic oligonucleotide
  Antisense strand to SEQ ID NO: 959028
auuauacucaacuuacugu

SEQ ID NO: 959030 - RNA, 19 nt, Artificial Sequence
  Description of Artificial Sequence: Synthetic oligonucleotide
  Sense strand starting at position 1300 of SEQ ID NO: 913851
ggacuuuauucugugacua

SEQ ID NO: 959031 - RNA, 19 nt, Artificial Sequence
  Description of Artificial Sequence: Synthetic oligonucleotide
  Antisense strand to SEQ ID NO: 959030
uagucacagaauaaagucc

SEQ ID NO: 959032 - RNA, 19 nt, Artificial Sequence
  Description of Artificial Sequence: Synthetic oligonucleotide
  Sense strand starting at position 933 of SEQ ID NO: 913851
ggaagacuuucugucccau

SEQ ID NO: 959033 - RNA, 19 nt, Artificial Sequence
  Description of Artificial Sequence: Synthetic oligonucleotide
  Antisense strand to SEQ ID NO: 959032
augggacagaaagucuucc

SEQ ID NO: 959034 - RNA, 19 nt, Artificial Sequence
  Description of Artificial Sequence: Synthetic oligonucleotide
  Sense strand starting at position 362 of SEQ ID NO: 913851
ccagaaugcuagguauuga

SEQ ID NO: 959035 - RNA, 19 nt, Artificial Sequence
  Description of Artificial Sequence: Synthetic oligonucleotide
  Antisense strand to SEQ ID NO: 959034
ucaauaccuagcauucugg

SEQ ID NO: 959036 - RNA, 19 nt, Artificial Sequence
  Description of Artificial Sequence: Synthetic oligonucleotide
  Sense strand starting at position 552 of SEQ ID NO: 913851
ucaccugaugccugaauga

SEQ ID NO: 959037 - RNA, 19 nt, Artificial Sequence
  Description of Artificial Sequence: Synthetic oligonucleotide
  Antisense strand to SEQ ID NO: 959036
ucauucaggcaucagguga

SEQ ID NO: 959038 - RNA, 19 nt, Artificial Sequence
  Description of Artificial Sequence: Synthetic oligonucleotide
  Sense strand starting at position 814 of SEQ ID NO: 913851
acacaugucagaggcugau

SEQ ID NO: 959039 - RNA, 19 nt, Artificial Sequence
  Description of Artificial Sequence: Synthetic oligonucleotide
  Antisense strand to SEQ ID NO: 959038
aucagccucugacaugugu

SEQ ID NO: 959040 - RNA, 19 nt, Artificial Sequence
  Description of Artificial Sequence: Synthetic oligonucleotide
  Sense strand starting at position 617 of SEQ ID NO: 913851
acuuccaaguguguaagaa

SEQ ID NO: 959041 - RNA, 19 nt, Artificial Sequence
  Description of Artificial Sequence: Synthetic oligonucleotide
  Antisense strand to SEQ ID NO: 959040
uucuuacacacuuggaagu

SEQ ID NO: 959042 - RNA, 19 nt, Artificial Sequence
  Description of Artificial Sequence: Synthetic oligonucleotide
  Sense strand starting at position 3921 of SEQ ID NO: 913851
ucagcugcugauggaaaua

SEQ ID NO: 959043 - RNA, 19 nt, Artificial Sequence
  Description of Artificial Sequence: Synthetic oligonucleotide
  Antisense strand to SEQ ID NO: 959042
uauuuccaucagcagcuga

SEQ ID NO: 959044 - RNA, 19 nt, Artificial Sequence
  Description of Artificial Sequence: Synthetic oligonucleotide
  Sense strand starting at position 907 of SEQ ID NO: 913851
gaggaaacguucucgaauu

SEQ ID NO: 959045 - RNA, 19 nt, Artificial Sequence
  Description of Artificial Sequence: Synthetic oligonucleotide
  Antisense strand to SEQ ID NO: 959044
aauucgagaacguuuccuc

SEQ ID NO: 959046 - RNA, 19 nt, Artificial Sequence
  Description of Artificial Sequence: Synthetic oligonucleotide
  Sense strand starting at position 917 of SEQ ID NO: 913851
ucucgaauuccaggcagga

SEQ ID NO: 959047 - RNA, 19 nt, Artificial Sequence
  Description of Artificial Sequence: Synthetic oligonucleotide
  Antisense strand to SEQ ID NO: 959046
uccugccuggaauucgaga

SEQ ID NO: 959048 - RNA, 19 nt, Artificial Sequence
  Description of Artificial Sequence: Synthetic oligonucleotide
  Sense strand starting at position 834 of SEQ ID NO: 913851
gggcacugucagcaacuau

SEQ ID NO: 959049 - RNA, 19 nt, Artificial Sequence
  Description of Artificial Sequence: Synthetic oligonucleotide
  Antisense strand to SEQ ID NO: 959048
auaguugcugacagugccc

SEQ ID NO: 959050 - RNA, 19 nt, Artificial Sequence
  Description of Artificial Sequence: Synthetic oligonucleotide
  Sense strand starting at position 414 of SEQ ID NO: 913851
cuacacacgugauuaguaa

SEQ ID NO: 959051 - RNA, 19 nt, Artificial Sequence
  Description of Artificial Sequence: Synthetic oligonucleotide
  Antisense strand to SEQ ID NO: 959050
uuacuaaucacguguguag

SEQ ID NO: 959052 - RNA, 19 nt, Artificial Sequence
  Description of Artificial Sequence: Synthetic oligonucleotide
  Sense strand starting at position 1304 of SEQ ID NO: 913851
uuuauucugugacuaaggu

SEQ ID NO: 959053 - RNA, 19 nt, Artificial Sequence
  Description of Artificial Sequence: Synthetic oligonucleotide
  Antisense strand to SEQ ID NO: 959052
accuuagucacagaauaaa

SEQ ID NO: 959054 - RNA, 19 nt, Artificial Sequence
  Description of Artificial Sequence: Synthetic oligonucleotide
  Sense strand starting at position 3710 of SEQ ID NO: 913851
gcaugaaauaggugcauca

SEQ ID NO: 959055 - RNA, 19 nt, Artificial Sequence
  Description of Artificial Sequence: Synthetic oligonucleotide
  Antisense strand to SEQ ID NO: 959054
ugaugcaccuauuucaugc

SEQ ID NO: 959056 - RNA, 19 nt, Artificial Sequence
  Description of Artificial Sequence: Synthetic oligonucleotide
  Sense strand starting at position 895 of SEQ ID NO: 913851
acagcaauauaagaggaaa

SEQ ID NO: 959057 - RNA, 19 nt, Artificial Sequence
  Description of Artificial Sequence: Synthetic oligonucleotide
  Antisense strand to SEQ ID NO: 959056
uuuccucuuauauugcugu

SEQ ID NO: 959058 - RNA, 19 nt, Artificial Sequence
  Description of Artificial Sequence: Synthetic oligonucleotide
  Sense strand starting at position 104 of SEQ ID NO: 913851
cgacuauagauggguguuu

SEQ ID NO: 959059 - RNA, 19 nt, Artificial Sequence
  Description of Artificial Sequence: Synthetic oligonucleotide
  Antisense strand to SEQ ID NO: 959058
aaacacccaucuauagucg

SEQ ID NO: 959060 - RNA, 19 nt, Artificial Sequence
  Description of Artificial Sequence: Synthetic oligonucleotide
  Sense strand starting at position 361 of SEQ ID NO: 913851
gccagaaugcuagguauug

SEQ ID NO: 959061 - RNA, 19 nt, Artificial Sequence
  Description of Artificial Sequence: Synthetic oligonucleotide
  Antisense strand to SEQ ID NO: 959060
caauaccuagcauucuggc

SEQ ID NO: 959062 - RNA, 19 nt, Artificial Sequence
  Description of Artificial Sequence: Synthetic oligonucleotide
  Sense strand starting at position 411 of SEQ ID NO: 913851
gcccuacacacgugauuag

SEQ ID NO: 959063 - RNA, 19 nt, Artificial Sequence
  Description of Artificial Sequence: Synthetic oligonucleotide
  Antisense strand to SEQ ID NO: 959062
cuaaucacguguguagggc

SEQ ID NO: 959064 - RNA, 19 nt, Artificial Sequence
  Description of Artificial Sequence: Synthetic oligonucleotide
  Sense strand starting at position 3211 of SEQ ID NO: 913851
auugaaauggcuugugcau

SEQ ID NO: 959065 - RNA, 19 nt, Artificial Sequence
  Description of Artificial Sequence: Synthetic oligonucleotide
  Antisense strand to SEQ ID NO: 959064
augcacaagccauuucaau

SEQ ID NO: 959066 - RNA, 19 nt, Artificial Sequence
  Description of Artificial Sequence: Synthetic oligonucleotide
  Sense strand starting at position 2519 of SEQ ID NO: 913851
ccaaacaucugggacacua

SEQ ID NO: 959067 - RNA, 19 nt, Artificial Sequence
  Description of Artificial Sequence: Synthetic oligonucleotide
  Antisense strand to SEQ ID NO: 959066
uagugucccagauguuugg

SEQ ID NO: 959068 - RNA, 19 nt, Artificial Sequence
  Description of Artificial Sequence: Synthetic oligonucleotide
  Sense strand starting at position 3885 of SEQ ID NO: 913851
gacugagcccucugcucua

SEQ ID NO: 959069 - RNA, 19 nt, Artificial Sequence
  Description of Artificial Sequence: Synthetic oligonucleotide
  Antisense strand to SEQ ID NO: 959068
uagagcagagggcucaguc

SEQ ID NO: 959070 - RNA, 19 nt, Artificial Sequence
  Description of Artificial Sequence: Synthetic oligonucleotide
  Sense strand starting at position 3563 of SEQ ID NO: 913851
gggugugguucugcaaaug

SEQ ID NO: 959071 - RNA, 19 nt, Artificial Sequence
  Description of Artificial Sequence: Synthetic oligonucleotide
  Antisense strand to SEQ ID NO: 959070
cauuugcagaaccacaccc

SEQ ID NO: 959072 - RNA, 19 nt, Artificial Sequence
  Description of Artificial Sequence: Synthetic oligonucleotide
  Sense strand starting at position 82 of SEQ ID NO: 913851
gagaauuuguuuggcagga

SEQ ID NO: 959073 - RNA, 19 nt, Artificial Sequence
  Description of Artificial Sequence: Synthetic oligonucleotide
  Antisense strand to SEQ ID NO: 959072
uccugccaaacaaauucuc

SEQ ID NO: 959074 - RNA, 19 nt, Artificial Sequence
  Description of Artificial Sequence: Synthetic oligonucleotide
  Sense strand starting at position 152 of SEQ ID NO: 913851
ccagaugcuucuguauugu

SEQ ID NO: 959075 - RNA, 19 nt, Artificial Sequence
  Description of Artificial Sequence: Synthetic oligonucleotide
  Antisense strand to SEQ ID NO: 959074
acaauacagaagcaucugg

SEQ ID NO: 959076 - RNA, 19 nt, Artificial Sequence
  Description of Artificial Sequence: Synthetic oligonucleotide
  Sense strand starting at position 1077 of SEQ ID NO: 913851
gccugcagccagugacaua

SEQ ID NO: 959077 - RNA, 19 nt, Artificial Sequence
  Description of Artificial Sequence: Synthetic oligonucleotide
  Antisense strand to SEQ ID NO: 959076
uaugucacuggcugcaggc

SEQ ID NO: 959078 - RNA, 19 nt, Artificial Sequence
  Description of Artificial Sequence: Synthetic oligonucleotide
  Sense strand starting at position 1308 of SEQ ID NO: 913851
uucugugacuaagguauuu

SEQ ID NO: 959079 - RNA, 19 nt, Artificial Sequence
  Description of Artificial Sequence: Synthetic oligonucleotide
  Antisense strand to SEQ ID NO: 959078
aaauaccuuagucacagaa

SEQ ID NO: 959080 - RNA, 19 nt, Artificial Sequence
  Description of Artificial Sequence: Synthetic oligonucleotide
  Sense strand starting at position 2542 of SEQ ID NO: 913851
auuacucauugccagaaga

SEQ ID NO: 959081 - RNA, 19 nt, Artificial Sequence
  Description of Artificial Sequence: Synthetic oligonucleotide
  Antisense strand to SEQ ID NO: 959080
ucuucuggcaaugaguaau

SEQ ID NO: 959082 - RNA, 19 nt, Artificial Sequence
  Description of Artificial Sequence: Synthetic oligonucleotide
  Sense strand starting at position 2813 of SEQ ID NO: 913852
cagauucucugauugauga

SEQ ID NO: 959083 - RNA, 19 nt, Artificial Sequence
  Description of Artificial Sequence: Synthetic oligonucleotide
  Antisense strand to SEQ ID NO: 959082
ucaucaaucagagaaucug

SEQ ID NO: 959084 - RNA, 19 nt, Artificial Sequence
  Description of Artificial Sequence: Synthetic oligonucleotide
  Sense strand starting at position 2448 of SEQ ID NO: 913852
cucgauuagcuggagggaa

SEQ ID NO: 959085 - RNA, 19 nt, Artificial Sequence
  Description of Artificial Sequence: Synthetic oligonucleotide
  Antisense strand to SEQ ID NO: 959084
uucccuccagcuaaucgag

SEQ ID NO: 959086 - RNA, 19 nt, Artificial Sequence
  Description of Artificial Sequence: Synthetic oligonucleotide
  Sense strand starting at position 2814 of SEQ ID NO: 913852
agauucucugauugaugau

SEQ ID NO: 959087 - RNA, 19 nt, Artificial Sequence
  Description of Artificial Sequence: Synthetic oligonucleotide
  Antisense strand to SEQ ID NO: 959086
aucaucaaucagagaaucu

SEQ ID NO: 959088 - RNA, 19 nt, Artificial Sequence
  Description of Artificial Sequence: Synthetic oligonucleotide
  Sense strand starting at position 2352 of SEQ ID NO: 913852
ggugcaaaucccgugucuu

SEQ ID NO: 959089 - RNA, 19 nt, Artificial Sequence
  Description of Artificial Sequence: Synthetic oligonucleotide
  Antisense strand to SEQ ID NO: 959088
aagacacgggauuugcacc

SEQ ID NO: 959090 - RNA, 19 nt, Artificial Sequence
  Description of Artificial Sequence: Synthetic oligonucleotide
  Sense strand starting at position 2376 of SEQ ID NO: 913852
gcccgauugccggaaauuu

SEQ ID NO: 959091 - RNA, 19 nt, Artificial Sequence
  Description of Artificial Sequence: Synthetic oligonucleotide
  Antisense strand to SEQ ID NO: 959090
aaauuuccggcaaucgggc

SEQ ID NO: 959092 - RNA, 19 nt, Artificial Sequence
  Description of Artificial Sequence: Synthetic oligonucleotide
  Sense strand starting at position 3959 of SEQ ID NO: 913852
uugaguaagccucaacuca

SEQ ID NO: 959093 - RNA, 19 nt, Artificial Sequence
  Description of Artificial Sequence: Synthetic oligonucleotide
  Antisense strand to SEQ ID NO: 959092
ugaguugaggcuuacucaa

SEQ ID NO: 959094 - RNA, 19 nt, Artificial Sequence
  Description of Artificial Sequence: Synthetic oligonucleotide
  Sense strand starting at position 3253 of SEQ ID NO: 913852
caaauuacgcgauagcaaa

SEQ ID NO: 959095 - RNA, 19 nt, Artificial Sequence
  Description of Artificial Sequence: Synthetic oligonucleotide
  Antisense strand to SEQ ID NO: 959094
uuugcuaucgcguaauuug

SEQ ID NO: 959096 - RNA, 19 nt, Artificial Sequence
  Description of Artificial Sequence: Synthetic oligonucleotide
  Sense strand starting at position 1330 of SEQ ID NO: 913852
cgaagucaucacgagguua

SEQ ID NO: 959097 - RNA, 19 nt, Artificial Sequence
  Description of Artificial Sequence: Synthetic oligonucleotide
  Antisense strand to SEQ ID NO: 959096
uaaccucgugaugacuucg

SEQ ID NO: 959098 - RNA, 19 nt, Artificial Sequence
  Description of Artificial Sequence: Synthetic oligonucleotide
  Sense strand starting at position 3751 of SEQ ID NO: 913852
agcuauaugcuauaguaca

SEQ ID NO: 959099 - RNA, 19 nt, Artificial Sequence
  Description of Artificial Sequence: Synthetic oligonucleotide
  Antisense strand to SEQ ID NO: 959098
uguacuauagcauauagcu

SEQ ID NO: 959100 - RNA, 19 nt, Artificial Sequence
  Description of Artificial Sequence: Synthetic oligonucleotide
  Sense strand starting at position 2823 of SEQ ID NO: 913852
gauugaugauacuuugcuu

SEQ ID NO: 959101 - RNA, 19 nt, Artificial Sequence
  Description of Artificial Sequence: Synthetic oligonucleotide
  Antisense strand to SEQ ID NO: 959100
aagcaaaguaucaucaauc

SEQ ID NO: 959102 - RNA, 19 nt, Artificial Sequence
  Description of Artificial Sequence: Synthetic oligonucleotide
  Sense strand starting at position 2447 of SEQ ID NO: 913852
ucucgauuagcuggaggga

SEQ ID NO: 959103 - RNA, 19 nt, Artificial Sequence
  Description of Artificial Sequence: Synthetic oligonucleotide
  Antisense strand to SEQ ID NO: 959102
ucccuccagcuaaucgaga

SEQ ID NO: 959104 - RNA, 19 nt, Artificial Sequence
  Description of Artificial Sequence: Synthetic oligonucleotide
  Sense strand starting at position 205 of SEQ ID NO: 913852
guggaugguuugguugaaa

SEQ ID NO: 959105 - RNA, 19 nt, Artificial Sequence
  Description of Artificial Sequence: Synthetic oligonucleotide
  Antisense strand to SEQ ID NO: 959104
uuucaaccaaaccauccac

SEQ ID NO: 959106 - RNA, 19 nt, Artificial Sequence
  Description of Artificial Sequence: Synthetic oligonucleotide
  Sense strand starting at position 2808 of SEQ ID NO: 913852
gcuaccagauucucugauu

SEQ ID NO: 959107 - RNA, 19 nt, Artificial Sequence
  Description of Artificial Sequence: Synthetic oligonucleotide
  Antisense strand to SEQ ID NO: 959106
aaucagagaaucugguagc

SEQ ID NO: 959108 - RNA, 19 nt, Artificial Sequence
  Description of Artificial Sequence: Synthetic oligonucleotide
  Sense strand starting at position 1600 of SEQ ID NO: 913852
ggucacucccugcagaagu

SEQ ID NO: 959109 - RNA, 19 nt, Artificial Sequence
  Description of Artificial Sequence: Synthetic oligonucleotide
  Antisense strand to SEQ ID NO: 959108
acuucugcagggagugacc

SEQ ID NO: 959110 - RNA, 19 nt, Artificial Sequence
  Description of Artificial Sequence: Synthetic oligonucleotide
  Sense strand starting at position 2501 of SEQ ID NO: 913852
cguauugcgggaagugcua

SEQ ID NO: 959111 - RNA, 19 nt, Artificial Sequence
  Description of Artificial Sequence: Synthetic oligonucleotide
  Antisense strand to SEQ ID NO: 959110
uagcacuucccgcaauacg

SEQ ID NO: 959112 - RNA, 19 nt, Artificial Sequence
  Description of Artificial Sequence: Synthetic oligonucleotide
  Sense strand starting at position 2853 of SEQ ID NO: 913852
cgcaaauauaaguagcgaa

SEQ ID NO: 959113 - RNA, 19 nt, Artificial Sequence
  Description of Artificial Sequence: Synthetic oligonucleotide
  Antisense strand to SEQ ID NO: 959112
uucgcuacuuauauuugcg

SEQ ID NO: 959114 - RNA, 19 nt, Artificial Sequence
  Description of Artificial Sequence: Synthetic oligonucleotide
  Sense strand starting at position 3620 of SEQ ID NO: 913852
guuagucaccgggaauugu

SEQ ID NO: 959115 - RNA, 19 nt, Artificial Sequence
  Description of Artificial Sequence: Synthetic oligonucleotide
  Antisense strand to SEQ ID NO: 959114
acaauucccggugacuaac

SEQ ID NO: 959116 - RNA, 19 nt, Artificial Sequence
  Description of Artificial Sequence: Synthetic oligonucleotide
  Sense strand starting at position 152 of SEQ ID NO: 913852
ucaugagucccaggccaua

SEQ ID NO: 959117 - RNA, 19 nt, Artificial Sequence
  Description of Artificial Sequence: Synthetic oligonucleotide
  Antisense strand to SEQ ID NO: 959116
uauggccugggacucauga

SEQ ID NO: 959118 - RNA, 19 nt, Artificial Sequence
  Description of Artificial Sequence: Synthetic oligonucleotide
  Sense strand starting at position 1466 of SEQ ID NO: 913852
gagcgcuguccugucgcaa

SEQ ID NO: 959119 - RNA, 19 nt, Artificial Sequence
  Description of Artificial Sequence: Synthetic oligonucleotide
  Antisense strand to SEQ ID NO: 959118
uugcgacaggacagcgcuc

SEQ ID NO: 959120 - RNA, 19 nt, Artificial Sequence
  Description of Artificial Sequence: Synthetic oligonucleotide
  Sense strand starting at position 1120 of SEQ ID NO: 913852
cauagccucggugauaagu

SEQ ID NO: 959121 - RNA, 19 nt, Artificial Sequence
  Description of Artificial Sequence: Synthetic oligonucleotide
  Antisense strand to SEQ ID NO: 959120
acuuaucaccgaggcuaug

SEQ ID NO: 959122 - RNA, 19 nt, Artificial Sequence
  Description of Artificial Sequence: Synthetic oligonucleotide
  Sense strand starting at position 3251 of SEQ ID NO: 913852
cccaaauuacgcgauagca

SEQ ID NO: 959123 - RNA, 19 nt, Artificial Sequence
  Description of Artificial Sequence: Synthetic oligonucleotide
  Antisense strand to SEQ ID NO: 959122
ugcuaucgcguaauuuggg

SEQ ID NO: 959124 - RNA, 19 nt, Artificial Sequence
  Description of Artificial Sequence: Synthetic oligonucleotide
  Sense strand starting at position 1118 of SEQ ID NO: 913852
cacauagccucggugauaa

SEQ ID NO: 959125 - RNA, 19 nt, Artificial Sequence
  Description of Artificial Sequence: Synthetic oligonucleotide
  Antisense strand to SEQ ID NO: 959124
uuaucaccgaggcuaugug

SEQ ID NO: 959126 - RNA, 19 nt, Artificial Sequence
  Description of Artificial Sequence: Synthetic oligonucleotide
  Sense strand starting at position 2564 of SEQ ID NO: 913852
cuaguugucucagucaaag

SEQ ID NO: 959127 - RNA, 19 nt, Artificial Sequence
  Description of Artificial Sequence: Synthetic oligonucleotide
  Antisense strand to SEQ ID NO: 959126
cuuugacugagacaacuag

SEQ ID NO: 959128 - RNA, 19 nt, Artificial Sequence
  Description of Artificial Sequence: Synthetic oligonucleotide
  Sense strand starting at position 3679 of SEQ ID NO: 913852
ucagcugucccagguaaag

SEQ ID NO: 959129 - RNA, 19 nt, Artificial Sequence
  Description of Artificial Sequence: Synthetic oligonucleotide
  Antisense strand to SEQ ID NO: 959128
cuuuaccugggacagcuga

SEQ ID NO: 959130 - RNA, 19 nt, Artificial Sequence
  Description of Artificial Sequence: Synthetic oligonucleotide
  Sense strand starting at position 1126 of SEQ ID NO: 913852
cucggugauaagugucaaa

SEQ ID NO: 959131 - RNA, 19 nt, Artificial Sequence
  Description of Artificial Sequence: Synthetic oligonucleotide
  Antisense strand to SEQ ID NO: 959130
uuugacacuuaucaccgag

SEQ ID NO: 959132 - RNA, 19 nt, Artificial Sequence
  Description of Artificial Sequence: Synthetic oligonucleotide
  Sense strand starting at position 3616 of SEQ ID NO: 913852
ugguguuagucaccgggaa

SEQ ID NO: 959133 - RNA, 19 nt, Artificial Sequence
  Description of Artificial Sequence: Synthetic oligonucleotide
  Antisense strand to SEQ ID NO: 959132
uucccggugacuaacacca

SEQ ID NO: 959134 - RNA, 19 nt, Artificial Sequence
  Description of Artificial Sequence: Synthetic oligonucleotide
  Sense strand starting at position 3617 of SEQ ID NO: 913852
gguguuagucaccgggaau

SEQ ID NO: 959135 - RNA, 19 nt, Artificial Sequence
  Description of Artificial Sequence: Synthetic oligonucleotide
  Antisense strand to SEQ ID NO: 959134
auucccggugacuaacacc

SEQ ID NO: 959136 - RNA, 19 nt, Artificial Sequence
  Description of Artificial Sequence: Synthetic oligonucleotide
  Sense strand starting at position 2537 of SEQ ID NO: 913852
uucugaugucacugggcuu

SEQ ID NO: 959137 - RNA, 19 nt, Artificial Sequence
  Description of Artificial Sequence: Synthetic oligonucleotide
  Antisense strand to SEQ ID NO: 959136
aagcccagugacaucagaa

SEQ ID NO: 959138 - RNA, 19 nt, Artificial Sequence
  Description of Artificial Sequence: Synthetic oligonucleotide
  Sense strand starting at position 2386 of SEQ ID NO: 913852
cggaaauuucacugcgcgu

SEQ ID NO: 959139 - RNA, 19 nt, Artificial Sequence
  Description of Artificial Sequence: Synthetic oligonucleotide
  Antisense strand to SEQ ID NO: 959138
acgcgcagugaaauuuccg

SEQ ID NO: 959140 - RNA, 19 nt, Artificial Sequence
  Description of Artificial Sequence: Synthetic oligonucleotide
  Sense strand starting at position 3618 of SEQ ID NO: 913852
guguuagucaccgggaauu

SEQ ID NO: 959141 - RNA, 19 nt, Artificial Sequence
  Description of Artificial Sequence: Synthetic oligonucleotide
  Antisense strand to SEQ ID NO: 959140
aauucccggugacuaacac

SEQ ID NO: 959142 - RNA, 19 nt, Artificial Sequence
  Description of Artificial Sequence: Synthetic oligonucleotide
  Sense strand starting at position 1237 of SEQ ID NO: 913852
cugcuuuauuuguacaaga

SEQ ID NO: 959143 - RNA, 19 nt, Artificial Sequence
  Description of Artificial Sequence: Synthetic oligonucleotide
  Antisense strand to SEQ ID NO: 959142
ucuuguacaaauaaagcag

SEQ ID NO: 959144 - RNA, 19 nt, Artificial Sequence
  Description of Artificial Sequence: Synthetic oligonucleotide
  Sense strand starting at position 3337 of SEQ ID NO: 913852
gauacaaaguaucauugga

SEQ ID NO: 959145 - RNA, 19 nt, Artificial Sequence
  Description of Artificial Sequence: Synthetic oligonucleotide
  Antisense strand to SEQ ID NO: 959144
uccaaugauacuuuguauc

SEQ ID NO: 959146 - RNA, 19 nt, Artificial Sequence
  Description of Artificial Sequence: Synthetic oligonucleotide
  Sense strand starting at position 2042 of SEQ ID NO: 913852
gccuucucauguuuccuga

SEQ ID NO: 959147 - RNA, 19 nt, Artificial Sequence
  Description of Artificial Sequence: Synthetic oligonucleotide
  Antisense strand to SEQ ID NO: 959146
ucaggaaacaugagaaggc

SEQ ID NO: 959148 - RNA, 19 nt, Artificial Sequence
  Description of Artificial Sequence: Synthetic oligonucleotide
  Sense strand starting at position 1220 of SEQ ID NO: 913852
agggauguguguucaugcu

SEQ ID NO: 959149 - RNA, 19 nt, Artificial Sequence
  Description of Artificial Sequence: Synthetic oligonucleotide
  Antisense strand to SEQ ID NO: 959148
agcaugaacacacaucccu

SEQ ID NO: 959150 - RNA, 19 nt, Artificial Sequence
  Description of Artificial Sequence: Synthetic oligonucleotide
  Sense strand starting at position 3758 of SEQ ID NO: 913852
ugcuauaguacauguuagu

SEQ ID NO: 959151 - RNA, 19 nt, Artificial Sequence
  Description of Artificial Sequence: Synthetic oligonucleotide
  Antisense strand to SEQ ID NO: 959150
acuaacauguacuauagca

SEQ ID NO: 959152 - RNA, 19 nt, Artificial Sequence
  Description of Artificial Sequence: Synthetic oligonucleotide
  Sense strand starting at position 1117 of SEQ ID NO: 913852
gcacauagccucggugaua

SEQ ID NO: 959153 - RNA, 19 nt, Artificial Sequence
  Description of Artificial Sequence: Synthetic oligonucleotide
  Antisense strand to SEQ ID NO: 959152
uaucaccgaggcuaugugc

SEQ ID NO: 959154 - RNA, 19 nt, Artificial Sequence
  Description of Artificial Sequence: Synthetic oligonucleotide
  Sense strand starting at position 3605 of SEQ ID NO: 913852
gucucuaucagugguguua

SEQ ID NO: 959155 - RNA, 19 nt, Artificial Sequence
  Description of Artificial Sequence: Synthetic oligonucleotide
  Antisense strand to SEQ ID NO: 959154
uaacaccacugauagagac

SEQ ID NO: 959156 - RNA, 19 nt, Artificial Sequence
  Description of Artificial Sequence: Synthetic oligonucleotide
  Sense strand starting at position 2559 of SEQ ID NO: 913852
ggguccuaguugucucagu

SEQ ID NO: 959157 - RNA, 19 nt, Artificial Sequence
  Description of Artificial Sequence: Synthetic oligonucleotide
  Antisense strand to SEQ ID NO: 959156
acugagacaacuaggaccc

SEQ ID NO: 959158 - RNA, 19 nt, Artificial Sequence
  Description of Artificial Sequence: Synthetic oligonucleotide
  Sense strand starting at position 414 of SEQ ID NO: 913852
gcccucaaucagugccauu

SEQ ID NO: 959159 - RNA, 19 nt, Artificial Sequence
  Description of Artificial Sequence: Synthetic oligonucleotide
  Antisense strand to SEQ ID NO: 959158
aauggcacugauugagggc

SEQ ID NO: 959160 - RNA, 19 nt, Artificial Sequence
  Description of Artificial Sequence: Synthetic oligonucleotide
  Sense strand starting at position 3879 of SEQ ID NO: 913852
uucuuaaagucugaaauga

SEQ ID NO: 959161 - RNA, 19 nt, Artificial Sequence
  Description of Artificial Sequence: Synthetic oligonucleotide
  Antisense strand to SEQ ID NO: 959160
ucauuucagacuuuaagaa

SEQ ID NO: 959162 - RNA, 19 nt, Artificial Sequence
  Description of Artificial Sequence: Synthetic oligonucleotide
  Sense strand starting at position 3872 of SEQ ID NO: 913853
gcacaaugagagcauauau

SEQ ID NO: 959163 - RNA, 19 nt, Artificial Sequence
  Description of Artificial Sequence: Synthetic oligonucleotide
  Antisense strand to SEQ ID NO: 959162
auauaugcucucauugugc

SEQ ID NO: 959164 - RNA, 19 nt, Artificial Sequence
  Description of Artificial Sequence: Synthetic oligonucleotide
  Sense strand starting at position 3853 of SEQ ID NO: 913853
gagugauaauagguauaca

SEQ ID NO: 959165 - RNA, 19 nt, Artificial Sequence
  Description of Artificial Sequence: Synthetic oligonucleotide
  Antisense strand to SEQ ID NO: 959164
uguauaccuauuaucacuc

SEQ ID NO: 959166 - RNA, 19 nt, Artificial Sequence
  Description of Artificial Sequence: Synthetic oligonucleotide
  Sense strand starting at position 3689 of SEQ ID NO: 913853
agugcuaaagcauagagaa

SEQ ID NO: 959167 - RNA, 19 nt, Artificial Sequence
  Description of Artificial Sequence: Synthetic oligonucleotide
  Antisense strand to SEQ ID NO: 959166
uucucuaugcuuuagcacu

SEQ ID NO: 959168 - RNA, 19 nt, Artificial Sequence
  Description of Artificial Sequence: Synthetic oligonucleotide
  Sense strand starting at position 3838 of SEQ ID NO: 913853
uagaaaucuguguaagagu

SEQ ID NO: 959169 - RNA, 19 nt, Artificial Sequence
  Description of Artificial Sequence: Synthetic oligonucleotide
  Antisense strand to SEQ ID NO: 959168
acucuuacacagauuucua

SEQ ID NO: 959170 - RNA, 19 nt, Artificial Sequence
  Description of Artificial Sequence: Synthetic oligonucleotide
  Sense strand starting at position 3845 of SEQ ID NO: 913853
cuguguaagagugauaaua

SEQ ID NO: 959171 - RNA, 19 nt, Artificial Sequence
  Description of Artificial Sequence: Synthetic oligonucleotide
  Antisense strand to SEQ ID NO: 959170
uauuaucacucuuacacag

SEQ ID NO: 959172 - RNA, 19 nt, Artificial Sequence
  Description of Artificial Sequence: Synthetic oligonucleotide
  Sense strand starting at position 3837 of SEQ ID NO: 913853
cuagaaaucuguguaagag

SEQ ID NO: 959173 - RNA, 19 nt, Artificial Sequence
  Description of Artificial Sequence: Synthetic oligonucleotide
  Antisense strand to SEQ ID NO: 959172
cucuuacacagauuucuag

SEQ ID NO: 959174 - RNA, 19 nt, Artificial Sequence
  Description of Artificial Sequence: Synthetic oligonucleotide
  Sense strand starting at position 3661 of SEQ ID NO: 913853
ugugcugaucuggaagaug

SEQ ID NO: 959175 - RNA, 19 nt, Artificial Sequence
  Description of Artificial Sequence: Synthetic oligonucleotide
  Antisense strand to SEQ ID NO: 959174
caucuuccagaucagcaca

SEQ ID NO: 959176 - RNA, 19 nt, Artificial Sequence
  Description of Artificial Sequence: Synthetic oligonucleotide
  Sense strand starting at position 3132 of SEQ ID NO: 913853
aggacaaauggugguuuau

SEQ ID NO: 959177 - RNA, 19 nt, Artificial Sequence
  Description of Artificial Sequence: Synthetic oligonucleotide
  Antisense strand to SEQ ID NO: 959176
auaaaccaccauuuguccu

SEQ ID NO: 959178 - RNA, 19 nt, Artificial Sequence
  Description of Artificial Sequence: Synthetic oligonucleotide
  Sense strand starting at position 3529 of SEQ ID NO: 913853
aaaguuucgcaugaaauca

SEQ ID NO: 959179 - RNA, 19 nt, Artificial Sequence
  Description of Artificial Sequence: Synthetic oligonucleotide
  Antisense strand to SEQ ID NO: 959178
ugauuucaugcgaaacuuu

SEQ ID NO: 959180 - RNA, 19 nt, Artificial Sequence
  Description of Artificial Sequence: Synthetic oligonucleotide
  Sense strand starting at position 160 of SEQ ID NO: 913853
gguguacuucuaggaagga

SEQ ID NO: 959181 - RNA, 19 nt, Artificial Sequence
  Description of Artificial Sequence: Synthetic oligonucleotide
  Antisense strand to SEQ ID NO: 959180
uccuuccuagaaguacacc

SEQ ID NO: 959182 - RNA, 19 nt, Artificial Sequence
  Description of Artificial Sequence: Synthetic oligonucleotide
  Sense strand starting at position 3285 of SEQ ID NO: 913853
ggaggauuccucugauccg

SEQ ID NO: 959183 - RNA, 19 nt, Artificial Sequence
  Description of Artificial Sequence: Synthetic oligonucleotide
  Antisense strand to SEQ ID NO: 959182
cggaucagaggaauccucc

SEQ ID NO: 959184 - RNA, 19 nt, Artificial Sequence
  Description of Artificial Sequence: Synthetic oligonucleotide
  Sense strand starting at position 3484 of SEQ ID NO: 913853
cguaaagcccaauauugau

SEQ ID NO: 959185 - RNA, 19 nt, Artificial Sequence
  Description of Artificial Sequence: Synthetic oligonucleotide
  Antisense strand to SEQ ID NO: 959184
aucaauauugggcuuuacg

SEQ ID NO: 959186 - RNA, 19 nt, Artificial Sequence
  Description of Artificial Sequence: Synthetic oligonucleotide
  Sense strand starting at position 3142 of SEQ ID NO: 913853
gugguuuauccggaauuag

SEQ ID NO: 959187 - RNA, 19 nt, Artificial Sequence
  Description of Artificial Sequence: Synthetic oligonucleotide
  Antisense strand to SEQ ID NO: 959186
cuaauuccggauaaaccac

SEQ ID NO: 959188 - RNA, 19 nt, Artificial Sequence
  Description of Artificial Sequence: Synthetic oligonucleotide
  Sense strand starting at position 3399 of SEQ ID NO: 913853
uaggccuaucugcauagau

SEQ ID NO: 959189 - RNA, 19 nt, Artificial Sequence
  Description of Artificial Sequence: Synthetic oligonucleotide
  Antisense strand to SEQ ID NO: 959188
aucuaugcagauaggccua

SEQ ID NO: 959190 - RNA, 19 nt, Artificial Sequence
  Description of Artificial Sequence: Synthetic oligonucleotide
  Sense strand starting at position 3401 of SEQ ID NO: 913853
ggccuaucugcauagauua

SEQ ID NO: 959191 - RNA, 19 nt, Artificial Sequence
  Description of Artificial Sequence: Synthetic oligonucleotide
  Antisense strand to SEQ ID NO: 959190
uaaucuaugcagauaggcc

SEQ ID NO: 959192 - RNA, 19 nt, Artificial Sequence
  Description of Artificial Sequence: Synthetic oligonucleotide
  Sense strand starting at position 732 of SEQ ID NO: 913853
gcauucucagaguaaguac

SEQ ID NO: 959193 - RNA, 19 nt, Artificial Sequence
  Description of Artificial Sequence: Synthetic oligonucleotide
  Antisense strand to SEQ ID NO: 959192
guacuuacucugagaaugc

SEQ ID NO: 959194 - RNA, 19 nt, Artificial Sequence
  Description of Artificial Sequence: Synthetic oligonucleotide
  Sense strand starting at position 233 of SEQ ID NO: 913853
uuugauaguuuaucaucca

SEQ ID NO: 959195 - RNA, 19 nt, Artificial Sequence
  Description of Artificial Sequence: Synthetic oligonucleotide
  Antisense strand to SEQ ID NO: 959194
uggaugauaaacuaucaaa

SEQ ID NO: 959196 - RNA, 19 nt, Artificial Sequence
  Description of Artificial Sequence: Synthetic oligonucleotide
  Sense strand starting at position 3643 of SEQ ID NO: 913853
agcaauucgcauuauaaau

SEQ ID NO: 959197 - RNA, 19 nt, Artificial Sequence
  Description of Artificial Sequence: Synthetic oligonucleotide
  Antisense strand to SEQ ID NO: 959196
auuuauaaugcgaauugcu

SEQ ID NO: 959198 - RNA, 19 nt, Artificial Sequence
  Description of Artificial Sequence: Synthetic oligonucleotide
  Sense strand starting at position 3481 of SEQ ID NO: 913853
auccguaaagcccaauauu

SEQ ID NO: 959199 - RNA, 19 nt, Artificial Sequence
  Description of Artificial Sequence: Synthetic oligonucleotide
  Antisense strand to SEQ ID NO: 959198
aauauugggcuuuacggau

SEQ ID NO: 959200 - RNA, 19 nt, Artificial Sequence
  Description of Artificial Sequence: Synthetic oligonucleotide
  Sense strand starting at position 3554 of SEQ ID NO: 913853
ugcauagauuguuuaaaug

SEQ ID NO: 959201 - RNA, 19 nt, Artificial Sequence
  Description of Artificial Sequence: Synthetic oligonucleotide
  Antisense strand to SEQ ID NO: 959200
cauuuaaacaaucuaugca

SEQ ID NO: 959202 - RNA, 19 nt, Artificial Sequence
  Description of Artificial Sequence: Synthetic oligonucleotide
  Sense strand starting at position 973 of SEQ ID NO: 913853
gauuccuuaccacgugaaa

SEQ ID NO: 959203 - RNA, 19 nt, Artificial Sequence
  Description of Artificial Sequence: Synthetic oligonucleotide
  Antisense strand to SEQ ID NO: 959202
uuucacgugguaaggaauc

SEQ ID NO: 959204 - RNA, 19 nt, Artificial Sequence
  Description of Artificial Sequence: Synthetic oligonucleotide
  Sense strand starting at position 325 of SEQ ID NO: 913853
aucaguaucugguuugaca

SEQ ID NO: 959205 - RNA, 19 nt, Artificial Sequence
  Description of Artificial Sequence: Synthetic oligonucleotide
  Antisense strand to SEQ ID NO: 959204
ugucaaaccagauacugau

SEQ ID NO: 959206 - RNA, 19 nt, Artificial Sequence
  Description of Artificial Sequence: Synthetic oligonucleotide
  Sense strand starting at position 1045 of SEQ ID NO: 913853
ggccuucuuguauauccaa

SEQ ID NO: 959207 - RNA, 19 nt, Artificial Sequence
  Description of Artificial Sequence: Synthetic oligonucleotide
  Antisense strand to SEQ ID NO: 959206
uuggauauacaagaaggcc

SEQ ID NO: 959208 - RNA, 19 nt, Artificial Sequence
  Description of Artificial Sequence: Synthetic oligonucleotide
  Sense strand starting at position 3836 of SEQ ID NO: 913853
gcuagaaaucuguguaaga

SEQ ID NO: 959209 - RNA, 19 nt, Artificial Sequence
  Description of Artificial Sequence: Synthetic oligonucleotide
  Antisense strand to SEQ ID NO: 959208
ucuuacacagauuucuagc

SEQ ID NO: 959210 - RNA, 19 nt, Artificial Sequence
  Description of Artificial Sequence: Synthetic oligonucleotide
  Sense strand starting at position 1640 of SEQ ID NO: 913853
agcggaaucacaugacagu

SEQ ID NO: 959211 - RNA, 19 nt, Artificial Sequence
  Description of Artificial Sequence: Synthetic oligonucleotide
  Antisense strand to SEQ ID NO: 959210
acugucaugugauuccgcu

SEQ ID NO: 959212 - RNA, 19 nt, Artificial Sequence
  Description of Artificial Sequence: Synthetic oligonucleotide
  Sense strand starting at position 3138 of SEQ ID NO: 913853
aauggugguuuauccggaa

SEQ ID NO: 959213 - RNA, 19 nt, Artificial Sequence
  Description of Artificial Sequence: Synthetic oligonucleotide
  Antisense strand to SEQ ID NO: 959212
uuccggauaaaccaccauu

SEQ ID NO: 959214 - RNA, 19 nt, Artificial Sequence
  Description of Artificial Sequence: Synthetic oligonucleotide
  Sense strand starting at position 3122 of SEQ ID NO: 913853
cucggugugcaggacaaau

SEQ ID NO: 959215 - RNA, 19 nt, Artificial Sequence
  Description of Artificial Sequence: Synthetic oligonucleotide
  Antisense strand to SEQ ID NO: 959214
auuuguccugcacaccgag

SEQ ID NO: 959216 - RNA, 19 nt, Artificial Sequence
  Description of Artificial Sequence: Synthetic oligonucleotide
  Sense strand starting at position 3606 of SEQ ID NO: 913853
ugauuaauaccuugcaggu

SEQ ID NO: 959217 - RNA, 19 nt, Artificial Sequence
  Description of Artificial Sequence: Synthetic oligonucleotide
  Antisense strand to SEQ ID NO: 959216
accugcaagguauuaauca

SEQ ID NO: 959218 - RNA, 19 nt, Artificial Sequence
  Description of Artificial Sequence: Synthetic oligonucleotide
  Sense strand starting at position 3415 of SEQ ID NO: 913853
gauuaauuagcuggaugcu

SEQ ID NO: 959219 - RNA, 19 nt, Artificial Sequence
  Description of Artificial Sequence: Synthetic oligonucleotide
  Antisense strand to SEQ ID NO: 959218
agcauccagcuaauuaauc

SEQ ID NO: 959220 - RNA, 19 nt, Artificial Sequence
  Description of Artificial Sequence: Synthetic oligonucleotide
  Sense strand starting at position 3046 of SEQ ID NO: 913853
aaguguauuccaggcugaa

SEQ ID NO: 959221 - RNA, 19 nt, Artificial Sequence
  Description of Artificial Sequence: Synthetic oligonucleotide
  Antisense strand to SEQ ID NO: 959220
uucagccuggaauacacuu

SEQ ID NO: 959222 - RNA, 19 nt, Artificial Sequence
  Description of Artificial Sequence: Synthetic oligonucleotide
  Sense strand starting at position 2864 of SEQ ID NO: 913853
gcuuccaugaaggguguaa

SEQ ID NO: 959223 - RNA, 19 nt, Artificial Sequence
  Description of Artificial Sequence: Synthetic oligonucleotide
  Antisense strand to SEQ ID NO: 959222
uuacacccuucauggaagc

SEQ ID NO: 959224 - RNA, 19 nt, Artificial Sequence
  Description of Artificial Sequence: Synthetic oligonucleotide
  Sense strand starting at position 84 of SEQ ID NO: 913853
cuauaaaugcucuauccgu

SEQ ID NO: 959225 - RNA, 19 nt, Artificial Sequence
  Description of Artificial Sequence: Synthetic oligonucleotide
  Antisense strand to SEQ ID NO: 959224
acggauagagcauuuauag

SEQ ID NO: 959226 - RNA, 19 nt, Artificial Sequence
  Description of Artificial Sequence: Synthetic oligonucleotide
  Sense strand starting at position 788 of SEQ ID NO: 913853
ccuuuccaagugugacauu

SEQ ID NO: 959227 - RNA, 19 nt, Artificial Sequence
  Description of Artificial Sequence: Synthetic oligonucleotide
  Antisense strand to SEQ ID NO: 959226
aaugucacacuuggaaagg

SEQ ID NO: 959228 - RNA, 19 nt, Artificial Sequence
  Description of Artificial Sequence: Synthetic oligonucleotide
  Sense strand starting at position 800 of SEQ ID NO: 913853
ugacauucguuucucuaca

SEQ ID NO: 959229 - RNA, 19 nt, Artificial Sequence
  Description of Artificial Sequence: Synthetic oligonucleotide
  Antisense strand to SEQ ID NO: 959228
uguagagaaacgaauguca

SEQ ID NO: 959230 - RNA, 19 nt, Artificial Sequence
  Description of Artificial Sequence: Synthetic oligonucleotide
  Sense strand starting at position 3632 of SEQ ID NO: 913853
gguucuuuaucagcaauuc

SEQ ID NO: 959231 - RNA, 19 nt, Artificial Sequence
  Description of Artificial Sequence: Synthetic oligonucleotide
  Antisense strand to SEQ ID NO: 959230
gaauugcugauaaagaacc

SEQ ID NO: 959232 - RNA, 19 nt, Artificial Sequence
  Description of Artificial Sequence: Synthetic oligonucleotide
  Sense strand starting at position 334 of SEQ ID NO: 913853
ugguuugacacgcauugua

SEQ ID NO: 959233 - RNA, 19 nt, Artificial Sequence
  Description of Artificial Sequence: Synthetic oligonucleotide
  Antisense strand to SEQ ID NO: 959232
uacaaugcgugucaaacca

SEQ ID NO: 959234 - RNA, 19 nt, Artificial Sequence
  Description of Artificial Sequence: Synthetic oligonucleotide
  Sense strand starting at position 891 of SEQ ID NO: 913853
acauaugcaucgcuuaaug

SEQ ID NO: 959235 - RNA, 19 nt, Artificial Sequence
  Description of Artificial Sequence: Synthetic oligonucleotide
  Antisense strand to SEQ ID NO: 959234
cauuaagcgaugcauaugu

SEQ ID NO: 959236 - RNA, 19 nt, Artificial Sequence
  Description of Artificial Sequence: Synthetic oligonucleotide
  Sense strand starting at position 1832 of SEQ ID NO: 913853
ggguguuuaccuugaugca

SEQ ID NO: 959237 - RNA, 19 nt, Artificial Sequence
  Description of Artificial Sequence: Synthetic oligonucleotide
  Antisense strand to SEQ ID NO: 959236
ugcaucaagguaaacaccc

SEQ ID NO: 959238 - RNA, 19 nt, Artificial Sequence
  Description of Artificial Sequence: Synthetic oligonucleotide
  Sense strand starting at position 202 of SEQ ID NO: 913853
uuucuauauugggacauag

SEQ ID NO: 959239 - RNA, 19 nt, Artificial Sequence
  Description of Artificial Sequence: Synthetic oligonucleotide
  Antisense strand to SEQ ID NO: 959238
cuaugucccaauauagaaa

SEQ ID NO: 959240 - RNA, 19 nt, Artificial Sequence
  Description of Artificial Sequence: Synthetic oligonucleotide
  Sense strand starting at position 161 of SEQ ID NO: 913853
guguacuucuaggaaggaa

SEQ ID NO: 959241 - RNA, 19 nt, Artificial Sequence
  Description of Artificial Sequence: Synthetic oligonucleotide
  Antisense strand to SEQ ID NO: 959240
uuccuuccuagaaguacac

SEQ ID NO: 959242 - RNA, 19 nt, Artificial Sequence
  Description of Artificial Sequence: Synthetic oligonucleotide
  Sense strand starting at position 3399 of SEQ ID NO: 913854
gcacaaugagagcauauau

SEQ ID NO: 959243 - RNA, 19 nt, Artificial Sequence
  Description of Artificial Sequence: Synthetic oligonucleotide
  Antisense strand to SEQ ID NO: 959242
auauaugcucucauugugc

SEQ ID NO: 959244 - RNA, 19 nt, Artificial Sequence
  Description of Artificial Sequence: Synthetic oligonucleotide
  Sense strand starting at position 3380 of SEQ ID NO: 913854
gagugauaauagguauaca

SEQ ID NO: 959245 - RNA, 19 nt, Artificial Sequence
  Description of Artificial Sequence: Synthetic oligonucleotide
  Antisense strand to SEQ ID NO: 959244
uguauaccuauuaucacuc

SEQ ID NO: 959246 - RNA, 19 nt, Artificial Sequence
  Description of Artificial Sequence: Synthetic oligonucleotide
  Sense strand starting at position 3216 of SEQ ID NO: 913854
agugcuaaagcauagagaa

SEQ ID NO: 959247 - RNA, 19 nt, Artificial Sequence
  Description of Artificial Sequence: Synthetic oligonucleotide
  Antisense strand to SEQ ID NO: 959246
uucucuaugcuuuagcacu

SEQ ID NO: 959248 - RNA, 19 nt, Artificial Sequence
  Description of Artificial Sequence: Synthetic oligonucleotide
  Sense strand starting at position 3372 of SEQ ID NO: 913854
cuguguaagagugauaaua

SEQ ID NO: 959249 - RNA, 19 nt, Artificial Sequence
  Description of Artificial Sequence: Synthetic oligonucleotide
  Antisense strand to SEQ ID NO: 959248
uauuaucacucuuacacag

SEQ ID NO: 959250 - RNA, 19 nt, Artificial Sequence
  Description of Artificial Sequence: Synthetic oligonucleotide
  Sense strand starting at position 3365 of SEQ ID NO: 913854
uagaaaucuguguaagagu

SEQ ID NO: 959251 - RNA, 19 nt, Artificial Sequence
  Description of Artificial Sequence: Synthetic oligonucleotide
  Antisense strand to SEQ ID NO: 959250
acucuuacacagauuucua

SEQ ID NO: 959252 - RNA, 19 nt, Artificial Sequence
  Description of Artificial Sequence: Synthetic oligonucleotide
  Sense strand starting at position 3364 of SEQ ID NO: 913854
cuagaaaucuguguaagag

SEQ ID NO: 959253 - RNA, 19 nt, Artificial Sequence
  Description of Artificial Sequence: Synthetic oligonucleotide
  Antisense strand to SEQ ID NO: 959252
cucuuacacagauuucuag

SEQ ID NO: 959254 - RNA, 19 nt, Artificial Sequence
  Description of Artificial Sequence: Synthetic oligonucleotide
  Sense strand starting at position 3188 of SEQ ID NO: 913854
ugugcugaucuggaagaug

SEQ ID NO: 959255 - RNA, 19 nt, Artificial Sequence
  Description of Artificial Sequence: Synthetic oligonucleotide
  Antisense strand to SEQ ID NO: 959254
caucuuccagaucagcaca

SEQ ID NO: 959256 - RNA, 19 nt, Artificial Sequence
  Description of Artificial Sequence: Synthetic oligonucleotide
  Sense strand starting at position 2659 of SEQ ID NO: 913854
aggacaaauggugguuuau

SEQ ID NO: 959257 - RNA, 19 nt, Artificial Sequence
  Description of Artificial Sequence: Synthetic oligonucleotide
  Antisense strand to SEQ ID NO: 959256
auaaaccaccauuuguccu

SEQ ID NO: 959258 - RNA, 19 nt, Artificial Sequence
  Description of Artificial Sequence: Synthetic oligonucleotide
  Sense strand starting at position 3056 of SEQ ID NO: 913854
aaaguuucgcaugaaauca

SEQ ID NO: 959259 - RNA, 19 nt, Artificial Sequence
  Description of Artificial Sequence: Synthetic oligonucleotide
  Antisense strand to SEQ ID NO: 959258
ugauuucaugcgaaacuuu

SEQ ID NO: 959260 - RNA, 19 nt, Artificial Sequence
  Description of Artificial Sequence: Synthetic oligonucleotide
  Sense strand starting at position 3861 of SEQ ID NO: 913854
aguucuugugaaggaauua

SEQ ID NO: 959261 - RNA, 19 nt, Artificial Sequence
  Description of Artificial Sequence: Synthetic oligonucleotide
  Antisense strand to SEQ ID NO: 959260
uaauuccuucacaagaacu

SEQ ID NO: 959262 - RNA, 19 nt, Artificial Sequence
  Description of Artificial Sequence: Synthetic oligonucleotide
  Sense strand starting at position 2812 of SEQ ID NO: 913854
ggaggauuccucugauccg

SEQ ID NO: 959263 - RNA, 19 nt, Artificial Sequence
  Description of Artificial Sequence: Synthetic oligonucleotide
  Antisense strand to SEQ ID NO: 959262
cggaucagaggaauccucc

SEQ ID NO: 959264 - RNA, 19 nt, Artificial Sequence
  Description of Artificial Sequence: Synthetic oligonucleotide
  Sense strand starting at position 3011 of SEQ ID NO: 913854
cguaaagcccaauauugau

SEQ ID NO: 959265 - RNA, 19 nt, Artificial Sequence
  Description of Artificial Sequence: Synthetic oligonucleotide
  Antisense strand to SEQ ID NO: 959264
aucaauauugggcuuuacg

SEQ ID NO: 959266 - RNA, 19 nt, Artificial Sequence
  Description of Artificial Sequence: Synthetic oligonucleotide
  Sense strand starting at position 2669 of SEQ ID NO: 913854
gugguuuauccggaauuag

SEQ ID NO: 959267 - RNA, 19 nt, Artificial Sequence
  Description of Artificial Sequence: Synthetic oligonucleotide
  Antisense strand to SEQ ID NO: 959266
cuaauuccggauaaaccac

SEQ ID NO: 959268 - RNA, 19 nt, Artificial Sequence
  Description of Artificial Sequence: Synthetic oligonucleotide
  Sense strand starting at position 2926 of SEQ ID NO: 913854
uaggccuaucugcauagau

SEQ ID NO: 959269 - RNA, 19 nt, Artificial Sequence
  Description of Artificial Sequence: Synthetic oligonucleotide
  Antisense strand to SEQ ID NO: 959268
aucuaugcagauaggccua

SEQ ID NO: 959270 - RNA, 19 nt, Artificial Sequence
  Description of Artificial Sequence: Synthetic oligonucleotide
  Sense strand starting at position 2928 of SEQ ID NO: 913854
ggccuaucugcauagauua

SEQ ID NO: 959271 - RNA, 19 nt, Artificial Sequence
  Description of Artificial Sequence: Synthetic oligonucleotide
  Antisense strand to SEQ ID NO: 959270
uaaucuaugcagauaggcc

SEQ ID NO: 959272 - RNA, 19 nt, Artificial Sequence
  Description of Artificial Sequence: Synthetic oligonucleotide
  Sense strand starting at position 259 of SEQ ID NO: 913854
gcauucucagaguaaguac

SEQ ID NO: 959273 - RNA, 19 nt, Artificial Sequence
  Description of Artificial Sequence: Synthetic oligonucleotide
  Antisense strand to SEQ ID NO: 959272
guacuuacucugagaaugc

SEQ ID NO: 959274 - RNA, 19 nt, Artificial Sequence
  Description of Artificial Sequence: Synthetic oligonucleotide
  Sense strand starting at position 3170 of SEQ ID NO: 913854
agcaauucgcauuauaaau

SEQ ID NO: 959275 - RNA, 19 nt, Artificial Sequence
  Description of Artificial Sequence: Synthetic oligonucleotide
  Antisense strand to SEQ ID NO: 959274
auuuauaaugcgaauugcu

SEQ ID NO: 959276 - RNA, 19 nt, Artificial Sequence
  Description of Artificial Sequence: Synthetic oligonucleotide
  Sense strand starting at position 3008 of SEQ ID NO: 913854
auccguaaagcccaauauu

SEQ ID NO: 959277 - RNA, 19 nt, Artificial Sequence
  Description of Artificial Sequence: Synthetic oligonucleotide
  Antisense strand to SEQ ID NO: 959276
aauauugggcuuuacggau

SEQ ID NO: 959278 - RNA, 19 nt, Artificial Sequence
  Description of Artificial Sequence: Synthetic oligonucleotide
  Sense strand starting at position 3081 of SEQ ID NO: 913854
ugcauagauuguuuaaaug

SEQ ID NO: 959279 - RNA, 19 nt, Artificial Sequence
  Description of Artificial Sequence: Synthetic oligonucleotide
  Antisense strand to SEQ ID NO: 959278
cauuuaaacaaucuaugca

SEQ ID NO: 959280 - RNA, 19 nt, Artificial Sequence
  Description of Artificial Sequence: Synthetic oligonucleotide
  Sense strand starting at position 500 of SEQ ID NO: 913854
gauuccuuaccacgugaaa

SEQ ID NO: 959281 - RNA, 19 nt, Artificial Sequence
  Description of Artificial Sequence: Synthetic oligonucleotide
  Antisense strand to SEQ ID NO: 959280
uuucacgugguaaggaauc

SEQ ID NO: 959282 - RNA, 19 nt, Artificial Sequence
  Description of Artificial Sequence: Synthetic oligonucleotide
  Sense strand starting at position 572 of SEQ ID NO: 913854
ggccuucuuguauauccaa

SEQ ID NO: 959283 - RNA, 19 nt, Artificial Sequence
  Description of Artificial Sequence: Synthetic oligonucleotide
  Antisense strand to SEQ ID NO: 959282
uuggauauacaagaaggcc

SEQ ID NO: 959284 - RNA, 19 nt, Artificial Sequence
  Description of Artificial Sequence: Synthetic oligonucleotide
  Sense strand starting at position 3363 of SEQ ID NO: 913854
gcuagaaaucuguguaaga

SEQ ID NO: 959285 - RNA, 19 nt, Artificial Sequence
  Description of Artificial Sequence: Synthetic oligonucleotide
  Antisense strand to SEQ ID NO: 959284
ucuuacacagauuucuagc

SEQ ID NO: 959286 - RNA, 19 nt, Artificial Sequence
  Description of Artificial Sequence: Synthetic oligonucleotide
  Sense strand starting at position 1167 of SEQ ID NO: 913854
agcggaaucacaugacagu

SEQ ID NO: 959287 - RNA, 19 nt, Artificial Sequence
  Description of Artificial Sequence: Synthetic oligonucleotide
  Antisense strand to SEQ ID NO: 959286
acugucaugugauuccgcu

SEQ ID NO: 959288 - RNA, 19 nt, Artificial Sequence
  Description of Artificial Sequence: Synthetic oligonucleotide
  Sense strand starting at position 3658 of SEQ ID NO: 913854
uguguaucuuaaccauaua

SEQ ID NO: 959289 - RNA, 19 nt, Artificial Sequence
  Description of Artificial Sequence: Synthetic oligonucleotide
  Antisense strand to SEQ ID NO: 959288
uauaugguuaagauacaca

SEQ ID NO: 959290 - RNA, 19 nt, Artificial Sequence
  Description of Artificial Sequence: Synthetic oligonucleotide
  Sense strand starting at position 2665 of SEQ ID NO: 913854
aauggugguuuauccggaa

SEQ ID NO: 959291 - RNA, 19 nt, Artificial Sequence
  Description of Artificial Sequence: Synthetic oligonucleotide
  Antisense strand to SEQ ID NO: 959290
uuccggauaaaccaccauu

SEQ ID NO: 959292 - RNA, 19 nt, Artificial Sequence
  Description of Artificial Sequence: Synthetic oligonucleotide
  Sense strand starting at position 2649 of SEQ ID NO: 913854
cucggugugcaggacaaau

SEQ ID NO: 959293 - RNA, 19 nt, Artificial Sequence
  Description of Artificial Sequence: Synthetic oligonucleotide
  Antisense strand to SEQ ID NO: 959292
auuuguccugcacaccgag

SEQ ID NO: 959294 - RNA, 19 nt, Artificial Sequence
  Description of Artificial Sequence: Synthetic oligonucleotide
  Sense strand starting at position 3133 of SEQ ID NO: 913854
ugauuaauaccuugcaggu

SEQ ID NO: 959295 - RNA, 19 nt, Artificial Sequence
  Description of Artificial Sequence: Synthetic oligonucleotide
  Antisense strand to SEQ ID NO: 959294
accugcaagguauuaauca

SEQ ID NO: 959296 - RNA, 19 nt, Artificial Sequence
  Description of Artificial Sequence: Synthetic oligonucleotide
  Sense strand starting at position 2942 of SEQ ID NO: 913854
gauuaauuagcuggaugcu

SEQ ID NO: 959297 - RNA, 19 nt, Artificial Sequence
  Description of Artificial Sequence: Synthetic oligonucleotide
  Antisense strand to SEQ ID NO: 959296
agcauccagcuaauuaauc

SEQ ID NO: 959298 - RNA, 19 nt, Artificial Sequence
  Description of Artificial Sequence: Synthetic oligonucleotide
  Sense strand starting at position 2573 of SEQ ID NO: 913854
aaguguauuccaggcugaa

SEQ ID NO: 959299 - RNA, 19 nt, Artificial Sequence
  Description of Artificial Sequence: Synthetic oligonucleotide
  Antisense strand to SEQ ID NO: 959298
uucagccuggaauacacuu

SEQ ID NO: 959300 - RNA, 19 nt, Artificial Sequence
  Description of Artificial Sequence: Synthetic oligonucleotide
  Sense strand starting at position 2391 of SEQ ID NO: 913854
gcuuccaugaaggguguaa

SEQ ID NO: 959301 - RNA, 19 nt, Artificial Sequence
  Description of Artificial Sequence: Synthetic oligonucleotide
  Antisense strand to SEQ ID NO: 959300
uuacacccuucauggaagc

SEQ ID NO: 959302 - RNA, 19 nt, Artificial Sequence
  Description of Artificial Sequence: Synthetic oligonucleotide
  Sense strand starting at position 315 of SEQ ID NO: 913854
ccuuuccaagugugacauu

SEQ ID NO: 959303 - RNA, 19 nt, Artificial Sequence
  Description of Artificial Sequence: Synthetic oligonucleotide
  Antisense strand to SEQ ID NO: 959302
aaugucacacuuggaaagg

SEQ ID NO: 959304 - RNA, 19 nt, Artificial Sequence
  Description of Artificial Sequence: Synthetic oligonucleotide
  Sense strand starting at position 3650 of SEQ ID NO: 913854
uacugucuuguguaucuua

SEQ ID NO: 959305 - RNA, 19 nt, Artificial Sequence
  Description of Artificial Sequence: Synthetic oligonucleotide
  Antisense strand to SEQ ID NO: 959304
uaagauacacaagacagua

SEQ ID NO: 959306 - RNA, 19 nt, Artificial Sequence
  Description of Artificial Sequence: Synthetic oligonucleotide
  Sense strand starting at position 3854 of SEQ ID NO: 913854
ggagcuuaguucuugugaa

SEQ ID NO: 959307 - RNA, 19 nt, Artificial Sequence
  Description of Artificial Sequence: Synthetic oligonucleotide
  Antisense strand to SEQ ID NO: 959306
uucacaagaacuaagcucc

SEQ ID NO: 959308 - RNA, 19 nt, Artificial Sequence
  Description of Artificial Sequence: Synthetic oligonucleotide
  Sense strand starting at position 327 of SEQ ID NO: 913854
ugacauucguuucucuaca

SEQ ID NO: 959309 - RNA, 19 nt, Artificial Sequence
  Description of Artificial Sequence: Synthetic oligonucleotide
  Antisense strand to SEQ ID NO: 959308
uguagagaaacgaauguca

SEQ ID NO: 959310 - RNA, 19 nt, Artificial Sequence
  Description of Artificial Sequence: Synthetic oligonucleotide
  Sense strand starting at position 3980 of SEQ ID NO: 913854
uaucauuuguaagagguuu

SEQ ID NO: 959311 - RNA, 19 nt, Artificial Sequence
  Description of Artificial Sequence: Synthetic oligonucleotide
  Antisense strand to SEQ ID NO: 959310
aaaccucuuacaaaugaua

SEQ ID NO: 959312 - RNA, 19 nt, Artificial Sequence
  Description of Artificial Sequence: Synthetic oligonucleotide
  Sense strand starting at position 3159 of SEQ ID NO: 913854
gguucuuuaucagcaauuc

SEQ ID NO: 959313 - RNA, 19 nt, Artificial Sequence
  Description of Artificial Sequence: Synthetic oligonucleotide
  Antisense strand to SEQ ID NO: 959312
gaauugcugauaaagaacc

SEQ ID NO: 959314 - RNA, 19 nt, Artificial Sequence
  Description of Artificial Sequence: Synthetic oligonucleotide
  Sense strand starting at position 418 of SEQ ID NO: 913854
acauaugcaucgcuuaaug

SEQ ID NO: 959315 - RNA, 19 nt, Artificial Sequence
  Description of Artificial Sequence: Synthetic oligonucleotide
  Antisense strand to SEQ ID NO: 959314
cauuaagcgaugcauaugu

SEQ ID NO: 959316 - RNA, 19 nt, Artificial Sequence
  Description of Artificial Sequence: Synthetic oligonucleotide
  Sense strand starting at position 1359 of SEQ ID NO: 913854
ggguguuuaccuugaugca

SEQ ID NO: 959317 - RNA, 19 nt, Artificial Sequence
  Description of Artificial Sequence: Synthetic oligonucleotide
  Antisense strand to SEQ ID NO: 959316
ugcaucaagguaaacaccc

SEQ ID NO: 959318 - RNA, 19 nt, Artificial Sequence
  Description of Artificial Sequence: Synthetic oligonucleotide
  Sense strand starting at position 3374 of SEQ ID NO: 913854
guguaagagugauaauagg

SEQ ID NO: 959319 - RNA, 19 nt, Artificial Sequence
  Description of Artificial Sequence: Synthetic oligonucleotide
  Antisense strand to SEQ ID NO: 959318
ccuauuaucacucuuacac

SEQ ID NO: 959320 - RNA, 19 nt, Artificial Sequence
  Description of Artificial Sequence: Synthetic oligonucleotide
  Sense strand starting at position 324 of SEQ ID NO: 913854
gugugacauucguuucucu

SEQ ID NO: 959321 - RNA, 19 nt, Artificial Sequence
  Description of Artificial Sequence: Synthetic oligonucleotide
  Antisense strand to SEQ ID NO: 959320
agagaaacgaaugucacac

SEQ ID NO: 959322 - RNA, 19 nt, Artificial Sequence
  Description of Artificial Sequence: Synthetic oligonucleotide
  Sense strand starting at position 2331 of SEQ ID NO: 913855
gcaaguuugccgcuaaaug

SEQ ID NO: 959323 - RNA, 19 nt, Artificial Sequence
  Description of Artificial Sequence: Synthetic oligonucleotide
  Antisense strand to SEQ ID NO: 959322
cauuuagcggcaaacuugc

SEQ ID NO: 959324 - RNA, 19 nt, Artificial Sequence
  Description of Artificial Sequence: Synthetic oligonucleotide
  Sense strand starting at position 3536 of SEQ ID NO: 913855
uccuauucucugugauuuc

SEQ ID NO: 959325 - RNA, 19 nt, Artificial Sequence
  Description of Artificial Sequence: Synthetic oligonucleotide
  Antisense strand to SEQ ID NO: 959324
gaaaucacagagaauagga

SEQ ID NO: 959326 - RNA, 19 nt, Artificial Sequence
  Description of Artificial Sequence: Synthetic oligonucleotide
  Sense strand starting at position 2674 of SEQ ID NO: 913855
uagagaaguauuugugugu

SEQ ID NO: 959327 - RNA, 19 nt, Artificial Sequence
  Description of Artificial Sequence: Synthetic oligonucleotide
  Antisense strand to SEQ ID NO: 959326
acacacaaauacuucucua

SEQ ID NO: 959328 - RNA, 19 nt, Artificial Sequence
  Description of Artificial Sequence: Synthetic oligonucleotide
  Sense strand starting at position 2767 of SEQ ID NO: 913855
gaauguaaguauuuaucgu

SEQ ID NO: 959329 - RNA, 19 nt, Artificial Sequence
  Description of Artificial Sequence: Synthetic oligonucleotide
  Antisense strand to SEQ ID NO: 959328
acgauaaauacuuacauuc

SEQ ID NO: 959330 - RNA, 19 nt, Artificial Sequence
  Description of Artificial Sequence: Synthetic oligonucleotide
  Sense strand starting at position 2662 of SEQ ID NO: 913855
ugcacagaugccuagagaa

SEQ ID NO: 959331 - RNA, 19 nt, Artificial Sequence
  Description of Artificial Sequence: Synthetic oligonucleotide
  Antisense strand to SEQ ID NO: 959330
uucucuaggcaucugugca

SEQ ID NO: 959332 - RNA, 19 nt, Artificial Sequence
  Description of Artificial Sequence: Synthetic oligonucleotide
  Sense strand starting at position 2810 of SEQ ID NO: 913855
ccauucuguggguaaagau

SEQ ID NO: 959333 - RNA, 19 nt, Artificial Sequence
  Description of Artificial Sequence: Synthetic oligonucleotide
  Antisense strand to SEQ ID NO: 959332
aucuuuacccacagaaugg

SEQ ID NO: 959334 - RNA, 19 nt, Artificial Sequence
  Description of Artificial Sequence: Synthetic oligonucleotide
  Sense strand starting at position 2557 of SEQ ID NO: 913855
gagaucuucugagcagaua

SEQ ID NO: 959335 - RNA, 19 nt, Artificial Sequence
  Description of Artificial Sequence: Synthetic oligonucleotide
  Antisense strand to SEQ ID NO: 959334
uaucugcucagaagaucuc

SEQ ID NO: 959336 - RNA, 19 nt, Artificial Sequence
  Description of Artificial Sequence: Synthetic oligonucleotide
  Sense strand starting at position 2560 of SEQ ID NO: 913855
aucuucugagcagauagua

SEQ ID NO: 959337 - RNA, 19 nt, Artificial Sequence
  Description of Artificial Sequence: Synthetic oligonucleotide
  Antisense strand to SEQ ID NO: 959336
uacuaucugcucagaagau

SEQ ID NO: 959338 - RNA, 19 nt, Artificial Sequence
  Description of Artificial Sequence: Synthetic oligonucleotide
  Sense strand starting at position 2604 of SEQ ID NO: 913855
aggagacauucugugauuc

SEQ ID NO: 959339 - RNA, 19 nt, Artificial Sequence
  Description of Artificial Sequence: Synthetic oligonucleotide
  Antisense strand to SEQ ID NO: 959338
gaaucacagaaugucuccu

SEQ ID NO: 959340 - RNA, 19 nt, Artificial Sequence
  Description of Artificial Sequence: Synthetic oligonucleotide
  Sense strand starting at position 3331 of SEQ ID NO: 913855
aguggcaugcgugccaaua

SEQ ID NO: 959341 - RNA, 19 nt, Artificial Sequence
  Description of Artificial Sequence: Synthetic oligonucleotide
  Antisense strand to SEQ ID NO: 959340
uauuggcacgcaugccacu

SEQ ID NO: 959342 - RNA, 19 nt, Artificial Sequence
  Description of Artificial Sequence: Synthetic oligonucleotide
  Sense strand starting at position 2773 of SEQ ID NO: 913855
aaguauuuaucguucuagu

SEQ ID NO: 959343 - RNA, 19 nt, Artificial Sequence
  Description of Artificial Sequence: Synthetic oligonucleotide
  Antisense strand to SEQ ID NO: 959342
acuagaacgauaaauacuu

SEQ ID NO: 959344 - RNA, 19 nt, Artificial Sequence
  Description of Artificial Sequence: Synthetic oligonucleotide
  Sense strand starting at position 1485 of SEQ ID NO: 913855
cagagauuggcauggugag

SEQ ID NO: 959345 - RNA, 19 nt, Artificial Sequence
  Description of Artificial Sequence: Synthetic oligonucleotide
  Antisense strand to SEQ ID NO: 959344
cucaccaugccaaucucug

SEQ ID NO: 959346 - RNA, 19 nt, Artificial Sequence
  Description of Artificial Sequence: Synthetic oligonucleotide
  Sense strand starting at position 3407 of SEQ ID NO: 913855
acugaaaugagccgagauc

SEQ ID NO: 959347 - RNA, 19 nt, Artificial Sequence
  Description of Artificial Sequence: Synthetic oligonucleotide
  Antisense strand to SEQ ID NO: 959346
gaucucggcucauuucagu

SEQ ID NO: 959348 - RNA, 19 nt, Artificial Sequence
  Description of Artificial Sequence: Synthetic oligonucleotide
  Sense strand starting at position 3386 of SEQ ID NO: 913855
acuuguguccaggagguua

SEQ ID NO: 959349 - RNA, 19 nt, Artificial Sequence
  Description of Artificial Sequence: Synthetic oligonucleotide
  Antisense strand to SEQ ID NO: 959348
uaaccuccuggacacaagu

SEQ ID NO: 959350 - RNA, 19 nt, Artificial Sequence
  Description of Artificial Sequence: Synthetic oligonucleotide
  Sense strand starting at position 2809 of SEQ ID NO: 913855
cccauucuguggguaaaga

SEQ ID NO: 959351 - RNA, 19 nt, Artificial Sequence
  Description of Artificial Sequence: Synthetic oligonucleotide
  Antisense strand to SEQ ID NO: 959350
ucuuuacccacagaauggg

SEQ ID NO: 959352 - RNA, 19 nt, Artificial Sequence
  Description of Artificial Sequence: Synthetic oligonucleotide
  Sense strand starting at position 3920 of SEQ ID NO: 913855
uccugugagccucaugaca

SEQ ID NO: 959353 - RNA, 19 nt, Artificial Sequence
  Description of Artificial Sequence: Synthetic oligonucleotide
  Antisense strand to SEQ ID NO: 959352
ugucaugaggcucacagga

SEQ ID NO: 959354 - RNA, 19 nt, Artificial Sequence
  Description of Artificial Sequence: Synthetic oligonucleotide
  Sense strand starting at position 2343 of SEQ ID NO: 913855
cuaaaugagcuguggaauu

SEQ ID NO: 959355 - RNA, 19 nt, Artificial Sequence
  Description of Artificial Sequence: Synthetic oligonucleotide
  Antisense strand to SEQ ID NO: 959354
aauuccacagcucauuuag

SEQ ID NO: 959356 - RNA, 19 nt, Artificial Sequence
  Description of Artificial Sequence: Synthetic oligonucleotide
  Sense strand starting at position 1422 of SEQ ID NO: 913855
cuguuaggauccuuacuau

SEQ ID NO: 959357 - RNA, 19 nt, Artificial Sequence
  Description of Artificial Sequence: Synthetic oligonucleotide
  Antisense strand to SEQ ID NO: 959356
auaguaaggauccuaacag

SEQ ID NO: 959358 - RNA, 19 nt, Artificial Sequence
  Description of Artificial Sequence: Synthetic oligonucleotide
  Sense strand starting at position 2637 of SEQ ID NO: 913855
cagugaacauucuugcaga

SEQ ID NO: 959359 - RNA, 19 nt, Artificial Sequence
  Description of Artificial Sequence: Synthetic oligonucleotide
  Antisense strand to SEQ ID NO: 959358
ucugcaagaauguucacug

SEQ ID NO: 959360 - RNA, 19 nt, Artificial Sequence
  Description of Artificial Sequence: Synthetic oligonucleotide
  Sense strand starting at position 2889 of SEQ ID NO: 913855
ccucaaguuucuuugggau

SEQ ID NO: 959361 - RNA, 19 nt, Artificial Sequence
  Description of Artificial Sequence: Synthetic oligonucleotide
  Antisense strand to SEQ ID NO: 959360
aucccaaagaaacuugagg

SEQ ID NO: 959362 - RNA, 19 nt, Artificial Sequence
  Description of Artificial Sequence: Synthetic oligonucleotide
  Sense strand starting at position 1619 of SEQ ID NO: 913855
agggcugaccugugggauu

SEQ ID NO: 959363 - RNA, 19 nt, Artificial Sequence
  Description of Artificial Sequence: Synthetic oligonucleotide
  Antisense strand to SEQ ID NO: 959362
aaucccacaggucagcccu

SEQ ID NO: 959364 - RNA, 19 nt, Artificial Sequence
  Description of Artificial Sequence: Synthetic oligonucleotide
  Sense strand starting at position 1562 of SEQ ID NO: 913855
uggaaaggcacuuggcauu

SEQ ID NO: 959365 - RNA, 19 nt, Artificial Sequence
  Description of Artificial Sequence: Synthetic oligonucleotide
  Antisense strand to SEQ ID NO: 959364
aaugccaagugccuuucca

SEQ ID NO: 959366 - RNA, 19 nt, Artificial Sequence
  Description of Artificial Sequence: Synthetic oligonucleotide
  Sense strand starting at position 1576 of SEQ ID NO: 913855
gcauuugagucuguugucu

SEQ ID NO: 959367 - RNA, 19 nt, Artificial Sequence
  Description of Artificial Sequence: Synthetic oligonucleotide
  Antisense strand to SEQ ID NO: 959366
agacaacagacucaaaugc

SEQ ID NO: 959368 - RNA, 19 nt, Artificial Sequence
  Description of Artificial Sequence: Synthetic oligonucleotide
  Sense strand starting at position 1638 of SEQ ID NO: 913855
gucgaaucagguuaagcau

SEQ ID NO: 959369 - RNA, 19 nt, Artificial Sequence
  Description of Artificial Sequence: Synthetic oligonucleotide
  Antisense strand to SEQ ID NO: 959368
augcuuaaccugauucgac

SEQ ID NO: 959370 - RNA, 19 nt, Artificial Sequence
  Description of Artificial Sequence: Synthetic oligonucleotide
  Sense strand starting at position 2808 of SEQ ID NO: 913855
ucccauucuguggguaaag

SEQ ID NO: 959371 - RNA, 19 nt, Artificial Sequence
  Description of Artificial Sequence: Synthetic oligonucleotide
  Antisense strand to SEQ ID NO: 959370
cuuuacccacagaauggga

SEQ ID NO: 959372 - RNA, 19 nt, Artificial Sequence
  Description of Artificial Sequence: Synthetic oligonucleotide
  Sense strand starting at position 2316 of SEQ ID NO: 913855
ggagauauacugcgggcaa

SEQ ID NO: 959373 - RNA, 19 nt, Artificial Sequence
  Description of Artificial Sequence: Synthetic oligonucleotide
  Antisense strand to SEQ ID NO: 959372
uugcccgcaguauaucucc

SEQ ID NO: 959374 - RNA, 19 nt, Artificial Sequence
  Description of Artificial Sequence: Synthetic oligonucleotide
  Sense strand starting at position 1630 of SEQ ID NO: 913855
gugggauugucgaaucagg

SEQ ID NO: 959375 - RNA, 19 nt, Artificial Sequence
  Description of Artificial Sequence: Synthetic oligonucleotide
  Antisense strand to SEQ ID NO: 959374
ccugauucgacaaucccac

SEQ ID NO: 959376 - RNA, 19 nt, Artificial Sequence
  Description of Artificial Sequence: Synthetic oligonucleotide
  Sense strand starting at position 2981 of SEQ ID NO: 913855
acagccguccaugggaaua

SEQ ID NO: 959377 - RNA, 19 nt, Artificial Sequence
  Description of Artificial Sequence: Synthetic oligonucleotide
  Antisense strand to SEQ ID NO: 959376
uauucccauggacggcugu

SEQ ID NO: 959378 - RNA, 19 nt, Artificial Sequence
  Description of Artificial Sequence: Synthetic oligonucleotide
  Sense strand starting at position 1044 of SEQ ID NO: 913855
cguccugagagcugggaau

SEQ ID NO: 959379 - RNA, 19 nt, Artificial Sequence
  Description of Artificial Sequence: Synthetic oligonucleotide
  Antisense strand to SEQ ID NO: 959378
auucccagcucucaggacg

SEQ ID NO: 959380 - RNA, 19 nt, Artificial Sequence
  Description of Artificial Sequence: Synthetic oligonucleotide
  Sense strand starting at position 2304 of SEQ ID NO: 913855
uuccauuucuauggagaua

SEQ ID NO: 959381 - RNA, 19 nt, Artificial Sequence
  Description of Artificial Sequence: Synthetic oligonucleotide
  Antisense strand to SEQ ID NO: 959380
uaucuccauagaaauggaa

SEQ ID NO: 959382 - RNA, 19 nt, Artificial Sequence
  Description of Artificial Sequence: Synthetic oligonucleotide
  Sense strand starting at position 2332 of SEQ ID NO: 913855
caaguuugccgcuaaauga

SEQ ID NO: 959383 - RNA, 19 nt, Artificial Sequence
  Description of Artificial Sequence: Synthetic oligonucleotide
  Antisense strand to SEQ ID NO: 959382
ucauuuagcggcaaacuug

SEQ ID NO: 959384 - RNA, 19 nt, Artificial Sequence
  Description of Artificial Sequence: Synthetic oligonucleotide
  Sense strand starting at position 2888 of SEQ ID NO: 913855
gccucaaguuucuuuggga

SEQ ID NO: 959385 - RNA, 19 nt, Artificial Sequence
  Description of Artificial Sequence: Synthetic oligonucleotide
  Antisense strand to SEQ ID NO: 959384
ucccaaagaaacuugaggc

SEQ ID NO: 959386 - RNA, 19 nt, Artificial Sequence
  Description of Artificial Sequence: Synthetic oligonucleotide
  Sense strand starting at position 1550 of SEQ ID NO: 913855
caugcuugccuuuggaaag

SEQ ID NO: 959387 - RNA, 19 nt, Artificial Sequence
  Description of Artificial Sequence: Synthetic oligonucleotide
  Antisense strand to SEQ ID NO: 959386
cuuuccaaaggcaagcaug

SEQ ID NO: 959388 - RNA, 19 nt, Artificial Sequence
  Description of Artificial Sequence: Synthetic oligonucleotide
  Sense strand starting at position 2494 of SEQ ID NO: 913855
uuaguuuguuucucacaca

SEQ ID NO: 959389 - RNA, 19 nt, Artificial Sequence
  Description of Artificial Sequence: Synthetic oligonucleotide
  Antisense strand to SEQ ID NO: 959388
ugugugagaaacaaacuaa

SEQ ID NO: 959390 - RNA, 19 nt, Artificial Sequence
  Description of Artificial Sequence: Synthetic oligonucleotide
  Sense strand starting at position 2992 of SEQ ID NO: 913855
ugggaauauugagaaucau

SEQ ID NO: 959391 - RNA, 19 nt, Artificial Sequence
  Description of Artificial Sequence: Synthetic oligonucleotide
  Antisense strand to SEQ ID NO: 959390
augauucucaauauuccca

SEQ ID NO: 959392 - RNA, 19 nt, Artificial Sequence
  Description of Artificial Sequence: Synthetic oligonucleotide
  Sense strand starting at position 3533 of SEQ ID NO: 913855
cccuccuauucucugugau

SEQ ID NO: 959393 - RNA, 19 nt, Artificial Sequence
  Description of Artificial Sequence: Synthetic oligonucleotide
  Antisense strand to SEQ ID NO: 959392
aucacagagaauaggaggg

SEQ ID NO: 959394 - RNA, 19 nt, Artificial Sequence
  Description of Artificial Sequence: Synthetic oligonucleotide
  Sense strand starting at position 3682 of SEQ ID NO: 913855
uugcguggagccuaagauu

SEQ ID NO: 959395 - RNA, 19 nt, Artificial Sequence
  Description of Artificial Sequence: Synthetic oligonucleotide
  Antisense strand to SEQ ID NO: 959394
aaucuuaggcuccacgcaa

SEQ ID NO: 959396 - RNA, 19 nt, Artificial Sequence
  Description of Artificial Sequence: Synthetic oligonucleotide
  Sense strand starting at position 3534 of SEQ ID NO: 913855
ccuccuauucucugugauu

SEQ ID NO: 959397 - RNA, 19 nt, Artificial Sequence
  Description of Artificial Sequence: Synthetic oligonucleotide
  Antisense strand to SEQ ID NO: 959396
aaucacagagaauaggagg

SEQ ID NO: 959398 - RNA, 19 nt, Artificial Sequence
  Description of Artificial Sequence: Synthetic oligonucleotide
  Sense strand starting at position 3640 of SEQ ID NO: 913855
acccuugacugcucuguga

SEQ ID NO: 959399 - RNA, 19 nt, Artificial Sequence
  Description of Artificial Sequence: Synthetic oligonucleotide
  Antisense strand to SEQ ID NO: 959398
ucacagagcagucaagggu

SEQ ID NO: 959400 - RNA, 19 nt, Artificial Sequence
  Description of Artificial Sequence: Synthetic oligonucleotide
  Sense strand starting at position 3489 of SEQ ID NO: 913855
gauagagugaugugugcca

SEQ ID NO: 959401 - RNA, 19 nt, Artificial Sequence
  Description of Artificial Sequence: Synthetic oligonucleotide
  Antisense strand to SEQ ID NO: 959400
uggcacacaucacucuauc

SEQ ID NO: 959402 - RNA, 19 nt, Artificial Sequence
  Description of Artificial Sequence: Synthetic oligonucleotide
  Sense strand starting at position 1931 of SEQ ID NO: 913856
gcuagugacguugucuuca

SEQ ID NO: 959403 - RNA, 19 nt, Artificial Sequence
  Description of Artificial Sequence: Synthetic oligonucleotide
  Antisense strand to SEQ ID NO: 959402
ugaagacaacgucacuagc

SEQ ID NO: 959404 - RNA, 19 nt, Artificial Sequence
  Description of Artificial Sequence: Synthetic oligonucleotide
  Sense strand starting at position 422 of SEQ ID NO: 913856
uuccuugguccugaaauca

SEQ ID NO: 959405 - RNA, 19 nt, Artificial Sequence
  Description of Artificial Sequence: Synthetic oligonucleotide
  Antisense strand to SEQ ID NO: 959404
ugauuucaggaccaaggaa

SEQ ID NO: 959406 - RNA, 19 nt, Artificial Sequence
  Description of Artificial Sequence: Synthetic oligonucleotide
  Sense strand starting at position 2792 of SEQ ID NO: 913856
ccuuccuauccuggaggaa

SEQ ID NO: 959407 - RNA, 19 nt, Artificial Sequence
  Description of Artificial Sequence: Synthetic oligonucleotide
  Antisense strand to SEQ ID NO: 959406
uuccuccaggauaggaagg

SEQ ID NO: 959408 - RNA, 19 nt, Artificial Sequence
  Description of Artificial Sequence: Synthetic oligonucleotide
  Sense strand starting at position 1510 of SEQ ID NO: 913856
gggaacucccugcaauucu

SEQ ID NO: 959409 - RNA, 19 nt, Artificial Sequence
  Description of Artificial Sequence: Synthetic oligonucleotide
  Antisense strand to SEQ ID NO: 959408
agaauugcagggaguuccc

SEQ ID NO: 959410 - RNA, 19 nt, Artificial Sequence
  Description of Artificial Sequence: Synthetic oligonucleotide
  Sense strand starting at position 1929 of SEQ ID NO: 913856
cugcuagugacguugucuu

SEQ ID NO: 959411 - RNA, 19 nt, Artificial Sequence
  Description of Artificial Sequence: Synthetic oligonucleotide
  Antisense strand to SEQ ID NO: 959410
aagacaacgucacuagcag

SEQ ID NO: 959412 - RNA, 19 nt, Artificial Sequence
  Description of Artificial Sequence: Synthetic oligonucleotide
  Sense strand starting at position 1768 of SEQ ID NO: 913856
uggagcucugcagaucaga

SEQ ID NO: 959413 - RNA, 19 nt, Artificial Sequence
  Description of Artificial Sequence: Synthetic oligonucleotide
  Antisense strand to SEQ ID NO: 959412
ucugaucugcagagcucca

SEQ ID NO: 959414 - RNA, 19 nt, Artificial Sequence
  Description of Artificial Sequence: Synthetic oligonucleotide
  Sense strand starting at position 1438 of SEQ ID NO: 913856
ugggugauugaugguagga

SEQ ID NO: 959415 - RNA, 19 nt, Artificial Sequence
  Description of Artificial Sequence: Synthetic oligonucleotide
  Antisense strand to SEQ ID NO: 959414
uccuaccaucaaucaccca

SEQ ID NO: 959416 - RNA, 19 nt, Artificial Sequence
  Description of Artificial Sequence: Synthetic oligonucleotide
  Sense strand starting at position 993 of SEQ ID NO: 913856
gggcuguuggagggaugaa

SEQ ID NO: 959417 - RNA, 19 nt, Artificial Sequence
  Description of Artificial Sequence: Synthetic oligonucleotide
  Antisense strand to SEQ ID NO: 959416
uucaucccuccaacagccc

SEQ ID NO: 959418 - RNA, 19 nt, Artificial Sequence
  Description of Artificial Sequence: Synthetic oligonucleotide
  Sense strand starting at position 2114 of SEQ ID NO: 913856
ggacucugggaauguggua

SEQ ID NO: 959419 - RNA, 19 nt, Artificial Sequence
  Description of Artificial Sequence: Synthetic oligonucleotide
  Antisense strand to SEQ ID NO: 959418
uaccacauucccagagucc

SEQ ID NO: 959420 - RNA, 19 nt, Artificial Sequence
  Description of Artificial Sequence: Synthetic oligonucleotide
  Sense strand starting at position 1359 of SEQ ID NO: 913856
uugauuucuuuggaagaac

SEQ ID NO: 959421 - RNA, 19 nt, Artificial Sequence
  Description of Artificial Sequence: Synthetic oligonucleotide
  Antisense strand to SEQ ID NO: 959420
guucuuccaaagaaaucaa

SEQ ID NO: 959422 - RNA, 19 nt, Artificial Sequence
  Description of Artificial Sequence: Synthetic oligonucleotide
  Sense strand starting at position 3562 of SEQ ID NO: 913856
gaugaaaccuaggcucagu

SEQ ID NO: 959423 - RNA, 19 nt, Artificial Sequence
  Description of Artificial Sequence: Synthetic oligonucleotide
  Antisense strand to SEQ ID NO: 959422
acugagccuagguuucauc

SEQ ID NO: 959424 - RNA, 19 nt, Artificial Sequence
  Description of Artificial Sequence: Synthetic oligonucleotide
  Sense strand starting at position 2087 of SEQ ID NO: 913856
guuccugucccugaggacu

SEQ ID NO: 959425 - RNA, 19 nt, Artificial Sequence
  Description of Artificial Sequence: Synthetic oligonucleotide
  Antisense strand to SEQ ID NO: 959424
aguccucagggacaggaac

SEQ ID NO: 959426 - RNA, 19 nt, Artificial Sequence
  Description of Artificial Sequence: Synthetic oligonucleotide
  Sense strand starting at position 1358 of SEQ ID NO: 913856
auugauuucuuuggaagaa

SEQ ID NO: 959427 - RNA, 19 nt, Artificial Sequence
  Description of Artificial Sequence: Synthetic oligonucleotide
  Antisense strand to SEQ ID NO: 959426
uucuuccaaagaaaucaau

SEQ ID NO: 959428 - RNA, 19 nt, Artificial Sequence
  Description of Artificial Sequence: Synthetic oligonucleotide
  Sense strand starting at position 891 of SEQ ID NO: 913856
cacuaugagcucugaaguc

SEQ ID NO: 959429 - RNA, 19 nt, Artificial Sequence
  Description of Artificial Sequence: Synthetic oligonucleotide
  Antisense strand to SEQ ID NO: 959428
gacuucagagcucauagug

SEQ ID NO: 959430 - RNA, 19 nt, Artificial Sequence
  Description of Artificial Sequence: Synthetic oligonucleotide
  Sense strand starting at position 791 of SEQ ID NO: 913856
uguagaugcccuuagccaa

SEQ ID NO: 959431 - RNA, 19 nt, Artificial Sequence
  Description of Artificial Sequence: Synthetic oligonucleotide
  Antisense strand to SEQ ID NO: 959430
uuggcuaagggcaucuaca

SEQ ID NO: 959432 - RNA, 19 nt, Artificial Sequence
  Description of Artificial Sequence: Synthetic oligonucleotide
  Sense strand starting at position 558 of SEQ ID NO: 913856
gagguuucuccauggccaa

SEQ ID NO: 959433 - RNA, 19 nt, Artificial Sequence
  Description of Artificial Sequence: Synthetic oligonucleotide
  Antisense strand to SEQ ID NO: 959432
uuggccauggagaaaccuc

SEQ ID NO: 959434 - RNA, 19 nt, Artificial Sequence
  Description of Artificial Sequence: Synthetic oligonucleotide
  Sense strand starting at position 872 of SEQ ID NO: 913856
ccaagugcugcagagaguu

SEQ ID NO: 959435 - RNA, 19 nt, Artificial Sequence
  Description of Artificial Sequence: Synthetic oligonucleotide
  Antisense strand to SEQ ID NO: 959434
aacucucugcagcacuugg

SEQ ID NO: 959436 - RNA, 19 nt, Artificial Sequence
  Description of Artificial Sequence: Synthetic oligonucleotide
  Sense strand starting at position 418 of SEQ ID NO: 913856
gagcuuccuugguccugaa

SEQ ID NO: 959437 - RNA, 19 nt, Artificial Sequence
  Description of Artificial Sequence: Synthetic oligonucleotide
  Antisense strand to SEQ ID NO: 959436
uucaggaccaaggaagcuc

SEQ ID NO: 959438 - RNA, 19 nt, Artificial Sequence
  Description of Artificial Sequence: Synthetic oligonucleotide
  Sense strand starting at position 3136 of SEQ ID NO: 913856
gggucauguauguggguaa

SEQ ID NO: 959439 - RNA, 19 nt, Artificial Sequence
  Description of Artificial Sequence: Synthetic oligonucleotide
  Antisense strand to SEQ ID NO: 959438
uuacccacauacaugaccc

SEQ ID NO: 959440 - RNA, 19 nt, Artificial Sequence
  Description of Artificial Sequence: Synthetic oligonucleotide
  Sense strand starting at position 3190 of SEQ ID NO: 913856
aagggugagugcccaguua

SEQ ID NO: 959441 - RNA, 19 nt, Artificial Sequence
  Description of Artificial Sequence: Synthetic oligonucleotide
  Antisense strand to SEQ ID NO: 959440
uaacugggcacucacccuu

SEQ ID NO: 959442 - RNA, 19 nt, Artificial Sequence
  Description of Artificial Sequence: Synthetic oligonucleotide
  Sense strand starting at position 1165 of SEQ ID NO: 913856
guuggaaagcuauguucug

SEQ ID NO: 959443 - RNA, 19 nt, Artificial Sequence
  Description of Artificial Sequence: Synthetic oligonucleotide
  Antisense strand to SEQ ID NO: 959442
cagaacauagcuuuccaac

SEQ ID NO: 959444 - RNA, 19 nt, Artificial Sequence
  Description of Artificial Sequence: Synthetic oligonucleotide
  Sense strand starting at position 3201 of SEQ ID NO: 913856
cccaguuaccuucgccaga

SEQ ID NO: 959445 - RNA, 19 nt, Artificial Sequence
  Description of Artificial Sequence: Synthetic oligonucleotide
  Antisense strand to SEQ ID NO: 959444
ucuggcgaagguaacuggg

SEQ ID NO: 959446 - RNA, 19 nt, Artificial Sequence
  Description of Artificial Sequence: Synthetic oligonucleotide
  Sense strand starting at position 1155 of SEQ ID NO: 913856
cacauagaauguuggaaag

SEQ ID NO: 959447 - RNA, 19 nt, Artificial Sequence
  Description of Artificial Sequence: Synthetic oligonucleotide
  Antisense strand to SEQ ID NO: 959446
cuuuccaacauucuaugug

SEQ ID NO: 959448 - RNA, 19 nt, Artificial Sequence
  Description of Artificial Sequence: Synthetic oligonucleotide
  Sense strand starting at position 1950 of SEQ ID NO: 913856
aguuaaaucucaggaggaa

SEQ ID NO: 959449 - RNA, 19 nt, Artificial Sequence
  Description of Artificial Sequence: Synthetic oligonucleotide
  Antisense strand to SEQ ID NO: 959448
uuccuccugagauuuaacu

SEQ ID NO: 959450 - RNA, 19 nt, Artificial Sequence
  Description of Artificial Sequence: Synthetic oligonucleotide
  Sense strand starting at position 2119 of SEQ ID NO: 913856
cugggaaugugguagacau

SEQ ID NO: 959451 - RNA, 19 nt, Artificial Sequence
  Description of Artificial Sequence: Synthetic oligonucleotide
  Antisense strand to SEQ ID NO: 959450
augucuaccacauucccag

SEQ ID NO: 959452 - RNA, 19 nt, Artificial Sequence
  Description of Artificial Sequence: Synthetic oligonucleotide
  Sense strand starting at position 1157 of SEQ ID NO: 913856
cauagaauguuggaaagcu

SEQ ID NO: 959453 - RNA, 19 nt, Artificial Sequence
  Description of Artificial Sequence: Synthetic oligonucleotide
  Antisense strand to SEQ ID NO: 959452
agcuuuccaacauucuaug

SEQ ID NO: 959454 - RNA, 19 nt, Artificial Sequence
  Description of Artificial Sequence: Synthetic oligonucleotide
  Sense strand starting at position 1528 of SEQ ID NO: 913856
uuagguggauccugaaaca

SEQ ID NO: 959455 - RNA, 19 nt, Artificial Sequence
  Description of Artificial Sequence: Synthetic oligonucleotide
  Antisense strand to SEQ ID NO: 959454
uguuucaggauccaccuaa

SEQ ID NO: 959456 - RNA, 19 nt, Artificial Sequence
  Description of Artificial Sequence: Synthetic oligonucleotide
  Sense strand starting at position 67 of SEQ ID NO: 913856
auccggguuuggugagaga

SEQ ID NO: 959457 - RNA, 19 nt, Artificial Sequence
  Description of Artificial Sequence: Synthetic oligonucleotide
  Antisense strand to SEQ ID NO: 959456
ucucucaccaaacccggau

SEQ ID NO: 959458 - RNA, 19 nt, Artificial Sequence
  Description of Artificial Sequence: Synthetic oligonucleotide
  Sense strand starting at position 421 of SEQ ID NO: 913856
cuuccuugguccugaaauc

SEQ ID NO: 959459 - RNA, 19 nt, Artificial Sequence
  Description of Artificial Sequence: Synthetic oligonucleotide
  Antisense strand to SEQ ID NO: 959458
gauuucaggaccaaggaag

SEQ ID NO: 959460 - RNA, 19 nt, Artificial Sequence
  Description of Artificial Sequence: Synthetic oligonucleotide
  Sense strand starting at position 1519 of SEQ ID NO: 913856
cugcaauucuuagguggau

SEQ ID NO: 959461 - RNA, 19 nt, Artificial Sequence
  Description of Artificial Sequence: Synthetic oligonucleotide
  Antisense strand to SEQ ID NO: 959460
auccaccuaagaauugcag

SEQ ID NO: 959462 - RNA, 19 nt, Artificial Sequence
  Description of Artificial Sequence: Synthetic oligonucleotide
  Sense strand starting at position 1171 of SEQ ID NO: 913856
aagcuauguucugggucca

SEQ ID NO: 959463 - RNA, 19 nt, Artificial Sequence
  Description of Artificial Sequence: Synthetic oligonucleotide
  Antisense strand to SEQ ID NO: 959462
uggacccagaacauagcuu

SEQ ID NO: 959464 - RNA, 19 nt, Artificial Sequence
  Description of Artificial Sequence: Synthetic oligonucleotide
  Sense strand starting at position 3886 of SEQ ID NO: 913857
auucuucuggcugaggaga

SEQ ID NO: 959465 - RNA, 19 nt, Artificial Sequence
  Description of Artificial Sequence: Synthetic oligonucleotide
  Antisense strand to SEQ ID NO: 959464
ucuccucagccagaagaau

SEQ ID NO: 959466 - RNA, 19 nt, Artificial Sequence
  Description of Artificial Sequence: Synthetic oligonucleotide
  Sense strand starting at position 494 of SEQ ID NO: 913857
ccagguauuugcuccuuga

SEQ ID NO: 959467 - RNA, 19 nt, Artificial Sequence
  Description of Artificial Sequence: Synthetic oligonucleotide
  Antisense strand to SEQ ID NO: 959466
ucaaggagcaaauaccugg

SEQ ID NO: 959468 - RNA, 19 nt, Artificial Sequence
  Description of Artificial Sequence: Synthetic oligonucleotide
  Sense strand starting at position 3072 of SEQ ID NO: 913857
gcgagaacagucgcuccuu

SEQ ID NO: 959469 - RNA, 19 nt, Artificial Sequence
  Description of Artificial Sequence: Synthetic oligonucleotide
  Antisense strand to SEQ ID NO: 959468
aaggagcgacuguucucgc

SEQ ID NO: 959470 - RNA, 19 nt, Artificial Sequence
  Description of Artificial Sequence: Synthetic oligonucleotide
  Sense strand starting at position 302 of SEQ ID NO: 913857
auguuaaugguaggauaga

SEQ ID NO: 959471 - RNA, 19 nt, Artificial Sequence
  Description of Artificial Sequence: Synthetic oligonucleotide
  Antisense strand to SEQ ID NO: 959470
ucuauccuaccauuaacau

SEQ ID NO: 959472 - RNA, 19 nt, Artificial Sequence
  Description of Artificial Sequence: Synthetic oligonucleotide
  Sense strand starting at position 3663 of SEQ ID NO: 913857
uguuaaugaaguggaaacu

SEQ ID NO: 959473 - RNA, 19 nt, Artificial Sequence
  Description of Artificial Sequence: Synthetic oligonucleotide
  Antisense strand to SEQ ID NO: 959472
aguuuccacuucauuaaca

SEQ ID NO: 959474 - RNA, 19 nt, Artificial Sequence
  Description of Artificial Sequence: Synthetic oligonucleotide
  Sense strand starting at position 3662 of SEQ ID NO: 913857
uuguuaaugaaguggaaac

SEQ ID NO: 959475 - RNA, 19 nt, Artificial Sequence
  Description of Artificial Sequence: Synthetic oligonucleotide
  Antisense strand to SEQ ID NO: 959474
guuuccacuucauuaacaa

SEQ ID NO: 959476 - RNA, 19 nt, Artificial Sequence
  Description of Artificial Sequence: Synthetic oligonucleotide
  Sense strand starting at position 3247 of SEQ ID NO: 913857
gagagucacccuugggauu

SEQ ID NO: 959477 - RNA, 19 nt, Artificial Sequence
  Description of Artificial Sequence: Synthetic oligonucleotide
  Antisense strand to SEQ ID NO: 959476
aaucccaagggugacucuc

SEQ ID NO: 959478 - RNA, 19 nt, Artificial Sequence
  Description of Artificial Sequence: Synthetic oligonucleotide
  Sense strand starting at position 3800 of SEQ ID NO: 913857
augacuuguggaggcagaa

SEQ ID NO: 959479 - RNA, 19 nt, Artificial Sequence
  Description of Artificial Sequence: Synthetic oligonucleotide
  Antisense strand to SEQ ID NO: 959478
uucugccuccacaagucau

SEQ ID NO: 959480 - RNA, 19 nt, Artificial Sequence
  Description of Artificial Sequence: Synthetic oligonucleotide
  Sense strand starting at position 3382 of SEQ ID NO: 913857
agaggucugucggucauuu

SEQ ID NO: 959481 - RNA, 19 nt, Artificial Sequence
  Description of Artificial Sequence: Synthetic oligonucleotide
  Antisense strand to SEQ ID NO: 959480
aaaugaccgacagaccucu

SEQ ID NO: 959482 - RNA, 19 nt, Artificial Sequence
  Description of Artificial Sequence: Synthetic oligonucleotide
  Sense strand starting at position 315 of SEQ ID NO: 913857
gauagauccuaagugaugu

SEQ ID NO: 959483 - RNA, 19 nt, Artificial Sequence
  Description of Artificial Sequence: Synthetic oligonucleotide
  Antisense strand to SEQ ID NO: 959482
acaucacuuaggaucuauc

SEQ ID NO: 959484 - RNA, 19 nt, Artificial Sequence
  Description of Artificial Sequence: Synthetic oligonucleotide
  Sense strand starting at position 658 of SEQ ID NO: 913857
acaauaguggcaugauuga

SEQ ID NO: 959485 - RNA, 19 nt, Artificial Sequence
  Description of Artificial Sequence: Synthetic oligonucleotide
  Antisense strand to SEQ ID NO: 959484
ucaaucaugccacuauugu

SEQ ID NO: 959486 - RNA, 19 nt, Artificial Sequence
  Description of Artificial Sequence: Synthetic oligonucleotide
  Sense strand starting at position 3775 of SEQ ID NO: 913857
gaaggaugucugcauggug

SEQ ID NO: 959487 - RNA, 19 nt, Artificial Sequence
  Description of Artificial Sequence: Synthetic oligonucleotide
  Antisense strand to SEQ ID NO: 959486
caccaugcagacauccuuc

SEQ ID NO: 959488 - RNA, 19 nt, Artificial Sequence
  Description of Artificial Sequence: Synthetic oligonucleotide
  Sense strand starting at position 3674 of SEQ ID NO: 913857
uggaaacucuaguuggagu

SEQ ID NO: 959489 - RNA, 19 nt, Artificial Sequence
  Description of Artificial Sequence: Synthetic oligonucleotide
  Antisense strand to SEQ ID NO: 959488
acuccaacuagaguuucca

SEQ ID NO: 959490 - RNA, 19 nt, Artificial Sequence
  Description of Artificial Sequence: Synthetic oligonucleotide
  Sense strand starting at position 3131 of SEQ ID NO: 913857
gggaauccgacuugcaaag

SEQ ID NO: 959491 - RNA, 19 nt, Artificial Sequence
  Description of Artificial Sequence: Synthetic oligonucleotide
  Antisense strand to SEQ ID NO: 959490
cuuugcaagucggauuccc

SEQ ID NO: 959492 - RNA, 19 nt, Artificial Sequence
  Description of Artificial Sequence: Synthetic oligonucleotide
  Sense strand starting at position 3675 of SEQ ID NO: 913857
ggaaacucuaguuggaguu

SEQ ID NO: 959493 - RNA, 19 nt, Artificial Sequence
  Description of Artificial Sequence: Synthetic oligonucleotide
  Antisense strand to SEQ ID NO: 959492
aacuccaacuagaguuucc

SEQ ID NO: 959494 - RNA, 19 nt, Artificial Sequence
  Description of Artificial Sequence: Synthetic oligonucleotide
  Sense strand starting at position 78 of SEQ ID NO: 913857
aguaauguucuauaucuuc

SEQ ID NO: 959495 - RNA, 19 nt, Artificial Sequence
  Description of Artificial Sequence: Synthetic oligonucleotide
  Antisense strand to SEQ ID NO: 959494
gaagauauagaacauuacu

SEQ ID NO: 959496 - RNA, 19 nt, Artificial Sequence
  Description of Artificial Sequence: Synthetic oligonucleotide
  Sense strand starting at position 775 of SEQ ID NO: 913857
agagaaauguguccuuacu

SEQ ID NO: 959497 - RNA, 19 nt, Artificial Sequence
  Description of Artificial Sequence: Synthetic oligonucleotide
  Antisense strand to SEQ ID NO: 959496
aguaaggacacauuucucu

SEQ ID NO: 959498 - RNA, 19 nt, Artificial Sequence
  Description of Artificial Sequence: Synthetic oligonucleotide
  Sense strand starting at position 36 of SEQ ID NO: 913857
aucgcauaaaugugaaaga

SEQ ID NO: 959499 - RNA, 19 nt, Artificial Sequence
  Description of Artificial Sequence: Synthetic oligonucleotide
  Antisense strand to SEQ ID NO: 959498
ucuuucacauuuaugcgau

SEQ ID NO: 959500 - RNA, 19 nt, Artificial Sequence
  Description of Artificial Sequence: Synthetic oligonucleotide
  Sense strand starting at position 986 of SEQ ID NO: 913857
agauaagcugucugaacua

SEQ ID NO: 959501 - RNA, 19 nt, Artificial Sequence
  Description of Artificial Sequence: Synthetic oligonucleotide
  Antisense strand to SEQ ID NO: 959500
uaguucagacagcuuaucu

SEQ ID NO: 959502 - RNA, 19 nt, Artificial Sequence
  Description of Artificial Sequence: Synthetic oligonucleotide
  Sense strand starting at position 3676 of SEQ ID NO: 913857
gaaacucuaguuggaguuu

SEQ ID NO: 959503 - RNA, 19 nt, Artificial Sequence
  Description of Artificial Sequence: Synthetic oligonucleotide
  Antisense strand to SEQ ID NO: 959502
aaacuccaacuagaguuuc

SEQ ID NO: 959504 - RNA, 19 nt, Artificial Sequence
  Description of Artificial Sequence: Synthetic oligonucleotide
  Sense strand starting at position 3090 of SEQ ID NO: 913857
uccaaagacugugucauua

SEQ ID NO: 959505 - RNA, 19 nt, Artificial Sequence
  Description of Artificial Sequence: Synthetic oligonucleotide
  Antisense strand to SEQ ID NO: 959504
uaaugacacagucuuugga

SEQ ID NO: 959506 - RNA, 19 nt, Artificial Sequence
  Description of Artificial Sequence: Synthetic oligonucleotide
  Sense strand starting at position 985 of SEQ ID NO: 913857
uagauaagcugucugaacu

SEQ ID NO: 959507 - RNA, 19 nt, Artificial Sequence
  Description of Artificial Sequence: Synthetic oligonucleotide
  Antisense strand to SEQ ID NO: 959506
aguucagacagcuuaucua

SEQ ID NO: 959508 - RNA, 19 nt, Artificial Sequence
  Description of Artificial Sequence: Synthetic oligonucleotide
  Sense strand starting at position 349 of SEQ ID NO: 913857
cuuuauacuuggcuggaua

SEQ ID NO: 959509 - RNA, 19 nt, Artificial Sequence
  Description of Artificial Sequence: Synthetic oligonucleotide
  Antisense strand to SEQ ID NO: 959508
uauccagccaaguauaaag

SEQ ID NO: 959510 - RNA, 19 nt, Artificial Sequence
  Description of Artificial Sequence: Synthetic oligonucleotide
  Sense strand starting at position 754 of SEQ ID NO: 913857
gguuaauacgcucaauauc

SEQ ID NO: 959511 - RNA, 19 nt, Artificial Sequence
  Description of Artificial Sequence: Synthetic oligonucleotide
  Antisense strand to SEQ ID NO: 959510
gauauugagcguauuaacc

SEQ ID NO: 959512 - RNA, 19 nt, Artificial Sequence
  Description of Artificial Sequence: Synthetic oligonucleotide
  Sense strand starting at position 1995 of SEQ ID NO: 913857
gcgauugagggcgaauaau

SEQ ID NO: 959513 - RNA, 19 nt, Artificial Sequence
  Description of Artificial Sequence: Synthetic oligonucleotide
  Antisense strand to SEQ ID NO: 959512
auuauucgcccucaaucgc

SEQ ID NO: 959514 - RNA, 19 nt, Artificial Sequence
  Description of Artificial Sequence: Synthetic oligonucleotide
  Sense strand starting at position 3477 of SEQ ID NO: 913857
cucaaacuugucuggauuc

SEQ ID NO: 959515 - RNA, 19 nt, Artificial Sequence
  Description of Artificial Sequence: Synthetic oligonucleotide
  Antisense strand to SEQ ID NO: 959514
gaauccagacaaguuugag

SEQ ID NO: 959516 - RNA, 19 nt, Artificial Sequence
  Description of Artificial Sequence: Synthetic oligonucleotide
  Sense strand starting at position 3280 of SEQ ID NO: 913857
cagcuuugggagugagauc

SEQ ID NO: 959517 - RNA, 19 nt, Artificial Sequence
  Description of Artificial Sequence: Synthetic oligonucleotide
  Antisense strand to SEQ ID NO: 959516
gaucucacucccaaagcug

SEQ ID NO: 959518 - RNA, 19 nt, Artificial Sequence
  Description of Artificial Sequence: Synthetic oligonucleotide
  Sense strand starting at position 350 of SEQ ID NO: 913857
uuuauacuuggcuggauau

SEQ ID NO: 959519 - RNA, 19 nt, Artificial Sequence
  Description of Artificial Sequence: Synthetic oligonucleotide
  Antisense strand to SEQ ID NO: 959518
auauccagccaaguauaaa

SEQ ID NO: 959520 - RNA, 19 nt, Artificial Sequence
  Description of Artificial Sequence: Synthetic oligonucleotide
  Sense strand starting at position 351 of SEQ ID NO: 913857
uuauacuuggcuggauauu

SEQ ID NO: 959521 - RNA, 19 nt, Artificial Sequence
  Description of Artificial Sequence: Synthetic oligonucleotide
  Antisense strand to SEQ ID NO: 959520
aauauccagccaaguauaa

SEQ ID NO: 959522 - RNA, 19 nt, Artificial Sequence
  Description of Artificial Sequence: Synthetic oligonucleotide
  Sense strand starting at position 3884 of SEQ ID NO: 913857
ccauucuucuggcugagga

SEQ ID NO: 959523 - RNA, 19 nt, Artificial Sequence
  Description of Artificial Sequence: Synthetic oligonucleotide
  Antisense strand to SEQ ID NO: 959522
uccucagccagaagaaugg

SEQ ID NO: 959524 - RNA, 19 nt, Artificial Sequence
  Description of Artificial Sequence: Synthetic oligonucleotide
  Sense strand starting at position 3542 of SEQ ID NO: 913857
gguugaacaccuuguccaa

SEQ ID NO: 959525 - RNA, 19 nt, Artificial Sequence
  Description of Artificial Sequence: Synthetic oligonucleotide
  Antisense strand to SEQ ID NO: 959524
uuggacaagguguucaacc

SEQ ID NO: 959526 - RNA, 19 nt, Artificial Sequence
  Description of Artificial Sequence: Synthetic oligonucleotide
  Sense strand starting at position 407 of SEQ ID NO: 913857
uugguaagacacuguacuu

SEQ ID NO: 959527 - RNA, 19 nt, Artificial Sequence
  Description of Artificial Sequence: Synthetic oligonucleotide
  Antisense strand to SEQ ID NO: 959526
aaguacagugucuuaccaa

SEQ ID NO: 959528 - RNA, 19 nt, Artificial Sequence
  Description of Artificial Sequence: Synthetic oligonucleotide
  Sense strand starting at position 3653 of SEQ ID NO: 913857
caggcagaguuguuaauga

SEQ ID NO: 959529 - RNA, 19 nt, Artificial Sequence
  Description of Artificial Sequence: Synthetic oligonucleotide
  Antisense strand to SEQ ID NO: 959528
ucauuaacaacucugccug

SEQ ID NO: 959530 - RNA, 19 nt, Artificial Sequence
  Description of Artificial Sequence: Synthetic oligonucleotide
  Sense strand starting at position 498 of SEQ ID NO: 913857
guauuugcuccuugaugcu

SEQ ID NO: 959531 - RNA, 19 nt, Artificial Sequence
  Description of Artificial Sequence: Synthetic oligonucleotide
  Antisense strand to SEQ ID NO: 959530
agcaucaaggagcaaauac

SEQ ID NO: 959532 - RNA, 19 nt, Artificial Sequence
  Description of Artificial Sequence: Synthetic oligonucleotide
  Sense strand starting at position 116 of SEQ ID NO: 913857
agguguaugcauuagucaa

SEQ ID NO: 959533 - RNA, 19 nt, Artificial Sequence
  Description of Artificial Sequence: Synthetic oligonucleotide
  Antisense strand to SEQ ID NO: 959532
uugacuaaugcauacaccu

SEQ ID NO: 959534 - RNA, 19 nt, Artificial Sequence
  Description of Artificial Sequence: Synthetic oligonucleotide
  Sense strand starting at position 777 of SEQ ID NO: 913857
agaaauguguccuuacuuc

SEQ ID NO: 959535 - RNA, 19 nt, Artificial Sequence
  Description of Artificial Sequence: Synthetic oligonucleotide
  Antisense strand to SEQ ID NO: 959534
gaaguaaggacacauuucu

SEQ ID NO: 959536 - RNA, 19 nt, Artificial Sequence
  Description of Artificial Sequence: Synthetic oligonucleotide
  Sense strand starting at position 3151 of SEQ ID NO: 913857
agcgcaggacucugggaaa

SEQ ID NO: 959537 - RNA, 19 nt, Artificial Sequence
  Description of Artificial Sequence: Synthetic oligonucleotide
  Antisense strand to SEQ ID NO: 959536
uuucccagaguccugcgcu

SEQ ID NO: 959538 - RNA, 19 nt, Artificial Sequence
  Description of Artificial Sequence: Synthetic oligonucleotide
  Sense strand starting at position 3475 of SEQ ID NO: 913857
agcucaaacuugucuggau

SEQ ID NO: 959539 - RNA, 19 nt, Artificial Sequence
  Description of Artificial Sequence: Synthetic oligonucleotide
  Antisense strand to SEQ ID NO: 959538
auccagacaaguuugagcu

SEQ ID NO: 959540 - RNA, 19 nt, Artificial Sequence
  Description of Artificial Sequence: Synthetic oligonucleotide
  Sense strand starting at position 805 of SEQ ID NO: 913857
auacgaaauuuccaaaguu

SEQ ID NO: 959541 - RNA, 19 nt, Artificial Sequence
  Description of Artificial Sequence: Synthetic oligonucleotide
  Antisense strand to SEQ ID NO: 959540
aacuuuggaaauuucguau

SEQ ID NO: 959542 - RNA, 19 nt, Artificial Sequence
  Description of Artificial Sequence: Synthetic oligonucleotide
  Sense strand starting at position 348 of SEQ ID NO: 913857
ucuuuauacuuggcuggau

SEQ ID NO: 959543 - RNA, 19 nt, Artificial Sequence
  Description of Artificial Sequence: Synthetic oligonucleotide
  Antisense strand to SEQ ID NO: 959542
auccagccaaguauaaaga

SEQ ID NO: 959544 - RNA, 19 nt, Artificial Sequence
  Description of Artificial Sequence: Synthetic oligonucleotide
  Sense strand starting at position 3701 of SEQ ID NO: 913858
auucuucuggcugaggaga

SEQ ID NO: 959545 - RNA, 19 nt, Artificial Sequence
  Description of Artificial Sequence: Synthetic oligonucleotide
  Antisense strand to SEQ ID NO: 959544
ucuccucagccagaagaau

SEQ ID NO: 959546 - RNA, 19 nt, Artificial Sequence
  Description of Artificial Sequence: Synthetic oligonucleotide
  Sense strand starting at position 309 of SEQ ID NO: 913858
ccagguauuugcuccuuga

SEQ ID NO: 959547 - RNA, 19 nt, Artificial Sequence
  Description of Artificial Sequence: Synthetic oligonucleotide
  Antisense strand to SEQ ID NO: 959546
ucaaggagcaaauaccugg

SEQ ID NO: 959548 - RNA, 19 nt, Artificial Sequence
  Description of Artificial Sequence: Synthetic oligonucleotide
  Sense strand starting at position 2887 of SEQ ID NO: 913858
gcgagaacagucgcuccuu

SEQ ID NO: 959549 - RNA, 19 nt, Artificial Sequence
  Description of Artificial Sequence: Synthetic oligonucleotide
  Antisense strand to SEQ ID NO: 959548
aaggagcgacuguucucgc

SEQ ID NO: 959550 - RNA, 19 nt, Artificial Sequence
  Description of Artificial Sequence: Synthetic oligonucleotide
  Sense strand starting at position 117 of SEQ ID NO: 913858
auguuaaugguaggauaga

SEQ ID NO: 959551 - RNA, 19 nt, Artificial Sequence
  Description of Artificial Sequence: Synthetic oligonucleotide
  Antisense strand to SEQ ID NO: 959550
ucuauccuaccauuaacau

SEQ ID NO: 959552 - RNA, 19 nt, Artificial Sequence
  Description of Artificial Sequence: Synthetic oligonucleotide
  Sense strand starting at position 3478 of SEQ ID NO: 913858
uguuaaugaaguggaaacu

SEQ ID NO: 959553 - RNA, 19 nt, Artificial Sequence
  Description of Artificial Sequence: Synthetic oligonucleotide
  Antisense strand to SEQ ID NO: 959552
aguuuccacuucauuaaca

SEQ ID NO: 959554 - RNA, 19 nt, Artificial Sequence
  Description of Artificial Sequence: Synthetic oligonucleotide
  Sense strand starting at position 3477 of SEQ ID NO: 913858
uuguuaaugaaguggaaac

SEQ ID NO: 959555 - RNA, 19 nt, Artificial Sequence
  Description of Artificial Sequence: Synthetic oligonucleotide
  Antisense strand to SEQ ID NO: 959554
guuuccacuucauuaacaa

SEQ ID NO: 959556 - RNA, 19 nt, Artificial Sequence
  Description of Artificial Sequence: Synthetic oligonucleotide
  Sense strand starting at position 3062 of SEQ ID NO: 913858
gagagucacccuugggauu

SEQ ID NO: 959557 - RNA, 19 nt, Artificial Sequence
  Description of Artificial Sequence: Synthetic oligonucleotide
  Antisense strand to SEQ ID NO: 959556
aaucccaagggugacucuc

SEQ ID NO: 959558 - RNA, 19 nt, Artificial Sequence
  Description of Artificial Sequence: Synthetic oligonucleotide
  Sense strand starting at position 3615 of SEQ ID NO: 913858
augacuuguggaggcagaa

SEQ ID NO: 959559 - RNA, 19 nt, Artificial Sequence
  Description of Artificial Sequence: Synthetic oligonucleotide
  Antisense strand to SEQ ID NO: 959558
uucugccuccacaagucau

SEQ ID NO: 959560 - RNA, 19 nt, Artificial Sequence
  Description of Artificial Sequence: Synthetic oligonucleotide
  Sense strand starting at position 3197 of SEQ ID NO: 913858
agaggucugucggucauuu

SEQ ID NO: 959561 - RNA, 19 nt, Artificial Sequence
  Description of Artificial Sequence: Synthetic oligonucleotide
  Antisense strand to SEQ ID NO: 959560
aaaugaccgacagaccucu

SEQ ID NO: 959562 - RNA, 19 nt, Artificial Sequence
  Description of Artificial Sequence: Synthetic oligonucleotide
  Sense strand starting at position 130 of SEQ ID NO: 913858
gauagauccuaagugaugu

SEQ ID NO: 959563 - RNA, 19 nt, Artificial Sequence
  Description of Artificial Sequence: Synthetic oligonucleotide
  Antisense strand to SEQ ID NO: 959562
acaucacuuaggaucuauc

SEQ ID NO: 959564 - RNA, 19 nt, Artificial Sequence
  Description of Artificial Sequence: Synthetic oligonucleotide
  Sense strand starting at position 473 of SEQ ID NO: 913858
acaauaguggcaugauuga

SEQ ID NO: 959565 - RNA, 19 nt, Artificial Sequence
  Description of Artificial Sequence: Synthetic oligonucleotide
  Antisense strand to SEQ ID NO: 959564
ucaaucaugccacuauugu

SEQ ID NO: 959566 - RNA, 19 nt, Artificial Sequence
  Description of Artificial Sequence: Synthetic oligonucleotide
  Sense strand starting at position 3590 of SEQ ID NO: 913858
gaaggaugucugcauggug

SEQ ID NO: 959567 - RNA, 19 nt, Artificial Sequence
  Description of Artificial Sequence: Synthetic oligonucleotide
  Antisense strand to SEQ ID NO: 959566
caccaugcagacauccuuc

SEQ ID NO: 959568 - RNA, 19 nt, Artificial Sequence
  Description of Artificial Sequence: Synthetic oligonucleotide
  Sense strand starting at position 3489 of SEQ ID NO: 913858
uggaaacucuaguuggagu

SEQ ID NO: 959569 - RNA, 19 nt, Artificial Sequence
  Description of Artificial Sequence: Synthetic oligonucleotide
  Antisense strand to SEQ ID NO: 959568
acuccaacuagaguuucca

SEQ ID NO: 959570 - RNA, 19 nt, Artificial Sequence
  Description of Artificial Sequence: Synthetic oligonucleotide
  Sense strand starting at position 2946 of SEQ ID NO: 913858
gggaauccgacuugcaaag

SEQ ID NO: 959571 - RNA, 19 nt, Artificial Sequence
  Description of Artificial Sequence: Synthetic oligonucleotide
  Antisense strand to SEQ ID NO: 959570
cuuugcaagucggauuccc

SEQ ID NO: 959572 - RNA, 19 nt, Artificial Sequence
  Description of Artificial Sequence: Synthetic oligonucleotide
  Sense strand starting at position 3490 of SEQ ID NO: 913858
ggaaacucuaguuggaguu

SEQ ID NO: 959573 - RNA, 19 nt, Artificial Sequence
  Description of Artificial Sequence: Synthetic oligonucleotide
  Antisense strand to SEQ ID NO: 959572
aacuccaacuagaguuucc

SEQ ID NO: 959574 - RNA, 19 nt, Artificial Sequence
  Description of Artificial Sequence: Synthetic oligonucleotide
  Sense strand starting at position 590 of SEQ ID NO: 913858
agagaaauguguccuuacu

SEQ ID NO: 959575 - RNA, 19 nt, Artificial Sequence
  Description of Artificial Sequence: Synthetic oligonucleotide
  Antisense strand to SEQ ID NO: 959574
aguaaggacacauuucucu

SEQ ID NO: 959576 - RNA, 19 nt, Artificial Sequence
  Description of Artificial Sequence: Synthetic oligonucleotide
  Sense strand starting at position 801 of SEQ ID NO: 913858
agauaagcugucugaacua

SEQ ID NO: 959577 - RNA, 19 nt, Artificial Sequence
  Description of Artificial Sequence: Synthetic oligonucleotide
  Antisense strand to SEQ ID NO: 959576
uaguucagacagcuuaucu

SEQ ID NO: 959578 - RNA, 19 nt, Artificial Sequence
  Description of Artificial Sequence: Synthetic oligonucleotide
  Sense strand starting at position 3491 of SEQ ID NO: 913858
gaaacucuaguuggaguuu

SEQ ID NO: 959579 - RNA, 19 nt, Artificial Sequence
  Description of Artificial Sequence: Synthetic oligonucleotide
  Antisense strand to SEQ ID NO: 959578
aaacuccaacuagaguuuc

SEQ ID NO: 959580 - RNA, 19 nt, Artificial Sequence
  Description of Artificial Sequence: Synthetic oligonucleotide
  Sense strand starting at position 2905 of SEQ ID NO: 913858
uccaaagacugugucauua

SEQ ID NO: 959581 - RNA, 19 nt, Artificial Sequence
  Description of Artificial Sequence: Synthetic oligonucleotide
  Antisense strand to SEQ ID NO: 959580
uaaugacacagucuuugga

SEQ ID NO: 959582 - RNA, 19 nt, Artificial Sequence
  Description of Artificial Sequence: Synthetic oligonucleotide
  Sense strand starting at position 800 of SEQ ID NO: 913858
uagauaagcugucugaacu

SEQ ID NO: 959583 - RNA, 19 nt, Artificial Sequence
  Description of Artificial Sequence: Synthetic oligonucleotide
  Antisense strand to SEQ ID NO: 959582
aguucagacagcuuaucua

SEQ ID NO: 959584 - RNA, 19 nt, Artificial Sequence
  Description of Artificial Sequence: Synthetic oligonucleotide
  Sense strand starting at position 164 of SEQ ID NO: 913858
cuuuauacuuggcuggaua

SEQ ID NO: 959585 - RNA, 19 nt, Artificial Sequence
  Description of Artificial Sequence: Synthetic oligonucleotide
  Antisense strand to SEQ ID NO: 959584
uauccagccaaguauaaag

SEQ ID NO: 959586 - RNA, 19 nt, Artificial Sequence
  Description of Artificial Sequence: Synthetic oligonucleotide
  Sense strand starting at position 569 of SEQ ID NO: 913858
gguuaauacgcucaauauc

SEQ ID NO: 959587 - RNA, 19 nt, Artificial Sequence
  Description of Artificial Sequence: Synthetic oligonucleotide
  Antisense strand to SEQ ID NO: 959586
gauauugagcguauuaacc

SEQ ID NO: 959588 - RNA, 19 nt, Artificial Sequence
  Description of Artificial Sequence: Synthetic oligonucleotide
  Sense strand starting at position 1810 of SEQ ID NO: 913858
gcgauugagggcgaauaau

SEQ ID NO: 959589 - RNA, 19 nt, Artificial Sequence
  Description of Artificial Sequence: Synthetic oligonucleotide
  Antisense strand to SEQ ID NO: 959588
auuauucgcccucaaucgc

SEQ ID NO: 959590 - RNA, 19 nt, Artificial Sequence
  Description of Artificial Sequence: Synthetic oligonucleotide
  Sense strand starting at position 3292 of SEQ ID NO: 913858
cucaaacuugucuggauuc

SEQ ID NO: 959591 - RNA, 19 nt, Artificial Sequence
  Description of Artificial Sequence: Synthetic oligonucleotide
  Antisense strand to SEQ ID NO: 959590
gaauccagacaaguuugag

SEQ ID NO: 959592 - RNA, 19 nt, Artificial Sequence
  Description of Artificial Sequence: Synthetic oligonucleotide
  Sense strand starting at position 3095 of SEQ ID NO: 913858
cagcuuugggagugagauc

SEQ ID NO: 959593 - RNA, 19 nt, Artificial Sequence
  Description of Artificial Sequence: Synthetic oligonucleotide
  Antisense strand to SEQ ID NO: 959592
gaucucacucccaaagcug

SEQ ID NO: 959594 - RNA, 19 nt, Artificial Sequence
  Description of Artificial Sequence: Synthetic oligonucleotide
  Sense strand starting at position 165 of SEQ ID NO: 913858
uuuauacuuggcuggauau

SEQ ID NO: 959595 - RNA, 19 nt, Artificial Sequence
  Description of Artificial Sequence: Synthetic oligonucleotide
  Antisense strand to SEQ ID NO: 959594
auauccagccaaguauaaa

SEQ ID NO: 959596 - RNA, 19 nt, Artificial Sequence
  Description of Artificial Sequence: Synthetic oligonucleotide
  Sense strand starting at position 166 of SEQ ID NO: 913858
uuauacuuggcuggauauu

SEQ ID NO: 959597 - RNA, 19 nt, Artificial Sequence
  Description of Artificial Sequence: Synthetic oligonucleotide
  Antisense strand to SEQ ID NO: 959596
aauauccagccaaguauaa

SEQ ID NO: 959598 - RNA, 19 nt, Artificial Sequence
  Description of Artificial Sequence: Synthetic oligonucleotide
  Sense strand starting at position 3699 of SEQ ID NO: 913858
ccauucuucuggcugagga

SEQ ID NO: 959599 - RNA, 19 nt, Artificial Sequence
  Description of Artificial Sequence: Synthetic oligonucleotide
  Antisense strand to SEQ ID NO: 959598
uccucagccagaagaaugg

SEQ ID NO: 959600 - RNA, 19 nt, Artificial Sequence
  Description of Artificial Sequence: Synthetic oligonucleotide
  Sense strand starting at position 3357 of SEQ ID NO: 913858
gguugaacaccuuguccaa

SEQ ID NO: 959601 - RNA, 19 nt, Artificial Sequence
  Description of Artificial Sequence: Synthetic oligonucleotide
  Antisense strand to SEQ ID NO: 959600
uuggacaagguguucaacc

SEQ ID NO: 959602 - RNA, 19 nt, Artificial Sequence
  Description of Artificial Sequence: Synthetic oligonucleotide
  Sense strand starting at position 222 of SEQ ID NO: 913858
uugguaagacacuguacuu

SEQ ID NO: 959603 - RNA, 19 nt, Artificial Sequence
  Description of Artificial Sequence: Synthetic oligonucleotide
  Antisense strand to SEQ ID NO: 959602
aaguacagugucuuaccaa

SEQ ID NO: 959604 - RNA, 19 nt, Artificial Sequence
  Description of Artificial Sequence: Synthetic oligonucleotide
  Sense strand starting at position 3468 of SEQ ID NO: 913858
caggcagaguuguuaauga

SEQ ID NO: 959605 - RNA, 19 nt, Artificial Sequence
  Description of Artificial Sequence: Synthetic oligonucleotide
  Antisense strand to SEQ ID NO: 959604
ucauuaacaacucugccug

SEQ ID NO: 959606 - RNA, 19 nt, Artificial Sequence
  Description of Artificial Sequence: Synthetic oligonucleotide
  Sense strand starting at position 313 of SEQ ID NO: 913858
guauuugcuccuugaugcu

SEQ ID NO: 959607 - RNA, 19 nt, Artificial Sequence
  Description of Artificial Sequence: Synthetic oligonucleotide
  Antisense strand to SEQ ID NO: 959606
agcaucaaggagcaaauac

SEQ ID NO: 959608 - RNA, 19 nt, Artificial Sequence
  Description of Artificial Sequence: Synthetic oligonucleotide
  Sense strand starting at position 592 of SEQ ID NO: 913858
agaaauguguccuuacuuc

SEQ ID NO: 959609 - RNA, 19 nt, Artificial Sequence
  Description of Artificial Sequence: Synthetic oligonucleotide
  Antisense strand to SEQ ID NO: 959608
gaaguaaggacacauuucu

SEQ ID NO: 959610 - RNA, 19 nt, Artificial Sequence
  Description of Artificial Sequence: Synthetic oligonucleotide
  Sense strand starting at position 2966 of SEQ ID NO: 913858
agcgcaggacucugggaaa

SEQ ID NO: 959611 - RNA, 19 nt, Artificial Sequence
  Description of Artificial Sequence: Synthetic oligonucleotide
  Antisense strand to SEQ ID NO: 959610
uuucccagaguccugcgcu

SEQ ID NO: 959612 - RNA, 19 nt, Artificial Sequence
  Description of Artificial Sequence: Synthetic oligonucleotide
  Sense strand starting at position 3290 of SEQ ID NO: 913858
agcucaaacuugucuggau

SEQ ID NO: 959613 - RNA, 19 nt, Artificial Sequence
  Description of Artificial Sequence: Synthetic oligonucleotide
  Antisense strand to SEQ ID NO: 959612
auccagacaaguuugagcu

SEQ ID NO: 959614 - RNA, 19 nt, Artificial Sequence
  Description of Artificial Sequence: Synthetic oligonucleotide
  Sense strand starting at position 620 of SEQ ID NO: 913858
auacgaaauuuccaaaguu

SEQ ID NO: 959615 - RNA, 19 nt, Artificial Sequence
  Description of Artificial Sequence: Synthetic oligonucleotide
  Antisense strand to SEQ ID NO: 959614
aacuuuggaaauuucguau

SEQ ID NO: 959616 - RNA, 19 nt, Artificial Sequence
  Description of Artificial Sequence: Synthetic oligonucleotide
  Sense strand starting at position 163 of SEQ ID NO: 913858
ucuuuauacuuggcuggau

SEQ ID NO: 959617 - RNA, 19 nt, Artificial Sequence
  Description of Artificial Sequence: Synthetic oligonucleotide
  Antisense strand to SEQ ID NO: 959616
auccagccaaguauaaaga

SEQ ID NO: 959618 - RNA, 19 nt, Artificial Sequence
  Description of Artificial Sequence: Synthetic oligonucleotide
  Sense strand starting at position 2909 of SEQ ID NO: 913858
aagacugugucauuaucga

SEQ ID NO: 959619 - RNA, 19 nt, Artificial Sequence
  Description of Artificial Sequence: Synthetic oligonucleotide
  Antisense strand to SEQ ID NO: 959618
ucgauaaugacacagucuu

SEQ ID NO: 959620 - RNA, 19 nt, Artificial Sequence
  Description of Artificial Sequence: Synthetic oligonucleotide
  Sense strand starting at position 2904 of SEQ ID NO: 913858
uuccaaagacugugucauu

SEQ ID NO: 959621 - RNA, 19 nt, Artificial Sequence
  Description of Artificial Sequence: Synthetic oligonucleotide
  Antisense strand to SEQ ID NO: 959620
aaugacacagucuuuggaa

SEQ ID NO: 959622 - RNA, 19 nt, Artificial Sequence
  Description of Artificial Sequence: Synthetic oligonucleotide
  Sense strand starting at position 2731 of SEQ ID NO: 913858
gcaggaaauguuugcagac

SEQ ID NO: 959623 - RNA, 19 nt, Artificial Sequence
  Description of Artificial Sequence: Synthetic oligonucleotide
  Antisense strand to SEQ ID NO: 959622
gucugcaaacauuuccugc

SEQ ID NO: 959624 - RNA, 19 nt, Artificial Sequence
  Description of Artificial Sequence: Synthetic oligonucleotide
  Sense strand starting at position 3073 of SEQ ID NO: 913859
gccugcuaucugucaaugu

SEQ ID NO: 959625 - RNA, 19 nt, Artificial Sequence
  Description of Artificial Sequence: Synthetic oligonucleotide
  Antisense strand to SEQ ID NO: 959624
acauugacagauagcaggc

SEQ ID NO: 959626 - RNA, 19 nt, Artificial Sequence
  Description of Artificial Sequence: Synthetic oligonucleotide
  Sense strand starting at position 1800 of SEQ ID NO: 913859
ugugcuguccuugucauua

SEQ ID NO: 959627 - RNA, 19 nt, Artificial Sequence
  Description of Artificial Sequence: Synthetic oligonucleotide
  Antisense strand to SEQ ID NO: 959626
uaaugacaaggacagcaca

SEQ ID NO: 959628 - RNA, 19 nt, Artificial Sequence
  Description of Artificial Sequence: Synthetic oligonucleotide
  Sense strand starting at position 3977 of SEQ ID NO: 913859
cuggguuuccaacaucaca

SEQ ID NO: 959629 - RNA, 19 nt, Artificial Sequence
  Description of Artificial Sequence: Synthetic oligonucleotide
  Antisense strand to SEQ ID NO: 959628
ugugauguuggaaacccag

SEQ ID NO: 959630 - RNA, 19 nt, Artificial Sequence
  Description of Artificial Sequence: Synthetic oligonucleotide
  Sense strand starting at position 1665 of SEQ ID NO: 913859
gaguuuaaggcagauccua

SEQ ID NO: 959631 - RNA, 19 nt, Artificial Sequence
  Description of Artificial Sequence: Synthetic oligonucleotide
  Antisense strand to SEQ ID NO: 959630
uaggaucugccuuaaacuc

SEQ ID NO: 959632 - RNA, 19 nt, Artificial Sequence
  Description of Artificial Sequence: Synthetic oligonucleotide
  Sense strand starting at position 3878 of SEQ ID NO: 913859
uaguguuaagagcauggaa

SEQ ID NO: 959633 - RNA, 19 nt, Artificial Sequence
  Description of Artificial Sequence: Synthetic oligonucleotide
  Antisense strand to SEQ ID NO: 959632
uuccaugcucuuaacacua

SEQ ID NO: 959634 - RNA, 19 nt, Artificial Sequence
  Description of Artificial Sequence: Synthetic oligonucleotide
  Sense strand starting at position 605 of SEQ ID NO: 913859
guaauacugccagaauacu

SEQ ID NO: 959635 - RNA, 19 nt, Artificial Sequence
  Description of Artificial Sequence: Synthetic oligonucleotide
  Antisense strand to SEQ ID NO: 959634
aguauucuggcaguauuac

SEQ ID NO: 959636 - RNA, 19 nt, Artificial Sequence
  Description of Artificial Sequence: Synthetic oligonucleotide
  Sense strand starting at position 2468 of SEQ ID NO: 913859
gguuaaguuaaggaauugu

SEQ ID NO: 959637 - RNA, 19 nt, Artificial Sequence
  Description of Artificial Sequence: Synthetic oligonucleotide
  Antisense strand to SEQ ID NO: 959636
acaauuccuuaacuuaacc

SEQ ID NO: 959638 - RNA, 19 nt, Artificial Sequence
  Description of Artificial Sequence: Synthetic oligonucleotide
  Sense strand starting at position 3803 of SEQ ID NO: 913859
guagcaucaguggagauga

SEQ ID NO: 959639 - RNA, 19 nt, Artificial Sequence
  Description of Artificial Sequence: Synthetic oligonucleotide
  Antisense strand to SEQ ID NO: 959638
ucaucuccacugaugcuac

SEQ ID NO: 959640 - RNA, 19 nt, Artificial Sequence
  Description of Artificial Sequence: Synthetic oligonucleotide
  Sense strand starting at position 2562 of SEQ ID NO: 913859
uuauuaugcagagaaggcu

SEQ ID NO: 959641 - RNA, 19 nt, Artificial Sequence
  Description of Artificial Sequence: Synthetic oligonucleotide
  Antisense strand to SEQ ID NO: 959640
agccuucucugcauaauaa

SEQ ID NO: 959642 - RNA, 19 nt, Artificial Sequence
  Description of Artificial Sequence: Synthetic oligonucleotide
  Sense strand starting at position 3358 of SEQ ID NO: 913859
uggagcaaaucuucccaaa

SEQ ID NO: 959643 - RNA, 19 nt, Artificial Sequence
  Description of Artificial Sequence: Synthetic oligonucleotide
  Antisense strand to SEQ ID NO: 959642
uuugggaagauuugcucca

SEQ ID NO: 959644 - RNA, 19 nt, Artificial Sequence
  Description of Artificial Sequence: Synthetic oligonucleotide
  Sense strand starting at position 1811 of SEQ ID NO: 913859
ugucauuaucuagauccuu

SEQ ID NO: 959645 - RNA, 19 nt, Artificial Sequence
  Description of Artificial Sequence: Synthetic oligonucleotide
  Antisense strand to SEQ ID NO: 959644
aaggaucuagauaaugaca

SEQ ID NO: 959646 - RNA, 19 nt, Artificial Sequence
  Description of Artificial Sequence: Synthetic oligonucleotide
  Sense strand starting at position 3780 of SEQ ID NO: 913859
cuaacacauccuggaaguu

SEQ ID NO: 959647 - RNA, 19 nt, Artificial Sequence
  Description of Artificial Sequence: Synthetic oligonucleotide
  Antisense strand to SEQ ID NO: 959646
aacuuccaggauguguuag

SEQ ID NO: 959648 - RNA, 19 nt, Artificial Sequence
  Description of Artificial Sequence: Synthetic oligonucleotide
  Sense strand starting at position 3697 of SEQ ID NO: 913859
uuaaucugacagugacacu

SEQ ID NO: 959649 - RNA, 19 nt, Artificial Sequence
  Description of Artificial Sequence: Synthetic oligonucleotide
  Antisense strand to SEQ ID NO: 959648
agugucacugucagauuaa

SEQ ID NO: 959650 - RNA, 19 nt, Artificial Sequence
  Description of Artificial Sequence: Synthetic oligonucleotide
  Sense strand starting at position 2459 of SEQ ID NO: 913859
gaaugucuggguuaaguua

SEQ ID NO: 959651 - RNA, 19 nt, Artificial Sequence
  Description of Artificial Sequence: Synthetic oligonucleotide
  Antisense strand to SEQ ID NO: 959650
uaacuuaacccagacauuc

SEQ ID NO: 959652 - RNA, 19 nt, Artificial Sequence
  Description of Artificial Sequence: Synthetic oligonucleotide
  Sense strand starting at position 3117 of SEQ ID NO: 913859
cugugucaaccuuaagauc

SEQ ID NO: 959653 - RNA, 19 nt, Artificial Sequence
  Description of Artificial Sequence: Synthetic oligonucleotide
  Antisense strand to SEQ ID NO: 959652
gaucuuaagguugacacag

SEQ ID NO: 959654 - RNA, 19 nt, Artificial Sequence
  Description of Artificial Sequence: Synthetic oligonucleotide
  Sense strand starting at position 447 of SEQ ID NO: 913859
aguaaagaaauguaucguu

SEQ ID NO: 959655 - RNA, 19 nt, Artificial Sequence
  Description of Artificial Sequence: Synthetic oligonucleotide
  Antisense strand to SEQ ID NO: 959654
aacgauacauuucuuuacu

SEQ ID NO: 959656 - RNA, 19 nt, Artificial Sequence
  Description of Artificial Sequence: Synthetic oligonucleotide
  Sense strand starting at position 2932 of SEQ ID NO: 913859
uuaucagauuuagaaaggu

SEQ ID NO: 959657 - RNA, 19 nt, Artificial Sequence
  Description of Artificial Sequence: Synthetic oligonucleotide
  Antisense strand to SEQ ID NO: 959656
accuuucuaaaucugauaa

SEQ ID NO: 959658 - RNA, 19 nt, Artificial Sequence
  Description of Artificial Sequence: Synthetic oligonucleotide
  Sense strand starting at position 772 of SEQ ID NO: 913859
gggaguucucuccaccagu

SEQ ID NO: 959659 - RNA, 19 nt, Artificial Sequence
  Description of Artificial Sequence: Synthetic oligonucleotide
  Antisense strand to SEQ ID NO: 959658
acugguggagagaacuccc

SEQ ID NO: 959660 - RNA, 19 nt, Artificial Sequence
  Description of Artificial Sequence: Synthetic oligonucleotide
  Sense strand starting at position 778 of SEQ ID NO: 913859
ucucuccaccagugagaua

SEQ ID NO: 959661 - RNA, 19 nt, Artificial Sequence
  Description of Artificial Sequence: Synthetic oligonucleotide
  Antisense strand to SEQ ID NO: 959660
uaucucacugguggagaga

SEQ ID NO: 959662 - RNA, 19 nt, Artificial Sequence
  Description of Artificial Sequence: Synthetic oligonucleotide
  Sense strand starting at position 8 of SEQ ID NO: 913859
agauuagccuuguuaggaa

SEQ ID NO: 959663 - RNA, 19 nt, Artificial Sequence
  Description of Artificial Sequence: Synthetic oligonucleotide
  Antisense strand to SEQ ID NO: 959662
uuccuaacaaggcuaaucu

SEQ ID NO: 959664 - RNA, 19 nt, Artificial Sequence
  Description of Artificial Sequence: Synthetic oligonucleotide
  Sense strand starting at position 3051 of SEQ ID NO: 913859
gccugcuaucaugacagau

SEQ ID NO: 959665 - RNA, 19 nt, Artificial Sequence
  Description of Artificial Sequence: Synthetic oligonucleotide
  Antisense strand to SEQ ID NO: 959664
aucugucaugauagcaggc

SEQ ID NO: 959666 - RNA, 19 nt, Artificial Sequence
  Description of Artificial Sequence: Synthetic oligonucleotide
  Sense strand starting at position 1962 of SEQ ID NO: 913859
cagggagacuccguaucua

SEQ ID NO: 959667 - RNA, 19 nt, Artificial Sequence
  Description of Artificial Sequence: Synthetic oligonucleotide
  Antisense strand to SEQ ID NO: 959666
uagauacggagucucccug

SEQ ID NO: 959668 - RNA, 19 nt, Artificial Sequence
  Description of Artificial Sequence: Synthetic oligonucleotide
  Sense strand starting at position 6 of SEQ ID NO: 913859
aaagauuagccuuguuagg

SEQ ID NO: 959669 - RNA, 19 nt, Artificial Sequence
  Description of Artificial Sequence: Synthetic oligonucleotide
  Antisense strand to SEQ ID NO: 959668
ccuaacaaggcuaaucuuu

SEQ ID NO: 959670 - RNA, 19 nt, Artificial Sequence
  Description of Artificial Sequence: Synthetic oligonucleotide
  Sense strand starting at position 3880 of SEQ ID NO: 913859
guguuaagagcauggaaac

SEQ ID NO: 959671 - RNA, 19 nt, Artificial Sequence
  Description of Artificial Sequence: Synthetic oligonucleotide
  Antisense strand to SEQ ID NO: 959670
guuuccaugcucuuaacac

SEQ ID NO: 959672 - RNA, 19 nt, Artificial Sequence
  Description of Artificial Sequence: Synthetic oligonucleotide
  Sense strand starting at position 651 of SEQ ID NO: 913859
agggcuggacuccgauaua

SEQ ID NO: 959673 - RNA, 19 nt, Artificial Sequence
  Description of Artificial Sequence: Synthetic oligonucleotide
  Antisense strand to SEQ ID NO: 959672
uauaucggaguccagcccu

SEQ ID NO: 959674 - RNA, 19 nt, Artificial Sequence
  Description of Artificial Sequence: Synthetic oligonucleotide
  Sense strand starting at position 2249 of SEQ ID NO: 913859
cuaagaauguguguccaaa

SEQ ID NO: 959675 - RNA, 19 nt, Artificial Sequence
  Description of Artificial Sequence: Synthetic oligonucleotide
  Antisense strand to SEQ ID NO: 959674
uuuggacacacauucuuag

SEQ ID NO: 959676 - RNA, 19 nt, Artificial Sequence
  Description of Artificial Sequence: Synthetic oligonucleotide
  Sense strand starting at position 3412 of SEQ ID NO: 913859
uuucuuaaacaaugugagu

SEQ ID NO: 959677 - RNA, 19 nt, Artificial Sequence
  Description of Artificial Sequence: Synthetic oligonucleotide
  Antisense strand to SEQ ID NO: 959676
acucacauuguuuaagaaa

SEQ ID NO: 959678 - RNA, 19 nt, Artificial Sequence
  Description of Artificial Sequence: Synthetic oligonucleotide
  Sense strand starting at position 426 of SEQ ID NO: 913859
cuccucuuuccucauguga

SEQ ID NO: 959679 - RNA, 19 nt, Artificial Sequence
  Description of Artificial Sequence: Synthetic oligonucleotide
  Antisense strand to SEQ ID NO: 959678
ucacaugaggaaagaggag

SEQ ID NO: 959680 - RNA, 19 nt, Artificial Sequence
  Description of Artificial Sequence: Synthetic oligonucleotide
  Sense strand starting at position 3894 of SEQ ID NO: 913859
gaaacagucugccuggauu

SEQ ID NO: 959681 - RNA, 19 nt, Artificial Sequence
  Description of Artificial Sequence: Synthetic oligonucleotide
  Antisense strand to SEQ ID NO: 959680
aauccaggcagacuguuuc

SEQ ID NO: 959682 - RNA, 19 nt, Artificial Sequence
  Description of Artificial Sequence: Synthetic oligonucleotide
  Sense strand starting at position 2457 of SEQ ID NO: 913859
gggaaugucuggguuaagu

SEQ ID NO: 959683 - RNA, 19 nt, Artificial Sequence
  Description of Artificial Sequence: Synthetic oligonucleotide
  Antisense strand to SEQ ID NO: 959682
acuuaacccagacauuccc

SEQ ID NO: 959684 - RNA, 19 nt, Artificial Sequence
  Description of Artificial Sequence: Synthetic oligonucleotide
  Sense strand starting at position 3385 of SEQ ID NO: 913859
acaucaaucuguguaucca

SEQ ID NO: 959685 - RNA, 19 nt, Artificial Sequence
  Description of Artificial Sequence: Synthetic oligonucleotide
  Antisense strand to SEQ ID NO: 959684
uggauacacagauugaugu

SEQ ID NO: 959686 - RNA, 19 nt, Artificial Sequence
  Description of Artificial Sequence: Synthetic oligonucleotide
  Sense strand starting at position 654 of SEQ ID NO: 913859
gcuggacuccgauauagca

SEQ ID NO: 959687 - RNA, 19 nt, Artificial Sequence
  Description of Artificial Sequence: Synthetic oligonucleotide
  Antisense strand to SEQ ID NO: 959686
ugcuauaucggaguccagc

SEQ ID NO: 959688 - RNA, 19 nt, Artificial Sequence
  Description of Artificial Sequence: Synthetic oligonucleotide
  Sense strand starting at position 3466 of SEQ ID NO: 913859
ccaugauuguuacucuuau

SEQ ID NO: 959689 - RNA, 19 nt, Artificial Sequence
  Description of Artificial Sequence: Synthetic oligonucleotide
  Antisense strand to SEQ ID NO: 959688
auaagaguaacaaucaugg

SEQ ID NO: 959690 - RNA, 19 nt, Artificial Sequence
  Description of Artificial Sequence: Synthetic oligonucleotide
  Sense strand starting at position 1808 of SEQ ID NO: 913859
ccuugucauuaucuagauc

SEQ ID NO: 959691 - RNA, 19 nt, Artificial Sequence
  Description of Artificial Sequence: Synthetic oligonucleotide
  Antisense strand to SEQ ID NO: 959690
gaucuagauaaugacaagg

SEQ ID NO: 959692 - RNA, 19 nt, Artificial Sequence
  Description of Artificial Sequence: Synthetic oligonucleotide
  Sense strand starting at position 3973 of SEQ ID NO: 913859
gggucuggguuuccaacau

SEQ ID NO: 959693 - RNA, 19 nt, Artificial Sequence
  Description of Artificial Sequence: Synthetic oligonucleotide
  Antisense strand to SEQ ID NO: 959692
auguuggaaacccagaccc

SEQ ID NO: 959694 - RNA, 19 nt, Artificial Sequence
  Description of Artificial Sequence: Synthetic oligonucleotide
  Sense strand starting at position 2951 of SEQ ID NO: 913859
aucagacucuuaguuaguu

SEQ ID NO: 959695 - RNA, 19 nt, Artificial Sequence
  Description of Artificial Sequence: Synthetic oligonucleotide
  Antisense strand to SEQ ID NO: 959694
aacuaacuaagagucugau

SEQ ID NO: 959696 - RNA, 19 nt, Artificial Sequence
  Description of Artificial Sequence: Synthetic oligonucleotide
  Sense strand starting at position 1740 of SEQ ID NO: 913859
ccaauaacucugugcuaga

SEQ ID NO: 959697 - RNA, 19 nt, Artificial Sequence
  Description of Artificial Sequence: Synthetic oligonucleotide
  Antisense strand to SEQ ID NO: 959696
ucuagcacagaguuauugg

SEQ ID NO: 959698 - RNA, 19 nt, Artificial Sequence
  Description of Artificial Sequence: Synthetic oligonucleotide
  Sense strand starting at position 469 of SEQ ID NO: 913859
auaugaaggguucguuuag

SEQ ID NO: 959699 - RNA, 19 nt, Artificial Sequence
  Description of Artificial Sequence: Synthetic oligonucleotide
  Antisense strand to SEQ ID NO: 959698
cuaaacgaacccuucauau

SEQ ID NO: 959700 - RNA, 19 nt, Artificial Sequence
  Description of Artificial Sequence: Synthetic oligonucleotide
  Sense strand starting at position 1366 of SEQ ID NO: 913859
uuggcuguuaccuaggcaa

SEQ ID NO: 959701 - RNA, 19 nt, Artificial Sequence
  Description of Artificial Sequence: Synthetic oligonucleotide
  Antisense strand to SEQ ID NO: 959700
uugccuagguaacagccaa

SEQ ID NO: 959702 - RNA, 19 nt, Artificial Sequence
  Description of Artificial Sequence: Synthetic oligonucleotide
  Sense strand starting at position 3487 of SEQ ID NO: 913859
ccuuuauaauuagcugagu

SEQ ID NO: 959703 - RNA, 19 nt, Artificial Sequence
  Description of Artificial Sequence: Synthetic oligonucleotide
  Antisense strand to SEQ ID NO: 959702
acucagcuaauuauaaagg

SEQ ID NO: 959704 - RNA, 19 nt, Artificial Sequence
  Description of Artificial Sequence: Synthetic oligonucleotide
  Sense strand starting at position 3642 of SEQ ID NO: 913860
gccugcuaucugucaaugu

SEQ ID NO: 959705 - RNA, 19 nt, Artificial Sequence
  Description of Artificial Sequence: Synthetic oligonucleotide
  Antisense strand to SEQ ID NO: 959704
acauugacagauagcaggc

SEQ ID NO: 959706 - RNA, 19 nt, Artificial Sequence
  Description of Artificial Sequence: Synthetic oligonucleotide
  Sense strand starting at position 2369 of SEQ ID NO: 913860
ugugcuguccuugucauua

SEQ ID NO: 959707 - RNA, 19 nt, Artificial Sequence
  Description of Artificial Sequence: Synthetic oligonucleotide
  Antisense strand to SEQ ID NO: 959706
uaaugacaaggacagcaca

SEQ ID NO: 959708 - RNA, 19 nt, Artificial Sequence
  Description of Artificial Sequence: Synthetic oligonucleotide
  Sense strand starting at position 2234 of SEQ ID NO: 913860
gaguuuaaggcagauccua

SEQ ID NO: 959709 - RNA, 19 nt, Artificial Sequence
  Description of Artificial Sequence: Synthetic oligonucleotide
  Antisense strand to SEQ ID NO: 959708
uaggaucugccuuaaacuc

SEQ ID NO: 959710 - RNA, 19 nt, Artificial Sequence
  Description of Artificial Sequence: Synthetic oligonucleotide
  Sense strand starting at position 1174 of SEQ ID NO: 913860
guaauacugccagaauacu

SEQ ID NO: 959711 - RNA, 19 nt, Artificial Sequence
  Description of Artificial Sequence: Synthetic oligonucleotide
  Antisense strand to SEQ ID NO: 959710
aguauucuggcaguauuac

SEQ ID NO: 959712 - RNA, 19 nt, Artificial Sequence
  Description of Artificial Sequence: Synthetic oligonucleotide
  Sense strand starting at position 3037 of SEQ ID NO: 913860
gguuaaguuaaggaauugu

SEQ ID NO: 959713 - RNA, 19 nt, Artificial Sequence
  Description of Artificial Sequence: Synthetic oligonucleotide
  Antisense strand to SEQ ID NO: 959712
acaauuccuuaacuuaacc

SEQ ID NO: 959714 - RNA, 19 nt, Artificial Sequence
  Description of Artificial Sequence: Synthetic oligonucleotide
  Sense strand starting at position 3131 of SEQ ID NO: 913860
uuauuaugcagagaaggcu

SEQ ID NO: 959715 - RNA, 19 nt, Artificial Sequence
  Description of Artificial Sequence: Synthetic oligonucleotide
  Antisense strand to SEQ ID NO: 959714
agccuucucugcauaauaa

SEQ ID NO: 959716 - RNA, 19 nt, Artificial Sequence
  Description of Artificial Sequence: Synthetic oligonucleotide
  Sense strand starting at position 3927 of SEQ ID NO: 913860
uggagcaaaucuucccaaa

SEQ ID NO: 959717 - RNA, 19 nt, Artificial Sequence
  Description of Artificial Sequence: Synthetic oligonucleotide
  Antisense strand to SEQ ID NO: 959716
uuugggaagauuugcucca

SEQ ID NO: 959718 - RNA, 19 nt, Artificial Sequence
  Description of Artificial Sequence: Synthetic oligonucleotide
  Sense strand starting at position 2380 of SEQ ID NO: 913860
ugucauuaucuagauccuu

SEQ ID NO: 959719 - RNA, 19 nt, Artificial Sequence
  Description of Artificial Sequence: Synthetic oligonucleotide
  Antisense strand to SEQ ID NO: 959718
aaggaucuagauaaugaca

SEQ ID NO: 959720 - RNA, 19 nt, Artificial Sequence
  Description of Artificial Sequence: Synthetic oligonucleotide
  Sense strand starting at position 3028 of SEQ ID NO: 913860
gaaugucuggguuaaguua

SEQ ID NO: 959721 - RNA, 19 nt, Artificial Sequence
  Description of Artificial Sequence: Synthetic oligonucleotide
  Antisense strand to SEQ ID NO: 959720
uaacuuaacccagacauuc

SEQ ID NO: 959722 - RNA, 19 nt, Artificial Sequence
  Description of Artificial Sequence: Synthetic oligonucleotide
  Sense strand starting at position 3686 of SEQ ID NO: 913860
cugugucaaccuuaagauc

SEQ ID NO: 959723 - RNA, 19 nt, Artificial Sequence
  Description of Artificial Sequence: Synthetic oligonucleotide
  Antisense strand to SEQ ID NO: 959722
gaucuuaagguugacacag

SEQ ID NO: 959724 - RNA, 19 nt, Artificial Sequence
  Description of Artificial Sequence: Synthetic oligonucleotide
  Sense strand starting at position 1016 of SEQ ID NO: 913860
aguaaagaaauguaucguu

SEQ ID NO: 959725 - RNA, 19 nt, Artificial Sequence
  Description of Artificial Sequence: Synthetic oligonucleotide
  Antisense strand to SEQ ID NO: 959724
aacgauacauuucuuuacu

SEQ ID NO: 959726 - RNA, 19 nt, Artificial Sequence
  Description of Artificial Sequence: Synthetic oligonucleotide
  Sense strand starting at position 3501 of SEQ ID NO: 913860
uuaucagauuuagaaaggu

SEQ ID NO: 959727 - RNA, 19 nt, Artificial Sequence
  Description of Artificial Sequence: Synthetic oligonucleotide
  Antisense strand to SEQ ID NO: 959726
accuuucuaaaucugauaa

SEQ ID NO: 959728 - RNA, 19 nt, Artificial Sequence
  Description of Artificial Sequence: Synthetic oligonucleotide
  Sense strand starting at position 1341 of SEQ ID NO: 913860
gggaguucucuccaccagu

SEQ ID NO: 959729 - RNA, 19 nt, Artificial Sequence
  Description of Artificial Sequence: Synthetic oligonucleotide
  Antisense strand to SEQ ID NO: 959728
acugguggagagaacuccc

SEQ ID NO: 959730 - RNA, 19 nt, Artificial Sequence
  Description of Artificial Sequence: Synthetic oligonucleotide
  Sense strand starting at position 1347 of SEQ ID NO: 913860
ucucuccaccagugagaua

SEQ ID NO: 959731 - RNA, 19 nt, Artificial Sequence
  Description of Artificial Sequence: Synthetic oligonucleotide
  Antisense strand to SEQ ID NO: 959730
uaucucacugguggagaga

SEQ ID NO: 959732 - RNA, 19 nt, Artificial Sequence
  Description of Artificial Sequence: Synthetic oligonucleotide
  Sense strand starting at position 577 of SEQ ID NO: 913860
agauuagccuuguuaggaa

SEQ ID NO: 959733 - RNA, 19 nt, Artificial Sequence
  Description of Artificial Sequence: Synthetic oligonucleotide
  Antisense strand to SEQ ID NO: 959732
uuccuaacaaggcuaaucu

SEQ ID NO: 959734 - RNA, 19 nt, Artificial Sequence
  Description of Artificial Sequence: Synthetic oligonucleotide
  Sense strand starting at position 3620 of SEQ ID NO: 913860
gccugcuaucaugacagau

SEQ ID NO: 959735 - RNA, 19 nt, Artificial Sequence
  Description of Artificial Sequence: Synthetic oligonucleotide
  Antisense strand to SEQ ID NO: 959734
aucugucaugauagcaggc

SEQ ID NO: 959736 - RNA, 19 nt, Artificial Sequence
  Description of Artificial Sequence: Synthetic oligonucleotide
  Sense strand starting at position 2531 of SEQ ID NO: 913860
cagggagacuccguaucua

SEQ ID NO: 959737 - RNA, 19 nt, Artificial Sequence
  Description of Artificial Sequence: Synthetic oligonucleotide
  Antisense strand to SEQ ID NO: 959736
uagauacggagucucccug

SEQ ID NO: 959738 - RNA, 19 nt, Artificial Sequence
  Description of Artificial Sequence: Synthetic oligonucleotide
  Sense strand starting at position 483 of SEQ ID NO: 913860
acaauagucuugucaaauu

SEQ ID NO: 959739 - RNA, 19 nt, Artificial Sequence
  Description of Artificial Sequence: Synthetic oligonucleotide
  Antisense strand to SEQ ID NO: 959738
aauuugacaagacuauugu

SEQ ID NO: 959740 - RNA, 19 nt, Artificial Sequence
  Description of Artificial Sequence: Synthetic oligonucleotide
  Sense strand starting at position 575 of SEQ ID NO: 913860
aaagauuagccuuguuagg

SEQ ID NO: 959741 - RNA, 19 nt, Artificial Sequence
  Description of Artificial Sequence: Synthetic oligonucleotide
  Antisense strand to SEQ ID NO: 959740
ccuaacaaggcuaaucuuu

SEQ ID NO: 959742 - RNA, 19 nt, Artificial Sequence
  Description of Artificial Sequence: Synthetic oligonucleotide
  Sense strand starting at position 13 of SEQ ID NO: 913860
uguccaauuuaagaggauu

SEQ ID NO: 959743 - RNA, 19 nt, Artificial Sequence
  Description of Artificial Sequence: Synthetic oligonucleotide
  Antisense strand to SEQ ID NO: 959742
aauccucuuaaauuggaca

SEQ ID NO: 959744 - RNA, 19 nt, Artificial Sequence
  Description of Artificial Sequence: Synthetic oligonucleotide
  Sense strand starting at position 1220 of SEQ ID NO: 913860
agggcuggacuccgauaua

SEQ ID NO: 959745 - RNA, 19 nt, Artificial Sequence
  Description of Artificial Sequence: Synthetic oligonucleotide
  Antisense strand to SEQ ID NO: 959744
uauaucggaguccagcccu

SEQ ID NO: 959746 - RNA, 19 nt, Artificial Sequence
  Description of Artificial Sequence: Synthetic oligonucleotide
  Sense strand starting at position 2818 of SEQ ID NO: 913860
cuaagaauguguguccaaa

SEQ ID NO: 959747 - RNA, 19 nt, Artificial Sequence
  Description of Artificial Sequence: Synthetic oligonucleotide
  Antisense strand to SEQ ID NO: 959746
uuuggacacacauucuuag

SEQ ID NO: 959748 - RNA, 19 nt, Artificial Sequence
  Description of Artificial Sequence: Synthetic oligonucleotide
  Sense strand starting at position 3981 of SEQ ID NO: 913860
uuucuuaaacaaugugagu

SEQ ID NO: 959749 - RNA, 19 nt, Artificial Sequence
  Description of Artificial Sequence: Synthetic oligonucleotide
  Antisense strand to SEQ ID NO: 959748
acucacauuguuuaagaaa

SEQ ID NO: 959750 - RNA, 19 nt, Artificial Sequence
  Description of Artificial Sequence: Synthetic oligonucleotide
  Sense strand starting at position 995 of SEQ ID NO: 913860
cuccucuuuccucauguga

SEQ ID NO: 959751 - RNA, 19 nt, Artificial Sequence
  Description of Artificial Sequence: Synthetic oligonucleotide
  Antisense strand to SEQ ID NO: 959750
ucacaugaggaaagaggag

SEQ ID NO: 959752 - RNA, 19 nt, Artificial Sequence
  Description of Artificial Sequence: Synthetic oligonucleotide
  Sense strand starting at position 3026 of SEQ ID NO: 913860
gggaaugucuggguuaagu

SEQ ID NO: 959753 - RNA, 19 nt, Artificial Sequence
  Description of Artificial Sequence: Synthetic oligonucleotide
  Antisense strand to SEQ ID NO: 959752
acuuaacccagacauuccc

SEQ ID NO: 959754 - RNA, 19 nt, Artificial Sequence
  Description of Artificial Sequence: Synthetic oligonucleotide
  Sense strand starting at position 3954 of SEQ ID NO: 913860
acaucaaucuguguaucca

SEQ ID NO: 959755 - RNA, 19 nt, Artificial Sequence
  Description of Artificial Sequence: Synthetic oligonucleotide
  Antisense strand to SEQ ID NO: 959754
uggauacacagauugaugu

SEQ ID NO: 959756 - RNA, 19 nt, Artificial Sequence
  Description of Artificial Sequence: Synthetic oligonucleotide
  Sense strand starting at position 1223 of SEQ ID NO: 913860
gcuggacuccgauauagca

SEQ ID NO: 959757 - RNA, 19 nt, Artificial Sequence
  Description of Artificial Sequence: Synthetic oligonucleotide
  Antisense strand to SEQ ID NO: 959756
ugcuauaucggaguccagc

SEQ ID NO: 959758 - RNA, 19 nt, Artificial Sequence
  Description of Artificial Sequence: Synthetic oligonucleotide
  Sense strand starting at position 2377 of SEQ ID NO: 913860
ccuugucauuaucuagauc

SEQ ID NO: 959759 - RNA, 19 nt, Artificial Sequence
  Description of Artificial Sequence: Synthetic oligonucleotide
  Antisense strand to SEQ ID NO: 959758
gaucuagauaaugacaagg

SEQ ID NO: 959760 - RNA, 19 nt, Artificial Sequence
  Description of Artificial Sequence: Synthetic oligonucleotide
  Sense strand starting at position 2 of SEQ ID NO: 913860
acaguaaacuguguccaau

SEQ ID NO: 959761 - RNA, 19 nt, Artificial Sequence
  Description of Artificial Sequence: Synthetic oligonucleotide
  Antisense strand to SEQ ID NO: 959760
auuggacacaguuuacugu

SEQ ID NO: 959762 - RNA, 19 nt, Artificial Sequence
  Description of Artificial Sequence: Synthetic oligonucleotide
  Sense strand starting at position 3520 of SEQ ID NO: 913860
aucagacucuuaguuaguu

SEQ ID NO: 959763 - RNA, 19 nt, Artificial Sequence
  Description of Artificial Sequence: Synthetic oligonucleotide
  Antisense strand to SEQ ID NO: 959762
aacuaacuaagagucugau

SEQ ID NO: 959764 - RNA, 19 nt, Artificial Sequence
  Description of Artificial Sequence: Synthetic oligonucleotide
  Sense strand starting at position 2309 of SEQ ID NO: 913860
ccaauaacucugugcuaga

SEQ ID NO: 959765 - RNA, 19 nt, Artificial Sequence
  Description of Artificial Sequence: Synthetic oligonucleotide
  Antisense strand to SEQ ID NO: 959764
ucuagcacagaguuauugg

SEQ ID NO: 959766 - RNA, 19 nt, Artificial Sequence
  Description of Artificial Sequence: Synthetic oligonucleotide
  Sense strand starting at position 1038 of SEQ ID NO: 913860
auaugaaggguucguuuag

SEQ ID NO: 959767 - RNA, 19 nt, Artificial Sequence
  Description of Artificial Sequence: Synthetic oligonucleotide
  Antisense strand to SEQ ID NO: 959766
cuaaacgaacccuucauau

SEQ ID NO: 959768 - RNA, 19 nt, Artificial Sequence
  Description of Artificial Sequence: Synthetic oligonucleotide
  Sense strand starting at position 1935 of SEQ ID NO: 913860
uuggcuguuaccuaggcaa

SEQ ID NO: 959769 - RNA, 19 nt, Artificial Sequence
  Description of Artificial Sequence: Synthetic oligonucleotide
  Antisense strand to SEQ ID NO: 959768
uugccuagguaacagccaa

SEQ ID NO: 959770 - RNA, 19 nt, Artificial Sequence
  Description of Artificial Sequence: Synthetic oligonucleotide
  Sense strand starting at position 2941 of SEQ ID NO: 913860
uggcaaguuccaggaugua

SEQ ID NO: 959771 - RNA, 19 nt, Artificial Sequence
  Description of Artificial Sequence: Synthetic oligonucleotide
  Antisense strand to SEQ ID NO: 959770
uacauccuggaacuugcca

SEQ ID NO: 959772 - RNA, 19 nt, Artificial Sequence
  Description of Artificial Sequence: Synthetic oligonucleotide
  Sense strand starting at position 2029 of SEQ ID NO: 913860
ccgggcugacuaugugaaa

SEQ ID NO: 959773 - RNA, 19 nt, Artificial Sequence
  Description of Artificial Sequence: Synthetic oligonucleotide
  Antisense strand to SEQ ID NO: 959772
uuucacauagucagcccgg

SEQ ID NO: 959774 - RNA, 19 nt, Artificial Sequence
  Description of Artificial Sequence: Synthetic oligonucleotide
  Sense strand starting at position 2266 of SEQ ID NO: 913860
agaggcagcuuuguaaauu

SEQ ID NO: 959775 - RNA, 19 nt, Artificial Sequence
  Description of Artificial Sequence: Synthetic oligonucleotide
  Antisense strand to SEQ ID NO: 959774
aauuuacaaagcugccucu

SEQ ID NO: 959776 - RNA, 19 nt, Artificial Sequence
  Description of Artificial Sequence: Synthetic oligonucleotide
  Sense strand starting at position 3716 of SEQ ID NO: 913860
guuaaaugcugguccugaa

SEQ ID NO: 959777 - RNA, 19 nt, Artificial Sequence
  Description of Artificial Sequence: Synthetic oligonucleotide
  Antisense strand to SEQ ID NO: 959776
uucaggaccagcauuuaac

SEQ ID NO: 959778 - RNA, 19 nt, Artificial Sequence
  Description of Artificial Sequence: Synthetic oligonucleotide
  Sense strand starting at position 2912 of SEQ ID NO: 913860
uggcuuggucccgaaagug

SEQ ID NO: 959779 - RNA, 19 nt, Artificial Sequence
  Description of Artificial Sequence: Synthetic oligonucleotide
  Antisense strand to SEQ ID NO: 959778
cacuuucgggaccaagcca

SEQ ID NO: 959780 - RNA, 19 nt, Artificial Sequence
  Description of Artificial Sequence: Synthetic oligonucleotide
  Sense strand starting at position 2319 of SEQ ID NO: 913860
ugugcuagacauugugaua

SEQ ID NO: 959781 - RNA, 19 nt, Artificial Sequence
  Description of Artificial Sequence: Synthetic oligonucleotide
  Antisense strand to SEQ ID NO: 959780
uaucacaaugucuagcaca

SEQ ID NO: 959782 - RNA, 19 nt, Artificial Sequence
  Description of Artificial Sequence: Synthetic oligonucleotide
  Sense strand starting at position 3651 of SEQ ID NO: 913860
cugucaauguugguaucau

SEQ ID NO: 959783 - RNA, 19 nt, Artificial Sequence
  Description of Artificial Sequence: Synthetic oligonucleotide
  Antisense strand to SEQ ID NO: 959782
augauaccaacauugacag

SEQ ID NO: 959784 - RNA, 19 nt, Artificial Sequence
  Description of Artificial Sequence: Synthetic oligonucleotide
  Sense strand starting at position 3107 of SEQ ID NO: 913861
gucucugauguauaggaga

SEQ ID NO: 959785 - RNA, 19 nt, Artificial Sequence
  Description of Artificial Sequence: Synthetic oligonucleotide
  Antisense strand to SEQ ID NO: 959784
ucuccuauacaucagagac

SEQ ID NO: 959786 - RNA, 19 nt, Artificial Sequence
  Description of Artificial Sequence: Synthetic oligonucleotide
  Sense strand starting at position 1318 of SEQ ID NO: 913861
ugaguaucugcucaaagaa

SEQ ID NO: 959787 - RNA, 19 nt, Artificial Sequence
  Description of Artificial Sequence: Synthetic oligonucleotide
  Antisense strand to SEQ ID NO: 959786
uucuuugagcagauacuca

SEQ ID NO: 959788 - RNA, 19 nt, Artificial Sequence
  Description of Artificial Sequence: Synthetic oligonucleotide
  Sense strand starting at position 3296 of SEQ ID NO: 913861
ccuggcauacuguaaagaa

SEQ ID NO: 959789 - RNA, 19 nt, Artificial Sequence
  Description of Artificial Sequence: Synthetic oligonucleotide
  Antisense strand to SEQ ID NO: 959788
uucuuuacaguaugccagg

SEQ ID NO: 959790 - RNA, 19 nt, Artificial Sequence
  Description of Artificial Sequence: Synthetic oligonucleotide
  Sense strand starting at position 3973 of SEQ ID NO: 913861
gaucuugguggugagauua

SEQ ID NO: 959791 - RNA, 19 nt, Artificial Sequence
  Description of Artificial Sequence: Synthetic oligonucleotide
  Antisense strand to SEQ ID NO: 959790
uaaucucaccaccaagauc

SEQ ID NO: 959792 - RNA, 19 nt, Artificial Sequence
  Description of Artificial Sequence: Synthetic oligonucleotide
  Sense strand starting at position 3109 of SEQ ID NO: 913861
cucugauguauaggagaau

SEQ ID NO: 959793 - RNA, 19 nt, Artificial Sequence
  Description of Artificial Sequence: Synthetic oligonucleotide
  Antisense strand to SEQ ID NO: 959792
auucuccuauacaucagag

SEQ ID NO: 959794 - RNA, 19 nt, Artificial Sequence
  Description of Artificial Sequence: Synthetic oligonucleotide
  Sense strand starting at position 1408 of SEQ ID NO: 913861
gguuauugaccagauagca

SEQ ID NO: 959795 - RNA, 19 nt, Artificial Sequence
  Description of Artificial Sequence: Synthetic oligonucleotide
  Antisense strand to SEQ ID NO: 959794
ugcuaucuggucaauaacc

SEQ ID NO: 959796 - RNA, 19 nt, Artificial Sequence
  Description of Artificial Sequence: Synthetic oligonucleotide
  Sense strand starting at position 1844 of SEQ ID NO: 913861
cagagucaucguuaagaag

SEQ ID NO: 959797 - RNA, 19 nt, Artificial Sequence
  Description of Artificial Sequence: Synthetic oligonucleotide
  Antisense strand to SEQ ID NO: 959796
cuucuuaacgaugacucug

SEQ ID NO: 959798 - RNA, 19 nt, Artificial Sequence
  Description of Artificial Sequence: Synthetic oligonucleotide
  Sense strand starting at position 1405 of SEQ ID NO: 913861
ucagguuauugaccagaua

SEQ ID NO: 959799 - RNA, 19 nt, Artificial Sequence
  Description of Artificial Sequence: Synthetic oligonucleotide
  Antisense strand to SEQ ID NO: 959798
uaucuggucaauaaccuga

SEQ ID NO: 959800 - RNA, 19 nt, Artificial Sequence
  Description of Artificial Sequence: Synthetic oligonucleotide
  Sense strand starting at position 3251 of SEQ ID NO: 913861
cugaauuaagcauggacau

SEQ ID NO: 959801 - RNA, 19 nt, Artificial Sequence
  Description of Artificial Sequence: Synthetic oligonucleotide
  Antisense strand to SEQ ID NO: 959800
auguccaugcuuaauucag

SEQ ID NO: 959802 - RNA, 19 nt, Artificial Sequence
  Description of Artificial Sequence: Synthetic oligonucleotide
  Sense strand starting at position 3252 of SEQ ID NO: 913861
ugaauuaagcauggacauc

SEQ ID NO: 959803 - RNA, 19 nt, Artificial Sequence
  Description of Artificial Sequence: Synthetic oligonucleotide
  Antisense strand to SEQ ID NO: 959802
gauguccaugcuuaauuca

SEQ ID NO: 959804 - RNA, 19 nt, Artificial Sequence
  Description of Artificial Sequence: Synthetic oligonucleotide
  Sense strand starting at position 20 of SEQ ID NO: 913861
aagggaacauuacugugua

SEQ ID NO: 959805 - RNA, 19 nt, Artificial Sequence
  Description of Artificial Sequence: Synthetic oligonucleotide
  Antisense strand to SEQ ID NO: 959804
uacacaguaauguucccuu

SEQ ID NO: 959806 - RNA, 19 nt, Artificial Sequence
  Description of Artificial Sequence: Synthetic oligonucleotide
  Sense strand starting at position 3011 of SEQ ID NO: 913861
aaauuaugugaaggagcca

SEQ ID NO: 959807 - RNA, 19 nt, Artificial Sequence
  Description of Artificial Sequence: Synthetic oligonucleotide
  Antisense strand to SEQ ID NO: 959806
uggcuccuucacauaauuu

SEQ ID NO: 959808 - RNA, 19 nt, Artificial Sequence
  Description of Artificial Sequence: Synthetic oligonucleotide
  Sense strand starting at position 533 of SEQ ID NO: 913861
guaauaaaguuucccagaa

SEQ ID NO: 959809 - RNA, 19 nt, Artificial Sequence
  Description of Artificial Sequence: Synthetic oligonucleotide
  Antisense strand to SEQ ID NO: 959808
uucugggaaacuuuauuac

SEQ ID NO: 959810 - RNA, 19 nt, Artificial Sequence
  Description of Artificial Sequence: Synthetic oligonucleotide
  Sense strand starting at position 656 of SEQ ID NO: 913861
augcgaccuccacauaaca

SEQ ID NO: 959811 - RNA, 19 nt, Artificial Sequence
  Description of Artificial Sequence: Synthetic oligonucleotide
  Antisense strand to SEQ ID NO: 959810
uguuauguggaggucgcau

SEQ ID NO: 959812 - RNA, 19 nt, Artificial Sequence
  Description of Artificial Sequence: Synthetic oligonucleotide
  Sense strand starting at position 2932 of SEQ ID NO: 913861
agucuucuccugggaagag

SEQ ID NO: 959813 - RNA, 19 nt, Artificial Sequence
  Description of Artificial Sequence: Synthetic oligonucleotide
  Antisense strand to SEQ ID NO: 959812
cucuucccaggagaagacu

SEQ ID NO: 959814 - RNA, 19 nt, Artificial Sequence
  Description of Artificial Sequence: Synthetic oligonucleotide
  Sense strand starting at position 3970 of SEQ ID NO: 913861
acagaucuugguggugaga

SEQ ID NO: 959815 - RNA, 19 nt, Artificial Sequence
  Description of Artificial Sequence: Synthetic oligonucleotide
  Antisense strand to SEQ ID NO: 959814
ucucaccaccaagaucugu

SEQ ID NO: 959816 - RNA, 19 nt, Artificial Sequence
  Description of Artificial Sequence: Synthetic oligonucleotide
  Sense strand starting at position 1772 of SEQ ID NO: 913861
ggcaguguacaccaauuaa

SEQ ID NO: 959817 - RNA, 19 nt, Artificial Sequence
  Description of Artificial Sequence: Synthetic oligonucleotide
  Antisense strand to SEQ ID NO: 959816
uuaauugguguacacugcc

SEQ ID NO: 959818 - RNA, 19 nt, Artificial Sequence
  Description of Artificial Sequence: Synthetic oligonucleotide
  Sense strand starting at position 2931 of SEQ ID NO: 913861
cagucuucuccugggaaga

SEQ ID NO: 959819 - RNA, 19 nt, Artificial Sequence
  Description of Artificial Sequence: Synthetic oligonucleotide
  Antisense strand to SEQ ID NO: 959818
ucuucccaggagaagacug

SEQ ID NO: 959820 - RNA, 19 nt, Artificial Sequence
  Description of Artificial Sequence: Synthetic oligonucleotide
  Sense strand starting at position 367 of SEQ ID NO: 913861
guugaauucccugaugcag

SEQ ID NO: 959821 - RNA, 19 nt, Artificial Sequence
  Description of Artificial Sequence: Synthetic oligonucleotide
  Antisense strand to SEQ ID NO: 959820
cugcaucagggaauucaac

SEQ ID NO: 959822 - RNA, 19 nt, Artificial Sequence
  Description of Artificial Sequence: Synthetic oligonucleotide
  Sense strand starting at position 1317 of SEQ ID NO: 913861
augaguaucugcucaaaga

SEQ ID NO: 959823 - RNA, 19 nt, Artificial Sequence
  Description of Artificial Sequence: Synthetic oligonucleotide
  Antisense strand to SEQ ID NO: 959822
ucuuugagcagauacucau

SEQ ID NO: 959824 - RNA, 19 nt, Artificial Sequence
  Description of Artificial Sequence: Synthetic oligonucleotide
  Sense strand starting at position 3736 of SEQ ID NO: 913861
gcagacuugccauaucaua

SEQ ID NO: 959825 - RNA, 19 nt, Artificial Sequence
  Description of Artificial Sequence: Synthetic oligonucleotide
  Antisense strand to SEQ ID NO: 959824
uaugauauggcaagucugc

SEQ ID NO: 959826 - RNA, 19 nt, Artificial Sequence
  Description of Artificial Sequence: Synthetic oligonucleotide
  Sense strand starting at position 2008 of SEQ ID NO: 913861
ugauguaaucucugacauu

SEQ ID NO: 959827 - RNA, 19 nt, Artificial Sequence
  Description of Artificial Sequence: Synthetic oligonucleotide
  Antisense strand to SEQ ID NO: 959826
aaugucagagauuacauca

SEQ ID NO: 959828 - RNA, 19 nt, Artificial Sequence
  Description of Artificial Sequence: Synthetic oligonucleotide
  Sense strand starting at position 2653 of SEQ ID NO: 913861
gcuuguucugugucgguga

SEQ ID NO: 959829 - RNA, 19 nt, Artificial Sequence
  Description of Artificial Sequence: Synthetic oligonucleotide
  Antisense strand to SEQ ID NO: 959828
ucaccgacacagaacaagc

SEQ ID NO: 959830 - RNA, 19 nt, Artificial Sequence
  Description of Artificial Sequence: Synthetic oligonucleotide
  Sense strand starting at position 2299 of SEQ ID NO: 913861
ggauauagccacugagcaa

SEQ ID NO: 959831 - RNA, 19 nt, Artificial Sequence
  Description of Artificial Sequence: Synthetic oligonucleotide
  Antisense strand to SEQ ID NO: 959830
uugcucaguggcuauaucc

SEQ ID NO: 959832 - RNA, 19 nt, Artificial Sequence
  Description of Artificial Sequence: Synthetic oligonucleotide
  Sense strand starting at position 3126 of SEQ ID NO: 913861
auggguaaccuggguuuga

SEQ ID NO: 959833 - RNA, 19 nt, Artificial Sequence
  Description of Artificial Sequence: Synthetic oligonucleotide
  Antisense strand to SEQ ID NO: 959832
ucaaacccagguuacccau

SEQ ID NO: 959834 - RNA, 19 nt, Artificial Sequence
  Description of Artificial Sequence: Synthetic oligonucleotide
  Sense strand starting at position 893 of SEQ ID NO: 913861
cucagugugguagaguaga

SEQ ID NO: 959835 - RNA, 19 nt, Artificial Sequence
  Description of Artificial Sequence: Synthetic oligonucleotide
  Antisense strand to SEQ ID NO: 959834
ucuacucuaccacacugag

SEQ ID NO: 959836 - RNA, 19 nt, Artificial Sequence
  Description of Artificial Sequence: Synthetic oligonucleotide
  Sense strand starting at position 1936 of SEQ ID NO: 913861
agaaccugcuguuuaugaa

SEQ ID NO: 959837 - RNA, 19 nt, Artificial Sequence
  Description of Artificial Sequence: Synthetic oligonucleotide
  Antisense strand to SEQ ID NO: 959836
uucauaaacagcagguucu

SEQ ID NO: 959838 - RNA, 19 nt, Artificial Sequence
  Description of Artificial Sequence: Synthetic oligonucleotide
  Sense strand starting at position 2268 of SEQ ID NO: 913861
acguacucacucugagaca

SEQ ID NO: 959839 - RNA, 19 nt, Artificial Sequence
  Description of Artificial Sequence: Synthetic oligonucleotide
  Antisense strand to SEQ ID NO: 959838
ugucucagagugaguacgu

SEQ ID NO: 959840 - RNA, 19 nt, Artificial Sequence
  Description of Artificial Sequence: Synthetic oligonucleotide
  Sense strand starting at position 2186 of SEQ ID NO: 913861
ugggaauguucucuuccua

SEQ ID NO: 959841 - RNA, 19 nt, Artificial Sequence
  Description of Artificial Sequence: Synthetic oligonucleotide
  Antisense strand to SEQ ID NO: 959840
uaggaagagaacauuccca

SEQ ID NO: 959842 - RNA, 19 nt, Artificial Sequence
  Description of Artificial Sequence: Synthetic oligonucleotide
  Sense strand starting at position 3156 of SEQ ID NO: 913861
accaguuccuaguuauaug

SEQ ID NO: 959843 - RNA, 19 nt, Artificial Sequence
  Description of Artificial Sequence: Synthetic oligonucleotide
  Antisense strand to SEQ ID NO: 959842
cauauaacuaggaacuggu

SEQ ID NO: 959844 - RNA, 19 nt, Artificial Sequence
  Description of Artificial Sequence: Synthetic oligonucleotide
  Sense strand starting at position 3315 of SEQ ID NO: 913861
ccaagaaaugaccgcucuu

SEQ ID NO: 959845 - RNA, 19 nt, Artificial Sequence
  Description of Artificial Sequence: Synthetic oligonucleotide
  Antisense strand to SEQ ID NO: 959844
aagagcggucauuucuugg

SEQ ID NO: 959846 - RNA, 19 nt, Artificial Sequence
  Description of Artificial Sequence: Synthetic oligonucleotide
  Sense strand starting at position 888 of SEQ ID NO: 913861
uuagacucagugugguaga

SEQ ID NO: 959847 - RNA, 19 nt, Artificial Sequence
  Description of Artificial Sequence: Synthetic oligonucleotide
  Antisense strand to SEQ ID NO: 959846
ucuaccacacugagucuaa

SEQ ID NO: 959848 - RNA, 19 nt, Artificial Sequence
  Description of Artificial Sequence: Synthetic oligonucleotide
  Sense strand starting at position 3100 of SEQ ID NO: 913861
cacacuggucucugaugua

SEQ ID NO: 959849 - RNA, 19 nt, Artificial Sequence
  Description of Artificial Sequence: Synthetic oligonucleotide
  Antisense strand to SEQ ID NO: 959848
uacaucagagaccagugug

SEQ ID NO: 959850 - RNA, 19 nt, Artificial Sequence
  Description of Artificial Sequence: Synthetic oligonucleotide
  Sense strand starting at position 366 of SEQ ID NO: 913861
gguugaauucccugaugca

SEQ ID NO: 959851 - RNA, 19 nt, Artificial Sequence
  Description of Artificial Sequence: Synthetic oligonucleotide
  Antisense strand to SEQ ID NO: 959850
ugcaucagggaauucaacc

SEQ ID NO: 959852 - RNA, 19 nt, Artificial Sequence
  Description of Artificial Sequence: Synthetic oligonucleotide
  Sense strand starting at position 2993 of SEQ ID NO: 913861
ugaaacuugugcuuaucca

SEQ ID NO: 959853 - RNA, 19 nt, Artificial Sequence
  Description of Artificial Sequence: Synthetic oligonucleotide
  Antisense strand to SEQ ID NO: 959852
uggauaagcacaaguuuca

SEQ ID NO: 959854 - RNA, 19 nt, Artificial Sequence
  Description of Artificial Sequence: Synthetic oligonucleotide
  Sense strand starting at position 2134 of SEQ ID NO: 913861
ucagcaaccuuggcugaua

SEQ ID NO: 959855 - RNA, 19 nt, Artificial Sequence
  Description of Artificial Sequence: Synthetic oligonucleotide
  Antisense strand to SEQ ID NO: 959854
uaucagccaagguugcuga

SEQ ID NO: 959856 - RNA, 19 nt, Artificial Sequence
  Description of Artificial Sequence: Synthetic oligonucleotide
  Sense strand starting at position 777 of SEQ ID NO: 913861
acauuccugugucugacua

SEQ ID NO: 959857 - RNA, 19 nt, Artificial Sequence
  Description of Artificial Sequence: Synthetic oligonucleotide
  Antisense strand to SEQ ID NO: 959856
uagucagacacaggaaugu

SEQ ID NO: 959858 - RNA, 19 nt, Artificial Sequence
  Description of Artificial Sequence: Synthetic oligonucleotide
  Sense strand starting at position 2612 of SEQ ID NO: 913861
ggaucuguguuacuccuca

SEQ ID NO: 959859 - RNA, 19 nt, Artificial Sequence
  Description of Artificial Sequence: Synthetic oligonucleotide
  Antisense strand to SEQ ID NO: 959858
ugaggaguaacacagaucc

SEQ ID NO: 959860 - RNA, 19 nt, Artificial Sequence
  Description of Artificial Sequence: Synthetic oligonucleotide
  Sense strand starting at position 1313 of SEQ ID NO: 913861
gguaaugaguaucugcuca

SEQ ID NO: 959861 - RNA, 19 nt, Artificial Sequence
  Description of Artificial Sequence: Synthetic oligonucleotide
  Antisense strand to SEQ ID NO: 959860
ugagcagauacucauuacc

SEQ ID NO: 959862 - RNA, 19 nt, Artificial Sequence
  Description of Artificial Sequence: Synthetic oligonucleotide
  Sense strand starting at position 1582 of SEQ ID NO: 913861
ugugguagguacucuaauu

SEQ ID NO: 959863 - RNA, 19 nt, Artificial Sequence
  Description of Artificial Sequence: Synthetic oligonucleotide
  Antisense strand to SEQ ID NO: 959862
aauuagaguaccuaccaca

SEQ ID NO: 959864 - RNA, 19 nt, Artificial Sequence
  Description of Artificial Sequence: Synthetic oligonucleotide
  Sense strand starting at position 106 of SEQ ID NO: 913862
ugagacaugcuauaaguau

SEQ ID NO: 959865 - RNA, 19 nt, Artificial Sequence
  Description of Artificial Sequence: Synthetic oligonucleotide
  Antisense strand to SEQ ID NO: 959864
auacuuauagcaugucuca

SEQ ID NO: 959866 - RNA, 19 nt, Artificial Sequence
  Description of Artificial Sequence: Synthetic oligonucleotide
  Sense strand starting at position 1228 of SEQ ID NO: 913862
gcuuaugcggcaguuugaa

SEQ ID NO: 959867 - RNA, 19 nt, Artificial Sequence
  Description of Artificial Sequence: Synthetic oligonucleotide
  Antisense strand to SEQ ID NO: 959866
uucaaacugccgcauaagc

SEQ ID NO: 959868 - RNA, 19 nt, Artificial Sequence
  Description of Artificial Sequence: Synthetic oligonucleotide
  Sense strand starting at position 1453 of SEQ ID NO: 913862
acagaaauagugugaauug

SEQ ID NO: 959869 - RNA, 19 nt, Artificial Sequence
  Description of Artificial Sequence: Synthetic oligonucleotide
  Antisense strand to SEQ ID NO: 959868
caauucacacuauuucugu

SEQ ID NO: 959870 - RNA, 19 nt, Artificial Sequence
  Description of Artificial Sequence: Synthetic oligonucleotide
  Sense strand starting at position 99 of SEQ ID NO: 913862
ugugaauugagacaugcua

SEQ ID NO: 959871 - RNA, 19 nt, Artificial Sequence
  Description of Artificial Sequence: Synthetic oligonucleotide
  Antisense strand to SEQ ID NO: 959870
uagcaugucucaauucaca

SEQ ID NO: 959872 - RNA, 19 nt, Artificial Sequence
  Description of Artificial Sequence: Synthetic oligonucleotide
  Sense strand starting at position 3125 of SEQ ID NO: 913862
uggaauucuuucuuagaau

SEQ ID NO: 959873 - RNA, 19 nt, Artificial Sequence
  Description of Artificial Sequence: Synthetic oligonucleotide
  Antisense strand to SEQ ID NO: 959872
auucuaagaaagaauucca

SEQ ID NO: 959874 - RNA, 19 nt, Artificial Sequence
  Description of Artificial Sequence: Synthetic oligonucleotide
  Sense strand starting at position 69 of SEQ ID NO: 913862
guaaccauuguacacuuaa

SEQ ID NO: 959875 - RNA, 19 nt, Artificial Sequence
  Description of Artificial Sequence: Synthetic oligonucleotide
  Antisense strand to SEQ ID NO: 959874
uuaaguguacaaugguuac

SEQ ID NO: 959876 - RNA, 19 nt, Artificial Sequence
  Description of Artificial Sequence: Synthetic oligonucleotide
  Sense strand starting at position 178 of SEQ ID NO: 913862
uuccaaaucgauuaaaugu

SEQ ID NO: 959877 - RNA, 19 nt, Artificial Sequence
  Description of Artificial Sequence: Synthetic oligonucleotide
  Antisense strand to SEQ ID NO: 959876
acauuuaaucgauuuggaa

SEQ ID NO: 959878 - RNA, 19 nt, Artificial Sequence
  Description of Artificial Sequence: Synthetic oligonucleotide
  Sense strand starting at position 3277 of SEQ ID NO: 913862
uagaguguggaauauguua

SEQ ID NO: 959879 - RNA, 19 nt, Artificial Sequence
  Description of Artificial Sequence: Synthetic oligonucleotide
  Antisense strand to SEQ ID NO: 959878
uaacauauuccacacucua

SEQ ID NO: 959880 - RNA, 19 nt, Artificial Sequence
  Description of Artificial Sequence: Synthetic oligonucleotide
  Sense strand starting at position 3425 of SEQ ID NO: 913862
agaaaugugauguaguucu

SEQ ID NO: 959881 - RNA, 19 nt, Artificial Sequence
  Description of Artificial Sequence: Synthetic oligonucleotide
  Antisense strand to SEQ ID NO: 959880
agaacuacaucacauuucu

SEQ ID NO: 959882 - RNA, 19 nt, Artificial Sequence
  Description of Artificial Sequence: Synthetic oligonucleotide
  Sense strand starting at position 785 of SEQ ID NO: 913862
aaagcuagugagugagaga

SEQ ID NO: 959883 - RNA, 19 nt, Artificial Sequence
  Description of Artificial Sequence: Synthetic oligonucleotide
  Antisense strand to SEQ ID NO: 959882
ucucucacucacuagcuuu

SEQ ID NO: 959884 - RNA, 19 nt, Artificial Sequence
  Description of Artificial Sequence: Synthetic oligonucleotide
  Sense strand starting at position 1238 of SEQ ID NO: 913862
caguuugaauagucuagaa

SEQ ID NO: 959885 - RNA, 19 nt, Artificial Sequence
  Description of Artificial Sequence: Synthetic oligonucleotide
  Antisense strand to SEQ ID NO: 959884
uucuagacuauucaaacug

SEQ ID NO: 959886 - RNA, 19 nt, Artificial Sequence
  Description of Artificial Sequence: Synthetic oligonucleotide
  Sense strand starting at position 3124 of SEQ ID NO: 913862
guggaauucuuucuuagaa

SEQ ID NO: 959887 - RNA, 19 nt, Artificial Sequence
  Description of Artificial Sequence: Synthetic oligonucleotide
  Antisense strand to SEQ ID NO: 959886
uucuaagaaagaauuccac

SEQ ID NO: 959888 - RNA, 19 nt, Artificial Sequence
  Description of Artificial Sequence: Synthetic oligonucleotide
  Sense strand starting at position 1172 of SEQ ID NO: 913862
guuccuaaugaguaaucuc

SEQ ID NO: 959889 - RNA, 19 nt, Artificial Sequence
  Description of Artificial Sequence: Synthetic oligonucleotide
  Antisense strand to SEQ ID NO: 959888
gagauuacucauuaggaac

SEQ ID NO: 959890 - RNA, 19 nt, Artificial Sequence
  Description of Artificial Sequence: Synthetic oligonucleotide
  Sense strand starting at position 1281 of SEQ ID NO: 913862
caaucaagugucugaauga

SEQ ID NO: 959891 - RNA, 19 nt, Artificial Sequence
  Description of Artificial Sequence: Synthetic oligonucleotide
  Antisense strand to SEQ ID NO: 959890
ucauucagacacuugauug

SEQ ID NO: 959892 - RNA, 19 nt, Artificial Sequence
  Description of Artificial Sequence: Synthetic oligonucleotide
  Sense strand starting at position 924 of SEQ ID NO: 913862
cacaucagugcauagagua

SEQ ID NO: 959893 - RNA, 19 nt, Artificial Sequence
  Description of Artificial Sequence: Synthetic oligonucleotide
  Antisense strand to SEQ ID NO: 959892
uacucuaugcacugaugug

SEQ ID NO: 959894 - RNA, 19 nt, Artificial Sequence
  Description of Artificial Sequence: Synthetic oligonucleotide
  Sense strand starting at position 1363 of SEQ ID NO: 913862
gaugauacccucggaccua

SEQ ID NO: 959895 - RNA, 19 nt, Artificial Sequence
  Description of Artificial Sequence: Synthetic oligonucleotide
  Antisense strand to SEQ ID NO: 959894
uagguccgaggguaucauc

SEQ ID NO: 959896 - RNA, 19 nt, Artificial Sequence
  Description of Artificial Sequence: Synthetic oligonucleotide
  Sense strand starting at position 3113 of SEQ ID NO: 913862
uuuaaaggcaaguggaauu

SEQ ID NO: 959897 - RNA, 19 nt, Artificial Sequence
  Description of Artificial Sequence: Synthetic oligonucleotide
  Antisense strand to SEQ ID NO: 959896
aauuccacuugccuuuaaa

SEQ ID NO: 959898 - RNA, 19 nt, Artificial Sequence
  Description of Artificial Sequence: Synthetic oligonucleotide
  Sense strand starting at position 666 of SEQ ID NO: 913862
acauauuguuacucauuga

SEQ ID NO: 959899 - RNA, 19 nt, Artificial Sequence
  Description of Artificial Sequence: Synthetic oligonucleotide
  Antisense strand to SEQ ID NO: 959898
ucaaugaguaacaauaugu

SEQ ID NO: 959900 - RNA, 19 nt, Artificial Sequence
  Description of Artificial Sequence: Synthetic oligonucleotide
  Sense strand starting at position 2633 of SEQ ID NO: 913862
cuagaacguucucuagaaa

SEQ ID NO: 959901 - RNA, 19 nt, Artificial Sequence
  Description of Artificial Sequence: Synthetic oligonucleotide
  Antisense strand to SEQ ID NO: 959900
uuucuagagaacguucuag

SEQ ID NO: 959902 - RNA, 19 nt, Artificial Sequence
  Description of Artificial Sequence: Synthetic oligonucleotide
  Sense strand starting at position 3284 of SEQ ID NO: 913862
uggaauauguuaguaauuc

SEQ ID NO: 959903 - RNA, 19 nt, Artificial Sequence
  Description of Artificial Sequence: Synthetic oligonucleotide
  Antisense strand to SEQ ID NO: 959902
gaauuacuaacauauucca

SEQ ID NO: 959904 - RNA, 19 nt, Artificial Sequence
  Description of Artificial Sequence: Synthetic oligonucleotide
  Sense strand starting at position 3262 of SEQ ID NO: 913862
uggccaaaccguuacuaga

SEQ ID NO: 959905 - RNA, 19 nt, Artificial Sequence
  Description of Artificial Sequence: Synthetic oligonucleotide
  Antisense strand to SEQ ID NO: 959904
ucuaguaacgguuuggcca

SEQ ID NO: 959906 - RNA, 19 nt, Artificial Sequence
  Description of Artificial Sequence: Synthetic oligonucleotide
  Sense strand starting at position 3272 of SEQ ID NO: 913862
guuacuagaguguggaaua

SEQ ID NO: 959907 - RNA, 19 nt, Artificial Sequence
  Description of Artificial Sequence: Synthetic oligonucleotide
  Antisense strand to SEQ ID NO: 959906
uauuccacacucuaguaac

SEQ ID NO: 959908 - RNA, 19 nt, Artificial Sequence
  Description of Artificial Sequence: Synthetic oligonucleotide
  Sense strand starting at position 213 of SEQ ID NO: 913862
cgaguuacugggugaaaua

SEQ ID NO: 959909 - RNA, 19 nt, Artificial Sequence
  Description of Artificial Sequence: Synthetic oligonucleotide
  Antisense strand to SEQ ID NO: 959908
uauuucacccaguaacucg

SEQ ID NO: 959910 - RNA, 19 nt, Artificial Sequence
  Description of Artificial Sequence: Synthetic oligonucleotide
  Sense strand starting at position 212 of SEQ ID NO: 913862
ccgaguuacugggugaaau

SEQ ID NO: 959911 - RNA, 19 nt, Artificial Sequence
  Description of Artificial Sequence: Synthetic oligonucleotide
  Antisense strand to SEQ ID NO: 959910
auuucacccaguaacucgg

SEQ ID NO: 959912 - RNA, 19 nt, Artificial Sequence
  Description of Artificial Sequence: Synthetic oligonucleotide
  Sense strand starting at position 65 of SEQ ID NO: 913862
ucauguaaccauuguacac

SEQ ID NO: 959913 - RNA, 19 nt, Artificial Sequence
  Description of Artificial Sequence: Synthetic oligonucleotide
  Antisense strand to SEQ ID NO: 959912
guguacaaugguuacauga

SEQ ID NO: 959914 - RNA, 19 nt, Artificial Sequence
  Description of Artificial Sequence: Synthetic oligonucleotide
  Sense strand starting at position 1171 of SEQ ID NO: 913862
uguuccuaaugaguaaucu

SEQ ID NO: 959915 - RNA, 19 nt, Artificial Sequence
  Description of Artificial Sequence: Synthetic oligonucleotide
  Antisense strand to SEQ ID NO: 959914
agauuacucauuaggaaca

SEQ ID NO: 959916 - RNA, 19 nt, Artificial Sequence
  Description of Artificial Sequence: Synthetic oligonucleotide
  Sense strand starting at position 939 of SEQ ID NO: 913862
aguagaucguaggcacaaa

SEQ ID NO: 959917 - RNA, 19 nt, Artificial Sequence
  Description of Artificial Sequence: Synthetic oligonucleotide
  Antisense strand to SEQ ID NO: 959916
uuugugccuacgaucuacu

SEQ ID NO: 959918 - RNA, 19 nt, Artificial Sequence
  Description of Artificial Sequence: Synthetic oligonucleotide
  Sense strand starting at position 640 of SEQ ID NO: 913862
gggucauacucuguucuaa

SEQ ID NO: 959919 - RNA, 19 nt, Artificial Sequence
  Description of Artificial Sequence: Synthetic oligonucleotide
  Antisense strand to SEQ ID NO: 959918
uuagaacagaguaugaccc

SEQ ID NO: 959920 - RNA, 19 nt, Artificial Sequence
  Description of Artificial Sequence: Synthetic oligonucleotide
  Sense strand starting at position 642 of SEQ ID NO: 913862
gucauacucuguucuaaac

SEQ ID NO: 959921 - RNA, 19 nt, Artificial Sequence
  Description of Artificial Sequence: Synthetic oligonucleotide
  Antisense strand to SEQ ID NO: 959920
guuuagaacagaguaugac

SEQ ID NO: 959922 - RNA, 19 nt, Artificial Sequence
  Description of Artificial Sequence: Synthetic oligonucleotide
  Sense strand starting at position 112 of SEQ ID NO: 913862
augcuauaaguaugcaaua

SEQ ID NO: 959923 - RNA, 19 nt, Artificial Sequence
  Description of Artificial Sequence: Synthetic oligonucleotide
  Antisense strand to SEQ ID NO: 959922
uauugcauacuuauagcau

SEQ ID NO: 959924 - RNA, 19 nt, Artificial Sequence
  Description of Artificial Sequence: Synthetic oligonucleotide
  Sense strand starting at position 2632 of SEQ ID NO: 913862
gcuagaacguucucuagaa

SEQ ID NO: 959925 - RNA, 19 nt, Artificial Sequence
  Description of Artificial Sequence: Synthetic oligonucleotide
  Antisense strand to SEQ ID NO: 959924
uucuagagaacguucuagc

SEQ ID NO: 959926 - RNA, 19 nt, Artificial Sequence
  Description of Artificial Sequence: Synthetic oligonucleotide
  Sense strand starting at position 3251 of SEQ ID NO: 913862
uaacgauuagcuggccaaa

SEQ ID NO: 959927 - RNA, 19 nt, Artificial Sequence
  Description of Artificial Sequence: Synthetic oligonucleotide
  Antisense strand to SEQ ID NO: 959926
uuuggccagcuaaucguua

SEQ ID NO: 959928 - RNA, 19 nt, Artificial Sequence
  Description of Artificial Sequence: Synthetic oligonucleotide
  Sense strand starting at position 210 of SEQ ID NO: 913862
uuccgaguuacugggugaa

SEQ ID NO: 959929 - RNA, 19 nt, Artificial Sequence
  Description of Artificial Sequence: Synthetic oligonucleotide
  Antisense strand to SEQ ID NO: 959928
uucacccaguaacucggaa

SEQ ID NO: 959930 - RNA, 19 nt, Artificial Sequence
  Description of Artificial Sequence: Synthetic oligonucleotide
  Sense strand starting at position 3436 of SEQ ID NO: 913862
guaguucucuuacugauug

SEQ ID NO: 959931 - RNA, 19 nt, Artificial Sequence
  Description of Artificial Sequence: Synthetic oligonucleotide
  Antisense strand to SEQ ID NO: 959930
caaucaguaagagaacuac

SEQ ID NO: 959932 - RNA, 19 nt, Artificial Sequence
  Description of Artificial Sequence: Synthetic oligonucleotide
  Sense strand starting at position 3279 of SEQ ID NO: 913862
gaguguggaauauguuagu

SEQ ID NO: 959933 - RNA, 19 nt, Artificial Sequence
  Description of Artificial Sequence: Synthetic oligonucleotide
  Antisense strand to SEQ ID NO: 959932
acuaacauauuccacacuc

SEQ ID NO: 959934 - RNA, 19 nt, Artificial Sequence
  Description of Artificial Sequence: Synthetic oligonucleotide
  Sense strand starting at position 202 of SEQ ID NO: 913862
gauaauauuuccgaguuac

SEQ ID NO: 959935 - RNA, 19 nt, Artificial Sequence
  Description of Artificial Sequence: Synthetic oligonucleotide
  Antisense strand to SEQ ID NO: 959934
guaacucggaaauauuauc

SEQ ID NO: 959936 - RNA, 19 nt, Artificial Sequence
  Description of Artificial Sequence: Synthetic oligonucleotide
  Sense strand starting at position 639 of SEQ ID NO: 913862
ugggucauacucuguucua

SEQ ID NO: 959937 - RNA, 19 nt, Artificial Sequence
  Description of Artificial Sequence: Synthetic oligonucleotide
  Antisense strand to SEQ ID NO: 959936
uagaacagaguaugaccca

SEQ ID NO: 959938 - RNA, 19 nt, Artificial Sequence
  Description of Artificial Sequence: Synthetic oligonucleotide
  Sense strand starting at position 2608 of SEQ ID NO: 913862
aggagaaaguucuagaaac

SEQ ID NO: 959939 - RNA, 19 nt, Artificial Sequence
  Description of Artificial Sequence: Synthetic oligonucleotide
  Antisense strand to SEQ ID NO: 959938
guuucuagaacuuucuccu

SEQ ID NO: 959940 - RNA, 19 nt, Artificial Sequence
  Description of Artificial Sequence: Synthetic oligonucleotide
  Sense strand starting at position 3270 of SEQ ID NO: 913862
ccguuacuagaguguggaa

SEQ ID NO: 959941 - RNA, 19 nt, Artificial Sequence
  Description of Artificial Sequence: Synthetic oligonucleotide
  Antisense strand to SEQ ID NO: 959940
uuccacacucuaguaacgg

SEQ ID NO: 959942 - RNA, 19 nt, Artificial Sequence
  Description of Artificial Sequence: Synthetic oligonucleotide
  Sense strand starting at position 3567 of SEQ ID NO: 913862
aaaugaugguuauagaaca

SEQ ID NO: 959943 - RNA, 19 nt, Artificial Sequence
  Description of Artificial Sequence: Synthetic oligonucleotide
  Antisense strand to SEQ ID NO: 959942
uguucuauaaccaucauuu

SEQ ID NO: 959944 - RNA, 19 nt, Artificial Sequence
  Description of Artificial Sequence: Synthetic oligonucleotide
  Sense strand starting at position 3936 of SEQ ID NO: 913863
cagguaacccuuugagaaa

SEQ ID NO: 959945 - RNA, 19 nt, Artificial Sequence
  Description of Artificial Sequence: Synthetic oligonucleotide
  Antisense strand to SEQ ID NO: 959944
uuucucaaaggguuaccug

SEQ ID NO: 959946 - RNA, 19 nt, Artificial Sequence
  Description of Artificial Sequence: Synthetic oligonucleotide
  Sense strand starting at position 582 of SEQ ID NO: 913863
caggacuuggucugagaau

SEQ ID NO: 959947 - RNA, 19 nt, Artificial Sequence
  Description of Artificial Sequence: Synthetic oligonucleotide
  Antisense strand to SEQ ID NO: 959946
auucucagaccaaguccug

SEQ ID NO: 959948 - RNA, 19 nt, Artificial Sequence
  Description of Artificial Sequence: Synthetic oligonucleotide
  Sense strand starting at position 621 of SEQ ID NO: 913863
gggucaggccuagauuaau

SEQ ID NO: 959949 - RNA, 19 nt, Artificial Sequence
  Description of Artificial Sequence: Synthetic oligonucleotide
  Antisense strand to SEQ ID NO: 959948
auuaaucuaggccugaccc

SEQ ID NO: 959950 - RNA, 19 nt, Artificial Sequence
  Description of Artificial Sequence: Synthetic oligonucleotide
  Sense strand starting at position 676 of SEQ ID NO: 913863
auauguucugcgucuaguu

SEQ ID NO: 959951 - RNA, 19 nt, Artificial Sequence
  Description of Artificial Sequence: Synthetic oligonucleotide
  Antisense strand to SEQ ID NO: 959950
aacuagacgcagaacauau

SEQ ID NO: 959952 - RNA, 19 nt, Artificial Sequence
  Description of Artificial Sequence: Synthetic oligonucleotide
  Sense strand starting at position 545 of SEQ ID NO: 913863
ggagauguauagcuaagac

SEQ ID NO: 959953 - RNA, 19 nt, Artificial Sequence
  Description of Artificial Sequence: Synthetic oligonucleotide
  Antisense strand to SEQ ID NO: 959952
gucuuagcuauacaucucc

SEQ ID NO: 959954 - RNA, 19 nt, Artificial Sequence
  Description of Artificial Sequence: Synthetic oligonucleotide
  Sense strand starting at position 180 of SEQ ID NO: 913863
gauaucugccuccaggauu

SEQ ID NO: 959955 - RNA, 19 nt, Artificial Sequence
  Description of Artificial Sequence: Synthetic oligonucleotide
  Antisense strand to SEQ ID NO: 959954
aauccuggaggcagauauc

SEQ ID NO: 959956 - RNA, 19 nt, Artificial Sequence
  Description of Artificial Sequence: Synthetic oligonucleotide
  Sense strand starting at position 1978 of SEQ ID NO: 913863
ggacuaaaccucgaggcuu

SEQ ID NO: 959957 - RNA, 19 nt, Artificial Sequence
  Description of Artificial Sequence: Synthetic oligonucleotide
  Antisense strand to SEQ ID NO: 959956
aagccucgagguuuagucc

SEQ ID NO: 959958 - RNA, 19 nt, Artificial Sequence
  Description of Artificial Sequence: Synthetic oligonucleotide
  Sense strand starting at position 759 of SEQ ID NO: 913863
ugugaccuuggauaaguuu

SEQ ID NO: 959959 - RNA, 19 nt, Artificial Sequence
  Description of Artificial Sequence: Synthetic oligonucleotide
  Antisense strand to SEQ ID NO: 959958
aaacuuauccaaggucaca

SEQ ID NO: 959960 - RNA, 19 nt, Artificial Sequence
  Description of Artificial Sequence: Synthetic oligonucleotide
  Sense strand starting at position 762 of SEQ ID NO: 913863
gaccuuggauaaguuuauu

SEQ ID NO: 959961 - RNA, 19 nt, Artificial Sequence
  Description of Artificial Sequence: Synthetic oligonucleotide
  Antisense strand to SEQ ID NO: 959960
aauaaacuuauccaagguc

SEQ ID NO: 959962 - RNA, 19 nt, Artificial Sequence
  Description of Artificial Sequence: Synthetic oligonucleotide
  Sense strand starting at position 677 of SEQ ID NO: 913863
uauguucugcgucuaguuu

SEQ ID NO: 959963 - RNA, 19 nt, Artificial Sequence
  Description of Artificial Sequence: Synthetic oligonucleotide
  Antisense strand to SEQ ID NO: 959962
aaacuagacgcagaacaua

SEQ ID NO: 959964 - RNA, 19 nt, Artificial Sequence
  Description of Artificial Sequence: Synthetic oligonucleotide
  Sense strand starting at position 1162 of SEQ ID NO: 913863
ccaccuuuaccggaguaac

SEQ ID NO: 959965 - RNA, 19 nt, Artificial Sequence
  Description of Artificial Sequence: Synthetic oligonucleotide
  Antisense strand to SEQ ID NO: 959964
guuacuccgguaaaggugg

SEQ ID NO: 959966 - RNA, 19 nt, Artificial Sequence
  Description of Artificial Sequence: Synthetic oligonucleotide
  Sense strand starting at position 165 of SEQ ID NO: 913863
gccuauacagaaggugaua

SEQ ID NO: 959967 - RNA, 19 nt, Artificial Sequence
  Description of Artificial Sequence: Synthetic oligonucleotide
  Antisense strand to SEQ ID NO: 959966
uaucaccuucuguauaggc

SEQ ID NO: 959968 - RNA, 19 nt, Artificial Sequence
  Description of Artificial Sequence: Synthetic oligonucleotide
  Sense strand starting at position 627 of SEQ ID NO: 913863
ggccuagauuaaucacuug

SEQ ID NO: 959969 - RNA, 19 nt, Artificial Sequence
  Description of Artificial Sequence: Synthetic oligonucleotide
  Antisense strand to SEQ ID NO: 959968
caagugauuaaucuaggcc

SEQ ID NO: 959970 - RNA, 19 nt, Artificial Sequence
  Description of Artificial Sequence: Synthetic oligonucleotide
  Sense strand starting at position 1165 of SEQ ID NO: 913863
ccuuuaccggaguaacagu

SEQ ID NO: 959971 - RNA, 19 nt, Artificial Sequence
  Description of Artificial Sequence: Synthetic oligonucleotide
  Antisense strand to SEQ ID NO: 959970
acuguuacuccgguaaagg

SEQ ID NO: 959972 - RNA, 19 nt, Artificial Sequence
  Description of Artificial Sequence: Synthetic oligonucleotide
  Sense strand starting at position 662 of SEQ ID NO: 913863
accugacaguuguuauaug

SEQ ID NO: 959973 - RNA, 19 nt, Artificial Sequence
  Description of Artificial Sequence: Synthetic oligonucleotide
  Antisense strand to SEQ ID NO: 959972
cauauaacaacugucaggu

SEQ ID NO: 959974 - RNA, 19 nt, Artificial Sequence
  Description of Artificial Sequence: Synthetic oligonucleotide
  Sense strand starting at position 1102 of SEQ ID NO: 913863
ugucaacuugcccauugau

SEQ ID NO: 959975 - RNA, 19 nt, Artificial Sequence
  Description of Artificial Sequence: Synthetic oligonucleotide
  Antisense strand to SEQ ID NO: 959974
aucaaugggcaaguugaca

SEQ ID NO: 959976 - RNA, 19 nt, Artificial Sequence
  Description of Artificial Sequence: Synthetic oligonucleotide
  Sense strand starting at position 998 of SEQ ID NO: 913863
agggaugccacuugcauaa

SEQ ID NO: 959977 - RNA, 19 nt, Artificial Sequence
  Description of Artificial Sequence: Synthetic oligonucleotide
  Antisense strand to SEQ ID NO: 959976
uuaugcaaguggcaucccu

SEQ ID NO: 959978 - RNA, 19 nt, Artificial Sequence
  Description of Artificial Sequence: Synthetic oligonucleotide
  Sense strand starting at position 712 of SEQ ID NO: 913863
gaggcuugugcuuaacaua

SEQ ID NO: 959979 - RNA, 19 nt, Artificial Sequence
  Description of Artificial Sequence: Synthetic oligonucleotide
  Antisense strand to SEQ ID NO: 959978
uauguuaagcacaagccuc

SEQ ID NO: 959980 - RNA, 19 nt, Artificial Sequence
  Description of Artificial Sequence: Synthetic oligonucleotide
  Sense strand starting at position 1091 of SEQ ID NO: 913863
agcagaaccucugucaacu

SEQ ID NO: 959981 - RNA, 19 nt, Artificial Sequence
  Description of Artificial Sequence: Synthetic oligonucleotide
  Antisense strand to SEQ ID NO: 959980
aguugacagagguucugcu

SEQ ID NO: 959982 - RNA, 19 nt, Artificial Sequence
  Description of Artificial Sequence: Synthetic oligonucleotide
  Sense strand starting at position 565 of SEQ ID NO: 913863
agagaaagcuugucagcca

SEQ ID NO: 959983 - RNA, 19 nt, Artificial Sequence
  Description of Artificial Sequence: Synthetic oligonucleotide
  Antisense strand to SEQ ID NO: 959982
uggcugacaagcuuucucu

SEQ ID NO: 959984 - RNA, 19 nt, Artificial Sequence
  Description of Artificial Sequence: Synthetic oligonucleotide
  Sense strand starting at position 568 of SEQ ID NO: 913863
gaaagcuugucagccagga

SEQ ID NO: 959985 - RNA, 19 nt, Artificial Sequence
  Description of Artificial Sequence: Synthetic oligonucleotide
  Antisense strand to SEQ ID NO: 959984
uccuggcugacaagcuuuc

SEQ ID NO: 959986 - RNA, 19 nt, Artificial Sequence
  Description of Artificial Sequence: Synthetic oligonucleotide
  Sense strand starting at position 639 of SEQ ID NO: 913863
ucacuuggccuuugauacu

SEQ ID NO: 959987 - RNA, 19 nt, Artificial Sequence
  Description of Artificial Sequence: Synthetic oligonucleotide
  Antisense strand to SEQ ID NO: 959986
aguaucaaaggccaaguga

SEQ ID NO: 959988 - RNA, 19 nt, Artificial Sequence
  Description of Artificial Sequence: Synthetic oligonucleotide
  Sense strand starting at position 851 of SEQ ID NO: 913863
cucagugguuguuccaaua

SEQ ID NO: 959989 - RNA, 19 nt, Artificial Sequence
  Description of Artificial Sequence: Synthetic oligonucleotide
  Antisense strand to SEQ ID NO: 959988
uauuggaacaaccacugag

SEQ ID NO: 959990 - RNA, 19 nt, Artificial Sequence
  Description of Artificial Sequence: Synthetic oligonucleotide
  Sense strand starting at position 1404 of SEQ ID NO: 913863
ucgagaucuccucgaccga

SEQ ID NO: 959991 - RNA, 19 nt, Artificial Sequence
  Description of Artificial Sequence: Synthetic oligonucleotide
  Antisense strand to SEQ ID NO: 959990
ucggucgaggagaucucga

SEQ ID NO: 959992 - RNA, 19 nt, Artificial Sequence
  Description of Artificial Sequence: Synthetic oligonucleotide
  Sense strand starting at position 1573 of SEQ ID NO: 913863
acgguauucggccacuacu

SEQ ID NO: 959993 - RNA, 19 nt, Artificial Sequence
  Description of Artificial Sequence: Synthetic oligonucleotide
  Antisense strand to SEQ ID NO: 959992
aguaguggccgaauaccgu

SEQ ID NO: 959994 - RNA, 19 nt, Artificial Sequence
  Description of Artificial Sequence: Synthetic oligonucleotide
  Sense strand starting at position 711 of SEQ ID NO: 913863
ugaggcuugugcuuaacau

SEQ ID NO: 959995 - RNA, 19 nt, Artificial Sequence
  Description of Artificial Sequence: Synthetic oligonucleotide
  Antisense strand to SEQ ID NO: 959994
auguuaagcacaagccuca

SEQ ID NO: 959996 - RNA, 19 nt, Artificial Sequence
  Description of Artificial Sequence: Synthetic oligonucleotide
  Sense strand starting at position 101 of SEQ ID NO: 913863
agcuaugacuagucugcuu

SEQ ID NO: 959997 - RNA, 19 nt, Artificial Sequence
  Description of Artificial Sequence: Synthetic oligonucleotide
  Antisense strand to SEQ ID NO: 959996
aagcagacuagucauagcu

SEQ ID NO: 959998 - RNA, 19 nt, Artificial Sequence
  Description of Artificial Sequence: Synthetic oligonucleotide
  Sense strand starting at position 1326 of SEQ ID NO: 913863
uaggguugucgguguggaa

SEQ ID NO: 959999 - RNA, 19 nt, Artificial Sequence
  Description of Artificial Sequence: Synthetic oligonucleotide
  Antisense strand to SEQ ID NO: 959998
uuccacaccgacaacccua

SEQ ID NO: 960000 - RNA, 19 nt, Artificial Sequence
  Description of Artificial Sequence: Synthetic oligonucleotide
  Sense strand starting at position 3937 of SEQ ID NO: 913863
agguaacccuuugagaaau

SEQ ID NO: 960001 - RNA, 19 nt, Artificial Sequence
  Description of Artificial Sequence: Synthetic oligonucleotide
  Antisense strand to SEQ ID NO: 960000
auuucucaaaggguuaccu

SEQ ID NO: 960002 - RNA, 19 nt, Artificial Sequence
  Description of Artificial Sequence: Synthetic oligonucleotide
  Sense strand starting at position 583 of SEQ ID NO: 913863
aggacuuggucugagaauc

SEQ ID NO: 960003 - RNA, 19 nt, Artificial Sequence
  Description of Artificial Sequence: Synthetic oligonucleotide
  Antisense strand to SEQ ID NO: 960002
gauucucagaccaaguccu

SEQ ID NO: 960004 - RNA, 19 nt, Artificial Sequence
  Description of Artificial Sequence: Synthetic oligonucleotide
  Sense strand starting at position 3939 of SEQ ID NO: 913863
guaacccuuugagaaauca

SEQ ID NO: 960005 - RNA, 19 nt, Artificial Sequence
  Description of Artificial Sequence: Synthetic oligonucleotide
  Antisense strand to SEQ ID NO: 960004
ugauuucucaaaggguuac

SEQ ID NO: 960006 - RNA, 19 nt, Artificial Sequence
  Description of Artificial Sequence: Synthetic oligonucleotide
  Sense strand starting at position 768 of SEQ ID NO: 913863
ggauaaguuuauuaaccug

SEQ ID NO: 960007 - RNA, 19 nt, Artificial Sequence
  Description of Artificial Sequence: Synthetic oligonucleotide
  Antisense strand to SEQ ID NO: 960006
cagguuaauaaacuuaucc

SEQ ID NO: 960008 - RNA, 19 nt, Artificial Sequence
  Description of Artificial Sequence: Synthetic oligonucleotide
  Sense strand starting at position 673 of SEQ ID NO: 913863
guuauauguucugcgucua

SEQ ID NO: 960009 - RNA, 19 nt, Artificial Sequence
  Description of Artificial Sequence: Synthetic oligonucleotide
  Antisense strand to SEQ ID NO: 960008
uagacgcagaacauauaac

SEQ ID NO: 960010 - RNA, 19 nt, Artificial Sequence
  Description of Artificial Sequence: Synthetic oligonucleotide
  Sense strand starting at position 1453 of SEQ ID NO: 913863
cccguuaacuggcagaaga

SEQ ID NO: 960011 - RNA, 19 nt, Artificial Sequence
  Description of Artificial Sequence: Synthetic oligonucleotide
  Antisense strand to SEQ ID NO: 960010
ucuucugccaguuaacggg

SEQ ID NO: 960012 - RNA, 19 nt, Artificial Sequence
  Description of Artificial Sequence: Synthetic oligonucleotide
  Sense strand starting at position 663 of SEQ ID NO: 913863
ccugacaguuguuauaugu

SEQ ID NO: 960013 - RNA, 19 nt, Artificial Sequence
  Description of Artificial Sequence: Synthetic oligonucleotide
  Antisense strand to SEQ ID NO: 960012
acauauaacaacugucagg

SEQ ID NO: 960014 - RNA, 19 nt, Artificial Sequence
  Description of Artificial Sequence: Synthetic oligonucleotide
  Sense strand starting at position 277 of SEQ ID NO: 913863
aggccucuuuaguaagguu

SEQ ID NO: 960015 - RNA, 19 nt, Artificial Sequence
  Description of Artificial Sequence: Synthetic oligonucleotide
  Antisense strand to SEQ ID NO: 960014
aaccuuacuaaagaggccu

SEQ ID NO: 960016 - RNA, 19 nt, Artificial Sequence
  Description of Artificial Sequence: Synthetic oligonucleotide
  Sense strand starting at position 708 of SEQ ID NO: 913863
aacugaggcuugugcuuaa

SEQ ID NO: 960017 - RNA, 19 nt, Artificial Sequence
  Description of Artificial Sequence: Synthetic oligonucleotide
  Antisense strand to SEQ ID NO: 960016
uuaagcacaagccucaguu

SEQ ID NO: 960018 - RNA, 19 nt, Artificial Sequence
  Description of Artificial Sequence: Synthetic oligonucleotide
  Sense strand starting at position 1870 of SEQ ID NO: 913863
cccaguccguuguggagaa

SEQ ID NO: 960019 - RNA, 19 nt, Artificial Sequence
  Description of Artificial Sequence: Synthetic oligonucleotide
  Antisense strand to SEQ ID NO: 960018
uucuccacaacggacuggg

SEQ ID NO: 960020 - RNA, 19 nt, Artificial Sequence
  Description of Artificial Sequence: Synthetic oligonucleotide
  Sense strand starting at position 672 of SEQ ID NO: 913863
uguuauauguucugcgucu

SEQ ID NO: 960021 - RNA, 19 nt, Artificial Sequence
  Description of Artificial Sequence: Synthetic oligonucleotide
  Antisense strand to SEQ ID NO: 960020
agacgcagaacauauaaca

SEQ ID NO: 960022 - RNA, 19 nt, Artificial Sequence
  Description of Artificial Sequence: Synthetic oligonucleotide
  Sense strand starting at position 2647 of SEQ ID NO: 913864
gugguuuagauccaugaag

SEQ ID NO: 960023 - RNA, 19 nt, Artificial Sequence
  Description of Artificial Sequence: Synthetic oligonucleotide
  Antisense strand to SEQ ID NO: 960022
cuucauggaucuaaaccac

SEQ ID NO: 960024 - RNA, 19 nt, Artificial Sequence
  Description of Artificial Sequence: Synthetic oligonucleotide
  Sense strand starting at position 3590 of SEQ ID NO: 913864
cggucaugauuuguacauu

SEQ ID NO: 960025 - RNA, 19 nt, Artificial Sequence
  Description of Artificial Sequence: Synthetic oligonucleotide
  Antisense strand to SEQ ID NO: 960024
aauguacaaaucaugaccg

SEQ ID NO: 960026 - RNA, 19 nt, Artificial Sequence
  Description of Artificial Sequence: Synthetic oligonucleotide
  Sense strand starting at position 2395 of SEQ ID NO: 913864
gaaggauuguaagugacua

SEQ ID NO: 960027 - RNA, 19 nt, Artificial Sequence
  Description of Artificial Sequence: Synthetic oligonucleotide
  Antisense strand to SEQ ID NO: 960026
uagucacuuacaauccuuc

SEQ ID NO: 960028 - RNA, 19 nt, Artificial Sequence
  Description of Artificial Sequence: Synthetic oligonucleotide
  Sense strand starting at position 2649 of SEQ ID NO: 913864
gguuuagauccaugaagau

SEQ ID NO: 960029 - RNA, 19 nt, Artificial Sequence
  Description of Artificial Sequence: Synthetic oligonucleotide
  Antisense strand to SEQ ID NO: 960028
aucuucauggaucuaaacc

SEQ ID NO: 960030 - RNA, 19 nt, Artificial Sequence
  Description of Artificial Sequence: Synthetic oligonucleotide
  Sense strand starting at position 3041 of SEQ ID NO: 913864
acguuaacuccagaaccau

SEQ ID NO: 960031 - RNA, 19 nt, Artificial Sequence
  Description of Artificial Sequence: Synthetic oligonucleotide
  Antisense strand to SEQ ID NO: 960030
augguucuggaguuaacgu

SEQ ID NO: 960032 - RNA, 19 nt, Artificial Sequence
  Description of Artificial Sequence: Synthetic oligonucleotide
  Sense strand starting at position 3591 of SEQ ID NO: 913864
ggucaugauuuguacauuu

SEQ ID NO: 960033 - RNA, 19 nt, Artificial Sequence
  Description of Artificial Sequence: Synthetic oligonucleotide
  Antisense strand to SEQ ID NO: 960032
aaauguacaaaucaugacc

SEQ ID NO: 960034 - RNA, 19 nt, Artificial Sequence
  Description of Artificial Sequence: Synthetic oligonucleotide
  Sense strand starting at position 2289 of SEQ ID NO: 913864
gcgcgaucaguaguacuca

SEQ ID NO: 960035 - RNA, 19 nt, Artificial Sequence
  Description of Artificial Sequence: Synthetic oligonucleotide
  Antisense strand to SEQ ID NO: 960034
ugaguacuacugaucgcgc

SEQ ID NO: 960036 - RNA, 19 nt, Artificial Sequence
  Description of Artificial Sequence: Synthetic oligonucleotide
  Sense strand starting at position 3457 of SEQ ID NO: 913864
gaacauaguucccugggau

SEQ ID NO: 960037 - RNA, 19 nt, Artificial Sequence
  Description of Artificial Sequence: Synthetic oligonucleotide
  Antisense strand to SEQ ID NO: 960036
aucccagggaacuauguuc

SEQ ID NO: 960038 - RNA, 19 nt, Artificial Sequence
  Description of Artificial Sequence: Synthetic oligonucleotide
  Sense strand starting at position 3170 of SEQ ID NO: 913864
guuuauagugaagauucuu

SEQ ID NO: 960039 - RNA, 19 nt, Artificial Sequence
  Description of Artificial Sequence: Synthetic oligonucleotide
  Antisense strand to SEQ ID NO: 960038
aagaaucuucacuauaaac

SEQ ID NO: 960040 - RNA, 19 nt, Artificial Sequence
  Description of Artificial Sequence: Synthetic oligonucleotide
  Sense strand starting at position 3458 of SEQ ID NO: 913864
aacauaguucccugggaug

SEQ ID NO: 960041 - RNA, 19 nt, Artificial Sequence
  Description of Artificial Sequence: Synthetic oligonucleotide
  Antisense strand to SEQ ID NO: 960040
caucccagggaacuauguu

SEQ ID NO: 960042 - RNA, 19 nt, Artificial Sequence
  Description of Artificial Sequence: Synthetic oligonucleotide
  Sense strand starting at position 3541 of SEQ ID NO: 913864
ugguuacauggauauguuu

SEQ ID NO: 960043 - RNA, 19 nt, Artificial Sequence
  Description of Artificial Sequence: Synthetic oligonucleotide
  Antisense strand to SEQ ID NO: 960042
aaacauauccauguaacca

SEQ ID NO: 960044 - RNA, 19 nt, Artificial Sequence
  Description of Artificial Sequence: Synthetic oligonucleotide
  Sense strand starting at position 3539 of SEQ ID NO: 913864
ccugguuacauggauaugu

SEQ ID NO: 960045 - RNA, 19 nt, Artificial Sequence
  Description of Artificial Sequence: Synthetic oligonucleotide
  Antisense strand to SEQ ID NO: 960044
acauauccauguaaccagg

SEQ ID NO: 960046 - RNA, 19 nt, Artificial Sequence
  Description of Artificial Sequence: Synthetic oligonucleotide
  Sense strand starting at position 3460 of SEQ ID NO: 913864
cauaguucccugggaugga

SEQ ID NO: 960047 - RNA, 19 nt, Artificial Sequence
  Description of Artificial Sequence: Synthetic oligonucleotide
  Antisense strand to SEQ ID NO: 960046
uccaucccagggaacuaug

SEQ ID NO: 960048 - RNA, 19 nt, Artificial Sequence
  Description of Artificial Sequence: Synthetic oligonucleotide
  Sense strand starting at position 2399 of SEQ ID NO: 913864
gauuguaagugacuagauu

SEQ ID NO: 960049 - RNA, 19 nt, Artificial Sequence
  Description of Artificial Sequence: Synthetic oligonucleotide
  Antisense strand to SEQ ID NO: 960048
aaucuagucacuuacaauc

SEQ ID NO: 960050 - RNA, 19 nt, Artificial Sequence
  Description of Artificial Sequence: Synthetic oligonucleotide
  Sense strand starting at position 2588 of SEQ ID NO: 913864
ucuguagcccuagaauaug

SEQ ID NO: 960051 - RNA, 19 nt, Artificial Sequence
  Description of Artificial Sequence: Synthetic oligonucleotide
  Antisense strand to SEQ ID NO: 960050
cauauucuagggcuacaga

SEQ ID NO: 960052 - RNA, 19 nt, Artificial Sequence
  Description of Artificial Sequence: Synthetic oligonucleotide
  Sense strand starting at position 1061 of SEQ ID NO: 913864
cugaguuacccagaagcuu

SEQ ID NO: 960053 - RNA, 19 nt, Artificial Sequence
  Description of Artificial Sequence: Synthetic oligonucleotide
  Antisense strand to SEQ ID NO: 960052
aagcuucuggguaacucag

SEQ ID NO: 960054 - RNA, 19 nt, Artificial Sequence
  Description of Artificial Sequence: Synthetic oligonucleotide
  Sense strand starting at position 2599 of SEQ ID NO: 913864
agaauaugaccucggugau

SEQ ID NO: 960055 - RNA, 19 nt, Artificial Sequence
  Description of Artificial Sequence: Synthetic oligonucleotide
  Antisense strand to SEQ ID NO: 960054
aucaccgaggucauauucu

SEQ ID NO: 960056 - RNA, 19 nt, Artificial Sequence
  Description of Artificial Sequence: Synthetic oligonucleotide
  Sense strand starting at position 242 of SEQ ID NO: 913864
gcagucucucagcauuugu

SEQ ID NO: 960057 - RNA, 19 nt, Artificial Sequence
  Description of Artificial Sequence: Synthetic oligonucleotide
  Antisense strand to SEQ ID NO: 960056
acaaaugcugagagacugc

SEQ ID NO: 960058 - RNA, 19 nt, Artificial Sequence
  Description of Artificial Sequence: Synthetic oligonucleotide
  Sense strand starting at position 2881 of SEQ ID NO: 913864
ugacuuccuccaggaguga

SEQ ID NO: 960059 - RNA, 19 nt, Artificial Sequence
  Description of Artificial Sequence: Synthetic oligonucleotide
  Antisense strand to SEQ ID NO: 960058
ucacuccuggaggaaguca

SEQ ID NO: 960060 - RNA, 19 nt, Artificial Sequence
  Description of Artificial Sequence: Synthetic oligonucleotide
  Sense strand starting at position 2600 of SEQ ID NO: 913864
gaauaugaccucggugaug

SEQ ID NO: 960061 - RNA, 19 nt, Artificial Sequence
  Description of Artificial Sequence: Synthetic oligonucleotide
  Antisense strand to SEQ ID NO: 960060
caucaccgaggucauauuc

SEQ ID NO: 960062 - RNA, 19 nt, Artificial Sequence
  Description of Artificial Sequence: Synthetic oligonucleotide
  Sense strand starting at position 153 of SEQ ID NO: 913864
gcucauuuauguuucugua

SEQ ID NO: 960063 - RNA, 19 nt, Artificial Sequence
  Description of Artificial Sequence: Synthetic oligonucleotide
  Antisense strand to SEQ ID NO: 960062
uacagaaacauaaaugagc

SEQ ID NO: 960064 - RNA, 19 nt, Artificial Sequence
  Description of Artificial Sequence: Synthetic oligonucleotide
  Sense strand starting at position 3393 of SEQ ID NO: 913864
uaugucauacgugauauac

SEQ ID NO: 960065 - RNA, 19 nt, Artificial Sequence
  Description of Artificial Sequence: Synthetic oligonucleotide
  Antisense strand to SEQ ID NO: 960064
guauaucacguaugacaua

SEQ ID NO: 960066 - RNA, 19 nt, Artificial Sequence
  Description of Artificial Sequence: Synthetic oligonucleotide
  Sense strand starting at position 2341 of SEQ ID NO: 913864
gugcuugcuaaggaagacu

SEQ ID NO: 960067 - RNA, 19 nt, Artificial Sequence
  Description of Artificial Sequence: Synthetic oligonucleotide
  Antisense strand to SEQ ID NO: 960066
agucuuccuuagcaagcac

SEQ ID NO: 960068 - RNA, 19 nt, Artificial Sequence
  Description of Artificial Sequence: Synthetic oligonucleotide
  Sense strand starting at position 3242 of SEQ ID NO: 913864
cucagagucccaugcagaa

SEQ ID NO: 960069 - RNA, 19 nt, Artificial Sequence
  Description of Artificial Sequence: Synthetic oligonucleotide
  Antisense strand to SEQ ID NO: 960068
uucugcaugggacucugag

SEQ ID NO: 960070 - RNA, 19 nt, Artificial Sequence
  Description of Artificial Sequence: Synthetic oligonucleotide
  Sense strand starting at position 3156 of SEQ ID NO: 913864
augaaugggucucuguuua

SEQ ID NO: 960071 - RNA, 19 nt, Artificial Sequence
  Description of Artificial Sequence: Synthetic oligonucleotide
  Antisense strand to SEQ ID NO: 960070
uaaacagagacccauucau

SEQ ID NO: 960072 - RNA, 19 nt, Artificial Sequence
  Description of Artificial Sequence: Synthetic oligonucleotide
  Sense strand starting at position 3550 of SEQ ID NO: 913864
ggauauguuuacuuuguga

SEQ ID NO: 960073 - RNA, 19 nt, Artificial Sequence
  Description of Artificial Sequence: Synthetic oligonucleotide
  Antisense strand to SEQ ID NO: 960072
ucacaaaguaaacauaucc

SEQ ID NO: 960074 - RNA, 19 nt, Artificial Sequence
  Description of Artificial Sequence: Synthetic oligonucleotide
  Sense strand starting at position 3476 of SEQ ID NO: 913864
ggaauuggcucuuccuauu

SEQ ID NO: 960075 - RNA, 19 nt, Artificial Sequence
  Description of Artificial Sequence: Synthetic oligonucleotide
  Antisense strand to SEQ ID NO: 960074
aauaggaagagccaauucc

SEQ ID NO: 960076 - RNA, 19 nt, Artificial Sequence
  Description of Artificial Sequence: Synthetic oligonucleotide
  Sense strand starting at position 3026 of SEQ ID NO: 913864
cauguaacucaguauacgu

SEQ ID NO: 960077 - RNA, 19 nt, Artificial Sequence
  Description of Artificial Sequence: Synthetic oligonucleotide
  Antisense strand to SEQ ID NO: 960076
acguauacugaguuacaug

SEQ ID NO: 960078 - RNA, 19 nt, Artificial Sequence
  Description of Artificial Sequence: Synthetic oligonucleotide
  Sense strand starting at position 3028 of SEQ ID NO: 913864
uguaacucaguauacguua

SEQ ID NO: 960079 - RNA, 19 nt, Artificial Sequence
  Description of Artificial Sequence: Synthetic oligonucleotide
  Antisense strand to SEQ ID NO: 960078
uaacguauacugaguuaca

SEQ ID NO: 960080 - RNA, 19 nt, Artificial Sequence
  Description of Artificial Sequence: Synthetic oligonucleotide
  Sense strand starting at position 3682 of SEQ ID NO: 913864
uuggcuaaugcauaguauu

SEQ ID NO: 960081 - RNA, 19 nt, Artificial Sequence
  Description of Artificial Sequence: Synthetic oligonucleotide
  Antisense strand to SEQ ID NO: 960080
aauacuaugcauuagccaa

SEQ ID NO: 960082 - RNA, 19 nt, Artificial Sequence
  Description of Artificial Sequence: Synthetic oligonucleotide
  Sense strand starting at position 3530 of SEQ ID NO: 913864
gaaccuuguccugguuaca

SEQ ID NO: 960083 - RNA, 19 nt, Artificial Sequence
  Description of Artificial Sequence: Synthetic oligonucleotide
  Antisense strand to SEQ ID NO: 960082
uguaaccaggacaagguuc

SEQ ID NO: 960084 - RNA, 19 nt, Artificial Sequence
  Description of Artificial Sequence: Synthetic oligonucleotide
  Sense strand starting at position 340 of SEQ ID NO: 913864
gccaaugcuucccuaggaa

SEQ ID NO: 960085 - RNA, 19 nt, Artificial Sequence
  Description of Artificial Sequence: Synthetic oligonucleotide
  Antisense strand to SEQ ID NO: 960084
uuccuagggaagcauuggc

SEQ ID NO: 960086 - RNA, 19 nt, Artificial Sequence
  Description of Artificial Sequence: Synthetic oligonucleotide
  Sense strand starting at position 3409 of SEQ ID NO: 913864
uacuuuauguggcuuugaa

SEQ ID NO: 960087 - RNA, 19 nt, Artificial Sequence
  Description of Artificial Sequence: Synthetic oligonucleotide
  Antisense strand to SEQ ID NO: 960086
uucaaagccacauaaagua

SEQ ID NO: 960088 - RNA, 19 nt, Artificial Sequence
  Description of Artificial Sequence: Synthetic oligonucleotide
  Sense strand starting at position 463 of SEQ ID NO: 913864
guggaugucuacuucccua

SEQ ID NO: 960089 - RNA, 19 nt, Artificial Sequence
  Description of Artificial Sequence: Synthetic oligonucleotide
  Antisense strand to SEQ ID NO: 960088
uagggaaguagacauccac

SEQ ID NO: 960090 - RNA, 19 nt, Artificial Sequence
  Description of Artificial Sequence: Synthetic oligonucleotide
  Sense strand starting at position 2281 of SEQ ID NO: 913864
agaaacuagcgcgaucagu

SEQ ID NO: 960091 - RNA, 19 nt, Artificial Sequence
  Description of Artificial Sequence: Synthetic oligonucleotide
  Antisense strand to SEQ ID NO: 960090
acugaucgcgcuaguuucu

SEQ ID NO: 960092 - RNA, 19 nt, Artificial Sequence
  Description of Artificial Sequence: Synthetic oligonucleotide
  Sense strand starting at position 2639 of SEQ ID NO: 913864
gagcccuagugguuuagau

SEQ ID NO: 960093 - RNA, 19 nt, Artificial Sequence
  Description of Artificial Sequence: Synthetic oligonucleotide
  Antisense strand to SEQ ID NO: 960092
aucuaaaccacuagggcuc

SEQ ID NO: 960094 - RNA, 19 nt, Artificial Sequence
  Description of Artificial Sequence: Synthetic oligonucleotide
  Sense strand starting at position 1121 of SEQ ID NO: 913864
gacggauccugucuagguu

SEQ ID NO: 960095 - RNA, 19 nt, Artificial Sequence
  Description of Artificial Sequence: Synthetic oligonucleotide
  Antisense strand to SEQ ID NO: 960094
aaccuagacaggauccguc

SEQ ID NO: 960096 - RNA, 19 nt, Artificial Sequence
  Description of Artificial Sequence: Synthetic oligonucleotide
  Sense strand starting at position 2735 of SEQ ID NO: 913864
guuuacuguuaguuccaaa

SEQ ID NO: 960097 - RNA, 19 nt, Artificial Sequence
  Description of Artificial Sequence: Synthetic oligonucleotide
  Antisense strand to SEQ ID NO: 960096
uuuggaacuaacaguaaac

SEQ ID NO: 960098 - RNA, 19 nt, Artificial Sequence
  Description of Artificial Sequence: Synthetic oligonucleotide
  Sense strand starting at position 1459 of SEQ ID NO: 913864
gcuacucuucuuugugaaa

SEQ ID NO: 960099 - RNA, 19 nt, Artificial Sequence
  Description of Artificial Sequence: Synthetic oligonucleotide
  Antisense strand to SEQ ID NO: 960098
uuucacaaagaagaguagc

SEQ ID NO: 960100 - RNA, 19 nt, Artificial Sequence
  Description of Artificial Sequence: Synthetic oligonucleotide
  Sense strand starting at position 2542 of SEQ ID NO: 913864
ugcugugauccagggcaga

SEQ ID NO: 960101 - RNA, 19 nt, Artificial Sequence
  Description of Artificial Sequence: Synthetic oligonucleotide
  Antisense strand to SEQ ID NO: 960100
ucugcccuggaucacagca

SEQ ID NO: 960102 - RNA, 19 nt, Artificial Sequence
  Description of Artificial Sequence: Synthetic oligonucleotide
  Sense strand starting at position 1344 of SEQ ID NO: 913865
gggaaaugguucccaaacu

SEQ ID NO: 960103 - RNA, 19 nt, Artificial Sequence
  Description of Artificial Sequence: Synthetic oligonucleotide
  Antisense strand to SEQ ID NO: 960102
aguuugggaaccauuuccc

SEQ ID NO: 960104 - RNA, 19 nt, Artificial Sequence
  Description of Artificial Sequence: Synthetic oligonucleotide
  Sense strand starting at position 2208 of SEQ ID NO: 913865
gcauuugcugcugaccuaa

SEQ ID NO: 960105 - RNA, 19 nt, Artificial Sequence
  Description of Artificial Sequence: Synthetic oligonucleotide
  Antisense strand to SEQ ID NO: 960104
uuaggucagcagcaaaugc

SEQ ID NO: 960106 - RNA, 19 nt, Artificial Sequence
  Description of Artificial Sequence: Synthetic oligonucleotide
  Sense strand starting at position 2289 of SEQ ID NO: 913865
gcacgugauguguccuuau

SEQ ID NO: 960107 - RNA, 19 nt, Artificial Sequence
  Description of Artificial Sequence: Synthetic oligonucleotide
  Antisense strand to SEQ ID NO: 960106
auaaggacacaucacgugc

SEQ ID NO: 960108 - RNA, 19 nt, Artificial Sequence
  Description of Artificial Sequence: Synthetic oligonucleotide
  Sense strand starting at position 742 of SEQ ID NO: 913865
caaguuugucuugccgagu

SEQ ID NO: 960109 - RNA, 19 nt, Artificial Sequence
  Description of Artificial Sequence: Synthetic oligonucleotide
  Antisense strand to SEQ ID NO: 960108
acucggcaagacaaacuug

SEQ ID NO: 960110 - RNA, 19 nt, Artificial Sequence
  Description of Artificial Sequence: Synthetic oligonucleotide
  Sense strand starting at position 2119 of SEQ ID NO: 913865
aggaaaguaugguuucaga

SEQ ID NO: 960111 - RNA, 19 nt, Artificial Sequence
  Description of Artificial Sequence: Synthetic oligonucleotide
  Antisense strand to SEQ ID NO: 960110
ucugaaaccauacuuuccu

SEQ ID NO: 960112 - RNA, 19 nt, Artificial Sequence
  Description of Artificial Sequence: Synthetic oligonucleotide
  Sense strand starting at position 2373 of SEQ ID NO: 913865
guuuccugaaggcauaaga

SEQ ID NO: 960113 - RNA, 19 nt, Artificial Sequence
  Description of Artificial Sequence: Synthetic oligonucleotide
  Antisense strand to SEQ ID NO: 960112
ucuuaugccuucaggaaac

SEQ ID NO: 960114 - RNA, 19 nt, Artificial Sequence
  Description of Artificial Sequence: Synthetic oligonucleotide
  Sense strand starting at position 2975 of SEQ ID NO: 913865
ggacacuagcuguauugga

SEQ ID NO: 960115 - RNA, 19 nt, Artificial Sequence
  Description of Artificial Sequence: Synthetic oligonucleotide
  Antisense strand to SEQ ID NO: 960114
uccaauacagcuagugucc

SEQ ID NO: 960116 - RNA, 19 nt, Artificial Sequence
  Description of Artificial Sequence: Synthetic oligonucleotide
  Sense strand starting at position 3114 of SEQ ID NO: 913865
ugcaauugagcucauaaga

SEQ ID NO: 960117 - RNA, 19 nt, Artificial Sequence
  Description of Artificial Sequence: Synthetic oligonucleotide
  Antisense strand to SEQ ID NO: 960116
ucuuaugagcucaauugca

SEQ ID NO: 960118 - RNA, 19 nt, Artificial Sequence
  Description of Artificial Sequence: Synthetic oligonucleotide
  Sense strand starting at position 369 of SEQ ID NO: 913865
aggguuaucccaugaucaa

SEQ ID NO: 960119 - RNA, 19 nt, Artificial Sequence
  Description of Artificial Sequence: Synthetic oligonucleotide
  Antisense strand to SEQ ID NO: 960118
uugaucaugggauaacccu

SEQ ID NO: 960120 - RNA, 19 nt, Artificial Sequence
  Description of Artificial Sequence: Synthetic oligonucleotide
  Sense strand starting at position 2050 of SEQ ID NO: 913865
auucgacaucauugggaau

SEQ ID NO: 960121 - RNA, 19 nt, Artificial Sequence
  Description of Artificial Sequence: Synthetic oligonucleotide
  Antisense strand to SEQ ID NO: 960120
auucccaaugaugucgaau

SEQ ID NO: 960122 - RNA, 19 nt, Artificial Sequence
  Description of Artificial Sequence: Synthetic oligonucleotide
  Sense strand starting at position 2096 of SEQ ID NO: 913865
uuuacagaggguugacuau

SEQ ID NO: 960123 - RNA, 19 nt, Artificial Sequence
  Description of Artificial Sequence: Synthetic oligonucleotide
  Antisense strand to SEQ ID NO: 960122
auagucaacccucuguaaa

SEQ ID NO: 960124 - RNA, 19 nt, Artificial Sequence
  Description of Artificial Sequence: Synthetic oligonucleotide
  Sense strand starting at position 2729 of SEQ ID NO: 913865
gggacuuacuacuuuaucu

SEQ ID NO: 960125 - RNA, 19 nt, Artificial Sequence
  Description of Artificial Sequence: Synthetic oligonucleotide
  Antisense strand to SEQ ID NO: 960124
agauaaaguaguaaguccc

SEQ ID NO: 960126 - RNA, 19 nt, Artificial Sequence
  Description of Artificial Sequence: Synthetic oligonucleotide
  Sense strand starting at position 2081 of SEQ ID NO: 913865
agaacacauugaguguuua

SEQ ID NO: 960127 - RNA, 19 nt, Artificial Sequence
  Description of Artificial Sequence: Synthetic oligonucleotide
  Antisense strand to SEQ ID NO: 960126
uaaacacucaauguguucu

SEQ ID NO: 960128 - RNA, 19 nt, Artificial Sequence
  Description of Artificial Sequence: Synthetic oligonucleotide
  Sense strand starting at position 3451 of SEQ ID NO: 913865
cucuaaguuccaggaaauc

SEQ ID NO: 960129 - RNA, 19 nt, Artificial Sequence
  Description of Artificial Sequence: Synthetic oligonucleotide
  Antisense strand to SEQ ID NO: 960128
gauuuccuggaacuuagag

SEQ ID NO: 960130 - RNA, 19 nt, Artificial Sequence
  Description of Artificial Sequence: Synthetic oligonucleotide
  Sense strand starting at position 3347 of SEQ ID NO: 913865
ucuccugcuccuuagaaga

SEQ ID NO: 960131 - RNA, 19 nt, Artificial Sequence
  Description of Artificial Sequence: Synthetic oligonucleotide
  Antisense strand to SEQ ID NO: 960130
ucuucuaaggagcaggaga

SEQ ID NO: 960132 - RNA, 19 nt, Artificial Sequence
  Description of Artificial Sequence: Synthetic oligonucleotide
  Sense strand starting at position 2296 of SEQ ID NO: 913865
auguguccuuauucgauuu

SEQ ID NO: 960133 - RNA, 19 nt, Artificial Sequence
  Description of Artificial Sequence: Synthetic oligonucleotide
  Antisense strand to SEQ ID NO: 960132
aaaucgaauaaggacacau

SEQ ID NO: 960134 - RNA, 19 nt, Artificial Sequence
  Description of Artificial Sequence: Synthetic oligonucleotide
  Sense strand starting at position 1352 of SEQ ID NO: 913865
guucccaaacuugaguauu

SEQ ID NO: 960135 - RNA, 19 nt, Artificial Sequence
  Description of Artificial Sequence: Synthetic oligonucleotide
  Antisense strand to SEQ ID NO: 960134
aauacucaaguuugggaac

SEQ ID NO: 960136 - RNA, 19 nt, Artificial Sequence
  Description of Artificial Sequence: Synthetic oligonucleotide
  Sense strand starting at position 3059 of SEQ ID NO: 913865
agucacauucugggauauu

SEQ ID NO: 960137 - RNA, 19 nt, Artificial Sequence
  Description of Artificial Sequence: Synthetic oligonucleotide
  Antisense strand to SEQ ID NO: 960136
aauaucccagaaugugacu

SEQ ID NO: 960138 - RNA, 19 nt, Artificial Sequence
  Description of Artificial Sequence: Synthetic oligonucleotide
  Sense strand starting at position 3897 of SEQ ID NO: 913865
aggcuugaauucucuaaca

SEQ ID NO: 960139 - RNA, 19 nt, Artificial Sequence
  Description of Artificial Sequence: Synthetic oligonucleotide
  Antisense strand to SEQ ID NO: 960138
uguuagagaauucaagccu

SEQ ID NO: 960140 - RNA, 19 nt, Artificial Sequence
  Description of Artificial Sequence: Synthetic oligonucleotide
  Sense strand starting at position 3877 of SEQ ID NO: 913865
gugucucuggccguuagua

SEQ ID NO: 960141 - RNA, 19 nt, Artificial Sequence
  Description of Artificial Sequence: Synthetic oligonucleotide
  Antisense strand to SEQ ID NO: 960140
uacuaacggccagagacac

SEQ ID NO: 960142 - RNA, 19 nt, Artificial Sequence
  Description of Artificial Sequence: Synthetic oligonucleotide
  Sense strand starting at position 2085 of SEQ ID NO: 913865
cacauugaguguuuacaga

SEQ ID NO: 960143 - RNA, 19 nt, Artificial Sequence
  Description of Artificial Sequence: Synthetic oligonucleotide
  Antisense strand to SEQ ID NO: 960142
ucuguaaacacucaaugug

SEQ ID NO: 960144 - RNA, 19 nt, Artificial Sequence
  Description of Artificial Sequence: Synthetic oligonucleotide
  Sense strand starting at position 1820 of SEQ ID NO: 913865
cauugaauugcagguaaua

SEQ ID NO: 960145 - RNA, 19 nt, Artificial Sequence
  Description of Artificial Sequence: Synthetic oligonucleotide
  Antisense strand to SEQ ID NO: 960144
uauuaccugcaauucaaug

SEQ ID NO: 960146 - RNA, 19 nt, Artificial Sequence
  Description of Artificial Sequence: Synthetic oligonucleotide
  Sense strand starting at position 3551 of SEQ ID NO: 913865
gaaguucugccuuacauug

SEQ ID NO: 960147 - RNA, 19 nt, Artificial Sequence
  Description of Artificial Sequence: Synthetic oligonucleotide
  Antisense strand to SEQ ID NO: 960146
caauguaaggcagaacuuc

SEQ ID NO: 960148 - RNA, 19 nt, Artificial Sequence
  Description of Artificial Sequence: Synthetic oligonucleotide
  Sense strand starting at position 730 of SEQ ID NO: 913865
aguuucugagagcaaguuu

SEQ ID NO: 960149 - RNA, 19 nt, Artificial Sequence
  Description of Artificial Sequence: Synthetic oligonucleotide
  Antisense strand to SEQ ID NO: 960148
aaacuugcucucagaaacu

SEQ ID NO: 960150 - RNA, 19 nt, Artificial Sequence
  Description of Artificial Sequence: Synthetic oligonucleotide
  Sense strand starting at position 2371 of SEQ ID NO: 913865
ggguuuccugaaggcauaa

SEQ ID NO: 960151 - RNA, 19 nt, Artificial Sequence
  Description of Artificial Sequence: Synthetic oligonucleotide
  Antisense strand to SEQ ID NO: 960150
uuaugccuucaggaaaccc

SEQ ID NO: 960152 - RNA, 19 nt, Artificial Sequence
  Description of Artificial Sequence: Synthetic oligonucleotide
  Sense strand starting at position 2078 of SEQ ID NO: 913865
gugagaacacauugagugu

SEQ ID NO: 960153 - RNA, 19 nt, Artificial Sequence
  Description of Artificial Sequence: Synthetic oligonucleotide
  Antisense strand to SEQ ID NO: 960152
acacucaauguguucucac

SEQ ID NO: 960154 - RNA, 19 nt, Artificial Sequence
  Description of Artificial Sequence: Synthetic oligonucleotide
  Sense strand starting at position 2665 of SEQ ID NO: 913865
cccucaucauggcuaggau

SEQ ID NO: 960155 - RNA, 19 nt, Artificial Sequence
  Description of Artificial Sequence: Synthetic oligonucleotide
  Antisense strand to SEQ ID NO: 960154
auccuagccaugaugaggg

SEQ ID NO: 960156 - RNA, 19 nt, Artificial Sequence
  Description of Artificial Sequence: Synthetic oligonucleotide
  Sense strand starting at position 3111 of SEQ ID NO: 913865
ggaugcaauugagcucaua

SEQ ID NO: 960157 - RNA, 19 nt, Artificial Sequence
  Description of Artificial Sequence: Synthetic oligonucleotide
  Antisense strand to SEQ ID NO: 960156
uaugagcucaauugcaucc

SEQ ID NO: 960158 - RNA, 19 nt, Artificial Sequence
  Description of Artificial Sequence: Synthetic oligonucleotide
  Sense strand starting at position 1206 of SEQ ID NO: 913865
gugaaucaugacugcacca

SEQ ID NO: 960159 - RNA, 19 nt, Artificial Sequence
  Description of Artificial Sequence: Synthetic oligonucleotide
  Antisense strand to SEQ ID NO: 960158
uggugcagucaugauucac

SEQ ID NO: 960160 - RNA, 19 nt, Artificial Sequence
  Description of Artificial Sequence: Synthetic oligonucleotide
  Sense strand starting at position 2092 of SEQ ID NO: 913865
aguguuuacagaggguuga

SEQ ID NO: 960161 - RNA, 19 nt, Artificial Sequence
  Description of Artificial Sequence: Synthetic oligonucleotide
  Antisense strand to SEQ ID NO: 960160
ucaacccucuguaaacacu

SEQ ID NO: 960162 - RNA, 19 nt, Artificial Sequence
  Description of Artificial Sequence: Synthetic oligonucleotide
  Sense strand starting at position 3890 of SEQ ID NO: 913865
uuaguagaggcuugaauuc

SEQ ID NO: 960163 - RNA, 19 nt, Artificial Sequence
  Description of Artificial Sequence: Synthetic oligonucleotide
  Antisense strand to SEQ ID NO: 960162
gaauucaagccucuacuaa

SEQ ID NO: 960164 - RNA, 19 nt, Artificial Sequence
  Description of Artificial Sequence: Synthetic oligonucleotide
  Sense strand starting at position 335 of SEQ ID NO: 913865
guuguaucucuuuagguaa

SEQ ID NO: 960165 - RNA, 19 nt, Artificial Sequence
  Description of Artificial Sequence: Synthetic oligonucleotide
  Antisense strand to SEQ ID NO: 960164
uuaccuaaagagauacaac

SEQ ID NO: 960166 - RNA, 19 nt, Artificial Sequence
  Description of Artificial Sequence: Synthetic oligonucleotide
  Sense strand starting at position 2547 of SEQ ID NO: 913865
gcugaauugcuggaccuuu

SEQ ID NO: 960167 - RNA, 19 nt, Artificial Sequence
  Description of Artificial Sequence: Synthetic oligonucleotide
  Antisense strand to SEQ ID NO: 960166
aaagguccagcaauucagc

SEQ ID NO: 960168 - RNA, 19 nt, Artificial Sequence
  Description of Artificial Sequence: Synthetic oligonucleotide
  Sense strand starting at position 338 of SEQ ID NO: 913865
guaucucuuuagguaaauu

SEQ ID NO: 960169 - RNA, 19 nt, Artificial Sequence
  Description of Artificial Sequence: Synthetic oligonucleotide
  Antisense strand to SEQ ID NO: 960168
aauuuaccuaaagagauac

SEQ ID NO: 960170 - RNA, 19 nt, Artificial Sequence
  Description of Artificial Sequence: Synthetic oligonucleotide
  Sense strand starting at position 350 of SEQ ID NO: 913865
guaaauuacugcuccugga

SEQ ID NO: 960171 - RNA, 19 nt, Artificial Sequence
  Description of Artificial Sequence: Synthetic oligonucleotide
  Antisense strand to SEQ ID NO: 960170
uccaggagcaguaauuuac

SEQ ID NO: 960172 - RNA, 19 nt, Artificial Sequence
  Description of Artificial Sequence: Synthetic oligonucleotide
  Sense strand starting at position 1957 of SEQ ID NO: 913865
guuaccuaccauugugaua

SEQ ID NO: 960173 - RNA, 19 nt, Artificial Sequence
  Description of Artificial Sequence: Synthetic oligonucleotide
  Antisense strand to SEQ ID NO: 960172
uaucacaaugguagguaac

SEQ ID NO: 960174 - RNA, 19 nt, Artificial Sequence
  Description of Artificial Sequence: Synthetic oligonucleotide
  Sense strand starting at position 1525 of SEQ ID NO: 913865
gaggaaugccuggguuccu

SEQ ID NO: 960175 - RNA, 19 nt, Artificial Sequence
  Description of Artificial Sequence: Synthetic oligonucleotide
  Antisense strand to SEQ ID NO: 960174
aggaacccaggcauuccuc

SEQ ID NO: 960176 - RNA, 19 nt, Artificial Sequence
  Description of Artificial Sequence: Synthetic oligonucleotide
  Sense strand starting at position 887 of SEQ ID NO: 913865
agcguuaguaaagaauguu

SEQ ID NO: 960177 - RNA, 19 nt, Artificial Sequence
  Description of Artificial Sequence: Synthetic oligonucleotide
  Antisense strand to SEQ ID NO: 960176
aacauucuuuacuaacgcu

SEQ ID NO: 960178 - RNA, 19 nt, Artificial Sequence
  Description of Artificial Sequence: Synthetic oligonucleotide
  Sense strand starting at position 2044 of SEQ ID NO: 913865
ccacgcauucgacaucauu

SEQ ID NO: 960179 - RNA, 19 nt, Artificial Sequence
  Description of Artificial Sequence: Synthetic oligonucleotide
  Antisense strand to SEQ ID NO: 960178
aaugaugucgaaugcgugg

SEQ ID NO: 960180 - RNA, 19 nt, Artificial Sequence
  Description of Artificial Sequence: Synthetic oligonucleotide
  Sense strand starting at position 1442 of SEQ ID NO: 913865
guggaagaugggugucagu

SEQ ID NO: 960181 - RNA, 19 nt, Artificial Sequence
  Description of Artificial Sequence: Synthetic oligonucleotide
  Antisense strand to SEQ ID NO: 960180
acugacacccaucuuccac

SEQ ID NO: 960182 - RNA, 19 nt, Artificial Sequence
  Description of Artificial Sequence: Synthetic oligonucleotide
  Sense strand starting at position 2815 of SEQ ID NO: 913866
guagauguuccgguucugu

SEQ ID NO: 960183 - RNA, 19 nt, Artificial Sequence
  Description of Artificial Sequence: Synthetic oligonucleotide
  Antisense strand to SEQ ID NO: 960182
acagaaccggaacaucuac

SEQ ID NO: 960184 - RNA, 19 nt, Artificial Sequence
  Description of Artificial Sequence: Synthetic oligonucleotide
  Sense strand starting at position 717 of SEQ ID NO: 913866
agcaaaugucaucagacug

SEQ ID NO: 960185 - RNA, 19 nt, Artificial Sequence
  Description of Artificial Sequence: Synthetic oligonucleotide
  Antisense strand to SEQ ID NO: 960184
cagucugaugacauuugcu

SEQ ID NO: 960186 - RNA, 19 nt, Artificial Sequence
  Description of Artificial Sequence: Synthetic oligonucleotide
  Sense strand starting at position 2752 of SEQ ID NO: 913866
gucuaugcgaguuccaguu

SEQ ID NO: 960187 - RNA, 19 nt, Artificial Sequence
  Description of Artificial Sequence: Synthetic oligonucleotide
  Antisense strand to SEQ ID NO: 960186
aacuggaacucgcauagac

SEQ ID NO: 960188 - RNA, 19 nt, Artificial Sequence
  Description of Artificial Sequence: Synthetic oligonucleotide
  Sense strand starting at position 2756 of SEQ ID NO: 913866
augcgaguuccaguuguuc

SEQ ID NO: 960189 - RNA, 19 nt, Artificial Sequence
  Description of Artificial Sequence: Synthetic oligonucleotide
  Antisense strand to SEQ ID NO: 960188
gaacaacuggaacucgcau

SEQ ID NO: 960190 - RNA, 19 nt, Artificial Sequence
  Description of Artificial Sequence: Synthetic oligonucleotide
  Sense strand starting at position 3088 of SEQ ID NO: 913866
uaauauugucuugggaaga

SEQ ID NO: 960191 - RNA, 19 nt, Artificial Sequence
  Description of Artificial Sequence: Synthetic oligonucleotide
  Antisense strand to SEQ ID NO: 960190
ucuucccaagacaauauua

SEQ ID NO: 960192 - RNA, 19 nt, Artificial Sequence
  Description of Artificial Sequence: Synthetic oligonucleotide
  Sense strand starting at position 677 of SEQ ID NO: 913866
gguucucagcaauacaaug

SEQ ID NO: 960193 - RNA, 19 nt, Artificial Sequence
  Description of Artificial Sequence: Synthetic oligonucleotide
  Antisense strand to SEQ ID NO: 960192
cauuguauugcugagaacc

SEQ ID NO: 960194 - RNA, 19 nt, Artificial Sequence
  Description of Artificial Sequence: Synthetic oligonucleotide
  Sense strand starting at position 748 of SEQ ID NO: 913866
agugauuagaaaggccaua

SEQ ID NO: 960195 - RNA, 19 nt, Artificial Sequence
  Description of Artificial Sequence: Synthetic oligonucleotide
  Antisense strand to SEQ ID NO: 960194
uauggccuuucuaaucacu

SEQ ID NO: 960196 - RNA, 19 nt, Artificial Sequence
  Description of Artificial Sequence: Synthetic oligonucleotide
  Sense strand starting at position 3754 of SEQ ID NO: 913866
uguugugucuauuucugga

SEQ ID NO: 960197 - RNA, 19 nt, Artificial Sequence
  Description of Artificial Sequence: Synthetic oligonucleotide
  Antisense strand to SEQ ID NO: 960196
uccagaaauagacacaaca

SEQ ID NO: 960198 - RNA, 19 nt, Artificial Sequence
  Description of Artificial Sequence: Synthetic oligonucleotide
  Sense strand starting at position 2374 of SEQ ID NO: 913866
uagagucguccauaaaugg

SEQ ID NO: 960199 - RNA, 19 nt, Artificial Sequence
  Description of Artificial Sequence: Synthetic oligonucleotide
  Antisense strand to SEQ ID NO: 960198
ccauuuauggacgacucua

SEQ ID NO: 960200 - RNA, 19 nt, Artificial Sequence
  Description of Artificial Sequence: Synthetic oligonucleotide
  Sense strand starting at position 1189 of SEQ ID NO: 913866
ugucucagucauuaacaau

SEQ ID NO: 960201 - RNA, 19 nt, Artificial Sequence
  Description of Artificial Sequence: Synthetic oligonucleotide
  Antisense strand to SEQ ID NO: 960200
auuguuaaugacugagaca

SEQ ID NO: 960202 - RNA, 19 nt, Artificial Sequence
  Description of Artificial Sequence: Synthetic oligonucleotide
  Sense strand starting at position 3751 of SEQ ID NO: 913866
auguguugugucuauuucu

SEQ ID NO: 960203 - RNA, 19 nt, Artificial Sequence
  Description of Artificial Sequence: Synthetic oligonucleotide
  Antisense strand to SEQ ID NO: 960202
agaaauagacacaacacau

SEQ ID NO: 960204 - RNA, 19 nt, Artificial Sequence
  Description of Artificial Sequence: Synthetic oligonucleotide
  Sense strand starting at position 875 of SEQ ID NO: 913866
cagaaugaguugguacauu

SEQ ID NO: 960205 - RNA, 19 nt, Artificial Sequence
  Description of Artificial Sequence: Synthetic oligonucleotide
  Antisense strand to SEQ ID NO: 960204
aauguaccaacucauucug

SEQ ID NO: 960206 - RNA, 19 nt, Artificial Sequence
  Description of Artificial Sequence: Synthetic oligonucleotide
  Sense strand starting at position 386 of SEQ ID NO: 913866
gagacuagugcuuaaagca

SEQ ID NO: 960207 - RNA, 19 nt, Artificial Sequence
  Description of Artificial Sequence: Synthetic oligonucleotide
  Antisense strand to SEQ ID NO: 960206
ugcuuuaagcacuagucuc

SEQ ID NO: 960208 - RNA, 19 nt, Artificial Sequence
  Description of Artificial Sequence: Synthetic oligonucleotide
  Sense strand starting at position 873 of SEQ ID NO: 913866
cucagaaugaguugguaca

SEQ ID NO: 960209 - RNA, 19 nt, Artificial Sequence
  Description of Artificial Sequence: Synthetic oligonucleotide
  Antisense strand to SEQ ID NO: 960208
uguaccaacucauucugag

SEQ ID NO: 960210 - RNA, 19 nt, Artificial Sequence
  Description of Artificial Sequence: Synthetic oligonucleotide
  Sense strand starting at position 874 of SEQ ID NO: 913866
ucagaaugaguugguacau

SEQ ID NO: 960211 - RNA, 19 nt, Artificial Sequence
  Description of Artificial Sequence: Synthetic oligonucleotide
  Antisense strand to SEQ ID NO: 960210
auguaccaacucauucuga

SEQ ID NO: 960212 - RNA, 19 nt, Artificial Sequence
  Description of Artificial Sequence: Synthetic oligonucleotide
  Sense strand starting at position 3085 of SEQ ID NO: 913866
uccuaauauugucuuggga

SEQ ID NO: 960213 - RNA, 19 nt, Artificial Sequence
  Description of Artificial Sequence: Synthetic oligonucleotide
  Antisense strand to SEQ ID NO: 960212
ucccaagacaauauuagga

SEQ ID NO: 960214 - RNA, 19 nt, Artificial Sequence
  Description of Artificial Sequence: Synthetic oligonucleotide
  Sense strand starting at position 2372 of SEQ ID NO: 913866
ucuagagucguccauaaau

SEQ ID NO: 960215 - RNA, 19 nt, Artificial Sequence
  Description of Artificial Sequence: Synthetic oligonucleotide
  Antisense strand to SEQ ID NO: 960214
auuuauggacgacucuaga

SEQ ID NO: 960216 - RNA, 19 nt, Artificial Sequence
  Description of Artificial Sequence: Synthetic oligonucleotide
  Sense strand starting at position 994 of SEQ ID NO: 913866
gcacuaaguuacccugaaa

SEQ ID NO: 960217 - RNA, 19 nt, Artificial Sequence
  Description of Artificial Sequence: Synthetic oligonucleotide
  Antisense strand to SEQ ID NO: 960216
uuucaggguaacuuagugc

SEQ ID NO: 960218 - RNA, 19 nt, Artificial Sequence
  Description of Artificial Sequence: Synthetic oligonucleotide
  Sense strand starting at position 267 of SEQ ID NO: 913866
acagaaauacuccguuuau

SEQ ID NO: 960219 - RNA, 19 nt, Artificial Sequence
  Description of Artificial Sequence: Synthetic oligonucleotide
  Antisense strand to SEQ ID NO: 960218
auaaacggaguauuucugu

SEQ ID NO: 960220 - RNA, 19 nt, Artificial Sequence
  Description of Artificial Sequence: Synthetic oligonucleotide
  Sense strand starting at position 2589 of SEQ ID NO: 913866
uaggaacaucccugugcaa

SEQ ID NO: 960221 - RNA, 19 nt, Artificial Sequence
  Description of Artificial Sequence: Synthetic oligonucleotide
  Antisense strand to SEQ ID NO: 960220
uugcacagggauguuccua

SEQ ID NO: 960222 - RNA, 19 nt, Artificial Sequence
  Description of Artificial Sequence: Synthetic oligonucleotide
  Sense strand starting at position 2591 of SEQ ID NO: 913866
ggaacaucccugugcaaau

SEQ ID NO: 960223 - RNA, 19 nt, Artificial Sequence
  Description of Artificial Sequence: Synthetic oligonucleotide
  Antisense strand to SEQ ID NO: 960222
auuugcacagggauguucc

SEQ ID NO: 960224 - RNA, 19 nt, Artificial Sequence
  Description of Artificial Sequence: Synthetic oligonucleotide
  Sense strand starting at position 898 of SEQ ID NO: 913866
ucaguuggguaucucugaa

SEQ ID NO: 960225 - RNA, 19 nt, Artificial Sequence
  Description of Artificial Sequence: Synthetic oligonucleotide
  Antisense strand to SEQ ID NO: 960224
uucagagauacccaacuga

SEQ ID NO: 960226 - RNA, 19 nt, Artificial Sequence
  Description of Artificial Sequence: Synthetic oligonucleotide
  Sense strand starting at position 1188 of SEQ ID NO: 913866
cugucucagucauuaacaa

SEQ ID NO: 960227 - RNA, 19 nt, Artificial Sequence
  Description of Artificial Sequence: Synthetic oligonucleotide
  Antisense strand to SEQ ID NO: 960226
uuguuaaugacugagacag

SEQ ID NO: 960228 - RNA, 19 nt, Artificial Sequence
  Description of Artificial Sequence: Synthetic oligonucleotide
  Sense strand starting at position 2865 of SEQ ID NO: 913866
auucucuaaucguuaauga

SEQ ID NO: 960229 - RNA, 19 nt, Artificial Sequence
  Description of Artificial Sequence: Synthetic oligonucleotide
  Antisense strand to SEQ ID NO: 960228
ucauuaacgauuagagaau

SEQ ID NO: 960230 - RNA, 19 nt, Artificial Sequence
  Description of Artificial Sequence: Synthetic oligonucleotide
  Sense strand starting at position 1260 of SEQ ID NO: 913866
agacacauuuaugggaagu

SEQ ID NO: 960231 - RNA, 19 nt, Artificial Sequence
  Description of Artificial Sequence: Synthetic oligonucleotide
  Antisense strand to SEQ ID NO: 960230
acuucccauaaaugugucu

SEQ ID NO: 960232 - RNA, 19 nt, Artificial Sequence
  Description of Artificial Sequence: Synthetic oligonucleotide
  Sense strand starting at position 773 of SEQ ID NO: 913866
agucaaguuggaugagcua

SEQ ID NO: 960233 - RNA, 19 nt, Artificial Sequence
  Description of Artificial Sequence: Synthetic oligonucleotide
  Antisense strand to SEQ ID NO: 960232
uagcucauccaacuugacu

SEQ ID NO: 960234 - RNA, 19 nt, Artificial Sequence
  Description of Artificial Sequence: Synthetic oligonucleotide
  Sense strand starting at position 437 of SEQ ID NO: 913866
acuauuuccuucgaauaga

SEQ ID NO: 960235 - RNA, 19 nt, Artificial Sequence
  Description of Artificial Sequence: Synthetic oligonucleotide
  Antisense strand to SEQ ID NO: 960234
ucuauucgaaggaaauagu

SEQ ID NO: 960236 - RNA, 19 nt, Artificial Sequence
  Description of Artificial Sequence: Synthetic oligonucleotide
  Sense strand starting at position 301 of SEQ ID NO: 913866
ccuaacaguuuguuggauu

SEQ ID NO: 960237 - RNA, 19 nt, Artificial Sequence
  Description of Artificial Sequence: Synthetic oligonucleotide
  Antisense strand to SEQ ID NO: 960236
aauccaacaaacuguuagg

SEQ ID NO: 960238 - RNA, 19 nt, Artificial Sequence
  Description of Artificial Sequence: Synthetic oligonucleotide
  Sense strand starting at position 518 of SEQ ID NO: 913866
uuuauuguugcuggagaac

SEQ ID NO: 960239 - RNA, 19 nt, Artificial Sequence
  Description of Artificial Sequence: Synthetic oligonucleotide
  Antisense strand to SEQ ID NO: 960238
guucuccagcaacaauaaa

SEQ ID NO: 960240 - RNA, 19 nt, Artificial Sequence
  Description of Artificial Sequence: Synthetic oligonucleotide
  Sense strand starting at position 2905 of SEQ ID NO: 913866
cguauuugcagcgagugua

SEQ ID NO: 960241 - RNA, 19 nt, Artificial Sequence
  Description of Artificial Sequence: Synthetic oligonucleotide
  Antisense strand to SEQ ID NO: 960240
uacacucgcugcaaauacg

SEQ ID NO: 960242 - RNA, 19 nt, Artificial Sequence
  Description of Artificial Sequence: Synthetic oligonucleotide
  Sense strand starting at position 337 of SEQ ID NO: 913866
guaaguauuucuuaacuga

SEQ ID NO: 960243 - RNA, 19 nt, Artificial Sequence
  Description of Artificial Sequence: Synthetic oligonucleotide
  Antisense strand to SEQ ID NO: 960242
ucaguuaagaaauacuuac

SEQ ID NO: 960244 - RNA, 19 nt, Artificial Sequence
  Description of Artificial Sequence: Synthetic oligonucleotide
  Sense strand starting at position 3143 of SEQ ID NO: 913866
uuguuaauggauuguucuu

SEQ ID NO: 960245 - RNA, 19 nt, Artificial Sequence
  Description of Artificial Sequence: Synthetic oligonucleotide
  Antisense strand to SEQ ID NO: 960244
aagaacaauccauuaacaa

SEQ ID NO: 960246 - RNA, 19 nt, Artificial Sequence
  Description of Artificial Sequence: Synthetic oligonucleotide
  Sense strand starting at position 2528 of SEQ ID NO: 913866
guguuuagucagcacuuga

SEQ ID NO: 960247 - RNA, 19 nt, Artificial Sequence
  Description of Artificial Sequence: Synthetic oligonucleotide
  Antisense strand to SEQ ID NO: 960246
ucaagugcugacuaaacac

SEQ ID NO: 960248 - RNA, 19 nt, Artificial Sequence
  Description of Artificial Sequence: Synthetic oligonucleotide
  Sense strand starting at position 2370 of SEQ ID NO: 913866
uuucuagagucguccauaa

SEQ ID NO: 960249 - RNA, 19 nt, Artificial Sequence
  Description of Artificial Sequence: Synthetic oligonucleotide
  Antisense strand to SEQ ID NO: 960248
uuauggacgacucuagaaa

SEQ ID NO: 960250 - RNA, 19 nt, Artificial Sequence
  Description of Artificial Sequence: Synthetic oligonucleotide
  Sense strand starting at position 2859 of SEQ ID NO: 913866
uuaugcauucucuaaucgu

SEQ ID NO: 960251 - RNA, 19 nt, Artificial Sequence
  Description of Artificial Sequence: Synthetic oligonucleotide
  Antisense strand to SEQ ID NO: 960250
acgauuagagaaugcauaa

SEQ ID NO: 960252 - RNA, 19 nt, Artificial Sequence
  Description of Artificial Sequence: Synthetic oligonucleotide
  Sense strand starting at position 1060 of SEQ ID NO: 913866
ccuuccugcuuggugaaau

SEQ ID NO: 960253 - RNA, 19 nt, Artificial Sequence
  Description of Artificial Sequence: Synthetic oligonucleotide
  Antisense strand to SEQ ID NO: 960252
auuucaccaagcaggaagg

SEQ ID NO: 960254 - RNA, 19 nt, Artificial Sequence
  Description of Artificial Sequence: Synthetic oligonucleotide
  Sense strand starting at position 2601 of SEQ ID NO: 913866
ugugcaaaucuuuguacag

SEQ ID NO: 960255 - RNA, 19 nt, Artificial Sequence
  Description of Artificial Sequence: Synthetic oligonucleotide
  Antisense strand to SEQ ID NO: 960254
cuguacaaagauuugcaca

SEQ ID NO: 960256 - RNA, 19 nt, Artificial Sequence
  Description of Artificial Sequence: Synthetic oligonucleotide
  Sense strand starting at position 300 of SEQ ID NO: 913866
gccuaacaguuuguuggau

SEQ ID NO: 960257 - RNA, 19 nt, Artificial Sequence
  Description of Artificial Sequence: Synthetic oligonucleotide
  Antisense strand to SEQ ID NO: 960256
auccaacaaacuguuaggc

SEQ ID NO: 960258 - RNA, 19 nt, Artificial Sequence
  Description of Artificial Sequence: Synthetic oligonucleotide
  Sense strand starting at position 1059 of SEQ ID NO: 913866
uccuuccugcuuggugaaa

SEQ ID NO: 960259 - RNA, 19 nt, Artificial Sequence
  Description of Artificial Sequence: Synthetic oligonucleotide
  Antisense strand to SEQ ID NO: 960258
uuucaccaagcaggaagga

SEQ ID NO: 960260 - RNA, 19 nt, Artificial Sequence
  Description of Artificial Sequence: Synthetic oligonucleotide
  Sense strand starting at position 2487 of SEQ ID NO: 913866
uugcuuccugagcaguauu

SEQ ID NO: 960261 - RNA, 19 nt, Artificial Sequence
  Description of Artificial Sequence: Synthetic oligonucleotide
  Antisense strand to SEQ ID NO: 960260
aauacugcucaggaagcaa

SEQ ID NO: 960262 - RNA, 19 nt, Artificial Sequence
  Description of Artificial Sequence: Synthetic oligonucleotide
  Sense strand starting at position 2310 of SEQ ID NO: 913867
ggcaauauuucuguucuca

SEQ ID NO: 960263 - RNA, 19 nt, Artificial Sequence
  Description of Artificial Sequence: Synthetic oligonucleotide
  Antisense strand to SEQ ID NO: 960262
ugagaacagaaauauugcc

SEQ ID NO: 960264 - RNA, 19 nt, Artificial Sequence
  Description of Artificial Sequence: Synthetic oligonucleotide
  Sense strand starting at position 2663 of SEQ ID NO: 913867
cucugagugagagagucau

SEQ ID NO: 960265 - RNA, 19 nt, Artificial Sequence
  Description of Artificial Sequence: Synthetic oligonucleotide
  Antisense strand to SEQ ID NO: 960264
augacucucucacucagag

SEQ ID NO: 960266 - RNA, 19 nt, Artificial Sequence
  Description of Artificial Sequence: Synthetic oligonucleotide
  Sense strand starting at position 830 of SEQ ID NO: 913867
auggaaggaaagugugauu

SEQ ID NO: 960267 - RNA, 19 nt, Artificial Sequence
  Description of Artificial Sequence: Synthetic oligonucleotide
  Antisense strand to SEQ ID NO: 960266
aaucacacuuuccuuccau

SEQ ID NO: 960268 - RNA, 19 nt, Artificial Sequence
  Description of Artificial Sequence: Synthetic oligonucleotide
  Sense strand starting at position 2669 of SEQ ID NO: 913867
gugagagagucaucaggag

SEQ ID NO: 960269 - RNA, 19 nt, Artificial Sequence
  Description of Artificial Sequence: Synthetic oligonucleotide
  Antisense strand to SEQ ID NO: 960268
cuccugaugacucucucac

SEQ ID NO: 960270 - RNA, 19 nt, Artificial Sequence
  Description of Artificial Sequence: Synthetic oligonucleotide
  Sense strand starting at position 1395 of SEQ ID NO: 913867
uugaacuuuccagagucua

SEQ ID NO: 960271 - RNA, 19 nt, Artificial Sequence
  Description of Artificial Sequence: Synthetic oligonucleotide
  Antisense strand to SEQ ID NO: 960270
uagacucuggaaaguucaa

SEQ ID NO: 960272 - RNA, 19 nt, Artificial Sequence
  Description of Artificial Sequence: Synthetic oligonucleotide
  Sense strand starting at position 2654 of SEQ ID NO: 913867
aagauaacucucugaguga

SEQ ID NO: 960273 - RNA, 19 nt, Artificial Sequence
  Description of Artificial Sequence: Synthetic oligonucleotide
  Antisense strand to SEQ ID NO: 960272
ucacucagagaguuaucuu

SEQ ID NO: 960274 - RNA, 19 nt, Artificial Sequence
  Description of Artificial Sequence: Synthetic oligonucleotide
  Sense strand starting at position 2658 of SEQ ID NO: 913867
uaacucucugagugagaga

SEQ ID NO: 960275 - RNA, 19 nt, Artificial Sequence
  Description of Artificial Sequence: Synthetic oligonucleotide
  Antisense strand to SEQ ID NO: 960274
ucucucacucagagaguua

SEQ ID NO: 960276 - RNA, 19 nt, Artificial Sequence
  Description of Artificial Sequence: Synthetic oligonucleotide
  Sense strand starting at position 2085 of SEQ ID NO: 913867
cugagucucagugauuaag

SEQ ID NO: 960277 - RNA, 19 nt, Artificial Sequence
  Description of Artificial Sequence: Synthetic oligonucleotide
  Antisense strand to SEQ ID NO: 960276
cuuaaucacugagacucag

SEQ ID NO: 960278 - RNA, 19 nt, Artificial Sequence
  Description of Artificial Sequence: Synthetic oligonucleotide
  Sense strand starting at position 2653 of SEQ ID NO: 913867
uaagauaacucucugagug

SEQ ID NO: 960279 - RNA, 19 nt, Artificial Sequence
  Description of Artificial Sequence: Synthetic oligonucleotide
  Antisense strand to SEQ ID NO: 960278
cacucagagaguuaucuua

SEQ ID NO: 960280 - RNA, 19 nt, Artificial Sequence
  Description of Artificial Sequence: Synthetic oligonucleotide
  Sense strand starting at position 3404 of SEQ ID NO: 913867
agaaguugucaaugaauau

SEQ ID NO: 960281 - RNA, 19 nt, Artificial Sequence
  Description of Artificial Sequence: Synthetic oligonucleotide
  Antisense strand to SEQ ID NO: 960280
auauucauugacaacuucu

SEQ ID NO: 960282 - RNA, 19 nt, Artificial Sequence
  Description of Artificial Sequence: Synthetic oligonucleotide
  Sense strand starting at position 850 of SEQ ID NO: 913867
gagacaacucuagggucuu

SEQ ID NO: 960283 - RNA, 19 nt, Artificial Sequence
  Description of Artificial Sequence: Synthetic oligonucleotide
  Antisense strand to SEQ ID NO: 960282
aagacccuagaguugucuc

SEQ ID NO: 960284 - RNA, 19 nt, Artificial Sequence
  Description of Artificial Sequence: Synthetic oligonucleotide
  Sense strand starting at position 886 of SEQ ID NO: 913867
auagauaucucccugaagu

SEQ ID NO: 960285 - RNA, 19 nt, Artificial Sequence
  Description of Artificial Sequence: Synthetic oligonucleotide
  Antisense strand to SEQ ID NO: 960284
acuucagggagauaucuau

SEQ ID NO: 960286 - RNA, 19 nt, Artificial Sequence
  Description of Artificial Sequence: Synthetic oligonucleotide
  Sense strand starting at position 1886 of SEQ ID NO: 913867
ggugauaaauacuuuacuc

SEQ ID NO: 960287 - RNA, 19 nt, Artificial Sequence
  Description of Artificial Sequence: Synthetic oligonucleotide
  Antisense strand to SEQ ID NO: 960286
gaguaaaguauuuaucacc

SEQ ID NO: 960288 - RNA, 19 nt, Artificial Sequence
  Description of Artificial Sequence: Synthetic oligonucleotide
  Sense strand starting at position 2355 of SEQ ID NO: 913867
uggauuagugcagaaguca

SEQ ID NO: 960289 - RNA, 19 nt, Artificial Sequence
  Description of Artificial Sequence: Synthetic oligonucleotide
  Antisense strand to SEQ ID NO: 960288
ugacuucugcacuaaucca

SEQ ID NO: 960290 - RNA, 19 nt, Artificial Sequence
  Description of Artificial Sequence: Synthetic oligonucleotide
  Sense strand starting at position 1477 of SEQ ID NO: 913867
gcucuaauuuagucccagu

SEQ ID NO: 960291 - RNA, 19 nt, Artificial Sequence
  Description of Artificial Sequence: Synthetic oligonucleotide
  Antisense strand to SEQ ID NO: 960290
acugggacuaaauuagagc

SEQ ID NO: 960292 - RNA, 19 nt, Artificial Sequence
  Description of Artificial Sequence: Synthetic oligonucleotide
  Sense strand starting at position 2529 of SEQ ID NO: 913867
auguccaaucuuggauuaa

SEQ ID NO: 960293 - RNA, 19 nt, Artificial Sequence
  Description of Artificial Sequence: Synthetic oligonucleotide
  Antisense strand to SEQ ID NO: 960292
uuaauccaagauuggacau

SEQ ID NO: 960294 - RNA, 19 nt, Artificial Sequence
  Description of Artificial Sequence: Synthetic oligonucleotide
  Sense strand starting at position 1997 of SEQ ID NO: 913867
aaaugagugcuugaucucu

SEQ ID NO: 960295 - RNA, 19 nt, Artificial Sequence
  Description of Artificial Sequence: Synthetic oligonucleotide
  Antisense strand to SEQ ID NO: 960294
agagaucaagcacucauuu

SEQ ID NO: 960296 - RNA, 19 nt, Artificial Sequence
  Description of Artificial Sequence: Synthetic oligonucleotide
  Sense strand starting at position 833 of SEQ ID NO: 913867
gaaggaaagugugauuuga

SEQ ID NO: 960297 - RNA, 19 nt, Artificial Sequence
  Description of Artificial Sequence: Synthetic oligonucleotide
  Antisense strand to SEQ ID NO: 960296
ucaaaucacacuuuccuuc

SEQ ID NO: 960298 - RNA, 19 nt, Artificial Sequence
  Description of Artificial Sequence: Synthetic oligonucleotide
  Sense strand starting at position 1212 of SEQ ID NO: 913867
cuauauacaucaucagguu

SEQ ID NO: 960299 - RNA, 19 nt, Artificial Sequence
  Description of Artificial Sequence: Synthetic oligonucleotide
  Antisense strand to SEQ ID NO: 960298
aaccugaugauguauauag

SEQ ID NO: 960300 - RNA, 19 nt, Artificial Sequence
  Description of Artificial Sequence: Synthetic oligonucleotide
  Sense strand starting at position 3183 of SEQ ID NO: 913867
gcauaacauuauguagaau

SEQ ID NO: 960301 - RNA, 19 nt, Artificial Sequence
  Description of Artificial Sequence: Synthetic oligonucleotide
  Antisense strand to SEQ ID NO: 960300
auucuacauaauguuaugc

SEQ ID NO: 960302 - RNA, 19 nt, Artificial Sequence
  Description of Artificial Sequence: Synthetic oligonucleotide
  Sense strand starting at position 163 of SEQ ID NO: 913867
gggugaauggaugguuuca

SEQ ID NO: 960303 - RNA, 19 nt, Artificial Sequence
  Description of Artificial Sequence: Synthetic oligonucleotide
  Antisense strand to SEQ ID NO: 960302
ugaaaccauccauucaccc

SEQ ID NO: 960304 - RNA, 19 nt, Artificial Sequence
  Description of Artificial Sequence: Synthetic oligonucleotide
  Sense strand starting at position 2368 of SEQ ID NO: 913867
aagucaauauuugauugga

SEQ ID NO: 960305 - RNA, 19 nt, Artificial Sequence
  Description of Artificial Sequence: Synthetic oligonucleotide
  Antisense strand to SEQ ID NO: 960304
uccaaucaaauauugacuu

SEQ ID NO: 960306 - RNA, 19 nt, Artificial Sequence
  Description of Artificial Sequence: Synthetic oligonucleotide
  Sense strand starting at position 3942 of SEQ ID NO: 913867
cgacaacaaucuuuaaggu

SEQ ID NO: 960307 - RNA, 19 nt, Artificial Sequence
  Description of Artificial Sequence: Synthetic oligonucleotide
  Antisense strand to SEQ ID NO: 960306
accuuaaagauuguugucg

SEQ ID NO: 960308 - RNA, 19 nt, Artificial Sequence
  Description of Artificial Sequence: Synthetic oligonucleotide
  Sense strand starting at position 204 of SEQ ID NO: 913867
agcucaucuguauaccaua

SEQ ID NO: 960309 - RNA, 19 nt, Artificial Sequence
  Description of Artificial Sequence: Synthetic oligonucleotide
  Antisense strand to SEQ ID NO: 960308
uaugguauacagaugagcu

SEQ ID NO: 960310 - RNA, 19 nt, Artificial Sequence
  Description of Artificial Sequence: Synthetic oligonucleotide
  Sense strand starting at position 1538 of SEQ ID NO: 913867
ugaucuugauugccuagaa

SEQ ID NO: 960311 - RNA, 19 nt, Artificial Sequence
  Description of Artificial Sequence: Synthetic oligonucleotide
  Antisense strand to SEQ ID NO: 960310
uucuaggcaaucaagauca

SEQ ID NO: 960312 - RNA, 19 nt, Artificial Sequence
  Description of Artificial Sequence: Synthetic oligonucleotide
  Sense strand starting at position 2353 of SEQ ID NO: 913867
uuuggauuagugcagaagu

SEQ ID NO: 960313 - RNA, 19 nt, Artificial Sequence
  Description of Artificial Sequence: Synthetic oligonucleotide
  Antisense strand to SEQ ID NO: 960312
acuucugcacuaauccaaa

SEQ ID NO: 960314 - RNA, 19 nt, Artificial Sequence
  Description of Artificial Sequence: Synthetic oligonucleotide
  Sense strand starting at position 2687 of SEQ ID NO: 913867
gcacuuuaccuguauuaag

SEQ ID NO: 960315 - RNA, 19 nt, Artificial Sequence
  Description of Artificial Sequence: Synthetic oligonucleotide
  Antisense strand to SEQ ID NO: 960314
cuuaauacagguaaagugc

SEQ ID NO: 960316 - RNA, 19 nt, Artificial Sequence
  Description of Artificial Sequence: Synthetic oligonucleotide
  Sense strand starting at position 2177 of SEQ ID NO: 913867
agggcuucucucuaaccuu

SEQ ID NO: 960317 - RNA, 19 nt, Artificial Sequence
  Description of Artificial Sequence: Synthetic oligonucleotide
  Antisense strand to SEQ ID NO: 960316
aagguuagagagaagcccu

SEQ ID NO: 960318 - RNA, 19 nt, Artificial Sequence
  Description of Artificial Sequence: Synthetic oligonucleotide
  Sense strand starting at position 151 of SEQ ID NO: 913867
cccuuaucccaugggugaa

SEQ ID NO: 960319 - RNA, 19 nt, Artificial Sequence
  Description of Artificial Sequence: Synthetic oligonucleotide
  Antisense strand to SEQ ID NO: 960318
uucacccaugggauaaggg

SEQ ID NO: 960320 - RNA, 19 nt, Artificial Sequence
  Description of Artificial Sequence: Synthetic oligonucleotide
  Sense strand starting at position 1687 of SEQ ID NO: 913867
ccagauaaggagugcucau

SEQ ID NO: 960321 - RNA, 19 nt, Artificial Sequence
  Description of Artificial Sequence: Synthetic oligonucleotide
  Antisense strand to SEQ ID NO: 960320
augagcacuccuuaucugg

SEQ ID NO: 960322 - RNA, 19 nt, Artificial Sequence
  Description of Artificial Sequence: Synthetic oligonucleotide
  Sense strand starting at position 2130 of SEQ ID NO: 913867
gcugaauucucccuaauga

SEQ ID NO: 960323 - RNA, 19 nt, Artificial Sequence
  Description of Artificial Sequence: Synthetic oligonucleotide
  Antisense strand to SEQ ID NO: 960322
ucauuagggagaauucagc

SEQ ID NO: 960324 - RNA, 19 nt, Artificial Sequence
  Description of Artificial Sequence: Synthetic oligonucleotide
  Sense strand starting at position 1535 of SEQ ID NO: 913867
acaugaucuugauugccua

SEQ ID NO: 960325 - RNA, 19 nt, Artificial Sequence
  Description of Artificial Sequence: Synthetic oligonucleotide
  Antisense strand to SEQ ID NO: 960324
uaggcaaucaagaucaugu

SEQ ID NO: 960326 - RNA, 19 nt, Artificial Sequence
  Description of Artificial Sequence: Synthetic oligonucleotide
  Sense strand starting at position 3195 of SEQ ID NO: 913867
guagaauagcuguggauaa

SEQ ID NO: 960327 - RNA, 19 nt, Artificial Sequence
  Description of Artificial Sequence: Synthetic oligonucleotide
  Antisense strand to SEQ ID NO: 960326
uuauccacagcuauucuac

SEQ ID NO: 960328 - RNA, 19 nt, Artificial Sequence
  Description of Artificial Sequence: Synthetic oligonucleotide
  Sense strand starting at position 1992 of SEQ ID NO: 913867
aagugaaaugagugcuuga

SEQ ID NO: 960329 - RNA, 19 nt, Artificial Sequence
  Description of Artificial Sequence: Synthetic oligonucleotide
  Antisense strand to SEQ ID NO: 960328
ucaagcacucauuucacuu

SEQ ID NO: 960330 - RNA, 19 nt, Artificial Sequence
  Description of Artificial Sequence: Synthetic oligonucleotide
  Sense strand starting at position 3345 of SEQ ID NO: 913867
uguuaauaauggcugaacu

SEQ ID NO: 960331 - RNA, 19 nt, Artificial Sequence
  Description of Artificial Sequence: Synthetic oligonucleotide
  Antisense strand to SEQ ID NO: 960330
aguucagccauuauuaaca

SEQ ID NO: 960332 - RNA, 19 nt, Artificial Sequence
  Description of Artificial Sequence: Synthetic oligonucleotide
  Sense strand starting at position 1857 of SEQ ID NO: 913867
cuguuuaaucagugauuaa

SEQ ID NO: 960333 - RNA, 19 nt, Artificial Sequence
  Description of Artificial Sequence: Synthetic oligonucleotide
  Antisense strand to SEQ ID NO: 960332
uuaaucacugauuaaacag

SEQ ID NO: 960334 - RNA, 19 nt, Artificial Sequence
  Description of Artificial Sequence: Synthetic oligonucleotide
  Sense strand starting at position 1995 of SEQ ID NO: 913867
ugaaaugagugcuugaucu

SEQ ID NO: 960335 - RNA, 19 nt, Artificial Sequence
  Description of Artificial Sequence: Synthetic oligonucleotide
  Antisense strand to SEQ ID NO: 960334
agaucaagcacucauuuca

SEQ ID NO: 960336 - RNA, 19 nt, Artificial Sequence
  Description of Artificial Sequence: Synthetic oligonucleotide
  Sense strand starting at position 2836 of SEQ ID NO: 913867
gcagcugauccaggaaauu

SEQ ID NO: 960337 - RNA, 19 nt, Artificial Sequence
  Description of Artificial Sequence: Synthetic oligonucleotide
  Antisense strand to SEQ ID NO: 960336
aauuuccuggaucagcugc

SEQ ID NO: 960338 - RNA, 19 nt, Artificial Sequence
  Description of Artificial Sequence: Synthetic oligonucleotide
  Sense strand starting at position 3656 of SEQ ID NO: 913867
ugugauacuuuaucacucu

SEQ ID NO: 960339 - RNA, 19 nt, Artificial Sequence
  Description of Artificial Sequence: Synthetic oligonucleotide
  Antisense strand to SEQ ID NO: 960338
agagugauaaaguaucaca

SEQ ID NO: 960340 - RNA, 19 nt, Artificial Sequence
  Description of Artificial Sequence: Synthetic oligonucleotide
  Sense strand starting at position 1370 of SEQ ID NO: 913867
gcuggaaagaauugcagua

SEQ ID NO: 960341 - RNA, 19 nt, Artificial Sequence
  Description of Artificial Sequence: Synthetic oligonucleotide
  Antisense strand to SEQ ID NO: 960340
uacugcaauucuuuccagc

SEQ ID NO: 960342 - RNA, 19 nt, Artificial Sequence
  Description of Artificial Sequence: Synthetic oligonucleotide
  Sense strand starting at position 1016 of SEQ ID NO: 913868
cuuaaucugggcuauaaca

SEQ ID NO: 960343 - RNA, 19 nt, Artificial Sequence
  Description of Artificial Sequence: Synthetic oligonucleotide
  Antisense strand to SEQ ID NO: 960342
uguuauagcccagauuaag

SEQ ID NO: 960344 - RNA, 19 nt, Artificial Sequence
  Description of Artificial Sequence: Synthetic oligonucleotide
  Sense strand starting at position 2846 of SEQ ID NO: 913868
agaguauuacucuaccgga

SEQ ID NO: 960345 - RNA, 19 nt, Artificial Sequence
  Description of Artificial Sequence: Synthetic oligonucleotide
  Antisense strand to SEQ ID NO: 960344
uccgguagaguaauacucu

SEQ ID NO: 960346 - RNA, 19 nt, Artificial Sequence
  Description of Artificial Sequence: Synthetic oligonucleotide
  Sense strand starting at position 222 of SEQ ID NO: 913868
cugauuaacuggucuagaa

SEQ ID NO: 960347 - RNA, 19 nt, Artificial Sequence
  Description of Artificial Sequence: Synthetic oligonucleotide
  Antisense strand to SEQ ID NO: 960346
uucuagaccaguuaaucag

SEQ ID NO: 960348 - RNA, 19 nt, Artificial Sequence
  Description of Artificial Sequence: Synthetic oligonucleotide
  Sense strand starting at position 1432 of SEQ ID NO: 913868
uugucaagaacauguggaa

SEQ ID NO: 960349 - RNA, 19 nt, Artificial Sequence
  Description of Artificial Sequence: Synthetic oligonucleotide
  Antisense strand to SEQ ID NO: 960348
uuccacauguucuugacaa

SEQ ID NO: 960350 - RNA, 19 nt, Artificial Sequence
  Description of Artificial Sequence: Synthetic oligonucleotide
  Sense strand starting at position 2777 of SEQ ID NO: 913868
acauaaauauagucggauu

SEQ ID NO: 960351 - RNA, 19 nt, Artificial Sequence
  Description of Artificial Sequence: Synthetic oligonucleotide
  Antisense strand to SEQ ID NO: 960350
aauccgacuauauuuaugu

SEQ ID NO: 960352 - RNA, 19 nt, Artificial Sequence
  Description of Artificial Sequence: Synthetic oligonucleotide
  Sense strand starting at position 76 of SEQ ID NO: 913868
cccaguuggcaggaacauu

SEQ ID NO: 960353 - RNA, 19 nt, Artificial Sequence
  Description of Artificial Sequence: Synthetic oligonucleotide
  Antisense strand to SEQ ID NO: 960352
aauguuccugccaacuggg

SEQ ID NO: 960354 - RNA, 19 nt, Artificial Sequence
  Description of Artificial Sequence: Synthetic oligonucleotide
  Sense strand starting at position 674 of SEQ ID NO: 913868
cugacucuggguggaauau

SEQ ID NO: 960355 - RNA, 19 nt, Artificial Sequence
  Description of Artificial Sequence: Synthetic oligonucleotide
  Antisense strand to SEQ ID NO: 960354
auauuccacccagagucag

SEQ ID NO: 960356 - RNA, 19 nt, Artificial Sequence
  Description of Artificial Sequence: Synthetic oligonucleotide
  Sense strand starting at position 445 of SEQ ID NO: 913868
ccuuucuagagugaucgau

SEQ ID NO: 960357 - RNA, 19 nt, Artificial Sequence
  Description of Artificial Sequence: Synthetic oligonucleotide
  Antisense strand to SEQ ID NO: 960356
aucgaucacucuagaaagg

SEQ ID NO: 960358 - RNA, 19 nt, Artificial Sequence
  Description of Artificial Sequence: Synthetic oligonucleotide
  Sense strand starting at position 150 of SEQ ID NO: 913868
uugagugacgcagauauau

SEQ ID NO: 960359 - RNA, 19 nt, Artificial Sequence
  Description of Artificial Sequence: Synthetic oligonucleotide
  Antisense strand to SEQ ID NO: 960358
auauaucugcgucacucaa

SEQ ID NO: 960360 - RNA, 19 nt, Artificial Sequence
  Description of Artificial Sequence: Synthetic oligonucleotide
  Sense strand starting at position 2239 of SEQ ID NO: 913868
agcauauccugaguauaag

SEQ ID NO: 960361 - RNA, 19 nt, Artificial Sequence
  Description of Artificial Sequence: Synthetic oligonucleotide
  Antisense strand to SEQ ID NO: 960360
cuuauacucaggauaugcu

SEQ ID NO: 960362 - RNA, 19 nt, Artificial Sequence
  Description of Artificial Sequence: Synthetic oligonucleotide
  Sense strand starting at position 3449 of SEQ ID NO: 913868
ccuuucucccugggauaca

SEQ ID NO: 960363 - RNA, 19 nt, Artificial Sequence
  Description of Artificial Sequence: Synthetic oligonucleotide
  Antisense strand to SEQ ID NO: 960362
uguaucccagggagaaagg

SEQ ID NO: 960364 - RNA, 19 nt, Artificial Sequence
  Description of Artificial Sequence: Synthetic oligonucleotide
  Sense strand starting at position 2240 of SEQ ID NO: 913868
gcauauccugaguauaagu

SEQ ID NO: 960365 - RNA, 19 nt, Artificial Sequence
  Description of Artificial Sequence: Synthetic oligonucleotide
  Antisense strand to SEQ ID NO: 960364
acuuauacucaggauaugc

SEQ ID NO: 960366 - RNA, 19 nt, Artificial Sequence
  Description of Artificial Sequence: Synthetic oligonucleotide
  Sense strand starting at position 13 of SEQ ID NO: 913868
cuugccaucagugaacgaa

SEQ ID NO: 960367 - RNA, 19 nt, Artificial Sequence
  Description of Artificial Sequence: Synthetic oligonucleotide
  Antisense strand to SEQ ID NO: 960366
uucguucacugauggcaag

SEQ ID NO: 960368 - RNA, 19 nt, Artificial Sequence
  Description of Artificial Sequence: Synthetic oligonucleotide
  Sense strand starting at position 2747 of SEQ ID NO: 913868
gcugaaauauucuccacug

SEQ ID NO: 960369 - RNA, 19 nt, Artificial Sequence
  Description of Artificial Sequence: Synthetic oligonucleotide
  Antisense strand to SEQ ID NO: 960368
caguggagaauauuucagc

SEQ ID NO: 960370 - RNA, 19 nt, Artificial Sequence
  Description of Artificial Sequence: Synthetic oligonucleotide
  Sense strand starting at position 1037 of SEQ ID NO: 913868
gaguaacacuggcucauua

SEQ ID NO: 960371 - RNA, 19 nt, Artificial Sequence
  Description of Artificial Sequence: Synthetic oligonucleotide
  Antisense strand to SEQ ID NO: 960370
uaaugagccaguguuacuc

SEQ ID NO: 960372 - RNA, 19 nt, Artificial Sequence
  Description of Artificial Sequence: Synthetic oligonucleotide
  Sense strand starting at position 152 of SEQ ID NO: 913868
gagugacgcagauauaugu

SEQ ID NO: 960373 - RNA, 19 nt, Artificial Sequence
  Description of Artificial Sequence: Synthetic oligonucleotide
  Antisense strand to SEQ ID NO: 960372
acauauaucugcgucacuc

SEQ ID NO: 960374 - RNA, 19 nt, Artificial Sequence
  Description of Artificial Sequence: Synthetic oligonucleotide
  Sense strand starting at position 2245 of SEQ ID NO: 913868
uccugaguauaaguguaaa

SEQ ID NO: 960375 - RNA, 19 nt, Artificial Sequence
  Description of Artificial Sequence: Synthetic oligonucleotide
  Antisense strand to SEQ ID NO: 960374
uuuacacuuauacucagga

SEQ ID NO: 960376 - RNA, 19 nt, Artificial Sequence
  Description of Artificial Sequence: Synthetic oligonucleotide
  Sense strand starting at position 673 of SEQ ID NO: 913868
gcugacucuggguggaaua

SEQ ID NO: 960377 - RNA, 19 nt, Artificial Sequence
  Description of Artificial Sequence: Synthetic oligonucleotide
  Antisense strand to SEQ ID NO: 960376
uauuccacccagagucagc

SEQ ID NO: 960378 - RNA, 19 nt, Artificial Sequence
  Description of Artificial Sequence: Synthetic oligonucleotide
  Sense strand starting at position 1153 of SEQ ID NO: 913868
guguuauccgaagaccgag

SEQ ID NO: 960379 - RNA, 19 nt, Artificial Sequence
  Description of Artificial Sequence: Synthetic oligonucleotide
  Antisense strand to SEQ ID NO: 960378
cucggucuucggauaacac

SEQ ID NO: 960380 - RNA, 19 nt, Artificial Sequence
  Description of Artificial Sequence: Synthetic oligonucleotide
  Sense strand starting at position 672 of SEQ ID NO: 913868
ggcugacucuggguggaau

SEQ ID NO: 960381 - RNA, 19 nt, Artificial Sequence
  Description of Artificial Sequence: Synthetic oligonucleotide
  Antisense strand to SEQ ID NO: 960380
auuccacccagagucagcc

SEQ ID NO: 960382 - RNA, 19 nt, Artificial Sequence
  Description of Artificial Sequence: Synthetic oligonucleotide
  Sense strand starting at position 444 of SEQ ID NO: 913868
accuuucuagagugaucga

SEQ ID NO: 960383 - RNA, 19 nt, Artificial Sequence
  Description of Artificial Sequence: Synthetic oligonucleotide
  Antisense strand to SEQ ID NO: 960382
ucgaucacucuagaaaggu

SEQ ID NO: 960384 - RNA, 19 nt, Artificial Sequence
  Description of Artificial Sequence: Synthetic oligonucleotide
  Sense strand starting at position 323 of SEQ ID NO: 913868
ugcucugugaaaggauauc

SEQ ID NO: 960385 - RNA, 19 nt, Artificial Sequence
  Description of Artificial Sequence: Synthetic oligonucleotide
  Antisense strand to SEQ ID NO: 960384
gauauccuuucacagagca

SEQ ID NO: 960386 - RNA, 19 nt, Artificial Sequence
  Description of Artificial Sequence: Synthetic oligonucleotide
  Sense strand starting at position 1014 of SEQ ID NO: 913868
gucuuaaucugggcuauaa

SEQ ID NO: 960387 - RNA, 19 nt, Artificial Sequence
  Description of Artificial Sequence: Synthetic oligonucleotide
  Antisense strand to SEQ ID NO: 960386
uuauagcccagauuaagac

SEQ ID NO: 960388 - RNA, 19 nt, Artificial Sequence
  Description of Artificial Sequence: Synthetic oligonucleotide
  Sense strand starting at position 3233 of SEQ ID NO: 913868
ugguucugauguucuuaaa

SEQ ID NO: 960389 - RNA, 19 nt, Artificial Sequence
  Description of Artificial Sequence: Synthetic oligonucleotide
  Antisense strand to SEQ ID NO: 960388
uuuaagaacaucagaacca

SEQ ID NO: 960390 - RNA, 19 nt, Artificial Sequence
  Description of Artificial Sequence: Synthetic oligonucleotide
  Sense strand starting at position 447 of SEQ ID NO: 913868
uuucuagagugaucgauuc

SEQ ID NO: 960391 - RNA, 19 nt, Artificial Sequence
  Description of Artificial Sequence: Synthetic oligonucleotide
  Antisense strand to SEQ ID NO: 960390
gaaucgaucacucuagaaa

SEQ ID NO: 960392 - RNA, 19 nt, Artificial Sequence
  Description of Artificial Sequence: Synthetic oligonucleotide
  Sense strand starting at position 16 of SEQ ID NO: 913868
gccaucagugaacgaauca

SEQ ID NO: 960393 - RNA, 19 nt, Artificial Sequence
  Description of Artificial Sequence: Synthetic oligonucleotide
  Antisense strand to SEQ ID NO: 960392
ugauucguucacugauggc

SEQ ID NO: 960394 - RNA, 19 nt, Artificial Sequence
  Description of Artificial Sequence: Synthetic oligonucleotide
  Sense strand starting at position 117 of SEQ ID NO: 913868
agaggauuccacugcugca

SEQ ID NO: 960395 - RNA, 19 nt, Artificial Sequence
  Description of Artificial Sequence: Synthetic oligonucleotide
  Antisense strand to SEQ ID NO: 960394
ugcagcaguggaauccucu

SEQ ID NO: 960396 - RNA, 19 nt, Artificial Sequence
  Description of Artificial Sequence: Synthetic oligonucleotide
  Sense strand starting at position 2838 of SEQ ID NO: 913868
gcguuacaagaguauuacu

SEQ ID NO: 960397 - RNA, 19 nt, Artificial Sequence
  Description of Artificial Sequence: Synthetic oligonucleotide
  Antisense strand to SEQ ID NO: 960396
aguaauacucuuguaacgc

SEQ ID NO: 960398 - RNA, 19 nt, Artificial Sequence
  Description of Artificial Sequence: Synthetic oligonucleotide
  Sense strand starting at position 510 of SEQ ID NO: 913868
aagacuauaucugagggaa

SEQ ID NO: 960399 - RNA, 19 nt, Artificial Sequence
  Description of Artificial Sequence: Synthetic oligonucleotide
  Antisense strand to SEQ ID NO: 960398
uucccucagauauagucuu

SEQ ID NO: 960400 - RNA, 19 nt, Artificial Sequence
  Description of Artificial Sequence: Synthetic oligonucleotide
  Sense strand starting at position 1013 of SEQ ID NO: 913868
ggucuuaaucugggcuaua

SEQ ID NO: 960401 - RNA, 19 nt, Artificial Sequence
  Description of Artificial Sequence: Synthetic oligonucleotide
  Antisense strand to SEQ ID NO: 960400
uauagcccagauuaagacc

SEQ ID NO: 960402 - RNA, 19 nt, Artificial Sequence
  Description of Artificial Sequence: Synthetic oligonucleotide
  Sense strand starting at position 148 of SEQ ID NO: 913868
gcuugagugacgcagauau

SEQ ID NO: 960403 - RNA, 19 nt, Artificial Sequence
  Description of Artificial Sequence: Synthetic oligonucleotide
  Antisense strand to SEQ ID NO: 960402
auaucugcgucacucaagc

SEQ ID NO: 960404 - RNA, 19 nt, Artificial Sequence
  Description of Artificial Sequence: Synthetic oligonucleotide
  Sense strand starting at position 3266 of SEQ ID NO: 913868
aacgccuagcuguaaauau

SEQ ID NO: 960405 - RNA, 19 nt, Artificial Sequence
  Description of Artificial Sequence: Synthetic oligonucleotide
  Antisense strand to SEQ ID NO: 960404
auauuuacagcuaggcguu

SEQ ID NO: 960406 - RNA, 19 nt, Artificial Sequence
  Description of Artificial Sequence: Synthetic oligonucleotide
  Sense strand starting at position 2830 of SEQ ID NO: 913868
ugcacacugcguuacaaga

SEQ ID NO: 960407 - RNA, 19 nt, Artificial Sequence
  Description of Artificial Sequence: Synthetic oligonucleotide
  Antisense strand to SEQ ID NO: 960406
ucuuguaacgcagugugca

SEQ ID NO: 960408 - RNA, 19 nt, Artificial Sequence
  Description of Artificial Sequence: Synthetic oligonucleotide
  Sense strand starting at position 3447 of SEQ ID NO: 913868
ugccuuucucccugggaua

SEQ ID NO: 960409 - RNA, 19 nt, Artificial Sequence
  Description of Artificial Sequence: Synthetic oligonucleotide
  Antisense strand to SEQ ID NO: 960408
uaucccagggagaaaggca

SEQ ID NO: 960410 - RNA, 19 nt, Artificial Sequence
  Description of Artificial Sequence: Synthetic oligonucleotide
  Sense strand starting at position 1149 of SEQ ID NO: 913868
uccaguguuauccgaagac

SEQ ID NO: 960411 - RNA, 19 nt, Artificial Sequence
  Description of Artificial Sequence: Synthetic oligonucleotide
  Antisense strand to SEQ ID NO: 960410
gucuucggauaacacugga

SEQ ID NO: 960412 - RNA, 19 nt, Artificial Sequence
  Description of Artificial Sequence: Synthetic oligonucleotide
  Sense strand starting at position 2225 of SEQ ID NO: 913868
aucguucucccuuaagcau

SEQ ID NO: 960413 - RNA, 19 nt, Artificial Sequence
  Description of Artificial Sequence: Synthetic oligonucleotide
  Antisense strand to SEQ ID NO: 960412
augcuuaagggagaacgau

SEQ ID NO: 960414 - RNA, 19 nt, Artificial Sequence
  Description of Artificial Sequence: Synthetic oligonucleotide
  Sense strand starting at position 1147 of SEQ ID NO: 913868
ccuccaguguuauccgaag

SEQ ID NO: 960415 - RNA, 19 nt, Artificial Sequence
  Description of Artificial Sequence: Synthetic oligonucleotide
  Antisense strand to SEQ ID NO: 960414
cuucggauaacacuggagg

SEQ ID NO: 960416 - RNA, 19 nt, Artificial Sequence
  Description of Artificial Sequence: Synthetic oligonucleotide
  Sense strand starting at position 2708 of SEQ ID NO: 913868
gacugcaguucugcuaaau

SEQ ID NO: 960417 - RNA, 19 nt, Artificial Sequence
  Description of Artificial Sequence: Synthetic oligonucleotide
  Antisense strand to SEQ ID NO: 960416
auuuagcagaacugcaguc

SEQ ID NO: 960418 - RNA, 19 nt, Artificial Sequence
  Description of Artificial Sequence: Synthetic oligonucleotide
  Sense strand starting at position 1011 of SEQ ID NO: 913868
cgggucuuaaucugggcua

SEQ ID NO: 960419 - RNA, 19 nt, Artificial Sequence
  Description of Artificial Sequence: Synthetic oligonucleotide
  Antisense strand to SEQ ID NO: 960418
uagcccagauuaagacccg

SEQ ID NO: 960420 - RNA, 19 nt, Artificial Sequence
  Description of Artificial Sequence: Synthetic oligonucleotide
  Sense strand starting at position 536 of SEQ ID NO: 913868
aaguaaugguaacagauaa

SEQ ID NO: 960421 - RNA, 19 nt, Artificial Sequence
  Description of Artificial Sequence: Synthetic oligonucleotide
  Antisense strand to SEQ ID NO: 960420
uuaucuguuaccauuacuu

SEQ ID NO: 960422 - RNA, 19 nt, Artificial Sequence
  Description of Artificial Sequence: Synthetic oligonucleotide
  Sense strand starting at position 154 of SEQ ID NO: 913869
cugaauauuuagucguauu

SEQ ID NO: 960423 - RNA, 19 nt, Artificial Sequence
  Description of Artificial Sequence: Synthetic oligonucleotide
  Antisense strand to SEQ ID NO: 960422
aauacgacuaaauauucag

SEQ ID NO: 960424 - RNA, 19 nt, Artificial Sequence
  Description of Artificial Sequence: Synthetic oligonucleotide
  Sense strand starting at position 153 of SEQ ID NO: 913869
ccugaauauuuagucguau

SEQ ID NO: 960425 - RNA, 19 nt, Artificial Sequence
  Description of Artificial Sequence: Synthetic oligonucleotide
  Antisense strand to SEQ ID NO: 960424
auacgacuaaauauucagg

SEQ ID NO: 960426 - RNA, 19 nt, Artificial Sequence
  Description of Artificial Sequence: Synthetic oligonucleotide
  Sense strand starting at position 3085 of SEQ ID NO: 913869
ugcuauugccuugcaggua

SEQ ID NO: 960427 - RNA, 19 nt, Artificial Sequence
  Description of Artificial Sequence: Synthetic oligonucleotide
  Antisense strand to SEQ ID NO: 960426
uaccugcaaggcaauagca

SEQ ID NO: 960428 - RNA, 19 nt, Artificial Sequence
  Description of Artificial Sequence: Synthetic oligonucleotide
  Sense strand starting at position 3668 of SEQ ID NO: 913869
ugauacuuccaaggaaagu

SEQ ID NO: 960429 - RNA, 19 nt, Artificial Sequence
  Description of Artificial Sequence: Synthetic oligonucleotide
  Antisense strand to SEQ ID NO: 960428
acuuuccuuggaaguauca

SEQ ID NO: 960430 - RNA, 19 nt, Artificial Sequence
  Description of Artificial Sequence: Synthetic oligonucleotide
  Sense strand starting at position 2377 of SEQ ID NO: 913869
gcgugauuacaugccugua

SEQ ID NO: 960431 - RNA, 19 nt, Artificial Sequence
  Description of Artificial Sequence: Synthetic oligonucleotide
  Antisense strand to SEQ ID NO: 960430
uacaggcauguaaucacgc

SEQ ID NO: 960432 - RNA, 19 nt, Artificial Sequence
  Description of Artificial Sequence: Synthetic oligonucleotide
  Sense strand starting at position 1413 of SEQ ID NO: 913869
gaaauauacguacacgaug

SEQ ID NO: 960433 - RNA, 19 nt, Artificial Sequence
  Description of Artificial Sequence: Synthetic oligonucleotide
  Antisense strand to SEQ ID NO: 960432
caucguguacguauauuuc

SEQ ID NO: 960434 - RNA, 19 nt, Artificial Sequence
  Description of Artificial Sequence: Synthetic oligonucleotide
  Sense strand starting at position 3072 of SEQ ID NO: 913869
uguguuagcauggugcuau

SEQ ID NO: 960435 - RNA, 19 nt, Artificial Sequence
  Description of Artificial Sequence: Synthetic oligonucleotide
  Antisense strand to SEQ ID NO: 960434
auagcaccaugcuaacaca

SEQ ID NO: 960436 - RNA, 19 nt, Artificial Sequence
  Description of Artificial Sequence: Synthetic oligonucleotide
  Sense strand starting at position 72 of SEQ ID NO: 913869
gaguauaagguguacuuaa

SEQ ID NO: 960437 - RNA, 19 nt, Artificial Sequence
  Description of Artificial Sequence: Synthetic oligonucleotide
  Antisense strand to SEQ ID NO: 960436
uuaaguacaccuuauacuc

SEQ ID NO: 960438 - RNA, 19 nt, Artificial Sequence
  Description of Artificial Sequence: Synthetic oligonucleotide
  Sense strand starting at position 2742 of SEQ ID NO: 913869
agaggacugguucagucuu

SEQ ID NO: 960439 - RNA, 19 nt, Artificial Sequence
  Description of Artificial Sequence: Synthetic oligonucleotide
  Antisense strand to SEQ ID NO: 960438
aagacugaaccaguccucu

SEQ ID NO: 960440 - RNA, 19 nt, Artificial Sequence
  Description of Artificial Sequence: Synthetic oligonucleotide
  Sense strand starting at position 1319 of SEQ ID NO: 913869
gacagaacccuaugucuag

SEQ ID NO: 960441 - RNA, 19 nt, Artificial Sequence
  Description of Artificial Sequence: Synthetic oligonucleotide
  Antisense strand to SEQ ID NO: 960440
cuagacauaggguucuguc

SEQ ID NO: 960442 - RNA, 19 nt, Artificial Sequence
  Description of Artificial Sequence: Synthetic oligonucleotide
  Sense strand starting at position 142 of SEQ ID NO: 913869
cugcaagaaucccugaaua

SEQ ID NO: 960443 - RNA, 19 nt, Artificial Sequence
  Description of Artificial Sequence: Synthetic oligonucleotide
  Antisense strand to SEQ ID NO: 960442
uauucagggauucuugcag

SEQ ID NO: 960444 - RNA, 19 nt, Artificial Sequence
  Description of Artificial Sequence: Synthetic oligonucleotide
  Sense strand starting at position 234 of SEQ ID NO: 913869
ugaagaguauagucuugga

SEQ ID NO: 960445 - RNA, 19 nt, Artificial Sequence
  Description of Artificial Sequence: Synthetic oligonucleotide
  Antisense strand to SEQ ID NO: 960444
uccaagacuauacucuuca

SEQ ID NO: 960446 - RNA, 19 nt, Artificial Sequence
  Description of Artificial Sequence: Synthetic oligonucleotide
  Sense strand starting at position 1454 of SEQ ID NO: 913869
gcauuacuaucauugggaa

SEQ ID NO: 960447 - RNA, 19 nt, Artificial Sequence
  Description of Artificial Sequence: Synthetic oligonucleotide
  Antisense strand to SEQ ID NO: 960446
uucccaaugauaguaaugc

SEQ ID NO: 960448 - RNA, 19 nt, Artificial Sequence
  Description of Artificial Sequence: Synthetic oligonucleotide
  Sense strand starting at position 249 of SEQ ID NO: 913869
uggaauuagaagugaguuu

SEQ ID NO: 960449 - RNA, 19 nt, Artificial Sequence
  Description of Artificial Sequence: Synthetic oligonucleotide
  Antisense strand to SEQ ID NO: 960448
aaacucacuucuaauucca

SEQ ID NO: 960450 - RNA, 19 nt, Artificial Sequence
  Description of Artificial Sequence: Synthetic oligonucleotide
  Sense strand starting at position 3064 of SEQ ID NO: 913869
gccagcucuguguuagcau

SEQ ID NO: 960451 - RNA, 19 nt, Artificial Sequence
  Description of Artificial Sequence: Synthetic oligonucleotide
  Antisense strand to SEQ ID NO: 960450
augcuaacacagagcuggc

SEQ ID NO: 960452 - RNA, 19 nt, Artificial Sequence
  Description of Artificial Sequence: Synthetic oligonucleotide
  Sense strand starting at position 605 of SEQ ID NO: 913869
ugaguuuagcuugaacuac

SEQ ID NO: 960453 - RNA, 19 nt, Artificial Sequence
  Description of Artificial Sequence: Synthetic oligonucleotide
  Antisense strand to SEQ ID NO: 960452
guaguucaagcuaaacuca

SEQ ID NO: 960454 - RNA, 19 nt, Artificial Sequence
  Description of Artificial Sequence: Synthetic oligonucleotide
  Sense strand starting at position 2691 of SEQ ID NO: 913869
cuccaagugagagguacau

SEQ ID NO: 960455 - RNA, 19 nt, Artificial Sequence
  Description of Artificial Sequence: Synthetic oligonucleotide
  Antisense strand to SEQ ID NO: 960454
auguaccucucacuuggag

SEQ ID NO: 960456 - RNA, 19 nt, Artificial Sequence
  Description of Artificial Sequence: Synthetic oligonucleotide
  Sense strand starting at position 238 of SEQ ID NO: 913869
gaguauagucuuggaauua

SEQ ID NO: 960457 - RNA, 19 nt, Artificial Sequence
  Description of Artificial Sequence: Synthetic oligonucleotide
  Antisense strand to SEQ ID NO: 960456
uaauuccaagacuauacuc

SEQ ID NO: 960458 - RNA, 19 nt, Artificial Sequence
  Description of Artificial Sequence: Synthetic oligonucleotide
  Sense strand starting at position 594 of SEQ ID NO: 913869
caccgaauagcugaguuua

SEQ ID NO: 960459 - RNA, 19 nt, Artificial Sequence
  Description of Artificial Sequence: Synthetic oligonucleotide
  Antisense strand to SEQ ID NO: 960458
uaaacucagcuauucggug

SEQ ID NO: 960460 - RNA, 19 nt, Artificial Sequence
  Description of Artificial Sequence: Synthetic oligonucleotide
  Sense strand starting at position 1506 of SEQ ID NO: 913869
cuggguuccugaccugaau

SEQ ID NO: 960461 - RNA, 19 nt, Artificial Sequence
  Description of Artificial Sequence: Synthetic oligonucleotide
  Antisense strand to SEQ ID NO: 960460
auucaggucaggaacccag

SEQ ID NO: 960462 - RNA, 19 nt, Artificial Sequence
  Description of Artificial Sequence: Synthetic oligonucleotide
  Sense strand starting at position 1141 of SEQ ID NO: 913869
acaagcucuugagucacaa

SEQ ID NO: 960463 - RNA, 19 nt, Artificial Sequence
  Description of Artificial Sequence: Synthetic oligonucleotide
  Antisense strand to SEQ ID NO: 960462
uugugacucaagagcuugu

SEQ ID NO: 960464 - RNA, 19 nt, Artificial Sequence
  Description of Artificial Sequence: Synthetic oligonucleotide
  Sense strand starting at position 1086 of SEQ ID NO: 913869
uggacacagugauacauuu

SEQ ID NO: 960465 - RNA, 19 nt, Artificial Sequence
  Description of Artificial Sequence: Synthetic oligonucleotide
  Antisense strand to SEQ ID NO: 960464
aaauguaucacugugucca

SEQ ID NO: 960466 - RNA, 19 nt, Artificial Sequence
  Description of Artificial Sequence: Synthetic oligonucleotide
  Sense strand starting at position 784 of SEQ ID NO: 913869
uuggcagaauccuuacuca

SEQ ID NO: 960467 - RNA, 19 nt, Artificial Sequence
  Description of Artificial Sequence: Synthetic oligonucleotide
  Antisense strand to SEQ ID NO: 960466
ugaguaaggauucugccaa

SEQ ID NO: 960468 - RNA, 19 nt, Artificial Sequence
  Description of Artificial Sequence: Synthetic oligonucleotide
  Sense strand starting at position 60 of SEQ ID NO: 913869
augcuucuaggugaguaua

SEQ ID NO: 960469 - RNA, 19 nt, Artificial Sequence
  Description of Artificial Sequence: Synthetic oligonucleotide
  Antisense strand to SEQ ID NO: 960468
uauacucaccuagaagcau

SEQ ID NO: 960470 - RNA, 19 nt, Artificial Sequence
  Description of Artificial Sequence: Synthetic oligonucleotide
  Sense strand starting at position 2287 of SEQ ID NO: 913869
ggugaaucuccugacguua

SEQ ID NO: 960471 - RNA, 19 nt, Artificial Sequence
  Description of Artificial Sequence: Synthetic oligonucleotide
  Antisense strand to SEQ ID NO: 960470
uaacgucaggagauucacc

SEQ ID NO: 960472 - RNA, 19 nt, Artificial Sequence
  Description of Artificial Sequence: Synthetic oligonucleotide
  Sense strand starting at position 1032 of SEQ ID NO: 913869
agugaccuugccuaaguua

SEQ ID NO: 960473 - RNA, 19 nt, Artificial Sequence
  Description of Artificial Sequence: Synthetic oligonucleotide
  Antisense strand to SEQ ID NO: 960472
uaacuuaggcaaggucacu

SEQ ID NO: 960474 - RNA, 19 nt, Artificial Sequence
  Description of Artificial Sequence: Synthetic oligonucleotide
  Sense strand starting at position 962 of SEQ ID NO: 913869
gcuccaaggaaucguagaa

SEQ ID NO: 960475 - RNA, 19 nt, Artificial Sequence
  Description of Artificial Sequence: Synthetic oligonucleotide
  Antisense strand to SEQ ID NO: 960474
uucuacgauuccuuggagc

SEQ ID NO: 960476 - RNA, 19 nt, Artificial Sequence
  Description of Artificial Sequence: Synthetic oligonucleotide
  Sense strand starting at position 604 of SEQ ID NO: 913869
cugaguuuagcuugaacua

SEQ ID NO: 960477 - RNA, 19 nt, Artificial Sequence
  Description of Artificial Sequence: Synthetic oligonucleotide
  Antisense strand to SEQ ID NO: 960476
uaguucaagcuaaacucag

SEQ ID NO: 960478 - RNA, 19 nt, Artificial Sequence
  Description of Artificial Sequence: Synthetic oligonucleotide
  Sense strand starting at position 62 of SEQ ID NO: 913869
gcuucuaggugaguauaag

SEQ ID NO: 960479 - RNA, 19 nt, Artificial Sequence
  Description of Artificial Sequence: Synthetic oligonucleotide
  Antisense strand to SEQ ID NO: 960478
cuuauacucaccuagaagc

SEQ ID NO: 960480 - RNA, 19 nt, Artificial Sequence
  Description of Artificial Sequence: Synthetic oligonucleotide
  Sense strand starting at position 58 of SEQ ID NO: 913869
acaugcuucuaggugagua

SEQ ID NO: 960481 - RNA, 19 nt, Artificial Sequence
  Description of Artificial Sequence: Synthetic oligonucleotide
  Antisense strand to SEQ ID NO: 960480
uacucaccuagaagcaugu

SEQ ID NO: 960482 - RNA, 19 nt, Artificial Sequence
  Description of Artificial Sequence: Synthetic oligonucleotide
  Sense strand starting at position 1926 of SEQ ID NO: 913869
gggaaccgccauugcuaaa

SEQ ID NO: 960483 - RNA, 19 nt, Artificial Sequence
  Description of Artificial Sequence: Synthetic oligonucleotide
  Antisense strand to SEQ ID NO: 960482
uuuagcaauggcgguuccc

SEQ ID NO: 960484 - RNA, 19 nt, Artificial Sequence
  Description of Artificial Sequence: Synthetic oligonucleotide
  Sense strand starting at position 22 of SEQ ID NO: 913869
uuggauauuucucaaguuc

SEQ ID NO: 960485 - RNA, 19 nt, Artificial Sequence
  Description of Artificial Sequence: Synthetic oligonucleotide
  Antisense strand to SEQ ID NO: 960484
gaacuugagaaauauccaa

SEQ ID NO: 960486 - RNA, 19 nt, Artificial Sequence
  Description of Artificial Sequence: Synthetic oligonucleotide
  Sense strand starting at position 3681 of SEQ ID NO: 913869
gaaaguccugcguaagcaa

SEQ ID NO: 960487 - RNA, 19 nt, Artificial Sequence
  Description of Artificial Sequence: Synthetic oligonucleotide
  Antisense strand to SEQ ID NO: 960486
uugcuuacgcaggacuuuc

SEQ ID NO: 960488 - RNA, 19 nt, Artificial Sequence
  Description of Artificial Sequence: Synthetic oligonucleotide
  Sense strand starting at position 70 of SEQ ID NO: 913869
gugaguauaagguguacuu

SEQ ID NO: 960489 - RNA, 19 nt, Artificial Sequence
  Description of Artificial Sequence: Synthetic oligonucleotide
  Antisense strand to SEQ ID NO: 960488
aaguacaccuuauacucac

SEQ ID NO: 960490 - RNA, 19 nt, Artificial Sequence
  Description of Artificial Sequence: Synthetic oligonucleotide
  Sense strand starting at position 1231 of SEQ ID NO: 913869
gccuguugcagugaaucca

SEQ ID NO: 960491 - RNA, 19 nt, Artificial Sequence
  Description of Artificial Sequence: Synthetic oligonucleotide
  Antisense strand to SEQ ID NO: 960490
uggauucacugcaacaggc

SEQ ID NO: 960492 - RNA, 19 nt, Artificial Sequence
  Description of Artificial Sequence: Synthetic oligonucleotide
  Sense strand starting at position 1448 of SEQ ID NO: 913869
uguguagcauuacuaucau

SEQ ID NO: 960493 - RNA, 19 nt, Artificial Sequence
  Description of Artificial Sequence: Synthetic oligonucleotide
  Antisense strand to SEQ ID NO: 960492
augauaguaaugcuacaca

SEQ ID NO: 960494 - RNA, 19 nt, Artificial Sequence
  Description of Artificial Sequence: Synthetic oligonucleotide
  Sense strand starting at position 3636 of SEQ ID NO: 913869
aucucaaaguuagauagaa

SEQ ID NO: 960495 - RNA, 19 nt, Artificial Sequence
  Description of Artificial Sequence: Synthetic oligonucleotide
  Antisense strand to SEQ ID NO: 960494
uucuaucuaacuuugagau

SEQ ID NO: 960496 - RNA, 19 nt, Artificial Sequence
  Description of Artificial Sequence: Synthetic oligonucleotide
  Sense strand starting at position 1031 of SEQ ID NO: 913869
uagugaccuugccuaaguu

SEQ ID NO: 960497 - RNA, 19 nt, Artificial Sequence
  Description of Artificial Sequence: Synthetic oligonucleotide
  Antisense strand to SEQ ID NO: 960496
aacuuaggcaaggucacua

SEQ ID NO: 960498 - RNA, 19 nt, Artificial Sequence
  Description of Artificial Sequence: Synthetic oligonucleotide
  Sense strand starting at position 1095 of SEQ ID NO: 913869
ugauacauuucuugcaaga

SEQ ID NO: 960499 - RNA, 19 nt, Artificial Sequence
  Description of Artificial Sequence: Synthetic oligonucleotide
  Antisense strand to SEQ ID NO: 960498
ucuugcaagaaauguauca

SEQ ID NO: 960500 - RNA, 19 nt, Artificial Sequence
  Description of Artificial Sequence: Synthetic oligonucleotide
  Sense strand starting at position 1469 of SEQ ID NO: 913869
ggaacacuauuucgucaaa

SEQ ID NO: 960501 - RNA, 19 nt, Artificial Sequence
  Description of Artificial Sequence: Synthetic oligonucleotide
  Antisense strand to SEQ ID NO: 960500
uuugacgaaauaguguucc

SEQ ID NO: 960502 - RNA, 19 nt, Artificial Sequence
  Description of Artificial Sequence: Synthetic oligonucleotide
  Sense strand starting at position 2767 of SEQ ID NO: 913870
uuagauagagcuuaacuuu

SEQ ID NO: 960503 - RNA, 19 nt, Artificial Sequence
  Description of Artificial Sequence: Synthetic oligonucleotide
  Antisense strand to SEQ ID NO: 960502
aaaguuaagcucuaucuaa

SEQ ID NO: 960504 - RNA, 19 nt, Artificial Sequence
  Description of Artificial Sequence: Synthetic oligonucleotide
  Sense strand starting at position 2565 of SEQ ID NO: 913870
ucuagaaggcuauaaagca

SEQ ID NO: 960505 - RNA, 19 nt, Artificial Sequence
  Description of Artificial Sequence: Synthetic oligonucleotide
  Antisense strand to SEQ ID NO: 960504
ugcuuuauagccuucuaga

SEQ ID NO: 960506 - RNA, 19 nt, Artificial Sequence
  Description of Artificial Sequence: Synthetic oligonucleotide
  Sense strand starting at position 3228 of SEQ ID NO: 913870
aaucuuguuggguauaaau

SEQ ID NO: 960507 - RNA, 19 nt, Artificial Sequence
  Description of Artificial Sequence: Synthetic oligonucleotide
  Antisense strand to SEQ ID NO: 960506
auuuauacccaacaagauu

SEQ ID NO: 960508 - RNA, 19 nt, Artificial Sequence
  Description of Artificial Sequence: Synthetic oligonucleotide
  Sense strand starting at position 2703 of SEQ ID NO: 913870
guguccucaggacauuaaa

SEQ ID NO: 960509 - RNA, 19 nt, Artificial Sequence
  Description of Artificial Sequence: Synthetic oligonucleotide
  Antisense strand to SEQ ID NO: 960508
uuuaauguccugaggacac

SEQ ID NO: 960510 - RNA, 19 nt, Artificial Sequence
  Description of Artificial Sequence: Synthetic oligonucleotide
  Sense strand starting at position 3389 of SEQ ID NO: 913870
ggaugcuugaaguauuaua

SEQ ID NO: 960511 - RNA, 19 nt, Artificial Sequence
  Description of Artificial Sequence: Synthetic oligonucleotide
  Antisense strand to SEQ ID NO: 960510
uauaauacuucaagcaucc

SEQ ID NO: 960512 - RNA, 19 nt, Artificial Sequence
  Description of Artificial Sequence: Synthetic oligonucleotide
  Sense strand starting at position 3258 of SEQ ID NO: 913870
auuugcaguccuggaaguu

SEQ ID NO: 960513 - RNA, 19 nt, Artificial Sequence
  Description of Artificial Sequence: Synthetic oligonucleotide
  Antisense strand to SEQ ID NO: 960512
aacuuccaggacugcaaau

SEQ ID NO: 960514 - RNA, 19 nt, Artificial Sequence
  Description of Artificial Sequence: Synthetic oligonucleotide
  Sense strand starting at position 2162 of SEQ ID NO: 913870
cgauuuaucuccucuguau

SEQ ID NO: 960515 - RNA, 19 nt, Artificial Sequence
  Description of Artificial Sequence: Synthetic oligonucleotide
  Antisense strand to SEQ ID NO: 960514
auacagaggagauaaaucg

SEQ ID NO: 960516 - RNA, 19 nt, Artificial Sequence
  Description of Artificial Sequence: Synthetic oligonucleotide
  Sense strand starting at position 2274 of SEQ ID NO: 913870
agcacucuguucuugauuu

SEQ ID NO: 960517 - RNA, 19 nt, Artificial Sequence
  Description of Artificial Sequence: Synthetic oligonucleotide
  Antisense strand to SEQ ID NO: 960516
aaaucaagaacagagugcu

SEQ ID NO: 960518 - RNA, 19 nt, Artificial Sequence
  Description of Artificial Sequence: Synthetic oligonucleotide
  Sense strand starting at position 2779 of SEQ ID NO: 913870
uaacuuuguugacugaaga

SEQ ID NO: 960519 - RNA, 19 nt, Artificial Sequence
  Description of Artificial Sequence: Synthetic oligonucleotide
  Antisense strand to SEQ ID NO: 960518
ucuucagucaacaaaguua

SEQ ID NO: 960520 - RNA, 19 nt, Artificial Sequence
  Description of Artificial Sequence: Synthetic oligonucleotide
  Sense strand starting at position 2386 of SEQ ID NO: 913870
uggacuacaccuugaccua

SEQ ID NO: 960521 - RNA, 19 nt, Artificial Sequence
  Description of Artificial Sequence: Synthetic oligonucleotide
  Antisense strand to SEQ ID NO: 960520
uaggucaagguguagucca

SEQ ID NO: 960522 - RNA, 19 nt, Artificial Sequence
  Description of Artificial Sequence: Synthetic oligonucleotide
  Sense strand starting at position 2164 of SEQ ID NO: 913870
auuuaucuccucuguaugu

SEQ ID NO: 960523 - RNA, 19 nt, Artificial Sequence
  Description of Artificial Sequence: Synthetic oligonucleotide
  Antisense strand to SEQ ID NO: 960522
acauacagaggagauaaau

SEQ ID NO: 960524 - RNA, 19 nt, Artificial Sequence
  Description of Artificial Sequence: Synthetic oligonucleotide
  Sense strand starting at position 5 of SEQ ID NO: 913870
ccucaagugaggugggaaa

SEQ ID NO: 960525 - RNA, 19 nt, Artificial Sequence
  Description of Artificial Sequence: Synthetic oligonucleotide
  Antisense strand to SEQ ID NO: 960524
uuucccaccucacuugagg

SEQ ID NO: 960526 - RNA, 19 nt, Artificial Sequence
  Description of Artificial Sequence: Synthetic oligonucleotide
  Sense strand starting at position 2780 of SEQ ID NO: 913870
aacuuuguugacugaagac

SEQ ID NO: 960527 - RNA, 19 nt, Artificial Sequence
  Description of Artificial Sequence: Synthetic oligonucleotide
  Antisense strand to SEQ ID NO: 960526
gucuucagucaacaaaguu

SEQ ID NO: 960528 - RNA, 19 nt, Artificial Sequence
  Description of Artificial Sequence: Synthetic oligonucleotide
  Sense strand starting at position 3908 of SEQ ID NO: 913870
auacgaaaugcaugacaau

SEQ ID NO: 960529 - RNA, 19 nt, Artificial Sequence
  Description of Artificial Sequence: Synthetic oligonucleotide
  Antisense strand to SEQ ID NO: 960528
auugucaugcauuucguau

SEQ ID NO: 960530 - RNA, 19 nt, Artificial Sequence
  Description of Artificial Sequence: Synthetic oligonucleotide
  Sense strand starting at position 3236 of SEQ ID NO: 913870
uggguauaaaucugaagug

SEQ ID NO: 960531 - RNA, 19 nt, Artificial Sequence
  Description of Artificial Sequence: Synthetic oligonucleotide
  Antisense strand to SEQ ID NO: 960530
cacuucagauuuauaccca

SEQ ID NO: 960532 - RNA, 19 nt, Artificial Sequence
  Description of Artificial Sequence: Synthetic oligonucleotide
  Sense strand starting at position 2086 of SEQ ID NO: 913870
gguguaagccgagugcuuu

SEQ ID NO: 960533 - RNA, 19 nt, Artificial Sequence
  Description of Artificial Sequence: Synthetic oligonucleotide
  Antisense strand to SEQ ID NO: 960532
aaagcacucggcuuacacc

SEQ ID NO: 960534 - RNA, 19 nt, Artificial Sequence
  Description of Artificial Sequence: Synthetic oligonucleotide
  Sense strand starting at position 1986 of SEQ ID NO: 913870
gaggguaaaugguuugauu

SEQ ID NO: 960535 - RNA, 19 nt, Artificial Sequence
  Description of Artificial Sequence: Synthetic oligonucleotide
  Antisense strand to SEQ ID NO: 960534
aaucaaaccauuuacccuc

SEQ ID NO: 960536 - RNA, 19 nt, Artificial Sequence
  Description of Artificial Sequence: Synthetic oligonucleotide
  Sense strand starting at position 3744 of SEQ ID NO: 913870
gugcgugaacguguauuga

SEQ ID NO: 960537 - RNA, 19 nt, Artificial Sequence
  Description of Artificial Sequence: Synthetic oligonucleotide
  Antisense strand to SEQ ID NO: 960536
ucaauacacguucacgcac

SEQ ID NO: 960538 - RNA, 19 nt, Artificial Sequence
  Description of Artificial Sequence: Synthetic oligonucleotide
  Sense strand starting at position 2500 of SEQ ID NO: 913870
uauauaggcugagugacaa

SEQ ID NO: 960539 - RNA, 19 nt, Artificial Sequence
  Description of Artificial Sequence: Synthetic oligonucleotide
  Antisense strand to SEQ ID NO: 960538
uugucacucagccuauaua

SEQ ID NO: 960540 - RNA, 19 nt, Artificial Sequence
  Description of Artificial Sequence: Synthetic oligonucleotide
  Sense strand starting at position 2650 of SEQ ID NO: 913870
cuauuuguguaagcauagu

SEQ ID NO: 960541 - RNA, 19 nt, Artificial Sequence
  Description of Artificial Sequence: Synthetic oligonucleotide
  Antisense strand to SEQ ID NO: 960540
acuaugcuuacacaaauag

SEQ ID NO: 960542 - RNA, 19 nt, Artificial Sequence
  Description of Artificial Sequence: Synthetic oligonucleotide
  Sense strand starting at position 3227 of SEQ ID NO: 913870
gaaucuuguuggguauaaa

SEQ ID NO: 960543 - RNA, 19 nt, Artificial Sequence
  Description of Artificial Sequence: Synthetic oligonucleotide
  Antisense strand to SEQ ID NO: 960542
uuuauacccaacaagauuc

SEQ ID NO: 960544 - RNA, 19 nt, Artificial Sequence
  Description of Artificial Sequence: Synthetic oligonucleotide
  Sense strand starting at position 2701 of SEQ ID NO: 913870
uuguguccucaggacauua

SEQ ID NO: 960545 - RNA, 19 nt, Artificial Sequence
  Description of Artificial Sequence: Synthetic oligonucleotide
  Antisense strand to SEQ ID NO: 960544
uaauguccugaggacacaa

SEQ ID NO: 960546 - RNA, 19 nt, Artificial Sequence
  Description of Artificial Sequence: Synthetic oligonucleotide
  Sense strand starting at position 3230 of SEQ ID NO: 913870
ucuuguuggguauaaaucu

SEQ ID NO: 960547 - RNA, 19 nt, Artificial Sequence
  Description of Artificial Sequence: Synthetic oligonucleotide
  Antisense strand to SEQ ID NO: 960546
agauuuauacccaacaaga

SEQ ID NO: 960548 - RNA, 19 nt, Artificial Sequence
  Description of Artificial Sequence: Synthetic oligonucleotide
  Sense strand starting at position 3805 of SEQ ID NO: 913870
uggguauguugacucagaa

SEQ ID NO: 960549 - RNA, 19 nt, Artificial Sequence
  Description of Artificial Sequence: Synthetic oligonucleotide
  Antisense strand to SEQ ID NO: 960548
uucugagucaacauaccca

SEQ ID NO: 960550 - RNA, 19 nt, Artificial Sequence
  Description of Artificial Sequence: Synthetic oligonucleotide
  Sense strand starting at position 3046 of SEQ ID NO: 913870
augcuuguauguguaauuu

SEQ ID NO: 960551 - RNA, 19 nt, Artificial Sequence
  Description of Artificial Sequence: Synthetic oligonucleotide
  Antisense strand to SEQ ID NO: 960550
aaauuacacauacaagcau

SEQ ID NO: 960552 - RNA, 19 nt, Artificial Sequence
  Description of Artificial Sequence: Synthetic oligonucleotide
  Sense strand starting at position 62 of SEQ ID NO: 913870
cccagacagucuguaggau

SEQ ID NO: 960553 - RNA, 19 nt, Artificial Sequence
  Description of Artificial Sequence: Synthetic oligonucleotide
  Antisense strand to SEQ ID NO: 960552
auccuacagacugucuggg

SEQ ID NO: 960554 - RNA, 19 nt, Artificial Sequence
  Description of Artificial Sequence: Synthetic oligonucleotide
  Sense strand starting at position 2883 of SEQ ID NO: 913870
uauuguauagguuagucau

SEQ ID NO: 960555 - RNA, 19 nt, Artificial Sequence
  Description of Artificial Sequence: Synthetic oligonucleotide
  Antisense strand to SEQ ID NO: 960554
augacuaaccuauacaaua

SEQ ID NO: 960556 - RNA, 19 nt, Artificial Sequence
  Description of Artificial Sequence: Synthetic oligonucleotide
  Sense strand starting at position 3225 of SEQ ID NO: 913870
uagaaucuuguuggguaua

SEQ ID NO: 960557 - RNA, 19 nt, Artificial Sequence
  Description of Artificial Sequence: Synthetic oligonucleotide
  Antisense strand to SEQ ID NO: 960556
uauacccaacaagauucua

SEQ ID NO: 960558 - RNA, 19 nt, Artificial Sequence
  Description of Artificial Sequence: Synthetic oligonucleotide
  Sense strand starting at position 3592 of SEQ ID NO: 913870
ggguaccucuuaccuaauu

SEQ ID NO: 960559 - RNA, 19 nt, Artificial Sequence
  Description of Artificial Sequence: Synthetic oligonucleotide
  Antisense strand to SEQ ID NO: 960558
aauuagguaagagguaccc

SEQ ID NO: 960560 - RNA, 19 nt, Artificial Sequence
  Description of Artificial Sequence: Synthetic oligonucleotide
  Sense strand starting at position 3648 of SEQ ID NO: 913870
cggauuuaaucagaaguag

SEQ ID NO: 960561 - RNA, 19 nt, Artificial Sequence
  Description of Artificial Sequence: Synthetic oligonucleotide
  Antisense strand to SEQ ID NO: 960560
cuacuucugauuaaauccg

SEQ ID NO: 960562 - RNA, 19 nt, Artificial Sequence
  Description of Artificial Sequence: Synthetic oligonucleotide
  Sense strand starting at position 2950 of SEQ ID NO: 913870
guggucgagcaaaguguuu

SEQ ID NO: 960563 - RNA, 19 nt, Artificial Sequence
  Description of Artificial Sequence: Synthetic oligonucleotide
  Antisense strand to SEQ ID NO: 960562
aaacacuuugcucgaccac

SEQ ID NO: 960564 - RNA, 19 nt, Artificial Sequence
  Description of Artificial Sequence: Synthetic oligonucleotide
  Sense strand starting at position 3451 of SEQ ID NO: 913870
uuuauuugguuggagaaua

SEQ ID NO: 960565 - RNA, 19 nt, Artificial Sequence
  Description of Artificial Sequence: Synthetic oligonucleotide
  Antisense strand to SEQ ID NO: 960564
uauucuccaaccaaauaaa

SEQ ID NO: 960566 - RNA, 19 nt, Artificial Sequence
  Description of Artificial Sequence: Synthetic oligonucleotide
  Sense strand starting at position 3543 of SEQ ID NO: 913870
ggguucugacuagguucaa

SEQ ID NO: 960567 - RNA, 19 nt, Artificial Sequence
  Description of Artificial Sequence: Synthetic oligonucleotide
  Antisense strand to SEQ ID NO: 960566
uugaaccuagucagaaccc

SEQ ID NO: 960568 - RNA, 19 nt, Artificial Sequence
  Description of Artificial Sequence: Synthetic oligonucleotide
  Sense strand starting at position 2240 of SEQ ID NO: 913870
gcuugugugcuugccuuau

SEQ ID NO: 960569 - RNA, 19 nt, Artificial Sequence
  Description of Artificial Sequence: Synthetic oligonucleotide
  Antisense strand to SEQ ID NO: 960568
auaaggcaagcacacaagc

SEQ ID NO: 960570 - RNA, 19 nt, Artificial Sequence
  Description of Artificial Sequence: Synthetic oligonucleotide
  Sense strand starting at position 3746 of SEQ ID NO: 913870
gcgugaacguguauugauu

SEQ ID NO: 960571 - RNA, 19 nt, Artificial Sequence
  Description of Artificial Sequence: Synthetic oligonucleotide
  Antisense strand to SEQ ID NO: 960570
aaucaauacacguucacgc

SEQ ID NO: 960572 - RNA, 19 nt, Artificial Sequence
  Description of Artificial Sequence: Synthetic oligonucleotide
  Sense strand starting at position 2473 of SEQ ID NO: 913870
uauauuaggguuugcugaa

SEQ ID NO: 960573 - RNA, 19 nt, Artificial Sequence
  Description of Artificial Sequence: Synthetic oligonucleotide
  Antisense strand to SEQ ID NO: 960572
uucagcaaacccuaauaua

SEQ ID NO: 960574 - RNA, 19 nt, Artificial Sequence
  Description of Artificial Sequence: Synthetic oligonucleotide
  Sense strand starting at position 1989 of SEQ ID NO: 913870
gguaaaugguuugauuuaa

SEQ ID NO: 960575 - RNA, 19 nt, Artificial Sequence
  Description of Artificial Sequence: Synthetic oligonucleotide
  Antisense strand to SEQ ID NO: 960574
uuaaaucaaaccauuuacc

SEQ ID NO: 960576 - RNA, 19 nt, Artificial Sequence
  Description of Artificial Sequence: Synthetic oligonucleotide
  Sense strand starting at position 2770 of SEQ ID NO: 913870
gauagagcuuaacuuuguu

SEQ ID NO: 960577 - RNA, 19 nt, Artificial Sequence
  Description of Artificial Sequence: Synthetic oligonucleotide
  Antisense strand to SEQ ID NO: 960576
aacaaaguuaagcucuauc

SEQ ID NO: 960578 - RNA, 19 nt, Artificial Sequence
  Description of Artificial Sequence: Synthetic oligonucleotide
  Sense strand starting at position 3223 of SEQ ID NO: 913870
gguagaaucuuguugggua

SEQ ID NO: 960579 - RNA, 19 nt, Artificial Sequence
  Description of Artificial Sequence: Synthetic oligonucleotide
  Antisense strand to SEQ ID NO: 960578
uacccaacaagauucuacc

SEQ ID NO: 960580 - RNA, 19 nt, Artificial Sequence
  Description of Artificial Sequence: Synthetic oligonucleotide
  Sense strand starting at position 2085 of SEQ ID NO: 913870
ggguguaagccgagugcuu

SEQ ID NO: 960581 - RNA, 19 nt, Artificial Sequence
  Description of Artificial Sequence: Synthetic oligonucleotide
  Antisense strand to SEQ ID NO: 960580
aagcacucggcuuacaccc

SEQ ID NO: 960582 - RNA, 19 nt, Artificial Sequence
  Description of Artificial Sequence: Synthetic oligonucleotide
  Sense strand starting at position 1880 of SEQ ID NO: 913871
auacauuaugcagaaggca

SEQ ID NO: 960583 - RNA, 19 nt, Artificial Sequence
  Description of Artificial Sequence: Synthetic oligonucleotide
  Antisense strand to SEQ ID NO: 960582
ugccuucugcauaauguau

SEQ ID NO: 960584 - RNA, 19 nt, Artificial Sequence
  Description of Artificial Sequence: Synthetic oligonucleotide
  Sense strand starting at position 410 of SEQ ID NO: 913871
ugaguaggagaagguuaau

SEQ ID NO: 960585 - RNA, 19 nt, Artificial Sequence
  Description of Artificial Sequence: Synthetic oligonucleotide
  Antisense strand to SEQ ID NO: 960584
auuaaccuucuccuacuca

SEQ ID NO: 960586 - RNA, 19 nt, Artificial Sequence
  Description of Artificial Sequence: Synthetic oligonucleotide
  Sense strand starting at position 2310 of SEQ ID NO: 913871
aaaguaugagaucaugcuu

SEQ ID NO: 960587 - RNA, 19 nt, Artificial Sequence
  Description of Artificial Sequence: Synthetic oligonucleotide
  Antisense strand to SEQ ID NO: 960586
aagcaugaucucauacuuu

SEQ ID NO: 960588 - RNA, 19 nt, Artificial Sequence
  Description of Artificial Sequence: Synthetic oligonucleotide
  Sense strand starting at position 3696 of SEQ ID NO: 913871
cuuggauggcuauacuaau

SEQ ID NO: 960589 - RNA, 19 nt, Artificial Sequence
  Description of Artificial Sequence: Synthetic oligonucleotide
  Antisense strand to SEQ ID NO: 960588
auuaguauagccauccaag

SEQ ID NO: 960590 - RNA, 19 nt, Artificial Sequence
  Description of Artificial Sequence: Synthetic oligonucleotide
  Sense strand starting at position 3138 of SEQ ID NO: 913871
aguaaaucucucuagguag

SEQ ID NO: 960591 - RNA, 19 nt, Artificial Sequence
  Description of Artificial Sequence: Synthetic oligonucleotide
  Antisense strand to SEQ ID NO: 960590
cuaccuagagagauuuacu

SEQ ID NO: 960592 - RNA, 19 nt, Artificial Sequence
  Description of Artificial Sequence: Synthetic oligonucleotide
  Sense strand starting at position 1254 of SEQ ID NO: 913871
agaguaugauuugccgagu

SEQ ID NO: 960593 - RNA, 19 nt, Artificial Sequence
  Description of Artificial Sequence: Synthetic oligonucleotide
  Antisense strand to SEQ ID NO: 960592
acucggcaaaucauacucu

SEQ ID NO: 960594 - RNA, 19 nt, Artificial Sequence
  Description of Artificial Sequence: Synthetic oligonucleotide
  Sense strand starting at position 527 of SEQ ID NO: 913871
ggguaggguggugaugauu

SEQ ID NO: 960595 - RNA, 19 nt, Artificial Sequence
  Description of Artificial Sequence: Synthetic oligonucleotide
  Antisense strand to SEQ ID NO: 960594
aaucaucaccacccuaccc

SEQ ID NO: 960596 - RNA, 19 nt, Artificial Sequence
  Description of Artificial Sequence: Synthetic oligonucleotide
  Sense strand starting at position 3691 of SEQ ID NO: 913871
gaaaccuuggauggcuaua

SEQ ID NO: 960597 - RNA, 19 nt, Artificial Sequence
  Description of Artificial Sequence: Synthetic oligonucleotide
  Antisense strand to SEQ ID NO: 960596
uauagccauccaagguuuc

SEQ ID NO: 960598 - RNA, 19 nt, Artificial Sequence
  Description of Artificial Sequence: Synthetic oligonucleotide
  Sense strand starting at position 839 of SEQ ID NO: 913871
aauuauuggguccauaugu

SEQ ID NO: 960599 - RNA, 19 nt, Artificial Sequence
  Description of Artificial Sequence: Synthetic oligonucleotide
  Antisense strand to SEQ ID NO: 960598
acauauggacccaauaauu

SEQ ID NO: 960600 - RNA, 19 nt, Artificial Sequence
  Description of Artificial Sequence: Synthetic oligonucleotide
  Sense strand starting at position 2841 of SEQ ID NO: 913871
agauauugccgugaagaua

SEQ ID NO: 960601 - RNA, 19 nt, Artificial Sequence
  Description of Artificial Sequence: Synthetic oligonucleotide
  Antisense strand to SEQ ID NO: 960600
uaucuucacggcaauaucu

SEQ ID NO: 960602 - RNA, 19 nt, Artificial Sequence
  Description of Artificial Sequence: Synthetic oligonucleotide
  Sense strand starting at position 1704 of SEQ ID NO: 913871
ggagucuaucuuggacaac

SEQ ID NO: 960603 - RNA, 19 nt, Artificial Sequence
  Description of Artificial Sequence: Synthetic oligonucleotide
  Antisense strand to SEQ ID NO: 960602
guuguccaagauagacucc

SEQ ID NO: 960604 - RNA, 19 nt, Artificial Sequence
  Description of Artificial Sequence: Synthetic oligonucleotide
  Sense strand starting at position 836 of SEQ ID NO: 913871
ucaaauuauuggguccaua

SEQ ID NO: 960605 - RNA, 19 nt, Artificial Sequence
  Description of Artificial Sequence: Synthetic oligonucleotide
  Antisense strand to SEQ ID NO: 960604
uauggacccaauaauuuga

SEQ ID NO: 960606 - RNA, 19 nt, Artificial Sequence
  Description of Artificial Sequence: Synthetic oligonucleotide
  Sense strand starting at position 1255 of SEQ ID NO: 913871
gaguaugauuugccgaguu

SEQ ID NO: 960607 - RNA, 19 nt, Artificial Sequence
  Description of Artificial Sequence: Synthetic oligonucleotide
  Antisense strand to SEQ ID NO: 960606
aacucggcaaaucauacuc

SEQ ID NO: 960608 - RNA, 19 nt, Artificial Sequence
  Description of Artificial Sequence: Synthetic oligonucleotide
  Sense strand starting at position 555 of SEQ ID NO: 913871
gagauagcauccucuauga

SEQ ID NO: 960609 - RNA, 19 nt, Artificial Sequence
  Description of Artificial Sequence: Synthetic oligonucleotide
  Antisense strand to SEQ ID NO: 960608
ucauagaggaugcuaucuc

SEQ ID NO: 960610 - RNA, 19 nt, Artificial Sequence
  Description of Artificial Sequence: Synthetic oligonucleotide
  Sense strand starting at position 148 of SEQ ID NO: 913871
uuaauuagaugaucuggca

SEQ ID NO: 960611 - RNA, 19 nt, Artificial Sequence
  Description of Artificial Sequence: Synthetic oligonucleotide
  Antisense strand to SEQ ID NO: 960610
ugccagaucaucuaauuaa

SEQ ID NO: 960612 - RNA, 19 nt, Artificial Sequence
  Description of Artificial Sequence: Synthetic oligonucleotide
  Sense strand starting at position 93 of SEQ ID NO: 913871
agaguagaugguuaagcuu

SEQ ID NO: 960613 - RNA, 19 nt, Artificial Sequence
  Description of Artificial Sequence: Synthetic oligonucleotide
  Antisense strand to SEQ ID NO: 960612
aagcuuaaccaucuacucu

SEQ ID NO: 960614 - RNA, 19 nt, Artificial Sequence
  Description of Artificial Sequence: Synthetic oligonucleotide
  Sense strand starting at position 372 of SEQ ID NO: 913871
gagcauaaggaaugcuaua

SEQ ID NO: 960615 - RNA, 19 nt, Artificial Sequence
  Description of Artificial Sequence: Synthetic oligonucleotide
  Antisense strand to SEQ ID NO: 960614
uauagcauuccuuaugcuc

SEQ ID NO: 960616 - RNA, 19 nt, Artificial Sequence
  Description of Artificial Sequence: Synthetic oligonucleotide
  Sense strand starting at position 1384 of SEQ ID NO: 913871
ggauuauucuggucugaug

SEQ ID NO: 960617 - RNA, 19 nt, Artificial Sequence
  Description of Artificial Sequence: Synthetic oligonucleotide
  Antisense strand to SEQ ID NO: 960616
caucagaccagaauaaucc

SEQ ID NO: 960618 - RNA, 19 nt, Artificial Sequence
  Description of Artificial Sequence: Synthetic oligonucleotide
  Sense strand starting at position 2048 of SEQ ID NO: 913871
cauagaaguguguaguuaa

SEQ ID NO: 960619 - RNA, 19 nt, Artificial Sequence
  Description of Artificial Sequence: Synthetic oligonucleotide
  Antisense strand to SEQ ID NO: 960618
uuaacuacacacuucuaug

SEQ ID NO: 960620 - RNA, 19 nt, Artificial Sequence
  Description of Artificial Sequence: Synthetic oligonucleotide
  Sense strand starting at position 3141 of SEQ ID NO: 913871
aaaucucucuagguaggua

SEQ ID NO: 960621 - RNA, 19 nt, Artificial Sequence
  Description of Artificial Sequence: Synthetic oligonucleotide
  Antisense strand to SEQ ID NO: 960620
uaccuaccuagagagauuu

SEQ ID NO: 960622 - RNA, 19 nt, Artificial Sequence
  Description of Artificial Sequence: Synthetic oligonucleotide
  Sense strand starting at position 430 of SEQ ID NO: 913871
auaggcauguaguuaagaa

SEQ ID NO: 960623 - RNA, 19 nt, Artificial Sequence
  Description of Artificial Sequence: Synthetic oligonucleotide
  Antisense strand to SEQ ID NO: 960622
uucuuaacuacaugccuau

SEQ ID NO: 960624 - RNA, 19 nt, Artificial Sequence
  Description of Artificial Sequence: Synthetic oligonucleotide
  Sense strand starting at position 342 of SEQ ID NO: 913871
uuguuuauagccuaagauu

SEQ ID NO: 960625 - RNA, 19 nt, Artificial Sequence
  Description of Artificial Sequence: Synthetic oligonucleotide
  Antisense strand to SEQ ID NO: 960624
aaucuuaggcuauaaacaa

SEQ ID NO: 960626 - RNA, 19 nt, Artificial Sequence
  Description of Artificial Sequence: Synthetic oligonucleotide
  Sense strand starting at position 231 of SEQ ID NO: 913871
gguaauaguagauguugga

SEQ ID NO: 960627 - RNA, 19 nt, Artificial Sequence
  Description of Artificial Sequence: Synthetic oligonucleotide
  Antisense strand to SEQ ID NO: 960626
uccaacaucuacuauuacc

SEQ ID NO: 960628 - RNA, 19 nt, Artificial Sequence
  Description of Artificial Sequence: Synthetic oligonucleotide
  Sense strand starting at position 2762 of SEQ ID NO: 913871
aucauaugugaugguuaau

SEQ ID NO: 960629 - RNA, 19 nt, Artificial Sequence
  Description of Artificial Sequence: Synthetic oligonucleotide
  Antisense strand to SEQ ID NO: 960628
auuaaccaucacauaugau

SEQ ID NO: 960630 - RNA, 19 nt, Artificial Sequence
  Description of Artificial Sequence: Synthetic oligonucleotide
  Sense strand starting at position 3944 of SEQ ID NO: 913871
guggauagaacuugcauau

SEQ ID NO: 960631 - RNA, 19 nt, Artificial Sequence
  Description of Artificial Sequence: Synthetic oligonucleotide
  Antisense strand to SEQ ID NO: 960630
auaugcaaguucuauccac

SEQ ID NO: 960632 - RNA, 19 nt, Artificial Sequence
  Description of Artificial Sequence: Synthetic oligonucleotide
  Sense strand starting at position 3875 of SEQ ID NO: 913871
gaggcaaaucugcagucau

SEQ ID NO: 960633 - RNA, 19 nt, Artificial Sequence
  Description of Artificial Sequence: Synthetic oligonucleotide
  Antisense strand to SEQ ID NO: 960632
augacugcagauuugccuc

SEQ ID NO: 960634 - RNA, 19 nt, Artificial Sequence
  Description of Artificial Sequence: Synthetic oligonucleotide
  Sense strand starting at position 16 of SEQ ID NO: 913871
gaaauugucugggccauag

SEQ ID NO: 960635 - RNA, 19 nt, Artificial Sequence
  Description of Artificial Sequence: Synthetic oligonucleotide
  Antisense strand to SEQ ID NO: 960634
cuauggcccagacaauuuc

SEQ ID NO: 960636 - RNA, 19 nt, Artificial Sequence
  Description of Artificial Sequence: Synthetic oligonucleotide
  Sense strand starting at position 946 of SEQ ID NO: 913871
gcaagaauaguaggcuaga

SEQ ID NO: 960637 - RNA, 19 nt, Artificial Sequence
  Description of Artificial Sequence: Synthetic oligonucleotide
  Antisense strand to SEQ ID NO: 960636
ucuagccuacuauucuugc

SEQ ID NO: 960638 - RNA, 19 nt, Artificial Sequence
  Description of Artificial Sequence: Synthetic oligonucleotide
  Sense strand starting at position 3285 of SEQ ID NO: 913871
aggaucuuaugcuucuuaa

SEQ ID NO: 960639 - RNA, 19 nt, Artificial Sequence
  Description of Artificial Sequence: Synthetic oligonucleotide
  Antisense strand to SEQ ID NO: 960638
uuaagaagcauaagauccu

SEQ ID NO: 960640 - RNA, 19 nt, Artificial Sequence
  Description of Artificial Sequence: Synthetic oligonucleotide
  Sense strand starting at position 1670 of SEQ ID NO: 913871
aaguaauucuguguauaag

SEQ ID NO: 960641 - RNA, 19 nt, Artificial Sequence
  Description of Artificial Sequence: Synthetic oligonucleotide
  Antisense strand to SEQ ID NO: 960640
cuuauacacagaauuacuu

SEQ ID NO: 960642 - RNA, 19 nt, Artificial Sequence
  Description of Artificial Sequence: Synthetic oligonucleotide
  Sense strand starting at position 1463 of SEQ ID NO: 913871
aguaauagauuaguccagu

SEQ ID NO: 960643 - RNA, 19 nt, Artificial Sequence
  Description of Artificial Sequence: Synthetic oligonucleotide
  Antisense strand to SEQ ID NO: 960642
acuggacuaaucuauuacu

SEQ ID NO: 960644 - RNA, 19 nt, Artificial Sequence
  Description of Artificial Sequence: Synthetic oligonucleotide
  Sense strand starting at position 2158 of SEQ ID NO: 913871
auugcucuaccguaaagau

SEQ ID NO: 960645 - RNA, 19 nt, Artificial Sequence
  Description of Artificial Sequence: Synthetic oligonucleotide
  Antisense strand to SEQ ID NO: 960644
aucuuuacgguagagcaau

SEQ ID NO: 960646 - RNA, 19 nt, Artificial Sequence
  Description of Artificial Sequence: Synthetic oligonucleotide
  Sense strand starting at position 844 of SEQ ID NO: 913871
uuggguccauauguauuaa

SEQ ID NO: 960647 - RNA, 19 nt, Artificial Sequence
  Description of Artificial Sequence: Synthetic oligonucleotide
  Antisense strand to SEQ ID NO: 960646
uuaauacauauggacccaa

SEQ ID NO: 960648 - RNA, 19 nt, Artificial Sequence
  Description of Artificial Sequence: Synthetic oligonucleotide
  Sense strand starting at position 1464 of SEQ ID NO: 913871
guaauagauuaguccagug

SEQ ID NO: 960649 - RNA, 19 nt, Artificial Sequence
  Description of Artificial Sequence: Synthetic oligonucleotide
  Antisense strand to SEQ ID NO: 960648
cacuggacuaaucuauuac

SEQ ID NO: 960650 - RNA, 19 nt, Artificial Sequence
  Description of Artificial Sequence: Synthetic oligonucleotide
  Sense strand starting at position 15 of SEQ ID NO: 913871
ugaaauugucugggccaua

SEQ ID NO: 960651 - RNA, 19 nt, Artificial Sequence
  Description of Artificial Sequence: Synthetic oligonucleotide
  Antisense strand to SEQ ID NO: 960650
uauggcccagacaauuuca

SEQ ID NO: 960652 - RNA, 19 nt, Artificial Sequence
  Description of Artificial Sequence: Synthetic oligonucleotide
  Sense strand starting at position 1469 of SEQ ID NO: 913871
agauuaguccagugugaug

SEQ ID NO: 960653 - RNA, 19 nt, Artificial Sequence
  Description of Artificial Sequence: Synthetic oligonucleotide
  Antisense strand to SEQ ID NO: 960652
caucacacuggacuaaucu

SEQ ID NO: 960654 - RNA, 19 nt, Artificial Sequence
  Description of Artificial Sequence: Synthetic oligonucleotide
  Sense strand starting at position 1017 of SEQ ID NO: 913871
gggagcuucucaucuuauu

SEQ ID NO: 960655 - RNA, 19 nt, Artificial Sequence
  Description of Artificial Sequence: Synthetic oligonucleotide
  Antisense strand to SEQ ID NO: 960654
aauaagaugagaagcuccc

SEQ ID NO: 960656 - RNA, 19 nt, Artificial Sequence
  Description of Artificial Sequence: Synthetic oligonucleotide
  Sense strand starting at position 34 of SEQ ID NO: 913871
gcucauaaugcauggauua

SEQ ID NO: 960657 - RNA, 19 nt, Artificial Sequence
  Description of Artificial Sequence: Synthetic oligonucleotide
  Antisense strand to SEQ ID NO: 960656
uaauccaugcauuaugagc

SEQ ID NO: 960658 - RNA, 19 nt, Artificial Sequence
  Description of Artificial Sequence: Synthetic oligonucleotide
  Sense strand starting at position 2073 of SEQ ID NO: 913871
uagaaugucuauguaguua

SEQ ID NO: 960659 - RNA, 19 nt, Artificial Sequence
  Description of Artificial Sequence: Synthetic oligonucleotide
  Antisense strand to SEQ ID NO: 960658
uaacuacauagacauucua

SEQ ID NO: 960660 - RNA, 19 nt, Artificial Sequence
  Description of Artificial Sequence: Synthetic oligonucleotide
  Sense strand starting at position 3504 of SEQ ID NO: 913871
gucauaugucuagguggag

SEQ ID NO: 960661 - RNA, 19 nt, Artificial Sequence
  Description of Artificial Sequence: Synthetic oligonucleotide
  Antisense strand to SEQ ID NO: 960660
cuccaccuagacauaugac

SEQ ID NO: 960662 - RNA, 19 nt, Artificial Sequence
  Description of Artificial Sequence: Synthetic oligonucleotide
  Sense strand starting at position 1904 of SEQ ID NO: 913872
acuuauuacgcacaugaag

SEQ ID NO: 960663 - RNA, 19 nt, Artificial Sequence
  Description of Artificial Sequence: Synthetic oligonucleotide
  Antisense strand to SEQ ID NO: 960662
cuucaugugcguaauaagu

SEQ ID NO: 960664 - RNA, 19 nt, Artificial Sequence
  Description of Artificial Sequence: Synthetic oligonucleotide
  Sense strand starting at position 2216 of SEQ ID NO: 913872
gauugucugcgggugcgaa

SEQ ID NO: 960665 - RNA, 19 nt, Artificial Sequence
  Description of Artificial Sequence: Synthetic oligonucleotide
  Antisense strand to SEQ ID NO: 960664
uucgcacccgcagacaauc

SEQ ID NO: 960666 - RNA, 19 nt, Artificial Sequence
  Description of Artificial Sequence: Synthetic oligonucleotide
  Sense strand starting at position 1902 of SEQ ID NO: 913872
ggacuuauuacgcacauga

SEQ ID NO: 960667 - RNA, 19 nt, Artificial Sequence
  Description of Artificial Sequence: Synthetic oligonucleotide
  Antisense strand to SEQ ID NO: 960666
ucaugugcguaauaagucc

SEQ ID NO: 960668 - RNA, 19 nt, Artificial Sequence
  Description of Artificial Sequence: Synthetic oligonucleotide
  Sense strand starting at position 493 of SEQ ID NO: 913872
gacagucaacaaugugacu

SEQ ID NO: 960669 - RNA, 19 nt, Artificial Sequence
  Description of Artificial Sequence: Synthetic oligonucleotide
  Antisense strand to SEQ ID NO: 960668
agucacauuguugacuguc

SEQ ID NO: 960670 - RNA, 19 nt, Artificial Sequence
  Description of Artificial Sequence: Synthetic oligonucleotide
  Sense strand starting at position 1325 of SEQ ID NO: 913872
agcagagcucuggagcaaa

SEQ ID NO: 960671 - RNA, 19 nt, Artificial Sequence
  Description of Artificial Sequence: Synthetic oligonucleotide
  Antisense strand to SEQ ID NO: 960670
uuugcuccagagcucugcu

SEQ ID NO: 960672 - RNA, 19 nt, Artificial Sequence
  Description of Artificial Sequence: Synthetic oligonucleotide
  Sense strand starting at position 182 of SEQ ID NO: 913872
ggcucuuaugcacauaaca

SEQ ID NO: 960673 - RNA, 19 nt, Artificial Sequence
  Description of Artificial Sequence: Synthetic oligonucleotide
  Antisense strand to SEQ ID NO: 960672
uguuaugugcauaagagcc

SEQ ID NO: 960674 - RNA, 19 nt, Artificial Sequence
  Description of Artificial Sequence: Synthetic oligonucleotide
  Sense strand starting at position 3847 of SEQ ID NO: 913872
cucaguugucagcaaacaa

SEQ ID NO: 960675 - RNA, 19 nt, Artificial Sequence
  Description of Artificial Sequence: Synthetic oligonucleotide
  Antisense strand to SEQ ID NO: 960674
uuguuugcugacaacugag

SEQ ID NO: 960676 - RNA, 19 nt, Artificial Sequence
  Description of Artificial Sequence: Synthetic oligonucleotide
  Sense strand starting at position 976 of SEQ ID NO: 913872
gaaagaaguuugucuccau

SEQ ID NO: 960677 - RNA, 19 nt, Artificial Sequence
  Description of Artificial Sequence: Synthetic oligonucleotide
  Antisense strand to SEQ ID NO: 960676
auggagacaaacuucuuuc

SEQ ID NO: 960678 - RNA, 19 nt, Artificial Sequence
  Description of Artificial Sequence: Synthetic oligonucleotide
  Sense strand starting at position 405 of SEQ ID NO: 913872
uugugauccguagagauuc

SEQ ID NO: 960679 - RNA, 19 nt, Artificial Sequence
  Description of Artificial Sequence: Synthetic oligonucleotide
  Antisense strand to SEQ ID NO: 960678
gaaucucuacggaucacaa

SEQ ID NO: 960680 - RNA, 19 nt, Artificial Sequence
  Description of Artificial Sequence: Synthetic oligonucleotide
  Sense strand starting at position 1299 of SEQ ID NO: 913872
gacugaaugauguaagcgu

SEQ ID NO: 960681 - RNA, 19 nt, Artificial Sequence
  Description of Artificial Sequence: Synthetic oligonucleotide
  Antisense strand to SEQ ID NO: 960680
acgcuuacaucauucaguc

SEQ ID NO: 960682 - RNA, 19 nt, Artificial Sequence
  Description of Artificial Sequence: Synthetic oligonucleotide
  Sense strand starting at position 441 of SEQ ID NO: 913872
gggagaauguaccugccuu

SEQ ID NO: 960683 - RNA, 19 nt, Artificial Sequence
  Description of Artificial Sequence: Synthetic oligonucleotide
  Antisense strand to SEQ ID NO: 960682
aaggcagguacauucuccc

SEQ ID NO: 960684 - RNA, 19 nt, Artificial Sequence
  Description of Artificial Sequence: Synthetic oligonucleotide
  Sense strand starting at position 2578 of SEQ ID NO: 913872
cagcaugaauaauugcgaa

SEQ ID NO: 960685 - RNA, 19 nt, Artificial Sequence
  Description of Artificial Sequence: Synthetic oligonucleotide
  Antisense strand to SEQ ID NO: 960684
uucgcaauuauucaugcug

SEQ ID NO: 960686 - RNA, 19 nt, Artificial Sequence
  Description of Artificial Sequence: Synthetic oligonucleotide
  Sense strand starting at position 3767 of SEQ ID NO: 913872
acacuugucugccugagaa

SEQ ID NO: 960687 - RNA, 19 nt, Artificial Sequence
  Description of Artificial Sequence: Synthetic oligonucleotide
  Antisense strand to SEQ ID NO: 960686
uucucaggcagacaagugu

SEQ ID NO: 960688 - RNA, 19 nt, Artificial Sequence
  Description of Artificial Sequence: Synthetic oligonucleotide
  Sense strand starting at position 2778 of SEQ ID NO: 913872
gguaucagucagcaauggu

SEQ ID NO: 960689 - RNA, 19 nt, Artificial Sequence
  Description of Artificial Sequence: Synthetic oligonucleotide
  Antisense strand to SEQ ID NO: 960688
accauugcugacugauacc

SEQ ID NO: 960690 - RNA, 19 nt, Artificial Sequence
  Description of Artificial Sequence: Synthetic oligonucleotide
  Sense strand starting at position 794 of SEQ ID NO: 913872
agaagagcgucccuuuaag

SEQ ID NO: 960691 - RNA, 19 nt, Artificial Sequence
  Description of Artificial Sequence: Synthetic oligonucleotide
  Antisense strand to SEQ ID NO: 960690
cuuaaagggacgcucuucu

SEQ ID NO: 960692 - RNA, 19 nt, Artificial Sequence
  Description of Artificial Sequence: Synthetic oligonucleotide
  Sense strand starting at position 346 of SEQ ID NO: 913872
cugaauuugugguaauagg

SEQ ID NO: 960693 - RNA, 19 nt, Artificial Sequence
  Description of Artificial Sequence: Synthetic oligonucleotide
  Antisense strand to SEQ ID NO: 960692
ccuauuaccacaaauucag

SEQ ID NO: 960694 - RNA, 19 nt, Artificial Sequence
  Description of Artificial Sequence: Synthetic oligonucleotide
  Sense strand starting at position 453 of SEQ ID NO: 913872
cugccuuuccuagggaauc

SEQ ID NO: 960695 - RNA, 19 nt, Artificial Sequence
  Description of Artificial Sequence: Synthetic oligonucleotide
  Antisense strand to SEQ ID NO: 960694
gauucccuaggaaaggcag

SEQ ID NO: 960696 - RNA, 19 nt, Artificial Sequence
  Description of Artificial Sequence: Synthetic oligonucleotide
  Sense strand starting at position 258 of SEQ ID NO: 913872
acuuauuagucaguccuua

SEQ ID NO: 960697 - RNA, 19 nt, Artificial Sequence
  Description of Artificial Sequence: Synthetic oligonucleotide
  Antisense strand to SEQ ID NO: 960696
uaaggacugacuaauaagu

SEQ ID NO: 960698 - RNA, 19 nt, Artificial Sequence
  Description of Artificial Sequence: Synthetic oligonucleotide
  Sense strand starting at position 262 of SEQ ID NO: 913872
auuagucaguccuuaauuc

SEQ ID NO: 960699 - RNA, 19 nt, Artificial Sequence
  Description of Artificial Sequence: Synthetic oligonucleotide
  Antisense strand to SEQ ID NO: 960698
gaauuaaggacugacuaau

SEQ ID NO: 960700 - RNA, 19 nt, Artificial Sequence
  Description of Artificial Sequence: Synthetic oligonucleotide
  Sense strand starting at position 442 of SEQ ID NO: 913872
ggagaauguaccugccuuu

SEQ ID NO: 960701 - RNA, 19 nt, Artificial Sequence
  Description of Artificial Sequence: Synthetic oligonucleotide
  Antisense strand to SEQ ID NO: 960700
aaaggcagguacauucucc

SEQ ID NO: 960702 - RNA, 19 nt, Artificial Sequence
  Description of Artificial Sequence: Synthetic oligonucleotide
  Sense strand starting at position 1102 of SEQ ID NO: 913872
accugagucggccaacgau

SEQ ID NO: 960703 - RNA, 19 nt, Artificial Sequence
  Description of Artificial Sequence: Synthetic oligonucleotide
  Antisense strand to SEQ ID NO: 960702
aucguuggccgacucaggu

SEQ ID NO: 960704 - RNA, 19 nt, Artificial Sequence
  Description of Artificial Sequence: Synthetic oligonucleotide
  Sense strand starting at position 63 of SEQ ID NO: 913872
aucguccuucccuaucuua

SEQ ID NO: 960705 - RNA, 19 nt, Artificial Sequence
  Description of Artificial Sequence: Synthetic oligonucleotide
  Antisense strand to SEQ ID NO: 960704
uaagauagggaaggacgau

SEQ ID NO: 960706 - RNA, 19 nt, Artificial Sequence
  Description of Artificial Sequence: Synthetic oligonucleotide
  Sense strand starting at position 1912 of SEQ ID NO: 913872
cgcacaugaaguugacuua

SEQ ID NO: 960707 - RNA, 19 nt, Artificial Sequence
  Description of Artificial Sequence: Synthetic oligonucleotide
  Antisense strand to SEQ ID NO: 960706
uaagucaacuucaugugcg

SEQ ID NO: 960708 - RNA, 19 nt, Artificial Sequence
  Description of Artificial Sequence: Synthetic oligonucleotide
  Sense strand starting at position 81 of SEQ ID NO: 913872
aaguguugccuccaaagca

SEQ ID NO: 960709 - RNA, 19 nt, Artificial Sequence
  Description of Artificial Sequence: Synthetic oligonucleotide
  Antisense strand to SEQ ID NO: 960708
ugcuuuggaggcaacacuu

SEQ ID NO: 960710 - RNA, 19 nt, Artificial Sequence
  Description of Artificial Sequence: Synthetic oligonucleotide
  Sense strand starting at position 1413 of SEQ ID NO: 913872
cgcguuauugcugugcaca

SEQ ID NO: 960711 - RNA, 19 nt, Artificial Sequence
  Description of Artificial Sequence: Synthetic oligonucleotide
  Antisense strand to SEQ ID NO: 960710
ugugcacagcaauaacgcg

SEQ ID NO: 960712 - RNA, 19 nt, Artificial Sequence
  Description of Artificial Sequence: Synthetic oligonucleotide
  Sense strand starting at position 979 of SEQ ID NO: 913872
agaaguuugucuccaugug

SEQ ID NO: 960713 - RNA, 19 nt, Artificial Sequence
  Description of Artificial Sequence: Synthetic oligonucleotide
  Antisense strand to SEQ ID NO: 960712
cacauggagacaaacuucu

SEQ ID NO: 960714 - RNA, 19 nt, Artificial Sequence
  Description of Artificial Sequence: Synthetic oligonucleotide
  Sense strand starting at position 995 of SEQ ID NO: 913872
guggaaaccaugugucucu

SEQ ID NO: 960715 - RNA, 19 nt, Artificial Sequence
  Description of Artificial Sequence: Synthetic oligonucleotide
  Antisense strand to SEQ ID NO: 960714
agagacacaugguuuccac

SEQ ID NO: 960716 - RNA, 19 nt, Artificial Sequence
  Description of Artificial Sequence: Synthetic oligonucleotide
  Sense strand starting at position 666 of SEQ ID NO: 913872
aaguaaguacuucgcaaac

SEQ ID NO: 960717 - RNA, 19 nt, Artificial Sequence
  Description of Artificial Sequence: Synthetic oligonucleotide
  Antisense strand to SEQ ID NO: 960716
guuugcgaaguacuuacuu

SEQ ID NO: 960718 - RNA, 19 nt, Artificial Sequence
  Description of Artificial Sequence: Synthetic oligonucleotide
  Sense strand starting at position 2941 of SEQ ID NO: 913872
cuuccuacuuguucggaca

SEQ ID NO: 960719 - RNA, 19 nt, Artificial Sequence
  Description of Artificial Sequence: Synthetic oligonucleotide
  Antisense strand to SEQ ID NO: 960718
uguccgaacaaguaggaag

SEQ ID NO: 960720 - RNA, 19 nt, Artificial Sequence
  Description of Artificial Sequence: Synthetic oligonucleotide
  Sense strand starting at position 34 of SEQ ID NO: 913872
ggagccuuauggcuuucua

SEQ ID NO: 960721 - RNA, 19 nt, Artificial Sequence
  Description of Artificial Sequence: Synthetic oligonucleotide
  Antisense strand to SEQ ID NO: 960720
uagaaagccauaaggcucc

SEQ ID NO: 960722 - RNA, 19 nt, Artificial Sequence
  Description of Artificial Sequence: Synthetic oligonucleotide
  Sense strand starting at position 664 of SEQ ID NO: 913872
ccaaguaaguacuucgcaa

SEQ ID NO: 960723 - RNA, 19 nt, Artificial Sequence
  Description of Artificial Sequence: Synthetic oligonucleotide
  Antisense strand to SEQ ID NO: 960722
uugcgaaguacuuacuugg

SEQ ID NO: 960724 - RNA, 19 nt, Artificial Sequence
  Description of Artificial Sequence: Synthetic oligonucleotide
  Sense strand starting at position 66 of SEQ ID NO: 913872
guccuucccuaucuuaagu

SEQ ID NO: 960725 - RNA, 19 nt, Artificial Sequence
  Description of Artificial Sequence: Synthetic oligonucleotide
  Antisense strand to SEQ ID NO: 960724
acuuaagauagggaaggac

SEQ ID NO: 960726 - RNA, 19 nt, Artificial Sequence
  Description of Artificial Sequence: Synthetic oligonucleotide
  Sense strand starting at position 58 of SEQ ID NO: 913872
aucugaucguccuucccua

SEQ ID NO: 960727 - RNA, 19 nt, Artificial Sequence
  Description of Artificial Sequence: Synthetic oligonucleotide
  Antisense strand to SEQ ID NO: 960726
uagggaaggacgaucagau

SEQ ID NO: 960728 - RNA, 19 nt, Artificial Sequence
  Description of Artificial Sequence: Synthetic oligonucleotide
  Sense strand starting at position 3693 of SEQ ID NO: 913872
cugagcucugccuaugguu

SEQ ID NO: 960729 - RNA, 19 nt, Artificial Sequence
  Description of Artificial Sequence: Synthetic oligonucleotide
  Antisense strand to SEQ ID NO: 960728
aaccauaggcagagcucag

SEQ ID NO: 960730 - RNA, 19 nt, Artificial Sequence
  Description of Artificial Sequence: Synthetic oligonucleotide
  Sense strand starting at position 1667 of SEQ ID NO: 913872
cggaguuugccggagguca

SEQ ID NO: 960731 - RNA, 19 nt, Artificial Sequence
  Description of Artificial Sequence: Synthetic oligonucleotide
  Antisense strand to SEQ ID NO: 960730
ugaccuccggcaaacuccg

SEQ ID NO: 960732 - RNA, 19 nt, Artificial Sequence
  Description of Artificial Sequence: Synthetic oligonucleotide
  Sense strand starting at position 3701 of SEQ ID NO: 913872
ugccuaugguuuccaacuu

SEQ ID NO: 960733 - RNA, 19 nt, Artificial Sequence
  Description of Artificial Sequence: Synthetic oligonucleotide
  Antisense strand to SEQ ID NO: 960732
aaguuggaaaccauaggca

SEQ ID NO: 960734 - RNA, 19 nt, Artificial Sequence
  Description of Artificial Sequence: Synthetic oligonucleotide
  Sense strand starting at position 77 of SEQ ID NO: 913872
ucuuaaguguugccuccaa

SEQ ID NO: 960735 - RNA, 19 nt, Artificial Sequence
  Description of Artificial Sequence: Synthetic oligonucleotide
  Antisense strand to SEQ ID NO: 960734
uuggaggcaacacuuaaga

SEQ ID NO: 960736 - RNA, 19 nt, Artificial Sequence
  Description of Artificial Sequence: Synthetic oligonucleotide
  Sense strand starting at position 3634 of SEQ ID NO: 913872
gagagcuguuugguuguua

SEQ ID NO: 960737 - RNA, 19 nt, Artificial Sequence
  Description of Artificial Sequence: Synthetic oligonucleotide
  Antisense strand to SEQ ID NO: 960736
uaacaaccaaacagcucuc

SEQ ID NO: 960738 - RNA, 19 nt, Artificial Sequence
  Description of Artificial Sequence: Synthetic oligonucleotide
  Sense strand starting at position 1802 of SEQ ID NO: 913872
ucacgucauuuagagccaa

SEQ ID NO: 960739 - RNA, 19 nt, Artificial Sequence
  Description of Artificial Sequence: Synthetic oligonucleotide
  Antisense strand to SEQ ID NO: 960738
uuggcucuaaaugacguga

SEQ ID NO: 960740 - RNA, 19 nt, Artificial Sequence
  Description of Artificial Sequence: Synthetic oligonucleotide
  Sense strand starting at position 344 of SEQ ID NO: 913872
uucugaauuugugguaaua

SEQ ID NO: 960741 - RNA, 19 nt, Artificial Sequence
  Description of Artificial Sequence: Synthetic oligonucleotide
  Antisense strand to SEQ ID NO: 960740
uauuaccacaaauucagaa

SEQ ID NO: 960742 - RNA, 19 nt, Artificial Sequence
  Description of Artificial Sequence: Synthetic oligonucleotide
  Sense strand starting at position 2380 of SEQ ID NO: 913873
ugagacauucuuuauucga

SEQ ID NO: 960743 - RNA, 19 nt, Artificial Sequence
  Description of Artificial Sequence: Synthetic oligonucleotide
  Antisense strand to SEQ ID NO: 960742
ucgaauaaagaaugucuca

SEQ ID NO: 960744 - RNA, 19 nt, Artificial Sequence
  Description of Artificial Sequence: Synthetic oligonucleotide
  Sense strand starting at position 2893 of SEQ ID NO: 913873
guguauucaguagugcuuu

SEQ ID NO: 960745 - RNA, 19 nt, Artificial Sequence
  Description of Artificial Sequence: Synthetic oligonucleotide
  Antisense strand to SEQ ID NO: 960744
aaagcacuacugaauacac

SEQ ID NO: 960746 - RNA, 19 nt, Artificial Sequence
  Description of Artificial Sequence: Synthetic oligonucleotide
  Sense strand starting at position 3706 of SEQ ID NO: 913873
uugaaugcucuaggaacaa

SEQ ID NO: 960747 - RNA, 19 nt, Artificial Sequence
  Description of Artificial Sequence: Synthetic oligonucleotide
  Antisense strand to SEQ ID NO: 960746
uuguuccuagagcauucaa

SEQ ID NO: 960748 - RNA, 19 nt, Artificial Sequence
  Description of Artificial Sequence: Synthetic oligonucleotide
  Sense strand starting at position 3694 of SEQ ID NO: 913873
agagaaucguacuugaaug

SEQ ID NO: 960749 - RNA, 19 nt, Artificial Sequence
  Description of Artificial Sequence: Synthetic oligonucleotide
  Antisense strand to SEQ ID NO: 960748
cauucaaguacgauucucu

SEQ ID NO: 960750 - RNA, 19 nt, Artificial Sequence
  Description of Artificial Sequence: Synthetic oligonucleotide
  Sense strand starting at position 2209 of SEQ ID NO: 913873
cuuuccugucucuagggaa

SEQ ID NO: 960751 - RNA, 19 nt, Artificial Sequence
  Description of Artificial Sequence: Synthetic oligonucleotide
  Antisense strand to SEQ ID NO: 960750
uucccuagagacaggaaag

SEQ ID NO: 960752 - RNA, 19 nt, Artificial Sequence
  Description of Artificial Sequence: Synthetic oligonucleotide
  Sense strand starting at position 183 of SEQ ID NO: 913873
ucuaaagagucucuuuaag

SEQ ID NO: 960753 - RNA, 19 nt, Artificial Sequence
  Description of Artificial Sequence: Synthetic oligonucleotide
  Antisense strand to SEQ ID NO: 960752
cuuaaagagacucuuuaga

SEQ ID NO: 960754 - RNA, 19 nt, Artificial Sequence
  Description of Artificial Sequence: Synthetic oligonucleotide
  Sense strand starting at position 2382 of SEQ ID NO: 913873
agacauucuuuauucgaag

SEQ ID NO: 960755 - RNA, 19 nt, Artificial Sequence
  Description of Artificial Sequence: Synthetic oligonucleotide
  Antisense strand to SEQ ID NO: 960754
cuucgaauaaagaaugucu

SEQ ID NO: 960756 - RNA, 19 nt, Artificial Sequence
  Description of Artificial Sequence: Synthetic oligonucleotide
  Sense strand starting at position 2963 of SEQ ID NO: 913873
aguaaauagaagcgaugau

SEQ ID NO: 960757 - RNA, 19 nt, Artificial Sequence
  Description of Artificial Sequence: Synthetic oligonucleotide
  Antisense strand to SEQ ID NO: 960756
aucaucgcuucuauuuacu

SEQ ID NO: 960758 - RNA, 19 nt, Artificial Sequence
  Description of Artificial Sequence: Synthetic oligonucleotide
  Sense strand starting at position 2188 of SEQ ID NO: 913873
gguguagucccgcuggguu

SEQ ID NO: 960759 - RNA, 19 nt, Artificial Sequence
  Description of Artificial Sequence: Synthetic oligonucleotide
  Antisense strand to SEQ ID NO: 960758
aacccagcgggacuacacc

SEQ ID NO: 960760 - RNA, 19 nt, Artificial Sequence
  Description of Artificial Sequence: Synthetic oligonucleotide
  Sense strand starting at position 3726 of SEQ ID NO: 913873
cugggaaccgugcaaacau

SEQ ID NO: 960761 - RNA, 19 nt, Artificial Sequence
  Description of Artificial Sequence: Synthetic oligonucleotide
  Antisense strand to SEQ ID NO: 960760
auguuugcacgguucccag

SEQ ID NO: 960762 - RNA, 19 nt, Artificial Sequence
  Description of Artificial Sequence: Synthetic oligonucleotide
  Sense strand starting at position 2734 of SEQ ID NO: 913873
cacugagaccugugugaac

SEQ ID NO: 960763 - RNA, 19 nt, Artificial Sequence
  Description of Artificial Sequence: Synthetic oligonucleotide
  Antisense strand to SEQ ID NO: 960762
guucacacaggucucagug

SEQ ID NO: 960764 - RNA, 19 nt, Artificial Sequence
  Description of Artificial Sequence: Synthetic oligonucleotide
  Sense strand starting at position 3702 of SEQ ID NO: 913873
guacuugaaugcucuagga

SEQ ID NO: 960765 - RNA, 19 nt, Artificial Sequence
  Description of Artificial Sequence: Synthetic oligonucleotide
  Antisense strand to SEQ ID NO: 960764
uccuagagcauucaaguac

SEQ ID NO: 960766 - RNA, 19 nt, Artificial Sequence
  Description of Artificial Sequence: Synthetic oligonucleotide
  Sense strand starting at position 2697 of SEQ ID NO: 913873
cggaacaguuugguucaaa

SEQ ID NO: 960767 - RNA, 19 nt, Artificial Sequence
  Description of Artificial Sequence: Synthetic oligonucleotide
  Antisense strand to SEQ ID NO: 960766
uuugaaccaaacuguuccg

SEQ ID NO: 960768 - RNA, 19 nt, Artificial Sequence
  Description of Artificial Sequence: Synthetic oligonucleotide
  Sense strand starting at position 2383 of SEQ ID NO: 913873
gacauucuuuauucgaagu

SEQ ID NO: 960769 - RNA, 19 nt, Artificial Sequence
  Description of Artificial Sequence: Synthetic oligonucleotide
  Antisense strand to SEQ ID NO: 960768
acuucgaauaaagaauguc

SEQ ID NO: 960770 - RNA, 19 nt, Artificial Sequence
  Description of Artificial Sequence: Synthetic oligonucleotide
  Sense strand starting at position 214 of SEQ ID NO: 913873
guguacuucgaacaagucu

SEQ ID NO: 960771 - RNA, 19 nt, Artificial Sequence
  Description of Artificial Sequence: Synthetic oligonucleotide
  Antisense strand to SEQ ID NO: 960770
agacuuguucgaaguacac

SEQ ID NO: 960772 - RNA, 19 nt, Artificial Sequence
  Description of Artificial Sequence: Synthetic oligonucleotide
  Sense strand starting at position 2231 of SEQ ID NO: 913873
uaagaaguugcgggacuuu

SEQ ID NO: 960773 - RNA, 19 nt, Artificial Sequence
  Description of Artificial Sequence: Synthetic oligonucleotide
  Antisense strand to SEQ ID NO: 960772
aaagucccgcaacuucuua

SEQ ID NO: 960774 - RNA, 19 nt, Artificial Sequence
  Description of Artificial Sequence: Synthetic oligonucleotide
  Sense strand starting at position 2397 of SEQ ID NO: 913873
gaaguaucauguuccaguc

SEQ ID NO: 960775 - RNA, 19 nt, Artificial Sequence
  Description of Artificial Sequence: Synthetic oligonucleotide
  Antisense strand to SEQ ID NO: 960774
gacuggaacaugauacuuc

SEQ ID NO: 960776 - RNA, 19 nt, Artificial Sequence
  Description of Artificial Sequence: Synthetic oligonucleotide
  Sense strand starting at position 3481 of SEQ ID NO: 913873
guaauuccuccuuggagca

SEQ ID NO: 960777 - RNA, 19 nt, Artificial Sequence
  Description of Artificial Sequence: Synthetic oligonucleotide
  Antisense strand to SEQ ID NO: 960776
ugcuccaaggaggaauuac

SEQ ID NO: 960778 - RNA, 19 nt, Artificial Sequence
  Description of Artificial Sequence: Synthetic oligonucleotide
  Sense strand starting at position 2838 of SEQ ID NO: 913873
uagacuuaguuugcauagu

SEQ ID NO: 960779 - RNA, 19 nt, Artificial Sequence
  Description of Artificial Sequence: Synthetic oligonucleotide
  Antisense strand to SEQ ID NO: 960778
acuaugcaaacuaagucua

SEQ ID NO: 960780 - RNA, 19 nt, Artificial Sequence
  Description of Artificial Sequence: Synthetic oligonucleotide
  Sense strand starting at position 2834 of SEQ ID NO: 913873
guacuagacuuaguuugca

SEQ ID NO: 960781 - RNA, 19 nt, Artificial Sequence
  Description of Artificial Sequence: Synthetic oligonucleotide
  Antisense strand to SEQ ID NO: 960780
ugcaaacuaagucuaguac

SEQ ID NO: 960782 - RNA, 19 nt, Artificial Sequence
  Description of Artificial Sequence: Synthetic oligonucleotide
  Sense strand starting at position 2339 of SEQ ID NO: 913873
gaaacuuguuucucagcga

SEQ ID NO: 960783 - RNA, 19 nt, Artificial Sequence
  Description of Artificial Sequence: Synthetic oligonucleotide
  Antisense strand to SEQ ID NO: 960782
ucgcugagaaacaaguuuc

SEQ ID NO: 960784 - RNA, 19 nt, Artificial Sequence
  Description of Artificial Sequence: Synthetic oligonucleotide
  Sense strand starting at position 3872 of SEQ ID NO: 913873
auaccaucuugagauggaa

SEQ ID NO: 960785 - RNA, 19 nt, Artificial Sequence
  Description of Artificial Sequence: Synthetic oligonucleotide
  Antisense strand to SEQ ID NO: 960784
uuccaucucaagaugguau

SEQ ID NO: 960786 - RNA, 19 nt, Artificial Sequence
  Description of Artificial Sequence: Synthetic oligonucleotide
  Sense strand starting at position 2887 of SEQ ID NO: 913873
agguuuguguauucaguag

SEQ ID NO: 960787 - RNA, 19 nt, Artificial Sequence
  Description of Artificial Sequence: Synthetic oligonucleotide
  Antisense strand to SEQ ID NO: 960786
cuacugaauacacaaaccu

SEQ ID NO: 960788 - RNA, 19 nt, Artificial Sequence
  Description of Artificial Sequence: Synthetic oligonucleotide
  Sense strand starting at position 2784 of SEQ ID NO: 913873
uggauaugaucauauccac

SEQ ID NO: 960789 - RNA, 19 nt, Artificial Sequence
  Description of Artificial Sequence: Synthetic oligonucleotide
  Antisense strand to SEQ ID NO: 960788
guggauaugaucauaucca

SEQ ID NO: 960790 - RNA, 19 nt, Artificial Sequence
  Description of Artificial Sequence: Synthetic oligonucleotide
  Sense strand starting at position 135 of SEQ ID NO: 913873
ugacuucgcuugccucaaa

SEQ ID NO: 960791 - RNA, 19 nt, Artificial Sequence
  Description of Artificial Sequence: Synthetic oligonucleotide
  Antisense strand to SEQ ID NO: 960790
uuugaggcaagcgaaguca

SEQ ID NO: 960792 - RNA, 19 nt, Artificial Sequence
  Description of Artificial Sequence: Synthetic oligonucleotide
  Sense strand starting at position 86 of SEQ ID NO: 913873
ucagaugcuuuagaacaaa

SEQ ID NO: 960793 - RNA, 19 nt, Artificial Sequence
  Description of Artificial Sequence: Synthetic oligonucleotide
  Antisense strand to SEQ ID NO: 960792
uuuguucuaaagcaucuga

SEQ ID NO: 960794 - RNA, 19 nt, Artificial Sequence
  Description of Artificial Sequence: Synthetic oligonucleotide
  Sense strand starting at position 2891 of SEQ ID NO: 913873
uuguguauucaguagugcu

SEQ ID NO: 960795 - RNA, 19 nt, Artificial Sequence
  Description of Artificial Sequence: Synthetic oligonucleotide
  Antisense strand to SEQ ID NO: 960794
agcacuacugaauacacaa

SEQ ID NO: 960796 - RNA, 19 nt, Artificial Sequence
  Description of Artificial Sequence: Synthetic oligonucleotide
  Sense strand starting at position 221 of SEQ ID NO: 913873
ucgaacaagucuuagaaag

SEQ ID NO: 960797 - RNA, 19 nt, Artificial Sequence
  Description of Artificial Sequence: Synthetic oligonucleotide
  Antisense strand to SEQ ID NO: 960796
cuuucuaagacuuguucga

SEQ ID NO: 960798 - RNA, 19 nt, Artificial Sequence
  Description of Artificial Sequence: Synthetic oligonucleotide
  Sense strand starting at position 3691 of SEQ ID NO: 913873
acaagagaaucguacuuga

SEQ ID NO: 960799 - RNA, 19 nt, Artificial Sequence
  Description of Artificial Sequence: Synthetic oligonucleotide
  Antisense strand to SEQ ID NO: 960798
ucaaguacgauucucuugu

SEQ ID NO: 960800 - RNA, 19 nt, Artificial Sequence
  Description of Artificial Sequence: Synthetic oligonucleotide
  Sense strand starting at position 267 of SEQ ID NO: 913873
ccgaguuccuggucuuucu

SEQ ID NO: 960801 - RNA, 19 nt, Artificial Sequence
  Description of Artificial Sequence: Synthetic oligonucleotide
  Antisense strand to SEQ ID NO: 960800
agaaagaccaggaacucgg

SEQ ID NO: 960802 - RNA, 19 nt, Artificial Sequence
  Description of Artificial Sequence: Synthetic oligonucleotide
  Sense strand starting at position 2847 of SEQ ID NO: 913873
uuugcauaguaagagagaa

SEQ ID NO: 960803 - RNA, 19 nt, Artificial Sequence
  Description of Artificial Sequence: Synthetic oligonucleotide
  Antisense strand to SEQ ID NO: 960802
uucucucuuacuaugcaaa

SEQ ID NO: 960804 - RNA, 19 nt, Artificial Sequence
  Description of Artificial Sequence: Synthetic oligonucleotide
  Sense strand starting at position 265 of SEQ ID NO: 913873
cuccgaguuccuggucuuu

SEQ ID NO: 960805 - RNA, 19 nt, Artificial Sequence
  Description of Artificial Sequence: Synthetic oligonucleotide
  Antisense strand to SEQ ID NO: 960804
aaagaccaggaacucggag

SEQ ID NO: 960806 - RNA, 19 nt, Artificial Sequence
  Description of Artificial Sequence: Synthetic oligonucleotide
  Sense strand starting at position 2246 of SEQ ID NO: 913873
cuuugcuucugggagggaa

SEQ ID NO: 960807 - RNA, 19 nt, Artificial Sequence
  Description of Artificial Sequence: Synthetic oligonucleotide
  Antisense strand to SEQ ID NO: 960806
uucccucccagaagcaaag

SEQ ID NO: 960808 - RNA, 19 nt, Artificial Sequence
  Description of Artificial Sequence: Synthetic oligonucleotide
  Sense strand starting at position 2880 of SEQ ID NO: 913873
gcucucgagguuuguguau

SEQ ID NO: 960809 - RNA, 19 nt, Artificial Sequence
  Description of Artificial Sequence: Synthetic oligonucleotide
  Antisense strand to SEQ ID NO: 960808
auacacaaaccucgagagc

SEQ ID NO: 960810 - RNA, 19 nt, Artificial Sequence
  Description of Artificial Sequence: Synthetic oligonucleotide
  Sense strand starting at position 2844 of SEQ ID NO: 913873
uaguuugcauaguaagaga

SEQ ID NO: 960811 - RNA, 19 nt, Artificial Sequence
  Description of Artificial Sequence: Synthetic oligonucleotide
  Antisense strand to SEQ ID NO: 960810
ucucuuacuaugcaaacua

SEQ ID NO: 960812 - RNA, 19 nt, Artificial Sequence
  Description of Artificial Sequence: Synthetic oligonucleotide
  Sense strand starting at position 2152 of SEQ ID NO: 913873
gccugcguuccgcaagauu

SEQ ID NO: 960813 - RNA, 19 nt, Artificial Sequence
  Description of Artificial Sequence: Synthetic oligonucleotide
  Antisense strand to SEQ ID NO: 960812
aaucuugcggaacgcaggc

SEQ ID NO: 960814 - RNA, 19 nt, Artificial Sequence
  Description of Artificial Sequence: Synthetic oligonucleotide
  Sense strand starting at position 2839 of SEQ ID NO: 913873
agacuuaguuugcauagua

SEQ ID NO: 960815 - RNA, 19 nt, Artificial Sequence
  Description of Artificial Sequence: Synthetic oligonucleotide
  Antisense strand to SEQ ID NO: 960814
uacuaugcaaacuaagucu

SEQ ID NO: 960816 - RNA, 19 nt, Artificial Sequence
  Description of Artificial Sequence: Synthetic oligonucleotide
  Sense strand starting at position 2230 of SEQ ID NO: 913873
cuaagaaguugcgggacuu

SEQ ID NO: 960817 - RNA, 19 nt, Artificial Sequence
  Description of Artificial Sequence: Synthetic oligonucleotide
  Antisense strand to SEQ ID NO: 960816
aagucccgcaacuucuuag

SEQ ID NO: 960818 - RNA, 19 nt, Artificial Sequence
  Description of Artificial Sequence: Synthetic oligonucleotide
  Sense strand starting at position 3771 of SEQ ID NO: 913873
auauuaaccugcugcuuga

SEQ ID NO: 960819 - RNA, 19 nt, Artificial Sequence
  Description of Artificial Sequence: Synthetic oligonucleotide
  Antisense strand to SEQ ID NO: 960818
ucaagcagcagguuaauau

SEQ ID NO: 960820 - RNA, 19 nt, Artificial Sequence
  Description of Artificial Sequence: Synthetic oligonucleotide
  Sense strand starting at position 2394 of SEQ ID NO: 913873
uucgaaguaucauguucca

SEQ ID NO: 960821 - RNA, 19 nt, Artificial Sequence
  Description of Artificial Sequence: Synthetic oligonucleotide
  Antisense strand to SEQ ID NO: 960820
uggaacaugauacuucgaa

SEQ ID NO: 960822 - RNA, 19 nt, Artificial Sequence
  Description of Artificial Sequence: Synthetic oligonucleotide
  Sense strand starting at position 2931 of SEQ ID NO: 913874
ggacaagucccuuaaccuc

SEQ ID NO: 960823 - RNA, 19 nt, Artificial Sequence
  Description of Artificial Sequence: Synthetic oligonucleotide
  Antisense strand to SEQ ID NO: 960822
gagguuaagggacuugucc

SEQ ID NO: 960824 - RNA, 19 nt, Artificial Sequence
  Description of Artificial Sequence: Synthetic oligonucleotide
  Sense strand starting at position 2160 of SEQ ID NO: 913874
caaggcuuaccacagagua

SEQ ID NO: 960825 - RNA, 19 nt, Artificial Sequence
  Description of Artificial Sequence: Synthetic oligonucleotide
  Antisense strand to SEQ ID NO: 960824
uacucugugguaagccuug

SEQ ID NO: 960826 - RNA, 19 nt, Artificial Sequence
  Description of Artificial Sequence: Synthetic oligonucleotide
  Sense strand starting at position 1372 of SEQ ID NO: 913874
guccuuucuccggugucau

SEQ ID NO: 960827 - RNA, 19 nt, Artificial Sequence
  Description of Artificial Sequence: Synthetic oligonucleotide
  Antisense strand to SEQ ID NO: 960826
augacaccggagaaaggac

SEQ ID NO: 960828 - RNA, 19 nt, Artificial Sequence
  Description of Artificial Sequence: Synthetic oligonucleotide
  Sense strand starting at position 1994 of SEQ ID NO: 913874
guguguaugggagauugaa

SEQ ID NO: 960829 - RNA, 19 nt, Artificial Sequence
  Description of Artificial Sequence: Synthetic oligonucleotide
  Antisense strand to SEQ ID NO: 960828
uucaaucucccauacacac

SEQ ID NO: 960830 - RNA, 19 nt, Artificial Sequence
  Description of Artificial Sequence: Synthetic oligonucleotide
  Sense strand starting at position 3698 of SEQ ID NO: 913874
uugaaaugccuguaaacau

SEQ ID NO: 960831 - RNA, 19 nt, Artificial Sequence
  Description of Artificial Sequence: Synthetic oligonucleotide
  Antisense strand to SEQ ID NO: 960830
auguuuacaggcauuucaa

SEQ ID NO: 960832 - RNA, 19 nt, Artificial Sequence
  Description of Artificial Sequence: Synthetic oligonucleotide
  Sense strand starting at position 3907 of SEQ ID NO: 913874
augggucagauguauagua

SEQ ID NO: 960833 - RNA, 19 nt, Artificial Sequence
  Description of Artificial Sequence: Synthetic oligonucleotide
  Antisense strand to SEQ ID NO: 960832
uacuauacaucugacccau

SEQ ID NO: 960834 - RNA, 19 nt, Artificial Sequence
  Description of Artificial Sequence: Synthetic oligonucleotide
  Sense strand starting at position 1382 of SEQ ID NO: 913874
cggugucaucggcuuuacu

SEQ ID NO: 960835 - RNA, 19 nt, Artificial Sequence
  Description of Artificial Sequence: Synthetic oligonucleotide
  Antisense strand to SEQ ID NO: 960834
aguaaagccgaugacaccg

SEQ ID NO: 960836 - RNA, 19 nt, Artificial Sequence
  Description of Artificial Sequence: Synthetic oligonucleotide
  Sense strand starting at position 2971 of SEQ ID NO: 913874
cauugaaaugugugauaag

SEQ ID NO: 960837 - RNA, 19 nt, Artificial Sequence
  Description of Artificial Sequence: Synthetic oligonucleotide
  Antisense strand to SEQ ID NO: 960836
cuuaucacacauuucaaug

SEQ ID NO: 960838 - RNA, 19 nt, Artificial Sequence
  Description of Artificial Sequence: Synthetic oligonucleotide
  Sense strand starting at position 2278 of SEQ ID NO: 913874
gaaaguguccagcacaaug

SEQ ID NO: 960839 - RNA, 19 nt, Artificial Sequence
  Description of Artificial Sequence: Synthetic oligonucleotide
  Antisense strand to SEQ ID NO: 960838
cauugugcuggacacuuuc

SEQ ID NO: 960840 - RNA, 19 nt, Artificial Sequence
  Description of Artificial Sequence: Synthetic oligonucleotide
  Sense strand starting at position 2595 of SEQ ID NO: 913874
aggagaugucagcaucccu

SEQ ID NO: 960841 - RNA, 19 nt, Artificial Sequence
  Description of Artificial Sequence: Synthetic oligonucleotide
  Antisense strand to SEQ ID NO: 960840
agggaugcugacaucuccu

SEQ ID NO: 960842 - RNA, 19 nt, Artificial Sequence
  Description of Artificial Sequence: Synthetic oligonucleotide
  Sense strand starting at position 3909 of SEQ ID NO: 913874
gggucagauguauaguacu

SEQ ID NO: 960843 - RNA, 19 nt, Artificial Sequence
  Description of Artificial Sequence: Synthetic oligonucleotide
  Antisense strand to SEQ ID NO: 960842
aguacuauacaucugaccc

SEQ ID NO: 960844 - RNA, 19 nt, Artificial Sequence
  Description of Artificial Sequence: Synthetic oligonucleotide
  Sense strand starting at position 2275 of SEQ ID NO: 913874
ucagaaaguguccagcaca

SEQ ID NO: 960845 - RNA, 19 nt, Artificial Sequence
  Description of Artificial Sequence: Synthetic oligonucleotide
  Antisense strand to SEQ ID NO: 960844
ugugcuggacacuuucuga

SEQ ID NO: 960846 - RNA, 19 nt, Artificial Sequence
  Description of Artificial Sequence: Synthetic oligonucleotide
  Sense strand starting at position 3089 of SEQ ID NO: 913874
uguaacuuguaucuaagaa

SEQ ID NO: 960847 - RNA, 19 nt, Artificial Sequence
  Description of Artificial Sequence: Synthetic oligonucleotide
  Antisense strand to SEQ ID NO: 960846
uucuuagauacaaguuaca

SEQ ID NO: 960848 - RNA, 19 nt, Artificial Sequence
  Description of Artificial Sequence: Synthetic oligonucleotide
  Sense strand starting at position 1221 of SEQ ID NO: 913874
cucaguugucagcaaacaa

SEQ ID NO: 960849 - RNA, 19 nt, Artificial Sequence
  Description of Artificial Sequence: Synthetic oligonucleotide
  Antisense strand to SEQ ID NO: 960848
uuguuugcugacaacugag

SEQ ID NO: 960850 - RNA, 19 nt, Artificial Sequence
  Description of Artificial Sequence: Synthetic oligonucleotide
  Sense strand starting at position 3917 of SEQ ID NO: 913874
uguauaguacugcaacaua

SEQ ID NO: 960851 - RNA, 19 nt, Artificial Sequence
  Description of Artificial Sequence: Synthetic oligonucleotide
  Antisense strand to SEQ ID NO: 960850
uauguugcaguacuauaca

SEQ ID NO: 960852 - RNA, 19 nt, Artificial Sequence
  Description of Artificial Sequence: Synthetic oligonucleotide
  Sense strand starting at position 2173 of SEQ ID NO: 913874
agaguagaacacugucuuu

SEQ ID NO: 960853 - RNA, 19 nt, Artificial Sequence
  Description of Artificial Sequence: Synthetic oligonucleotide
  Antisense strand to SEQ ID NO: 960852
aaagacaguguucuacucu

SEQ ID NO: 960854 - RNA, 19 nt, Artificial Sequence
  Description of Artificial Sequence: Synthetic oligonucleotide
  Sense strand starting at position 2831 of SEQ ID NO: 913874
ggaaguacuggagguguca

SEQ ID NO: 960855 - RNA, 19 nt, Artificial Sequence
  Description of Artificial Sequence: Synthetic oligonucleotide
  Antisense strand to SEQ ID NO: 960854
ugacaccuccaguacuucc

SEQ ID NO: 960856 - RNA, 19 nt, Artificial Sequence
  Description of Artificial Sequence: Synthetic oligonucleotide
  Sense strand starting at position 3135 of SEQ ID NO: 913874
uucugcacuuccuuggaaa

SEQ ID NO: 960857 - RNA, 19 nt, Artificial Sequence
  Description of Artificial Sequence: Synthetic oligonucleotide
  Antisense strand to SEQ ID NO: 960856
uuuccaaggaagugcagaa

SEQ ID NO: 960858 - RNA, 19 nt, Artificial Sequence
  Description of Artificial Sequence: Synthetic oligonucleotide
  Sense strand starting at position 1141 of SEQ ID NO: 913874
acacuugucugccugagaa

SEQ ID NO: 960859 - RNA, 19 nt, Artificial Sequence
  Description of Artificial Sequence: Synthetic oligonucleotide
  Antisense strand to SEQ ID NO: 960858
uucucaggcagacaagugu

SEQ ID NO: 960860 - RNA, 19 nt, Artificial Sequence
  Description of Artificial Sequence: Synthetic oligonucleotide
  Sense strand starting at position 152 of SEQ ID NO: 913874
gguaucagucagcaauggu

SEQ ID NO: 960861 - RNA, 19 nt, Artificial Sequence
  Description of Artificial Sequence: Synthetic oligonucleotide
  Antisense strand to SEQ ID NO: 960860
accauugcugacugauacc

SEQ ID NO: 960862 - RNA, 19 nt, Artificial Sequence
  Description of Artificial Sequence: Synthetic oligonucleotide
  Sense strand starting at position 3799 of SEQ ID NO: 913874
gugaaacagcucugaucuc

SEQ ID NO: 960863 - RNA, 19 nt, Artificial Sequence
  Description of Artificial Sequence: Synthetic oligonucleotide
  Antisense strand to SEQ ID NO: 960862
gagaucagagcuguuucac

SEQ ID NO: 960864 - RNA, 19 nt, Artificial Sequence
  Description of Artificial Sequence: Synthetic oligonucleotide
  Sense strand starting at position 3696 of SEQ ID NO: 913874
uguugaaaugccuguaaac

SEQ ID NO: 960865 - RNA, 19 nt, Artificial Sequence
  Description of Artificial Sequence: Synthetic oligonucleotide
  Antisense strand to SEQ ID NO: 960864
guuuacaggcauuucaaca

SEQ ID NO: 960866 - RNA, 19 nt, Artificial Sequence
  Description of Artificial Sequence: Synthetic oligonucleotide
  Sense strand starting at position 2946 of SEQ ID NO: 913874
ccucucuuggccuaaguuu

SEQ ID NO: 960867 - RNA, 19 nt, Artificial Sequence
  Description of Artificial Sequence: Synthetic oligonucleotide
  Antisense strand to SEQ ID NO: 960866
aaacuuaggccaagagagg

SEQ ID NO: 960868 - RNA, 19 nt, Artificial Sequence
  Description of Artificial Sequence: Synthetic oligonucleotide
  Sense strand starting at position 2802 of SEQ ID NO: 913874
uccgcaaucauggaugcuu

SEQ ID NO: 960869 - RNA, 19 nt, Artificial Sequence
  Description of Artificial Sequence: Synthetic oligonucleotide
  Antisense strand to SEQ ID NO: 960868
aagcauccaugauugcgga

SEQ ID NO: 960870 - RNA, 19 nt, Artificial Sequence
  Description of Artificial Sequence: Synthetic oligonucleotide
  Sense strand starting at position 2983 of SEQ ID NO: 913874
ugauaagaugcuuguguau

SEQ ID NO: 960871 - RNA, 19 nt, Artificial Sequence
  Description of Artificial Sequence: Synthetic oligonucleotide
  Antisense strand to SEQ ID NO: 960870
auacacaagcaucuuauca

SEQ ID NO: 960872 - RNA, 19 nt, Artificial Sequence
  Description of Artificial Sequence: Synthetic oligonucleotide
  Sense strand starting at position 315 of SEQ ID NO: 913874
cuuccuacuuguucggaca

SEQ ID NO: 960873 - RNA, 19 nt, Artificial Sequence
  Description of Artificial Sequence: Synthetic oligonucleotide
  Antisense strand to SEQ ID NO: 960872
uguccgaacaaguaggaag

SEQ ID NO: 960874 - RNA, 19 nt, Artificial Sequence
  Description of Artificial Sequence: Synthetic oligonucleotide
  Sense strand starting at position 2996 of SEQ ID NO: 913874
guguauuguaucugacuua

SEQ ID NO: 960875 - RNA, 19 nt, Artificial Sequence
  Description of Artificial Sequence: Synthetic oligonucleotide
  Antisense strand to SEQ ID NO: 960874
uaagucagauacaauacac

SEQ ID NO: 960876 - RNA, 19 nt, Artificial Sequence
  Description of Artificial Sequence: Synthetic oligonucleotide
  Sense strand starting at position 2982 of SEQ ID NO: 913874
gugauaagaugcuugugua

SEQ ID NO: 960877 - RNA, 19 nt, Artificial Sequence
  Description of Artificial Sequence: Synthetic oligonucleotide
  Antisense strand to SEQ ID NO: 960876
uacacaagcaucuuaucac

SEQ ID NO: 960878 - RNA, 19 nt, Artificial Sequence
  Description of Artificial Sequence: Synthetic oligonucleotide
  Sense strand starting at position 1067 of SEQ ID NO: 913874
cugagcucugccuaugguu

SEQ ID NO: 960879 - RNA, 19 nt, Artificial Sequence
  Description of Artificial Sequence: Synthetic oligonucleotide
  Antisense strand to SEQ ID NO: 960878
aaccauaggcagagcucag

SEQ ID NO: 960880 - RNA, 19 nt, Artificial Sequence
  Description of Artificial Sequence: Synthetic oligonucleotide
  Sense strand starting at position 1075 of SEQ ID NO: 913874
ugccuaugguuuccaacuu

SEQ ID NO: 960881 - RNA, 19 nt, Artificial Sequence
  Description of Artificial Sequence: Synthetic oligonucleotide
  Antisense strand to SEQ ID NO: 960880
aaguuggaaaccauaggca

SEQ ID NO: 960882 - RNA, 19 nt, Artificial Sequence
  Description of Artificial Sequence: Synthetic oligonucleotide
  Sense strand starting at position 2995 of SEQ ID NO: 913874
uguguauuguaucugacuu

SEQ ID NO: 960883 - RNA, 19 nt, Artificial Sequence
  Description of Artificial Sequence: Synthetic oligonucleotide
  Antisense strand to SEQ ID NO: 960882
aagucagauacaauacaca

SEQ ID NO: 960884 - RNA, 19 nt, Artificial Sequence
  Description of Artificial Sequence: Synthetic oligonucleotide
  Sense strand starting at position 3093 of SEQ ID NO: 913874
acuuguaucuaagaaagga

SEQ ID NO: 960885 - RNA, 19 nt, Artificial Sequence
  Description of Artificial Sequence: Synthetic oligonucleotide
  Antisense strand to SEQ ID NO: 960884
uccuuucuuagauacaagu

SEQ ID NO: 960886 - RNA, 19 nt, Artificial Sequence
  Description of Artificial Sequence: Synthetic oligonucleotide
  Sense strand starting at position 1008 of SEQ ID NO: 913874
gagagcuguuugguuguua

SEQ ID NO: 960887 - RNA, 19 nt, Artificial Sequence
  Description of Artificial Sequence: Synthetic oligonucleotide
  Antisense strand to SEQ ID NO: 960886
uaacaaccaaacagcucuc

SEQ ID NO: 960888 - RNA, 19 nt, Artificial Sequence
  Description of Artificial Sequence: Synthetic oligonucleotide
  Sense strand starting at position 2794 of SEQ ID NO: 913874
cacugcuguccgcaaucau

SEQ ID NO: 960889 - RNA, 19 nt, Artificial Sequence
  Description of Artificial Sequence: Synthetic oligonucleotide
  Antisense strand to SEQ ID NO: 960888
augauugcggacagcagug

SEQ ID NO: 960890 - RNA, 19 nt, Artificial Sequence
  Description of Artificial Sequence: Synthetic oligonucleotide
  Sense strand starting at position 2972 of SEQ ID NO: 913874
auugaaaugugugauaaga

SEQ ID NO: 960891 - RNA, 19 nt, Artificial Sequence
  Description of Artificial Sequence: Synthetic oligonucleotide
  Antisense strand to SEQ ID NO: 960890
ucuuaucacacauuucaau

SEQ ID NO: 960892 - RNA, 19 nt, Artificial Sequence
  Description of Artificial Sequence: Synthetic oligonucleotide
  Sense strand starting at position 901 of SEQ ID NO: 913874
ggacuguguccguagacgu

SEQ ID NO: 960893 - RNA, 19 nt, Artificial Sequence
  Description of Artificial Sequence: Synthetic oligonucleotide
  Antisense strand to SEQ ID NO: 960892
acgucuacggacacagucc

SEQ ID NO: 960894 - RNA, 19 nt, Artificial Sequence
  Description of Artificial Sequence: Synthetic oligonucleotide
  Sense strand starting at position 1009 of SEQ ID NO: 913874
agagcuguuugguuguuau

SEQ ID NO: 960895 - RNA, 19 nt, Artificial Sequence
  Description of Artificial Sequence: Synthetic oligonucleotide
  Antisense strand to SEQ ID NO: 960894
auaacaaccaaacagcucu

SEQ ID NO: 960896 - RNA, 19 nt, Artificial Sequence
  Description of Artificial Sequence: Synthetic oligonucleotide
  Sense strand starting at position 3831 of SEQ ID NO: 913874
gaaagaugguacugagaca

SEQ ID NO: 960897 - RNA, 19 nt, Artificial Sequence
  Description of Artificial Sequence: Synthetic oligonucleotide
  Antisense strand to SEQ ID NO: 960896
ugucucaguaccaucuuuc

SEQ ID NO: 960898 - RNA, 19 nt, Artificial Sequence
  Description of Artificial Sequence: Synthetic oligonucleotide
  Sense strand starting at position 3682 of SEQ ID NO: 913874
accugaguuauucguguug

SEQ ID NO: 960899 - RNA, 19 nt, Artificial Sequence
  Description of Artificial Sequence: Synthetic oligonucleotide
  Antisense strand to SEQ ID NO: 960898
caacacgaauaacucaggu

SEQ ID NO: 960900 - RNA, 19 nt, Artificial Sequence
  Description of Artificial Sequence: Synthetic oligonucleotide
  Sense strand starting at position 2974 of SEQ ID NO: 913874
ugaaaugugugauaagaug

SEQ ID NO: 960901 - RNA, 19 nt, Artificial Sequence
  Description of Artificial Sequence: Synthetic oligonucleotide
  Antisense strand to SEQ ID NO: 960900
caucuuaucacacauuuca

SEQ ID NO: 960902 - RNA, 19 nt, Artificial Sequence
  Description of Artificial Sequence: Synthetic oligonucleotide
  Sense strand starting at position 3438 of SEQ ID NO: 913875
cuggaauccuaaguuagaa

SEQ ID NO: 960903 - RNA, 19 nt, Artificial Sequence
  Description of Artificial Sequence: Synthetic oligonucleotide
  Antisense strand to SEQ ID NO: 960902
uucuaacuuaggauuccag

SEQ ID NO: 960904 - RNA, 19 nt, Artificial Sequence
  Description of Artificial Sequence: Synthetic oligonucleotide
  Sense strand starting at position 2456 of SEQ ID NO: 913875
ccagauucucuugaacagu

SEQ ID NO: 960905 - RNA, 19 nt, Artificial Sequence
  Description of Artificial Sequence: Synthetic oligonucleotide
  Antisense strand to SEQ ID NO: 960904
acuguucaagagaaucugg

SEQ ID NO: 960906 - RNA, 19 nt, Artificial Sequence
  Description of Artificial Sequence: Synthetic oligonucleotide
  Sense strand starting at position 841 of SEQ ID NO: 913875
cugguagguuucucuauuu

SEQ ID NO: 960907 - RNA, 19 nt, Artificial Sequence
  Description of Artificial Sequence: Synthetic oligonucleotide
  Antisense strand to SEQ ID NO: 960906
aaauagagaaaccuaccag

SEQ ID NO: 960908 - RNA, 19 nt, Artificial Sequence
  Description of Artificial Sequence: Synthetic oligonucleotide
  Sense strand starting at position 357 of SEQ ID NO: 913875
gcuuuaugggaguaaacau

SEQ ID NO: 960909 - RNA, 19 nt, Artificial Sequence
  Description of Artificial Sequence: Synthetic oligonucleotide
  Antisense strand to SEQ ID NO: 960908
auguuuacucccauaaagc

SEQ ID NO: 960910 - RNA, 19 nt, Artificial Sequence
  Description of Artificial Sequence: Synthetic oligonucleotide
  Sense strand starting at position 512 of SEQ ID NO: 913875
auaugcuggcauuaaacaa

SEQ ID NO: 960911 - RNA, 19 nt, Artificial Sequence
  Description of Artificial Sequence: Synthetic oligonucleotide
  Antisense strand to SEQ ID NO: 960910
uuguuuaaugccagcauau

SEQ ID NO: 960912 - RNA, 19 nt, Artificial Sequence
  Description of Artificial Sequence: Synthetic oligonucleotide
  Sense strand starting at position 2568 of SEQ ID NO: 913875
ugggucugucguucauguu

SEQ ID NO: 960913 - RNA, 19 nt, Artificial Sequence
  Description of Artificial Sequence: Synthetic oligonucleotide
  Antisense strand to SEQ ID NO: 960912
aacaugaacgacagaccca

SEQ ID NO: 960914 - RNA, 19 nt, Artificial Sequence
  Description of Artificial Sequence: Synthetic oligonucleotide
  Sense strand starting at position 3192 of SEQ ID NO: 913875
ggacauaccugggagauuu

SEQ ID NO: 960915 - RNA, 19 nt, Artificial Sequence
  Description of Artificial Sequence: Synthetic oligonucleotide
  Antisense strand to SEQ ID NO: 960914
aaaucucccagguaugucc

SEQ ID NO: 960916 - RNA, 19 nt, Artificial Sequence
  Description of Artificial Sequence: Synthetic oligonucleotide
  Sense strand starting at position 147 of SEQ ID NO: 913875
aucaauauggcacgaauaa

SEQ ID NO: 960917 - RNA, 19 nt, Artificial Sequence
  Description of Artificial Sequence: Synthetic oligonucleotide
  Antisense strand to SEQ ID NO: 960916
uuauucgugccauauugau

SEQ ID NO: 960918 - RNA, 19 nt, Artificial Sequence
  Description of Artificial Sequence: Synthetic oligonucleotide
  Sense strand starting at position 2481 of SEQ ID NO: 913875
ggacauauuggguauugcu

SEQ ID NO: 960919 - RNA, 19 nt, Artificial Sequence
  Description of Artificial Sequence: Synthetic oligonucleotide
  Antisense strand to SEQ ID NO: 960918
agcaauacccaauaugucc

SEQ ID NO: 960920 - RNA, 19 nt, Artificial Sequence
  Description of Artificial Sequence: Synthetic oligonucleotide
  Sense strand starting at position 2452 of SEQ ID NO: 913875
auggccagauucucuugaa

SEQ ID NO: 960921 - RNA, 19 nt, Artificial Sequence
  Description of Artificial Sequence: Synthetic oligonucleotide
  Antisense strand to SEQ ID NO: 960920
uucaagagaaucuggccau

SEQ ID NO: 960922 - RNA, 19 nt, Artificial Sequence
  Description of Artificial Sequence: Synthetic oligonucleotide
  Sense strand starting at position 3776 of SEQ ID NO: 913875
ucuguuaugccagacauua

SEQ ID NO: 960923 - RNA, 19 nt, Artificial Sequence
  Description of Artificial Sequence: Synthetic oligonucleotide
  Antisense strand to SEQ ID NO: 960922
uaaugucuggcauaacaga

SEQ ID NO: 960924 - RNA, 19 nt, Artificial Sequence
  Description of Artificial Sequence: Synthetic oligonucleotide
  Sense strand starting at position 828 of SEQ ID NO: 913875
aggacauccuuuccuggua

SEQ ID NO: 960925 - RNA, 19 nt, Artificial Sequence
  Description of Artificial Sequence: Synthetic oligonucleotide
  Antisense strand to SEQ ID NO: 960924
uaccaggaaaggauguccu

SEQ ID NO: 960926 - RNA, 19 nt, Artificial Sequence
  Description of Artificial Sequence: Synthetic oligonucleotide
  Sense strand starting at position 2240 of SEQ ID NO: 913875
agggauagugaguggcuaa

SEQ ID NO: 960927 - RNA, 19 nt, Artificial Sequence
  Description of Artificial Sequence: Synthetic oligonucleotide
  Antisense strand to SEQ ID NO: 960926
uuagccacucacuaucccu

SEQ ID NO: 960928 - RNA, 19 nt, Artificial Sequence
  Description of Artificial Sequence: Synthetic oligonucleotide
  Sense strand starting at position 681 of SEQ ID NO: 913875
guggcauuacaacagucau

SEQ ID NO: 960929 - RNA, 19 nt, Artificial Sequence
  Description of Artificial Sequence: Synthetic oligonucleotide
  Antisense strand to SEQ ID NO: 960928
augacuguuguaaugccac

SEQ ID NO: 960930 - RNA, 19 nt, Artificial Sequence
  Description of Artificial Sequence: Synthetic oligonucleotide
  Sense strand starting at position 2243 of SEQ ID NO: 913875
gauagugaguggcuaauga

SEQ ID NO: 960931 - RNA, 19 nt, Artificial Sequence
  Description of Artificial Sequence: Synthetic oligonucleotide
  Antisense strand to SEQ ID NO: 960930
ucauuagccacucacuauc

SEQ ID NO: 960932 - RNA, 19 nt, Artificial Sequence
  Description of Artificial Sequence: Synthetic oligonucleotide
  Sense strand starting at position 2453 of SEQ ID NO: 913875
uggccagauucucuugaac

SEQ ID NO: 960933 - RNA, 19 nt, Artificial Sequence
  Description of Artificial Sequence: Synthetic oligonucleotide
  Antisense strand to SEQ ID NO: 960932
guucaagagaaucuggcca

SEQ ID NO: 960934 - RNA, 19 nt, Artificial Sequence
  Description of Artificial Sequence: Synthetic oligonucleotide
  Sense strand starting at position 541 of SEQ ID NO: 913875
accagauccgucugaauua

SEQ ID NO: 960935 - RNA, 19 nt, Artificial Sequence
  Description of Artificial Sequence: Synthetic oligonucleotide
  Antisense strand to SEQ ID NO: 960934
uaauucagacggaucuggu

SEQ ID NO: 960936 - RNA, 19 nt, Artificial Sequence
  Description of Artificial Sequence: Synthetic oligonucleotide
  Sense strand starting at position 2241 of SEQ ID NO: 913875
gggauagugaguggcuaau

SEQ ID NO: 960937 - RNA, 19 nt, Artificial Sequence
  Description of Artificial Sequence: Synthetic oligonucleotide
  Antisense strand to SEQ ID NO: 960936
auuagccacucacuauccc

SEQ ID NO: 960938 - RNA, 19 nt, Artificial Sequence
  Description of Artificial Sequence: Synthetic oligonucleotide
  Sense strand starting at position 803 of SEQ ID NO: 913875
agagcuguuggugagcaga

SEQ ID NO: 960939 - RNA, 19 nt, Artificial Sequence
  Description of Artificial Sequence: Synthetic oligonucleotide
  Antisense strand to SEQ ID NO: 960938
ucugcucaccaacagcucu

SEQ ID NO: 960940 - RNA, 19 nt, Artificial Sequence
  Description of Artificial Sequence: Synthetic oligonucleotide
  Sense strand starting at position 440 of SEQ ID NO: 913875
auaguuuauuccucaguaa

SEQ ID NO: 960941 - RNA, 19 nt, Artificial Sequence
  Description of Artificial Sequence: Synthetic oligonucleotide
  Antisense strand to SEQ ID NO: 960940
uuacugaggaauaaacuau

SEQ ID NO: 960942 - RNA, 19 nt, Artificial Sequence
  Description of Artificial Sequence: Synthetic oligonucleotide
  Sense strand starting at position 588 of SEQ ID NO: 913875
ccuguacaauuaguuaauu

SEQ ID NO: 960943 - RNA, 19 nt, Artificial Sequence
  Description of Artificial Sequence: Synthetic oligonucleotide
  Antisense strand to SEQ ID NO: 960942
aauuaacuaauuguacagg

SEQ ID NO: 960944 - RNA, 19 nt, Artificial Sequence
  Description of Artificial Sequence: Synthetic oligonucleotide
  Sense strand starting at position 3900 of SEQ ID NO: 913875
auguaaugagcuuaguagu

SEQ ID NO: 960945 - RNA, 19 nt, Artificial Sequence
  Description of Artificial Sequence: Synthetic oligonucleotide
  Antisense strand to SEQ ID NO: 960944
acuacuaagcucauuacau

SEQ ID NO: 960946 - RNA, 19 nt, Artificial Sequence
  Description of Artificial Sequence: Synthetic oligonucleotide
  Sense strand starting at position 443 of SEQ ID NO: 913875
guuuauuccucaguaacua

SEQ ID NO: 960947 - RNA, 19 nt, Artificial Sequence
  Description of Artificial Sequence: Synthetic oligonucleotide
  Antisense strand to SEQ ID NO: 960946
uaguuacugaggaauaaac

SEQ ID NO: 960948 - RNA, 19 nt, Artificial Sequence
  Description of Artificial Sequence: Synthetic oligonucleotide
  Sense strand starting at position 68 of SEQ ID NO: 913875
agcccauguuaucuuugaa

SEQ ID NO: 960949 - RNA, 19 nt, Artificial Sequence
  Description of Artificial Sequence: Synthetic oligonucleotide
  Antisense strand to SEQ ID NO: 960948
uucaaagauaacaugggcu

SEQ ID NO: 960950 - RNA, 19 nt, Artificial Sequence
  Description of Artificial Sequence: Synthetic oligonucleotide
  Sense strand starting at position 3222 of SEQ ID NO: 913875
gcaacugagugcucacaug

SEQ ID NO: 960951 - RNA, 19 nt, Artificial Sequence
  Description of Artificial Sequence: Synthetic oligonucleotide
  Antisense strand to SEQ ID NO: 960950
caugugagcacucaguugc

SEQ ID NO: 960952 - RNA, 19 nt, Artificial Sequence
  Description of Artificial Sequence: Synthetic oligonucleotide
  Sense strand starting at position 2959 of SEQ ID NO: 913875
cagaguuugcagugacgga

SEQ ID NO: 960953 - RNA, 19 nt, Artificial Sequence
  Description of Artificial Sequence: Synthetic oligonucleotide
  Antisense strand to SEQ ID NO: 960952
uccgucacugcaaacucug

SEQ ID NO: 960954 - RNA, 19 nt, Artificial Sequence
  Description of Artificial Sequence: Synthetic oligonucleotide
  Sense strand starting at position 840 of SEQ ID NO: 913875
ccugguagguuucucuauu

SEQ ID NO: 960955 - RNA, 19 nt, Artificial Sequence
  Description of Artificial Sequence: Synthetic oligonucleotide
  Antisense strand to SEQ ID NO: 960954
aauagagaaaccuaccagg

SEQ ID NO: 960956 - RNA, 19 nt, Artificial Sequence
  Description of Artificial Sequence: Synthetic oligonucleotide
  Sense strand starting at position 2376 of SEQ ID NO: 913875
ucuacuugguccuuugcaa

SEQ ID NO: 960957 - RNA, 19 nt, Artificial Sequence
  Description of Artificial Sequence: Synthetic oligonucleotide
  Antisense strand to SEQ ID NO: 960956
uugcaaaggaccaaguaga

SEQ ID NO: 960958 - RNA, 19 nt, Artificial Sequence
  Description of Artificial Sequence: Synthetic oligonucleotide
  Sense strand starting at position 3612 of SEQ ID NO: 913875
gaaaccauuucgggagguu

SEQ ID NO: 960959 - RNA, 19 nt, Artificial Sequence
  Description of Artificial Sequence: Synthetic oligonucleotide
  Antisense strand to SEQ ID NO: 960958
aaccucccgaaaugguuuc

SEQ ID NO: 960960 - RNA, 19 nt, Artificial Sequence
  Description of Artificial Sequence: Synthetic oligonucleotide
  Sense strand starting at position 955 of SEQ ID NO: 913875
cgaccugcuuguucugaga

SEQ ID NO: 960961 - RNA, 19 nt, Artificial Sequence
  Description of Artificial Sequence: Synthetic oligonucleotide
  Antisense strand to SEQ ID NO: 960960
ucucagaacaagcaggucg

SEQ ID NO: 960962 - RNA, 19 nt, Artificial Sequence
  Description of Artificial Sequence: Synthetic oligonucleotide
  Sense strand starting at position 88 of SEQ ID NO: 913875
gcuuaugcaucuguaaauu

SEQ ID NO: 960963 - RNA, 19 nt, Artificial Sequence
  Description of Artificial Sequence: Synthetic oligonucleotide
  Antisense strand to SEQ ID NO: 960962
aauuuacagaugcauaagc

SEQ ID NO: 960964 - RNA, 19 nt, Artificial Sequence
  Description of Artificial Sequence: Synthetic oligonucleotide
  Sense strand starting at position 1283 of SEQ ID NO: 913875
cacguucccuccucgagau

SEQ ID NO: 960965 - RNA, 19 nt, Artificial Sequence
  Description of Artificial Sequence: Synthetic oligonucleotide
  Antisense strand to SEQ ID NO: 960964
aucucgaggagggaacgug

SEQ ID NO: 960966 - RNA, 19 nt, Artificial Sequence
  Description of Artificial Sequence: Synthetic oligonucleotide
  Sense strand starting at position 3559 of SEQ ID NO: 913875
guucucagaguguggucua

SEQ ID NO: 960967 - RNA, 19 nt, Artificial Sequence
  Description of Artificial Sequence: Synthetic oligonucleotide
  Antisense strand to SEQ ID NO: 960966
uagaccacacucugagaac

SEQ ID NO: 960968 - RNA, 19 nt, Artificial Sequence
  Description of Artificial Sequence: Synthetic oligonucleotide
  Sense strand starting at position 3764 of SEQ ID NO: 913875
cagguaacgucuucuguua

SEQ ID NO: 960969 - RNA, 19 nt, Artificial Sequence
  Description of Artificial Sequence: Synthetic oligonucleotide
  Antisense strand to SEQ ID NO: 960968
uaacagaagacguuaccug

SEQ ID NO: 960970 - RNA, 19 nt, Artificial Sequence
  Description of Artificial Sequence: Synthetic oligonucleotide
  Sense strand starting at position 2569 of SEQ ID NO: 913875
gggucugucguucauguua

SEQ ID NO: 960971 - RNA, 19 nt, Artificial Sequence
  Description of Artificial Sequence: Synthetic oligonucleotide
  Antisense strand to SEQ ID NO: 960970
uaacaugaacgacagaccc

SEQ ID NO: 960972 - RNA, 19 nt, Artificial Sequence
  Description of Artificial Sequence: Synthetic oligonucleotide
  Sense strand starting at position 3401 of SEQ ID NO: 913875
caggauuguugacagacua

SEQ ID NO: 960973 - RNA, 19 nt, Artificial Sequence
  Description of Artificial Sequence: Synthetic oligonucleotide
  Antisense strand to SEQ ID NO: 960972
uagucugucaacaauccug

SEQ ID NO: 960974 - RNA, 19 nt, Artificial Sequence
  Description of Artificial Sequence: Synthetic oligonucleotide
  Sense strand starting at position 408 of SEQ ID NO: 913875
cuuagaaacuucuagguag

SEQ ID NO: 960975 - RNA, 19 nt, Artificial Sequence
  Description of Artificial Sequence: Synthetic oligonucleotide
  Antisense strand to SEQ ID NO: 960974
cuaccuagaaguuucuaag

SEQ ID NO: 960976 - RNA, 19 nt, Artificial Sequence
  Description of Artificial Sequence: Synthetic oligonucleotide
  Sense strand starting at position 3066 of SEQ ID NO: 913875
guggacuuguaauagggau

SEQ ID NO: 960977 - RNA, 19 nt, Artificial Sequence
  Description of Artificial Sequence: Synthetic oligonucleotide
  Antisense strand to SEQ ID NO: 960976
aucccuauuacaaguccac

SEQ ID NO: 960978 - RNA, 19 nt, Artificial Sequence
  Description of Artificial Sequence: Synthetic oligonucleotide
  Sense strand starting at position 1133 of SEQ ID NO: 913875
ccucguuacucuucgaggu

SEQ ID NO: 960979 - RNA, 19 nt, Artificial Sequence
  Description of Artificial Sequence: Synthetic oligonucleotide
  Antisense strand to SEQ ID NO: 960978
accucgaagaguaacgagg

SEQ ID NO: 960980 - RNA, 19 nt, Artificial Sequence
  Description of Artificial Sequence: Synthetic oligonucleotide
  Sense strand starting at position 3055 of SEQ ID NO: 913875
gaaauugaauaguggacuu

SEQ ID NO: 960981 - RNA, 19 nt, Artificial Sequence
  Description of Artificial Sequence: Synthetic oligonucleotide
  Antisense strand to SEQ ID NO: 960980
aaguccacuauucaauuuc

SEQ ID NO: 960982 - RNA, 19 nt, Artificial Sequence
  Description of Artificial Sequence: Synthetic oligonucleotide
  Sense strand starting at position 2113 of SEQ ID NO: 913876
gaauucgggaaauguggaa

SEQ ID NO: 960983 - RNA, 19 nt, Artificial Sequence
  Description of Artificial Sequence: Synthetic oligonucleotide
  Antisense strand to SEQ ID NO: 960982
uuccacauuucccgaauuc

SEQ ID NO: 960984 - RNA, 19 nt, Artificial Sequence
  Description of Artificial Sequence: Synthetic oligonucleotide
  Sense strand starting at position 1200 of SEQ ID NO: 913876
gaguucuuuccucaaugag

SEQ ID NO: 960985 - RNA, 19 nt, Artificial Sequence
  Description of Artificial Sequence: Synthetic oligonucleotide
  Antisense strand to SEQ ID NO: 960984
cucauugaggaaagaacuc

SEQ ID NO: 960986 - RNA, 19 nt, Artificial Sequence
  Description of Artificial Sequence: Synthetic oligonucleotide
  Sense strand starting at position 3507 of SEQ ID NO: 913876
auugaauaagcaugacuua

SEQ ID NO: 960987 - RNA, 19 nt, Artificial Sequence
  Description of Artificial Sequence: Synthetic oligonucleotide
  Antisense strand to SEQ ID NO: 960986
uaagucaugcuuauucaau

SEQ ID NO: 960988 - RNA, 19 nt, Artificial Sequence
  Description of Artificial Sequence: Synthetic oligonucleotide
  Sense strand starting at position 1541 of SEQ ID NO: 913876
cugccaagagcuuacagaa

SEQ ID NO: 960989 - RNA, 19 nt, Artificial Sequence
  Description of Artificial Sequence: Synthetic oligonucleotide
  Antisense strand to SEQ ID NO: 960988
uucuguaagcucuuggcag

SEQ ID NO: 960990 - RNA, 19 nt, Artificial Sequence
  Description of Artificial Sequence: Synthetic oligonucleotide
  Sense strand starting at position 3820 of SEQ ID NO: 913876
cuccuucucccagagguaa

SEQ ID NO: 960991 - RNA, 19 nt, Artificial Sequence
  Description of Artificial Sequence: Synthetic oligonucleotide
  Antisense strand to SEQ ID NO: 960990
uuaccucugggagaaggag

SEQ ID NO: 960992 - RNA, 19 nt, Artificial Sequence
  Description of Artificial Sequence: Synthetic oligonucleotide
  Sense strand starting at position 2255 of SEQ ID NO: 913876
guucgugaaacugaauuaa

SEQ ID NO: 960993 - RNA, 19 nt, Artificial Sequence
  Description of Artificial Sequence: Synthetic oligonucleotide
  Antisense strand to SEQ ID NO: 960992
uuaauucaguuucacgaac

SEQ ID NO: 960994 - RNA, 19 nt, Artificial Sequence
  Description of Artificial Sequence: Synthetic oligonucleotide
  Sense strand starting at position 3263 of SEQ ID NO: 913876
gcuguuauaagauaaaggu

SEQ ID NO: 960995 - RNA, 19 nt, Artificial Sequence
  Description of Artificial Sequence: Synthetic oligonucleotide
  Antisense strand to SEQ ID NO: 960994
accuuuaucuuauaacagc

SEQ ID NO: 960996 - RNA, 19 nt, Artificial Sequence
  Description of Artificial Sequence: Synthetic oligonucleotide
  Sense strand starting at position 12 of SEQ ID NO: 913876
aaguuugagcaagggaauu

SEQ ID NO: 960997 - RNA, 19 nt, Artificial Sequence
  Description of Artificial Sequence: Synthetic oligonucleotide
  Antisense strand to SEQ ID NO: 960996
aauucccuugcucaaacuu

SEQ ID NO: 960998 - RNA, 19 nt, Artificial Sequence
  Description of Artificial Sequence: Synthetic oligonucleotide
  Sense strand starting at position 1064 of SEQ ID NO: 913876
agaugaucuugucuaaacc

SEQ ID NO: 960999 - RNA, 19 nt, Artificial Sequence
  Description of Artificial Sequence: Synthetic oligonucleotide
  Antisense strand to SEQ ID NO: 960998
gguuuagacaagaucaucu

SEQ ID NO: 961000 - RNA, 19 nt, Artificial Sequence
  Description of Artificial Sequence: Synthetic oligonucleotide
  Sense strand starting at position 3725 of SEQ ID NO: 913876
cuacauaaacgugacaguu

SEQ ID NO: 961001 - RNA, 19 nt, Artificial Sequence
  Description of Artificial Sequence: Synthetic oligonucleotide
  Antisense strand to SEQ ID NO: 961000
aacugucacguuuauguag

SEQ ID NO: 961002 - RNA, 19 nt, Artificial Sequence
  Description of Artificial Sequence: Synthetic oligonucleotide
  Sense strand starting at position 3371 of SEQ ID NO: 913876
gcaggcugacuuuaaauca

SEQ ID NO: 961003 - RNA, 19 nt, Artificial Sequence
  Description of Artificial Sequence: Synthetic oligonucleotide
  Antisense strand to SEQ ID NO: 961002
ugauuuaaagucagccugc

SEQ ID NO: 961004 - RNA, 19 nt, Artificial Sequence
  Description of Artificial Sequence: Synthetic oligonucleotide
  Sense strand starting at position 2118 of SEQ ID NO: 913876
cgggaaauguggaagugaa

SEQ ID NO: 961005 - RNA, 19 nt, Artificial Sequence
  Description of Artificial Sequence: Synthetic oligonucleotide
  Antisense strand to SEQ ID NO: 961004
uucacuuccacauuucccg

SEQ ID NO: 961006 - RNA, 19 nt, Artificial Sequence
  Description of Artificial Sequence: Synthetic oligonucleotide
  Sense strand starting at position 3338 of SEQ ID NO: 913876
gcuuauuuguggucucaca

SEQ ID NO: 961007 - RNA, 19 nt, Artificial Sequence
  Description of Artificial Sequence: Synthetic oligonucleotide
  Antisense strand to SEQ ID NO: 961006
ugugagaccacaaauaagc

SEQ ID NO: 961008 - RNA, 19 nt, Artificial Sequence
  Description of Artificial Sequence: Synthetic oligonucleotide
  Sense strand starting at position 696 of SEQ ID NO: 913876
cccucuugccaagaaguga

SEQ ID NO: 961009 - RNA, 19 nt, Artificial Sequence
  Description of Artificial Sequence: Synthetic oligonucleotide
  Antisense strand to SEQ ID NO: 961008
ucacuucuuggcaagaggg

SEQ ID NO: 961010 - RNA, 19 nt, Artificial Sequence
  Description of Artificial Sequence: Synthetic oligonucleotide
  Sense strand starting at position 1199 of SEQ ID NO: 913876
agaguucuuuccucaauga

SEQ ID NO: 961011 - RNA, 19 nt, Artificial Sequence
  Description of Artificial Sequence: Synthetic oligonucleotide
  Antisense strand to SEQ ID NO: 961010
ucauugaggaaagaacucu

SEQ ID NO: 961012 - RNA, 19 nt, Artificial Sequence
  Description of Artificial Sequence: Synthetic oligonucleotide
  Sense strand starting at position 2199 of SEQ ID NO: 913876
cuaagaaauacggguaggu

SEQ ID NO: 961013 - RNA, 19 nt, Artificial Sequence
  Description of Artificial Sequence: Synthetic oligonucleotide
  Antisense strand to SEQ ID NO: 961012
accuacccguauuucuuag

SEQ ID NO: 961014 - RNA, 19 nt, Artificial Sequence
  Description of Artificial Sequence: Synthetic oligonucleotide
  Sense strand starting at position 2815 of SEQ ID NO: 913876
cagaucugagugugagacu

SEQ ID NO: 961015 - RNA, 19 nt, Artificial Sequence
  Description of Artificial Sequence: Synthetic oligonucleotide
  Antisense strand to SEQ ID NO: 961014
agucucacacucagaucug

SEQ ID NO: 961016 - RNA, 19 nt, Artificial Sequence
  Description of Artificial Sequence: Synthetic oligonucleotide
  Sense strand starting at position 1490 of SEQ ID NO: 913876
aauacagauguuuguugau

SEQ ID NO: 961017 - RNA, 19 nt, Artificial Sequence
  Description of Artificial Sequence: Synthetic oligonucleotide
  Antisense strand to SEQ ID NO: 961016
aucaacaaacaucuguauu

SEQ ID NO: 961018 - RNA, 19 nt, Artificial Sequence
  Description of Artificial Sequence: Synthetic oligonucleotide
  Sense strand starting at position 1186 of SEQ ID NO: 913876
aaacuagcuguccagaguu

SEQ ID NO: 961019 - RNA, 19 nt, Artificial Sequence
  Description of Artificial Sequence: Synthetic oligonucleotide
  Antisense strand to SEQ ID NO: 961018
aacucuggacagcuaguuu

SEQ ID NO: 961020 - RNA, 19 nt, Artificial Sequence
  Description of Artificial Sequence: Synthetic oligonucleotide
  Sense strand starting at position 2805 of SEQ ID NO: 913876
guuagucagccagaucuga

SEQ ID NO: 961021 - RNA, 19 nt, Artificial Sequence
  Description of Artificial Sequence: Synthetic oligonucleotide
  Antisense strand to SEQ ID NO: 961020
ucagaucuggcugacuaac

SEQ ID NO: 961022 - RNA, 19 nt, Artificial Sequence
  Description of Artificial Sequence: Synthetic oligonucleotide
  Sense strand starting at position 1839 of SEQ ID NO: 913876
agggauauugcuggcagau

SEQ ID NO: 961023 - RNA, 19 nt, Artificial Sequence
  Description of Artificial Sequence: Synthetic oligonucleotide
  Antisense strand to SEQ ID NO: 961022
aucugccagcaauaucccu

SEQ ID NO: 961024 - RNA, 19 nt, Artificial Sequence
  Description of Artificial Sequence: Synthetic oligonucleotide
  Sense strand starting at position 2803 of SEQ ID NO: 913876
ggguuagucagccagaucu

SEQ ID NO: 961025 - RNA, 19 nt, Artificial Sequence
  Description of Artificial Sequence: Synthetic oligonucleotide
  Antisense strand to SEQ ID NO: 961024
agaucuggcugacuaaccc

SEQ ID NO: 961026 - RNA, 19 nt, Artificial Sequence
  Description of Artificial Sequence: Synthetic oligonucleotide
  Sense strand starting at position 1492 of SEQ ID NO: 913876
uacagauguuuguugauac

SEQ ID NO: 961027 - RNA, 19 nt, Artificial Sequence
  Description of Artificial Sequence: Synthetic oligonucleotide
  Antisense strand to SEQ ID NO: 961026
guaucaacaaacaucugua

SEQ ID NO: 961028 - RNA, 19 nt, Artificial Sequence
  Description of Artificial Sequence: Synthetic oligonucleotide
  Sense strand starting at position 1499 of SEQ ID NO: 913876
guuuguugauaccugaaau

SEQ ID NO: 961029 - RNA, 19 nt, Artificial Sequence
  Description of Artificial Sequence: Synthetic oligonucleotide
  Antisense strand to SEQ ID NO: 961028
auuucagguaucaacaaac

SEQ ID NO: 961030 - RNA, 19 nt, Artificial Sequence
  Description of Artificial Sequence: Synthetic oligonucleotide
  Sense strand starting at position 1587 of SEQ ID NO: 913876
gucauuccaugagucucaa

SEQ ID NO: 961031 - RNA, 19 nt, Artificial Sequence
  Description of Artificial Sequence: Synthetic oligonucleotide
  Antisense strand to SEQ ID NO: 961030
uugagacucauggaaugac

SEQ ID NO: 961032 - RNA, 19 nt, Artificial Sequence
  Description of Artificial Sequence: Synthetic oligonucleotide
  Sense strand starting at position 716 of SEQ ID NO: 913876
uuggcagucuuaccaauga

SEQ ID NO: 961033 - RNA, 19 nt, Artificial Sequence
  Description of Artificial Sequence: Synthetic oligonucleotide
  Antisense strand to SEQ ID NO: 961032
ucauugguaagacugccaa

SEQ ID NO: 961034 - RNA, 19 nt, Artificial Sequence
  Description of Artificial Sequence: Synthetic oligonucleotide
  Sense strand starting at position 2813 of SEQ ID NO: 913876
gccagaucugagugugaga

SEQ ID NO: 961035 - RNA, 19 nt, Artificial Sequence
  Description of Artificial Sequence: Synthetic oligonucleotide
  Antisense strand to SEQ ID NO: 961034
ucucacacucagaucuggc

SEQ ID NO: 961036 - RNA, 19 nt, Artificial Sequence
  Description of Artificial Sequence: Synthetic oligonucleotide
  Sense strand starting at position 1983 of SEQ ID NO: 913876
gaggauuucucccagggca

SEQ ID NO: 961037 - RNA, 19 nt, Artificial Sequence
  Description of Artificial Sequence: Synthetic oligonucleotide
  Antisense strand to SEQ ID NO: 961036
ugcccugggagaaauccuc

SEQ ID NO: 961038 - RNA, 19 nt, Artificial Sequence
  Description of Artificial Sequence: Synthetic oligonucleotide
  Sense strand starting at position 3552 of SEQ ID NO: 913876
gaguuucuccaaggcuuaa

SEQ ID NO: 961039 - RNA, 19 nt, Artificial Sequence
  Description of Artificial Sequence: Synthetic oligonucleotide
  Antisense strand to SEQ ID NO: 961038
uuaagccuuggagaaacuc

SEQ ID NO: 961040 - RNA, 19 nt, Artificial Sequence
  Description of Artificial Sequence: Synthetic oligonucleotide
  Sense strand starting at position 1385 of SEQ ID NO: 913876
gaguaauggugucuccaac

SEQ ID NO: 961041 - RNA, 19 nt, Artificial Sequence
  Description of Artificial Sequence: Synthetic oligonucleotide
  Antisense strand to SEQ ID NO: 961040
guuggagacaccauuacuc

SEQ ID NO: 961042 - RNA, 19 nt, Artificial Sequence
  Description of Artificial Sequence: Synthetic oligonucleotide
  Sense strand starting at position 1584 of SEQ ID NO: 913876
caggucauuccaugagucu

SEQ ID NO: 961043 - RNA, 19 nt, Artificial Sequence
  Description of Artificial Sequence: Synthetic oligonucleotide
  Antisense strand to SEQ ID NO: 961042
agacucauggaaugaccug

SEQ ID NO: 961044 - RNA, 19 nt, Artificial Sequence
  Description of Artificial Sequence: Synthetic oligonucleotide
  Sense strand starting at position 1145 of SEQ ID NO: 913876
ggucauucagcaggcaaga

SEQ ID NO: 961045 - RNA, 19 nt, Artificial Sequence
  Description of Artificial Sequence: Synthetic oligonucleotide
  Antisense strand to SEQ ID NO: 961044
ucuugccugcugaaugacc

SEQ ID NO: 961046 - RNA, 19 nt, Artificial Sequence
  Description of Artificial Sequence: Synthetic oligonucleotide
  Sense strand starting at position 1185 of SEQ ID NO: 913876
caaacuagcuguccagagu

SEQ ID NO: 961047 - RNA, 19 nt, Artificial Sequence
  Description of Artificial Sequence: Synthetic oligonucleotide
  Antisense strand to SEQ ID NO: 961046
acucuggacagcuaguuug

SEQ ID NO: 961048 - RNA, 19 nt, Artificial Sequence
  Description of Artificial Sequence: Synthetic oligonucleotide
  Sense strand starting at position 2480 of SEQ ID NO: 913876
gcgauccaggcaugggaua

SEQ ID NO: 961049 - RNA, 19 nt, Artificial Sequence
  Description of Artificial Sequence: Synthetic oligonucleotide
  Antisense strand to SEQ ID NO: 961048
uaucccaugccuggaucgc

SEQ ID NO: 961050 - RNA, 19 nt, Artificial Sequence
  Description of Artificial Sequence: Synthetic oligonucleotide
  Sense strand starting at position 3368 of SEQ ID NO: 913876
agugcaggcugacuuuaaa

SEQ ID NO: 961051 - RNA, 19 nt, Artificial Sequence
  Description of Artificial Sequence: Synthetic oligonucleotide
  Antisense strand to SEQ ID NO: 961050
uuuaaagucagccugcacu

SEQ ID NO: 961052 - RNA, 19 nt, Artificial Sequence
  Description of Artificial Sequence: Synthetic oligonucleotide
  Sense strand starting at position 705 of SEQ ID NO: 913876
caagaagugaguuggcagu

SEQ ID NO: 961053 - RNA, 19 nt, Artificial Sequence
  Description of Artificial Sequence: Synthetic oligonucleotide
  Antisense strand to SEQ ID NO: 961052
acugccaacucacuucuug

SEQ ID NO: 961054 - RNA, 19 nt, Artificial Sequence
  Description of Artificial Sequence: Synthetic oligonucleotide
  Sense strand starting at position 2158 of SEQ ID NO: 913876
aauaauuccgugcgacaaa

SEQ ID NO: 961055 - RNA, 19 nt, Artificial Sequence
  Description of Artificial Sequence: Synthetic oligonucleotide
  Antisense strand to SEQ ID NO: 961054
uuugucgcacggaauuauu

SEQ ID NO: 961056 - RNA, 19 nt, Artificial Sequence
  Description of Artificial Sequence: Synthetic oligonucleotide
  Sense strand starting at position 1877 of SEQ ID NO: 913876
ugguucuuagcugguagaa

SEQ ID NO: 961057 - RNA, 19 nt, Artificial Sequence
  Description of Artificial Sequence: Synthetic oligonucleotide
  Antisense strand to SEQ ID NO: 961056
uucuaccagcuaagaacca

SEQ ID NO: 961058 - RNA, 19 nt, Artificial Sequence
  Description of Artificial Sequence: Synthetic oligonucleotide
  Sense strand starting at position 1876 of SEQ ID NO: 913876
augguucuuagcugguaga

SEQ ID NO: 961059 - RNA, 19 nt, Artificial Sequence
  Description of Artificial Sequence: Synthetic oligonucleotide
  Antisense strand to SEQ ID NO: 961058
ucuaccagcuaagaaccau

SEQ ID NO: 961060 - RNA, 19 nt, Artificial Sequence
  Description of Artificial Sequence: Synthetic oligonucleotide
  Sense strand starting at position 2450 of SEQ ID NO: 913876
aacgaaugacagcguuuau

SEQ ID NO: 961061 - RNA, 19 nt, Artificial Sequence
  Description of Artificial Sequence: Synthetic oligonucleotide
  Antisense strand to SEQ ID NO: 961060
auaaacgcugucauucguu

SEQ ID NO: 961062 - RNA, 19 nt, Artificial Sequence
  Description of Artificial Sequence: Synthetic oligonucleotide
  Sense strand starting at position 2806 of SEQ ID NO: 913877
gggauagacaucgaugucu

SEQ ID NO: 961063 - RNA, 19 nt, Artificial Sequence
  Description of Artificial Sequence: Synthetic oligonucleotide
  Antisense strand to SEQ ID NO: 961062
agacaucgaugucuauccc

SEQ ID NO: 961064 - RNA, 19 nt, Artificial Sequence
  Description of Artificial Sequence: Synthetic oligonucleotide
  Sense strand starting at position 2703 of SEQ ID NO: 913877
aggaucuggucucuaagga

SEQ ID NO: 961065 - RNA, 19 nt, Artificial Sequence
  Description of Artificial Sequence: Synthetic oligonucleotide
  Antisense strand to SEQ ID NO: 961064
uccuuagagaccagauccu

SEQ ID NO: 961066 - RNA, 19 nt, Artificial Sequence
  Description of Artificial Sequence: Synthetic oligonucleotide
  Sense strand starting at position 1768 of SEQ ID NO: 913877
gagggaaguugguuauuaa

SEQ ID NO: 961067 - RNA, 19 nt, Artificial Sequence
  Description of Artificial Sequence: Synthetic oligonucleotide
  Antisense strand to SEQ ID NO: 961066
uuaauaaccaacuucccuc

SEQ ID NO: 961068 - RNA, 19 nt, Artificial Sequence
  Description of Artificial Sequence: Synthetic oligonucleotide
  Sense strand starting at position 1623 of SEQ ID NO: 913877
agccuuucuaacgauagag

SEQ ID NO: 961069 - RNA, 19 nt, Artificial Sequence
  Description of Artificial Sequence: Synthetic oligonucleotide
  Antisense strand to SEQ ID NO: 961068
cucuaucguuagaaaggcu

SEQ ID NO: 961070 - RNA, 19 nt, Artificial Sequence
  Description of Artificial Sequence: Synthetic oligonucleotide
  Sense strand starting at position 1771 of SEQ ID NO: 913877
ggaaguugguuauuaauag

SEQ ID NO: 961071 - RNA, 19 nt, Artificial Sequence
  Description of Artificial Sequence: Synthetic oligonucleotide
  Antisense strand to SEQ ID NO: 961070
cuauuaauaaccaacuucc

SEQ ID NO: 961072 - RNA, 19 nt, Artificial Sequence
  Description of Artificial Sequence: Synthetic oligonucleotide
  Sense strand starting at position 2708 of SEQ ID NO: 913877
cuggucucuaaggaguuau

SEQ ID NO: 961073 - RNA, 19 nt, Artificial Sequence
  Description of Artificial Sequence: Synthetic oligonucleotide
  Antisense strand to SEQ ID NO: 961072
auaacuccuuagagaccag

SEQ ID NO: 961074 - RNA, 19 nt, Artificial Sequence
  Description of Artificial Sequence: Synthetic oligonucleotide
  Sense strand starting at position 1110 of SEQ ID NO: 913877
ggaacauggccugggaagu

SEQ ID NO: 961075 - RNA, 19 nt, Artificial Sequence
  Description of Artificial Sequence: Synthetic oligonucleotide
  Antisense strand to SEQ ID NO: 961074
acuucccaggccauguucc

SEQ ID NO: 961076 - RNA, 19 nt, Artificial Sequence
  Description of Artificial Sequence: Synthetic oligonucleotide
  Sense strand starting at position 3157 of SEQ ID NO: 913877
ugagguuucuacuugagau

SEQ ID NO: 961077 - RNA, 19 nt, Artificial Sequence
  Description of Artificial Sequence: Synthetic oligonucleotide
  Antisense strand to SEQ ID NO: 961076
aucucaaguagaaaccuca

SEQ ID NO: 961078 - RNA, 19 nt, Artificial Sequence
  Description of Artificial Sequence: Synthetic oligonucleotide
  Sense strand starting at position 1274 of SEQ ID NO: 913877
aguaauaggaucuggcaau

SEQ ID NO: 961079 - RNA, 19 nt, Artificial Sequence
  Description of Artificial Sequence: Synthetic oligonucleotide
  Antisense strand to SEQ ID NO: 961078
auugccagauccuauuacu

SEQ ID NO: 961080 - RNA, 19 nt, Artificial Sequence
  Description of Artificial Sequence: Synthetic oligonucleotide
  Sense strand starting at position 2719 of SEQ ID NO: 913877
ggaguuauucucuagccac

SEQ ID NO: 961081 - RNA, 19 nt, Artificial Sequence
  Description of Artificial Sequence: Synthetic oligonucleotide
  Antisense strand to SEQ ID NO: 961080
guggcuagagaauaacucc

SEQ ID NO: 961082 - RNA, 19 nt, Artificial Sequence
  Description of Artificial Sequence: Synthetic oligonucleotide
  Sense strand starting at position 191 of SEQ ID NO: 913877
cagugaguuccaugaucag

SEQ ID NO: 961083 - RNA, 19 nt, Artificial Sequence
  Description of Artificial Sequence: Synthetic oligonucleotide
  Antisense strand to SEQ ID NO: 961082
cugaucauggaacucacug

SEQ ID NO: 961084 - RNA, 19 nt, Artificial Sequence
  Description of Artificial Sequence: Synthetic oligonucleotide
  Sense strand starting at position 828 of SEQ ID NO: 913877
agagucagugcaggaauua

SEQ ID NO: 961085 - RNA, 19 nt, Artificial Sequence
  Description of Artificial Sequence: Synthetic oligonucleotide
  Antisense strand to SEQ ID NO: 961084
uaauuccugcacugacucu

SEQ ID NO: 961086 - RNA, 19 nt, Artificial Sequence
  Description of Artificial Sequence: Synthetic oligonucleotide
  Sense strand starting at position 1926 of SEQ ID NO: 913877
ggaucagucugcccaggga

SEQ ID NO: 961087 - RNA, 19 nt, Artificial Sequence
  Description of Artificial Sequence: Synthetic oligonucleotide
  Antisense strand to SEQ ID NO: 961086
ucccugggcagacugaucc

SEQ ID NO: 961088 - RNA, 19 nt, Artificial Sequence
  Description of Artificial Sequence: Synthetic oligonucleotide
  Sense strand starting at position 2815 of SEQ ID NO: 913877
aucgaugucucccugagaa

SEQ ID NO: 961089 - RNA, 19 nt, Artificial Sequence
  Description of Artificial Sequence: Synthetic oligonucleotide
  Antisense strand to SEQ ID NO: 961088
uucucagggagacaucgau

SEQ ID NO: 961090 - RNA, 19 nt, Artificial Sequence
  Description of Artificial Sequence: Synthetic oligonucleotide
  Sense strand starting at position 1298 of SEQ ID NO: 913877
gggacaaacugggauaaga

SEQ ID NO: 961091 - RNA, 19 nt, Artificial Sequence
  Description of Artificial Sequence: Synthetic oligonucleotide
  Antisense strand to SEQ ID NO: 961090
ucuuaucccaguuuguccc

SEQ ID NO: 961092 - RNA, 19 nt, Artificial Sequence
  Description of Artificial Sequence: Synthetic oligonucleotide
  Sense strand starting at position 353 of SEQ ID NO: 913877
cuucuuaaccuggguuuaa

SEQ ID NO: 961093 - RNA, 19 nt, Artificial Sequence
  Description of Artificial Sequence: Synthetic oligonucleotide
  Antisense strand to SEQ ID NO: 961092
uuaaacccagguuaagaag

SEQ ID NO: 961094 - RNA, 19 nt, Artificial Sequence
  Description of Artificial Sequence: Synthetic oligonucleotide
  Sense strand starting at position 352 of SEQ ID NO: 913877
acuucuuaaccuggguuua

SEQ ID NO: 961095 - RNA, 19 nt, Artificial Sequence
  Description of Artificial Sequence: Synthetic oligonucleotide
  Antisense strand to SEQ ID NO: 961094
uaaacccagguuaagaagu

SEQ ID NO: 961096 - RNA, 19 nt, Artificial Sequence
  Description of Artificial Sequence: Synthetic oligonucleotide
  Sense strand starting at position 1027 of SEQ ID NO: 913877
aauauucugccaggguuga

SEQ ID NO: 961097 - RNA, 19 nt, Artificial Sequence
  Description of Artificial Sequence: Synthetic oligonucleotide
  Antisense strand to SEQ ID NO: 961096
ucaacccuggcagaauauu

SEQ ID NO: 961098 - RNA, 19 nt, Artificial Sequence
  Description of Artificial Sequence: Synthetic oligonucleotide
  Sense strand starting at position 2119 of SEQ ID NO: 913877
gagagaccuguggguguau

SEQ ID NO: 961099 - RNA, 19 nt, Artificial Sequence
  Description of Artificial Sequence: Synthetic oligonucleotide
  Antisense strand to SEQ ID NO: 961098
auacacccacaggucucuc

SEQ ID NO: 961100 - RNA, 19 nt, Artificial Sequence
  Description of Artificial Sequence: Synthetic oligonucleotide
  Sense strand starting at position 2817 of SEQ ID NO: 913877
cgaugucucccugagaagc

SEQ ID NO: 961101 - RNA, 19 nt, Artificial Sequence
  Description of Artificial Sequence: Synthetic oligonucleotide
  Antisense strand to SEQ ID NO: 961100
gcuucucagggagacaucg

SEQ ID NO: 961102 - RNA, 19 nt, Artificial Sequence
  Description of Artificial Sequence: Synthetic oligonucleotide
  Sense strand starting at position 2718 of SEQ ID NO: 913877
aggaguuauucucuagcca

SEQ ID NO: 961103 - RNA, 19 nt, Artificial Sequence
  Description of Artificial Sequence: Synthetic oligonucleotide
  Antisense strand to SEQ ID NO: 961102
uggcuagagaauaacuccu

SEQ ID NO: 961104 - RNA, 19 nt, Artificial Sequence
  Description of Artificial Sequence: Synthetic oligonucleotide
  Sense strand starting at position 1906 of SEQ ID NO: 913877
cacugaacugucugagcca

SEQ ID NO: 961105 - RNA, 19 nt, Artificial Sequence
  Description of Artificial Sequence: Synthetic oligonucleotide
  Antisense strand to SEQ ID NO: 961104
uggcucagacaguucagug

SEQ ID NO: 961106 - RNA, 19 nt, Artificial Sequence
  Description of Artificial Sequence: Synthetic oligonucleotide
  Sense strand starting at position 1343 of SEQ ID NO: 913877
guuggcacucagugaaaug

SEQ ID NO: 961107 - RNA, 19 nt, Artificial Sequence
  Description of Artificial Sequence: Synthetic oligonucleotide
  Antisense strand to SEQ ID NO: 961106
cauuucacugagugccaac

SEQ ID NO: 961108 - RNA, 19 nt, Artificial Sequence
  Description of Artificial Sequence: Synthetic oligonucleotide
  Sense strand starting at position 194 of SEQ ID NO: 913877
ugaguuccaugaucagcuu

SEQ ID NO: 961109 - RNA, 19 nt, Artificial Sequence
  Description of Artificial Sequence: Synthetic oligonucleotide
  Antisense strand to SEQ ID NO: 961108
aagcugaucauggaacuca

SEQ ID NO: 961110 - RNA, 19 nt, Artificial Sequence
  Description of Artificial Sequence: Synthetic oligonucleotide
  Sense strand starting at position 2217 of SEQ ID NO: 913877
ccuggauagguuggucuuu

SEQ ID NO: 961111 - RNA, 19 nt, Artificial Sequence
  Description of Artificial Sequence: Synthetic oligonucleotide
  Antisense strand to SEQ ID NO: 961110
aaagaccaaccuauccagg

SEQ ID NO: 961112 - RNA, 19 nt, Artificial Sequence
  Description of Artificial Sequence: Synthetic oligonucleotide
  Sense strand starting at position 3522 of SEQ ID NO: 913877
cagguaauccuucgaccuc

SEQ ID NO: 961113 - RNA, 19 nt, Artificial Sequence
  Description of Artificial Sequence: Synthetic oligonucleotide
  Antisense strand to SEQ ID NO: 961112
gaggucgaaggauuaccug

SEQ ID NO: 961114 - RNA, 19 nt, Artificial Sequence
  Description of Artificial Sequence: Synthetic oligonucleotide
  Sense strand starting at position 1267 of SEQ ID NO: 913877
gaaacauaguaauaggauc

SEQ ID NO: 961115 - RNA, 19 nt, Artificial Sequence
  Description of Artificial Sequence: Synthetic oligonucleotide
  Antisense strand to SEQ ID NO: 961114
gauccuauuacuauguuuc

SEQ ID NO: 961116 - RNA, 19 nt, Artificial Sequence
  Description of Artificial Sequence: Synthetic oligonucleotide
  Sense strand starting at position 2245 of SEQ ID NO: 913877
gggcuagaucuuggcaggu

SEQ ID NO: 961117 - RNA, 19 nt, Artificial Sequence
  Description of Artificial Sequence: Synthetic oligonucleotide
  Antisense strand to SEQ ID NO: 961116
accugccaagaucuagccc

SEQ ID NO: 961118 - RNA, 19 nt, Artificial Sequence
  Description of Artificial Sequence: Synthetic oligonucleotide
  Sense strand starting at position 921 of SEQ ID NO: 913877
uuggcaugauuugaaguuu

SEQ ID NO: 961119 - RNA, 19 nt, Artificial Sequence
  Description of Artificial Sequence: Synthetic oligonucleotide
  Antisense strand to SEQ ID NO: 961118
aaacuucaaaucaugccaa

SEQ ID NO: 961120 - RNA, 19 nt, Artificial Sequence
  Description of Artificial Sequence: Synthetic oligonucleotide
  Sense strand starting at position 1354 of SEQ ID NO: 913877
gugaaaugcuguccucuuc

SEQ ID NO: 961121 - RNA, 19 nt, Artificial Sequence
  Description of Artificial Sequence: Synthetic oligonucleotide
  Antisense strand to SEQ ID NO: 961120
gaagaggacagcauuucac

SEQ ID NO: 961122 - RNA, 19 nt, Artificial Sequence
  Description of Artificial Sequence: Synthetic oligonucleotide
  Sense strand starting at position 3308 of SEQ ID NO: 913877
ucaguagcugcaugaucuu

SEQ ID NO: 961123 - RNA, 19 nt, Artificial Sequence
  Description of Artificial Sequence: Synthetic oligonucleotide
  Antisense strand to SEQ ID NO: 961122
aagaucaugcagcuacuga

SEQ ID NO: 961124 - RNA, 19 nt, Artificial Sequence
  Description of Artificial Sequence: Synthetic oligonucleotide
  Sense strand starting at position 137 of SEQ ID NO: 913877
uagggaugcucuuaagaag

SEQ ID NO: 961125 - RNA, 19 nt, Artificial Sequence
  Description of Artificial Sequence: Synthetic oligonucleotide
  Antisense strand to SEQ ID NO: 961124
cuucuuaagagcaucccua

SEQ ID NO: 961126 - RNA, 19 nt, Artificial Sequence
  Description of Artificial Sequence: Synthetic oligonucleotide
  Sense strand starting at position 1894 of SEQ ID NO: 913877
uugggauucucccacugaa

SEQ ID NO: 961127 - RNA, 19 nt, Artificial Sequence
  Description of Artificial Sequence: Synthetic oligonucleotide
  Antisense strand to SEQ ID NO: 961126
uucagugggagaaucccaa

SEQ ID NO: 961128 - RNA, 19 nt, Artificial Sequence
  Description of Artificial Sequence: Synthetic oligonucleotide
  Sense strand starting at position 1772 of SEQ ID NO: 913877
gaaguugguuauuaauaga

SEQ ID NO: 961129 - RNA, 19 nt, Artificial Sequence
  Description of Artificial Sequence: Synthetic oligonucleotide
  Antisense strand to SEQ ID NO: 961128
ucuauuaauaaccaacuuc

SEQ ID NO: 961130 - RNA, 19 nt, Artificial Sequence
  Description of Artificial Sequence: Synthetic oligonucleotide
  Sense strand starting at position 1326 of SEQ ID NO: 913877
aucccuucuuaagagaagu

SEQ ID NO: 961131 - RNA, 19 nt, Artificial Sequence
  Description of Artificial Sequence: Synthetic oligonucleotide
  Antisense strand to SEQ ID NO: 961130
acuucucuuaagaagggau

SEQ ID NO: 961132 - RNA, 19 nt, Artificial Sequence
  Description of Artificial Sequence: Synthetic oligonucleotide
  Sense strand starting at position 2767 of SEQ ID NO: 913877
uccauuugcuguugagaug

SEQ ID NO: 961133 - RNA, 19 nt, Artificial Sequence
  Description of Artificial Sequence: Synthetic oligonucleotide
  Antisense strand to SEQ ID NO: 961132
caucucaacagcaaaugga

SEQ ID NO: 961134 - RNA, 19 nt, Artificial Sequence
  Description of Artificial Sequence: Synthetic oligonucleotide
  Sense strand starting at position 3455 of SEQ ID NO: 913877
cucuguugccugugcugaa

SEQ ID NO: 961135 - RNA, 19 nt, Artificial Sequence
  Description of Artificial Sequence: Synthetic oligonucleotide
  Antisense strand to SEQ ID NO: 961134
uucagcacaggcaacagag

SEQ ID NO: 961136 - RNA, 19 nt, Artificial Sequence
  Description of Artificial Sequence: Synthetic oligonucleotide
  Sense strand starting at position 203 of SEQ ID NO: 913877
ugaucagcuugcuggauuu

SEQ ID NO: 961137 - RNA, 19 nt, Artificial Sequence
  Description of Artificial Sequence: Synthetic oligonucleotide
  Antisense strand to SEQ ID NO: 961136
aaauccagcaagcugauca

SEQ ID NO: 961138 - RNA, 19 nt, Artificial Sequence
  Description of Artificial Sequence: Synthetic oligonucleotide
  Sense strand starting at position 3154 of SEQ ID NO: 913877
cucugagguuucuacuuga

SEQ ID NO: 961139 - RNA, 19 nt, Artificial Sequence
  Description of Artificial Sequence: Synthetic oligonucleotide
  Antisense strand to SEQ ID NO: 961138
ucaaguagaaaccucagag

SEQ ID NO: 961140 - RNA, 19 nt, Artificial Sequence
  Description of Artificial Sequence: Synthetic oligonucleotide
  Sense strand starting at position 1025 of SEQ ID NO: 913877
gaaauauucugccaggguu

SEQ ID NO: 961141 - RNA, 19 nt, Artificial Sequence
  Description of Artificial Sequence: Synthetic oligonucleotide
  Antisense strand to SEQ ID NO: 961140
aacccuggcagaauauuuc

SEQ ID NO: 961142 - RNA, 19 nt, Artificial Sequence
  Description of Artificial Sequence: Synthetic oligonucleotide
  Sense strand starting at position 76 of SEQ ID NO: 913878
ugcauauucuauuuaugug

SEQ ID NO: 961143 - RNA, 19 nt, Artificial Sequence
  Description of Artificial Sequence: Synthetic oligonucleotide
  Antisense strand to SEQ ID NO: 961142
cacauaaauagaauaugca

SEQ ID NO: 961144 - RNA, 19 nt, Artificial Sequence
  Description of Artificial Sequence: Synthetic oligonucleotide
  Sense strand starting at position 3534 of SEQ ID NO: 913878
augaauugauauguagacu

SEQ ID NO: 961145 - RNA, 19 nt, Artificial Sequence
  Description of Artificial Sequence: Synthetic oligonucleotide
  Antisense strand to SEQ ID NO: 961144
agucuacauaucaauucau

SEQ ID NO: 961146 - RNA, 19 nt, Artificial Sequence
  Description of Artificial Sequence: Synthetic oligonucleotide
  Sense strand starting at position 3910 of SEQ ID NO: 913878
agguaaucacacuaauguu

SEQ ID NO: 961147 - RNA, 19 nt, Artificial Sequence
  Description of Artificial Sequence: Synthetic oligonucleotide
  Antisense strand to SEQ ID NO: 961146
aacauuagugugauuaccu

SEQ ID NO: 961148 - RNA, 19 nt, Artificial Sequence
  Description of Artificial Sequence: Synthetic oligonucleotide
  Sense strand starting at position 938 of SEQ ID NO: 913878
cugguuauaguacaucaaa

SEQ ID NO: 961149 - RNA, 19 nt, Artificial Sequence
  Description of Artificial Sequence: Synthetic oligonucleotide
  Antisense strand to SEQ ID NO: 961148
uuugauguacuauaaccag

SEQ ID NO: 961150 - RNA, 19 nt, Artificial Sequence
  Description of Artificial Sequence: Synthetic oligonucleotide
  Sense strand starting at position 931 of SEQ ID NO: 913878
gaacacucugguuauagua

SEQ ID NO: 961151 - RNA, 19 nt, Artificial Sequence
  Description of Artificial Sequence: Synthetic oligonucleotide
  Antisense strand to SEQ ID NO: 961150
uacuauaaccagaguguuc

SEQ ID NO: 961152 - RNA, 19 nt, Artificial Sequence
  Description of Artificial Sequence: Synthetic oligonucleotide
  Sense strand starting at position 125 of SEQ ID NO: 913878
agaggaucuuccuccacua

SEQ ID NO: 961153 - RNA, 19 nt, Artificial Sequence
  Description of Artificial Sequence: Synthetic oligonucleotide
  Antisense strand to SEQ ID NO: 961152
uaguggaggaagauccucu

SEQ ID NO: 961154 - RNA, 19 nt, Artificial Sequence
  Description of Artificial Sequence: Synthetic oligonucleotide
  Sense strand starting at position 2055 of SEQ ID NO: 913878
cagaguaaugaaggguauu

SEQ ID NO: 961155 - RNA, 19 nt, Artificial Sequence
  Description of Artificial Sequence: Synthetic oligonucleotide
  Antisense strand to SEQ ID NO: 961154
aauacccuucauuacucug

SEQ ID NO: 961156 - RNA, 19 nt, Artificial Sequence
  Description of Artificial Sequence: Synthetic oligonucleotide
  Sense strand starting at position 2592 of SEQ ID NO: 913878
gcacucugagacuaaguua

SEQ ID NO: 961157 - RNA, 19 nt, Artificial Sequence
  Description of Artificial Sequence: Synthetic oligonucleotide
  Antisense strand to SEQ ID NO: 961156
uaacuuagucucagagugc

SEQ ID NO: 961158 - RNA, 19 nt, Artificial Sequence
  Description of Artificial Sequence: Synthetic oligonucleotide
  Sense strand starting at position 3818 of SEQ ID NO: 913878
ggaucugagugauuccaca

SEQ ID NO: 961159 - RNA, 19 nt, Artificial Sequence
  Description of Artificial Sequence: Synthetic oligonucleotide
  Antisense strand to SEQ ID NO: 961158
uguggaaucacucagaucc

SEQ ID NO: 961160 - RNA, 19 nt, Artificial Sequence
  Description of Artificial Sequence: Synthetic oligonucleotide
  Sense strand starting at position 2099 of SEQ ID NO: 913878
gacagucauuuagaacaga

SEQ ID NO: 961161 - RNA, 19 nt, Artificial Sequence
  Description of Artificial Sequence: Synthetic oligonucleotide
  Antisense strand to SEQ ID NO: 961160
ucuguucuaaaugacuguc

SEQ ID NO: 961162 - RNA, 19 nt, Artificial Sequence
  Description of Artificial Sequence: Synthetic oligonucleotide
  Sense strand starting at position 3385 of SEQ ID NO: 913878
cuauauaggguuuaaguuu

SEQ ID NO: 961163 - RNA, 19 nt, Artificial Sequence
  Description of Artificial Sequence: Synthetic oligonucleotide
  Antisense strand to SEQ ID NO: 961162
aaacuuaaacccuauauag

SEQ ID NO: 961164 - RNA, 19 nt, Artificial Sequence
  Description of Artificial Sequence: Synthetic oligonucleotide
  Sense strand starting at position 3686 of SEQ ID NO: 913878
auuuaaaugcuuugguguu

SEQ ID NO: 961165 - RNA, 19 nt, Artificial Sequence
  Description of Artificial Sequence: Synthetic oligonucleotide
  Antisense strand to SEQ ID NO: 961164
aacaccaaagcauuuaaau

SEQ ID NO: 961166 - RNA, 19 nt, Artificial Sequence
  Description of Artificial Sequence: Synthetic oligonucleotide
  Sense strand starting at position 3550 of SEQ ID NO: 913878
acuggaguuaggcauuauu

SEQ ID NO: 961167 - RNA, 19 nt, Artificial Sequence
  Description of Artificial Sequence: Synthetic oligonucleotide
  Antisense strand to SEQ ID NO: 961166
aauaaugccuaacuccagu

SEQ ID NO: 961168 - RNA, 19 nt, Artificial Sequence
  Description of Artificial Sequence: Synthetic oligonucleotide
  Sense strand starting at position 2621 of SEQ ID NO: 913878
cuggaacaauuguuaccau

SEQ ID NO: 961169 - RNA, 19 nt, Artificial Sequence
  Description of Artificial Sequence: Synthetic oligonucleotide
  Antisense strand to SEQ ID NO: 961168
augguaacaauuguuccag

SEQ ID NO: 961170 - RNA, 19 nt, Artificial Sequence
  Description of Artificial Sequence: Synthetic oligonucleotide
  Sense strand starting at position 197 of SEQ ID NO: 913878
aggucucucccaugggaga

SEQ ID NO: 961171 - RNA, 19 nt, Artificial Sequence
  Description of Artificial Sequence: Synthetic oligonucleotide
  Antisense strand to SEQ ID NO: 961170
ucucccaugggagagaccu

SEQ ID NO: 961172 - RNA, 19 nt, Artificial Sequence
  Description of Artificial Sequence: Synthetic oligonucleotide
  Sense strand starting at position 198 of SEQ ID NO: 913878
ggucucucccaugggagaa

SEQ ID NO: 961173 - RNA, 19 nt, Artificial Sequence
  Description of Artificial Sequence: Synthetic oligonucleotide
  Antisense strand to SEQ ID NO: 961172
uucucccaugggagagacc

SEQ ID NO: 961174 - RNA, 19 nt, Artificial Sequence
  Description of Artificial Sequence: Synthetic oligonucleotide
  Sense strand starting at position 3899 of SEQ ID NO: 913878
acucaugacccagguaauc

SEQ ID NO: 961175 - RNA, 19 nt, Artificial Sequence
  Description of Artificial Sequence: Synthetic oligonucleotide
  Antisense strand to SEQ ID NO: 961174
gauuaccugggucaugagu

SEQ ID NO: 961176 - RNA, 19 nt, Artificial Sequence
  Description of Artificial Sequence: Synthetic oligonucleotide
  Sense strand starting at position 2811 of SEQ ID NO: 913878
uccuuuaacgucuaugaag

SEQ ID NO: 961177 - RNA, 19 nt, Artificial Sequence
  Description of Artificial Sequence: Synthetic oligonucleotide
  Antisense strand to SEQ ID NO: 961176
cuucauagacguuaaagga

SEQ ID NO: 961178 - RNA, 19 nt, Artificial Sequence
  Description of Artificial Sequence: Synthetic oligonucleotide
  Sense strand starting at position 3594 of SEQ ID NO: 913878
gucagaaugcuaugacaga

SEQ ID NO: 961179 - RNA, 19 nt, Artificial Sequence
  Description of Artificial Sequence: Synthetic oligonucleotide
  Antisense strand to SEQ ID NO: 961178
ucugucauagcauucugac

SEQ ID NO: 961180 - RNA, 19 nt, Artificial Sequence
  Description of Artificial Sequence: Synthetic oligonucleotide
  Sense strand starting at position 2802 of SEQ ID NO: 913878
uuaauagauuccuuuaacg

SEQ ID NO: 961181 - RNA, 19 nt, Artificial Sequence
  Description of Artificial Sequence: Synthetic oligonucleotide
  Antisense strand to SEQ ID NO: 961180
cguuaaaggaaucuauuaa

SEQ ID NO: 961182 - RNA, 19 nt, Artificial Sequence
  Description of Artificial Sequence: Synthetic oligonucleotide
  Sense strand starting at position 3440 of SEQ ID NO: 913878
uuguaugacuaagcaaaca

SEQ ID NO: 961183 - RNA, 19 nt, Artificial Sequence
  Description of Artificial Sequence: Synthetic oligonucleotide
  Antisense strand to SEQ ID NO: 961182
uguuugcuuagucauacaa

SEQ ID NO: 961184 - RNA, 19 nt, Artificial Sequence
  Description of Artificial Sequence: Synthetic oligonucleotide
  Sense strand starting at position 199 of SEQ ID NO: 913878
gucucucccaugggagaau

SEQ ID NO: 961185 - RNA, 19 nt, Artificial Sequence
  Description of Artificial Sequence: Synthetic oligonucleotide
  Antisense strand to SEQ ID NO: 961184
auucucccaugggagagac

SEQ ID NO: 961186 - RNA, 19 nt, Artificial Sequence
  Description of Artificial Sequence: Synthetic oligonucleotide
  Sense strand starting at position 3540 of SEQ ID NO: 913878
ugauauguagacuggaguu

SEQ ID NO: 961187 - RNA, 19 nt, Artificial Sequence
  Description of Artificial Sequence: Synthetic oligonucleotide
  Antisense strand to SEQ ID NO: 961186
aacuccagucuacauauca

SEQ ID NO: 961188 - RNA, 19 nt, Artificial Sequence
  Description of Artificial Sequence: Synthetic oligonucleotide
  Sense strand starting at position 3963 of SEQ ID NO: 913878
uucuuacaaguguauucua

SEQ ID NO: 961189 - RNA, 19 nt, Artificial Sequence
  Description of Artificial Sequence: Synthetic oligonucleotide
  Antisense strand to SEQ ID NO: 961188
uagaauacacuuguaagaa

SEQ ID NO: 961190 - RNA, 19 nt, Artificial Sequence
  Description of Artificial Sequence: Synthetic oligonucleotide
  Sense strand starting at position 792 of SEQ ID NO: 913878
agacauucugaauggcagu

SEQ ID NO: 961191 - RNA, 19 nt, Artificial Sequence
  Description of Artificial Sequence: Synthetic oligonucleotide
  Antisense strand to SEQ ID NO: 961190
acugccauucagaaugucu

SEQ ID NO: 961192 - RNA, 19 nt, Artificial Sequence
  Description of Artificial Sequence: Synthetic oligonucleotide
  Sense strand starting at position 2640 of SEQ ID NO: 913878
guauguacuccucaaggua

SEQ ID NO: 961193 - RNA, 19 nt, Artificial Sequence
  Description of Artificial Sequence: Synthetic oligonucleotide
  Antisense strand to SEQ ID NO: 961192
uaccuugaggaguacauac

SEQ ID NO: 961194 - RNA, 19 nt, Artificial Sequence
  Description of Artificial Sequence: Synthetic oligonucleotide
  Sense strand starting at position 1205 of SEQ ID NO: 913878
aguugaguggcucauccaa

SEQ ID NO: 961195 - RNA, 19 nt, Artificial Sequence
  Description of Artificial Sequence: Synthetic oligonucleotide
  Antisense strand to SEQ ID NO: 961194
uuggaugagccacucaacu

SEQ ID NO: 961196 - RNA, 19 nt, Artificial Sequence
  Description of Artificial Sequence: Synthetic oligonucleotide
  Sense strand starting at position 290 of SEQ ID NO: 913878
ugcaaacugccaugauaag

SEQ ID NO: 961197 - RNA, 19 nt, Artificial Sequence
  Description of Artificial Sequence: Synthetic oligonucleotide
  Antisense strand to SEQ ID NO: 961196
cuuaucauggcaguuugca

SEQ ID NO: 961198 - RNA, 19 nt, Artificial Sequence
  Description of Artificial Sequence: Synthetic oligonucleotide
  Sense strand starting at position 930 of SEQ ID NO: 913878
ugaacacucugguuauagu

SEQ ID NO: 961199 - RNA, 19 nt, Artificial Sequence
  Description of Artificial Sequence: Synthetic oligonucleotide
  Antisense strand to SEQ ID NO: 961198
acuauaaccagaguguuca

SEQ ID NO: 961200 - RNA, 19 nt, Artificial Sequence
  Description of Artificial Sequence: Synthetic oligonucleotide
  Sense strand starting at position 239 of SEQ ID NO: 913878
uaguaaaggcaauguuuaa

SEQ ID NO: 961201 - RNA, 19 nt, Artificial Sequence
  Description of Artificial Sequence: Synthetic oligonucleotide
  Antisense strand to SEQ ID NO: 961200
uuaaacauugccuuuacua

SEQ ID NO: 961202 - RNA, 19 nt, Artificial Sequence
  Description of Artificial Sequence: Synthetic oligonucleotide
  Sense strand starting at position 3657 of SEQ ID NO: 913878
auacaagagguuuguucuu

SEQ ID NO: 961203 - RNA, 19 nt, Artificial Sequence
  Description of Artificial Sequence: Synthetic oligonucleotide
  Antisense strand to SEQ ID NO: 961202
aagaacaaaccucuuguau

SEQ ID NO: 961204 - RNA, 19 nt, Artificial Sequence
  Description of Artificial Sequence: Synthetic oligonucleotide
  Sense strand starting at position 1144 of SEQ ID NO: 913878
aaacuuuguuaaguggcaa

SEQ ID NO: 961205 - RNA, 19 nt, Artificial Sequence
  Description of Artificial Sequence: Synthetic oligonucleotide
  Antisense strand to SEQ ID NO: 961204
uugccacuuaacaaaguuu

SEQ ID NO: 961206 - RNA, 19 nt, Artificial Sequence
  Description of Artificial Sequence: Synthetic oligonucleotide
  Sense strand starting at position 3553 of SEQ ID NO: 913878
ggaguuaggcauuauugcu

SEQ ID NO: 961207 - RNA, 19 nt, Artificial Sequence
  Description of Artificial Sequence: Synthetic oligonucleotide
  Antisense strand to SEQ ID NO: 961206
agcaauaaugccuaacucc

SEQ ID NO: 961208 - RNA, 19 nt, Artificial Sequence
  Description of Artificial Sequence: Synthetic oligonucleotide
  Sense strand starting at position 1207 of SEQ ID NO: 913878
uugaguggcucauccaaca

SEQ ID NO: 961209 - RNA, 19 nt, Artificial Sequence
  Description of Artificial Sequence: Synthetic oligonucleotide
  Antisense strand to SEQ ID NO: 961208
uguuggaugagccacucaa

SEQ ID NO: 961210 - RNA, 19 nt, Artificial Sequence
  Description of Artificial Sequence: Synthetic oligonucleotide
  Sense strand starting at position 2720 of SEQ ID NO: 913878
acuauagucuugguaguaa

SEQ ID NO: 961211 - RNA, 19 nt, Artificial Sequence
  Description of Artificial Sequence: Synthetic oligonucleotide
  Antisense strand to SEQ ID NO: 961210
uuacuaccaagacuauagu

SEQ ID NO: 961212 - RNA, 19 nt, Artificial Sequence
  Description of Artificial Sequence: Synthetic oligonucleotide
  Sense strand starting at position 402 of SEQ ID NO: 913878
aggaaucuauaugaagaau

SEQ ID NO: 961213 - RNA, 19 nt, Artificial Sequence
  Description of Artificial Sequence: Synthetic oligonucleotide
  Antisense strand to SEQ ID NO: 961212
auucuucauauagauuccu

SEQ ID NO: 961214 - RNA, 19 nt, Artificial Sequence
  Description of Artificial Sequence: Synthetic oligonucleotide
  Sense strand starting at position 300 of SEQ ID NO: 913878
caugauaagccugguauuc

SEQ ID NO: 961215 - RNA, 19 nt, Artificial Sequence
  Description of Artificial Sequence: Synthetic oligonucleotide
  Antisense strand to SEQ ID NO: 961214
gaauaccaggcuuaucaug

SEQ ID NO: 961216 - RNA, 19 nt, Artificial Sequence
  Description of Artificial Sequence: Synthetic oligonucleotide
  Sense strand starting at position 299 of SEQ ID NO: 913878
ccaugauaagccugguauu

SEQ ID NO: 961217 - RNA, 19 nt, Artificial Sequence
  Description of Artificial Sequence: Synthetic oligonucleotide
  Antisense strand to SEQ ID NO: 961216
aauaccaggcuuaucaugg

SEQ ID NO: 961218 - RNA, 19 nt, Artificial Sequence
  Description of Artificial Sequence: Synthetic oligonucleotide
  Sense strand starting at position 927 of SEQ ID NO: 913878
uugugaacacucugguuau

SEQ ID NO: 961219 - RNA, 19 nt, Artificial Sequence
  Description of Artificial Sequence: Synthetic oligonucleotide
  Antisense strand to SEQ ID NO: 961218
auaaccagaguguucacaa

SEQ ID NO: 961220 - RNA, 19 nt, Artificial Sequence
  Description of Artificial Sequence: Synthetic oligonucleotide
  Sense strand starting at position 2364 of SEQ ID NO: 913878
caaggcauuuauuaaggua

SEQ ID NO: 961221 - RNA, 19 nt, Artificial Sequence
  Description of Artificial Sequence: Synthetic oligonucleotide
  Antisense strand to SEQ ID NO: 961220
uaccuuaauaaaugccuug

SEQ ID NO: 961222 - RNA, 19 nt, Artificial Sequence
  Description of Artificial Sequence: Synthetic oligonucleotide
  Sense strand starting at position 3392 of SEQ ID NO: 913879
ugcauauucuauuuaugug

SEQ ID NO: 961223 - RNA, 19 nt, Artificial Sequence
  Description of Artificial Sequence: Synthetic oligonucleotide
  Antisense strand to SEQ ID NO: 961222
cacauaaauagaauaugca

SEQ ID NO: 961224 - RNA, 19 nt, Artificial Sequence
  Description of Artificial Sequence: Synthetic oligonucleotide
  Sense strand starting at position 3265 of SEQ ID NO: 913879
ggaaaugaauuaucuguac

SEQ ID NO: 961225 - RNA, 19 nt, Artificial Sequence
  Description of Artificial Sequence: Synthetic oligonucleotide
  Antisense strand to SEQ ID NO: 961224
guacagauaauucauuucc

SEQ ID NO: 961226 - RNA, 19 nt, Artificial Sequence
  Description of Artificial Sequence: Synthetic oligonucleotide
  Sense strand starting at position 2973 of SEQ ID NO: 913879
ucguaaugccuacugugua

SEQ ID NO: 961227 - RNA, 19 nt, Artificial Sequence
  Description of Artificial Sequence: Synthetic oligonucleotide
  Antisense strand to SEQ ID NO: 961226
uacacaguaggcauuacga

SEQ ID NO: 961228 - RNA, 19 nt, Artificial Sequence
  Description of Artificial Sequence: Synthetic oligonucleotide
  Sense strand starting at position 3054 of SEQ ID NO: 913879
cgaagagaucuuuauccuc

SEQ ID NO: 961229 - RNA, 19 nt, Artificial Sequence
  Description of Artificial Sequence: Synthetic oligonucleotide
  Antisense strand to SEQ ID NO: 961228
gaggauaaagaucucuucg

SEQ ID NO: 961230 - RNA, 19 nt, Artificial Sequence
  Description of Artificial Sequence: Synthetic oligonucleotide
  Sense strand starting at position 1435 of SEQ ID NO: 913879
ugagauaugcaacauguca

SEQ ID NO: 961231 - RNA, 19 nt, Artificial Sequence
  Description of Artificial Sequence: Synthetic oligonucleotide
  Antisense strand to SEQ ID NO: 961230
ugacauguugcauaucuca

SEQ ID NO: 961232 - RNA, 19 nt, Artificial Sequence
  Description of Artificial Sequence: Synthetic oligonucleotide
  Sense strand starting at position 1309 of SEQ ID NO: 913879
aaugaaagucuuuaugcag

SEQ ID NO: 961233 - RNA, 19 nt, Artificial Sequence
  Description of Artificial Sequence: Synthetic oligonucleotide
  Antisense strand to SEQ ID NO: 961232
cugcauaaagacuuucauu

SEQ ID NO: 961234 - RNA, 19 nt, Artificial Sequence
  Description of Artificial Sequence: Synthetic oligonucleotide
  Sense strand starting at position 1235 of SEQ ID NO: 913879
acauuaauccagggagcag

SEQ ID NO: 961235 - RNA, 19 nt, Artificial Sequence
  Description of Artificial Sequence: Synthetic oligonucleotide
  Antisense strand to SEQ ID NO: 961234
cugcucccuggauuaaugu

SEQ ID NO: 961236 - RNA, 19 nt, Artificial Sequence
  Description of Artificial Sequence: Synthetic oligonucleotide
  Sense strand starting at position 2117 of SEQ ID NO: 913879
guuauuuauugauugacgu

SEQ ID NO: 961237 - RNA, 19 nt, Artificial Sequence
  Description of Artificial Sequence: Synthetic oligonucleotide
  Antisense strand to SEQ ID NO: 961236
acgucaaucaauaaauaac

SEQ ID NO: 961238 - RNA, 19 nt, Artificial Sequence
  Description of Artificial Sequence: Synthetic oligonucleotide
  Sense strand starting at position 3269 of SEQ ID NO: 913879
augaauuaucuguacaggu

SEQ ID NO: 961239 - RNA, 19 nt, Artificial Sequence
  Description of Artificial Sequence: Synthetic oligonucleotide
  Antisense strand to SEQ ID NO: 961238
accuguacagauaauucau

SEQ ID NO: 961240 - RNA, 19 nt, Artificial Sequence
  Description of Artificial Sequence: Synthetic oligonucleotide
  Sense strand starting at position 3271 of SEQ ID NO: 913879
gaauuaucuguacagguua

SEQ ID NO: 961241 - RNA, 19 nt, Artificial Sequence
  Description of Artificial Sequence: Synthetic oligonucleotide
  Antisense strand to SEQ ID NO: 961240
uaaccuguacagauaauuc

SEQ ID NO: 961242 - RNA, 19 nt, Artificial Sequence
  Description of Artificial Sequence: Synthetic oligonucleotide
  Sense strand starting at position 3135 of SEQ ID NO: 913879
gaucacauuggagguuuaa

SEQ ID NO: 961243 - RNA, 19 nt, Artificial Sequence
  Description of Artificial Sequence: Synthetic oligonucleotide
  Antisense strand to SEQ ID NO: 961242
uuaaaccuccaaugugauc

SEQ ID NO: 961244 - RNA, 19 nt, Artificial Sequence
  Description of Artificial Sequence: Synthetic oligonucleotide
  Sense strand starting at position 3441 of SEQ ID NO: 913879
agaggaucuuccuccacua

SEQ ID NO: 961245 - RNA, 19 nt, Artificial Sequence
  Description of Artificial Sequence: Synthetic oligonucleotide
  Antisense strand to SEQ ID NO: 961244
uaguggaggaagauccucu

SEQ ID NO: 961246 - RNA, 19 nt, Artificial Sequence
  Description of Artificial Sequence: Synthetic oligonucleotide
  Sense strand starting at position 3285 of SEQ ID NO: 913879
gguuauucucauuaccaca

SEQ ID NO: 961247 - RNA, 19 nt, Artificial Sequence
  Description of Artificial Sequence: Synthetic oligonucleotide
  Antisense strand to SEQ ID NO: 961246
ugugguaaugagaauaacc

SEQ ID NO: 961248 - RNA, 19 nt, Artificial Sequence
  Description of Artificial Sequence: Synthetic oligonucleotide
  Sense strand starting at position 1456 of SEQ ID NO: 913879
acuucuucuguugagauau

SEQ ID NO: 961249 - RNA, 19 nt, Artificial Sequence
  Description of Artificial Sequence: Synthetic oligonucleotide
  Antisense strand to SEQ ID NO: 961248
auaucucaacagaagaagu

SEQ ID NO: 961250 - RNA, 19 nt, Artificial Sequence
  Description of Artificial Sequence: Synthetic oligonucleotide
  Sense strand starting at position 2824 of SEQ ID NO: 913879
gacuuaaaugaugguuauu

SEQ ID NO: 961251 - RNA, 19 nt, Artificial Sequence
  Description of Artificial Sequence: Synthetic oligonucleotide
  Antisense strand to SEQ ID NO: 961250
aauaaccaucauuuaaguc

SEQ ID NO: 961252 - RNA, 19 nt, Artificial Sequence
  Description of Artificial Sequence: Synthetic oligonucleotide
  Sense strand starting at position 2752 of SEQ ID NO: 913879
gauugcuuaguauagauua

SEQ ID NO: 961253 - RNA, 19 nt, Artificial Sequence
  Description of Artificial Sequence: Synthetic oligonucleotide
  Antisense strand to SEQ ID NO: 961252
uaaucuauacuaagcaauc

SEQ ID NO: 961254 - RNA, 19 nt, Artificial Sequence
  Description of Artificial Sequence: Synthetic oligonucleotide
  Sense strand starting at position 1569 of SEQ ID NO: 913879
uuucgugucccgucauaug

SEQ ID NO: 961255 - RNA, 19 nt, Artificial Sequence
  Description of Artificial Sequence: Synthetic oligonucleotide
  Antisense strand to SEQ ID NO: 961254
cauaugacgggacacgaaa

SEQ ID NO: 961256 - RNA, 19 nt, Artificial Sequence
  Description of Artificial Sequence: Synthetic oligonucleotide
  Sense strand starting at position 89 of SEQ ID NO: 913879
gugaacugagucuacuauu

SEQ ID NO: 961257 - RNA, 19 nt, Artificial Sequence
  Description of Artificial Sequence: Synthetic oligonucleotide
  Antisense strand to SEQ ID NO: 961256
aauaguagacucaguucac

SEQ ID NO: 961258 - RNA, 19 nt, Artificial Sequence
  Description of Artificial Sequence: Synthetic oligonucleotide
  Sense strand starting at position 118 of SEQ ID NO: 913879
guaggaacuaacuguugaa

SEQ ID NO: 961259 - RNA, 19 nt, Artificial Sequence
  Description of Artificial Sequence: Synthetic oligonucleotide
  Antisense strand to SEQ ID NO: 961258
uucaacaguuaguuccuac

SEQ ID NO: 961260 - RNA, 19 nt, Artificial Sequence
  Description of Artificial Sequence: Synthetic oligonucleotide
  Sense strand starting at position 409 of SEQ ID NO: 913879
acauuauuaugaguuccag

SEQ ID NO: 961261 - RNA, 19 nt, Artificial Sequence
  Description of Artificial Sequence: Synthetic oligonucleotide
  Antisense strand to SEQ ID NO: 961260
cuggaacucauaauaaugu

SEQ ID NO: 961262 - RNA, 19 nt, Artificial Sequence
  Description of Artificial Sequence: Synthetic oligonucleotide
  Sense strand starting at position 2989 of SEQ ID NO: 913879
guaccagguacugaguaua

SEQ ID NO: 961263 - RNA, 19 nt, Artificial Sequence
  Description of Artificial Sequence: Synthetic oligonucleotide
  Antisense strand to SEQ ID NO: 961262
uauacucaguaccugguac

SEQ ID NO: 961264 - RNA, 19 nt, Artificial Sequence
  Description of Artificial Sequence: Synthetic oligonucleotide
  Sense strand starting at position 956 of SEQ ID NO: 913879
acaccauuacuguaauguu

SEQ ID NO: 961265 - RNA, 19 nt, Artificial Sequence
  Description of Artificial Sequence: Synthetic oligonucleotide
  Antisense strand to SEQ ID NO: 961264
aacauuacaguaauggugu

SEQ ID NO: 961266 - RNA, 19 nt, Artificial Sequence
  Description of Artificial Sequence: Synthetic oligonucleotide
  Sense strand starting at position 3513 of SEQ ID NO: 913879
aggucucucccaugggaga

SEQ ID NO: 961267 - RNA, 19 nt, Artificial Sequence
  Description of Artificial Sequence: Synthetic oligonucleotide
  Antisense strand to SEQ ID NO: 961266
ucucccaugggagagaccu

SEQ ID NO: 961268 - RNA, 19 nt, Artificial Sequence
  Description of Artificial Sequence: Synthetic oligonucleotide
  Sense strand starting at position 3514 of SEQ ID NO: 913879
ggucucucccaugggagaa

SEQ ID NO: 961269 - RNA, 19 nt, Artificial Sequence
  Description of Artificial Sequence: Synthetic oligonucleotide
  Antisense strand to SEQ ID NO: 961268
uucucccaugggagagacc

SEQ ID NO: 961270 - RNA, 19 nt, Artificial Sequence
  Description of Artificial Sequence: Synthetic oligonucleotide
  Sense strand starting at position 1625 of SEQ ID NO: 913879
aguaaugaguucuuugaaa

SEQ ID NO: 961271 - RNA, 19 nt, Artificial Sequence
  Description of Artificial Sequence: Synthetic oligonucleotide
  Antisense strand to SEQ ID NO: 961270
uuucaaagaacucauuacu

SEQ ID NO: 961272 - RNA, 19 nt, Artificial Sequence
  Description of Artificial Sequence: Synthetic oligonucleotide
  Sense strand starting at position 1047 of SEQ ID NO: 913879
acucaagaugugcaucuau

SEQ ID NO: 961273 - RNA, 19 nt, Artificial Sequence
  Description of Artificial Sequence: Synthetic oligonucleotide
  Antisense strand to SEQ ID NO: 961272
auagaugcacaucuugagu

SEQ ID NO: 961274 - RNA, 19 nt, Artificial Sequence
  Description of Artificial Sequence: Synthetic oligonucleotide
  Sense strand starting at position 548 of SEQ ID NO: 913879
uugacaccucuguaaguau

SEQ ID NO: 961275 - RNA, 19 nt, Artificial Sequence
  Description of Artificial Sequence: Synthetic oligonucleotide
  Antisense strand to SEQ ID NO: 961274
auacuuacagaggugucaa

SEQ ID NO: 961276 - RNA, 19 nt, Artificial Sequence
  Description of Artificial Sequence: Synthetic oligonucleotide
  Sense strand starting at position 2130 of SEQ ID NO: 913879
ugacguuuggaaugaacac

SEQ ID NO: 961277 - RNA, 19 nt, Artificial Sequence
  Description of Artificial Sequence: Synthetic oligonucleotide
  Antisense strand to SEQ ID NO: 961276
guguucauuccaaacguca

SEQ ID NO: 961278 - RNA, 19 nt, Artificial Sequence
  Description of Artificial Sequence: Synthetic oligonucleotide
  Sense strand starting at position 3515 of SEQ ID NO: 913879
gucucucccaugggagaau

SEQ ID NO: 961279 - RNA, 19 nt, Artificial Sequence
  Description of Artificial Sequence: Synthetic oligonucleotide
  Antisense strand to SEQ ID NO: 961278
auucucccaugggagagac

SEQ ID NO: 961280 - RNA, 19 nt, Artificial Sequence
  Description of Artificial Sequence: Synthetic oligonucleotide
  Sense strand starting at position 291 of SEQ ID NO: 913879
acuucuuguguccauaaau

SEQ ID NO: 961281 - RNA, 19 nt, Artificial Sequence
  Description of Artificial Sequence: Synthetic oligonucleotide
  Antisense strand to SEQ ID NO: 961280
auuuauggacacaagaagu

SEQ ID NO: 961282 - RNA, 19 nt, Artificial Sequence
  Description of Artificial Sequence: Synthetic oligonucleotide
  Sense strand starting at position 11 of SEQ ID NO: 913879
gucaaaucucaaugugaau

SEQ ID NO: 961283 - RNA, 19 nt, Artificial Sequence
  Description of Artificial Sequence: Synthetic oligonucleotide
  Antisense strand to SEQ ID NO: 961282
auucacauugagauuugac

SEQ ID NO: 961284 - RNA, 19 nt, Artificial Sequence
  Description of Artificial Sequence: Synthetic oligonucleotide
  Sense strand starting at position 522 of SEQ ID NO: 913879
uucuguaaggccuauaauu

SEQ ID NO: 961285 - RNA, 19 nt, Artificial Sequence
  Description of Artificial Sequence: Synthetic oligonucleotide
  Antisense strand to SEQ ID NO: 961284
aauuauaggccuuacagaa

SEQ ID NO: 961286 - RNA, 19 nt, Artificial Sequence
  Description of Artificial Sequence: Synthetic oligonucleotide
  Sense strand starting at position 3126 of SEQ ID NO: 913879
gcuuauugugaucacauug

SEQ ID NO: 961287 - RNA, 19 nt, Artificial Sequence
  Description of Artificial Sequence: Synthetic oligonucleotide
  Antisense strand to SEQ ID NO: 961286
caaugugaucacaauaagc

SEQ ID NO: 961288 - RNA, 19 nt, Artificial Sequence
  Description of Artificial Sequence: Synthetic oligonucleotide
  Sense strand starting at position 3284 of SEQ ID NO: 913879
agguuauucucauuaccac

SEQ ID NO: 961289 - RNA, 19 nt, Artificial Sequence
  Description of Artificial Sequence: Synthetic oligonucleotide
  Antisense strand to SEQ ID NO: 961288
gugguaaugagaauaaccu

SEQ ID NO: 961290 - RNA, 19 nt, Artificial Sequence
  Description of Artificial Sequence: Synthetic oligonucleotide
  Sense strand starting at position 107 of SEQ ID NO: 913879
uccuauuacguguaggaac

SEQ ID NO: 961291 - RNA, 19 nt, Artificial Sequence
  Description of Artificial Sequence: Synthetic oligonucleotide
  Antisense strand to SEQ ID NO: 961290
guuccuacacguaauagga

SEQ ID NO: 961292 - RNA, 19 nt, Artificial Sequence
  Description of Artificial Sequence: Synthetic oligonucleotide
  Sense strand starting at position 927 of SEQ ID NO: 913879
aucuguugauaaguuacua

SEQ ID NO: 961293 - RNA, 19 nt, Artificial Sequence
  Description of Artificial Sequence: Synthetic oligonucleotide
  Antisense strand to SEQ ID NO: 961292
uaguaacuuaucaacagau

SEQ ID NO: 961294 - RNA, 19 nt, Artificial Sequence
  Description of Artificial Sequence: Synthetic oligonucleotide
  Sense strand starting at position 321 of SEQ ID NO: 913879
gucuguucuacugaaagug

SEQ ID NO: 961295 - RNA, 19 nt, Artificial Sequence
  Description of Artificial Sequence: Synthetic oligonucleotide
  Antisense strand to SEQ ID NO: 961294
cacuuucaguagaacagac

SEQ ID NO: 961296 - RNA, 19 nt, Artificial Sequence
  Description of Artificial Sequence: Synthetic oligonucleotide
  Sense strand starting at position 1365 of SEQ ID NO: 913879
acuggcauugcuuacauau

SEQ ID NO: 961297 - RNA, 19 nt, Artificial Sequence
  Description of Artificial Sequence: Synthetic oligonucleotide
  Antisense strand to SEQ ID NO: 961296
auauguaagcaaugccagu

SEQ ID NO: 961298 - RNA, 19 nt, Artificial Sequence
  Description of Artificial Sequence: Synthetic oligonucleotide
  Sense strand starting at position 3606 of SEQ ID NO: 913879
ugcaaacugccaugauaag

SEQ ID NO: 961299 - RNA, 19 nt, Artificial Sequence
  Description of Artificial Sequence: Synthetic oligonucleotide
  Antisense strand to SEQ ID NO: 961298
cuuaucauggcaguuugca

SEQ ID NO: 961300 - RNA, 19 nt, Artificial Sequence
  Description of Artificial Sequence: Synthetic oligonucleotide
  Sense strand starting at position 3131 of SEQ ID NO: 913879
uugugaucacauuggaggu

SEQ ID NO: 961301 - RNA, 19 nt, Artificial Sequence
  Description of Artificial Sequence: Synthetic oligonucleotide
  Antisense strand to SEQ ID NO: 961300
accuccaaugugaucacaa

SEQ ID NO: 961302 - RNA, 19 nt, Artificial Sequence
  Description of Artificial Sequence: Synthetic oligonucleotide
  Sense strand starting at position 2853 of SEQ ID NO: 913880
gccgauagccgguuacuua

SEQ ID NO: 961303 - RNA, 19 nt, Artificial Sequence
  Description of Artificial Sequence: Synthetic oligonucleotide
  Antisense strand to SEQ ID NO: 961302
uaaguaaccggcuaucggc

SEQ ID NO: 961304 - RNA, 19 nt, Artificial Sequence
  Description of Artificial Sequence: Synthetic oligonucleotide
  Sense strand starting at position 2563 of SEQ ID NO: 913880
ggcccuaauccugagaauc

SEQ ID NO: 961305 - RNA, 19 nt, Artificial Sequence
  Description of Artificial Sequence: Synthetic oligonucleotide
  Antisense strand to SEQ ID NO: 961304
gauucucaggauuagggcc

SEQ ID NO: 961306 - RNA, 19 nt, Artificial Sequence
  Description of Artificial Sequence: Synthetic oligonucleotide
  Sense strand starting at position 2852 of SEQ ID NO: 913880
ggccgauagccgguuacuu

SEQ ID NO: 961307 - RNA, 19 nt, Artificial Sequence
  Description of Artificial Sequence: Synthetic oligonucleotide
  Antisense strand to SEQ ID NO: 961306
aaguaaccggcuaucggcc

SEQ ID NO: 961308 - RNA, 19 nt, Artificial Sequence
  Description of Artificial Sequence: Synthetic oligonucleotide
  Sense strand starting at position 3726 of SEQ ID NO: 913880
agggcucuucuaggaugaa

SEQ ID NO: 961309 - RNA, 19 nt, Artificial Sequence
  Description of Artificial Sequence: Synthetic oligonucleotide
  Antisense strand to SEQ ID NO: 961308
uucauccuagaagagcccu

SEQ ID NO: 961310 - RNA, 19 nt, Artificial Sequence
  Description of Artificial Sequence: Synthetic oligonucleotide
  Sense strand starting at position 3957 of SEQ ID NO: 913880
gcuggcauugguuaauauu

SEQ ID NO: 961311 - RNA, 19 nt, Artificial Sequence
  Description of Artificial Sequence: Synthetic oligonucleotide
  Antisense strand to SEQ ID NO: 961310
aauauuaaccaaugccagc

SEQ ID NO: 961312 - RNA, 19 nt, Artificial Sequence
  Description of Artificial Sequence: Synthetic oligonucleotide
  Sense strand starting at position 3915 of SEQ ID NO: 913880
gcagguuuagaauggcuca

SEQ ID NO: 961313 - RNA, 19 nt, Artificial Sequence
  Description of Artificial Sequence: Synthetic oligonucleotide
  Antisense strand to SEQ ID NO: 961312
ugagccauucuaaaccugc

SEQ ID NO: 961314 - RNA, 19 nt, Artificial Sequence
  Description of Artificial Sequence: Synthetic oligonucleotide
  Sense strand starting at position 3954 of SEQ ID NO: 913880
agugcuggcauugguuaau

SEQ ID NO: 961315 - RNA, 19 nt, Artificial Sequence
  Description of Artificial Sequence: Synthetic oligonucleotide
  Antisense strand to SEQ ID NO: 961314
auuaaccaaugccagcacu

SEQ ID NO: 961316 - RNA, 19 nt, Artificial Sequence
  Description of Artificial Sequence: Synthetic oligonucleotide
  Sense strand starting at position 3953 of SEQ ID NO: 913880
uagugcuggcauugguuaa

SEQ ID NO: 961317 - RNA, 19 nt, Artificial Sequence
  Description of Artificial Sequence: Synthetic oligonucleotide
  Antisense strand to SEQ ID NO: 961316
uuaaccaaugccagcacua

SEQ ID NO: 961318 - RNA, 19 nt, Artificial Sequence
  Description of Artificial Sequence: Synthetic oligonucleotide
  Sense strand starting at position 3727 of SEQ ID NO: 913880
gggcucuucuaggaugaaa

SEQ ID NO: 961319 - RNA, 19 nt, Artificial Sequence
  Description of Artificial Sequence: Synthetic oligonucleotide
  Antisense strand to SEQ ID NO: 961318
uuucauccuagaagagccc

SEQ ID NO: 961320 - RNA, 19 nt, Artificial Sequence
  Description of Artificial Sequence: Synthetic oligonucleotide
  Sense strand starting at position 3960 of SEQ ID NO: 913880
ggcauugguuaauauuaga

SEQ ID NO: 961321 - RNA, 19 nt, Artificial Sequence
  Description of Artificial Sequence: Synthetic oligonucleotide
  Antisense strand to SEQ ID NO: 961320
ucuaauauuaaccaaugcc

SEQ ID NO: 961322 - RNA, 19 nt, Artificial Sequence
  Description of Artificial Sequence: Synthetic oligonucleotide
  Sense strand starting at position 2562 of SEQ ID NO: 913880
aggcccuaauccugagaau

SEQ ID NO: 961323 - RNA, 19 nt, Artificial Sequence
  Description of Artificial Sequence: Synthetic oligonucleotide
  Antisense strand to SEQ ID NO: 961322
auucucaggauuagggccu

SEQ ID NO: 961324 - RNA, 19 nt, Artificial Sequence
  Description of Artificial Sequence: Synthetic oligonucleotide
  Sense strand starting at position 2755 of SEQ ID NO: 913880
gguuccugccgcgguaaga

SEQ ID NO: 961325 - RNA, 19 nt, Artificial Sequence
  Description of Artificial Sequence: Synthetic oligonucleotide
  Antisense strand to SEQ ID NO: 961324
ucuuaccgcggcaggaacc

SEQ ID NO: 961326 - RNA, 19 nt, Artificial Sequence
  Description of Artificial Sequence: Synthetic oligonucleotide
  Sense strand starting at position 2985 of SEQ ID NO: 913880
gguuguaugugcaguuuga

SEQ ID NO: 961327 - RNA, 19 nt, Artificial Sequence
  Description of Artificial Sequence: Synthetic oligonucleotide
  Antisense strand to SEQ ID NO: 961326
ucaaacugcacauacaacc

SEQ ID NO: 961328 - RNA, 19 nt, Artificial Sequence
  Description of Artificial Sequence: Synthetic oligonucleotide
  Sense strand starting at position 2061 of SEQ ID NO: 913881
cgugaauaaaucgaaauua

SEQ ID NO: 961329 - RNA, 19 nt, Artificial Sequence
  Description of Artificial Sequence: Synthetic oligonucleotide
  Antisense strand to SEQ ID NO: 961328
uaauuucgauuuauucacg

SEQ ID NO: 961330 - RNA, 19 nt, Artificial Sequence
  Description of Artificial Sequence: Synthetic oligonucleotide
  Sense strand starting at position 854 of SEQ ID NO: 913881
gugcgugguggaaagcuaa

SEQ ID NO: 961331 - RNA, 19 nt, Artificial Sequence
  Description of Artificial Sequence: Synthetic oligonucleotide
  Antisense strand to SEQ ID NO: 961330
uuagcuuuccaccacgcac

SEQ ID NO: 961332 - RNA, 19 nt, Artificial Sequence
  Description of Artificial Sequence: Synthetic oligonucleotide
  Sense strand starting at position 571 of SEQ ID NO: 913881
aaaugaaaggaacguuauu

SEQ ID NO: 961333 - RNA, 19 nt, Artificial Sequence
  Description of Artificial Sequence: Synthetic oligonucleotide
  Antisense strand to SEQ ID NO: 961332
aauaacguuccuuucauuu

SEQ ID NO: 961334 - RNA, 19 nt, Artificial Sequence
  Description of Artificial Sequence: Synthetic oligonucleotide
  Sense strand starting at position 171 of SEQ ID NO: 913881
gaaugcuaacacuauguga

SEQ ID NO: 961335 - RNA, 19 nt, Artificial Sequence
  Description of Artificial Sequence: Synthetic oligonucleotide
  Antisense strand to SEQ ID NO: 961334
ucacauaguguuagcauuc

SEQ ID NO: 961336 - RNA, 19 nt, Artificial Sequence
  Description of Artificial Sequence: Synthetic oligonucleotide
  Sense strand starting at position 233 of SEQ ID NO: 913881
ggagggauaugugucagga

SEQ ID NO: 961337 - RNA, 19 nt, Artificial Sequence
  Description of Artificial Sequence: Synthetic oligonucleotide
  Antisense strand to SEQ ID NO: 961336
uccugacacauaucccucc

SEQ ID NO: 961338 - RNA, 19 nt, Artificial Sequence
  Description of Artificial Sequence: Synthetic oligonucleotide
  Sense strand starting at position 2143 of SEQ ID NO: 913881
ggccucacaagguagauau

SEQ ID NO: 961339 - RNA, 19 nt, Artificial Sequence
  Description of Artificial Sequence: Synthetic oligonucleotide
  Antisense strand to SEQ ID NO: 961338
auaucuaccuugugaggcc

SEQ ID NO: 961340 - RNA, 19 nt, Artificial Sequence
  Description of Artificial Sequence: Synthetic oligonucleotide
  Sense strand starting at position 902 of SEQ ID NO: 913881
acccgacccugauuagaaa

SEQ ID NO: 961341 - RNA, 19 nt, Artificial Sequence
  Description of Artificial Sequence: Synthetic oligonucleotide
  Antisense strand to SEQ ID NO: 961340
uuucuaaucagggucgggu

SEQ ID NO: 961342 - RNA, 19 nt, Artificial Sequence
  Description of Artificial Sequence: Synthetic oligonucleotide
  Sense strand starting at position 627 of SEQ ID NO: 913881
ugaacaaaucugcaagcua

SEQ ID NO: 961343 - RNA, 19 nt, Artificial Sequence
  Description of Artificial Sequence: Synthetic oligonucleotide
  Antisense strand to SEQ ID NO: 961342
uagcuugcagauuuguuca

SEQ ID NO: 961344 - RNA, 19 nt, Artificial Sequence
  Description of Artificial Sequence: Synthetic oligonucleotide
  Sense strand starting at position 3698 of SEQ ID NO: 913881
cuguguguagcaagaggua

SEQ ID NO: 961345 - RNA, 19 nt, Artificial Sequence
  Description of Artificial Sequence: Synthetic oligonucleotide
  Antisense strand to SEQ ID NO: 961344
uaccucuugcuacacacag

SEQ ID NO: 961346 - RNA, 19 nt, Artificial Sequence
  Description of Artificial Sequence: Synthetic oligonucleotide
  Sense strand starting at position 3473 of SEQ ID NO: 913881
gcucauuucugaucuguca

SEQ ID NO: 961347 - RNA, 19 nt, Artificial Sequence
  Description of Artificial Sequence: Synthetic oligonucleotide
  Antisense strand to SEQ ID NO: 961346
ugacagaucagaaaugagc

SEQ ID NO: 961348 - RNA, 19 nt, Artificial Sequence
  Description of Artificial Sequence: Synthetic oligonucleotide
  Sense strand starting at position 3466 of SEQ ID NO: 913881
acuguuugcucauuucuga

SEQ ID NO: 961349 - RNA, 19 nt, Artificial Sequence
  Description of Artificial Sequence: Synthetic oligonucleotide
  Antisense strand to SEQ ID NO: 961348
ucagaaaugagcaaacagu

SEQ ID NO: 961350 - RNA, 19 nt, Artificial Sequence
  Description of Artificial Sequence: Synthetic oligonucleotide
  Sense strand starting at position 3115 of SEQ ID NO: 913881
cgaugcagaagcuaagaua

SEQ ID NO: 961351 - RNA, 19 nt, Artificial Sequence
  Description of Artificial Sequence: Synthetic oligonucleotide
  Antisense strand to SEQ ID NO: 961350
uaucuuagcuucugcaucg

SEQ ID NO: 961352 - RNA, 19 nt, Artificial Sequence
  Description of Artificial Sequence: Synthetic oligonucleotide
  Sense strand starting at position 3286 of SEQ ID NO: 913881
ugagacuuuguguaacuca

SEQ ID NO: 961353 - RNA, 19 nt, Artificial Sequence
  Description of Artificial Sequence: Synthetic oligonucleotide
  Antisense strand to SEQ ID NO: 961352
ugaguuacacaaagucuca

SEQ ID NO: 961354 - RNA, 19 nt, Artificial Sequence
  Description of Artificial Sequence: Synthetic oligonucleotide
  Sense strand starting at position 3527 of SEQ ID NO: 913881
ggguucucuccugaaaucu

SEQ ID NO: 961355 - RNA, 19 nt, Artificial Sequence
  Description of Artificial Sequence: Synthetic oligonucleotide
  Antisense strand to SEQ ID NO: 961354
agauuucaggagagaaccc

SEQ ID NO: 961356 - RNA, 19 nt, Artificial Sequence
  Description of Artificial Sequence: Synthetic oligonucleotide
  Sense strand starting at position 247 of SEQ ID NO: 913881
caggauauccuauggaguu

SEQ ID NO: 961357 - RNA, 19 nt, Artificial Sequence
  Description of Artificial Sequence: Synthetic oligonucleotide
  Antisense strand to SEQ ID NO: 961356
aacuccauaggauauccug

SEQ ID NO: 961358 - RNA, 19 nt, Artificial Sequence
  Description of Artificial Sequence: Synthetic oligonucleotide
  Sense strand starting at position 720 of SEQ ID NO: 913881
ucucaaguacuuuaaaguu

SEQ ID NO: 961359 - RNA, 19 nt, Artificial Sequence
  Description of Artificial Sequence: Synthetic oligonucleotide
  Antisense strand to SEQ ID NO: 961358
aacuuuaaaguacuugaga

SEQ ID NO: 961360 - RNA, 19 nt, Artificial Sequence
  Description of Artificial Sequence: Synthetic oligonucleotide
  Sense strand starting at position 2120 of SEQ ID NO: 913881
ggaccauccuaagugauuc

SEQ ID NO: 961361 - RNA, 19 nt, Artificial Sequence
  Description of Artificial Sequence: Synthetic oligonucleotide
  Antisense strand to SEQ ID NO: 961360
gaaucacuuaggauggucc

SEQ ID NO: 961362 - RNA, 19 nt, Artificial Sequence
  Description of Artificial Sequence: Synthetic oligonucleotide
  Sense strand starting at position 3106 of SEQ ID NO: 913881
cauagauuacgaugcagaa

SEQ ID NO: 961363 - RNA, 19 nt, Artificial Sequence
  Description of Artificial Sequence: Synthetic oligonucleotide
  Antisense strand to SEQ ID NO: 961362
uucugcaucguaaucuaug

SEQ ID NO: 961364 - RNA, 19 nt, Artificial Sequence
  Description of Artificial Sequence: Synthetic oligonucleotide
  Sense strand starting at position 1015 of SEQ ID NO: 913881
ucuugauggcaucauucca

SEQ ID NO: 961365 - RNA, 19 nt, Artificial Sequence
  Description of Artificial Sequence: Synthetic oligonucleotide
  Antisense strand to SEQ ID NO: 961364
uggaaugaugccaucaaga

SEQ ID NO: 961366 - RNA, 19 nt, Artificial Sequence
  Description of Artificial Sequence: Synthetic oligonucleotide
  Sense strand starting at position 3283 of SEQ ID NO: 913881
gaaugagacuuuguguaac

SEQ ID NO: 961367 - RNA, 19 nt, Artificial Sequence
  Description of Artificial Sequence: Synthetic oligonucleotide
  Antisense strand to SEQ ID NO: 961366
guuacacaaagucucauuc

SEQ ID NO: 961368 - RNA, 19 nt, Artificial Sequence
  Description of Artificial Sequence: Synthetic oligonucleotide
  Sense strand starting at position 3604 of SEQ ID NO: 913881
cagaccuguugagugaaca

SEQ ID NO: 961369 - RNA, 19 nt, Artificial Sequence
  Description of Artificial Sequence: Synthetic oligonucleotide
  Antisense strand to SEQ ID NO: 961368
uguucacucaacaggucug

SEQ ID NO: 961370 - RNA, 19 nt, Artificial Sequence
  Description of Artificial Sequence: Synthetic oligonucleotide
  Sense strand starting at position 291 of SEQ ID NO: 913881
gagauucuggcacagcuau

SEQ ID NO: 961371 - RNA, 19 nt, Artificial Sequence
  Description of Artificial Sequence: Synthetic oligonucleotide
  Antisense strand to SEQ ID NO: 961370
auagcugugccagaaucuc

SEQ ID NO: 961372 - RNA, 19 nt, Artificial Sequence
  Description of Artificial Sequence: Synthetic oligonucleotide
  Sense strand starting at position 2914 of SEQ ID NO: 913881
uuuacuugugacuagaugu

SEQ ID NO: 961373 - RNA, 19 nt, Artificial Sequence
  Description of Artificial Sequence: Synthetic oligonucleotide
  Antisense strand to SEQ ID NO: 961372
acaucuagucacaaguaaa

SEQ ID NO: 961374 - RNA, 19 nt, Artificial Sequence
  Description of Artificial Sequence: Synthetic oligonucleotide
  Sense strand starting at position 1097 of SEQ ID NO: 913881
augagaauuagguguccau

SEQ ID NO: 961375 - RNA, 19 nt, Artificial Sequence
  Description of Artificial Sequence: Synthetic oligonucleotide
  Antisense strand to SEQ ID NO: 961374
auggacaccuaauucucau

SEQ ID NO: 961376 - RNA, 19 nt, Artificial Sequence
  Description of Artificial Sequence: Synthetic oligonucleotide
  Sense strand starting at position 3052 of SEQ ID NO: 913881
aagagugacucugcuacaa

SEQ ID NO: 961377 - RNA, 19 nt, Artificial Sequence
  Description of Artificial Sequence: Synthetic oligonucleotide
  Antisense strand to SEQ ID NO: 961376
uuguagcagagucacucuu

SEQ ID NO: 961378 - RNA, 19 nt, Artificial Sequence
  Description of Artificial Sequence: Synthetic oligonucleotide
  Sense strand starting at position 2885 of SEQ ID NO: 913881
gccuacagcccagauuaua

SEQ ID NO: 961379 - RNA, 19 nt, Artificial Sequence
  Description of Artificial Sequence: Synthetic oligonucleotide
  Antisense strand to SEQ ID NO: 961378
uauaaucugggcuguaggc

SEQ ID NO: 961380 - RNA, 19 nt, Artificial Sequence
  Description of Artificial Sequence: Synthetic oligonucleotide
  Sense strand starting at position 1956 of SEQ ID NO: 913881
gcgagaucuccgcucgggu

SEQ ID NO: 961381 - RNA, 19 nt, Artificial Sequence
  Description of Artificial Sequence: Synthetic oligonucleotide
  Antisense strand to SEQ ID NO: 961380
acccgagcggagaucucgc

SEQ ID NO: 961382 - RNA, 19 nt, Artificial Sequence
  Description of Artificial Sequence: Synthetic oligonucleotide
  Sense strand starting at position 3616 of SEQ ID NO: 913881
gugaacagauguucuuuaa

SEQ ID NO: 961383 - RNA, 19 nt, Artificial Sequence
  Description of Artificial Sequence: Synthetic oligonucleotide
  Antisense strand to SEQ ID NO: 961382
uuaaagaacaucuguucac

SEQ ID NO: 961384 - RNA, 19 nt, Artificial Sequence
  Description of Artificial Sequence: Synthetic oligonucleotide
  Sense strand starting at position 1164 of SEQ ID NO: 913881
augauugcugguggaauga

SEQ ID NO: 961385 - RNA, 19 nt, Artificial Sequence
  Description of Artificial Sequence: Synthetic oligonucleotide
  Antisense strand to SEQ ID NO: 961384
ucauuccaccagcaaucau

SEQ ID NO: 961386 - RNA, 19 nt, Artificial Sequence
  Description of Artificial Sequence: Synthetic oligonucleotide
  Sense strand starting at position 371 of SEQ ID NO: 913881
cuucucucccuuugagaag

SEQ ID NO: 961387 - RNA, 19 nt, Artificial Sequence
  Description of Artificial Sequence: Synthetic oligonucleotide
  Antisense strand to SEQ ID NO: 961386
cuucucaaagggagagaag

SEQ ID NO: 961388 - RNA, 19 nt, Artificial Sequence
  Description of Artificial Sequence: Synthetic oligonucleotide
  Sense strand starting at position 2052 of SEQ ID NO: 913881
uuaguccuucgugaauaaa

SEQ ID NO: 961389 - RNA, 19 nt, Artificial Sequence
  Description of Artificial Sequence: Synthetic oligonucleotide
  Antisense strand to SEQ ID NO: 961388
uuuauucacgaaggacuaa

SEQ ID NO: 961390 - RNA, 19 nt, Artificial Sequence
  Description of Artificial Sequence: Synthetic oligonucleotide
  Sense strand starting at position 25 of SEQ ID NO: 913881
cugugauagucccugagaa

SEQ ID NO: 961391 - RNA, 19 nt, Artificial Sequence
  Description of Artificial Sequence: Synthetic oligonucleotide
  Antisense strand to SEQ ID NO: 961390
uucucagggacuaucacag

SEQ ID NO: 961392 - RNA, 19 nt, Artificial Sequence
  Description of Artificial Sequence: Synthetic oligonucleotide
  Sense strand starting at position 26 of SEQ ID NO: 913881
ugugauagucccugagaac

SEQ ID NO: 961393 - RNA, 19 nt, Artificial Sequence
  Description of Artificial Sequence: Synthetic oligonucleotide
  Antisense strand to SEQ ID NO: 961392
guucucagggacuaucaca

SEQ ID NO: 961394 - RNA, 19 nt, Artificial Sequence
  Description of Artificial Sequence: Synthetic oligonucleotide
  Sense strand starting at position 3875 of SEQ ID NO: 913881
cugcuuugaccucaagcaa

SEQ ID NO: 961395 - RNA, 19 nt, Artificial Sequence
  Description of Artificial Sequence: Synthetic oligonucleotide
  Antisense strand to SEQ ID NO: 961394
uugcuugaggucaaagcag

SEQ ID NO: 961396 - RNA, 19 nt, Artificial Sequence
  Description of Artificial Sequence: Synthetic oligonucleotide
  Sense strand starting at position 2060 of SEQ ID NO: 913881
ucgugaauaaaucgaaauu

SEQ ID NO: 961397 - RNA, 19 nt, Artificial Sequence
  Description of Artificial Sequence: Synthetic oligonucleotide
  Antisense strand to SEQ ID NO: 961396
aauuucgauuuauucacga

SEQ ID NO: 961398 - RNA, 19 nt, Artificial Sequence
  Description of Artificial Sequence: Synthetic oligonucleotide
  Sense strand starting at position 3285 of SEQ ID NO: 913881
augagacuuuguguaacuc

SEQ ID NO: 961399 - RNA, 19 nt, Artificial Sequence
  Description of Artificial Sequence: Synthetic oligonucleotide
  Antisense strand to SEQ ID NO: 961398
gaguuacacaaagucucau

SEQ ID NO: 961400 - RNA, 19 nt, Artificial Sequence
  Description of Artificial Sequence: Synthetic oligonucleotide
  Sense strand starting at position 697 of SEQ ID NO: 913881
uaggguaagucuuucucaa

SEQ ID NO: 961401 - RNA, 19 nt, Artificial Sequence
  Description of Artificial Sequence: Synthetic oligonucleotide
  Antisense strand to SEQ ID NO: 961400
uugagaaagacuuacccua

SEQ ID NO: 961402 - RNA, 19 nt, Artificial Sequence
  Description of Artificial Sequence: Synthetic oligonucleotide
  Sense strand starting at position 699 of SEQ ID NO: 913881
ggguaagucuuucucaaac

SEQ ID NO: 961403 - RNA, 19 nt, Artificial Sequence
  Description of Artificial Sequence: Synthetic oligonucleotide
  Antisense strand to SEQ ID NO: 961402
guuugagaaagacuuaccc

SEQ ID NO: 961404 - RNA, 19 nt, Artificial Sequence
  Description of Artificial Sequence: Synthetic oligonucleotide
  Sense strand starting at position 3434 of SEQ ID NO: 913881
uuaucaguugcccacugau

SEQ ID NO: 961405 - RNA, 19 nt, Artificial Sequence
  Description of Artificial Sequence: Synthetic oligonucleotide
  Antisense strand to SEQ ID NO: 961404
aucagugggcaacugauaa

SEQ ID NO: 961406 - RNA, 19 nt, Artificial Sequence
  Description of Artificial Sequence: Synthetic oligonucleotide
  Sense strand starting at position 16 of SEQ ID NO: 913881
cugacacuacugugauagu

SEQ ID NO: 961407 - RNA, 19 nt, Artificial Sequence
  Description of Artificial Sequence: Synthetic oligonucleotide
  Antisense strand to SEQ ID NO: 961406
acuaucacaguagugucag

SEQ ID NO: 961408 - RNA, 19 nt, Artificial Sequence
  Description of Artificial Sequence: Synthetic oligonucleotide
  Sense strand starting at position 1510 of SEQ ID NO: 913882
gaacuagaguuuccacaag

SEQ ID NO: 961409 - RNA, 19 nt, Artificial Sequence
  Description of Artificial Sequence: Synthetic oligonucleotide
  Antisense strand to SEQ ID NO: 961408
cuuguggaaacucuaguuc

SEQ ID NO: 961410 - RNA, 19 nt, Artificial Sequence
  Description of Artificial Sequence: Synthetic oligonucleotide
  Sense strand starting at position 1639 of SEQ ID NO: 913882
cacagaaaucccuguggaa

SEQ ID NO: 961411 - RNA, 19 nt, Artificial Sequence
  Description of Artificial Sequence: Synthetic oligonucleotide
  Antisense strand to SEQ ID NO: 961410
uuccacagggauuucugug

SEQ ID NO: 961412 - RNA, 19 nt, Artificial Sequence
  Description of Artificial Sequence: Synthetic oligonucleotide
  Sense strand starting at position 1641 of SEQ ID NO: 913882
cagaaaucccuguggaaau

SEQ ID NO: 961413 - RNA, 19 nt, Artificial Sequence
  Description of Artificial Sequence: Synthetic oligonucleotide
  Antisense strand to SEQ ID NO: 961412
auuuccacagggauuucug

SEQ ID NO: 961414 - RNA, 19 nt, Artificial Sequence
  Description of Artificial Sequence: Synthetic oligonucleotide
  Sense strand starting at position 845 of SEQ ID NO: 913882
uaugaauucgcagugugcu

SEQ ID NO: 961415 - RNA, 19 nt, Artificial Sequence
  Description of Artificial Sequence: Synthetic oligonucleotide
  Antisense strand to SEQ ID NO: 961414
agcacacugcgaauucaua

SEQ ID NO: 961416 - RNA, 19 nt, Artificial Sequence
  Description of Artificial Sequence: Synthetic oligonucleotide
  Sense strand starting at position 3344 of SEQ ID NO: 913882
agaggacugccuuaaaugu

SEQ ID NO: 961417 - RNA, 19 nt, Artificial Sequence
  Description of Artificial Sequence: Synthetic oligonucleotide
  Antisense strand to SEQ ID NO: 961416
acauuuaaggcaguccucu

SEQ ID NO: 961418 - RNA, 19 nt, Artificial Sequence
  Description of Artificial Sequence: Synthetic oligonucleotide
  Sense strand starting at position 514 of SEQ ID NO: 913882
agugaauauuagcuaaaga

SEQ ID NO: 961419 - RNA, 19 nt, Artificial Sequence
  Description of Artificial Sequence: Synthetic oligonucleotide
  Antisense strand to SEQ ID NO: 961418
ucuuuagcuaauauucacu

SEQ ID NO: 961420 - RNA, 19 nt, Artificial Sequence
  Description of Artificial Sequence: Synthetic oligonucleotide
  Sense strand starting at position 3887 of SEQ ID NO: 913882
uggguuuagaacuacaguu

SEQ ID NO: 961421 - RNA, 19 nt, Artificial Sequence
  Description of Artificial Sequence: Synthetic oligonucleotide
  Antisense strand to SEQ ID NO: 961420
aacuguaguucuaaaccca

SEQ ID NO: 961422 - RNA, 19 nt, Artificial Sequence
  Description of Artificial Sequence: Synthetic oligonucleotide
  Sense strand starting at position 2598 of SEQ ID NO: 913882
aagagacuuguaugaggua

SEQ ID NO: 961423 - RNA, 19 nt, Artificial Sequence
  Description of Artificial Sequence: Synthetic oligonucleotide
  Antisense strand to SEQ ID NO: 961422
uaccucauacaagucucuu

SEQ ID NO: 961424 - RNA, 19 nt, Artificial Sequence
  Description of Artificial Sequence: Synthetic oligonucleotide
  Sense strand starting at position 2083 of SEQ ID NO: 913882
acuguauuacuagauuccu

SEQ ID NO: 961425 - RNA, 19 nt, Artificial Sequence
  Description of Artificial Sequence: Synthetic oligonucleotide
  Antisense strand to SEQ ID NO: 961424
aggaaucuaguaauacagu

SEQ ID NO: 961426 - RNA, 19 nt, Artificial Sequence
  Description of Artificial Sequence: Synthetic oligonucleotide
  Sense strand starting at position 1218 of SEQ ID NO: 913882
ccuaacaguccugaaagca

SEQ ID NO: 961427 - RNA, 19 nt, Artificial Sequence
  Description of Artificial Sequence: Synthetic oligonucleotide
  Antisense strand to SEQ ID NO: 961426
ugcuuucaggacuguuagg

SEQ ID NO: 961428 - RNA, 19 nt, Artificial Sequence
  Description of Artificial Sequence: Synthetic oligonucleotide
  Sense strand starting at position 2703 of SEQ ID NO: 913882
cacucuggagucugacaaa

SEQ ID NO: 961429 - RNA, 19 nt, Artificial Sequence
  Description of Artificial Sequence: Synthetic oligonucleotide
  Antisense strand to SEQ ID NO: 961428
uuugucagacuccagagug

SEQ ID NO: 961430 - RNA, 19 nt, Artificial Sequence
  Description of Artificial Sequence: Synthetic oligonucleotide
  Sense strand starting at position 356 of SEQ ID NO: 913882
cagugauuacuagagcuca

SEQ ID NO: 961431 - RNA, 19 nt, Artificial Sequence
  Description of Artificial Sequence: Synthetic oligonucleotide
  Antisense strand to SEQ ID NO: 961430
ugagcucuaguaaucacug

SEQ ID NO: 961432 - RNA, 19 nt, Artificial Sequence
  Description of Artificial Sequence: Synthetic oligonucleotide
  Sense strand starting at position 1060 of SEQ ID NO: 913882
cuguuuagccuagauaaga

SEQ ID NO: 961433 - RNA, 19 nt, Artificial Sequence
  Description of Artificial Sequence: Synthetic oligonucleotide
  Antisense strand to SEQ ID NO: 961432
ucuuaucuaggcuaaacag

SEQ ID NO: 961434 - RNA, 19 nt, Artificial Sequence
  Description of Artificial Sequence: Synthetic oligonucleotide
  Sense strand starting at position 668 of SEQ ID NO: 913882
aacauuaaagcuggaggua

SEQ ID NO: 961435 - RNA, 19 nt, Artificial Sequence
  Description of Artificial Sequence: Synthetic oligonucleotide
  Antisense strand to SEQ ID NO: 961434
uaccuccagcuuuaauguu

SEQ ID NO: 961436 - RNA, 19 nt, Artificial Sequence
  Description of Artificial Sequence: Synthetic oligonucleotide
  Sense strand starting at position 445 of SEQ ID NO: 913882
gguaaugcuguagacacaa

SEQ ID NO: 961437 - RNA, 19 nt, Artificial Sequence
  Description of Artificial Sequence: Synthetic oligonucleotide
  Antisense strand to SEQ ID NO: 961436
uugugucuacagcauuacc

SEQ ID NO: 961438 - RNA, 19 nt, Artificial Sequence
  Description of Artificial Sequence: Synthetic oligonucleotide
  Sense strand starting at position 1788 of SEQ ID NO: 913882
guaucacaugggugaaaug

SEQ ID NO: 961439 - RNA, 19 nt, Artificial Sequence
  Description of Artificial Sequence: Synthetic oligonucleotide
  Antisense strand to SEQ ID NO: 961438
cauuucacccaugugauac

SEQ ID NO: 961440 - RNA, 19 nt, Artificial Sequence
  Description of Artificial Sequence: Synthetic oligonucleotide
  Sense strand starting at position 1434 of SEQ ID NO: 913882
auguauucugagggaagug

SEQ ID NO: 961441 - RNA, 19 nt, Artificial Sequence
  Description of Artificial Sequence: Synthetic oligonucleotide
  Antisense strand to SEQ ID NO: 961440
cacuucccucagaauacau

SEQ ID NO: 961442 - RNA, 19 nt, Artificial Sequence
  Description of Artificial Sequence: Synthetic oligonucleotide
  Sense strand starting at position 3077 of SEQ ID NO: 913882
ggucgugcuuauuuaauaa

SEQ ID NO: 961443 - RNA, 19 nt, Artificial Sequence
  Description of Artificial Sequence: Synthetic oligonucleotide
  Antisense strand to SEQ ID NO: 961442
uuauuaaauaagcacgacc

SEQ ID NO: 961444 - RNA, 19 nt, Artificial Sequence
  Description of Artificial Sequence: Synthetic oligonucleotide
  Sense strand starting at position 1385 of SEQ ID NO: 913882
acugaaagcuggcuagaga

SEQ ID NO: 961445 - RNA, 19 nt, Artificial Sequence
  Description of Artificial Sequence: Synthetic oligonucleotide
  Antisense strand to SEQ ID NO: 961444
ucucuagccagcuuucagu

SEQ ID NO: 961446 - RNA, 19 nt, Artificial Sequence
  Description of Artificial Sequence: Synthetic oligonucleotide
  Sense strand starting at position 88 of SEQ ID NO: 913882
aagaaugugcauuauaugu

SEQ ID NO: 961447 - RNA, 19 nt, Artificial Sequence
  Description of Artificial Sequence: Synthetic oligonucleotide
  Antisense strand to SEQ ID NO: 961446
acauauaaugcacauucuu

SEQ ID NO: 961448 - RNA, 19 nt, Artificial Sequence
  Description of Artificial Sequence: Synthetic oligonucleotide
  Sense strand starting at position 1787 of SEQ ID NO: 913882
uguaucacaugggugaaau

SEQ ID NO: 961449 - RNA, 19 nt, Artificial Sequence
  Description of Artificial Sequence: Synthetic oligonucleotide
  Antisense strand to SEQ ID NO: 961448
auuucacccaugugauaca

SEQ ID NO: 961450 - RNA, 19 nt, Artificial Sequence
  Description of Artificial Sequence: Synthetic oligonucleotide
  Sense strand starting at position 1188 of SEQ ID NO: 913882
aggcauguuaggcaauaua

SEQ ID NO: 961451 - RNA, 19 nt, Artificial Sequence
  Description of Artificial Sequence: Synthetic oligonucleotide
  Antisense strand to SEQ ID NO: 961450
uauauugccuaacaugccu

SEQ ID NO: 961452 - RNA, 19 nt, Artificial Sequence
  Description of Artificial Sequence: Synthetic oligonucleotide
  Sense strand starting at position 2811 of SEQ ID NO: 913882
caaggaugguugcuacaga

SEQ ID NO: 961453 - RNA, 19 nt, Artificial Sequence
  Description of Artificial Sequence: Synthetic oligonucleotide
  Antisense strand to SEQ ID NO: 961452
ucuguagcaaccauccuug

SEQ ID NO: 961454 - RNA, 19 nt, Artificial Sequence
  Description of Artificial Sequence: Synthetic oligonucleotide
  Sense strand starting at position 3218 of SEQ ID NO: 913882
uucuuacguguagaaagau

SEQ ID NO: 961455 - RNA, 19 nt, Artificial Sequence
  Description of Artificial Sequence: Synthetic oligonucleotide
  Antisense strand to SEQ ID NO: 961454
aucuuucuacacguaagaa

SEQ ID NO: 961456 - RNA, 19 nt, Artificial Sequence
  Description of Artificial Sequence: Synthetic oligonucleotide
  Sense strand starting at position 1142 of SEQ ID NO: 913882
uaaauuuguuuggaacaga

SEQ ID NO: 961457 - RNA, 19 nt, Artificial Sequence
  Description of Artificial Sequence: Synthetic oligonucleotide
  Antisense strand to SEQ ID NO: 961456
ucuguuccaaacaaauuua

SEQ ID NO: 961458 - RNA, 19 nt, Artificial Sequence
  Description of Artificial Sequence: Synthetic oligonucleotide
  Sense strand starting at position 1786 of SEQ ID NO: 913882
cuguaucacaugggugaaa

SEQ ID NO: 961459 - RNA, 19 nt, Artificial Sequence
  Description of Artificial Sequence: Synthetic oligonucleotide
  Antisense strand to SEQ ID NO: 961458
uuucacccaugugauacag

SEQ ID NO: 961460 - RNA, 19 nt, Artificial Sequence
  Description of Artificial Sequence: Synthetic oligonucleotide
  Sense strand starting at position 482 of SEQ ID NO: 913882
guggcaagacuauauguua

SEQ ID NO: 961461 - RNA, 19 nt, Artificial Sequence
  Description of Artificial Sequence: Synthetic oligonucleotide
  Antisense strand to SEQ ID NO: 961460
uaacauauagucuugccac

SEQ ID NO: 961462 - RNA, 19 nt, Artificial Sequence
  Description of Artificial Sequence: Synthetic oligonucleotide
  Sense strand starting at position 3624 of SEQ ID NO: 913882
ugguuauguaaugaagcua

SEQ ID NO: 961463 - RNA, 19 nt, Artificial Sequence
  Description of Artificial Sequence: Synthetic oligonucleotide
  Antisense strand to SEQ ID NO: 961462
uagcuucauuacauaacca

SEQ ID NO: 961464 - RNA, 19 nt, Artificial Sequence
  Description of Artificial Sequence: Synthetic oligonucleotide
  Sense strand starting at position 2080 of SEQ ID NO: 913882
cugacuguauuacuagauu

SEQ ID NO: 961465 - RNA, 19 nt, Artificial Sequence
  Description of Artificial Sequence: Synthetic oligonucleotide
  Antisense strand to SEQ ID NO: 961464
aaucuaguaauacagucag

SEQ ID NO: 961466 - RNA, 19 nt, Artificial Sequence
  Description of Artificial Sequence: Synthetic oligonucleotide
  Sense strand starting at position 1226 of SEQ ID NO: 913882
uccugaaagcaaugacuuu

SEQ ID NO: 961467 - RNA, 19 nt, Artificial Sequence
  Description of Artificial Sequence: Synthetic oligonucleotide
  Antisense strand to SEQ ID NO: 961466
aaagucauugcuuucagga

SEQ ID NO: 961468 - RNA, 19 nt, Artificial Sequence
  Description of Artificial Sequence: Synthetic oligonucleotide
  Sense strand starting at position 160 of SEQ ID NO: 913882
gaaauugguguggguaaau

SEQ ID NO: 961469 - RNA, 19 nt, Artificial Sequence
  Description of Artificial Sequence: Synthetic oligonucleotide
  Antisense strand to SEQ ID NO: 961468
auuuacccacaccaauuuc

SEQ ID NO: 961470 - RNA, 19 nt, Artificial Sequence
  Description of Artificial Sequence: Synthetic oligonucleotide
  Sense strand starting at position 158 of SEQ ID NO: 913882
cagaaauugguguggguaa

SEQ ID NO: 961471 - RNA, 19 nt, Artificial Sequence
  Description of Artificial Sequence: Synthetic oligonucleotide
  Antisense strand to SEQ ID NO: 961470
uuacccacaccaauuucug

SEQ ID NO: 961472 - RNA, 19 nt, Artificial Sequence
  Description of Artificial Sequence: Synthetic oligonucleotide
  Sense strand starting at position 940 of SEQ ID NO: 913882
cuguuccauguuuauuaga

SEQ ID NO: 961473 - RNA, 19 nt, Artificial Sequence
  Description of Artificial Sequence: Synthetic oligonucleotide
  Antisense strand to SEQ ID NO: 961472
ucuaauaaacauggaacag

SEQ ID NO: 961474 - RNA, 19 nt, Artificial Sequence
  Description of Artificial Sequence: Synthetic oligonucleotide
  Sense strand starting at position 493 of SEQ ID NO: 913882
auauguuaucacuguggaa

SEQ ID NO: 961475 - RNA, 19 nt, Artificial Sequence
  Description of Artificial Sequence: Synthetic oligonucleotide
  Antisense strand to SEQ ID NO: 961474
uuccacagugauaacauau

SEQ ID NO: 961476 - RNA, 19 nt, Artificial Sequence
  Description of Artificial Sequence: Synthetic oligonucleotide
  Sense strand starting at position 485 of SEQ ID NO: 913882
gcaagacuauauguuauca

SEQ ID NO: 961477 - RNA, 19 nt, Artificial Sequence
  Description of Artificial Sequence: Synthetic oligonucleotide
  Antisense strand to SEQ ID NO: 961476
ugauaacauauagucuugc

SEQ ID NO: 961478 - RNA, 19 nt, Artificial Sequence
  Description of Artificial Sequence: Synthetic oligonucleotide
  Sense strand starting at position 3619 of SEQ ID NO: 913882
ugaagugguuauguaauga

SEQ ID NO: 961479 - RNA, 19 nt, Artificial Sequence
  Description of Artificial Sequence: Synthetic oligonucleotide
  Antisense strand to SEQ ID NO: 961478
ucauuacauaaccacuuca

SEQ ID NO: 961480 - RNA, 19 nt, Artificial Sequence
  Description of Artificial Sequence: Synthetic oligonucleotide
  Sense strand starting at position 2783 of SEQ ID NO: 913882
gccucaacuuccucaggaa

SEQ ID NO: 961481 - RNA, 19 nt, Artificial Sequence
  Description of Artificial Sequence: Synthetic oligonucleotide
  Antisense strand to SEQ ID NO: 961480
uuccugaggaaguugaggc

SEQ ID NO: 961482 - RNA, 19 nt, Artificial Sequence
  Description of Artificial Sequence: Synthetic oligonucleotide
  Sense strand starting at position 1784 of SEQ ID NO: 913882
accuguaucacauggguga

SEQ ID NO: 961483 - RNA, 19 nt, Artificial Sequence
  Description of Artificial Sequence: Synthetic oligonucleotide
  Antisense strand to SEQ ID NO: 961482
ucacccaugugauacaggu

SEQ ID NO: 961484 - RNA, 19 nt, Artificial Sequence
  Description of Artificial Sequence: Synthetic oligonucleotide
  Sense strand starting at position 1785 of SEQ ID NO: 913882
ccuguaucacaugggugaa

SEQ ID NO: 961485 - RNA, 19 nt, Artificial Sequence
  Description of Artificial Sequence: Synthetic oligonucleotide
  Antisense strand to SEQ ID NO: 961484
uucacccaugugauacagg

SEQ ID NO: 961486 - RNA, 19 nt, Artificial Sequence
  Description of Artificial Sequence: Synthetic oligonucleotide
  Sense strand starting at position 275 of SEQ ID NO: 913882
ucaguaaagccauaacgua

SEQ ID NO: 961487 - RNA, 19 nt, Artificial Sequence
  Description of Artificial Sequence: Synthetic oligonucleotide
  Antisense strand to SEQ ID NO: 961486
uacguuauggcuuuacuga

SEQ ID NO: 961488 - RNA, 19 nt, Artificial Sequence
  Description of Artificial Sequence: Synthetic oligonucleotide
  Sense strand starting at position 2938 of SEQ ID NO: 913883
cuuuguuggccgucaccua

SEQ ID NO: 961489 - RNA, 19 nt, Artificial Sequence
  Description of Artificial Sequence: Synthetic oligonucleotide
  Antisense strand to SEQ ID NO: 961488
uaggugacggccaacaaag

SEQ ID NO: 961490 - RNA, 19 nt, Artificial Sequence
  Description of Artificial Sequence: Synthetic oligonucleotide
  Sense strand starting at position 1540 of SEQ ID NO: 913883
ggcucagauuuguccaccu

SEQ ID NO: 961491 - RNA, 19 nt, Artificial Sequence
  Description of Artificial Sequence: Synthetic oligonucleotide
  Antisense strand to SEQ ID NO: 961490
agguggacaaaucugagcc

SEQ ID NO: 961492 - RNA, 19 nt, Artificial Sequence
  Description of Artificial Sequence: Synthetic oligonucleotide
  Sense strand starting at position 2730 of SEQ ID NO: 913883
gcccuccuuggauaauaca

SEQ ID NO: 961493 - RNA, 19 nt, Artificial Sequence
  Description of Artificial Sequence: Synthetic oligonucleotide
  Antisense strand to SEQ ID NO: 961492
uguauuauccaaggagggc

SEQ ID NO: 961494 - RNA, 19 nt, Artificial Sequence
  Description of Artificial Sequence: Synthetic oligonucleotide
  Sense strand starting at position 2258 of SEQ ID NO: 913883
ggcccaacucaaugagaau

SEQ ID NO: 961495 - RNA, 19 nt, Artificial Sequence
  Description of Artificial Sequence: Synthetic oligonucleotide
  Antisense strand to SEQ ID NO: 961494
auucucauugaguugggcc

SEQ ID NO: 961496 - RNA, 19 nt, Artificial Sequence
  Description of Artificial Sequence: Synthetic oligonucleotide
  Sense strand starting at position 2583 of SEQ ID NO: 913883
aggagccauuacccuaaau

SEQ ID NO: 961497 - RNA, 19 nt, Artificial Sequence
  Description of Artificial Sequence: Synthetic oligonucleotide
  Antisense strand to SEQ ID NO: 961496
auuuaggguaauggcuccu

SEQ ID NO: 961498 - RNA, 19 nt, Artificial Sequence
  Description of Artificial Sequence: Synthetic oligonucleotide
  Sense strand starting at position 636 of SEQ ID NO: 913883
gucuguaagaaugaaagcu

SEQ ID NO: 961499 - RNA, 19 nt, Artificial Sequence
  Description of Artificial Sequence: Synthetic oligonucleotide
  Antisense strand to SEQ ID NO: 961498
agcuuucauucuuacagac

SEQ ID NO: 961500 - RNA, 19 nt, Artificial Sequence
  Description of Artificial Sequence: Synthetic oligonucleotide
  Sense strand starting at position 746 of SEQ ID NO: 913883
uuacuuauuugccuggcau

SEQ ID NO: 961501 - RNA, 19 nt, Artificial Sequence
  Description of Artificial Sequence: Synthetic oligonucleotide
  Antisense strand to SEQ ID NO: 961500
augccaggcaaauaaguaa

SEQ ID NO: 961502 - RNA, 19 nt, Artificial Sequence
  Description of Artificial Sequence: Synthetic oligonucleotide
  Sense strand starting at position 3070 of SEQ ID NO: 913883
auuuguguuucucuccuca

SEQ ID NO: 961503 - RNA, 19 nt, Artificial Sequence
  Description of Artificial Sequence: Synthetic oligonucleotide
  Antisense strand to SEQ ID NO: 961502
ugaggagagaaacacaaau

SEQ ID NO: 961504 - RNA, 19 nt, Artificial Sequence
  Description of Artificial Sequence: Synthetic oligonucleotide
  Sense strand starting at position 2353 of SEQ ID NO: 913883
gacuaucaugcuuauggua

SEQ ID NO: 961505 - RNA, 19 nt, Artificial Sequence
  Description of Artificial Sequence: Synthetic oligonucleotide
  Antisense strand to SEQ ID NO: 961504
uaccauaagcaugauaguc

SEQ ID NO: 961506 - RNA, 19 nt, Artificial Sequence
  Description of Artificial Sequence: Synthetic oligonucleotide
  Sense strand starting at position 1529 of SEQ ID NO: 913883
agaguuuacuaggcucaga

SEQ ID NO: 961507 - RNA, 19 nt, Artificial Sequence
  Description of Artificial Sequence: Synthetic oligonucleotide
  Antisense strand to SEQ ID NO: 961506
ucugagccuaguaaacucu

SEQ ID NO: 961508 - RNA, 19 nt, Artificial Sequence
  Description of Artificial Sequence: Synthetic oligonucleotide
  Sense strand starting at position 3790 of SEQ ID NO: 913883
ggaagaauguaucccagcu

SEQ ID NO: 961509 - RNA, 19 nt, Artificial Sequence
  Description of Artificial Sequence: Synthetic oligonucleotide
  Antisense strand to SEQ ID NO: 961508
agcugggauacauucuucc

SEQ ID NO: 961510 - RNA, 19 nt, Artificial Sequence
  Description of Artificial Sequence: Synthetic oligonucleotide
  Sense strand starting at position 539 of SEQ ID NO: 913883
augucaugauaggcucaga

SEQ ID NO: 961511 - RNA, 19 nt, Artificial Sequence
  Description of Artificial Sequence: Synthetic oligonucleotide
  Antisense strand to SEQ ID NO: 961510
ucugagccuaucaugacau

SEQ ID NO: 961512 - RNA, 19 nt, Artificial Sequence
  Description of Artificial Sequence: Synthetic oligonucleotide
  Sense strand starting at position 2502 of SEQ ID NO: 913883
guugucuaugcauauaaag

SEQ ID NO: 961513 - RNA, 19 nt, Artificial Sequence
  Description of Artificial Sequence: Synthetic oligonucleotide
  Antisense strand to SEQ ID NO: 961512
cuuuauaugcauagacaac

SEQ ID NO: 961514 - RNA, 19 nt, Artificial Sequence
  Description of Artificial Sequence: Synthetic oligonucleotide
  Sense strand starting at position 816 of SEQ ID NO: 913883
guguucuaugaguacuaca

SEQ ID NO: 961515 - RNA, 19 nt, Artificial Sequence
  Description of Artificial Sequence: Synthetic oligonucleotide
  Antisense strand to SEQ ID NO: 961514
uguaguacucauagaacac

SEQ ID NO: 961516 - RNA, 19 nt, Artificial Sequence
  Description of Artificial Sequence: Synthetic oligonucleotide
  Sense strand starting at position 856 of SEQ ID NO: 913883
uuugguuaucuuugaugag

SEQ ID NO: 961517 - RNA, 19 nt, Artificial Sequence
  Description of Artificial Sequence: Synthetic oligonucleotide
  Antisense strand to SEQ ID NO: 961516
cucaucaaagauaaccaaa

SEQ ID NO: 961518 - RNA, 19 nt, Artificial Sequence
  Description of Artificial Sequence: Synthetic oligonucleotide
  Sense strand starting at position 180 of SEQ ID NO: 913883
agaaucuucugccuuggau

SEQ ID NO: 961519 - RNA, 19 nt, Artificial Sequence
  Description of Artificial Sequence: Synthetic oligonucleotide
  Antisense strand to SEQ ID NO: 961518
auccaaggcagaagauucu

SEQ ID NO: 961520 - RNA, 19 nt, Artificial Sequence
  Description of Artificial Sequence: Synthetic oligonucleotide
  Sense strand starting at position 1413 of SEQ ID NO: 913883
agaaucugguucucuguaa

SEQ ID NO: 961521 - RNA, 19 nt, Artificial Sequence
  Description of Artificial Sequence: Synthetic oligonucleotide
  Antisense strand to SEQ ID NO: 961520
uuacagagaaccagauucu

SEQ ID NO: 961522 - RNA, 19 nt, Artificial Sequence
  Description of Artificial Sequence: Synthetic oligonucleotide
  Sense strand starting at position 803 of SEQ ID NO: 913883
acaggauaccuauguguuc

SEQ ID NO: 961523 - RNA, 19 nt, Artificial Sequence
  Description of Artificial Sequence: Synthetic oligonucleotide
  Antisense strand to SEQ ID NO: 961522
gaacacauagguauccugu

SEQ ID NO: 961524 - RNA, 19 nt, Artificial Sequence
  Description of Artificial Sequence: Synthetic oligonucleotide
  Sense strand starting at position 2649 of SEQ ID NO: 913883
gucugugaugcauacaauu

SEQ ID NO: 961525 - RNA, 19 nt, Artificial Sequence
  Description of Artificial Sequence: Synthetic oligonucleotide
  Antisense strand to SEQ ID NO: 961524
aauuguaugcaucacagac

SEQ ID NO: 961526 - RNA, 19 nt, Artificial Sequence
  Description of Artificial Sequence: Synthetic oligonucleotide
  Sense strand starting at position 808 of SEQ ID NO: 913883
auaccuauguguucuauga

SEQ ID NO: 961527 - RNA, 19 nt, Artificial Sequence
  Description of Artificial Sequence: Synthetic oligonucleotide
  Antisense strand to SEQ ID NO: 961526
ucauagaacacauagguau

SEQ ID NO: 961528 - RNA, 19 nt, Artificial Sequence
  Description of Artificial Sequence: Synthetic oligonucleotide
  Sense strand starting at position 1653 of SEQ ID NO: 913883
aggcauuucuaauacgaaa

SEQ ID NO: 961529 - RNA, 19 nt, Artificial Sequence
  Description of Artificial Sequence: Synthetic oligonucleotide
  Antisense strand to SEQ ID NO: 961528
uuucguauuagaaaugccu

SEQ ID NO: 961530 - RNA, 19 nt, Artificial Sequence
  Description of Artificial Sequence: Synthetic oligonucleotide
  Sense strand starting at position 1414 of SEQ ID NO: 913883
gaaucugguucucuguaau

SEQ ID NO: 961531 - RNA, 19 nt, Artificial Sequence
  Description of Artificial Sequence: Synthetic oligonucleotide
  Antisense strand to SEQ ID NO: 961530
auuacagagaaccagauuc

SEQ ID NO: 961532 - RNA, 19 nt, Artificial Sequence
  Description of Artificial Sequence: Synthetic oligonucleotide
  Sense strand starting at position 806 of SEQ ID NO: 913883
ggauaccuauguguucuau

SEQ ID NO: 961533 - RNA, 19 nt, Artificial Sequence
  Description of Artificial Sequence: Synthetic oligonucleotide
  Antisense strand to SEQ ID NO: 961532
auagaacacauagguaucc

SEQ ID NO: 961534 - RNA, 19 nt, Artificial Sequence
  Description of Artificial Sequence: Synthetic oligonucleotide
  Sense strand starting at position 1417 of SEQ ID NO: 913883
ucugguucucuguaaucuu

SEQ ID NO: 961535 - RNA, 19 nt, Artificial Sequence
  Description of Artificial Sequence: Synthetic oligonucleotide
  Antisense strand to SEQ ID NO: 961534
aagauuacagagaaccaga

SEQ ID NO: 961536 - RNA, 19 nt, Artificial Sequence
  Description of Artificial Sequence: Synthetic oligonucleotide
  Sense strand starting at position 2317 of SEQ ID NO: 913883
aggacagugccuggcaaua

SEQ ID NO: 961537 - RNA, 19 nt, Artificial Sequence
  Description of Artificial Sequence: Synthetic oligonucleotide
  Antisense strand to SEQ ID NO: 961536
uauugccaggcacuguccu

SEQ ID NO: 961538 - RNA, 19 nt, Artificial Sequence
  Description of Artificial Sequence: Synthetic oligonucleotide
  Sense strand starting at position 3232 of SEQ ID NO: 913883
aguauuugcccuugugucu

SEQ ID NO: 961539 - RNA, 19 nt, Artificial Sequence
  Description of Artificial Sequence: Synthetic oligonucleotide
  Antisense strand to SEQ ID NO: 961538
agacacaagggcaaauacu

SEQ ID NO: 961540 - RNA, 19 nt, Artificial Sequence
  Description of Artificial Sequence: Synthetic oligonucleotide
  Sense strand starting at position 3763 of SEQ ID NO: 913883
ggaguucuguuguccaaag

SEQ ID NO: 961541 - RNA, 19 nt, Artificial Sequence
  Description of Artificial Sequence: Synthetic oligonucleotide
  Antisense strand to SEQ ID NO: 961540
cuuuggacaacagaacucc

SEQ ID NO: 961542 - RNA, 19 nt, Artificial Sequence
  Description of Artificial Sequence: Synthetic oligonucleotide
  Sense strand starting at position 36 of SEQ ID NO: 913883
aguguauuaucaccuguaa

SEQ ID NO: 961543 - RNA, 19 nt, Artificial Sequence
  Description of Artificial Sequence: Synthetic oligonucleotide
  Antisense strand to SEQ ID NO: 961542
uuacaggugauaauacacu

SEQ ID NO: 961544 - RNA, 19 nt, Artificial Sequence
  Description of Artificial Sequence: Synthetic oligonucleotide
  Sense strand starting at position 3973 of SEQ ID NO: 913883
guuucuagauguccuuaau

SEQ ID NO: 961545 - RNA, 19 nt, Artificial Sequence
  Description of Artificial Sequence: Synthetic oligonucleotide
  Antisense strand to SEQ ID NO: 961544
auuaaggacaucuagaaac

SEQ ID NO: 961546 - RNA, 19 nt, Artificial Sequence
  Description of Artificial Sequence: Synthetic oligonucleotide
  Sense strand starting at position 2352 of SEQ ID NO: 913883
ugacuaucaugcuuauggu

SEQ ID NO: 961547 - RNA, 19 nt, Artificial Sequence
  Description of Artificial Sequence: Synthetic oligonucleotide
  Antisense strand to SEQ ID NO: 961546
accauaagcaugauaguca

SEQ ID NO: 961548 - RNA, 19 nt, Artificial Sequence
  Description of Artificial Sequence: Synthetic oligonucleotide
  Sense strand starting at position 2740 of SEQ ID NO: 913883
gauaauacauuucguaaag

SEQ ID NO: 961549 - RNA, 19 nt, Artificial Sequence
  Description of Artificial Sequence: Synthetic oligonucleotide
  Antisense strand to SEQ ID NO: 961548
cuuuacgaaauguauuauc

SEQ ID NO: 961550 - RNA, 19 nt, Artificial Sequence
  Description of Artificial Sequence: Synthetic oligonucleotide
  Sense strand starting at position 23 of SEQ ID NO: 913883
uuguucuuccuuuagugua

SEQ ID NO: 961551 - RNA, 19 nt, Artificial Sequence
  Description of Artificial Sequence: Synthetic oligonucleotide
  Antisense strand to SEQ ID NO: 961550
uacacuaaaggaagaacaa

SEQ ID NO: 961552 - RNA, 19 nt, Artificial Sequence
  Description of Artificial Sequence: Synthetic oligonucleotide
  Sense strand starting at position 812 of SEQ ID NO: 913883
cuauguguucuaugaguac

SEQ ID NO: 961553 - RNA, 19 nt, Artificial Sequence
  Description of Artificial Sequence: Synthetic oligonucleotide
  Antisense strand to SEQ ID NO: 961552
guacucauagaacacauag

SEQ ID NO: 961554 - RNA, 19 nt, Artificial Sequence
  Description of Artificial Sequence: Synthetic oligonucleotide
  Sense strand starting at position 3072 of SEQ ID NO: 913883
uuguguuucucuccucaag

SEQ ID NO: 961555 - RNA, 19 nt, Artificial Sequence
  Description of Artificial Sequence: Synthetic oligonucleotide
  Antisense strand to SEQ ID NO: 961554
cuugaggagagaaacacaa

SEQ ID NO: 961556 - RNA, 19 nt, Artificial Sequence
  Description of Artificial Sequence: Synthetic oligonucleotide
  Sense strand starting at position 2772 of SEQ ID NO: 913883
agacauacuucugaaugac

SEQ ID NO: 961557 - RNA, 19 nt, Artificial Sequence
  Description of Artificial Sequence: Synthetic oligonucleotide
  Antisense strand to SEQ ID NO: 961556
gucauucagaaguaugucu

SEQ ID NO: 961558 - RNA, 19 nt, Artificial Sequence
  Description of Artificial Sequence: Synthetic oligonucleotide
  Sense strand starting at position 2808 of SEQ ID NO: 913883
gguccuuuguacuaauuua

SEQ ID NO: 961559 - RNA, 19 nt, Artificial Sequence
  Description of Artificial Sequence: Synthetic oligonucleotide
  Antisense strand to SEQ ID NO: 961558
uaaauuaguacaaaggacc

SEQ ID NO: 961560 - RNA, 19 nt, Artificial Sequence
  Description of Artificial Sequence: Synthetic oligonucleotide
  Sense strand starting at position 761 of SEQ ID NO: 913883
gcauccuagucauugcuaa

SEQ ID NO: 961561 - RNA, 19 nt, Artificial Sequence
  Description of Artificial Sequence: Synthetic oligonucleotide
  Antisense strand to SEQ ID NO: 961560
uuagcaaugacuaggaugc

SEQ ID NO: 961562 - RNA, 19 nt, Artificial Sequence
  Description of Artificial Sequence: Synthetic oligonucleotide
  Sense strand starting at position 1534 of SEQ ID NO: 913883
uuacuaggcucagauuugu

SEQ ID NO: 961563 - RNA, 19 nt, Artificial Sequence
  Description of Artificial Sequence: Synthetic oligonucleotide
  Antisense strand to SEQ ID NO: 961562
acaaaucugagccuaguaa

SEQ ID NO: 961564 - RNA, 19 nt, Artificial Sequence
  Description of Artificial Sequence: Synthetic oligonucleotide
  Sense strand starting at position 3239 of SEQ ID NO: 913883
gcccuugugucuuuauaaa

SEQ ID NO: 961565 - RNA, 19 nt, Artificial Sequence
  Description of Artificial Sequence: Synthetic oligonucleotide
  Antisense strand to SEQ ID NO: 961564
uuuauaaagacacaagggc

SEQ ID NO: 961566 - RNA, 19 nt, Artificial Sequence
  Description of Artificial Sequence: Synthetic oligonucleotide
  Sense strand starting at position 2934 of SEQ ID NO: 913883
gaaacuuuguuggccguca

SEQ ID NO: 961567 - RNA, 19 nt, Artificial Sequence
  Description of Artificial Sequence: Synthetic oligonucleotide
  Antisense strand to SEQ ID NO: 961566
ugacggccaacaaaguuuc

SEQ ID NO: 961568 - RNA, 19 nt, Artificial Sequence
  Description of Artificial Sequence: Synthetic oligonucleotide
  Sense strand starting at position 2855 of SEQ ID NO: 913884
ucuauagaugcugacauua

SEQ ID NO: 961569 - RNA, 19 nt, Artificial Sequence
  Description of Artificial Sequence: Synthetic oligonucleotide
  Antisense strand to SEQ ID NO: 961568
uaaugucagcaucuauaga

SEQ ID NO: 961570 - RNA, 19 nt, Artificial Sequence
  Description of Artificial Sequence: Synthetic oligonucleotide
  Sense strand starting at position 3352 of SEQ ID NO: 913884
ggaacuccuugagcacaga

SEQ ID NO: 961571 - RNA, 19 nt, Artificial Sequence
  Description of Artificial Sequence: Synthetic oligonucleotide
  Antisense strand to SEQ ID NO: 961570
ucugugcucaaggaguucc

SEQ ID NO: 961572 - RNA, 19 nt, Artificial Sequence
  Description of Artificial Sequence: Synthetic oligonucleotide
  Sense strand starting at position 3184 of SEQ ID NO: 913884
gaagguaguccagggaacu

SEQ ID NO: 961573 - RNA, 19 nt, Artificial Sequence
  Description of Artificial Sequence: Synthetic oligonucleotide
  Antisense strand to SEQ ID NO: 961572
aguucccuggacuaccuuc

SEQ ID NO: 961574 - RNA, 19 nt, Artificial Sequence
  Description of Artificial Sequence: Synthetic oligonucleotide
  Sense strand starting at position 3317 of SEQ ID NO: 913884
aucugcuuaggguauagau

SEQ ID NO: 961575 - RNA, 19 nt, Artificial Sequence
  Description of Artificial Sequence: Synthetic oligonucleotide
  Antisense strand to SEQ ID NO: 961574
aucuauacccuaagcagau

SEQ ID NO: 961576 - RNA, 19 nt, Artificial Sequence
  Description of Artificial Sequence: Synthetic oligonucleotide
  Sense strand starting at position 2774 of SEQ ID NO: 913884
auuucuauguugucaugca

SEQ ID NO: 961577 - RNA, 19 nt, Artificial Sequence
  Description of Artificial Sequence: Synthetic oligonucleotide
  Antisense strand to SEQ ID NO: 961576
ugcaugacaacauagaaau

SEQ ID NO: 961578 - RNA, 19 nt, Artificial Sequence
  Description of Artificial Sequence: Synthetic oligonucleotide
  Sense strand starting at position 3910 of SEQ ID NO: 913884
uugugcauccuauagaaau

SEQ ID NO: 961579 - RNA, 19 nt, Artificial Sequence
  Description of Artificial Sequence: Synthetic oligonucleotide
  Antisense strand to SEQ ID NO: 961578
auuucuauaggaugcacaa

SEQ ID NO: 961580 - RNA, 19 nt, Artificial Sequence
  Description of Artificial Sequence: Synthetic oligonucleotide
  Sense strand starting at position 3446 of SEQ ID NO: 913884
cagauuguccagcaguaag

SEQ ID NO: 961581 - RNA, 19 nt, Artificial Sequence
  Description of Artificial Sequence: Synthetic oligonucleotide
  Antisense strand to SEQ ID NO: 961580
cuuacugcuggacaaucug

SEQ ID NO: 961582 - RNA, 19 nt, Artificial Sequence
  Description of Artificial Sequence: Synthetic oligonucleotide
  Sense strand starting at position 3234 of SEQ ID NO: 913884
gauguuugugcagauaaau

SEQ ID NO: 961583 - RNA, 19 nt, Artificial Sequence
  Description of Artificial Sequence: Synthetic oligonucleotide
  Antisense strand to SEQ ID NO: 961582
auuuaucugcacaaacauc

SEQ ID NO: 961584 - RNA, 19 nt, Artificial Sequence
  Description of Artificial Sequence: Synthetic oligonucleotide
  Sense strand starting at position 1172 of SEQ ID NO: 913884
gcgggagaucucugaggac

SEQ ID NO: 961585 - RNA, 19 nt, Artificial Sequence
  Description of Artificial Sequence: Synthetic oligonucleotide
  Antisense strand to SEQ ID NO: 961584
guccucagagaucucccgc

SEQ ID NO: 961586 - RNA, 19 nt, Artificial Sequence
  Description of Artificial Sequence: Synthetic oligonucleotide
  Sense strand starting at position 2976 of SEQ ID NO: 913884
aacgaaacccuguggugaa

SEQ ID NO: 961587 - RNA, 19 nt, Artificial Sequence
  Description of Artificial Sequence: Synthetic oligonucleotide
  Antisense strand to SEQ ID NO: 961586
uucaccacaggguuucguu

SEQ ID NO: 961588 - RNA, 19 nt, Artificial Sequence
  Description of Artificial Sequence: Synthetic oligonucleotide
  Sense strand starting at position 3074 of SEQ ID NO: 913884
ggaggagccuggcuaaauc

SEQ ID NO: 961589 - RNA, 19 nt, Artificial Sequence
  Description of Artificial Sequence: Synthetic oligonucleotide
  Antisense strand to SEQ ID NO: 961588
gauuuagccaggcuccucc

SEQ ID NO: 961590 - RNA, 19 nt, Artificial Sequence
  Description of Artificial Sequence: Synthetic oligonucleotide
  Sense strand starting at position 801 of SEQ ID NO: 913884
ugauacucaggguguauca

SEQ ID NO: 961591 - RNA, 19 nt, Artificial Sequence
  Description of Artificial Sequence: Synthetic oligonucleotide
  Antisense strand to SEQ ID NO: 961590
ugauacacccugaguauca

SEQ ID NO: 961592 - RNA, 19 nt, Artificial Sequence
  Description of Artificial Sequence: Synthetic oligonucleotide
  Sense strand starting at position 2844 of SEQ ID NO: 913884
auagucuauugucuauaga

SEQ ID NO: 961593 - RNA, 19 nt, Artificial Sequence
  Description of Artificial Sequence: Synthetic oligonucleotide
  Antisense strand to SEQ ID NO: 961592
ucuauagacaauagacuau

SEQ ID NO: 961594 - RNA, 19 nt, Artificial Sequence
  Description of Artificial Sequence: Synthetic oligonucleotide
  Sense strand starting at position 738 of SEQ ID NO: 913884
augcuaagaaugugaugca

SEQ ID NO: 961595 - RNA, 19 nt, Artificial Sequence
  Description of Artificial Sequence: Synthetic oligonucleotide
  Antisense strand to SEQ ID NO: 961594
ugcaucacauucuuagcau

SEQ ID NO: 961596 - RNA, 19 nt, Artificial Sequence
  Description of Artificial Sequence: Synthetic oligonucleotide
  Sense strand starting at position 663 of SEQ ID NO: 913884
ucagcuuuggccuagguaa

SEQ ID NO: 961597 - RNA, 19 nt, Artificial Sequence
  Description of Artificial Sequence: Synthetic oligonucleotide
  Antisense strand to SEQ ID NO: 961596
uuaccuaggccaaagcuga

SEQ ID NO: 961598 - RNA, 19 nt, Artificial Sequence
  Description of Artificial Sequence: Synthetic oligonucleotide
  Sense strand starting at position 799 of SEQ ID NO: 913884
guugauacucaggguguau

SEQ ID NO: 961599 - RNA, 19 nt, Artificial Sequence
  Description of Artificial Sequence: Synthetic oligonucleotide
  Antisense strand to SEQ ID NO: 961598
auacacccugaguaucaac

SEQ ID NO: 961600 - RNA, 19 nt, Artificial Sequence
  Description of Artificial Sequence: Synthetic oligonucleotide
  Sense strand starting at position 3244 of SEQ ID NO: 913884
cagauaaaucugcagcguu

SEQ ID NO: 961601 - RNA, 19 nt, Artificial Sequence
  Description of Artificial Sequence: Synthetic oligonucleotide
  Antisense strand to SEQ ID NO: 961600
aacgcugcagauuuaucug

SEQ ID NO: 961602 - RNA, 19 nt, Artificial Sequence
  Description of Artificial Sequence: Synthetic oligonucleotide
  Sense strand starting at position 820 of SEQ ID NO: 913884
ucccguauuugagaaauua

SEQ ID NO: 961603 - RNA, 19 nt, Artificial Sequence
  Description of Artificial Sequence: Synthetic oligonucleotide
  Antisense strand to SEQ ID NO: 961602
uaauuucucaaauacggga

SEQ ID NO: 961604 - RNA, 19 nt, Artificial Sequence
  Description of Artificial Sequence: Synthetic oligonucleotide
  Sense strand starting at position 818 of SEQ ID NO: 913884
caucccguauuugagaaau

SEQ ID NO: 961605 - RNA, 19 nt, Artificial Sequence
  Description of Artificial Sequence: Synthetic oligonucleotide
  Antisense strand to SEQ ID NO: 961604
auuucucaaauacgggaug

SEQ ID NO: 961606 - RNA, 19 nt, Artificial Sequence
  Description of Artificial Sequence: Synthetic oligonucleotide
  Sense strand starting at position 845 of SEQ ID NO: 913884
gccagccauucuucuaaga

SEQ ID NO: 961607 - RNA, 19 nt, Artificial Sequence
  Description of Artificial Sequence: Synthetic oligonucleotide
  Antisense strand to SEQ ID NO: 961606
ucuuagaagaauggcuggc

SEQ ID NO: 961608 - RNA, 19 nt, Artificial Sequence
  Description of Artificial Sequence: Synthetic oligonucleotide
  Sense strand starting at position 3312 of SEQ ID NO: 913884
uugcuaucugcuuagggua

SEQ ID NO: 961609 - RNA, 19 nt, Artificial Sequence
  Description of Artificial Sequence: Synthetic oligonucleotide
  Antisense strand to SEQ ID NO: 961608
uacccuaagcagauagcaa

SEQ ID NO: 961610 - RNA, 19 nt, Artificial Sequence
  Description of Artificial Sequence: Synthetic oligonucleotide
  Sense strand starting at position 3432 of SEQ ID NO: 913884
gggugaugcccaugcagau

SEQ ID NO: 961611 - RNA, 19 nt, Artificial Sequence
  Description of Artificial Sequence: Synthetic oligonucleotide
  Antisense strand to SEQ ID NO: 961610
aucugcaugggcaucaccc

SEQ ID NO: 961612 - RNA, 19 nt, Artificial Sequence
  Description of Artificial Sequence: Synthetic oligonucleotide
  Sense strand starting at position 3810 of SEQ ID NO: 913884
cucuccuugccagguuaga

SEQ ID NO: 961613 - RNA, 19 nt, Artificial Sequence
  Description of Artificial Sequence: Synthetic oligonucleotide
  Antisense strand to SEQ ID NO: 961612
ucuaaccuggcaaggagag

SEQ ID NO: 961614 - RNA, 19 nt, Artificial Sequence
  Description of Artificial Sequence: Synthetic oligonucleotide
  Sense strand starting at position 180 of SEQ ID NO: 913884
ucuuaaaucgacugcuucu

SEQ ID NO: 961615 - RNA, 19 nt, Artificial Sequence
  Description of Artificial Sequence: Synthetic oligonucleotide
  Antisense strand to SEQ ID NO: 961614
agaagcagucgauuuaaga

SEQ ID NO: 961616 - RNA, 19 nt, Artificial Sequence
  Description of Artificial Sequence: Synthetic oligonucleotide
  Sense strand starting at position 808 of SEQ ID NO: 913884
caggguguaucaucccgua

SEQ ID NO: 961617 - RNA, 19 nt, Artificial Sequence
  Description of Artificial Sequence: Synthetic oligonucleotide
  Antisense strand to SEQ ID NO: 961616
uacgggaugauacacccug

SEQ ID NO: 961618 - RNA, 19 nt, Artificial Sequence
  Description of Artificial Sequence: Synthetic oligonucleotide
  Sense strand starting at position 2886 of SEQ ID NO: 913884
gaguaagaaugcuaagaag

SEQ ID NO: 961619 - RNA, 19 nt, Artificial Sequence
  Description of Artificial Sequence: Synthetic oligonucleotide
  Antisense strand to SEQ ID NO: 961618
cuucuuagcauucuuacuc

SEQ ID NO: 961620 - RNA, 19 nt, Artificial Sequence
  Description of Artificial Sequence: Synthetic oligonucleotide
  Sense strand starting at position 191 of SEQ ID NO: 913884
cugcuucuguaagcuuuau

SEQ ID NO: 961621 - RNA, 19 nt, Artificial Sequence
  Description of Artificial Sequence: Synthetic oligonucleotide
  Antisense strand to SEQ ID NO: 961620
auaaagcuuacagaagcag

SEQ ID NO: 961622 - RNA, 19 nt, Artificial Sequence
  Description of Artificial Sequence: Synthetic oligonucleotide
  Sense strand starting at position 3957 of SEQ ID NO: 913884
cgagguuucucaucggcuu

SEQ ID NO: 961623 - RNA, 19 nt, Artificial Sequence
  Description of Artificial Sequence: Synthetic oligonucleotide
  Antisense strand to SEQ ID NO: 961622
aagccgaugagaaaccucg

SEQ ID NO: 961624 - RNA, 19 nt, Artificial Sequence
  Description of Artificial Sequence: Synthetic oligonucleotide
  Sense strand starting at position 2927 of SEQ ID NO: 913884
agcuaugggucucaaugaa

SEQ ID NO: 961625 - RNA, 19 nt, Artificial Sequence
  Description of Artificial Sequence: Synthetic oligonucleotide
  Antisense strand to SEQ ID NO: 961624
uucauugagacccauagcu

SEQ ID NO: 961626 - RNA, 19 nt, Artificial Sequence
  Description of Artificial Sequence: Synthetic oligonucleotide
  Sense strand starting at position 2228 of SEQ ID NO: 913884
gaggcuguuuaugagaagu

SEQ ID NO: 961627 - RNA, 19 nt, Artificial Sequence
  Description of Artificial Sequence: Synthetic oligonucleotide
  Antisense strand to SEQ ID NO: 961626
acuucucauaaacagccuc

SEQ ID NO: 961628 - RNA, 19 nt, Artificial Sequence
  Description of Artificial Sequence: Synthetic oligonucleotide
  Sense strand starting at position 2227 of SEQ ID NO: 913884
ggaggcuguuuaugagaag

SEQ ID NO: 961629 - RNA, 19 nt, Artificial Sequence
  Description of Artificial Sequence: Synthetic oligonucleotide
  Antisense strand to SEQ ID NO: 961628
cuucucauaaacagccucc

SEQ ID NO: 961630 - RNA, 19 nt, Artificial Sequence
  Description of Artificial Sequence: Synthetic oligonucleotide
  Sense strand starting at position 739 of SEQ ID NO: 913884
ugcuaagaaugugaugcaa

SEQ ID NO: 961631 - RNA, 19 nt, Artificial Sequence
  Description of Artificial Sequence: Synthetic oligonucleotide
  Antisense strand to SEQ ID NO: 961630
uugcaucacauucuuagca

SEQ ID NO: 961632 - RNA, 19 nt, Artificial Sequence
  Description of Artificial Sequence: Synthetic oligonucleotide
  Sense strand starting at position 741 of SEQ ID NO: 913884
cuaagaaugugaugcaacu

SEQ ID NO: 961633 - RNA, 19 nt, Artificial Sequence
  Description of Artificial Sequence: Synthetic oligonucleotide
  Antisense strand to SEQ ID NO: 961632
aguugcaucacauucuuag

SEQ ID NO: 961634 - RNA, 19 nt, Artificial Sequence
  Description of Artificial Sequence: Synthetic oligonucleotide
  Sense strand starting at position 811 of SEQ ID NO: 913884
gguguaucaucccguauuu

SEQ ID NO: 961635 - RNA, 19 nt, Artificial Sequence
  Description of Artificial Sequence: Synthetic oligonucleotide
  Antisense strand to SEQ ID NO: 961634
aaauacgggaugauacacc

SEQ ID NO: 961636 - RNA, 19 nt, Artificial Sequence
  Description of Artificial Sequence: Synthetic oligonucleotide
  Sense strand starting at position 2230 of SEQ ID NO: 913884
ggcuguuuaugagaaguuu

SEQ ID NO: 961637 - RNA, 19 nt, Artificial Sequence
  Description of Artificial Sequence: Synthetic oligonucleotide
  Antisense strand to SEQ ID NO: 961636
aaacuucucauaaacagcc

SEQ ID NO: 961638 - RNA, 19 nt, Artificial Sequence
  Description of Artificial Sequence: Synthetic oligonucleotide
  Sense strand starting at position 798 of SEQ ID NO: 913884
aguugauacucagggugua

SEQ ID NO: 961639 - RNA, 19 nt, Artificial Sequence
  Description of Artificial Sequence: Synthetic oligonucleotide
  Antisense strand to SEQ ID NO: 961638
uacacccugaguaucaacu

SEQ ID NO: 961640 - RNA, 19 nt, Artificial Sequence
  Description of Artificial Sequence: Synthetic oligonucleotide
  Sense strand starting at position 3935 of SEQ ID NO: 913884
gugagugcaugucagacua

SEQ ID NO: 961641 - RNA, 19 nt, Artificial Sequence
  Description of Artificial Sequence: Synthetic oligonucleotide
  Antisense strand to SEQ ID NO: 961640
uagucugacaugcacucac

SEQ ID NO: 961642 - RNA, 19 nt, Artificial Sequence
  Description of Artificial Sequence: Synthetic oligonucleotide
  Sense strand starting at position 2854 of SEQ ID NO: 913884
gucuauagaugcugacauu

SEQ ID NO: 961643 - RNA, 19 nt, Artificial Sequence
  Description of Artificial Sequence: Synthetic oligonucleotide
  Antisense strand to SEQ ID NO: 961642
aaugucagcaucuauagac

SEQ ID NO: 961644 - RNA, 19 nt, Artificial Sequence
  Description of Artificial Sequence: Synthetic oligonucleotide
  Sense strand starting at position 2775 of SEQ ID NO: 913884
uuucuauguugucaugcaa

SEQ ID NO: 961645 - RNA, 19 nt, Artificial Sequence
  Description of Artificial Sequence: Synthetic oligonucleotide
  Antisense strand to SEQ ID NO: 961644
uugcaugacaacauagaaa

SEQ ID NO: 961646 - RNA, 19 nt, Artificial Sequence
  Description of Artificial Sequence: Synthetic oligonucleotide
  Sense strand starting at position 3314 of SEQ ID NO: 913884
gcuaucugcuuaggguaua

SEQ ID NO: 961647 - RNA, 19 nt, Artificial Sequence
  Description of Artificial Sequence: Synthetic oligonucleotide
  Antisense strand to SEQ ID NO: 961646
uauacccuaagcagauagc

SEQ ID NO: 961648 - RNA, 19 nt, Artificial Sequence
  Description of Artificial Sequence: Synthetic oligonucleotide
  Sense strand starting at position 846 of SEQ ID NO: 913885
aaauaaaggcgaugauaau

SEQ ID NO: 961649 - RNA, 19 nt, Artificial Sequence
  Description of Artificial Sequence: Synthetic oligonucleotide
  Antisense strand to SEQ ID NO: 961648
auuaucaucgccuuuauuu

SEQ ID NO: 961650 - RNA, 19 nt, Artificial Sequence
  Description of Artificial Sequence: Synthetic oligonucleotide
  Sense strand starting at position 3010 of SEQ ID NO: 913885
uguaaaugacaucacuagu

SEQ ID NO: 961651 - RNA, 19 nt, Artificial Sequence
  Description of Artificial Sequence: Synthetic oligonucleotide
  Antisense strand to SEQ ID NO: 961650
acuagugaugucauuuaca

SEQ ID NO: 961652 - RNA, 19 nt, Artificial Sequence
  Description of Artificial Sequence: Synthetic oligonucleotide
  Sense strand starting at position 1204 of SEQ ID NO: 913885
ccucgagggagccauuaaa

SEQ ID NO: 961653 - RNA, 19 nt, Artificial Sequence
  Description of Artificial Sequence: Synthetic oligonucleotide
  Antisense strand to SEQ ID NO: 961652
uuuaauggcucccucgagg

SEQ ID NO: 961654 - RNA, 19 nt, Artificial Sequence
  Description of Artificial Sequence: Synthetic oligonucleotide
  Sense strand starting at position 3798 of SEQ ID NO: 913885
ccauuauaugaauguacag

SEQ ID NO: 961655 - RNA, 19 nt, Artificial Sequence
  Description of Artificial Sequence: Synthetic oligonucleotide
  Antisense strand to SEQ ID NO: 961654
cuguacauucauauaaugg

SEQ ID NO: 961656 - RNA, 19 nt, Artificial Sequence
  Description of Artificial Sequence: Synthetic oligonucleotide
  Sense strand starting at position 2704 of SEQ ID NO: 913885
acguauuuccagugacuuu

SEQ ID NO: 961657 - RNA, 19 nt, Artificial Sequence
  Description of Artificial Sequence: Synthetic oligonucleotide
  Antisense strand to SEQ ID NO: 961656
aaagucacuggaaauacgu

SEQ ID NO: 961658 - RNA, 19 nt, Artificial Sequence
  Description of Artificial Sequence: Synthetic oligonucleotide
  Sense strand starting at position 2251 of SEQ ID NO: 913885
agcuguacuagugaaauga

SEQ ID NO: 961659 - RNA, 19 nt, Artificial Sequence
  Description of Artificial Sequence: Synthetic oligonucleotide
  Antisense strand to SEQ ID NO: 961658
ucauuucacuaguacagcu

SEQ ID NO: 961660 - RNA, 19 nt, Artificial Sequence
  Description of Artificial Sequence: Synthetic oligonucleotide
  Sense strand starting at position 878 of SEQ ID NO: 913885
uaaccauugggauguuaug

SEQ ID NO: 961661 - RNA, 19 nt, Artificial Sequence
  Description of Artificial Sequence: Synthetic oligonucleotide
  Antisense strand to SEQ ID NO: 961660
cauaacaucccaaugguua

SEQ ID NO: 961662 - RNA, 19 nt, Artificial Sequence
  Description of Artificial Sequence: Synthetic oligonucleotide
  Sense strand starting at position 1102 of SEQ ID NO: 913885
gucacaugccuggaugaca

SEQ ID NO: 961663 - RNA, 19 nt, Artificial Sequence
  Description of Artificial Sequence: Synthetic oligonucleotide
  Antisense strand to SEQ ID NO: 961662
ugucauccaggcaugugac

SEQ ID NO: 961664 - RNA, 19 nt, Artificial Sequence
  Description of Artificial Sequence: Synthetic oligonucleotide
  Sense strand starting at position 2563 of SEQ ID NO: 913885
guugguaggacuuggauaa

SEQ ID NO: 961665 - RNA, 19 nt, Artificial Sequence
  Description of Artificial Sequence: Synthetic oligonucleotide
  Antisense strand to SEQ ID NO: 961664
uuauccaaguccuaccaac

SEQ ID NO: 961666 - RNA, 19 nt, Artificial Sequence
  Description of Artificial Sequence: Synthetic oligonucleotide
  Sense strand starting at position 889 of SEQ ID NO: 913885
auguuauguggguauggau

SEQ ID NO: 961667 - RNA, 19 nt, Artificial Sequence
  Description of Artificial Sequence: Synthetic oligonucleotide
  Antisense strand to SEQ ID NO: 961666
auccauacccacauaacau

SEQ ID NO: 961668 - RNA, 19 nt, Artificial Sequence
  Description of Artificial Sequence: Synthetic oligonucleotide
  Sense strand starting at position 460 of SEQ ID NO: 913885
auaugacuguacucugauu

SEQ ID NO: 961669 - RNA, 19 nt, Artificial Sequence
  Description of Artificial Sequence: Synthetic oligonucleotide
  Antisense strand to SEQ ID NO: 961668
aaucagaguacagucauau

SEQ ID NO: 961670 - RNA, 19 nt, Artificial Sequence
  Description of Artificial Sequence: Synthetic oligonucleotide
  Sense strand starting at position 1049 of SEQ ID NO: 913885
gaguacuccguuuacaaau

SEQ ID NO: 961671 - RNA, 19 nt, Artificial Sequence
  Description of Artificial Sequence: Synthetic oligonucleotide
  Antisense strand to SEQ ID NO: 961670
auuuguaaacggaguacuc

SEQ ID NO: 961672 - RNA, 19 nt, Artificial Sequence
  Description of Artificial Sequence: Synthetic oligonucleotide
  Sense strand starting at position 1675 of SEQ ID NO: 913885
gggacuucgcaggaucagu

SEQ ID NO: 961673 - RNA, 19 nt, Artificial Sequence
  Description of Artificial Sequence: Synthetic oligonucleotide
  Antisense strand to SEQ ID NO: 961672
acugauccugcgaaguccc

SEQ ID NO: 961674 - RNA, 19 nt, Artificial Sequence
  Description of Artificial Sequence: Synthetic oligonucleotide
  Sense strand starting at position 2387 of SEQ ID NO: 913885
cuccaaauggguugaucuu

SEQ ID NO: 961675 - RNA, 19 nt, Artificial Sequence
  Description of Artificial Sequence: Synthetic oligonucleotide
  Antisense strand to SEQ ID NO: 961674
aagaucaacccauuuggag

SEQ ID NO: 961676 - RNA, 19 nt, Artificial Sequence
  Description of Artificial Sequence: Synthetic oligonucleotide
  Sense strand starting at position 3491 of SEQ ID NO: 913885
uaaaguguacaguaguuau

SEQ ID NO: 961677 - RNA, 19 nt, Artificial Sequence
  Description of Artificial Sequence: Synthetic oligonucleotide
  Antisense strand to SEQ ID NO: 961676
auaacuacuguacacuuua

SEQ ID NO: 961678 - RNA, 19 nt, Artificial Sequence
  Description of Artificial Sequence: Synthetic oligonucleotide
  Sense strand starting at position 1556 of SEQ ID NO: 913885
gggaacauguccuugguca

SEQ ID NO: 961679 - RNA, 19 nt, Artificial Sequence
  Description of Artificial Sequence: Synthetic oligonucleotide
  Antisense strand to SEQ ID NO: 961678
ugaccaaggacauguuccc

SEQ ID NO: 961680 - RNA, 19 nt, Artificial Sequence
  Description of Artificial Sequence: Synthetic oligonucleotide
  Sense strand starting at position 1463 of SEQ ID NO: 913885
ccaucauccggguaagguu

SEQ ID NO: 961681 - RNA, 19 nt, Artificial Sequence
  Description of Artificial Sequence: Synthetic oligonucleotide
  Antisense strand to SEQ ID NO: 961680
aaccuuacccggaugaugg

SEQ ID NO: 961682 - RNA, 19 nt, Artificial Sequence
  Description of Artificial Sequence: Synthetic oligonucleotide
  Sense strand starting at position 3949 of SEQ ID NO: 913885
ugguuauaugccuaggagu

SEQ ID NO: 961683 - RNA, 19 nt, Artificial Sequence
  Description of Artificial Sequence: Synthetic oligonucleotide
  Antisense strand to SEQ ID NO: 961682
acuccuaggcauauaacca

SEQ ID NO: 961684 - RNA, 19 nt, Artificial Sequence
  Description of Artificial Sequence: Synthetic oligonucleotide
  Sense strand starting at position 3016 of SEQ ID NO: 913885
ugacaucacuaguugaugu

SEQ ID NO: 961685 - RNA, 19 nt, Artificial Sequence
  Description of Artificial Sequence: Synthetic oligonucleotide
  Antisense strand to SEQ ID NO: 961684
acaucaacuagugauguca

SEQ ID NO: 961686 - RNA, 19 nt, Artificial Sequence
  Description of Artificial Sequence: Synthetic oligonucleotide
  Sense strand starting at position 2547 of SEQ ID NO: 913885
agcuuaaagccucagaguu

SEQ ID NO: 961687 - RNA, 19 nt, Artificial Sequence
  Description of Artificial Sequence: Synthetic oligonucleotide
  Antisense strand to SEQ ID NO: 961686
aacucugaggcuuuaagcu

SEQ ID NO: 961688 - RNA, 19 nt, Artificial Sequence
  Description of Artificial Sequence: Synthetic oligonucleotide
  Sense strand starting at position 888 of SEQ ID NO: 913885
gauguuauguggguaugga

SEQ ID NO: 961689 - RNA, 19 nt, Artificial Sequence
  Description of Artificial Sequence: Synthetic oligonucleotide
  Antisense strand to SEQ ID NO: 961688
uccauacccacauaacauc

SEQ ID NO: 961690 - RNA, 19 nt, Artificial Sequence
  Description of Artificial Sequence: Synthetic oligonucleotide
  Sense strand starting at position 455 of SEQ ID NO: 913885
gugacauaugacuguacuc

SEQ ID NO: 961691 - RNA, 19 nt, Artificial Sequence
  Description of Artificial Sequence: Synthetic oligonucleotide
  Antisense strand to SEQ ID NO: 961690
gaguacagucauaugucac

SEQ ID NO: 961692 - RNA, 19 nt, Artificial Sequence
  Description of Artificial Sequence: Synthetic oligonucleotide
  Sense strand starting at position 2622 of SEQ ID NO: 913885
acagaagaauuggagacau

SEQ ID NO: 961693 - RNA, 19 nt, Artificial Sequence
  Description of Artificial Sequence: Synthetic oligonucleotide
  Antisense strand to SEQ ID NO: 961692
augucuccaauucuucugu

SEQ ID NO: 961694 - RNA, 19 nt, Artificial Sequence
  Description of Artificial Sequence: Synthetic oligonucleotide
  Sense strand starting at position 2635 of SEQ ID NO: 913885
agacauuauuauguuugca

SEQ ID NO: 961695 - RNA, 19 nt, Artificial Sequence
  Description of Artificial Sequence: Synthetic oligonucleotide
  Antisense strand to SEQ ID NO: 961694
ugcaaacauaauaaugucu

SEQ ID NO: 961696 - RNA, 19 nt, Artificial Sequence
  Description of Artificial Sequence: Synthetic oligonucleotide
  Sense strand starting at position 1558 of SEQ ID NO: 913885
gaacauguccuuggucaug

SEQ ID NO: 961697 - RNA, 19 nt, Artificial Sequence
  Description of Artificial Sequence: Synthetic oligonucleotide
  Antisense strand to SEQ ID NO: 961696
caugaccaaggacauguuc

SEQ ID NO: 961698 - RNA, 19 nt, Artificial Sequence
  Description of Artificial Sequence: Synthetic oligonucleotide
  Sense strand starting at position 1557 of SEQ ID NO: 913885
ggaacauguccuuggucau

SEQ ID NO: 961699 - RNA, 19 nt, Artificial Sequence
  Description of Artificial Sequence: Synthetic oligonucleotide
  Antisense strand to SEQ ID NO: 961698
augaccaaggacauguucc

SEQ ID NO: 961700 - RNA, 19 nt, Artificial Sequence
  Description of Artificial Sequence: Synthetic oligonucleotide
  Sense strand starting at position 591 of SEQ ID NO: 913885
auaacuguguucuugacca

SEQ ID NO: 961701 - RNA, 19 nt, Artificial Sequence
  Description of Artificial Sequence: Synthetic oligonucleotide
  Antisense strand to SEQ ID NO: 961700
uggucaagaacacaguuau

SEQ ID NO: 961702 - RNA, 19 nt, Artificial Sequence
  Description of Artificial Sequence: Synthetic oligonucleotide
  Sense strand starting at position 1131 of SEQ ID NO: 913885
gcagcagaugcucaaucua

SEQ ID NO: 961703 - RNA, 19 nt, Artificial Sequence
  Description of Artificial Sequence: Synthetic oligonucleotide
  Antisense strand to SEQ ID NO: 961702
uagauugagcaucugcugc

SEQ ID NO: 961704 - RNA, 19 nt, Artificial Sequence
  Description of Artificial Sequence: Synthetic oligonucleotide
  Sense strand starting at position 966 of SEQ ID NO: 913885
guuuaaucugcuuaauagu

SEQ ID NO: 961705 - RNA, 19 nt, Artificial Sequence
  Description of Artificial Sequence: Synthetic oligonucleotide
  Antisense strand to SEQ ID NO: 961704
acuauuaagcagauuaaac

SEQ ID NO: 961706 - RNA, 19 nt, Artificial Sequence
  Description of Artificial Sequence: Synthetic oligonucleotide
  Sense strand starting at position 1231 of SEQ ID NO: 913885
uuccucauuugaggaaaca

SEQ ID NO: 961707 - RNA, 19 nt, Artificial Sequence
  Description of Artificial Sequence: Synthetic oligonucleotide
  Antisense strand to SEQ ID NO: 961706
uguuuccucaaaugaggaa

SEQ ID NO: 961708 - RNA, 19 nt, Artificial Sequence
  Description of Artificial Sequence: Synthetic oligonucleotide
  Sense strand starting at position 2428 of SEQ ID NO: 913885
acaauucggcccugaauug

SEQ ID NO: 961709 - RNA, 19 nt, Artificial Sequence
  Description of Artificial Sequence: Synthetic oligonucleotide
  Antisense strand to SEQ ID NO: 961708
caauucagggccgaauugu

SEQ ID NO: 961710 - RNA, 19 nt, Artificial Sequence
  Description of Artificial Sequence: Synthetic oligonucleotide
  Sense strand starting at position 2122 of SEQ ID NO: 913885
ccaggcaggucucugacau

SEQ ID NO: 961711 - RNA, 19 nt, Artificial Sequence
  Description of Artificial Sequence: Synthetic oligonucleotide
  Antisense strand to SEQ ID NO: 961710
augucagagaccugccugg

SEQ ID NO: 961712 - RNA, 19 nt, Artificial Sequence
  Description of Artificial Sequence: Synthetic oligonucleotide
  Sense strand starting at position 884 of SEQ ID NO: 913885
uugggauguuaugugggua

SEQ ID NO: 961713 - RNA, 19 nt, Artificial Sequence
  Description of Artificial Sequence: Synthetic oligonucleotide
  Antisense strand to SEQ ID NO: 961712
uacccacauaacaucccaa

SEQ ID NO: 961714 - RNA, 19 nt, Artificial Sequence
  Description of Artificial Sequence: Synthetic oligonucleotide
  Sense strand starting at position 1229 of SEQ ID NO: 913885
gcuuccucauuugaggaaa

SEQ ID NO: 961715 - RNA, 19 nt, Artificial Sequence
  Description of Artificial Sequence: Synthetic oligonucleotide
  Antisense strand to SEQ ID NO: 961714
uuuccucaaaugaggaagc

SEQ ID NO: 961716 - RNA, 19 nt, Artificial Sequence
  Description of Artificial Sequence: Synthetic oligonucleotide
  Sense strand starting at position 2123 of SEQ ID NO: 913885
caggcaggucucugacauu

SEQ ID NO: 961717 - RNA, 19 nt, Artificial Sequence
  Description of Artificial Sequence: Synthetic oligonucleotide
  Antisense strand to SEQ ID NO: 961716
aaugucagagaccugccug

SEQ ID NO: 961718 - RNA, 19 nt, Artificial Sequence
  Description of Artificial Sequence: Synthetic oligonucleotide
  Sense strand starting at position 468 of SEQ ID NO: 913885
guacucugauucccucauu

SEQ ID NO: 961719 - RNA, 19 nt, Artificial Sequence
  Description of Artificial Sequence: Synthetic oligonucleotide
  Antisense strand to SEQ ID NO: 961718
aaugagggaaucagaguac

SEQ ID NO: 961720 - RNA, 19 nt, Artificial Sequence
  Description of Artificial Sequence: Synthetic oligonucleotide
  Sense strand starting at position 885 of SEQ ID NO: 913885
ugggauguuauguggguau

SEQ ID NO: 961721 - RNA, 19 nt, Artificial Sequence
  Description of Artificial Sequence: Synthetic oligonucleotide
  Antisense strand to SEQ ID NO: 961720
auacccacauaacauccca

SEQ ID NO: 961722 - RNA, 19 nt, Artificial Sequence
  Description of Artificial Sequence: Synthetic oligonucleotide
  Sense strand starting at position 965 of SEQ ID NO: 913885
uguuuaaucugcuuaauag

SEQ ID NO: 961723 - RNA, 19 nt, Artificial Sequence
  Description of Artificial Sequence: Synthetic oligonucleotide
  Antisense strand to SEQ ID NO: 961722
cuauuaagcagauuaaaca

SEQ ID NO: 961724 - RNA, 19 nt, Artificial Sequence
  Description of Artificial Sequence: Synthetic oligonucleotide
  Sense strand starting at position 1043 of SEQ ID NO: 913885
aauauagaguacuccguuu

SEQ ID NO: 961725 - RNA, 19 nt, Artificial Sequence
  Description of Artificial Sequence: Synthetic oligonucleotide
  Antisense strand to SEQ ID NO: 961724
aaacggaguacucuauauu

SEQ ID NO: 961726 - RNA, 19 nt, Artificial Sequence
  Description of Artificial Sequence: Synthetic oligonucleotide
  Sense strand starting at position 3951 of SEQ ID NO: 913885
guuauaugccuaggaguag

SEQ ID NO: 961727 - RNA, 19 nt, Artificial Sequence
  Description of Artificial Sequence: Synthetic oligonucleotide
  Antisense strand to SEQ ID NO: 961726
cuacuccuaggcauauaac

SEQ ID NO: 961728 - RNA, 19 nt, Artificial Sequence
  Description of Artificial Sequence: Synthetic oligonucleotide
  Sense strand starting at position 269 of SEQ ID NO: 913886
ggaaacauccuuuaugcca

SEQ ID NO: 961729 - RNA, 19 nt, Artificial Sequence
  Description of Artificial Sequence: Synthetic oligonucleotide
  Antisense strand to SEQ ID NO: 961728
uggcauaaaggauguuucc

SEQ ID NO: 961730 - RNA, 19 nt, Artificial Sequence
  Description of Artificial Sequence: Synthetic oligonucleotide
  Sense strand starting at position 3434 of SEQ ID NO: 913886
agauguaacuucuuuaaag

SEQ ID NO: 961731 - RNA, 19 nt, Artificial Sequence
  Description of Artificial Sequence: Synthetic oligonucleotide
  Antisense strand to SEQ ID NO: 961730
cuuuaaagaaguuacaucu

SEQ ID NO: 961732 - RNA, 19 nt, Artificial Sequence
  Description of Artificial Sequence: Synthetic oligonucleotide
  Sense strand starting at position 577 of SEQ ID NO: 913886
gauuucugagcucgguuaa

SEQ ID NO: 961733 - RNA, 19 nt, Artificial Sequence
  Description of Artificial Sequence: Synthetic oligonucleotide
  Antisense strand to SEQ ID NO: 961732
uuaaccgagcucagaaauc

SEQ ID NO: 961734 - RNA, 19 nt, Artificial Sequence
  Description of Artificial Sequence: Synthetic oligonucleotide
  Sense strand starting at position 3435 of SEQ ID NO: 913886
gauguaacuucuuuaaagg

SEQ ID NO: 961735 - RNA, 19 nt, Artificial Sequence
  Description of Artificial Sequence: Synthetic oligonucleotide
  Antisense strand to SEQ ID NO: 961734
ccuuuaaagaaguuacauc

SEQ ID NO: 961736 - RNA, 19 nt, Artificial Sequence
  Description of Artificial Sequence: Synthetic oligonucleotide
  Sense strand starting at position 277 of SEQ ID NO: 913886
ccuuuaugccaauacugga

SEQ ID NO: 961737 - RNA, 19 nt, Artificial Sequence
  Description of Artificial Sequence: Synthetic oligonucleotide
  Antisense strand to SEQ ID NO: 961736
uccaguauuggcauaaagg

SEQ ID NO: 961738 - RNA, 19 nt, Artificial Sequence
  Description of Artificial Sequence: Synthetic oligonucleotide
  Sense strand starting at position 3170 of SEQ ID NO: 913886
ggaagcuccacggaagagu

SEQ ID NO: 961739 - RNA, 19 nt, Artificial Sequence
  Description of Artificial Sequence: Synthetic oligonucleotide
  Antisense strand to SEQ ID NO: 961738
acucuuccguggagcuucc

SEQ ID NO: 961740 - RNA, 19 nt, Artificial Sequence
  Description of Artificial Sequence: Synthetic oligonucleotide
  Sense strand starting at position 3187 of SEQ ID NO: 913886
gucagcuaggauuauuaua

SEQ ID NO: 961741 - RNA, 19 nt, Artificial Sequence
  Description of Artificial Sequence: Synthetic oligonucleotide
  Antisense strand to SEQ ID NO: 961740
uauaauaauccuagcugac

SEQ ID NO: 961742 - RNA, 19 nt, Artificial Sequence
  Description of Artificial Sequence: Synthetic oligonucleotide
  Sense strand starting at position 2778 of SEQ ID NO: 913886
accgcaaagaucugggaaa

SEQ ID NO: 961743 - RNA, 19 nt, Artificial Sequence
  Description of Artificial Sequence: Synthetic oligonucleotide
  Antisense strand to SEQ ID NO: 961742
uuucccagaucuuugcggu

SEQ ID NO: 961744 - RNA, 19 nt, Artificial Sequence
  Description of Artificial Sequence: Synthetic oligonucleotide
  Sense strand starting at position 578 of SEQ ID NO: 913886
auuucugagcucgguuaau

SEQ ID NO: 961745 - RNA, 19 nt, Artificial Sequence
  Description of Artificial Sequence: Synthetic oligonucleotide
  Antisense strand to SEQ ID NO: 961744
auuaaccgagcucagaaau

SEQ ID NO: 961746 - RNA, 19 nt, Artificial Sequence
  Description of Artificial Sequence: Synthetic oligonucleotide
  Sense strand starting at position 3109 of SEQ ID NO: 913886
uccugcugugaggauuaaa

SEQ ID NO: 961747 - RNA, 19 nt, Artificial Sequence
  Description of Artificial Sequence: Synthetic oligonucleotide
  Antisense strand to SEQ ID NO: 961746
uuuaauccucacagcagga

SEQ ID NO: 961748 - RNA, 19 nt, Artificial Sequence
  Description of Artificial Sequence: Synthetic oligonucleotide
  Sense strand starting at position 535 of SEQ ID NO: 913886
caagguucugucgaaacag

SEQ ID NO: 961749 - RNA, 19 nt, Artificial Sequence
  Description of Artificial Sequence: Synthetic oligonucleotide
  Antisense strand to SEQ ID NO: 961748
cuguuucgacagaaccuug

SEQ ID NO: 961750 - RNA, 19 nt, Artificial Sequence
  Description of Artificial Sequence: Synthetic oligonucleotide
  Sense strand starting at position 3183 of SEQ ID NO: 913886
aagagucagcuaggauuau

SEQ ID NO: 961751 - RNA, 19 nt, Artificial Sequence
  Description of Artificial Sequence: Synthetic oligonucleotide
  Antisense strand to SEQ ID NO: 961750
auaauccuagcugacucuu

SEQ ID NO: 961752 - RNA, 19 nt, Artificial Sequence
  Description of Artificial Sequence: Synthetic oligonucleotide
  Sense strand starting at position 28 of SEQ ID NO: 913886
agugaucgucaacaaagua

SEQ ID NO: 961753 - RNA, 19 nt, Artificial Sequence
  Description of Artificial Sequence: Synthetic oligonucleotide
  Antisense strand to SEQ ID NO: 961752
uacuuuguugacgaucacu

SEQ ID NO: 961754 - RNA, 19 nt, Artificial Sequence
  Description of Artificial Sequence: Synthetic oligonucleotide
  Sense strand starting at position 3382 of SEQ ID NO: 913886
gcugcacugauggacauau

SEQ ID NO: 961755 - RNA, 19 nt, Artificial Sequence
  Description of Artificial Sequence: Synthetic oligonucleotide
  Antisense strand to SEQ ID NO: 961754
auauguccaucagugcagc

SEQ ID NO: 961756 - RNA, 19 nt, Artificial Sequence
  Description of Artificial Sequence: Synthetic oligonucleotide
  Sense strand starting at position 330 of SEQ ID NO: 913886
gccaguucucaccaggaug

SEQ ID NO: 961757 - RNA, 19 nt, Artificial Sequence
  Description of Artificial Sequence: Synthetic oligonucleotide
  Antisense strand to SEQ ID NO: 961756
cauccuggugagaacuggc

SEQ ID NO: 961758 - RNA, 19 nt, Artificial Sequence
  Description of Artificial Sequence: Synthetic oligonucleotide
  Sense strand starting at position 3417 of SEQ ID NO: 913886
cuguuugacuuuccagaag

SEQ ID NO: 961759 - RNA, 19 nt, Artificial Sequence
  Description of Artificial Sequence: Synthetic oligonucleotide
  Antisense strand to SEQ ID NO: 961758
cuucuggaaagucaaacag

SEQ ID NO: 961760 - RNA, 19 nt, Artificial Sequence
  Description of Artificial Sequence: Synthetic oligonucleotide
  Sense strand starting at position 25 of SEQ ID NO: 913886
agcagugaucgucaacaaa

SEQ ID NO: 961761 - RNA, 19 nt, Artificial Sequence
  Description of Artificial Sequence: Synthetic oligonucleotide
  Antisense strand to SEQ ID NO: 961760
uuuguugacgaucacugcu

SEQ ID NO: 961762 - RNA, 19 nt, Artificial Sequence
  Description of Artificial Sequence: Synthetic oligonucleotide
  Sense strand starting at position 3753 of SEQ ID NO: 913886
gugacauuauagcugauua

SEQ ID NO: 961763 - RNA, 19 nt, Artificial Sequence
  Description of Artificial Sequence: Synthetic oligonucleotide
  Antisense strand to SEQ ID NO: 961762
uaaucagcuauaaugucac

SEQ ID NO: 961764 - RNA, 19 nt, Artificial Sequence
  Description of Artificial Sequence: Synthetic oligonucleotide
  Sense strand starting at position 3403 of SEQ ID NO: 913886
auaauaaugcuguacuguu

SEQ ID NO: 961765 - RNA, 19 nt, Artificial Sequence
  Description of Artificial Sequence: Synthetic oligonucleotide
  Antisense strand to SEQ ID NO: 961764
aacaguacagcauuauuau

SEQ ID NO: 961766 - RNA, 19 nt, Artificial Sequence
  Description of Artificial Sequence: Synthetic oligonucleotide
  Sense strand starting at position 3002 of SEQ ID NO: 913886
ccgccaucuaaugauguga

SEQ ID NO: 961767 - RNA, 19 nt, Artificial Sequence
  Description of Artificial Sequence: Synthetic oligonucleotide
  Antisense strand to SEQ ID NO: 961766
ucacaucauuagauggcgg

SEQ ID NO: 961768 - RNA, 19 nt, Artificial Sequence
  Description of Artificial Sequence: Synthetic oligonucleotide
  Sense strand starting at position 3734 of SEQ ID NO: 913886
gcaagaauguuggugauau

SEQ ID NO: 961769 - RNA, 19 nt, Artificial Sequence
  Description of Artificial Sequence: Synthetic oligonucleotide
  Antisense strand to SEQ ID NO: 961768
auaucaccaacauucuugc

SEQ ID NO: 961770 - RNA, 19 nt, Artificial Sequence
  Description of Artificial Sequence: Synthetic oligonucleotide
  Sense strand starting at position 814 of SEQ ID NO: 913886
gcuuguucuaaggaagcau

SEQ ID NO: 961771 - RNA, 19 nt, Artificial Sequence
  Description of Artificial Sequence: Synthetic oligonucleotide
  Antisense strand to SEQ ID NO: 961770
augcuuccuuagaacaagc

SEQ ID NO: 961772 - RNA, 19 nt, Artificial Sequence
  Description of Artificial Sequence: Synthetic oligonucleotide
  Sense strand starting at position 1594 of SEQ ID NO: 913886
acuuucucggugggauaca

SEQ ID NO: 961773 - RNA, 19 nt, Artificial Sequence
  Description of Artificial Sequence: Synthetic oligonucleotide
  Antisense strand to SEQ ID NO: 961772
uguaucccaccgagaaagu

SEQ ID NO: 961774 - RNA, 19 nt, Artificial Sequence
  Description of Artificial Sequence: Synthetic oligonucleotide
  Sense strand starting at position 1592 of SEQ ID NO: 913886
ugacuuucucggugggaua

SEQ ID NO: 961775 - RNA, 19 nt, Artificial Sequence
  Description of Artificial Sequence: Synthetic oligonucleotide
  Antisense strand to SEQ ID NO: 961774
uaucccaccgagaaaguca

SEQ ID NO: 961776 - RNA, 19 nt, Artificial Sequence
  Description of Artificial Sequence: Synthetic oligonucleotide
  Sense strand starting at position 3531 of SEQ ID NO: 913886
agaauuugcugucagagag

SEQ ID NO: 961777 - RNA, 19 nt, Artificial Sequence
  Description of Artificial Sequence: Synthetic oligonucleotide
  Antisense strand to SEQ ID NO: 961776
cucucugacagcaaauucu

SEQ ID NO: 961778 - RNA, 19 nt, Artificial Sequence
  Description of Artificial Sequence: Synthetic oligonucleotide
  Sense strand starting at position 720 of SEQ ID NO: 913886
cugcacgagagcuauguaa

SEQ ID NO: 961779 - RNA, 19 nt, Artificial Sequence
  Description of Artificial Sequence: Synthetic oligonucleotide
  Antisense strand to SEQ ID NO: 961778
uuacauagcucucgugcag

SEQ ID NO: 961780 - RNA, 19 nt, Artificial Sequence
  Description of Artificial Sequence: Synthetic oligonucleotide
  Sense strand starting at position 1071 of SEQ ID NO: 913886
ggauuauucuuagcaaugc

SEQ ID NO: 961781 - RNA, 19 nt, Artificial Sequence
  Description of Artificial Sequence: Synthetic oligonucleotide
  Antisense strand to SEQ ID NO: 961780
gcauugcuaagaauaaucc

SEQ ID NO: 961782 - RNA, 19 nt, Artificial Sequence
  Description of Artificial Sequence: Synthetic oligonucleotide
  Sense strand starting at position 1591 of SEQ ID NO: 913886
uugacuuucucggugggau

SEQ ID NO: 961783 - RNA, 19 nt, Artificial Sequence
  Description of Artificial Sequence: Synthetic oligonucleotide
  Antisense strand to SEQ ID NO: 961782
aucccaccgagaaagucaa

SEQ ID NO: 961784 - RNA, 19 nt, Artificial Sequence
  Description of Artificial Sequence: Synthetic oligonucleotide
  Sense strand starting at position 3742 of SEQ ID NO: 913886
guuggugauaugugacauu

SEQ ID NO: 961785 - RNA, 19 nt, Artificial Sequence
  Description of Artificial Sequence: Synthetic oligonucleotide
  Antisense strand to SEQ ID NO: 961784
aaugucacauaucaccaac

SEQ ID NO: 961786 - RNA, 19 nt, Artificial Sequence
  Description of Artificial Sequence: Synthetic oligonucleotide
  Sense strand starting at position 428 of SEQ ID NO: 913886
ggauguguuuaccuacuuu

SEQ ID NO: 961787 - RNA, 19 nt, Artificial Sequence
  Description of Artificial Sequence: Synthetic oligonucleotide
  Antisense strand to SEQ ID NO: 961786
aaaguagguaaacacaucc

SEQ ID NO: 961788 - RNA, 19 nt, Artificial Sequence
  Description of Artificial Sequence: Synthetic oligonucleotide
  Sense strand starting at position 177 of SEQ ID NO: 913886
gcguguugacaauacuuac

SEQ ID NO: 961789 - RNA, 19 nt, Artificial Sequence
  Description of Artificial Sequence: Synthetic oligonucleotide
  Antisense strand to SEQ ID NO: 961788
guaaguauugucaacacgc

SEQ ID NO: 961790 - RNA, 19 nt, Artificial Sequence
  Description of Artificial Sequence: Synthetic oligonucleotide
  Sense strand starting at position 3281 of SEQ ID NO: 913886
cugccacugcucugacaaa

SEQ ID NO: 961791 - RNA, 19 nt, Artificial Sequence
  Description of Artificial Sequence: Synthetic oligonucleotide
  Antisense strand to SEQ ID NO: 961790
uuugucagagcaguggcag

SEQ ID NO: 961792 - RNA, 19 nt, Artificial Sequence
  Description of Artificial Sequence: Synthetic oligonucleotide
  Sense strand starting at position 1590 of SEQ ID NO: 913886
guugacuuucucgguggga

SEQ ID NO: 961793 - RNA, 19 nt, Artificial Sequence
  Description of Artificial Sequence: Synthetic oligonucleotide
  Antisense strand to SEQ ID NO: 961792
ucccaccgagaaagucaac

SEQ ID NO: 961794 - RNA, 19 nt, Artificial Sequence
  Description of Artificial Sequence: Synthetic oligonucleotide
  Sense strand starting at position 532 of SEQ ID NO: 913886
ugucaagguucugucgaaa

SEQ ID NO: 961795 - RNA, 19 nt, Artificial Sequence
  Description of Artificial Sequence: Synthetic oligonucleotide
  Antisense strand to SEQ ID NO: 961794
uuucgacagaaccuugaca

SEQ ID NO: 961796 - RNA, 19 nt, Artificial Sequence
  Description of Artificial Sequence: Synthetic oligonucleotide
  Sense strand starting at position 3609 of SEQ ID NO: 913886
aaaguaugugaucgccuga

SEQ ID NO: 961797 - RNA, 19 nt, Artificial Sequence
  Description of Artificial Sequence: Synthetic oligonucleotide
  Antisense strand to SEQ ID NO: 961796
ucaggcgaucacauacuuu

SEQ ID NO: 961798 - RNA, 19 nt, Artificial Sequence
  Description of Artificial Sequence: Synthetic oligonucleotide
  Sense strand starting at position 2745 of SEQ ID NO: 913886
ggauguauacguuguauug

SEQ ID NO: 961799 - RNA, 19 nt, Artificial Sequence
  Description of Artificial Sequence: Synthetic oligonucleotide
  Antisense strand to SEQ ID NO: 961798
caauacaacguauacaucc

SEQ ID NO: 961800 - RNA, 19 nt, Artificial Sequence
  Description of Artificial Sequence: Synthetic oligonucleotide
  Sense strand starting at position 3528 of SEQ ID NO: 913886
augagaauuugcugucaga

SEQ ID NO: 961801 - RNA, 19 nt, Artificial Sequence
  Description of Artificial Sequence: Synthetic oligonucleotide
  Antisense strand to SEQ ID NO: 961800
ucugacagcaaauucucau

SEQ ID NO: 961802 - RNA, 19 nt, Artificial Sequence
  Description of Artificial Sequence: Synthetic oligonucleotide
  Sense strand starting at position 3040 of SEQ ID NO: 913886
cgcucuaugccucaauucu

SEQ ID NO: 961803 - RNA, 19 nt, Artificial Sequence
  Description of Artificial Sequence: Synthetic oligonucleotide
  Antisense strand to SEQ ID NO: 961802
agaauugaggcauagagcg

SEQ ID NO: 961804 - RNA, 19 nt, Artificial Sequence
  Description of Artificial Sequence: Synthetic oligonucleotide
  Sense strand starting at position 3238 of SEQ ID NO: 913886
guugcuagcgcacagauua

SEQ ID NO: 961805 - RNA, 19 nt, Artificial Sequence
  Description of Artificial Sequence: Synthetic oligonucleotide
  Antisense strand to SEQ ID NO: 961804
uaaucugugcgcuagcaac

SEQ ID NO: 961806 - RNA, 19 nt, Artificial Sequence
  Description of Artificial Sequence: Synthetic oligonucleotide
  Sense strand starting at position 1400 of SEQ ID NO: 913886
aagcguggucucugacacu

SEQ ID NO: 961807 - RNA, 19 nt, Artificial Sequence
  Description of Artificial Sequence: Synthetic oligonucleotide
  Antisense strand to SEQ ID NO: 961806
agugucagagaccacgcuu

SEQ ID NO: 961808 - RNA, 19 nt, Artificial Sequence
  Description of Artificial Sequence: Synthetic oligonucleotide
  Sense strand starting at position 3040 of SEQ ID NO: 913887
agagaucuacaaggcauau

SEQ ID NO: 961809 - RNA, 19 nt, Artificial Sequence
  Description of Artificial Sequence: Synthetic oligonucleotide
  Antisense strand to SEQ ID NO: 961808
auaugccuuguagaucucu

SEQ ID NO: 961810 - RNA, 19 nt, Artificial Sequence
  Description of Artificial Sequence: Synthetic oligonucleotide
  Sense strand starting at position 2198 of SEQ ID NO: 913887
cugauuagaggcuacuuau

SEQ ID NO: 961811 - RNA, 19 nt, Artificial Sequence
  Description of Artificial Sequence: Synthetic oligonucleotide
  Antisense strand to SEQ ID NO: 961810
auaaguagccucuaaucag

SEQ ID NO: 961812 - RNA, 19 nt, Artificial Sequence
  Description of Artificial Sequence: Synthetic oligonucleotide
  Sense strand starting at position 1170 of SEQ ID NO: 913887
agaaauucucuguauaggu

SEQ ID NO: 961813 - RNA, 19 nt, Artificial Sequence
  Description of Artificial Sequence: Synthetic oligonucleotide
  Antisense strand to SEQ ID NO: 961812
accuauacagagaauuucu

SEQ ID NO: 961814 - RNA, 19 nt, Artificial Sequence
  Description of Artificial Sequence: Synthetic oligonucleotide
  Sense strand starting at position 88 of SEQ ID NO: 913887
ggguaauuacaucacaugu

SEQ ID NO: 961815 - RNA, 19 nt, Artificial Sequence
  Description of Artificial Sequence: Synthetic oligonucleotide
  Antisense strand to SEQ ID NO: 961814
acaugugauguaauuaccc

SEQ ID NO: 961816 - RNA, 19 nt, Artificial Sequence
  Description of Artificial Sequence: Synthetic oligonucleotide
  Sense strand starting at position 1172 of SEQ ID NO: 913887
aaauucucuguauagguga

SEQ ID NO: 961817 - RNA, 19 nt, Artificial Sequence
  Description of Artificial Sequence: Synthetic oligonucleotide
  Antisense strand to SEQ ID NO: 961816
ucaccuauacagagaauuu

SEQ ID NO: 961818 - RNA, 19 nt, Artificial Sequence
  Description of Artificial Sequence: Synthetic oligonucleotide
  Sense strand starting at position 103 of SEQ ID NO: 913887
augucaaguauaugggaaa

SEQ ID NO: 961819 - RNA, 19 nt, Artificial Sequence
  Description of Artificial Sequence: Synthetic oligonucleotide
  Antisense strand to SEQ ID NO: 961818
uuucccauauacuugacau

SEQ ID NO: 961820 - RNA, 19 nt, Artificial Sequence
  Description of Artificial Sequence: Synthetic oligonucleotide
  Sense strand starting at position 2450 of SEQ ID NO: 913887
agucauuggugauuugcau

SEQ ID NO: 961821 - RNA, 19 nt, Artificial Sequence
  Description of Artificial Sequence: Synthetic oligonucleotide
  Antisense strand to SEQ ID NO: 961820
augcaaaucaccaaugacu

SEQ ID NO: 961822 - RNA, 19 nt, Artificial Sequence
  Description of Artificial Sequence: Synthetic oligonucleotide
  Sense strand starting at position 920 of SEQ ID NO: 913887
uuuccuguucuggaagaca

SEQ ID NO: 961823 - RNA, 19 nt, Artificial Sequence
  Description of Artificial Sequence: Synthetic oligonucleotide
  Antisense strand to SEQ ID NO: 961822
ugucuuccagaacaggaaa

SEQ ID NO: 961824 - RNA, 19 nt, Artificial Sequence
  Description of Artificial Sequence: Synthetic oligonucleotide
  Sense strand starting at position 1169 of SEQ ID NO: 913887
cagaaauucucuguauagg

SEQ ID NO: 961825 - RNA, 19 nt, Artificial Sequence
  Description of Artificial Sequence: Synthetic oligonucleotide
  Antisense strand to SEQ ID NO: 961824
ccuauacagagaauuucug

SEQ ID NO: 961826 - RNA, 19 nt, Artificial Sequence
  Description of Artificial Sequence: Synthetic oligonucleotide
  Sense strand starting at position 2656 of SEQ ID NO: 913887
auguaaauccuaggguaaa

SEQ ID NO: 961827 - RNA, 19 nt, Artificial Sequence
  Description of Artificial Sequence: Synthetic oligonucleotide
  Antisense strand to SEQ ID NO: 961826
uuuacccuaggauuuacau

SEQ ID NO: 961828 - RNA, 19 nt, Artificial Sequence
  Description of Artificial Sequence: Synthetic oligonucleotide
  Sense strand starting at position 3913 of SEQ ID NO: 913887
gugcaaugugaacacaaau

SEQ ID NO: 961829 - RNA, 19 nt, Artificial Sequence
  Description of Artificial Sequence: Synthetic oligonucleotide
  Antisense strand to SEQ ID NO: 961828
auuuguguucacauugcac

SEQ ID NO: 961830 - RNA, 19 nt, Artificial Sequence
  Description of Artificial Sequence: Synthetic oligonucleotide
  Sense strand starting at position 186 of SEQ ID NO: 913887
ucuaaauugugauuggaug

SEQ ID NO: 961831 - RNA, 19 nt, Artificial Sequence
  Description of Artificial Sequence: Synthetic oligonucleotide
  Antisense strand to SEQ ID NO: 961830
cauccaaucacaauuuaga

SEQ ID NO: 961832 - RNA, 19 nt, Artificial Sequence
  Description of Artificial Sequence: Synthetic oligonucleotide
  Sense strand starting at position 1154 of SEQ ID NO: 913887
ggagacuugcucuagcaga

SEQ ID NO: 961833 - RNA, 19 nt, Artificial Sequence
  Description of Artificial Sequence: Synthetic oligonucleotide
  Antisense strand to SEQ ID NO: 961832
ucugcuagagcaagucucc

SEQ ID NO: 961834 - RNA, 19 nt, Artificial Sequence
  Description of Artificial Sequence: Synthetic oligonucleotide
  Sense strand starting at position 2903 of SEQ ID NO: 913887
agucaucacguauaaauua

SEQ ID NO: 961835 - RNA, 19 nt, Artificial Sequence
  Description of Artificial Sequence: Synthetic oligonucleotide
  Antisense strand to SEQ ID NO: 961834
uaauuuauacgugaugacu

SEQ ID NO: 961836 - RNA, 19 nt, Artificial Sequence
  Description of Artificial Sequence: Synthetic oligonucleotide
  Sense strand starting at position 3271 of SEQ ID NO: 913887
agggaaacauugcucuauu

SEQ ID NO: 961837 - RNA, 19 nt, Artificial Sequence
  Description of Artificial Sequence: Synthetic oligonucleotide
  Antisense strand to SEQ ID NO: 961836
aauagagcaauguuucccu

SEQ ID NO: 961838 - RNA, 19 nt, Artificial Sequence
  Description of Artificial Sequence: Synthetic oligonucleotide
  Sense strand starting at position 731 of SEQ ID NO: 913887
ucccuuaaaguguaauauc

SEQ ID NO: 961839 - RNA, 19 nt, Artificial Sequence
  Description of Artificial Sequence: Synthetic oligonucleotide
  Antisense strand to SEQ ID NO: 961838
gauauuacacuuuaaggga

SEQ ID NO: 961840 - RNA, 19 nt, Artificial Sequence
  Description of Artificial Sequence: Synthetic oligonucleotide
  Sense strand starting at position 3521 of SEQ ID NO: 913887
aaagaaugugugcauucca

SEQ ID NO: 961841 - RNA, 19 nt, Artificial Sequence
  Description of Artificial Sequence: Synthetic oligonucleotide
  Antisense strand to SEQ ID NO: 961840
uggaaugcacacauucuuu

SEQ ID NO: 961842 - RNA, 19 nt, Artificial Sequence
  Description of Artificial Sequence: Synthetic oligonucleotide
  Sense strand starting at position 1808 of SEQ ID NO: 913887
ggccucacaaguggaaaua

SEQ ID NO: 961843 - RNA, 19 nt, Artificial Sequence
  Description of Artificial Sequence: Synthetic oligonucleotide
  Antisense strand to SEQ ID NO: 961842
uauuuccacuugugaggcc

SEQ ID NO: 961844 - RNA, 19 nt, Artificial Sequence
  Description of Artificial Sequence: Synthetic oligonucleotide
  Sense strand starting at position 3299 of SEQ ID NO: 913887
uguuguguucuagaaggag

SEQ ID NO: 961845 - RNA, 19 nt, Artificial Sequence
  Description of Artificial Sequence: Synthetic oligonucleotide
  Antisense strand to SEQ ID NO: 961844
cuccuucuagaacacaaca

SEQ ID NO: 961846 - RNA, 19 nt, Artificial Sequence
  Description of Artificial Sequence: Synthetic oligonucleotide
  Sense strand starting at position 1763 of SEQ ID NO: 913887
uggugugugagugaacaga

SEQ ID NO: 961847 - RNA, 19 nt, Artificial Sequence
  Description of Artificial Sequence: Synthetic oligonucleotide
  Antisense strand to SEQ ID NO: 961846
ucuguucacucacacacca

SEQ ID NO: 961848 - RNA, 19 nt, Artificial Sequence
  Description of Artificial Sequence: Synthetic oligonucleotide
  Sense strand starting at position 3272 of SEQ ID NO: 913887
gggaaacauugcucuauuc

SEQ ID NO: 961849 - RNA, 19 nt, Artificial Sequence
  Description of Artificial Sequence: Synthetic oligonucleotide
  Antisense strand to SEQ ID NO: 961848
gaauagagcaauguuuccc

SEQ ID NO: 961850 - RNA, 19 nt, Artificial Sequence
  Description of Artificial Sequence: Synthetic oligonucleotide
  Sense strand starting at position 2036 of SEQ ID NO: 913887
cuugucucugucuaaauaa

SEQ ID NO: 961851 - RNA, 19 nt, Artificial Sequence
  Description of Artificial Sequence: Synthetic oligonucleotide
  Antisense strand to SEQ ID NO: 961850
uuauuuagacagagacaag

SEQ ID NO: 961852 - RNA, 19 nt, Artificial Sequence
  Description of Artificial Sequence: Synthetic oligonucleotide
  Sense strand starting at position 2421 of SEQ ID NO: 913887
aguucuacucaucauguca

SEQ ID NO: 961853 - RNA, 19 nt, Artificial Sequence
  Description of Artificial Sequence: Synthetic oligonucleotide
  Antisense strand to SEQ ID NO: 961852
ugacaugaugaguagaacu

SEQ ID NO: 961854 - RNA, 19 nt, Artificial Sequence
  Description of Artificial Sequence: Synthetic oligonucleotide
  Sense strand starting at position 1214 of SEQ ID NO: 913887
ucaggacuuuguuccauga

SEQ ID NO: 961855 - RNA, 19 nt, Artificial Sequence
  Description of Artificial Sequence: Synthetic oligonucleotide
  Antisense strand to SEQ ID NO: 961854
ucauggaacaaaguccuga

SEQ ID NO: 961856 - RNA, 19 nt, Artificial Sequence
  Description of Artificial Sequence: Synthetic oligonucleotide
  Sense strand starting at position 192 of SEQ ID NO: 913887
uugugauuggauggaugua

SEQ ID NO: 961857 - RNA, 19 nt, Artificial Sequence
  Description of Artificial Sequence: Synthetic oligonucleotide
  Antisense strand to SEQ ID NO: 961856
uacauccauccaaucacaa

SEQ ID NO: 961858 - RNA, 19 nt, Artificial Sequence
  Description of Artificial Sequence: Synthetic oligonucleotide
  Sense strand starting at position 397 of SEQ ID NO: 913887
gcagguugacuuuggagga

SEQ ID NO: 961859 - RNA, 19 nt, Artificial Sequence
  Description of Artificial Sequence: Synthetic oligonucleotide
  Antisense strand to SEQ ID NO: 961858
uccuccaaagucaaccugc

SEQ ID NO: 961860 - RNA, 19 nt, Artificial Sequence
  Description of Artificial Sequence: Synthetic oligonucleotide
  Sense strand starting at position 3518 of SEQ ID NO: 913887
aggaaagaaugugugcauu

SEQ ID NO: 961861 - RNA, 19 nt, Artificial Sequence
  Description of Artificial Sequence: Synthetic oligonucleotide
  Antisense strand to SEQ ID NO: 961860
aaugcacacauucuuuccu

SEQ ID NO: 961862 - RNA, 19 nt, Artificial Sequence
  Description of Artificial Sequence: Synthetic oligonucleotide
  Sense strand starting at position 1807 of SEQ ID NO: 913887
uggccucacaaguggaaau

SEQ ID NO: 961863 - RNA, 19 nt, Artificial Sequence
  Description of Artificial Sequence: Synthetic oligonucleotide
  Antisense strand to SEQ ID NO: 961862
auuuccacuugugaggcca

SEQ ID NO: 961864 - RNA, 19 nt, Artificial Sequence
  Description of Artificial Sequence: Synthetic oligonucleotide
  Sense strand starting at position 1167 of SEQ ID NO: 913887
agcagaaauucucuguaua

SEQ ID NO: 961865 - RNA, 19 nt, Artificial Sequence
  Description of Artificial Sequence: Synthetic oligonucleotide
  Antisense strand to SEQ ID NO: 961864
uauacagagaauuucugcu

SEQ ID NO: 961866 - RNA, 19 nt, Artificial Sequence
  Description of Artificial Sequence: Synthetic oligonucleotide
  Sense strand starting at position 1361 of SEQ ID NO: 913887
uaaugaguuccgugcauuu

SEQ ID NO: 961867 - RNA, 19 nt, Artificial Sequence
  Description of Artificial Sequence: Synthetic oligonucleotide
  Antisense strand to SEQ ID NO: 961866
aaaugcacggaacucauua

SEQ ID NO: 961868 - RNA, 19 nt, Artificial Sequence
  Description of Artificial Sequence: Synthetic oligonucleotide
  Sense strand starting at position 834 of SEQ ID NO: 913887
gcaggucaguaaucaacaa

SEQ ID NO: 961869 - RNA, 19 nt, Artificial Sequence
  Description of Artificial Sequence: Synthetic oligonucleotide
  Antisense strand to SEQ ID NO: 961868
uuguugauuacugaccugc

SEQ ID NO: 961870 - RNA, 19 nt, Artificial Sequence
  Description of Artificial Sequence: Synthetic oligonucleotide
  Sense strand starting at position 2068 of SEQ ID NO: 913887
augucagacuuccuucuga

SEQ ID NO: 961871 - RNA, 19 nt, Artificial Sequence
  Description of Artificial Sequence: Synthetic oligonucleotide
  Antisense strand to SEQ ID NO: 961870
ucagaaggaagucugacau

SEQ ID NO: 961872 - RNA, 19 nt, Artificial Sequence
  Description of Artificial Sequence: Synthetic oligonucleotide
  Sense strand starting at position 815 of SEQ ID NO: 913887
auaucaggguucuuagcaa

SEQ ID NO: 961873 - RNA, 19 nt, Artificial Sequence
  Description of Artificial Sequence: Synthetic oligonucleotide
  Antisense strand to SEQ ID NO: 961872
uugcuaagaacccugauau

SEQ ID NO: 961874 - RNA, 19 nt, Artificial Sequence
  Description of Artificial Sequence: Synthetic oligonucleotide
  Sense strand starting at position 3709 of SEQ ID NO: 913887
uggcucauauuugaggaga

SEQ ID NO: 961875 - RNA, 19 nt, Artificial Sequence
  Description of Artificial Sequence: Synthetic oligonucleotide
  Antisense strand to SEQ ID NO: 961874
ucuccucaaauaugagcca

SEQ ID NO: 961876 - RNA, 19 nt, Artificial Sequence
  Description of Artificial Sequence: Synthetic oligonucleotide
  Sense strand starting at position 2925 of SEQ ID NO: 913887
cugaaauuguguuccauga

SEQ ID NO: 961877 - RNA, 19 nt, Artificial Sequence
  Description of Artificial Sequence: Synthetic oligonucleotide
  Antisense strand to SEQ ID NO: 961876
ucauggaacacaauuucag

SEQ ID NO: 961878 - RNA, 19 nt, Artificial Sequence
  Description of Artificial Sequence: Synthetic oligonucleotide
  Sense strand starting at position 1168 of SEQ ID NO: 913887
gcagaaauucucuguauag

SEQ ID NO: 961879 - RNA, 19 nt, Artificial Sequence
  Description of Artificial Sequence: Synthetic oligonucleotide
  Antisense strand to SEQ ID NO: 961878
cuauacagagaauuucugc

SEQ ID NO: 961880 - RNA, 19 nt, Artificial Sequence
  Description of Artificial Sequence: Synthetic oligonucleotide
  Sense strand starting at position 3723 of SEQ ID NO: 913887
ggagacaguacugguguua

SEQ ID NO: 961881 - RNA, 19 nt, Artificial Sequence
  Description of Artificial Sequence: Synthetic oligonucleotide
  Antisense strand to SEQ ID NO: 961880
uaacaccaguacugucucc

SEQ ID NO: 961882 - RNA, 19 nt, Artificial Sequence
  Description of Artificial Sequence: Synthetic oligonucleotide
  Sense strand starting at position 1218 of SEQ ID NO: 913887
gacuuuguuccaugaucug

SEQ ID NO: 961883 - RNA, 19 nt, Artificial Sequence
  Description of Artificial Sequence: Synthetic oligonucleotide
  Antisense strand to SEQ ID NO: 961882
cagaucauggaacaaaguc

SEQ ID NO: 961884 - RNA, 19 nt, Artificial Sequence
  Description of Artificial Sequence: Synthetic oligonucleotide
  Sense strand starting at position 828 of SEQ ID NO: 913887
uagcaagcaggucaguaau

SEQ ID NO: 961885 - RNA, 19 nt, Artificial Sequence
  Description of Artificial Sequence: Synthetic oligonucleotide
  Antisense strand to SEQ ID NO: 961884
auuacugaccugcuugcua

SEQ ID NO: 961886 - RNA, 19 nt, Artificial Sequence
  Description of Artificial Sequence: Synthetic oligonucleotide
  Sense strand starting at position 2688 of SEQ ID NO: 913887
gucauagcacauuagcauu

SEQ ID NO: 961887 - RNA, 19 nt, Artificial Sequence
  Description of Artificial Sequence: Synthetic oligonucleotide
  Antisense strand to SEQ ID NO: 961886
aaugcuaaugugcuaugac

SEQ ID NO: 961888 - RNA, 19 nt, Artificial Sequence
  Description of Artificial Sequence: Synthetic oligonucleotide
  Sense strand starting at position 2384 of SEQ ID NO: 913888
cgggacugucucuagggaa

SEQ ID NO: 961889 - RNA, 19 nt, Artificial Sequence
  Description of Artificial Sequence: Synthetic oligonucleotide
  Antisense strand to SEQ ID NO: 961888
uucccuagagacagucccg

SEQ ID NO: 961890 - RNA, 19 nt, Artificial Sequence
  Description of Artificial Sequence: Synthetic oligonucleotide
  Sense strand starting at position 511 of SEQ ID NO: 913888
cuaaacugguccuuaaaga

SEQ ID NO: 961891 - RNA, 19 nt, Artificial Sequence
  Description of Artificial Sequence: Synthetic oligonucleotide
  Antisense strand to SEQ ID NO: 961890
ucuuuaaggaccaguuuag

SEQ ID NO: 961892 - RNA, 19 nt, Artificial Sequence
  Description of Artificial Sequence: Synthetic oligonucleotide
  Sense strand starting at position 3274 of SEQ ID NO: 913888
cuagguagacuuuagguau

SEQ ID NO: 961893 - RNA, 19 nt, Artificial Sequence
  Description of Artificial Sequence: Synthetic oligonucleotide
  Antisense strand to SEQ ID NO: 961892
auaccuaaagucuaccuag

SEQ ID NO: 961894 - RNA, 19 nt, Artificial Sequence
  Description of Artificial Sequence: Synthetic oligonucleotide
  Sense strand starting at position 3417 of SEQ ID NO: 913888
guaacauugagaugugaag

SEQ ID NO: 961895 - RNA, 19 nt, Artificial Sequence
  Description of Artificial Sequence: Synthetic oligonucleotide
  Antisense strand to SEQ ID NO: 961894
cuucacaucucaauguuac

SEQ ID NO: 961896 - RNA, 19 nt, Artificial Sequence
  Description of Artificial Sequence: Synthetic oligonucleotide
  Sense strand starting at position 317 of SEQ ID NO: 913888
ggcgcuuaccucuuuagca

SEQ ID NO: 961897 - RNA, 19 nt, Artificial Sequence
  Description of Artificial Sequence: Synthetic oligonucleotide
  Antisense strand to SEQ ID NO: 961896
ugcuaaagagguaagcgcc

SEQ ID NO: 961898 - RNA, 19 nt, Artificial Sequence
  Description of Artificial Sequence: Synthetic oligonucleotide
  Sense strand starting at position 809 of SEQ ID NO: 913888
uuguaaccauucuuggaaa

SEQ ID NO: 961899 - RNA, 19 nt, Artificial Sequence
  Description of Artificial Sequence: Synthetic oligonucleotide
  Antisense strand to SEQ ID NO: 961898
uuuccaagaaugguuacaa

SEQ ID NO: 961900 - RNA, 19 nt, Artificial Sequence
  Description of Artificial Sequence: Synthetic oligonucleotide
  Sense strand starting at position 36 of SEQ ID NO: 913888
ucagcuaaacuuggaaauu

SEQ ID NO: 961901 - RNA, 19 nt, Artificial Sequence
  Description of Artificial Sequence: Synthetic oligonucleotide
  Antisense strand to SEQ ID NO: 961900
aauuuccaaguuuagcuga

SEQ ID NO: 961902 - RNA, 19 nt, Artificial Sequence
  Description of Artificial Sequence: Synthetic oligonucleotide
  Sense strand starting at position 3440 of SEQ ID NO: 913888
cuagacuuccuggguagag

SEQ ID NO: 961903 - RNA, 19 nt, Artificial Sequence
  Description of Artificial Sequence: Synthetic oligonucleotide
  Antisense strand to SEQ ID NO: 961902
cucuacccaggaagucuag

SEQ ID NO: 961904 - RNA, 19 nt, Artificial Sequence
  Description of Artificial Sequence: Synthetic oligonucleotide
  Sense strand starting at position 3478 of SEQ ID NO: 913888
ucugucuggcaagaggauu

SEQ ID NO: 961905 - RNA, 19 nt, Artificial Sequence
  Description of Artificial Sequence: Synthetic oligonucleotide
  Antisense strand to SEQ ID NO: 961904
aauccucuugccagacaga

SEQ ID NO: 961906 - RNA, 19 nt, Artificial Sequence
  Description of Artificial Sequence: Synthetic oligonucleotide
  Sense strand starting at position 3105 of SEQ ID NO: 913888
ugaagugugaaguauguaa

SEQ ID NO: 961907 - RNA, 19 nt, Artificial Sequence
  Description of Artificial Sequence: Synthetic oligonucleotide
  Antisense strand to SEQ ID NO: 961906
uuacauacuucacacuuca

SEQ ID NO: 961908 - RNA, 19 nt, Artificial Sequence
  Description of Artificial Sequence: Synthetic oligonucleotide
  Sense strand starting at position 2087 of SEQ ID NO: 913888
ucuacuugccuaggaaaga

SEQ ID NO: 961909 - RNA, 19 nt, Artificial Sequence
  Description of Artificial Sequence: Synthetic oligonucleotide
  Antisense strand to SEQ ID NO: 961908
ucuuuccuaggcaaguaga

SEQ ID NO: 961910 - RNA, 19 nt, Artificial Sequence
  Description of Artificial Sequence: Synthetic oligonucleotide
  Sense strand starting at position 2084 of SEQ ID NO: 913888
ggaucuacuugccuaggaa

SEQ ID NO: 961911 - RNA, 19 nt, Artificial Sequence
  Description of Artificial Sequence: Synthetic oligonucleotide
  Antisense strand to SEQ ID NO: 961910
uuccuaggcaaguagaucc

SEQ ID NO: 961912 - RNA, 19 nt, Artificial Sequence
  Description of Artificial Sequence: Synthetic oligonucleotide
  Sense strand starting at position 88 of SEQ ID NO: 913888
uccugaaauguuuauguau

SEQ ID NO: 961913 - RNA, 19 nt, Artificial Sequence
  Description of Artificial Sequence: Synthetic oligonucleotide
  Antisense strand to SEQ ID NO: 961912
auacauaaacauuucagga

SEQ ID NO: 961914 - RNA, 19 nt, Artificial Sequence
  Description of Artificial Sequence: Synthetic oligonucleotide
  Sense strand starting at position 3894 of SEQ ID NO: 913888
aguugaccuuggucaagaa

SEQ ID NO: 961915 - RNA, 19 nt, Artificial Sequence
  Description of Artificial Sequence: Synthetic oligonucleotide
  Antisense strand to SEQ ID NO: 961914
uucuugaccaaggucaacu

SEQ ID NO: 961916 - RNA, 19 nt, Artificial Sequence
  Description of Artificial Sequence: Synthetic oligonucleotide
  Sense strand starting at position 2083 of SEQ ID NO: 913888
gggaucuacuugccuagga

SEQ ID NO: 961917 - RNA, 19 nt, Artificial Sequence
  Description of Artificial Sequence: Synthetic oligonucleotide
  Antisense strand to SEQ ID NO: 961916
uccuaggcaaguagauccc

SEQ ID NO: 961918 - RNA, 19 nt, Artificial Sequence
  Description of Artificial Sequence: Synthetic oligonucleotide
  Sense strand starting at position 3975 of SEQ ID NO: 913888
gcaguuagaguguaagaau

SEQ ID NO: 961919 - RNA, 19 nt, Artificial Sequence
  Description of Artificial Sequence: Synthetic oligonucleotide
  Antisense strand to SEQ ID NO: 961918
auucuuacacucuaacugc

SEQ ID NO: 961920 - RNA, 19 nt, Artificial Sequence
  Description of Artificial Sequence: Synthetic oligonucleotide
  Sense strand starting at position 3891 of SEQ ID NO: 913888
auaaguugaccuuggucaa

SEQ ID NO: 961921 - RNA, 19 nt, Artificial Sequence
  Description of Artificial Sequence: Synthetic oligonucleotide
  Antisense strand to SEQ ID NO: 961920
uugaccaaggucaacuuau

SEQ ID NO: 961922 - RNA, 19 nt, Artificial Sequence
  Description of Artificial Sequence: Synthetic oligonucleotide
  Sense strand starting at position 3441 of SEQ ID NO: 913888
uagacuuccuggguagagu

SEQ ID NO: 961923 - RNA, 19 nt, Artificial Sequence
  Description of Artificial Sequence: Synthetic oligonucleotide
  Antisense strand to SEQ ID NO: 961922
acucuacccaggaagucua

SEQ ID NO: 961924 - RNA, 19 nt, Artificial Sequence
  Description of Artificial Sequence: Synthetic oligonucleotide
  Sense strand starting at position 795 of SEQ ID NO: 913888
cucuaaguucgauauugua

SEQ ID NO: 961925 - RNA, 19 nt, Artificial Sequence
  Description of Artificial Sequence: Synthetic oligonucleotide
  Antisense strand to SEQ ID NO: 961924
uacaauaucgaacuuagag

SEQ ID NO: 961926 - RNA, 19 nt, Artificial Sequence
  Description of Artificial Sequence: Synthetic oligonucleotide
  Sense strand starting at position 605 of SEQ ID NO: 913888
cuguguauaucacuauaau

SEQ ID NO: 961927 - RNA, 19 nt, Artificial Sequence
  Description of Artificial Sequence: Synthetic oligonucleotide
  Antisense strand to SEQ ID NO: 961926
auuauagugauauacacag

SEQ ID NO: 961928 - RNA, 19 nt, Artificial Sequence
  Description of Artificial Sequence: Synthetic oligonucleotide
  Sense strand starting at position 3429 of SEQ ID NO: 913888
ugugaagccagcuagacuu

SEQ ID NO: 961929 - RNA, 19 nt, Artificial Sequence
  Description of Artificial Sequence: Synthetic oligonucleotide
  Antisense strand to SEQ ID NO: 961928
aagucuagcuggcuucaca

SEQ ID NO: 961930 - RNA, 19 nt, Artificial Sequence
  Description of Artificial Sequence: Synthetic oligonucleotide
  Sense strand starting at position 1244 of SEQ ID NO: 913888
ggugcucaccaugacaguu

SEQ ID NO: 961931 - RNA, 19 nt, Artificial Sequence
  Description of Artificial Sequence: Synthetic oligonucleotide
  Antisense strand to SEQ ID NO: 961930
aacugucauggugagcacc

SEQ ID NO: 961932 - RNA, 19 nt, Artificial Sequence
  Description of Artificial Sequence: Synthetic oligonucleotide
  Sense strand starting at position 792 of SEQ ID NO: 913888
acacucuaaguucgauauu

SEQ ID NO: 961933 - RNA, 19 nt, Artificial Sequence
  Description of Artificial Sequence: Synthetic oligonucleotide
  Antisense strand to SEQ ID NO: 961932
aauaucgaacuuagagugu

SEQ ID NO: 961934 - RNA, 19 nt, Artificial Sequence
  Description of Artificial Sequence: Synthetic oligonucleotide
  Sense strand starting at position 2240 of SEQ ID NO: 913888
uucuuagcauuugaggaga

SEQ ID NO: 961935 - RNA, 19 nt, Artificial Sequence
  Description of Artificial Sequence: Synthetic oligonucleotide
  Antisense strand to SEQ ID NO: 961934
ucuccucaaaugcuaagaa

SEQ ID NO: 961936 - RNA, 19 nt, Artificial Sequence
  Description of Artificial Sequence: Synthetic oligonucleotide
  Sense strand starting at position 2327 of SEQ ID NO: 913888
gcacguggccaauaugaga

SEQ ID NO: 961937 - RNA, 19 nt, Artificial Sequence
  Description of Artificial Sequence: Synthetic oligonucleotide
  Antisense strand to SEQ ID NO: 961936
ucucauauuggccacgugc

SEQ ID NO: 961938 - RNA, 19 nt, Artificial Sequence
  Description of Artificial Sequence: Synthetic oligonucleotide
  Sense strand starting at position 3439 of SEQ ID NO: 913888
gcuagacuuccuggguaga

SEQ ID NO: 961939 - RNA, 19 nt, Artificial Sequence
  Description of Artificial Sequence: Synthetic oligonucleotide
  Antisense strand to SEQ ID NO: 961938
ucuacccaggaagucuagc

SEQ ID NO: 961940 - RNA, 19 nt, Artificial Sequence
  Description of Artificial Sequence: Synthetic oligonucleotide
  Sense strand starting at position 993 of SEQ ID NO: 913888
ccuggauacuguucucacu

SEQ ID NO: 961941 - RNA, 19 nt, Artificial Sequence
  Description of Artificial Sequence: Synthetic oligonucleotide
  Antisense strand to SEQ ID NO: 961940
agugagaacaguauccagg

SEQ ID NO: 961942 - RNA, 19 nt, Artificial Sequence
  Description of Artificial Sequence: Synthetic oligonucleotide
  Sense strand starting at position 474 of SEQ ID NO: 913888
gcuucucugccugaaauca

SEQ ID NO: 961943 - RNA, 19 nt, Artificial Sequence
  Description of Artificial Sequence: Synthetic oligonucleotide
  Antisense strand to SEQ ID NO: 961942
ugauuucaggcagagaagc

SEQ ID NO: 961944 - RNA, 19 nt, Artificial Sequence
  Description of Artificial Sequence: Synthetic oligonucleotide
  Sense strand starting at position 3109 of SEQ ID NO: 913888
gugugaaguauguaauagu

SEQ ID NO: 961945 - RNA, 19 nt, Artificial Sequence
  Description of Artificial Sequence: Synthetic oligonucleotide
  Antisense strand to SEQ ID NO: 961944
acuauuacauacuucacac

SEQ ID NO: 961946 - RNA, 19 nt, Artificial Sequence
  Description of Artificial Sequence: Synthetic oligonucleotide
  Sense strand starting at position 535 of SEQ ID NO: 913888
ggauuacaauaggaaauca

SEQ ID NO: 961947 - RNA, 19 nt, Artificial Sequence
  Description of Artificial Sequence: Synthetic oligonucleotide
  Antisense strand to SEQ ID NO: 961946
ugauuuccuauuguaaucc

SEQ ID NO: 961948 - RNA, 19 nt, Artificial Sequence
  Description of Artificial Sequence: Synthetic oligonucleotide
  Sense strand starting at position 3437 of SEQ ID NO: 913888
cagcuagacuuccugggua

SEQ ID NO: 961949 - RNA, 19 nt, Artificial Sequence
  Description of Artificial Sequence: Synthetic oligonucleotide
  Antisense strand to SEQ ID NO: 961948
uacccaggaagucuagcug

SEQ ID NO: 961950 - RNA, 19 nt, Artificial Sequence
  Description of Artificial Sequence: Synthetic oligonucleotide
  Sense strand starting at position 803 of SEQ ID NO: 913888
ucgauauuguaaccauucu

SEQ ID NO: 961951 - RNA, 19 nt, Artificial Sequence
  Description of Artificial Sequence: Synthetic oligonucleotide
  Antisense strand to SEQ ID NO: 961950
agaaugguuacaauaucga

SEQ ID NO: 961952 - RNA, 19 nt, Artificial Sequence
  Description of Artificial Sequence: Synthetic oligonucleotide
  Sense strand starting at position 600 of SEQ ID NO: 913888
gcauucuguguauaucacu

SEQ ID NO: 961953 - RNA, 19 nt, Artificial Sequence
  Description of Artificial Sequence: Synthetic oligonucleotide
  Antisense strand to SEQ ID NO: 961952
agugauauacacagaaugc

SEQ ID NO: 961954 - RNA, 19 nt, Artificial Sequence
  Description of Artificial Sequence: Synthetic oligonucleotide
  Sense strand starting at position 2593 of SEQ ID NO: 913888
ugcuuuauaugugucaaag

SEQ ID NO: 961955 - RNA, 19 nt, Artificial Sequence
  Description of Artificial Sequence: Synthetic oligonucleotide
  Antisense strand to SEQ ID NO: 961954
cuuugacacauauaaagca

SEQ ID NO: 961956 - RNA, 19 nt, Artificial Sequence
  Description of Artificial Sequence: Synthetic oligonucleotide
  Sense strand starting at position 3184 of SEQ ID NO: 913888
aguuaugaauuacaagaga

SEQ ID NO: 961957 - RNA, 19 nt, Artificial Sequence
  Description of Artificial Sequence: Synthetic oligonucleotide
  Antisense strand to SEQ ID NO: 961956
ucucuuguaauucauaacu

SEQ ID NO: 961958 - RNA, 19 nt, Artificial Sequence
  Description of Artificial Sequence: Synthetic oligonucleotide
  Sense strand starting at position 598 of SEQ ID NO: 913888
cggcauucuguguauauca

SEQ ID NO: 961959 - RNA, 19 nt, Artificial Sequence
  Description of Artificial Sequence: Synthetic oligonucleotide
  Antisense strand to SEQ ID NO: 961958
ugauauacacagaaugccg

SEQ ID NO: 961960 - RNA, 19 nt, Artificial Sequence
  Description of Artificial Sequence: Synthetic oligonucleotide
  Sense strand starting at position 472 of SEQ ID NO: 913888
augcuucucugccugaaau

SEQ ID NO: 961961 - RNA, 19 nt, Artificial Sequence
  Description of Artificial Sequence: Synthetic oligonucleotide
  Antisense strand to SEQ ID NO: 961960
auuucaggcagagaagcau

SEQ ID NO: 961962 - RNA, 19 nt, Artificial Sequence
  Description of Artificial Sequence: Synthetic oligonucleotide
  Sense strand starting at position 470 of SEQ ID NO: 913888
acaugcuucucugccugaa

SEQ ID NO: 961963 - RNA, 19 nt, Artificial Sequence
  Description of Artificial Sequence: Synthetic oligonucleotide
  Antisense strand to SEQ ID NO: 961962
uucaggcagagaagcaugu

SEQ ID NO: 961964 - RNA, 19 nt, Artificial Sequence
  Description of Artificial Sequence: Synthetic oligonucleotide
  Sense strand starting at position 1243 of SEQ ID NO: 913888
uggugcucaccaugacagu

SEQ ID NO: 961965 - RNA, 19 nt, Artificial Sequence
  Description of Artificial Sequence: Synthetic oligonucleotide
  Antisense strand to SEQ ID NO: 961964
acugucauggugagcacca

SEQ ID NO: 961966 - RNA, 19 nt, Artificial Sequence
  Description of Artificial Sequence: Synthetic oligonucleotide
  Sense strand starting at position 2591 of SEQ ID NO: 913888
auugcuuuauaugugucaa

SEQ ID NO: 961967 - RNA, 19 nt, Artificial Sequence
  Description of Artificial Sequence: Synthetic oligonucleotide
  Antisense strand to SEQ ID NO: 961966
uugacacauauaaagcaau

SEQ ID NO: 961968 - RNA, 19 nt, Artificial Sequence
  Description of Artificial Sequence: Synthetic oligonucleotide
  Sense strand starting at position 3062 of SEQ ID NO: 913889
cuagauacuuggguaauaa

SEQ ID NO: 961969 - RNA, 19 nt, Artificial Sequence
  Description of Artificial Sequence: Synthetic oligonucleotide
  Antisense strand to SEQ ID NO: 961968
uuauuacccaaguaucuag

SEQ ID NO: 961970 - RNA, 19 nt, Artificial Sequence
  Description of Artificial Sequence: Synthetic oligonucleotide
  Sense strand starting at position 185 of SEQ ID NO: 913889
uguugagaauaaguuaaag

SEQ ID NO: 961971 - RNA, 19 nt, Artificial Sequence
  Description of Artificial Sequence: Synthetic oligonucleotide
  Antisense strand to SEQ ID NO: 961970
cuuuaacuuauucucaaca

SEQ ID NO: 961972 - RNA, 19 nt, Artificial Sequence
  Description of Artificial Sequence: Synthetic oligonucleotide
  Sense strand starting at position 389 of SEQ ID NO: 913889
auuccuuuggguuauaaua

SEQ ID NO: 961973 - RNA, 19 nt, Artificial Sequence
  Description of Artificial Sequence: Synthetic oligonucleotide
  Antisense strand to SEQ ID NO: 961972
uauuauaacccaaaggaau

SEQ ID NO: 961974 - RNA, 19 nt, Artificial Sequence
  Description of Artificial Sequence: Synthetic oligonucleotide
  Sense strand starting at position 325 of SEQ ID NO: 913889
gggucucuucuauaaccaa

SEQ ID NO: 961975 - RNA, 19 nt, Artificial Sequence
  Description of Artificial Sequence: Synthetic oligonucleotide
  Antisense strand to SEQ ID NO: 961974
uugguuauagaagagaccc

SEQ ID NO: 961976 - RNA, 19 nt, Artificial Sequence
  Description of Artificial Sequence: Synthetic oligonucleotide
  Sense strand starting at position 700 of SEQ ID NO: 913889
ggaugacugcucuacucaa

SEQ ID NO: 961977 - RNA, 19 nt, Artificial Sequence
  Description of Artificial Sequence: Synthetic oligonucleotide
  Antisense strand to SEQ ID NO: 961976
uugaguagagcagucaucc

SEQ ID NO: 961978 - RNA, 19 nt, Artificial Sequence
  Description of Artificial Sequence: Synthetic oligonucleotide
  Sense strand starting at position 649 of SEQ ID NO: 913889
cuucuaugggcccaacaga

SEQ ID NO: 961979 - RNA, 19 nt, Artificial Sequence
  Description of Artificial Sequence: Synthetic oligonucleotide
  Antisense strand to SEQ ID NO: 961978
ucuguugggcccauagaag

SEQ ID NO: 961980 - RNA, 19 nt, Artificial Sequence
  Description of Artificial Sequence: Synthetic oligonucleotide
  Sense strand starting at position 3524 of SEQ ID NO: 913889
acaagaacuuugccuaaag

SEQ ID NO: 961981 - RNA, 19 nt, Artificial Sequence
  Description of Artificial Sequence: Synthetic oligonucleotide
  Antisense strand to SEQ ID NO: 961980
cuuuaggcaaaguucuugu

SEQ ID NO: 961982 - RNA, 19 nt, Artificial Sequence
  Description of Artificial Sequence: Synthetic oligonucleotide
  Sense strand starting at position 2613 of SEQ ID NO: 913889
ggugauuucuguucucuau

SEQ ID NO: 961983 - RNA, 19 nt, Artificial Sequence
  Description of Artificial Sequence: Synthetic oligonucleotide
  Antisense strand to SEQ ID NO: 961982
auagagaacagaaaucacc

SEQ ID NO: 961984 - RNA, 19 nt, Artificial Sequence
  Description of Artificial Sequence: Synthetic oligonucleotide
  Sense strand starting at position 1182 of SEQ ID NO: 913889
gagucacugguuuaaauau

SEQ ID NO: 961985 - RNA, 19 nt, Artificial Sequence
  Description of Artificial Sequence: Synthetic oligonucleotide
  Antisense strand to SEQ ID NO: 961984
auauuuaaaccagugacuc

SEQ ID NO: 961986 - RNA, 19 nt, Artificial Sequence
  Description of Artificial Sequence: Synthetic oligonucleotide
  Sense strand starting at position 2231 of SEQ ID NO: 913889
ggaauaaguucaguaugga

SEQ ID NO: 961987 - RNA, 19 nt, Artificial Sequence
  Description of Artificial Sequence: Synthetic oligonucleotide
  Antisense strand to SEQ ID NO: 961986
uccauacugaacuuauucc

SEQ ID NO: 961988 - RNA, 19 nt, Artificial Sequence
  Description of Artificial Sequence: Synthetic oligonucleotide
  Sense strand starting at position 2689 of SEQ ID NO: 913889
gguccuucucuagacugaa

SEQ ID NO: 961989 - RNA, 19 nt, Artificial Sequence
  Description of Artificial Sequence: Synthetic oligonucleotide
  Antisense strand to SEQ ID NO: 961988
uucagucuagagaaggacc

SEQ ID NO: 961990 - RNA, 19 nt, Artificial Sequence
  Description of Artificial Sequence: Synthetic oligonucleotide
  Sense strand starting at position 1360 of SEQ ID NO: 913889
aguuucuaagacuggauga

SEQ ID NO: 961991 - RNA, 19 nt, Artificial Sequence
  Description of Artificial Sequence: Synthetic oligonucleotide
  Antisense strand to SEQ ID NO: 961990
ucauccagucuuagaaacu

SEQ ID NO: 961992 - RNA, 19 nt, Artificial Sequence
  Description of Artificial Sequence: Synthetic oligonucleotide
  Sense strand starting at position 2287 of SEQ ID NO: 913889
uucgauagggcugaaucaa

SEQ ID NO: 961993 - RNA, 19 nt, Artificial Sequence
  Description of Artificial Sequence: Synthetic oligonucleotide
  Antisense strand to SEQ ID NO: 961992
uugauucagcccuaucgaa

SEQ ID NO: 961994 - RNA, 19 nt, Artificial Sequence
  Description of Artificial Sequence: Synthetic oligonucleotide
  Sense strand starting at position 3705 of SEQ ID NO: 913889
gguggaagaacaugcaaau

SEQ ID NO: 961995 - RNA, 19 nt, Artificial Sequence
  Description of Artificial Sequence: Synthetic oligonucleotide
  Antisense strand to SEQ ID NO: 961994
auuugcauguucuuccacc

SEQ ID NO: 961996 - RNA, 19 nt, Artificial Sequence
  Description of Artificial Sequence: Synthetic oligonucleotide
  Sense strand starting at position 2276 of SEQ ID NO: 913889
agaaauucuuauucgauag

SEQ ID NO: 961997 - RNA, 19 nt, Artificial Sequence
  Description of Artificial Sequence: Synthetic oligonucleotide
  Antisense strand to SEQ ID NO: 961996
cuaucgaauaagaauuucu

SEQ ID NO: 961998 - RNA, 19 nt, Artificial Sequence
  Description of Artificial Sequence: Synthetic oligonucleotide
  Sense strand starting at position 666 of SEQ ID NO: 913889
gaugauaagcugcaggauu

SEQ ID NO: 961999 - RNA, 19 nt, Artificial Sequence
  Description of Artificial Sequence: Synthetic oligonucleotide
  Antisense strand to SEQ ID NO: 961998
aauccugcagcuuaucauc

SEQ ID NO: 962000 - RNA, 19 nt, Artificial Sequence
  Description of Artificial Sequence: Synthetic oligonucleotide
  Sense strand starting at position 3469 of SEQ ID NO: 913889
guuuaagaugguugaaaga

SEQ ID NO: 962001 - RNA, 19 nt, Artificial Sequence
  Description of Artificial Sequence: Synthetic oligonucleotide
  Antisense strand to SEQ ID NO: 962000
ucuuucaaccaucuuaaac

SEQ ID NO: 962002 - RNA, 19 nt, Artificial Sequence
  Description of Artificial Sequence: Synthetic oligonucleotide
  Sense strand starting at position 3742 of SEQ ID NO: 913889
guuggaaauguuggacaaa

SEQ ID NO: 962003 - RNA, 19 nt, Artificial Sequence
  Description of Artificial Sequence: Synthetic oligonucleotide
  Antisense strand to SEQ ID NO: 962002
uuuguccaacauuuccaac

SEQ ID NO: 962004 - RNA, 19 nt, Artificial Sequence
  Description of Artificial Sequence: Synthetic oligonucleotide
  Sense strand starting at position 3409 of SEQ ID NO: 913889
guacucaauaggugagaga

SEQ ID NO: 962005 - RNA, 19 nt, Artificial Sequence
  Description of Artificial Sequence: Synthetic oligonucleotide
  Antisense strand to SEQ ID NO: 962004
ucucucaccuauugaguac

SEQ ID NO: 962006 - RNA, 19 nt, Artificial Sequence
  Description of Artificial Sequence: Synthetic oligonucleotide
  Sense strand starting at position 3053 of SEQ ID NO: 913889
gucacuauucuagauacuu

SEQ ID NO: 962007 - RNA, 19 nt, Artificial Sequence
  Description of Artificial Sequence: Synthetic oligonucleotide
  Antisense strand to SEQ ID NO: 962006
aaguaucuagaauagugac

SEQ ID NO: 962008 - RNA, 19 nt, Artificial Sequence
  Description of Artificial Sequence: Synthetic oligonucleotide
  Sense strand starting at position 3822 of SEQ ID NO: 913889
aagcuaugggagugaauga

SEQ ID NO: 962009 - RNA, 19 nt, Artificial Sequence
  Description of Artificial Sequence: Synthetic oligonucleotide
  Antisense strand to SEQ ID NO: 962008
ucauucacucccauagcuu

SEQ ID NO: 962010 - RNA, 19 nt, Artificial Sequence
  Description of Artificial Sequence: Synthetic oligonucleotide
  Sense strand starting at position 3108 of SEQ ID NO: 913889
gagaccauuguguaaaggu

SEQ ID NO: 962011 - RNA, 19 nt, Artificial Sequence
  Description of Artificial Sequence: Synthetic oligonucleotide
  Antisense strand to SEQ ID NO: 962010
accuuuacacaauggucuc

SEQ ID NO: 962012 - RNA, 19 nt, Artificial Sequence
  Description of Artificial Sequence: Synthetic oligonucleotide
  Sense strand starting at position 3378 of SEQ ID NO: 913889
cgggcugugcguaaagaug

SEQ ID NO: 962013 - RNA, 19 nt, Artificial Sequence
  Description of Artificial Sequence: Synthetic oligonucleotide
  Antisense strand to SEQ ID NO: 962012
caucuuuacgcacagcccg

SEQ ID NO: 962014 - RNA, 19 nt, Artificial Sequence
  Description of Artificial Sequence: Synthetic oligonucleotide
  Sense strand starting at position 3104 of SEQ ID NO: 913889
uaaagagaccauuguguaa

SEQ ID NO: 962015 - RNA, 19 nt, Artificial Sequence
  Description of Artificial Sequence: Synthetic oligonucleotide
  Antisense strand to SEQ ID NO: 962014
uuacacaauggucucuuua

SEQ ID NO: 962016 - RNA, 19 nt, Artificial Sequence
  Description of Artificial Sequence: Synthetic oligonucleotide
  Sense strand starting at position 94 of SEQ ID NO: 913889
uccacagaucaggguauua

SEQ ID NO: 962017 - RNA, 19 nt, Artificial Sequence
  Description of Artificial Sequence: Synthetic oligonucleotide
  Antisense strand to SEQ ID NO: 962016
uaauacccugaucugugga

SEQ ID NO: 962018 - RNA, 19 nt, Artificial Sequence
  Description of Artificial Sequence: Synthetic oligonucleotide
  Sense strand starting at position 84 of SEQ ID NO: 913889
aggcaaucuguccacagau

SEQ ID NO: 962019 - RNA, 19 nt, Artificial Sequence
  Description of Artificial Sequence: Synthetic oligonucleotide
  Antisense strand to SEQ ID NO: 962018
aucuguggacagauugccu

SEQ ID NO: 962020 - RNA, 19 nt, Artificial Sequence
  Description of Artificial Sequence: Synthetic oligonucleotide
  Sense strand starting at position 2426 of SEQ ID NO: 913889
uaagacuagcaggguaaau

SEQ ID NO: 962021 - RNA, 19 nt, Artificial Sequence
  Description of Artificial Sequence: Synthetic oligonucleotide
  Antisense strand to SEQ ID NO: 962020
auuuacccugcuagucuua

SEQ ID NO: 962022 - RNA, 19 nt, Artificial Sequence
  Description of Artificial Sequence: Synthetic oligonucleotide
  Sense strand starting at position 2425 of SEQ ID NO: 913889
uuaagacuagcaggguaaa

SEQ ID NO: 962023 - RNA, 19 nt, Artificial Sequence
  Description of Artificial Sequence: Synthetic oligonucleotide
  Antisense strand to SEQ ID NO: 962022
uuuacccugcuagucuuaa

SEQ ID NO: 962024 - RNA, 19 nt, Artificial Sequence
  Description of Artificial Sequence: Synthetic oligonucleotide
  Sense strand starting at position 2580 of SEQ ID NO: 913889
ugauuaucuguguacuaga

SEQ ID NO: 962025 - RNA, 19 nt, Artificial Sequence
  Description of Artificial Sequence: Synthetic oligonucleotide
  Antisense strand to SEQ ID NO: 962024
ucuaguacacagauaauca

SEQ ID NO: 962026 - RNA, 19 nt, Artificial Sequence
  Description of Artificial Sequence: Synthetic oligonucleotide
  Sense strand starting at position 536 of SEQ ID NO: 913889
uauuuagagcugugucacu

SEQ ID NO: 962027 - RNA, 19 nt, Artificial Sequence
  Description of Artificial Sequence: Synthetic oligonucleotide
  Antisense strand to SEQ ID NO: 962026
agugacacagcucuaaaua

SEQ ID NO: 962028 - RNA, 19 nt, Artificial Sequence
  Description of Artificial Sequence: Synthetic oligonucleotide
  Sense strand starting at position 3407 of SEQ ID NO: 913889
auguacucaauaggugaga

SEQ ID NO: 962029 - RNA, 19 nt, Artificial Sequence
  Description of Artificial Sequence: Synthetic oligonucleotide
  Antisense strand to SEQ ID NO: 962028
ucucaccuauugaguacau

SEQ ID NO: 962030 - RNA, 19 nt, Artificial Sequence
  Description of Artificial Sequence: Synthetic oligonucleotide
  Sense strand starting at position 3187 of SEQ ID NO: 913889
uaauaagugcuacaggagu

SEQ ID NO: 962031 - RNA, 19 nt, Artificial Sequence
  Description of Artificial Sequence: Synthetic oligonucleotide
  Antisense strand to SEQ ID NO: 962030
acuccuguagcacuuauua

SEQ ID NO: 962032 - RNA, 19 nt, Artificial Sequence
  Description of Artificial Sequence: Synthetic oligonucleotide
  Sense strand starting at position 3468 of SEQ ID NO: 913889
uguuuaagaugguugaaag

SEQ ID NO: 962033 - RNA, 19 nt, Artificial Sequence
  Description of Artificial Sequence: Synthetic oligonucleotide
  Antisense strand to SEQ ID NO: 962032
cuuucaaccaucuuaaaca

SEQ ID NO: 962034 - RNA, 19 nt, Artificial Sequence
  Description of Artificial Sequence: Synthetic oligonucleotide
  Sense strand starting at position 1361 of SEQ ID NO: 913889
guuucuaagacuggaugau

SEQ ID NO: 962035 - RNA, 19 nt, Artificial Sequence
  Description of Artificial Sequence: Synthetic oligonucleotide
  Antisense strand to SEQ ID NO: 962034
aucauccagucuuagaaac

SEQ ID NO: 962036 - RNA, 19 nt, Artificial Sequence
  Description of Artificial Sequence: Synthetic oligonucleotide
  Sense strand starting at position 3270 of SEQ ID NO: 913889
agagguuuaagauguuaug

SEQ ID NO: 962037 - RNA, 19 nt, Artificial Sequence
  Description of Artificial Sequence: Synthetic oligonucleotide
  Antisense strand to SEQ ID NO: 962036
cauaacaucuuaaaccucu

SEQ ID NO: 962038 - RNA, 19 nt, Artificial Sequence
  Description of Artificial Sequence: Synthetic oligonucleotide
  Sense strand starting at position 86 of SEQ ID NO: 913889
gcaaucuguccacagauca

SEQ ID NO: 962039 - RNA, 19 nt, Artificial Sequence
  Description of Artificial Sequence: Synthetic oligonucleotide
  Antisense strand to SEQ ID NO: 962038
ugaucuguggacagauugc

SEQ ID NO: 962040 - RNA, 19 nt, Artificial Sequence
  Description of Artificial Sequence: Synthetic oligonucleotide
  Sense strand starting at position 3058 of SEQ ID NO: 913889
uauucuagauacuugggua

SEQ ID NO: 962041 - RNA, 19 nt, Artificial Sequence
  Description of Artificial Sequence: Synthetic oligonucleotide
  Antisense strand to SEQ ID NO: 962040
uacccaaguaucuagaaua

SEQ ID NO: 962042 - RNA, 19 nt, Artificial Sequence
  Description of Artificial Sequence: Synthetic oligonucleotide
  Sense strand starting at position 2218 of SEQ ID NO: 913889
acccuauugcaugggaaua

SEQ ID NO: 962043 - RNA, 19 nt, Artificial Sequence
  Description of Artificial Sequence: Synthetic oligonucleotide
  Antisense strand to SEQ ID NO: 962042
uauucccaugcaauagggu

SEQ ID NO: 962044 - RNA, 19 nt, Artificial Sequence
  Description of Artificial Sequence: Synthetic oligonucleotide
  Sense strand starting at position 2974 of SEQ ID NO: 913889
cuauaauaugaugguagua

SEQ ID NO: 962045 - RNA, 19 nt, Artificial Sequence
  Description of Artificial Sequence: Synthetic oligonucleotide
  Antisense strand to SEQ ID NO: 962044
uacuaccaucauauuauag

SEQ ID NO: 962046 - RNA, 19 nt, Artificial Sequence
  Description of Artificial Sequence: Synthetic oligonucleotide
  Sense strand starting at position 3460 of SEQ ID NO: 913889
gugacugguguuuaagaug

SEQ ID NO: 962047 - RNA, 19 nt, Artificial Sequence
  Description of Artificial Sequence: Synthetic oligonucleotide
  Antisense strand to SEQ ID NO: 962046
caucuuaaacaccagucac

SEQ ID NO: 962048 - RNA, 19 nt, Artificial Sequence
  Description of Artificial Sequence: Synthetic oligonucleotide
  Sense strand starting at position 3659 of SEQ ID NO: 913890
cuagaaauaucugugacag

SEQ ID NO: 962049 - RNA, 19 nt, Artificial Sequence
  Description of Artificial Sequence: Synthetic oligonucleotide
  Antisense strand to SEQ ID NO: 962048
cugucacagauauuucuag

SEQ ID NO: 962050 - RNA, 19 nt, Artificial Sequence
  Description of Artificial Sequence: Synthetic oligonucleotide
  Sense strand starting at position 3480 of SEQ ID NO: 913890
ugugacagauucucagaaa

SEQ ID NO: 962051 - RNA, 19 nt, Artificial Sequence
  Description of Artificial Sequence: Synthetic oligonucleotide
  Antisense strand to SEQ ID NO: 962050
uuucugagaaucugucaca

SEQ ID NO: 962052 - RNA, 19 nt, Artificial Sequence
  Description of Artificial Sequence: Synthetic oligonucleotide
  Sense strand starting at position 3650 of SEQ ID NO: 913890
ccaggcaagcuagaaauau

SEQ ID NO: 962053 - RNA, 19 nt, Artificial Sequence
  Description of Artificial Sequence: Synthetic oligonucleotide
  Antisense strand to SEQ ID NO: 962052
auauuucuagcuugccugg

SEQ ID NO: 962054 - RNA, 19 nt, Artificial Sequence
  Description of Artificial Sequence: Synthetic oligonucleotide
  Sense strand starting at position 467 of SEQ ID NO: 913890
gugugauuagcucugcucu

SEQ ID NO: 962055 - RNA, 19 nt, Artificial Sequence
  Description of Artificial Sequence: Synthetic oligonucleotide
  Antisense strand to SEQ ID NO: 962054
agagcagagcuaaucacac

SEQ ID NO: 962056 - RNA, 19 nt, Artificial Sequence
  Description of Artificial Sequence: Synthetic oligonucleotide
  Sense strand starting at position 2931 of SEQ ID NO: 913890
uggcuagugccuuccugua

SEQ ID NO: 962057 - RNA, 19 nt, Artificial Sequence
  Description of Artificial Sequence: Synthetic oligonucleotide
  Antisense strand to SEQ ID NO: 962056
uacaggaaggcacuagcca

SEQ ID NO: 962058 - RNA, 19 nt, Artificial Sequence
  Description of Artificial Sequence: Synthetic oligonucleotide
  Sense strand starting at position 3347 of SEQ ID NO: 913890
auggaacuuguuuacaagu

SEQ ID NO: 962059 - RNA, 19 nt, Artificial Sequence
  Description of Artificial Sequence: Synthetic oligonucleotide
  Antisense strand to SEQ ID NO: 962058
acuuguaaacaaguuccau

SEQ ID NO: 962060 - RNA, 19 nt, Artificial Sequence
  Description of Artificial Sequence: Synthetic oligonucleotide
  Sense strand starting at position 536 of SEQ ID NO: 913890
guucgaugccuuguguuaa

SEQ ID NO: 962061 - RNA, 19 nt, Artificial Sequence
  Description of Artificial Sequence: Synthetic oligonucleotide
  Antisense strand to SEQ ID NO: 962060
uuaacacaaggcaucgaac

SEQ ID NO: 962062 - RNA, 19 nt, Artificial Sequence
  Description of Artificial Sequence: Synthetic oligonucleotide
  Sense strand starting at position 2569 of SEQ ID NO: 913890
uguaaaugagcgagcggau

SEQ ID NO: 962063 - RNA, 19 nt, Artificial Sequence
  Description of Artificial Sequence: Synthetic oligonucleotide
  Antisense strand to SEQ ID NO: 962062
auccgcucgcucauuuaca

SEQ ID NO: 962064 - RNA, 19 nt, Artificial Sequence
  Description of Artificial Sequence: Synthetic oligonucleotide
  Sense strand starting at position 3367 of SEQ ID NO: 913890
gccuuuccucguuuaucuu

SEQ ID NO: 962065 - RNA, 19 nt, Artificial Sequence
  Description of Artificial Sequence: Synthetic oligonucleotide
  Antisense strand to SEQ ID NO: 962064
aagauaaacgaggaaaggc

SEQ ID NO: 962066 - RNA, 19 nt, Artificial Sequence
  Description of Artificial Sequence: Synthetic oligonucleotide
  Sense strand starting at position 3797 of SEQ ID NO: 913890
gucuuauuuaugggcagua

SEQ ID NO: 962067 - RNA, 19 nt, Artificial Sequence
  Description of Artificial Sequence: Synthetic oligonucleotide
  Antisense strand to SEQ ID NO: 962066
uacugcccauaaauaagac

SEQ ID NO: 962068 - RNA, 19 nt, Artificial Sequence
  Description of Artificial Sequence: Synthetic oligonucleotide
  Sense strand starting at position 270 of SEQ ID NO: 913890
ggaguauuagaaugcagga

SEQ ID NO: 962069 - RNA, 19 nt, Artificial Sequence
  Description of Artificial Sequence: Synthetic oligonucleotide
  Antisense strand to SEQ ID NO: 962068
uccugcauucuaauacucc

SEQ ID NO: 962070 - RNA, 19 nt, Artificial Sequence
  Description of Artificial Sequence: Synthetic oligonucleotide
  Sense strand starting at position 3346 of SEQ ID NO: 913890
uauggaacuuguuuacaag

SEQ ID NO: 962071 - RNA, 19 nt, Artificial Sequence
  Description of Artificial Sequence: Synthetic oligonucleotide
  Antisense strand to SEQ ID NO: 962070
cuuguaaacaaguuccaua

SEQ ID NO: 962072 - RNA, 19 nt, Artificial Sequence
  Description of Artificial Sequence: Synthetic oligonucleotide
  Sense strand starting at position 3028 of SEQ ID NO: 913890
cuggucuaucagggaugga

SEQ ID NO: 962073 - RNA, 19 nt, Artificial Sequence
  Description of Artificial Sequence: Synthetic oligonucleotide
  Antisense strand to SEQ ID NO: 962072
uccaucccugauagaccag

SEQ ID NO: 962074 - RNA, 19 nt, Artificial Sequence
  Description of Artificial Sequence: Synthetic oligonucleotide
  Sense strand starting at position 937 of SEQ ID NO: 913890
auaucuggucuuugggaaa

SEQ ID NO: 962075 - RNA, 19 nt, Artificial Sequence
  Description of Artificial Sequence: Synthetic oligonucleotide
  Antisense strand to SEQ ID NO: 962074
uuucccaaagaccagauau

SEQ ID NO: 962076 - RNA, 19 nt, Artificial Sequence
  Description of Artificial Sequence: Synthetic oligonucleotide
  Sense strand starting at position 936 of SEQ ID NO: 913890
gauaucuggucuuugggaa

SEQ ID NO: 962077 - RNA, 19 nt, Artificial Sequence
  Description of Artificial Sequence: Synthetic oligonucleotide
  Antisense strand to SEQ ID NO: 962076
uucccaaagaccagauauc

SEQ ID NO: 962078 - RNA, 19 nt, Artificial Sequence
  Description of Artificial Sequence: Synthetic oligonucleotide
  Sense strand starting at position 2828 of SEQ ID NO: 913890
uucuguuagcuauaacaag

SEQ ID NO: 962079 - RNA, 19 nt, Artificial Sequence
  Description of Artificial Sequence: Synthetic oligonucleotide
  Antisense strand to SEQ ID NO: 962078
cuuguuauagcuaacagaa

SEQ ID NO: 962080 - RNA, 19 nt, Artificial Sequence
  Description of Artificial Sequence: Synthetic oligonucleotide
  Sense strand starting at position 2869 of SEQ ID NO: 913890
gccuauggcagucaaagaa

SEQ ID NO: 962081 - RNA, 19 nt, Artificial Sequence
  Description of Artificial Sequence: Synthetic oligonucleotide
  Antisense strand to SEQ ID NO: 962080
uucuuugacugccauaggc

SEQ ID NO: 962082 - RNA, 19 nt, Artificial Sequence
  Description of Artificial Sequence: Synthetic oligonucleotide
  Sense strand starting at position 258 of SEQ ID NO: 913890
ucugaaagagcuggaguau

SEQ ID NO: 962083 - RNA, 19 nt, Artificial Sequence
  Description of Artificial Sequence: Synthetic oligonucleotide
  Antisense strand to SEQ ID NO: 962082
auacuccagcucuuucaga

SEQ ID NO: 962084 - RNA, 19 nt, Artificial Sequence
  Description of Artificial Sequence: Synthetic oligonucleotide
  Sense strand starting at position 257 of SEQ ID NO: 913890
uucugaaagagcuggagua

SEQ ID NO: 962085 - RNA, 19 nt, Artificial Sequence
  Description of Artificial Sequence: Synthetic oligonucleotide
  Antisense strand to SEQ ID NO: 962084
uacuccagcucuuucagaa

SEQ ID NO: 962086 - RNA, 19 nt, Artificial Sequence
  Description of Artificial Sequence: Synthetic oligonucleotide
  Sense strand starting at position 922 of SEQ ID NO: 913890
uagggcucugacuggauau

SEQ ID NO: 962087 - RNA, 19 nt, Artificial Sequence
  Description of Artificial Sequence: Synthetic oligonucleotide
  Antisense strand to SEQ ID NO: 962086
auauccagucagagcccua

SEQ ID NO: 962088 - RNA, 19 nt, Artificial Sequence
  Description of Artificial Sequence: Synthetic oligonucleotide
  Sense strand starting at position 3660 of SEQ ID NO: 913890
uagaaauaucugugacagc

SEQ ID NO: 962089 - RNA, 19 nt, Artificial Sequence
  Description of Artificial Sequence: Synthetic oligonucleotide
  Antisense strand to SEQ ID NO: 962088
gcugucacagauauuucua

SEQ ID NO: 962090 - RNA, 19 nt, Artificial Sequence
  Description of Artificial Sequence: Synthetic oligonucleotide
  Sense strand starting at position 672 of SEQ ID NO: 913890
cugguucugaggugacaga

SEQ ID NO: 962091 - RNA, 19 nt, Artificial Sequence
  Description of Artificial Sequence: Synthetic oligonucleotide
  Antisense strand to SEQ ID NO: 962090
ucugucaccucagaaccag

SEQ ID NO: 962092 - RNA, 19 nt, Artificial Sequence
  Description of Artificial Sequence: Synthetic oligonucleotide
  Sense strand starting at position 3631 of SEQ ID NO: 913890
cccuuaaaugucugggacu

SEQ ID NO: 962093 - RNA, 19 nt, Artificial Sequence
  Description of Artificial Sequence: Synthetic oligonucleotide
  Antisense strand to SEQ ID NO: 962092
agucccagacauuuaaggg

SEQ ID NO: 962094 - RNA, 19 nt, Artificial Sequence
  Description of Artificial Sequence: Synthetic oligonucleotide
  Sense strand starting at position 3961 of SEQ ID NO: 913890
cugaaaucugccggaauga

SEQ ID NO: 962095 - RNA, 19 nt, Artificial Sequence
  Description of Artificial Sequence: Synthetic oligonucleotide
  Antisense strand to SEQ ID NO: 962094
ucauuccggcagauuucag

SEQ ID NO: 962096 - RNA, 19 nt, Artificial Sequence
  Description of Artificial Sequence: Synthetic oligonucleotide
  Sense strand starting at position 550 of SEQ ID NO: 913890
guuaaagggcacuauuguu

SEQ ID NO: 962097 - RNA, 19 nt, Artificial Sequence
  Description of Artificial Sequence: Synthetic oligonucleotide
  Antisense strand to SEQ ID NO: 962096
aacaauagugcccuuuaac

SEQ ID NO: 962098 - RNA, 19 nt, Artificial Sequence
  Description of Artificial Sequence: Synthetic oligonucleotide
  Sense strand starting at position 3974 of SEQ ID NO: 913890
gaaugaagucacugugagu

SEQ ID NO: 962099 - RNA, 19 nt, Artificial Sequence
  Description of Artificial Sequence: Synthetic oligonucleotide
  Antisense strand to SEQ ID NO: 962098
acucacagugacuucauuc

SEQ ID NO: 962100 - RNA, 19 nt, Artificial Sequence
  Description of Artificial Sequence: Synthetic oligonucleotide
  Sense strand starting at position 458 of SEQ ID NO: 913890
auggguauagugugauuag

SEQ ID NO: 962101 - RNA, 19 nt, Artificial Sequence
  Description of Artificial Sequence: Synthetic oligonucleotide
  Antisense strand to SEQ ID NO: 962100
cuaaucacacuauacccau

SEQ ID NO: 962102 - RNA, 19 nt, Artificial Sequence
  Description of Artificial Sequence: Synthetic oligonucleotide
  Sense strand starting at position 240 of SEQ ID NO: 913890
ccaagugaaagcugaaguu

SEQ ID NO: 962103 - RNA, 19 nt, Artificial Sequence
  Description of Artificial Sequence: Synthetic oligonucleotide
  Antisense strand to SEQ ID NO: 962102
aacuucagcuuucacuugg

SEQ ID NO: 962104 - RNA, 19 nt, Artificial Sequence
  Description of Artificial Sequence: Synthetic oligonucleotide
  Sense strand starting at position 3298 of SEQ ID NO: 913890
gucagucacuuuccacaau

SEQ ID NO: 962105 - RNA, 19 nt, Artificial Sequence
  Description of Artificial Sequence: Synthetic oligonucleotide
  Antisense strand to SEQ ID NO: 962104
auuguggaaagugacugac

SEQ ID NO: 962106 - RNA, 19 nt, Artificial Sequence
  Description of Artificial Sequence: Synthetic oligonucleotide
  Sense strand starting at position 180 of SEQ ID NO: 913890
ugacauguauugccauauu

SEQ ID NO: 962107 - RNA, 19 nt, Artificial Sequence
  Description of Artificial Sequence: Synthetic oligonucleotide
  Antisense strand to SEQ ID NO: 962106
aauauggcaauacauguca

SEQ ID NO: 962108 - RNA, 19 nt, Artificial Sequence
  Description of Artificial Sequence: Synthetic oligonucleotide
  Sense strand starting at position 746 of SEQ ID NO: 913890
gugucuuccaaaggucaga

SEQ ID NO: 962109 - RNA, 19 nt, Artificial Sequence
  Description of Artificial Sequence: Synthetic oligonucleotide
  Antisense strand to SEQ ID NO: 962108
ucugaccuuuggaagacac

SEQ ID NO: 962110 - RNA, 19 nt, Artificial Sequence
  Description of Artificial Sequence: Synthetic oligonucleotide
  Sense strand starting at position 530 of SEQ ID NO: 913890
gagaaaguucgaugccuug

SEQ ID NO: 962111 - RNA, 19 nt, Artificial Sequence
  Description of Artificial Sequence: Synthetic oligonucleotide
  Antisense strand to SEQ ID NO: 962110
caaggcaucgaacuuucuc

SEQ ID NO: 962112 - RNA, 19 nt, Artificial Sequence
  Description of Artificial Sequence: Synthetic oligonucleotide
  Sense strand starting at position 1047 of SEQ ID NO: 913890
cuguaauccuguccugaau

SEQ ID NO: 962113 - RNA, 19 nt, Artificial Sequence
  Description of Artificial Sequence: Synthetic oligonucleotide
  Antisense strand to SEQ ID NO: 962112
auucaggacaggauuacag

SEQ ID NO: 962114 - RNA, 19 nt, Artificial Sequence
  Description of Artificial Sequence: Synthetic oligonucleotide
  Sense strand starting at position 1498 of SEQ ID NO: 913890
ggagccuaccuuugagguu

SEQ ID NO: 962115 - RNA, 19 nt, Artificial Sequence
  Description of Artificial Sequence: Synthetic oligonucleotide
  Antisense strand to SEQ ID NO: 962114
aaccucaaagguaggcucc

SEQ ID NO: 962116 - RNA, 19 nt, Artificial Sequence
  Description of Artificial Sequence: Synthetic oligonucleotide
  Sense strand starting at position 2816 of SEQ ID NO: 913890
ugaacugagugguucuguu

SEQ ID NO: 962117 - RNA, 19 nt, Artificial Sequence
  Description of Artificial Sequence: Synthetic oligonucleotide
  Antisense strand to SEQ ID NO: 962116
aacagaaccacucaguuca

SEQ ID NO: 962118 - RNA, 19 nt, Artificial Sequence
  Description of Artificial Sequence: Synthetic oligonucleotide
  Sense strand starting at position 3243 of SEQ ID NO: 913890
cacaauucguguccugaca

SEQ ID NO: 962119 - RNA, 19 nt, Artificial Sequence
  Description of Artificial Sequence: Synthetic oligonucleotide
  Antisense strand to SEQ ID NO: 962118
ugucaggacacgaauugug

SEQ ID NO: 962120 - RNA, 19 nt, Artificial Sequence
  Description of Artificial Sequence: Synthetic oligonucleotide
  Sense strand starting at position 438 of SEQ ID NO: 913890
ugguucuccucaucuguaa

SEQ ID NO: 962121 - RNA, 19 nt, Artificial Sequence
  Description of Artificial Sequence: Synthetic oligonucleotide
  Antisense strand to SEQ ID NO: 962120
uuacagaugaggagaacca

SEQ ID NO: 962122 - RNA, 19 nt, Artificial Sequence
  Description of Artificial Sequence: Synthetic oligonucleotide
  Sense strand starting at position 740 of SEQ ID NO: 913890
ccagcagugucuuccaaag

SEQ ID NO: 962123 - RNA, 19 nt, Artificial Sequence
  Description of Artificial Sequence: Synthetic oligonucleotide
  Antisense strand to SEQ ID NO: 962122
cuuuggaagacacugcugg

SEQ ID NO: 962124 - RNA, 19 nt, Artificial Sequence
  Description of Artificial Sequence: Synthetic oligonucleotide
  Sense strand starting at position 3677 of SEQ ID NO: 913890
gccacugucucucuggaau

SEQ ID NO: 962125 - RNA, 19 nt, Artificial Sequence
  Description of Artificial Sequence: Synthetic oligonucleotide
  Antisense strand to SEQ ID NO: 962124
auuccagagagacaguggc

SEQ ID NO: 962126 - RNA, 19 nt, Artificial Sequence
  Description of Artificial Sequence: Synthetic oligonucleotide
  Sense strand starting at position 707 of SEQ ID NO: 913890
ggaauuuaguagggucuga

SEQ ID NO: 962127 - RNA, 19 nt, Artificial Sequence
  Description of Artificial Sequence: Synthetic oligonucleotide
  Antisense strand to SEQ ID NO: 962126
ucagacccuacuaaauucc

SEQ ID NO: 962128 - RNA, 19 nt, Artificial Sequence
  Description of Artificial Sequence: Synthetic oligonucleotide
  Sense strand starting at position 3613 of SEQ ID NO: 913891
uccagauauccugagucuc

SEQ ID NO: 962129 - RNA, 19 nt, Artificial Sequence
  Description of Artificial Sequence: Synthetic oligonucleotide
  Antisense strand to SEQ ID NO: 962128
gagacucaggauaucugga

SEQ ID NO: 962130 - RNA, 19 nt, Artificial Sequence
  Description of Artificial Sequence: Synthetic oligonucleotide
  Sense strand starting at position 2392 of SEQ ID NO: 913891
ugaaaucgcacaggaagau

SEQ ID NO: 962131 - RNA, 19 nt, Artificial Sequence
  Description of Artificial Sequence: Synthetic oligonucleotide
  Antisense strand to SEQ ID NO: 962130
aucuuccugugcgauuuca

SEQ ID NO: 962132 - RNA, 19 nt, Artificial Sequence
  Description of Artificial Sequence: Synthetic oligonucleotide
  Sense strand starting at position 643 of SEQ ID NO: 913891
guauucuuugaaugagauu

SEQ ID NO: 962133 - RNA, 19 nt, Artificial Sequence
  Description of Artificial Sequence: Synthetic oligonucleotide
  Antisense strand to SEQ ID NO: 962132
aaucucauucaaagaauac

SEQ ID NO: 962134 - RNA, 19 nt, Artificial Sequence
  Description of Artificial Sequence: Synthetic oligonucleotide
  Sense strand starting at position 1734 of SEQ ID NO: 913891
cucggaggccuccaaauau

SEQ ID NO: 962135 - RNA, 19 nt, Artificial Sequence
  Description of Artificial Sequence: Synthetic oligonucleotide
  Antisense strand to SEQ ID NO: 962134
auauuuggaggccuccgag

SEQ ID NO: 962136 - RNA, 19 nt, Artificial Sequence
  Description of Artificial Sequence: Synthetic oligonucleotide
  Sense strand starting at position 639 of SEQ ID NO: 913891
ucuaguauucuuugaauga

SEQ ID NO: 962137 - RNA, 19 nt, Artificial Sequence
  Description of Artificial Sequence: Synthetic oligonucleotide
  Antisense strand to SEQ ID NO: 962136
ucauucaaagaauacuaga

SEQ ID NO: 962138 - RNA, 19 nt, Artificial Sequence
  Description of Artificial Sequence: Synthetic oligonucleotide
  Sense strand starting at position 3547 of SEQ ID NO: 913891
aggcgggagguuuaaguau

SEQ ID NO: 962139 - RNA, 19 nt, Artificial Sequence
  Description of Artificial Sequence: Synthetic oligonucleotide
  Antisense strand to SEQ ID NO: 962138
auacuuaaaccucccgccu

SEQ ID NO: 962140 - RNA, 19 nt, Artificial Sequence
  Description of Artificial Sequence: Synthetic oligonucleotide
  Sense strand starting at position 3656 of SEQ ID NO: 913891
acccgacuucgagacugua

SEQ ID NO: 962141 - RNA, 19 nt, Artificial Sequence
  Description of Artificial Sequence: Synthetic oligonucleotide
  Antisense strand to SEQ ID NO: 962140
uacagucucgaagucgggu

SEQ ID NO: 962142 - RNA, 19 nt, Artificial Sequence
  Description of Artificial Sequence: Synthetic oligonucleotide
  Sense strand starting at position 2316 of SEQ ID NO: 913891
cuuugaugccucuagggua

SEQ ID NO: 962143 - RNA, 19 nt, Artificial Sequence
  Description of Artificial Sequence: Synthetic oligonucleotide
  Antisense strand to SEQ ID NO: 962142
uacccuagaggcaucaaag

SEQ ID NO: 962144 - RNA, 19 nt, Artificial Sequence
  Description of Artificial Sequence: Synthetic oligonucleotide
  Sense strand starting at position 3588 of SEQ ID NO: 913891
gaggaaggcuucucuuucu

SEQ ID NO: 962145 - RNA, 19 nt, Artificial Sequence
  Description of Artificial Sequence: Synthetic oligonucleotide
  Antisense strand to SEQ ID NO: 962144
agaaagagaagccuuccuc

SEQ ID NO: 962146 - RNA, 19 nt, Artificial Sequence
  Description of Artificial Sequence: Synthetic oligonucleotide
  Sense strand starting at position 635 of SEQ ID NO: 913891
ccauucuaguauucuuuga

SEQ ID NO: 962147 - RNA, 19 nt, Artificial Sequence
  Description of Artificial Sequence: Synthetic oligonucleotide
  Antisense strand to SEQ ID NO: 962146
ucaaagaauacuagaaugg

SEQ ID NO: 962148 - RNA, 19 nt, Artificial Sequence
  Description of Artificial Sequence: Synthetic oligonucleotide
  Sense strand starting at position 2198 of SEQ ID NO: 913891
acucucgguuccucaaaga

SEQ ID NO: 962149 - RNA, 19 nt, Artificial Sequence
  Description of Artificial Sequence: Synthetic oligonucleotide
  Antisense strand to SEQ ID NO: 962148
ucuuugaggaaccgagagu

SEQ ID NO: 962150 - RNA, 19 nt, Artificial Sequence
  Description of Artificial Sequence: Synthetic oligonucleotide
  Sense strand starting at position 2378 of SEQ ID NO: 913891
ggagguggcuugucugaaa

SEQ ID NO: 962151 - RNA, 19 nt, Artificial Sequence
  Description of Artificial Sequence: Synthetic oligonucleotide
  Antisense strand to SEQ ID NO: 962150
uuucagacaagccaccucc

SEQ ID NO: 962152 - RNA, 19 nt, Artificial Sequence
  Description of Artificial Sequence: Synthetic oligonucleotide
  Sense strand starting at position 2544 of SEQ ID NO: 913891
gagagauccugccuauguc

SEQ ID NO: 962153 - RNA, 19 nt, Artificial Sequence
  Description of Artificial Sequence: Synthetic oligonucleotide
  Antisense strand to SEQ ID NO: 962152
gacauaggcaggaucucuc

SEQ ID NO: 962154 - RNA, 19 nt, Artificial Sequence
  Description of Artificial Sequence: Synthetic oligonucleotide
  Sense strand starting at position 500 of SEQ ID NO: 913891
gggaguaagcgcugagaga

SEQ ID NO: 962155 - RNA, 19 nt, Artificial Sequence
  Description of Artificial Sequence: Synthetic oligonucleotide
  Antisense strand to SEQ ID NO: 962154
ucucucagcgcuuacuccc

SEQ ID NO: 962156 - RNA, 19 nt, Artificial Sequence
  Description of Artificial Sequence: Synthetic oligonucleotide
  Sense strand starting at position 2728 of SEQ ID NO: 913891
ccuacuacagcuuguagau

SEQ ID NO: 962157 - RNA, 19 nt, Artificial Sequence
  Description of Artificial Sequence: Synthetic oligonucleotide
  Antisense strand to SEQ ID NO: 962156
aucuacaagcuguaguagg

SEQ ID NO: 962158 - RNA, 19 nt, Artificial Sequence
  Description of Artificial Sequence: Synthetic oligonucleotide
  Sense strand starting at position 3703 of SEQ ID NO: 913891
gugagucugcccuagugau

SEQ ID NO: 962159 - RNA, 19 nt, Artificial Sequence
  Description of Artificial Sequence: Synthetic oligonucleotide
  Antisense strand to SEQ ID NO: 962158
aucacuagggcagacucac

SEQ ID NO: 962160 - RNA, 19 nt, Artificial Sequence
  Description of Artificial Sequence: Synthetic oligonucleotide
  Sense strand starting at position 527 of SEQ ID NO: 913891
uggauugaaucacauugga

SEQ ID NO: 962161 - RNA, 19 nt, Artificial Sequence
  Description of Artificial Sequence: Synthetic oligonucleotide
  Antisense strand to SEQ ID NO: 962160
uccaaugugauucaaucca

SEQ ID NO: 962162 - RNA, 19 nt, Artificial Sequence
  Description of Artificial Sequence: Synthetic oligonucleotide
  Sense strand starting at position 3692 of SEQ ID NO: 913891
gagguaggucugugagucu

SEQ ID NO: 962163 - RNA, 19 nt, Artificial Sequence
  Description of Artificial Sequence: Synthetic oligonucleotide
  Antisense strand to SEQ ID NO: 962162
agacucacagaccuaccuc

SEQ ID NO: 962164 - RNA, 19 nt, Artificial Sequence
  Description of Artificial Sequence: Synthetic oligonucleotide
  Sense strand starting at position 449 of SEQ ID NO: 913891
ggaccugauugggaguaga

SEQ ID NO: 962165 - RNA, 19 nt, Artificial Sequence
  Description of Artificial Sequence: Synthetic oligonucleotide
  Antisense strand to SEQ ID NO: 962164
ucuacucccaaucaggucc

SEQ ID NO: 962166 - RNA, 19 nt, Artificial Sequence
  Description of Artificial Sequence: Synthetic oligonucleotide
  Sense strand starting at position 3201 of SEQ ID NO: 913891
gggagaagcugauaaacuu

SEQ ID NO: 962167 - RNA, 19 nt, Artificial Sequence
  Description of Artificial Sequence: Synthetic oligonucleotide
  Antisense strand to SEQ ID NO: 962166
aaguuuaucagcuucuccc

SEQ ID NO: 962168 - RNA, 19 nt, Artificial Sequence
  Description of Artificial Sequence: Synthetic oligonucleotide
  Sense strand starting at position 2332 of SEQ ID NO: 913891
guacaaugccugcacguua

SEQ ID NO: 962169 - RNA, 19 nt, Artificial Sequence
  Description of Artificial Sequence: Synthetic oligonucleotide
  Antisense strand to SEQ ID NO: 962168
uaacgugcaggcauuguac

SEQ ID NO: 962170 - RNA, 19 nt, Artificial Sequence
  Description of Artificial Sequence: Synthetic oligonucleotide
  Sense strand starting at position 646 of SEQ ID NO: 913891
uucuuugaaugagauuaug

SEQ ID NO: 962171 - RNA, 19 nt, Artificial Sequence
  Description of Artificial Sequence: Synthetic oligonucleotide
  Antisense strand to SEQ ID NO: 962170
cauaaucucauucaaagaa

SEQ ID NO: 962172 - RNA, 19 nt, Artificial Sequence
  Description of Artificial Sequence: Synthetic oligonucleotide
  Sense strand starting at position 1615 of SEQ ID NO: 913891
uaaguuugaguccgucacu

SEQ ID NO: 962173 - RNA, 19 nt, Artificial Sequence
  Description of Artificial Sequence: Synthetic oligonucleotide
  Antisense strand to SEQ ID NO: 962172
agugacggacucaaacuua

SEQ ID NO: 962174 - RNA, 19 nt, Artificial Sequence
  Description of Artificial Sequence: Synthetic oligonucleotide
  Sense strand starting at position 640 of SEQ ID NO: 913891
cuaguauucuuugaaugag

SEQ ID NO: 962175 - RNA, 19 nt, Artificial Sequence
  Description of Artificial Sequence: Synthetic oligonucleotide
  Antisense strand to SEQ ID NO: 962174
cucauucaaagaauacuag

SEQ ID NO: 962176 - RNA, 19 nt, Artificial Sequence
  Description of Artificial Sequence: Synthetic oligonucleotide
  Sense strand starting at position 1817 of SEQ ID NO: 913891
ggcuucuggucgccaaguu

SEQ ID NO: 962177 - RNA, 19 nt, Artificial Sequence
  Description of Artificial Sequence: Synthetic oligonucleotide
  Antisense strand to SEQ ID NO: 962176
aacuuggcgaccagaagcc

SEQ ID NO: 962178 - RNA, 19 nt, Artificial Sequence
  Description of Artificial Sequence: Synthetic oligonucleotide
  Sense strand starting at position 3621 of SEQ ID NO: 913891
uccugagucucccggaaac

SEQ ID NO: 962179 - RNA, 19 nt, Artificial Sequence
  Description of Artificial Sequence: Synthetic oligonucleotide
  Antisense strand to SEQ ID NO: 962178
guuuccgggagacucagga

SEQ ID NO: 962180 - RNA, 19 nt, Artificial Sequence
  Description of Artificial Sequence: Synthetic oligonucleotide
  Sense strand starting at position 10 of SEQ ID NO: 913891
gagucaucuugccaaggcu

SEQ ID NO: 962181 - RNA, 19 nt, Artificial Sequence
  Description of Artificial Sequence: Synthetic oligonucleotide
  Antisense strand to SEQ ID NO: 962180
agccuuggcaagaugacuc

SEQ ID NO: 962182 - RNA, 19 nt, Artificial Sequence
  Description of Artificial Sequence: Synthetic oligonucleotide
  Sense strand starting at position 3774 of SEQ ID NO: 913891
gugguaugcucaggaacca

SEQ ID NO: 962183 - RNA, 19 nt, Artificial Sequence
  Description of Artificial Sequence: Synthetic oligonucleotide
  Antisense strand to SEQ ID NO: 962182
ugguuccugagcauaccac

SEQ ID NO: 962184 - RNA, 19 nt, Artificial Sequence
  Description of Artificial Sequence: Synthetic oligonucleotide
  Sense strand starting at position 629 of SEQ ID NO: 913891
gugcuaccauucuaguauu

SEQ ID NO: 962185 - RNA, 19 nt, Artificial Sequence
  Description of Artificial Sequence: Synthetic oligonucleotide
  Antisense strand to SEQ ID NO: 962184
aauacuagaaugguagcac

SEQ ID NO: 962186 - RNA, 19 nt, Artificial Sequence
  Description of Artificial Sequence: Synthetic oligonucleotide
  Sense strand starting at position 2430 of SEQ ID NO: 913891
agcucauuguccugacuag

SEQ ID NO: 962187 - RNA, 19 nt, Artificial Sequence
  Description of Artificial Sequence: Synthetic oligonucleotide
  Antisense strand to SEQ ID NO: 962186
cuagucaggacaaugagcu

SEQ ID NO: 962188 - RNA, 19 nt, Artificial Sequence
  Description of Artificial Sequence: Synthetic oligonucleotide
  Sense strand starting at position 2742 of SEQ ID NO: 913891
uagauaguaucccagcguu

SEQ ID NO: 962189 - RNA, 19 nt, Artificial Sequence
  Description of Artificial Sequence: Synthetic oligonucleotide
  Antisense strand to SEQ ID NO: 962188
aacgcugggauacuaucua

SEQ ID NO: 962190 - RNA, 19 nt, Artificial Sequence
  Description of Artificial Sequence: Synthetic oligonucleotide
  Sense strand starting at position 3556 of SEQ ID NO: 913891
guuuaaguaucccgguuua

SEQ ID NO: 962191 - RNA, 19 nt, Artificial Sequence
  Description of Artificial Sequence: Synthetic oligonucleotide
  Antisense strand to SEQ ID NO: 962190
uaaaccgggauacuuaaac

SEQ ID NO: 962192 - RNA, 19 nt, Artificial Sequence
  Description of Artificial Sequence: Synthetic oligonucleotide
  Sense strand starting at position 2678 of SEQ ID NO: 913892
guguuuauccaccaaggag

SEQ ID NO: 962193 - RNA, 19 nt, Artificial Sequence
  Description of Artificial Sequence: Synthetic oligonucleotide
  Antisense strand to SEQ ID NO: 962192
cuccuugguggauaaacac

SEQ ID NO: 962194 - RNA, 19 nt, Artificial Sequence
  Description of Artificial Sequence: Synthetic oligonucleotide
  Sense strand starting at position 2667 of SEQ ID NO: 913892
agggaaaugaaguguuuau

SEQ ID NO: 962195 - RNA, 19 nt, Artificial Sequence
  Description of Artificial Sequence: Synthetic oligonucleotide
  Antisense strand to SEQ ID NO: 962194
auaaacacuucauuucccu

SEQ ID NO: 962196 - RNA, 19 nt, Artificial Sequence
  Description of Artificial Sequence: Synthetic oligonucleotide
  Sense strand starting at position 2648 of SEQ ID NO: 913892
aggagcucugcucaggaga

SEQ ID NO: 962197 - RNA, 19 nt, Artificial Sequence
  Description of Artificial Sequence: Synthetic oligonucleotide
  Antisense strand to SEQ ID NO: 962196
ucuccugagcagagcuccu

SEQ ID NO: 962198 - RNA, 19 nt, Artificial Sequence
  Description of Artificial Sequence: Synthetic oligonucleotide
  Sense strand starting at position 1020 of SEQ ID NO: 913892
ggcagaggucuaggagaau

SEQ ID NO: 962199 - RNA, 19 nt, Artificial Sequence
  Description of Artificial Sequence: Synthetic oligonucleotide
  Antisense strand to SEQ ID NO: 962198
auucuccuagaccucugcc

SEQ ID NO: 962200 - RNA, 19 nt, Artificial Sequence
  Description of Artificial Sequence: Synthetic oligonucleotide
  Sense strand starting at position 454 of SEQ ID NO: 913892
ggcagaguugcagacagau

SEQ ID NO: 962201 - RNA, 19 nt, Artificial Sequence
  Description of Artificial Sequence: Synthetic oligonucleotide
  Antisense strand to SEQ ID NO: 962200
aucugucugcaacucugcc

SEQ ID NO: 962202 - RNA, 19 nt, Artificial Sequence
  Description of Artificial Sequence: Synthetic oligonucleotide
  Sense strand starting at position 2674 of SEQ ID NO: 913892
ugaaguguuuauccaccaa

SEQ ID NO: 962203 - RNA, 19 nt, Artificial Sequence
  Description of Artificial Sequence: Synthetic oligonucleotide
  Antisense strand to SEQ ID NO: 962202
uugguggauaaacacuuca

SEQ ID NO: 962204 - RNA, 19 nt, Artificial Sequence
  Description of Artificial Sequence: Synthetic oligonucleotide
  Sense strand starting at position 1515 of SEQ ID NO: 913892
aguguguuucggcuguagu

SEQ ID NO: 962205 - RNA, 19 nt, Artificial Sequence
  Description of Artificial Sequence: Synthetic oligonucleotide
  Antisense strand to SEQ ID NO: 962204
acuacagccgaaacacacu

SEQ ID NO: 962206 - RNA, 19 nt, Artificial Sequence
  Description of Artificial Sequence: Synthetic oligonucleotide
  Sense strand starting at position 3524 of SEQ ID NO: 913892
cucccuuaggcuuauggua

SEQ ID NO: 962207 - RNA, 19 nt, Artificial Sequence
  Description of Artificial Sequence: Synthetic oligonucleotide
  Antisense strand to SEQ ID NO: 962206
uaccauaagccuaagggag

SEQ ID NO: 962208 - RNA, 19 nt, Artificial Sequence
  Description of Artificial Sequence: Synthetic oligonucleotide
  Sense strand starting at position 3720 of SEQ ID NO: 913892
agguucggguacuuuagaa

SEQ ID NO: 962209 - RNA, 19 nt, Artificial Sequence
  Description of Artificial Sequence: Synthetic oligonucleotide
  Antisense strand to SEQ ID NO: 962208
uucuaaaguacccgaaccu

SEQ ID NO: 962210 - RNA, 19 nt, Artificial Sequence
  Description of Artificial Sequence: Synthetic oligonucleotide
  Sense strand starting at position 3633 of SEQ ID NO: 913892
agacuauuauggcucucga

SEQ ID NO: 962211 - RNA, 19 nt, Artificial Sequence
  Description of Artificial Sequence: Synthetic oligonucleotide
  Antisense strand to SEQ ID NO: 962210
ucgagagccauaauagucu

SEQ ID NO: 962212 - RNA, 19 nt, Artificial Sequence
  Description of Artificial Sequence: Synthetic oligonucleotide
  Sense strand starting at position 1581 of SEQ ID NO: 913892
cgagcauguguguagauag

SEQ ID NO: 962213 - RNA, 19 nt, Artificial Sequence
  Description of Artificial Sequence: Synthetic oligonucleotide
  Antisense strand to SEQ ID NO: 962212
cuaucuacacacaugcucg

SEQ ID NO: 962214 - RNA, 19 nt, Artificial Sequence
  Description of Artificial Sequence: Synthetic oligonucleotide
  Sense strand starting at position 3497 of SEQ ID NO: 913892
ugaguaaucucccugccug

SEQ ID NO: 962215 - RNA, 19 nt, Artificial Sequence
  Description of Artificial Sequence: Synthetic oligonucleotide
  Antisense strand to SEQ ID NO: 962214
caggcagggagauuacuca

SEQ ID NO: 962216 - RNA, 19 nt, Artificial Sequence
  Description of Artificial Sequence: Synthetic oligonucleotide
  Sense strand starting at position 2698 of SEQ ID NO: 913892
ucuggaauauuagaacuga

SEQ ID NO: 962217 - RNA, 19 nt, Artificial Sequence
  Description of Artificial Sequence: Synthetic oligonucleotide
  Antisense strand to SEQ ID NO: 962216
ucaguucuaauauuccaga

SEQ ID NO: 962218 - RNA, 19 nt, Artificial Sequence
  Description of Artificial Sequence: Synthetic oligonucleotide
  Sense strand starting at position 2739 of SEQ ID NO: 913892
agcucaaauuuccaccgau

SEQ ID NO: 962219 - RNA, 19 nt, Artificial Sequence
  Description of Artificial Sequence: Synthetic oligonucleotide
  Antisense strand to SEQ ID NO: 962218
aucgguggaaauuugagcu

SEQ ID NO: 962220 - RNA, 19 nt, Artificial Sequence
  Description of Artificial Sequence: Synthetic oligonucleotide
  Sense strand starting at position 1674 of SEQ ID NO: 913892
gaguuugugcgugaagggu

SEQ ID NO: 962221 - RNA, 19 nt, Artificial Sequence
  Description of Artificial Sequence: Synthetic oligonucleotide
  Antisense strand to SEQ ID NO: 962220
acccuucacgcacaaacuc

SEQ ID NO: 962222 - RNA, 19 nt, Artificial Sequence
  Description of Artificial Sequence: Synthetic oligonucleotide
  Sense strand starting at position 1561 of SEQ ID NO: 913892
cgucaacaugagugugcaa

SEQ ID NO: 962223 - RNA, 19 nt, Artificial Sequence
  Description of Artificial Sequence: Synthetic oligonucleotide
  Antisense strand to SEQ ID NO: 962222
uugcacacucauguugacg

SEQ ID NO: 962224 - RNA, 19 nt, Artificial Sequence
  Description of Artificial Sequence: Synthetic oligonucleotide
  Sense strand starting at position 1659 of SEQ ID NO: 913892
gggugagcguaucuugagu

SEQ ID NO: 962225 - RNA, 19 nt, Artificial Sequence
  Description of Artificial Sequence: Synthetic oligonucleotide
  Antisense strand to SEQ ID NO: 962224
acucaagauacgcucaccc

SEQ ID NO: 962226 - RNA, 19 nt, Artificial Sequence
  Description of Artificial Sequence: Synthetic oligonucleotide
  Sense strand starting at position 1670 of SEQ ID NO: 913892
ucuugaguuugugcgugaa

SEQ ID NO: 962227 - RNA, 19 nt, Artificial Sequence
  Description of Artificial Sequence: Synthetic oligonucleotide
  Antisense strand to SEQ ID NO: 962226
uucacgcacaaacucaaga

SEQ ID NO: 962228 - RNA, 19 nt, Artificial Sequence
  Description of Artificial Sequence: Synthetic oligonucleotide
  Sense strand starting at position 1580 of SEQ ID NO: 913892
gcgagcauguguguagaua

SEQ ID NO: 962229 - RNA, 19 nt, Artificial Sequence
  Description of Artificial Sequence: Synthetic oligonucleotide
  Antisense strand to SEQ ID NO: 962228
uaucuacacacaugcucgc

SEQ ID NO: 962230 - RNA, 19 nt, Artificial Sequence
  Description of Artificial Sequence: Synthetic oligonucleotide
  Sense strand starting at position 3529 of SEQ ID NO: 913892
uuaggcuuaugguagaaca

SEQ ID NO: 962231 - RNA, 19 nt, Artificial Sequence
  Description of Artificial Sequence: Synthetic oligonucleotide
  Antisense strand to SEQ ID NO: 962230
uguucuaccauaagccuaa

SEQ ID NO: 962232 - RNA, 19 nt, Artificial Sequence
  Description of Artificial Sequence: Synthetic oligonucleotide
  Sense strand starting at position 3359 of SEQ ID NO: 913892
cgaauugccucuuauagac

SEQ ID NO: 962233 - RNA, 19 nt, Artificial Sequence
  Description of Artificial Sequence: Synthetic oligonucleotide
  Antisense strand to SEQ ID NO: 962232
gucuauaagaggcaauucg

SEQ ID NO: 962234 - RNA, 19 nt, Artificial Sequence
  Description of Artificial Sequence: Synthetic oligonucleotide
  Sense strand starting at position 2650 of SEQ ID NO: 913892
gagcucugcucaggagaag

SEQ ID NO: 962235 - RNA, 19 nt, Artificial Sequence
  Description of Artificial Sequence: Synthetic oligonucleotide
  Antisense strand to SEQ ID NO: 962234
cuucuccugagcagagcuc

SEQ ID NO: 962236 - RNA, 19 nt, Artificial Sequence
  Description of Artificial Sequence: Synthetic oligonucleotide
  Sense strand starting at position 3166 of SEQ ID NO: 913892
cucugacucuccugaguag

SEQ ID NO: 962237 - RNA, 19 nt, Artificial Sequence
  Description of Artificial Sequence: Synthetic oligonucleotide
  Antisense strand to SEQ ID NO: 962236
cuacucaggagagucagag

SEQ ID NO: 962238 - RNA, 19 nt, Artificial Sequence
  Description of Artificial Sequence: Synthetic oligonucleotide
  Sense strand starting at position 1516 of SEQ ID NO: 913892
guguguuucggcuguagug

SEQ ID NO: 962239 - RNA, 19 nt, Artificial Sequence
  Description of Artificial Sequence: Synthetic oligonucleotide
  Antisense strand to SEQ ID NO: 962238
cacuacagccgaaacacac

SEQ ID NO: 962240 - RNA, 19 nt, Artificial Sequence
  Description of Artificial Sequence: Synthetic oligonucleotide
  Sense strand starting at position 3654 of SEQ ID NO: 913892
ugggcuguuuccuauuacu

SEQ ID NO: 962241 - RNA, 19 nt, Artificial Sequence
  Description of Artificial Sequence: Synthetic oligonucleotide
  Antisense strand to SEQ ID NO: 962240
aguaauaggaaacagccca

SEQ ID NO: 962242 - RNA, 19 nt, Artificial Sequence
  Description of Artificial Sequence: Synthetic oligonucleotide
  Sense strand starting at position 3526 of SEQ ID NO: 913892
cccuuaggcuuaugguaga

SEQ ID NO: 962243 - RNA, 19 nt, Artificial Sequence
  Description of Artificial Sequence: Synthetic oligonucleotide
  Antisense strand to SEQ ID NO: 962242
ucuaccauaagccuaaggg

SEQ ID NO: 962244 - RNA, 19 nt, Artificial Sequence
  Description of Artificial Sequence: Synthetic oligonucleotide
  Sense strand starting at position 490 of SEQ ID NO: 913892
gagagcaucugcgagcaua

SEQ ID NO: 962245 - RNA, 19 nt, Artificial Sequence
  Description of Artificial Sequence: Synthetic oligonucleotide
  Antisense strand to SEQ ID NO: 962244
uaugcucgcagaugcucuc

SEQ ID NO: 962246 - RNA, 19 nt, Artificial Sequence
  Description of Artificial Sequence: Synthetic oligonucleotide
  Sense strand starting at position 3548 of SEQ ID NO: 913892
uaaacuaucucgggucuuu

SEQ ID NO: 962247 - RNA, 19 nt, Artificial Sequence
  Description of Artificial Sequence: Synthetic oligonucleotide
  Antisense strand to SEQ ID NO: 962246
aaagacccgagauaguuua

SEQ ID NO: 962248 - RNA, 19 nt, Artificial Sequence
  Description of Artificial Sequence: Synthetic oligonucleotide
  Sense strand starting at position 1596 of SEQ ID NO: 913892
auaggugaaucccgagcuu

SEQ ID NO: 962249 - RNA, 19 nt, Artificial Sequence
  Description of Artificial Sequence: Synthetic oligonucleotide
  Antisense strand to SEQ ID NO: 962248
aagcucgggauucaccuau

SEQ ID NO: 962250 - RNA, 19 nt, Artificial Sequence
  Description of Artificial Sequence: Synthetic oligonucleotide
  Sense strand starting at position 3695 of SEQ ID NO: 913892
cugcaaauauaguguccua

SEQ ID NO: 962251 - RNA, 19 nt, Artificial Sequence
  Description of Artificial Sequence: Synthetic oligonucleotide
  Antisense strand to SEQ ID NO: 962250
uaggacacuauauuugcag

SEQ ID NO: 962252 - RNA, 19 nt, Artificial Sequence
  Description of Artificial Sequence: Synthetic oligonucleotide
  Sense strand starting at position 1232 of SEQ ID NO: 913892
ggacauuccugcugucgga

SEQ ID NO: 962253 - RNA, 19 nt, Artificial Sequence
  Description of Artificial Sequence: Synthetic oligonucleotide
  Antisense strand to SEQ ID NO: 962252
uccgacagcaggaaugucc

SEQ ID NO: 962254 - RNA, 19 nt, Artificial Sequence
  Description of Artificial Sequence: Synthetic oligonucleotide
  Sense strand starting at position 2469 of SEQ ID NO: 913892
ggaaguuauucuugcgguc

SEQ ID NO: 962255 - RNA, 19 nt, Artificial Sequence
  Description of Artificial Sequence: Synthetic oligonucleotide
  Antisense strand to SEQ ID NO: 962254
gaccgcaagaauaacuucc

SEQ ID NO: 962256 - RNA, 19 nt, Artificial Sequence
  Description of Artificial Sequence: Synthetic oligonucleotide
  Sense strand starting at position 1661 of SEQ ID NO: 913892
gugagcguaucuugaguuu

SEQ ID NO: 962257 - RNA, 19 nt, Artificial Sequence
  Description of Artificial Sequence: Synthetic oligonucleotide
  Antisense strand to SEQ ID NO: 962256
aaacucaagauacgcucac

SEQ ID NO: 962258 - RNA, 19 nt, Artificial Sequence
  Description of Artificial Sequence: Synthetic oligonucleotide
  Sense strand starting at position 1633 of SEQ ID NO: 913892
cagcgccugucuugaugua

SEQ ID NO: 962259 - RNA, 19 nt, Artificial Sequence
  Description of Artificial Sequence: Synthetic oligonucleotide
  Antisense strand to SEQ ID NO: 962258
uacaucaagacaggcgcug

SEQ ID NO: 962260 - RNA, 19 nt, Artificial Sequence
  Description of Artificial Sequence: Synthetic oligonucleotide
  Sense strand starting at position 3696 of SEQ ID NO: 913893
guguuuauccaccaaggag

SEQ ID NO: 962261 - RNA, 19 nt, Artificial Sequence
  Description of Artificial Sequence: Synthetic oligonucleotide
  Antisense strand to SEQ ID NO: 962260
cuccuugguggauaaacac

SEQ ID NO: 962262 - RNA, 19 nt, Artificial Sequence
  Description of Artificial Sequence: Synthetic oligonucleotide
  Sense strand starting at position 3685 of SEQ ID NO: 913893
agggaaaugaaguguuuau

SEQ ID NO: 962263 - RNA, 19 nt, Artificial Sequence
  Description of Artificial Sequence: Synthetic oligonucleotide
  Antisense strand to SEQ ID NO: 962262
auaaacacuucauuucccu

SEQ ID NO: 962264 - RNA, 19 nt, Artificial Sequence
  Description of Artificial Sequence: Synthetic oligonucleotide
  Sense strand starting at position 377 of SEQ ID NO: 913893
gccuuacuuccucaaggaa

SEQ ID NO: 962265 - RNA, 19 nt, Artificial Sequence
  Description of Artificial Sequence: Synthetic oligonucleotide
  Antisense strand to SEQ ID NO: 962264
uuccuugaggaaguaaggc

SEQ ID NO: 962266 - RNA, 19 nt, Artificial Sequence
  Description of Artificial Sequence: Synthetic oligonucleotide
  Sense strand starting at position 3666 of SEQ ID NO: 913893
aggagcucugcucaggaga

SEQ ID NO: 962267 - RNA, 19 nt, Artificial Sequence
  Description of Artificial Sequence: Synthetic oligonucleotide
  Antisense strand to SEQ ID NO: 962266
ucuccugagcagagcuccu

SEQ ID NO: 962268 - RNA, 19 nt, Artificial Sequence
  Description of Artificial Sequence: Synthetic oligonucleotide
  Sense strand starting at position 2038 of SEQ ID NO: 913893
ggcagaggucuaggagaau

SEQ ID NO: 962269 - RNA, 19 nt, Artificial Sequence
  Description of Artificial Sequence: Synthetic oligonucleotide
  Antisense strand to SEQ ID NO: 962268
auucuccuagaccucugcc

SEQ ID NO: 962270 - RNA, 19 nt, Artificial Sequence
  Description of Artificial Sequence: Synthetic oligonucleotide
  Sense strand starting at position 770 of SEQ ID NO: 913893
ucaccuugacagugggaua

SEQ ID NO: 962271 - RNA, 19 nt, Artificial Sequence
  Description of Artificial Sequence: Synthetic oligonucleotide
  Antisense strand to SEQ ID NO: 962270
uaucccacugucaagguga

SEQ ID NO: 962272 - RNA, 19 nt, Artificial Sequence
  Description of Artificial Sequence: Synthetic oligonucleotide
  Sense strand starting at position 285 of SEQ ID NO: 913893
gguuguuaaaucugagaag

SEQ ID NO: 962273 - RNA, 19 nt, Artificial Sequence
  Description of Artificial Sequence: Synthetic oligonucleotide
  Antisense strand to SEQ ID NO: 962272
cuucucagauuuaacaacc

SEQ ID NO: 962274 - RNA, 19 nt, Artificial Sequence
  Description of Artificial Sequence: Synthetic oligonucleotide
  Sense strand starting at position 1472 of SEQ ID NO: 913893
ggcagaguugcagacagau

SEQ ID NO: 962275 - RNA, 19 nt, Artificial Sequence
  Description of Artificial Sequence: Synthetic oligonucleotide
  Antisense strand to SEQ ID NO: 962274
aucugucugcaacucugcc

SEQ ID NO: 962276 - RNA, 19 nt, Artificial Sequence
  Description of Artificial Sequence: Synthetic oligonucleotide
  Sense strand starting at position 944 of SEQ ID NO: 913893
gguaguagcccugaaccaa

SEQ ID NO: 962277 - RNA, 19 nt, Artificial Sequence
  Description of Artificial Sequence: Synthetic oligonucleotide
  Antisense strand to SEQ ID NO: 962276
uugguucagggcuacuacc

SEQ ID NO: 962278 - RNA, 19 nt, Artificial Sequence
  Description of Artificial Sequence: Synthetic oligonucleotide
  Sense strand starting at position 303 of SEQ ID NO: 913893
gagagaaucggaggccuuu

SEQ ID NO: 962279 - RNA, 19 nt, Artificial Sequence
  Description of Artificial Sequence: Synthetic oligonucleotide
  Antisense strand to SEQ ID NO: 962278
aaaggccuccgauucucuc

SEQ ID NO: 962280 - RNA, 19 nt, Artificial Sequence
  Description of Artificial Sequence: Synthetic oligonucleotide
  Sense strand starting at position 376 of SEQ ID NO: 913893
agccuuacuuccucaagga

SEQ ID NO: 962281 - RNA, 19 nt, Artificial Sequence
  Description of Artificial Sequence: Synthetic oligonucleotide
  Antisense strand to SEQ ID NO: 962280
uccuugaggaaguaaggcu

SEQ ID NO: 962282 - RNA, 19 nt, Artificial Sequence
  Description of Artificial Sequence: Synthetic oligonucleotide
  Sense strand starting at position 3692 of SEQ ID NO: 913893
ugaaguguuuauccaccaa

SEQ ID NO: 962283 - RNA, 19 nt, Artificial Sequence
  Description of Artificial Sequence: Synthetic oligonucleotide
  Antisense strand to SEQ ID NO: 962282
uugguggauaaacacuuca

SEQ ID NO: 962284 - RNA, 19 nt, Artificial Sequence
  Description of Artificial Sequence: Synthetic oligonucleotide
  Sense strand starting at position 2533 of SEQ ID NO: 913893
aguguguuucggcuguagu

SEQ ID NO: 962285 - RNA, 19 nt, Artificial Sequence
  Description of Artificial Sequence: Synthetic oligonucleotide
  Antisense strand to SEQ ID NO: 962284
acuacagccgaaacacacu

SEQ ID NO: 962286 - RNA, 19 nt, Artificial Sequence
  Description of Artificial Sequence: Synthetic oligonucleotide
  Sense strand starting at position 892 of SEQ ID NO: 913893
guagcauugugaucaggga

SEQ ID NO: 962287 - RNA, 19 nt, Artificial Sequence
  Description of Artificial Sequence: Synthetic oligonucleotide
  Antisense strand to SEQ ID NO: 962286
ucccugaucacaaugcuac

SEQ ID NO: 962288 - RNA, 19 nt, Artificial Sequence
  Description of Artificial Sequence: Synthetic oligonucleotide
  Sense strand starting at position 2599 of SEQ ID NO: 913893
cgagcauguguguagauag

SEQ ID NO: 962289 - RNA, 19 nt, Artificial Sequence
  Description of Artificial Sequence: Synthetic oligonucleotide
  Antisense strand to SEQ ID NO: 962288
cuaucuacacacaugcucg

SEQ ID NO: 962290 - RNA, 19 nt, Artificial Sequence
  Description of Artificial Sequence: Synthetic oligonucleotide
  Sense strand starting at position 3716 of SEQ ID NO: 913893
ucuggaauauuagaacuga

SEQ ID NO: 962291 - RNA, 19 nt, Artificial Sequence
  Description of Artificial Sequence: Synthetic oligonucleotide
  Antisense strand to SEQ ID NO: 962290
ucaguucuaauauuccaga

SEQ ID NO: 962292 - RNA, 19 nt, Artificial Sequence
  Description of Artificial Sequence: Synthetic oligonucleotide
  Sense strand starting at position 3757 of SEQ ID NO: 913893
agcucaaauuuccaccgau

SEQ ID NO: 962293 - RNA, 19 nt, Artificial Sequence
  Description of Artificial Sequence: Synthetic oligonucleotide
  Antisense strand to SEQ ID NO: 962292
aucgguggaaauuugagcu

SEQ ID NO: 962294 - RNA, 19 nt, Artificial Sequence
  Description of Artificial Sequence: Synthetic oligonucleotide
  Sense strand starting at position 2692 of SEQ ID NO: 913893
gaguuugugcgugaagggu

SEQ ID NO: 962295 - RNA, 19 nt, Artificial Sequence
  Description of Artificial Sequence: Synthetic oligonucleotide
  Antisense strand to SEQ ID NO: 962294
acccuucacgcacaaacuc

SEQ ID NO: 962296 - RNA, 19 nt, Artificial Sequence
  Description of Artificial Sequence: Synthetic oligonucleotide
  Sense strand starting at position 726 of SEQ ID NO: 913893
ugggcaugcuguccacuua

SEQ ID NO: 962297 - RNA, 19 nt, Artificial Sequence
  Description of Artificial Sequence: Synthetic oligonucleotide
  Antisense strand to SEQ ID NO: 962296
uaaguggacagcaugccca

SEQ ID NO: 962298 - RNA, 19 nt, Artificial Sequence
  Description of Artificial Sequence: Synthetic oligonucleotide
  Sense strand starting at position 2579 of SEQ ID NO: 913893
cgucaacaugagugugcaa

SEQ ID NO: 962299 - RNA, 19 nt, Artificial Sequence
  Description of Artificial Sequence: Synthetic oligonucleotide
  Antisense strand to SEQ ID NO: 962298
uugcacacucauguugacg

SEQ ID NO: 962300 - RNA, 19 nt, Artificial Sequence
  Description of Artificial Sequence: Synthetic oligonucleotide
  Sense strand starting at position 2677 of SEQ ID NO: 913893
gggugagcguaucuugagu

SEQ ID NO: 962301 - RNA, 19 nt, Artificial Sequence
  Description of Artificial Sequence: Synthetic oligonucleotide
  Antisense strand to SEQ ID NO: 962300
acucaagauacgcucaccc

SEQ ID NO: 962302 - RNA, 19 nt, Artificial Sequence
  Description of Artificial Sequence: Synthetic oligonucleotide
  Sense strand starting at position 286 of SEQ ID NO: 913893
guuguuaaaucugagaaga

SEQ ID NO: 962303 - RNA, 19 nt, Artificial Sequence
  Description of Artificial Sequence: Synthetic oligonucleotide
  Antisense strand to SEQ ID NO: 962302
ucuucucagauuuaacaac

SEQ ID NO: 962304 - RNA, 19 nt, Artificial Sequence
  Description of Artificial Sequence: Synthetic oligonucleotide
  Sense strand starting at position 2688 of SEQ ID NO: 913893
ucuugaguuugugcgugaa

SEQ ID NO: 962305 - RNA, 19 nt, Artificial Sequence
  Description of Artificial Sequence: Synthetic oligonucleotide
  Antisense strand to SEQ ID NO: 962304
uucacgcacaaacucaaga

SEQ ID NO: 962306 - RNA, 19 nt, Artificial Sequence
  Description of Artificial Sequence: Synthetic oligonucleotide
  Sense strand starting at position 2598 of SEQ ID NO: 913893
gcgagcauguguguagaua

SEQ ID NO: 962307 - RNA, 19 nt, Artificial Sequence
  Description of Artificial Sequence: Synthetic oligonucleotide
  Antisense strand to SEQ ID NO: 962306
uaucuacacacaugcucgc

SEQ ID NO: 962308 - RNA, 19 nt, Artificial Sequence
  Description of Artificial Sequence: Synthetic oligonucleotide
  Sense strand starting at position 3668 of SEQ ID NO: 913893
gagcucugcucaggagaag

SEQ ID NO: 962309 - RNA, 19 nt, Artificial Sequence
  Description of Artificial Sequence: Synthetic oligonucleotide
  Antisense strand to SEQ ID NO: 962308
cuucuccugagcagagcuc

SEQ ID NO: 962310 - RNA, 19 nt, Artificial Sequence
  Description of Artificial Sequence: Synthetic oligonucleotide
  Sense strand starting at position 2534 of SEQ ID NO: 913893
guguguuucggcuguagug

SEQ ID NO: 962311 - RNA, 19 nt, Artificial Sequence
  Description of Artificial Sequence: Synthetic oligonucleotide
  Antisense strand to SEQ ID NO: 962310
cacuacagccgaaacacac

SEQ ID NO: 962312 - RNA, 19 nt, Artificial Sequence
  Description of Artificial Sequence: Synthetic oligonucleotide
  Sense strand starting at position 889 of SEQ ID NO: 913893
auaguagcauugugaucag

SEQ ID NO: 962313 - RNA, 19 nt, Artificial Sequence
  Description of Artificial Sequence: Synthetic oligonucleotide
  Antisense strand to SEQ ID NO: 962312
cugaucacaaugcuacuau

SEQ ID NO: 962314 - RNA, 19 nt, Artificial Sequence
  Description of Artificial Sequence: Synthetic oligonucleotide
  Sense strand starting at position 1508 of SEQ ID NO: 913893
gagagcaucugcgagcaua

SEQ ID NO: 962315 - RNA, 19 nt, Artificial Sequence
  Description of Artificial Sequence: Synthetic oligonucleotide
  Antisense strand to SEQ ID NO: 962314
uaugcucgcagaugcucuc

SEQ ID NO: 962316 - RNA, 19 nt, Artificial Sequence
  Description of Artificial Sequence: Synthetic oligonucleotide
  Sense strand starting at position 2614 of SEQ ID NO: 913893
auaggugaaucccgagcuu

SEQ ID NO: 962317 - RNA, 19 nt, Artificial Sequence
  Description of Artificial Sequence: Synthetic oligonucleotide
  Antisense strand to SEQ ID NO: 962316
aagcucgggauucaccuau

SEQ ID NO: 962318 - RNA, 19 nt, Artificial Sequence
  Description of Artificial Sequence: Synthetic oligonucleotide
  Sense strand starting at position 2250 of SEQ ID NO: 913893
ggacauuccugcugucgga

SEQ ID NO: 962319 - RNA, 19 nt, Artificial Sequence
  Description of Artificial Sequence: Synthetic oligonucleotide
  Antisense strand to SEQ ID NO: 962318
uccgacagcaggaaugucc

SEQ ID NO: 962320 - RNA, 19 nt, Artificial Sequence
  Description of Artificial Sequence: Synthetic oligonucleotide
  Sense strand starting at position 331 of SEQ ID NO: 913893
guucuuucuuccugaggca

SEQ ID NO: 962321 - RNA, 19 nt, Artificial Sequence
  Description of Artificial Sequence: Synthetic oligonucleotide
  Antisense strand to SEQ ID NO: 962320
ugccucaggaagaaagaac

SEQ ID NO: 962322 - RNA, 19 nt, Artificial Sequence
  Description of Artificial Sequence: Synthetic oligonucleotide
  Sense strand starting at position 3487 of SEQ ID NO: 913893
ggaaguuauucuugcgguc

SEQ ID NO: 962323 - RNA, 19 nt, Artificial Sequence
  Description of Artificial Sequence: Synthetic oligonucleotide
  Antisense strand to SEQ ID NO: 962322
gaccgcaagaauaacuucc

SEQ ID NO: 962324 - RNA, 19 nt, Artificial Sequence
  Description of Artificial Sequence: Synthetic oligonucleotide
  Sense strand starting at position 2679 of SEQ ID NO: 913893
gugagcguaucuugaguuu

SEQ ID NO: 962325 - RNA, 19 nt, Artificial Sequence
  Description of Artificial Sequence: Synthetic oligonucleotide
  Antisense strand to SEQ ID NO: 962324
aaacucaagauacgcucac

SEQ ID NO: 962326 - RNA, 19 nt, Artificial Sequence
  Description of Artificial Sequence: Synthetic oligonucleotide
  Sense strand starting at position 2651 of SEQ ID NO: 913893
cagcgccugucuugaugua

SEQ ID NO: 962327 - RNA, 19 nt, Artificial Sequence
  Description of Artificial Sequence: Synthetic oligonucleotide
  Antisense strand to SEQ ID NO: 962326
uacaucaagacaggcgcug

SEQ ID NO: 962328 - RNA, 19 nt, Artificial Sequence
  Description of Artificial Sequence: Synthetic oligonucleotide
  Sense strand starting at position 2210 of SEQ ID NO: 913894
guguuuauccaccaaggag

SEQ ID NO: 962329 - RNA, 19 nt, Artificial Sequence
  Description of Artificial Sequence: Synthetic oligonucleotide
  Antisense strand to SEQ ID NO: 962328
cuccuugguggauaaacac

SEQ ID NO: 962330 - RNA, 19 nt, Artificial Sequence
  Description of Artificial Sequence: Synthetic oligonucleotide
  Sense strand starting at position 2199 of SEQ ID NO: 913894
agggaaaugaaguguuuau

SEQ ID NO: 962331 - RNA, 19 nt, Artificial Sequence
  Description of Artificial Sequence: Synthetic oligonucleotide
  Antisense strand to SEQ ID NO: 962330
auaaacacuucauuucccu

SEQ ID NO: 962332 - RNA, 19 nt, Artificial Sequence
  Description of Artificial Sequence: Synthetic oligonucleotide
  Sense strand starting at position 2180 of SEQ ID NO: 913894
aggagcucugcucaggaga

SEQ ID NO: 962333 - RNA, 19 nt, Artificial Sequence
  Description of Artificial Sequence: Synthetic oligonucleotide
  Antisense strand to SEQ ID NO: 962332
ucuccugagcagagcuccu

SEQ ID NO: 962334 - RNA, 19 nt, Artificial Sequence
  Description of Artificial Sequence: Synthetic oligonucleotide
  Sense strand starting at position 552 of SEQ ID NO: 913894
ggcagaggucuaggagaau

SEQ ID NO: 962335 - RNA, 19 nt, Artificial Sequence
  Description of Artificial Sequence: Synthetic oligonucleotide
  Antisense strand to SEQ ID NO: 962334
auucuccuagaccucugcc

SEQ ID NO: 962336 - RNA, 19 nt, Artificial Sequence
  Description of Artificial Sequence: Synthetic oligonucleotide
  Sense strand starting at position 2206 of SEQ ID NO: 913894
ugaaguguuuauccaccaa

SEQ ID NO: 962337 - RNA, 19 nt, Artificial Sequence
  Description of Artificial Sequence: Synthetic oligonucleotide
  Antisense strand to SEQ ID NO: 962336
uugguggauaaacacuuca

SEQ ID NO: 962338 - RNA, 19 nt, Artificial Sequence
  Description of Artificial Sequence: Synthetic oligonucleotide
  Sense strand starting at position 3890 of SEQ ID NO: 913894
auggguguuucucugagag

SEQ ID NO: 962339 - RNA, 19 nt, Artificial Sequence
  Description of Artificial Sequence: Synthetic oligonucleotide
  Antisense strand to SEQ ID NO: 962338
cucucagagaaacacccau

SEQ ID NO: 962340 - RNA, 19 nt, Artificial Sequence
  Description of Artificial Sequence: Synthetic oligonucleotide
  Sense strand starting at position 1047 of SEQ ID NO: 913894
aguguguuucggcuguagu

SEQ ID NO: 962341 - RNA, 19 nt, Artificial Sequence
  Description of Artificial Sequence: Synthetic oligonucleotide
  Antisense strand to SEQ ID NO: 962340
acuacagccgaaacacacu

SEQ ID NO: 962342 - RNA, 19 nt, Artificial Sequence
  Description of Artificial Sequence: Synthetic oligonucleotide
  Sense strand starting at position 3056 of SEQ ID NO: 913894
cucccuuaggcuuauggua

SEQ ID NO: 962343 - RNA, 19 nt, Artificial Sequence
  Description of Artificial Sequence: Synthetic oligonucleotide
  Antisense strand to SEQ ID NO: 962342
uaccauaagccuaagggag

SEQ ID NO: 962344 - RNA, 19 nt, Artificial Sequence
  Description of Artificial Sequence: Synthetic oligonucleotide
  Sense strand starting at position 3252 of SEQ ID NO: 913894
agguucggguacuuuagaa

SEQ ID NO: 962345 - RNA, 19 nt, Artificial Sequence
  Description of Artificial Sequence: Synthetic oligonucleotide
  Antisense strand to SEQ ID NO: 962344
uucuaaaguacccgaaccu

SEQ ID NO: 962346 - RNA, 19 nt, Artificial Sequence
  Description of Artificial Sequence: Synthetic oligonucleotide
  Sense strand starting at position 3525 of SEQ ID NO: 913894
ccagauauguugucuacua

SEQ ID NO: 962347 - RNA, 19 nt, Artificial Sequence
  Description of Artificial Sequence: Synthetic oligonucleotide
  Antisense strand to SEQ ID NO: 962346
uaguagacaacauaucugg

SEQ ID NO: 962348 - RNA, 19 nt, Artificial Sequence
  Description of Artificial Sequence: Synthetic oligonucleotide
  Sense strand starting at position 3165 of SEQ ID NO: 913894
agacuauuauggcucucga

SEQ ID NO: 962349 - RNA, 19 nt, Artificial Sequence
  Description of Artificial Sequence: Synthetic oligonucleotide
  Antisense strand to SEQ ID NO: 962348
ucgagagccauaauagucu

SEQ ID NO: 962350 - RNA, 19 nt, Artificial Sequence
  Description of Artificial Sequence: Synthetic oligonucleotide
  Sense strand starting at position 1113 of SEQ ID NO: 913894
cgagcauguguguagauag

SEQ ID NO: 962351 - RNA, 19 nt, Artificial Sequence
  Description of Artificial Sequence: Synthetic oligonucleotide
  Antisense strand to SEQ ID NO: 962350
cuaucuacacacaugcucg

SEQ ID NO: 962352 - RNA, 19 nt, Artificial Sequence
  Description of Artificial Sequence: Synthetic oligonucleotide
  Sense strand starting at position 3029 of SEQ ID NO: 913894
ugaguaaucucccugccug

SEQ ID NO: 962353 - RNA, 19 nt, Artificial Sequence
  Description of Artificial Sequence: Synthetic oligonucleotide
  Antisense strand to SEQ ID NO: 962352
caggcagggagauuacuca

SEQ ID NO: 962354 - RNA, 19 nt, Artificial Sequence
  Description of Artificial Sequence: Synthetic oligonucleotide
  Sense strand starting at position 2230 of SEQ ID NO: 913894
ucuggaauauuagaacuga

SEQ ID NO: 962355 - RNA, 19 nt, Artificial Sequence
  Description of Artificial Sequence: Synthetic oligonucleotide
  Antisense strand to SEQ ID NO: 962354
ucaguucuaauauuccaga

SEQ ID NO: 962356 - RNA, 19 nt, Artificial Sequence
  Description of Artificial Sequence: Synthetic oligonucleotide
  Sense strand starting at position 3539 of SEQ ID NO: 913894
uacuacguuucucugguaa

SEQ ID NO: 962357 - RNA, 19 nt, Artificial Sequence
  Description of Artificial Sequence: Synthetic oligonucleotide
  Antisense strand to SEQ ID NO: 962356
uuaccagagaaacguagua

SEQ ID NO: 962358 - RNA, 19 nt, Artificial Sequence
  Description of Artificial Sequence: Synthetic oligonucleotide
  Sense strand starting at position 2271 of SEQ ID NO: 913894
agcucaaauuuccaccgau

SEQ ID NO: 962359 - RNA, 19 nt, Artificial Sequence
  Description of Artificial Sequence: Synthetic oligonucleotide
  Antisense strand to SEQ ID NO: 962358
aucgguggaaauuugagcu

SEQ ID NO: 962360 - RNA, 19 nt, Artificial Sequence
  Description of Artificial Sequence: Synthetic oligonucleotide
  Sense strand starting at position 3538 of SEQ ID NO: 913894
cuacuacguuucucuggua

SEQ ID NO: 962361 - RNA, 19 nt, Artificial Sequence
  Description of Artificial Sequence: Synthetic oligonucleotide
  Antisense strand to SEQ ID NO: 962360
uaccagagaaacguaguag

SEQ ID NO: 962362 - RNA, 19 nt, Artificial Sequence
  Description of Artificial Sequence: Synthetic oligonucleotide
  Sense strand starting at position 1206 of SEQ ID NO: 913894
gaguuugugcgugaagggu

SEQ ID NO: 962363 - RNA, 19 nt, Artificial Sequence
  Description of Artificial Sequence: Synthetic oligonucleotide
  Antisense strand to SEQ ID NO: 962362
acccuucacgcacaaacuc

SEQ ID NO: 962364 - RNA, 19 nt, Artificial Sequence
  Description of Artificial Sequence: Synthetic oligonucleotide
  Sense strand starting at position 1093 of SEQ ID NO: 913894
cgucaacaugagugugcaa

SEQ ID NO: 962365 - RNA, 19 nt, Artificial Sequence
  Description of Artificial Sequence: Synthetic oligonucleotide
  Antisense strand to SEQ ID NO: 962364
uugcacacucauguugacg

SEQ ID NO: 962366 - RNA, 19 nt, Artificial Sequence
  Description of Artificial Sequence: Synthetic oligonucleotide
  Sense strand starting at position 1191 of SEQ ID NO: 913894
gggugagcguaucuugagu

SEQ ID NO: 962367 - RNA, 19 nt, Artificial Sequence
  Description of Artificial Sequence: Synthetic oligonucleotide
  Antisense strand to SEQ ID NO: 962366
acucaagauacgcucaccc

SEQ ID NO: 962368 - RNA, 19 nt, Artificial Sequence
  Description of Artificial Sequence: Synthetic oligonucleotide
  Sense strand starting at position 1202 of SEQ ID NO: 913894
ucuugaguuugugcgugaa

SEQ ID NO: 962369 - RNA, 19 nt, Artificial Sequence
  Description of Artificial Sequence: Synthetic oligonucleotide
  Antisense strand to SEQ ID NO: 962368
uucacgcacaaacucaaga

SEQ ID NO: 962370 - RNA, 19 nt, Artificial Sequence
  Description of Artificial Sequence: Synthetic oligonucleotide
  Sense strand starting at position 1112 of SEQ ID NO: 913894
gcgagcauguguguagaua

SEQ ID NO: 962371 - RNA, 19 nt, Artificial Sequence
  Description of Artificial Sequence: Synthetic oligonucleotide
  Antisense strand to SEQ ID NO: 962370
uaucuacacacaugcucgc

SEQ ID NO: 962372 - RNA, 19 nt, Artificial Sequence
  Description of Artificial Sequence: Synthetic oligonucleotide
  Sense strand starting at position 3061 of SEQ ID NO: 913894
uuaggcuuaugguagaaca

SEQ ID NO: 962373 - RNA, 19 nt, Artificial Sequence
  Description of Artificial Sequence: Synthetic oligonucleotide
  Antisense strand to SEQ ID NO: 962372
uguucuaccauaagccuaa

SEQ ID NO: 962374 - RNA, 19 nt, Artificial Sequence
  Description of Artificial Sequence: Synthetic oligonucleotide
  Sense strand starting at position 2891 of SEQ ID NO: 913894
cgaauugccucuuauagac

SEQ ID NO: 962375 - RNA, 19 nt, Artificial Sequence
  Description of Artificial Sequence: Synthetic oligonucleotide
  Antisense strand to SEQ ID NO: 962374
gucuauaagaggcaauucg

SEQ ID NO: 962376 - RNA, 19 nt, Artificial Sequence
  Description of Artificial Sequence: Synthetic oligonucleotide
  Sense strand starting at position 2182 of SEQ ID NO: 913894
gagcucugcucaggagaag

SEQ ID NO: 962377 - RNA, 19 nt, Artificial Sequence
  Description of Artificial Sequence: Synthetic oligonucleotide
  Antisense strand to SEQ ID NO: 962376
cuucuccugagcagagcuc

SEQ ID NO: 962378 - RNA, 19 nt, Artificial Sequence
  Description of Artificial Sequence: Synthetic oligonucleotide
  Sense strand starting at position 2698 of SEQ ID NO: 913894
cucugacucuccugaguag

SEQ ID NO: 962379 - RNA, 19 nt, Artificial Sequence
  Description of Artificial Sequence: Synthetic oligonucleotide
  Antisense strand to SEQ ID NO: 962378
cuacucaggagagucagag

SEQ ID NO: 962380 - RNA, 19 nt, Artificial Sequence
  Description of Artificial Sequence: Synthetic oligonucleotide
  Sense strand starting at position 1048 of SEQ ID NO: 913894
guguguuucggcuguagug

SEQ ID NO: 962381 - RNA, 19 nt, Artificial Sequence
  Description of Artificial Sequence: Synthetic oligonucleotide
  Antisense strand to SEQ ID NO: 962380
cacuacagccgaaacacac

SEQ ID NO: 962382 - RNA, 19 nt, Artificial Sequence
  Description of Artificial Sequence: Synthetic oligonucleotide
  Sense strand starting at position 3186 of SEQ ID NO: 913894
ugggcuguuuccuauuacu

SEQ ID NO: 962383 - RNA, 19 nt, Artificial Sequence
  Description of Artificial Sequence: Synthetic oligonucleotide
  Antisense strand to SEQ ID NO: 962382
aguaauaggaaacagccca

SEQ ID NO: 962384 - RNA, 19 nt, Artificial Sequence
  Description of Artificial Sequence: Synthetic oligonucleotide
  Sense strand starting at position 3058 of SEQ ID NO: 913894
cccuuaggcuuaugguaga

SEQ ID NO: 962385 - RNA, 19 nt, Artificial Sequence
  Description of Artificial Sequence: Synthetic oligonucleotide
  Antisense strand to SEQ ID NO: 962384
ucuaccauaagccuaaggg

SEQ ID NO: 962386 - RNA, 19 nt, Artificial Sequence
  Description of Artificial Sequence: Synthetic oligonucleotide
  Sense strand starting at position 22 of SEQ ID NO: 913894
gagagcaucugcgagcaua

SEQ ID NO: 962387 - RNA, 19 nt, Artificial Sequence
  Description of Artificial Sequence: Synthetic oligonucleotide
  Antisense strand to SEQ ID NO: 962386
uaugcucgcagaugcucuc

SEQ ID NO: 962388 - RNA, 19 nt, Artificial Sequence
  Description of Artificial Sequence: Synthetic oligonucleotide
  Sense strand starting at position 3080 of SEQ ID NO: 913894
uaaacuaucucgggucuuu

SEQ ID NO: 962389 - RNA, 19 nt, Artificial Sequence
  Description of Artificial Sequence: Synthetic oligonucleotide
  Antisense strand to SEQ ID NO: 962388
aaagacccgagauaguuua

SEQ ID NO: 962390 - RNA, 19 nt, Artificial Sequence
  Description of Artificial Sequence: Synthetic oligonucleotide
  Sense strand starting at position 1128 of SEQ ID NO: 913894
auaggugaaucccgagcuu

SEQ ID NO: 962391 - RNA, 19 nt, Artificial Sequence
  Description of Artificial Sequence: Synthetic oligonucleotide
  Antisense strand to SEQ ID NO: 962390
aagcucgggauucaccuau

SEQ ID NO: 962392 - RNA, 19 nt, Artificial Sequence
  Description of Artificial Sequence: Synthetic oligonucleotide
  Sense strand starting at position 3543 of SEQ ID NO: 913894
acguuucucugguaaguca

SEQ ID NO: 962393 - RNA, 19 nt, Artificial Sequence
  Description of Artificial Sequence: Synthetic oligonucleotide
  Antisense strand to SEQ ID NO: 962392
ugacuuaccagagaaacgu

SEQ ID NO: 962394 - RNA, 19 nt, Artificial Sequence
  Description of Artificial Sequence: Synthetic oligonucleotide
  Sense strand starting at position 3227 of SEQ ID NO: 913894
cugcaaauauaguguccua

SEQ ID NO: 962395 - RNA, 19 nt, Artificial Sequence
  Description of Artificial Sequence: Synthetic oligonucleotide
  Antisense strand to SEQ ID NO: 962394
uaggacacuauauuugcag

SEQ ID NO: 962396 - RNA, 19 nt, Artificial Sequence
  Description of Artificial Sequence: Synthetic oligonucleotide
  Sense strand starting at position 764 of SEQ ID NO: 913894
ggacauuccugcugucgga

SEQ ID NO: 962397 - RNA, 19 nt, Artificial Sequence
  Description of Artificial Sequence: Synthetic oligonucleotide
  Antisense strand to SEQ ID NO: 962396
uccgacagcaggaaugucc

SEQ ID NO: 962398 - RNA, 19 nt, Artificial Sequence
  Description of Artificial Sequence: Synthetic oligonucleotide
  Sense strand starting at position 3530 of SEQ ID NO: 913894
uauguugucuacuacguuu

SEQ ID NO: 962399 - RNA, 19 nt, Artificial Sequence
  Description of Artificial Sequence: Synthetic oligonucleotide
  Antisense strand to SEQ ID NO: 962398
aaacguaguagacaacaua

SEQ ID NO: 962400 - RNA, 19 nt, Artificial Sequence
  Description of Artificial Sequence: Synthetic oligonucleotide
  Sense strand starting at position 2001 of SEQ ID NO: 913894
ggaaguuauucuugcgguc

SEQ ID NO: 962401 - RNA, 19 nt, Artificial Sequence
  Description of Artificial Sequence: Synthetic oligonucleotide
  Antisense strand to SEQ ID NO: 962400
gaccgcaagaauaacuucc

SEQ ID NO: 962402 - RNA, 19 nt, Artificial Sequence
  Description of Artificial Sequence: Synthetic oligonucleotide
  Sense strand starting at position 3541 of SEQ ID NO: 913894
cuacguuucucugguaagu

SEQ ID NO: 962403 - RNA, 19 nt, Artificial Sequence
  Description of Artificial Sequence: Synthetic oligonucleotide
  Antisense strand to SEQ ID NO: 962402
acuuaccagagaaacguag

SEQ ID NO: 962404 - RNA, 19 nt, Artificial Sequence
  Description of Artificial Sequence: Synthetic oligonucleotide
  Sense strand starting at position 1193 of SEQ ID NO: 913894
gugagcguaucuugaguuu

SEQ ID NO: 962405 - RNA, 19 nt, Artificial Sequence
  Description of Artificial Sequence: Synthetic oligonucleotide
  Antisense strand to SEQ ID NO: 962404
aaacucaagauacgcucac

SEQ ID NO: 962406 - RNA, 19 nt, Artificial Sequence
  Description of Artificial Sequence: Synthetic oligonucleotide
  Sense strand starting at position 1165 of SEQ ID NO: 913894
cagcgccugucuugaugua

SEQ ID NO: 962407 - RNA, 19 nt, Artificial Sequence
  Description of Artificial Sequence: Synthetic oligonucleotide
  Antisense strand to SEQ ID NO: 962406
uacaucaagacaggcgcug

SEQ ID NO: 962408 - RNA, 19 nt, Artificial Sequence
  Description of Artificial Sequence: Synthetic oligonucleotide
  Sense strand starting at position 2938 of SEQ ID NO: 913895
gucauuuaguguuugggau

SEQ ID NO: 962409 - RNA, 19 nt, Artificial Sequence
  Description of Artificial Sequence: Synthetic oligonucleotide
  Antisense strand to SEQ ID NO: 962408
aucccaaacacuaaaugac

SEQ ID NO: 962410 - RNA, 19 nt, Artificial Sequence
  Description of Artificial Sequence: Synthetic oligonucleotide
  Sense strand starting at position 2124 of SEQ ID NO: 913895
cggacuuucgaacacaaau

SEQ ID NO: 962411 - RNA, 19 nt, Artificial Sequence
  Description of Artificial Sequence: Synthetic oligonucleotide
  Antisense strand to SEQ ID NO: 962410
auuuguguucgaaaguccg

SEQ ID NO: 962412 - RNA, 19 nt, Artificial Sequence
  Description of Artificial Sequence: Synthetic oligonucleotide
  Sense strand starting at position 3093 of SEQ ID NO: 913895
uugccauuagcgcuuaauu

SEQ ID NO: 962413 - RNA, 19 nt, Artificial Sequence
  Description of Artificial Sequence: Synthetic oligonucleotide
  Antisense strand to SEQ ID NO: 962412
aauuaagcgcuaauggcaa

SEQ ID NO: 962414 - RNA, 19 nt, Artificial Sequence
  Description of Artificial Sequence: Synthetic oligonucleotide
  Sense strand starting at position 3457 of SEQ ID NO: 913895
gaagacauuuccgaagaag

SEQ ID NO: 962415 - RNA, 19 nt, Artificial Sequence
  Description of Artificial Sequence: Synthetic oligonucleotide
  Antisense strand to SEQ ID NO: 962414
cuucuucggaaaugucuuc

SEQ ID NO: 962416 - RNA, 19 nt, Artificial Sequence
  Description of Artificial Sequence: Synthetic oligonucleotide
  Sense strand starting at position 3071 of SEQ ID NO: 913895
gauuaagcuguugaaccua

SEQ ID NO: 962417 - RNA, 19 nt, Artificial Sequence
  Description of Artificial Sequence: Synthetic oligonucleotide
  Antisense strand to SEQ ID NO: 962416
uagguucaacagcuuaauc

SEQ ID NO: 962418 - RNA, 19 nt, Artificial Sequence
  Description of Artificial Sequence: Synthetic oligonucleotide
  Sense strand starting at position 2305 of SEQ ID NO: 913895
gagagaaggcuuuguaaac

SEQ ID NO: 962419 - RNA, 19 nt, Artificial Sequence
  Description of Artificial Sequence: Synthetic oligonucleotide
  Antisense strand to SEQ ID NO: 962418
guuuacaaagccuucucuc

SEQ ID NO: 962420 - RNA, 19 nt, Artificial Sequence
  Description of Artificial Sequence: Synthetic oligonucleotide
  Sense strand starting at position 741 of SEQ ID NO: 913895
ggagcaccucacugggaua

SEQ ID NO: 962421 - RNA, 19 nt, Artificial Sequence
  Description of Artificial Sequence: Synthetic oligonucleotide
  Antisense strand to SEQ ID NO: 962420
uaucccagugaggugcucc

SEQ ID NO: 962422 - RNA, 19 nt, Artificial Sequence
  Description of Artificial Sequence: Synthetic oligonucleotide
  Sense strand starting at position 3250 of SEQ ID NO: 913895
gcagguguugucagguaca

SEQ ID NO: 962423 - RNA, 19 nt, Artificial Sequence
  Description of Artificial Sequence: Synthetic oligonucleotide
  Antisense strand to SEQ ID NO: 962422
uguaccugacaacaccugc

SEQ ID NO: 962424 - RNA, 19 nt, Artificial Sequence
  Description of Artificial Sequence: Synthetic oligonucleotide
  Sense strand starting at position 63 of SEQ ID NO: 913895
guguacuuacuauauaacu

SEQ ID NO: 962425 - RNA, 19 nt, Artificial Sequence
  Description of Artificial Sequence: Synthetic oligonucleotide
  Antisense strand to SEQ ID NO: 962424
aguuauauaguaaguacac

SEQ ID NO: 962426 - RNA, 19 nt, Artificial Sequence
  Description of Artificial Sequence: Synthetic oligonucleotide
  Sense strand starting at position 2150 of SEQ ID NO: 913895
aauaaauccguaggacuua

SEQ ID NO: 962427 - RNA, 19 nt, Artificial Sequence
  Description of Artificial Sequence: Synthetic oligonucleotide
  Antisense strand to SEQ ID NO: 962426
uaaguccuacggauuuauu

SEQ ID NO: 962428 - RNA, 19 nt, Artificial Sequence
  Description of Artificial Sequence: Synthetic oligonucleotide
  Sense strand starting at position 2306 of SEQ ID NO: 913895
agagaaggcuuuguaaacu

SEQ ID NO: 962429 - RNA, 19 nt, Artificial Sequence
  Description of Artificial Sequence: Synthetic oligonucleotide
  Antisense strand to SEQ ID NO: 962428
aguuuacaaagccuucucu

SEQ ID NO: 962430 - RNA, 19 nt, Artificial Sequence
  Description of Artificial Sequence: Synthetic oligonucleotide
  Sense strand starting at position 743 of SEQ ID NO: 913895
agcaccucacugggauaua

SEQ ID NO: 962431 - RNA, 19 nt, Artificial Sequence
  Description of Artificial Sequence: Synthetic oligonucleotide
  Antisense strand to SEQ ID NO: 962430
uauaucccagugaggugcu

SEQ ID NO: 962432 - RNA, 19 nt, Artificial Sequence
  Description of Artificial Sequence: Synthetic oligonucleotide
  Sense strand starting at position 3785 of SEQ ID NO: 913895
caaagauacguccaguuua

SEQ ID NO: 962433 - RNA, 19 nt, Artificial Sequence
  Description of Artificial Sequence: Synthetic oligonucleotide
  Antisense strand to SEQ ID NO: 962432
uaaacuggacguaucuuug

SEQ ID NO: 962434 - RNA, 19 nt, Artificial Sequence
  Description of Artificial Sequence: Synthetic oligonucleotide
  Sense strand starting at position 3796 of SEQ ID NO: 913895
ccaguuuaugauggauacu

SEQ ID NO: 962435 - RNA, 19 nt, Artificial Sequence
  Description of Artificial Sequence: Synthetic oligonucleotide
  Antisense strand to SEQ ID NO: 962434
aguauccaucauaaacugg

SEQ ID NO: 962436 - RNA, 19 nt, Artificial Sequence
  Description of Artificial Sequence: Synthetic oligonucleotide
  Sense strand starting at position 3838 of SEQ ID NO: 913895
uccucauugauagggcaga

SEQ ID NO: 962437 - RNA, 19 nt, Artificial Sequence
  Description of Artificial Sequence: Synthetic oligonucleotide
  Antisense strand to SEQ ID NO: 962436
ucugcccuaucaaugagga

SEQ ID NO: 962438 - RNA, 19 nt, Artificial Sequence
  Description of Artificial Sequence: Synthetic oligonucleotide
  Sense strand starting at position 2560 of SEQ ID NO: 913895
uaugcuuaaccuggagaug

SEQ ID NO: 962439 - RNA, 19 nt, Artificial Sequence
  Description of Artificial Sequence: Synthetic oligonucleotide
  Antisense strand to SEQ ID NO: 962438
caucuccagguuaagcaua

SEQ ID NO: 962440 - RNA, 19 nt, Artificial Sequence
  Description of Artificial Sequence: Synthetic oligonucleotide
  Sense strand starting at position 3206 of SEQ ID NO: 913895
cugugauagguuuaucuua

SEQ ID NO: 962441 - RNA, 19 nt, Artificial Sequence
  Description of Artificial Sequence: Synthetic oligonucleotide
  Antisense strand to SEQ ID NO: 962440
uaagauaaaccuaucacag

SEQ ID NO: 962442 - RNA, 19 nt, Artificial Sequence
  Description of Artificial Sequence: Synthetic oligonucleotide
  Sense strand starting at position 806 of SEQ ID NO: 913895
cccucaaguguuuaggacu

SEQ ID NO: 962443 - RNA, 19 nt, Artificial Sequence
  Description of Artificial Sequence: Synthetic oligonucleotide
  Antisense strand to SEQ ID NO: 962442
aguccuaaacacuugaggg

SEQ ID NO: 962444 - RNA, 19 nt, Artificial Sequence
  Description of Artificial Sequence: Synthetic oligonucleotide
  Sense strand starting at position 3456 of SEQ ID NO: 913895
agaagacauuuccgaagaa

SEQ ID NO: 962445 - RNA, 19 nt, Artificial Sequence
  Description of Artificial Sequence: Synthetic oligonucleotide
  Antisense strand to SEQ ID NO: 962444
uucuucggaaaugucuucu

SEQ ID NO: 962446 - RNA, 19 nt, Artificial Sequence
  Description of Artificial Sequence: Synthetic oligonucleotide
  Sense strand starting at position 2976 of SEQ ID NO: 913895
cagggacugugguuggauu

SEQ ID NO: 962447 - RNA, 19 nt, Artificial Sequence
  Description of Artificial Sequence: Synthetic oligonucleotide
  Antisense strand to SEQ ID NO: 962446
aauccaaccacagucccug

SEQ ID NO: 962448 - RNA, 19 nt, Artificial Sequence
  Description of Artificial Sequence: Synthetic oligonucleotide
  Sense strand starting at position 57 of SEQ ID NO: 913895
auaacaguguacuuacuau

SEQ ID NO: 962449 - RNA, 19 nt, Artificial Sequence
  Description of Artificial Sequence: Synthetic oligonucleotide
  Antisense strand to SEQ ID NO: 962448
auaguaaguacacuguuau

SEQ ID NO: 962450 - RNA, 19 nt, Artificial Sequence
  Description of Artificial Sequence: Synthetic oligonucleotide
  Sense strand starting at position 2027 of SEQ ID NO: 913895
cauugagagcgucagauuc

SEQ ID NO: 962451 - RNA, 19 nt, Artificial Sequence
  Description of Artificial Sequence: Synthetic oligonucleotide
  Antisense strand to SEQ ID NO: 962450
gaaucugacgcucucaaug

SEQ ID NO: 962452 - RNA, 19 nt, Artificial Sequence
  Description of Artificial Sequence: Synthetic oligonucleotide
  Sense strand starting at position 2831 of SEQ ID NO: 913895
aacugaagugguugaguau

SEQ ID NO: 962453 - RNA, 19 nt, Artificial Sequence
  Description of Artificial Sequence: Synthetic oligonucleotide
  Antisense strand to SEQ ID NO: 962452
auacucaaccacuucaguu

SEQ ID NO: 962454 - RNA, 19 nt, Artificial Sequence
  Description of Artificial Sequence: Synthetic oligonucleotide
  Sense strand starting at position 3652 of SEQ ID NO: 913895
ggaaaugcagguugucaga

SEQ ID NO: 962455 - RNA, 19 nt, Artificial Sequence
  Description of Artificial Sequence: Synthetic oligonucleotide
  Antisense strand to SEQ ID NO: 962454
ucugacaaccugcauuucc

SEQ ID NO: 962456 - RNA, 19 nt, Artificial Sequence
  Description of Artificial Sequence: Synthetic oligonucleotide
  Sense strand starting at position 2024 of SEQ ID NO: 913895
ggacauugagagcgucaga

SEQ ID NO: 962457 - RNA, 19 nt, Artificial Sequence
  Description of Artificial Sequence: Synthetic oligonucleotide
  Antisense strand to SEQ ID NO: 962456
ucugacgcucucaaugucc

SEQ ID NO: 962458 - RNA, 19 nt, Artificial Sequence
  Description of Artificial Sequence: Synthetic oligonucleotide
  Sense strand starting at position 777 of SEQ ID NO: 913895
gguaauaucuccucaagug

SEQ ID NO: 962459 - RNA, 19 nt, Artificial Sequence
  Description of Artificial Sequence: Synthetic oligonucleotide
  Antisense strand to SEQ ID NO: 962458
cacuugaggagauauuacc

SEQ ID NO: 962460 - RNA, 19 nt, Artificial Sequence
  Description of Artificial Sequence: Synthetic oligonucleotide
  Sense strand starting at position 2944 of SEQ ID NO: 913895
uaguguuugggauaccugu

SEQ ID NO: 962461 - RNA, 19 nt, Artificial Sequence
  Description of Artificial Sequence: Synthetic oligonucleotide
  Antisense strand to SEQ ID NO: 962460
acagguaucccaaacacua

SEQ ID NO: 962462 - RNA, 19 nt, Artificial Sequence
  Description of Artificial Sequence: Synthetic oligonucleotide
  Sense strand starting at position 778 of SEQ ID NO: 913895
guaauaucuccucaagugu

SEQ ID NO: 962463 - RNA, 19 nt, Artificial Sequence
  Description of Artificial Sequence: Synthetic oligonucleotide
  Antisense strand to SEQ ID NO: 962462
acacuugaggagauauuac

SEQ ID NO: 962464 - RNA, 19 nt, Artificial Sequence
  Description of Artificial Sequence: Synthetic oligonucleotide
  Sense strand starting at position 3053 of SEQ ID NO: 913895
uuacaaaucucguucuaag

SEQ ID NO: 962465 - RNA, 19 nt, Artificial Sequence
  Description of Artificial Sequence: Synthetic oligonucleotide
  Antisense strand to SEQ ID NO: 962464
cuuagaacgagauuuguaa

SEQ ID NO: 962466 - RNA, 19 nt, Artificial Sequence
  Description of Artificial Sequence: Synthetic oligonucleotide
  Sense strand starting at position 2899 of SEQ ID NO: 913895
acaucucuuugauuauguu

SEQ ID NO: 962467 - RNA, 19 nt, Artificial Sequence
  Description of Artificial Sequence: Synthetic oligonucleotide
  Antisense strand to SEQ ID NO: 962466
aacauaaucaaagagaugu

SEQ ID NO: 962468 - RNA, 19 nt, Artificial Sequence
  Description of Artificial Sequence: Synthetic oligonucleotide
  Sense strand starting at position 2336 of SEQ ID NO: 913895
gcgcgaguggcuuucacuu

SEQ ID NO: 962469 - RNA, 19 nt, Artificial Sequence
  Description of Artificial Sequence: Synthetic oligonucleotide
  Antisense strand to SEQ ID NO: 962468
aagugaaagccacucgcgc

SEQ ID NO: 962470 - RNA, 19 nt, Artificial Sequence
  Description of Artificial Sequence: Synthetic oligonucleotide
  Sense strand starting at position 786 of SEQ ID NO: 913895
uccucaaguguuuagguau

SEQ ID NO: 962471 - RNA, 19 nt, Artificial Sequence
  Description of Artificial Sequence: Synthetic oligonucleotide
  Antisense strand to SEQ ID NO: 962470
auaccuaaacacuugagga

SEQ ID NO: 962472 - RNA, 19 nt, Artificial Sequence
  Description of Artificial Sequence: Synthetic oligonucleotide
  Sense strand starting at position 2834 of SEQ ID NO: 913895
ugaagugguugaguaucca

SEQ ID NO: 962473 - RNA, 19 nt, Artificial Sequence
  Description of Artificial Sequence: Synthetic oligonucleotide
  Antisense strand to SEQ ID NO: 962472
uggauacucaaccacuuca

SEQ ID NO: 962474 - RNA, 19 nt, Artificial Sequence
  Description of Artificial Sequence: Synthetic oligonucleotide
  Sense strand starting at position 2113 of SEQ ID NO: 913895
uugggaauuagcggacuuu

SEQ ID NO: 962475 - RNA, 19 nt, Artificial Sequence
  Description of Artificial Sequence: Synthetic oligonucleotide
  Antisense strand to SEQ ID NO: 962474
aaaguccgcuaauucccaa

SEQ ID NO: 962476 - RNA, 19 nt, Artificial Sequence
  Description of Artificial Sequence: Synthetic oligonucleotide
  Sense strand starting at position 550 of SEQ ID NO: 913895
ggcuauaauugauuccgau

SEQ ID NO: 962477 - RNA, 19 nt, Artificial Sequence
  Description of Artificial Sequence: Synthetic oligonucleotide
  Antisense strand to SEQ ID NO: 962476
aucggaaucaauuauagcc

SEQ ID NO: 962478 - RNA, 19 nt, Artificial Sequence
  Description of Artificial Sequence: Synthetic oligonucleotide
  Sense strand starting at position 3654 of SEQ ID NO: 913895
aaaugcagguugucagacu

SEQ ID NO: 962479 - RNA, 19 nt, Artificial Sequence
  Description of Artificial Sequence: Synthetic oligonucleotide
  Antisense strand to SEQ ID NO: 962478
agucugacaaccugcauuu

SEQ ID NO: 962480 - RNA, 19 nt, Artificial Sequence
  Description of Artificial Sequence: Synthetic oligonucleotide
  Sense strand starting at position 3306 of SEQ ID NO: 913895
gcagauucccauugaguug

SEQ ID NO: 962481 - RNA, 19 nt, Artificial Sequence
  Description of Artificial Sequence: Synthetic oligonucleotide
  Antisense strand to SEQ ID NO: 962480
caacucaaugggaaucugc

SEQ ID NO: 962482 - RNA, 19 nt, Artificial Sequence
  Description of Artificial Sequence: Synthetic oligonucleotide
  Sense strand starting at position 2312 of SEQ ID NO: 913895
ggcuuuguaaacuggaagu

SEQ ID NO: 962483 - RNA, 19 nt, Artificial Sequence
  Description of Artificial Sequence: Synthetic oligonucleotide
  Antisense strand to SEQ ID NO: 962482
acuuccaguuuacaaagcc

SEQ ID NO: 962484 - RNA, 19 nt, Artificial Sequence
  Description of Artificial Sequence: Synthetic oligonucleotide
  Sense strand starting at position 2996 of SEQ ID NO: 913895
augaauuauuuggacgguu

SEQ ID NO: 962485 - RNA, 19 nt, Artificial Sequence
  Description of Artificial Sequence: Synthetic oligonucleotide
  Antisense strand to SEQ ID NO: 962484
aaccguccaaauaauucau

SEQ ID NO: 962486 - RNA, 19 nt, Artificial Sequence
  Description of Artificial Sequence: Synthetic oligonucleotide
  Sense strand starting at position 2375 of SEQ ID NO: 913895
gucaucugggagugcugaa

SEQ ID NO: 962487 - RNA, 19 nt, Artificial Sequence
  Description of Artificial Sequence: Synthetic oligonucleotide
  Antisense strand to SEQ ID NO: 962486
uucagcacucccagaugac

SEQ ID NO: 962488 - RNA, 19 nt, Artificial Sequence
  Description of Artificial Sequence: Synthetic oligonucleotide
  Sense strand starting at position 1434 of SEQ ID NO: 913896
uuaaaugcccgauaaauga

SEQ ID NO: 962489 - RNA, 19 nt, Artificial Sequence
  Description of Artificial Sequence: Synthetic oligonucleotide
  Antisense strand to SEQ ID NO: 962488
ucauuuaucgggcauuuaa

SEQ ID NO: 962490 - RNA, 19 nt, Artificial Sequence
  Description of Artificial Sequence: Synthetic oligonucleotide
  Sense strand starting at position 1015 of SEQ ID NO: 913896
ccgccuuucccugucugau

SEQ ID NO: 962491 - RNA, 19 nt, Artificial Sequence
  Description of Artificial Sequence: Synthetic oligonucleotide
  Antisense strand to SEQ ID NO: 962490
aucagacagggaaaggcgg

SEQ ID NO: 962492 - RNA, 19 nt, Artificial Sequence
  Description of Artificial Sequence: Synthetic oligonucleotide
  Sense strand starting at position 2643 of SEQ ID NO: 913896
ugaggaaaucgagguucaa

SEQ ID NO: 962493 - RNA, 19 nt, Artificial Sequence
  Description of Artificial Sequence: Synthetic oligonucleotide
  Antisense strand to SEQ ID NO: 962492
uugaaccucgauuuccuca

SEQ ID NO: 962494 - RNA, 19 nt, Artificial Sequence
  Description of Artificial Sequence: Synthetic oligonucleotide
  Sense strand starting at position 435 of SEQ ID NO: 913896
ugacauuauuggguaacca

SEQ ID NO: 962495 - RNA, 19 nt, Artificial Sequence
  Description of Artificial Sequence: Synthetic oligonucleotide
  Antisense strand to SEQ ID NO: 962494
ugguuacccaauaauguca

SEQ ID NO: 962496 - RNA, 19 nt, Artificial Sequence
  Description of Artificial Sequence: Synthetic oligonucleotide
  Sense strand starting at position 393 of SEQ ID NO: 913896
acgccaaaugaaugaauga

SEQ ID NO: 962497 - RNA, 19 nt, Artificial Sequence
  Description of Artificial Sequence: Synthetic oligonucleotide
  Antisense strand to SEQ ID NO: 962496
ucauucauucauuuggcgu

SEQ ID NO: 962498 - RNA, 19 nt, Artificial Sequence
  Description of Artificial Sequence: Synthetic oligonucleotide
  Sense strand starting at position 3184 of SEQ ID NO: 913896
gaaagugaucaccaguggu

SEQ ID NO: 962499 - RNA, 19 nt, Artificial Sequence
  Description of Artificial Sequence: Synthetic oligonucleotide
  Antisense strand to SEQ ID NO: 962498
accacuggugaucacuuuc

SEQ ID NO: 962500 - RNA, 19 nt, Artificial Sequence
  Description of Artificial Sequence: Synthetic oligonucleotide
  Sense strand starting at position 3479 of SEQ ID NO: 913896
ucuguuauugaagaggcau

SEQ ID NO: 962501 - RNA, 19 nt, Artificial Sequence
  Description of Artificial Sequence: Synthetic oligonucleotide
  Antisense strand to SEQ ID NO: 962500
augccucuucaauaacaga

SEQ ID NO: 962502 - RNA, 19 nt, Artificial Sequence
  Description of Artificial Sequence: Synthetic oligonucleotide
  Sense strand starting at position 641 of SEQ ID NO: 913896
cucucccgccguguuaaua

SEQ ID NO: 962503 - RNA, 19 nt, Artificial Sequence
  Description of Artificial Sequence: Synthetic oligonucleotide
  Antisense strand to SEQ ID NO: 962502
uauuaacacggcgggagag

SEQ ID NO: 962504 - RNA, 19 nt, Artificial Sequence
  Description of Artificial Sequence: Synthetic oligonucleotide
  Sense strand starting at position 2472 of SEQ ID NO: 913896
agugaauuacuguaauagc

SEQ ID NO: 962505 - RNA, 19 nt, Artificial Sequence
  Description of Artificial Sequence: Synthetic oligonucleotide
  Antisense strand to SEQ ID NO: 962504
gcuauuacaguaauucacu

SEQ ID NO: 962506 - RNA, 19 nt, Artificial Sequence
  Description of Artificial Sequence: Synthetic oligonucleotide
  Sense strand starting at position 1442 of SEQ ID NO: 913896
ccgauaaaugaguaagccu

SEQ ID NO: 962507 - RNA, 19 nt, Artificial Sequence
  Description of Artificial Sequence: Synthetic oligonucleotide
  Antisense strand to SEQ ID NO: 962506
aggcuuacucauuuaucgg

SEQ ID NO: 962508 - RNA, 19 nt, Artificial Sequence
  Description of Artificial Sequence: Synthetic oligonucleotide
  Sense strand starting at position 371 of SEQ ID NO: 913896
caaguaggcguccaagaaa

SEQ ID NO: 962509 - RNA, 19 nt, Artificial Sequence
  Description of Artificial Sequence: Synthetic oligonucleotide
  Antisense strand to SEQ ID NO: 962508
uuucuuggacgccuacuug

SEQ ID NO: 962510 - RNA, 19 nt, Artificial Sequence
  Description of Artificial Sequence: Synthetic oligonucleotide
  Sense strand starting at position 1027 of SEQ ID NO: 913896
gucugaucccagcaggacu

SEQ ID NO: 962511 - RNA, 19 nt, Artificial Sequence
  Description of Artificial Sequence: Synthetic oligonucleotide
  Antisense strand to SEQ ID NO: 962510
aguccugcugggaucagac

SEQ ID NO: 962512 - RNA, 19 nt, Artificial Sequence
  Description of Artificial Sequence: Synthetic oligonucleotide
  Sense strand starting at position 1107 of SEQ ID NO: 913896
gccagcguugggaguaauu

SEQ ID NO: 962513 - RNA, 19 nt, Artificial Sequence
  Description of Artificial Sequence: Synthetic oligonucleotide
  Antisense strand to SEQ ID NO: 962512
aauuacucccaacgcuggc

SEQ ID NO: 962514 - RNA, 19 nt, Artificial Sequence
  Description of Artificial Sequence: Synthetic oligonucleotide
  Sense strand starting at position 3474 of SEQ ID NO: 913896
ucccaucuguuauugaaga

SEQ ID NO: 962515 - RNA, 19 nt, Artificial Sequence
  Description of Artificial Sequence: Synthetic oligonucleotide
  Antisense strand to SEQ ID NO: 962514
ucuucaauaacagauggga

SEQ ID NO: 962516 - RNA, 19 nt, Artificial Sequence
  Description of Artificial Sequence: Synthetic oligonucleotide
  Sense strand starting at position 3121 of SEQ ID NO: 913896
aauuuaagguccgagaaga

SEQ ID NO: 962517 - RNA, 19 nt, Artificial Sequence
  Description of Artificial Sequence: Synthetic oligonucleotide
  Antisense strand to SEQ ID NO: 962516
ucuucucggaccuuaaauu

SEQ ID NO: 962518 - RNA, 19 nt, Artificial Sequence
  Description of Artificial Sequence: Synthetic oligonucleotide
  Sense strand starting at position 3107 of SEQ ID NO: 913896
gccugucugguuugaauuu

SEQ ID NO: 962519 - RNA, 19 nt, Artificial Sequence
  Description of Artificial Sequence: Synthetic oligonucleotide
  Antisense strand to SEQ ID NO: 962518
aaauucaaaccagacaggc

SEQ ID NO: 962520 - RNA, 19 nt, Artificial Sequence
  Description of Artificial Sequence: Synthetic oligonucleotide
  Sense strand starting at position 3549 of SEQ ID NO: 913896
cccagagguggucacugua

SEQ ID NO: 962521 - RNA, 19 nt, Artificial Sequence
  Description of Artificial Sequence: Synthetic oligonucleotide
  Antisense strand to SEQ ID NO: 962520
uacagugaccaccucuggg

SEQ ID NO: 962522 - RNA, 19 nt, Artificial Sequence
  Description of Artificial Sequence: Synthetic oligonucleotide
  Sense strand starting at position 382 of SEQ ID NO: 913896
ccaagaaauguacgccaaa

SEQ ID NO: 962523 - RNA, 19 nt, Artificial Sequence
  Description of Artificial Sequence: Synthetic oligonucleotide
  Antisense strand to SEQ ID NO: 962522
uuuggcguacauuucuugg

SEQ ID NO: 962524 - RNA, 19 nt, Artificial Sequence
  Description of Artificial Sequence: Synthetic oligonucleotide
  Sense strand starting at position 1438 of SEQ ID NO: 913896
augcccgauaaaugaguaa

SEQ ID NO: 962525 - RNA, 19 nt, Artificial Sequence
  Description of Artificial Sequence: Synthetic oligonucleotide
  Antisense strand to SEQ ID NO: 962524
uuacucauuuaucgggcau

SEQ ID NO: 962526 - RNA, 19 nt, Artificial Sequence
  Description of Artificial Sequence: Synthetic oligonucleotide
  Sense strand starting at position 3399 of SEQ ID NO: 913896
auuaauauugucugagcag

SEQ ID NO: 962527 - RNA, 19 nt, Artificial Sequence
  Description of Artificial Sequence: Synthetic oligonucleotide
  Antisense strand to SEQ ID NO: 962526
cugcucagacaauauuaau

SEQ ID NO: 962528 - RNA, 19 nt, Artificial Sequence
  Description of Artificial Sequence: Synthetic oligonucleotide
  Sense strand starting at position 3042 of SEQ ID NO: 913896
ugagaauuagguugcaucu

SEQ ID NO: 962529 - RNA, 19 nt, Artificial Sequence
  Description of Artificial Sequence: Synthetic oligonucleotide
  Antisense strand to SEQ ID NO: 962528
agaugcaaccuaauucuca

SEQ ID NO: 962530 - RNA, 19 nt, Artificial Sequence
  Description of Artificial Sequence: Synthetic oligonucleotide
  Sense strand starting at position 1449 of SEQ ID NO: 913896
augaguaagccuggcaaga

SEQ ID NO: 962531 - RNA, 19 nt, Artificial Sequence
  Description of Artificial Sequence: Synthetic oligonucleotide
  Antisense strand to SEQ ID NO: 962530
ucuugccaggcuuacucau

SEQ ID NO: 962532 - RNA, 19 nt, Artificial Sequence
  Description of Artificial Sequence: Synthetic oligonucleotide
  Sense strand starting at position 2585 of SEQ ID NO: 913896
ugagcaucccugugagaug

SEQ ID NO: 962533 - RNA, 19 nt, Artificial Sequence
  Description of Artificial Sequence: Synthetic oligonucleotide
  Antisense strand to SEQ ID NO: 962532
caucucacagggaugcuca

SEQ ID NO: 962534 - RNA, 19 nt, Artificial Sequence
  Description of Artificial Sequence: Synthetic oligonucleotide
  Sense strand starting at position 925 of SEQ ID NO: 913896
ggcaaucaccgccaaacuu

SEQ ID NO: 962535 - RNA, 19 nt, Artificial Sequence
  Description of Artificial Sequence: Synthetic oligonucleotide
  Antisense strand to SEQ ID NO: 962534
aaguuuggcggugauugcc

SEQ ID NO: 962536 - RNA, 19 nt, Artificial Sequence
  Description of Artificial Sequence: Synthetic oligonucleotide
  Sense strand starting at position 680 of SEQ ID NO: 913896
gccggaucgauagauguca

SEQ ID NO: 962537 - RNA, 19 nt, Artificial Sequence
  Description of Artificial Sequence: Synthetic oligonucleotide
  Antisense strand to SEQ ID NO: 962536
ugacaucuaucgauccggc

SEQ ID NO: 962538 - RNA, 19 nt, Artificial Sequence
  Description of Artificial Sequence: Synthetic oligonucleotide
  Sense strand starting at position 796 of SEQ ID NO: 913896
gcgccaguaauagaauauc

SEQ ID NO: 962539 - RNA, 19 nt, Artificial Sequence
  Description of Artificial Sequence: Synthetic oligonucleotide
  Antisense strand to SEQ ID NO: 962538
gauauucuauuacuggcgc

SEQ ID NO: 962540 - RNA, 19 nt, Artificial Sequence
  Description of Artificial Sequence: Synthetic oligonucleotide
  Sense strand starting at position 3402 of SEQ ID NO: 913896
aauauugucugagcaggua

SEQ ID NO: 962541 - RNA, 19 nt, Artificial Sequence
  Description of Artificial Sequence: Synthetic oligonucleotide
  Antisense strand to SEQ ID NO: 962540
uaccugcucagacaauauu

SEQ ID NO: 962542 - RNA, 19 nt, Artificial Sequence
  Description of Artificial Sequence: Synthetic oligonucleotide
  Sense strand starting at position 2758 of SEQ ID NO: 913896
acauccugcugucucagaa

SEQ ID NO: 962543 - RNA, 19 nt, Artificial Sequence
  Description of Artificial Sequence: Synthetic oligonucleotide
  Antisense strand to SEQ ID NO: 962542
uucugagacagcaggaugu

SEQ ID NO: 962544 - RNA, 19 nt, Artificial Sequence
  Description of Artificial Sequence: Synthetic oligonucleotide
  Sense strand starting at position 1431 of SEQ ID NO: 913896
gcauuaaaugcccgauaaa

SEQ ID NO: 962545 - RNA, 19 nt, Artificial Sequence
  Description of Artificial Sequence: Synthetic oligonucleotide
  Antisense strand to SEQ ID NO: 962544
uuuaucgggcauuuaaugc

SEQ ID NO: 962546 - RNA, 19 nt, Artificial Sequence
  Description of Artificial Sequence: Synthetic oligonucleotide
  Sense strand starting at position 2469 of SEQ ID NO: 913896
gccagugaauuacuguaau

SEQ ID NO: 962547 - RNA, 19 nt, Artificial Sequence
  Description of Artificial Sequence: Synthetic oligonucleotide
  Antisense strand to SEQ ID NO: 962546
auuacaguaauucacuggc

SEQ ID NO: 962548 - RNA, 19 nt, Artificial Sequence
  Description of Artificial Sequence: Synthetic oligonucleotide
  Sense strand starting at position 374 of SEQ ID NO: 913896
guaggcguccaagaaaugu

SEQ ID NO: 962549 - RNA, 19 nt, Artificial Sequence
  Description of Artificial Sequence: Synthetic oligonucleotide
  Antisense strand to SEQ ID NO: 962548
acauuucuuggacgccuac

SEQ ID NO: 962550 - RNA, 19 nt, Artificial Sequence
  Description of Artificial Sequence: Synthetic oligonucleotide
  Sense strand starting at position 3577 of SEQ ID NO: 913896
gacuuuaaagccugcggaa

SEQ ID NO: 962551 - RNA, 19 nt, Artificial Sequence
  Description of Artificial Sequence: Synthetic oligonucleotide
  Antisense strand to SEQ ID NO: 962550
uuccgcaggcuuuaaaguc

SEQ ID NO: 962552 - RNA, 19 nt, Artificial Sequence
  Description of Artificial Sequence: Synthetic oligonucleotide
  Sense strand starting at position 1198 of SEQ ID NO: 913896
ccaguuaacaguugagucu

SEQ ID NO: 962553 - RNA, 19 nt, Artificial Sequence
  Description of Artificial Sequence: Synthetic oligonucleotide
  Antisense strand to SEQ ID NO: 962552
agacucaacuguuaacugg

SEQ ID NO: 962554 - RNA, 19 nt, Artificial Sequence
  Description of Artificial Sequence: Synthetic oligonucleotide
  Sense strand starting at position 2467 of SEQ ID NO: 913896
ccgccagugaauuacugua

SEQ ID NO: 962555 - RNA, 19 nt, Artificial Sequence
  Description of Artificial Sequence: Synthetic oligonucleotide
  Antisense strand to SEQ ID NO: 962554
uacaguaauucacuggcgg

SEQ ID NO: 962556 - RNA, 19 nt, Artificial Sequence
  Description of Artificial Sequence: Synthetic oligonucleotide
  Sense strand starting at position 851 of SEQ ID NO: 913896
gagagaagauccgaacaau

SEQ ID NO: 962557 - RNA, 19 nt, Artificial Sequence
  Description of Artificial Sequence: Synthetic oligonucleotide
  Antisense strand to SEQ ID NO: 962556
auuguucggaucuucucuc

SEQ ID NO: 962558 - RNA, 19 nt, Artificial Sequence
  Description of Artificial Sequence: Synthetic oligonucleotide
  Sense strand starting at position 3270 of SEQ ID NO: 913896
gucugugagcacuaagcau

SEQ ID NO: 962559 - RNA, 19 nt, Artificial Sequence
  Description of Artificial Sequence: Synthetic oligonucleotide
  Antisense strand to SEQ ID NO: 962558
augcuuagugcucacagac

SEQ ID NO: 962560 - RNA, 19 nt, Artificial Sequence
  Description of Artificial Sequence: Synthetic oligonucleotide
  Sense strand starting at position 3031 of SEQ ID NO: 913896
gaaauuggaucugagaauu

SEQ ID NO: 962561 - RNA, 19 nt, Artificial Sequence
  Description of Artificial Sequence: Synthetic oligonucleotide
  Antisense strand to SEQ ID NO: 962560
aauucucagauccaauuuc

SEQ ID NO: 962562 - RNA, 19 nt, Artificial Sequence
  Description of Artificial Sequence: Synthetic oligonucleotide
  Sense strand starting at position 3579 of SEQ ID NO: 913896
cuuuaaagccugcggaaau

SEQ ID NO: 962563 - RNA, 19 nt, Artificial Sequence
  Description of Artificial Sequence: Synthetic oligonucleotide
  Antisense strand to SEQ ID NO: 962562
auuuccgcaggcuuuaaag

SEQ ID NO: 962564 - RNA, 19 nt, Artificial Sequence
  Description of Artificial Sequence: Synthetic oligonucleotide
  Sense strand starting at position 3014 of SEQ ID NO: 913896
uucgaucauuugcaacaga

SEQ ID NO: 962565 - RNA, 19 nt, Artificial Sequence
  Description of Artificial Sequence: Synthetic oligonucleotide
  Antisense strand to SEQ ID NO: 962564
ucuguugcaaaugaucgaa

SEQ ID NO: 962566 - RNA, 19 nt, Artificial Sequence
  Description of Artificial Sequence: Synthetic oligonucleotide
  Sense strand starting at position 3316 of SEQ ID NO: 913896
ccuaguguuuggcccagaa

SEQ ID NO: 962567 - RNA, 19 nt, Artificial Sequence
  Description of Artificial Sequence: Synthetic oligonucleotide
  Antisense strand to SEQ ID NO: 962566
uucugggccaaacacuagg

SEQ ID NO: 962568 - RNA, 19 nt, Artificial Sequence
  Description of Artificial Sequence: Synthetic oligonucleotide
  Sense strand starting at position 211 of SEQ ID NO: 913897
agaagagauuacucuguau

SEQ ID NO: 962569 - RNA, 19 nt, Artificial Sequence
  Description of Artificial Sequence: Synthetic oligonucleotide
  Antisense strand to SEQ ID NO: 962568
auacagaguaaucucuucu

SEQ ID NO: 962570 - RNA, 19 nt, Artificial Sequence
  Description of Artificial Sequence: Synthetic oligonucleotide
  Sense strand starting at position 502 of SEQ ID NO: 913897
aaugaaguuugauugacua

SEQ ID NO: 962571 - RNA, 19 nt, Artificial Sequence
  Description of Artificial Sequence: Synthetic oligonucleotide
  Antisense strand to SEQ ID NO: 962570
uagucaaucaaacuucauu

SEQ ID NO: 962572 - RNA, 19 nt, Artificial Sequence
  Description of Artificial Sequence: Synthetic oligonucleotide
  Sense strand starting at position 2508 of SEQ ID NO: 913897
ggaaacuguucuccaagga

SEQ ID NO: 962573 - RNA, 19 nt, Artificial Sequence
  Description of Artificial Sequence: Synthetic oligonucleotide
  Antisense strand to SEQ ID NO: 962572
uccuuggagaacaguuucc

SEQ ID NO: 962574 - RNA, 19 nt, Artificial Sequence
  Description of Artificial Sequence: Synthetic oligonucleotide
  Sense strand starting at position 469 of SEQ ID NO: 913897
gaauguuaugacgacaucu

SEQ ID NO: 962575 - RNA, 19 nt, Artificial Sequence
  Description of Artificial Sequence: Synthetic oligonucleotide
  Antisense strand to SEQ ID NO: 962574
agaugucgucauaacauuc

SEQ ID NO: 962576 - RNA, 19 nt, Artificial Sequence
  Description of Artificial Sequence: Synthetic oligonucleotide
  Sense strand starting at position 2512 of SEQ ID NO: 913897
acuguucuccaaggaagag

SEQ ID NO: 962577 - RNA, 19 nt, Artificial Sequence
  Description of Artificial Sequence: Synthetic oligonucleotide
  Antisense strand to SEQ ID NO: 962576
cucuuccuuggagaacagu

SEQ ID NO: 962578 - RNA, 19 nt, Artificial Sequence
  Description of Artificial Sequence: Synthetic oligonucleotide
  Sense strand starting at position 214 of SEQ ID NO: 913897
agagauuacucuguauuaa

SEQ ID NO: 962579 - RNA, 19 nt, Artificial Sequence
  Description of Artificial Sequence: Synthetic oligonucleotide
  Antisense strand to SEQ ID NO: 962578
uuaauacagaguaaucucu

SEQ ID NO: 962580 - RNA, 19 nt, Artificial Sequence
  Description of Artificial Sequence: Synthetic oligonucleotide
  Sense strand starting at position 504 of SEQ ID NO: 913897
ugaaguuugauugacuagu

SEQ ID NO: 962581 - RNA, 19 nt, Artificial Sequence
  Description of Artificial Sequence: Synthetic oligonucleotide
  Antisense strand to SEQ ID NO: 962580
acuagucaaucaaacuuca

SEQ ID NO: 962582 - RNA, 19 nt, Artificial Sequence
  Description of Artificial Sequence: Synthetic oligonucleotide
  Sense strand starting at position 198 of SEQ ID NO: 913897
gagcaucugcgagagaaga

SEQ ID NO: 962583 - RNA, 19 nt, Artificial Sequence
  Description of Artificial Sequence: Synthetic oligonucleotide
  Antisense strand to SEQ ID NO: 962582
ucuucucucgcagaugcuc

SEQ ID NO: 962584 - RNA, 19 nt, Artificial Sequence
  Description of Artificial Sequence: Synthetic oligonucleotide
  Sense strand starting at position 510 of SEQ ID NO: 913897
uugauugacuaguuauaga

SEQ ID NO: 962585 - RNA, 19 nt, Artificial Sequence
  Description of Artificial Sequence: Synthetic oligonucleotide
  Antisense strand to SEQ ID NO: 962584
ucuauaacuagucaaucaa

SEQ ID NO: 962586 - RNA, 19 nt, Artificial Sequence
  Description of Artificial Sequence: Synthetic oligonucleotide
  Sense strand starting at position 3897 of SEQ ID NO: 913897
ggagaccagugucuacaaa

SEQ ID NO: 962587 - RNA, 19 nt, Artificial Sequence
  Description of Artificial Sequence: Synthetic oligonucleotide
  Antisense strand to SEQ ID NO: 962586
uuuguagacacuggucucc

SEQ ID NO: 962588 - RNA, 19 nt, Artificial Sequence
  Description of Artificial Sequence: Synthetic oligonucleotide
  Sense strand starting at position 2822 of SEQ ID NO: 913897
ggcguuucuaagucuguuu

SEQ ID NO: 962589 - RNA, 19 nt, Artificial Sequence
  Description of Artificial Sequence: Synthetic oligonucleotide
  Antisense strand to SEQ ID NO: 962588
aaacagacuuagaaacgcc

SEQ ID NO: 962590 - RNA, 19 nt, Artificial Sequence
  Description of Artificial Sequence: Synthetic oligonucleotide
  Sense strand starting at position 2813 of SEQ ID NO: 913897
gugaucuucggcguuucua

SEQ ID NO: 962591 - RNA, 19 nt, Artificial Sequence
  Description of Artificial Sequence: Synthetic oligonucleotide
  Antisense strand to SEQ ID NO: 962590
uagaaacgccgaagaucac

SEQ ID NO: 962592 - RNA, 19 nt, Artificial Sequence
  Description of Artificial Sequence: Synthetic oligonucleotide
  Sense strand starting at position 2030 of SEQ ID NO: 913897
ggagauuugcgucacguug

SEQ ID NO: 962593 - RNA, 19 nt, Artificial Sequence
  Description of Artificial Sequence: Synthetic oligonucleotide
  Antisense strand to SEQ ID NO: 962592
caacgugacgcaaaucucc

SEQ ID NO: 962594 - RNA, 19 nt, Artificial Sequence
  Description of Artificial Sequence: Synthetic oligonucleotide
  Sense strand starting at position 344 of SEQ ID NO: 913897
ggugugaggcguguuggua

SEQ ID NO: 962595 - RNA, 19 nt, Artificial Sequence
  Description of Artificial Sequence: Synthetic oligonucleotide
  Antisense strand to SEQ ID NO: 962594
uaccaacacgccucacacc

SEQ ID NO: 962596 - RNA, 19 nt, Artificial Sequence
  Description of Artificial Sequence: Synthetic oligonucleotide
  Sense strand starting at position 2765 of SEQ ID NO: 913897
augacuaaacuuugguauu

SEQ ID NO: 962597 - RNA, 19 nt, Artificial Sequence
  Description of Artificial Sequence: Synthetic oligonucleotide
  Antisense strand to SEQ ID NO: 962596
aauaccaaaguuuagucau

SEQ ID NO: 962598 - RNA, 19 nt, Artificial Sequence
  Description of Artificial Sequence: Synthetic oligonucleotide
  Sense strand starting at position 3046 of SEQ ID NO: 913897
caggaucuguccucacaag

SEQ ID NO: 962599 - RNA, 19 nt, Artificial Sequence
  Description of Artificial Sequence: Synthetic oligonucleotide
  Antisense strand to SEQ ID NO: 962598
cuugugaggacagauccug

SEQ ID NO: 962600 - RNA, 19 nt, Artificial Sequence
  Description of Artificial Sequence: Synthetic oligonucleotide
  Sense strand starting at position 171 of SEQ ID NO: 913897
uaguuagugcguguuuauu

SEQ ID NO: 962601 - RNA, 19 nt, Artificial Sequence
  Description of Artificial Sequence: Synthetic oligonucleotide
  Antisense strand to SEQ ID NO: 962600
aauaaacacgcacuaacua

SEQ ID NO: 962602 - RNA, 19 nt, Artificial Sequence
  Description of Artificial Sequence: Synthetic oligonucleotide
  Sense strand starting at position 345 of SEQ ID NO: 913897
gugugaggcguguugguau

SEQ ID NO: 962603 - RNA, 19 nt, Artificial Sequence
  Description of Artificial Sequence: Synthetic oligonucleotide
  Antisense strand to SEQ ID NO: 962602
auaccaacacgccucacac

SEQ ID NO: 962604 - RNA, 19 nt, Artificial Sequence
  Description of Artificial Sequence: Synthetic oligonucleotide
  Sense strand starting at position 506 of SEQ ID NO: 913897
aaguuugauugacuaguua

SEQ ID NO: 962605 - RNA, 19 nt, Artificial Sequence
  Description of Artificial Sequence: Synthetic oligonucleotide
  Antisense strand to SEQ ID NO: 962604
uaacuagucaaucaaacuu

SEQ ID NO: 962606 - RNA, 19 nt, Artificial Sequence
  Description of Artificial Sequence: Synthetic oligonucleotide
  Sense strand starting at position 2505 of SEQ ID NO: 913897
aguggaaacuguucuccaa

SEQ ID NO: 962607 - RNA, 19 nt, Artificial Sequence
  Description of Artificial Sequence: Synthetic oligonucleotide
  Antisense strand to SEQ ID NO: 962606
uuggagaacaguuuccacu

SEQ ID NO: 962608 - RNA, 19 nt, Artificial Sequence
  Description of Artificial Sequence: Synthetic oligonucleotide
  Sense strand starting at position 608 of SEQ ID NO: 913897
gaaagacugugauucuguc

SEQ ID NO: 962609 - RNA, 19 nt, Artificial Sequence
  Description of Artificial Sequence: Synthetic oligonucleotide
  Antisense strand to SEQ ID NO: 962608
gacagaaucacagucuuuc

SEQ ID NO: 962610 - RNA, 19 nt, Artificial Sequence
  Description of Artificial Sequence: Synthetic oligonucleotide
  Sense strand starting at position 2733 of SEQ ID NO: 913897
cacagagcaguaugugaaa

SEQ ID NO: 962611 - RNA, 19 nt, Artificial Sequence
  Description of Artificial Sequence: Synthetic oligonucleotide
  Antisense strand to SEQ ID NO: 962610
uuucacauacugcucugug

SEQ ID NO: 962612 - RNA, 19 nt, Artificial Sequence
  Description of Artificial Sequence: Synthetic oligonucleotide
  Sense strand starting at position 2136 of SEQ ID NO: 913897
gcggcucuaccagaaauag

SEQ ID NO: 962613 - RNA, 19 nt, Artificial Sequence
  Description of Artificial Sequence: Synthetic oligonucleotide
  Antisense strand to SEQ ID NO: 962612
cuauuucugguagagccgc

SEQ ID NO: 962614 - RNA, 19 nt, Artificial Sequence
  Description of Artificial Sequence: Synthetic oligonucleotide
  Sense strand starting at position 471 of SEQ ID NO: 913897
auguuaugacgacaucugu

SEQ ID NO: 962615 - RNA, 19 nt, Artificial Sequence
  Description of Artificial Sequence: Synthetic oligonucleotide
  Antisense strand to SEQ ID NO: 962614
acagaugucgucauaacau

SEQ ID NO: 962616 - RNA, 19 nt, Artificial Sequence
  Description of Artificial Sequence: Synthetic oligonucleotide
  Sense strand starting at position 647 of SEQ ID NO: 913897
gggacuuuauuugauuauc

SEQ ID NO: 962617 - RNA, 19 nt, Artificial Sequence
  Description of Artificial Sequence: Synthetic oligonucleotide
  Antisense strand to SEQ ID NO: 962616
gauaaucaaauaaaguccc

SEQ ID NO: 962618 - RNA, 19 nt, Artificial Sequence
  Description of Artificial Sequence: Synthetic oligonucleotide
  Sense strand starting at position 815 of SEQ ID NO: 913897
agcuauggucgcgcggaau

SEQ ID NO: 962619 - RNA, 19 nt, Artificial Sequence
  Description of Artificial Sequence: Synthetic oligonucleotide
  Antisense strand to SEQ ID NO: 962618
auuccgcgcgaccauagcu

SEQ ID NO: 962620 - RNA, 19 nt, Artificial Sequence
  Description of Artificial Sequence: Synthetic oligonucleotide
  Sense strand starting at position 577 of SEQ ID NO: 913897
uggccucugccacaucaaa

SEQ ID NO: 962621 - RNA, 19 nt, Artificial Sequence
  Description of Artificial Sequence: Synthetic oligonucleotide
  Antisense strand to SEQ ID NO: 962620
uuugauguggcagaggcca

SEQ ID NO: 962622 - RNA, 19 nt, Artificial Sequence
  Description of Artificial Sequence: Synthetic oligonucleotide
  Sense strand starting at position 2936 of SEQ ID NO: 913897
cguguuaagcgcucaguac

SEQ ID NO: 962623 - RNA, 19 nt, Artificial Sequence
  Description of Artificial Sequence: Synthetic oligonucleotide
  Antisense strand to SEQ ID NO: 962622
guacugagcgcuuaacacg

SEQ ID NO: 962624 - RNA, 19 nt, Artificial Sequence
  Description of Artificial Sequence: Synthetic oligonucleotide
  Sense strand starting at position 54 of SEQ ID NO: 913897
uaguaaauggcuggacuuu

SEQ ID NO: 962625 - RNA, 19 nt, Artificial Sequence
  Description of Artificial Sequence: Synthetic oligonucleotide
  Antisense strand to SEQ ID NO: 962624
aaaguccagccauuuacua

SEQ ID NO: 962626 - RNA, 19 nt, Artificial Sequence
  Description of Artificial Sequence: Synthetic oligonucleotide
  Sense strand starting at position 2598 of SEQ ID NO: 913897
acaugcaugucacuuauca

SEQ ID NO: 962627 - RNA, 19 nt, Artificial Sequence
  Description of Artificial Sequence: Synthetic oligonucleotide
  Antisense strand to SEQ ID NO: 962626
ugauaagugacaugcaugu

SEQ ID NO: 962628 - RNA, 19 nt, Artificial Sequence
  Description of Artificial Sequence: Synthetic oligonucleotide
  Sense strand starting at position 2351 of SEQ ID NO: 913897
aaacuuccuggcggguaaa

SEQ ID NO: 962629 - RNA, 19 nt, Artificial Sequence
  Description of Artificial Sequence: Synthetic oligonucleotide
  Antisense strand to SEQ ID NO: 962628
uuuacccgccaggaaguuu

SEQ ID NO: 962630 - RNA, 19 nt, Artificial Sequence
  Description of Artificial Sequence: Synthetic oligonucleotide
  Sense strand starting at position 53 of SEQ ID NO: 913897
guaguaaauggcuggacuu

SEQ ID NO: 962631 - RNA, 19 nt, Artificial Sequence
  Description of Artificial Sequence: Synthetic oligonucleotide
  Antisense strand to SEQ ID NO: 962630
aaguccagccauuuacuac

SEQ ID NO: 962632 - RNA, 19 nt, Artificial Sequence
  Description of Artificial Sequence: Synthetic oligonucleotide
  Sense strand starting at position 616 of SEQ ID NO: 913897
gugauucuguccucuuaaa

SEQ ID NO: 962633 - RNA, 19 nt, Artificial Sequence
  Description of Artificial Sequence: Synthetic oligonucleotide
  Antisense strand to SEQ ID NO: 962632
uuuaagaggacagaaucac

SEQ ID NO: 962634 - RNA, 19 nt, Artificial Sequence
  Description of Artificial Sequence: Synthetic oligonucleotide
  Sense strand starting at position 177 of SEQ ID NO: 913897
gugcguguuuauuuggauc

SEQ ID NO: 962635 - RNA, 19 nt, Artificial Sequence
  Description of Artificial Sequence: Synthetic oligonucleotide
  Antisense strand to SEQ ID NO: 962634
gauccaaauaaacacgcac

SEQ ID NO: 962636 - RNA, 19 nt, Artificial Sequence
  Description of Artificial Sequence: Synthetic oligonucleotide
  Sense strand starting at position 2880 of SEQ ID NO: 913897
uguugcuaggguugaauga

SEQ ID NO: 962637 - RNA, 19 nt, Artificial Sequence
  Description of Artificial Sequence: Synthetic oligonucleotide
  Antisense strand to SEQ ID NO: 962636
ucauucaacccuagcaaca

SEQ ID NO: 962638 - RNA, 19 nt, Artificial Sequence
  Description of Artificial Sequence: Synthetic oligonucleotide
  Sense strand starting at position 3937 of SEQ ID NO: 913897
ggaggaaugugccugguuu

SEQ ID NO: 962639 - RNA, 19 nt, Artificial Sequence
  Description of Artificial Sequence: Synthetic oligonucleotide
  Antisense strand to SEQ ID NO: 962638
aaaccaggcacauuccucc

SEQ ID NO: 962640 - RNA, 19 nt, Artificial Sequence
  Description of Artificial Sequence: Synthetic oligonucleotide
  Sense strand starting at position 243 of SEQ ID NO: 913897
cgacgugcuaaugacuauu

SEQ ID NO: 962641 - RNA, 19 nt, Artificial Sequence
  Description of Artificial Sequence: Synthetic oligonucleotide
  Antisense strand to SEQ ID NO: 962640
aauagucauuagcacgucg

SEQ ID NO: 962642 - RNA, 19 nt, Artificial Sequence
  Description of Artificial Sequence: Synthetic oligonucleotide
  Sense strand starting at position 2935 of SEQ ID NO: 913897
gcguguuaagcgcucagua

SEQ ID NO: 962643 - RNA, 19 nt, Artificial Sequence
  Description of Artificial Sequence: Synthetic oligonucleotide
  Antisense strand to SEQ ID NO: 962642
uacugagcgcuuaacacgc

SEQ ID NO: 962644 - RNA, 19 nt, Artificial Sequence
  Description of Artificial Sequence: Synthetic oligonucleotide
  Sense strand starting at position 2018 of SEQ ID NO: 913897
agccucuguccgggagauu

SEQ ID NO: 962645 - RNA, 19 nt, Artificial Sequence
  Description of Artificial Sequence: Synthetic oligonucleotide
  Antisense strand to SEQ ID NO: 962644
aaucucccggacagaggcu

SEQ ID NO: 962646 - RNA, 19 nt, Artificial Sequence
  Description of Artificial Sequence: Synthetic oligonucleotide
  Sense strand starting at position 614 of SEQ ID NO: 913897
cugugauucuguccucuua

SEQ ID NO: 962647 - RNA, 19 nt, Artificial Sequence
  Description of Artificial Sequence: Synthetic oligonucleotide
  Antisense strand to SEQ ID NO: 962646
uaagaggacagaaucacag

SEQ ID NO: 962648 - RNA, 19 nt, Artificial Sequence
  Description of Artificial Sequence: Synthetic oligonucleotide
  Sense strand starting at position 1261 of SEQ ID NO: 913898
cggucaugcccagcgagua

SEQ ID NO: 962649 - RNA, 19 nt, Artificial Sequence
  Description of Artificial Sequence: Synthetic oligonucleotide
  Antisense strand to SEQ ID NO: 962648
uacucgcugggcaugaccg

SEQ ID NO: 962650 - RNA, 19 nt, Artificial Sequence
  Description of Artificial Sequence: Synthetic oligonucleotide
  Sense strand starting at position 197 of SEQ ID NO: 913898
ggaagaaacugcuuuccac

SEQ ID NO: 962651 - RNA, 19 nt, Artificial Sequence
  Description of Artificial Sequence: Synthetic oligonucleotide
  Antisense strand to SEQ ID NO: 962650
guggaaagcaguuucuucc

SEQ ID NO: 962652 - RNA, 19 nt, Artificial Sequence
  Description of Artificial Sequence: Synthetic oligonucleotide
  Sense strand starting at position 3083 of SEQ ID NO: 913898
uguggugacgucucguauu

SEQ ID NO: 962653 - RNA, 19 nt, Artificial Sequence
  Description of Artificial Sequence: Synthetic oligonucleotide
  Antisense strand to SEQ ID NO: 962652
aauacgagacgucaccaca

SEQ ID NO: 962654 - RNA, 19 nt, Artificial Sequence
  Description of Artificial Sequence: Synthetic oligonucleotide
  Sense strand starting at position 160 of SEQ ID NO: 913898
cggaauuauuucggauuuc

SEQ ID NO: 962655 - RNA, 19 nt, Artificial Sequence
  Description of Artificial Sequence: Synthetic oligonucleotide
  Antisense strand to SEQ ID NO: 962654
gaaauccgaaauaauuccg

SEQ ID NO: 962656 - RNA, 19 nt, Artificial Sequence
  Description of Artificial Sequence: Synthetic oligonucleotide
  Sense strand starting at position 3482 of SEQ ID NO: 913898
acucgauucgacugggauu

SEQ ID NO: 962657 - RNA, 19 nt, Artificial Sequence
  Description of Artificial Sequence: Synthetic oligonucleotide
  Antisense strand to SEQ ID NO: 962656
aaucccagucgaaucgagu

SEQ ID NO: 962658 - RNA, 19 nt, Artificial Sequence
  Description of Artificial Sequence: Synthetic oligonucleotide
  Sense strand starting at position 2347 of SEQ ID NO: 913898
aguguaguuaggcaaaggu

SEQ ID NO: 962659 - RNA, 19 nt, Artificial Sequence
  Description of Artificial Sequence: Synthetic oligonucleotide
  Antisense strand to SEQ ID NO: 962658
accuuugccuaacuacacu

SEQ ID NO: 962660 - RNA, 19 nt, Artificial Sequence
  Description of Artificial Sequence: Synthetic oligonucleotide
  Sense strand starting at position 725 of SEQ ID NO: 913898
ccggguucgagacggaaga

SEQ ID NO: 962661 - RNA, 19 nt, Artificial Sequence
  Description of Artificial Sequence: Synthetic oligonucleotide
  Antisense strand to SEQ ID NO: 962660
ucuuccgucucgaacccgg

SEQ ID NO: 962662 - RNA, 19 nt, Artificial Sequence
  Description of Artificial Sequence: Synthetic oligonucleotide
  Sense strand starting at position 2337 of SEQ ID NO: 913898
cuuggaugggaguguaguu

SEQ ID NO: 962663 - RNA, 19 nt, Artificial Sequence
  Description of Artificial Sequence: Synthetic oligonucleotide
  Antisense strand to SEQ ID NO: 962662
aacuacacucccauccaag

SEQ ID NO: 962664 - RNA, 19 nt, Artificial Sequence
  Description of Artificial Sequence: Synthetic oligonucleotide
  Sense strand starting at position 159 of SEQ ID NO: 913898
gcggaauuauuucggauuu

SEQ ID NO: 962665 - RNA, 19 nt, Artificial Sequence
  Description of Artificial Sequence: Synthetic oligonucleotide
  Antisense strand to SEQ ID NO: 962664
aaauccgaaauaauuccgc

SEQ ID NO: 962666 - RNA, 19 nt, Artificial Sequence
  Description of Artificial Sequence: Synthetic oligonucleotide
  Sense strand starting at position 1370 of SEQ ID NO: 913898
gcgcgagugcuucuucuuc

SEQ ID NO: 962667 - RNA, 19 nt, Artificial Sequence
  Description of Artificial Sequence: Synthetic oligonucleotide
  Antisense strand to SEQ ID NO: 962666
gaagaagaagcacucgcgc

SEQ ID NO: 962668 - RNA, 19 nt, Artificial Sequence
  Description of Artificial Sequence: Synthetic oligonucleotide
  Sense strand starting at position 935 of SEQ ID NO: 913898
gaggguuugugcuucuuga

SEQ ID NO: 962669 - RNA, 19 nt, Artificial Sequence
  Description of Artificial Sequence: Synthetic oligonucleotide
  Antisense strand to SEQ ID NO: 962668
ucaagaagcacaaacccuc

SEQ ID NO: 962670 - RNA, 19 nt, Artificial Sequence
  Description of Artificial Sequence: Synthetic oligonucleotide
  Sense strand starting at position 1313 of SEQ ID NO: 913898
cuuggucugcucgaagguu

SEQ ID NO: 962671 - RNA, 19 nt, Artificial Sequence
  Description of Artificial Sequence: Synthetic oligonucleotide
  Antisense strand to SEQ ID NO: 962670
aaccuucgagcagaccaag

SEQ ID NO: 962672 - RNA, 19 nt, Artificial Sequence
  Description of Artificial Sequence: Synthetic oligonucleotide
  Sense strand starting at position 332 of SEQ ID NO: 913898
uggaaauaaucagagcgaa

SEQ ID NO: 962673 - RNA, 19 nt, Artificial Sequence
  Description of Artificial Sequence: Synthetic oligonucleotide
  Antisense strand to SEQ ID NO: 962672
uucgcucugauuauuucca

SEQ ID NO: 962674 - RNA, 19 nt, Artificial Sequence
  Description of Artificial Sequence: Synthetic oligonucleotide
  Sense strand starting at position 1309 of SEQ ID NO: 913898
gguacuuggucugcucgaa

SEQ ID NO: 962675 - RNA, 19 nt, Artificial Sequence
  Description of Artificial Sequence: Synthetic oligonucleotide
  Antisense strand to SEQ ID NO: 962674
uucgagcagaccaaguacc

SEQ ID NO: 962676 - RNA, 19 nt, Artificial Sequence
  Description of Artificial Sequence: Synthetic oligonucleotide
  Sense strand starting at position 186 of SEQ ID NO: 913898
gguccuaguucggaagaaa

SEQ ID NO: 962677 - RNA, 19 nt, Artificial Sequence
  Description of Artificial Sequence: Synthetic oligonucleotide
  Antisense strand to SEQ ID NO: 962676
uuucuuccgaacuaggacc

SEQ ID NO: 962678 - RNA, 19 nt, Artificial Sequence
  Description of Artificial Sequence: Synthetic oligonucleotide
  Sense strand starting at position 3089 of SEQ ID NO: 913898
gacgucucguauugauuua

SEQ ID NO: 962679 - RNA, 19 nt, Artificial Sequence
  Description of Artificial Sequence: Synthetic oligonucleotide
  Antisense strand to SEQ ID NO: 962678
uaaaucaauacgagacguc

SEQ ID NO: 962680 - RNA, 19 nt, Artificial Sequence
  Description of Artificial Sequence: Synthetic oligonucleotide
  Sense strand starting at position 951 of SEQ ID NO: 913898
ugagcagccgcgugaucuu

SEQ ID NO: 962681 - RNA, 19 nt, Artificial Sequence
  Description of Artificial Sequence: Synthetic oligonucleotide
  Antisense strand to SEQ ID NO: 962680
aagaucacgcggcugcuca

SEQ ID NO: 962682 - RNA, 19 nt, Artificial Sequence
  Description of Artificial Sequence: Synthetic oligonucleotide
  Sense strand starting at position 924 of SEQ ID NO: 913898
gcgccaaguucgaggguuu

SEQ ID NO: 962683 - RNA, 19 nt, Artificial Sequence
  Description of Artificial Sequence: Synthetic oligonucleotide
  Antisense strand to SEQ ID NO: 962682
aaacccucgaacuuggcgc

SEQ ID NO: 962684 - RNA, 19 nt, Artificial Sequence
  Description of Artificial Sequence: Synthetic oligonucleotide
  Sense strand starting at position 185 of SEQ ID NO: 913898
cgguccuaguucggaagaa

SEQ ID NO: 962685 - RNA, 19 nt, Artificial Sequence
  Description of Artificial Sequence: Synthetic oligonucleotide
  Antisense strand to SEQ ID NO: 962684
uucuuccgaacuaggaccg

SEQ ID NO: 962686 - RNA, 19 nt, Artificial Sequence
  Description of Artificial Sequence: Synthetic oligonucleotide
  Sense strand starting at position 3086 of SEQ ID NO: 913898
ggugacgucucguauugau

SEQ ID NO: 962687 - RNA, 19 nt, Artificial Sequence
  Description of Artificial Sequence: Synthetic oligonucleotide
  Antisense strand to SEQ ID NO: 962686
aucaauacgagacgucacc

SEQ ID NO: 962688 - RNA, 19 nt, Artificial Sequence
  Description of Artificial Sequence: Synthetic oligonucleotide
  Sense strand starting at position 960 of SEQ ID NO: 913898
gcgugaucuucucgucguc

SEQ ID NO: 962689 - RNA, 19 nt, Artificial Sequence
  Description of Artificial Sequence: Synthetic oligonucleotide
  Antisense strand to SEQ ID NO: 962688
gacgacgagaagaucacgc

SEQ ID NO: 962690 - RNA, 19 nt, Artificial Sequence
  Description of Artificial Sequence: Synthetic oligonucleotide
  Sense strand starting at position 674 of SEQ ID NO: 913899
agacaaguagaaugcaaau

SEQ ID NO: 962691 - RNA, 19 nt, Artificial Sequence
  Description of Artificial Sequence: Synthetic oligonucleotide
  Antisense strand to SEQ ID NO: 962690
auuugcauucuacuugucu

SEQ ID NO: 962692 - RNA, 19 nt, Artificial Sequence
  Description of Artificial Sequence: Synthetic oligonucleotide
  Sense strand starting at position 3521 of SEQ ID NO: 913899
agcaaauacagaugaguga

SEQ ID NO: 962693 - RNA, 19 nt, Artificial Sequence
  Description of Artificial Sequence: Synthetic oligonucleotide
  Antisense strand to SEQ ID NO: 962692
ucacucaucuguauuugcu

SEQ ID NO: 962694 - RNA, 19 nt, Artificial Sequence
  Description of Artificial Sequence: Synthetic oligonucleotide
  Sense strand starting at position 1054 of SEQ ID NO: 913899
aagaaauccgaucaagugu

SEQ ID NO: 962695 - RNA, 19 nt, Artificial Sequence
  Description of Artificial Sequence: Synthetic oligonucleotide
  Antisense strand to SEQ ID NO: 962694
acacuugaucggauuucuu

SEQ ID NO: 962696 - RNA, 19 nt, Artificial Sequence
  Description of Artificial Sequence: Synthetic oligonucleotide
  Sense strand starting at position 3525 of SEQ ID NO: 913899
aauacagaugagugagguu

SEQ ID NO: 962697 - RNA, 19 nt, Artificial Sequence
  Description of Artificial Sequence: Synthetic oligonucleotide
  Antisense strand to SEQ ID NO: 962696
aaccucacucaucuguauu

SEQ ID NO: 962698 - RNA, 19 nt, Artificial Sequence
  Description of Artificial Sequence: Synthetic oligonucleotide
  Sense strand starting at position 163 of SEQ ID NO: 913899
gaggaauucuuuguaccag

SEQ ID NO: 962699 - RNA, 19 nt, Artificial Sequence
  Description of Artificial Sequence: Synthetic oligonucleotide
  Antisense strand to SEQ ID NO: 962698
cugguacaaagaauuccuc

SEQ ID NO: 962700 - RNA, 19 nt, Artificial Sequence
  Description of Artificial Sequence: Synthetic oligonucleotide
  Sense strand starting at position 720 of SEQ ID NO: 913899
ucaagaaucucucuacgaa

SEQ ID NO: 962701 - RNA, 19 nt, Artificial Sequence
  Description of Artificial Sequence: Synthetic oligonucleotide
  Antisense strand to SEQ ID NO: 962700
uucguagagagauucuuga

SEQ ID NO: 962702 - RNA, 19 nt, Artificial Sequence
  Description of Artificial Sequence: Synthetic oligonucleotide
  Sense strand starting at position 3883 of SEQ ID NO: 913899
acaguacuggauugaagua

SEQ ID NO: 962703 - RNA, 19 nt, Artificial Sequence
  Description of Artificial Sequence: Synthetic oligonucleotide
  Antisense strand to SEQ ID NO: 962702
uacuucaauccaguacugu

SEQ ID NO: 962704 - RNA, 19 nt, Artificial Sequence
  Description of Artificial Sequence: Synthetic oligonucleotide
  Sense strand starting at position 3377 of SEQ ID NO: 913899
cuguuuggcauugagacaa

SEQ ID NO: 962705 - RNA, 19 nt, Artificial Sequence
  Description of Artificial Sequence: Synthetic oligonucleotide
  Antisense strand to SEQ ID NO: 962704
uugucucaaugccaaacag

SEQ ID NO: 962706 - RNA, 19 nt, Artificial Sequence
  Description of Artificial Sequence: Synthetic oligonucleotide
  Sense strand starting at position 162 of SEQ ID NO: 913899
ugaggaauucuuuguacca

SEQ ID NO: 962707 - RNA, 19 nt, Artificial Sequence
  Description of Artificial Sequence: Synthetic oligonucleotide
  Antisense strand to SEQ ID NO: 962706
ugguacaaagaauuccuca

SEQ ID NO: 962708 - RNA, 19 nt, Artificial Sequence
  Description of Artificial Sequence: Synthetic oligonucleotide
  Sense strand starting at position 3896 of SEQ ID NO: 913899
gaaguacaucgguacagua

SEQ ID NO: 962709 - RNA, 19 nt, Artificial Sequence
  Description of Artificial Sequence: Synthetic oligonucleotide
  Antisense strand to SEQ ID NO: 962708
uacuguaccgauguacuuc

SEQ ID NO: 962710 - RNA, 19 nt, Artificial Sequence
  Description of Artificial Sequence: Synthetic oligonucleotide
  Sense strand starting at position 3040 of SEQ ID NO: 913899
auagaagaccggugaaguu

SEQ ID NO: 962711 - RNA, 19 nt, Artificial Sequence
  Description of Artificial Sequence: Synthetic oligonucleotide
  Antisense strand to SEQ ID NO: 962710
aacuucaccggucuucuau

SEQ ID NO: 962712 - RNA, 19 nt, Artificial Sequence
  Description of Artificial Sequence: Synthetic oligonucleotide
  Sense strand starting at position 3152 of SEQ ID NO: 913899
ggaagucuccgcagugguu

SEQ ID NO: 962713 - RNA, 19 nt, Artificial Sequence
  Description of Artificial Sequence: Synthetic oligonucleotide
  Antisense strand to SEQ ID NO: 962712
aaccacugcggagacuucc

SEQ ID NO: 962714 - RNA, 19 nt, Artificial Sequence
  Description of Artificial Sequence: Synthetic oligonucleotide
  Sense strand starting at position 2543 of SEQ ID NO: 913899
uuuacuucuggacgaauua

SEQ ID NO: 962715 - RNA, 19 nt, Artificial Sequence
  Description of Artificial Sequence: Synthetic oligonucleotide
  Antisense strand to SEQ ID NO: 962714
uaauucguccagaaguaaa

SEQ ID NO: 962716 - RNA, 19 nt, Artificial Sequence
  Description of Artificial Sequence: Synthetic oligonucleotide
  Sense strand starting at position 144 of SEQ ID NO: 913899
gaucaaugcgcacacagau

SEQ ID NO: 962717 - RNA, 19 nt, Artificial Sequence
  Description of Artificial Sequence: Synthetic oligonucleotide
  Antisense strand to SEQ ID NO: 962716
aucugugugcgcauugauc

SEQ ID NO: 962718 - RNA, 19 nt, Artificial Sequence
  Description of Artificial Sequence: Synthetic oligonucleotide
  Sense strand starting at position 2807 of SEQ ID NO: 913899
cugcuuucccuggacacua

SEQ ID NO: 962719 - RNA, 19 nt, Artificial Sequence
  Description of Artificial Sequence: Synthetic oligonucleotide
  Antisense strand to SEQ ID NO: 962718
uaguguccagggaaagcag

SEQ ID NO: 962720 - RNA, 19 nt, Artificial Sequence
  Description of Artificial Sequence: Synthetic oligonucleotide
  Sense strand starting at position 182 of SEQ ID NO: 913899
gggcauucucaacagugua

SEQ ID NO: 962721 - RNA, 19 nt, Artificial Sequence
  Description of Artificial Sequence: Synthetic oligonucleotide
  Antisense strand to SEQ ID NO: 962720
uacacuguugagaaugccc

SEQ ID NO: 962722 - RNA, 19 nt, Artificial Sequence
  Description of Artificial Sequence: Synthetic oligonucleotide
  Sense strand starting at position 803 of SEQ ID NO: 913899
cacucaccaugguucgaaa

SEQ ID NO: 962723 - RNA, 19 nt, Artificial Sequence
  Description of Artificial Sequence: Synthetic oligonucleotide
  Antisense strand to SEQ ID NO: 962722
uuucgaaccauggugagug

SEQ ID NO: 962724 - RNA, 19 nt, Artificial Sequence
  Description of Artificial Sequence: Synthetic oligonucleotide
  Sense strand starting at position 3016 of SEQ ID NO: 913899
ggaggcauucuguaguacu

SEQ ID NO: 962725 - RNA, 19 nt, Artificial Sequence
  Description of Artificial Sequence: Synthetic oligonucleotide
  Antisense strand to SEQ ID NO: 962724
aguacuacagaaugccucc

SEQ ID NO: 962726 - RNA, 19 nt, Artificial Sequence
  Description of Artificial Sequence: Synthetic oligonucleotide
  Sense strand starting at position 3490 of SEQ ID NO: 913899
acaugucaccucugugaaa

SEQ ID NO: 962727 - RNA, 19 nt, Artificial Sequence
  Description of Artificial Sequence: Synthetic oligonucleotide
  Antisense strand to SEQ ID NO: 962726
uuucacagaggugacaugu

SEQ ID NO: 962728 - RNA, 19 nt, Artificial Sequence
  Description of Artificial Sequence: Synthetic oligonucleotide
  Sense strand starting at position 743 of SEQ ID NO: 913899
guaaaccaucugugacuca

SEQ ID NO: 962729 - RNA, 19 nt, Artificial Sequence
  Description of Artificial Sequence: Synthetic oligonucleotide
  Antisense strand to SEQ ID NO: 962728
ugagucacagaugguuuac

SEQ ID NO: 962730 - RNA, 19 nt, Artificial Sequence
  Description of Artificial Sequence: Synthetic oligonucleotide
  Sense strand starting at position 3318 of SEQ ID NO: 913899
cgcaaugagcuagaaguau

SEQ ID NO: 962731 - RNA, 19 nt, Artificial Sequence
  Description of Artificial Sequence: Synthetic oligonucleotide
  Antisense strand to SEQ ID NO: 962730
auacuucuagcucauugcg

SEQ ID NO: 962732 - RNA, 19 nt, Artificial Sequence
  Description of Artificial Sequence: Synthetic oligonucleotide
  Sense strand starting at position 3105 of SEQ ID NO: 913899
cuuugcuuugcugagauga

SEQ ID NO: 962733 - RNA, 19 nt, Artificial Sequence
  Description of Artificial Sequence: Synthetic oligonucleotide
  Antisense strand to SEQ ID NO: 962732
ucaucucagcaaagcaaag

SEQ ID NO: 962734 - RNA, 19 nt, Artificial Sequence
  Description of Artificial Sequence: Synthetic oligonucleotide
  Sense strand starting at position 3492 of SEQ ID NO: 913899
augucaccucugugaaacu

SEQ ID NO: 962735 - RNA, 19 nt, Artificial Sequence
  Description of Artificial Sequence: Synthetic oligonucleotide
  Antisense strand to SEQ ID NO: 962734
aguuucacagaggugacau

SEQ ID NO: 962736 - RNA, 19 nt, Artificial Sequence
  Description of Artificial Sequence: Synthetic oligonucleotide
  Sense strand starting at position 92 of SEQ ID NO: 913899
ggugcuacucugggaacuu

SEQ ID NO: 962737 - RNA, 19 nt, Artificial Sequence
  Description of Artificial Sequence: Synthetic oligonucleotide
  Antisense strand to SEQ ID NO: 962736
aaguucccagaguagcacc

SEQ ID NO: 962738 - RNA, 19 nt, Artificial Sequence
  Description of Artificial Sequence: Synthetic oligonucleotide
  Sense strand starting at position 3549 of SEQ ID NO: 913899
agcucaucucugugaacau

SEQ ID NO: 962739 - RNA, 19 nt, Artificial Sequence
  Description of Artificial Sequence: Synthetic oligonucleotide
  Antisense strand to SEQ ID NO: 962738
auguucacagagaugagcu

SEQ ID NO: 962740 - RNA, 19 nt, Artificial Sequence
  Description of Artificial Sequence: Synthetic oligonucleotide
  Sense strand starting at position 3895 of SEQ ID NO: 913899
ugaaguacaucgguacagu

SEQ ID NO: 962741 - RNA, 19 nt, Artificial Sequence
  Description of Artificial Sequence: Synthetic oligonucleotide
  Antisense strand to SEQ ID NO: 962740
acuguaccgauguacuuca

SEQ ID NO: 962742 - RNA, 19 nt, Artificial Sequence
  Description of Artificial Sequence: Synthetic oligonucleotide
  Sense strand starting at position 3080 of SEQ ID NO: 913899
gcauucuguacagagcagu

SEQ ID NO: 962743 - RNA, 19 nt, Artificial Sequence
  Description of Artificial Sequence: Synthetic oligonucleotide
  Antisense strand to SEQ ID NO: 962742
acugcucuguacagaaugc

SEQ ID NO: 962744 - RNA, 19 nt, Artificial Sequence
  Description of Artificial Sequence: Synthetic oligonucleotide
  Sense strand starting at position 3465 of SEQ ID NO: 913899
gcaacuauuucugaggcaa

SEQ ID NO: 962745 - RNA, 19 nt, Artificial Sequence
  Description of Artificial Sequence: Synthetic oligonucleotide
  Antisense strand to SEQ ID NO: 962744
uugccucagaaauaguugc

SEQ ID NO: 962746 - RNA, 19 nt, Artificial Sequence
  Description of Artificial Sequence: Synthetic oligonucleotide
  Sense strand starting at position 3503 of SEQ ID NO: 913899
gugaaacuuuaggauagaa

SEQ ID NO: 962747 - RNA, 19 nt, Artificial Sequence
  Description of Artificial Sequence: Synthetic oligonucleotide
  Antisense strand to SEQ ID NO: 962746
uucuauccuaaaguuucac

SEQ ID NO: 962748 - RNA, 19 nt, Artificial Sequence
  Description of Artificial Sequence: Synthetic oligonucleotide
  Sense strand starting at position 3376 of SEQ ID NO: 913899
gcuguuuggcauugagaca

SEQ ID NO: 962749 - RNA, 19 nt, Artificial Sequence
  Description of Artificial Sequence: Synthetic oligonucleotide
  Antisense strand to SEQ ID NO: 962748
ugucucaaugccaaacagc

SEQ ID NO: 962750 - RNA, 19 nt, Artificial Sequence
  Description of Artificial Sequence: Synthetic oligonucleotide
  Sense strand starting at position 355 of SEQ ID NO: 913899
gcccauuucuggcaauaga

SEQ ID NO: 962751 - RNA, 19 nt, Artificial Sequence
  Description of Artificial Sequence: Synthetic oligonucleotide
  Antisense strand to SEQ ID NO: 962750
ucuauugccagaaaugggc

SEQ ID NO: 962752 - RNA, 19 nt, Artificial Sequence
  Description of Artificial Sequence: Synthetic oligonucleotide
  Sense strand starting at position 3260 of SEQ ID NO: 913899
agaagauacuaggagcauu

SEQ ID NO: 962753 - RNA, 19 nt, Artificial Sequence
  Description of Artificial Sequence: Synthetic oligonucleotide
  Antisense strand to SEQ ID NO: 962752
aaugcuccuaguaucuucu

SEQ ID NO: 962754 - RNA, 19 nt, Artificial Sequence
  Description of Artificial Sequence: Synthetic oligonucleotide
  Sense strand starting at position 3546 of SEQ ID NO: 913899
ugcagcucaucucugugaa

SEQ ID NO: 962755 - RNA, 19 nt, Artificial Sequence
  Description of Artificial Sequence: Synthetic oligonucleotide
  Antisense strand to SEQ ID NO: 962754
uucacagagaugagcugca

SEQ ID NO: 962756 - RNA, 19 nt, Artificial Sequence
  Description of Artificial Sequence: Synthetic oligonucleotide
  Sense strand starting at position 3547 of SEQ ID NO: 913899
gcagcucaucucugugaac

SEQ ID NO: 962757 - RNA, 19 nt, Artificial Sequence
  Description of Artificial Sequence: Synthetic oligonucleotide
  Antisense strand to SEQ ID NO: 962756
guucacagagaugagcugc

SEQ ID NO: 962758 - RNA, 19 nt, Artificial Sequence
  Description of Artificial Sequence: Synthetic oligonucleotide
  Sense strand starting at position 420 of SEQ ID NO: 913899
acguuucuaucccugcaua

SEQ ID NO: 962759 - RNA, 19 nt, Artificial Sequence
  Description of Artificial Sequence: Synthetic oligonucleotide
  Antisense strand to SEQ ID NO: 962758
uaugcagggauagaaacgu

SEQ ID NO: 962760 - RNA, 19 nt, Artificial Sequence
  Description of Artificial Sequence: Synthetic oligonucleotide
  Sense strand starting at position 421 of SEQ ID NO: 913899
cguuucuaucccugcauaa

SEQ ID NO: 962761 - RNA, 19 nt, Artificial Sequence
  Description of Artificial Sequence: Synthetic oligonucleotide
  Antisense strand to SEQ ID NO: 962760
uuaugcagggauagaaacg

SEQ ID NO: 962762 - RNA, 19 nt, Artificial Sequence
  Description of Artificial Sequence: Synthetic oligonucleotide
  Sense strand starting at position 132 of SEQ ID NO: 913899
gggacaggcucagaucaau

SEQ ID NO: 962763 - RNA, 19 nt, Artificial Sequence
  Description of Artificial Sequence: Synthetic oligonucleotide
  Antisense strand to SEQ ID NO: 962762
auugaucugagccuguccc

SEQ ID NO: 962764 - RNA, 19 nt, Artificial Sequence
  Description of Artificial Sequence: Synthetic oligonucleotide
  Sense strand starting at position 2967 of SEQ ID NO: 913899
acggccuucugugcugaaa

SEQ ID NO: 962765 - RNA, 19 nt, Artificial Sequence
  Description of Artificial Sequence: Synthetic oligonucleotide
  Antisense strand to SEQ ID NO: 962764
uuucagcacagaaggccgu

SEQ ID NO: 962766 - RNA, 19 nt, Artificial Sequence
  Description of Artificial Sequence: Synthetic oligonucleotide
  Sense strand starting at position 3464 of SEQ ID NO: 913899
ggcaacuauuucugaggca

SEQ ID NO: 962767 - RNA, 19 nt, Artificial Sequence
  Description of Artificial Sequence: Synthetic oligonucleotide
  Antisense strand to SEQ ID NO: 962766
ugccucagaaauaguugcc

SEQ ID NO: 962768 - RNA, 19 nt, Artificial Sequence
  Description of Artificial Sequence: Synthetic oligonucleotide
  Sense strand starting at position 2980 of SEQ ID NO: 913899
cugaaauuguccgcugucu

SEQ ID NO: 962769 - RNA, 19 nt, Artificial Sequence
  Description of Artificial Sequence: Synthetic oligonucleotide
  Antisense strand to SEQ ID NO: 962768
agacagcggacaauuucag

SEQ ID NO: 962770 - RNA, 19 nt, Artificial Sequence
  Description of Artificial Sequence: Synthetic oligonucleotide
  Sense strand starting at position 1911 of SEQ ID NO: 913900
auccuuaggccuuaaauga

SEQ ID NO: 962771 - RNA, 19 nt, Artificial Sequence
  Description of Artificial Sequence: Synthetic oligonucleotide
  Antisense strand to SEQ ID NO: 962770
ucauuuaaggccuaaggau

SEQ ID NO: 962772 - RNA, 19 nt, Artificial Sequence
  Description of Artificial Sequence: Synthetic oligonucleotide
  Sense strand starting at position 597 of SEQ ID NO: 913900
guccuauaggacuacuauc

SEQ ID NO: 962773 - RNA, 19 nt, Artificial Sequence
  Description of Artificial Sequence: Synthetic oligonucleotide
  Antisense strand to SEQ ID NO: 962772
gauaguaguccuauaggac

SEQ ID NO: 962774 - RNA, 19 nt, Artificial Sequence
  Description of Artificial Sequence: Synthetic oligonucleotide
  Sense strand starting at position 2231 of SEQ ID NO: 913900
agguuaucugaguaugauu

SEQ ID NO: 962775 - RNA, 19 nt, Artificial Sequence
  Description of Artificial Sequence: Synthetic oligonucleotide
  Antisense strand to SEQ ID NO: 962774
aaucauacucagauaaccu

SEQ ID NO: 962776 - RNA, 19 nt, Artificial Sequence
  Description of Artificial Sequence: Synthetic oligonucleotide
  Sense strand starting at position 1576 of SEQ ID NO: 913900
cgugacucacauuauaaac

SEQ ID NO: 962777 - RNA, 19 nt, Artificial Sequence
  Description of Artificial Sequence: Synthetic oligonucleotide
  Antisense strand to SEQ ID NO: 962776
guuuauaaugugagucacg

SEQ ID NO: 962778 - RNA, 19 nt, Artificial Sequence
  Description of Artificial Sequence: Synthetic oligonucleotide
  Sense strand starting at position 559 of SEQ ID NO: 913900
ucauacugacugugauaaa

SEQ ID NO: 962779 - RNA, 19 nt, Artificial Sequence
  Description of Artificial Sequence: Synthetic oligonucleotide
  Antisense strand to SEQ ID NO: 962778
uuuaucacagucaguauga

SEQ ID NO: 962780 - RNA, 19 nt, Artificial Sequence
  Description of Artificial Sequence: Synthetic oligonucleotide
  Sense strand starting at position 649 of SEQ ID NO: 913900
aagcgauuacuagaaagca

SEQ ID NO: 962781 - RNA, 19 nt, Artificial Sequence
  Description of Artificial Sequence: Synthetic oligonucleotide
  Antisense strand to SEQ ID NO: 962780
ugcuuucuaguaaucgcuu

SEQ ID NO: 962782 - RNA, 19 nt, Artificial Sequence
  Description of Artificial Sequence: Synthetic oligonucleotide
  Sense strand starting at position 591 of SEQ ID NO: 913900
auagcaguccuauaggacu

SEQ ID NO: 962783 - RNA, 19 nt, Artificial Sequence
  Description of Artificial Sequence: Synthetic oligonucleotide
  Antisense strand to SEQ ID NO: 962782
aguccuauaggacugcuau

SEQ ID NO: 962784 - RNA, 19 nt, Artificial Sequence
  Description of Artificial Sequence: Synthetic oligonucleotide
  Sense strand starting at position 2480 of SEQ ID NO: 913900
cauucuggccguguuugua

SEQ ID NO: 962785 - RNA, 19 nt, Artificial Sequence
  Description of Artificial Sequence: Synthetic oligonucleotide
  Antisense strand to SEQ ID NO: 962784
uacaaacacggccagaaug

SEQ ID NO: 962786 - RNA, 19 nt, Artificial Sequence
  Description of Artificial Sequence: Synthetic oligonucleotide
  Sense strand starting at position 773 of SEQ ID NO: 913900
ggguuucuuagacacagca

SEQ ID NO: 962787 - RNA, 19 nt, Artificial Sequence
  Description of Artificial Sequence: Synthetic oligonucleotide
  Antisense strand to SEQ ID NO: 962786
ugcugugucuaagaaaccc

SEQ ID NO: 962788 - RNA, 19 nt, Artificial Sequence
  Description of Artificial Sequence: Synthetic oligonucleotide
  Sense strand starting at position 216 of SEQ ID NO: 913900
agucauauuccuuacaagu

SEQ ID NO: 962789 - RNA, 19 nt, Artificial Sequence
  Description of Artificial Sequence: Synthetic oligonucleotide
  Antisense strand to SEQ ID NO: 962788
acuuguaaggaauaugacu

SEQ ID NO: 962790 - RNA, 19 nt, Artificial Sequence
  Description of Artificial Sequence: Synthetic oligonucleotide
  Sense strand starting at position 1232 of SEQ ID NO: 913900
uuaacacaccuguaguuua

SEQ ID NO: 962791 - RNA, 19 nt, Artificial Sequence
  Description of Artificial Sequence: Synthetic oligonucleotide
  Antisense strand to SEQ ID NO: 962790
uaaacuacagguguguuaa

SEQ ID NO: 962792 - RNA, 19 nt, Artificial Sequence
  Description of Artificial Sequence: Synthetic oligonucleotide
  Sense strand starting at position 755 of SEQ ID NO: 913900
uggguucuccaauggaaug

SEQ ID NO: 962793 - RNA, 19 nt, Artificial Sequence
  Description of Artificial Sequence: Synthetic oligonucleotide
  Antisense strand to SEQ ID NO: 962792
cauuccauuggagaaccca

SEQ ID NO: 962794 - RNA, 19 nt, Artificial Sequence
  Description of Artificial Sequence: Synthetic oligonucleotide
  Sense strand starting at position 125 of SEQ ID NO: 913900
aagacugaauaguugucua

SEQ ID NO: 962795 - RNA, 19 nt, Artificial Sequence
  Description of Artificial Sequence: Synthetic oligonucleotide
  Antisense strand to SEQ ID NO: 962794
uagacaacuauucagucuu

SEQ ID NO: 962796 - RNA, 19 nt, Artificial Sequence
  Description of Artificial Sequence: Synthetic oligonucleotide
  Sense strand starting at position 2943 of SEQ ID NO: 913900
aucuuacaacuuuggguaa

SEQ ID NO: 962797 - RNA, 19 nt, Artificial Sequence
  Description of Artificial Sequence: Synthetic oligonucleotide
  Antisense strand to SEQ ID NO: 962796
uuacccaaaguuguaagau

SEQ ID NO: 962798 - RNA, 19 nt, Artificial Sequence
  Description of Artificial Sequence: Synthetic oligonucleotide
  Sense strand starting at position 2230 of SEQ ID NO: 913900
aagguuaucugaguaugau

SEQ ID NO: 962799 - RNA, 19 nt, Artificial Sequence
  Description of Artificial Sequence: Synthetic oligonucleotide
  Antisense strand to SEQ ID NO: 962798
aucauacucagauaaccuu

SEQ ID NO: 962800 - RNA, 19 nt, Artificial Sequence
  Description of Artificial Sequence: Synthetic oligonucleotide
  Sense strand starting at position 347 of SEQ ID NO: 913900
uuggcaauacugugaagaa

SEQ ID NO: 962801 - RNA, 19 nt, Artificial Sequence
  Description of Artificial Sequence: Synthetic oligonucleotide
  Antisense strand to SEQ ID NO: 962800
uucuucacaguauugccaa

SEQ ID NO: 962802 - RNA, 19 nt, Artificial Sequence
  Description of Artificial Sequence: Synthetic oligonucleotide
  Sense strand starting at position 1429 of SEQ ID NO: 913900
gaauucggaucuuuggauu

SEQ ID NO: 962803 - RNA, 19 nt, Artificial Sequence
  Description of Artificial Sequence: Synthetic oligonucleotide
  Antisense strand to SEQ ID NO: 962802
aauccaaagauccgaauuc

SEQ ID NO: 962804 - RNA, 19 nt, Artificial Sequence
  Description of Artificial Sequence: Synthetic oligonucleotide
  Sense strand starting at position 1588 of SEQ ID NO: 913900
uauaaacucgcugagggua

SEQ ID NO: 962805 - RNA, 19 nt, Artificial Sequence
  Description of Artificial Sequence: Synthetic oligonucleotide
  Antisense strand to SEQ ID NO: 962804
uacccucagcgaguuuaua

SEQ ID NO: 962806 - RNA, 19 nt, Artificial Sequence
  Description of Artificial Sequence: Synthetic oligonucleotide
  Sense strand starting at position 128 of SEQ ID NO: 913900
acugaauaguugucuaaua

SEQ ID NO: 962807 - RNA, 19 nt, Artificial Sequence
  Description of Artificial Sequence: Synthetic oligonucleotide
  Antisense strand to SEQ ID NO: 962806
uauuagacaacuauucagu

SEQ ID NO: 962808 - RNA, 19 nt, Artificial Sequence
  Description of Artificial Sequence: Synthetic oligonucleotide
  Sense strand starting at position 129 of SEQ ID NO: 913900
cugaauaguugucuaauaa

SEQ ID NO: 962809 - RNA, 19 nt, Artificial Sequence
  Description of Artificial Sequence: Synthetic oligonucleotide
  Antisense strand to SEQ ID NO: 962808
uuauuagacaacuauucag

SEQ ID NO: 962810 - RNA, 19 nt, Artificial Sequence
  Description of Artificial Sequence: Synthetic oligonucleotide
  Sense strand starting at position 2964 of SEQ ID NO: 913900
ucugucugcuuaguaauuu

SEQ ID NO: 962811 - RNA, 19 nt, Artificial Sequence
  Description of Artificial Sequence: Synthetic oligonucleotide
  Antisense strand to SEQ ID NO: 962810
aaauuacuaagcagacaga

SEQ ID NO: 962812 - RNA, 19 nt, Artificial Sequence
  Description of Artificial Sequence: Synthetic oligonucleotide
  Sense strand starting at position 557 of SEQ ID NO: 913900
ucucauacugacugugaua

SEQ ID NO: 962813 - RNA, 19 nt, Artificial Sequence
  Description of Artificial Sequence: Synthetic oligonucleotide
  Antisense strand to SEQ ID NO: 962812
uaucacagucaguaugaga

SEQ ID NO: 962814 - RNA, 19 nt, Artificial Sequence
  Description of Artificial Sequence: Synthetic oligonucleotide
  Sense strand starting at position 2240 of SEQ ID NO: 913900
gaguaugauucuuugacuc

SEQ ID NO: 962815 - RNA, 19 nt, Artificial Sequence
  Description of Artificial Sequence: Synthetic oligonucleotide
  Antisense strand to SEQ ID NO: 962814
gagucaaagaaucauacuc

SEQ ID NO: 962816 - RNA, 19 nt, Artificial Sequence
  Description of Artificial Sequence: Synthetic oligonucleotide
  Sense strand starting at position 2239 of SEQ ID NO: 913900
ugaguaugauucuuugacu

SEQ ID NO: 962817 - RNA, 19 nt, Artificial Sequence
  Description of Artificial Sequence: Synthetic oligonucleotide
  Antisense strand to SEQ ID NO: 962816
agucaaagaaucauacuca

SEQ ID NO: 962818 - RNA, 19 nt, Artificial Sequence
  Description of Artificial Sequence: Synthetic oligonucleotide
  Sense strand starting at position 2333 of SEQ ID NO: 913900
cggucaccucauugcauuu

SEQ ID NO: 962819 - RNA, 19 nt, Artificial Sequence
  Description of Artificial Sequence: Synthetic oligonucleotide
  Antisense strand to SEQ ID NO: 962818
aaaugcaaugaggugaccg

SEQ ID NO: 962820 - RNA, 19 nt, Artificial Sequence
  Description of Artificial Sequence: Synthetic oligonucleotide
  Sense strand starting at position 1087 of SEQ ID NO: 913900
accaaacgauggcuuuaau

SEQ ID NO: 962821 - RNA, 19 nt, Artificial Sequence
  Description of Artificial Sequence: Synthetic oligonucleotide
  Antisense strand to SEQ ID NO: 962820
auuaaagccaucguuuggu

SEQ ID NO: 962822 - RNA, 19 nt, Artificial Sequence
  Description of Artificial Sequence: Synthetic oligonucleotide
  Sense strand starting at position 1571 of SEQ ID NO: 913900
gguaccgugacucacauua

SEQ ID NO: 962823 - RNA, 19 nt, Artificial Sequence
  Description of Artificial Sequence: Synthetic oligonucleotide
  Antisense strand to SEQ ID NO: 962822
uaaugugagucacgguacc

SEQ ID NO: 962824 - RNA, 19 nt, Artificial Sequence
  Description of Artificial Sequence: Synthetic oligonucleotide
  Sense strand starting at position 136 of SEQ ID NO: 913900
guugucuaauaaucugaua

SEQ ID NO: 962825 - RNA, 19 nt, Artificial Sequence
  Description of Artificial Sequence: Synthetic oligonucleotide
  Antisense strand to SEQ ID NO: 962824
uaucagauuauuagacaac

SEQ ID NO: 962826 - RNA, 19 nt, Artificial Sequence
  Description of Artificial Sequence: Synthetic oligonucleotide
  Sense strand starting at position 1479 of SEQ ID NO: 913900
ucccaaaguuaguccugaa

SEQ ID NO: 962827 - RNA, 19 nt, Artificial Sequence
  Description of Artificial Sequence: Synthetic oligonucleotide
  Antisense strand to SEQ ID NO: 962826
uucaggacuaacuuuggga

SEQ ID NO: 962828 - RNA, 19 nt, Artificial Sequence
  Description of Artificial Sequence: Synthetic oligonucleotide
  Sense strand starting at position 556 of SEQ ID NO: 913900
uucucauacugacugugau

SEQ ID NO: 962829 - RNA, 19 nt, Artificial Sequence
  Description of Artificial Sequence: Synthetic oligonucleotide
  Antisense strand to SEQ ID NO: 962828
aucacagucaguaugagaa

SEQ ID NO: 962830 - RNA, 19 nt, Artificial Sequence
  Description of Artificial Sequence: Synthetic oligonucleotide
  Sense strand starting at position 193 of SEQ ID NO: 913900
guagaacuagccugacuca

SEQ ID NO: 962831 - RNA, 19 nt, Artificial Sequence
  Description of Artificial Sequence: Synthetic oligonucleotide
  Antisense strand to SEQ ID NO: 962830
ugagucaggcuaguucuac

SEQ ID NO: 962832 - RNA, 19 nt, Artificial Sequence
  Description of Artificial Sequence: Synthetic oligonucleotide
  Sense strand starting at position 1365 of SEQ ID NO: 913900
ugcuguuauccucacauua

SEQ ID NO: 962833 - RNA, 19 nt, Artificial Sequence
  Description of Artificial Sequence: Synthetic oligonucleotide
  Antisense strand to SEQ ID NO: 962832
uaaugugaggauaacagca

SEQ ID NO: 962834 - RNA, 19 nt, Artificial Sequence
  Description of Artificial Sequence: Synthetic oligonucleotide
  Sense strand starting at position 1206 of SEQ ID NO: 913900
gugguaaguggcuauucaa

SEQ ID NO: 962835 - RNA, 19 nt, Artificial Sequence
  Description of Artificial Sequence: Synthetic oligonucleotide
  Antisense strand to SEQ ID NO: 962834
uugaauagccacuuaccac

SEQ ID NO: 962836 - RNA, 19 nt, Artificial Sequence
  Description of Artificial Sequence: Synthetic oligonucleotide
  Sense strand starting at position 395 of SEQ ID NO: 913900
uaccuaacugcuggugaau

SEQ ID NO: 962837 - RNA, 19 nt, Artificial Sequence
  Description of Artificial Sequence: Synthetic oligonucleotide
  Antisense strand to SEQ ID NO: 962836
auucaccagcaguuaggua

SEQ ID NO: 962838 - RNA, 19 nt, Artificial Sequence
  Description of Artificial Sequence: Synthetic oligonucleotide
  Sense strand starting at position 1269 of SEQ ID NO: 913900
gcuggcugucuuuaauaaa

SEQ ID NO: 962839 - RNA, 19 nt, Artificial Sequence
  Description of Artificial Sequence: Synthetic oligonucleotide
  Antisense strand to SEQ ID NO: 962838
uuuauuaaagacagccagc

SEQ ID NO: 962840 - RNA, 19 nt, Artificial Sequence
  Description of Artificial Sequence: Synthetic oligonucleotide
  Sense strand starting at position 3440 of SEQ ID NO: 913900
ugagcauggcccugacaca

SEQ ID NO: 962841 - RNA, 19 nt, Artificial Sequence
  Description of Artificial Sequence: Synthetic oligonucleotide
  Antisense strand to SEQ ID NO: 962840
ugugucagggccaugcuca

SEQ ID NO: 962842 - RNA, 19 nt, Artificial Sequence
  Description of Artificial Sequence: Synthetic oligonucleotide
  Sense strand starting at position 2233 of SEQ ID NO: 913900
guuaucugaguaugauucu

SEQ ID NO: 962843 - RNA, 19 nt, Artificial Sequence
  Description of Artificial Sequence: Synthetic oligonucleotide
  Antisense strand to SEQ ID NO: 962842
agaaucauacucagauaac

SEQ ID NO: 962844 - RNA, 19 nt, Artificial Sequence
  Description of Artificial Sequence: Synthetic oligonucleotide
  Sense strand starting at position 336 of SEQ ID NO: 913900
agaaguguaccuuggcaau

SEQ ID NO: 962845 - RNA, 19 nt, Artificial Sequence
  Description of Artificial Sequence: Synthetic oligonucleotide
  Antisense strand to SEQ ID NO: 962844
auugccaagguacacuucu

SEQ ID NO: 962846 - RNA, 19 nt, Artificial Sequence
  Description of Artificial Sequence: Synthetic oligonucleotide
  Sense strand starting at position 626 of SEQ ID NO: 913900
cuaggaagaucugagaaca

SEQ ID NO: 962847 - RNA, 19 nt, Artificial Sequence
  Description of Artificial Sequence: Synthetic oligonucleotide
  Antisense strand to SEQ ID NO: 962846
uguucucagaucuuccuag

SEQ ID NO: 962848 - RNA, 19 nt, Artificial Sequence
  Description of Artificial Sequence: Synthetic oligonucleotide
  Sense strand starting at position 578 of SEQ ID NO: 913900
gcauauaugcuuuauagca

SEQ ID NO: 962849 - RNA, 19 nt, Artificial Sequence
  Description of Artificial Sequence: Synthetic oligonucleotide
  Antisense strand to SEQ ID NO: 962848
ugcuauaaagcauauaugc

SEQ ID NO: 962850 - RNA, 19 nt, Artificial Sequence
  Description of Artificial Sequence: Synthetic oligonucleotide
  Sense strand starting at position 1338 of SEQ ID NO: 913901
gcgcuuuccacagucugau

SEQ ID NO: 962851 - RNA, 19 nt, Artificial Sequence
  Description of Artificial Sequence: Synthetic oligonucleotide
  Antisense strand to SEQ ID NO: 962850
aucagacuguggaaagcgc

SEQ ID NO: 962852 - RNA, 19 nt, Artificial Sequence
  Description of Artificial Sequence: Synthetic oligonucleotide
  Sense strand starting at position 1219 of SEQ ID NO: 913901
cccucacucgcagaaagaa

SEQ ID NO: 962853 - RNA, 19 nt, Artificial Sequence
  Description of Artificial Sequence: Synthetic oligonucleotide
  Antisense strand to SEQ ID NO: 962852
uucuuucugcgagugaggg

SEQ ID NO: 962854 - RNA, 19 nt, Artificial Sequence
  Description of Artificial Sequence: Synthetic oligonucleotide
  Sense strand starting at position 2551 of SEQ ID NO: 913901
cgaugacuucuccaccuga

SEQ ID NO: 962855 - RNA, 19 nt, Artificial Sequence
  Description of Artificial Sequence: Synthetic oligonucleotide
  Antisense strand to SEQ ID NO: 962854
ucagguggagaagucaucg

SEQ ID NO: 962856 - RNA, 19 nt, Artificial Sequence
  Description of Artificial Sequence: Synthetic oligonucleotide
  Sense strand starting at position 3600 of SEQ ID NO: 913901
uuccuaaagcuggaaaugu

SEQ ID NO: 962857 - RNA, 19 nt, Artificial Sequence
  Description of Artificial Sequence: Synthetic oligonucleotide
  Antisense strand to SEQ ID NO: 962856
acauuuccagcuuuaggaa

SEQ ID NO: 962858 - RNA, 19 nt, Artificial Sequence
  Description of Artificial Sequence: Synthetic oligonucleotide
  Sense strand starting at position 389 of SEQ ID NO: 913901
caguguuuagcugaaagag

SEQ ID NO: 962859 - RNA, 19 nt, Artificial Sequence
  Description of Artificial Sequence: Synthetic oligonucleotide
  Antisense strand to SEQ ID NO: 962858
cucuuucagcuaaacacug

SEQ ID NO: 962860 - RNA, 19 nt, Artificial Sequence
  Description of Artificial Sequence: Synthetic oligonucleotide
  Sense strand starting at position 1350 of SEQ ID NO: 913901
gucugauaggcgagguguu

SEQ ID NO: 962861 - RNA, 19 nt, Artificial Sequence
  Description of Artificial Sequence: Synthetic oligonucleotide
  Antisense strand to SEQ ID NO: 962860
aacaccucgccuaucagac

SEQ ID NO: 962862 - RNA, 19 nt, Artificial Sequence
  Description of Artificial Sequence: Synthetic oligonucleotide
  Sense strand starting at position 2779 of SEQ ID NO: 913901
ggcucagcuuuccuuauuu

SEQ ID NO: 962863 - RNA, 19 nt, Artificial Sequence
  Description of Artificial Sequence: Synthetic oligonucleotide
  Antisense strand to SEQ ID NO: 962862
aaauaaggaaagcugagcc

SEQ ID NO: 962864 - RNA, 19 nt, Artificial Sequence
  Description of Artificial Sequence: Synthetic oligonucleotide
  Sense strand starting at position 3056 of SEQ ID NO: 913901
acaggaugccucuagcuca

SEQ ID NO: 962865 - RNA, 19 nt, Artificial Sequence
  Description of Artificial Sequence: Synthetic oligonucleotide
  Antisense strand to SEQ ID NO: 962864
ugagcuagaggcauccugu

SEQ ID NO: 962866 - RNA, 19 nt, Artificial Sequence
  Description of Artificial Sequence: Synthetic oligonucleotide
  Sense strand starting at position 2277 of SEQ ID NO: 913901
ggcagauucccaggucaga

SEQ ID NO: 962867 - RNA, 19 nt, Artificial Sequence
  Description of Artificial Sequence: Synthetic oligonucleotide
  Antisense strand to SEQ ID NO: 962866
ucugaccugggaaucugcc

SEQ ID NO: 962868 - RNA, 19 nt, Artificial Sequence
  Description of Artificial Sequence: Synthetic oligonucleotide
  Sense strand starting at position 387 of SEQ ID NO: 913901
aacaguguuuagcugaaag

SEQ ID NO: 962869 - RNA, 19 nt, Artificial Sequence
  Description of Artificial Sequence: Synthetic oligonucleotide
  Antisense strand to SEQ ID NO: 962868
cuuucagcuaaacacuguu

SEQ ID NO: 962870 - RNA, 19 nt, Artificial Sequence
  Description of Artificial Sequence: Synthetic oligonucleotide
  Sense strand starting at position 3432 of SEQ ID NO: 913901
cugagcagguuguuagaaa

SEQ ID NO: 962871 - RNA, 19 nt, Artificial Sequence
  Description of Artificial Sequence: Synthetic oligonucleotide
  Antisense strand to SEQ ID NO: 962870
uuucuaacaaccugcucag

SEQ ID NO: 962872 - RNA, 19 nt, Artificial Sequence
  Description of Artificial Sequence: Synthetic oligonucleotide
  Sense strand starting at position 2613 of SEQ ID NO: 913901
gggugauccugguucauca

SEQ ID NO: 962873 - RNA, 19 nt, Artificial Sequence
  Description of Artificial Sequence: Synthetic oligonucleotide
  Antisense strand to SEQ ID NO: 962872
ugaugaaccaggaucaccc

SEQ ID NO: 962874 - RNA, 19 nt, Artificial Sequence
  Description of Artificial Sequence: Synthetic oligonucleotide
  Sense strand starting at position 3649 of SEQ ID NO: 913901
ccaucaucaucguuggaac

SEQ ID NO: 962875 - RNA, 19 nt, Artificial Sequence
  Description of Artificial Sequence: Synthetic oligonucleotide
  Antisense strand to SEQ ID NO: 962874
guuccaacgaugaugaugg

SEQ ID NO: 962876 - RNA, 19 nt, Artificial Sequence
  Description of Artificial Sequence: Synthetic oligonucleotide
  Sense strand starting at position 2795 of SEQ ID NO: 913901
uuugcacaagagugaucuu

SEQ ID NO: 962877 - RNA, 19 nt, Artificial Sequence
  Description of Artificial Sequence: Synthetic oligonucleotide
  Antisense strand to SEQ ID NO: 962876
aagaucacucuugugcaaa

SEQ ID NO: 962878 - RNA, 19 nt, Artificial Sequence
  Description of Artificial Sequence: Synthetic oligonucleotide
  Sense strand starting at position 3430 of SEQ ID NO: 913901
accugagcagguuguuaga

SEQ ID NO: 962879 - RNA, 19 nt, Artificial Sequence
  Description of Artificial Sequence: Synthetic oligonucleotide
  Antisense strand to SEQ ID NO: 962878
ucuaacaaccugcucaggu

SEQ ID NO: 962880 - RNA, 19 nt, Artificial Sequence
  Description of Artificial Sequence: Synthetic oligonucleotide
  Sense strand starting at position 526 of SEQ ID NO: 913901
cgcacacaucucgaacuuu

SEQ ID NO: 962881 - RNA, 19 nt, Artificial Sequence
  Description of Artificial Sequence: Synthetic oligonucleotide
  Antisense strand to SEQ ID NO: 962880
aaaguucgagaugugugcg

SEQ ID NO: 962882 - RNA, 19 nt, Artificial Sequence
  Description of Artificial Sequence: Synthetic oligonucleotide
  Sense strand starting at position 3025 of SEQ ID NO: 913901
ugcuaagugcucuauacac

SEQ ID NO: 962883 - RNA, 19 nt, Artificial Sequence
  Description of Artificial Sequence: Synthetic oligonucleotide
  Antisense strand to SEQ ID NO: 962882
guguauagagcacuuagca

SEQ ID NO: 962884 - RNA, 19 nt, Artificial Sequence
  Description of Artificial Sequence: Synthetic oligonucleotide
  Sense strand starting at position 2798 of SEQ ID NO: 913901
gcacaagagugaucuuguc

SEQ ID NO: 962885 - RNA, 19 nt, Artificial Sequence
  Description of Artificial Sequence: Synthetic oligonucleotide
  Antisense strand to SEQ ID NO: 962884
gacaagaucacucuugugc

SEQ ID NO: 962886 - RNA, 19 nt, Artificial Sequence
  Description of Artificial Sequence: Synthetic oligonucleotide
  Sense strand starting at position 2925 of SEQ ID NO: 913901
agggcucuuucucuucuua

SEQ ID NO: 962887 - RNA, 19 nt, Artificial Sequence
  Description of Artificial Sequence: Synthetic oligonucleotide
  Antisense strand to SEQ ID NO: 962886
uaagaagagaaagagcccu

SEQ ID NO: 962888 - RNA, 19 nt, Artificial Sequence
  Description of Artificial Sequence: Synthetic oligonucleotide
  Sense strand starting at position 3590 of SEQ ID NO: 913901
gucuguuaguuuccuaaag

SEQ ID NO: 962889 - RNA, 19 nt, Artificial Sequence
  Description of Artificial Sequence: Synthetic oligonucleotide
  Antisense strand to SEQ ID NO: 962888
cuuuaggaaacuaacagac

SEQ ID NO: 962890 - RNA, 19 nt, Artificial Sequence
  Description of Artificial Sequence: Synthetic oligonucleotide
  Sense strand starting at position 406 of SEQ ID NO: 913901
agagcagucuccuaauuua

SEQ ID NO: 962891 - RNA, 19 nt, Artificial Sequence
  Description of Artificial Sequence: Synthetic oligonucleotide
  Antisense strand to SEQ ID NO: 962890
uaaauuaggagacugcucu

SEQ ID NO: 962892 - RNA, 19 nt, Artificial Sequence
  Description of Artificial Sequence: Synthetic oligonucleotide
  Sense strand starting at position 2297 of SEQ ID NO: 913901
cugcgacuuccuuacucga

SEQ ID NO: 962893 - RNA, 19 nt, Artificial Sequence
  Description of Artificial Sequence: Synthetic oligonucleotide
  Antisense strand to SEQ ID NO: 962892
ucgaguaaggaagucgcag

SEQ ID NO: 962894 - RNA, 19 nt, Artificial Sequence
  Description of Artificial Sequence: Synthetic oligonucleotide
  Sense strand starting at position 3582 of SEQ ID NO: 913901
ccuggacagucuguuaguu

SEQ ID NO: 962895 - RNA, 19 nt, Artificial Sequence
  Description of Artificial Sequence: Synthetic oligonucleotide
  Antisense strand to SEQ ID NO: 962894
aacuaacagacuguccagg

SEQ ID NO: 962896 - RNA, 19 nt, Artificial Sequence
  Description of Artificial Sequence: Synthetic oligonucleotide
  Sense strand starting at position 1351 of SEQ ID NO: 913901
ucugauaggcgagguguua

SEQ ID NO: 962897 - RNA, 19 nt, Artificial Sequence
  Description of Artificial Sequence: Synthetic oligonucleotide
  Antisense strand to SEQ ID NO: 962896
uaacaccucgccuaucaga

SEQ ID NO: 962898 - RNA, 19 nt, Artificial Sequence
  Description of Artificial Sequence: Synthetic oligonucleotide
  Sense strand starting at position 1363 of SEQ ID NO: 913901
gguguuauuuauuacaccu

SEQ ID NO: 962899 - RNA, 19 nt, Artificial Sequence
  Description of Artificial Sequence: Synthetic oligonucleotide
  Antisense strand to SEQ ID NO: 962898
agguguaauaaauaacacc

SEQ ID NO: 962900 - RNA, 19 nt, Artificial Sequence
  Description of Artificial Sequence: Synthetic oligonucleotide
  Sense strand starting at position 793 of SEQ ID NO: 913901
agauuagcguuuguggauu

SEQ ID NO: 962901 - RNA, 19 nt, Artificial Sequence
  Description of Artificial Sequence: Synthetic oligonucleotide
  Antisense strand to SEQ ID NO: 962900
aauccacaaacgcuaaucu

SEQ ID NO: 962902 - RNA, 19 nt, Artificial Sequence
  Description of Artificial Sequence: Synthetic oligonucleotide
  Sense strand starting at position 2804 of SEQ ID NO: 913901
gagugaucuugucuggccu

SEQ ID NO: 962903 - RNA, 19 nt, Artificial Sequence
  Description of Artificial Sequence: Synthetic oligonucleotide
  Antisense strand to SEQ ID NO: 962902
aggccagacaagaucacuc

SEQ ID NO: 962904 - RNA, 19 nt, Artificial Sequence
  Description of Artificial Sequence: Synthetic oligonucleotide
  Sense strand starting at position 792 of SEQ ID NO: 913901
cagauuagcguuuguggau

SEQ ID NO: 962905 - RNA, 19 nt, Artificial Sequence
  Description of Artificial Sequence: Synthetic oligonucleotide
  Antisense strand to SEQ ID NO: 962904
auccacaaacgcuaaucug

SEQ ID NO: 962906 - RNA, 19 nt, Artificial Sequence
  Description of Artificial Sequence: Synthetic oligonucleotide
  Sense strand starting at position 2778 of SEQ ID NO: 913901
gggcucagcuuuccuuauu

SEQ ID NO: 962907 - RNA, 19 nt, Artificial Sequence
  Description of Artificial Sequence: Synthetic oligonucleotide
  Antisense strand to SEQ ID NO: 962906
aauaaggaaagcugagccc

SEQ ID NO: 962908 - RNA, 19 nt, Artificial Sequence
  Description of Artificial Sequence: Synthetic oligonucleotide
  Sense strand starting at position 3023 of SEQ ID NO: 913901
agugcuaagugcucuauac

SEQ ID NO: 962909 - RNA, 19 nt, Artificial Sequence
  Description of Artificial Sequence: Synthetic oligonucleotide
  Antisense strand to SEQ ID NO: 962908
guauagagcacuuagcacu

SEQ ID NO: 962910 - RNA, 19 nt, Artificial Sequence
  Description of Artificial Sequence: Synthetic oligonucleotide
  Sense strand starting at position 2265 of SEQ ID NO: 913901
caggcuugucccggcagau

SEQ ID NO: 962911 - RNA, 19 nt, Artificial Sequence
  Description of Artificial Sequence: Synthetic oligonucleotide
  Antisense strand to SEQ ID NO: 962910
aucugccgggacaagccug

SEQ ID NO: 962912 - RNA, 19 nt, Artificial Sequence
  Description of Artificial Sequence: Synthetic oligonucleotide
  Sense strand starting at position 78 of SEQ ID NO: 913901
aguguuuaggccggucaca

SEQ ID NO: 962913 - RNA, 19 nt, Artificial Sequence
  Description of Artificial Sequence: Synthetic oligonucleotide
  Antisense strand to SEQ ID NO: 962912
ugugaccggccuaaacacu

SEQ ID NO: 962914 - RNA, 19 nt, Artificial Sequence
  Description of Artificial Sequence: Synthetic oligonucleotide
  Sense strand starting at position 2420 of SEQ ID NO: 913901
ggcagacuuugacacaauc

SEQ ID NO: 962915 - RNA, 19 nt, Artificial Sequence
  Description of Artificial Sequence: Synthetic oligonucleotide
  Antisense strand to SEQ ID NO: 962914
gauugugucaaagucugcc

SEQ ID NO: 962916 - RNA, 19 nt, Artificial Sequence
  Description of Artificial Sequence: Synthetic oligonucleotide
  Sense strand starting at position 2673 of SEQ ID NO: 913901
gaggaaagguguuacccuu

SEQ ID NO: 962917 - RNA, 19 nt, Artificial Sequence
  Description of Artificial Sequence: Synthetic oligonucleotide
  Antisense strand to SEQ ID NO: 962916
aaggguaacaccuuuccuc

SEQ ID NO: 962918 - RNA, 19 nt, Artificial Sequence
  Description of Artificial Sequence: Synthetic oligonucleotide
  Sense strand starting at position 3489 of SEQ ID NO: 913901
gccuuuguccucugucuua

SEQ ID NO: 962919 - RNA, 19 nt, Artificial Sequence
  Description of Artificial Sequence: Synthetic oligonucleotide
  Antisense strand to SEQ ID NO: 962918
uaagacagaggacaaaggc

SEQ ID NO: 962920 - RNA, 19 nt, Artificial Sequence
  Description of Artificial Sequence: Synthetic oligonucleotide
  Sense strand starting at position 3592 of SEQ ID NO: 913901
cuguuaguuuccuaaagcu

SEQ ID NO: 962921 - RNA, 19 nt, Artificial Sequence
  Description of Artificial Sequence: Synthetic oligonucleotide
  Antisense strand to SEQ ID NO: 962920
agcuuuaggaaacuaacag

SEQ ID NO: 962922 - RNA, 19 nt, Artificial Sequence
  Description of Artificial Sequence: Synthetic oligonucleotide
  Sense strand starting at position 2243 of SEQ ID NO: 913901
acgccuugaugcugagaca

SEQ ID NO: 962923 - RNA, 19 nt, Artificial Sequence
  Description of Artificial Sequence: Synthetic oligonucleotide
  Antisense strand to SEQ ID NO: 962922
ugucucagcaucaaggcgu

SEQ ID NO: 962924 - RNA, 19 nt, Artificial Sequence
  Description of Artificial Sequence: Synthetic oligonucleotide
  Sense strand starting at position 2399 of SEQ ID NO: 913901
gagggauccucguggcucu

SEQ ID NO: 962925 - RNA, 19 nt, Artificial Sequence
  Description of Artificial Sequence: Synthetic oligonucleotide
  Antisense strand to SEQ ID NO: 962924
agagccacgaggaucccuc

SEQ ID NO: 962926 - RNA, 19 nt, Artificial Sequence
  Description of Artificial Sequence: Synthetic oligonucleotide
  Sense strand starting at position 788 of SEQ ID NO: 913901
ggaucagauuagcguuugu

SEQ ID NO: 962927 - RNA, 19 nt, Artificial Sequence
  Description of Artificial Sequence: Synthetic oligonucleotide
  Antisense strand to SEQ ID NO: 962926
acaaacgcuaaucugaucc

SEQ ID NO: 962928 - RNA, 19 nt, Artificial Sequence
  Description of Artificial Sequence: Synthetic oligonucleotide
  Sense strand starting at position 2264 of SEQ ID NO: 913901
gcaggcuugucccggcaga

SEQ ID NO: 962929 - RNA, 19 nt, Artificial Sequence
  Description of Artificial Sequence: Synthetic oligonucleotide
  Antisense strand to SEQ ID NO: 962928
ucugccgggacaagccugc

SEQ ID NO: 962930 - RNA, 19 nt, Artificial Sequence
  Description of Artificial Sequence: Synthetic oligonucleotide
  Sense strand starting at position 3500 of SEQ ID NO: 913902
ugacaugaugaauguauac

SEQ ID NO: 962931 - RNA, 19 nt, Artificial Sequence
  Description of Artificial Sequence: Synthetic oligonucleotide
  Antisense strand to SEQ ID NO: 962930
guauacauucaucauguca

SEQ ID NO: 962932 - RNA, 19 nt, Artificial Sequence
  Description of Artificial Sequence: Synthetic oligonucleotide
  Sense strand starting at position 3811 of SEQ ID NO: 913902
gcauuagcaccauauaaag

SEQ ID NO: 962933 - RNA, 19 nt, Artificial Sequence
  Description of Artificial Sequence: Synthetic oligonucleotide
  Antisense strand to SEQ ID NO: 962932
cuuuauauggugcuaaugc

SEQ ID NO: 962934 - RNA, 19 nt, Artificial Sequence
  Description of Artificial Sequence: Synthetic oligonucleotide
  Sense strand starting at position 2174 of SEQ ID NO: 913902
acaguuguucuacaagauc

SEQ ID NO: 962935 - RNA, 19 nt, Artificial Sequence
  Description of Artificial Sequence: Synthetic oligonucleotide
  Antisense strand to SEQ ID NO: 962934
gaucuuguagaacaacugu

SEQ ID NO: 962936 - RNA, 19 nt, Artificial Sequence
  Description of Artificial Sequence: Synthetic oligonucleotide
  Sense strand starting at position 1233 of SEQ ID NO: 913902
uuugaaucccaguaaaugu

SEQ ID NO: 962937 - RNA, 19 nt, Artificial Sequence
  Description of Artificial Sequence: Synthetic oligonucleotide
  Antisense strand to SEQ ID NO: 962936
acauuuacugggauucaaa

SEQ ID NO: 962938 - RNA, 19 nt, Artificial Sequence
  Description of Artificial Sequence: Synthetic oligonucleotide
  Sense strand starting at position 2328 of SEQ ID NO: 913902
ucggguuauccgucgugag

SEQ ID NO: 962939 - RNA, 19 nt, Artificial Sequence
  Description of Artificial Sequence: Synthetic oligonucleotide
  Antisense strand to SEQ ID NO: 962938
cucacgacggauaacccga

SEQ ID NO: 962940 - RNA, 19 nt, Artificial Sequence
  Description of Artificial Sequence: Synthetic oligonucleotide
  Sense strand starting at position 2354 of SEQ ID NO: 913902
gguguugauuucccaagcu

SEQ ID NO: 962941 - RNA, 19 nt, Artificial Sequence
  Description of Artificial Sequence: Synthetic oligonucleotide
  Antisense strand to SEQ ID NO: 962940
agcuugggaaaucaacacc

SEQ ID NO: 962942 - RNA, 19 nt, Artificial Sequence
  Description of Artificial Sequence: Synthetic oligonucleotide
  Sense strand starting at position 2499 of SEQ ID NO: 913902
uucuuccuccgggaucaga

SEQ ID NO: 962943 - RNA, 19 nt, Artificial Sequence
  Description of Artificial Sequence: Synthetic oligonucleotide
  Antisense strand to SEQ ID NO: 962942
ucugaucccggaggaagaa

SEQ ID NO: 962944 - RNA, 19 nt, Artificial Sequence
  Description of Artificial Sequence: Synthetic oligonucleotide
  Sense strand starting at position 2472 of SEQ ID NO: 913902
agcugaagagauuguugaa

SEQ ID NO: 962945 - RNA, 19 nt, Artificial Sequence
  Description of Artificial Sequence: Synthetic oligonucleotide
  Antisense strand to SEQ ID NO: 962944
uucaacaaucucuucagcu

SEQ ID NO: 962946 - RNA, 19 nt, Artificial Sequence
  Description of Artificial Sequence: Synthetic oligonucleotide
  Sense strand starting at position 3809 of SEQ ID NO: 913902
uggcauuagcaccauauaa

SEQ ID NO: 962947 - RNA, 19 nt, Artificial Sequence
  Description of Artificial Sequence: Synthetic oligonucleotide
  Antisense strand to SEQ ID NO: 962946
uuauauggugcuaaugcca

SEQ ID NO: 962948 - RNA, 19 nt, Artificial Sequence
  Description of Artificial Sequence: Synthetic oligonucleotide
  Sense strand starting at position 1244 of SEQ ID NO: 913902
guaaaugugacugaggcua

SEQ ID NO: 962949 - RNA, 19 nt, Artificial Sequence
  Description of Artificial Sequence: Synthetic oligonucleotide
  Antisense strand to SEQ ID NO: 962948
uagccucagucacauuuac

SEQ ID NO: 962950 - RNA, 19 nt, Artificial Sequence
  Description of Artificial Sequence: Synthetic oligonucleotide
  Sense strand starting at position 664 of SEQ ID NO: 913902
uugcuuucgcagccugauu

SEQ ID NO: 962951 - RNA, 19 nt, Artificial Sequence
  Description of Artificial Sequence: Synthetic oligonucleotide
  Antisense strand to SEQ ID NO: 962950
aaucaggcugcgaaagcaa

SEQ ID NO: 962952 - RNA, 19 nt, Artificial Sequence
  Description of Artificial Sequence: Synthetic oligonucleotide
  Sense strand starting at position 2017 of SEQ ID NO: 913902
gagcucugacgucagggau

SEQ ID NO: 962953 - RNA, 19 nt, Artificial Sequence
  Description of Artificial Sequence: Synthetic oligonucleotide
  Antisense strand to SEQ ID NO: 962952
aucccugacgucagagcuc

SEQ ID NO: 962954 - RNA, 19 nt, Artificial Sequence
  Description of Artificial Sequence: Synthetic oligonucleotide
  Sense strand starting at position 130 of SEQ ID NO: 913902
gcaucugacccuuaguuag

SEQ ID NO: 962955 - RNA, 19 nt, Artificial Sequence
  Description of Artificial Sequence: Synthetic oligonucleotide
  Antisense strand to SEQ ID NO: 962954
cuaacuaagggucagaugc

SEQ ID NO: 962956 - RNA, 19 nt, Artificial Sequence
  Description of Artificial Sequence: Synthetic oligonucleotide
  Sense strand starting at position 1444 of SEQ ID NO: 913902
agcgauaucuacucagaca

SEQ ID NO: 962957 - RNA, 19 nt, Artificial Sequence
  Description of Artificial Sequence: Synthetic oligonucleotide
  Antisense strand to SEQ ID NO: 962956
ugucugaguagauaucgcu

SEQ ID NO: 962958 - RNA, 19 nt, Artificial Sequence
  Description of Artificial Sequence: Synthetic oligonucleotide
  Sense strand starting at position 780 of SEQ ID NO: 913902
uccguugauguagauuaca

SEQ ID NO: 962959 - RNA, 19 nt, Artificial Sequence
  Description of Artificial Sequence: Synthetic oligonucleotide
  Antisense strand to SEQ ID NO: 962958
uguaaucuacaucaacgga

SEQ ID NO: 962960 - RNA, 19 nt, Artificial Sequence
  Description of Artificial Sequence: Synthetic oligonucleotide
  Sense strand starting at position 3605 of SEQ ID NO: 913902
ucaucaucccauugucaga

SEQ ID NO: 962961 - RNA, 19 nt, Artificial Sequence
  Description of Artificial Sequence: Synthetic oligonucleotide
  Antisense strand to SEQ ID NO: 962960
ucugacaaugggaugauga

SEQ ID NO: 962962 - RNA, 19 nt, Artificial Sequence
  Description of Artificial Sequence: Synthetic oligonucleotide
  Sense strand starting at position 832 of SEQ ID NO: 913902
auguguuuggagcauccua

SEQ ID NO: 962963 - RNA, 19 nt, Artificial Sequence
  Description of Artificial Sequence: Synthetic oligonucleotide
  Antisense strand to SEQ ID NO: 962962
uaggaugcuccaaacacau

SEQ ID NO: 962964 - RNA, 19 nt, Artificial Sequence
  Description of Artificial Sequence: Synthetic oligonucleotide
  Sense strand starting at position 1243 of SEQ ID NO: 913902
aguaaaugugacugaggcu

SEQ ID NO: 962965 - RNA, 19 nt, Artificial Sequence
  Description of Artificial Sequence: Synthetic oligonucleotide
  Antisense strand to SEQ ID NO: 962964
agccucagucacauuuacu

SEQ ID NO: 962966 - RNA, 19 nt, Artificial Sequence
  Description of Artificial Sequence: Synthetic oligonucleotide
  Sense strand starting at position 3763 of SEQ ID NO: 913902
gaggcaugucccuggacca

SEQ ID NO: 962967 - RNA, 19 nt, Artificial Sequence
  Description of Artificial Sequence: Synthetic oligonucleotide
  Antisense strand to SEQ ID NO: 962966
ugguccagggacaugccuc

SEQ ID NO: 962968 - RNA, 19 nt, Artificial Sequence
  Description of Artificial Sequence: Synthetic oligonucleotide
  Sense strand starting at position 853 of SEQ ID NO: 913902
uugccauaacuaugguaca

SEQ ID NO: 962969 - RNA, 19 nt, Artificial Sequence
  Description of Artificial Sequence: Synthetic oligonucleotide
  Antisense strand to SEQ ID NO: 962968
uguaccauaguuauggcaa

SEQ ID NO: 962970 - RNA, 19 nt, Artificial Sequence
  Description of Artificial Sequence: Synthetic oligonucleotide
  Sense strand starting at position 1050 of SEQ ID NO: 913902
aaccuagguuuguuugauu

SEQ ID NO: 962971 - RNA, 19 nt, Artificial Sequence
  Description of Artificial Sequence: Synthetic oligonucleotide
  Antisense strand to SEQ ID NO: 962970
aaucaaacaaaccuagguu

SEQ ID NO: 962972 - RNA, 19 nt, Artificial Sequence
  Description of Artificial Sequence: Synthetic oligonucleotide
  Sense strand starting at position 824 of SEQ ID NO: 913902
acucuuacauguguuugga

SEQ ID NO: 962973 - RNA, 19 nt, Artificial Sequence
  Description of Artificial Sequence: Synthetic oligonucleotide
  Antisense strand to SEQ ID NO: 962972
uccaaacacauguaagagu

SEQ ID NO: 962974 - RNA, 19 nt, Artificial Sequence
  Description of Artificial Sequence: Synthetic oligonucleotide
  Sense strand starting at position 895 of SEQ ID NO: 913902
cuguaccagcacugagauu

SEQ ID NO: 962975 - RNA, 19 nt, Artificial Sequence
  Description of Artificial Sequence: Synthetic oligonucleotide
  Antisense strand to SEQ ID NO: 962974
aaucucagugcugguacag

SEQ ID NO: 962976 - RNA, 19 nt, Artificial Sequence
  Description of Artificial Sequence: Synthetic oligonucleotide
  Sense strand starting at position 1113 of SEQ ID NO: 913902
ggcuguugaugacucucaa

SEQ ID NO: 962977 - RNA, 19 nt, Artificial Sequence
  Description of Artificial Sequence: Synthetic oligonucleotide
  Antisense strand to SEQ ID NO: 962976
uugagagucaucaacagcc

SEQ ID NO: 962978 - RNA, 19 nt, Artificial Sequence
  Description of Artificial Sequence: Synthetic oligonucleotide
  Sense strand starting at position 1321 of SEQ ID NO: 913902
caacguccucaguggaaca

SEQ ID NO: 962979 - RNA, 19 nt, Artificial Sequence
  Description of Artificial Sequence: Synthetic oligonucleotide
  Antisense strand to SEQ ID NO: 962978
uguuccacugaggacguug

SEQ ID NO: 962980 - RNA, 19 nt, Artificial Sequence
  Description of Artificial Sequence: Synthetic oligonucleotide
  Sense strand starting at position 2528 of SEQ ID NO: 913902
ugccuuugucaugaguaac

SEQ ID NO: 962981 - RNA, 19 nt, Artificial Sequence
  Description of Artificial Sequence: Synthetic oligonucleotide
  Antisense strand to SEQ ID NO: 962980
guuacucaugacaaaggca

SEQ ID NO: 962982 - RNA, 19 nt, Artificial Sequence
  Description of Artificial Sequence: Synthetic oligonucleotide
  Sense strand starting at position 1126 of SEQ ID NO: 913902
ucucaauucucaguguaac

SEQ ID NO: 962983 - RNA, 19 nt, Artificial Sequence
  Description of Artificial Sequence: Synthetic oligonucleotide
  Antisense strand to SEQ ID NO: 962982
guuacacugagaauugaga

SEQ ID NO: 962984 - RNA, 19 nt, Artificial Sequence
  Description of Artificial Sequence: Synthetic oligonucleotide
  Sense strand starting at position 814 of SEQ ID NO: 913902
ugguucucuuacucuuaca

SEQ ID NO: 962985 - RNA, 19 nt, Artificial Sequence
  Description of Artificial Sequence: Synthetic oligonucleotide
  Antisense strand to SEQ ID NO: 962984
uguaagaguaagagaacca

SEQ ID NO: 962986 - RNA, 19 nt, Artificial Sequence
  Description of Artificial Sequence: Synthetic oligonucleotide
  Sense strand starting at position 2170 of SEQ ID NO: 913902
ucgaacaguuguucuacaa

SEQ ID NO: 962987 - RNA, 19 nt, Artificial Sequence
  Description of Artificial Sequence: Synthetic oligonucleotide
  Antisense strand to SEQ ID NO: 962986
uuguagaacaacuguucga

SEQ ID NO: 962988 - RNA, 19 nt, Artificial Sequence
  Description of Artificial Sequence: Synthetic oligonucleotide
  Sense strand starting at position 1127 of SEQ ID NO: 913902
cucaauucucaguguaacu

SEQ ID NO: 962989 - RNA, 19 nt, Artificial Sequence
  Description of Artificial Sequence: Synthetic oligonucleotide
  Antisense strand to SEQ ID NO: 962988
aguuacacugagaauugag

SEQ ID NO: 962990 - RNA, 19 nt, Artificial Sequence
  Description of Artificial Sequence: Synthetic oligonucleotide
  Sense strand starting at position 753 of SEQ ID NO: 913902
cucaaagugucuucccaug

SEQ ID NO: 962991 - RNA, 19 nt, Artificial Sequence
  Description of Artificial Sequence: Synthetic oligonucleotide
  Antisense strand to SEQ ID NO: 962990
caugggaagacacuuugag

SEQ ID NO: 962992 - RNA, 19 nt, Artificial Sequence
  Description of Artificial Sequence: Synthetic oligonucleotide
  Sense strand starting at position 1272 of SEQ ID NO: 913902
cacgguuugccucacccaa

SEQ ID NO: 962993 - RNA, 19 nt, Artificial Sequence
  Description of Artificial Sequence: Synthetic oligonucleotide
  Antisense strand to SEQ ID NO: 962992
uugggugaggcaaaccgug

SEQ ID NO: 962994 - RNA, 19 nt, Artificial Sequence
  Description of Artificial Sequence: Synthetic oligonucleotide
  Sense strand starting at position 980 of SEQ ID NO: 913902
uagaaagacucagaaaggu

SEQ ID NO: 962995 - RNA, 19 nt, Artificial Sequence
  Description of Artificial Sequence: Synthetic oligonucleotide
  Antisense strand to SEQ ID NO: 962994
accuuucugagucuuucua

SEQ ID NO: 962996 - RNA, 19 nt, Artificial Sequence
  Description of Artificial Sequence: Synthetic oligonucleotide
  Sense strand starting at position 652 of SEQ ID NO: 913902
ugaucugauucuuugcuuu

SEQ ID NO: 962997 - RNA, 19 nt, Artificial Sequence
  Description of Artificial Sequence: Synthetic oligonucleotide
  Antisense strand to SEQ ID NO: 962996
aaagcaaagaaucagauca

SEQ ID NO: 962998 - RNA, 19 nt, Artificial Sequence
  Description of Artificial Sequence: Synthetic oligonucleotide
  Sense strand starting at position 2169 of SEQ ID NO: 913902
cucgaacaguuguucuaca

SEQ ID NO: 962999 - RNA, 19 nt, Artificial Sequence
  Description of Artificial Sequence: Synthetic oligonucleotide
  Antisense strand to SEQ ID NO: 962998
uguagaacaacuguucgag

SEQ ID NO: 963000 - RNA, 19 nt, Artificial Sequence
  Description of Artificial Sequence: Synthetic oligonucleotide
  Sense strand starting at position 773 of SEQ ID NO: 913902
aggaauguccguugaugua

SEQ ID NO: 963001 - RNA, 19 nt, Artificial Sequence
  Description of Artificial Sequence: Synthetic oligonucleotide
  Antisense strand to SEQ ID NO: 963000
uacaucaacggacauuccu

SEQ ID NO: 963002 - RNA, 19 nt, Artificial Sequence
  Description of Artificial Sequence: Synthetic oligonucleotide
  Sense strand starting at position 714 of SEQ ID NO: 913902
augcuaucaucccugcuga

SEQ ID NO: 963003 - RNA, 19 nt, Artificial Sequence
  Description of Artificial Sequence: Synthetic oligonucleotide
  Antisense strand to SEQ ID NO: 963002
ucagcagggaugauagcau

SEQ ID NO: 963004 - RNA, 19 nt, Artificial Sequence
  Description of Artificial Sequence: Synthetic oligonucleotide
  Sense strand starting at position 715 of SEQ ID NO: 913902
ugcuaucaucccugcugaa

SEQ ID NO: 963005 - RNA, 19 nt, Artificial Sequence
  Description of Artificial Sequence: Synthetic oligonucleotide
  Antisense strand to SEQ ID NO: 963004
uucagcagggaugauagca

SEQ ID NO: 963006 - RNA, 19 nt, Artificial Sequence
  Description of Artificial Sequence: Synthetic oligonucleotide
  Sense strand starting at position 771 of SEQ ID NO: 913902
gcaggaauguccguugaug

SEQ ID NO: 963007 - RNA, 19 nt, Artificial Sequence
  Description of Artificial Sequence: Synthetic oligonucleotide
  Antisense strand to SEQ ID NO: 963006
caucaacggacauuccugc

SEQ ID NO: 963008 - RNA, 19 nt, Artificial Sequence
  Description of Artificial Sequence: Synthetic oligonucleotide
  Sense strand starting at position 3563 of SEQ ID NO: 913902
uucucuagguccuuguuau

SEQ ID NO: 963009 - RNA, 19 nt, Artificial Sequence
  Description of Artificial Sequence: Synthetic oligonucleotide
  Antisense strand to SEQ ID NO: 963008
auaacaaggaccuagagaa

SEQ ID NO: 963010 - RNA, 19 nt, Artificial Sequence
  Description of Artificial Sequence: Synthetic oligonucleotide
  Sense strand starting at position 2894 of SEQ ID NO: 913903
ucgccacaugaauaaagau

SEQ ID NO: 963011 - RNA, 19 nt, Artificial Sequence
  Description of Artificial Sequence: Synthetic oligonucleotide
  Antisense strand to SEQ ID NO: 963010
aucuuuauucauguggcga

SEQ ID NO: 963012 - RNA, 19 nt, Artificial Sequence
  Description of Artificial Sequence: Synthetic oligonucleotide
  Sense strand starting at position 3629 of SEQ ID NO: 913903
aacaguuggcaucaagauu

SEQ ID NO: 963013 - RNA, 19 nt, Artificial Sequence
  Description of Artificial Sequence: Synthetic oligonucleotide
  Antisense strand to SEQ ID NO: 963012
aaucuugaugccaacuguu

SEQ ID NO: 963014 - RNA, 19 nt, Artificial Sequence
  Description of Artificial Sequence: Synthetic oligonucleotide
  Sense strand starting at position 2826 of SEQ ID NO: 913903
uugagcugaauuggagaau

SEQ ID NO: 963015 - RNA, 19 nt, Artificial Sequence
  Description of Artificial Sequence: Synthetic oligonucleotide
  Antisense strand to SEQ ID NO: 963014
auucuccaauucagcucaa

SEQ ID NO: 963016 - RNA, 19 nt, Artificial Sequence
  Description of Artificial Sequence: Synthetic oligonucleotide
  Sense strand starting at position 1314 of SEQ ID NO: 913903
gacaaagucggugacaauu

SEQ ID NO: 963017 - RNA, 19 nt, Artificial Sequence
  Description of Artificial Sequence: Synthetic oligonucleotide
  Antisense strand to SEQ ID NO: 963016
aauugucaccgacuuuguc

SEQ ID NO: 963018 - RNA, 19 nt, Artificial Sequence
  Description of Artificial Sequence: Synthetic oligonucleotide
  Sense strand starting at position 1203 of SEQ ID NO: 913903
gaagguaagguccauaguu

SEQ ID NO: 963019 - RNA, 19 nt, Artificial Sequence
  Description of Artificial Sequence: Synthetic oligonucleotide
  Antisense strand to SEQ ID NO: 963018
aacuauggaccuuaccuuc

SEQ ID NO: 963020 - RNA, 19 nt, Artificial Sequence
  Description of Artificial Sequence: Synthetic oligonucleotide
  Sense strand starting at position 1323 of SEQ ID NO: 913903
ggugacaauucuucugaag

SEQ ID NO: 963021 - RNA, 19 nt, Artificial Sequence
  Description of Artificial Sequence: Synthetic oligonucleotide
  Antisense strand to SEQ ID NO: 963020
cuucagaagaauugucacc

SEQ ID NO: 963022 - RNA, 19 nt, Artificial Sequence
  Description of Artificial Sequence: Synthetic oligonucleotide
  Sense strand starting at position 3625 of SEQ ID NO: 913903
gggaaacaguuggcaucaa

SEQ ID NO: 963023 - RNA, 19 nt, Artificial Sequence
  Description of Artificial Sequence: Synthetic oligonucleotide
  Antisense strand to SEQ ID NO: 963022
uugaugccaacuguuuccc

SEQ ID NO: 963024 - RNA, 19 nt, Artificial Sequence
  Description of Artificial Sequence: Synthetic oligonucleotide
  Sense strand starting at position 872 of SEQ ID NO: 913903
ugcaauuacuaauuggaau

SEQ ID NO: 963025 - RNA, 19 nt, Artificial Sequence
  Description of Artificial Sequence: Synthetic oligonucleotide
  Antisense strand to SEQ ID NO: 963024
auuccaauuaguaauugca

SEQ ID NO: 963026 - RNA, 19 nt, Artificial Sequence
  Description of Artificial Sequence: Synthetic oligonucleotide
  Sense strand starting at position 3567 of SEQ ID NO: 913903
aagugaauggucuauuccu

SEQ ID NO: 963027 - RNA, 19 nt, Artificial Sequence
  Description of Artificial Sequence: Synthetic oligonucleotide
  Antisense strand to SEQ ID NO: 963026
aggaauagaccauucacuu

SEQ ID NO: 963028 - RNA, 19 nt, Artificial Sequence
  Description of Artificial Sequence: Synthetic oligonucleotide
  Sense strand starting at position 1398 of SEQ ID NO: 913903
gauugugugcgugcacaca

SEQ ID NO: 963029 - RNA, 19 nt, Artificial Sequence
  Description of Artificial Sequence: Synthetic oligonucleotide
  Antisense strand to SEQ ID NO: 963028
ugugugcacgcacacaauc

SEQ ID NO: 963030 - RNA, 19 nt, Artificial Sequence
  Description of Artificial Sequence: Synthetic oligonucleotide
  Sense strand starting at position 3887 of SEQ ID NO: 913903
gcuguucuacuggagaaac

SEQ ID NO: 963031 - RNA, 19 nt, Artificial Sequence
  Description of Artificial Sequence: Synthetic oligonucleotide
  Antisense strand to SEQ ID NO: 963030
guuucuccaguagaacagc

SEQ ID NO: 963032 - RNA, 19 nt, Artificial Sequence
  Description of Artificial Sequence: Synthetic oligonucleotide
  Sense strand starting at position 3544 of SEQ ID NO: 913903
ccauguucuaggcagauga

SEQ ID NO: 963033 - RNA, 19 nt, Artificial Sequence
  Description of Artificial Sequence: Synthetic oligonucleotide
  Antisense strand to SEQ ID NO: 963032
ucaucugccuagaacaugg

SEQ ID NO: 963034 - RNA, 19 nt, Artificial Sequence
  Description of Artificial Sequence: Synthetic oligonucleotide
  Sense strand starting at position 3548 of SEQ ID NO: 913903
guucuaggcagaugaaaga

SEQ ID NO: 963035 - RNA, 19 nt, Artificial Sequence
  Description of Artificial Sequence: Synthetic oligonucleotide
  Antisense strand to SEQ ID NO: 963034
ucuuucaucugccuagaac

SEQ ID NO: 963036 - RNA, 19 nt, Artificial Sequence
  Description of Artificial Sequence: Synthetic oligonucleotide
  Sense strand starting at position 3212 of SEQ ID NO: 913903
gaagcaugugguuaccaga

SEQ ID NO: 963037 - RNA, 19 nt, Artificial Sequence
  Description of Artificial Sequence: Synthetic oligonucleotide
  Antisense strand to SEQ ID NO: 963036
ucugguaaccacaugcuuc

SEQ ID NO: 963038 - RNA, 19 nt, Artificial Sequence
  Description of Artificial Sequence: Synthetic oligonucleotide
  Sense strand starting at position 3565 of SEQ ID NO: 913903
gaaagugaauggucuauuc

SEQ ID NO: 963039 - RNA, 19 nt, Artificial Sequence
  Description of Artificial Sequence: Synthetic oligonucleotide
  Antisense strand to SEQ ID NO: 963038
gaauagaccauucacuuuc

SEQ ID NO: 963040 - RNA, 19 nt, Artificial Sequence
  Description of Artificial Sequence: Synthetic oligonucleotide
  Sense strand starting at position 1035 of SEQ ID NO: 913903
agguuuaggcacuaucuca

SEQ ID NO: 963041 - RNA, 19 nt, Artificial Sequence
  Description of Artificial Sequence: Synthetic oligonucleotide
  Antisense strand to SEQ ID NO: 963040
ugagauagugccuaaaccu

SEQ ID NO: 963042 - RNA, 19 nt, Artificial Sequence
  Description of Artificial Sequence: Synthetic oligonucleotide
  Sense strand starting at position 1313 of SEQ ID NO: 913903
agacaaagucggugacaau

SEQ ID NO: 963043 - RNA, 19 nt, Artificial Sequence
  Description of Artificial Sequence: Synthetic oligonucleotide
  Antisense strand to SEQ ID NO: 963042
auugucaccgacuuugucu

SEQ ID NO: 963044 - RNA, 19 nt, Artificial Sequence
  Description of Artificial Sequence: Synthetic oligonucleotide
  Sense strand starting at position 738 of SEQ ID NO: 913903
uuccucuuggguuauugau

SEQ ID NO: 963045 - RNA, 19 nt, Artificial Sequence
  Description of Artificial Sequence: Synthetic oligonucleotide
  Antisense strand to SEQ ID NO: 963044
aucaauaacccaagaggaa

SEQ ID NO: 963046 - RNA, 19 nt, Artificial Sequence
  Description of Artificial Sequence: Synthetic oligonucleotide
  Sense strand starting at position 1123 of SEQ ID NO: 913903
guccacaauggcugagaga

SEQ ID NO: 963047 - RNA, 19 nt, Artificial Sequence
  Description of Artificial Sequence: Synthetic oligonucleotide
  Antisense strand to SEQ ID NO: 963046
ucucucagccauuguggac

SEQ ID NO: 963048 - RNA, 19 nt, Artificial Sequence
  Description of Artificial Sequence: Synthetic oligonucleotide
  Sense strand starting at position 2545 of SEQ ID NO: 913903
augagagguagcugugaaa

SEQ ID NO: 963049 - RNA, 19 nt, Artificial Sequence
  Description of Artificial Sequence: Synthetic oligonucleotide
  Antisense strand to SEQ ID NO: 963048
uuucacagcuaccucucau

SEQ ID NO: 963050 - RNA, 19 nt, Artificial Sequence
  Description of Artificial Sequence: Synthetic oligonucleotide
  Sense strand starting at position 3637 of SEQ ID NO: 913903
gcaucaagauucuuccuag

SEQ ID NO: 963051 - RNA, 19 nt, Artificial Sequence
  Description of Artificial Sequence: Synthetic oligonucleotide
  Antisense strand to SEQ ID NO: 963050
cuaggaagaaucuugaugc

SEQ ID NO: 963052 - RNA, 19 nt, Artificial Sequence
  Description of Artificial Sequence: Synthetic oligonucleotide
  Sense strand starting at position 1374 of SEQ ID NO: 913903
augauucucugcucagaca

SEQ ID NO: 963053 - RNA, 19 nt, Artificial Sequence
  Description of Artificial Sequence: Synthetic oligonucleotide
  Antisense strand to SEQ ID NO: 963052
ugucugagcagagaaucau

SEQ ID NO: 963054 - RNA, 19 nt, Artificial Sequence
  Description of Artificial Sequence: Synthetic oligonucleotide
  Sense strand starting at position 3983 of SEQ ID NO: 913903
accuaucuccuauaguugu

SEQ ID NO: 963055 - RNA, 19 nt, Artificial Sequence
  Description of Artificial Sequence: Synthetic oligonucleotide
  Antisense strand to SEQ ID NO: 963054
acaacuauaggagauaggu

SEQ ID NO: 963056 - RNA, 19 nt, Artificial Sequence
  Description of Artificial Sequence: Synthetic oligonucleotide
  Sense strand starting at position 1322 of SEQ ID NO: 913903
cggugacaauucuucugaa

SEQ ID NO: 963057 - RNA, 19 nt, Artificial Sequence
  Description of Artificial Sequence: Synthetic oligonucleotide
  Antisense strand to SEQ ID NO: 963056
uucagaagaauugucaccg

SEQ ID NO: 963058 - RNA, 19 nt, Artificial Sequence
  Description of Artificial Sequence: Synthetic oligonucleotide
  Sense strand starting at position 504 of SEQ ID NO: 913903
ugacuaucuugggucucua

SEQ ID NO: 963059 - RNA, 19 nt, Artificial Sequence
  Description of Artificial Sequence: Synthetic oligonucleotide
  Antisense strand to SEQ ID NO: 963058
uagagacccaagauaguca

SEQ ID NO: 963060 - RNA, 19 nt, Artificial Sequence
  Description of Artificial Sequence: Synthetic oligonucleotide
  Sense strand starting at position 734 of SEQ ID NO: 913903
cagauuccucuuggguuau

SEQ ID NO: 963061 - RNA, 19 nt, Artificial Sequence
  Description of Artificial Sequence: Synthetic oligonucleotide
  Antisense strand to SEQ ID NO: 963060
auaacccaagaggaaucug

SEQ ID NO: 963062 - RNA, 19 nt, Artificial Sequence
  Description of Artificial Sequence: Synthetic oligonucleotide
  Sense strand starting at position 3603 of SEQ ID NO: 913903
ggaguuugcucacuggaca

SEQ ID NO: 963063 - RNA, 19 nt, Artificial Sequence
  Description of Artificial Sequence: Synthetic oligonucleotide
  Antisense strand to SEQ ID NO: 963062
uguccagugagcaaacucc

SEQ ID NO: 963064 - RNA, 19 nt, Artificial Sequence
  Description of Artificial Sequence: Synthetic oligonucleotide
  Sense strand starting at position 2814 of SEQ ID NO: 913903
acaaaugguuccuugagcu

SEQ ID NO: 963065 - RNA, 19 nt, Artificial Sequence
  Description of Artificial Sequence: Synthetic oligonucleotide
  Antisense strand to SEQ ID NO: 963064
agcucaaggaaccauuugu

SEQ ID NO: 963066 - RNA, 19 nt, Artificial Sequence
  Description of Artificial Sequence: Synthetic oligonucleotide
  Sense strand starting at position 2647 of SEQ ID NO: 913903
ugaccacggcuuugaaauu

SEQ ID NO: 963067 - RNA, 19 nt, Artificial Sequence
  Description of Artificial Sequence: Synthetic oligonucleotide
  Antisense strand to SEQ ID NO: 963066
aauuucaaagccgugguca

SEQ ID NO: 963068 - RNA, 19 nt, Artificial Sequence
  Description of Artificial Sequence: Synthetic oligonucleotide
  Sense strand starting at position 2818 of SEQ ID NO: 913903
augguuccuugagcugaau

SEQ ID NO: 963069 - RNA, 19 nt, Artificial Sequence
  Description of Artificial Sequence: Synthetic oligonucleotide
  Antisense strand to SEQ ID NO: 963068
auucagcucaaggaaccau

SEQ ID NO: 963070 - RNA, 19 nt, Artificial Sequence
  Description of Artificial Sequence: Synthetic oligonucleotide
  Sense strand starting at position 277 of SEQ ID NO: 913903
uaaucuuagcaguguagag

SEQ ID NO: 963071 - RNA, 19 nt, Artificial Sequence
  Description of Artificial Sequence: Synthetic oligonucleotide
  Antisense strand to SEQ ID NO: 963070
cucuacacugcuaagauua

SEQ ID NO: 963072 - RNA, 19 nt, Artificial Sequence
  Description of Artificial Sequence: Synthetic oligonucleotide
  Sense strand starting at position 165 of SEQ ID NO: 913903
aagugugcagcucagaauu

SEQ ID NO: 963073 - RNA, 19 nt, Artificial Sequence
  Description of Artificial Sequence: Synthetic oligonucleotide
  Antisense strand to SEQ ID NO: 963072
aauucugagcugcacacuu

SEQ ID NO: 963074 - RNA, 19 nt, Artificial Sequence
  Description of Artificial Sequence: Synthetic oligonucleotide
  Sense strand starting at position 2609 of SEQ ID NO: 913903
ccggcucucccaggagaau

SEQ ID NO: 963075 - RNA, 19 nt, Artificial Sequence
  Description of Artificial Sequence: Synthetic oligonucleotide
  Antisense strand to SEQ ID NO: 963074
auucuccugggagagccgg

SEQ ID NO: 963076 - RNA, 19 nt, Artificial Sequence
  Description of Artificial Sequence: Synthetic oligonucleotide
  Sense strand starting at position 612 of SEQ ID NO: 913903
ccuucuuguuauucuuaga

SEQ ID NO: 963077 - RNA, 19 nt, Artificial Sequence
  Description of Artificial Sequence: Synthetic oligonucleotide
  Antisense strand to SEQ ID NO: 963076
ucuaagaauaacaagaagg

SEQ ID NO: 963078 - RNA, 19 nt, Artificial Sequence
  Description of Artificial Sequence: Synthetic oligonucleotide
  Sense strand starting at position 1356 of SEQ ID NO: 913903
guccucaccuggucucaaa

SEQ ID NO: 963079 - RNA, 19 nt, Artificial Sequence
  Description of Artificial Sequence: Synthetic oligonucleotide
  Antisense strand to SEQ ID NO: 963078
uuugagaccaggugaggac

SEQ ID NO: 963080 - RNA, 19 nt, Artificial Sequence
  Description of Artificial Sequence: Synthetic oligonucleotide
  Sense strand starting at position 2629 of SEQ ID NO: 913903
gggacaaguucugcuaggu

SEQ ID NO: 963081 - RNA, 19 nt, Artificial Sequence
  Description of Artificial Sequence: Synthetic oligonucleotide
  Antisense strand to SEQ ID NO: 963080
accuagcagaacuuguccc

SEQ ID NO: 963082 - RNA, 19 nt, Artificial Sequence
  Description of Artificial Sequence: Synthetic oligonucleotide
  Sense strand starting at position 602 of SEQ ID NO: 913903
agagcagauuccuucuugu

SEQ ID NO: 963083 - RNA, 19 nt, Artificial Sequence
  Description of Artificial Sequence: Synthetic oligonucleotide
  Antisense strand to SEQ ID NO: 963082
acaagaaggaaucugcucu

SEQ ID NO: 963084 - RNA, 19 nt, Artificial Sequence
  Description of Artificial Sequence: Synthetic oligonucleotide
  Sense strand starting at position 51 of SEQ ID NO: 913903
auaguaugccauugcagaa

SEQ ID NO: 963085 - RNA, 19 nt, Artificial Sequence
  Description of Artificial Sequence: Synthetic oligonucleotide
  Antisense strand to SEQ ID NO: 963084
uucugcaauggcauacuau

SEQ ID NO: 963086 - RNA, 19 nt, Artificial Sequence
  Description of Artificial Sequence: Synthetic oligonucleotide
  Sense strand starting at position 3756 of SEQ ID NO: 913903
cgggcauccugacccuaau

SEQ ID NO: 963087 - RNA, 19 nt, Artificial Sequence
  Description of Artificial Sequence: Synthetic oligonucleotide
  Antisense strand to SEQ ID NO: 963086
auuagggucaggaugcccg

SEQ ID NO: 963088 - RNA, 19 nt, Artificial Sequence
  Description of Artificial Sequence: Synthetic oligonucleotide
  Sense strand starting at position 3542 of SEQ ID NO: 913903
ucccauguucuaggcagau

SEQ ID NO: 963089 - RNA, 19 nt, Artificial Sequence
  Description of Artificial Sequence: Synthetic oligonucleotide
  Antisense strand to SEQ ID NO: 963088
aucugccuagaacauggga

SEQ ID NO: 963090 - RNA, 19 nt, Artificial Sequence
  Description of Artificial Sequence: Synthetic oligonucleotide
  Sense strand starting at position 1516 of SEQ ID NO: 913904
uagaaauaacagugaguau

SEQ ID NO: 963091 - RNA, 19 nt, Artificial Sequence
  Description of Artificial Sequence: Synthetic oligonucleotide
  Antisense strand to SEQ ID NO: 963090
auacucacuguuauuucua

SEQ ID NO: 963092 - RNA, 19 nt, Artificial Sequence
  Description of Artificial Sequence: Synthetic oligonucleotide
  Sense strand starting at position 3727 of SEQ ID NO: 913904
guuaucaaucuauggagaa

SEQ ID NO: 963093 - RNA, 19 nt, Artificial Sequence
  Description of Artificial Sequence: Synthetic oligonucleotide
  Antisense strand to SEQ ID NO: 963092
uucuccauagauugauaac

SEQ ID NO: 963094 - RNA, 19 nt, Artificial Sequence
  Description of Artificial Sequence: Synthetic oligonucleotide
  Sense strand starting at position 3740 of SEQ ID NO: 913904
ggagaaaucagccagccau

SEQ ID NO: 963095 - RNA, 19 nt, Artificial Sequence
  Description of Artificial Sequence: Synthetic oligonucleotide
  Antisense strand to SEQ ID NO: 963094
auggcuggcugauuucucc

SEQ ID NO: 963096 - RNA, 19 nt, Artificial Sequence
  Description of Artificial Sequence: Synthetic oligonucleotide
  Sense strand starting at position 2577 of SEQ ID NO: 913904
uaguuagcucauguguguu

SEQ ID NO: 963097 - RNA, 19 nt, Artificial Sequence
  Description of Artificial Sequence: Synthetic oligonucleotide
  Antisense strand to SEQ ID NO: 963096
aacacacaugagcuaacua

SEQ ID NO: 963098 - RNA, 19 nt, Artificial Sequence
  Description of Artificial Sequence: Synthetic oligonucleotide
  Sense strand starting at position 2302 of SEQ ID NO: 913904
cguuaaaggaguuauagau

SEQ ID NO: 963099 - RNA, 19 nt, Artificial Sequence
  Description of Artificial Sequence: Synthetic oligonucleotide
  Antisense strand to SEQ ID NO: 963098
aucuauaacuccuuuaacg

SEQ ID NO: 963100 - RNA, 19 nt, Artificial Sequence
  Description of Artificial Sequence: Synthetic oligonucleotide
  Sense strand starting at position 659 of SEQ ID NO: 913904
ggagguaggcuugaguaga

SEQ ID NO: 963101 - RNA, 19 nt, Artificial Sequence
  Description of Artificial Sequence: Synthetic oligonucleotide
  Antisense strand to SEQ ID NO: 963100
ucuacucaagccuaccucc

SEQ ID NO: 963102 - RNA, 19 nt, Artificial Sequence
  Description of Artificial Sequence: Synthetic oligonucleotide
  Sense strand starting at position 2206 of SEQ ID NO: 913904
ugcucauuuccacgaccau

SEQ ID NO: 963103 - RNA, 19 nt, Artificial Sequence
  Description of Artificial Sequence: Synthetic oligonucleotide
  Antisense strand to SEQ ID NO: 963102
auggucguggaaaugagca

SEQ ID NO: 963104 - RNA, 19 nt, Artificial Sequence
  Description of Artificial Sequence: Synthetic oligonucleotide
  Sense strand starting at position 2636 of SEQ ID NO: 913904
ccaaaucauccaggaguau

SEQ ID NO: 963105 - RNA, 19 nt, Artificial Sequence
  Description of Artificial Sequence: Synthetic oligonucleotide
  Antisense strand to SEQ ID NO: 963104
auacuccuggaugauuugg

SEQ ID NO: 963106 - RNA, 19 nt, Artificial Sequence
  Description of Artificial Sequence: Synthetic oligonucleotide
  Sense strand starting at position 3302 of SEQ ID NO: 913904
ccaugagguuaacucugaa

SEQ ID NO: 963107 - RNA, 19 nt, Artificial Sequence
  Description of Artificial Sequence: Synthetic oligonucleotide
  Antisense strand to SEQ ID NO: 963106
uucagaguuaaccucaugg

SEQ ID NO: 963108 - RNA, 19 nt, Artificial Sequence
  Description of Artificial Sequence: Synthetic oligonucleotide
  Sense strand starting at position 3747 of SEQ ID NO: 913904
ucagccagccaugaugaaa

SEQ ID NO: 963109 - RNA, 19 nt, Artificial Sequence
  Description of Artificial Sequence: Synthetic oligonucleotide
  Antisense strand to SEQ ID NO: 963108
uuucaucauggcuggcuga

SEQ ID NO: 963110 - RNA, 19 nt, Artificial Sequence
  Description of Artificial Sequence: Synthetic oligonucleotide
  Sense strand starting at position 3305 of SEQ ID NO: 913904
ugagguuaacucugaaauc

SEQ ID NO: 963111 - RNA, 19 nt, Artificial Sequence
  Description of Artificial Sequence: Synthetic oligonucleotide
  Antisense strand to SEQ ID NO: 963110
gauuucagaguuaaccuca

SEQ ID NO: 963112 - RNA, 19 nt, Artificial Sequence
  Description of Artificial Sequence: Synthetic oligonucleotide
  Sense strand starting at position 2253 of SEQ ID NO: 913904
cucugugucggaagagugu

SEQ ID NO: 963113 - RNA, 19 nt, Artificial Sequence
  Description of Artificial Sequence: Synthetic oligonucleotide
  Antisense strand to SEQ ID NO: 963112
acacucuuccgacacagag

SEQ ID NO: 963114 - RNA, 19 nt, Artificial Sequence
  Description of Artificial Sequence: Synthetic oligonucleotide
  Sense strand starting at position 2961 of SEQ ID NO: 913904
guaggugaggcaugaaaga

SEQ ID NO: 963115 - RNA, 19 nt, Artificial Sequence
  Description of Artificial Sequence: Synthetic oligonucleotide
  Antisense strand to SEQ ID NO: 963114
ucuuucaugccucaccuac

SEQ ID NO: 963116 - RNA, 19 nt, Artificial Sequence
  Description of Artificial Sequence: Synthetic oligonucleotide
  Sense strand starting at position 2652 of SEQ ID NO: 913904
uaucuuugcgccguggauu

SEQ ID NO: 963117 - RNA, 19 nt, Artificial Sequence
  Description of Artificial Sequence: Synthetic oligonucleotide
  Antisense strand to SEQ ID NO: 963116
aauccacggcgcaaagaua

SEQ ID NO: 963118 - RNA, 19 nt, Artificial Sequence
  Description of Artificial Sequence: Synthetic oligonucleotide
  Sense strand starting at position 3093 of SEQ ID NO: 913904
ggaacugagcucugaucca

SEQ ID NO: 963119 - RNA, 19 nt, Artificial Sequence
  Description of Artificial Sequence: Synthetic oligonucleotide
  Antisense strand to SEQ ID NO: 963118
uggaucagagcucaguucc

SEQ ID NO: 963120 - RNA, 19 nt, Artificial Sequence
  Description of Artificial Sequence: Synthetic oligonucleotide
  Sense strand starting at position 164 of SEQ ID NO: 913904
uguugaaacuugucaggga

SEQ ID NO: 963121 - RNA, 19 nt, Artificial Sequence
  Description of Artificial Sequence: Synthetic oligonucleotide
  Antisense strand to SEQ ID NO: 963120
ucccugacaaguuucaaca

SEQ ID NO: 963122 - RNA, 19 nt, Artificial Sequence
  Description of Artificial Sequence: Synthetic oligonucleotide
  Sense strand starting at position 3878 of SEQ ID NO: 913904
guaaauaacugguuaaagu

SEQ ID NO: 963123 - RNA, 19 nt, Artificial Sequence
  Description of Artificial Sequence: Synthetic oligonucleotide
  Antisense strand to SEQ ID NO: 963122
acuuuaaccaguuauuuac

SEQ ID NO: 963124 - RNA, 19 nt, Artificial Sequence
  Description of Artificial Sequence: Synthetic oligonucleotide
  Sense strand starting at position 2868 of SEQ ID NO: 913904
ggaagucuuacuggugaug

SEQ ID NO: 963125 - RNA, 19 nt, Artificial Sequence
  Description of Artificial Sequence: Synthetic oligonucleotide
  Antisense strand to SEQ ID NO: 963124
caucaccaguaagacuucc

SEQ ID NO: 963126 - RNA, 19 nt, Artificial Sequence
  Description of Artificial Sequence: Synthetic oligonucleotide
  Sense strand starting at position 2410 of SEQ ID NO: 913904
uugucuuugccucaagaga

SEQ ID NO: 963127 - RNA, 19 nt, Artificial Sequence
  Description of Artificial Sequence: Synthetic oligonucleotide
  Antisense strand to SEQ ID NO: 963126
ucucuugaggcaaagacaa

SEQ ID NO: 963128 - RNA, 19 nt, Artificial Sequence
  Description of Artificial Sequence: Synthetic oligonucleotide
  Sense strand starting at position 3612 of SEQ ID NO: 913904
gguggaguucugugaaaga

SEQ ID NO: 963129 - RNA, 19 nt, Artificial Sequence
  Description of Artificial Sequence: Synthetic oligonucleotide
  Antisense strand to SEQ ID NO: 963128
ucuuucacagaacuccacc

SEQ ID NO: 963130 - RNA, 19 nt, Artificial Sequence
  Description of Artificial Sequence: Synthetic oligonucleotide
  Sense strand starting at position 3340 of SEQ ID NO: 913904
agaauuguccacuaguguu

SEQ ID NO: 963131 - RNA, 19 nt, Artificial Sequence
  Description of Artificial Sequence: Synthetic oligonucleotide
  Antisense strand to SEQ ID NO: 963130
aacacuaguggacaauucu

SEQ ID NO: 963132 - RNA, 19 nt, Artificial Sequence
  Description of Artificial Sequence: Synthetic oligonucleotide
  Sense strand starting at position 2866 of SEQ ID NO: 913904
cuggaagucuuacugguga

SEQ ID NO: 963133 - RNA, 19 nt, Artificial Sequence
  Description of Artificial Sequence: Synthetic oligonucleotide
  Antisense strand to SEQ ID NO: 963132
ucaccaguaagacuuccag

SEQ ID NO: 963134 - RNA, 19 nt, Artificial Sequence
  Description of Artificial Sequence: Synthetic oligonucleotide
  Sense strand starting at position 3480 of SEQ ID NO: 913904
gguuaaagguuucuaaccu

SEQ ID NO: 963135 - RNA, 19 nt, Artificial Sequence
  Description of Artificial Sequence: Synthetic oligonucleotide
  Antisense strand to SEQ ID NO: 963134
agguuagaaaccuuuaacc

SEQ ID NO: 963136 - RNA, 19 nt, Artificial Sequence
  Description of Artificial Sequence: Synthetic oligonucleotide
  Sense strand starting at position 643 of SEQ ID NO: 913904
ggccauguuccauggagga

SEQ ID NO: 963137 - RNA, 19 nt, Artificial Sequence
  Description of Artificial Sequence: Synthetic oligonucleotide
  Antisense strand to SEQ ID NO: 963136
uccuccauggaacauggcc

SEQ ID NO: 963138 - RNA, 19 nt, Artificial Sequence
  Description of Artificial Sequence: Synthetic oligonucleotide
  Sense strand starting at position 3337 of SEQ ID NO: 913904
gcuagaauuguccacuagu

SEQ ID NO: 963139 - RNA, 19 nt, Artificial Sequence
  Description of Artificial Sequence: Synthetic oligonucleotide
  Antisense strand to SEQ ID NO: 963138
acuaguggacaauucuagc

SEQ ID NO: 963140 - RNA, 19 nt, Artificial Sequence
  Description of Artificial Sequence: Synthetic oligonucleotide
  Sense strand starting at position 3335 of SEQ ID NO: 913904
augcuagaauuguccacua

SEQ ID NO: 963141 - RNA, 19 nt, Artificial Sequence
  Description of Artificial Sequence: Synthetic oligonucleotide
  Antisense strand to SEQ ID NO: 963140
uaguggacaauucuagcau

SEQ ID NO: 963142 - RNA, 19 nt, Artificial Sequence
  Description of Artificial Sequence: Synthetic oligonucleotide
  Sense strand starting at position 3471 of SEQ ID NO: 913904
ccuucuaucgguuaaaggu

SEQ ID NO: 963143 - RNA, 19 nt, Artificial Sequence
  Description of Artificial Sequence: Synthetic oligonucleotide
  Antisense strand to SEQ ID NO: 963142
accuuuaaccgauagaagg

SEQ ID NO: 963144 - RNA, 19 nt, Artificial Sequence
  Description of Artificial Sequence: Synthetic oligonucleotide
  Sense strand starting at position 2293 of SEQ ID NO: 913904
guaagcuuucguuaaagga

SEQ ID NO: 963145 - RNA, 19 nt, Artificial Sequence
  Description of Artificial Sequence: Synthetic oligonucleotide
  Antisense strand to SEQ ID NO: 963144
uccuuuaacgaaagcuuac

SEQ ID NO: 963146 - RNA, 19 nt, Artificial Sequence
  Description of Artificial Sequence: Synthetic oligonucleotide
  Sense strand starting at position 1327 of SEQ ID NO: 913904
gaggaugugucuccaagua

SEQ ID NO: 963147 - RNA, 19 nt, Artificial Sequence
  Description of Artificial Sequence: Synthetic oligonucleotide
  Antisense strand to SEQ ID NO: 963146
uacuuggagacacauccuc

SEQ ID NO: 963148 - RNA, 19 nt, Artificial Sequence
  Description of Artificial Sequence: Synthetic oligonucleotide
  Sense strand starting at position 2786 of SEQ ID NO: 913904
agguuauaacuguggcaag

SEQ ID NO: 963149 - RNA, 19 nt, Artificial Sequence
  Description of Artificial Sequence: Synthetic oligonucleotide
  Antisense strand to SEQ ID NO: 963148
cuugccacaguuauaaccu

SEQ ID NO: 963150 - RNA, 19 nt, Artificial Sequence
  Description of Artificial Sequence: Synthetic oligonucleotide
  Sense strand starting at position 3469 of SEQ ID NO: 913904
auccuucuaucgguuaaag

SEQ ID NO: 963151 - RNA, 19 nt, Artificial Sequence
  Description of Artificial Sequence: Synthetic oligonucleotide
  Antisense strand to SEQ ID NO: 963150
cuuuaaccgauagaaggau

SEQ ID NO: 963152 - RNA, 19 nt, Artificial Sequence
  Description of Artificial Sequence: Synthetic oligonucleotide
  Sense strand starting at position 473 of SEQ ID NO: 913904
guguuaagaccagaccguu

SEQ ID NO: 963153 - RNA, 19 nt, Artificial Sequence
  Description of Artificial Sequence: Synthetic oligonucleotide
  Antisense strand to SEQ ID NO: 963152
aacggucuggucuuaacac

SEQ ID NO: 963154 - RNA, 19 nt, Artificial Sequence
  Description of Artificial Sequence: Synthetic oligonucleotide
  Sense strand starting at position 1528 of SEQ ID NO: 913904
ugaguaugccugagcgugu

SEQ ID NO: 963155 - RNA, 19 nt, Artificial Sequence
  Description of Artificial Sequence: Synthetic oligonucleotide
  Antisense strand to SEQ ID NO: 963154
acacgcucaggcauacuca

SEQ ID NO: 963156 - RNA, 19 nt, Artificial Sequence
  Description of Artificial Sequence: Synthetic oligonucleotide
  Sense strand starting at position 3386 of SEQ ID NO: 913904
cugucuuacuaucugguaa

SEQ ID NO: 963157 - RNA, 19 nt, Artificial Sequence
  Description of Artificial Sequence: Synthetic oligonucleotide
  Antisense strand to SEQ ID NO: 963156
uuaccagauaguaagacag

SEQ ID NO: 963158 - RNA, 19 nt, Artificial Sequence
  Description of Artificial Sequence: Synthetic oligonucleotide
  Sense strand starting at position 3399 of SEQ ID NO: 913904
ugguaagagucuucccuuc

SEQ ID NO: 963159 - RNA, 19 nt, Artificial Sequence
  Description of Artificial Sequence: Synthetic oligonucleotide
  Antisense strand to SEQ ID NO: 963158
gaagggaagacucuuacca

SEQ ID NO: 963160 - RNA, 19 nt, Artificial Sequence
  Description of Artificial Sequence: Synthetic oligonucleotide
  Sense strand starting at position 988 of SEQ ID NO: 913904
cacuguaaugagugcuaac

SEQ ID NO: 963161 - RNA, 19 nt, Artificial Sequence
  Description of Artificial Sequence: Synthetic oligonucleotide
  Antisense strand to SEQ ID NO: 963160
guuagcacucauuacagug

SEQ ID NO: 963162 - RNA, 19 nt, Artificial Sequence
  Description of Artificial Sequence: Synthetic oligonucleotide
  Sense strand starting at position 2784 of SEQ ID NO: 913904
ccagguuauaacuguggca

SEQ ID NO: 963163 - RNA, 19 nt, Artificial Sequence
  Description of Artificial Sequence: Synthetic oligonucleotide
  Antisense strand to SEQ ID NO: 963162
ugccacaguuauaaccugg

SEQ ID NO: 963164 - RNA, 19 nt, Artificial Sequence
  Description of Artificial Sequence: Synthetic oligonucleotide
  Sense strand starting at position 405 of SEQ ID NO: 913904
ucgcucuccuccucagaaa

SEQ ID NO: 963165 - RNA, 19 nt, Artificial Sequence
  Description of Artificial Sequence: Synthetic oligonucleotide
  Antisense strand to SEQ ID NO: 963164
uuucugaggaggagagcga

SEQ ID NO: 963166 - RNA, 19 nt, Artificial Sequence
  Description of Artificial Sequence: Synthetic oligonucleotide
  Sense strand starting at position 2483 of SEQ ID NO: 913904
ggcuaagccucucuuaauu

SEQ ID NO: 963167 - RNA, 19 nt, Artificial Sequence
  Description of Artificial Sequence: Synthetic oligonucleotide
  Antisense strand to SEQ ID NO: 963166
aauuaagagaggcuuagcc

SEQ ID NO: 963168 - RNA, 19 nt, Artificial Sequence
  Description of Artificial Sequence: Synthetic oligonucleotide
  Sense strand starting at position 2291 of SEQ ID NO: 913904
ggguaagcuuucguuaaag

SEQ ID NO: 963169 - RNA, 19 nt, Artificial Sequence
  Description of Artificial Sequence: Synthetic oligonucleotide
  Antisense strand to SEQ ID NO: 963168
cuuuaacgaaagcuuaccc

SEQ ID NO: 963170 - RNA, 19 nt, Artificial Sequence
  Description of Artificial Sequence: Synthetic oligonucleotide
  Sense strand starting at position 132 of SEQ ID NO: 913905
ucagaaauauuggucauga

SEQ ID NO: 963171 - RNA, 19 nt, Artificial Sequence
  Description of Artificial Sequence: Synthetic oligonucleotide
  Antisense strand to SEQ ID NO: 963170
ucaugaccaauauuucuga

SEQ ID NO: 963172 - RNA, 19 nt, Artificial Sequence
  Description of Artificial Sequence: Synthetic oligonucleotide
  Sense strand starting at position 3820 of SEQ ID NO: 913905
cuagaauuggcaggagaug

SEQ ID NO: 963173 - RNA, 19 nt, Artificial Sequence
  Description of Artificial Sequence: Synthetic oligonucleotide
  Antisense strand to SEQ ID NO: 963172
caucuccugccaauucuag

SEQ ID NO: 963174 - RNA, 19 nt, Artificial Sequence
  Description of Artificial Sequence: Synthetic oligonucleotide
  Sense strand starting at position 558 of SEQ ID NO: 913905
aucaaauuggcaugaauag

SEQ ID NO: 963175 - RNA, 19 nt, Artificial Sequence
  Description of Artificial Sequence: Synthetic oligonucleotide
  Antisense strand to SEQ ID NO: 963174
cuauucaugccaauuugau

SEQ ID NO: 963176 - RNA, 19 nt, Artificial Sequence
  Description of Artificial Sequence: Synthetic oligonucleotide
  Sense strand starting at position 436 of SEQ ID NO: 913905
agggcagacucauuaacau

SEQ ID NO: 963177 - RNA, 19 nt, Artificial Sequence
  Description of Artificial Sequence: Synthetic oligonucleotide
  Antisense strand to SEQ ID NO: 963176
auguuaaugagucugcccu

SEQ ID NO: 963178 - RNA, 19 nt, Artificial Sequence
  Description of Artificial Sequence: Synthetic oligonucleotide
  Sense strand starting at position 873 of SEQ ID NO: 913905
uggugucuuauagaauuga

SEQ ID NO: 963179 - RNA, 19 nt, Artificial Sequence
  Description of Artificial Sequence: Synthetic oligonucleotide
  Antisense strand to SEQ ID NO: 963178
ucaauucuauaagacacca

SEQ ID NO: 963180 - RNA, 19 nt, Artificial Sequence
  Description of Artificial Sequence: Synthetic oligonucleotide
  Sense strand starting at position 354 of SEQ ID NO: 913905
aucaguucugguuaugaga

SEQ ID NO: 963181 - RNA, 19 nt, Artificial Sequence
  Description of Artificial Sequence: Synthetic oligonucleotide
  Antisense strand to SEQ ID NO: 963180
ucucauaaccagaacugau

SEQ ID NO: 963182 - RNA, 19 nt, Artificial Sequence
  Description of Artificial Sequence: Synthetic oligonucleotide
  Sense strand starting at position 110 of SEQ ID NO: 913905
cagagaguuuggucagaga

SEQ ID NO: 963183 - RNA, 19 nt, Artificial Sequence
  Description of Artificial Sequence: Synthetic oligonucleotide
  Antisense strand to SEQ ID NO: 963182
ucucugaccaaacucucug

SEQ ID NO: 963184 - RNA, 19 nt, Artificial Sequence
  Description of Artificial Sequence: Synthetic oligonucleotide
  Sense strand starting at position 3049 of SEQ ID NO: 913905
gggcaucugcauuaauaaa

SEQ ID NO: 963185 - RNA, 19 nt, Artificial Sequence
  Description of Artificial Sequence: Synthetic oligonucleotide
  Antisense strand to SEQ ID NO: 963184
uuuauuaaugcagaugccc

SEQ ID NO: 963186 - RNA, 19 nt, Artificial Sequence
  Description of Artificial Sequence: Synthetic oligonucleotide
  Sense strand starting at position 1270 of SEQ ID NO: 913905
ucugaaugucuugaacagu

SEQ ID NO: 963187 - RNA, 19 nt, Artificial Sequence
  Description of Artificial Sequence: Synthetic oligonucleotide
  Antisense strand to SEQ ID NO: 963186
acuguucaagacauucaga

SEQ ID NO: 963188 - RNA, 19 nt, Artificial Sequence
  Description of Artificial Sequence: Synthetic oligonucleotide
  Sense strand starting at position 463 of SEQ ID NO: 913905
uguauauuugccugguuaa

SEQ ID NO: 963189 - RNA, 19 nt, Artificial Sequence
  Description of Artificial Sequence: Synthetic oligonucleotide
  Antisense strand to SEQ ID NO: 963188
uuaaccaggcaaauauaca

SEQ ID NO: 963190 - RNA, 19 nt, Artificial Sequence
  Description of Artificial Sequence: Synthetic oligonucleotide
  Sense strand starting at position 464 of SEQ ID NO: 913905
guauauuugccugguuaau

SEQ ID NO: 963191 - RNA, 19 nt, Artificial Sequence
  Description of Artificial Sequence: Synthetic oligonucleotide
  Antisense strand to SEQ ID NO: 963190
auuaaccaggcaaauauac

SEQ ID NO: 963192 - RNA, 19 nt, Artificial Sequence
  Description of Artificial Sequence: Synthetic oligonucleotide
  Sense strand starting at position 2246 of SEQ ID NO: 913905
cauugucuucgagacugaa

SEQ ID NO: 963193 - RNA, 19 nt, Artificial Sequence
  Description of Artificial Sequence: Synthetic oligonucleotide
  Antisense strand to SEQ ID NO: 963192
uucagucucgaagacaaug

SEQ ID NO: 963194 - RNA, 19 nt, Artificial Sequence
  Description of Artificial Sequence: Synthetic oligonucleotide
  Sense strand starting at position 2250 of SEQ ID NO: 913905
gucuucgagacugaaucau

SEQ ID NO: 963195 - RNA, 19 nt, Artificial Sequence
  Description of Artificial Sequence: Synthetic oligonucleotide
  Antisense strand to SEQ ID NO: 963194
augauucagucucgaagac

SEQ ID NO: 963196 - RNA, 19 nt, Artificial Sequence
  Description of Artificial Sequence: Synthetic oligonucleotide
  Sense strand starting at position 1896 of SEQ ID NO: 913905
gucucaaguaggcaagaau

SEQ ID NO: 963197 - RNA, 19 nt, Artificial Sequence
  Description of Artificial Sequence: Synthetic oligonucleotide
  Antisense strand to SEQ ID NO: 963196
auucuugccuacuugagac

SEQ ID NO: 963198 - RNA, 19 nt, Artificial Sequence
  Description of Artificial Sequence: Synthetic oligonucleotide
  Sense strand starting at position 1691 of SEQ ID NO: 913905
gucacauauuccuugaaag

SEQ ID NO: 963199 - RNA, 19 nt, Artificial Sequence
  Description of Artificial Sequence: Synthetic oligonucleotide
  Antisense strand to SEQ ID NO: 963198
cuuucaaggaauaugugac

SEQ ID NO: 963200 - RNA, 19 nt, Artificial Sequence
  Description of Artificial Sequence: Synthetic oligonucleotide
  Sense strand starting at position 491 of SEQ ID NO: 913905
ugaaguucgcaacaaauau

SEQ ID NO: 963201 - RNA, 19 nt, Artificial Sequence
  Description of Artificial Sequence: Synthetic oligonucleotide
  Antisense strand to SEQ ID NO: 963200
auauuuguugcgaacuuca

SEQ ID NO: 963202 - RNA, 19 nt, Artificial Sequence
  Description of Artificial Sequence: Synthetic oligonucleotide
  Sense strand starting at position 524 of SEQ ID NO: 913905
ugucgucugccugcauaau

SEQ ID NO: 963203 - RNA, 19 nt, Artificial Sequence
  Description of Artificial Sequence: Synthetic oligonucleotide
  Antisense strand to SEQ ID NO: 963202
auuaugcaggcagacgaca

SEQ ID NO: 963204 - RNA, 19 nt, Artificial Sequence
  Description of Artificial Sequence: Synthetic oligonucleotide
  Sense strand starting at position 842 of SEQ ID NO: 913905
uauggauugugacucauca

SEQ ID NO: 963205 - RNA, 19 nt, Artificial Sequence
  Description of Artificial Sequence: Synthetic oligonucleotide
  Antisense strand to SEQ ID NO: 963204
ugaugagucacaauccaua

SEQ ID NO: 963206 - RNA, 19 nt, Artificial Sequence
  Description of Artificial Sequence: Synthetic oligonucleotide
  Sense strand starting at position 3476 of SEQ ID NO: 913905
ugggacauaguguggauau

SEQ ID NO: 963207 - RNA, 19 nt, Artificial Sequence
  Description of Artificial Sequence: Synthetic oligonucleotide
  Antisense strand to SEQ ID NO: 963206
auauccacacuauguccca

SEQ ID NO: 963208 - RNA, 19 nt, Artificial Sequence
  Description of Artificial Sequence: Synthetic oligonucleotide
  Sense strand starting at position 174 of SEQ ID NO: 913905
ucggacauccacuauguau

SEQ ID NO: 963209 - RNA, 19 nt, Artificial Sequence
  Description of Artificial Sequence: Synthetic oligonucleotide
  Antisense strand to SEQ ID NO: 963208
auacauaguggauguccga

SEQ ID NO: 963210 - RNA, 19 nt, Artificial Sequence
  Description of Artificial Sequence: Synthetic oligonucleotide
  Sense strand starting at position 462 of SEQ ID NO: 913905
uuguauauuugccugguua

SEQ ID NO: 963211 - RNA, 19 nt, Artificial Sequence
  Description of Artificial Sequence: Synthetic oligonucleotide
  Antisense strand to SEQ ID NO: 963210
uaaccaggcaaauauacaa

SEQ ID NO: 963212 - RNA, 19 nt, Artificial Sequence
  Description of Artificial Sequence: Synthetic oligonucleotide
  Sense strand starting at position 3658 of SEQ ID NO: 913905
ugagaaaggugcuuacuga

SEQ ID NO: 963213 - RNA, 19 nt, Artificial Sequence
  Description of Artificial Sequence: Synthetic oligonucleotide
  Antisense strand to SEQ ID NO: 963212
ucaguaagcaccuuucuca

SEQ ID NO: 963214 - RNA, 19 nt, Artificial Sequence
  Description of Artificial Sequence: Synthetic oligonucleotide
  Sense strand starting at position 1767 of SEQ ID NO: 913905
ggcaaauccuuaccuuaga

SEQ ID NO: 963215 - RNA, 19 nt, Artificial Sequence
  Description of Artificial Sequence: Synthetic oligonucleotide
  Antisense strand to SEQ ID NO: 963214
ucuaagguaaggauuugcc

SEQ ID NO: 963216 - RNA, 19 nt, Artificial Sequence
  Description of Artificial Sequence: Synthetic oligonucleotide
  Sense strand starting at position 1764 of SEQ ID NO: 913905
ggaggcaaauccuuaccuu

SEQ ID NO: 963217 - RNA, 19 nt, Artificial Sequence
  Description of Artificial Sequence: Synthetic oligonucleotide
  Antisense strand to SEQ ID NO: 963216
aagguaaggauuugccucc

SEQ ID NO: 963218 - RNA, 19 nt, Artificial Sequence
  Description of Artificial Sequence: Synthetic oligonucleotide
  Sense strand starting at position 3653 of SEQ ID NO: 913905
ggaucugagaaaggugcuu

SEQ ID NO: 963219 - RNA, 19 nt, Artificial Sequence
  Description of Artificial Sequence: Synthetic oligonucleotide
  Antisense strand to SEQ ID NO: 963218
aagcaccuuucucagaucc

SEQ ID NO: 963220 - RNA, 19 nt, Artificial Sequence
  Description of Artificial Sequence: Synthetic oligonucleotide
  Sense strand starting at position 3706 of SEQ ID NO: 913905
gcauguagugaagauggua

SEQ ID NO: 963221 - RNA, 19 nt, Artificial Sequence
  Description of Artificial Sequence: Synthetic oligonucleotide
  Antisense strand to SEQ ID NO: 963220
uaccaucuucacuacaugc

SEQ ID NO: 963222 - RNA, 19 nt, Artificial Sequence
  Description of Artificial Sequence: Synthetic oligonucleotide
  Sense strand starting at position 745 of SEQ ID NO: 913905
cagagaagagccuguuauu

SEQ ID NO: 963223 - RNA, 19 nt, Artificial Sequence
  Description of Artificial Sequence: Synthetic oligonucleotide
  Antisense strand to SEQ ID NO: 963222
aauaacaggcucuucucug

SEQ ID NO: 963224 - RNA, 19 nt, Artificial Sequence
  Description of Artificial Sequence: Synthetic oligonucleotide
  Sense strand starting at position 1580 of SEQ ID NO: 913905
uugaauauaguccaguguu

SEQ ID NO: 963225 - RNA, 19 nt, Artificial Sequence
  Description of Artificial Sequence: Synthetic oligonucleotide
  Antisense strand to SEQ ID NO: 963224
aacacuggacuauauucaa

SEQ ID NO: 963226 - RNA, 19 nt, Artificial Sequence
  Description of Artificial Sequence: Synthetic oligonucleotide
  Sense strand starting at position 1493 of SEQ ID NO: 913905
auaaauugccauuggcaaa

SEQ ID NO: 963227 - RNA, 19 nt, Artificial Sequence
  Description of Artificial Sequence: Synthetic oligonucleotide
  Antisense strand to SEQ ID NO: 963226
uuugccaauggcaauuuau

SEQ ID NO: 963228 - RNA, 19 nt, Artificial Sequence
  Description of Artificial Sequence: Synthetic oligonucleotide
  Sense strand starting at position 3466 of SEQ ID NO: 913905
aguguucuuaugggacaua

SEQ ID NO: 963229 - RNA, 19 nt, Artificial Sequence
  Description of Artificial Sequence: Synthetic oligonucleotide
  Antisense strand to SEQ ID NO: 963228
uaugucccauaagaacacu

SEQ ID NO: 963230 - RNA, 19 nt, Artificial Sequence
  Description of Artificial Sequence: Synthetic oligonucleotide
  Sense strand starting at position 837 of SEQ ID NO: 913905
caguauauggauugugacu

SEQ ID NO: 963231 - RNA, 19 nt, Artificial Sequence
  Description of Artificial Sequence: Synthetic oligonucleotide
  Antisense strand to SEQ ID NO: 963230
agucacaauccauauacug

SEQ ID NO: 963232 - RNA, 19 nt, Artificial Sequence
  Description of Artificial Sequence: Synthetic oligonucleotide
  Sense strand starting at position 2242 of SEQ ID NO: 913905
aaaccauugucuucgagac

SEQ ID NO: 963233 - RNA, 19 nt, Artificial Sequence
  Description of Artificial Sequence: Synthetic oligonucleotide
  Antisense strand to SEQ ID NO: 963232
gucucgaagacaaugguuu

SEQ ID NO: 963234 - RNA, 19 nt, Artificial Sequence
  Description of Artificial Sequence: Synthetic oligonucleotide
  Sense strand starting at position 3152 of SEQ ID NO: 913905
uaacuaguguuucugagau

SEQ ID NO: 963235 - RNA, 19 nt, Artificial Sequence
  Description of Artificial Sequence: Synthetic oligonucleotide
  Antisense strand to SEQ ID NO: 963234
aucucagaaacacuaguua

SEQ ID NO: 963236 - RNA, 19 nt, Artificial Sequence
  Description of Artificial Sequence: Synthetic oligonucleotide
  Sense strand starting at position 3219 of SEQ ID NO: 913905
ccucgagaucagcaccuuu

SEQ ID NO: 963237 - RNA, 19 nt, Artificial Sequence
  Description of Artificial Sequence: Synthetic oligonucleotide
  Antisense strand to SEQ ID NO: 963236
aaaggugcugaucucgagg

SEQ ID NO: 963238 - RNA, 19 nt, Artificial Sequence
  Description of Artificial Sequence: Synthetic oligonucleotide
  Sense strand starting at position 1853 of SEQ ID NO: 913905
uuuacugagcugcaaagua

SEQ ID NO: 963239 - RNA, 19 nt, Artificial Sequence
  Description of Artificial Sequence: Synthetic oligonucleotide
  Antisense strand to SEQ ID NO: 963238
uacuuugcagcucaguaaa

SEQ ID NO: 963240 - RNA, 19 nt, Artificial Sequence
  Description of Artificial Sequence: Synthetic oligonucleotide
  Sense strand starting at position 15 of SEQ ID NO: 913905
gugggugguuuacugaaga

SEQ ID NO: 963241 - RNA, 19 nt, Artificial Sequence
  Description of Artificial Sequence: Synthetic oligonucleotide
  Antisense strand to SEQ ID NO: 963240
ucuucaguaaaccacccac

SEQ ID NO: 963242 - RNA, 19 nt, Artificial Sequence
  Description of Artificial Sequence: Synthetic oligonucleotide
  Sense strand starting at position 1437 of SEQ ID NO: 913905
uauaguuuccaugguuaag

SEQ ID NO: 963243 - RNA, 19 nt, Artificial Sequence
  Description of Artificial Sequence: Synthetic oligonucleotide
  Antisense strand to SEQ ID NO: 963242
cuuaaccauggaaacuaua

SEQ ID NO: 963244 - RNA, 19 nt, Artificial Sequence
  Description of Artificial Sequence: Synthetic oligonucleotide
  Sense strand starting at position 2249 of SEQ ID NO: 913905
ugucuucgagacugaauca

SEQ ID NO: 963245 - RNA, 19 nt, Artificial Sequence
  Description of Artificial Sequence: Synthetic oligonucleotide
  Antisense strand to SEQ ID NO: 963244
ugauucagucucgaagaca

SEQ ID NO: 963246 - RNA, 19 nt, Artificial Sequence
  Description of Artificial Sequence: Synthetic oligonucleotide
  Sense strand starting at position 1888 of SEQ ID NO: 913905
aagauuuagucucaaguag

SEQ ID NO: 963247 - RNA, 19 nt, Artificial Sequence
  Description of Artificial Sequence: Synthetic oligonucleotide
  Antisense strand to SEQ ID NO: 963246
cuacuugagacuaaaucuu

SEQ ID NO: 963248 - RNA, 19 nt, Artificial Sequence
  Description of Artificial Sequence: Synthetic oligonucleotide
  Sense strand starting at position 1433 of SEQ ID NO: 913905
uuaauauaguuuccauggu

SEQ ID NO: 963249 - RNA, 19 nt, Artificial Sequence
  Description of Artificial Sequence: Synthetic oligonucleotide
  Antisense strand to SEQ ID NO: 963248
accauggaaacuauauuaa

SEQ ID NO: 963250 - RNA, 19 nt, Artificial Sequence
  Description of Artificial Sequence: Synthetic oligonucleotide
  Sense strand starting at position 186 of SEQ ID NO: 913906
ucaaccagagcucaguaaa

SEQ ID NO: 963251 - RNA, 19 nt, Artificial Sequence
  Description of Artificial Sequence: Synthetic oligonucleotide
  Antisense strand to SEQ ID NO: 963250
uuuacugagcucugguuga

SEQ ID NO: 963252 - RNA, 19 nt, Artificial Sequence
  Description of Artificial Sequence: Synthetic oligonucleotide
  Sense strand starting at position 91 of SEQ ID NO: 913906
ugagauauucuuuaagucu

SEQ ID NO: 963253 - RNA, 19 nt, Artificial Sequence
  Description of Artificial Sequence: Synthetic oligonucleotide
  Antisense strand to SEQ ID NO: 963252
agacuuaaagaauaucuca

SEQ ID NO: 963254 - RNA, 19 nt, Artificial Sequence
  Description of Artificial Sequence: Synthetic oligonucleotide
  Sense strand starting at position 1328 of SEQ ID NO: 913906
guaagaucacuuggauaua

SEQ ID NO: 963255 - RNA, 19 nt, Artificial Sequence
  Description of Artificial Sequence: Synthetic oligonucleotide
  Antisense strand to SEQ ID NO: 963254
uauauccaagugaucuuac

SEQ ID NO: 963256 - RNA, 19 nt, Artificial Sequence
  Description of Artificial Sequence: Synthetic oligonucleotide
  Sense strand starting at position 3844 of SEQ ID NO: 913906
agagaacauugcuugacca

SEQ ID NO: 963257 - RNA, 19 nt, Artificial Sequence
  Description of Artificial Sequence: Synthetic oligonucleotide
  Antisense strand to SEQ ID NO: 963256
uggucaagcaauguucucu

SEQ ID NO: 963258 - RNA, 19 nt, Artificial Sequence
  Description of Artificial Sequence: Synthetic oligonucleotide
  Sense strand starting at position 3272 of SEQ ID NO: 913906
gccguuuguagugcagaga

SEQ ID NO: 963259 - RNA, 19 nt, Artificial Sequence
  Description of Artificial Sequence: Synthetic oligonucleotide
  Antisense strand to SEQ ID NO: 963258
ucucugcacuacaaacggc

SEQ ID NO: 963260 - RNA, 19 nt, Artificial Sequence
  Description of Artificial Sequence: Synthetic oligonucleotide
  Sense strand starting at position 2762 of SEQ ID NO: 913906
uucgauaggccagauggau

SEQ ID NO: 963261 - RNA, 19 nt, Artificial Sequence
  Description of Artificial Sequence: Synthetic oligonucleotide
  Antisense strand to SEQ ID NO: 963260
auccaucuggccuaucgaa

SEQ ID NO: 963262 - RNA, 19 nt, Artificial Sequence
  Description of Artificial Sequence: Synthetic oligonucleotide
  Sense strand starting at position 1325 of SEQ ID NO: 913906
ccaguaagaucacuuggau

SEQ ID NO: 963263 - RNA, 19 nt, Artificial Sequence
  Description of Artificial Sequence: Synthetic oligonucleotide
  Antisense strand to SEQ ID NO: 963262
auccaagugaucuuacugg

SEQ ID NO: 963264 - RNA, 19 nt, Artificial Sequence
  Description of Artificial Sequence: Synthetic oligonucleotide
  Sense strand starting at position 2975 of SEQ ID NO: 913906
caaugagaauggucacuuu

SEQ ID NO: 963265 - RNA, 19 nt, Artificial Sequence
  Description of Artificial Sequence: Synthetic oligonucleotide
  Antisense strand to SEQ ID NO: 963264
aaagugaccauucucauug

SEQ ID NO: 963266 - RNA, 19 nt, Artificial Sequence
  Description of Artificial Sequence: Synthetic oligonucleotide
  Sense strand starting at position 3841 of SEQ ID NO: 913906
aucagagaacauugcuuga

SEQ ID NO: 963267 - RNA, 19 nt, Artificial Sequence
  Description of Artificial Sequence: Synthetic oligonucleotide
  Antisense strand to SEQ ID NO: 963266
ucaagcaauguucucugau

SEQ ID NO: 963268 - RNA, 19 nt, Artificial Sequence
  Description of Artificial Sequence: Synthetic oligonucleotide
  Sense strand starting at position 258 of SEQ ID NO: 913906
aaagaugaguuucuaaggu

SEQ ID NO: 963269 - RNA, 19 nt, Artificial Sequence
  Description of Artificial Sequence: Synthetic oligonucleotide
  Antisense strand to SEQ ID NO: 963268
accuuagaaacucaucuuu

SEQ ID NO: 963270 - RNA, 19 nt, Artificial Sequence
  Description of Artificial Sequence: Synthetic oligonucleotide
  Sense strand starting at position 1317 of SEQ ID NO: 913906
gguccauuccaguaagauc

SEQ ID NO: 963271 - RNA, 19 nt, Artificial Sequence
  Description of Artificial Sequence: Synthetic oligonucleotide
  Antisense strand to SEQ ID NO: 963270
gaucuuacuggaauggacc

SEQ ID NO: 963272 - RNA, 19 nt, Artificial Sequence
  Description of Artificial Sequence: Synthetic oligonucleotide
  Sense strand starting at position 111 of SEQ ID NO: 913906
auaucauggccauauguau

SEQ ID NO: 963273 - RNA, 19 nt, Artificial Sequence
  Description of Artificial Sequence: Synthetic oligonucleotide
  Antisense strand to SEQ ID NO: 963272
auacauauggccaugauau

SEQ ID NO: 963274 - RNA, 19 nt, Artificial Sequence
  Description of Artificial Sequence: Synthetic oligonucleotide
  Sense strand starting at position 3528 of SEQ ID NO: 913906
ugucuugacuaccuggaaa

SEQ ID NO: 963275 - RNA, 19 nt, Artificial Sequence
  Description of Artificial Sequence: Synthetic oligonucleotide
  Antisense strand to SEQ ID NO: 963274
uuuccagguagucaagaca

SEQ ID NO: 963276 - RNA, 19 nt, Artificial Sequence
  Description of Artificial Sequence: Synthetic oligonucleotide
  Sense strand starting at position 19 of SEQ ID NO: 913906
uagacuaugugauucugau

SEQ ID NO: 963277 - RNA, 19 nt, Artificial Sequence
  Description of Artificial Sequence: Synthetic oligonucleotide
  Antisense strand to SEQ ID NO: 963276
aucagaaucacauagucua

SEQ ID NO: 963278 - RNA, 19 nt, Artificial Sequence
  Description of Artificial Sequence: Synthetic oligonucleotide
  Sense strand starting at position 2568 of SEQ ID NO: 913906
uaaguucguccagaaacau

SEQ ID NO: 963279 - RNA, 19 nt, Artificial Sequence
  Description of Artificial Sequence: Synthetic oligonucleotide
  Antisense strand to SEQ ID NO: 963278
auguuucuggacgaacuua

SEQ ID NO: 963280 - RNA, 19 nt, Artificial Sequence
  Description of Artificial Sequence: Synthetic oligonucleotide
  Sense strand starting at position 1568 of SEQ ID NO: 913906
ggcagcucuccagauacaa

SEQ ID NO: 963281 - RNA, 19 nt, Artificial Sequence
  Description of Artificial Sequence: Synthetic oligonucleotide
  Antisense strand to SEQ ID NO: 963280
uuguaucuggagagcugcc

SEQ ID NO: 963282 - RNA, 19 nt, Artificial Sequence
  Description of Artificial Sequence: Synthetic oligonucleotide
  Sense strand starting at position 14 of SEQ ID NO: 913906
acaaguagacuaugugauu

SEQ ID NO: 963283 - RNA, 19 nt, Artificial Sequence
  Description of Artificial Sequence: Synthetic oligonucleotide
  Antisense strand to SEQ ID NO: 963282
aaucacauagucuacuugu

SEQ ID NO: 963284 - RNA, 19 nt, Artificial Sequence
  Description of Artificial Sequence: Synthetic oligonucleotide
  Sense strand starting at position 90 of SEQ ID NO: 913906
uugagauauucuuuaaguc

SEQ ID NO: 963285 - RNA, 19 nt, Artificial Sequence
  Description of Artificial Sequence: Synthetic oligonucleotide
  Antisense strand to SEQ ID NO: 963284
gacuuaaagaauaucucaa

SEQ ID NO: 963286 - RNA, 19 nt, Artificial Sequence
  Description of Artificial Sequence: Synthetic oligonucleotide
  Sense strand starting at position 2978 of SEQ ID NO: 913906
ugagaauggucacuuucuc

SEQ ID NO: 963287 - RNA, 19 nt, Artificial Sequence
  Description of Artificial Sequence: Synthetic oligonucleotide
  Antisense strand to SEQ ID NO: 963286
gagaaagugaccauucuca

SEQ ID NO: 963288 - RNA, 19 nt, Artificial Sequence
  Description of Artificial Sequence: Synthetic oligonucleotide
  Sense strand starting at position 3116 of SEQ ID NO: 913906
cacauaugcgcuuagagaa

SEQ ID NO: 963289 - RNA, 19 nt, Artificial Sequence
  Description of Artificial Sequence: Synthetic oligonucleotide
  Antisense strand to SEQ ID NO: 963288
uucucuaagcgcauaugug

SEQ ID NO: 963290 - RNA, 19 nt, Artificial Sequence
  Description of Artificial Sequence: Synthetic oligonucleotide
  Sense strand starting at position 1047 of SEQ ID NO: 913906
gaaagagaggccugugagu

SEQ ID NO: 963291 - RNA, 19 nt, Artificial Sequence
  Description of Artificial Sequence: Synthetic oligonucleotide
  Antisense strand to SEQ ID NO: 963290
acucacaggccucucuuuc

SEQ ID NO: 963292 - RNA, 19 nt, Artificial Sequence
  Description of Artificial Sequence: Synthetic oligonucleotide
  Sense strand starting at position 2953 of SEQ ID NO: 913906
caagguuguggcgaugaga

SEQ ID NO: 963293 - RNA, 19 nt, Artificial Sequence
  Description of Artificial Sequence: Synthetic oligonucleotide
  Antisense strand to SEQ ID NO: 963292
ucucaucgccacaaccuug

SEQ ID NO: 963294 - RNA, 19 nt, Artificial Sequence
  Description of Artificial Sequence: Synthetic oligonucleotide
  Sense strand starting at position 139 of SEQ ID NO: 913906
gaucaauugcuauguuaag

SEQ ID NO: 963295 - RNA, 19 nt, Artificial Sequence
  Description of Artificial Sequence: Synthetic oligonucleotide
  Antisense strand to SEQ ID NO: 963294
cuuaacauagcaauugauc

SEQ ID NO: 963296 - RNA, 19 nt, Artificial Sequence
  Description of Artificial Sequence: Synthetic oligonucleotide
  Sense strand starting at position 205 of SEQ ID NO: 913906
aucuauuugucggcuguca

SEQ ID NO: 963297 - RNA, 19 nt, Artificial Sequence
  Description of Artificial Sequence: Synthetic oligonucleotide
  Antisense strand to SEQ ID NO: 963296
ugacagccgacaaauagau

SEQ ID NO: 963298 - RNA, 19 nt, Artificial Sequence
  Description of Artificial Sequence: Synthetic oligonucleotide
  Sense strand starting at position 1054 of SEQ ID NO: 913906
aggccugugaguugagaga

SEQ ID NO: 963299 - RNA, 19 nt, Artificial Sequence
  Description of Artificial Sequence: Synthetic oligonucleotide
  Antisense strand to SEQ ID NO: 963298
ucucucaacucacaggccu

SEQ ID NO: 963300 - RNA, 19 nt, Artificial Sequence
  Description of Artificial Sequence: Synthetic oligonucleotide
  Sense strand starting at position 1513 of SEQ ID NO: 913906
gaggguagauuauuacgca

SEQ ID NO: 963301 - RNA, 19 nt, Artificial Sequence
  Description of Artificial Sequence: Synthetic oligonucleotide
  Antisense strand to SEQ ID NO: 963300
ugcguaauaaucuacccuc

SEQ ID NO: 963302 - RNA, 19 nt, Artificial Sequence
  Description of Artificial Sequence: Synthetic oligonucleotide
  Sense strand starting at position 2956 of SEQ ID NO: 913906
gguuguggcgaugagaauu

SEQ ID NO: 963303 - RNA, 19 nt, Artificial Sequence
  Description of Artificial Sequence: Synthetic oligonucleotide
  Antisense strand to SEQ ID NO: 963302
aauucucaucgccacaacc

SEQ ID NO: 963304 - RNA, 19 nt, Artificial Sequence
  Description of Artificial Sequence: Synthetic oligonucleotide
  Sense strand starting at position 2453 of SEQ ID NO: 913906
cucuuucuccaggaguguu

SEQ ID NO: 963305 - RNA, 19 nt, Artificial Sequence
  Description of Artificial Sequence: Synthetic oligonucleotide
  Antisense strand to SEQ ID NO: 963304
aacacuccuggagaaagag

SEQ ID NO: 963306 - RNA, 19 nt, Artificial Sequence
  Description of Artificial Sequence: Synthetic oligonucleotide
  Sense strand starting at position 3032 of SEQ ID NO: 913906
ggaacagcuuugcuuacaa

SEQ ID NO: 963307 - RNA, 19 nt, Artificial Sequence
  Description of Artificial Sequence: Synthetic oligonucleotide
  Antisense strand to SEQ ID NO: 963306
uuguaagcaaagcuguucc

SEQ ID NO: 963308 - RNA, 19 nt, Artificial Sequence
  Description of Artificial Sequence: Synthetic oligonucleotide
  Sense strand starting at position 3012 of SEQ ID NO: 913906
gcacaugacuuggcuauaa

SEQ ID NO: 963309 - RNA, 19 nt, Artificial Sequence
  Description of Artificial Sequence: Synthetic oligonucleotide
  Antisense strand to SEQ ID NO: 963308
uuauagccaagucaugugc

SEQ ID NO: 963310 - RNA, 19 nt, Artificial Sequence
  Description of Artificial Sequence: Synthetic oligonucleotide
  Sense strand starting at position 2841 of SEQ ID NO: 913906
ggcaguguggcugagaaug

SEQ ID NO: 963311 - RNA, 19 nt, Artificial Sequence
  Description of Artificial Sequence: Synthetic oligonucleotide
  Antisense strand to SEQ ID NO: 963310
cauucucagccacacugcc

SEQ ID NO: 963312 - RNA, 19 nt, Artificial Sequence
  Description of Artificial Sequence: Synthetic oligonucleotide
  Sense strand starting at position 207 of SEQ ID NO: 913906
cuauuugucggcugucaug

SEQ ID NO: 963313 - RNA, 19 nt, Artificial Sequence
  Description of Artificial Sequence: Synthetic oligonucleotide
  Antisense strand to SEQ ID NO: 963312
caugacagccgacaaauag

SEQ ID NO: 963314 - RNA, 19 nt, Artificial Sequence
  Description of Artificial Sequence: Synthetic oligonucleotide
  Sense strand starting at position 2921 of SEQ ID NO: 913906
cuggaaguggagugucuua

SEQ ID NO: 963315 - RNA, 19 nt, Artificial Sequence
  Description of Artificial Sequence: Synthetic oligonucleotide
  Antisense strand to SEQ ID NO: 963314
uaagacacuccacuuccag

SEQ ID NO: 963316 - RNA, 19 nt, Artificial Sequence
  Description of Artificial Sequence: Synthetic oligonucleotide
  Sense strand starting at position 3376 of SEQ ID NO: 913906
acacucagugguugagcaa

SEQ ID NO: 963317 - RNA, 19 nt, Artificial Sequence
  Description of Artificial Sequence: Synthetic oligonucleotide
  Antisense strand to SEQ ID NO: 963316
uugcucaaccacugagugu

SEQ ID NO: 963318 - RNA, 19 nt, Artificial Sequence
  Description of Artificial Sequence: Synthetic oligonucleotide
  Sense strand starting at position 1565 of SEQ ID NO: 913906
ccaggcagcucuccagaua

SEQ ID NO: 963319 - RNA, 19 nt, Artificial Sequence
  Description of Artificial Sequence: Synthetic oligonucleotide
  Antisense strand to SEQ ID NO: 963318
uaucuggagagcugccugg

SEQ ID NO: 963320 - RNA, 19 nt, Artificial Sequence
  Description of Artificial Sequence: Synthetic oligonucleotide
  Sense strand starting at position 1521 of SEQ ID NO: 913906
auuauuacgcaaggucaau

SEQ ID NO: 963321 - RNA, 19 nt, Artificial Sequence
  Description of Artificial Sequence: Synthetic oligonucleotide
  Antisense strand to SEQ ID NO: 963320
auugaccuugcguaauaau

SEQ ID NO: 963322 - RNA, 19 nt, Artificial Sequence
  Description of Artificial Sequence: Synthetic oligonucleotide
  Sense strand starting at position 106 of SEQ ID NO: 913906
gucucauaucauggccaua

SEQ ID NO: 963323 - RNA, 19 nt, Artificial Sequence
  Description of Artificial Sequence: Synthetic oligonucleotide
  Antisense strand to SEQ ID NO: 963322
uauggccaugauaugagac

SEQ ID NO: 963324 - RNA, 19 nt, Artificial Sequence
  Description of Artificial Sequence: Synthetic oligonucleotide
  Sense strand starting at position 3011 of SEQ ID NO: 913906
ugcacaugacuuggcuaua

SEQ ID NO: 963325 - RNA, 19 nt, Artificial Sequence
  Description of Artificial Sequence: Synthetic oligonucleotide
  Antisense strand to SEQ ID NO: 963324
uauagccaagucaugugca

SEQ ID NO: 963326 - RNA, 19 nt, Artificial Sequence
  Description of Artificial Sequence: Synthetic oligonucleotide
  Sense strand starting at position 2955 of SEQ ID NO: 913906
agguuguggcgaugagaau

SEQ ID NO: 963327 - RNA, 19 nt, Artificial Sequence
  Description of Artificial Sequence: Synthetic oligonucleotide
  Antisense strand to SEQ ID NO: 963326
auucucaucgccacaaccu

SEQ ID NO: 963328 - RNA, 19 nt, Artificial Sequence
  Description of Artificial Sequence: Synthetic oligonucleotide
  Sense strand starting at position 795 of SEQ ID NO: 913906
uggccagugguguggagaa

SEQ ID NO: 963329 - RNA, 19 nt, Artificial Sequence
  Description of Artificial Sequence: Synthetic oligonucleotide
  Antisense strand to SEQ ID NO: 963328
uucuccacaccacuggcca

SEQ ID NO: 963330 - RNA, 19 nt, Artificial Sequence
  Description of Artificial Sequence: Synthetic oligonucleotide
  Sense strand starting at position 184 of SEQ ID NO: 913907
ucaaccagagcucaguaaa

SEQ ID NO: 963331 - RNA, 19 nt, Artificial Sequence
  Description of Artificial Sequence: Synthetic oligonucleotide
  Antisense strand to SEQ ID NO: 963330
uuuacugagcucugguuga

SEQ ID NO: 963332 - RNA, 19 nt, Artificial Sequence
  Description of Artificial Sequence: Synthetic oligonucleotide
  Sense strand starting at position 1329 of SEQ ID NO: 913907
guaagaucacuuggauaua

SEQ ID NO: 963333 - RNA, 19 nt, Artificial Sequence
  Description of Artificial Sequence: Synthetic oligonucleotide
  Antisense strand to SEQ ID NO: 963332
uauauccaagugaucuuac

SEQ ID NO: 963334 - RNA, 19 nt, Artificial Sequence
  Description of Artificial Sequence: Synthetic oligonucleotide
  Sense strand starting at position 3806 of SEQ ID NO: 913907
agagaacauugcuugacca

SEQ ID NO: 963335 - RNA, 19 nt, Artificial Sequence
  Description of Artificial Sequence: Synthetic oligonucleotide
  Antisense strand to SEQ ID NO: 963334
uggucaagcaauguucucu

SEQ ID NO: 963336 - RNA, 19 nt, Artificial Sequence
  Description of Artificial Sequence: Synthetic oligonucleotide
  Sense strand starting at position 3234 of SEQ ID NO: 913907
gccguuuguagugcagaga

SEQ ID NO: 963337 - RNA, 19 nt, Artificial Sequence
  Description of Artificial Sequence: Synthetic oligonucleotide
  Antisense strand to SEQ ID NO: 963336
ucucugcacuacaaacggc

SEQ ID NO: 963338 - RNA, 19 nt, Artificial Sequence
  Description of Artificial Sequence: Synthetic oligonucleotide
  Sense strand starting at position 2724 of SEQ ID NO: 913907
uucgauaggccagauggau

SEQ ID NO: 963339 - RNA, 19 nt, Artificial Sequence
  Description of Artificial Sequence: Synthetic oligonucleotide
  Antisense strand to SEQ ID NO: 963338
auccaucuggccuaucgaa

SEQ ID NO: 963340 - RNA, 19 nt, Artificial Sequence
  Description of Artificial Sequence: Synthetic oligonucleotide
  Sense strand starting at position 1326 of SEQ ID NO: 913907
ccaguaagaucacuuggau

SEQ ID NO: 963341 - RNA, 19 nt, Artificial Sequence
  Description of Artificial Sequence: Synthetic oligonucleotide
  Antisense strand to SEQ ID NO: 963340
auccaagugaucuuacugg

SEQ ID NO: 963342 - RNA, 19 nt, Artificial Sequence
  Description of Artificial Sequence: Synthetic oligonucleotide
  Sense strand starting at position 2937 of SEQ ID NO: 913907
caaugagaauggucacuuu

SEQ ID NO: 963343 - RNA, 19 nt, Artificial Sequence
  Description of Artificial Sequence: Synthetic oligonucleotide
  Antisense strand to SEQ ID NO: 963342
aaagugaccauucucauug

SEQ ID NO: 963344 - RNA, 19 nt, Artificial Sequence
  Description of Artificial Sequence: Synthetic oligonucleotide
  Sense strand starting at position 3803 of SEQ ID NO: 913907
aucagagaacauugcuuga

SEQ ID NO: 963345 - RNA, 19 nt, Artificial Sequence
  Description of Artificial Sequence: Synthetic oligonucleotide
  Antisense strand to SEQ ID NO: 963344
ucaagcaauguucucugau

SEQ ID NO: 963346 - RNA, 19 nt, Artificial Sequence
  Description of Artificial Sequence: Synthetic oligonucleotide
  Sense strand starting at position 256 of SEQ ID NO: 913907
aaagaugaguuucuaaggu

SEQ ID NO: 963347 - RNA, 19 nt, Artificial Sequence
  Description of Artificial Sequence: Synthetic oligonucleotide
  Antisense strand to SEQ ID NO: 963346
accuuagaaacucaucuuu

SEQ ID NO: 963348 - RNA, 19 nt, Artificial Sequence
  Description of Artificial Sequence: Synthetic oligonucleotide
  Sense strand starting at position 1318 of SEQ ID NO: 913907
gguccauuccaguaagauc

SEQ ID NO: 963349 - RNA, 19 nt, Artificial Sequence
  Description of Artificial Sequence: Synthetic oligonucleotide
  Antisense strand to SEQ ID NO: 963348
gaucuuacuggaauggacc

SEQ ID NO: 963350 - RNA, 19 nt, Artificial Sequence
  Description of Artificial Sequence: Synthetic oligonucleotide
  Sense strand starting at position 109 of SEQ ID NO: 913907
auaucauggccauauguau

SEQ ID NO: 963351 - RNA, 19 nt, Artificial Sequence
  Description of Artificial Sequence: Synthetic oligonucleotide
  Antisense strand to SEQ ID NO: 963350
auacauauggccaugauau

SEQ ID NO: 963352 - RNA, 19 nt, Artificial Sequence
  Description of Artificial Sequence: Synthetic oligonucleotide
  Sense strand starting at position 3490 of SEQ ID NO: 913907
ugucuugacuaccuggaaa

SEQ ID NO: 963353 - RNA, 19 nt, Artificial Sequence
  Description of Artificial Sequence: Synthetic oligonucleotide
  Antisense strand to SEQ ID NO: 963352
uuuccagguagucaagaca

SEQ ID NO: 963354 - RNA, 19 nt, Artificial Sequence
  Description of Artificial Sequence: Synthetic oligonucleotide
  Sense strand starting at position 17 of SEQ ID NO: 913907
uagacuaugugauucugau

SEQ ID NO: 963355 - RNA, 19 nt, Artificial Sequence
  Description of Artificial Sequence: Synthetic oligonucleotide
  Antisense strand to SEQ ID NO: 963354
aucagaaucacauagucua

SEQ ID NO: 963356 - RNA, 19 nt, Artificial Sequence
  Description of Artificial Sequence: Synthetic oligonucleotide
  Sense strand starting at position 2530 of SEQ ID NO: 913907
uaaguucguccagaaacau

SEQ ID NO: 963357 - RNA, 19 nt, Artificial Sequence
  Description of Artificial Sequence: Synthetic oligonucleotide
  Antisense strand to SEQ ID NO: 963356
auguuucuggacgaacuua

SEQ ID NO: 963358 - RNA, 19 nt, Artificial Sequence
  Description of Artificial Sequence: Synthetic oligonucleotide
  Sense strand starting at position 1569 of SEQ ID NO: 913907
ggcagcucuccagauacaa

SEQ ID NO: 963359 - RNA, 19 nt, Artificial Sequence
  Description of Artificial Sequence: Synthetic oligonucleotide
  Antisense strand to SEQ ID NO: 963358
uuguaucuggagagcugcc

SEQ ID NO: 963360 - RNA, 19 nt, Artificial Sequence
  Description of Artificial Sequence: Synthetic oligonucleotide
  Sense strand starting at position 89 of SEQ ID NO: 913907
cgagauauucuuuaagucu

SEQ ID NO: 963361 - RNA, 19 nt, Artificial Sequence
  Description of Artificial Sequence: Synthetic oligonucleotide
  Antisense strand to SEQ ID NO: 963360
agacuuaaagaauaucucg

SEQ ID NO: 963362 - RNA, 19 nt, Artificial Sequence
  Description of Artificial Sequence: Synthetic oligonucleotide
  Sense strand starting at position 12 of SEQ ID NO: 913907
acaaguagacuaugugauu

SEQ ID NO: 963363 - RNA, 19 nt, Artificial Sequence
  Description of Artificial Sequence: Synthetic oligonucleotide
  Antisense strand to SEQ ID NO: 963362
aaucacauagucuacuugu

SEQ ID NO: 963364 - RNA, 19 nt, Artificial Sequence
  Description of Artificial Sequence: Synthetic oligonucleotide
  Sense strand starting at position 3078 of SEQ ID NO: 913907
cacauaugcgcuuagagaa

SEQ ID NO: 963365 - RNA, 19 nt, Artificial Sequence
  Description of Artificial Sequence: Synthetic oligonucleotide
  Antisense strand to SEQ ID NO: 963364
uucucuaagcgcauaugug

SEQ ID NO: 963366 - RNA, 19 nt, Artificial Sequence
  Description of Artificial Sequence: Synthetic oligonucleotide
  Sense strand starting at position 1048 of SEQ ID NO: 913907
gaaagagaggccugugagu

SEQ ID NO: 963367 - RNA, 19 nt, Artificial Sequence
  Description of Artificial Sequence: Synthetic oligonucleotide
  Antisense strand to SEQ ID NO: 963366
acucacaggccucucuuuc

SEQ ID NO: 963368 - RNA, 19 nt, Artificial Sequence
  Description of Artificial Sequence: Synthetic oligonucleotide
  Sense strand starting at position 2412 of SEQ ID NO: 913907
uuucucuuucuccaggagu

SEQ ID NO: 963369 - RNA, 19 nt, Artificial Sequence
  Description of Artificial Sequence: Synthetic oligonucleotide
  Antisense strand to SEQ ID NO: 963368
acuccuggagaaagagaaa

SEQ ID NO: 963370 - RNA, 19 nt, Artificial Sequence
  Description of Artificial Sequence: Synthetic oligonucleotide
  Sense strand starting at position 2915 of SEQ ID NO: 913907
caagguuguggcgaugaga

SEQ ID NO: 963371 - RNA, 19 nt, Artificial Sequence
  Description of Artificial Sequence: Synthetic oligonucleotide
  Antisense strand to SEQ ID NO: 963370
ucucaucgccacaaccuug

SEQ ID NO: 963372 - RNA, 19 nt, Artificial Sequence
  Description of Artificial Sequence: Synthetic oligonucleotide
  Sense strand starting at position 3544 of SEQ ID NO: 913907
cccugcugccaugacaaau

SEQ ID NO: 963373 - RNA, 19 nt, Artificial Sequence
  Description of Artificial Sequence: Synthetic oligonucleotide
  Antisense strand to SEQ ID NO: 963372
auuugucauggcagcaggg

SEQ ID NO: 963374 - RNA, 19 nt, Artificial Sequence
  Description of Artificial Sequence: Synthetic oligonucleotide
  Sense strand starting at position 137 of SEQ ID NO: 913907
gaucaauugcuauguuaag

SEQ ID NO: 963375 - RNA, 19 nt, Artificial Sequence
  Description of Artificial Sequence: Synthetic oligonucleotide
  Antisense strand to SEQ ID NO: 963374
cuuaacauagcaauugauc

SEQ ID NO: 963376 - RNA, 19 nt, Artificial Sequence
  Description of Artificial Sequence: Synthetic oligonucleotide
  Sense strand starting at position 203 of SEQ ID NO: 913907
aucuauuugucggcuguca

SEQ ID NO: 963377 - RNA, 19 nt, Artificial Sequence
  Description of Artificial Sequence: Synthetic oligonucleotide
  Antisense strand to SEQ ID NO: 963376
ugacagccgacaaauagau

SEQ ID NO: 963378 - RNA, 19 nt, Artificial Sequence
  Description of Artificial Sequence: Synthetic oligonucleotide
  Sense strand starting at position 1055 of SEQ ID NO: 913907
aggccugugaguugagaga

SEQ ID NO: 963379 - RNA, 19 nt, Artificial Sequence
  Description of Artificial Sequence: Synthetic oligonucleotide
  Antisense strand to SEQ ID NO: 963378
ucucucaacucacaggccu

SEQ ID NO: 963380 - RNA, 19 nt, Artificial Sequence
  Description of Artificial Sequence: Synthetic oligonucleotide
  Sense strand starting at position 1514 of SEQ ID NO: 913907
gaggguagauuauuacgca

SEQ ID NO: 963381 - RNA, 19 nt, Artificial Sequence
  Description of Artificial Sequence: Synthetic oligonucleotide
  Antisense strand to SEQ ID NO: 963380
ugcguaauaaucuacccuc

SEQ ID NO: 963382 - RNA, 19 nt, Artificial Sequence
  Description of Artificial Sequence: Synthetic oligonucleotide
  Sense strand starting at position 2918 of SEQ ID NO: 913907
gguuguggcgaugagaauu

SEQ ID NO: 963383 - RNA, 19 nt, Artificial Sequence
  Description of Artificial Sequence: Synthetic oligonucleotide
  Antisense strand to SEQ ID NO: 963382
aauucucaucgccacaacc

SEQ ID NO: 963384 - RNA, 19 nt, Artificial Sequence
  Description of Artificial Sequence: Synthetic oligonucleotide
  Sense strand starting at position 2994 of SEQ ID NO: 913907
ggaacagcuuugcuuacaa

SEQ ID NO: 963385 - RNA, 19 nt, Artificial Sequence
  Description of Artificial Sequence: Synthetic oligonucleotide
  Antisense strand to SEQ ID NO: 963384
uuguaagcaaagcuguucc

SEQ ID NO: 963386 - RNA, 19 nt, Artificial Sequence
  Description of Artificial Sequence: Synthetic oligonucleotide
  Sense strand starting at position 2974 of SEQ ID NO: 913907
gcacaugacuuggcuauaa

SEQ ID NO: 963387 - RNA, 19 nt, Artificial Sequence
  Description of Artificial Sequence: Synthetic oligonucleotide
  Antisense strand to SEQ ID NO: 963386
uuauagccaagucaugugc

SEQ ID NO: 963388 - RNA, 19 nt, Artificial Sequence
  Description of Artificial Sequence: Synthetic oligonucleotide
  Sense strand starting at position 2803 of SEQ ID NO: 913907
ggcaguguggcugagaaug

SEQ ID NO: 963389 - RNA, 19 nt, Artificial Sequence
  Description of Artificial Sequence: Synthetic oligonucleotide
  Antisense strand to SEQ ID NO: 963388
cauucucagccacacugcc

SEQ ID NO: 963390 - RNA, 19 nt, Artificial Sequence
  Description of Artificial Sequence: Synthetic oligonucleotide
  Sense strand starting at position 88 of SEQ ID NO: 913907
ucgagauauucuuuaaguc

SEQ ID NO: 963391 - RNA, 19 nt, Artificial Sequence
  Description of Artificial Sequence: Synthetic oligonucleotide
  Antisense strand to SEQ ID NO: 963390
gacuuaaagaauaucucga

SEQ ID NO: 963392 - RNA, 19 nt, Artificial Sequence
  Description of Artificial Sequence: Synthetic oligonucleotide
  Sense strand starting at position 205 of SEQ ID NO: 913907
cuauuugucggcugucaug

SEQ ID NO: 963393 - RNA, 19 nt, Artificial Sequence
  Description of Artificial Sequence: Synthetic oligonucleotide
  Antisense strand to SEQ ID NO: 963392
caugacagccgacaaauag

SEQ ID NO: 963394 - RNA, 19 nt, Artificial Sequence
  Description of Artificial Sequence: Synthetic oligonucleotide
  Sense strand starting at position 2883 of SEQ ID NO: 913907
cuggaaguggagugucuua

SEQ ID NO: 963395 - RNA, 19 nt, Artificial Sequence
  Description of Artificial Sequence: Synthetic oligonucleotide
  Antisense strand to SEQ ID NO: 963394
uaagacacuccacuuccag

SEQ ID NO: 963396 - RNA, 19 nt, Artificial Sequence
  Description of Artificial Sequence: Synthetic oligonucleotide
  Sense strand starting at position 3338 of SEQ ID NO: 913907
acacucagugguugagcaa

SEQ ID NO: 963397 - RNA, 19 nt, Artificial Sequence
  Description of Artificial Sequence: Synthetic oligonucleotide
  Antisense strand to SEQ ID NO: 963396
uugcucaaccacugagugu

SEQ ID NO: 963398 - RNA, 19 nt, Artificial Sequence
  Description of Artificial Sequence: Synthetic oligonucleotide
  Sense strand starting at position 1566 of SEQ ID NO: 913907
ccaggcagcucuccagaua

SEQ ID NO: 963399 - RNA, 19 nt, Artificial Sequence
  Description of Artificial Sequence: Synthetic oligonucleotide
  Antisense strand to SEQ ID NO: 963398
uaucuggagagcugccugg

SEQ ID NO: 963400 - RNA, 19 nt, Artificial Sequence
  Description of Artificial Sequence: Synthetic oligonucleotide
  Sense strand starting at position 1522 of SEQ ID NO: 913907
auuauuacgcaaggucaau

SEQ ID NO: 963401 - RNA, 19 nt, Artificial Sequence
  Description of Artificial Sequence: Synthetic oligonucleotide
  Antisense strand to SEQ ID NO: 963400
auugaccuugcguaauaau

SEQ ID NO: 963402 - RNA, 19 nt, Artificial Sequence
  Description of Artificial Sequence: Synthetic oligonucleotide
  Sense strand starting at position 104 of SEQ ID NO: 913907
gucucauaucauggccaua

SEQ ID NO: 963403 - RNA, 19 nt, Artificial Sequence
  Description of Artificial Sequence: Synthetic oligonucleotide
  Antisense strand to SEQ ID NO: 963402
uauggccaugauaugagac

SEQ ID NO: 963404 - RNA, 19 nt, Artificial Sequence
  Description of Artificial Sequence: Synthetic oligonucleotide
  Sense strand starting at position 2973 of SEQ ID NO: 913907
ugcacaugacuuggcuaua

SEQ ID NO: 963405 - RNA, 19 nt, Artificial Sequence
  Description of Artificial Sequence: Synthetic oligonucleotide
  Antisense strand to SEQ ID NO: 963404
uauagccaagucaugugca

SEQ ID NO: 963406 - RNA, 19 nt, Artificial Sequence
  Description of Artificial Sequence: Synthetic oligonucleotide
  Sense strand starting at position 2917 of SEQ ID NO: 913907
agguuguggcgaugagaau

SEQ ID NO: 963407 - RNA, 19 nt, Artificial Sequence
  Description of Artificial Sequence: Synthetic oligonucleotide
  Antisense strand to SEQ ID NO: 963406
auucucaucgccacaaccu

SEQ ID NO: 963408 - RNA, 19 nt, Artificial Sequence
  Description of Artificial Sequence: Synthetic oligonucleotide
  Sense strand starting at position 796 of SEQ ID NO: 913907
uggccagugguguggagaa

SEQ ID NO: 963409 - RNA, 19 nt, Artificial Sequence
  Description of Artificial Sequence: Synthetic oligonucleotide
  Antisense strand to SEQ ID NO: 963408
uucuccacaccacuggcca

SEQ ID NO: 963410 - RNA, 19 nt, Artificial Sequence
  Description of Artificial Sequence: Synthetic oligonucleotide
  Sense strand starting at position 3775 of SEQ ID NO: 913908
guuggucacauuugugaac

SEQ ID NO: 963411 - RNA, 19 nt, Artificial Sequence
  Description of Artificial Sequence: Synthetic oligonucleotide
  Antisense strand to SEQ ID NO: 963410
guucacaaaugugaccaac

SEQ ID NO: 963412 - RNA, 19 nt, Artificial Sequence
  Description of Artificial Sequence: Synthetic oligonucleotide
  Sense strand starting at position 3291 of SEQ ID NO: 913908
gaguaagaugaguaguauu

SEQ ID NO: 963413 - RNA, 19 nt, Artificial Sequence
  Description of Artificial Sequence: Synthetic oligonucleotide
  Antisense strand to SEQ ID NO: 963412
aauacuacucaucuuacuc

SEQ ID NO: 963414 - RNA, 19 nt, Artificial Sequence
  Description of Artificial Sequence: Synthetic oligonucleotide
  Sense strand starting at position 2265 of SEQ ID NO: 913908
ugcucuaugcguccuauga

SEQ ID NO: 963415 - RNA, 19 nt, Artificial Sequence
  Description of Artificial Sequence: Synthetic oligonucleotide
  Antisense strand to SEQ ID NO: 963414
ucauaggacgcauagagca

SEQ ID NO: 963416 - RNA, 19 nt, Artificial Sequence
  Description of Artificial Sequence: Synthetic oligonucleotide
  Sense strand starting at position 2266 of SEQ ID NO: 913908
gcucuaugcguccuaugac

SEQ ID NO: 963417 - RNA, 19 nt, Artificial Sequence
  Description of Artificial Sequence: Synthetic oligonucleotide
  Antisense strand to SEQ ID NO: 963416
gucauaggacgcauagagc

SEQ ID NO: 963418 - RNA, 19 nt, Artificial Sequence
  Description of Artificial Sequence: Synthetic oligonucleotide
  Sense strand starting at position 3212 of SEQ ID NO: 913908
guauuuggccagcagguua

SEQ ID NO: 963419 - RNA, 19 nt, Artificial Sequence
  Description of Artificial Sequence: Synthetic oligonucleotide
  Antisense strand to SEQ ID NO: 963418
uaaccugcuggccaaauac

SEQ ID NO: 963420 - RNA, 19 nt, Artificial Sequence
  Description of Artificial Sequence: Synthetic oligonucleotide
  Sense strand starting at position 3376 of SEQ ID NO: 913908
ucaaguccacaugaguaua

SEQ ID NO: 963421 - RNA, 19 nt, Artificial Sequence
  Description of Artificial Sequence: Synthetic oligonucleotide
  Antisense strand to SEQ ID NO: 963420
uauacucauguggacuuga

SEQ ID NO: 963422 - RNA, 19 nt, Artificial Sequence
  Description of Artificial Sequence: Synthetic oligonucleotide
  Sense strand starting at position 1527 of SEQ ID NO: 913908
cgguuaaauaaauggauaa

SEQ ID NO: 963423 - RNA, 19 nt, Artificial Sequence
  Description of Artificial Sequence: Synthetic oligonucleotide
  Antisense strand to SEQ ID NO: 963422
uuauccauuuauuuaaccg

SEQ ID NO: 963424 - RNA, 19 nt, Artificial Sequence
  Description of Artificial Sequence: Synthetic oligonucleotide
  Sense strand starting at position 243 of SEQ ID NO: 913908
gggcauuuaggguguuuau

SEQ ID NO: 963425 - RNA, 19 nt, Artificial Sequence
  Description of Artificial Sequence: Synthetic oligonucleotide
  Antisense strand to SEQ ID NO: 963424
auaaacacccuaaaugccc

SEQ ID NO: 963426 - RNA, 19 nt, Artificial Sequence
  Description of Artificial Sequence: Synthetic oligonucleotide
  Sense strand starting at position 2818 of SEQ ID NO: 913908
augaguucugucuaaacag

SEQ ID NO: 963427 - RNA, 19 nt, Artificial Sequence
  Description of Artificial Sequence: Synthetic oligonucleotide
  Antisense strand to SEQ ID NO: 963426
cuguuuagacagaacucau

SEQ ID NO: 963428 - RNA, 19 nt, Artificial Sequence
  Description of Artificial Sequence: Synthetic oligonucleotide
  Sense strand starting at position 2129 of SEQ ID NO: 913908
uguuuauguggauaaccaa

SEQ ID NO: 963429 - RNA, 19 nt, Artificial Sequence
  Description of Artificial Sequence: Synthetic oligonucleotide
  Antisense strand to SEQ ID NO: 963428
uugguuauccacauaaaca

SEQ ID NO: 963430 - RNA, 19 nt, Artificial Sequence
  Description of Artificial Sequence: Synthetic oligonucleotide
  Sense strand starting at position 32 of SEQ ID NO: 913908
ccuaauauugugggagaac

SEQ ID NO: 963431 - RNA, 19 nt, Artificial Sequence
  Description of Artificial Sequence: Synthetic oligonucleotide
  Antisense strand to SEQ ID NO: 963430
guucucccacaauauuagg

SEQ ID NO: 963432 - RNA, 19 nt, Artificial Sequence
  Description of Artificial Sequence: Synthetic oligonucleotide
  Sense strand starting at position 686 of SEQ ID NO: 913908
uaggguuauggcuacaaca

SEQ ID NO: 963433 - RNA, 19 nt, Artificial Sequence
  Description of Artificial Sequence: Synthetic oligonucleotide
  Antisense strand to SEQ ID NO: 963432
uguuguagccauaacccua

SEQ ID NO: 963434 - RNA, 19 nt, Artificial Sequence
  Description of Artificial Sequence: Synthetic oligonucleotide
  Sense strand starting at position 2506 of SEQ ID NO: 913908
auucuagaauguuccaaga

SEQ ID NO: 963435 - RNA, 19 nt, Artificial Sequence
  Description of Artificial Sequence: Synthetic oligonucleotide
  Antisense strand to SEQ ID NO: 963434
ucuuggaacauucuagaau

SEQ ID NO: 963436 - RNA, 19 nt, Artificial Sequence
  Description of Artificial Sequence: Synthetic oligonucleotide
  Sense strand starting at position 657 of SEQ ID NO: 913908
gugauagacacuggugaaa

SEQ ID NO: 963437 - RNA, 19 nt, Artificial Sequence
  Description of Artificial Sequence: Synthetic oligonucleotide
  Antisense strand to SEQ ID NO: 963436
uuucaccagugucuaucac

SEQ ID NO: 963438 - RNA, 19 nt, Artificial Sequence
  Description of Artificial Sequence: Synthetic oligonucleotide
  Sense strand starting at position 3057 of SEQ ID NO: 913908
gccaacugucaucaugaaa

SEQ ID NO: 963439 - RNA, 19 nt, Artificial Sequence
  Description of Artificial Sequence: Synthetic oligonucleotide
  Antisense strand to SEQ ID NO: 963438
uuucaugaugacaguuggc

SEQ ID NO: 963440 - RNA, 19 nt, Artificial Sequence
  Description of Artificial Sequence: Synthetic oligonucleotide
  Sense strand starting at position 3750 of SEQ ID NO: 913908
uugcaaucuguagccguua

SEQ ID NO: 963441 - RNA, 19 nt, Artificial Sequence
  Description of Artificial Sequence: Synthetic oligonucleotide
  Antisense strand to SEQ ID NO: 963440
uaacggcuacagauugcaa

SEQ ID NO: 963442 - RNA, 19 nt, Artificial Sequence
  Description of Artificial Sequence: Synthetic oligonucleotide
  Sense strand starting at position 2191 of SEQ ID NO: 913908
cugugaucaugacccaaga

SEQ ID NO: 963443 - RNA, 19 nt, Artificial Sequence
  Description of Artificial Sequence: Synthetic oligonucleotide
  Antisense strand to SEQ ID NO: 963442
ucuugggucaugaucacag

SEQ ID NO: 963444 - RNA, 19 nt, Artificial Sequence
  Description of Artificial Sequence: Synthetic oligonucleotide
  Sense strand starting at position 3962 of SEQ ID NO: 913908
uguguagucgagucuuggu

SEQ ID NO: 963445 - RNA, 19 nt, Artificial Sequence
  Description of Artificial Sequence: Synthetic oligonucleotide
  Antisense strand to SEQ ID NO: 963444
accaagacucgacuacaca

SEQ ID NO: 963446 - RNA, 19 nt, Artificial Sequence
  Description of Artificial Sequence: Synthetic oligonucleotide
  Sense strand starting at position 1731 of SEQ ID NO: 913908
gucuacugaccugaucuau

SEQ ID NO: 963447 - RNA, 19 nt, Artificial Sequence
  Description of Artificial Sequence: Synthetic oligonucleotide
  Antisense strand to SEQ ID NO: 963446
auagaucaggucaguagac

SEQ ID NO: 963448 - RNA, 19 nt, Artificial Sequence
  Description of Artificial Sequence: Synthetic oligonucleotide
  Sense strand starting at position 2189 of SEQ ID NO: 913908
agcugugaucaugacccaa

SEQ ID NO: 963449 - RNA, 19 nt, Artificial Sequence
  Description of Artificial Sequence: Synthetic oligonucleotide
  Antisense strand to SEQ ID NO: 963448
uugggucaugaucacagcu

SEQ ID NO: 963450 - RNA, 19 nt, Artificial Sequence
  Description of Artificial Sequence: Synthetic oligonucleotide
  Sense strand starting at position 2878 of SEQ ID NO: 913908
agaacaaggucugccaaua

SEQ ID NO: 963451 - RNA, 19 nt, Artificial Sequence
  Description of Artificial Sequence: Synthetic oligonucleotide
  Antisense strand to SEQ ID NO: 963450
uauuggcagaccuuguucu

SEQ ID NO: 963452 - RNA, 19 nt, Artificial Sequence
  Description of Artificial Sequence: Synthetic oligonucleotide
  Sense strand starting at position 254 of SEQ ID NO: 913908
guguuuaucggcucgagua

SEQ ID NO: 963453 - RNA, 19 nt, Artificial Sequence
  Description of Artificial Sequence: Synthetic oligonucleotide
  Antisense strand to SEQ ID NO: 963452
uacucgagccgauaaacac

SEQ ID NO: 963454 - RNA, 19 nt, Artificial Sequence
  Description of Artificial Sequence: Synthetic oligonucleotide
  Sense strand starting at position 3290 of SEQ ID NO: 913908
ggaguaagaugaguaguau

SEQ ID NO: 963455 - RNA, 19 nt, Artificial Sequence
  Description of Artificial Sequence: Synthetic oligonucleotide
  Antisense strand to SEQ ID NO: 963454
auacuacucaucuuacucc

SEQ ID NO: 963456 - RNA, 19 nt, Artificial Sequence
  Description of Artificial Sequence: Synthetic oligonucleotide
  Sense strand starting at position 1051 of SEQ ID NO: 913908
ugagguuauaguggauaua

SEQ ID NO: 963457 - RNA, 19 nt, Artificial Sequence
  Description of Artificial Sequence: Synthetic oligonucleotide
  Antisense strand to SEQ ID NO: 963456
uauauccacuauaaccuca

SEQ ID NO: 963458 - RNA, 19 nt, Artificial Sequence
  Description of Artificial Sequence: Synthetic oligonucleotide
  Sense strand starting at position 646 of SEQ ID NO: 913908
uuuaauggagugugauaga

SEQ ID NO: 963459 - RNA, 19 nt, Artificial Sequence
  Description of Artificial Sequence: Synthetic oligonucleotide
  Antisense strand to SEQ ID NO: 963458
ucuaucacacuccauuaaa

SEQ ID NO: 963460 - RNA, 19 nt, Artificial Sequence
  Description of Artificial Sequence: Synthetic oligonucleotide
  Sense strand starting at position 656 of SEQ ID NO: 913908
ugugauagacacuggugaa

SEQ ID NO: 963461 - RNA, 19 nt, Artificial Sequence
  Description of Artificial Sequence: Synthetic oligonucleotide
  Antisense strand to SEQ ID NO: 963460
uucaccagugucuaucaca

SEQ ID NO: 963462 - RNA, 19 nt, Artificial Sequence
  Description of Artificial Sequence: Synthetic oligonucleotide
  Sense strand starting at position 253 of SEQ ID NO: 913908
gguguuuaucggcucgagu

SEQ ID NO: 963463 - RNA, 19 nt, Artificial Sequence
  Description of Artificial Sequence: Synthetic oligonucleotide
  Antisense strand to SEQ ID NO: 963462
acucgagccgauaaacacc

SEQ ID NO: 963464 - RNA, 19 nt, Artificial Sequence
  Description of Artificial Sequence: Synthetic oligonucleotide
  Sense strand starting at position 2384 of SEQ ID NO: 913908
acccaaagcguuuacaaca

SEQ ID NO: 963465 - RNA, 19 nt, Artificial Sequence
  Description of Artificial Sequence: Synthetic oligonucleotide
  Antisense strand to SEQ ID NO: 963464
uguuguaaacgcuuugggu

SEQ ID NO: 963466 - RNA, 19 nt, Artificial Sequence
  Description of Artificial Sequence: Synthetic oligonucleotide
  Sense strand starting at position 1755 of SEQ ID NO: 913908
ugaucuucucggcaggaua

SEQ ID NO: 963467 - RNA, 19 nt, Artificial Sequence
  Description of Artificial Sequence: Synthetic oligonucleotide
  Antisense strand to SEQ ID NO: 963466
uauccugccgagaagauca

SEQ ID NO: 963468 - RNA, 19 nt, Artificial Sequence
  Description of Artificial Sequence: Synthetic oligonucleotide
  Sense strand starting at position 623 of SEQ ID NO: 913908
cuggaaauguccucacauu

SEQ ID NO: 963469 - RNA, 19 nt, Artificial Sequence
  Description of Artificial Sequence: Synthetic oligonucleotide
  Antisense strand to SEQ ID NO: 963468
aaugugaggacauuuccag

SEQ ID NO: 963470 - RNA, 19 nt, Artificial Sequence
  Description of Artificial Sequence: Synthetic oligonucleotide
  Sense strand starting at position 1668 of SEQ ID NO: 913908
cuauguccauaugugagaa

SEQ ID NO: 963471 - RNA, 19 nt, Artificial Sequence
  Description of Artificial Sequence: Synthetic oligonucleotide
  Antisense strand to SEQ ID NO: 963470
uucucacauauggacauag

SEQ ID NO: 963472 - RNA, 19 nt, Artificial Sequence
  Description of Artificial Sequence: Synthetic oligonucleotide
  Sense strand starting at position 2749 of SEQ ID NO: 913908
guaaucacagcuggacaua

SEQ ID NO: 963473 - RNA, 19 nt, Artificial Sequence
  Description of Artificial Sequence: Synthetic oligonucleotide
  Antisense strand to SEQ ID NO: 963472
uauguccagcugugauuac

SEQ ID NO: 963474 - RNA, 19 nt, Artificial Sequence
  Description of Artificial Sequence: Synthetic oligonucleotide
  Sense strand starting at position 1689 of SEQ ID NO: 913908
ucaauuuccuguguuuguu

SEQ ID NO: 963475 - RNA, 19 nt, Artificial Sequence
  Description of Artificial Sequence: Synthetic oligonucleotide
  Antisense strand to SEQ ID NO: 963474
aacaaacacaggaaauuga

SEQ ID NO: 963476 - RNA, 19 nt, Artificial Sequence
  Description of Artificial Sequence: Synthetic oligonucleotide
  Sense strand starting at position 262 of SEQ ID NO: 913908
cggcucgaguauuuaucau

SEQ ID NO: 963477 - RNA, 19 nt, Artificial Sequence
  Description of Artificial Sequence: Synthetic oligonucleotide
  Antisense strand to SEQ ID NO: 963476
augauaaauacucgagccg

SEQ ID NO: 963478 - RNA, 19 nt, Artificial Sequence
  Description of Artificial Sequence: Synthetic oligonucleotide
  Sense strand starting at position 3239 of SEQ ID NO: 913908
ugaccuuggcccuaaaugu

SEQ ID NO: 963479 - RNA, 19 nt, Artificial Sequence
  Description of Artificial Sequence: Synthetic oligonucleotide
  Antisense strand to SEQ ID NO: 963478
acauuuagggccaagguca

SEQ ID NO: 963480 - RNA, 19 nt, Artificial Sequence
  Description of Artificial Sequence: Synthetic oligonucleotide
  Sense strand starting at position 338 of SEQ ID NO: 913908
cucugucugcuauaggaca

SEQ ID NO: 963481 - RNA, 19 nt, Artificial Sequence
  Description of Artificial Sequence: Synthetic oligonucleotide
  Antisense strand to SEQ ID NO: 963480
uguccuauagcagacagag

SEQ ID NO: 963482 - RNA, 19 nt, Artificial Sequence
  Description of Artificial Sequence: Synthetic oligonucleotide
  Sense strand starting at position 2748 of SEQ ID NO: 913908
gguaaucacagcuggacau

SEQ ID NO: 963483 - RNA, 19 nt, Artificial Sequence
  Description of Artificial Sequence: Synthetic oligonucleotide
  Antisense strand to SEQ ID NO: 963482
auguccagcugugauuacc

SEQ ID NO: 963484 - RNA, 19 nt, Artificial Sequence
  Description of Artificial Sequence: Synthetic oligonucleotide
  Sense strand starting at position 1692 of SEQ ID NO: 913908
auuuccuguguuuguuauu

SEQ ID NO: 963485 - RNA, 19 nt, Artificial Sequence
  Description of Artificial Sequence: Synthetic oligonucleotide
  Antisense strand to SEQ ID NO: 963484
aauaacaaacacaggaaau

SEQ ID NO: 963486 - RNA, 19 nt, Artificial Sequence
  Description of Artificial Sequence: Synthetic oligonucleotide
  Sense strand starting at position 3056 of SEQ ID NO: 913908
agccaacugucaucaugaa

SEQ ID NO: 963487 - RNA, 19 nt, Artificial Sequence
  Description of Artificial Sequence: Synthetic oligonucleotide
  Antisense strand to SEQ ID NO: 963486
uucaugaugacaguuggcu

SEQ ID NO: 963488 - RNA, 19 nt, Artificial Sequence
  Description of Artificial Sequence: Synthetic oligonucleotide
  Sense strand starting at position 2389 of SEQ ID NO: 913908
aagcguuuacaacaguuaa

SEQ ID NO: 963489 - RNA, 19 nt, Artificial Sequence
  Description of Artificial Sequence: Synthetic oligonucleotide
  Antisense strand to SEQ ID NO: 963488
uuaacuguuguaaacgcuu

SEQ ID NO: 963490 - RNA, 19 nt, Artificial Sequence
  Description of Artificial Sequence: Synthetic oligonucleotide
  Sense strand starting at position 694 of SEQ ID NO: 913909
aagugacgagguuagaauu

SEQ ID NO: 963491 - RNA, 19 nt, Artificial Sequence
  Description of Artificial Sequence: Synthetic oligonucleotide
  Antisense strand to SEQ ID NO: 963490
aauucuaaccucgucacuu

SEQ ID NO: 963492 - RNA, 19 nt, Artificial Sequence
  Description of Artificial Sequence: Synthetic oligonucleotide
  Sense strand starting at position 3312 of SEQ ID NO: 913909
ggaagauugggucaugcau

SEQ ID NO: 963493 - RNA, 19 nt, Artificial Sequence
  Description of Artificial Sequence: Synthetic oligonucleotide
  Antisense strand to SEQ ID NO: 963492
augcaugacccaaucuucc

SEQ ID NO: 963494 - RNA, 19 nt, Artificial Sequence
  Description of Artificial Sequence: Synthetic oligonucleotide
  Sense strand starting at position 3445 of SEQ ID NO: 913909
ggcaguaaagcauacagaa

SEQ ID NO: 963495 - RNA, 19 nt, Artificial Sequence
  Description of Artificial Sequence: Synthetic oligonucleotide
  Antisense strand to SEQ ID NO: 963494
uucuguaugcuuuacugcc

SEQ ID NO: 963496 - RNA, 19 nt, Artificial Sequence
  Description of Artificial Sequence: Synthetic oligonucleotide
  Sense strand starting at position 3166 of SEQ ID NO: 913909
agagaauaaucugcuuuaa

SEQ ID NO: 963497 - RNA, 19 nt, Artificial Sequence
  Description of Artificial Sequence: Synthetic oligonucleotide
  Antisense strand to SEQ ID NO: 963496
uuaaagcagauuauucucu

SEQ ID NO: 963498 - RNA, 19 nt, Artificial Sequence
  Description of Artificial Sequence: Synthetic oligonucleotide
  Sense strand starting at position 783 of SEQ ID NO: 913909
agaguucuaaugugagaaa

SEQ ID NO: 963499 - RNA, 19 nt, Artificial Sequence
  Description of Artificial Sequence: Synthetic oligonucleotide
  Antisense strand to SEQ ID NO: 963498
uuucucacauuagaacucu

SEQ ID NO: 963500 - RNA, 19 nt, Artificial Sequence
  Description of Artificial Sequence: Synthetic oligonucleotide
  Sense strand starting at position 685 of SEQ ID NO: 913909
acagauaucaagugacgag

SEQ ID NO: 963501 - RNA, 19 nt, Artificial Sequence
  Description of Artificial Sequence: Synthetic oligonucleotide
  Antisense strand to SEQ ID NO: 963500
cucgucacuugauaucugu

SEQ ID NO: 963502 - RNA, 19 nt, Artificial Sequence
  Description of Artificial Sequence: Synthetic oligonucleotide
  Sense strand starting at position 1110 of SEQ ID NO: 913909
ugaugaaucugagcuaaau

SEQ ID NO: 963503 - RNA, 19 nt, Artificial Sequence
  Description of Artificial Sequence: Synthetic oligonucleotide
  Antisense strand to SEQ ID NO: 963502
auuuagcucagauucauca

SEQ ID NO: 963504 - RNA, 19 nt, Artificial Sequence
  Description of Artificial Sequence: Synthetic oligonucleotide
  Sense strand starting at position 2570 of SEQ ID NO: 913909
ggagcugugauagaguaac

SEQ ID NO: 963505 - RNA, 19 nt, Artificial Sequence
  Description of Artificial Sequence: Synthetic oligonucleotide
  Antisense strand to SEQ ID NO: 963504
guuacucuaucacagcucc

SEQ ID NO: 963506 - RNA, 19 nt, Artificial Sequence
  Description of Artificial Sequence: Synthetic oligonucleotide
  Sense strand starting at position 2969 of SEQ ID NO: 913909
cgacaaaggaaaugucuua

SEQ ID NO: 963507 - RNA, 19 nt, Artificial Sequence
  Description of Artificial Sequence: Synthetic oligonucleotide
  Antisense strand to SEQ ID NO: 963506
uaagacauuuccuuugucg

SEQ ID NO: 963508 - RNA, 19 nt, Artificial Sequence
  Description of Artificial Sequence: Synthetic oligonucleotide
  Sense strand starting at position 916 of SEQ ID NO: 913909
uggguaaccucucuggaaa

SEQ ID NO: 963509 - RNA, 19 nt, Artificial Sequence
  Description of Artificial Sequence: Synthetic oligonucleotide
  Antisense strand to SEQ ID NO: 963508
uuuccagagagguuaccca

SEQ ID NO: 963510 - RNA, 19 nt, Artificial Sequence
  Description of Artificial Sequence: Synthetic oligonucleotide
  Sense strand starting at position 3266 of SEQ ID NO: 913909
cuaguugauugacuaauua

SEQ ID NO: 963511 - RNA, 19 nt, Artificial Sequence
  Description of Artificial Sequence: Synthetic oligonucleotide
  Antisense strand to SEQ ID NO: 963510
uaauuagucaaucaacuag

SEQ ID NO: 963512 - RNA, 19 nt, Artificial Sequence
  Description of Artificial Sequence: Synthetic oligonucleotide
  Sense strand starting at position 3259 of SEQ ID NO: 913909
agacaagcuaguugauuga

SEQ ID NO: 963513 - RNA, 19 nt, Artificial Sequence
  Description of Artificial Sequence: Synthetic oligonucleotide
  Antisense strand to SEQ ID NO: 963512
ucaaucaacuagcuugucu

SEQ ID NO: 963514 - RNA, 19 nt, Artificial Sequence
  Description of Artificial Sequence: Synthetic oligonucleotide
  Sense strand starting at position 1197 of SEQ ID NO: 913909
ugugaauguaugugagaaa

SEQ ID NO: 963515 - RNA, 19 nt, Artificial Sequence
  Description of Artificial Sequence: Synthetic oligonucleotide
  Antisense strand to SEQ ID NO: 963514
uuucucacauacauucaca

SEQ ID NO: 963516 - RNA, 19 nt, Artificial Sequence
  Description of Artificial Sequence: Synthetic oligonucleotide
  Sense strand starting at position 3263 of SEQ ID NO: 913909
aagcuaguugauugacuaa

SEQ ID NO: 963517 - RNA, 19 nt, Artificial Sequence
  Description of Artificial Sequence: Synthetic oligonucleotide
  Antisense strand to SEQ ID NO: 963516
uuagucaaucaacuagcuu

SEQ ID NO: 963518 - RNA, 19 nt, Artificial Sequence
  Description of Artificial Sequence: Synthetic oligonucleotide
  Sense strand starting at position 2380 of SEQ ID NO: 913909
gucagcacacucgaaugau

SEQ ID NO: 963519 - RNA, 19 nt, Artificial Sequence
  Description of Artificial Sequence: Synthetic oligonucleotide
  Antisense strand to SEQ ID NO: 963518
aucauucgagugugcugac

SEQ ID NO: 963520 - RNA, 19 nt, Artificial Sequence
  Description of Artificial Sequence: Synthetic oligonucleotide
  Sense strand starting at position 1726 of SEQ ID NO: 913909
cuauauucugugggacacu

SEQ ID NO: 963521 - RNA, 19 nt, Artificial Sequence
  Description of Artificial Sequence: Synthetic oligonucleotide
  Antisense strand to SEQ ID NO: 963520
agugucccacagaauauag

SEQ ID NO: 963522 - RNA, 19 nt, Artificial Sequence
  Description of Artificial Sequence: Synthetic oligonucleotide
  Sense strand starting at position 2117 of SEQ ID NO: 913909
ucgcgagaagcguuaguuu

SEQ ID NO: 963523 - RNA, 19 nt, Artificial Sequence
  Description of Artificial Sequence: Synthetic oligonucleotide
  Antisense strand to SEQ ID NO: 963522
aaacuaacgcuucucgcga

SEQ ID NO: 963524 - RNA, 19 nt, Artificial Sequence
  Description of Artificial Sequence: Synthetic oligonucleotide
  Sense strand starting at position 2915 of SEQ ID NO: 913909
gggcguaaucuuuaagauu

SEQ ID NO: 963525 - RNA, 19 nt, Artificial Sequence
  Description of Artificial Sequence: Synthetic oligonucleotide
  Antisense strand to SEQ ID NO: 963524
aaucuuaaagauuacgccc

SEQ ID NO: 963526 - RNA, 19 nt, Artificial Sequence
  Description of Artificial Sequence: Synthetic oligonucleotide
  Sense strand starting at position 2119 of SEQ ID NO: 913909
gcgagaagcguuaguuuag

SEQ ID NO: 963527 - RNA, 19 nt, Artificial Sequence
  Description of Artificial Sequence: Synthetic oligonucleotide
  Antisense strand to SEQ ID NO: 963526
cuaaacuaacgcuucucgc

SEQ ID NO: 963528 - RNA, 19 nt, Artificial Sequence
  Description of Artificial Sequence: Synthetic oligonucleotide
  Sense strand starting at position 3262 of SEQ ID NO: 913909
caagcuaguugauugacua

SEQ ID NO: 963529 - RNA, 19 nt, Artificial Sequence
  Description of Artificial Sequence: Synthetic oligonucleotide
  Antisense strand to SEQ ID NO: 963528
uagucaaucaacuagcuug

SEQ ID NO: 963530 - RNA, 19 nt, Artificial Sequence
  Description of Artificial Sequence: Synthetic oligonucleotide
  Sense strand starting at position 2728 of SEQ ID NO: 913909
ucucuuaaguagcuaggaa

SEQ ID NO: 963531 - RNA, 19 nt, Artificial Sequence
  Description of Artificial Sequence: Synthetic oligonucleotide
  Antisense strand to SEQ ID NO: 963530
uuccuagcuacuuaagaga

SEQ ID NO: 963532 - RNA, 19 nt, Artificial Sequence
  Description of Artificial Sequence: Synthetic oligonucleotide
  Sense strand starting at position 40 of SEQ ID NO: 913909
caagacaguucccugguua

SEQ ID NO: 963533 - RNA, 19 nt, Artificial Sequence
  Description of Artificial Sequence: Synthetic oligonucleotide
  Antisense strand to SEQ ID NO: 963532
uaaccagggaacugucuug

SEQ ID NO: 963534 - RNA, 19 nt, Artificial Sequence
  Description of Artificial Sequence: Synthetic oligonucleotide
  Sense strand starting at position 41 of SEQ ID NO: 913909
aagacaguucccugguuau

SEQ ID NO: 963535 - RNA, 19 nt, Artificial Sequence
  Description of Artificial Sequence: Synthetic oligonucleotide
  Antisense strand to SEQ ID NO: 963534
auaaccagggaacugucuu

SEQ ID NO: 963536 - RNA, 19 nt, Artificial Sequence
  Description of Artificial Sequence: Synthetic oligonucleotide
  Sense strand starting at position 1179 of SEQ ID NO: 913909
guagacucaguuuaugcau

SEQ ID NO: 963537 - RNA, 19 nt, Artificial Sequence
  Description of Artificial Sequence: Synthetic oligonucleotide
  Antisense strand to SEQ ID NO: 963536
augcauaaacugagucuac

SEQ ID NO: 963538 - RNA, 19 nt, Artificial Sequence
  Description of Artificial Sequence: Synthetic oligonucleotide
  Sense strand starting at position 3163 of SEQ ID NO: 913909
gcuagagaauaaucugcuu

SEQ ID NO: 963539 - RNA, 19 nt, Artificial Sequence
  Description of Artificial Sequence: Synthetic oligonucleotide
  Antisense strand to SEQ ID NO: 963538
aagcagauuauucucuagc

SEQ ID NO: 963540 - RNA, 19 nt, Artificial Sequence
  Description of Artificial Sequence: Synthetic oligonucleotide
  Sense strand starting at position 847 of SEQ ID NO: 913909
auugcaaaccugugacuca

SEQ ID NO: 963541 - RNA, 19 nt, Artificial Sequence
  Description of Artificial Sequence: Synthetic oligonucleotide
  Antisense strand to SEQ ID NO: 963540
ugagucacagguuugcaau

SEQ ID NO: 963542 - RNA, 19 nt, Artificial Sequence
  Description of Artificial Sequence: Synthetic oligonucleotide
  Sense strand starting at position 554 of SEQ ID NO: 913909
gguuauaaucgcuaacucu

SEQ ID NO: 963543 - RNA, 19 nt, Artificial Sequence
  Description of Artificial Sequence: Synthetic oligonucleotide
  Antisense strand to SEQ ID NO: 963542
agaguuagcgauuauaacc

SEQ ID NO: 963544 - RNA, 19 nt, Artificial Sequence
  Description of Artificial Sequence: Synthetic oligonucleotide
  Sense strand starting at position 2592 of SEQ ID NO: 913909
gguggaguugggugguaaa

SEQ ID NO: 963545 - RNA, 19 nt, Artificial Sequence
  Description of Artificial Sequence: Synthetic oligonucleotide
  Antisense strand to SEQ ID NO: 963544
uuuaccacccaacuccacc

SEQ ID NO: 963546 - RNA, 19 nt, Artificial Sequence
  Description of Artificial Sequence: Synthetic oligonucleotide
  Sense strand starting at position 382 of SEQ ID NO: 913909
ucgucuuaaguguaaauac

SEQ ID NO: 963547 - RNA, 19 nt, Artificial Sequence
  Description of Artificial Sequence: Synthetic oligonucleotide
  Antisense strand to SEQ ID NO: 963546
guauuuacacuuaagacga

SEQ ID NO: 963548 - RNA, 19 nt, Artificial Sequence
  Description of Artificial Sequence: Synthetic oligonucleotide
  Sense strand starting at position 1176 of SEQ ID NO: 913909
acgguagacucaguuuaug

SEQ ID NO: 963549 - RNA, 19 nt, Artificial Sequence
  Description of Artificial Sequence: Synthetic oligonucleotide
  Antisense strand to SEQ ID NO: 963548
cauaaacugagucuaccgu

SEQ ID NO: 963550 - RNA, 19 nt, Artificial Sequence
  Description of Artificial Sequence: Synthetic oligonucleotide
  Sense strand starting at position 2832 of SEQ ID NO: 913909
gagcucaagugagcucaau

SEQ ID NO: 963551 - RNA, 19 nt, Artificial Sequence
  Description of Artificial Sequence: Synthetic oligonucleotide
  Antisense strand to SEQ ID NO: 963550
auugagcucacuugagcuc

SEQ ID NO: 963552 - RNA, 19 nt, Artificial Sequence
  Description of Artificial Sequence: Synthetic oligonucleotide
  Sense strand starting at position 2130 of SEQ ID NO: 913909
uaguuuagguucuuaaagu

SEQ ID NO: 963553 - RNA, 19 nt, Artificial Sequence
  Description of Artificial Sequence: Synthetic oligonucleotide
  Antisense strand to SEQ ID NO: 963552
acuuuaagaaccuaaacua

SEQ ID NO: 963554 - RNA, 19 nt, Artificial Sequence
  Description of Artificial Sequence: Synthetic oligonucleotide
  Sense strand starting at position 667 of SEQ ID NO: 913909
uaguuugcccaagguaaca

SEQ ID NO: 963555 - RNA, 19 nt, Artificial Sequence
  Description of Artificial Sequence: Synthetic oligonucleotide
  Antisense strand to SEQ ID NO: 963554
uguuaccuugggcaaacua

SEQ ID NO: 963556 - RNA, 19 nt, Artificial Sequence
  Description of Artificial Sequence: Synthetic oligonucleotide
  Sense strand starting at position 2871 of SEQ ID NO: 913909
acaaacugaugggauuaua

SEQ ID NO: 963557 - RNA, 19 nt, Artificial Sequence
  Description of Artificial Sequence: Synthetic oligonucleotide
  Antisense strand to SEQ ID NO: 963556
uauaaucccaucaguuugu

SEQ ID NO: 963558 - RNA, 19 nt, Artificial Sequence
  Description of Artificial Sequence: Synthetic oligonucleotide
  Sense strand starting at position 2421 of SEQ ID NO: 913909
cucacaaacugauagggaa

SEQ ID NO: 963559 - RNA, 19 nt, Artificial Sequence
  Description of Artificial Sequence: Synthetic oligonucleotide
  Antisense strand to SEQ ID NO: 963558
uucccuaucaguuugugag

SEQ ID NO: 963560 - RNA, 19 nt, Artificial Sequence
  Description of Artificial Sequence: Synthetic oligonucleotide
  Sense strand starting at position 3345 of SEQ ID NO: 913909
guuaucauguuucuaccau

SEQ ID NO: 963561 - RNA, 19 nt, Artificial Sequence
  Description of Artificial Sequence: Synthetic oligonucleotide
  Antisense strand to SEQ ID NO: 963560
augguagaaacaugauaac

SEQ ID NO: 963562 - RNA, 19 nt, Artificial Sequence
  Description of Artificial Sequence: Synthetic oligonucleotide
  Sense strand starting at position 2201 of SEQ ID NO: 913909
ggcugucuucugcaauuag

SEQ ID NO: 963563 - RNA, 19 nt, Artificial Sequence
  Description of Artificial Sequence: Synthetic oligonucleotide
  Antisense strand to SEQ ID NO: 963562
cuaauugcagaagacagcc

SEQ ID NO: 963564 - RNA, 19 nt, Artificial Sequence
  Description of Artificial Sequence: Synthetic oligonucleotide
  Sense strand starting at position 2908 of SEQ ID NO: 913909
uggcuaagggcguaaucuu

SEQ ID NO: 963565 - RNA, 19 nt, Artificial Sequence
  Description of Artificial Sequence: Synthetic oligonucleotide
  Antisense strand to SEQ ID NO: 963564
aagauuacgcccuuagcca

SEQ ID NO: 963566 - RNA, 19 nt, Artificial Sequence
  Description of Artificial Sequence: Synthetic oligonucleotide
  Sense strand starting at position 1185 of SEQ ID NO: 913909
ucaguuuaugcaugugaau

SEQ ID NO: 963567 - RNA, 19 nt, Artificial Sequence
  Description of Artificial Sequence: Synthetic oligonucleotide
  Antisense strand to SEQ ID NO: 963566
auucacaugcauaaacuga

SEQ ID NO: 963568 - RNA, 19 nt, Artificial Sequence
  Description of Artificial Sequence: Synthetic oligonucleotide
  Sense strand starting at position 39 of SEQ ID NO: 913909
gcaagacaguucccugguu

SEQ ID NO: 963569 - RNA, 19 nt, Artificial Sequence
  Description of Artificial Sequence: Synthetic oligonucleotide
  Antisense strand to SEQ ID NO: 963568
aaccagggaacugucuugc

SEQ ID NO: 963570 - RNA, 19 nt, Artificial Sequence
  Description of Artificial Sequence: Synthetic oligonucleotide
  Sense strand starting at position 3900 of SEQ ID NO: 913910
gaguacuuugcacagacaa

SEQ ID NO: 963571 - RNA, 19 nt, Artificial Sequence
  Description of Artificial Sequence: Synthetic oligonucleotide
  Antisense strand to SEQ ID NO: 963570
uugucugugcaaaguacuc

SEQ ID NO: 963572 - RNA, 19 nt, Artificial Sequence
  Description of Artificial Sequence: Synthetic oligonucleotide
  Sense strand starting at position 3762 of SEQ ID NO: 913910
ugugauagucuccacaaag

SEQ ID NO: 963573 - RNA, 19 nt, Artificial Sequence
  Description of Artificial Sequence: Synthetic oligonucleotide
  Antisense strand to SEQ ID NO: 963572
cuuuguggagacuaucaca

SEQ ID NO: 963574 - RNA, 19 nt, Artificial Sequence
  Description of Artificial Sequence: Synthetic oligonucleotide
  Sense strand starting at position 3132 of SEQ ID NO: 913910
uugugagucgucuccugua

SEQ ID NO: 963575 - RNA, 19 nt, Artificial Sequence
  Description of Artificial Sequence: Synthetic oligonucleotide
  Antisense strand to SEQ ID NO: 963574
uacaggagacgacucacaa

SEQ ID NO: 963576 - RNA, 19 nt, Artificial Sequence
  Description of Artificial Sequence: Synthetic oligonucleotide
  Sense strand starting at position 1118 of SEQ ID NO: 913910
aguaaaucauaguugagac

SEQ ID NO: 963577 - RNA, 19 nt, Artificial Sequence
  Description of Artificial Sequence: Synthetic oligonucleotide
  Antisense strand to SEQ ID NO: 963576
gucucaacuaugauuuacu

SEQ ID NO: 963578 - RNA, 19 nt, Artificial Sequence
  Description of Artificial Sequence: Synthetic oligonucleotide
  Sense strand starting at position 3420 of SEQ ID NO: 913910
guuugugagagguaaauau

SEQ ID NO: 963579 - RNA, 19 nt, Artificial Sequence
  Description of Artificial Sequence: Synthetic oligonucleotide
  Antisense strand to SEQ ID NO: 963578
auauuuaccucucacaaac

SEQ ID NO: 963580 - RNA, 19 nt, Artificial Sequence
  Description of Artificial Sequence: Synthetic oligonucleotide
  Sense strand starting at position 23 of SEQ ID NO: 913910
uccugaucagaucagcuua

SEQ ID NO: 963581 - RNA, 19 nt, Artificial Sequence
  Description of Artificial Sequence: Synthetic oligonucleotide
  Antisense strand to SEQ ID NO: 963580
uaagcugaucugaucagga

SEQ ID NO: 963582 - RNA, 19 nt, Artificial Sequence
  Description of Artificial Sequence: Synthetic oligonucleotide
  Sense strand starting at position 25 of SEQ ID NO: 913910
cugaucagaucagcuuaaa

SEQ ID NO: 963583 - RNA, 19 nt, Artificial Sequence
  Description of Artificial Sequence: Synthetic oligonucleotide
  Antisense strand to SEQ ID NO: 963582
uuuaagcugaucugaucag

SEQ ID NO: 963584 - RNA, 19 nt, Artificial Sequence
  Description of Artificial Sequence: Synthetic oligonucleotide
  Sense strand starting at position 3940 of SEQ ID NO: 913910
ggcaguaaugcggcuguca

SEQ ID NO: 963585 - RNA, 19 nt, Artificial Sequence
  Description of Artificial Sequence: Synthetic oligonucleotide
  Antisense strand to SEQ ID NO: 963584
ugacagccgcauuacugcc

SEQ ID NO: 963586 - RNA, 19 nt, Artificial Sequence
  Description of Artificial Sequence: Synthetic oligonucleotide
  Sense strand starting at position 1126 of SEQ ID NO: 913910
auaguugagacacaguguu

SEQ ID NO: 963587 - RNA, 19 nt, Artificial Sequence
  Description of Artificial Sequence: Synthetic oligonucleotide
  Antisense strand to SEQ ID NO: 963586
aacacugugucucaacuau

SEQ ID NO: 963588 - RNA, 19 nt, Artificial Sequence
  Description of Artificial Sequence: Synthetic oligonucleotide
  Sense strand starting at position 3272 of SEQ ID NO: 913910
gccugaguuccugagagau

SEQ ID NO: 963589 - RNA, 19 nt, Artificial Sequence
  Description of Artificial Sequence: Synthetic oligonucleotide
  Antisense strand to SEQ ID NO: 963588
aucucucaggaacucaggc

SEQ ID NO: 963590 - RNA, 19 nt, Artificial Sequence
  Description of Artificial Sequence: Synthetic oligonucleotide
  Sense strand starting at position 3327 of SEQ ID NO: 913910
gucagauaucuccaagcca

SEQ ID NO: 963591 - RNA, 19 nt, Artificial Sequence
  Description of Artificial Sequence: Synthetic oligonucleotide
  Antisense strand to SEQ ID NO: 963590
uggcuuggagauaucugac

SEQ ID NO: 963592 - RNA, 19 nt, Artificial Sequence
  Description of Artificial Sequence: Synthetic oligonucleotide
  Sense strand starting at position 3000 of SEQ ID NO: 913910
cugggauucgggcagagua

SEQ ID NO: 963593 - RNA, 19 nt, Artificial Sequence
  Description of Artificial Sequence: Synthetic oligonucleotide
  Antisense strand to SEQ ID NO: 963592
uacucugcccgaaucccag

SEQ ID NO: 963594 - RNA, 19 nt, Artificial Sequence
  Description of Artificial Sequence: Synthetic oligonucleotide
  Sense strand starting at position 1132 of SEQ ID NO: 913910
gagacacaguguuuacuua

SEQ ID NO: 963595 - RNA, 19 nt, Artificial Sequence
  Description of Artificial Sequence: Synthetic oligonucleotide
  Antisense strand to SEQ ID NO: 963594
uaaguaaacacugugucuc

SEQ ID NO: 963596 - RNA, 19 nt, Artificial Sequence
  Description of Artificial Sequence: Synthetic oligonucleotide
  Sense strand starting at position 93 of SEQ ID NO: 913910
gaggucaauuagucaccua

SEQ ID NO: 963597 - RNA, 19 nt, Artificial Sequence
  Description of Artificial Sequence: Synthetic oligonucleotide
  Antisense strand to SEQ ID NO: 963596
uaggugacuaauugaccuc

SEQ ID NO: 963598 - RNA, 19 nt, Artificial Sequence
  Description of Artificial Sequence: Synthetic oligonucleotide
  Sense strand starting at position 3300 of SEQ ID NO: 913910
gcagaagaccuuuguauaa

SEQ ID NO: 963599 - RNA, 19 nt, Artificial Sequence
  Description of Artificial Sequence: Synthetic oligonucleotide
  Antisense strand to SEQ ID NO: 963598
uuauacaaaggucuucugc

SEQ ID NO: 963600 - RNA, 19 nt, Artificial Sequence
  Description of Artificial Sequence: Synthetic oligonucleotide
  Sense strand starting at position 219 of SEQ ID NO: 913910
acauucuaacggugacaug

SEQ ID NO: 963601 - RNA, 19 nt, Artificial Sequence
  Description of Artificial Sequence: Synthetic oligonucleotide
  Antisense strand to SEQ ID NO: 963600
caugucaccguuagaaugu

SEQ ID NO: 963602 - RNA, 19 nt, Artificial Sequence
  Description of Artificial Sequence: Synthetic oligonucleotide
  Sense strand starting at position 3560 of SEQ ID NO: 913910
caguguuagcaugacauau

SEQ ID NO: 963603 - RNA, 19 nt, Artificial Sequence
  Description of Artificial Sequence: Synthetic oligonucleotide
  Antisense strand to SEQ ID NO: 963602
auaugucaugcuaacacug

SEQ ID NO: 963604 - RNA, 19 nt, Artificial Sequence
  Description of Artificial Sequence: Synthetic oligonucleotide
  Sense strand starting at position 96 of SEQ ID NO: 913910
gucaauuagucaccuacaa

SEQ ID NO: 963605 - RNA, 19 nt, Artificial Sequence
  Description of Artificial Sequence: Synthetic oligonucleotide
  Antisense strand to SEQ ID NO: 963604
uuguaggugacuaauugac

SEQ ID NO: 963606 - RNA, 19 nt, Artificial Sequence
  Description of Artificial Sequence: Synthetic oligonucleotide
  Sense strand starting at position 880 of SEQ ID NO: 913910
ggagaucuguucucacuug

SEQ ID NO: 963607 - RNA, 19 nt, Artificial Sequence
  Description of Artificial Sequence: Synthetic oligonucleotide
  Antisense strand to SEQ ID NO: 963606
caagugagaacagaucucc

SEQ ID NO: 963608 - RNA, 19 nt, Artificial Sequence
  Description of Artificial Sequence: Synthetic oligonucleotide
  Sense strand starting at position 3761 of SEQ ID NO: 913910
cugugauagucuccacaaa

SEQ ID NO: 963609 - RNA, 19 nt, Artificial Sequence
  Description of Artificial Sequence: Synthetic oligonucleotide
  Antisense strand to SEQ ID NO: 963608
uuuguggagacuaucacag

SEQ ID NO: 963610 - RNA, 19 nt, Artificial Sequence
  Description of Artificial Sequence: Synthetic oligonucleotide
  Sense strand starting at position 3883 of SEQ ID NO: 913910
ggguuuggugccuaccaga

SEQ ID NO: 963611 - RNA, 19 nt, Artificial Sequence
  Description of Artificial Sequence: Synthetic oligonucleotide
  Antisense strand to SEQ ID NO: 963610
ucugguaggcaccaaaccc

SEQ ID NO: 963612 - RNA, 19 nt, Artificial Sequence
  Description of Artificial Sequence: Synthetic oligonucleotide
  Sense strand starting at position 3427 of SEQ ID NO: 913910
agagguaaauaugaaagga

SEQ ID NO: 963613 - RNA, 19 nt, Artificial Sequence
  Description of Artificial Sequence: Synthetic oligonucleotide
  Antisense strand to SEQ ID NO: 963612
uccuuucauauuuaccucu

SEQ ID NO: 963614 - RNA, 19 nt, Artificial Sequence
  Description of Artificial Sequence: Synthetic oligonucleotide
  Sense strand starting at position 700 of SEQ ID NO: 913910
ggucaauuugcaugugcuu

SEQ ID NO: 963615 - RNA, 19 nt, Artificial Sequence
  Description of Artificial Sequence: Synthetic oligonucleotide
  Antisense strand to SEQ ID NO: 963614
aagcacaugcaaauugacc

SEQ ID NO: 963616 - RNA, 19 nt, Artificial Sequence
  Description of Artificial Sequence: Synthetic oligonucleotide
  Sense strand starting at position 3371 of SEQ ID NO: 913910
ugucuuuaccuguaaaugu

SEQ ID NO: 963617 - RNA, 19 nt, Artificial Sequence
  Description of Artificial Sequence: Synthetic oligonucleotide
  Antisense strand to SEQ ID NO: 963616
acauuuacagguaaagaca

SEQ ID NO: 963618 - RNA, 19 nt, Artificial Sequence
  Description of Artificial Sequence: Synthetic oligonucleotide
  Sense strand starting at position 1136 of SEQ ID NO: 913910
cacaguguuuacuuacgaa

SEQ ID NO: 963619 - RNA, 19 nt, Artificial Sequence
  Description of Artificial Sequence: Synthetic oligonucleotide
  Antisense strand to SEQ ID NO: 963618
uucguaaguaaacacugug

SEQ ID NO: 963620 - RNA, 19 nt, Artificial Sequence
  Description of Artificial Sequence: Synthetic oligonucleotide
  Sense strand starting at position 3411 of SEQ ID NO: 913910
aaggcaaguguuugugaga

SEQ ID NO: 963621 - RNA, 19 nt, Artificial Sequence
  Description of Artificial Sequence: Synthetic oligonucleotide
  Antisense strand to SEQ ID NO: 963620
ucucacaaacacuugccuu

SEQ ID NO: 963622 - RNA, 19 nt, Artificial Sequence
  Description of Artificial Sequence: Synthetic oligonucleotide
  Sense strand starting at position 3418 of SEQ ID NO: 913910
guguuugugagagguaaau

SEQ ID NO: 963623 - RNA, 19 nt, Artificial Sequence
  Description of Artificial Sequence: Synthetic oligonucleotide
  Antisense strand to SEQ ID NO: 963622
auuuaccucucacaaacac

SEQ ID NO: 963624 - RNA, 19 nt, Artificial Sequence
  Description of Artificial Sequence: Synthetic oligonucleotide
  Sense strand starting at position 916 of SEQ ID NO: 913910
gccaguggagccugacaau

SEQ ID NO: 963625 - RNA, 19 nt, Artificial Sequence
  Description of Artificial Sequence: Synthetic oligonucleotide
  Antisense strand to SEQ ID NO: 963624
auugucaggcuccacuggc

SEQ ID NO: 963626 - RNA, 19 nt, Artificial Sequence
  Description of Artificial Sequence: Synthetic oligonucleotide
  Sense strand starting at position 3666 of SEQ ID NO: 913910
gcguuaagaauaugagguu

SEQ ID NO: 963627 - RNA, 19 nt, Artificial Sequence
  Description of Artificial Sequence: Synthetic oligonucleotide
  Antisense strand to SEQ ID NO: 963626
aaccucauauucuuaacgc

SEQ ID NO: 963628 - RNA, 19 nt, Artificial Sequence
  Description of Artificial Sequence: Synthetic oligonucleotide
  Sense strand starting at position 615 of SEQ ID NO: 913910
aagcguccucagcaacauu

SEQ ID NO: 963629 - RNA, 19 nt, Artificial Sequence
  Description of Artificial Sequence: Synthetic oligonucleotide
  Antisense strand to SEQ ID NO: 963628
aauguugcugaggacgcuu

SEQ ID NO: 963630 - RNA, 19 nt, Artificial Sequence
  Description of Artificial Sequence: Synthetic oligonucleotide
  Sense strand starting at position 3722 of SEQ ID NO: 913910
ucugauuggcguggaugau

SEQ ID NO: 963631 - RNA, 19 nt, Artificial Sequence
  Description of Artificial Sequence: Synthetic oligonucleotide
  Antisense strand to SEQ ID NO: 963630
aucauccacgccaaucaga

SEQ ID NO: 963632 - RNA, 19 nt, Artificial Sequence
  Description of Artificial Sequence: Synthetic oligonucleotide
  Sense strand starting at position 3721 of SEQ ID NO: 913910
gucugauuggcguggauga

SEQ ID NO: 963633 - RNA, 19 nt, Artificial Sequence
  Description of Artificial Sequence: Synthetic oligonucleotide
  Antisense strand to SEQ ID NO: 963632
ucauccacgccaaucagac

SEQ ID NO: 963634 - RNA, 19 nt, Artificial Sequence
  Description of Artificial Sequence: Synthetic oligonucleotide
  Sense strand starting at position 3034 of SEQ ID NO: 913910
agcuaaugcugguuucuua

SEQ ID NO: 963635 - RNA, 19 nt, Artificial Sequence
  Description of Artificial Sequence: Synthetic oligonucleotide
  Antisense strand to SEQ ID NO: 963634
uaagaaaccagcauuagcu

SEQ ID NO: 963636 - RNA, 19 nt, Artificial Sequence
  Description of Artificial Sequence: Synthetic oligonucleotide
  Sense strand starting at position 3137 of SEQ ID NO: 913910
agucgucuccuguacggau

SEQ ID NO: 963637 - RNA, 19 nt, Artificial Sequence
  Description of Artificial Sequence: Synthetic oligonucleotide
  Antisense strand to SEQ ID NO: 963636
auccguacaggagacgacu

SEQ ID NO: 963638 - RNA, 19 nt, Artificial Sequence
  Description of Artificial Sequence: Synthetic oligonucleotide
  Sense strand starting at position 611 of SEQ ID NO: 913910
cuggaagcguccucagcaa

SEQ ID NO: 963639 - RNA, 19 nt, Artificial Sequence
  Description of Artificial Sequence: Synthetic oligonucleotide
  Antisense strand to SEQ ID NO: 963638
uugcugaggacgcuuccag

SEQ ID NO: 963640 - RNA, 19 nt, Artificial Sequence
  Description of Artificial Sequence: Synthetic oligonucleotide
  Sense strand starting at position 1140 of SEQ ID NO: 913910
guguuuacuuacgaaauuu

SEQ ID NO: 963641 - RNA, 19 nt, Artificial Sequence
  Description of Artificial Sequence: Synthetic oligonucleotide
  Antisense strand to SEQ ID NO: 963640
aaauuucguaaguaaacac

SEQ ID NO: 963642 - RNA, 19 nt, Artificial Sequence
  Description of Artificial Sequence: Synthetic oligonucleotide
  Sense strand starting at position 167 of SEQ ID NO: 913910
gcuaucaugcuuuggguau

SEQ ID NO: 963643 - RNA, 19 nt, Artificial Sequence
  Description of Artificial Sequence: Synthetic oligonucleotide
  Antisense strand to SEQ ID NO: 963642
auacccaaagcaugauagc

SEQ ID NO: 963644 - RNA, 19 nt, Artificial Sequence
  Description of Artificial Sequence: Synthetic oligonucleotide
  Sense strand starting at position 3752 of SEQ ID NO: 913910
ucucuuguccugugauagu

SEQ ID NO: 963645 - RNA, 19 nt, Artificial Sequence
  Description of Artificial Sequence: Synthetic oligonucleotide
  Antisense strand to SEQ ID NO: 963644
acuaucacaggacaagaga

SEQ ID NO: 963646 - RNA, 19 nt, Artificial Sequence
  Description of Artificial Sequence: Synthetic oligonucleotide
  Sense strand starting at position 3302 of SEQ ID NO: 913910
agaagaccuuuguauaauc

SEQ ID NO: 963647 - RNA, 19 nt, Artificial Sequence
  Description of Artificial Sequence: Synthetic oligonucleotide
  Antisense strand to SEQ ID NO: 963646
gauuauacaaaggucuucu

SEQ ID NO: 963648 - RNA, 19 nt, Artificial Sequence
  Description of Artificial Sequence: Synthetic oligonucleotide
  Sense strand starting at position 3126 of SEQ ID NO: 913910
gaccgauugugagucgucu

SEQ ID NO: 963649 - RNA, 19 nt, Artificial Sequence
  Description of Artificial Sequence: Synthetic oligonucleotide
  Antisense strand to SEQ ID NO: 963648
agacgacucacaaucgguc

SEQ ID NO: 963650 - RNA, 19 nt, Artificial Sequence
  Description of Artificial Sequence: Synthetic oligonucleotide
  Sense strand starting at position 803 of SEQ ID NO: 913911
cagacaggauccuucugau

SEQ ID NO: 963651 - RNA, 19 nt, Artificial Sequence
  Description of Artificial Sequence: Synthetic oligonucleotide
  Antisense strand to SEQ ID NO: 963650
aucagaaggauccugucug

SEQ ID NO: 963652 - RNA, 19 nt, Artificial Sequence
  Description of Artificial Sequence: Synthetic oligonucleotide
  Sense strand starting at position 813 of SEQ ID NO: 913911
ccuucugauugaucuaaga

SEQ ID NO: 963653 - RNA, 19 nt, Artificial Sequence
  Description of Artificial Sequence: Synthetic oligonucleotide
  Antisense strand to SEQ ID NO: 963652
ucuuagaucaaucagaagg

SEQ ID NO: 963654 - RNA, 19 nt, Artificial Sequence
  Description of Artificial Sequence: Synthetic oligonucleotide
  Sense strand starting at position 3491 of SEQ ID NO: 913911
aguaaaucauaguugagac

SEQ ID NO: 963655 - RNA, 19 nt, Artificial Sequence
  Description of Artificial Sequence: Synthetic oligonucleotide
  Antisense strand to SEQ ID NO: 963654
gucucaacuaugauuuacu

SEQ ID NO: 963656 - RNA, 19 nt, Artificial Sequence
  Description of Artificial Sequence: Synthetic oligonucleotide
  Sense strand starting at position 1060 of SEQ ID NO: 913911
acuuuacgggcauaaucaa

SEQ ID NO: 963657 - RNA, 19 nt, Artificial Sequence
  Description of Artificial Sequence: Synthetic oligonucleotide
  Antisense strand to SEQ ID NO: 963656
uugauuaugcccguaaagu

SEQ ID NO: 963658 - RNA, 19 nt, Artificial Sequence
  Description of Artificial Sequence: Synthetic oligonucleotide
  Sense strand starting at position 2396 of SEQ ID NO: 913911
uccugaucagaucagcuua

SEQ ID NO: 963659 - RNA, 19 nt, Artificial Sequence
  Description of Artificial Sequence: Synthetic oligonucleotide
  Antisense strand to SEQ ID NO: 963658
uaagcugaucugaucagga

SEQ ID NO: 963660 - RNA, 19 nt, Artificial Sequence
  Description of Artificial Sequence: Synthetic oligonucleotide
  Sense strand starting at position 1058 of SEQ ID NO: 913911
gaacuuuacgggcauaauc

SEQ ID NO: 963661 - RNA, 19 nt, Artificial Sequence
  Description of Artificial Sequence: Synthetic oligonucleotide
  Antisense strand to SEQ ID NO: 963660
gauuaugcccguaaaguuc

SEQ ID NO: 963662 - RNA, 19 nt, Artificial Sequence
  Description of Artificial Sequence: Synthetic oligonucleotide
  Sense strand starting at position 2398 of SEQ ID NO: 913911
cugaucagaucagcuuaaa

SEQ ID NO: 963663 - RNA, 19 nt, Artificial Sequence
  Description of Artificial Sequence: Synthetic oligonucleotide
  Antisense strand to SEQ ID NO: 963662
uuuaagcugaucugaucag

SEQ ID NO: 963664 - RNA, 19 nt, Artificial Sequence
  Description of Artificial Sequence: Synthetic oligonucleotide
  Sense strand starting at position 307 of SEQ ID NO: 913911
gggaaaggcugauuguaca

SEQ ID NO: 963665 - RNA, 19 nt, Artificial Sequence
  Description of Artificial Sequence: Synthetic oligonucleotide
  Antisense strand to SEQ ID NO: 963664
uguacaaucagccuuuccc

SEQ ID NO: 963666 - RNA, 19 nt, Artificial Sequence
  Description of Artificial Sequence: Synthetic oligonucleotide
  Sense strand starting at position 3499 of SEQ ID NO: 913911
auaguugagacacaguguu

SEQ ID NO: 963667 - RNA, 19 nt, Artificial Sequence
  Description of Artificial Sequence: Synthetic oligonucleotide
  Antisense strand to SEQ ID NO: 963666
aacacugugucucaacuau

SEQ ID NO: 963668 - RNA, 19 nt, Artificial Sequence
  Description of Artificial Sequence: Synthetic oligonucleotide
  Sense strand starting at position 809 of SEQ ID NO: 913911
ggauccuucugauugaucu

SEQ ID NO: 963669 - RNA, 19 nt, Artificial Sequence
  Description of Artificial Sequence: Synthetic oligonucleotide
  Antisense strand to SEQ ID NO: 963668
agaucaaucagaaggaucc

SEQ ID NO: 963670 - RNA, 19 nt, Artificial Sequence
  Description of Artificial Sequence: Synthetic oligonucleotide
  Sense strand starting at position 1502 of SEQ ID NO: 913911
gggcccugucaauaaucau

SEQ ID NO: 963671 - RNA, 19 nt, Artificial Sequence
  Description of Artificial Sequence: Synthetic oligonucleotide
  Antisense strand to SEQ ID NO: 963670
augauuauugacagggccc

SEQ ID NO: 963672 - RNA, 19 nt, Artificial Sequence
  Description of Artificial Sequence: Synthetic oligonucleotide
  Sense strand starting at position 453 of SEQ ID NO: 913911
uggcgauauguuuaagaca

SEQ ID NO: 963673 - RNA, 19 nt, Artificial Sequence
  Description of Artificial Sequence: Synthetic oligonucleotide
  Antisense strand to SEQ ID NO: 963672
ugucuuaaacauaucgcca

SEQ ID NO: 963674 - RNA, 19 nt, Artificial Sequence
  Description of Artificial Sequence: Synthetic oligonucleotide
  Sense strand starting at position 1056 of SEQ ID NO: 913911
gggaacuuuacgggcauaa

SEQ ID NO: 963675 - RNA, 19 nt, Artificial Sequence
  Description of Artificial Sequence: Synthetic oligonucleotide
  Antisense strand to SEQ ID NO: 963674
uuaugcccguaaaguuccc

SEQ ID NO: 963676 - RNA, 19 nt, Artificial Sequence
  Description of Artificial Sequence: Synthetic oligonucleotide
  Sense strand starting at position 3505 of SEQ ID NO: 913911
gagacacaguguuuacuua

SEQ ID NO: 963677 - RNA, 19 nt, Artificial Sequence
  Description of Artificial Sequence: Synthetic oligonucleotide
  Antisense strand to SEQ ID NO: 963676
uaaguaaacacugugucuc

SEQ ID NO: 963678 - RNA, 19 nt, Artificial Sequence
  Description of Artificial Sequence: Synthetic oligonucleotide
  Sense strand starting at position 2466 of SEQ ID NO: 913911
gaggucaauuagucaccua

SEQ ID NO: 963679 - RNA, 19 nt, Artificial Sequence
  Description of Artificial Sequence: Synthetic oligonucleotide
  Antisense strand to SEQ ID NO: 963678
uaggugacuaauugaccuc

SEQ ID NO: 963680 - RNA, 19 nt, Artificial Sequence
  Description of Artificial Sequence: Synthetic oligonucleotide
  Sense strand starting at position 862 of SEQ ID NO: 913911
ucagguauccaaugcaaga

SEQ ID NO: 963681 - RNA, 19 nt, Artificial Sequence
  Description of Artificial Sequence: Synthetic oligonucleotide
  Antisense strand to SEQ ID NO: 963680
ucuugcauuggauaccuga

SEQ ID NO: 963682 - RNA, 19 nt, Artificial Sequence
  Description of Artificial Sequence: Synthetic oligonucleotide
  Sense strand starting at position 1184 of SEQ ID NO: 913911
uccugcaaucuuggaugaa

SEQ ID NO: 963683 - RNA, 19 nt, Artificial Sequence
  Description of Artificial Sequence: Synthetic oligonucleotide
  Antisense strand to SEQ ID NO: 963682
uucauccaagauugcagga

SEQ ID NO: 963684 - RNA, 19 nt, Artificial Sequence
  Description of Artificial Sequence: Synthetic oligonucleotide
  Sense strand starting at position 924 of SEQ ID NO: 913911
acgaaagcaucauccuuaa

SEQ ID NO: 963685 - RNA, 19 nt, Artificial Sequence
  Description of Artificial Sequence: Synthetic oligonucleotide
  Antisense strand to SEQ ID NO: 963684
uuaaggaugaugcuuucgu

SEQ ID NO: 963686 - RNA, 19 nt, Artificial Sequence
  Description of Artificial Sequence: Synthetic oligonucleotide
  Sense strand starting at position 689 of SEQ ID NO: 913911
gggccuuucccauagcaaa

SEQ ID NO: 963687 - RNA, 19 nt, Artificial Sequence
  Description of Artificial Sequence: Synthetic oligonucleotide
  Antisense strand to SEQ ID NO: 963686
uuugcuaugggaaaggccc

SEQ ID NO: 963688 - RNA, 19 nt, Artificial Sequence
  Description of Artificial Sequence: Synthetic oligonucleotide
  Sense strand starting at position 2592 of SEQ ID NO: 913911
acauucuaacggugacaug

SEQ ID NO: 963689 - RNA, 19 nt, Artificial Sequence
  Description of Artificial Sequence: Synthetic oligonucleotide
  Antisense strand to SEQ ID NO: 963688
caugucaccguuagaaugu

SEQ ID NO: 963690 - RNA, 19 nt, Artificial Sequence
  Description of Artificial Sequence: Synthetic oligonucleotide
  Sense strand starting at position 2469 of SEQ ID NO: 913911
gucaauuagucaccuacaa

SEQ ID NO: 963691 - RNA, 19 nt, Artificial Sequence
  Description of Artificial Sequence: Synthetic oligonucleotide
  Antisense strand to SEQ ID NO: 963690
uuguaggugacuaauugac

SEQ ID NO: 963692 - RNA, 19 nt, Artificial Sequence
  Description of Artificial Sequence: Synthetic oligonucleotide
  Sense strand starting at position 3253 of SEQ ID NO: 913911
ggagaucuguucucacuug

SEQ ID NO: 963693 - RNA, 19 nt, Artificial Sequence
  Description of Artificial Sequence: Synthetic oligonucleotide
  Antisense strand to SEQ ID NO: 963692
caagugagaacagaucucc

SEQ ID NO: 963694 - RNA, 19 nt, Artificial Sequence
  Description of Artificial Sequence: Synthetic oligonucleotide
  Sense strand starting at position 1439 of SEQ ID NO: 913911
uuauaugucuaugugaaca

SEQ ID NO: 963695 - RNA, 19 nt, Artificial Sequence
  Description of Artificial Sequence: Synthetic oligonucleotide
  Antisense strand to SEQ ID NO: 963694
uguucacauagacauauaa

SEQ ID NO: 963696 - RNA, 19 nt, Artificial Sequence
  Description of Artificial Sequence: Synthetic oligonucleotide
  Sense strand starting at position 250 of SEQ ID NO: 913911
ggcagcauuguacaacuau

SEQ ID NO: 963697 - RNA, 19 nt, Artificial Sequence
  Description of Artificial Sequence: Synthetic oligonucleotide
  Antisense strand to SEQ ID NO: 963696
auaguuguacaaugcugcc

SEQ ID NO: 963698 - RNA, 19 nt, Artificial Sequence
  Description of Artificial Sequence: Synthetic oligonucleotide
  Sense strand starting at position 315 of SEQ ID NO: 913911
cugauuguacauuggucaa

SEQ ID NO: 963699 - RNA, 19 nt, Artificial Sequence
  Description of Artificial Sequence: Synthetic oligonucleotide
  Antisense strand to SEQ ID NO: 963698
uugaccaauguacaaucag

SEQ ID NO: 963700 - RNA, 19 nt, Artificial Sequence
  Description of Artificial Sequence: Synthetic oligonucleotide
  Sense strand starting at position 3073 of SEQ ID NO: 913911
ggucaauuugcaugugcuu

SEQ ID NO: 963701 - RNA, 19 nt, Artificial Sequence
  Description of Artificial Sequence: Synthetic oligonucleotide
  Antisense strand to SEQ ID NO: 963700
aagcacaugcaaauugacc

SEQ ID NO: 963702 - RNA, 19 nt, Artificial Sequence
  Description of Artificial Sequence: Synthetic oligonucleotide
  Sense strand starting at position 880 of SEQ ID NO: 913911
agcaaagauccuggccauu

SEQ ID NO: 963703 - RNA, 19 nt, Artificial Sequence
  Description of Artificial Sequence: Synthetic oligonucleotide
  Antisense strand to SEQ ID NO: 963702
aauggccaggaucuuugcu

SEQ ID NO: 963704 - RNA, 19 nt, Artificial Sequence
  Description of Artificial Sequence: Synthetic oligonucleotide
  Sense strand starting at position 1438 of SEQ ID NO: 913911
cuuauaugucuaugugaac

SEQ ID NO: 963705 - RNA, 19 nt, Artificial Sequence
  Description of Artificial Sequence: Synthetic oligonucleotide
  Antisense strand to SEQ ID NO: 963704
guucacauagacauauaag

SEQ ID NO: 963706 - RNA, 19 nt, Artificial Sequence
  Description of Artificial Sequence: Synthetic oligonucleotide
  Sense strand starting at position 1436 of SEQ ID NO: 913911
ugcuuauaugucuauguga

SEQ ID NO: 963707 - RNA, 19 nt, Artificial Sequence
  Description of Artificial Sequence: Synthetic oligonucleotide
  Antisense strand to SEQ ID NO: 963706
ucacauagacauauaagca

SEQ ID NO: 963708 - RNA, 19 nt, Artificial Sequence
  Description of Artificial Sequence: Synthetic oligonucleotide
  Sense strand starting at position 3509 of SEQ ID NO: 913911
cacaguguuuacuuacgaa

SEQ ID NO: 963709 - RNA, 19 nt, Artificial Sequence
  Description of Artificial Sequence: Synthetic oligonucleotide
  Antisense strand to SEQ ID NO: 963708
uucguaaguaaacacugug

SEQ ID NO: 963710 - RNA, 19 nt, Artificial Sequence
  Description of Artificial Sequence: Synthetic oligonucleotide
  Sense strand starting at position 3289 of SEQ ID NO: 913911
gccaguggagccugacaau

SEQ ID NO: 963711 - RNA, 19 nt, Artificial Sequence
  Description of Artificial Sequence: Synthetic oligonucleotide
  Antisense strand to SEQ ID NO: 963710
auugucaggcuccacuggc

SEQ ID NO: 963712 - RNA, 19 nt, Artificial Sequence
  Description of Artificial Sequence: Synthetic oligonucleotide
  Sense strand starting at position 2988 of SEQ ID NO: 913911
aagcguccucagcaacauu

SEQ ID NO: 963713 - RNA, 19 nt, Artificial Sequence
  Description of Artificial Sequence: Synthetic oligonucleotide
  Antisense strand to SEQ ID NO: 963712
aauguugcugaggacgcuu

SEQ ID NO: 963714 - RNA, 19 nt, Artificial Sequence
  Description of Artificial Sequence: Synthetic oligonucleotide
  Sense strand starting at position 898 of SEQ ID NO: 913911
uaaagaauuuguggguuag

SEQ ID NO: 963715 - RNA, 19 nt, Artificial Sequence
  Description of Artificial Sequence: Synthetic oligonucleotide
  Antisense strand to SEQ ID NO: 963714
cuaacccacaaauucuuua

SEQ ID NO: 963716 - RNA, 19 nt, Artificial Sequence
  Description of Artificial Sequence: Synthetic oligonucleotide
  Sense strand starting at position 173 of SEQ ID NO: 913911
cgggcuaccaccuguuaaa

SEQ ID NO: 963717 - RNA, 19 nt, Artificial Sequence
  Description of Artificial Sequence: Synthetic oligonucleotide
  Antisense strand to SEQ ID NO: 963716
uuuaacaggugguagcccg

SEQ ID NO: 963718 - RNA, 19 nt, Artificial Sequence
  Description of Artificial Sequence: Synthetic oligonucleotide
  Sense strand starting at position 1404 of SEQ ID NO: 913911
agcugaaacuaagauacaa

SEQ ID NO: 963719 - RNA, 19 nt, Artificial Sequence
  Description of Artificial Sequence: Synthetic oligonucleotide
  Antisense strand to SEQ ID NO: 963718
uuguaucuuaguuucagcu

SEQ ID NO: 963720 - RNA, 19 nt, Artificial Sequence
  Description of Artificial Sequence: Synthetic oligonucleotide
  Sense strand starting at position 59 of SEQ ID NO: 913911
uuagauauuugugauguuc

SEQ ID NO: 963721 - RNA, 19 nt, Artificial Sequence
  Description of Artificial Sequence: Synthetic oligonucleotide
  Antisense strand to SEQ ID NO: 963720
gaacaucacaaauaucuaa

SEQ ID NO: 963722 - RNA, 19 nt, Artificial Sequence
  Description of Artificial Sequence: Synthetic oligonucleotide
  Sense strand starting at position 1496 of SEQ ID NO: 913911
ggcugagggcccugucaau

SEQ ID NO: 963723 - RNA, 19 nt, Artificial Sequence
  Description of Artificial Sequence: Synthetic oligonucleotide
  Antisense strand to SEQ ID NO: 963722
auugacagggcccucagcc

SEQ ID NO: 963724 - RNA, 19 nt, Artificial Sequence
  Description of Artificial Sequence: Synthetic oligonucleotide
  Sense strand starting at position 135 of SEQ ID NO: 913911
gcucuuugucuuuaguauu

SEQ ID NO: 963725 - RNA, 19 nt, Artificial Sequence
  Description of Artificial Sequence: Synthetic oligonucleotide
  Antisense strand to SEQ ID NO: 963724
aauacuaaagacaaagagc

SEQ ID NO: 963726 - RNA, 19 nt, Artificial Sequence
  Description of Artificial Sequence: Synthetic oligonucleotide
  Sense strand starting at position 2984 of SEQ ID NO: 913911
cuggaagcguccucagcaa

SEQ ID NO: 963727 - RNA, 19 nt, Artificial Sequence
  Description of Artificial Sequence: Synthetic oligonucleotide
  Antisense strand to SEQ ID NO: 963726
uugcugaggacgcuuccag

SEQ ID NO: 963728 - RNA, 19 nt, Artificial Sequence
  Description of Artificial Sequence: Synthetic oligonucleotide
  Sense strand starting at position 3513 of SEQ ID NO: 913911
guguuuacuuacgaaauuu

SEQ ID NO: 963729 - RNA, 19 nt, Artificial Sequence
  Description of Artificial Sequence: Synthetic oligonucleotide
  Antisense strand to SEQ ID NO: 963728
aaauuucguaaguaaacac

SEQ ID NO: 963730 - RNA, 19 nt, Artificial Sequence
  Description of Artificial Sequence: Synthetic oligonucleotide
  Sense strand starting at position 389 of SEQ ID NO: 913912
agggaaauccauugcuaaa

SEQ ID NO: 963731 - RNA, 19 nt, Artificial Sequence
  Description of Artificial Sequence: Synthetic oligonucleotide
  Antisense strand to SEQ ID NO: 963730
uuuagcaauggauuucccu

SEQ ID NO: 963732 - RNA, 19 nt, Artificial Sequence
  Description of Artificial Sequence: Synthetic oligonucleotide
  Sense strand starting at position 1395 of SEQ ID NO: 913912
ugucacuuaccguugcgaa

SEQ ID NO: 963733 - RNA, 19 nt, Artificial Sequence
  Description of Artificial Sequence: Synthetic oligonucleotide
  Antisense strand to SEQ ID NO: 963732
uucgcaacgguaagugaca

SEQ ID NO: 963734 - RNA, 19 nt, Artificial Sequence
  Description of Artificial Sequence: Synthetic oligonucleotide
  Sense strand starting at position 287 of SEQ ID NO: 913912
ucaacuugggcucauuaau

SEQ ID NO: 963735 - RNA, 19 nt, Artificial Sequence
  Description of Artificial Sequence: Synthetic oligonucleotide
  Antisense strand to SEQ ID NO: 963734
auuaaugagcccaaguuga

SEQ ID NO: 963736 - RNA, 19 nt, Artificial Sequence
  Description of Artificial Sequence: Synthetic oligonucleotide
  Sense strand starting at position 1545 of SEQ ID NO: 913912
gagaaucuaagcgauccga

SEQ ID NO: 963737 - RNA, 19 nt, Artificial Sequence
  Description of Artificial Sequence: Synthetic oligonucleotide
  Antisense strand to SEQ ID NO: 963736
ucggaucgcuuagauucuc

SEQ ID NO: 963738 - RNA, 19 nt, Artificial Sequence
  Description of Artificial Sequence: Synthetic oligonucleotide
  Sense strand starting at position 2085 of SEQ ID NO: 913912
cuguaauugccugacagga

SEQ ID NO: 963739 - RNA, 19 nt, Artificial Sequence
  Description of Artificial Sequence: Synthetic oligonucleotide
  Antisense strand to SEQ ID NO: 963738
uccugucaggcaauuacag

SEQ ID NO: 963740 - RNA, 19 nt, Artificial Sequence
  Description of Artificial Sequence: Synthetic oligonucleotide
  Sense strand starting at position 1088 of SEQ ID NO: 913912
uugccuuugggaggaaaca

SEQ ID NO: 963741 - RNA, 19 nt, Artificial Sequence
  Description of Artificial Sequence: Synthetic oligonucleotide
  Antisense strand to SEQ ID NO: 963740
uguuuccucccaaaggcaa

SEQ ID NO: 963742 - RNA, 19 nt, Artificial Sequence
  Description of Artificial Sequence: Synthetic oligonucleotide
  Sense strand starting at position 1151 of SEQ ID NO: 913912
ugucuuguaacagagguaa

SEQ ID NO: 963743 - RNA, 19 nt, Artificial Sequence
  Description of Artificial Sequence: Synthetic oligonucleotide
  Antisense strand to SEQ ID NO: 963742
uuaccucuguuacaagaca

SEQ ID NO: 963744 - RNA, 19 nt, Artificial Sequence
  Description of Artificial Sequence: Synthetic oligonucleotide
  Sense strand starting at position 1385 of SEQ ID NO: 913912
cgccucugccugucacuua

SEQ ID NO: 963745 - RNA, 19 nt, Artificial Sequence
  Description of Artificial Sequence: Synthetic oligonucleotide
  Antisense strand to SEQ ID NO: 963744
uaagugacaggcagaggcg

SEQ ID NO: 963746 - RNA, 19 nt, Artificial Sequence
  Description of Artificial Sequence: Synthetic oligonucleotide
  Sense strand starting at position 3124 of SEQ ID NO: 913912
aaggacauuucugggaaga

SEQ ID NO: 963747 - RNA, 19 nt, Artificial Sequence
  Description of Artificial Sequence: Synthetic oligonucleotide
  Antisense strand to SEQ ID NO: 963746
ucuucccagaaauguccuu

SEQ ID NO: 963748 - RNA, 19 nt, Artificial Sequence
  Description of Artificial Sequence: Synthetic oligonucleotide
  Sense strand starting at position 1071 of SEQ ID NO: 913912
aagggagucucuucuaauu

SEQ ID NO: 963749 - RNA, 19 nt, Artificial Sequence
  Description of Artificial Sequence: Synthetic oligonucleotide
  Antisense strand to SEQ ID NO: 963748
aauuagaagagacucccuu

SEQ ID NO: 963750 - RNA, 19 nt, Artificial Sequence
  Description of Artificial Sequence: Synthetic oligonucleotide
  Sense strand starting at position 1014 of SEQ ID NO: 913912
gaaguaagaucuccuggua

SEQ ID NO: 963751 - RNA, 19 nt, Artificial Sequence
  Description of Artificial Sequence: Synthetic oligonucleotide
  Antisense strand to SEQ ID NO: 963750
uaccaggagaucuuacuuc

SEQ ID NO: 963752 - RNA, 19 nt, Artificial Sequence
  Description of Artificial Sequence: Synthetic oligonucleotide
  Sense strand starting at position 629 of SEQ ID NO: 913912
cuguaaagauaauugcaua

SEQ ID NO: 963753 - RNA, 19 nt, Artificial Sequence
  Description of Artificial Sequence: Synthetic oligonucleotide
  Antisense strand to SEQ ID NO: 963752
uaugcaauuaucuuuacag

SEQ ID NO: 963754 - RNA, 19 nt, Artificial Sequence
  Description of Artificial Sequence: Synthetic oligonucleotide
  Sense strand starting at position 853 of SEQ ID NO: 913912
gucagauuccuguauugau

SEQ ID NO: 963755 - RNA, 19 nt, Artificial Sequence
  Description of Artificial Sequence: Synthetic oligonucleotide
  Antisense strand to SEQ ID NO: 963754
aucaauacaggaaucugac

SEQ ID NO: 963756 - RNA, 19 nt, Artificial Sequence
  Description of Artificial Sequence: Synthetic oligonucleotide
  Sense strand starting at position 1017 of SEQ ID NO: 913912
guaagaucuccugguaaag

SEQ ID NO: 963757 - RNA, 19 nt, Artificial Sequence
  Description of Artificial Sequence: Synthetic oligonucleotide
  Antisense strand to SEQ ID NO: 963756
cuuuaccaggagaucuuac

SEQ ID NO: 963758 - RNA, 19 nt, Artificial Sequence
  Description of Artificial Sequence: Synthetic oligonucleotide
  Sense strand starting at position 3693 of SEQ ID NO: 913912
gaguuaaaugccuaaguug

SEQ ID NO: 963759 - RNA, 19 nt, Artificial Sequence
  Description of Artificial Sequence: Synthetic oligonucleotide
  Antisense strand to SEQ ID NO: 963758
caacuuaggcauuuaacuc

SEQ ID NO: 963760 - RNA, 19 nt, Artificial Sequence
  Description of Artificial Sequence: Synthetic oligonucleotide
  Sense strand starting at position 549 of SEQ ID NO: 913912
uucuaauuacugugauuga

SEQ ID NO: 963761 - RNA, 19 nt, Artificial Sequence
  Description of Artificial Sequence: Synthetic oligonucleotide
  Antisense strand to SEQ ID NO: 963760
ucaaucacaguaauuagaa

SEQ ID NO: 963762 - RNA, 19 nt, Artificial Sequence
  Description of Artificial Sequence: Synthetic oligonucleotide
  Sense strand starting at position 763 of SEQ ID NO: 913912
uuuacuuaacagugaguga

SEQ ID NO: 963763 - RNA, 19 nt, Artificial Sequence
  Description of Artificial Sequence: Synthetic oligonucleotide
  Antisense strand to SEQ ID NO: 963762
ucacucacuguuaaguaaa

SEQ ID NO: 963764 - RNA, 19 nt, Artificial Sequence
  Description of Artificial Sequence: Synthetic oligonucleotide
  Sense strand starting at position 3689 of SEQ ID NO: 913912
cugggaguuaaaugccuaa

SEQ ID NO: 963765 - RNA, 19 nt, Artificial Sequence
  Description of Artificial Sequence: Synthetic oligonucleotide
  Antisense strand to SEQ ID NO: 963764
uuaggcauuuaacucccag

SEQ ID NO: 963766 - RNA, 19 nt, Artificial Sequence
  Description of Artificial Sequence: Synthetic oligonucleotide
  Sense strand starting at position 147 of SEQ ID NO: 913912
cuuucaguuggacgagaau

SEQ ID NO: 963767 - RNA, 19 nt, Artificial Sequence
  Description of Artificial Sequence: Synthetic oligonucleotide
  Antisense strand to SEQ ID NO: 963766
auucucguccaacugaaag

SEQ ID NO: 963768 - RNA, 19 nt, Artificial Sequence
  Description of Artificial Sequence: Synthetic oligonucleotide
  Sense strand starting at position 1113 of SEQ ID NO: 913912
agauaauuggcaugcugau

SEQ ID NO: 963769 - RNA, 19 nt, Artificial Sequence
  Description of Artificial Sequence: Synthetic oligonucleotide
  Antisense strand to SEQ ID NO: 963768
aucagcaugccaauuaucu

SEQ ID NO: 963770 - RNA, 19 nt, Artificial Sequence
  Description of Artificial Sequence: Synthetic oligonucleotide
  Sense strand starting at position 467 of SEQ ID NO: 913912
uaaauuccuguugguauga

SEQ ID NO: 963771 - RNA, 19 nt, Artificial Sequence
  Description of Artificial Sequence: Synthetic oligonucleotide
  Antisense strand to SEQ ID NO: 963770
ucauaccaacaggaauuua

SEQ ID NO: 963772 - RNA, 19 nt, Artificial Sequence
  Description of Artificial Sequence: Synthetic oligonucleotide
  Sense strand starting at position 660 of SEQ ID NO: 913912
cuuacuuuacagugugaag

SEQ ID NO: 963773 - RNA, 19 nt, Artificial Sequence
  Description of Artificial Sequence: Synthetic oligonucleotide
  Antisense strand to SEQ ID NO: 963772
cuucacacuguaaaguaag

SEQ ID NO: 963774 - RNA, 19 nt, Artificial Sequence
  Description of Artificial Sequence: Synthetic oligonucleotide
  Sense strand starting at position 296 of SEQ ID NO: 913912
gcucauuaauaagcugaau

SEQ ID NO: 963775 - RNA, 19 nt, Artificial Sequence
  Description of Artificial Sequence: Synthetic oligonucleotide
  Antisense strand to SEQ ID NO: 963774
auucagcuuauuaaugagc

SEQ ID NO: 963776 - RNA, 19 nt, Artificial Sequence
  Description of Artificial Sequence: Synthetic oligonucleotide
  Sense strand starting at position 1723 of SEQ ID NO: 913912
acuuguuccucuuccagga

SEQ ID NO: 963777 - RNA, 19 nt, Artificial Sequence
  Description of Artificial Sequence: Synthetic oligonucleotide
  Antisense strand to SEQ ID NO: 963776
uccuggaagaggaacaagu

SEQ ID NO: 963778 - RNA, 19 nt, Artificial Sequence
  Description of Artificial Sequence: Synthetic oligonucleotide
  Sense strand starting at position 257 of SEQ ID NO: 913912
gcuuuccugccagauuaua

SEQ ID NO: 963779 - RNA, 19 nt, Artificial Sequence
  Description of Artificial Sequence: Synthetic oligonucleotide
  Antisense strand to SEQ ID NO: 963778
uauaaucuggcaggaaagc

SEQ ID NO: 963780 - RNA, 19 nt, Artificial Sequence
  Description of Artificial Sequence: Synthetic oligonucleotide
  Sense strand starting at position 3692 of SEQ ID NO: 913912
ggaguuaaaugccuaaguu

SEQ ID NO: 963781 - RNA, 19 nt, Artificial Sequence
  Description of Artificial Sequence: Synthetic oligonucleotide
  Antisense strand to SEQ ID NO: 963780
aacuuaggcauuuaacucc

SEQ ID NO: 963782 - RNA, 19 nt, Artificial Sequence
  Description of Artificial Sequence: Synthetic oligonucleotide
  Sense strand starting at position 2084 of SEQ ID NO: 913912
ccuguaauugccugacagg

SEQ ID NO: 963783 - RNA, 19 nt, Artificial Sequence
  Description of Artificial Sequence: Synthetic oligonucleotide
  Antisense strand to SEQ ID NO: 963782
ccugucaggcaauuacagg

SEQ ID NO: 963784 - RNA, 19 nt, Artificial Sequence
  Description of Artificial Sequence: Synthetic oligonucleotide
  Sense strand starting at position 153 of SEQ ID NO: 913912
guuggacgagaaugcuauu

SEQ ID NO: 963785 - RNA, 19 nt, Artificial Sequence
  Description of Artificial Sequence: Synthetic oligonucleotide
  Antisense strand to SEQ ID NO: 963784
aauagcauucucguccaac

SEQ ID NO: 963786 - RNA, 19 nt, Artificial Sequence
  Description of Artificial Sequence: Synthetic oligonucleotide
  Sense strand starting at position 617 of SEQ ID NO: 913912
gcugacgacuuacuguaaa

SEQ ID NO: 963787 - RNA, 19 nt, Artificial Sequence
  Description of Artificial Sequence: Synthetic oligonucleotide
  Antisense strand to SEQ ID NO: 963786
uuuacaguaagucgucagc

SEQ ID NO: 963788 - RNA, 19 nt, Artificial Sequence
  Description of Artificial Sequence: Synthetic oligonucleotide
  Sense strand starting at position 3204 of SEQ ID NO: 913912
gggaguuuguggguaaggu

SEQ ID NO: 963789 - RNA, 19 nt, Artificial Sequence
  Description of Artificial Sequence: Synthetic oligonucleotide
  Antisense strand to SEQ ID NO: 963788
accuuacccacaaacuccc

SEQ ID NO: 963790 - RNA, 19 nt, Artificial Sequence
  Description of Artificial Sequence: Synthetic oligonucleotide
  Sense strand starting at position 82 of SEQ ID NO: 913912
uggauuuagucucaagagu

SEQ ID NO: 963791 - RNA, 19 nt, Artificial Sequence
  Description of Artificial Sequence: Synthetic oligonucleotide
  Antisense strand to SEQ ID NO: 963790
acucuugagacuaaaucca

SEQ ID NO: 963792 - RNA, 19 nt, Artificial Sequence
  Description of Artificial Sequence: Synthetic oligonucleotide
  Sense strand starting at position 717 of SEQ ID NO: 913912
uuauuuagguuacauggua

SEQ ID NO: 963793 - RNA, 19 nt, Artificial Sequence
  Description of Artificial Sequence: Synthetic oligonucleotide
  Antisense strand to SEQ ID NO: 963792
uaccauguaaccuaaauaa

SEQ ID NO: 963794 - RNA, 19 nt, Artificial Sequence
  Description of Artificial Sequence: Synthetic oligonucleotide
  Sense strand starting at position 712 of SEQ ID NO: 913912
acacauuauuuagguuaca

SEQ ID NO: 963795 - RNA, 19 nt, Artificial Sequence
  Description of Artificial Sequence: Synthetic oligonucleotide
  Antisense strand to SEQ ID NO: 963794
uguaaccuaaauaaugugu

SEQ ID NO: 963796 - RNA, 19 nt, Artificial Sequence
  Description of Artificial Sequence: Synthetic oligonucleotide
  Sense strand starting at position 3097 of SEQ ID NO: 913912
caggaagcguuuguagaug

SEQ ID NO: 963797 - RNA, 19 nt, Artificial Sequence
  Description of Artificial Sequence: Synthetic oligonucleotide
  Antisense strand to SEQ ID NO: 963796
caucuacaaacgcuuccug

SEQ ID NO: 963798 - RNA, 19 nt, Artificial Sequence
  Description of Artificial Sequence: Synthetic oligonucleotide
  Sense strand starting at position 1577 of SEQ ID NO: 913912
cgccuagagcuguacaauc

SEQ ID NO: 963799 - RNA, 19 nt, Artificial Sequence
  Description of Artificial Sequence: Synthetic oligonucleotide
  Antisense strand to SEQ ID NO: 963798
gauuguacagcucuaggcg

SEQ ID NO: 963800 - RNA, 19 nt, Artificial Sequence
  Description of Artificial Sequence: Synthetic oligonucleotide
  Sense strand starting at position 2172 of SEQ ID NO: 913912
gcagggaucuccgcgggaa

SEQ ID NO: 963801 - RNA, 19 nt, Artificial Sequence
  Description of Artificial Sequence: Synthetic oligonucleotide
  Antisense strand to SEQ ID NO: 963800
uucccgcggagaucccugc

SEQ ID NO: 963802 - RNA, 19 nt, Artificial Sequence
  Description of Artificial Sequence: Synthetic oligonucleotide
  Sense strand starting at position 527 of SEQ ID NO: 913912
guaaguaguggauguucuu

SEQ ID NO: 963803 - RNA, 19 nt, Artificial Sequence
  Description of Artificial Sequence: Synthetic oligonucleotide
  Antisense strand to SEQ ID NO: 963802
aagaacauccacuacuuac

SEQ ID NO: 963804 - RNA, 19 nt, Artificial Sequence
  Description of Artificial Sequence: Synthetic oligonucleotide
  Sense strand starting at position 30 of SEQ ID NO: 913912
cugauagcucuuugcauug

SEQ ID NO: 963805 - RNA, 19 nt, Artificial Sequence
  Description of Artificial Sequence: Synthetic oligonucleotide
  Antisense strand to SEQ ID NO: 963804
caaugcaaagagcuaucag

SEQ ID NO: 963806 - RNA, 19 nt, Artificial Sequence
  Description of Artificial Sequence: Synthetic oligonucleotide
  Sense strand starting at position 834 of SEQ ID NO: 913912
ggugccuuacacuguauau

SEQ ID NO: 963807 - RNA, 19 nt, Artificial Sequence
  Description of Artificial Sequence: Synthetic oligonucleotide
  Antisense strand to SEQ ID NO: 963806
auauacaguguaaggcacc

SEQ ID NO: 963808 - RNA, 19 nt, Artificial Sequence
  Description of Artificial Sequence: Synthetic oligonucleotide
  Sense strand starting at position 3924 of SEQ ID NO: 913912
gcggcaucaucagauuuag

SEQ ID NO: 963809 - RNA, 19 nt, Artificial Sequence
  Description of Artificial Sequence: Synthetic oligonucleotide
  Antisense strand to SEQ ID NO: 963808
cuaaaucugaugaugccgc

SEQ ID NO: 963810 - RNA, 19 nt, Artificial Sequence
  Description of Artificial Sequence: Synthetic oligonucleotide
  Sense strand starting at position 1032 of SEQ ID NO: 913913
cuuuaugcagcaugaauuu

SEQ ID NO: 963811 - RNA, 19 nt, Artificial Sequence
  Description of Artificial Sequence: Synthetic oligonucleotide
  Antisense strand to SEQ ID NO: 963810
aaauucaugcugcauaaag

SEQ ID NO: 963812 - RNA, 19 nt, Artificial Sequence
  Description of Artificial Sequence: Synthetic oligonucleotide
  Sense strand starting at position 3546 of SEQ ID NO: 913913
augaaacgugaucacucua

SEQ ID NO: 963813 - RNA, 19 nt, Artificial Sequence
  Description of Artificial Sequence: Synthetic oligonucleotide
  Antisense strand to SEQ ID NO: 963812
uagagugaucacguuucau

SEQ ID NO: 963814 - RNA, 19 nt, Artificial Sequence
  Description of Artificial Sequence: Synthetic oligonucleotide
  Sense strand starting at position 3884 of SEQ ID NO: 913913
ugaaacaacgucugaaaga

SEQ ID NO: 963815 - RNA, 19 nt, Artificial Sequence
  Description of Artificial Sequence: Synthetic oligonucleotide
  Antisense strand to SEQ ID NO: 963814
ucuuucagacguuguuuca

SEQ ID NO: 963816 - RNA, 19 nt, Artificial Sequence
  Description of Artificial Sequence: Synthetic oligonucleotide
  Sense strand starting at position 454 of SEQ ID NO: 913913
caauguauacuagggauac

SEQ ID NO: 963817 - RNA, 19 nt, Artificial Sequence
  Description of Artificial Sequence: Synthetic oligonucleotide
  Antisense strand to SEQ ID NO: 963816
guaucccuaguauacauug

SEQ ID NO: 963818 - RNA, 19 nt, Artificial Sequence
  Description of Artificial Sequence: Synthetic oligonucleotide
  Sense strand starting at position 29 of SEQ ID NO: 913913
gauauauuuggcugcauuc

SEQ ID NO: 963819 - RNA, 19 nt, Artificial Sequence
  Description of Artificial Sequence: Synthetic oligonucleotide
  Antisense strand to SEQ ID NO: 963818
gaaugcagccaaauauauc

SEQ ID NO: 963820 - RNA, 19 nt, Artificial Sequence
  Description of Artificial Sequence: Synthetic oligonucleotide
  Sense strand starting at position 704 of SEQ ID NO: 913913
uaauuuggcgcuuauguaa

SEQ ID NO: 963821 - RNA, 19 nt, Artificial Sequence
  Description of Artificial Sequence: Synthetic oligonucleotide
  Antisense strand to SEQ ID NO: 963820
uuacauaagcgccaaauua

SEQ ID NO: 963822 - RNA, 19 nt, Artificial Sequence
  Description of Artificial Sequence: Synthetic oligonucleotide
  Sense strand starting at position 3500 of SEQ ID NO: 913913
gcuuaucuguauuuccuga

SEQ ID NO: 963823 - RNA, 19 nt, Artificial Sequence
  Description of Artificial Sequence: Synthetic oligonucleotide
  Antisense strand to SEQ ID NO: 963822
ucaggaaauacagauaagc

SEQ ID NO: 963824 - RNA, 19 nt, Artificial Sequence
  Description of Artificial Sequence: Synthetic oligonucleotide
  Sense strand starting at position 3551 of SEQ ID NO: 913913
acgugaucacucuaaccag

SEQ ID NO: 963825 - RNA, 19 nt, Artificial Sequence
  Description of Artificial Sequence: Synthetic oligonucleotide
  Antisense strand to SEQ ID NO: 963824
cugguuagagugaucacgu

SEQ ID NO: 963826 - RNA, 19 nt, Artificial Sequence
  Description of Artificial Sequence: Synthetic oligonucleotide
  Sense strand starting at position 2154 of SEQ ID NO: 913913
cuuuguucccuugacaaga

SEQ ID NO: 963827 - RNA, 19 nt, Artificial Sequence
  Description of Artificial Sequence: Synthetic oligonucleotide
  Antisense strand to SEQ ID NO: 963826
ucuugucaagggaacaaag

SEQ ID NO: 963828 - RNA, 19 nt, Artificial Sequence
  Description of Artificial Sequence: Synthetic oligonucleotide
  Sense strand starting at position 3531 of SEQ ID NO: 913913
ugccuacuuccuuagauga

SEQ ID NO: 963829 - RNA, 19 nt, Artificial Sequence
  Description of Artificial Sequence: Synthetic oligonucleotide
  Antisense strand to SEQ ID NO: 963828
ucaucuaaggaaguaggca

SEQ ID NO: 963830 - RNA, 19 nt, Artificial Sequence
  Description of Artificial Sequence: Synthetic oligonucleotide
  Sense strand starting at position 815 of SEQ ID NO: 913913
uuaauuugucaccggcauu

SEQ ID NO: 963831 - RNA, 19 nt, Artificial Sequence
  Description of Artificial Sequence: Synthetic oligonucleotide
  Antisense strand to SEQ ID NO: 963830
aaugccggugacaaauuaa

SEQ ID NO: 963832 - RNA, 19 nt, Artificial Sequence
  Description of Artificial Sequence: Synthetic oligonucleotide
  Sense strand starting at position 3542 of SEQ ID NO: 913913
uuagaugaaacgugaucac

SEQ ID NO: 963833 - RNA, 19 nt, Artificial Sequence
  Description of Artificial Sequence: Synthetic oligonucleotide
  Antisense strand to SEQ ID NO: 963832
gugaucacguuucaucuaa

SEQ ID NO: 963834 - RNA, 19 nt, Artificial Sequence
  Description of Artificial Sequence: Synthetic oligonucleotide
  Sense strand starting at position 1112 of SEQ ID NO: 913913
cugagugcuccauaacuga

SEQ ID NO: 963835 - RNA, 19 nt, Artificial Sequence
  Description of Artificial Sequence: Synthetic oligonucleotide
  Antisense strand to SEQ ID NO: 963834
ucaguuauggagcacucag

SEQ ID NO: 963836 - RNA, 19 nt, Artificial Sequence
  Description of Artificial Sequence: Synthetic oligonucleotide
  Sense strand starting at position 2983 of SEQ ID NO: 913913
guaaacagucuaugggauu

SEQ ID NO: 963837 - RNA, 19 nt, Artificial Sequence
  Description of Artificial Sequence: Synthetic oligonucleotide
  Antisense strand to SEQ ID NO: 963836
aaucccauagacuguuuac

SEQ ID NO: 963838 - RNA, 19 nt, Artificial Sequence
  Description of Artificial Sequence: Synthetic oligonucleotide
  Sense strand starting at position 1968 of SEQ ID NO: 913913
gcggaaguucgcgccagaa

SEQ ID NO: 963839 - RNA, 19 nt, Artificial Sequence
  Description of Artificial Sequence: Synthetic oligonucleotide
  Antisense strand to SEQ ID NO: 963838
uucuggcgcgaacuuccgc

SEQ ID NO: 963840 - RNA, 19 nt, Artificial Sequence
  Description of Artificial Sequence: Synthetic oligonucleotide
  Sense strand starting at position 962 of SEQ ID NO: 913913
gaguaauuacuucgaacau

SEQ ID NO: 963841 - RNA, 19 nt, Artificial Sequence
  Description of Artificial Sequence: Synthetic oligonucleotide
  Antisense strand to SEQ ID NO: 963840
auguucgaaguaauuacuc

SEQ ID NO: 963842 - RNA, 19 nt, Artificial Sequence
  Description of Artificial Sequence: Synthetic oligonucleotide
  Sense strand starting at position 1123 of SEQ ID NO: 913913
auaacugagugguucucaa

SEQ ID NO: 963843 - RNA, 19 nt, Artificial Sequence
  Description of Artificial Sequence: Synthetic oligonucleotide
  Antisense strand to SEQ ID NO: 963842
uugagaaccacucaguuau

SEQ ID NO: 963844 - RNA, 19 nt, Artificial Sequence
  Description of Artificial Sequence: Synthetic oligonucleotide
  Sense strand starting at position 3388 of SEQ ID NO: 913913
uaaguuggguuauuacaca

SEQ ID NO: 963845 - RNA, 19 nt, Artificial Sequence
  Description of Artificial Sequence: Synthetic oligonucleotide
  Antisense strand to SEQ ID NO: 963844
uguguaauaacccaacuua

SEQ ID NO: 963846 - RNA, 19 nt, Artificial Sequence
  Description of Artificial Sequence: Synthetic oligonucleotide
  Sense strand starting at position 3545 of SEQ ID NO: 913913
gaugaaacgugaucacucu

SEQ ID NO: 963847 - RNA, 19 nt, Artificial Sequence
  Description of Artificial Sequence: Synthetic oligonucleotide
  Antisense strand to SEQ ID NO: 963846
agagugaucacguuucauc

SEQ ID NO: 963848 - RNA, 19 nt, Artificial Sequence
  Description of Artificial Sequence: Synthetic oligonucleotide
  Sense strand starting at position 699 of SEQ ID NO: 913913
gucaauaauuuggcgcuua

SEQ ID NO: 963849 - RNA, 19 nt, Artificial Sequence
  Description of Artificial Sequence: Synthetic oligonucleotide
  Antisense strand to SEQ ID NO: 963848
uaagcgccaaauuauugac

SEQ ID NO: 963850 - RNA, 19 nt, Artificial Sequence
  Description of Artificial Sequence: Synthetic oligonucleotide
  Sense strand starting at position 1470 of SEQ ID NO: 913913
gggagcacuuugucaacaa

SEQ ID NO: 963851 - RNA, 19 nt, Artificial Sequence
  Description of Artificial Sequence: Synthetic oligonucleotide
  Antisense strand to SEQ ID NO: 963850
uuguugacaaagugcuccc

SEQ ID NO: 963852 - RNA, 19 nt, Artificial Sequence
  Description of Artificial Sequence: Synthetic oligonucleotide
  Sense strand starting at position 3803 of SEQ ID NO: 913913
aagagaacugcuugaagcu

SEQ ID NO: 963853 - RNA, 19 nt, Artificial Sequence
  Description of Artificial Sequence: Synthetic oligonucleotide
  Antisense strand to SEQ ID NO: 963852
agcuucaagcaguucucuu

SEQ ID NO: 963854 - RNA, 19 nt, Artificial Sequence
  Description of Artificial Sequence: Synthetic oligonucleotide
  Sense strand starting at position 814 of SEQ ID NO: 913913
guuaauuugucaccggcau

SEQ ID NO: 963855 - RNA, 19 nt, Artificial Sequence
  Description of Artificial Sequence: Synthetic oligonucleotide
  Antisense strand to SEQ ID NO: 963854
augccggugacaaauuaac

SEQ ID NO: 963856 - RNA, 19 nt, Artificial Sequence
  Description of Artificial Sequence: Synthetic oligonucleotide
  Sense strand starting at position 3642 of SEQ ID NO: 913913
gugaaaggguuucccaacu

SEQ ID NO: 963857 - RNA, 19 nt, Artificial Sequence
  Description of Artificial Sequence: Synthetic oligonucleotide
  Antisense strand to SEQ ID NO: 963856
aguugggaaacccuuucac

SEQ ID NO: 963858 - RNA, 19 nt, Artificial Sequence
  Description of Artificial Sequence: Synthetic oligonucleotide
  Sense strand starting at position 960 of SEQ ID NO: 913913
cugaguaauuacuucgaac

SEQ ID NO: 963859 - RNA, 19 nt, Artificial Sequence
  Description of Artificial Sequence: Synthetic oligonucleotide
  Antisense strand to SEQ ID NO: 963858
guucgaaguaauuacucag

SEQ ID NO: 963860 - RNA, 19 nt, Artificial Sequence
  Description of Artificial Sequence: Synthetic oligonucleotide
  Sense strand starting at position 1030 of SEQ ID NO: 913913
cccuuuaugcagcaugaau

SEQ ID NO: 963861 - RNA, 19 nt, Artificial Sequence
  Description of Artificial Sequence: Synthetic oligonucleotide
  Antisense strand to SEQ ID NO: 963860
auucaugcugcauaaaggg

SEQ ID NO: 963862 - RNA, 19 nt, Artificial Sequence
  Description of Artificial Sequence: Synthetic oligonucleotide
  Sense strand starting at position 3427 of SEQ ID NO: 913913
gugcaucaugucuacuaaa

SEQ ID NO: 963863 - RNA, 19 nt, Artificial Sequence
  Description of Artificial Sequence: Synthetic oligonucleotide
  Antisense strand to SEQ ID NO: 963862
uuuaguagacaugaugcac

SEQ ID NO: 963864 - RNA, 19 nt, Artificial Sequence
  Description of Artificial Sequence: Synthetic oligonucleotide
  Sense strand starting at position 1110 of SEQ ID NO: 913913
cucugagugcuccauaacu

SEQ ID NO: 963865 - RNA, 19 nt, Artificial Sequence
  Description of Artificial Sequence: Synthetic oligonucleotide
  Antisense strand to SEQ ID NO: 963864
aguuauggagcacucagag

SEQ ID NO: 963866 - RNA, 19 nt, Artificial Sequence
  Description of Artificial Sequence: Synthetic oligonucleotide
  Sense strand starting at position 2995 of SEQ ID NO: 913913
ugggauuguuggguugauu

SEQ ID NO: 963867 - RNA, 19 nt, Artificial Sequence
  Description of Artificial Sequence: Synthetic oligonucleotide
  Antisense strand to SEQ ID NO: 963866
aaucaacccaacaauccca

SEQ ID NO: 963868 - RNA, 19 nt, Artificial Sequence
  Description of Artificial Sequence: Synthetic oligonucleotide
  Sense strand starting at position 916 of SEQ ID NO: 913913
gguuaucaccugcaacagu

SEQ ID NO: 963869 - RNA, 19 nt, Artificial Sequence
  Description of Artificial Sequence: Synthetic oligonucleotide
  Antisense strand to SEQ ID NO: 963868
acuguugcaggugauaacc

SEQ ID NO: 963870 - RNA, 19 nt, Artificial Sequence
  Description of Artificial Sequence: Synthetic oligonucleotide
  Sense strand starting at position 3192 of SEQ ID NO: 913913
gccugauucugauucucaa

SEQ ID NO: 963871 - RNA, 19 nt, Artificial Sequence
  Description of Artificial Sequence: Synthetic oligonucleotide
  Antisense strand to SEQ ID NO: 963870
uugagaaucagaaucaggc

SEQ ID NO: 963872 - RNA, 19 nt, Artificial Sequence
  Description of Artificial Sequence: Synthetic oligonucleotide
  Sense strand starting at position 602 of SEQ ID NO: 913913
auuauaugguaagugcaua

SEQ ID NO: 963873 - RNA, 19 nt, Artificial Sequence
  Description of Artificial Sequence: Synthetic oligonucleotide
  Antisense strand to SEQ ID NO: 963872
uaugcacuuaccauauaau

SEQ ID NO: 963874 - RNA, 19 nt, Artificial Sequence
  Description of Artificial Sequence: Synthetic oligonucleotide
  Sense strand starting at position 344 of SEQ ID NO: 913913
guguuacacguggaccaau

SEQ ID NO: 963875 - RNA, 19 nt, Artificial Sequence
  Description of Artificial Sequence: Synthetic oligonucleotide
  Antisense strand to SEQ ID NO: 963874
auugguccacguguaacac

SEQ ID NO: 963876 - RNA, 19 nt, Artificial Sequence
  Description of Artificial Sequence: Synthetic oligonucleotide
  Sense strand starting at position 1120 of SEQ ID NO: 913913
uccauaacugagugguucu

SEQ ID NO: 963877 - RNA, 19 nt, Artificial Sequence
  Description of Artificial Sequence: Synthetic oligonucleotide
  Antisense strand to SEQ ID NO: 963876
agaaccacucaguuaugga

SEQ ID NO: 963878 - RNA, 19 nt, Artificial Sequence
  Description of Artificial Sequence: Synthetic oligonucleotide
  Sense strand starting at position 627 of SEQ ID NO: 913913
auggcauuauugcuauaau

SEQ ID NO: 963879 - RNA, 19 nt, Artificial Sequence
  Description of Artificial Sequence: Synthetic oligonucleotide
  Antisense strand to SEQ ID NO: 963878
auuauagcaauaaugccau

SEQ ID NO: 963880 - RNA, 19 nt, Artificial Sequence
  Description of Artificial Sequence: Synthetic oligonucleotide
  Sense strand starting at position 3629 of SEQ ID NO: 913913
ggguccgugagaugugaaa

SEQ ID NO: 963881 - RNA, 19 nt, Artificial Sequence
  Description of Artificial Sequence: Synthetic oligonucleotide
  Antisense strand to SEQ ID NO: 963880
uuucacaucucacggaccc

SEQ ID NO: 963882 - RNA, 19 nt, Artificial Sequence
  Description of Artificial Sequence: Synthetic oligonucleotide
  Sense strand starting at position 230 of SEQ ID NO: 913913
gcacccauggccuagaguu

SEQ ID NO: 963883 - RNA, 19 nt, Artificial Sequence
  Description of Artificial Sequence: Synthetic oligonucleotide
  Antisense strand to SEQ ID NO: 963882
aacucuaggccaugggugc

SEQ ID NO: 963884 - RNA, 19 nt, Artificial Sequence
  Description of Artificial Sequence: Synthetic oligonucleotide
  Sense strand starting at position 2151 of SEQ ID NO: 913913
auccuuuguucccuugaca

SEQ ID NO: 963885 - RNA, 19 nt, Artificial Sequence
  Description of Artificial Sequence: Synthetic oligonucleotide
  Antisense strand to SEQ ID NO: 963884
ugucaagggaacaaaggau

SEQ ID NO: 963886 - RNA, 19 nt, Artificial Sequence
  Description of Artificial Sequence: Synthetic oligonucleotide
  Sense strand starting at position 3710 of SEQ ID NO: 913913
cuuugagauggcuggcaua

SEQ ID NO: 963887 - RNA, 19 nt, Artificial Sequence
  Description of Artificial Sequence: Synthetic oligonucleotide
  Antisense strand to SEQ ID NO: 963886
uaugccagccaucucaaag

SEQ ID NO: 963888 - RNA, 19 nt, Artificial Sequence
  Description of Artificial Sequence: Synthetic oligonucleotide
  Sense strand starting at position 3623 of SEQ ID NO: 913913
caaccuggguccgugagau

SEQ ID NO: 963889 - RNA, 19 nt, Artificial Sequence
  Description of Artificial Sequence: Synthetic oligonucleotide
  Antisense strand to SEQ ID NO: 963888
aucucacggacccagguug

SEQ ID NO: 963890 - RNA, 19 nt, Artificial Sequence
  Description of Artificial Sequence: Synthetic oligonucleotide
  Sense strand starting at position 1812 of SEQ ID NO: 913914
ggaaaucacugagccaaug

SEQ ID NO: 963891 - RNA, 19 nt, Artificial Sequence
  Description of Artificial Sequence: Synthetic oligonucleotide
  Antisense strand to SEQ ID NO: 963890
cauuggcucagugauuucc

SEQ ID NO: 963892 - RNA, 19 nt, Artificial Sequence
  Description of Artificial Sequence: Synthetic oligonucleotide
  Sense strand starting at position 3421 of SEQ ID NO: 913914
aucagacauuuccaaagga

SEQ ID NO: 963893 - RNA, 19 nt, Artificial Sequence
  Description of Artificial Sequence: Synthetic oligonucleotide
  Antisense strand to SEQ ID NO: 963892
uccuuuggaaaugucugau

SEQ ID NO: 963894 - RNA, 19 nt, Artificial Sequence
  Description of Artificial Sequence: Synthetic oligonucleotide
  Sense strand starting at position 2543 of SEQ ID NO: 913914
ugacauauucuuuagaguu

SEQ ID NO: 963895 - RNA, 19 nt, Artificial Sequence
  Description of Artificial Sequence: Synthetic oligonucleotide
  Antisense strand to SEQ ID NO: 963894
aacucuaaagaauauguca

SEQ ID NO: 963896 - RNA, 19 nt, Artificial Sequence
  Description of Artificial Sequence: Synthetic oligonucleotide
  Sense strand starting at position 1800 of SEQ ID NO: 913914
agagaugcucauggaaauc

SEQ ID NO: 963897 - RNA, 19 nt, Artificial Sequence
  Description of Artificial Sequence: Synthetic oligonucleotide
  Antisense strand to SEQ ID NO: 963896
gauuuccaugagcaucucu

SEQ ID NO: 963898 - RNA, 19 nt, Artificial Sequence
  Description of Artificial Sequence: Synthetic oligonucleotide
  Sense strand starting at position 1186 of SEQ ID NO: 913914
auucgaguucuugaagaca

SEQ ID NO: 963899 - RNA, 19 nt, Artificial Sequence
  Description of Artificial Sequence: Synthetic oligonucleotide
  Antisense strand to SEQ ID NO: 963898
ugucuucaagaacucgaau

SEQ ID NO: 963900 - RNA, 19 nt, Artificial Sequence
  Description of Artificial Sequence: Synthetic oligonucleotide
  Sense strand starting at position 2329 of SEQ ID NO: 913914
ccagaauuugggcgcauca

SEQ ID NO: 963901 - RNA, 19 nt, Artificial Sequence
  Description of Artificial Sequence: Synthetic oligonucleotide
  Antisense strand to SEQ ID NO: 963900
ugaugcgcccaaauucugg

SEQ ID NO: 963902 - RNA, 19 nt, Artificial Sequence
  Description of Artificial Sequence: Synthetic oligonucleotide
  Sense strand starting at position 2163 of SEQ ID NO: 913914
gggcgggauggucaaagau

SEQ ID NO: 963903 - RNA, 19 nt, Artificial Sequence
  Description of Artificial Sequence: Synthetic oligonucleotide
  Antisense strand to SEQ ID NO: 963902
aucuuugaccaucccgccc

SEQ ID NO: 963904 - RNA, 19 nt, Artificial Sequence
  Description of Artificial Sequence: Synthetic oligonucleotide
  Sense strand starting at position 1970 of SEQ ID NO: 913914
ccuauuucucggcggaaag

SEQ ID NO: 963905 - RNA, 19 nt, Artificial Sequence
  Description of Artificial Sequence: Synthetic oligonucleotide
  Antisense strand to SEQ ID NO: 963904
cuuuccgccgagaaauagg

SEQ ID NO: 963906 - RNA, 19 nt, Artificial Sequence
  Description of Artificial Sequence: Synthetic oligonucleotide
  Sense strand starting at position 347 of SEQ ID NO: 913914
guaacauuuaagugguguu

SEQ ID NO: 963907 - RNA, 19 nt, Artificial Sequence
  Description of Artificial Sequence: Synthetic oligonucleotide
  Antisense strand to SEQ ID NO: 963906
aacaccacuuaaauguuac

SEQ ID NO: 963908 - RNA, 19 nt, Artificial Sequence
  Description of Artificial Sequence: Synthetic oligonucleotide
  Sense strand starting at position 2379 of SEQ ID NO: 913914
cucucucaggcauacagau

SEQ ID NO: 963909 - RNA, 19 nt, Artificial Sequence
  Description of Artificial Sequence: Synthetic oligonucleotide
  Antisense strand to SEQ ID NO: 963908
aucuguaugccugagagag

SEQ ID NO: 963910 - RNA, 19 nt, Artificial Sequence
  Description of Artificial Sequence: Synthetic oligonucleotide
  Sense strand starting at position 2532 of SEQ ID NO: 913914
uguaucauaguugacauau

SEQ ID NO: 963911 - RNA, 19 nt, Artificial Sequence
  Description of Artificial Sequence: Synthetic oligonucleotide
  Antisense strand to SEQ ID NO: 963910
auaugucaacuaugauaca

SEQ ID NO: 963912 - RNA, 19 nt, Artificial Sequence
  Description of Artificial Sequence: Synthetic oligonucleotide
  Sense strand starting at position 1969 of SEQ ID NO: 913914
cccuauuucucggcggaaa

SEQ ID NO: 963913 - RNA, 19 nt, Artificial Sequence
  Description of Artificial Sequence: Synthetic oligonucleotide
  Antisense strand to SEQ ID NO: 963912
uuuccgccgagaaauaggg

SEQ ID NO: 963914 - RNA, 19 nt, Artificial Sequence
  Description of Artificial Sequence: Synthetic oligonucleotide
  Sense strand starting at position 3301 of SEQ ID NO: 913914
gauaaagacuaguaauuug

SEQ ID NO: 963915 - RNA, 19 nt, Artificial Sequence
  Description of Artificial Sequence: Synthetic oligonucleotide
  Antisense strand to SEQ ID NO: 963914
caaauuacuagucuuuauc

SEQ ID NO: 963916 - RNA, 19 nt, Artificial Sequence
  Description of Artificial Sequence: Synthetic oligonucleotide
  Sense strand starting at position 113 of SEQ ID NO: 913914
aagaaagacguuuggaucu

SEQ ID NO: 963917 - RNA, 19 nt, Artificial Sequence
  Description of Artificial Sequence: Synthetic oligonucleotide
  Antisense strand to SEQ ID NO: 963916
agauccaaacgucuuucuu

SEQ ID NO: 963918 - RNA, 19 nt, Artificial Sequence
  Description of Artificial Sequence: Synthetic oligonucleotide
  Sense strand starting at position 2550 of SEQ ID NO: 913914
uucuuuagaguuuggaaga

SEQ ID NO: 963919 - RNA, 19 nt, Artificial Sequence
  Description of Artificial Sequence: Synthetic oligonucleotide
  Antisense strand to SEQ ID NO: 963918
ucuuccaaacucuaaagaa

SEQ ID NO: 963920 - RNA, 19 nt, Artificial Sequence
  Description of Artificial Sequence: Synthetic oligonucleotide
  Sense strand starting at position 3405 of SEQ ID NO: 913914
agugauaaaugucuaaauc

SEQ ID NO: 963921 - RNA, 19 nt, Artificial Sequence
  Description of Artificial Sequence: Synthetic oligonucleotide
  Antisense strand to SEQ ID NO: 963920
gauuuagacauuuaucacu

SEQ ID NO: 963922 - RNA, 19 nt, Artificial Sequence
  Description of Artificial Sequence: Synthetic oligonucleotide
  Sense strand starting at position 2827 of SEQ ID NO: 913914
agguacuuuccaugacaca

SEQ ID NO: 963923 - RNA, 19 nt, Artificial Sequence
  Description of Artificial Sequence: Synthetic oligonucleotide
  Antisense strand to SEQ ID NO: 963922
ugugucauggaaaguaccu

SEQ ID NO: 963924 - RNA, 19 nt, Artificial Sequence
  Description of Artificial Sequence: Synthetic oligonucleotide
  Sense strand starting at position 1002 of SEQ ID NO: 913914
acacaauuccuugagcagu

SEQ ID NO: 963925 - RNA, 19 nt, Artificial Sequence
  Description of Artificial Sequence: Synthetic oligonucleotide
  Antisense strand to SEQ ID NO: 963924
acugcucaaggaauugugu

SEQ ID NO: 963926 - RNA, 19 nt, Artificial Sequence
  Description of Artificial Sequence: Synthetic oligonucleotide
  Sense strand starting at position 2541 of SEQ ID NO: 913914
guugacauauucuuuagag

SEQ ID NO: 963927 - RNA, 19 nt, Artificial Sequence
  Description of Artificial Sequence: Synthetic oligonucleotide
  Antisense strand to SEQ ID NO: 963926
cucuaaagaauaugucaac

SEQ ID NO: 963928 - RNA, 19 nt, Artificial Sequence
  Description of Artificial Sequence: Synthetic oligonucleotide
  Sense strand starting at position 3239 of SEQ ID NO: 913914
agaguaaaucaagguuccu

SEQ ID NO: 963929 - RNA, 19 nt, Artificial Sequence
  Description of Artificial Sequence: Synthetic oligonucleotide
  Antisense strand to SEQ ID NO: 963928
aggaaccuugauuuacucu

SEQ ID NO: 963930 - RNA, 19 nt, Artificial Sequence
  Description of Artificial Sequence: Synthetic oligonucleotide
  Sense strand starting at position 896 of SEQ ID NO: 913914
aaucaugugccugagauuc

SEQ ID NO: 963931 - RNA, 19 nt, Artificial Sequence
  Description of Artificial Sequence: Synthetic oligonucleotide
  Antisense strand to SEQ ID NO: 963930
gaaucucaggcacaugauu

SEQ ID NO: 963932 - RNA, 19 nt, Artificial Sequence
  Description of Artificial Sequence: Synthetic oligonucleotide
  Sense strand starting at position 361 of SEQ ID NO: 913914
guguuacucuaacuaagaa

SEQ ID NO: 963933 - RNA, 19 nt, Artificial Sequence
  Description of Artificial Sequence: Synthetic oligonucleotide
  Antisense strand to SEQ ID NO: 963932
uucuuaguuagaguaacac

SEQ ID NO: 963934 - RNA, 19 nt, Artificial Sequence
  Description of Artificial Sequence: Synthetic oligonucleotide
  Sense strand starting at position 1636 of SEQ ID NO: 913914
cgaauuaauagugacgagu

SEQ ID NO: 963935 - RNA, 19 nt, Artificial Sequence
  Description of Artificial Sequence: Synthetic oligonucleotide
  Antisense strand to SEQ ID NO: 963934
acucgucacuauuaauucg

SEQ ID NO: 963936 - RNA, 19 nt, Artificial Sequence
  Description of Artificial Sequence: Synthetic oligonucleotide
  Sense strand starting at position 2542 of SEQ ID NO: 913914
uugacauauucuuuagagu

SEQ ID NO: 963937 - RNA, 19 nt, Artificial Sequence
  Description of Artificial Sequence: Synthetic oligonucleotide
  Antisense strand to SEQ ID NO: 963936
acucuaaagaauaugucaa

SEQ ID NO: 963938 - RNA, 19 nt, Artificial Sequence
  Description of Artificial Sequence: Synthetic oligonucleotide
  Sense strand starting at position 1971 of SEQ ID NO: 913914
cuauuucucggcggaaagu

SEQ ID NO: 963939 - RNA, 19 nt, Artificial Sequence
  Description of Artificial Sequence: Synthetic oligonucleotide
  Antisense strand to SEQ ID NO: 963938
acuuuccgccgagaaauag

SEQ ID NO: 963940 - RNA, 19 nt, Artificial Sequence
  Description of Artificial Sequence: Synthetic oligonucleotide
  Sense strand starting at position 3251 of SEQ ID NO: 913914
gguuccuaggguugaaaca

SEQ ID NO: 963941 - RNA, 19 nt, Artificial Sequence
  Description of Artificial Sequence: Synthetic oligonucleotide
  Antisense strand to SEQ ID NO: 963940
uguuucaacccuaggaacc

SEQ ID NO: 963942 - RNA, 19 nt, Artificial Sequence
  Description of Artificial Sequence: Synthetic oligonucleotide
  Sense strand starting at position 438 of SEQ ID NO: 913914
aggacaggcuuugcaauaa

SEQ ID NO: 963943 - RNA, 19 nt, Artificial Sequence
  Description of Artificial Sequence: Synthetic oligonucleotide
  Antisense strand to SEQ ID NO: 963942
uuauugcaaagccuguccu

SEQ ID NO: 963944 - RNA, 19 nt, Artificial Sequence
  Description of Artificial Sequence: Synthetic oligonucleotide
  Sense strand starting at position 2254 of SEQ ID NO: 913914
gaagauguugcuggacuga

SEQ ID NO: 963945 - RNA, 19 nt, Artificial Sequence
  Description of Artificial Sequence: Synthetic oligonucleotide
  Antisense strand to SEQ ID NO: 963944
ucaguccagcaacaucuuc

SEQ ID NO: 963946 - RNA, 19 nt, Artificial Sequence
  Description of Artificial Sequence: Synthetic oligonucleotide
  Sense strand starting at position 3339 of SEQ ID NO: 913914
uguccuugaccauagcaua

SEQ ID NO: 963947 - RNA, 19 nt, Artificial Sequence
  Description of Artificial Sequence: Synthetic oligonucleotide
  Antisense strand to SEQ ID NO: 963946
uaugcuauggucaaggaca

SEQ ID NO: 963948 - RNA, 19 nt, Artificial Sequence
  Description of Artificial Sequence: Synthetic oligonucleotide
  Sense strand starting at position 1576 of SEQ ID NO: 913914
uguuuaguucuccaccaag

SEQ ID NO: 963949 - RNA, 19 nt, Artificial Sequence
  Description of Artificial Sequence: Synthetic oligonucleotide
  Antisense strand to SEQ ID NO: 963948
cuugguggagaacuaaaca

SEQ ID NO: 963950 - RNA, 19 nt, Artificial Sequence
  Description of Artificial Sequence: Synthetic oligonucleotide
  Sense strand starting at position 1875 of SEQ ID NO: 913914
aacugaauccguggugaaa

SEQ ID NO: 963951 - RNA, 19 nt, Artificial Sequence
  Description of Artificial Sequence: Synthetic oligonucleotide
  Antisense strand to SEQ ID NO: 963950
uuucaccacggauucaguu

SEQ ID NO: 963952 - RNA, 19 nt, Artificial Sequence
  Description of Artificial Sequence: Synthetic oligonucleotide
  Sense strand starting at position 437 of SEQ ID NO: 913914
gaggacaggcuuugcaaua

SEQ ID NO: 963953 - RNA, 19 nt, Artificial Sequence
  Description of Artificial Sequence: Synthetic oligonucleotide
  Antisense strand to SEQ ID NO: 963952
uauugcaaagccuguccuc

SEQ ID NO: 963954 - RNA, 19 nt, Artificial Sequence
  Description of Artificial Sequence: Synthetic oligonucleotide
  Sense strand starting at position 1436 of SEQ ID NO: 913914
gugugcgaauauuugaguu

SEQ ID NO: 963955 - RNA, 19 nt, Artificial Sequence
  Description of Artificial Sequence: Synthetic oligonucleotide
  Antisense strand to SEQ ID NO: 963954
aacucaaauauucgcacac

SEQ ID NO: 963956 - RNA, 19 nt, Artificial Sequence
  Description of Artificial Sequence: Synthetic oligonucleotide
  Sense strand starting at position 894 of SEQ ID NO: 913914
caaaucaugugccugagau

SEQ ID NO: 963957 - RNA, 19 nt, Artificial Sequence
  Description of Artificial Sequence: Synthetic oligonucleotide
  Antisense strand to SEQ ID NO: 963956
aucucaggcacaugauuug

SEQ ID NO: 963958 - RNA, 19 nt, Artificial Sequence
  Description of Artificial Sequence: Synthetic oligonucleotide
  Sense strand starting at position 261 of SEQ ID NO: 913914
agucuaguaccucaagcua

SEQ ID NO: 963959 - RNA, 19 nt, Artificial Sequence
  Description of Artificial Sequence: Synthetic oligonucleotide
  Antisense strand to SEQ ID NO: 963958
uagcuugagguacuagacu

SEQ ID NO: 963960 - RNA, 19 nt, Artificial Sequence
  Description of Artificial Sequence: Synthetic oligonucleotide
  Sense strand starting at position 895 of SEQ ID NO: 913914
aaaucaugugccugagauu

SEQ ID NO: 963961 - RNA, 19 nt, Artificial Sequence
  Description of Artificial Sequence: Synthetic oligonucleotide
  Antisense strand to SEQ ID NO: 963960
aaucucaggcacaugauuu

SEQ ID NO: 963962 - RNA, 19 nt, Artificial Sequence
  Description of Artificial Sequence: Synthetic oligonucleotide
  Sense strand starting at position 1774 of SEQ ID NO: 913914
accucaucgaggcaauguu

SEQ ID NO: 963963 - RNA, 19 nt, Artificial Sequence
  Description of Artificial Sequence: Synthetic oligonucleotide
  Antisense strand to SEQ ID NO: 963962
aacauugccucgaugaggu

SEQ ID NO: 963964 - RNA, 19 nt, Artificial Sequence
  Description of Artificial Sequence: Synthetic oligonucleotide
  Sense strand starting at position 2530 of SEQ ID NO: 913914
cuuguaucauaguugacau

SEQ ID NO: 963965 - RNA, 19 nt, Artificial Sequence
  Description of Artificial Sequence: Synthetic oligonucleotide
  Antisense strand to SEQ ID NO: 963964
augucaacuaugauacaag

SEQ ID NO: 963966 - RNA, 19 nt, Artificial Sequence
  Description of Artificial Sequence: Synthetic oligonucleotide
  Sense strand starting at position 2165 of SEQ ID NO: 913914
gcgggauggucaaagauau

SEQ ID NO: 963967 - RNA, 19 nt, Artificial Sequence
  Description of Artificial Sequence: Synthetic oligonucleotide
  Antisense strand to SEQ ID NO: 963966
auaucuuugaccaucccgc

SEQ ID NO: 963968 - RNA, 19 nt, Artificial Sequence
  Description of Artificial Sequence: Synthetic oligonucleotide
  Sense strand starting at position 3333 of SEQ ID NO: 913914
auaccuuguccuugaccau

SEQ ID NO: 963969 - RNA, 19 nt, Artificial Sequence
  Description of Artificial Sequence: Synthetic oligonucleotide
  Antisense strand to SEQ ID NO: 963968
auggucaaggacaagguau

SEQ ID NO: 963970 - RNA, 19 nt, Artificial Sequence
  Description of Artificial Sequence: Synthetic oligonucleotide
  Sense strand starting at position 2536 of SEQ ID NO: 913915
ggguguugacgggaugaaa

SEQ ID NO: 963971 - RNA, 19 nt, Artificial Sequence
  Description of Artificial Sequence: Synthetic oligonucleotide
  Antisense strand to SEQ ID NO: 963970
uuucaucccgucaacaccc

SEQ ID NO: 963972 - RNA, 19 nt, Artificial Sequence
  Description of Artificial Sequence: Synthetic oligonucleotide
  Sense strand starting at position 872 of SEQ ID NO: 913915
uuugcauucguugcuugaa

SEQ ID NO: 963973 - RNA, 19 nt, Artificial Sequence
  Description of Artificial Sequence: Synthetic oligonucleotide
  Antisense strand to SEQ ID NO: 963972
uucaagcaacgaaugcaaa

SEQ ID NO: 963974 - RNA, 19 nt, Artificial Sequence
  Description of Artificial Sequence: Synthetic oligonucleotide
  Sense strand starting at position 892 of SEQ ID NO: 913915
aggcgaaaugaauagucua

SEQ ID NO: 963975 - RNA, 19 nt, Artificial Sequence
  Description of Artificial Sequence: Synthetic oligonucleotide
  Antisense strand to SEQ ID NO: 963974
uagacuauucauuucgccu

SEQ ID NO: 963976 - RNA, 19 nt, Artificial Sequence
  Description of Artificial Sequence: Synthetic oligonucleotide
  Sense strand starting at position 482 of SEQ ID NO: 913915
ggucaaugagaguaaugca

SEQ ID NO: 963977 - RNA, 19 nt, Artificial Sequence
  Description of Artificial Sequence: Synthetic oligonucleotide
  Antisense strand to SEQ ID NO: 963976
ugcauuacucucauugacc

SEQ ID NO: 963978 - RNA, 19 nt, Artificial Sequence
  Description of Artificial Sequence: Synthetic oligonucleotide
  Sense strand starting at position 226 of SEQ ID NO: 913915
ucuuuaggaagaugugaug

SEQ ID NO: 963979 - RNA, 19 nt, Artificial Sequence
  Description of Artificial Sequence: Synthetic oligonucleotide
  Antisense strand to SEQ ID NO: 963978
caucacaucuuccuaaaga

SEQ ID NO: 963980 - RNA, 19 nt, Artificial Sequence
  Description of Artificial Sequence: Synthetic oligonucleotide
  Sense strand starting at position 3814 of SEQ ID NO: 913915
uguauuaauuucuuacggu

SEQ ID NO: 963981 - RNA, 19 nt, Artificial Sequence
  Description of Artificial Sequence: Synthetic oligonucleotide
  Antisense strand to SEQ ID NO: 963980
accguaagaaauuaauaca

SEQ ID NO: 963982 - RNA, 19 nt, Artificial Sequence
  Description of Artificial Sequence: Synthetic oligonucleotide
  Sense strand starting at position 504 of SEQ ID NO: 913915
accuauacuguugaaaugu

SEQ ID NO: 963983 - RNA, 19 nt, Artificial Sequence
  Description of Artificial Sequence: Synthetic oligonucleotide
  Antisense strand to SEQ ID NO: 963982
acauuucaacaguauaggu

SEQ ID NO: 963984 - RNA, 19 nt, Artificial Sequence
  Description of Artificial Sequence: Synthetic oligonucleotide
  Sense strand starting at position 1305 of SEQ ID NO: 913915
ugaccuuuccaggaagugu

SEQ ID NO: 963985 - RNA, 19 nt, Artificial Sequence
  Description of Artificial Sequence: Synthetic oligonucleotide
  Antisense strand to SEQ ID NO: 963984
acacuuccuggaaagguca

SEQ ID NO: 963986 - RNA, 19 nt, Artificial Sequence
  Description of Artificial Sequence: Synthetic oligonucleotide
  Sense strand starting at position 2658 of SEQ ID NO: 913915
gcagcuagcuauuuccaga

SEQ ID NO: 963987 - RNA, 19 nt, Artificial Sequence
  Description of Artificial Sequence: Synthetic oligonucleotide
  Antisense strand to SEQ ID NO: 963986
ucuggaaauagcuagcugc

SEQ ID NO: 963988 - RNA, 19 nt, Artificial Sequence
  Description of Artificial Sequence: Synthetic oligonucleotide
  Sense strand starting at position 2991 of SEQ ID NO: 913915
guaucaucagagcaaagca

SEQ ID NO: 963989 - RNA, 19 nt, Artificial Sequence
  Description of Artificial Sequence: Synthetic oligonucleotide
  Antisense strand to SEQ ID NO: 963988
ugcuuugcucugaugauac

SEQ ID NO: 963990 - RNA, 19 nt, Artificial Sequence
  Description of Artificial Sequence: Synthetic oligonucleotide
  Sense strand starting at position 3643 of SEQ ID NO: 913915
gugucuaaacacuauggua

SEQ ID NO: 963991 - RNA, 19 nt, Artificial Sequence
  Description of Artificial Sequence: Synthetic oligonucleotide
  Antisense strand to SEQ ID NO: 963990
uaccauaguguuuagacac

SEQ ID NO: 963992 - RNA, 19 nt, Artificial Sequence
  Description of Artificial Sequence: Synthetic oligonucleotide
  Sense strand starting at position 800 of SEQ ID NO: 913915
acgcaauaacacuaaguuu

SEQ ID NO: 963993 - RNA, 19 nt, Artificial Sequence
  Description of Artificial Sequence: Synthetic oligonucleotide
  Antisense strand to SEQ ID NO: 963992
aaacuuaguguuauugcgu

SEQ ID NO: 963994 - RNA, 19 nt, Artificial Sequence
  Description of Artificial Sequence: Synthetic oligonucleotide
  Sense strand starting at position 1118 of SEQ ID NO: 913915
guggccugccggagucaaa

SEQ ID NO: 963995 - RNA, 19 nt, Artificial Sequence
  Description of Artificial Sequence: Synthetic oligonucleotide
  Antisense strand to SEQ ID NO: 963994
uuugacuccggcaggccac

SEQ ID NO: 963996 - RNA, 19 nt, Artificial Sequence
  Description of Artificial Sequence: Synthetic oligonucleotide
  Sense strand starting at position 3636 of SEQ ID NO: 913915
aggguuugugucuaaacac

SEQ ID NO: 963997 - RNA, 19 nt, Artificial Sequence
  Description of Artificial Sequence: Synthetic oligonucleotide
  Antisense strand to SEQ ID NO: 963996
guguuuagacacaaacccu

SEQ ID NO: 963998 - RNA, 19 nt, Artificial Sequence
  Description of Artificial Sequence: Synthetic oligonucleotide
  Sense strand starting at position 985 of SEQ ID NO: 913915
uguaauggugacuagucau

SEQ ID NO: 963999 - RNA, 19 nt, Artificial Sequence
  Description of Artificial Sequence: Synthetic oligonucleotide
  Antisense strand to SEQ ID NO: 963998
augacuagucaccauuaca

SEQ ID NO: 964000 - RNA, 19 nt, Artificial Sequence
  Description of Artificial Sequence: Synthetic oligonucleotide
  Sense strand starting at position 354 of SEQ ID NO: 913915
gcaucaaaccuuugaacug

SEQ ID NO: 964001 - RNA, 19 nt, Artificial Sequence
  Description of Artificial Sequence: Synthetic oligonucleotide
  Antisense strand to SEQ ID NO: 964000
caguucaaagguuugaugc

SEQ ID NO: 964002 - RNA, 19 nt, Artificial Sequence
  Description of Artificial Sequence: Synthetic oligonucleotide
  Sense strand starting at position 470 of SEQ ID NO: 913915
accuuaauucugggucaau

SEQ ID NO: 964003 - RNA, 19 nt, Artificial Sequence
  Description of Artificial Sequence: Synthetic oligonucleotide
  Antisense strand to SEQ ID NO: 964002
auugacccagaauuaaggu

SEQ ID NO: 964004 - RNA, 19 nt, Artificial Sequence
  Description of Artificial Sequence: Synthetic oligonucleotide
  Sense strand starting at position 471 of SEQ ID NO: 913915
ccuuaauucugggucaaug

SEQ ID NO: 964005 - RNA, 19 nt, Artificial Sequence
  Description of Artificial Sequence: Synthetic oligonucleotide
  Antisense strand to SEQ ID NO: 964004
cauugacccagaauuaagg

SEQ ID NO: 964006 - RNA, 19 nt, Artificial Sequence
  Description of Artificial Sequence: Synthetic oligonucleotide
  Sense strand starting at position 2700 of SEQ ID NO: 913915
agcucucaccagugagaaa

SEQ ID NO: 964007 - RNA, 19 nt, Artificial Sequence
  Description of Artificial Sequence: Synthetic oligonucleotide
  Antisense strand to SEQ ID NO: 964006
uuucucacuggugagagcu

SEQ ID NO: 964008 - RNA, 19 nt, Artificial Sequence
  Description of Artificial Sequence: Synthetic oligonucleotide
  Sense strand starting at position 554 of SEQ ID NO: 913915
agaaauaagucuguguaug

SEQ ID NO: 964009 - RNA, 19 nt, Artificial Sequence
  Description of Artificial Sequence: Synthetic oligonucleotide
  Antisense strand to SEQ ID NO: 964008
cauacacagacuuauuucu

SEQ ID NO: 964010 - RNA, 19 nt, Artificial Sequence
  Description of Artificial Sequence: Synthetic oligonucleotide
  Sense strand starting at position 3073 of SEQ ID NO: 913915
ccauacuguugacucauau

SEQ ID NO: 964011 - RNA, 19 nt, Artificial Sequence
  Description of Artificial Sequence: Synthetic oligonucleotide
  Antisense strand to SEQ ID NO: 964010
auaugagucaacaguaugg

SEQ ID NO: 964012 - RNA, 19 nt, Artificial Sequence
  Description of Artificial Sequence: Synthetic oligonucleotide
  Sense strand starting at position 854 of SEQ ID NO: 913915
ucacauuauggucaguagu

SEQ ID NO: 964013 - RNA, 19 nt, Artificial Sequence
  Description of Artificial Sequence: Synthetic oligonucleotide
  Antisense strand to SEQ ID NO: 964012
acuacugaccauaauguga

SEQ ID NO: 964014 - RNA, 19 nt, Artificial Sequence
  Description of Artificial Sequence: Synthetic oligonucleotide
  Sense strand starting at position 982 of SEQ ID NO: 913915
cccuguaauggugacuagu

SEQ ID NO: 964015 - RNA, 19 nt, Artificial Sequence
  Description of Artificial Sequence: Synthetic oligonucleotide
  Antisense strand to SEQ ID NO: 964014
acuagucaccauuacaggg

SEQ ID NO: 964016 - RNA, 19 nt, Artificial Sequence
  Description of Artificial Sequence: Synthetic oligonucleotide
  Sense strand starting at position 3645 of SEQ ID NO: 913915
gucuaaacacuaugguacu

SEQ ID NO: 964017 - RNA, 19 nt, Artificial Sequence
  Description of Artificial Sequence: Synthetic oligonucleotide
  Antisense strand to SEQ ID NO: 964016
aguaccauaguguuuagac

SEQ ID NO: 964018 - RNA, 19 nt, Artificial Sequence
  Description of Artificial Sequence: Synthetic oligonucleotide
  Sense strand starting at position 2398 of SEQ ID NO: 913915
cuuugaaguuugucagaac

SEQ ID NO: 964019 - RNA, 19 nt, Artificial Sequence
  Description of Artificial Sequence: Synthetic oligonucleotide
  Antisense strand to SEQ ID NO: 964018
guucugacaaacuucaaag

SEQ ID NO: 964020 - RNA, 19 nt, Artificial Sequence
  Description of Artificial Sequence: Synthetic oligonucleotide
  Sense strand starting at position 242 of SEQ ID NO: 913915
augucuucugguuaagggu

SEQ ID NO: 964021 - RNA, 19 nt, Artificial Sequence
  Description of Artificial Sequence: Synthetic oligonucleotide
  Antisense strand to SEQ ID NO: 964020
acccuuaaccagaagacau

SEQ ID NO: 964022 - RNA, 19 nt, Artificial Sequence
  Description of Artificial Sequence: Synthetic oligonucleotide
  Sense strand starting at position 553 of SEQ ID NO: 913915
cagaaauaagucuguguau

SEQ ID NO: 964023 - RNA, 19 nt, Artificial Sequence
  Description of Artificial Sequence: Synthetic oligonucleotide
  Antisense strand to SEQ ID NO: 964022
auacacagacuuauuucug

SEQ ID NO: 964024 - RNA, 19 nt, Artificial Sequence
  Description of Artificial Sequence: Synthetic oligonucleotide
  Sense strand starting at position 2944 of SEQ ID NO: 913915
gugauuucuuuagaauaca

SEQ ID NO: 964025 - RNA, 19 nt, Artificial Sequence
  Description of Artificial Sequence: Synthetic oligonucleotide
  Antisense strand to SEQ ID NO: 964024
uguauucuaaagaaaucac

SEQ ID NO: 964026 - RNA, 19 nt, Artificial Sequence
  Description of Artificial Sequence: Synthetic oligonucleotide
  Sense strand starting at position 2975 of SEQ ID NO: 913915
gaaccaaauguuuguggua

SEQ ID NO: 964027 - RNA, 19 nt, Artificial Sequence
  Description of Artificial Sequence: Synthetic oligonucleotide
  Antisense strand to SEQ ID NO: 964026
uaccacaaacauuugguuc

SEQ ID NO: 964028 - RNA, 19 nt, Artificial Sequence
  Description of Artificial Sequence: Synthetic oligonucleotide
  Sense strand starting at position 2976 of SEQ ID NO: 913915
aaccaaauguuugugguau

SEQ ID NO: 964029 - RNA, 19 nt, Artificial Sequence
  Description of Artificial Sequence: Synthetic oligonucleotide
  Antisense strand to SEQ ID NO: 964028
auaccacaaacauuugguu

SEQ ID NO: 964030 - RNA, 19 nt, Artificial Sequence
  Description of Artificial Sequence: Synthetic oligonucleotide
  Sense strand starting at position 984 of SEQ ID NO: 913915
cuguaauggugacuaguca

SEQ ID NO: 964031 - RNA, 19 nt, Artificial Sequence
  Description of Artificial Sequence: Synthetic oligonucleotide
  Antisense strand to SEQ ID NO: 964030
ugacuagucaccauuacag

SEQ ID NO: 964032 - RNA, 19 nt, Artificial Sequence
  Description of Artificial Sequence: Synthetic oligonucleotide
  Sense strand starting at position 3635 of SEQ ID NO: 913915
caggguuugugucuaaaca

SEQ ID NO: 964033 - RNA, 19 nt, Artificial Sequence
  Description of Artificial Sequence: Synthetic oligonucleotide
  Antisense strand to SEQ ID NO: 964032
uguuuagacacaaacccug

SEQ ID NO: 964034 - RNA, 19 nt, Artificial Sequence
  Description of Artificial Sequence: Synthetic oligonucleotide
  Sense strand starting at position 2679 of SEQ ID NO: 913915
acugaauuccuugguccga

SEQ ID NO: 964035 - RNA, 19 nt, Artificial Sequence
  Description of Artificial Sequence: Synthetic oligonucleotide
  Antisense strand to SEQ ID NO: 964034
ucggaccaaggaauucagu

SEQ ID NO: 964036 - RNA, 19 nt, Artificial Sequence
  Description of Artificial Sequence: Synthetic oligonucleotide
  Sense strand starting at position 514 of SEQ ID NO: 913915
uugaaauguagugguuuac

SEQ ID NO: 964037 - RNA, 19 nt, Artificial Sequence
  Description of Artificial Sequence: Synthetic oligonucleotide
  Antisense strand to SEQ ID NO: 964036
guaaaccacuacauuucaa

SEQ ID NO: 964038 - RNA, 19 nt, Artificial Sequence
  Description of Artificial Sequence: Synthetic oligonucleotide
  Sense strand starting at position 736 of SEQ ID NO: 913915
gauaaauucuaaccguugu

SEQ ID NO: 964039 - RNA, 19 nt, Artificial Sequence
  Description of Artificial Sequence: Synthetic oligonucleotide
  Antisense strand to SEQ ID NO: 964038
acaacgguuagaauuuauc

SEQ ID NO: 964040 - RNA, 19 nt, Artificial Sequence
  Description of Artificial Sequence: Synthetic oligonucleotide
  Sense strand starting at position 740 of SEQ ID NO: 913915
aauucuaaccguuguugaa

SEQ ID NO: 964041 - RNA, 19 nt, Artificial Sequence
  Description of Artificial Sequence: Synthetic oligonucleotide
  Antisense strand to SEQ ID NO: 964040
uucaacaacgguuagaauu

SEQ ID NO: 964042 - RNA, 19 nt, Artificial Sequence
  Description of Artificial Sequence: Synthetic oligonucleotide
  Sense strand starting at position 856 of SEQ ID NO: 913915
acauuauggucaguaguuu

SEQ ID NO: 964043 - RNA, 19 nt, Artificial Sequence
  Description of Artificial Sequence: Synthetic oligonucleotide
  Antisense strand to SEQ ID NO: 964042
aaacuacugaccauaaugu

SEQ ID NO: 964044 - RNA, 19 nt, Artificial Sequence
  Description of Artificial Sequence: Synthetic oligonucleotide
  Sense strand starting at position 3083 of SEQ ID NO: 913915
gacucauauugggcuugca

SEQ ID NO: 964045 - RNA, 19 nt, Artificial Sequence
  Description of Artificial Sequence: Synthetic oligonucleotide
  Antisense strand to SEQ ID NO: 964044
ugcaagcccaauaugaguc

SEQ ID NO: 964046 - RNA, 19 nt, Artificial Sequence
  Description of Artificial Sequence: Synthetic oligonucleotide
  Sense strand starting at position 1262 of SEQ ID NO: 913915
aggagcuguccggauguuu

SEQ ID NO: 964047 - RNA, 19 nt, Artificial Sequence
  Description of Artificial Sequence: Synthetic oligonucleotide
  Antisense strand to SEQ ID NO: 964046
aaacauccggacagcuccu

SEQ ID NO: 964048 - RNA, 19 nt, Artificial Sequence
  Description of Artificial Sequence: Synthetic oligonucleotide
  Sense strand starting at position 2396 of SEQ ID NO: 913915
agcuuugaaguuugucaga

SEQ ID NO: 964049 - RNA, 19 nt, Artificial Sequence
  Description of Artificial Sequence: Synthetic oligonucleotide
  Antisense strand to SEQ ID NO: 964048
ucugacaaacuucaaagcu

SEQ ID NO: 964050 - RNA, 19 nt, Artificial Sequence
  Description of Artificial Sequence: Synthetic oligonucleotide
  Sense strand starting at position 2075 of SEQ ID NO: 913916
gagaaaguagguuaguauu

SEQ ID NO: 964051 - RNA, 19 nt, Artificial Sequence
  Description of Artificial Sequence: Synthetic oligonucleotide
  Antisense strand to SEQ ID NO: 964050
aauacuaaccuacuuucuc

SEQ ID NO: 964052 - RNA, 19 nt, Artificial Sequence
  Description of Artificial Sequence: Synthetic oligonucleotide
  Sense strand starting at position 3867 of SEQ ID NO: 913916
gaaagagauuuguagacag

SEQ ID NO: 964053 - RNA, 19 nt, Artificial Sequence
  Description of Artificial Sequence: Synthetic oligonucleotide
  Antisense strand to SEQ ID NO: 964052
cugucuacaaaucucuuuc

SEQ ID NO: 964054 - RNA, 19 nt, Artificial Sequence
  Description of Artificial Sequence: Synthetic oligonucleotide
  Sense strand starting at position 499 of SEQ ID NO: 913916
auaguaguuccugagacua

SEQ ID NO: 964055 - RNA, 19 nt, Artificial Sequence
  Description of Artificial Sequence: Synthetic oligonucleotide
  Antisense strand to SEQ ID NO: 964054
uagucucaggaacuacuau

SEQ ID NO: 964056 - RNA, 19 nt, Artificial Sequence
  Description of Artificial Sequence: Synthetic oligonucleotide
  Sense strand starting at position 1379 of SEQ ID NO: 913916
cuguguuuagaguccguuu

SEQ ID NO: 964057 - RNA, 19 nt, Artificial Sequence
  Description of Artificial Sequence: Synthetic oligonucleotide
  Antisense strand to SEQ ID NO: 964056
aaacggacucuaaacacag

SEQ ID NO: 964058 - RNA, 19 nt, Artificial Sequence
  Description of Artificial Sequence: Synthetic oligonucleotide
  Sense strand starting at position 2293 of SEQ ID NO: 913916
ugggacucuguauagguau

SEQ ID NO: 964059 - RNA, 19 nt, Artificial Sequence
  Description of Artificial Sequence: Synthetic oligonucleotide
  Antisense strand to SEQ ID NO: 964058
auaccuauacagaguccca

SEQ ID NO: 964060 - RNA, 19 nt, Artificial Sequence
  Description of Artificial Sequence: Synthetic oligonucleotide
  Sense strand starting at position 734 of SEQ ID NO: 913916
aaguacaauguuugauaga

SEQ ID NO: 964061 - RNA, 19 nt, Artificial Sequence
  Description of Artificial Sequence: Synthetic oligonucleotide
  Antisense strand to SEQ ID NO: 964060
ucuaucaaacauuguacuu

SEQ ID NO: 964062 - RNA, 19 nt, Artificial Sequence
  Description of Artificial Sequence: Synthetic oligonucleotide
  Sense strand starting at position 2062 of SEQ ID NO: 913916
uacuguauccuuggagaaa

SEQ ID NO: 964063 - RNA, 19 nt, Artificial Sequence
  Description of Artificial Sequence: Synthetic oligonucleotide
  Antisense strand to SEQ ID NO: 964062
uuucuccaaggauacagua

SEQ ID NO: 964064 - RNA, 19 nt, Artificial Sequence
  Description of Artificial Sequence: Synthetic oligonucleotide
  Sense strand starting at position 3234 of SEQ ID NO: 913916
aaguuacuugccuaugaga

SEQ ID NO: 964065 - RNA, 19 nt, Artificial Sequence
  Description of Artificial Sequence: Synthetic oligonucleotide
  Antisense strand to SEQ ID NO: 964064
ucucauaggcaaguaacuu

SEQ ID NO: 964066 - RNA, 19 nt, Artificial Sequence
  Description of Artificial Sequence: Synthetic oligonucleotide
  Sense strand starting at position 1367 of SEQ ID NO: 913916
gugauacuucgccuguguu

SEQ ID NO: 964067 - RNA, 19 nt, Artificial Sequence
  Description of Artificial Sequence: Synthetic oligonucleotide
  Antisense strand to SEQ ID NO: 964066
aacacaggcgaaguaucac

SEQ ID NO: 964068 - RNA, 19 nt, Artificial Sequence
  Description of Artificial Sequence: Synthetic oligonucleotide
  Sense strand starting at position 3279 of SEQ ID NO: 913916
ggaguugcucugucgcuca

SEQ ID NO: 964069 - RNA, 19 nt, Artificial Sequence
  Description of Artificial Sequence: Synthetic oligonucleotide
  Antisense strand to SEQ ID NO: 964068
ugagcgacagagcaacucc

SEQ ID NO: 964070 - RNA, 19 nt, Artificial Sequence
  Description of Artificial Sequence: Synthetic oligonucleotide
  Sense strand starting at position 2301 of SEQ ID NO: 913916
uguauagguauguauagau

SEQ ID NO: 964071 - RNA, 19 nt, Artificial Sequence
  Description of Artificial Sequence: Synthetic oligonucleotide
  Antisense strand to SEQ ID NO: 964070
aucuauacauaccuauaca

SEQ ID NO: 964072 - RNA, 19 nt, Artificial Sequence
  Description of Artificial Sequence: Synthetic oligonucleotide
  Sense strand starting at position 2073 of SEQ ID NO: 913916
uggagaaaguagguuagua

SEQ ID NO: 964073 - RNA, 19 nt, Artificial Sequence
  Description of Artificial Sequence: Synthetic oligonucleotide
  Antisense strand to SEQ ID NO: 964072
uacuaaccuacuuucucca

SEQ ID NO: 964074 - RNA, 19 nt, Artificial Sequence
  Description of Artificial Sequence: Synthetic oligonucleotide
  Sense strand starting at position 2060 of SEQ ID NO: 913916
acuacuguauccuuggaga

SEQ ID NO: 964075 - RNA, 19 nt, Artificial Sequence
  Description of Artificial Sequence: Synthetic oligonucleotide
  Antisense strand to SEQ ID NO: 964074
ucuccaaggauacaguagu

SEQ ID NO: 964076 - RNA, 19 nt, Artificial Sequence
  Description of Artificial Sequence: Synthetic oligonucleotide
  Sense strand starting at position 507 of SEQ ID NO: 913916
uccugagacuaacugguua

SEQ ID NO: 964077 - RNA, 19 nt, Artificial Sequence
  Description of Artificial Sequence: Synthetic oligonucleotide
  Antisense strand to SEQ ID NO: 964076
uaaccaguuagucucagga

SEQ ID NO: 964078 - RNA, 19 nt, Artificial Sequence
  Description of Artificial Sequence: Synthetic oligonucleotide
  Sense strand starting at position 2007 of SEQ ID NO: 913916
aguuaaccaugauugucaa

SEQ ID NO: 964079 - RNA, 19 nt, Artificial Sequence
  Description of Artificial Sequence: Synthetic oligonucleotide
  Antisense strand to SEQ ID NO: 964078
uugacaaucaugguuaacu

SEQ ID NO: 964080 - RNA, 19 nt, Artificial Sequence
  Description of Artificial Sequence: Synthetic oligonucleotide
  Sense strand starting at position 1454 of SEQ ID NO: 913916
ggaauacagcuuugaaggu

SEQ ID NO: 964081 - RNA, 19 nt, Artificial Sequence
  Description of Artificial Sequence: Synthetic oligonucleotide
  Antisense strand to SEQ ID NO: 964080
accuucaaagcuguauucc

SEQ ID NO: 964082 - RNA, 19 nt, Artificial Sequence
  Description of Artificial Sequence: Synthetic oligonucleotide
  Sense strand starting at position 812 of SEQ ID NO: 913916
uuaagaguuucuuugaacu

SEQ ID NO: 964083 - RNA, 19 nt, Artificial Sequence
  Description of Artificial Sequence: Synthetic oligonucleotide
  Antisense strand to SEQ ID NO: 964082
aguucaaagaaacucuuaa

SEQ ID NO: 964084 - RNA, 19 nt, Artificial Sequence
  Description of Artificial Sequence: Synthetic oligonucleotide
  Sense strand starting at position 1357 of SEQ ID NO: 913916
gggcgaccaagugauacuu

SEQ ID NO: 964085 - RNA, 19 nt, Artificial Sequence
  Description of Artificial Sequence: Synthetic oligonucleotide
  Antisense strand to SEQ ID NO: 964084
aaguaucacuuggucgccc

SEQ ID NO: 964086 - RNA, 19 nt, Artificial Sequence
  Description of Artificial Sequence: Synthetic oligonucleotide
  Sense strand starting at position 2008 of SEQ ID NO: 913916
guuaaccaugauugucaaa

SEQ ID NO: 964087 - RNA, 19 nt, Artificial Sequence
  Description of Artificial Sequence: Synthetic oligonucleotide
  Antisense strand to SEQ ID NO: 964086
uuugacaaucaugguuaac

SEQ ID NO: 964088 - RNA, 19 nt, Artificial Sequence
  Description of Artificial Sequence: Synthetic oligonucleotide
  Sense strand starting at position 801 of SEQ ID NO: 913916
gugcuuuaacauuaagagu

SEQ ID NO: 964089 - RNA, 19 nt, Artificial Sequence
  Description of Artificial Sequence: Synthetic oligonucleotide
  Antisense strand to SEQ ID NO: 964088
acucuuaauguuaaagcac

SEQ ID NO: 964090 - RNA, 19 nt, Artificial Sequence
  Description of Artificial Sequence: Synthetic oligonucleotide
  Sense strand starting at position 2214 of SEQ ID NO: 913916
uuaguauaucucuaguucu

SEQ ID NO: 964091 - RNA, 19 nt, Artificial Sequence
  Description of Artificial Sequence: Synthetic oligonucleotide
  Antisense strand to SEQ ID NO: 964090
agaacuagagauauacuaa

SEQ ID NO: 964092 - RNA, 19 nt, Artificial Sequence
  Description of Artificial Sequence: Synthetic oligonucleotide
  Sense strand starting at position 1609 of SEQ ID NO: 913916
augagcugugguuacugau

SEQ ID NO: 964093 - RNA, 19 nt, Artificial Sequence
  Description of Artificial Sequence: Synthetic oligonucleotide
  Antisense strand to SEQ ID NO: 964092
aucaguaaccacagcucau

SEQ ID NO: 964094 - RNA, 19 nt, Artificial Sequence
  Description of Artificial Sequence: Synthetic oligonucleotide
  Sense strand starting at position 1073 of SEQ ID NO: 913916
ccuaguauuuaagagaccu

SEQ ID NO: 964095 - RNA, 19 nt, Artificial Sequence
  Description of Artificial Sequence: Synthetic oligonucleotide
  Antisense strand to SEQ ID NO: 964094
aggucucuuaaauacuagg

SEQ ID NO: 964096 - RNA, 19 nt, Artificial Sequence
  Description of Artificial Sequence: Synthetic oligonucleotide
  Sense strand starting at position 2300 of SEQ ID NO: 913916
cuguauagguauguauaga

SEQ ID NO: 964097 - RNA, 19 nt, Artificial Sequence
  Description of Artificial Sequence: Synthetic oligonucleotide
  Antisense strand to SEQ ID NO: 964096
ucuauacauaccuauacag

SEQ ID NO: 964098 - RNA, 19 nt, Artificial Sequence
  Description of Artificial Sequence: Synthetic oligonucleotide
  Sense strand starting at position 1045 of SEQ ID NO: 913916
uuacuuccaccgugaagag

SEQ ID NO: 964099 - RNA, 19 nt, Artificial Sequence
  Description of Artificial Sequence: Synthetic oligonucleotide
  Antisense strand to SEQ ID NO: 964098
cucuucacgguggaaguaa

SEQ ID NO: 964100 - RNA, 19 nt, Artificial Sequence
  Description of Artificial Sequence: Synthetic oligonucleotide
  Sense strand starting at position 1625 of SEQ ID NO: 913916
gauguagcuccacaguuau

SEQ ID NO: 964101 - RNA, 19 nt, Artificial Sequence
  Description of Artificial Sequence: Synthetic oligonucleotide
  Antisense strand to SEQ ID NO: 964100
auaacuguggagcuacauc

SEQ ID NO: 964102 - RNA, 19 nt, Artificial Sequence
  Description of Artificial Sequence: Synthetic oligonucleotide
  Sense strand starting at position 2382 of SEQ ID NO: 913916
aguagucuccuagaagugu

SEQ ID NO: 964103 - RNA, 19 nt, Artificial Sequence
  Description of Artificial Sequence: Synthetic oligonucleotide
  Antisense strand to SEQ ID NO: 964102
acacuucuaggagacuacu

SEQ ID NO: 964104 - RNA, 19 nt, Artificial Sequence
  Description of Artificial Sequence: Synthetic oligonucleotide
  Sense strand starting at position 3232 of SEQ ID NO: 913916
ugaaguuacuugccuauga

SEQ ID NO: 964105 - RNA, 19 nt, Artificial Sequence
  Description of Artificial Sequence: Synthetic oligonucleotide
  Antisense strand to SEQ ID NO: 964104
ucauaggcaaguaacuuca

SEQ ID NO: 964106 - RNA, 19 nt, Artificial Sequence
  Description of Artificial Sequence: Synthetic oligonucleotide
  Sense strand starting at position 676 of SEQ ID NO: 913916
agauuaucauggcugcuga

SEQ ID NO: 964107 - RNA, 19 nt, Artificial Sequence
  Description of Artificial Sequence: Synthetic oligonucleotide
  Antisense strand to SEQ ID NO: 964106
ucagcagccaugauaaucu

SEQ ID NO: 964108 - RNA, 19 nt, Artificial Sequence
  Description of Artificial Sequence: Synthetic oligonucleotide
  Sense strand starting at position 793 of SEQ ID NO: 913916
gaggcaaggugcuuuaaca

SEQ ID NO: 964109 - RNA, 19 nt, Artificial Sequence
  Description of Artificial Sequence: Synthetic oligonucleotide
  Antisense strand to SEQ ID NO: 964108
uguuaaagcaccuugccuc

SEQ ID NO: 964110 - RNA, 19 nt, Artificial Sequence
  Description of Artificial Sequence: Synthetic oligonucleotide
  Sense strand starting at position 2296 of SEQ ID NO: 913916
gacucuguauagguaugua

SEQ ID NO: 964111 - RNA, 19 nt, Artificial Sequence
  Description of Artificial Sequence: Synthetic oligonucleotide
  Antisense strand to SEQ ID NO: 964110
uacauaccuauacagaguc

SEQ ID NO: 964112 - RNA, 19 nt, Artificial Sequence
  Description of Artificial Sequence: Synthetic oligonucleotide
  Sense strand starting at position 3660 of SEQ ID NO: 913916
guccucauguaacuuacau

SEQ ID NO: 964113 - RNA, 19 nt, Artificial Sequence
  Description of Artificial Sequence: Synthetic oligonucleotide
  Antisense strand to SEQ ID NO: 964112
auguaaguuacaugaggac

SEQ ID NO: 964114 - RNA, 19 nt, Artificial Sequence
  Description of Artificial Sequence: Synthetic oligonucleotide
  Sense strand starting at position 3792 of SEQ ID NO: 913916
ucagccucauuguuaagau

SEQ ID NO: 964115 - RNA, 19 nt, Artificial Sequence
  Description of Artificial Sequence: Synthetic oligonucleotide
  Antisense strand to SEQ ID NO: 964114
aucuuaacaaugaggcuga

SEQ ID NO: 964116 - RNA, 19 nt, Artificial Sequence
  Description of Artificial Sequence: Synthetic oligonucleotide
  Sense strand starting at position 2299 of SEQ ID NO: 913916
ucuguauagguauguauag

SEQ ID NO: 964117 - RNA, 19 nt, Artificial Sequence
  Description of Artificial Sequence: Synthetic oligonucleotide
  Antisense strand to SEQ ID NO: 964116
cuauacauaccuauacaga

SEQ ID NO: 964118 - RNA, 19 nt, Artificial Sequence
  Description of Artificial Sequence: Synthetic oligonucleotide
  Sense strand starting at position 3787 of SEQ ID NO: 913916
gauggucagccucauuguu

SEQ ID NO: 964119 - RNA, 19 nt, Artificial Sequence
  Description of Artificial Sequence: Synthetic oligonucleotide
  Antisense strand to SEQ ID NO: 964118
aacaaugaggcugaccauc

SEQ ID NO: 964120 - RNA, 19 nt, Artificial Sequence
  Description of Artificial Sequence: Synthetic oligonucleotide
  Sense strand starting at position 1740 of SEQ ID NO: 913916
gaucaugccucccugugaa

SEQ ID NO: 964121 - RNA, 19 nt, Artificial Sequence
  Description of Artificial Sequence: Synthetic oligonucleotide
  Antisense strand to SEQ ID NO: 964120
uucacagggaggcaugauc

SEQ ID NO: 964122 - RNA, 19 nt, Artificial Sequence
  Description of Artificial Sequence: Synthetic oligonucleotide
  Sense strand starting at position 893 of SEQ ID NO: 913916
aguacuacagcgugacaaa

SEQ ID NO: 964123 - RNA, 19 nt, Artificial Sequence
  Description of Artificial Sequence: Synthetic oligonucleotide
  Antisense strand to SEQ ID NO: 964122
uuugucacgcuguaguacu

SEQ ID NO: 964124 - RNA, 19 nt, Artificial Sequence
  Description of Artificial Sequence: Synthetic oligonucleotide
  Sense strand starting at position 3711 of SEQ ID NO: 913916
augugucgugguuauaaag

SEQ ID NO: 964125 - RNA, 19 nt, Artificial Sequence
  Description of Artificial Sequence: Synthetic oligonucleotide
  Antisense strand to SEQ ID NO: 964124
cuuuauaaccacgacacau

SEQ ID NO: 964126 - RNA, 19 nt, Artificial Sequence
  Description of Artificial Sequence: Synthetic oligonucleotide
  Sense strand starting at position 1655 of SEQ ID NO: 913916
augguuauaucccugguuu

SEQ ID NO: 964127 - RNA, 19 nt, Artificial Sequence
  Description of Artificial Sequence: Synthetic oligonucleotide
  Antisense strand to SEQ ID NO: 964126
aaaccagggauauaaccau

SEQ ID NO: 964128 - RNA, 19 nt, Artificial Sequence
  Description of Artificial Sequence: Synthetic oligonucleotide
  Sense strand starting at position 2004 of SEQ ID NO: 913916
gcaaguuaaccaugauugu

SEQ ID NO: 964129 - RNA, 19 nt, Artificial Sequence
  Description of Artificial Sequence: Synthetic oligonucleotide
  Antisense strand to SEQ ID NO: 964128
acaaucaugguuaacuugc

SEQ ID NO: 964130 - RNA, 19 nt, Artificial Sequence
  Description of Artificial Sequence: Synthetic oligonucleotide
  Sense strand starting at position 3685 of SEQ ID NO: 913917
gaaguagcccaugaauacu

SEQ ID NO: 964131 - RNA, 19 nt, Artificial Sequence
  Description of Artificial Sequence: Synthetic oligonucleotide
  Antisense strand to SEQ ID NO: 964130
aguauucaugggcuacuuc

SEQ ID NO: 964132 - RNA, 19 nt, Artificial Sequence
  Description of Artificial Sequence: Synthetic oligonucleotide
  Sense strand starting at position 2694 of SEQ ID NO: 913917
augcauuuguuagcuaaau

SEQ ID NO: 964133 - RNA, 19 nt, Artificial Sequence
  Description of Artificial Sequence: Synthetic oligonucleotide
  Antisense strand to SEQ ID NO: 964132
auuuagcuaacaaaugcau

SEQ ID NO: 964134 - RNA, 19 nt, Artificial Sequence
  Description of Artificial Sequence: Synthetic oligonucleotide
  Sense strand starting at position 3058 of SEQ ID NO: 913917
gcuuauuuguaaucagcaa

SEQ ID NO: 964135 - RNA, 19 nt, Artificial Sequence
  Description of Artificial Sequence: Synthetic oligonucleotide
  Antisense strand to SEQ ID NO: 964134
uugcugauuacaaauaagc

SEQ ID NO: 964136 - RNA, 19 nt, Artificial Sequence
  Description of Artificial Sequence: Synthetic oligonucleotide
  Sense strand starting at position 2985 of SEQ ID NO: 913917
gugguagaaccuuagauuc

SEQ ID NO: 964137 - RNA, 19 nt, Artificial Sequence
  Description of Artificial Sequence: Synthetic oligonucleotide
  Antisense strand to SEQ ID NO: 964136
gaaucuaagguucuaccac

SEQ ID NO: 964138 - RNA, 19 nt, Artificial Sequence
  Description of Artificial Sequence: Synthetic oligonucleotide
  Sense strand starting at position 343 of SEQ ID NO: 913917
gaugaaucaugacugucca

SEQ ID NO: 964139 - RNA, 19 nt, Artificial Sequence
  Description of Artificial Sequence: Synthetic oligonucleotide
  Antisense strand to SEQ ID NO: 964138
uggacagucaugauucauc

SEQ ID NO: 964140 - RNA, 19 nt, Artificial Sequence
  Description of Artificial Sequence: Synthetic oligonucleotide
  Sense strand starting at position 2286 of SEQ ID NO: 913917
ggagugugucgagagggaa

SEQ ID NO: 964141 - RNA, 19 nt, Artificial Sequence
  Description of Artificial Sequence: Synthetic oligonucleotide
  Antisense strand to SEQ ID NO: 964140
uucccucucgacacacucc

SEQ ID NO: 964142 - RNA, 19 nt, Artificial Sequence
  Description of Artificial Sequence: Synthetic oligonucleotide
  Sense strand starting at position 2341 of SEQ ID NO: 913917
gcgagugugcuggcuagga

SEQ ID NO: 964143 - RNA, 19 nt, Artificial Sequence
  Description of Artificial Sequence: Synthetic oligonucleotide
  Antisense strand to SEQ ID NO: 964142
uccuagccagcacacucgc

SEQ ID NO: 964144 - RNA, 19 nt, Artificial Sequence
  Description of Artificial Sequence: Synthetic oligonucleotide
  Sense strand starting at position 2548 of SEQ ID NO: 913917
aggauacguaauuacaguu

SEQ ID NO: 964145 - RNA, 19 nt, Artificial Sequence
  Description of Artificial Sequence: Synthetic oligonucleotide
  Antisense strand to SEQ ID NO: 964144
aacuguaauuacguauccu

SEQ ID NO: 964146 - RNA, 19 nt, Artificial Sequence
  Description of Artificial Sequence: Synthetic oligonucleotide
  Sense strand starting at position 2792 of SEQ ID NO: 913917
uuuaaaggcguugauagaa

SEQ ID NO: 964147 - RNA, 19 nt, Artificial Sequence
  Description of Artificial Sequence: Synthetic oligonucleotide
  Antisense strand to SEQ ID NO: 964146
uucuaucaacgccuuuaaa

SEQ ID NO: 964148 - RNA, 19 nt, Artificial Sequence
  Description of Artificial Sequence: Synthetic oligonucleotide
  Sense strand starting at position 2484 of SEQ ID NO: 913917
agugcacucggagaauuaa

SEQ ID NO: 964149 - RNA, 19 nt, Artificial Sequence
  Description of Artificial Sequence: Synthetic oligonucleotide
  Antisense strand to SEQ ID NO: 964148
uuaauucuccgagugcacu

SEQ ID NO: 964150 - RNA, 19 nt, Artificial Sequence
  Description of Artificial Sequence: Synthetic oligonucleotide
  Sense strand starting at position 3011 of SEQ ID NO: 913917
uuaacaauuucgcuuguua

SEQ ID NO: 964151 - RNA, 19 nt, Artificial Sequence
  Description of Artificial Sequence: Synthetic oligonucleotide
  Antisense strand to SEQ ID NO: 964150
uaacaagcgaaauuguuaa

SEQ ID NO: 964152 - RNA, 19 nt, Artificial Sequence
  Description of Artificial Sequence: Synthetic oligonucleotide
  Sense strand starting at position 2695 of SEQ ID NO: 913917
ugcauuuguuagcuaaauu

SEQ ID NO: 964153 - RNA, 19 nt, Artificial Sequence
  Description of Artificial Sequence: Synthetic oligonucleotide
  Antisense strand to SEQ ID NO: 964152
aauuuagcuaacaaaugca

SEQ ID NO: 964154 - RNA, 19 nt, Artificial Sequence
  Description of Artificial Sequence: Synthetic oligonucleotide
  Sense strand starting at position 344 of SEQ ID NO: 913917
augaaucaugacuguccau

SEQ ID NO: 964155 - RNA, 19 nt, Artificial Sequence
  Description of Artificial Sequence: Synthetic oligonucleotide
  Antisense strand to SEQ ID NO: 964154
auggacagucaugauucau

SEQ ID NO: 964156 - RNA, 19 nt, Artificial Sequence
  Description of Artificial Sequence: Synthetic oligonucleotide
  Sense strand starting at position 3020 of SEQ ID NO: 913917
ucgcuuguuagcuuuguaa

SEQ ID NO: 964157 - RNA, 19 nt, Artificial Sequence
  Description of Artificial Sequence: Synthetic oligonucleotide
  Antisense strand to SEQ ID NO: 964156
uuacaaagcuaacaagcga

SEQ ID NO: 964158 - RNA, 19 nt, Artificial Sequence
  Description of Artificial Sequence: Synthetic oligonucleotide
  Sense strand starting at position 2979 of SEQ ID NO: 913917
gaaugugugguagaaccuu

SEQ ID NO: 964159 - RNA, 19 nt, Artificial Sequence
  Description of Artificial Sequence: Synthetic oligonucleotide
  Antisense strand to SEQ ID NO: 964158
aagguucuaccacacauuc

SEQ ID NO: 964160 - RNA, 19 nt, Artificial Sequence
  Description of Artificial Sequence: Synthetic oligonucleotide
  Sense strand starting at position 2543 of SEQ ID NO: 913917
gugaaaggauacguaauua

SEQ ID NO: 964161 - RNA, 19 nt, Artificial Sequence
  Description of Artificial Sequence: Synthetic oligonucleotide
  Antisense strand to SEQ ID NO: 964160
uaauuacguauccuuucac

SEQ ID NO: 964162 - RNA, 19 nt, Artificial Sequence
  Description of Artificial Sequence: Synthetic oligonucleotide
  Sense strand starting at position 2302 of SEQ ID NO: 913917
gaaguacaucagcaauugu

SEQ ID NO: 964163 - RNA, 19 nt, Artificial Sequence
  Description of Artificial Sequence: Synthetic oligonucleotide
  Antisense strand to SEQ ID NO: 964162
acaauugcugauguacuuc

SEQ ID NO: 964164 - RNA, 19 nt, Artificial Sequence
  Description of Artificial Sequence: Synthetic oligonucleotide
  Sense strand starting at position 3682 of SEQ ID NO: 913917
accgaaguagcccaugaau

SEQ ID NO: 964165 - RNA, 19 nt, Artificial Sequence
  Description of Artificial Sequence: Synthetic oligonucleotide
  Antisense strand to SEQ ID NO: 964164
auucaugggcuacuucggu

SEQ ID NO: 964166 - RNA, 19 nt, Artificial Sequence
  Description of Artificial Sequence: Synthetic oligonucleotide
  Sense strand starting at position 3791 of SEQ ID NO: 913917
uguuaacuucgggaaagca

SEQ ID NO: 964167 - RNA, 19 nt, Artificial Sequence
  Description of Artificial Sequence: Synthetic oligonucleotide
  Antisense strand to SEQ ID NO: 964166
ugcuuucccgaaguuaaca

SEQ ID NO: 964168 - RNA, 19 nt, Artificial Sequence
  Description of Artificial Sequence: Synthetic oligonucleotide
  Sense strand starting at position 3833 of SEQ ID NO: 913917
gaagauguauaugccucaa

SEQ ID NO: 964169 - RNA, 19 nt, Artificial Sequence
  Description of Artificial Sequence: Synthetic oligonucleotide
  Antisense strand to SEQ ID NO: 964168
uugaggcauauacaucuuc

SEQ ID NO: 964170 - RNA, 19 nt, Artificial Sequence
  Description of Artificial Sequence: Synthetic oligonucleotide
  Sense strand starting at position 2542 of SEQ ID NO: 913917
ggugaaaggauacguaauu

SEQ ID NO: 964171 - RNA, 19 nt, Artificial Sequence
  Description of Artificial Sequence: Synthetic oligonucleotide
  Antisense strand to SEQ ID NO: 964170
aauuacguauccuuucacc

SEQ ID NO: 964172 - RNA, 19 nt, Artificial Sequence
  Description of Artificial Sequence: Synthetic oligonucleotide
  Sense strand starting at position 2547 of SEQ ID NO: 913917
aaggauacguaauuacagu

SEQ ID NO: 964173 - RNA, 19 nt, Artificial Sequence
  Description of Artificial Sequence: Synthetic oligonucleotide
  Antisense strand to SEQ ID NO: 964172
acuguaauuacguauccuu

SEQ ID NO: 964174 - RNA, 19 nt, Artificial Sequence
  Description of Artificial Sequence: Synthetic oligonucleotide
  Sense strand starting at position 2917 of SEQ ID NO: 913917
guguaacuggcuuagaaug

SEQ ID NO: 964175 - RNA, 19 nt, Artificial Sequence
  Description of Artificial Sequence: Synthetic oligonucleotide
  Antisense strand to SEQ ID NO: 964174
cauucuaagccaguuacac

SEQ ID NO: 964176 - RNA, 19 nt, Artificial Sequence
  Description of Artificial Sequence: Synthetic oligonucleotide
  Sense strand starting at position 1326 of SEQ ID NO: 913917
cgguauucccucuaccaag

SEQ ID NO: 964177 - RNA, 19 nt, Artificial Sequence
  Description of Artificial Sequence: Synthetic oligonucleotide
  Antisense strand to SEQ ID NO: 964176
cuugguagagggaauaccg

SEQ ID NO: 964178 - RNA, 19 nt, Artificial Sequence
  Description of Artificial Sequence: Synthetic oligonucleotide
  Sense strand starting at position 3150 of SEQ ID NO: 913917
aaaguuucgcuugaaauug

SEQ ID NO: 964179 - RNA, 19 nt, Artificial Sequence
  Description of Artificial Sequence: Synthetic oligonucleotide
  Antisense strand to SEQ ID NO: 964178
caauuucaagcgaaacuuu

SEQ ID NO: 964180 - RNA, 19 nt, Artificial Sequence
  Description of Artificial Sequence: Synthetic oligonucleotide
  Sense strand starting at position 1155 of SEQ ID NO: 913917
cgaucaucgcaggaauacu

SEQ ID NO: 964181 - RNA, 19 nt, Artificial Sequence
  Description of Artificial Sequence: Synthetic oligonucleotide
  Antisense strand to SEQ ID NO: 964180
aguauuccugcgaugaucg

SEQ ID NO: 964182 - RNA, 19 nt, Artificial Sequence
  Description of Artificial Sequence: Synthetic oligonucleotide
  Sense strand starting at position 2923 of SEQ ID NO: 913917
cuggcuuagaaugguuaaa

SEQ ID NO: 964183 - RNA, 19 nt, Artificial Sequence
  Description of Artificial Sequence: Synthetic oligonucleotide
  Antisense strand to SEQ ID NO: 964182
uuuaaccauucuaagccag

SEQ ID NO: 964184 - RNA, 19 nt, Artificial Sequence
  Description of Artificial Sequence: Synthetic oligonucleotide
  Sense strand starting at position 2922 of SEQ ID NO: 913917
acuggcuuagaaugguuaa

SEQ ID NO: 964185 - RNA, 19 nt, Artificial Sequence
  Description of Artificial Sequence: Synthetic oligonucleotide
  Antisense strand to SEQ ID NO: 964184
uuaaccauucuaagccagu

SEQ ID NO: 964186 - RNA, 19 nt, Artificial Sequence
  Description of Artificial Sequence: Synthetic oligonucleotide
  Sense strand starting at position 3803 of SEQ ID NO: 913917
gaaagcaggcuguaaucuu

SEQ ID NO: 964187 - RNA, 19 nt, Artificial Sequence
  Description of Artificial Sequence: Synthetic oligonucleotide
  Antisense strand to SEQ ID NO: 964186
aagauuacagccugcuuuc

SEQ ID NO: 964188 - RNA, 19 nt, Artificial Sequence
  Description of Artificial Sequence: Synthetic oligonucleotide
  Sense strand starting at position 2614 of SEQ ID NO: 913917
aguuaaugacgauauacgu

SEQ ID NO: 964189 - RNA, 19 nt, Artificial Sequence
  Description of Artificial Sequence: Synthetic oligonucleotide
  Antisense strand to SEQ ID NO: 964188
acguauaucgucauuaacu

SEQ ID NO: 964190 - RNA, 19 nt, Artificial Sequence
  Description of Artificial Sequence: Synthetic oligonucleotide
  Sense strand starting at position 2816 of SEQ ID NO: 913917
gggcuuugcacuuaacuga

SEQ ID NO: 964191 - RNA, 19 nt, Artificial Sequence
  Description of Artificial Sequence: Synthetic oligonucleotide
  Antisense strand to SEQ ID NO: 964190
ucaguuaagugcaaagccc

SEQ ID NO: 964192 - RNA, 19 nt, Artificial Sequence
  Description of Artificial Sequence: Synthetic oligonucleotide
  Sense strand starting at position 81 of SEQ ID NO: 913917
cuauguucccgggaucuau

SEQ ID NO: 964193 - RNA, 19 nt, Artificial Sequence
  Description of Artificial Sequence: Synthetic oligonucleotide
  Antisense strand to SEQ ID NO: 964192
auagaucccgggaacauag

SEQ ID NO: 964194 - RNA, 19 nt, Artificial Sequence
  Description of Artificial Sequence: Synthetic oligonucleotide
  Sense strand starting at position 316 of SEQ ID NO: 913917
ugcauaguuccggaucaag

SEQ ID NO: 964195 - RNA, 19 nt, Artificial Sequence
  Description of Artificial Sequence: Synthetic oligonucleotide
  Antisense strand to SEQ ID NO: 964194
cuugauccggaacuaugca

SEQ ID NO: 964196 - RNA, 19 nt, Artificial Sequence
  Description of Artificial Sequence: Synthetic oligonucleotide
  Sense strand starting at position 3551 of SEQ ID NO: 913917
gugaaauuguaccuuugau

SEQ ID NO: 964197 - RNA, 19 nt, Artificial Sequence
  Description of Artificial Sequence: Synthetic oligonucleotide
  Antisense strand to SEQ ID NO: 964196
aucaaagguacaauuucac

SEQ ID NO: 964198 - RNA, 19 nt, Artificial Sequence
  Description of Artificial Sequence: Synthetic oligonucleotide
  Sense strand starting at position 2466 of SEQ ID NO: 913917
caaggugaucacugccuaa

SEQ ID NO: 964199 - RNA, 19 nt, Artificial Sequence
  Description of Artificial Sequence: Synthetic oligonucleotide
  Antisense strand to SEQ ID NO: 964198
uuaggcagugaucaccuug

SEQ ID NO: 964200 - RNA, 19 nt, Artificial Sequence
  Description of Artificial Sequence: Synthetic oligonucleotide
  Sense strand starting at position 899 of SEQ ID NO: 913917
ucagcuacucgagaagcua

SEQ ID NO: 964201 - RNA, 19 nt, Artificial Sequence
  Description of Artificial Sequence: Synthetic oligonucleotide
  Antisense strand to SEQ ID NO: 964200
uagcuucucgaguagcuga

SEQ ID NO: 964202 - RNA, 19 nt, Artificial Sequence
  Description of Artificial Sequence: Synthetic oligonucleotide
  Sense strand starting at position 2620 of SEQ ID NO: 913917
ugacgauauacguauucuu

SEQ ID NO: 964203 - RNA, 19 nt, Artificial Sequence
  Description of Artificial Sequence: Synthetic oligonucleotide
  Antisense strand to SEQ ID NO: 964202
aagaauacguauaucguca

SEQ ID NO: 964204 - RNA, 19 nt, Artificial Sequence
  Description of Artificial Sequence: Synthetic oligonucleotide
  Sense strand starting at position 635 of SEQ ID NO: 913917
auguacauuuaaggagaua

SEQ ID NO: 964205 - RNA, 19 nt, Artificial Sequence
  Description of Artificial Sequence: Synthetic oligonucleotide
  Antisense strand to SEQ ID NO: 964204
uaucuccuuaaauguacau

SEQ ID NO: 964206 - RNA, 19 nt, Artificial Sequence
  Description of Artificial Sequence: Synthetic oligonucleotide
  Sense strand starting at position 3788 of SEQ ID NO: 913917
uucuguuaacuucgggaaa

SEQ ID NO: 964207 - RNA, 19 nt, Artificial Sequence
  Description of Artificial Sequence: Synthetic oligonucleotide
  Antisense strand to SEQ ID NO: 964206
uuucccgaaguuaacagaa

SEQ ID NO: 964208 - RNA, 19 nt, Artificial Sequence
  Description of Artificial Sequence: Synthetic oligonucleotide
  Sense strand starting at position 2587 of SEQ ID NO: 913917
agauaugucguacagcaug

SEQ ID NO: 964209 - RNA, 19 nt, Artificial Sequence
  Description of Artificial Sequence: Synthetic oligonucleotide
  Antisense strand to SEQ ID NO: 964208
caugcuguacgacauaucu

SEQ ID NO: 964210 - RNA, 19 nt, Artificial Sequence
  Description of Artificial Sequence: Synthetic oligonucleotide
  Sense strand starting at position 3003 of SEQ ID NO: 913918
gcccucuucuacugugcaa

SEQ ID NO: 964211 - RNA, 19 nt, Artificial Sequence
  Description of Artificial Sequence: Synthetic oligonucleotide
  Antisense strand to SEQ ID NO: 964210
uugcacaguagaagagggc

SEQ ID NO: 964212 - RNA, 19 nt, Artificial Sequence
  Description of Artificial Sequence: Synthetic oligonucleotide
  Sense strand starting at position 39 of SEQ ID NO: 913919
gcugcuggucaugauacaa

SEQ ID NO: 964213 - RNA, 19 nt, Artificial Sequence
  Description of Artificial Sequence: Synthetic oligonucleotide
  Antisense strand to SEQ ID NO: 964212
uuguaucaugaccagcagc

SEQ ID NO: 964214 - RNA, 19 nt, Artificial Sequence
  Description of Artificial Sequence: Synthetic oligonucleotide
  Sense strand starting at position 36 of SEQ ID NO: 913919
acagcugcuggucaugaua

SEQ ID NO: 964215 - RNA, 19 nt, Artificial Sequence
  Description of Artificial Sequence: Synthetic oligonucleotide
  Antisense strand to SEQ ID NO: 964214
uaucaugaccagcagcugu

SEQ ID NO: 964216 - RNA, 19 nt, Artificial Sequence
  Description of Artificial Sequence: Synthetic oligonucleotide
  Sense strand starting at position 98 of SEQ ID NO: 913919
uugagcuccuaauaacuga

SEQ ID NO: 964217 - RNA, 19 nt, Artificial Sequence
  Description of Artificial Sequence: Synthetic oligonucleotide
  Antisense strand to SEQ ID NO: 964216
ucaguuauuaggagcucaa

SEQ ID NO: 964218 - RNA, 19 nt, Artificial Sequence
  Description of Artificial Sequence: Synthetic oligonucleotide
  Sense strand starting at position 38 of SEQ ID NO: 913919
agcugcuggucaugauaca

SEQ ID NO: 964219 - RNA, 19 nt, Artificial Sequence
  Description of Artificial Sequence: Synthetic oligonucleotide
  Antisense strand to SEQ ID NO: 964218
uguaucaugaccagcagcu

SEQ ID NO: 964220 - RNA, 19 nt, Artificial Sequence
  Description of Artificial Sequence: Synthetic oligonucleotide
  Sense strand starting at position 85 of SEQ ID NO: 913920
uuugaaagguccucaagaa

SEQ ID NO: 964221 - RNA, 19 nt, Artificial Sequence
  Description of Artificial Sequence: Synthetic oligonucleotide
  Antisense strand to SEQ ID NO: 964220
uucuugaggaccuuucaaa

SEQ ID NO: 964222 - RNA, 19 nt, Artificial Sequence
  Description of Artificial Sequence: Synthetic oligonucleotide
  Sense strand starting at position 3196 of SEQ ID NO: 913920
agaaauaaccugggucuca

SEQ ID NO: 964223 - RNA, 19 nt, Artificial Sequence
  Description of Artificial Sequence: Synthetic oligonucleotide
  Antisense strand to SEQ ID NO: 964222
ugagacccagguuauuucu

SEQ ID NO: 964224 - RNA, 19 nt, Artificial Sequence
  Description of Artificial Sequence: Synthetic oligonucleotide
  Sense strand starting at position 2577 of SEQ ID NO: 913920
auagauauuccgggacaac

SEQ ID NO: 964225 - RNA, 19 nt, Artificial Sequence
  Description of Artificial Sequence: Synthetic oligonucleotide
  Antisense strand to SEQ ID NO: 964224
guugucccggaauaucuau

SEQ ID NO: 964226 - RNA, 19 nt, Artificial Sequence
  Description of Artificial Sequence: Synthetic oligonucleotide
  Sense strand starting at position 713 of SEQ ID NO: 913920
cuaagagcgauugauuaca

SEQ ID NO: 964227 - RNA, 19 nt, Artificial Sequence
  Description of Artificial Sequence: Synthetic oligonucleotide
  Antisense strand to SEQ ID NO: 964226
uguaaucaaucgcucuuag

SEQ ID NO: 964228 - RNA, 19 nt, Artificial Sequence
  Description of Artificial Sequence: Synthetic oligonucleotide
  Sense strand starting at position 3510 of SEQ ID NO: 913920
auacauaacuggcuaagau

SEQ ID NO: 964229 - RNA, 19 nt, Artificial Sequence
  Description of Artificial Sequence: Synthetic oligonucleotide
  Antisense strand to SEQ ID NO: 964228
aucuuagccaguuauguau

SEQ ID NO: 964230 - RNA, 19 nt, Artificial Sequence
  Description of Artificial Sequence: Synthetic oligonucleotide
  Sense strand starting at position 3195 of SEQ ID NO: 913920
gagaaauaaccugggucuc

SEQ ID NO: 964231 - RNA, 19 nt, Artificial Sequence
  Description of Artificial Sequence: Synthetic oligonucleotide
  Antisense strand to SEQ ID NO: 964230
gagacccagguuauuucuc

SEQ ID NO: 964232 - RNA, 19 nt, Artificial Sequence
  Description of Artificial Sequence: Synthetic oligonucleotide
  Sense strand starting at position 871 of SEQ ID NO: 913920
cugucuguucgcccuuaau

SEQ ID NO: 964233 - RNA, 19 nt, Artificial Sequence
  Description of Artificial Sequence: Synthetic oligonucleotide
  Antisense strand to SEQ ID NO: 964232
auuaagggcgaacagacag

SEQ ID NO: 964234 - RNA, 19 nt, Artificial Sequence
  Description of Artificial Sequence: Synthetic oligonucleotide
  Sense strand starting at position 3197 of SEQ ID NO: 913920
gaaauaaccugggucucau

SEQ ID NO: 964235 - RNA, 19 nt, Artificial Sequence
  Description of Artificial Sequence: Synthetic oligonucleotide
  Antisense strand to SEQ ID NO: 964234
augagacccagguuauuuc

SEQ ID NO: 964236 - RNA, 19 nt, Artificial Sequence
  Description of Artificial Sequence: Synthetic oligonucleotide
  Sense strand starting at position 2523 of SEQ ID NO: 913920
uacagauuugccuguggug

SEQ ID NO: 964237 - RNA, 19 nt, Artificial Sequence
  Description of Artificial Sequence: Synthetic oligonucleotide
  Antisense strand to SEQ ID NO: 964236
caccacaggcaaaucugua

SEQ ID NO: 964238 - RNA, 19 nt, Artificial Sequence
  Description of Artificial Sequence: Synthetic oligonucleotide
  Sense strand starting at position 874 of SEQ ID NO: 913920
ucuguucgcccuuaauuua

SEQ ID NO: 964239 - RNA, 19 nt, Artificial Sequence
  Description of Artificial Sequence: Synthetic oligonucleotide
  Antisense strand to SEQ ID NO: 964238
uaaauuaagggcgaacaga

SEQ ID NO: 964240 - RNA, 19 nt, Artificial Sequence
  Description of Artificial Sequence: Synthetic oligonucleotide
  Sense strand starting at position 3545 of SEQ ID NO: 913920
gaaaguaaaguccaugcua

SEQ ID NO: 964241 - RNA, 19 nt, Artificial Sequence
  Description of Artificial Sequence: Synthetic oligonucleotide
  Antisense strand to SEQ ID NO: 964240
uagcauggacuuuacuuuc

SEQ ID NO: 964242 - RNA, 19 nt, Artificial Sequence
  Description of Artificial Sequence: Synthetic oligonucleotide
  Sense strand starting at position 3306 of SEQ ID NO: 913920
aggcuaucuggucaccaaa

SEQ ID NO: 964243 - RNA, 19 nt, Artificial Sequence
  Description of Artificial Sequence: Synthetic oligonucleotide
  Antisense strand to SEQ ID NO: 964242
uuuggugaccagauagccu

SEQ ID NO: 964244 - RNA, 19 nt, Artificial Sequence
  Description of Artificial Sequence: Synthetic oligonucleotide
  Sense strand starting at position 3793 of SEQ ID NO: 913920
gugauuaacuuccuggaag

SEQ ID NO: 964245 - RNA, 19 nt, Artificial Sequence
  Description of Artificial Sequence: Synthetic oligonucleotide
  Antisense strand to SEQ ID NO: 964244
cuuccaggaaguuaaucac

SEQ ID NO: 964246 - RNA, 19 nt, Artificial Sequence
  Description of Artificial Sequence: Synthetic oligonucleotide
  Sense strand starting at position 3839 of SEQ ID NO: 913920
aaggaaugguuucuccaug

SEQ ID NO: 964247 - RNA, 19 nt, Artificial Sequence
  Description of Artificial Sequence: Synthetic oligonucleotide
  Antisense strand to SEQ ID NO: 964246
cauggagaaaccauuccuu

SEQ ID NO: 964248 - RNA, 19 nt, Artificial Sequence
  Description of Artificial Sequence: Synthetic oligonucleotide
  Sense strand starting at position 2586 of SEQ ID NO: 913920
ccgggacaaccucauguua

SEQ ID NO: 964249 - RNA, 19 nt, Artificial Sequence
  Description of Artificial Sequence: Synthetic oligonucleotide
  Antisense strand to SEQ ID NO: 964248
uaacaugagguugucccgg

SEQ ID NO: 964250 - RNA, 19 nt, Artificial Sequence
  Description of Artificial Sequence: Synthetic oligonucleotide
  Sense strand starting at position 3559 of SEQ ID NO: 913920
ugcuaaaugguagggauaa

SEQ ID NO: 964251 - RNA, 19 nt, Artificial Sequence
  Description of Artificial Sequence: Synthetic oligonucleotide
  Antisense strand to SEQ ID NO: 964250
uuaucccuaccauuuagca

SEQ ID NO: 964252 - RNA, 19 nt, Artificial Sequence
  Description of Artificial Sequence: Synthetic oligonucleotide
  Sense strand starting at position 715 of SEQ ID NO: 913920
aagagcgauugauuacaau

SEQ ID NO: 964253 - RNA, 19 nt, Artificial Sequence
  Description of Artificial Sequence: Synthetic oligonucleotide
  Antisense strand to SEQ ID NO: 964252
auuguaaucaaucgcucuu

SEQ ID NO: 964254 - RNA, 19 nt, Artificial Sequence
  Description of Artificial Sequence: Synthetic oligonucleotide
  Sense strand starting at position 3795 of SEQ ID NO: 913920
gauuaacuuccuggaaguu

SEQ ID NO: 964255 - RNA, 19 nt, Artificial Sequence
  Description of Artificial Sequence: Synthetic oligonucleotide
  Antisense strand to SEQ ID NO: 964254
aacuuccaggaaguuaauc

SEQ ID NO: 964256 - RNA, 19 nt, Artificial Sequence
  Description of Artificial Sequence: Synthetic oligonucleotide
  Sense strand starting at position 709 of SEQ ID NO: 913920
auggcuaagagcgauugau

SEQ ID NO: 964257 - RNA, 19 nt, Artificial Sequence
  Description of Artificial Sequence: Synthetic oligonucleotide
  Antisense strand to SEQ ID NO: 964256
aucaaucgcucuuagccau

SEQ ID NO: 964258 - RNA, 19 nt, Artificial Sequence
  Description of Artificial Sequence: Synthetic oligonucleotide
  Sense strand starting at position 3580 of SEQ ID NO: 913920
aagugauaugggugcagag

SEQ ID NO: 964259 - RNA, 19 nt, Artificial Sequence
  Description of Artificial Sequence: Synthetic oligonucleotide
  Antisense strand to SEQ ID NO: 964258
cucugcacccauaucacuu

SEQ ID NO: 964260 - RNA, 19 nt, Artificial Sequence
  Description of Artificial Sequence: Synthetic oligonucleotide
  Sense strand starting at position 3162 of SEQ ID NO: 913920
caaucaauguaggcaagua

SEQ ID NO: 964261 - RNA, 19 nt, Artificial Sequence
  Description of Artificial Sequence: Synthetic oligonucleotide
  Antisense strand to SEQ ID NO: 964260
uacuugccuacauugauug

SEQ ID NO: 964262 - RNA, 19 nt, Artificial Sequence
  Description of Artificial Sequence: Synthetic oligonucleotide
  Sense strand starting at position 2209 of SEQ ID NO: 913920
gcccuugcugacgagaaga

SEQ ID NO: 964263 - RNA, 19 nt, Artificial Sequence
  Description of Artificial Sequence: Synthetic oligonucleotide
  Antisense strand to SEQ ID NO: 964262
ucuucucgucagcaagggc

SEQ ID NO: 964264 - RNA, 19 nt, Artificial Sequence
  Description of Artificial Sequence: Synthetic oligonucleotide
  Sense strand starting at position 3305 of SEQ ID NO: 913920
aaggcuaucuggucaccaa

SEQ ID NO: 964265 - RNA, 19 nt, Artificial Sequence
  Description of Artificial Sequence: Synthetic oligonucleotide
  Antisense strand to SEQ ID NO: 964264
uuggugaccagauagccuu

SEQ ID NO: 964266 - RNA, 19 nt, Artificial Sequence
  Description of Artificial Sequence: Synthetic oligonucleotide
  Sense strand starting at position 2545 of SEQ ID NO: 913920
uccacagccgguuauuaaa

SEQ ID NO: 964267 - RNA, 19 nt, Artificial Sequence
  Description of Artificial Sequence: Synthetic oligonucleotide
  Antisense strand to SEQ ID NO: 964266
uuuaauaaccggcugugga

SEQ ID NO: 964268 - RNA, 19 nt, Artificial Sequence
  Description of Artificial Sequence: Synthetic oligonucleotide
  Sense strand starting at position 3857 of SEQ ID NO: 913920
gguccugcucuauaaaccu

SEQ ID NO: 964269 - RNA, 19 nt, Artificial Sequence
  Description of Artificial Sequence: Synthetic oligonucleotide
  Antisense strand to SEQ ID NO: 964268
agguuuauagagcaggacc

SEQ ID NO: 964270 - RNA, 19 nt, Artificial Sequence
  Description of Artificial Sequence: Synthetic oligonucleotide
  Sense strand starting at position 2828 of SEQ ID NO: 913920
ggcacacuccaaugugaac

SEQ ID NO: 964271 - RNA, 19 nt, Artificial Sequence
  Description of Artificial Sequence: Synthetic oligonucleotide
  Antisense strand to SEQ ID NO: 964270
guucacauuggagugugcc

SEQ ID NO: 964272 - RNA, 19 nt, Artificial Sequence
  Description of Artificial Sequence: Synthetic oligonucleotide
  Sense strand starting at position 2483 of SEQ ID NO: 913920
gcugcugucagauaauuga

SEQ ID NO: 964273 - RNA, 19 nt, Artificial Sequence
  Description of Artificial Sequence: Synthetic oligonucleotide
  Antisense strand to SEQ ID NO: 964272
ucaauuaucugacagcagc

SEQ ID NO: 964274 - RNA, 19 nt, Artificial Sequence
  Description of Artificial Sequence: Synthetic oligonucleotide
  Sense strand starting at position 3530 of SEQ ID NO: 913920
agucuuagcuaagcagaaa

SEQ ID NO: 964275 - RNA, 19 nt, Artificial Sequence
  Description of Artificial Sequence: Synthetic oligonucleotide
  Antisense strand to SEQ ID NO: 964274
uuucugcuuagcuaagacu

SEQ ID NO: 964276 - RNA, 19 nt, Artificial Sequence
  Description of Artificial Sequence: Synthetic oligonucleotide
  Sense strand starting at position 1173 of SEQ ID NO: 913920
cuaauuaaccugcacguua

SEQ ID NO: 964277 - RNA, 19 nt, Artificial Sequence
  Description of Artificial Sequence: Synthetic oligonucleotide
  Antisense strand to SEQ ID NO: 964276
uaacgugcagguuaauuag

SEQ ID NO: 964278 - RNA, 19 nt, Artificial Sequence
  Description of Artificial Sequence: Synthetic oligonucleotide
  Sense strand starting at position 71 of SEQ ID NO: 913920
guaaauguuugagauuuga

SEQ ID NO: 964279 - RNA, 19 nt, Artificial Sequence
  Description of Artificial Sequence: Synthetic oligonucleotide
  Antisense strand to SEQ ID NO: 964278
ucaaaucucaaacauuuac

SEQ ID NO: 964280 - RNA, 19 nt, Artificial Sequence
  Description of Artificial Sequence: Synthetic oligonucleotide
  Sense strand starting at position 1202 of SEQ ID NO: 913920
gguucugcuuccguaauuu

SEQ ID NO: 964281 - RNA, 19 nt, Artificial Sequence
  Description of Artificial Sequence: Synthetic oligonucleotide
  Antisense strand to SEQ ID NO: 964280
aaauuacggaagcagaacc

SEQ ID NO: 964282 - RNA, 19 nt, Artificial Sequence
  Description of Artificial Sequence: Synthetic oligonucleotide
  Sense strand starting at position 3525 of SEQ ID NO: 913920
agauaagucuuagcuaagc

SEQ ID NO: 964283 - RNA, 19 nt, Artificial Sequence
  Description of Artificial Sequence: Synthetic oligonucleotide
  Antisense strand to SEQ ID NO: 964282
gcuuagcuaagacuuaucu

SEQ ID NO: 964284 - RNA, 19 nt, Artificial Sequence
  Description of Artificial Sequence: Synthetic oligonucleotide
  Sense strand starting at position 3935 of SEQ ID NO: 913920
aguuaugccuugucaagga

SEQ ID NO: 964285 - RNA, 19 nt, Artificial Sequence
  Description of Artificial Sequence: Synthetic oligonucleotide
  Antisense strand to SEQ ID NO: 964284
uccuugacaaggcauaacu

SEQ ID NO: 964286 - RNA, 19 nt, Artificial Sequence
  Description of Artificial Sequence: Synthetic oligonucleotide
  Sense strand starting at position 1219 of SEQ ID NO: 913920
uuucuuuauuucgacagag

SEQ ID NO: 964287 - RNA, 19 nt, Artificial Sequence
  Description of Artificial Sequence: Synthetic oligonucleotide
  Antisense strand to SEQ ID NO: 964286
cucugucgaaauaaagaaa

SEQ ID NO: 964288 - RNA, 19 nt, Artificial Sequence
  Description of Artificial Sequence: Synthetic oligonucleotide
  Sense strand starting at position 830 of SEQ ID NO: 913920
uuagucauuucuuaaggua

SEQ ID NO: 964289 - RNA, 19 nt, Artificial Sequence
  Description of Artificial Sequence: Synthetic oligonucleotide
  Antisense strand to SEQ ID NO: 964288
uaccuuaagaaaugacuaa

SEQ ID NO: 964290 - RNA, 19 nt, Artificial Sequence
  Description of Artificial Sequence: Synthetic oligonucleotide
  Sense strand starting at position 1001 of SEQ ID NO: 913920
caguccucucgccagcaaa

SEQ ID NO: 964291 - RNA, 19 nt, Artificial Sequence
  Description of Artificial Sequence: Synthetic oligonucleotide
  Antisense strand to SEQ ID NO: 964290
uuugcuggcgagaggacug

SEQ ID NO: 964292 - RNA, 19 nt, Artificial Sequence
  Description of Artificial Sequence: Synthetic oligonucleotide
  Sense strand starting at position 833 of SEQ ID NO: 913920
gucauuucuuaagguaaag

SEQ ID NO: 964293 - RNA, 19 nt, Artificial Sequence
  Description of Artificial Sequence: Synthetic oligonucleotide
  Antisense strand to SEQ ID NO: 964292
cuuuaccuuaagaaaugac

SEQ ID NO: 964294 - RNA, 19 nt, Artificial Sequence
  Description of Artificial Sequence: Synthetic oligonucleotide
  Sense strand starting at position 3574 of SEQ ID NO: 913920
auaagaaagugauaugggu

SEQ ID NO: 964295 - RNA, 19 nt, Artificial Sequence
  Description of Artificial Sequence: Synthetic oligonucleotide
  Antisense strand to SEQ ID NO: 964294
acccauaucacuuucuuau

SEQ ID NO: 964296 - RNA, 19 nt, Artificial Sequence
  Description of Artificial Sequence: Synthetic oligonucleotide
  Sense strand starting at position 3933 of SEQ ID NO: 913920
cgaguuaugccuugucaag

SEQ ID NO: 964297 - RNA, 19 nt, Artificial Sequence
  Description of Artificial Sequence: Synthetic oligonucleotide
  Antisense strand to SEQ ID NO: 964296
cuugacaaggcauaacucg

SEQ ID NO: 964298 - RNA, 19 nt, Artificial Sequence
  Description of Artificial Sequence: Synthetic oligonucleotide
  Sense strand starting at position 2576 of SEQ ID NO: 913920
aauagauauuccgggacaa

SEQ ID NO: 964299 - RNA, 19 nt, Artificial Sequence
  Description of Artificial Sequence: Synthetic oligonucleotide
  Antisense strand to SEQ ID NO: 964298
uugucccggaauaucuauu

SEQ ID NO: 964300 - RNA, 19 nt, Artificial Sequence
  Description of Artificial Sequence: Synthetic oligonucleotide
  Sense strand starting at position 538 of SEQ ID NO: 913921
guauaaugccuuguugcuu

SEQ ID NO: 964301 - RNA, 19 nt, Artificial Sequence
  Description of Artificial Sequence: Synthetic oligonucleotide
  Antisense strand to SEQ ID NO: 964300
aagcaacaaggcauuauac

SEQ ID NO: 964302 - RNA, 19 nt, Artificial Sequence
  Description of Artificial Sequence: Synthetic oligonucleotide
  Sense strand starting at position 2588 of SEQ ID NO: 913921
uugacucugccagagacua

SEQ ID NO: 964303 - RNA, 19 nt, Artificial Sequence
  Description of Artificial Sequence: Synthetic oligonucleotide
  Antisense strand to SEQ ID NO: 964302
uagucucuggcagagucaa

SEQ ID NO: 964304 - RNA, 19 nt, Artificial Sequence
  Description of Artificial Sequence: Synthetic oligonucleotide
  Sense strand starting at position 3526 of SEQ ID NO: 913921
gagacagguugagugacau

SEQ ID NO: 964305 - RNA, 19 nt, Artificial Sequence
  Description of Artificial Sequence: Synthetic oligonucleotide
  Antisense strand to SEQ ID NO: 964304
augucacucaaccugucuc

SEQ ID NO: 964306 - RNA, 19 nt, Artificial Sequence
  Description of Artificial Sequence: Synthetic oligonucleotide
  Sense strand starting at position 3028 of SEQ ID NO: 913921
aaacaagaguccuugguaa

SEQ ID NO: 964307 - RNA, 19 nt, Artificial Sequence
  Description of Artificial Sequence: Synthetic oligonucleotide
  Antisense strand to SEQ ID NO: 964306
uuaccaaggacucuuguuu

SEQ ID NO: 964308 - RNA, 19 nt, Artificial Sequence
  Description of Artificial Sequence: Synthetic oligonucleotide
  Sense strand starting at position 1392 of SEQ ID NO: 913921
gaugcaaugcguuuaacgu

SEQ ID NO: 964309 - RNA, 19 nt, Artificial Sequence
  Description of Artificial Sequence: Synthetic oligonucleotide
  Antisense strand to SEQ ID NO: 964308
acguuaaacgcauugcauc

SEQ ID NO: 964310 - RNA, 19 nt, Artificial Sequence
  Description of Artificial Sequence: Synthetic oligonucleotide
  Sense strand starting at position 273 of SEQ ID NO: 913921
ugagauucuugacuacuuc

SEQ ID NO: 964311 - RNA, 19 nt, Artificial Sequence
  Description of Artificial Sequence: Synthetic oligonucleotide
  Antisense strand to SEQ ID NO: 964310
gaaguagucaagaaucuca

SEQ ID NO: 964312 - RNA, 19 nt, Artificial Sequence
  Description of Artificial Sequence: Synthetic oligonucleotide
  Sense strand starting at position 3079 of SEQ ID NO: 913921
cuaggaaauguaggguuua

SEQ ID NO: 964313 - RNA, 19 nt, Artificial Sequence
  Description of Artificial Sequence: Synthetic oligonucleotide
  Antisense strand to SEQ ID NO: 964312
uaaacccuacauuuccuag

SEQ ID NO: 964314 - RNA, 19 nt, Artificial Sequence
  Description of Artificial Sequence: Synthetic oligonucleotide
  Sense strand starting at position 467 of SEQ ID NO: 913921
guaagauaagccuaucucu

SEQ ID NO: 964315 - RNA, 19 nt, Artificial Sequence
  Description of Artificial Sequence: Synthetic oligonucleotide
  Antisense strand to SEQ ID NO: 964314
agagauaggcuuaucuuac

SEQ ID NO: 964316 - RNA, 19 nt, Artificial Sequence
  Description of Artificial Sequence: Synthetic oligonucleotide
  Sense strand starting at position 2862 of SEQ ID NO: 913921
uacagaucacccuggcaga

SEQ ID NO: 964317 - RNA, 19 nt, Artificial Sequence
  Description of Artificial Sequence: Synthetic oligonucleotide
  Antisense strand to SEQ ID NO: 964316
ucugccagggugaucugua

SEQ ID NO: 964318 - RNA, 19 nt, Artificial Sequence
  Description of Artificial Sequence: Synthetic oligonucleotide
  Sense strand starting at position 3603 of SEQ ID NO: 913921
gugucagagccugagauga

SEQ ID NO: 964319 - RNA, 19 nt, Artificial Sequence
  Description of Artificial Sequence: Synthetic oligonucleotide
  Antisense strand to SEQ ID NO: 964318
ucaucucaggcucugacac

SEQ ID NO: 964320 - RNA, 19 nt, Artificial Sequence
  Description of Artificial Sequence: Synthetic oligonucleotide
  Sense strand starting at position 3771 of SEQ ID NO: 913921
ggaggacuccuuggagucu

SEQ ID NO: 964321 - RNA, 19 nt, Artificial Sequence
  Description of Artificial Sequence: Synthetic oligonucleotide
  Antisense strand to SEQ ID NO: 964320
agacuccaaggaguccucc

SEQ ID NO: 964322 - RNA, 19 nt, Artificial Sequence
  Description of Artificial Sequence: Synthetic oligonucleotide
  Sense strand starting at position 1202 of SEQ ID NO: 913921
ccaggauaucccugaugua

SEQ ID NO: 964323 - RNA, 19 nt, Artificial Sequence
  Description of Artificial Sequence: Synthetic oligonucleotide
  Antisense strand to SEQ ID NO: 964322
uacaucagggauauccugg

SEQ ID NO: 964324 - RNA, 19 nt, Artificial Sequence
  Description of Artificial Sequence: Synthetic oligonucleotide
  Sense strand starting at position 195 of SEQ ID NO: 913921
agcauaaggucauccaaau

SEQ ID NO: 964325 - RNA, 19 nt, Artificial Sequence
  Description of Artificial Sequence: Synthetic oligonucleotide
  Antisense strand to SEQ ID NO: 964324
auuuggaugaccuuaugcu

SEQ ID NO: 964326 - RNA, 19 nt, Artificial Sequence
  Description of Artificial Sequence: Synthetic oligonucleotide
  Sense strand starting at position 1 of SEQ ID NO: 913921
ugcagaagaucauuaagca

SEQ ID NO: 964327 - RNA, 19 nt, Artificial Sequence
  Description of Artificial Sequence: Synthetic oligonucleotide
  Antisense strand to SEQ ID NO: 964326
ugcuuaaugaucuucugca

SEQ ID NO: 964328 - RNA, 19 nt, Artificial Sequence
  Description of Artificial Sequence: Synthetic oligonucleotide
  Sense strand starting at position 2806 of SEQ ID NO: 913921
ccgagacgucaggaauucu

SEQ ID NO: 964329 - RNA, 19 nt, Artificial Sequence
  Description of Artificial Sequence: Synthetic oligonucleotide
  Antisense strand to SEQ ID NO: 964328
agaauuccugacgucucgg

SEQ ID NO: 964330 - RNA, 19 nt, Artificial Sequence
  Description of Artificial Sequence: Synthetic oligonucleotide
  Sense strand starting at position 9 of SEQ ID NO: 913921
aucauuaagcaaggcuaga

SEQ ID NO: 964331 - RNA, 19 nt, Artificial Sequence
  Description of Artificial Sequence: Synthetic oligonucleotide
  Antisense strand to SEQ ID NO: 964330
ucuagccuugcuuaaugau

SEQ ID NO: 964332 - RNA, 19 nt, Artificial Sequence
  Description of Artificial Sequence: Synthetic oligonucleotide
  Sense strand starting at position 3723 of SEQ ID NO: 913921
gugguauaagcagagcaga

SEQ ID NO: 964333 - RNA, 19 nt, Artificial Sequence
  Description of Artificial Sequence: Synthetic oligonucleotide
  Antisense strand to SEQ ID NO: 964332
ucugcucugcuuauaccac

SEQ ID NO: 964334 - RNA, 19 nt, Artificial Sequence
  Description of Artificial Sequence: Synthetic oligonucleotide
  Sense strand starting at position 2655 of SEQ ID NO: 913921
gucuacagucuggaagguu

SEQ ID NO: 964335 - RNA, 19 nt, Artificial Sequence
  Description of Artificial Sequence: Synthetic oligonucleotide
  Antisense strand to SEQ ID NO: 964334
aaccuuccagacuguagac

SEQ ID NO: 964336 - RNA, 19 nt, Artificial Sequence
  Description of Artificial Sequence: Synthetic oligonucleotide
  Sense strand starting at position 3823 of SEQ ID NO: 913921
gaaggaguagguuguaacu

SEQ ID NO: 964337 - RNA, 19 nt, Artificial Sequence
  Description of Artificial Sequence: Synthetic oligonucleotide
  Antisense strand to SEQ ID NO: 964336
aguuacaaccuacuccuuc

SEQ ID NO: 964338 - RNA, 19 nt, Artificial Sequence
  Description of Artificial Sequence: Synthetic oligonucleotide
  Sense strand starting at position 3903 of SEQ ID NO: 913921
ggaggauccucuucccuuu

SEQ ID NO: 964339 - RNA, 19 nt, Artificial Sequence
  Description of Artificial Sequence: Synthetic oligonucleotide
  Antisense strand to SEQ ID NO: 964338
aaagggaagaggauccucc

SEQ ID NO: 964340 - RNA, 19 nt, Artificial Sequence
  Description of Artificial Sequence: Synthetic oligonucleotide
  Sense strand starting at position 260 of SEQ ID NO: 913921
aacuguggaugcuugagau

SEQ ID NO: 964341 - RNA, 19 nt, Artificial Sequence
  Description of Artificial Sequence: Synthetic oligonucleotide
  Antisense strand to SEQ ID NO: 964340
aucucaagcauccacaguu

SEQ ID NO: 964342 - RNA, 19 nt, Artificial Sequence
  Description of Artificial Sequence: Synthetic oligonucleotide
  Sense strand starting at position 829 of SEQ ID NO: 913921
gagccaggccuaggaauau

SEQ ID NO: 964343 - RNA, 19 nt, Artificial Sequence
  Description of Artificial Sequence: Synthetic oligonucleotide
  Antisense strand to SEQ ID NO: 964342
auauuccuaggccuggcuc

SEQ ID NO: 964344 - RNA, 19 nt, Artificial Sequence
  Description of Artificial Sequence: Synthetic oligonucleotide
  Sense strand starting at position 2498 of SEQ ID NO: 913921
ugguaagugaccugacuca

SEQ ID NO: 964345 - RNA, 19 nt, Artificial Sequence
  Description of Artificial Sequence: Synthetic oligonucleotide
  Antisense strand to SEQ ID NO: 964344
ugagucaggucacuuacca

SEQ ID NO: 964346 - RNA, 19 nt, Artificial Sequence
  Description of Artificial Sequence: Synthetic oligonucleotide
  Sense strand starting at position 2977 of SEQ ID NO: 913921
ucauuagacccauggcauu

SEQ ID NO: 964347 - RNA, 19 nt, Artificial Sequence
  Description of Artificial Sequence: Synthetic oligonucleotide
  Antisense strand to SEQ ID NO: 964346
aaugccaugggucuaauga

SEQ ID NO: 964348 - RNA, 19 nt, Artificial Sequence
  Description of Artificial Sequence: Synthetic oligonucleotide
  Sense strand starting at position 1630 of SEQ ID NO: 913921
ggaagauacgucuguacag

SEQ ID NO: 964349 - RNA, 19 nt, Artificial Sequence
  Description of Artificial Sequence: Synthetic oligonucleotide
  Antisense strand to SEQ ID NO: 964348
cuguacagacguaucuucc

SEQ ID NO: 964350 - RNA, 19 nt, Artificial Sequence
  Description of Artificial Sequence: Synthetic oligonucleotide
  Sense strand starting at position 156 of SEQ ID NO: 913921
gaaauaaagguguggcgaa

SEQ ID NO: 964351 - RNA, 19 nt, Artificial Sequence
  Description of Artificial Sequence: Synthetic oligonucleotide
  Antisense strand to SEQ ID NO: 964350
uucgccacaccuuuauuuc

SEQ ID NO: 964352 - RNA, 19 nt, Artificial Sequence
  Description of Artificial Sequence: Synthetic oligonucleotide
  Sense strand starting at position 2295 of SEQ ID NO: 913921
uugaaauuccugcaguucu

SEQ ID NO: 964353 - RNA, 19 nt, Artificial Sequence
  Description of Artificial Sequence: Synthetic oligonucleotide
  Antisense strand to SEQ ID NO: 964352
agaacugcaggaauuucaa

SEQ ID NO: 964354 - RNA, 19 nt, Artificial Sequence
  Description of Artificial Sequence: Synthetic oligonucleotide
  Sense strand starting at position 1482 of SEQ ID NO: 913921
gauccagggcccugucaaa

SEQ ID NO: 964355 - RNA, 19 nt, Artificial Sequence
  Description of Artificial Sequence: Synthetic oligonucleotide
  Antisense strand to SEQ ID NO: 964354
uuugacagggcccuggauc

SEQ ID NO: 964356 - RNA, 19 nt, Artificial Sequence
  Description of Artificial Sequence: Synthetic oligonucleotide
  Sense strand starting at position 3559 of SEQ ID NO: 913921
acaucugcuccagggugaa

SEQ ID NO: 964357 - RNA, 19 nt, Artificial Sequence
  Description of Artificial Sequence: Synthetic oligonucleotide
  Antisense strand to SEQ ID NO: 964356
uucacccuggagcagaugu

SEQ ID NO: 964358 - RNA, 19 nt, Artificial Sequence
  Description of Artificial Sequence: Synthetic oligonucleotide
  Sense strand starting at position 842 of SEQ ID NO: 913921
gaauaucuggcccagcgau

SEQ ID NO: 964359 - RNA, 19 nt, Artificial Sequence
  Description of Artificial Sequence: Synthetic oligonucleotide
  Antisense strand to SEQ ID NO: 964358
aucgcugggccagauauuc

SEQ ID NO: 964360 - RNA, 19 nt, Artificial Sequence
  Description of Artificial Sequence: Synthetic oligonucleotide
  Sense strand starting at position 470 of SEQ ID NO: 913921
agauaagccuaucucuagu

SEQ ID NO: 964361 - RNA, 19 nt, Artificial Sequence
  Description of Artificial Sequence: Synthetic oligonucleotide
  Antisense strand to SEQ ID NO: 964360
acuagagauaggcuuaucu

SEQ ID NO: 964362 - RNA, 19 nt, Artificial Sequence
  Description of Artificial Sequence: Synthetic oligonucleotide
  Sense strand starting at position 1627 of SEQ ID NO: 913921
cugggaagauacgucugua

SEQ ID NO: 964363 - RNA, 19 nt, Artificial Sequence
  Description of Artificial Sequence: Synthetic oligonucleotide
  Antisense strand to SEQ ID NO: 964362
uacagacguaucuucccag

SEQ ID NO: 964364 - RNA, 19 nt, Artificial Sequence
  Description of Artificial Sequence: Synthetic oligonucleotide
  Sense strand starting at position 2707 of SEQ ID NO: 913921
gguaaaucauggccaccuu

SEQ ID NO: 964365 - RNA, 19 nt, Artificial Sequence
  Description of Artificial Sequence: Synthetic oligonucleotide
  Antisense strand to SEQ ID NO: 964364
aagguggccaugauuuacc

SEQ ID NO: 964366 - RNA, 19 nt, Artificial Sequence
  Description of Artificial Sequence: Synthetic oligonucleotide
  Sense strand starting at position 2765 of SEQ ID NO: 913921
gaaagauagccacguucca

SEQ ID NO: 964367 - RNA, 19 nt, Artificial Sequence
  Description of Artificial Sequence: Synthetic oligonucleotide
  Antisense strand to SEQ ID NO: 964366
uggaacguggcuaucuuuc

SEQ ID NO: 964368 - RNA, 19 nt, Artificial Sequence
  Description of Artificial Sequence: Synthetic oligonucleotide
  Sense strand starting at position 2730 of SEQ ID NO: 913921
gugcuuagucuccagaauu

SEQ ID NO: 964369 - RNA, 19 nt, Artificial Sequence
  Description of Artificial Sequence: Synthetic oligonucleotide
  Antisense strand to SEQ ID NO: 964368
aauucuggagacuaagcac

SEQ ID NO: 964370 - RNA, 19 nt, Artificial Sequence
  Description of Artificial Sequence: Synthetic oligonucleotide
  Sense strand starting at position 2583 of SEQ ID NO: 913921
aggucuugacucugccaga

SEQ ID NO: 964371 - RNA, 19 nt, Artificial Sequence
  Description of Artificial Sequence: Synthetic oligonucleotide
  Antisense strand to SEQ ID NO: 964370
ucuggcagagucaagaccu

SEQ ID NO: 964372 - RNA, 19 nt, Artificial Sequence
  Description of Artificial Sequence: Synthetic oligonucleotide
  Sense strand starting at position 600 of SEQ ID NO: 913921
guucuaagcccugggauua

SEQ ID NO: 964373 - RNA, 19 nt, Artificial Sequence
  Description of Artificial Sequence: Synthetic oligonucleotide
  Antisense strand to SEQ ID NO: 964372
uaaucccagggcuuagaac

SEQ ID NO: 964374 - RNA, 19 nt, Artificial Sequence
  Description of Artificial Sequence: Synthetic oligonucleotide
  Sense strand starting at position 2496 of SEQ ID NO: 913921
guugguaagugaccugacu

SEQ ID NO: 964375 - RNA, 19 nt, Artificial Sequence
  Description of Artificial Sequence: Synthetic oligonucleotide
  Antisense strand to SEQ ID NO: 964374
agucaggucacuuaccaac

SEQ ID NO: 964376 - RNA, 19 nt, Artificial Sequence
  Description of Artificial Sequence: Synthetic oligonucleotide
  Sense strand starting at position 408 of SEQ ID NO: 913921
auuacacagcuacgugaau

SEQ ID NO: 964377 - RNA, 19 nt, Artificial Sequence
  Description of Artificial Sequence: Synthetic oligonucleotide
  Antisense strand to SEQ ID NO: 964376
auucacguagcuguguaau

SEQ ID NO: 964378 - RNA, 19 nt, Artificial Sequence
  Description of Artificial Sequence: Synthetic oligonucleotide
  Sense strand starting at position 599 of SEQ ID NO: 913921
uguucuaagcccugggauu

SEQ ID NO: 964379 - RNA, 19 nt, Artificial Sequence
  Description of Artificial Sequence: Synthetic oligonucleotide
  Antisense strand to SEQ ID NO: 964378
aaucccagggcuuagaaca

SEQ ID NO: 964380 - RNA, 19 nt, Artificial Sequence
  Description of Artificial Sequence: Synthetic oligonucleotide
  Sense strand starting at position 989 of SEQ ID NO: 913922
aggacuacucccuaaugca

SEQ ID NO: 964381 - RNA, 19 nt, Artificial Sequence
  Description of Artificial Sequence: Synthetic oligonucleotide
  Antisense strand to SEQ ID NO: 964380
ugcauuagggaguaguccu

SEQ ID NO: 964382 - RNA, 19 nt, Artificial Sequence
  Description of Artificial Sequence: Synthetic oligonucleotide
  Sense strand starting at position 3646 of SEQ ID NO: 913922
gccuaauugguguucugcu

SEQ ID NO: 964383 - RNA, 19 nt, Artificial Sequence
  Description of Artificial Sequence: Synthetic oligonucleotide
  Antisense strand to SEQ ID NO: 964382
agcagaacaccaauuaggc

SEQ ID NO: 964384 - RNA, 19 nt, Artificial Sequence
  Description of Artificial Sequence: Synthetic oligonucleotide
  Sense strand starting at position 2971 of SEQ ID NO: 913922
acauguggucaagaaucuu

SEQ ID NO: 964385 - RNA, 19 nt, Artificial Sequence
  Description of Artificial Sequence: Synthetic oligonucleotide
  Antisense strand to SEQ ID NO: 964384
aagauucuugaccacaugu

SEQ ID NO: 964386 - RNA, 19 nt, Artificial Sequence
  Description of Artificial Sequence: Synthetic oligonucleotide
  Sense strand starting at position 2008 of SEQ ID NO: 913922
cgugacgucuccauggaug

SEQ ID NO: 964387 - RNA, 19 nt, Artificial Sequence
  Description of Artificial Sequence: Synthetic oligonucleotide
  Antisense strand to SEQ ID NO: 964386
cauccauggagacgucacg

SEQ ID NO: 964388 - RNA, 19 nt, Artificial Sequence
  Description of Artificial Sequence: Synthetic oligonucleotide
  Sense strand starting at position 2967 of SEQ ID NO: 913922
ggauacauguggucaagaa

SEQ ID NO: 964389 - RNA, 19 nt, Artificial Sequence
  Description of Artificial Sequence: Synthetic oligonucleotide
  Antisense strand to SEQ ID NO: 964388
uucuugaccacauguaucc

SEQ ID NO: 964390 - RNA, 19 nt, Artificial Sequence
  Description of Artificial Sequence: Synthetic oligonucleotide
  Sense strand starting at position 2440 of SEQ ID NO: 913922
uggaacuuucucugggaua

SEQ ID NO: 964391 - RNA, 19 nt, Artificial Sequence
  Description of Artificial Sequence: Synthetic oligonucleotide
  Antisense strand to SEQ ID NO: 964390
uaucccagagaaaguucca

SEQ ID NO: 964392 - RNA, 19 nt, Artificial Sequence
  Description of Artificial Sequence: Synthetic oligonucleotide
  Sense strand starting at position 3126 of SEQ ID NO: 913922
uugggaauucuuuggacac

SEQ ID NO: 964393 - RNA, 19 nt, Artificial Sequence
  Description of Artificial Sequence: Synthetic oligonucleotide
  Antisense strand to SEQ ID NO: 964392
guguccaaagaauucccaa

SEQ ID NO: 964394 - RNA, 19 nt, Artificial Sequence
  Description of Artificial Sequence: Synthetic oligonucleotide
  Sense strand starting at position 2192 of SEQ ID NO: 913922
uuguguguaggagaggaua

SEQ ID NO: 964395 - RNA, 19 nt, Artificial Sequence
  Description of Artificial Sequence: Synthetic oligonucleotide
  Antisense strand to SEQ ID NO: 964394
uauccucuccuacacacaa

SEQ ID NO: 964396 - RNA, 19 nt, Artificial Sequence
  Description of Artificial Sequence: Synthetic oligonucleotide
  Sense strand starting at position 3482 of SEQ ID NO: 913922
uucucagugagcuagggaa

SEQ ID NO: 964397 - RNA, 19 nt, Artificial Sequence
  Description of Artificial Sequence: Synthetic oligonucleotide
  Antisense strand to SEQ ID NO: 964396
uucccuagcucacugagaa

SEQ ID NO: 964398 - RNA, 19 nt, Artificial Sequence
  Description of Artificial Sequence: Synthetic oligonucleotide
  Sense strand starting at position 2517 of SEQ ID NO: 913922
aucugcauuucucugguua

SEQ ID NO: 964399 - RNA, 19 nt, Artificial Sequence
  Description of Artificial Sequence: Synthetic oligonucleotide
  Antisense strand to SEQ ID NO: 964398
uaaccagagaaaugcagau

SEQ ID NO: 964400 - RNA, 19 nt, Artificial Sequence
  Description of Artificial Sequence: Synthetic oligonucleotide
  Sense strand starting at position 3881 of SEQ ID NO: 913922
auucuaguuguacagaacu

SEQ ID NO: 964401 - RNA, 19 nt, Artificial Sequence
  Description of Artificial Sequence: Synthetic oligonucleotide
  Antisense strand to SEQ ID NO: 964400
aguucuguacaacuagaau

SEQ ID NO: 964402 - RNA, 19 nt, Artificial Sequence
  Description of Artificial Sequence: Synthetic oligonucleotide
  Sense strand starting at position 3544 of SEQ ID NO: 913922
gucagagucaccgauuaag

SEQ ID NO: 964403 - RNA, 19 nt, Artificial Sequence
  Description of Artificial Sequence: Synthetic oligonucleotide
  Antisense strand to SEQ ID NO: 964402
cuuaaucggugacucugac

SEQ ID NO: 964404 - RNA, 19 nt, Artificial Sequence
  Description of Artificial Sequence: Synthetic oligonucleotide
  Sense strand starting at position 2964 of SEQ ID NO: 913922
uagggauacauguggucaa

SEQ ID NO: 964405 - RNA, 19 nt, Artificial Sequence
  Description of Artificial Sequence: Synthetic oligonucleotide
  Antisense strand to SEQ ID NO: 964404
uugaccacauguaucccua

SEQ ID NO: 964406 - RNA, 19 nt, Artificial Sequence
  Description of Artificial Sequence: Synthetic oligonucleotide
  Sense strand starting at position 1159 of SEQ ID NO: 913922
ccgcaauucuauuuaguug

SEQ ID NO: 964407 - RNA, 19 nt, Artificial Sequence
  Description of Artificial Sequence: Synthetic oligonucleotide
  Antisense strand to SEQ ID NO: 964406
caacuaaauagaauugcgg

SEQ ID NO: 964408 - RNA, 19 nt, Artificial Sequence
  Description of Artificial Sequence: Synthetic oligonucleotide
  Sense strand starting at position 1005 of SEQ ID NO: 913922
gcacccauugcagagauca

SEQ ID NO: 964409 - RNA, 19 nt, Artificial Sequence
  Description of Artificial Sequence: Synthetic oligonucleotide
  Antisense strand to SEQ ID NO: 964408
ugaucucugcaaugggugc

SEQ ID NO: 964410 - RNA, 19 nt, Artificial Sequence
  Description of Artificial Sequence: Synthetic oligonucleotide
  Sense strand starting at position 208 of SEQ ID NO: 913922
accaucgucaugggaauaa

SEQ ID NO: 964411 - RNA, 19 nt, Artificial Sequence
  Description of Artificial Sequence: Synthetic oligonucleotide
  Antisense strand to SEQ ID NO: 964410
uuauucccaugacgauggu

SEQ ID NO: 964412 - RNA, 19 nt, Artificial Sequence
  Description of Artificial Sequence: Synthetic oligonucleotide
  Sense strand starting at position 2518 of SEQ ID NO: 913922
ucugcauuucucugguuau

SEQ ID NO: 964413 - RNA, 19 nt, Artificial Sequence
  Description of Artificial Sequence: Synthetic oligonucleotide
  Antisense strand to SEQ ID NO: 964412
auaaccagagaaaugcaga

SEQ ID NO: 964414 - RNA, 19 nt, Artificial Sequence
  Description of Artificial Sequence: Synthetic oligonucleotide
  Sense strand starting at position 3399 of SEQ ID NO: 913922
gguuuagugguugaccaga

SEQ ID NO: 964415 - RNA, 19 nt, Artificial Sequence
  Description of Artificial Sequence: Synthetic oligonucleotide
  Antisense strand to SEQ ID NO: 964414
ucuggucaaccacuaaacc

SEQ ID NO: 964416 - RNA, 19 nt, Artificial Sequence
  Description of Artificial Sequence: Synthetic oligonucleotide
  Sense strand starting at position 99 of SEQ ID NO: 913922
ccaggagcuccugaagcau

SEQ ID NO: 964417 - RNA, 19 nt, Artificial Sequence
  Description of Artificial Sequence: Synthetic oligonucleotide
  Antisense strand to SEQ ID NO: 964416
augcuucaggagcuccugg

SEQ ID NO: 964418 - RNA, 19 nt, Artificial Sequence
  Description of Artificial Sequence: Synthetic oligonucleotide
  Sense strand starting at position 3187 of SEQ ID NO: 913922
ugauaugaagguuguauau

SEQ ID NO: 964419 - RNA, 19 nt, Artificial Sequence
  Description of Artificial Sequence: Synthetic oligonucleotide
  Antisense strand to SEQ ID NO: 964418
auauacaaccuucauauca

SEQ ID NO: 964420 - RNA, 19 nt, Artificial Sequence
  Description of Artificial Sequence: Synthetic oligonucleotide
  Sense strand starting at position 207 of SEQ ID NO: 913922
gaccaucgucaugggaaua

SEQ ID NO: 964421 - RNA, 19 nt, Artificial Sequence
  Description of Artificial Sequence: Synthetic oligonucleotide
  Antisense strand to SEQ ID NO: 964420
uauucccaugacgaugguc

SEQ ID NO: 964422 - RNA, 19 nt, Artificial Sequence
  Description of Artificial Sequence: Synthetic oligonucleotide
  Sense strand starting at position 3306 of SEQ ID NO: 913922
auucaaauuccgggugaga

SEQ ID NO: 964423 - RNA, 19 nt, Artificial Sequence
  Description of Artificial Sequence: Synthetic oligonucleotide
  Antisense strand to SEQ ID NO: 964422
ucucacccggaauuugaau

SEQ ID NO: 964424 - RNA, 19 nt, Artificial Sequence
  Description of Artificial Sequence: Synthetic oligonucleotide
  Sense strand starting at position 2886 of SEQ ID NO: 913922
gacagagugccacgaagaa

SEQ ID NO: 964425 - RNA, 19 nt, Artificial Sequence
  Description of Artificial Sequence: Synthetic oligonucleotide
  Antisense strand to SEQ ID NO: 964424
uucuucguggcacucuguc

SEQ ID NO: 964426 - RNA, 19 nt, Artificial Sequence
  Description of Artificial Sequence: Synthetic oligonucleotide
  Sense strand starting at position 2439 of SEQ ID NO: 913922
guggaacuuucucugggau

SEQ ID NO: 964427 - RNA, 19 nt, Artificial Sequence
  Description of Artificial Sequence: Synthetic oligonucleotide
  Antisense strand to SEQ ID NO: 964426
aucccagagaaaguuccac

SEQ ID NO: 964428 - RNA, 19 nt, Artificial Sequence
  Description of Artificial Sequence: Synthetic oligonucleotide
  Sense strand starting at position 2628 of SEQ ID NO: 913922
agggauuucuuguauagga

SEQ ID NO: 964429 - RNA, 19 nt, Artificial Sequence
  Description of Artificial Sequence: Synthetic oligonucleotide
  Antisense strand to SEQ ID NO: 964428
uccuauacaagaaaucccu

SEQ ID NO: 964430 - RNA, 19 nt, Artificial Sequence
  Description of Artificial Sequence: Synthetic oligonucleotide
  Sense strand starting at position 3401 of SEQ ID NO: 913922
uuuagugguugaccagaua

SEQ ID NO: 964431 - RNA, 19 nt, Artificial Sequence
  Description of Artificial Sequence: Synthetic oligonucleotide
  Antisense strand to SEQ ID NO: 964430
uaucuggucaaccacuaaa

SEQ ID NO: 964432 - RNA, 19 nt, Artificial Sequence
  Description of Artificial Sequence: Synthetic oligonucleotide
  Sense strand starting at position 3315 of SEQ ID NO: 913922
ccgggugagaggcaguaau

SEQ ID NO: 964433 - RNA, 19 nt, Artificial Sequence
  Description of Artificial Sequence: Synthetic oligonucleotide
  Antisense strand to SEQ ID NO: 964432
auuacugccucucacccgg

SEQ ID NO: 964434 - RNA, 19 nt, Artificial Sequence
  Description of Artificial Sequence: Synthetic oligonucleotide
  Sense strand starting at position 3184 of SEQ ID NO: 913922
aguugauaugaagguugua

SEQ ID NO: 964435 - RNA, 19 nt, Artificial Sequence
  Description of Artificial Sequence: Synthetic oligonucleotide
  Antisense strand to SEQ ID NO: 964434
uacaaccuucauaucaacu

SEQ ID NO: 964436 - RNA, 19 nt, Artificial Sequence
  Description of Artificial Sequence: Synthetic oligonucleotide
  Sense strand starting at position 3855 of SEQ ID NO: 913922
gugucagaacauggaaguu

SEQ ID NO: 964437 - RNA, 19 nt, Artificial Sequence
  Description of Artificial Sequence: Synthetic oligonucleotide
  Antisense strand to SEQ ID NO: 964436
aacuuccauguucugacac

SEQ ID NO: 964438 - RNA, 19 nt, Artificial Sequence
  Description of Artificial Sequence: Synthetic oligonucleotide
  Sense strand starting at position 3542 of SEQ ID NO: 913922
aagucagagucaccgauua

SEQ ID NO: 964439 - RNA, 19 nt, Artificial Sequence
  Description of Artificial Sequence: Synthetic oligonucleotide
  Antisense strand to SEQ ID NO: 964438
uaaucggugacucugacuu

SEQ ID NO: 964440 - RNA, 19 nt, Artificial Sequence
  Description of Artificial Sequence: Synthetic oligonucleotide
  Sense strand starting at position 854 of SEQ ID NO: 913922
gggucucuucucugaggac

SEQ ID NO: 964441 - RNA, 19 nt, Artificial Sequence
  Description of Artificial Sequence: Synthetic oligonucleotide
  Antisense strand to SEQ ID NO: 964440
guccucagagaagagaccc

SEQ ID NO: 964442 - RNA, 19 nt, Artificial Sequence
  Description of Artificial Sequence: Synthetic oligonucleotide
  Sense strand starting at position 3351 of SEQ ID NO: 913922
ggaguaagguggccagauu

SEQ ID NO: 964443 - RNA, 19 nt, Artificial Sequence
  Description of Artificial Sequence: Synthetic oligonucleotide
  Antisense strand to SEQ ID NO: 964442
aaucuggccaccuuacucc

SEQ ID NO: 964444 - RNA, 19 nt, Artificial Sequence
  Description of Artificial Sequence: Synthetic oligonucleotide
  Sense strand starting at position 1398 of SEQ ID NO: 913922
ucucaucuguaaucggaga

SEQ ID NO: 964445 - RNA, 19 nt, Artificial Sequence
  Description of Artificial Sequence: Synthetic oligonucleotide
  Antisense strand to SEQ ID NO: 964444
ucuccgauuacagaugaga

SEQ ID NO: 964446 - RNA, 19 nt, Artificial Sequence
  Description of Artificial Sequence: Synthetic oligonucleotide
  Sense strand starting at position 3477 of SEQ ID NO: 913922
ggaacuucucagugagcua

SEQ ID NO: 964447 - RNA, 19 nt, Artificial Sequence
  Description of Artificial Sequence: Synthetic oligonucleotide
  Antisense strand to SEQ ID NO: 964446
uagcucacugagaaguucc

SEQ ID NO: 964448 - RNA, 19 nt, Artificial Sequence
  Description of Artificial Sequence: Synthetic oligonucleotide
  Sense strand starting at position 2438 of SEQ ID NO: 913922
cguggaacuuucucuggga

SEQ ID NO: 964449 - RNA, 19 nt, Artificial Sequence
  Description of Artificial Sequence: Synthetic oligonucleotide
  Antisense strand to SEQ ID NO: 964448
ucccagagaaaguuccacg

SEQ ID NO: 964450 - RNA, 19 nt, Artificial Sequence
  Description of Artificial Sequence: Synthetic oligonucleotide
  Sense strand starting at position 425 of SEQ ID NO: 913922
gucaauauguaagccagau

SEQ ID NO: 964451 - RNA, 19 nt, Artificial Sequence
  Description of Artificial Sequence: Synthetic oligonucleotide
  Antisense strand to SEQ ID NO: 964450
aucuggcuuacauauugac

SEQ ID NO: 964452 - RNA, 19 nt, Artificial Sequence
  Description of Artificial Sequence: Synthetic oligonucleotide
  Sense strand starting at position 3760 of SEQ ID NO: 913922
guaggcuuugcagagaucu

SEQ ID NO: 964453 - RNA, 19 nt, Artificial Sequence
  Description of Artificial Sequence: Synthetic oligonucleotide
  Antisense strand to SEQ ID NO: 964452
agaucucugcaaagccuac

SEQ ID NO: 964454 - RNA, 19 nt, Artificial Sequence
  Description of Artificial Sequence: Synthetic oligonucleotide
  Sense strand starting at position 261 of SEQ ID NO: 913922
gacagauacugugcucauu

SEQ ID NO: 964455 - RNA, 19 nt, Artificial Sequence
  Description of Artificial Sequence: Synthetic oligonucleotide
  Antisense strand to SEQ ID NO: 964454
aaugagcacaguaucuguc

SEQ ID NO: 964456 - RNA, 19 nt, Artificial Sequence
  Description of Artificial Sequence: Synthetic oligonucleotide
  Sense strand starting at position 1566 of SEQ ID NO: 913922
aguccucgggcuggagaaa

SEQ ID NO: 964457 - RNA, 19 nt, Artificial Sequence
  Description of Artificial Sequence: Synthetic oligonucleotide
  Antisense strand to SEQ ID NO: 964456
uuucuccagcccgaggacu

SEQ ID NO: 964458 - RNA, 19 nt, Artificial Sequence
  Description of Artificial Sequence: Synthetic oligonucleotide
  Sense strand starting at position 3213 of SEQ ID NO: 913922
cucacagaaucagaggaaa

SEQ ID NO: 964459 - RNA, 19 nt, Artificial Sequence
  Description of Artificial Sequence: Synthetic oligonucleotide
  Antisense strand to SEQ ID NO: 964458
uuuccucugauucugugag

SEQ ID NO: 964460 - RNA, 19 nt, Artificial Sequence
  Description of Artificial Sequence: Synthetic oligonucleotide
  Sense strand starting at position 1417 of SEQ ID NO: 913923
cuauaaagugccuagaaca

SEQ ID NO: 964461 - RNA, 19 nt, Artificial Sequence
  Description of Artificial Sequence: Synthetic oligonucleotide
  Antisense strand to SEQ ID NO: 964460
uguucuaggcacuuuauag

SEQ ID NO: 964462 - RNA, 19 nt, Artificial Sequence
  Description of Artificial Sequence: Synthetic oligonucleotide
  Sense strand starting at position 3052 of SEQ ID NO: 913923
uacuaacaucagugggaca

SEQ ID NO: 964463 - RNA, 19 nt, Artificial Sequence
  Description of Artificial Sequence: Synthetic oligonucleotide
  Antisense strand to SEQ ID NO: 964462
ugucccacugauguuagua

SEQ ID NO: 964464 - RNA, 19 nt, Artificial Sequence
  Description of Artificial Sequence: Synthetic oligonucleotide
  Sense strand starting at position 1035 of SEQ ID NO: 913923
agaaauaagccagggucaa

SEQ ID NO: 964465 - RNA, 19 nt, Artificial Sequence
  Description of Artificial Sequence: Synthetic oligonucleotide
  Antisense strand to SEQ ID NO: 964464
uugacccuggcuuauuucu

SEQ ID NO: 964466 - RNA, 19 nt, Artificial Sequence
  Description of Artificial Sequence: Synthetic oligonucleotide
  Sense strand starting at position 1501 of SEQ ID NO: 913923
auggcagauccauggaaau

SEQ ID NO: 964467 - RNA, 19 nt, Artificial Sequence
  Description of Artificial Sequence: Synthetic oligonucleotide
  Antisense strand to SEQ ID NO: 964466
auuuccauggaucugccau

SEQ ID NO: 964468 - RNA, 19 nt, Artificial Sequence
  Description of Artificial Sequence: Synthetic oligonucleotide
  Sense strand starting at position 3289 of SEQ ID NO: 913923
gauugauugcuggagucaa

SEQ ID NO: 964469 - RNA, 19 nt, Artificial Sequence
  Description of Artificial Sequence: Synthetic oligonucleotide
  Antisense strand to SEQ ID NO: 964468
uugacuccagcaaucaauc

SEQ ID NO: 964470 - RNA, 19 nt, Artificial Sequence
  Description of Artificial Sequence: Synthetic oligonucleotide
  Sense strand starting at position 2337 of SEQ ID NO: 913923
aggacaguauucucuugaa

SEQ ID NO: 964471 - RNA, 19 nt, Artificial Sequence
  Description of Artificial Sequence: Synthetic oligonucleotide
  Antisense strand to SEQ ID NO: 964470
uucaagagaauacuguccu

SEQ ID NO: 964472 - RNA, 19 nt, Artificial Sequence
  Description of Artificial Sequence: Synthetic oligonucleotide
  Sense strand starting at position 1036 of SEQ ID NO: 913923
gaaauaagccagggucaau

SEQ ID NO: 964473 - RNA, 19 nt, Artificial Sequence
  Description of Artificial Sequence: Synthetic oligonucleotide
  Antisense strand to SEQ ID NO: 964472
auugacccuggcuuauuuc

SEQ ID NO: 964474 - RNA, 19 nt, Artificial Sequence
  Description of Artificial Sequence: Synthetic oligonucleotide
  Sense strand starting at position 406 of SEQ ID NO: 913923
uuuacagcauaauugagau

SEQ ID NO: 964475 - RNA, 19 nt, Artificial Sequence
  Description of Artificial Sequence: Synthetic oligonucleotide
  Antisense strand to SEQ ID NO: 964474
aucucaauuaugcuguaaa

SEQ ID NO: 964476 - RNA, 19 nt, Artificial Sequence
  Description of Artificial Sequence: Synthetic oligonucleotide
  Sense strand starting at position 3230 of SEQ ID NO: 913923
auauguguugcagagaaac

SEQ ID NO: 964477 - RNA, 19 nt, Artificial Sequence
  Description of Artificial Sequence: Synthetic oligonucleotide
  Antisense strand to SEQ ID NO: 964476
guuucucugcaacacauau

SEQ ID NO: 964478 - RNA, 19 nt, Artificial Sequence
  Description of Artificial Sequence: Synthetic oligonucleotide
  Sense strand starting at position 2119 of SEQ ID NO: 913923
ccaguaucuuauccagaag

SEQ ID NO: 964479 - RNA, 19 nt, Artificial Sequence
  Description of Artificial Sequence: Synthetic oligonucleotide
  Antisense strand to SEQ ID NO: 964478
cuucuggauaagauacugg

SEQ ID NO: 964480 - RNA, 19 nt, Artificial Sequence
  Description of Artificial Sequence: Synthetic oligonucleotide
  Sense strand starting at position 1634 of SEQ ID NO: 913923
acuggaaucuaguucuuaa

SEQ ID NO: 964481 - RNA, 19 nt, Artificial Sequence
  Description of Artificial Sequence: Synthetic oligonucleotide
  Antisense strand to SEQ ID NO: 964480
uuaagaacuagauuccagu

SEQ ID NO: 964482 - RNA, 19 nt, Artificial Sequence
  Description of Artificial Sequence: Synthetic oligonucleotide
  Sense strand starting at position 1637 of SEQ ID NO: 913923
ggaaucuaguucuuaauca

SEQ ID NO: 964483 - RNA, 19 nt, Artificial Sequence
  Description of Artificial Sequence: Synthetic oligonucleotide
  Antisense strand to SEQ ID NO: 964482
ugauuaagaacuagauucc

SEQ ID NO: 964484 - RNA, 19 nt, Artificial Sequence
  Description of Artificial Sequence: Synthetic oligonucleotide
  Sense strand starting at position 1294 of SEQ ID NO: 913923
augaguuugguuuauccag

SEQ ID NO: 964485 - RNA, 19 nt, Artificial Sequence
  Description of Artificial Sequence: Synthetic oligonucleotide
  Antisense strand to SEQ ID NO: 964484
cuggauaaaccaaacucau

SEQ ID NO: 964486 - RNA, 19 nt, Artificial Sequence
  Description of Artificial Sequence: Synthetic oligonucleotide
  Sense strand starting at position 2993 of SEQ ID NO: 913923
aggguuuauggucaagcaa

SEQ ID NO: 964487 - RNA, 19 nt, Artificial Sequence
  Description of Artificial Sequence: Synthetic oligonucleotide
  Antisense strand to SEQ ID NO: 964486
uugcuugaccauaaacccu

SEQ ID NO: 964488 - RNA, 19 nt, Artificial Sequence
  Description of Artificial Sequence: Synthetic oligonucleotide
  Sense strand starting at position 1161 of SEQ ID NO: 913923
agaaaucuguuaguaacug

SEQ ID NO: 964489 - RNA, 19 nt, Artificial Sequence
  Description of Artificial Sequence: Synthetic oligonucleotide
  Antisense strand to SEQ ID NO: 964488
caguuacuaacagauuucu

SEQ ID NO: 964490 - RNA, 19 nt, Artificial Sequence
  Description of Artificial Sequence: Synthetic oligonucleotide
  Sense strand starting at position 2013 of SEQ ID NO: 913923
aggguuccuuuauuaauag

SEQ ID NO: 964491 - RNA, 19 nt, Artificial Sequence
  Description of Artificial Sequence: Synthetic oligonucleotide
  Antisense strand to SEQ ID NO: 964490
cuauuaauaaaggaacccu

SEQ ID NO: 964492 - RNA, 19 nt, Artificial Sequence
  Description of Artificial Sequence: Synthetic oligonucleotide
  Sense strand starting at position 2314 of SEQ ID NO: 913923
guaguaaggacagguauga

SEQ ID NO: 964493 - RNA, 19 nt, Artificial Sequence
  Description of Artificial Sequence: Synthetic oligonucleotide
  Antisense strand to SEQ ID NO: 964492
ucauaccuguccuuacuac

SEQ ID NO: 964494 - RNA, 19 nt, Artificial Sequence
  Description of Artificial Sequence: Synthetic oligonucleotide
  Sense strand starting at position 1697 of SEQ ID NO: 913923
ugccaaguucuugacauga

SEQ ID NO: 964495 - RNA, 19 nt, Artificial Sequence
  Description of Artificial Sequence: Synthetic oligonucleotide
  Antisense strand to SEQ ID NO: 964494
ucaugucaagaacuuggca

SEQ ID NO: 964496 - RNA, 19 nt, Artificial Sequence
  Description of Artificial Sequence: Synthetic oligonucleotide
  Sense strand starting at position 1083 of SEQ ID NO: 913923
gaaggaugguucucuccau

SEQ ID NO: 964497 - RNA, 19 nt, Artificial Sequence
  Description of Artificial Sequence: Synthetic oligonucleotide
  Antisense strand to SEQ ID NO: 964496
auggagagaaccauccuuc

SEQ ID NO: 964498 - RNA, 19 nt, Artificial Sequence
  Description of Artificial Sequence: Synthetic oligonucleotide
  Sense strand starting at position 2181 of SEQ ID NO: 913923
uugugacuucuaggaauug

SEQ ID NO: 964499 - RNA, 19 nt, Artificial Sequence
  Description of Artificial Sequence: Synthetic oligonucleotide
  Antisense strand to SEQ ID NO: 964498
caauuccuagaagucacaa

SEQ ID NO: 964500 - RNA, 19 nt, Artificial Sequence
  Description of Artificial Sequence: Synthetic oligonucleotide
  Sense strand starting at position 3277 of SEQ ID NO: 913923
acuuguugccaggauugau

SEQ ID NO: 964501 - RNA, 19 nt, Artificial Sequence
  Description of Artificial Sequence: Synthetic oligonucleotide
  Antisense strand to SEQ ID NO: 964500
aucaauccuggcaacaagu

SEQ ID NO: 964502 - RNA, 19 nt, Artificial Sequence
  Description of Artificial Sequence: Synthetic oligonucleotide
  Sense strand starting at position 3520 of SEQ ID NO: 913923
uuuacauaccaguaugcau

SEQ ID NO: 964503 - RNA, 19 nt, Artificial Sequence
  Description of Artificial Sequence: Synthetic oligonucleotide
  Antisense strand to SEQ ID NO: 964502
augcauacugguauguaaa

SEQ ID NO: 964504 - RNA, 19 nt, Artificial Sequence
  Description of Artificial Sequence: Synthetic oligonucleotide
  Sense strand starting at position 2095 of SEQ ID NO: 913923
ucaagaauucccugcaaug

SEQ ID NO: 964505 - RNA, 19 nt, Artificial Sequence
  Description of Artificial Sequence: Synthetic oligonucleotide
  Antisense strand to SEQ ID NO: 964504
cauugcagggaauucuuga

SEQ ID NO: 964506 - RNA, 19 nt, Artificial Sequence
  Description of Artificial Sequence: Synthetic oligonucleotide
  Sense strand starting at position 1165 of SEQ ID NO: 913923
aucuguuaguaacuggaau

SEQ ID NO: 964507 - RNA, 19 nt, Artificial Sequence
  Description of Artificial Sequence: Synthetic oligonucleotide
  Antisense strand to SEQ ID NO: 964506
auuccaguuacuaacagau

SEQ ID NO: 964508 - RNA, 19 nt, Artificial Sequence
  Description of Artificial Sequence: Synthetic oligonucleotide
  Sense strand starting at position 3104 of SEQ ID NO: 913923
guuugauggcagcaaugga

SEQ ID NO: 964509 - RNA, 19 nt, Artificial Sequence
  Description of Artificial Sequence: Synthetic oligonucleotide
  Antisense strand to SEQ ID NO: 964508
uccauugcugccaucaaac

SEQ ID NO: 964510 - RNA, 19 nt, Artificial Sequence
  Description of Artificial Sequence: Synthetic oligonucleotide
  Sense strand starting at position 3252 of SEQ ID NO: 913923
ggacgugugcaugagauaa

SEQ ID NO: 964511 - RNA, 19 nt, Artificial Sequence
  Description of Artificial Sequence: Synthetic oligonucleotide
  Antisense strand to SEQ ID NO: 964510
uuaucucaugcacacgucc

SEQ ID NO: 964512 - RNA, 19 nt, Artificial Sequence
  Description of Artificial Sequence: Synthetic oligonucleotide
  Sense strand starting at position 3159 of SEQ ID NO: 913923
guaucagugcuuuaaacag

SEQ ID NO: 964513 - RNA, 19 nt, Artificial Sequence
  Description of Artificial Sequence: Synthetic oligonucleotide
  Antisense strand to SEQ ID NO: 964512
cuguuuaaagcacugauac

SEQ ID NO: 964514 - RNA, 19 nt, Artificial Sequence
  Description of Artificial Sequence: Synthetic oligonucleotide
  Sense strand starting at position 359 of SEQ ID NO: 913923
ugauuaaugacagguagcu

SEQ ID NO: 964515 - RNA, 19 nt, Artificial Sequence
  Description of Artificial Sequence: Synthetic oligonucleotide
  Antisense strand to SEQ ID NO: 964514
agcuaccugucauuaauca

SEQ ID NO: 964516 - RNA, 19 nt, Artificial Sequence
  Description of Artificial Sequence: Synthetic oligonucleotide
  Sense strand starting at position 1300 of SEQ ID NO: 913923
uugguuuauccagaucugu

SEQ ID NO: 964517 - RNA, 19 nt, Artificial Sequence
  Description of Artificial Sequence: Synthetic oligonucleotide
  Antisense strand to SEQ ID NO: 964516
acagaucuggauaaaccaa

SEQ ID NO: 964518 - RNA, 19 nt, Artificial Sequence
  Description of Artificial Sequence: Synthetic oligonucleotide
  Sense strand starting at position 1289 of SEQ ID NO: 913923
gacuaaugaguuugguuua

SEQ ID NO: 964519 - RNA, 19 nt, Artificial Sequence
  Description of Artificial Sequence: Synthetic oligonucleotide
  Antisense strand to SEQ ID NO: 964518
uaaaccaaacucauuaguc

SEQ ID NO: 964520 - RNA, 19 nt, Artificial Sequence
  Description of Artificial Sequence: Synthetic oligonucleotide
  Sense strand starting at position 203 of SEQ ID NO: 913923
ugggaagggcgaugguaua

SEQ ID NO: 964521 - RNA, 19 nt, Artificial Sequence
  Description of Artificial Sequence: Synthetic oligonucleotide
  Antisense strand to SEQ ID NO: 964520
uauaccaucgcccuuccca

SEQ ID NO: 964522 - RNA, 19 nt, Artificial Sequence
  Description of Artificial Sequence: Synthetic oligonucleotide
  Sense strand starting at position 602 of SEQ ID NO: 913923
auaucuuucuguuccagga

SEQ ID NO: 964523 - RNA, 19 nt, Artificial Sequence
  Description of Artificial Sequence: Synthetic oligonucleotide
  Antisense strand to SEQ ID NO: 964522
uccuggaacagaaagauau

SEQ ID NO: 964524 - RNA, 19 nt, Artificial Sequence
  Description of Artificial Sequence: Synthetic oligonucleotide
  Sense strand starting at position 2008 of SEQ ID NO: 913923
ucaacaggguuccuuuauu

SEQ ID NO: 964525 - RNA, 19 nt, Artificial Sequence
  Description of Artificial Sequence: Synthetic oligonucleotide
  Antisense strand to SEQ ID NO: 964524
aauaaaggaacccuguuga

SEQ ID NO: 964526 - RNA, 19 nt, Artificial Sequence
  Description of Artificial Sequence: Synthetic oligonucleotide
  Sense strand starting at position 3286 of SEQ ID NO: 913923
caggauugauugcuggagu

SEQ ID NO: 964527 - RNA, 19 nt, Artificial Sequence
  Description of Artificial Sequence: Synthetic oligonucleotide
  Antisense strand to SEQ ID NO: 964526
acuccagcaaucaauccug

SEQ ID NO: 964528 - RNA, 19 nt, Artificial Sequence
  Description of Artificial Sequence: Synthetic oligonucleotide
  Sense strand starting at position 3133 of SEQ ID NO: 913923
gucucauugcaggauagug

SEQ ID NO: 964529 - RNA, 19 nt, Artificial Sequence
  Description of Artificial Sequence: Synthetic oligonucleotide
  Antisense strand to SEQ ID NO: 964528
cacuauccugcaaugagac

SEQ ID NO: 964530 - RNA, 19 nt, Artificial Sequence
  Description of Artificial Sequence: Synthetic oligonucleotide
  Sense strand starting at position 1483 of SEQ ID NO: 913923
uagugaaagcugugggaua

SEQ ID NO: 964531 - RNA, 19 nt, Artificial Sequence
  Description of Artificial Sequence: Synthetic oligonucleotide
  Antisense strand to SEQ ID NO: 964530
uaucccacagcuuucacua

SEQ ID NO: 964532 - RNA, 19 nt, Artificial Sequence
  Description of Artificial Sequence: Synthetic oligonucleotide
  Sense strand starting at position 1470 of SEQ ID NO: 913923
ggaacucuuuagcuaguga

SEQ ID NO: 964533 - RNA, 19 nt, Artificial Sequence
  Description of Artificial Sequence: Synthetic oligonucleotide
  Antisense strand to SEQ ID NO: 964532
ucacuagcuaaagaguucc

SEQ ID NO: 964534 - RNA, 19 nt, Artificial Sequence
  Description of Artificial Sequence: Synthetic oligonucleotide
  Sense strand starting at position 1485 of SEQ ID NO: 913923
gugaaagcugugggauaug

SEQ ID NO: 964535 - RNA, 19 nt, Artificial Sequence
  Description of Artificial Sequence: Synthetic oligonucleotide
  Antisense strand to SEQ ID NO: 964534
cauaucccacagcuuucac

SEQ ID NO: 964536 - RNA, 19 nt, Artificial Sequence
  Description of Artificial Sequence: Synthetic oligonucleotide
  Sense strand starting at position 1296 of SEQ ID NO: 913923
gaguuugguuuauccagau

SEQ ID NO: 964537 - RNA, 19 nt, Artificial Sequence
  Description of Artificial Sequence: Synthetic oligonucleotide
  Antisense strand to SEQ ID NO: 964536
aucuggauaaaccaaacuc

SEQ ID NO: 964538 - RNA, 19 nt, Artificial Sequence
  Description of Artificial Sequence: Synthetic oligonucleotide
  Sense strand starting at position 2251 of SEQ ID NO: 913923
gccaaaucacugcaacugu

SEQ ID NO: 964539 - RNA, 19 nt, Artificial Sequence
  Description of Artificial Sequence: Synthetic oligonucleotide
  Antisense strand to SEQ ID NO: 964538
acaguugcagugauuuggc

SEQ ID NO: 964540 - RNA, 19 nt, Artificial Sequence
  Description of Artificial Sequence: Synthetic oligonucleotide
  Sense strand starting at position 905 of SEQ ID NO: 913924
cagagauaauggcuuagau

SEQ ID NO: 964541 - RNA, 19 nt, Artificial Sequence
  Description of Artificial Sequence: Synthetic oligonucleotide
  Antisense strand to SEQ ID NO: 964540
aucuaagccauuaucucug

SEQ ID NO: 964542 - RNA, 19 nt, Artificial Sequence
  Description of Artificial Sequence: Synthetic oligonucleotide
  Sense strand starting at position 1852 of SEQ ID NO: 913924
cauaucugagaagguauua

SEQ ID NO: 964543 - RNA, 19 nt, Artificial Sequence
  Description of Artificial Sequence: Synthetic oligonucleotide
  Antisense strand to SEQ ID NO: 964542
uaauaccuucucagauaug

SEQ ID NO: 964544 - RNA, 19 nt, Artificial Sequence
  Description of Artificial Sequence: Synthetic oligonucleotide
  Sense strand starting at position 977 of SEQ ID NO: 913924
uguccagcagaauagauua

SEQ ID NO: 964545 - RNA, 19 nt, Artificial Sequence
  Description of Artificial Sequence: Synthetic oligonucleotide
  Antisense strand to SEQ ID NO: 964544
uaaucuauucugcuggaca

SEQ ID NO: 964546 - RNA, 19 nt, Artificial Sequence
  Description of Artificial Sequence: Synthetic oligonucleotide
  Sense strand starting at position 3374 of SEQ ID NO: 913924
aaauguuugagagggugga

SEQ ID NO: 964547 - RNA, 19 nt, Artificial Sequence
  Description of Artificial Sequence: Synthetic oligonucleotide
  Antisense strand to SEQ ID NO: 964546
uccacccucucaaacauuu

SEQ ID NO: 964548 - RNA, 19 nt, Artificial Sequence
  Description of Artificial Sequence: Synthetic oligonucleotide
  Sense strand starting at position 930 of SEQ ID NO: 913924
ggaacugaugcauaguacu

SEQ ID NO: 964549 - RNA, 19 nt, Artificial Sequence
  Description of Artificial Sequence: Synthetic oligonucleotide
  Antisense strand to SEQ ID NO: 964548
aguacuaugcaucaguucc

SEQ ID NO: 964550 - RNA, 19 nt, Artificial Sequence
  Description of Artificial Sequence: Synthetic oligonucleotide
  Sense strand starting at position 1744 of SEQ ID NO: 913924
agauaccagugauuauauu

SEQ ID NO: 964551 - RNA, 19 nt, Artificial Sequence
  Description of Artificial Sequence: Synthetic oligonucleotide
  Antisense strand to SEQ ID NO: 964550
aauauaaucacugguaucu

SEQ ID NO: 964552 - RNA, 19 nt, Artificial Sequence
  Description of Artificial Sequence: Synthetic oligonucleotide
  Sense strand starting at position 422 of SEQ ID NO: 913924
cucugacuuuaccuggaaa

SEQ ID NO: 964553 - RNA, 19 nt, Artificial Sequence
  Description of Artificial Sequence: Synthetic oligonucleotide
  Antisense strand to SEQ ID NO: 964552
uuuccagguaaagucagag

SEQ ID NO: 964554 - RNA, 19 nt, Artificial Sequence
  Description of Artificial Sequence: Synthetic oligonucleotide
  Sense strand starting at position 1799 of SEQ ID NO: 913924
auauucgcagauuagauua

SEQ ID NO: 964555 - RNA, 19 nt, Artificial Sequence
  Description of Artificial Sequence: Synthetic oligonucleotide
  Antisense strand to SEQ ID NO: 964554
uaaucuaaucugcgaauau

SEQ ID NO: 964556 - RNA, 19 nt, Artificial Sequence
  Description of Artificial Sequence: Synthetic oligonucleotide
  Sense strand starting at position 829 of SEQ ID NO: 913924
uugaaaccucuagaugcuu

SEQ ID NO: 964557 - RNA, 19 nt, Artificial Sequence
  Description of Artificial Sequence: Synthetic oligonucleotide
  Antisense strand to SEQ ID NO: 964556
aagcaucuagagguuucaa

SEQ ID NO: 964558 - RNA, 19 nt, Artificial Sequence
  Description of Artificial Sequence: Synthetic oligonucleotide
  Sense strand starting at position 2705 of SEQ ID NO: 913924
gagguuaaguaacugacua

SEQ ID NO: 964559 - RNA, 19 nt, Artificial Sequence
  Description of Artificial Sequence: Synthetic oligonucleotide
  Antisense strand to SEQ ID NO: 964558
uagucaguuacuuaaccuc

SEQ ID NO: 964560 - RNA, 19 nt, Artificial Sequence
  Description of Artificial Sequence: Synthetic oligonucleotide
  Sense strand starting at position 1583 of SEQ ID NO: 913924
caggcuagcccuuagaaga

SEQ ID NO: 964561 - RNA, 19 nt, Artificial Sequence
  Description of Artificial Sequence: Synthetic oligonucleotide
  Antisense strand to SEQ ID NO: 964560
ucuucuaagggcuagccug

SEQ ID NO: 964562 - RNA, 19 nt, Artificial Sequence
  Description of Artificial Sequence: Synthetic oligonucleotide
  Sense strand starting at position 3375 of SEQ ID NO: 913924
aauguuugagaggguggau

SEQ ID NO: 964563 - RNA, 19 nt, Artificial Sequence
  Description of Artificial Sequence: Synthetic oligonucleotide
  Antisense strand to SEQ ID NO: 964562
auccacccucucaaacauu

SEQ ID NO: 964564 - RNA, 19 nt, Artificial Sequence
  Description of Artificial Sequence: Synthetic oligonucleotide
  Sense strand starting at position 928 of SEQ ID NO: 913924
guggaacugaugcauagua

SEQ ID NO: 964565 - RNA, 19 nt, Artificial Sequence
  Description of Artificial Sequence: Synthetic oligonucleotide
  Antisense strand to SEQ ID NO: 964564
uacuaugcaucaguuccac

SEQ ID NO: 964566 - RNA, 19 nt, Artificial Sequence
  Description of Artificial Sequence: Synthetic oligonucleotide
  Sense strand starting at position 1741 of SEQ ID NO: 913924
cccagauaccagugauuau

SEQ ID NO: 964567 - RNA, 19 nt, Artificial Sequence
  Description of Artificial Sequence: Synthetic oligonucleotide
  Antisense strand to SEQ ID NO: 964566
auaaucacugguaucuggg

SEQ ID NO: 964568 - RNA, 19 nt, Artificial Sequence
  Description of Artificial Sequence: Synthetic oligonucleotide
  Sense strand starting at position 436 of SEQ ID NO: 913924
ggaaauaguuccuucuuag

SEQ ID NO: 964569 - RNA, 19 nt, Artificial Sequence
  Description of Artificial Sequence: Synthetic oligonucleotide
  Antisense strand to SEQ ID NO: 964568
cuaagaaggaacuauuucc

SEQ ID NO: 964570 - RNA, 19 nt, Artificial Sequence
  Description of Artificial Sequence: Synthetic oligonucleotide
  Sense strand starting at position 972 of SEQ ID NO: 913924
gcaaauguccagcagaaua

SEQ ID NO: 964571 - RNA, 19 nt, Artificial Sequence
  Description of Artificial Sequence: Synthetic oligonucleotide
  Antisense strand to SEQ ID NO: 964570
uauucugcuggacauuugc

SEQ ID NO: 964572 - RNA, 19 nt, Artificial Sequence
  Description of Artificial Sequence: Synthetic oligonucleotide
  Sense strand starting at position 2197 of SEQ ID NO: 913924
aggucuagaguuugagaug

SEQ ID NO: 964573 - RNA, 19 nt, Artificial Sequence
  Description of Artificial Sequence: Synthetic oligonucleotide
  Antisense strand to SEQ ID NO: 964572
caucucaaacucuagaccu

SEQ ID NO: 964574 - RNA, 19 nt, Artificial Sequence
  Description of Artificial Sequence: Synthetic oligonucleotide
  Sense strand starting at position 220 of SEQ ID NO: 913924
aggugaaucccucagcuua

SEQ ID NO: 964575 - RNA, 19 nt, Artificial Sequence
  Description of Artificial Sequence: Synthetic oligonucleotide
  Antisense strand to SEQ ID NO: 964574
uaagcugagggauucaccu

SEQ ID NO: 964576 - RNA, 19 nt, Artificial Sequence
  Description of Artificial Sequence: Synthetic oligonucleotide
  Sense strand starting at position 3874 of SEQ ID NO: 913924
uccugagaaucacuagcau

SEQ ID NO: 964577 - RNA, 19 nt, Artificial Sequence
  Description of Artificial Sequence: Synthetic oligonucleotide
  Antisense strand to SEQ ID NO: 964576
augcuagugauucucagga

SEQ ID NO: 964578 - RNA, 19 nt, Artificial Sequence
  Description of Artificial Sequence: Synthetic oligonucleotide
  Sense strand starting at position 706 of SEQ ID NO: 913924
guccaaguuuacucaagaa

SEQ ID NO: 964579 - RNA, 19 nt, Artificial Sequence
  Description of Artificial Sequence: Synthetic oligonucleotide
  Antisense strand to SEQ ID NO: 964578
uucuugaguaaacuuggac

SEQ ID NO: 964580 - RNA, 19 nt, Artificial Sequence
  Description of Artificial Sequence: Synthetic oligonucleotide
  Sense strand starting at position 1833 of SEQ ID NO: 913924
auaggcugugcauaugaga

SEQ ID NO: 964581 - RNA, 19 nt, Artificial Sequence
  Description of Artificial Sequence: Synthetic oligonucleotide
  Antisense strand to SEQ ID NO: 964580
ucucauaugcacagccuau

SEQ ID NO: 964582 - RNA, 19 nt, Artificial Sequence
  Description of Artificial Sequence: Synthetic oligonucleotide
  Sense strand starting at position 435 of SEQ ID NO: 913924
uggaaauaguuccuucuua

SEQ ID NO: 964583 - RNA, 19 nt, Artificial Sequence
  Description of Artificial Sequence: Synthetic oligonucleotide
  Antisense strand to SEQ ID NO: 964582
uaagaaggaacuauuucca

SEQ ID NO: 964584 - RNA, 19 nt, Artificial Sequence
  Description of Artificial Sequence: Synthetic oligonucleotide
  Sense strand starting at position 480 of SEQ ID NO: 913924
agagcaaguucuuccaaga

SEQ ID NO: 964585 - RNA, 19 nt, Artificial Sequence
  Description of Artificial Sequence: Synthetic oligonucleotide
  Antisense strand to SEQ ID NO: 964584
ucuuggaagaacuugcucu

SEQ ID NO: 964586 - RNA, 19 nt, Artificial Sequence
  Description of Artificial Sequence: Synthetic oligonucleotide
  Sense strand starting at position 1796 of SEQ ID NO: 913924
gcaauauucgcagauuaga

SEQ ID NO: 964587 - RNA, 19 nt, Artificial Sequence
  Description of Artificial Sequence: Synthetic oligonucleotide
  Antisense strand to SEQ ID NO: 964586
ucuaaucugcgaauauugc

SEQ ID NO: 964588 - RNA, 19 nt, Artificial Sequence
  Description of Artificial Sequence: Synthetic oligonucleotide
  Sense strand starting at position 1250 of SEQ ID NO: 913924
cuaaguuugucaccaggag

SEQ ID NO: 964589 - RNA, 19 nt, Artificial Sequence
  Description of Artificial Sequence: Synthetic oligonucleotide
  Antisense strand to SEQ ID NO: 964588
cuccuggugacaaacuuag

SEQ ID NO: 964590 - RNA, 19 nt, Artificial Sequence
  Description of Artificial Sequence: Synthetic oligonucleotide
  Sense strand starting at position 3748 of SEQ ID NO: 913924
ccauguguauuuguuguau

SEQ ID NO: 964591 - RNA, 19 nt, Artificial Sequence
  Description of Artificial Sequence: Synthetic oligonucleotide
  Antisense strand to SEQ ID NO: 964590
auacaacaaauacacaugg

SEQ ID NO: 964592 - RNA, 19 nt, Artificial Sequence
  Description of Artificial Sequence: Synthetic oligonucleotide
  Sense strand starting at position 354 of SEQ ID NO: 913924
uaguaauucugggccagag

SEQ ID NO: 964593 - RNA, 19 nt, Artificial Sequence
  Description of Artificial Sequence: Synthetic oligonucleotide
  Antisense strand to SEQ ID NO: 964592
cucuggcccagaauuacua

SEQ ID NO: 964594 - RNA, 19 nt, Artificial Sequence
  Description of Artificial Sequence: Synthetic oligonucleotide
  Sense strand starting at position 659 of SEQ ID NO: 913924
acggucugugaucaaucau

SEQ ID NO: 964595 - RNA, 19 nt, Artificial Sequence
  Description of Artificial Sequence: Synthetic oligonucleotide
  Antisense strand to SEQ ID NO: 964594
augauugaucacagaccgu

SEQ ID NO: 964596 - RNA, 19 nt, Artificial Sequence
  Description of Artificial Sequence: Synthetic oligonucleotide
  Sense strand starting at position 552 of SEQ ID NO: 913924
guuguuauggagcauuaca

SEQ ID NO: 964597 - RNA, 19 nt, Artificial Sequence
  Description of Artificial Sequence: Synthetic oligonucleotide
  Antisense strand to SEQ ID NO: 964596
uguaaugcuccauaacaac

SEQ ID NO: 964598 - RNA, 19 nt, Artificial Sequence
  Description of Artificial Sequence: Synthetic oligonucleotide
  Sense strand starting at position 414 of SEQ ID NO: 913924
gaggauuucucugacuuua

SEQ ID NO: 964599 - RNA, 19 nt, Artificial Sequence
  Description of Artificial Sequence: Synthetic oligonucleotide
  Antisense strand to SEQ ID NO: 964598
uaaagucagagaaauccuc

SEQ ID NO: 964600 - RNA, 19 nt, Artificial Sequence
  Description of Artificial Sequence: Synthetic oligonucleotide
  Sense strand starting at position 775 of SEQ ID NO: 913924
ggcauccuccgguaagaau

SEQ ID NO: 964601 - RNA, 19 nt, Artificial Sequence
  Description of Artificial Sequence: Synthetic oligonucleotide
  Antisense strand to SEQ ID NO: 964600
auucuuaccggaggaugcc

SEQ ID NO: 964602 - RNA, 19 nt, Artificial Sequence
  Description of Artificial Sequence: Synthetic oligonucleotide
  Sense strand starting at position 705 of SEQ ID NO: 913924
uguccaaguuuacucaaga

SEQ ID NO: 964603 - RNA, 19 nt, Artificial Sequence
  Description of Artificial Sequence: Synthetic oligonucleotide
  Antisense strand to SEQ ID NO: 964602
ucuugaguaaacuuggaca

SEQ ID NO: 964604 - RNA, 19 nt, Artificial Sequence
  Description of Artificial Sequence: Synthetic oligonucleotide
  Sense strand starting at position 798 of SEQ ID NO: 913924
gugacucucuccucaagau

SEQ ID NO: 964605 - RNA, 19 nt, Artificial Sequence
  Description of Artificial Sequence: Synthetic oligonucleotide
  Antisense strand to SEQ ID NO: 964604
aucuugaggagagagucac

SEQ ID NO: 964606 - RNA, 19 nt, Artificial Sequence
  Description of Artificial Sequence: Synthetic oligonucleotide
  Sense strand starting at position 3763 of SEQ ID NO: 913924
guauuugugccugguacca

SEQ ID NO: 964607 - RNA, 19 nt, Artificial Sequence
  Description of Artificial Sequence: Synthetic oligonucleotide
  Antisense strand to SEQ ID NO: 964606
ugguaccaggcacaaauac

SEQ ID NO: 964608 - RNA, 19 nt, Artificial Sequence
  Description of Artificial Sequence: Synthetic oligonucleotide
  Sense strand starting at position 3396 of SEQ ID NO: 913924
cccauucuccgugacauua

SEQ ID NO: 964609 - RNA, 19 nt, Artificial Sequence
  Description of Artificial Sequence: Synthetic oligonucleotide
  Antisense strand to SEQ ID NO: 964608
uaaugucacggagaauggg

SEQ ID NO: 964610 - RNA, 19 nt, Artificial Sequence
  Description of Artificial Sequence: Synthetic oligonucleotide
  Sense strand starting at position 353 of SEQ ID NO: 913924
uuaguaauucugggccaga

SEQ ID NO: 964611 - RNA, 19 nt, Artificial Sequence
  Description of Artificial Sequence: Synthetic oligonucleotide
  Antisense strand to SEQ ID NO: 964610
ucuggcccagaauuacuaa

SEQ ID NO: 964612 - RNA, 19 nt, Artificial Sequence
  Description of Artificial Sequence: Synthetic oligonucleotide
  Sense strand starting at position 1518 of SEQ ID NO: 913924
uuccuuacauuaucuguga

SEQ ID NO: 964613 - RNA, 19 nt, Artificial Sequence
  Description of Artificial Sequence: Synthetic oligonucleotide
  Antisense strand to SEQ ID NO: 964612
ucacagauaauguaaggaa

SEQ ID NO: 964614 - RNA, 19 nt, Artificial Sequence
  Description of Artificial Sequence: Synthetic oligonucleotide
  Sense strand starting at position 2623 of SEQ ID NO: 913924
ucaaucauguaggcauuau

SEQ ID NO: 964615 - RNA, 19 nt, Artificial Sequence
  Description of Artificial Sequence: Synthetic oligonucleotide
  Antisense strand to SEQ ID NO: 964614
auaaugccuacaugauuga

SEQ ID NO: 964616 - RNA, 19 nt, Artificial Sequence
  Description of Artificial Sequence: Synthetic oligonucleotide
  Sense strand starting at position 222 of SEQ ID NO: 913924
gugaaucccucagcuuaaa

SEQ ID NO: 964617 - RNA, 19 nt, Artificial Sequence
  Description of Artificial Sequence: Synthetic oligonucleotide
  Antisense strand to SEQ ID NO: 964616
uuuaagcugagggauucac

SEQ ID NO: 964618 - RNA, 19 nt, Artificial Sequence
  Description of Artificial Sequence: Synthetic oligonucleotide
  Sense strand starting at position 2006 of SEQ ID NO: 913924
ucagaacauuaugaaagaa

SEQ ID NO: 964619 - RNA, 19 nt, Artificial Sequence
  Description of Artificial Sequence: Synthetic oligonucleotide
  Antisense strand to SEQ ID NO: 964618
uucuuucauaauguucuga

SEQ ID NO: 964620 - RNA, 19 nt, Artificial Sequence
  Description of Artificial Sequence: Synthetic oligonucleotide
  Sense strand starting at position 1365 of SEQ ID NO: 913925
agcaaauauuaggugagaa

SEQ ID NO: 964621 - RNA, 19 nt, Artificial Sequence
  Description of Artificial Sequence: Synthetic oligonucleotide
  Antisense strand to SEQ ID NO: 964620
uucucaccuaauauuugcu

SEQ ID NO: 964622 - RNA, 19 nt, Artificial Sequence
  Description of Artificial Sequence: Synthetic oligonucleotide
  Sense strand starting at position 3553 of SEQ ID NO: 913925
cagagacucugacuugauu

SEQ ID NO: 964623 - RNA, 19 nt, Artificial Sequence
  Description of Artificial Sequence: Synthetic oligonucleotide
  Antisense strand to SEQ ID NO: 964622
aaucaagucagagucucug

SEQ ID NO: 964624 - RNA, 19 nt, Artificial Sequence
  Description of Artificial Sequence: Synthetic oligonucleotide
  Sense strand starting at position 743 of SEQ ID NO: 913925
agugguagagaucagguua

SEQ ID NO: 964625 - RNA, 19 nt, Artificial Sequence
  Description of Artificial Sequence: Synthetic oligonucleotide
  Antisense strand to SEQ ID NO: 964624
uaaccugaucucuaccacu

SEQ ID NO: 964626 - RNA, 19 nt, Artificial Sequence
  Description of Artificial Sequence: Synthetic oligonucleotide
  Sense strand starting at position 1366 of SEQ ID NO: 913925
gcaaauauuaggugagaag

SEQ ID NO: 964627 - RNA, 19 nt, Artificial Sequence
  Description of Artificial Sequence: Synthetic oligonucleotide
  Antisense strand to SEQ ID NO: 964626
cuucucaccuaauauuugc

SEQ ID NO: 964628 - RNA, 19 nt, Artificial Sequence
  Description of Artificial Sequence: Synthetic oligonucleotide
  Sense strand starting at position 161 of SEQ ID NO: 913925
uuggauaagucacucaaac

SEQ ID NO: 964629 - RNA, 19 nt, Artificial Sequence
  Description of Artificial Sequence: Synthetic oligonucleotide
  Antisense strand to SEQ ID NO: 964628
guuugagugacuuauccaa

SEQ ID NO: 964630 - RNA, 19 nt, Artificial Sequence
  Description of Artificial Sequence: Synthetic oligonucleotide
  Sense strand starting at position 277 of SEQ ID NO: 913925
aagggaauaccguaauguc

SEQ ID NO: 964631 - RNA, 19 nt, Artificial Sequence
  Description of Artificial Sequence: Synthetic oligonucleotide
  Antisense strand to SEQ ID NO: 964630
gacauuacgguauucccuu

SEQ ID NO: 964632 - RNA, 19 nt, Artificial Sequence
  Description of Artificial Sequence: Synthetic oligonucleotide
  Sense strand starting at position 689 of SEQ ID NO: 913925
auauuauaccuguggaaac

SEQ ID NO: 964633 - RNA, 19 nt, Artificial Sequence
  Description of Artificial Sequence: Synthetic oligonucleotide
  Antisense strand to SEQ ID NO: 964632
guuuccacagguauaauau

SEQ ID NO: 964634 - RNA, 19 nt, Artificial Sequence
  Description of Artificial Sequence: Synthetic oligonucleotide
  Sense strand starting at position 2471 of SEQ ID NO: 913925
aggagagucccaggcagaa

SEQ ID NO: 964635 - RNA, 19 nt, Artificial Sequence
  Description of Artificial Sequence: Synthetic oligonucleotide
  Antisense strand to SEQ ID NO: 964634
uucugccugggacucuccu

SEQ ID NO: 964636 - RNA, 19 nt, Artificial Sequence
  Description of Artificial Sequence: Synthetic oligonucleotide
  Sense strand starting at position 3444 of SEQ ID NO: 913925
ccagauugccuuuaaucag

SEQ ID NO: 964637 - RNA, 19 nt, Artificial Sequence
  Description of Artificial Sequence: Synthetic oligonucleotide
  Antisense strand to SEQ ID NO: 964636
cugauuaaaggcaaucugg

SEQ ID NO: 964638 - RNA, 19 nt, Artificial Sequence
  Description of Artificial Sequence: Synthetic oligonucleotide
  Sense strand starting at position 2689 of SEQ ID NO: 913925
gggagagaugcaugaugua

SEQ ID NO: 964639 - RNA, 19 nt, Artificial Sequence
  Description of Artificial Sequence: Synthetic oligonucleotide
  Antisense strand to SEQ ID NO: 964638
uacaucaugcaucucuccc

SEQ ID NO: 964640 - RNA, 19 nt, Artificial Sequence
  Description of Artificial Sequence: Synthetic oligonucleotide
  Sense strand starting at position 3562 of SEQ ID NO: 913925
ugacuugauugaucagagu

SEQ ID NO: 964641 - RNA, 19 nt, Artificial Sequence
  Description of Artificial Sequence: Synthetic oligonucleotide
  Antisense strand to SEQ ID NO: 964640
acucugaucaaucaaguca

SEQ ID NO: 964642 - RNA, 19 nt, Artificial Sequence
  Description of Artificial Sequence: Synthetic oligonucleotide
  Sense strand starting at position 397 of SEQ ID NO: 913925
auaggaaaguucuugugga

SEQ ID NO: 964643 - RNA, 19 nt, Artificial Sequence
  Description of Artificial Sequence: Synthetic oligonucleotide
  Antisense strand to SEQ ID NO: 964642
uccacaagaacuuuccuau

SEQ ID NO: 964644 - RNA, 19 nt, Artificial Sequence
  Description of Artificial Sequence: Synthetic oligonucleotide
  Sense strand starting at position 3795 of SEQ ID NO: 913925
uagagagaccucuguuuag

SEQ ID NO: 964645 - RNA, 19 nt, Artificial Sequence
  Description of Artificial Sequence: Synthetic oligonucleotide
  Antisense strand to SEQ ID NO: 964644
cuaaacagaggucucucua

SEQ ID NO: 964646 - RNA, 19 nt, Artificial Sequence
  Description of Artificial Sequence: Synthetic oligonucleotide
  Sense strand starting at position 105 of SEQ ID NO: 913925
ggagccaccugaucuaaau

SEQ ID NO: 964647 - RNA, 19 nt, Artificial Sequence
  Description of Artificial Sequence: Synthetic oligonucleotide
  Antisense strand to SEQ ID NO: 964646
auuuagaucagguggcucc

SEQ ID NO: 964648 - RNA, 19 nt, Artificial Sequence
  Description of Artificial Sequence: Synthetic oligonucleotide
  Sense strand starting at position 3568 of SEQ ID NO: 913925
gauugaucagagugaggca

SEQ ID NO: 964649 - RNA, 19 nt, Artificial Sequence
  Description of Artificial Sequence: Synthetic oligonucleotide
  Antisense strand to SEQ ID NO: 964648
ugccucacucugaucaauc

SEQ ID NO: 964650 - RNA, 19 nt, Artificial Sequence
  Description of Artificial Sequence: Synthetic oligonucleotide
  Sense strand starting at position 3441 of SEQ ID NO: 913925
agaccagauugccuuuaau

SEQ ID NO: 964651 - RNA, 19 nt, Artificial Sequence
  Description of Artificial Sequence: Synthetic oligonucleotide
  Antisense strand to SEQ ID NO: 964650
auuaaaggcaaucuggucu

SEQ ID NO: 964652 - RNA, 19 nt, Artificial Sequence
  Description of Artificial Sequence: Synthetic oligonucleotide
  Sense strand starting at position 434 of SEQ ID NO: 913925
guuagugauagucaaagua

SEQ ID NO: 964653 - RNA, 19 nt, Artificial Sequence
  Description of Artificial Sequence: Synthetic oligonucleotide
  Antisense strand to SEQ ID NO: 964652
uacuuugacuaucacuaac

SEQ ID NO: 964654 - RNA, 19 nt, Artificial Sequence
  Description of Artificial Sequence: Synthetic oligonucleotide
  Sense strand starting at position 417 of SEQ ID NO: 913925
uggaauugcaagcaugagu

SEQ ID NO: 964655 - RNA, 19 nt, Artificial Sequence
  Description of Artificial Sequence: Synthetic oligonucleotide
  Antisense strand to SEQ ID NO: 964654
acucaugcuugcaauucca

SEQ ID NO: 964656 - RNA, 19 nt, Artificial Sequence
  Description of Artificial Sequence: Synthetic oligonucleotide
  Sense strand starting at position 686 of SEQ ID NO: 913925
ccuauauuauaccugugga

SEQ ID NO: 964657 - RNA, 19 nt, Artificial Sequence
  Description of Artificial Sequence: Synthetic oligonucleotide
  Antisense strand to SEQ ID NO: 964656
uccacagguauaauauagg

SEQ ID NO: 964658 - RNA, 19 nt, Artificial Sequence
  Description of Artificial Sequence: Synthetic oligonucleotide
  Sense strand starting at position 2184 of SEQ ID NO: 913925
gcucucuagaccuggagga

SEQ ID NO: 964659 - RNA, 19 nt, Artificial Sequence
  Description of Artificial Sequence: Synthetic oligonucleotide
  Antisense strand to SEQ ID NO: 964658
uccuccaggucuagagagc

SEQ ID NO: 964660 - RNA, 19 nt, Artificial Sequence
  Description of Artificial Sequence: Synthetic oligonucleotide
  Sense strand starting at position 154 of SEQ ID NO: 913925
uguagucuuggauaaguca

SEQ ID NO: 964661 - RNA, 19 nt, Artificial Sequence
  Description of Artificial Sequence: Synthetic oligonucleotide
  Antisense strand to SEQ ID NO: 964660
ugacuuauccaagacuaca

SEQ ID NO: 964662 - RNA, 19 nt, Artificial Sequence
  Description of Artificial Sequence: Synthetic oligonucleotide
  Sense strand starting at position 3840 of SEQ ID NO: 913925
cauggucuuaggcaaguga

SEQ ID NO: 964663 - RNA, 19 nt, Artificial Sequence
  Description of Artificial Sequence: Synthetic oligonucleotide
  Antisense strand to SEQ ID NO: 964662
ucacuugccuaagaccaug

SEQ ID NO: 964664 - RNA, 19 nt, Artificial Sequence
  Description of Artificial Sequence: Synthetic oligonucleotide
  Sense strand starting at position 2987 of SEQ ID NO: 913925
agcuuaggcagguaauacu

SEQ ID NO: 964665 - RNA, 19 nt, Artificial Sequence
  Description of Artificial Sequence: Synthetic oligonucleotide
  Antisense strand to SEQ ID NO: 964664
aguauuaccugccuaagcu

SEQ ID NO: 964666 - RNA, 19 nt, Artificial Sequence
  Description of Artificial Sequence: Synthetic oligonucleotide
  Sense strand starting at position 626 of SEQ ID NO: 913925
aggugugcuggguauaaga

SEQ ID NO: 964667 - RNA, 19 nt, Artificial Sequence
  Description of Artificial Sequence: Synthetic oligonucleotide
  Antisense strand to SEQ ID NO: 964666
ucuuauacccagcacaccu

SEQ ID NO: 964668 - RNA, 19 nt, Artificial Sequence
  Description of Artificial Sequence: Synthetic oligonucleotide
  Sense strand starting at position 672 of SEQ ID NO: 913925
ggagcacuauuauuccuau

SEQ ID NO: 964669 - RNA, 19 nt, Artificial Sequence
  Description of Artificial Sequence: Synthetic oligonucleotide
  Antisense strand to SEQ ID NO: 964668
auaggaauaauagugcucc

SEQ ID NO: 964670 - RNA, 19 nt, Artificial Sequence
  Description of Artificial Sequence: Synthetic oligonucleotide
  Sense strand starting at position 2364 of SEQ ID NO: 913925
gagcgacucaagugacaga

SEQ ID NO: 964671 - RNA, 19 nt, Artificial Sequence
  Description of Artificial Sequence: Synthetic oligonucleotide
  Antisense strand to SEQ ID NO: 964670
ucugucacuugagucgcuc

SEQ ID NO: 964672 - RNA, 19 nt, Artificial Sequence
  Description of Artificial Sequence: Synthetic oligonucleotide
  Sense strand starting at position 3063 of SEQ ID NO: 913925
caaguaggcgacuggauaa

SEQ ID NO: 964673 - RNA, 19 nt, Artificial Sequence
  Description of Artificial Sequence: Synthetic oligonucleotide
  Antisense strand to SEQ ID NO: 964672
uuauccagucgccuacuug

SEQ ID NO: 964674 - RNA, 19 nt, Artificial Sequence
  Description of Artificial Sequence: Synthetic oligonucleotide
  Sense strand starting at position 405 of SEQ ID NO: 913925
guucuuguggaauggaauu

SEQ ID NO: 964675 - RNA, 19 nt, Artificial Sequence
  Description of Artificial Sequence: Synthetic oligonucleotide
  Antisense strand to SEQ ID NO: 964674
aauuccauuccacaagaac

SEQ ID NO: 964676 - RNA, 19 nt, Artificial Sequence
  Description of Artificial Sequence: Synthetic oligonucleotide
  Sense strand starting at position 2949 of SEQ ID NO: 913925
ggguuugaggcuugacuaa

SEQ ID NO: 964677 - RNA, 19 nt, Artificial Sequence
  Description of Artificial Sequence: Synthetic oligonucleotide
  Antisense strand to SEQ ID NO: 964676
uuagucaagccucaaaccc

SEQ ID NO: 964678 - RNA, 19 nt, Artificial Sequence
  Description of Artificial Sequence: Synthetic oligonucleotide
  Sense strand starting at position 2268 of SEQ ID NO: 913925
gugaaugaguugcuaauaa

SEQ ID NO: 964679 - RNA, 19 nt, Artificial Sequence
  Description of Artificial Sequence: Synthetic oligonucleotide
  Antisense strand to SEQ ID NO: 964678
uuauuagcaacucauucac

SEQ ID NO: 964680 - RNA, 19 nt, Artificial Sequence
  Description of Artificial Sequence: Synthetic oligonucleotide
  Sense strand starting at position 3402 of SEQ ID NO: 913925
gcugguggccuugacaaga

SEQ ID NO: 964681 - RNA, 19 nt, Artificial Sequence
  Description of Artificial Sequence: Synthetic oligonucleotide
  Antisense strand to SEQ ID NO: 964680
ucuugucaaggccaccagc

SEQ ID NO: 964682 - RNA, 19 nt, Artificial Sequence
  Description of Artificial Sequence: Synthetic oligonucleotide
  Sense strand starting at position 3312 of SEQ ID NO: 913925
ggaguagauguugguuaau

SEQ ID NO: 964683 - RNA, 19 nt, Artificial Sequence
  Description of Artificial Sequence: Synthetic oligonucleotide
  Antisense strand to SEQ ID NO: 964682
auuaaccaacaucuacucc

SEQ ID NO: 964684 - RNA, 19 nt, Artificial Sequence
  Description of Artificial Sequence: Synthetic oligonucleotide
  Sense strand starting at position 1719 of SEQ ID NO: 913925
caguccaucccucgggaaa

SEQ ID NO: 964685 - RNA, 19 nt, Artificial Sequence
  Description of Artificial Sequence: Synthetic oligonucleotide
  Antisense strand to SEQ ID NO: 964684
uuucccgagggauggacug

SEQ ID NO: 964686 - RNA, 19 nt, Artificial Sequence
  Description of Artificial Sequence: Synthetic oligonucleotide
  Sense strand starting at position 3844 of SEQ ID NO: 913925
gucuuaggcaagugaaaua

SEQ ID NO: 964687 - RNA, 19 nt, Artificial Sequence
  Description of Artificial Sequence: Synthetic oligonucleotide
  Antisense strand to SEQ ID NO: 964686
uauuucacuugccuaagac

SEQ ID NO: 964688 - RNA, 19 nt, Artificial Sequence
  Description of Artificial Sequence: Synthetic oligonucleotide
  Sense strand starting at position 3314 of SEQ ID NO: 913925
aguagauguugguuaauug

SEQ ID NO: 964689 - RNA, 19 nt, Artificial Sequence
  Description of Artificial Sequence: Synthetic oligonucleotide
  Antisense strand to SEQ ID NO: 964688
caauuaaccaacaucuacu

SEQ ID NO: 964690 - RNA, 19 nt, Artificial Sequence
  Description of Artificial Sequence: Synthetic oligonucleotide
  Sense strand starting at position 3969 of SEQ ID NO: 913925
ccuugacuggcguagaauc

SEQ ID NO: 964691 - RNA, 19 nt, Artificial Sequence
  Description of Artificial Sequence: Synthetic oligonucleotide
  Antisense strand to SEQ ID NO: 964690
gauucuacgccagucaagg

SEQ ID NO: 964692 - RNA, 19 nt, Artificial Sequence
  Description of Artificial Sequence: Synthetic oligonucleotide
  Sense strand starting at position 424 of SEQ ID NO: 913925
gcaagcaugaguuagugau

SEQ ID NO: 964693 - RNA, 19 nt, Artificial Sequence
  Description of Artificial Sequence: Synthetic oligonucleotide
  Antisense strand to SEQ ID NO: 964692
aucacuaacucaugcuugc

SEQ ID NO: 964694 - RNA, 19 nt, Artificial Sequence
  Description of Artificial Sequence: Synthetic oligonucleotide
  Sense strand starting at position 1546 of SEQ ID NO: 913925
caggaaccuucuucguaca

SEQ ID NO: 964695 - RNA, 19 nt, Artificial Sequence
  Description of Artificial Sequence: Synthetic oligonucleotide
  Antisense strand to SEQ ID NO: 964694
uguacgaagaagguuccug

SEQ ID NO: 964696 - RNA, 19 nt, Artificial Sequence
  Description of Artificial Sequence: Synthetic oligonucleotide
  Sense strand starting at position 3098 of SEQ ID NO: 913925
aagacauccguuugggagu

SEQ ID NO: 964697 - RNA, 19 nt, Artificial Sequence
  Description of Artificial Sequence: Synthetic oligonucleotide
  Antisense strand to SEQ ID NO: 964696
acucccaaacggaugucuu

SEQ ID NO: 964698 - RNA, 19 nt, Artificial Sequence
  Description of Artificial Sequence: Synthetic oligonucleotide
  Sense strand starting at position 428 of SEQ ID NO: 913925
gcaugaguuagugauaguc

SEQ ID NO: 964699 - RNA, 19 nt, Artificial Sequence
  Description of Artificial Sequence: Synthetic oligonucleotide
  Antisense strand to SEQ ID NO: 964698
gacuaucacuaacucaugc

SEQ ID NO: 964700 - RNA, 19 nt, Artificial Sequence
  Description of Artificial Sequence: Synthetic oligonucleotide
  Sense strand starting at position 486 of SEQ ID NO: 913926
cuagaacuccuuugagaca

SEQ ID NO: 964701 - RNA, 19 nt, Artificial Sequence
  Description of Artificial Sequence: Synthetic oligonucleotide
  Antisense strand to SEQ ID NO: 964700
ugucucaaaggaguucuag

SEQ ID NO: 964702 - RNA, 19 nt, Artificial Sequence
  Description of Artificial Sequence: Synthetic oligonucleotide
  Sense strand starting at position 3571 of SEQ ID NO: 913926
agcaaauauuaggugagaa

SEQ ID NO: 964703 - RNA, 19 nt, Artificial Sequence
  Description of Artificial Sequence: Synthetic oligonucleotide
  Antisense strand to SEQ ID NO: 964702
uucucaccuaauauuugcu

SEQ ID NO: 964704 - RNA, 19 nt, Artificial Sequence
  Description of Artificial Sequence: Synthetic oligonucleotide
  Sense strand starting at position 1135 of SEQ ID NO: 913926
ucugucauuguagaaacaa

SEQ ID NO: 964705 - RNA, 19 nt, Artificial Sequence
  Description of Artificial Sequence: Synthetic oligonucleotide
  Antisense strand to SEQ ID NO: 964704
uuguuucuacaaugacaga

SEQ ID NO: 964706 - RNA, 19 nt, Artificial Sequence
  Description of Artificial Sequence: Synthetic oligonucleotide
  Sense strand starting at position 2949 of SEQ ID NO: 913926
agugguagagaucagguua

SEQ ID NO: 964707 - RNA, 19 nt, Artificial Sequence
  Description of Artificial Sequence: Synthetic oligonucleotide
  Antisense strand to SEQ ID NO: 964706
uaaccugaucucuaccacu

SEQ ID NO: 964708 - RNA, 19 nt, Artificial Sequence
  Description of Artificial Sequence: Synthetic oligonucleotide
  Sense strand starting at position 108 of SEQ ID NO: 913926
cagggugaaguucagugaa

SEQ ID NO: 964709 - RNA, 19 nt, Artificial Sequence
  Description of Artificial Sequence: Synthetic oligonucleotide
  Antisense strand to SEQ ID NO: 964708
uucacugaacuucacccug

SEQ ID NO: 964710 - RNA, 19 nt, Artificial Sequence
  Description of Artificial Sequence: Synthetic oligonucleotide
  Sense strand starting at position 3572 of SEQ ID NO: 913926
gcaaauauuaggugagaag

SEQ ID NO: 964711 - RNA, 19 nt, Artificial Sequence
  Description of Artificial Sequence: Synthetic oligonucleotide
  Antisense strand to SEQ ID NO: 964710
cuucucaccuaauauuugc

SEQ ID NO: 964712 - RNA, 19 nt, Artificial Sequence
  Description of Artificial Sequence: Synthetic oligonucleotide
  Sense strand starting at position 2367 of SEQ ID NO: 913926
uuggauaagucacucaaac

SEQ ID NO: 964713 - RNA, 19 nt, Artificial Sequence
  Description of Artificial Sequence: Synthetic oligonucleotide
  Antisense strand to SEQ ID NO: 964712
guuugagugacuuauccaa

SEQ ID NO: 964714 - RNA, 19 nt, Artificial Sequence
  Description of Artificial Sequence: Synthetic oligonucleotide
  Sense strand starting at position 2483 of SEQ ID NO: 913926
aagggaauaccguaauguc

SEQ ID NO: 964715 - RNA, 19 nt, Artificial Sequence
  Description of Artificial Sequence: Synthetic oligonucleotide
  Antisense strand to SEQ ID NO: 964714
gacauuacgguauucccuu

SEQ ID NO: 964716 - RNA, 19 nt, Artificial Sequence
  Description of Artificial Sequence: Synthetic oligonucleotide
  Sense strand starting at position 60 of SEQ ID NO: 913926
cugcguugccuggugaaug

SEQ ID NO: 964717 - RNA, 19 nt, Artificial Sequence
  Description of Artificial Sequence: Synthetic oligonucleotide
  Antisense strand to SEQ ID NO: 964716
cauucaccaggcaacgcag

SEQ ID NO: 964718 - RNA, 19 nt, Artificial Sequence
  Description of Artificial Sequence: Synthetic oligonucleotide
  Sense strand starting at position 2895 of SEQ ID NO: 913926
auauuauaccuguggaaac

SEQ ID NO: 964719 - RNA, 19 nt, Artificial Sequence
  Description of Artificial Sequence: Synthetic oligonucleotide
  Antisense strand to SEQ ID NO: 964718
guuuccacagguauaauau

SEQ ID NO: 964720 - RNA, 19 nt, Artificial Sequence
  Description of Artificial Sequence: Synthetic oligonucleotide
  Sense strand starting at position 223 of SEQ ID NO: 913926
agaggucauugauccuaua

SEQ ID NO: 964721 - RNA, 19 nt, Artificial Sequence
  Description of Artificial Sequence: Synthetic oligonucleotide
  Antisense strand to SEQ ID NO: 964720
uauaggaucaaugaccucu

SEQ ID NO: 964722 - RNA, 19 nt, Artificial Sequence
  Description of Artificial Sequence: Synthetic oligonucleotide
  Sense strand starting at position 1007 of SEQ ID NO: 913926
ccagccacccuggauuaau

SEQ ID NO: 964723 - RNA, 19 nt, Artificial Sequence
  Description of Artificial Sequence: Synthetic oligonucleotide
  Antisense strand to SEQ ID NO: 964722
auuaauccaggguggcugg

SEQ ID NO: 964724 - RNA, 19 nt, Artificial Sequence
  Description of Artificial Sequence: Synthetic oligonucleotide
  Sense strand starting at position 16 of SEQ ID NO: 913926
augugaguucuggagaccu

SEQ ID NO: 964725 - RNA, 19 nt, Artificial Sequence
  Description of Artificial Sequence: Synthetic oligonucleotide
  Antisense strand to SEQ ID NO: 964724
aggucuccagaacucacau

SEQ ID NO: 964726 - RNA, 19 nt, Artificial Sequence
  Description of Artificial Sequence: Synthetic oligonucleotide
  Sense strand starting at position 2603 of SEQ ID NO: 913926
auaggaaaguucuugugga

SEQ ID NO: 964727 - RNA, 19 nt, Artificial Sequence
  Description of Artificial Sequence: Synthetic oligonucleotide
  Antisense strand to SEQ ID NO: 964726
uccacaagaacuuuccuau

SEQ ID NO: 964728 - RNA, 19 nt, Artificial Sequence
  Description of Artificial Sequence: Synthetic oligonucleotide
  Sense strand starting at position 212 of SEQ ID NO: 913926
gguggauuccgagagguca

SEQ ID NO: 964729 - RNA, 19 nt, Artificial Sequence
  Description of Artificial Sequence: Synthetic oligonucleotide
  Antisense strand to SEQ ID NO: 964728
ugaccucucggaauccacc

SEQ ID NO: 964730 - RNA, 19 nt, Artificial Sequence
  Description of Artificial Sequence: Synthetic oligonucleotide
  Sense strand starting at position 2311 of SEQ ID NO: 913926
ggagccaccugaucuaaau

SEQ ID NO: 964731 - RNA, 19 nt, Artificial Sequence
  Description of Artificial Sequence: Synthetic oligonucleotide
  Antisense strand to SEQ ID NO: 964730
auuuagaucagguggcucc

SEQ ID NO: 964732 - RNA, 19 nt, Artificial Sequence
  Description of Artificial Sequence: Synthetic oligonucleotide
  Sense strand starting at position 2065 of SEQ ID NO: 913926
gacaaagcuuccuuuggga

SEQ ID NO: 964733 - RNA, 19 nt, Artificial Sequence
  Description of Artificial Sequence: Synthetic oligonucleotide
  Antisense strand to SEQ ID NO: 964732
ucccaaaggaagcuuuguc

SEQ ID NO: 964734 - RNA, 19 nt, Artificial Sequence
  Description of Artificial Sequence: Synthetic oligonucleotide
  Sense strand starting at position 2137 of SEQ ID NO: 913926
ucaacauucggaugacgga

SEQ ID NO: 964735 - RNA, 19 nt, Artificial Sequence
  Description of Artificial Sequence: Synthetic oligonucleotide
  Antisense strand to SEQ ID NO: 964734
uccgucauccgaauguuga

SEQ ID NO: 964736 - RNA, 19 nt, Artificial Sequence
  Description of Artificial Sequence: Synthetic oligonucleotide
  Sense strand starting at position 2640 of SEQ ID NO: 913926
guuagugauagucaaagua

SEQ ID NO: 964737 - RNA, 19 nt, Artificial Sequence
  Description of Artificial Sequence: Synthetic oligonucleotide
  Antisense strand to SEQ ID NO: 964736
uacuuugacuaucacuaac

SEQ ID NO: 964738 - RNA, 19 nt, Artificial Sequence
  Description of Artificial Sequence: Synthetic oligonucleotide
  Sense strand starting at position 2623 of SEQ ID NO: 913926
uggaauugcaagcaugagu

SEQ ID NO: 964739 - RNA, 19 nt, Artificial Sequence
  Description of Artificial Sequence: Synthetic oligonucleotide
  Antisense strand to SEQ ID NO: 964738
acucaugcuugcaauucca

SEQ ID NO: 964740 - RNA, 19 nt, Artificial Sequence
  Description of Artificial Sequence: Synthetic oligonucleotide
  Sense strand starting at position 2892 of SEQ ID NO: 913926
ccuauauuauaccugugga

SEQ ID NO: 964741 - RNA, 19 nt, Artificial Sequence
  Description of Artificial Sequence: Synthetic oligonucleotide
  Antisense strand to SEQ ID NO: 964740
uccacagguauaauauagg

SEQ ID NO: 964742 - RNA, 19 nt, Artificial Sequence
  Description of Artificial Sequence: Synthetic oligonucleotide
  Sense strand starting at position 2360 of SEQ ID NO: 913926
uguagucuuggauaaguca

SEQ ID NO: 964743 - RNA, 19 nt, Artificial Sequence
  Description of Artificial Sequence: Synthetic oligonucleotide
  Antisense strand to SEQ ID NO: 964742
ugacuuauccaagacuaca

SEQ ID NO: 964744 - RNA, 19 nt, Artificial Sequence
  Description of Artificial Sequence: Synthetic oligonucleotide
  Sense strand starting at position 1912 of SEQ ID NO: 913926
gguccucuugcucaaggga

SEQ ID NO: 964745 - RNA, 19 nt, Artificial Sequence
  Description of Artificial Sequence: Synthetic oligonucleotide
  Antisense strand to SEQ ID NO: 964744
ucccuugagcaagaggacc

SEQ ID NO: 964746 - RNA, 19 nt, Artificial Sequence
  Description of Artificial Sequence: Synthetic oligonucleotide
  Sense strand starting at position 1809 of SEQ ID NO: 913926
guagucucuguggaugaau

SEQ ID NO: 964747 - RNA, 19 nt, Artificial Sequence
  Description of Artificial Sequence: Synthetic oligonucleotide
  Antisense strand to SEQ ID NO: 964746
auucauccacagagacuac

SEQ ID NO: 964748 - RNA, 19 nt, Artificial Sequence
  Description of Artificial Sequence: Synthetic oligonucleotide
  Sense strand starting at position 1131 of SEQ ID NO: 913926
agauucugucauuguagaa

SEQ ID NO: 964749 - RNA, 19 nt, Artificial Sequence
  Description of Artificial Sequence: Synthetic oligonucleotide
  Antisense strand to SEQ ID NO: 964748
uucuacaaugacagaaucu

SEQ ID NO: 964750 - RNA, 19 nt, Artificial Sequence
  Description of Artificial Sequence: Synthetic oligonucleotide
  Sense strand starting at position 2832 of SEQ ID NO: 913926
aggugugcuggguauaaga

SEQ ID NO: 964751 - RNA, 19 nt, Artificial Sequence
  Description of Artificial Sequence: Synthetic oligonucleotide
  Antisense strand to SEQ ID NO: 964750
ucuuauacccagcacaccu

SEQ ID NO: 964752 - RNA, 19 nt, Artificial Sequence
  Description of Artificial Sequence: Synthetic oligonucleotide
  Sense strand starting at position 2878 of SEQ ID NO: 913926
ggagcacuauuauuccuau

SEQ ID NO: 964753 - RNA, 19 nt, Artificial Sequence
  Description of Artificial Sequence: Synthetic oligonucleotide
  Antisense strand to SEQ ID NO: 964752
auaggaauaauagugcucc

SEQ ID NO: 964754 - RNA, 19 nt, Artificial Sequence
  Description of Artificial Sequence: Synthetic oligonucleotide
  Sense strand starting at position 1811 of SEQ ID NO: 913926
agucucuguggaugaauca

SEQ ID NO: 964755 - RNA, 19 nt, Artificial Sequence
  Description of Artificial Sequence: Synthetic oligonucleotide
  Antisense strand to SEQ ID NO: 964754
ugauucauccacagagacu

SEQ ID NO: 964756 - RNA, 19 nt, Artificial Sequence
  Description of Artificial Sequence: Synthetic oligonucleotide
  Sense strand starting at position 2205 of SEQ ID NO: 913926
cagugcucucauggagaga

SEQ ID NO: 964757 - RNA, 19 nt, Artificial Sequence
  Description of Artificial Sequence: Synthetic oligonucleotide
  Antisense strand to SEQ ID NO: 964756
ucucuccaugagagcacug

SEQ ID NO: 964758 - RNA, 19 nt, Artificial Sequence
  Description of Artificial Sequence: Synthetic oligonucleotide
  Sense strand starting at position 2611 of SEQ ID NO: 913926
guucuuguggaauggaauu

SEQ ID NO: 964759 - RNA, 19 nt, Artificial Sequence
  Description of Artificial Sequence: Synthetic oligonucleotide
  Antisense strand to SEQ ID NO: 964758
aauuccauuccacaagaac

SEQ ID NO: 964760 - RNA, 19 nt, Artificial Sequence
  Description of Artificial Sequence: Synthetic oligonucleotide
  Sense strand starting at position 214 of SEQ ID NO: 913926
uggauuccgagaggucauu

SEQ ID NO: 964761 - RNA, 19 nt, Artificial Sequence
  Description of Artificial Sequence: Synthetic oligonucleotide
  Antisense strand to SEQ ID NO: 964760
aaugaccucucggaaucca

SEQ ID NO: 964762 - RNA, 19 nt, Artificial Sequence
  Description of Artificial Sequence: Synthetic oligonucleotide
  Sense strand starting at position 1130 of SEQ ID NO: 913926
cagauucugucauuguaga

SEQ ID NO: 964763 - RNA, 19 nt, Artificial Sequence
  Description of Artificial Sequence: Synthetic oligonucleotide
  Antisense strand to SEQ ID NO: 964762
ucuacaaugacagaaucug

SEQ ID NO: 964764 - RNA, 19 nt, Artificial Sequence
  Description of Artificial Sequence: Synthetic oligonucleotide
  Sense strand starting at position 921 of SEQ ID NO: 913926
ugacucagccagugaaacu

SEQ ID NO: 964765 - RNA, 19 nt, Artificial Sequence
  Description of Artificial Sequence: Synthetic oligonucleotide
  Antisense strand to SEQ ID NO: 964764
aguuucacuggcugaguca

SEQ ID NO: 964766 - RNA, 19 nt, Artificial Sequence
  Description of Artificial Sequence: Synthetic oligonucleotide
  Sense strand starting at position 3925 of SEQ ID NO: 913926
caguccaucccucgggaaa

SEQ ID NO: 964767 - RNA, 19 nt, Artificial Sequence
  Description of Artificial Sequence: Synthetic oligonucleotide
  Antisense strand to SEQ ID NO: 964766
uuucccgagggauggacug

SEQ ID NO: 964768 - RNA, 19 nt, Artificial Sequence
  Description of Artificial Sequence: Synthetic oligonucleotide
  Sense strand starting at position 220 of SEQ ID NO: 913926
ccgagaggucauugauccu

SEQ ID NO: 964769 - RNA, 19 nt, Artificial Sequence
  Description of Artificial Sequence: Synthetic oligonucleotide
  Antisense strand to SEQ ID NO: 964768
aggaucaaugaccucucgg

SEQ ID NO: 964770 - RNA, 19 nt, Artificial Sequence
  Description of Artificial Sequence: Synthetic oligonucleotide
  Sense strand starting at position 947 of SEQ ID NO: 913926
ccucuuucccuggguggaa

SEQ ID NO: 964771 - RNA, 19 nt, Artificial Sequence
  Description of Artificial Sequence: Synthetic oligonucleotide
  Antisense strand to SEQ ID NO: 964770
uuccacccagggaaagagg

SEQ ID NO: 964772 - RNA, 19 nt, Artificial Sequence
  Description of Artificial Sequence: Synthetic oligonucleotide
  Sense strand starting at position 2630 of SEQ ID NO: 913926
gcaagcaugaguuagugau

SEQ ID NO: 964773 - RNA, 19 nt, Artificial Sequence
  Description of Artificial Sequence: Synthetic oligonucleotide
  Antisense strand to SEQ ID NO: 964772
aucacuaacucaugcuugc

SEQ ID NO: 964774 - RNA, 19 nt, Artificial Sequence
  Description of Artificial Sequence: Synthetic oligonucleotide
  Sense strand starting at position 3752 of SEQ ID NO: 913926
caggaaccuucuucguaca

SEQ ID NO: 964775 - RNA, 19 nt, Artificial Sequence
  Description of Artificial Sequence: Synthetic oligonucleotide
  Antisense strand to SEQ ID NO: 964774
uguacgaagaagguuccug

SEQ ID NO: 964776 - RNA, 19 nt, Artificial Sequence
  Description of Artificial Sequence: Synthetic oligonucleotide
  Sense strand starting at position 2634 of SEQ ID NO: 913926
gcaugaguuagugauaguc

SEQ ID NO: 964777 - RNA, 19 nt, Artificial Sequence
  Description of Artificial Sequence: Synthetic oligonucleotide
  Antisense strand to SEQ ID NO: 964776
gacuaucacuaacucaugc

SEQ ID NO: 964778 - RNA, 19 nt, Artificial Sequence
  Description of Artificial Sequence: Synthetic oligonucleotide
  Sense strand starting at position 2010 of SEQ ID NO: 913926
ugcccagagcuuuaucuca

SEQ ID NO: 964779 - RNA, 19 nt, Artificial Sequence
  Description of Artificial Sequence: Synthetic oligonucleotide
  Antisense strand to SEQ ID NO: 964778
ugagauaaagcucugggca

SEQ ID NO: 964780 - RNA, 19 nt, Artificial Sequence
  Description of Artificial Sequence: Synthetic oligonucleotide
  Sense strand starting at position 473 of SEQ ID NO: 913927
gaguuaggauucucaacag

SEQ ID NO: 964781 - RNA, 19 nt, Artificial Sequence
  Description of Artificial Sequence: Synthetic oligonucleotide
  Antisense strand to SEQ ID NO: 964780
cuguugagaauccuaacuc

SEQ ID NO: 964782 - RNA, 19 nt, Artificial Sequence
  Description of Artificial Sequence: Synthetic oligonucleotide
  Sense strand starting at position 3740 of SEQ ID NO: 913927
agguuugagcaggagaagu

SEQ ID NO: 964783 - RNA, 19 nt, Artificial Sequence
  Description of Artificial Sequence: Synthetic oligonucleotide
  Antisense strand to SEQ ID NO: 964782
acuucuccugcucaaaccu

SEQ ID NO: 964784 - RNA, 19 nt, Artificial Sequence
  Description of Artificial Sequence: Synthetic oligonucleotide
  Sense strand starting at position 2530 of SEQ ID NO: 913927
ggagauuucugggaugaug

SEQ ID NO: 964785 - RNA, 19 nt, Artificial Sequence
  Description of Artificial Sequence: Synthetic oligonucleotide
  Antisense strand to SEQ ID NO: 964784
caucaucccagaaaucucc

SEQ ID NO: 964786 - RNA, 19 nt, Artificial Sequence
  Description of Artificial Sequence: Synthetic oligonucleotide
  Sense strand starting at position 2190 of SEQ ID NO: 913927
agacuucuggaaugauggu

SEQ ID NO: 964787 - RNA, 19 nt, Artificial Sequence
  Description of Artificial Sequence: Synthetic oligonucleotide
  Antisense strand to SEQ ID NO: 964786
accaucauuccagaagucu

SEQ ID NO: 964788 - RNA, 19 nt, Artificial Sequence
  Description of Artificial Sequence: Synthetic oligonucleotide
  Sense strand starting at position 1403 of SEQ ID NO: 913927
gcauuucuguuccuugaau

SEQ ID NO: 964789 - RNA, 19 nt, Artificial Sequence
  Description of Artificial Sequence: Synthetic oligonucleotide
  Antisense strand to SEQ ID NO: 964788
auucaaggaacagaaaugc

SEQ ID NO: 964790 - RNA, 19 nt, Artificial Sequence
  Description of Artificial Sequence: Synthetic oligonucleotide
  Sense strand starting at position 2935 of SEQ ID NO: 913927
acagucacccugcauagaa

SEQ ID NO: 964791 - RNA, 19 nt, Artificial Sequence
  Description of Artificial Sequence: Synthetic oligonucleotide
  Antisense strand to SEQ ID NO: 964790
uucuaugcagggugacugu

SEQ ID NO: 964792 - RNA, 19 nt, Artificial Sequence
  Description of Artificial Sequence: Synthetic oligonucleotide
  Sense strand starting at position 1401 of SEQ ID NO: 913927
uggcauuucuguuccuuga

SEQ ID NO: 964793 - RNA, 19 nt, Artificial Sequence
  Description of Artificial Sequence: Synthetic oligonucleotide
  Antisense strand to SEQ ID NO: 964792
ucaaggaacagaaaugcca

SEQ ID NO: 964794 - RNA, 19 nt, Artificial Sequence
  Description of Artificial Sequence: Synthetic oligonucleotide
  Sense strand starting at position 1418 of SEQ ID NO: 913927
gaaugcucuccaugaggaa

SEQ ID NO: 964795 - RNA, 19 nt, Artificial Sequence
  Description of Artificial Sequence: Synthetic oligonucleotide
  Antisense strand to SEQ ID NO: 964794
uuccucauggagagcauuc

SEQ ID NO: 964796 - RNA, 19 nt, Artificial Sequence
  Description of Artificial Sequence: Synthetic oligonucleotide
  Sense strand starting at position 2241 of SEQ ID NO: 913927
aagggagauuucuggauga

SEQ ID NO: 964797 - RNA, 19 nt, Artificial Sequence
  Description of Artificial Sequence: Synthetic oligonucleotide
  Antisense strand to SEQ ID NO: 964796
ucauccagaaaucucccuu

SEQ ID NO: 964798 - RNA, 19 nt, Artificial Sequence
  Description of Artificial Sequence: Synthetic oligonucleotide
  Sense strand starting at position 2458 of SEQ ID NO: 913927
aaggaagauuucugggaug

SEQ ID NO: 964799 - RNA, 19 nt, Artificial Sequence
  Description of Artificial Sequence: Synthetic oligonucleotide
  Antisense strand to SEQ ID NO: 964798
caucccagaaaucuuccuu

SEQ ID NO: 964800 - RNA, 19 nt, Artificial Sequence
  Description of Artificial Sequence: Synthetic oligonucleotide
  Sense strand starting at position 2344 of SEQ ID NO: 913927
gcguaaauguguaugugag

SEQ ID NO: 964801 - RNA, 19 nt, Artificial Sequence
  Description of Artificial Sequence: Synthetic oligonucleotide
  Antisense strand to SEQ ID NO: 964800
cucacauacacauuuacgc

SEQ ID NO: 964802 - RNA, 19 nt, Artificial Sequence
  Description of Artificial Sequence: Synthetic oligonucleotide
  Sense strand starting at position 2377 of SEQ ID NO: 913927
aagggagauuucugggaug

SEQ ID NO: 964803 - RNA, 19 nt, Artificial Sequence
  Description of Artificial Sequence: Synthetic oligonucleotide
  Antisense strand to SEQ ID NO: 964802
caucccagaaaucucccuu

SEQ ID NO: 964804 - RNA, 19 nt, Artificial Sequence
  Description of Artificial Sequence: Synthetic oligonucleotide
  Sense strand starting at position 3979 of SEQ ID NO: 913927
gagcaauucugagucaaca

SEQ ID NO: 964805 - RNA, 19 nt, Artificial Sequence
  Description of Artificial Sequence: Synthetic oligonucleotide
  Antisense strand to SEQ ID NO: 964804
uguugacucagaauugcuc

SEQ ID NO: 964806 - RNA, 19 nt, Artificial Sequence
  Description of Artificial Sequence: Synthetic oligonucleotide
  Sense strand starting at position 2461 of SEQ ID NO: 913927
gaagauuucugggauggug

SEQ ID NO: 964807 - RNA, 19 nt, Artificial Sequence
  Description of Artificial Sequence: Synthetic oligonucleotide
  Antisense strand to SEQ ID NO: 964806
caccaucccagaaaucuuc

SEQ ID NO: 964808 - RNA, 19 nt, Artificial Sequence
  Description of Artificial Sequence: Synthetic oligonucleotide
  Sense strand starting at position 710 of SEQ ID NO: 913927
cccuaucuuuccuuaggga

SEQ ID NO: 964809 - RNA, 19 nt, Artificial Sequence
  Description of Artificial Sequence: Synthetic oligonucleotide
  Antisense strand to SEQ ID NO: 964808
ucccuaaggaaagauaggg

SEQ ID NO: 964810 - RNA, 19 nt, Artificial Sequence
  Description of Artificial Sequence: Synthetic oligonucleotide
  Sense strand starting at position 2380 of SEQ ID NO: 913927
ggagauuucugggauggug

SEQ ID NO: 964811 - RNA, 19 nt, Artificial Sequence
  Description of Artificial Sequence: Synthetic oligonucleotide
  Antisense strand to SEQ ID NO: 964810
caccaucccagaaaucucc

SEQ ID NO: 964812 - RNA, 19 nt, Artificial Sequence
  Description of Artificial Sequence: Synthetic oligonucleotide
  Sense strand starting at position 1188 of SEQ ID NO: 913927
agcagugguguugauggaa

SEQ ID NO: 964813 - RNA, 19 nt, Artificial Sequence
  Description of Artificial Sequence: Synthetic oligonucleotide
  Antisense strand to SEQ ID NO: 964812
uuccaucaacaccacugcu

SEQ ID NO: 964814 - RNA, 19 nt, Artificial Sequence
  Description of Artificial Sequence: Synthetic oligonucleotide
  Sense strand starting at position 2335 of SEQ ID NO: 913927
gggaugauggcguaaaugu

SEQ ID NO: 964815 - RNA, 19 nt, Artificial Sequence
  Description of Artificial Sequence: Synthetic oligonucleotide
  Antisense strand to SEQ ID NO: 964814
acauuuacgccaucauccc

SEQ ID NO: 964816 - RNA, 19 nt, Artificial Sequence
  Description of Artificial Sequence: Synthetic oligonucleotide
  Sense strand starting at position 1415 of SEQ ID NO: 913927
cuugaaugcucuccaugag

SEQ ID NO: 964817 - RNA, 19 nt, Artificial Sequence
  Description of Artificial Sequence: Synthetic oligonucleotide
  Antisense strand to SEQ ID NO: 964816
cucauggagagcauucaag

SEQ ID NO: 964818 - RNA, 19 nt, Artificial Sequence
  Description of Artificial Sequence: Synthetic oligonucleotide
  Sense strand starting at position 50 of SEQ ID NO: 913927
ucaagucucccuggaccau

SEQ ID NO: 964819 - RNA, 19 nt, Artificial Sequence
  Description of Artificial Sequence: Synthetic oligonucleotide
  Antisense strand to SEQ ID NO: 964818
augguccagggagacuuga

SEQ ID NO: 964820 - RNA, 19 nt, Artificial Sequence
  Description of Artificial Sequence: Synthetic oligonucleotide
  Sense strand starting at position 1623 of SEQ ID NO: 913927
aggcuuacugugggacuga

SEQ ID NO: 964821 - RNA, 19 nt, Artificial Sequence
  Description of Artificial Sequence: Synthetic oligonucleotide
  Antisense strand to SEQ ID NO: 964820
ucagucccacaguaagccu

SEQ ID NO: 964822 - RNA, 19 nt, Artificial Sequence
  Description of Artificial Sequence: Synthetic oligonucleotide
  Sense strand starting at position 1191 of SEQ ID NO: 913927
agugguguugauggaauau

SEQ ID NO: 964823 - RNA, 19 nt, Artificial Sequence
  Description of Artificial Sequence: Synthetic oligonucleotide
  Antisense strand to SEQ ID NO: 964822
auauuccaucaacaccacu

SEQ ID NO: 964824 - RNA, 19 nt, Artificial Sequence
  Description of Artificial Sequence: Synthetic oligonucleotide
  Sense strand starting at position 35 of SEQ ID NO: 913927
auuagugccagucagucaa

SEQ ID NO: 964825 - RNA, 19 nt, Artificial Sequence
  Description of Artificial Sequence: Synthetic oligonucleotide
  Antisense strand to SEQ ID NO: 964824
uugacugacuggcacuaau

SEQ ID NO: 964826 - RNA, 19 nt, Artificial Sequence
  Description of Artificial Sequence: Synthetic oligonucleotide
  Sense strand starting at position 885 of SEQ ID NO: 913927
ugcauugcccaauagcaua

SEQ ID NO: 964827 - RNA, 19 nt, Artificial Sequence
  Description of Artificial Sequence: Synthetic oligonucleotide
  Antisense strand to SEQ ID NO: 964826
uaugcuauugggcaaugca

SEQ ID NO: 964828 - RNA, 19 nt, Artificial Sequence
  Description of Artificial Sequence: Synthetic oligonucleotide
  Sense strand starting at position 2034 of SEQ ID NO: 913927
uuuauauagcgauguggga

SEQ ID NO: 964829 - RNA, 19 nt, Artificial Sequence
  Description of Artificial Sequence: Synthetic oligonucleotide
  Antisense strand to SEQ ID NO: 964828
ucccacaucgcuauauaaa

SEQ ID NO: 964830 - RNA, 19 nt, Artificial Sequence
  Description of Artificial Sequence: Synthetic oligonucleotide
  Sense strand starting at position 2784 of SEQ ID NO: 913927
uguuucuucccugagcuca

SEQ ID NO: 964831 - RNA, 19 nt, Artificial Sequence
  Description of Artificial Sequence: Synthetic oligonucleotide
  Antisense strand to SEQ ID NO: 964830
ugagcucagggaagaaaca

SEQ ID NO: 964832 - RNA, 19 nt, Artificial Sequence
  Description of Artificial Sequence: Synthetic oligonucleotide
  Sense strand starting at position 2104 of SEQ ID NO: 913927
cugggugucuaucuacgaa

SEQ ID NO: 964833 - RNA, 19 nt, Artificial Sequence
  Description of Artificial Sequence: Synthetic oligonucleotide
  Antisense strand to SEQ ID NO: 964832
uucguagauagacacccag

SEQ ID NO: 964834 - RNA, 19 nt, Artificial Sequence
  Description of Artificial Sequence: Synthetic oligonucleotide
  Sense strand starting at position 569 of SEQ ID NO: 913927
aagugcagguccuuucuaa

SEQ ID NO: 964835 - RNA, 19 nt, Artificial Sequence
  Description of Artificial Sequence: Synthetic oligonucleotide
  Antisense strand to SEQ ID NO: 964834
uuagaaaggaccugcacuu

SEQ ID NO: 964836 - RNA, 19 nt, Artificial Sequence
  Description of Artificial Sequence: Synthetic oligonucleotide
  Sense strand starting at position 1590 of SEQ ID NO: 913927
cagggaaggcucugugcau

SEQ ID NO: 964837 - RNA, 19 nt, Artificial Sequence
  Description of Artificial Sequence: Synthetic oligonucleotide
  Antisense strand to SEQ ID NO: 964836
augcacagagccuucccug

SEQ ID NO: 964838 - RNA, 19 nt, Artificial Sequence
  Description of Artificial Sequence: Synthetic oligonucleotide
  Sense strand starting at position 2107 of SEQ ID NO: 913927
ggugucuaucuacgaaggu

SEQ ID NO: 964839 - RNA, 19 nt, Artificial Sequence
  Description of Artificial Sequence: Synthetic oligonucleotide
  Antisense strand to SEQ ID NO: 964838
accuucguagauagacacc

SEQ ID NO: 964840 - RNA, 19 nt, Artificial Sequence
  Description of Artificial Sequence: Synthetic oligonucleotide
  Sense strand starting at position 2343 of SEQ ID NO: 913927
ggcguaaauguguauguga

SEQ ID NO: 964841 - RNA, 19 nt, Artificial Sequence
  Description of Artificial Sequence: Synthetic oligonucleotide
  Antisense strand to SEQ ID NO: 964840
ucacauacacauuuacgcc

SEQ ID NO: 964842 - RNA, 19 nt, Artificial Sequence
  Description of Artificial Sequence: Synthetic oligonucleotide
  Sense strand starting at position 1455 of SEQ ID NO: 913927
ccucuaucagccuguuuau

SEQ ID NO: 964843 - RNA, 19 nt, Artificial Sequence
  Description of Artificial Sequence: Synthetic oligonucleotide
  Antisense strand to SEQ ID NO: 964842
auaaacaggcugauagagg

SEQ ID NO: 964844 - RNA, 19 nt, Artificial Sequence
  Description of Artificial Sequence: Synthetic oligonucleotide
  Sense strand starting at position 2260 of SEQ ID NO: 913927
ugguggugugaaugugagu

SEQ ID NO: 964845 - RNA, 19 nt, Artificial Sequence
  Description of Artificial Sequence: Synthetic oligonucleotide
  Antisense strand to SEQ ID NO: 964844
acucacauucacaccacca

SEQ ID NO: 964846 - RNA, 19 nt, Artificial Sequence
  Description of Artificial Sequence: Synthetic oligonucleotide
  Sense strand starting at position 2322 of SEQ ID NO: 913927
aaaggagacuucugggaug

SEQ ID NO: 964847 - RNA, 19 nt, Artificial Sequence
  Description of Artificial Sequence: Synthetic oligonucleotide
  Antisense strand to SEQ ID NO: 964846
caucccagaagucuccuuu

SEQ ID NO: 964848 - RNA, 19 nt, Artificial Sequence
  Description of Artificial Sequence: Synthetic oligonucleotide
  Sense strand starting at position 2547 of SEQ ID NO: 913927
ugguggugugaauguguau

SEQ ID NO: 964849 - RNA, 19 nt, Artificial Sequence
  Description of Artificial Sequence: Synthetic oligonucleotide
  Antisense strand to SEQ ID NO: 964848
auacacauucacaccacca

SEQ ID NO: 964850 - RNA, 19 nt, Artificial Sequence
  Description of Artificial Sequence: Synthetic oligonucleotide
  Sense strand starting at position 2779 of SEQ ID NO: 913927
uguuguguuucuucccuga

SEQ ID NO: 964851 - RNA, 19 nt, Artificial Sequence
  Description of Artificial Sequence: Synthetic oligonucleotide
  Antisense strand to SEQ ID NO: 964850
ucagggaagaaacacaaca

SEQ ID NO: 964852 - RNA, 19 nt, Artificial Sequence
  Description of Artificial Sequence: Synthetic oligonucleotide
  Sense strand starting at position 2345 of SEQ ID NO: 913927
cguaaauguguaugugagu

SEQ ID NO: 964853 - RNA, 19 nt, Artificial Sequence
  Description of Artificial Sequence: Synthetic oligonucleotide
  Antisense strand to SEQ ID NO: 964852
acucacauacacauuuacg

SEQ ID NO: 964854 - RNA, 19 nt, Artificial Sequence
  Description of Artificial Sequence: Synthetic oligonucleotide
  Sense strand starting at position 2199 of SEQ ID NO: 913927
gaaugaugguggcaugaau

SEQ ID NO: 964855 - RNA, 19 nt, Artificial Sequence
  Description of Artificial Sequence: Synthetic oligonucleotide
  Antisense strand to SEQ ID NO: 964854
auucaugccaccaucauuc

SEQ ID NO: 964856 - RNA, 19 nt, Artificial Sequence
  Description of Artificial Sequence: Synthetic oligonucleotide
  Sense strand starting at position 1004 of SEQ ID NO: 913927
cauaucaggucaggacaaa

SEQ ID NO: 964857 - RNA, 19 nt, Artificial Sequence
  Description of Artificial Sequence: Synthetic oligonucleotide
  Antisense strand to SEQ ID NO: 964856
uuuguccugaccugauaug

SEQ ID NO: 964858 - RNA, 19 nt, Artificial Sequence
  Description of Artificial Sequence: Synthetic oligonucleotide
  Sense strand starting at position 2782 of SEQ ID NO: 913927
uguguuucuucccugagcu

SEQ ID NO: 964859 - RNA, 19 nt, Artificial Sequence
  Description of Artificial Sequence: Synthetic oligonucleotide
  Antisense strand to SEQ ID NO: 964858
agcucagggaagaaacaca

SEQ ID NO: 964860 - RNA, 19 nt, Artificial Sequence
  Description of Artificial Sequence: Synthetic oligonucleotide
  Sense strand starting at position 556 of SEQ ID NO: 913928
gguguauuucauggccaga

SEQ ID NO: 964861 - RNA, 19 nt, Artificial Sequence
  Description of Artificial Sequence: Synthetic oligonucleotide
  Antisense strand to SEQ ID NO: 964860
ucuggccaugaaauacacc

SEQ ID NO: 964862 - RNA, 19 nt, Artificial Sequence
  Description of Artificial Sequence: Synthetic oligonucleotide
  Sense strand starting at position 1238 of SEQ ID NO: 913928
uaugcauuucgauggcaaa

SEQ ID NO: 964863 - RNA, 19 nt, Artificial Sequence
  Description of Artificial Sequence: Synthetic oligonucleotide
  Antisense strand to SEQ ID NO: 964862
uuugccaucgaaaugcaua

SEQ ID NO: 964864 - RNA, 19 nt, Artificial Sequence
  Description of Artificial Sequence: Synthetic oligonucleotide
  Sense strand starting at position 3797 of SEQ ID NO: 913928
aaaugagcaucagugaaac

SEQ ID NO: 964865 - RNA, 19 nt, Artificial Sequence
  Description of Artificial Sequence: Synthetic oligonucleotide
  Antisense strand to SEQ ID NO: 964864
guuucacugaugcucauuu

SEQ ID NO: 964866 - RNA, 19 nt, Artificial Sequence
  Description of Artificial Sequence: Synthetic oligonucleotide
  Sense strand starting at position 97 of SEQ ID NO: 913928
auguuauucuuacuagaga

SEQ ID NO: 964867 - RNA, 19 nt, Artificial Sequence
  Description of Artificial Sequence: Synthetic oligonucleotide
  Antisense strand to SEQ ID NO: 964866
ucucuaguaagaauaacau

SEQ ID NO: 964868 - RNA, 19 nt, Artificial Sequence
  Description of Artificial Sequence: Synthetic oligonucleotide
  Sense strand starting at position 826 of SEQ ID NO: 913928
ugaauuaugccaggacuua

SEQ ID NO: 964869 - RNA, 19 nt, Artificial Sequence
  Description of Artificial Sequence: Synthetic oligonucleotide
  Antisense strand to SEQ ID NO: 964868
uaaguccuggcauaauuca

SEQ ID NO: 964870 - RNA, 19 nt, Artificial Sequence
  Description of Artificial Sequence: Synthetic oligonucleotide
  Sense strand starting at position 2249 of SEQ ID NO: 913928
ccgugucuucccgcagauc

SEQ ID NO: 964871 - RNA, 19 nt, Artificial Sequence
  Description of Artificial Sequence: Synthetic oligonucleotide
  Antisense strand to SEQ ID NO: 964870
gaucugcgggaagacacgg

SEQ ID NO: 964872 - RNA, 19 nt, Artificial Sequence
  Description of Artificial Sequence: Synthetic oligonucleotide
  Sense strand starting at position 635 of SEQ ID NO: 913928
aguugcccucgagaauaaa

SEQ ID NO: 964873 - RNA, 19 nt, Artificial Sequence
  Description of Artificial Sequence: Synthetic oligonucleotide
  Antisense strand to SEQ ID NO: 964872
uuuauucucgagggcaacu

SEQ ID NO: 964874 - RNA, 19 nt, Artificial Sequence
  Description of Artificial Sequence: Synthetic oligonucleotide
  Sense strand starting at position 3458 of SEQ ID NO: 913928
guuuaucuacugggauaau

SEQ ID NO: 964875 - RNA, 19 nt, Artificial Sequence
  Description of Artificial Sequence: Synthetic oligonucleotide
  Antisense strand to SEQ ID NO: 964874
auuaucccaguagauaaac

SEQ ID NO: 964876 - RNA, 19 nt, Artificial Sequence
  Description of Artificial Sequence: Synthetic oligonucleotide
  Sense strand starting at position 348 of SEQ ID NO: 913928
aagccaucuggguaucacu

SEQ ID NO: 964877 - RNA, 19 nt, Artificial Sequence
  Description of Artificial Sequence: Synthetic oligonucleotide
  Antisense strand to SEQ ID NO: 964876
agugauacccagauggcuu

SEQ ID NO: 964878 - RNA, 19 nt, Artificial Sequence
  Description of Artificial Sequence: Synthetic oligonucleotide
  Sense strand starting at position 2501 of SEQ ID NO: 913928
auucuuguugcugaagaau

SEQ ID NO: 964879 - RNA, 19 nt, Artificial Sequence
  Description of Artificial Sequence: Synthetic oligonucleotide
  Antisense strand to SEQ ID NO: 964878
auucuucagcaacaagaau

SEQ ID NO: 964880 - RNA, 19 nt, Artificial Sequence
  Description of Artificial Sequence: Synthetic oligonucleotide
  Sense strand starting at position 2386 of SEQ ID NO: 913928
auaguuaacugagcauaca

SEQ ID NO: 964881 - RNA, 19 nt, Artificial Sequence
  Description of Artificial Sequence: Synthetic oligonucleotide
  Antisense strand to SEQ ID NO: 964880
uguaugcucaguuaacuau

SEQ ID NO: 964882 - RNA, 19 nt, Artificial Sequence
  Description of Artificial Sequence: Synthetic oligonucleotide
  Sense strand starting at position 730 of SEQ ID NO: 913928
ccuaaagguuaguuuauaa

SEQ ID NO: 964883 - RNA, 19 nt, Artificial Sequence
  Description of Artificial Sequence: Synthetic oligonucleotide
  Antisense strand to SEQ ID NO: 964882
uuauaaacuaaccuuuagg

SEQ ID NO: 964884 - RNA, 19 nt, Artificial Sequence
  Description of Artificial Sequence: Synthetic oligonucleotide
  Sense strand starting at position 729 of SEQ ID NO: 913928
accuaaagguuaguuuaua

SEQ ID NO: 964885 - RNA, 19 nt, Artificial Sequence
  Description of Artificial Sequence: Synthetic oligonucleotide
  Antisense strand to SEQ ID NO: 964884
uauaaacuaaccuuuaggu

SEQ ID NO: 964886 - RNA, 19 nt, Artificial Sequence
  Description of Artificial Sequence: Synthetic oligonucleotide
  Sense strand starting at position 839 of SEQ ID NO: 913928
gacuuaaaucaaugaucgu

SEQ ID NO: 964887 - RNA, 19 nt, Artificial Sequence
  Description of Artificial Sequence: Synthetic oligonucleotide
  Antisense strand to SEQ ID NO: 964886
acgaucauugauuuaaguc

SEQ ID NO: 964888 - RNA, 19 nt, Artificial Sequence
  Description of Artificial Sequence: Synthetic oligonucleotide
  Sense strand starting at position 136 of SEQ ID NO: 913928
aguaaauguugguugaaau

SEQ ID NO: 964889 - RNA, 19 nt, Artificial Sequence
  Description of Artificial Sequence: Synthetic oligonucleotide
  Antisense strand to SEQ ID NO: 964888
auuucaaccaacauuuacu

SEQ ID NO: 964890 - RNA, 19 nt, Artificial Sequence
  Description of Artificial Sequence: Synthetic oligonucleotide
  Sense strand starting at position 135 of SEQ ID NO: 913928
caguaaauguugguugaaa

SEQ ID NO: 964891 - RNA, 19 nt, Artificial Sequence
  Description of Artificial Sequence: Synthetic oligonucleotide
  Antisense strand to SEQ ID NO: 964890
uuucaaccaacauuuacug

SEQ ID NO: 964892 - RNA, 19 nt, Artificial Sequence
  Description of Artificial Sequence: Synthetic oligonucleotide
  Sense strand starting at position 638 of SEQ ID NO: 913928
ugcccucgagaauaaaguu

SEQ ID NO: 964893 - RNA, 19 nt, Artificial Sequence
  Description of Artificial Sequence: Synthetic oligonucleotide
  Antisense strand to SEQ ID NO: 964892
aacuuuauucucgagggca

SEQ ID NO: 964894 - RNA, 19 nt, Artificial Sequence
  Description of Artificial Sequence: Synthetic oligonucleotide
  Sense strand starting at position 137 of SEQ ID NO: 913928
guaaauguugguugaaaug

SEQ ID NO: 964895 - RNA, 19 nt, Artificial Sequence
  Description of Artificial Sequence: Synthetic oligonucleotide
  Antisense strand to SEQ ID NO: 964894
cauuucaaccaacauuuac

SEQ ID NO: 964896 - RNA, 19 nt, Artificial Sequence
  Description of Artificial Sequence: Synthetic oligonucleotide
  Sense strand starting at position 633 of SEQ ID NO: 913928
ccaguugcccucgagaaua

SEQ ID NO: 964897 - RNA, 19 nt, Artificial Sequence
  Description of Artificial Sequence: Synthetic oligonucleotide
  Antisense strand to SEQ ID NO: 964896
uauucucgagggcaacugg

SEQ ID NO: 964898 - RNA, 19 nt, Artificial Sequence
  Description of Artificial Sequence: Synthetic oligonucleotide
  Sense strand starting at position 693 of SEQ ID NO: 913928
gagguuagguuaguuauau

SEQ ID NO: 964899 - RNA, 19 nt, Artificial Sequence
  Description of Artificial Sequence: Synthetic oligonucleotide
  Antisense strand to SEQ ID NO: 964898
auauaacuaaccuaaccuc

SEQ ID NO: 964900 - RNA, 19 nt, Artificial Sequence
  Description of Artificial Sequence: Synthetic oligonucleotide
  Sense strand starting at position 2799 of SEQ ID NO: 913928
gguaucuccgaaggauucu

SEQ ID NO: 964901 - RNA, 19 nt, Artificial Sequence
  Description of Artificial Sequence: Synthetic oligonucleotide
  Antisense strand to SEQ ID NO: 964900
agaauccuucggagauacc

SEQ ID NO: 964902 - RNA, 19 nt, Artificial Sequence
  Description of Artificial Sequence: Synthetic oligonucleotide
  Sense strand starting at position 995 of SEQ ID NO: 913928
cuucucucccugggucaaa

SEQ ID NO: 964903 - RNA, 19 nt, Artificial Sequence
  Description of Artificial Sequence: Synthetic oligonucleotide
  Antisense strand to SEQ ID NO: 964902
uuugacccagggagagaag

SEQ ID NO: 964904 - RNA, 19 nt, Artificial Sequence
  Description of Artificial Sequence: Synthetic oligonucleotide
  Sense strand starting at position 694 of SEQ ID NO: 913928
agguuagguuaguuauauu

SEQ ID NO: 964905 - RNA, 19 nt, Artificial Sequence
  Description of Artificial Sequence: Synthetic oligonucleotide
  Antisense strand to SEQ ID NO: 964904
aauauaacuaaccuaaccu

SEQ ID NO: 964906 - RNA, 19 nt, Artificial Sequence
  Description of Artificial Sequence: Synthetic oligonucleotide
  Sense strand starting at position 1271 of SEQ ID NO: 913928
gguucucggccucaucaaa

SEQ ID NO: 964907 - RNA, 19 nt, Artificial Sequence
  Description of Artificial Sequence: Synthetic oligonucleotide
  Antisense strand to SEQ ID NO: 964906
uuugaugaggccgagaacc

SEQ ID NO: 964908 - RNA, 19 nt, Artificial Sequence
  Description of Artificial Sequence: Synthetic oligonucleotide
  Sense strand starting at position 1477 of SEQ ID NO: 913928
ccaagucucugggugacuu

SEQ ID NO: 964909 - RNA, 19 nt, Artificial Sequence
  Description of Artificial Sequence: Synthetic oligonucleotide
  Antisense strand to SEQ ID NO: 964908
aagucacccagagacuugg

SEQ ID NO: 964910 - RNA, 19 nt, Artificial Sequence
  Description of Artificial Sequence: Synthetic oligonucleotide
  Sense strand starting at position 1474 of SEQ ID NO: 913928
ccuccaagucucuggguga

SEQ ID NO: 964911 - RNA, 19 nt, Artificial Sequence
  Description of Artificial Sequence: Synthetic oligonucleotide
  Antisense strand to SEQ ID NO: 964910
ucacccagagacuuggagg

SEQ ID NO: 964912 - RNA, 19 nt, Artificial Sequence
  Description of Artificial Sequence: Synthetic oligonucleotide
  Sense strand starting at position 2499 of SEQ ID NO: 913928
cuauucuuguugcugaaga

SEQ ID NO: 964913 - RNA, 19 nt, Artificial Sequence
  Description of Artificial Sequence: Synthetic oligonucleotide
  Antisense strand to SEQ ID NO: 964912
ucuucagcaacaagaauag

SEQ ID NO: 964914 - RNA, 19 nt, Artificial Sequence
  Description of Artificial Sequence: Synthetic oligonucleotide
  Sense strand starting at position 1133 of SEQ ID NO: 913928
aacaguuccuugguguaca

SEQ ID NO: 964915 - RNA, 19 nt, Artificial Sequence
  Description of Artificial Sequence: Synthetic oligonucleotide
  Antisense strand to SEQ ID NO: 964914
uguacaccaaggaacuguu

SEQ ID NO: 964916 - RNA, 19 nt, Artificial Sequence
  Description of Artificial Sequence: Synthetic oligonucleotide
  Sense strand starting at position 1327 of SEQ ID NO: 913928
acagcagucuauguggauu

SEQ ID NO: 964917 - RNA, 19 nt, Artificial Sequence
  Description of Artificial Sequence: Synthetic oligonucleotide
  Antisense strand to SEQ ID NO: 964916
aauccacauagacugcugu

SEQ ID NO: 964918 - RNA, 19 nt, Artificial Sequence
  Description of Artificial Sequence: Synthetic oligonucleotide
  Sense strand starting at position 863 of SEQ ID NO: 913928
gucuacaggucacauuuaa

SEQ ID NO: 964919 - RNA, 19 nt, Artificial Sequence
  Description of Artificial Sequence: Synthetic oligonucleotide
  Antisense strand to SEQ ID NO: 964918
uuaaaugugaccuguagac

SEQ ID NO: 964920 - RNA, 19 nt, Artificial Sequence
  Description of Artificial Sequence: Synthetic oligonucleotide
  Sense strand starting at position 1144 of SEQ ID NO: 913928
gguguacauuuccauacaa

SEQ ID NO: 964921 - RNA, 19 nt, Artificial Sequence
  Description of Artificial Sequence: Synthetic oligonucleotide
  Antisense strand to SEQ ID NO: 964920
uuguauggaaauguacacc

SEQ ID NO: 964922 - RNA, 19 nt, Artificial Sequence
  Description of Artificial Sequence: Synthetic oligonucleotide
  Sense strand starting at position 702 of SEQ ID NO: 913928
uuaguuauauuccuagcau

SEQ ID NO: 964923 - RNA, 19 nt, Artificial Sequence
  Description of Artificial Sequence: Synthetic oligonucleotide
  Antisense strand to SEQ ID NO: 964922
augcuaggaauauaacuaa

SEQ ID NO: 964924 - RNA, 19 nt, Artificial Sequence
  Description of Artificial Sequence: Synthetic oligonucleotide
  Sense strand starting at position 1131 of SEQ ID NO: 913928
caaacaguuccuuggugua

SEQ ID NO: 964925 - RNA, 19 nt, Artificial Sequence
  Description of Artificial Sequence: Synthetic oligonucleotide
  Antisense strand to SEQ ID NO: 964924
uacaccaaggaacuguuug

SEQ ID NO: 964926 - RNA, 19 nt, Artificial Sequence
  Description of Artificial Sequence: Synthetic oligonucleotide
  Sense strand starting at position 134 of SEQ ID NO: 913928
gcaguaaauguugguugaa

SEQ ID NO: 964927 - RNA, 19 nt, Artificial Sequence
  Description of Artificial Sequence: Synthetic oligonucleotide
  Antisense strand to SEQ ID NO: 964926
uucaaccaacauuuacugc

SEQ ID NO: 964928 - RNA, 19 nt, Artificial Sequence
  Description of Artificial Sequence: Synthetic oligonucleotide
  Sense strand starting at position 1188 of SEQ ID NO: 913928
gucggaaccuggguuucau

SEQ ID NO: 964929 - RNA, 19 nt, Artificial Sequence
  Description of Artificial Sequence: Synthetic oligonucleotide
  Antisense strand to SEQ ID NO: 964928
augaaacccagguuccgac

SEQ ID NO: 964930 - RNA, 19 nt, Artificial Sequence
  Description of Artificial Sequence: Synthetic oligonucleotide
  Sense strand starting at position 1221 of SEQ ID NO: 913928
guuuacuuccuguagcuua

SEQ ID NO: 964931 - RNA, 19 nt, Artificial Sequence
  Description of Artificial Sequence: Synthetic oligonucleotide
  Antisense strand to SEQ ID NO: 964930
uaagcuacaggaaguaaac

SEQ ID NO: 964932 - RNA, 19 nt, Artificial Sequence
  Description of Artificial Sequence: Synthetic oligonucleotide
  Sense strand starting at position 344 of SEQ ID NO: 913928
ugcaaagccaucuggguau

SEQ ID NO: 964933 - RNA, 19 nt, Artificial Sequence
  Description of Artificial Sequence: Synthetic oligonucleotide
  Antisense strand to SEQ ID NO: 964932
auacccagauggcuuugca

SEQ ID NO: 964934 - RNA, 19 nt, Artificial Sequence
  Description of Artificial Sequence: Synthetic oligonucleotide
  Sense strand starting at position 770 of SEQ ID NO: 913928
uuguguuguacguaauaua

SEQ ID NO: 964935 - RNA, 19 nt, Artificial Sequence
  Description of Artificial Sequence: Synthetic oligonucleotide
  Antisense strand to SEQ ID NO: 964934
uauauuacguacaacacaa

SEQ ID NO: 964936 - RNA, 19 nt, Artificial Sequence
  Description of Artificial Sequence: Synthetic oligonucleotide
  Sense strand starting at position 2188 of SEQ ID NO: 913928
cugugacggcguuaaucaa

SEQ ID NO: 964937 - RNA, 19 nt, Artificial Sequence
  Description of Artificial Sequence: Synthetic oligonucleotide
  Antisense strand to SEQ ID NO: 964936
uugauuaacgccgucacag

SEQ ID NO: 964938 - RNA, 19 nt, Artificial Sequence
  Description of Artificial Sequence: Synthetic oligonucleotide
  Sense strand starting at position 3867 of SEQ ID NO: 913928
ggaggcucgaggugaguuu

SEQ ID NO: 964939 - RNA, 19 nt, Artificial Sequence
  Description of Artificial Sequence: Synthetic oligonucleotide
  Antisense strand to SEQ ID NO: 964938
aaacucaccucgagccucc

SEQ ID NO: 964940 - RNA, 19 nt, Artificial Sequence
  Description of Artificial Sequence: Synthetic oligonucleotide
  Sense strand starting at position 3620 of SEQ ID NO: 913929
gcacuugugcaaguuugua

SEQ ID NO: 964941 - RNA, 19 nt, Artificial Sequence
  Description of Artificial Sequence: Synthetic oligonucleotide
  Antisense strand to SEQ ID NO: 964940
uacaaacuugcacaagugc

SEQ ID NO: 964942 - RNA, 19 nt, Artificial Sequence
  Description of Artificial Sequence: Synthetic oligonucleotide
  Sense strand starting at position 1973 of SEQ ID NO: 913929
cugucucuucgcuucuauu

SEQ ID NO: 964943 - RNA, 19 nt, Artificial Sequence
  Description of Artificial Sequence: Synthetic oligonucleotide
  Antisense strand to SEQ ID NO: 964942
aauagaagcgaagagacag

SEQ ID NO: 964944 - RNA, 19 nt, Artificial Sequence
  Description of Artificial Sequence: Synthetic oligonucleotide
  Sense strand starting at position 852 of SEQ ID NO: 913929
agaagaaaguuugcaaauc

SEQ ID NO: 964945 - RNA, 19 nt, Artificial Sequence
  Description of Artificial Sequence: Synthetic oligonucleotide
  Antisense strand to SEQ ID NO: 964944
gauuugcaaacuuucuucu

SEQ ID NO: 964946 - RNA, 19 nt, Artificial Sequence
  Description of Artificial Sequence: Synthetic oligonucleotide
  Sense strand starting at position 698 of SEQ ID NO: 913929
gaagaaaguggcuaggcau

SEQ ID NO: 964947 - RNA, 19 nt, Artificial Sequence
  Description of Artificial Sequence: Synthetic oligonucleotide
  Antisense strand to SEQ ID NO: 964946
augccuagccacuuucuuc

SEQ ID NO: 964948 - RNA, 19 nt, Artificial Sequence
  Description of Artificial Sequence: Synthetic oligonucleotide
  Sense strand starting at position 3381 of SEQ ID NO: 913929
aauugagugguuuacuauu

SEQ ID NO: 964949 - RNA, 19 nt, Artificial Sequence
  Description of Artificial Sequence: Synthetic oligonucleotide
  Antisense strand to SEQ ID NO: 964948
aauaguaaaccacucaauu

SEQ ID NO: 964950 - RNA, 19 nt, Artificial Sequence
  Description of Artificial Sequence: Synthetic oligonucleotide
  Sense strand starting at position 3859 of SEQ ID NO: 913929
guauuuguuugccuaggau

SEQ ID NO: 964951 - RNA, 19 nt, Artificial Sequence
  Description of Artificial Sequence: Synthetic oligonucleotide
  Antisense strand to SEQ ID NO: 964950
auccuaggcaaacaaauac

SEQ ID NO: 964952 - RNA, 19 nt, Artificial Sequence
  Description of Artificial Sequence: Synthetic oligonucleotide
  Sense strand starting at position 2491 of SEQ ID NO: 913929
ucuguacaacauuauguau

SEQ ID NO: 964953 - RNA, 19 nt, Artificial Sequence
  Description of Artificial Sequence: Synthetic oligonucleotide
  Antisense strand to SEQ ID NO: 964952
auacauaauguuguacaga

SEQ ID NO: 964954 - RNA, 19 nt, Artificial Sequence
  Description of Artificial Sequence: Synthetic oligonucleotide
  Sense strand starting at position 2416 of SEQ ID NO: 913929
auguaaagacauugguauu

SEQ ID NO: 964955 - RNA, 19 nt, Artificial Sequence
  Description of Artificial Sequence: Synthetic oligonucleotide
  Antisense strand to SEQ ID NO: 964954
aauaccaaugucuuuacau

SEQ ID NO: 964956 - RNA, 19 nt, Artificial Sequence
  Description of Artificial Sequence: Synthetic oligonucleotide
  Sense strand starting at position 2157 of SEQ ID NO: 913929
agaugcauauaugcauaaa

SEQ ID NO: 964957 - RNA, 19 nt, Artificial Sequence
  Description of Artificial Sequence: Synthetic oligonucleotide
  Antisense strand to SEQ ID NO: 964956
uuuaugcauauaugcaucu

SEQ ID NO: 964958 - RNA, 19 nt, Artificial Sequence
  Description of Artificial Sequence: Synthetic oligonucleotide
  Sense strand starting at position 3670 of SEQ ID NO: 913929
ggguaugaauggucccauu

SEQ ID NO: 964959 - RNA, 19 nt, Artificial Sequence
  Description of Artificial Sequence: Synthetic oligonucleotide
  Antisense strand to SEQ ID NO: 964958
aaugggaccauucauaccc

SEQ ID NO: 964960 - RNA, 19 nt, Artificial Sequence
  Description of Artificial Sequence: Synthetic oligonucleotide
  Sense strand starting at position 2716 of SEQ ID NO: 913929
gcaugacacuggcuuaaag

SEQ ID NO: 964961 - RNA, 19 nt, Artificial Sequence
  Description of Artificial Sequence: Synthetic oligonucleotide
  Antisense strand to SEQ ID NO: 964960
cuuuaagccagugucaugc

SEQ ID NO: 964962 - RNA, 19 nt, Artificial Sequence
  Description of Artificial Sequence: Synthetic oligonucleotide
  Sense strand starting at position 3383 of SEQ ID NO: 913929
uugagugguuuacuauuaa

SEQ ID NO: 964963 - RNA, 19 nt, Artificial Sequence
  Description of Artificial Sequence: Synthetic oligonucleotide
  Antisense strand to SEQ ID NO: 964962
uuaauaguaaaccacucaa

SEQ ID NO: 964964 - RNA, 19 nt, Artificial Sequence
  Description of Artificial Sequence: Synthetic oligonucleotide
  Sense strand starting at position 3326 of SEQ ID NO: 913929
aggaaaucauuagagaaau

SEQ ID NO: 964965 - RNA, 19 nt, Artificial Sequence
  Description of Artificial Sequence: Synthetic oligonucleotide
  Antisense strand to SEQ ID NO: 964964
auuucucuaaugauuuccu

SEQ ID NO: 964966 - RNA, 19 nt, Artificial Sequence
  Description of Artificial Sequence: Synthetic oligonucleotide
  Sense strand starting at position 1498 of SEQ ID NO: 913929
accaauauuugugaugauc

SEQ ID NO: 964967 - RNA, 19 nt, Artificial Sequence
  Description of Artificial Sequence: Synthetic oligonucleotide
  Antisense strand to SEQ ID NO: 964966
gaucaucacaaauauuggu

SEQ ID NO: 964968 - RNA, 19 nt, Artificial Sequence
  Description of Artificial Sequence: Synthetic oligonucleotide
  Sense strand starting at position 1052 of SEQ ID NO: 913929
acaaaugcuuagcuagauu

SEQ ID NO: 964969 - RNA, 19 nt, Artificial Sequence
  Description of Artificial Sequence: Synthetic oligonucleotide
  Antisense strand to SEQ ID NO: 964968
aaucuagcuaagcauuugu

SEQ ID NO: 964970 - RNA, 19 nt, Artificial Sequence
  Description of Artificial Sequence: Synthetic oligonucleotide
  Sense strand starting at position 2900 of SEQ ID NO: 913929
aguugaaacuuugucuuau

SEQ ID NO: 964971 - RNA, 19 nt, Artificial Sequence
  Description of Artificial Sequence: Synthetic oligonucleotide
  Antisense strand to SEQ ID NO: 964970
auaagacaaaguuucaacu

SEQ ID NO: 964972 - RNA, 19 nt, Artificial Sequence
  Description of Artificial Sequence: Synthetic oligonucleotide
  Sense strand starting at position 1520 of SEQ ID NO: 913929
uuggcuuuauuccuggaau

SEQ ID NO: 964973 - RNA, 19 nt, Artificial Sequence
  Description of Artificial Sequence: Synthetic oligonucleotide
  Antisense strand to SEQ ID NO: 964972
auuccaggaauaaagccaa

SEQ ID NO: 964974 - RNA, 19 nt, Artificial Sequence
  Description of Artificial Sequence: Synthetic oligonucleotide
  Sense strand starting at position 2901 of SEQ ID NO: 913929
guugaaacuuugucuuaug

SEQ ID NO: 964975 - RNA, 19 nt, Artificial Sequence
  Description of Artificial Sequence: Synthetic oligonucleotide
  Antisense strand to SEQ ID NO: 964974
cauaagacaaaguuucaac

SEQ ID NO: 964976 - RNA, 19 nt, Artificial Sequence
  Description of Artificial Sequence: Synthetic oligonucleotide
  Sense strand starting at position 3862 of SEQ ID NO: 913929
uuuguuugccuaggauaaa

SEQ ID NO: 964977 - RNA, 19 nt, Artificial Sequence
  Description of Artificial Sequence: Synthetic oligonucleotide
  Antisense strand to SEQ ID NO: 964976
uuuauccuaggcaaacaaa

SEQ ID NO: 964978 - RNA, 19 nt, Artificial Sequence
  Description of Artificial Sequence: Synthetic oligonucleotide
  Sense strand starting at position 1962 of SEQ ID NO: 913929
acaaguauacucugucucu

SEQ ID NO: 964979 - RNA, 19 nt, Artificial Sequence
  Description of Artificial Sequence: Synthetic oligonucleotide
  Antisense strand to SEQ ID NO: 964978
agagacagaguauacuugu

SEQ ID NO: 964980 - RNA, 19 nt, Artificial Sequence
  Description of Artificial Sequence: Synthetic oligonucleotide
  Sense strand starting at position 1512 of SEQ ID NO: 913929
ugaucagguuggcuuuauu

SEQ ID NO: 964981 - RNA, 19 nt, Artificial Sequence
  Description of Artificial Sequence: Synthetic oligonucleotide
  Antisense strand to SEQ ID NO: 964980
aauaaagccaaccugauca

SEQ ID NO: 964982 - RNA, 19 nt, Artificial Sequence
  Description of Artificial Sequence: Synthetic oligonucleotide
  Sense strand starting at position 1497 of SEQ ID NO: 913929
gaccaauauuugugaugau

SEQ ID NO: 964983 - RNA, 19 nt, Artificial Sequence
  Description of Artificial Sequence: Synthetic oligonucleotide
  Antisense strand to SEQ ID NO: 964982
aucaucacaaauauugguc

SEQ ID NO: 964984 - RNA, 19 nt, Artificial Sequence
  Description of Artificial Sequence: Synthetic oligonucleotide
  Sense strand starting at position 1500 of SEQ ID NO: 913929
caauauuugugaugaucag

SEQ ID NO: 964985 - RNA, 19 nt, Artificial Sequence
  Description of Artificial Sequence: Synthetic oligonucleotide
  Antisense strand to SEQ ID NO: 964984
cugaucaucacaaauauug

SEQ ID NO: 964986 - RNA, 19 nt, Artificial Sequence
  Description of Artificial Sequence: Synthetic oligonucleotide
  Sense strand starting at position 3617 of SEQ ID NO: 913929
agggcacuugugcaaguuu

SEQ ID NO: 964987 - RNA, 19 nt, Artificial Sequence
  Description of Artificial Sequence: Synthetic oligonucleotide
  Antisense strand to SEQ ID NO: 964986
aaacuugcacaagugcccu

SEQ ID NO: 964988 - RNA, 19 nt, Artificial Sequence
  Description of Artificial Sequence: Synthetic oligonucleotide
  Sense strand starting at position 1537 of SEQ ID NO: 913929
augcaagaaugauagaaca

SEQ ID NO: 964989 - RNA, 19 nt, Artificial Sequence
  Description of Artificial Sequence: Synthetic oligonucleotide
  Antisense strand to SEQ ID NO: 964988
uguucuaucauucuugcau

SEQ ID NO: 964990 - RNA, 19 nt, Artificial Sequence
  Description of Artificial Sequence: Synthetic oligonucleotide
  Sense strand starting at position 2667 of SEQ ID NO: 913929
caugcuccgugaucucaaa

SEQ ID NO: 964991 - RNA, 19 nt, Artificial Sequence
  Description of Artificial Sequence: Synthetic oligonucleotide
  Antisense strand to SEQ ID NO: 964990
uuugagaucacggagcaug

SEQ ID NO: 964992 - RNA, 19 nt, Artificial Sequence
  Description of Artificial Sequence: Synthetic oligonucleotide
  Sense strand starting at position 1184 of SEQ ID NO: 913929
gucaacaaauuggauaauu

SEQ ID NO: 964993 - RNA, 19 nt, Artificial Sequence
  Description of Artificial Sequence: Synthetic oligonucleotide
  Antisense strand to SEQ ID NO: 964992
aauuauccaauuuguugac

SEQ ID NO: 964994 - RNA, 19 nt, Artificial Sequence
  Description of Artificial Sequence: Synthetic oligonucleotide
  Sense strand starting at position 1269 of SEQ ID NO: 913929
cgaacagacuuauaacuac

SEQ ID NO: 964995 - RNA, 19 nt, Artificial Sequence
  Description of Artificial Sequence: Synthetic oligonucleotide
  Antisense strand to SEQ ID NO: 964994
guaguuauaagucuguucg

SEQ ID NO: 964996 - RNA, 19 nt, Artificial Sequence
  Description of Artificial Sequence: Synthetic oligonucleotide
  Sense strand starting at position 3529 of SEQ ID NO: 913929
uuauguauuuauugagggu

SEQ ID NO: 964997 - RNA, 19 nt, Artificial Sequence
  Description of Artificial Sequence: Synthetic oligonucleotide
  Antisense strand to SEQ ID NO: 964996
acccucaauaaauacauaa

SEQ ID NO: 964998 - RNA, 19 nt, Artificial Sequence
  Description of Artificial Sequence: Synthetic oligonucleotide
  Sense strand starting at position 1338 of SEQ ID NO: 913929
ccggaugacuaccaaacau

SEQ ID NO: 964999 - RNA, 19 nt, Artificial Sequence
  Description of Artificial Sequence: Synthetic oligonucleotide
  Antisense strand to SEQ ID NO: 964998
auguuugguagucauccgg

SEQ ID NO: 965000 - RNA, 19 nt, Artificial Sequence
  Description of Artificial Sequence: Synthetic oligonucleotide
  Sense strand starting at position 3387 of SEQ ID NO: 913929
gugguuuacuauuaagaaa

SEQ ID NO: 965001 - RNA, 19 nt, Artificial Sequence
  Description of Artificial Sequence: Synthetic oligonucleotide
  Antisense strand to SEQ ID NO: 965000
uuucuuaauaguaaaccac

SEQ ID NO: 965002 - RNA, 19 nt, Artificial Sequence
  Description of Artificial Sequence: Synthetic oligonucleotide
  Sense strand starting at position 2663 of SEQ ID NO: 913929
gucucaugcuccgugaucu

SEQ ID NO: 965003 - RNA, 19 nt, Artificial Sequence
  Description of Artificial Sequence: Synthetic oligonucleotide
  Antisense strand to SEQ ID NO: 965002
agaucacggagcaugagac

SEQ ID NO: 965004 - RNA, 19 nt, Artificial Sequence
  Description of Artificial Sequence: Synthetic oligonucleotide
  Sense strand starting at position 2856 of SEQ ID NO: 913929
caaacaguguugggaaacu

SEQ ID NO: 965005 - RNA, 19 nt, Artificial Sequence
  Description of Artificial Sequence: Synthetic oligonucleotide
  Antisense strand to SEQ ID NO: 965004
aguuucccaacacuguuug

SEQ ID NO: 965006 - RNA, 19 nt, Artificial Sequence
  Description of Artificial Sequence: Synthetic oligonucleotide
  Sense strand starting at position 3863 of SEQ ID NO: 913929
uuguuugccuaggauaaag

SEQ ID NO: 965007 - RNA, 19 nt, Artificial Sequence
  Description of Artificial Sequence: Synthetic oligonucleotide
  Antisense strand to SEQ ID NO: 965006
cuuuauccuaggcaaacaa

SEQ ID NO: 965008 - RNA, 19 nt, Artificial Sequence
  Description of Artificial Sequence: Synthetic oligonucleotide
  Sense strand starting at position 3421 of SEQ ID NO: 913929
ggaugcaguugauagcaaa

SEQ ID NO: 965009 - RNA, 19 nt, Artificial Sequence
  Description of Artificial Sequence: Synthetic oligonucleotide
  Antisense strand to SEQ ID NO: 965008
uuugcuaucaacugcaucc

SEQ ID NO: 965010 - RNA, 19 nt, Artificial Sequence
  Description of Artificial Sequence: Synthetic oligonucleotide
  Sense strand starting at position 1373 of SEQ ID NO: 913929
accaauguuucucaaaguc

SEQ ID NO: 965011 - RNA, 19 nt, Artificial Sequence
  Description of Artificial Sequence: Synthetic oligonucleotide
  Antisense strand to SEQ ID NO: 965010
gacuuugagaaacauuggu

SEQ ID NO: 965012 - RNA, 19 nt, Artificial Sequence
  Description of Artificial Sequence: Synthetic oligonucleotide
  Sense strand starting at position 1521 of SEQ ID NO: 913929
uggcuuuauuccuggaaug

SEQ ID NO: 965013 - RNA, 19 nt, Artificial Sequence
  Description of Artificial Sequence: Synthetic oligonucleotide
  Antisense strand to SEQ ID NO: 965012
cauuccaggaauaaagcca

SEQ ID NO: 965014 - RNA, 19 nt, Artificial Sequence
  Description of Artificial Sequence: Synthetic oligonucleotide
  Sense strand starting at position 3713 of SEQ ID NO: 913930
augugaauuccaggaauug

SEQ ID NO: 965015 - RNA, 19 nt, Artificial Sequence
  Description of Artificial Sequence: Synthetic oligonucleotide
  Antisense strand to SEQ ID NO: 965014
caauuccuggaauucacau

SEQ ID NO: 965016 - RNA, 19 nt, Artificial Sequence
  Description of Artificial Sequence: Synthetic oligonucleotide
  Sense strand starting at position 3858 of SEQ ID NO: 913930
uggugaagccaagauuacu

SEQ ID NO: 965017 - RNA, 19 nt, Artificial Sequence
  Description of Artificial Sequence: Synthetic oligonucleotide
  Antisense strand to SEQ ID NO: 965016
aguaaucuuggcuucacca

SEQ ID NO: 965018 - RNA, 19 nt, Artificial Sequence
  Description of Artificial Sequence: Synthetic oligonucleotide
  Sense strand starting at position 3408 of SEQ ID NO: 913930
cuuugagaauaggugugaa

SEQ ID NO: 965019 - RNA, 19 nt, Artificial Sequence
  Description of Artificial Sequence: Synthetic oligonucleotide
  Antisense strand to SEQ ID NO: 965018
uucacaccuauucucaaag

SEQ ID NO: 965020 - RNA, 19 nt, Artificial Sequence
  Description of Artificial Sequence: Synthetic oligonucleotide
  Sense strand starting at position 2565 of SEQ ID NO: 913930
gcgaguuagcaugcucgga

SEQ ID NO: 965021 - RNA, 19 nt, Artificial Sequence
  Description of Artificial Sequence: Synthetic oligonucleotide
  Antisense strand to SEQ ID NO: 965020
uccgagcaugcuaacucgc

SEQ ID NO: 965022 - RNA, 19 nt, Artificial Sequence
  Description of Artificial Sequence: Synthetic oligonucleotide
  Sense strand starting at position 3424 of SEQ ID NO: 913930
gaaugcuagccagagguca

SEQ ID NO: 965023 - RNA, 19 nt, Artificial Sequence
  Description of Artificial Sequence: Synthetic oligonucleotide
  Antisense strand to SEQ ID NO: 965022
ugaccucuggcuagcauuc

SEQ ID NO: 965024 - RNA, 19 nt, Artificial Sequence
  Description of Artificial Sequence: Synthetic oligonucleotide
  Sense strand starting at position 3405 of SEQ ID NO: 913930
gcccuuugagaauaggugu

SEQ ID NO: 965025 - RNA, 19 nt, Artificial Sequence
  Description of Artificial Sequence: Synthetic oligonucleotide
  Antisense strand to SEQ ID NO: 965024
acaccuauucucaaagggc

SEQ ID NO: 965026 - RNA, 19 nt, Artificial Sequence
  Description of Artificial Sequence: Synthetic oligonucleotide
  Sense strand starting at position 3625 of SEQ ID NO: 913930
cccagagguuguccuaaca

SEQ ID NO: 965027 - RNA, 19 nt, Artificial Sequence
  Description of Artificial Sequence: Synthetic oligonucleotide
  Antisense strand to SEQ ID NO: 965026
uguuaggacaaccucuggg

SEQ ID NO: 965028 - RNA, 19 nt, Artificial Sequence
  Description of Artificial Sequence: Synthetic oligonucleotide
  Sense strand starting at position 3838 of SEQ ID NO: 913930
uuccaagguuugucagaca

SEQ ID NO: 965029 - RNA, 19 nt, Artificial Sequence
  Description of Artificial Sequence: Synthetic oligonucleotide
  Antisense strand to SEQ ID NO: 965028
ugucugacaaaccuuggaa

SEQ ID NO: 965030 - RNA, 19 nt, Artificial Sequence
  Description of Artificial Sequence: Synthetic oligonucleotide
  Sense strand starting at position 3909 of SEQ ID NO: 913930
aauuaucuuugggcaguau

SEQ ID NO: 965031 - RNA, 19 nt, Artificial Sequence
  Description of Artificial Sequence: Synthetic oligonucleotide
  Antisense strand to SEQ ID NO: 965030
auacugcccaaagauaauu

SEQ ID NO: 965032 - RNA, 19 nt, Artificial Sequence
  Description of Artificial Sequence: Synthetic oligonucleotide
  Sense strand starting at position 3846 of SEQ ID NO: 913930
uuugucagacaguggugaa

SEQ ID NO: 965033 - RNA, 19 nt, Artificial Sequence
  Description of Artificial Sequence: Synthetic oligonucleotide
  Antisense strand to SEQ ID NO: 965032
uucaccacugucugacaaa

SEQ ID NO: 965034 - RNA, 19 nt, Artificial Sequence
  Description of Artificial Sequence: Synthetic oligonucleotide
  Sense strand starting at position 3570 of SEQ ID NO: 913930
uauucugagcugugaucaa

SEQ ID NO: 965035 - RNA, 19 nt, Artificial Sequence
  Description of Artificial Sequence: Synthetic oligonucleotide
  Antisense strand to SEQ ID NO: 965034
uugaucacagcucagaaua

SEQ ID NO: 965036 - RNA, 19 nt, Artificial Sequence
  Description of Artificial Sequence: Synthetic oligonucleotide
  Sense strand starting at position 3426 of SEQ ID NO: 913930
augcuagccagaggucaaa

SEQ ID NO: 965037 - RNA, 19 nt, Artificial Sequence
  Description of Artificial Sequence: Synthetic oligonucleotide
  Antisense strand to SEQ ID NO: 965036
uuugaccucuggcuagcau

SEQ ID NO: 965038 - RNA, 19 nt, Artificial Sequence
  Description of Artificial Sequence: Synthetic oligonucleotide
  Sense strand starting at position 3697 of SEQ ID NO: 913930
ccaccuuuccgguggaaug

SEQ ID NO: 965039 - RNA, 19 nt, Artificial Sequence
  Description of Artificial Sequence: Synthetic oligonucleotide
  Antisense strand to SEQ ID NO: 965038
cauuccaccggaaaggugg

SEQ ID NO: 965040 - RNA, 19 nt, Artificial Sequence
  Description of Artificial Sequence: Synthetic oligonucleotide
  Sense strand starting at position 3161 of SEQ ID NO: 913930
uugccuugggcagggauua

SEQ ID NO: 965041 - RNA, 19 nt, Artificial Sequence
  Description of Artificial Sequence: Synthetic oligonucleotide
  Antisense strand to SEQ ID NO: 965040
uaaucccugcccaaggcaa

SEQ ID NO: 965042 - RNA, 19 nt, Artificial Sequence
  Description of Artificial Sequence: Synthetic oligonucleotide
  Sense strand starting at position 2625 of SEQ ID NO: 913930
acggaaugcugccuuaaag

SEQ ID NO: 965043 - RNA, 19 nt, Artificial Sequence
  Description of Artificial Sequence: Synthetic oligonucleotide
  Antisense strand to SEQ ID NO: 965042
cuuuaaggcagcauuccgu

SEQ ID NO: 965044 - RNA, 19 nt, Artificial Sequence
  Description of Artificial Sequence: Synthetic oligonucleotide
  Sense strand starting at position 3836 of SEQ ID NO: 913930
guuuccaagguuugucaga

SEQ ID NO: 965045 - RNA, 19 nt, Artificial Sequence
  Description of Artificial Sequence: Synthetic oligonucleotide
  Antisense strand to SEQ ID NO: 965044
ucugacaaaccuuggaaac

SEQ ID NO: 965046 - RNA, 19 nt, Artificial Sequence
  Description of Artificial Sequence: Synthetic oligonucleotide
  Sense strand starting at position 3242 of SEQ ID NO: 913930
gggugaguccgcuagugga

SEQ ID NO: 965047 - RNA, 19 nt, Artificial Sequence
  Description of Artificial Sequence: Synthetic oligonucleotide
  Antisense strand to SEQ ID NO: 965046
uccacuagcggacucaccc

SEQ ID NO: 965048 - RNA, 19 nt, Artificial Sequence
  Description of Artificial Sequence: Synthetic oligonucleotide
  Sense strand starting at position 2567 of SEQ ID NO: 913930
gaguuagcaugcucggaaa

SEQ ID NO: 965049 - RNA, 19 nt, Artificial Sequence
  Description of Artificial Sequence: Synthetic oligonucleotide
  Antisense strand to SEQ ID NO: 965048
uuuccgagcaugcuaacuc

SEQ ID NO: 965050 - RNA, 19 nt, Artificial Sequence
  Description of Artificial Sequence: Synthetic oligonucleotide
  Sense strand starting at position 3953 of SEQ ID NO: 913930
acuccagccgcuuauguaa

SEQ ID NO: 965051 - RNA, 19 nt, Artificial Sequence
  Description of Artificial Sequence: Synthetic oligonucleotide
  Antisense strand to SEQ ID NO: 965050
uuacauaagcggcuggagu

SEQ ID NO: 965052 - RNA, 19 nt, Artificial Sequence
  Description of Artificial Sequence: Synthetic oligonucleotide
  Sense strand starting at position 3566 of SEQ ID NO: 913930
gcuauauucugagcuguga

SEQ ID NO: 965053 - RNA, 19 nt, Artificial Sequence
  Description of Artificial Sequence: Synthetic oligonucleotide
  Antisense strand to SEQ ID NO: 965052
ucacagcucagaauauagc

SEQ ID NO: 965054 - RNA, 19 nt, Artificial Sequence
  Description of Artificial Sequence: Synthetic oligonucleotide
  Sense strand starting at position 2728 of SEQ ID NO: 913930
ggucuuaccugucuccgaa

SEQ ID NO: 965055 - RNA, 19 nt, Artificial Sequence
  Description of Artificial Sequence: Synthetic oligonucleotide
  Antisense strand to SEQ ID NO: 965054
uucggagacagguaagacc

SEQ ID NO: 965056 - RNA, 19 nt, Artificial Sequence
  Description of Artificial Sequence: Synthetic oligonucleotide
  Sense strand starting at position 3772 of SEQ ID NO: 913930
ccgugcuuggcacauaauu

SEQ ID NO: 965057 - RNA, 19 nt, Artificial Sequence
  Description of Artificial Sequence: Synthetic oligonucleotide
  Antisense strand to SEQ ID NO: 965056
aauuaugugccaagcacgg

SEQ ID NO: 965058 - RNA, 19 nt, Artificial Sequence
  Description of Artificial Sequence: Synthetic oligonucleotide
  Sense strand starting at position 3711 of SEQ ID NO: 913930
gaaugugaauuccaggaau

SEQ ID NO: 965059 - RNA, 19 nt, Artificial Sequence
  Description of Artificial Sequence: Synthetic oligonucleotide
  Antisense strand to SEQ ID NO: 965058
auuccuggaauucacauuc

SEQ ID NO: 965060 - RNA, 19 nt, Artificial Sequence
  Description of Artificial Sequence: Synthetic oligonucleotide
  Sense strand starting at position 3258 of SEQ ID NO: 913930
ggauucucuugccuugcua

SEQ ID NO: 965061 - RNA, 19 nt, Artificial Sequence
  Description of Artificial Sequence: Synthetic oligonucleotide
  Antisense strand to SEQ ID NO: 965060
uagcaaggcaagagaaucc

SEQ ID NO: 965062 - RNA, 19 nt, Artificial Sequence
  Description of Artificial Sequence: Synthetic oligonucleotide
  Sense strand starting at position 3740 of SEQ ID NO: 913930
gggucuugcucuuauauuu

SEQ ID NO: 965063 - RNA, 19 nt, Artificial Sequence
  Description of Artificial Sequence: Synthetic oligonucleotide
  Antisense strand to SEQ ID NO: 965062
aaauauaagagcaagaccc

SEQ ID NO: 965064 - RNA, 19 nt, Artificial Sequence
  Description of Artificial Sequence: Synthetic oligonucleotide
  Sense strand starting at position 3581 of SEQ ID NO: 913930
gugaucaaaugcuaaauua

SEQ ID NO: 965065 - RNA, 19 nt, Artificial Sequence
  Description of Artificial Sequence: Synthetic oligonucleotide
  Antisense strand to SEQ ID NO: 965064
uaauuuagcauuugaucac

SEQ ID NO: 965066 - RNA, 19 nt, Artificial Sequence
  Description of Artificial Sequence: Synthetic oligonucleotide
  Sense strand starting at position 3832 of SEQ ID NO: 913930
gcgaguuuccaagguuugu

SEQ ID NO: 965067 - RNA, 19 nt, Artificial Sequence
  Description of Artificial Sequence: Synthetic oligonucleotide
  Antisense strand to SEQ ID NO: 965066
acaaaccuuggaaacucgc

SEQ ID NO: 965068 - RNA, 19 nt, Artificial Sequence
  Description of Artificial Sequence: Synthetic oligonucleotide
  Sense strand starting at position 3605 of SEQ ID NO: 913930
gccuaaacauucgaauuga

SEQ ID NO: 965069 - RNA, 19 nt, Artificial Sequence
  Description of Artificial Sequence: Synthetic oligonucleotide
  Antisense strand to SEQ ID NO: 965068
ucaauucgaauguuuaggc

SEQ ID NO: 965070 - RNA, 19 nt, Artificial Sequence
  Description of Artificial Sequence: Synthetic oligonucleotide
  Sense strand starting at position 3412 of SEQ ID NO: 913930
gagaauaggugugaaugcu

SEQ ID NO: 965071 - RNA, 19 nt, Artificial Sequence
  Description of Artificial Sequence: Synthetic oligonucleotide
  Antisense strand to SEQ ID NO: 965070
agcauucacaccuauucuc

SEQ ID NO: 965072 - RNA, 19 nt, Artificial Sequence
  Description of Artificial Sequence: Synthetic oligonucleotide
  Sense strand starting at position 3841 of SEQ ID NO: 913930
caagguuugucagacagug

SEQ ID NO: 965073 - RNA, 19 nt, Artificial Sequence
  Description of Artificial Sequence: Synthetic oligonucleotide
  Antisense strand to SEQ ID NO: 965072
cacugucugacaaaccuug

SEQ ID NO: 965074 - RNA, 19 nt, Artificial Sequence
  Description of Artificial Sequence: Synthetic oligonucleotide
  Sense strand starting at position 3908 of SEQ ID NO: 913930
uaauuaucuuugggcagua

SEQ ID NO: 965075 - RNA, 19 nt, Artificial Sequence
  Description of Artificial Sequence: Synthetic oligonucleotide
  Antisense strand to SEQ ID NO: 965074
uacugcccaaagauaauua

SEQ ID NO: 965076 - RNA, 19 nt, Artificial Sequence
  Description of Artificial Sequence: Synthetic oligonucleotide
  Sense strand starting at position 2732 of SEQ ID NO: 913930
uuaccugucuccgaagcua

SEQ ID NO: 965077 - RNA, 19 nt, Artificial Sequence
  Description of Artificial Sequence: Synthetic oligonucleotide
  Antisense strand to SEQ ID NO: 965076
uagcuucggagacagguaa

SEQ ID NO: 965078 - RNA, 19 nt, Artificial Sequence
  Description of Artificial Sequence: Synthetic oligonucleotide
  Sense strand starting at position 3907 of SEQ ID NO: 913930
uuaauuaucuuugggcagu

SEQ ID NO: 965079 - RNA, 19 nt, Artificial Sequence
  Description of Artificial Sequence: Synthetic oligonucleotide
  Antisense strand to SEQ ID NO: 965078
acugcccaaagauaauuaa

SEQ ID NO: 965080 - RNA, 19 nt, Artificial Sequence
  Description of Artificial Sequence: Synthetic oligonucleotide
  Sense strand starting at position 3564 of SEQ ID NO: 913930
uugcuauauucugagcugu

SEQ ID NO: 965081 - RNA, 19 nt, Artificial Sequence
  Description of Artificial Sequence: Synthetic oligonucleotide
  Antisense strand to SEQ ID NO: 965080
acagcucagaauauagcaa

SEQ ID NO: 965082 - RNA, 19 nt, Artificial Sequence
  Description of Artificial Sequence: Synthetic oligonucleotide
  Sense strand starting at position 2570 of SEQ ID NO: 913930
uuagcaugcucggaaagcu

SEQ ID NO: 965083 - RNA, 19 nt, Artificial Sequence
  Description of Artificial Sequence: Synthetic oligonucleotide
  Antisense strand to SEQ ID NO: 965082
agcuuuccgagcaugcuaa

SEQ ID NO: 965084 - RNA, 19 nt, Artificial Sequence
  Description of Artificial Sequence: Synthetic oligonucleotide
  Sense strand starting at position 2926 of SEQ ID NO: 913930
ccagucuggugucgaacua

SEQ ID NO: 965085 - RNA, 19 nt, Artificial Sequence
  Description of Artificial Sequence: Synthetic oligonucleotide
  Antisense strand to SEQ ID NO: 965084
uaguucgacaccagacugg

SEQ ID NO: 965086 - RNA, 19 nt, Artificial Sequence
  Description of Artificial Sequence: Synthetic oligonucleotide
  Sense strand starting at position 2549 of SEQ ID NO: 913931
aauagaaaugacgguacua

SEQ ID NO: 965087 - RNA, 19 nt, Artificial Sequence
  Description of Artificial Sequence: Synthetic oligonucleotide
  Antisense strand to SEQ ID NO: 965086
uaguaccgucauuucuauu

SEQ ID NO: 965088 - RNA, 19 nt, Artificial Sequence
  Description of Artificial Sequence: Synthetic oligonucleotide
  Sense strand starting at position 2350 of SEQ ID NO: 913931
guaucucagcugucuuguu

SEQ ID NO: 965089 - RNA, 19 nt, Artificial Sequence
  Description of Artificial Sequence: Synthetic oligonucleotide
  Antisense strand to SEQ ID NO: 965088
aacaagacagcugagauac

SEQ ID NO: 965090 - RNA, 19 nt, Artificial Sequence
  Description of Artificial Sequence: Synthetic oligonucleotide
  Sense strand starting at position 2702 of SEQ ID NO: 913931
uugcguuugaucuuagucu

SEQ ID NO: 965091 - RNA, 19 nt, Artificial Sequence
  Description of Artificial Sequence: Synthetic oligonucleotide
  Antisense strand to SEQ ID NO: 965090
agacuaagaucaaacgcaa

SEQ ID NO: 965092 - RNA, 19 nt, Artificial Sequence
  Description of Artificial Sequence: Synthetic oligonucleotide
  Sense strand starting at position 3304 of SEQ ID NO: 913931
auguuauuaggccaaauga

SEQ ID NO: 965093 - RNA, 19 nt, Artificial Sequence
  Description of Artificial Sequence: Synthetic oligonucleotide
  Antisense strand to SEQ ID NO: 965092
ucauuuggccuaauaacau

SEQ ID NO: 965094 - RNA, 19 nt, Artificial Sequence
  Description of Artificial Sequence: Synthetic oligonucleotide
  Sense strand starting at position 3019 of SEQ ID NO: 913931
cuaaaucaaugguucugaa

SEQ ID NO: 965095 - RNA, 19 nt, Artificial Sequence
  Description of Artificial Sequence: Synthetic oligonucleotide
  Antisense strand to SEQ ID NO: 965094
uucagaaccauugauuuag

SEQ ID NO: 965096 - RNA, 19 nt, Artificial Sequence
  Description of Artificial Sequence: Synthetic oligonucleotide
  Sense strand starting at position 2935 of SEQ ID NO: 913931
ggaggugagugauuauaua

SEQ ID NO: 965097 - RNA, 19 nt, Artificial Sequence
  Description of Artificial Sequence: Synthetic oligonucleotide
  Antisense strand to SEQ ID NO: 965096
uauauaaucacucaccucc

SEQ ID NO: 965098 - RNA, 19 nt, Artificial Sequence
  Description of Artificial Sequence: Synthetic oligonucleotide
  Sense strand starting at position 828 of SEQ ID NO: 913931
acgcguaagauguuagugu

SEQ ID NO: 965099 - RNA, 19 nt, Artificial Sequence
  Description of Artificial Sequence: Synthetic oligonucleotide
  Antisense strand to SEQ ID NO: 965098
acacuaacaucuuacgcgu

SEQ ID NO: 965100 - RNA, 19 nt, Artificial Sequence
  Description of Artificial Sequence: Synthetic oligonucleotide
  Sense strand starting at position 875 of SEQ ID NO: 913931
ucgauuauuuaggagaaag

SEQ ID NO: 965101 - RNA, 19 nt, Artificial Sequence
  Description of Artificial Sequence: Synthetic oligonucleotide
  Antisense strand to SEQ ID NO: 965100
cuuucuccuaaauaaucga

SEQ ID NO: 965102 - RNA, 19 nt, Artificial Sequence
  Description of Artificial Sequence: Synthetic oligonucleotide
  Sense strand starting at position 2717 of SEQ ID NO: 913931
gucuaacauuugccuuagu

SEQ ID NO: 965103 - RNA, 19 nt, Artificial Sequence
  Description of Artificial Sequence: Synthetic oligonucleotide
  Antisense strand to SEQ ID NO: 965102
acuaaggcaaauguuagac

SEQ ID NO: 965104 - RNA, 19 nt, Artificial Sequence
  Description of Artificial Sequence: Synthetic oligonucleotide
  Sense strand starting at position 836 of SEQ ID NO: 913931
gauguuagugucuaaacau

SEQ ID NO: 965105 - RNA, 19 nt, Artificial Sequence
  Description of Artificial Sequence: Synthetic oligonucleotide
  Antisense strand to SEQ ID NO: 965104
auguuuagacacuaacauc

SEQ ID NO: 965106 - RNA, 19 nt, Artificial Sequence
  Description of Artificial Sequence: Synthetic oligonucleotide
  Sense strand starting at position 865 of SEQ ID NO: 913931
uguaacagagucgauuauu

SEQ ID NO: 965107 - RNA, 19 nt, Artificial Sequence
  Description of Artificial Sequence: Synthetic oligonucleotide
  Antisense strand to SEQ ID NO: 965106
aauaaucgacucuguuaca

SEQ ID NO: 965108 - RNA, 19 nt, Artificial Sequence
  Description of Artificial Sequence: Synthetic oligonucleotide
  Sense strand starting at position 523 of SEQ ID NO: 913931
ggaaauacguuucuaacca

SEQ ID NO: 965109 - RNA, 19 nt, Artificial Sequence
  Description of Artificial Sequence: Synthetic oligonucleotide
  Antisense strand to SEQ ID NO: 965108
ugguuagaaacguauuucc

SEQ ID NO: 965110 - RNA, 19 nt, Artificial Sequence
  Description of Artificial Sequence: Synthetic oligonucleotide
  Sense strand starting at position 1022 of SEQ ID NO: 913931
gcaaauucucggcagagag

SEQ ID NO: 965111 - RNA, 19 nt, Artificial Sequence
  Description of Artificial Sequence: Synthetic oligonucleotide
  Antisense strand to SEQ ID NO: 965110
cucucugccgagaauuugc

SEQ ID NO: 965112 - RNA, 19 nt, Artificial Sequence
  Description of Artificial Sequence: Synthetic oligonucleotide
  Sense strand starting at position 2943 of SEQ ID NO: 913931
gugauuauauagcuacaga

SEQ ID NO: 965113 - RNA, 19 nt, Artificial Sequence
  Description of Artificial Sequence: Synthetic oligonucleotide
  Antisense strand to SEQ ID NO: 965112
ucuguagcuauauaaucac

SEQ ID NO: 965114 - RNA, 19 nt, Artificial Sequence
  Description of Artificial Sequence: Synthetic oligonucleotide
  Sense strand starting at position 530 of SEQ ID NO: 913931
cguuucuaaccagaacuuu

SEQ ID NO: 965115 - RNA, 19 nt, Artificial Sequence
  Description of Artificial Sequence: Synthetic oligonucleotide
  Antisense strand to SEQ ID NO: 965114
aaaguucugguuagaaacg

SEQ ID NO: 965116 - RNA, 19 nt, Artificial Sequence
  Description of Artificial Sequence: Synthetic oligonucleotide
  Sense strand starting at position 2863 of SEQ ID NO: 913931
uaagaauugugguuucuaa

SEQ ID NO: 965117 - RNA, 19 nt, Artificial Sequence
  Description of Artificial Sequence: Synthetic oligonucleotide
  Antisense strand to SEQ ID NO: 965116
uuagaaaccacaauucuua

SEQ ID NO: 965118 - RNA, 19 nt, Artificial Sequence
  Description of Artificial Sequence: Synthetic oligonucleotide
  Sense strand starting at position 1050 of SEQ ID NO: 913931
gacagagauugagagaaga

SEQ ID NO: 965119 - RNA, 19 nt, Artificial Sequence
  Description of Artificial Sequence: Synthetic oligonucleotide
  Antisense strand to SEQ ID NO: 965118
ucuucucucaaucucuguc

SEQ ID NO: 965120 - RNA, 19 nt, Artificial Sequence
  Description of Artificial Sequence: Synthetic oligonucleotide
  Sense strand starting at position 2457 of SEQ ID NO: 913931
agggucagguuaucucaau

SEQ ID NO: 965121 - RNA, 19 nt, Artificial Sequence
  Description of Artificial Sequence: Synthetic oligonucleotide
  Antisense strand to SEQ ID NO: 965120
auugagauaaccugacccu

SEQ ID NO: 965122 - RNA, 19 nt, Artificial Sequence
  Description of Artificial Sequence: Synthetic oligonucleotide
  Sense strand starting at position 3978 of SEQ ID NO: 913931
acaguuuacucaguaauua

SEQ ID NO: 965123 - RNA, 19 nt, Artificial Sequence
  Description of Artificial Sequence: Synthetic oligonucleotide
  Antisense strand to SEQ ID NO: 965122
uaauuacugaguaaacugu

SEQ ID NO: 965124 - RNA, 19 nt, Artificial Sequence
  Description of Artificial Sequence: Synthetic oligonucleotide
  Sense strand starting at position 527 of SEQ ID NO: 913931
auacguuucuaaccagaac

SEQ ID NO: 965125 - RNA, 19 nt, Artificial Sequence
  Description of Artificial Sequence: Synthetic oligonucleotide
  Antisense strand to SEQ ID NO: 965124
guucugguuagaaacguau

SEQ ID NO: 965126 - RNA, 19 nt, Artificial Sequence
  Description of Artificial Sequence: Synthetic oligonucleotide
  Sense strand starting at position 3957 of SEQ ID NO: 913931
uagagcugacucugaaagu

SEQ ID NO: 965127 - RNA, 19 nt, Artificial Sequence
  Description of Artificial Sequence: Synthetic oligonucleotide
  Antisense strand to SEQ ID NO: 965126
acuuucagagucagcucua

SEQ ID NO: 965128 - RNA, 19 nt, Artificial Sequence
  Description of Artificial Sequence: Synthetic oligonucleotide
  Sense strand starting at position 3302 of SEQ ID NO: 913931
auauguuauuaggccaaau

SEQ ID NO: 965129 - RNA, 19 nt, Artificial Sequence
  Description of Artificial Sequence: Synthetic oligonucleotide
  Antisense strand to SEQ ID NO: 965128
auuuggccuaauaacauau

SEQ ID NO: 965130 - RNA, 19 nt, Artificial Sequence
  Description of Artificial Sequence: Synthetic oligonucleotide
  Sense strand starting at position 823 of SEQ ID NO: 913931
ccggaacgcguaagauguu

SEQ ID NO: 965131 - RNA, 19 nt, Artificial Sequence
  Description of Artificial Sequence: Synthetic oligonucleotide
  Antisense strand to SEQ ID NO: 965130
aacaucuuacgcguuccgg

SEQ ID NO: 965132 - RNA, 19 nt, Artificial Sequence
  Description of Artificial Sequence: Synthetic oligonucleotide
  Sense strand starting at position 3975 of SEQ ID NO: 913931
uugacaguuuacucaguaa

SEQ ID NO: 965133 - RNA, 19 nt, Artificial Sequence
  Description of Artificial Sequence: Synthetic oligonucleotide
  Antisense strand to SEQ ID NO: 965132
uuacugaguaaacugucaa

SEQ ID NO: 965134 - RNA, 19 nt, Artificial Sequence
  Description of Artificial Sequence: Synthetic oligonucleotide
  Sense strand starting at position 835 of SEQ ID NO: 913931
agauguuagugucuaaaca

SEQ ID NO: 965135 - RNA, 19 nt, Artificial Sequence
  Description of Artificial Sequence: Synthetic oligonucleotide
  Antisense strand to SEQ ID NO: 965134
uguuuagacacuaacaucu

SEQ ID NO: 965136 - RNA, 19 nt, Artificial Sequence
  Description of Artificial Sequence: Synthetic oligonucleotide
  Sense strand starting at position 348 of SEQ ID NO: 913931
uugaauauaucgucuuagg

SEQ ID NO: 965137 - RNA, 19 nt, Artificial Sequence
  Description of Artificial Sequence: Synthetic oligonucleotide
  Antisense strand to SEQ ID NO: 965136
ccuaagacgauauauucaa

SEQ ID NO: 965138 - RNA, 19 nt, Artificial Sequence
  Description of Artificial Sequence: Synthetic oligonucleotide
  Sense strand starting at position 3150 of SEQ ID NO: 913931
agacuacaugccugugaua

SEQ ID NO: 965139 - RNA, 19 nt, Artificial Sequence
  Description of Artificial Sequence: Synthetic oligonucleotide
  Antisense strand to SEQ ID NO: 965138
uaucacaggcauguagucu

SEQ ID NO: 965140 - RNA, 19 nt, Artificial Sequence
  Description of Artificial Sequence: Synthetic oligonucleotide
  Sense strand starting at position 674 of SEQ ID NO: 913931
accacugcucucggagaaa

SEQ ID NO: 965141 - RNA, 19 nt, Artificial Sequence
  Description of Artificial Sequence: Synthetic oligonucleotide
  Antisense strand to SEQ ID NO: 965140
uuucuccgagagcaguggu

SEQ ID NO: 965142 - RNA, 19 nt, Artificial Sequence
  Description of Artificial Sequence: Synthetic oligonucleotide
  Sense strand starting at position 3149 of SEQ ID NO: 913931
gagacuacaugccugugau

SEQ ID NO: 965143 - RNA, 19 nt, Artificial Sequence
  Description of Artificial Sequence: Synthetic oligonucleotide
  Antisense strand to SEQ ID NO: 965142
aucacaggcauguagucuc

SEQ ID NO: 965144 - RNA, 19 nt, Artificial Sequence
  Description of Artificial Sequence: Synthetic oligonucleotide
  Sense strand starting at position 986 of SEQ ID NO: 913931
uggaauuuguuggacugau

SEQ ID NO: 965145 - RNA, 19 nt, Artificial Sequence
  Description of Artificial Sequence: Synthetic oligonucleotide
  Antisense strand to SEQ ID NO: 965144
aucaguccaacaaauucca

SEQ ID NO: 965146 - RNA, 19 nt, Artificial Sequence
  Description of Artificial Sequence: Synthetic oligonucleotide
  Sense strand starting at position 864 of SEQ ID NO: 913931
auguaacagagucgauuau

SEQ ID NO: 965147 - RNA, 19 nt, Artificial Sequence
  Description of Artificial Sequence: Synthetic oligonucleotide
  Antisense strand to SEQ ID NO: 965146
auaaucgacucuguuacau

SEQ ID NO: 965148 - RNA, 19 nt, Artificial Sequence
  Description of Artificial Sequence: Synthetic oligonucleotide
  Sense strand starting at position 994 of SEQ ID NO: 913931
guuggacugauguggacuu

SEQ ID NO: 965149 - RNA, 19 nt, Artificial Sequence
  Description of Artificial Sequence: Synthetic oligonucleotide
  Antisense strand to SEQ ID NO: 965148
aaguccacaucaguccaac

SEQ ID NO: 965150 - RNA, 19 nt, Artificial Sequence
  Description of Artificial Sequence: Synthetic oligonucleotide
  Sense strand starting at position 2932 of SEQ ID NO: 913931
gcaggaggugagugauuau

SEQ ID NO: 965151 - RNA, 19 nt, Artificial Sequence
  Description of Artificial Sequence: Synthetic oligonucleotide
  Antisense strand to SEQ ID NO: 965150
auaaucacucaccuccugc

SEQ ID NO: 965152 - RNA, 19 nt, Artificial Sequence
  Description of Artificial Sequence: Synthetic oligonucleotide
  Sense strand starting at position 2458 of SEQ ID NO: 913931
gggucagguuaucucaauu

SEQ ID NO: 965153 - RNA, 19 nt, Artificial Sequence
  Description of Artificial Sequence: Synthetic oligonucleotide
  Antisense strand to SEQ ID NO: 965152
aauugagauaaccugaccc

SEQ ID NO: 965154 - RNA, 19 nt, Artificial Sequence
  Description of Artificial Sequence: Synthetic oligonucleotide
  Sense strand starting at position 2573 of SEQ ID NO: 913931
cuuguaagauucuugugag

SEQ ID NO: 965155 - RNA, 19 nt, Artificial Sequence
  Description of Artificial Sequence: Synthetic oligonucleotide
  Antisense strand to SEQ ID NO: 965154
cucacaagaaucuuacaag

SEQ ID NO: 965156 - RNA, 19 nt, Artificial Sequence
  Description of Artificial Sequence: Synthetic oligonucleotide
  Sense strand starting at position 830 of SEQ ID NO: 913931
gcguaagauguuagugucu

SEQ ID NO: 965157 - RNA, 19 nt, Artificial Sequence
  Description of Artificial Sequence: Synthetic oligonucleotide
  Antisense strand to SEQ ID NO: 965156
agacacuaacaucuuacgc

SEQ ID NO: 965158 - RNA, 19 nt, Artificial Sequence
  Description of Artificial Sequence: Synthetic oligonucleotide
  Sense strand starting at position 1230 of SEQ ID NO: 913931
ugaguucagccggaacuuu

SEQ ID NO: 965159 - RNA, 19 nt, Artificial Sequence
  Description of Artificial Sequence: Synthetic oligonucleotide
  Antisense strand to SEQ ID NO: 965158
aaaguuccggcugaacuca

SEQ ID NO: 965160 - RNA, 19 nt, Artificial Sequence
  Description of Artificial Sequence: Synthetic oligonucleotide
  Sense strand starting at position 2706 of SEQ ID NO: 913931
guuugaucuuagucuaaca

SEQ ID NO: 965161 - RNA, 19 nt, Artificial Sequence
  Description of Artificial Sequence: Synthetic oligonucleotide
  Antisense strand to SEQ ID NO: 965160
uguuagacuaagaucaaac

SEQ ID NO: 965162 - RNA, 19 nt, Artificial Sequence
  Description of Artificial Sequence: Synthetic oligonucleotide
  Sense strand starting at position 2498 of SEQ ID NO: 913931
guguaacacuaggcauuaa

SEQ ID NO: 965163 - RNA, 19 nt, Artificial Sequence
  Description of Artificial Sequence: Synthetic oligonucleotide
  Antisense strand to SEQ ID NO: 965162
uuaaugccuaguguuacac

SEQ ID NO: 965164 - RNA, 19 nt, Artificial Sequence
  Description of Artificial Sequence: Synthetic oligonucleotide
  Sense strand starting at position 3152 of SEQ ID NO: 913931
acuacaugccugugauaca

SEQ ID NO: 965165 - RNA, 19 nt, Artificial Sequence
  Description of Artificial Sequence: Synthetic oligonucleotide
  Antisense strand to SEQ ID NO: 965164
uguaucacaggcauguagu

SEQ ID NO: 965166 - RNA, 19 nt, Artificial Sequence
  Description of Artificial Sequence: Synthetic oligonucleotide
  Sense strand starting at position 191 of SEQ ID NO: 913932
gaaaccugccagggacaau

SEQ ID NO: 965167 - RNA, 19 nt, Artificial Sequence
  Description of Artificial Sequence: Synthetic oligonucleotide
  Antisense strand to SEQ ID NO: 965166
auugucccuggcagguuuc

SEQ ID NO: 965168 - RNA, 19 nt, Artificial Sequence
  Description of Artificial Sequence: Synthetic oligonucleotide
  Sense strand starting at position 1276 of SEQ ID NO: 913932
gccagacugggccaagaau

SEQ ID NO: 965169 - RNA, 19 nt, Artificial Sequence
  Description of Artificial Sequence: Synthetic oligonucleotide
  Antisense strand to SEQ ID NO: 965168
auucuuggcccagucuggc

SEQ ID NO: 965170 - RNA, 19 nt, Artificial Sequence
  Description of Artificial Sequence: Synthetic oligonucleotide
  Sense strand starting at position 3195 of SEQ ID NO: 913932
cucuuaagugccucgcgaa

SEQ ID NO: 965171 - RNA, 19 nt, Artificial Sequence
  Description of Artificial Sequence: Synthetic oligonucleotide
  Antisense strand to SEQ ID NO: 965170
uucgcgaggcacuuaagag

SEQ ID NO: 965172 - RNA, 19 nt, Artificial Sequence
  Description of Artificial Sequence: Synthetic oligonucleotide
  Sense strand starting at position 1012 of SEQ ID NO: 913932
agguuacucuacccagaag

SEQ ID NO: 965173 - RNA, 19 nt, Artificial Sequence
  Description of Artificial Sequence: Synthetic oligonucleotide
  Antisense strand to SEQ ID NO: 965172
cuucuggguagaguaaccu

SEQ ID NO: 965174 - RNA, 19 nt, Artificial Sequence
  Description of Artificial Sequence: Synthetic oligonucleotide
  Sense strand starting at position 3202 of SEQ ID NO: 913932
gugccucgcgaaguuauaa

SEQ ID NO: 965175 - RNA, 19 nt, Artificial Sequence
  Description of Artificial Sequence: Synthetic oligonucleotide
  Antisense strand to SEQ ID NO: 965174
uuauaacuucgcgaggcac

SEQ ID NO: 965176 - RNA, 19 nt, Artificial Sequence
  Description of Artificial Sequence: Synthetic oligonucleotide
  Sense strand starting at position 3672 of SEQ ID NO: 913932
ggaugcauuccaggauaau

SEQ ID NO: 965177 - RNA, 19 nt, Artificial Sequence
  Description of Artificial Sequence: Synthetic oligonucleotide
  Antisense strand to SEQ ID NO: 965176
auuauccuggaaugcaucc

SEQ ID NO: 965178 - RNA, 19 nt, Artificial Sequence
  Description of Artificial Sequence: Synthetic oligonucleotide
  Sense strand starting at position 2889 of SEQ ID NO: 913932
cugugcuuccucgcggaga

SEQ ID NO: 965179 - RNA, 19 nt, Artificial Sequence
  Description of Artificial Sequence: Synthetic oligonucleotide
  Antisense strand to SEQ ID NO: 965178
ucuccgcgaggaagcacag

SEQ ID NO: 965180 - RNA, 19 nt, Artificial Sequence
  Description of Artificial Sequence: Synthetic oligonucleotide
  Sense strand starting at position 3399 of SEQ ID NO: 913932
cucaaaguggcucacaauu

SEQ ID NO: 965181 - RNA, 19 nt, Artificial Sequence
  Description of Artificial Sequence: Synthetic oligonucleotide
  Antisense strand to SEQ ID NO: 965180
aauugugagccacuuugag

SEQ ID NO: 965182 - RNA, 19 nt, Artificial Sequence
  Description of Artificial Sequence: Synthetic oligonucleotide
  Sense strand starting at position 1078 of SEQ ID NO: 913932
agaagauucccugggccau

SEQ ID NO: 965183 - RNA, 19 nt, Artificial Sequence
  Description of Artificial Sequence: Synthetic oligonucleotide
  Antisense strand to SEQ ID NO: 965182
auggcccagggaaucuucu

SEQ ID NO: 965184 - RNA, 19 nt, Artificial Sequence
  Description of Artificial Sequence: Synthetic oligonucleotide
  Sense strand starting at position 3683 of SEQ ID NO: 913932
aggauaauguccucuucua

SEQ ID NO: 965185 - RNA, 19 nt, Artificial Sequence
  Description of Artificial Sequence: Synthetic oligonucleotide
  Antisense strand to SEQ ID NO: 965184
uagaagaggacauuauccu

SEQ ID NO: 965186 - RNA, 19 nt, Artificial Sequence
  Description of Artificial Sequence: Synthetic oligonucleotide
  Sense strand starting at position 1079 of SEQ ID NO: 913932
gaagauucccugggccaug

SEQ ID NO: 965187 - RNA, 19 nt, Artificial Sequence
  Description of Artificial Sequence: Synthetic oligonucleotide
  Antisense strand to SEQ ID NO: 965186
cauggcccagggaaucuuc

SEQ ID NO: 965188 - RNA, 19 nt, Artificial Sequence
  Description of Artificial Sequence: Synthetic oligonucleotide
  Sense strand starting at position 3150 of SEQ ID NO: 913932
agaaaucacucauuguggu

SEQ ID NO: 965189 - RNA, 19 nt, Artificial Sequence
  Description of Artificial Sequence: Synthetic oligonucleotide
  Antisense strand to SEQ ID NO: 965188
accacaaugagugauuucu

SEQ ID NO: 965190 - RNA, 19 nt, Artificial Sequence
  Description of Artificial Sequence: Synthetic oligonucleotide
  Sense strand starting at position 3503 of SEQ ID NO: 913932
agagguauuugagaagcca

SEQ ID NO: 965191 - RNA, 19 nt, Artificial Sequence
  Description of Artificial Sequence: Synthetic oligonucleotide
  Antisense strand to SEQ ID NO: 965190
uggcuucucaaauaccucu

SEQ ID NO: 965192 - RNA, 19 nt, Artificial Sequence
  Description of Artificial Sequence: Synthetic oligonucleotide
  Sense strand starting at position 1235 of SEQ ID NO: 913932
aacguacucuccuuggaga

SEQ ID NO: 965193 - RNA, 19 nt, Artificial Sequence
  Description of Artificial Sequence: Synthetic oligonucleotide
  Antisense strand to SEQ ID NO: 965192
ucuccaaggagaguacguu

SEQ ID NO: 965194 - RNA, 19 nt, Artificial Sequence
  Description of Artificial Sequence: Synthetic oligonucleotide
  Sense strand starting at position 3307 of SEQ ID NO: 913932
ccacccaaggugugugaaa

SEQ ID NO: 965195 - RNA, 19 nt, Artificial Sequence
  Description of Artificial Sequence: Synthetic oligonucleotide
  Antisense strand to SEQ ID NO: 965194
uuucacacaccuugggugg

SEQ ID NO: 965196 - RNA, 19 nt, Artificial Sequence
  Description of Artificial Sequence: Synthetic oligonucleotide
  Sense strand starting at position 3531 of SEQ ID NO: 913932
gcaaguaauguccaggcau

SEQ ID NO: 965197 - RNA, 19 nt, Artificial Sequence
  Description of Artificial Sequence: Synthetic oligonucleotide
  Antisense strand to SEQ ID NO: 965196
augccuggacauuacuugc

SEQ ID NO: 965198 - RNA, 19 nt, Artificial Sequence
  Description of Artificial Sequence: Synthetic oligonucleotide
  Sense strand starting at position 3272 of SEQ ID NO: 913932
gaagacuuguccucagcuc

SEQ ID NO: 965199 - RNA, 19 nt, Artificial Sequence
  Description of Artificial Sequence: Synthetic oligonucleotide
  Antisense strand to SEQ ID NO: 965198
gagcugaggacaagucuuc

SEQ ID NO: 965200 - RNA, 19 nt, Artificial Sequence
  Description of Artificial Sequence: Synthetic oligonucleotide
  Sense strand starting at position 3443 of SEQ ID NO: 913932
ugacguaaguucucagauu

SEQ ID NO: 965201 - RNA, 19 nt, Artificial Sequence
  Description of Artificial Sequence: Synthetic oligonucleotide
  Antisense strand to SEQ ID NO: 965200
aaucugagaacuuacguca

SEQ ID NO: 965202 - RNA, 19 nt, Artificial Sequence
  Description of Artificial Sequence: Synthetic oligonucleotide
  Sense strand starting at position 3019 of SEQ ID NO: 913932
gcuggauuucggcgagcug

SEQ ID NO: 965203 - RNA, 19 nt, Artificial Sequence
  Description of Artificial Sequence: Synthetic oligonucleotide
  Antisense strand to SEQ ID NO: 965202
cagcucgccgaaauccagc

SEQ ID NO: 965204 - RNA, 19 nt, Artificial Sequence
  Description of Artificial Sequence: Synthetic oligonucleotide
  Sense strand starting at position 2731 of SEQ ID NO: 913932
ggcagugacccgcaccaua

SEQ ID NO: 965205 - RNA, 19 nt, Artificial Sequence
  Description of Artificial Sequence: Synthetic oligonucleotide
  Antisense strand to SEQ ID NO: 965204
uauggugcgggucacugcc

SEQ ID NO: 965206 - RNA, 19 nt, Artificial Sequence
  Description of Artificial Sequence: Synthetic oligonucleotide
  Sense strand starting at position 3212 of SEQ ID NO: 913932
aaguuauaaggucgguacu

SEQ ID NO: 965207 - RNA, 19 nt, Artificial Sequence
  Description of Artificial Sequence: Synthetic oligonucleotide
  Antisense strand to SEQ ID NO: 965206
aguaccgaccuuauaacuu

SEQ ID NO: 965208 - RNA, 19 nt, Artificial Sequence
  Description of Artificial Sequence: Synthetic oligonucleotide
  Sense strand starting at position 865 of SEQ ID NO: 913932
ggaacuuuguguguuuaug

SEQ ID NO: 965209 - RNA, 19 nt, Artificial Sequence
  Description of Artificial Sequence: Synthetic oligonucleotide
  Antisense strand to SEQ ID NO: 965208
cauaaacacacaaaguucc

SEQ ID NO: 965210 - RNA, 19 nt, Artificial Sequence
  Description of Artificial Sequence: Synthetic oligonucleotide
  Sense strand starting at position 864 of SEQ ID NO: 913932
gggaacuuuguguguuuau

SEQ ID NO: 965211 - RNA, 19 nt, Artificial Sequence
  Description of Artificial Sequence: Synthetic oligonucleotide
  Antisense strand to SEQ ID NO: 965210
auaaacacacaaaguuccc

SEQ ID NO: 965212 - RNA, 19 nt, Artificial Sequence
  Description of Artificial Sequence: Synthetic oligonucleotide
  Sense strand starting at position 3213 of SEQ ID NO: 913932
aguuauaaggucgguacuu

SEQ ID NO: 965213 - RNA, 19 nt, Artificial Sequence
  Description of Artificial Sequence: Synthetic oligonucleotide
  Antisense strand to SEQ ID NO: 965212
aaguaccgaccuuauaacu

SEQ ID NO: 965214 - RNA, 19 nt, Artificial Sequence
  Description of Artificial Sequence: Synthetic oligonucleotide
  Sense strand starting at position 3422 of SEQ ID NO: 913932
ggcuguguggucugggaaa

SEQ ID NO: 965215 - RNA, 19 nt, Artificial Sequence
  Description of Artificial Sequence: Synthetic oligonucleotide
  Antisense strand to SEQ ID NO: 965214
uuucccagaccacacagcc

SEQ ID NO: 965216 - RNA, 19 nt, Artificial Sequence
  Description of Artificial Sequence: Synthetic oligonucleotide
  Sense strand starting at position 1654 of SEQ ID NO: 913932
ggaguuggugucuggagca

SEQ ID NO: 965217 - RNA, 19 nt, Artificial Sequence
  Description of Artificial Sequence: Synthetic oligonucleotide
  Antisense strand to SEQ ID NO: 965216
ugcuccagacaccaacucc

SEQ ID NO: 965218 - RNA, 19 nt, Artificial Sequence
  Description of Artificial Sequence: Synthetic oligonucleotide
  Sense strand starting at position 2892 of SEQ ID NO: 913932
ugcuuccucgcggagagau

SEQ ID NO: 965219 - RNA, 19 nt, Artificial Sequence
  Description of Artificial Sequence: Synthetic oligonucleotide
  Antisense strand to SEQ ID NO: 965218
aucucuccgcgaggaagca

SEQ ID NO: 965220 - RNA, 19 nt, Artificial Sequence
  Description of Artificial Sequence: Synthetic oligonucleotide
  Sense strand starting at position 3214 of SEQ ID NO: 913932
guuauaaggucgguacuuu

SEQ ID NO: 965221 - RNA, 19 nt, Artificial Sequence
  Description of Artificial Sequence: Synthetic oligonucleotide
  Antisense strand to SEQ ID NO: 965220
aaaguaccgaccuuauaac

SEQ ID NO: 965222 - RNA, 19 nt, Artificial Sequence
  Description of Artificial Sequence: Synthetic oligonucleotide
  Sense strand starting at position 3670 of SEQ ID NO: 913932
gaggaugcauuccaggaua

SEQ ID NO: 965223 - RNA, 19 nt, Artificial Sequence
  Description of Artificial Sequence: Synthetic oligonucleotide
  Antisense strand to SEQ ID NO: 965222
uauccuggaaugcauccuc

SEQ ID NO: 965224 - RNA, 19 nt, Artificial Sequence
  Description of Artificial Sequence: Synthetic oligonucleotide
  Sense strand starting at position 51 of SEQ ID NO: 913932
gcaggcaaguguguucaca

SEQ ID NO: 965225 - RNA, 19 nt, Artificial Sequence
  Description of Artificial Sequence: Synthetic oligonucleotide
  Antisense strand to SEQ ID NO: 965224
ugugaacacacuugccugc

SEQ ID NO: 965226 - RNA, 19 nt, Artificial Sequence
  Description of Artificial Sequence: Synthetic oligonucleotide
  Sense strand starting at position 971 of SEQ ID NO: 913932
ugcccuuccuggcauuuaa

SEQ ID NO: 965227 - RNA, 19 nt, Artificial Sequence
  Description of Artificial Sequence: Synthetic oligonucleotide
  Antisense strand to SEQ ID NO: 965226
uuaaaugccaggaagggca

SEQ ID NO: 965228 - RNA, 19 nt, Artificial Sequence
  Description of Artificial Sequence: Synthetic oligonucleotide
  Sense strand starting at position 1560 of SEQ ID NO: 913932
gcaacugcucccugugagu

SEQ ID NO: 965229 - RNA, 19 nt, Artificial Sequence
  Description of Artificial Sequence: Synthetic oligonucleotide
  Antisense strand to SEQ ID NO: 965228
acucacagggagcaguugc

SEQ ID NO: 965230 - RNA, 19 nt, Artificial Sequence
  Description of Artificial Sequence: Synthetic oligonucleotide
  Sense strand starting at position 2891 of SEQ ID NO: 913932
gugcuuccucgcggagaga

SEQ ID NO: 965231 - RNA, 19 nt, Artificial Sequence
  Description of Artificial Sequence: Synthetic oligonucleotide
  Antisense strand to SEQ ID NO: 965230
ucucuccgcgaggaagcac

SEQ ID NO: 965232 - RNA, 19 nt, Artificial Sequence
  Description of Artificial Sequence: Synthetic oligonucleotide
  Sense strand starting at position 3980 of SEQ ID NO: 913932
cucucuagcucccagagaa

SEQ ID NO: 965233 - RNA, 19 nt, Artificial Sequence
  Description of Artificial Sequence: Synthetic oligonucleotide
  Antisense strand to SEQ ID NO: 965232
uucucugggagcuagagag

SEQ ID NO: 965234 - RNA, 19 nt, Artificial Sequence
  Description of Artificial Sequence: Synthetic oligonucleotide
  Sense strand starting at position 873 of SEQ ID NO: 913932
guguguuuauguccugucu

SEQ ID NO: 965235 - RNA, 19 nt, Artificial Sequence
  Description of Artificial Sequence: Synthetic oligonucleotide
  Antisense strand to SEQ ID NO: 965234
agacaggacauaaacacac

SEQ ID NO: 965236 - RNA, 19 nt, Artificial Sequence
  Description of Artificial Sequence: Synthetic oligonucleotide
  Sense strand starting at position 3444 of SEQ ID NO: 913932
gacguaaguucucagauuc

SEQ ID NO: 965237 - RNA, 19 nt, Artificial Sequence
  Description of Artificial Sequence: Synthetic oligonucleotide
  Antisense strand to SEQ ID NO: 965236
gaaucugagaacuuacguc

SEQ ID NO: 965238 - RNA, 19 nt, Artificial Sequence
  Description of Artificial Sequence: Synthetic oligonucleotide
  Sense strand starting at position 2300 of SEQ ID NO: 913932
ugcggcuccuucuggaaga

SEQ ID NO: 965239 - RNA, 19 nt, Artificial Sequence
  Description of Artificial Sequence: Synthetic oligonucleotide
  Antisense strand to SEQ ID NO: 965238
ucuuccagaaggagccgca

SEQ ID NO: 965240 - RNA, 19 nt, Artificial Sequence
  Description of Artificial Sequence: Synthetic oligonucleotide
  Sense strand starting at position 2917 of SEQ ID NO: 913932
uguugugguuggugaguca

SEQ ID NO: 965241 - RNA, 19 nt, Artificial Sequence
  Description of Artificial Sequence: Synthetic oligonucleotide
  Antisense strand to SEQ ID NO: 965240
ugacucaccaaccacaaca

SEQ ID NO: 965242 - RNA, 19 nt, Artificial Sequence
  Description of Artificial Sequence: Synthetic oligonucleotide
  Sense strand starting at position 875 of SEQ ID NO: 913932
guguuuauguccugucuug

SEQ ID NO: 965243 - RNA, 19 nt, Artificial Sequence
  Description of Artificial Sequence: Synthetic oligonucleotide
  Antisense strand to SEQ ID NO: 965242
caagacaggacauaaacac

SEQ ID NO: 965244 - RNA, 19 nt, Artificial Sequence
  Description of Artificial Sequence: Synthetic oligonucleotide
  Sense strand starting at position 3198 of SEQ ID NO: 913932
uuaagugccucgcgaaguu

SEQ ID NO: 965245 - RNA, 19 nt, Artificial Sequence
  Description of Artificial Sequence: Synthetic oligonucleotide
  Antisense strand to SEQ ID NO: 965244
aacuucgcgaggcacuuaa

SEQ ID NO: 965246 - RNA, 19 nt, Artificial Sequence
  Description of Artificial Sequence: Synthetic oligonucleotide
  Sense strand starting at position 3766 of SEQ ID NO: 913933
ugaaauuucuuugcuggca

SEQ ID NO: 965247 - RNA, 19 nt, Artificial Sequence
  Description of Artificial Sequence: Synthetic oligonucleotide
  Antisense strand to SEQ ID NO: 965246
ugccagcaaagaaauuuca

SEQ ID NO: 965248 - RNA, 19 nt, Artificial Sequence
  Description of Artificial Sequence: Synthetic oligonucleotide
  Sense strand starting at position 1999 of SEQ ID NO: 913933
gcuuucuccgguguacauu

SEQ ID NO: 965249 - RNA, 19 nt, Artificial Sequence
  Description of Artificial Sequence: Synthetic oligonucleotide
  Antisense strand to SEQ ID NO: 965248
aauguacaccggagaaagc

SEQ ID NO: 965250 - RNA, 19 nt, Artificial Sequence
  Description of Artificial Sequence: Synthetic oligonucleotide
  Sense strand starting at position 139 of SEQ ID NO: 913933
auaguaaguagauagucua

SEQ ID NO: 965251 - RNA, 19 nt, Artificial Sequence
  Description of Artificial Sequence: Synthetic oligonucleotide
  Antisense strand to SEQ ID NO: 965250
uagacuaucuacuuacuau

SEQ ID NO: 965252 - RNA, 19 nt, Artificial Sequence
  Description of Artificial Sequence: Synthetic oligonucleotide
  Sense strand starting at position 978 of SEQ ID NO: 913933
aacaaucguggucaugaaa

SEQ ID NO: 965253 - RNA, 19 nt, Artificial Sequence
  Description of Artificial Sequence: Synthetic oligonucleotide
  Antisense strand to SEQ ID NO: 965252
uuucaugaccacgauuguu

SEQ ID NO: 965254 - RNA, 19 nt, Artificial Sequence
  Description of Artificial Sequence: Synthetic oligonucleotide
  Sense strand starting at position 3449 of SEQ ID NO: 913933
ggcggguugggcuuuguau

SEQ ID NO: 965255 - RNA, 19 nt, Artificial Sequence
  Description of Artificial Sequence: Synthetic oligonucleotide
  Antisense strand to SEQ ID NO: 965254
auacaaagcccaacccgcc

SEQ ID NO: 965256 - RNA, 19 nt, Artificial Sequence
  Description of Artificial Sequence: Synthetic oligonucleotide
  Sense strand starting at position 72 of SEQ ID NO: 913933
ugguaacuugguuaagauc

SEQ ID NO: 965257 - RNA, 19 nt, Artificial Sequence
  Description of Artificial Sequence: Synthetic oligonucleotide
  Antisense strand to SEQ ID NO: 965256
gaucuuaaccaaguuacca

SEQ ID NO: 965258 - RNA, 19 nt, Artificial Sequence
  Description of Artificial Sequence: Synthetic oligonucleotide
  Sense strand starting at position 134 of SEQ ID NO: 913933
accugauaguaaguagaua

SEQ ID NO: 965259 - RNA, 19 nt, Artificial Sequence
  Description of Artificial Sequence: Synthetic oligonucleotide
  Antisense strand to SEQ ID NO: 965258
uaucuacuuacuaucaggu

SEQ ID NO: 965260 - RNA, 19 nt, Artificial Sequence
  Description of Artificial Sequence: Synthetic oligonucleotide
  Sense strand starting at position 2419 of SEQ ID NO: 913933
cagagcguucgcuuauuau

SEQ ID NO: 965261 - RNA, 19 nt, Artificial Sequence
  Description of Artificial Sequence: Synthetic oligonucleotide
  Antisense strand to SEQ ID NO: 965260
auaauaagcgaacgcucug

SEQ ID NO: 965262 - RNA, 19 nt, Artificial Sequence
  Description of Artificial Sequence: Synthetic oligonucleotide
  Sense strand starting at position 271 of SEQ ID NO: 913933
uagauuguaggauggugaa

SEQ ID NO: 965263 - RNA, 19 nt, Artificial Sequence
  Description of Artificial Sequence: Synthetic oligonucleotide
  Antisense strand to SEQ ID NO: 965262
uucaccauccuacaaucua

SEQ ID NO: 965264 - RNA, 19 nt, Artificial Sequence
  Description of Artificial Sequence: Synthetic oligonucleotide
  Sense strand starting at position 772 of SEQ ID NO: 913933
aagauaugugaaugucaau

SEQ ID NO: 965265 - RNA, 19 nt, Artificial Sequence
  Description of Artificial Sequence: Synthetic oligonucleotide
  Antisense strand to SEQ ID NO: 965264
auugacauucacauaucuu

SEQ ID NO: 965266 - RNA, 19 nt, Artificial Sequence
  Description of Artificial Sequence: Synthetic oligonucleotide
  Sense strand starting at position 661 of SEQ ID NO: 913933
auaagcuuagaguauguaa

SEQ ID NO: 965267 - RNA, 19 nt, Artificial Sequence
  Description of Artificial Sequence: Synthetic oligonucleotide
  Antisense strand to SEQ ID NO: 965266
uuacauacucuaagcuuau

SEQ ID NO: 965268 - RNA, 19 nt, Artificial Sequence
  Description of Artificial Sequence: Synthetic oligonucleotide
  Sense strand starting at position 858 of SEQ ID NO: 913933
augugacuccuaggaacau

SEQ ID NO: 965269 - RNA, 19 nt, Artificial Sequence
  Description of Artificial Sequence: Synthetic oligonucleotide
  Antisense strand to SEQ ID NO: 965268
auguuccuaggagucacau

SEQ ID NO: 965270 - RNA, 19 nt, Artificial Sequence
  Description of Artificial Sequence: Synthetic oligonucleotide
  Sense strand starting at position 106 of SEQ ID NO: 913933
agcagagguggguaaagua

SEQ ID NO: 965271 - RNA, 19 nt, Artificial Sequence
  Description of Artificial Sequence: Synthetic oligonucleotide
  Antisense strand to SEQ ID NO: 965270
uacuuuacccaccucugcu

SEQ ID NO: 965272 - RNA, 19 nt, Artificial Sequence
  Description of Artificial Sequence: Synthetic oligonucleotide
  Sense strand starting at position 1997 of SEQ ID NO: 913933
cggcuuucuccgguguaca

SEQ ID NO: 965273 - RNA, 19 nt, Artificial Sequence
  Description of Artificial Sequence: Synthetic oligonucleotide
  Antisense strand to SEQ ID NO: 965272
uguacaccggagaaagccg

SEQ ID NO: 965274 - RNA, 19 nt, Artificial Sequence
  Description of Artificial Sequence: Synthetic oligonucleotide
  Sense strand starting at position 778 of SEQ ID NO: 913933
ugugaaugucaauaggcaa

SEQ ID NO: 965275 - RNA, 19 nt, Artificial Sequence
  Description of Artificial Sequence: Synthetic oligonucleotide
  Antisense strand to SEQ ID NO: 965274
uugccuauugacauucaca

SEQ ID NO: 965276 - RNA, 19 nt, Artificial Sequence
  Description of Artificial Sequence: Synthetic oligonucleotide
  Sense strand starting at position 2415 of SEQ ID NO: 913933
cggacagagcguucgcuua

SEQ ID NO: 965277 - RNA, 19 nt, Artificial Sequence
  Description of Artificial Sequence: Synthetic oligonucleotide
  Antisense strand to SEQ ID NO: 965276
uaagcgaacgcucuguccg

SEQ ID NO: 965278 - RNA, 19 nt, Artificial Sequence
  Description of Artificial Sequence: Synthetic oligonucleotide
  Sense strand starting at position 672 of SEQ ID NO: 913933
guauguaaauacucacaga

SEQ ID NO: 965279 - RNA, 19 nt, Artificial Sequence
  Description of Artificial Sequence: Synthetic oligonucleotide
  Antisense strand to SEQ ID NO: 965278
ucugugaguauuuacauac

SEQ ID NO: 965280 - RNA, 19 nt, Artificial Sequence
  Description of Artificial Sequence: Synthetic oligonucleotide
  Sense strand starting at position 1742 of SEQ ID NO: 913933
cccuauaucgaacagcaua

SEQ ID NO: 965281 - RNA, 19 nt, Artificial Sequence
  Description of Artificial Sequence: Synthetic oligonucleotide
  Antisense strand to SEQ ID NO: 965280
uaugcuguucgauauaggg

SEQ ID NO: 965282 - RNA, 19 nt, Artificial Sequence
  Description of Artificial Sequence: Synthetic oligonucleotide
  Sense strand starting at position 1774 of SEQ ID NO: 913933
ugcagucauuuauuagcau

SEQ ID NO: 965283 - RNA, 19 nt, Artificial Sequence
  Description of Artificial Sequence: Synthetic oligonucleotide
  Antisense strand to SEQ ID NO: 965282
augcuaauaaaugacugca

SEQ ID NO: 965284 - RNA, 19 nt, Artificial Sequence
  Description of Artificial Sequence: Synthetic oligonucleotide
  Sense strand starting at position 1207 of SEQ ID NO: 913933
guguuauauccucaauuaa

SEQ ID NO: 965285 - RNA, 19 nt, Artificial Sequence
  Description of Artificial Sequence: Synthetic oligonucleotide
  Antisense strand to SEQ ID NO: 965284
uuaauugaggauauaacac

SEQ ID NO: 965286 - RNA, 19 nt, Artificial Sequence
  Description of Artificial Sequence: Synthetic oligonucleotide
  Sense strand starting at position 536 of SEQ ID NO: 913933
ggaaauaauuaugugucua

SEQ ID NO: 965287 - RNA, 19 nt, Artificial Sequence
  Description of Artificial Sequence: Synthetic oligonucleotide
  Antisense strand to SEQ ID NO: 965286
uagacacauaauuauuucc

SEQ ID NO: 965288 - RNA, 19 nt, Artificial Sequence
  Description of Artificial Sequence: Synthetic oligonucleotide
  Sense strand starting at position 142 of SEQ ID NO: 913933
guaaguagauagucuaaga

SEQ ID NO: 965289 - RNA, 19 nt, Artificial Sequence
  Description of Artificial Sequence: Synthetic oligonucleotide
  Antisense strand to SEQ ID NO: 965288
ucuuagacuaucuacuuac

SEQ ID NO: 965290 - RNA, 19 nt, Artificial Sequence
  Description of Artificial Sequence: Synthetic oligonucleotide
  Sense strand starting at position 640 of SEQ ID NO: 913933
gucagucaucagcaaauag

SEQ ID NO: 965291 - RNA, 19 nt, Artificial Sequence
  Description of Artificial Sequence: Synthetic oligonucleotide
  Antisense strand to SEQ ID NO: 965290
cuauuugcugaugacugac

SEQ ID NO: 965292 - RNA, 19 nt, Artificial Sequence
  Description of Artificial Sequence: Synthetic oligonucleotide
  Sense strand starting at position 981 of SEQ ID NO: 913933
aaucguggucaugaaacuu

SEQ ID NO: 965293 - RNA, 19 nt, Artificial Sequence
  Description of Artificial Sequence: Synthetic oligonucleotide
  Antisense strand to SEQ ID NO: 965292
aaguuucaugaccacgauu

SEQ ID NO: 965294 - RNA, 19 nt, Artificial Sequence
  Description of Artificial Sequence: Synthetic oligonucleotide
  Sense strand starting at position 1121 of SEQ ID NO: 913933
caaguuaaggcucagguua

SEQ ID NO: 965295 - RNA, 19 nt, Artificial Sequence
  Description of Artificial Sequence: Synthetic oligonucleotide
  Antisense strand to SEQ ID NO: 965294
uaaccugagccuuaacuug

SEQ ID NO: 965296 - RNA, 19 nt, Artificial Sequence
  Description of Artificial Sequence: Synthetic oligonucleotide
  Sense strand starting at position 2143 of SEQ ID NO: 913933
cucauuggccgugaagaaa

SEQ ID NO: 965297 - RNA, 19 nt, Artificial Sequence
  Description of Artificial Sequence: Synthetic oligonucleotide
  Antisense strand to SEQ ID NO: 965296
uuucuucacggccaaugag

SEQ ID NO: 965298 - RNA, 19 nt, Artificial Sequence
  Description of Artificial Sequence: Synthetic oligonucleotide
  Sense strand starting at position 1158 of SEQ ID NO: 913933
gauauuccuagagggugua

SEQ ID NO: 965299 - RNA, 19 nt, Artificial Sequence
  Description of Artificial Sequence: Synthetic oligonucleotide
  Antisense strand to SEQ ID NO: 965298
uacacccucuaggaauauc

SEQ ID NO: 965300 - RNA, 19 nt, Artificial Sequence
  Description of Artificial Sequence: Synthetic oligonucleotide
  Sense strand starting at position 1292 of SEQ ID NO: 913933
acaaucugucaauguagau

SEQ ID NO: 965301 - RNA, 19 nt, Artificial Sequence
  Description of Artificial Sequence: Synthetic oligonucleotide
  Antisense strand to SEQ ID NO: 965300
aucuacauugacagauugu

SEQ ID NO: 965302 - RNA, 19 nt, Artificial Sequence
  Description of Artificial Sequence: Synthetic oligonucleotide
  Sense strand starting at position 3677 of SEQ ID NO: 913933
uugguuaagugaccaaacu

SEQ ID NO: 965303 - RNA, 19 nt, Artificial Sequence
  Description of Artificial Sequence: Synthetic oligonucleotide
  Antisense strand to SEQ ID NO: 965302
aguuuggucacuuaaccaa

SEQ ID NO: 965304 - RNA, 19 nt, Artificial Sequence
  Description of Artificial Sequence: Synthetic oligonucleotide
  Sense strand starting at position 469 of SEQ ID NO: 913933
guuaacacuggcuaucuua

SEQ ID NO: 965305 - RNA, 19 nt, Artificial Sequence
  Description of Artificial Sequence: Synthetic oligonucleotide
  Antisense strand to SEQ ID NO: 965304
uaagauagccaguguuaac

SEQ ID NO: 965306 - RNA, 19 nt, Artificial Sequence
  Description of Artificial Sequence: Synthetic oligonucleotide
  Sense strand starting at position 1968 of SEQ ID NO: 913933
caagcuuuagauugugaaa

SEQ ID NO: 965307 - RNA, 19 nt, Artificial Sequence
  Description of Artificial Sequence: Synthetic oligonucleotide
  Antisense strand to SEQ ID NO: 965306
uuucacaaucuaaagcuug

SEQ ID NO: 965308 - RNA, 19 nt, Artificial Sequence
  Description of Artificial Sequence: Synthetic oligonucleotide
  Sense strand starting at position 2079 of SEQ ID NO: 913933
cucauugguccacauaguu

SEQ ID NO: 965309 - RNA, 19 nt, Artificial Sequence
  Description of Artificial Sequence: Synthetic oligonucleotide
  Antisense strand to SEQ ID NO: 965308
aacuauguggaccaaugag

SEQ ID NO: 965310 - RNA, 19 nt, Artificial Sequence
  Description of Artificial Sequence: Synthetic oligonucleotide
  Sense strand starting at position 71 of SEQ ID NO: 913933
uugguaacuugguuaagau

SEQ ID NO: 965311 - RNA, 19 nt, Artificial Sequence
  Description of Artificial Sequence: Synthetic oligonucleotide
  Antisense strand to SEQ ID NO: 965310
aucuuaaccaaguuaccaa

SEQ ID NO: 965312 - RNA, 19 nt, Artificial Sequence
  Description of Artificial Sequence: Synthetic oligonucleotide
  Sense strand starting at position 62 of SEQ ID NO: 913933
agaugugacuugguaacuu

SEQ ID NO: 965313 - RNA, 19 nt, Artificial Sequence
  Description of Artificial Sequence: Synthetic oligonucleotide
  Antisense strand to SEQ ID NO: 965312
aaguuaccaagucacaucu

SEQ ID NO: 965314 - RNA, 19 nt, Artificial Sequence
  Description of Artificial Sequence: Synthetic oligonucleotide
  Sense strand starting at position 70 of SEQ ID NO: 913933
cuugguaacuugguuaaga

SEQ ID NO: 965315 - RNA, 19 nt, Artificial Sequence
  Description of Artificial Sequence: Synthetic oligonucleotide
  Antisense strand to SEQ ID NO: 965314
ucuuaaccaaguuaccaag

SEQ ID NO: 965316 - RNA, 19 nt, Artificial Sequence
  Description of Artificial Sequence: Synthetic oligonucleotide
  Sense strand starting at position 2555 of SEQ ID NO: 913933
gaaucagucccgggaaccu

SEQ ID NO: 965317 - RNA, 19 nt, Artificial Sequence
  Description of Artificial Sequence: Synthetic oligonucleotide
  Antisense strand to SEQ ID NO: 965316
agguucccgggacugauuc

SEQ ID NO: 965318 - RNA, 19 nt, Artificial Sequence
  Description of Artificial Sequence: Synthetic oligonucleotide
  Sense strand starting at position 1287 of SEQ ID NO: 913933
cuaguacaaucugucaaug

SEQ ID NO: 965319 - RNA, 19 nt, Artificial Sequence
  Description of Artificial Sequence: Synthetic oligonucleotide
  Antisense strand to SEQ ID NO: 965318
cauugacagauuguacuag

SEQ ID NO: 965320 - RNA, 19 nt, Artificial Sequence
  Description of Artificial Sequence: Synthetic oligonucleotide
  Sense strand starting at position 664 of SEQ ID NO: 913933
agcuuagaguauguaaaua

SEQ ID NO: 965321 - RNA, 19 nt, Artificial Sequence
  Description of Artificial Sequence: Synthetic oligonucleotide
  Antisense strand to SEQ ID NO: 965320
uauuuacauacucuaagcu

SEQ ID NO: 965322 - RNA, 19 nt, Artificial Sequence
  Description of Artificial Sequence: Synthetic oligonucleotide
  Sense strand starting at position 3592 of SEQ ID NO: 913933
caagauaccuuugcaaggu

SEQ ID NO: 965323 - RNA, 19 nt, Artificial Sequence
  Description of Artificial Sequence: Synthetic oligonucleotide
  Antisense strand to SEQ ID NO: 965322
accuugcaaagguaucuug

SEQ ID NO: 965324 - RNA, 19 nt, Artificial Sequence
  Description of Artificial Sequence: Synthetic oligonucleotide
  Sense strand starting at position 977 of SEQ ID NO: 913933
uaacaaucguggucaugaa

SEQ ID NO: 965325 - RNA, 19 nt, Artificial Sequence
  Description of Artificial Sequence: Synthetic oligonucleotide
  Antisense strand to SEQ ID NO: 965324
uucaugaccacgauuguua

SEQ ID NO: 965326 - RNA, 19 nt, Artificial Sequence
  Description of Artificial Sequence: Synthetic oligonucleotide
  Sense strand starting at position 2485 of SEQ ID NO: 913934
cucacuaugcaggacuaau

SEQ ID NO: 965327 - RNA, 19 nt, Artificial Sequence
  Description of Artificial Sequence: Synthetic oligonucleotide
  Antisense strand to SEQ ID NO: 965326
auuaguccugcauagugag

SEQ ID NO: 965328 - RNA, 19 nt, Artificial Sequence
  Description of Artificial Sequence: Synthetic oligonucleotide
  Sense strand starting at position 2085 of SEQ ID NO: 913934
ugaaauuucuuugcuggca

SEQ ID NO: 965329 - RNA, 19 nt, Artificial Sequence
  Description of Artificial Sequence: Synthetic oligonucleotide
  Antisense strand to SEQ ID NO: 965328
ugccagcaaagaaauuuca

SEQ ID NO: 965330 - RNA, 19 nt, Artificial Sequence
  Description of Artificial Sequence: Synthetic oligonucleotide
  Sense strand starting at position 318 of SEQ ID NO: 913934
gcuuucuccgguguacauu

SEQ ID NO: 965331 - RNA, 19 nt, Artificial Sequence
  Description of Artificial Sequence: Synthetic oligonucleotide
  Antisense strand to SEQ ID NO: 965330
aauguacaccggagaaagc

SEQ ID NO: 965332 - RNA, 19 nt, Artificial Sequence
  Description of Artificial Sequence: Synthetic oligonucleotide
  Sense strand starting at position 3272 of SEQ ID NO: 913934
gacccuuagggcuacauua

SEQ ID NO: 965333 - RNA, 19 nt, Artificial Sequence
  Description of Artificial Sequence: Synthetic oligonucleotide
  Antisense strand to SEQ ID NO: 965332
uaauguagcccuaaggguc

SEQ ID NO: 965334 - RNA, 19 nt, Artificial Sequence
  Description of Artificial Sequence: Synthetic oligonucleotide
  Sense strand starting at position 1768 of SEQ ID NO: 913934
ggcggguugggcuuuguau

SEQ ID NO: 965335 - RNA, 19 nt, Artificial Sequence
  Description of Artificial Sequence: Synthetic oligonucleotide
  Antisense strand to SEQ ID NO: 965334
auacaaagcccaacccgcc

SEQ ID NO: 965336 - RNA, 19 nt, Artificial Sequence
  Description of Artificial Sequence: Synthetic oligonucleotide
  Sense strand starting at position 2993 of SEQ ID NO: 913934
gguuauuaagagcaaaggu

SEQ ID NO: 965337 - RNA, 19 nt, Artificial Sequence
  Description of Artificial Sequence: Synthetic oligonucleotide
  Antisense strand to SEQ ID NO: 965336
accuuugcucuuaauaacc

SEQ ID NO: 965338 - RNA, 19 nt, Artificial Sequence
  Description of Artificial Sequence: Synthetic oligonucleotide
  Sense strand starting at position 738 of SEQ ID NO: 913934
cagagcguucgcuuauuau

SEQ ID NO: 965339 - RNA, 19 nt, Artificial Sequence
  Description of Artificial Sequence: Synthetic oligonucleotide
  Antisense strand to SEQ ID NO: 965338
auaauaagcgaacgcucug

SEQ ID NO: 965340 - RNA, 19 nt, Artificial Sequence
  Description of Artificial Sequence: Synthetic oligonucleotide
  Sense strand starting at position 3168 of SEQ ID NO: 913934
uuuccauugccuuagagaa

SEQ ID NO: 965341 - RNA, 19 nt, Artificial Sequence
  Description of Artificial Sequence: Synthetic oligonucleotide
  Antisense strand to SEQ ID NO: 965340
uucucuaaggcaauggaaa

SEQ ID NO: 965342 - RNA, 19 nt, Artificial Sequence
  Description of Artificial Sequence: Synthetic oligonucleotide
  Sense strand starting at position 2737 of SEQ ID NO: 913934
gugauauucuccgugauuu

SEQ ID NO: 965343 - RNA, 19 nt, Artificial Sequence
  Description of Artificial Sequence: Synthetic oligonucleotide
  Antisense strand to SEQ ID NO: 965342
aaaucacggagaauaucac

SEQ ID NO: 965344 - RNA, 19 nt, Artificial Sequence
  Description of Artificial Sequence: Synthetic oligonucleotide
  Sense strand starting at position 316 of SEQ ID NO: 913934
cggcuuucuccgguguaca

SEQ ID NO: 965345 - RNA, 19 nt, Artificial Sequence
  Description of Artificial Sequence: Synthetic oligonucleotide
  Antisense strand to SEQ ID NO: 965344
uguacaccggagaaagccg

SEQ ID NO: 965346 - RNA, 19 nt, Artificial Sequence
  Description of Artificial Sequence: Synthetic oligonucleotide
  Sense strand starting at position 734 of SEQ ID NO: 913934
cggacagagcguucgcuua

SEQ ID NO: 965347 - RNA, 19 nt, Artificial Sequence
  Description of Artificial Sequence: Synthetic oligonucleotide
  Antisense strand to SEQ ID NO: 965346
uaagcgaacgcucuguccg

SEQ ID NO: 965348 - RNA, 19 nt, Artificial Sequence
  Description of Artificial Sequence: Synthetic oligonucleotide
  Sense strand starting at position 61 of SEQ ID NO: 913934
cccuauaucgaacagcaua

SEQ ID NO: 965349 - RNA, 19 nt, Artificial Sequence
  Description of Artificial Sequence: Synthetic oligonucleotide
  Antisense strand to SEQ ID NO: 965348
uaugcuguucgauauaggg

SEQ ID NO: 965350 - RNA, 19 nt, Artificial Sequence
  Description of Artificial Sequence: Synthetic oligonucleotide
  Sense strand starting at position 3181 of SEQ ID NO: 913934
agagaagucucuucucuaa

SEQ ID NO: 965351 - RNA, 19 nt, Artificial Sequence
  Description of Artificial Sequence: Synthetic oligonucleotide
  Antisense strand to SEQ ID NO: 965350
uuagagaagagacuucucu

SEQ ID NO: 965352 - RNA, 19 nt, Artificial Sequence
  Description of Artificial Sequence: Synthetic oligonucleotide
  Sense strand starting at position 3183 of SEQ ID NO: 913934
agaagucucuucucuaaga

SEQ ID NO: 965353 - RNA, 19 nt, Artificial Sequence
  Description of Artificial Sequence: Synthetic oligonucleotide
  Antisense strand to SEQ ID NO: 965352
ucuuagagaagagacuucu

SEQ ID NO: 965354 - RNA, 19 nt, Artificial Sequence
  Description of Artificial Sequence: Synthetic oligonucleotide
  Sense strand starting at position 93 of SEQ ID NO: 913934
ugcagucauuuauuagcau

SEQ ID NO: 965355 - RNA, 19 nt, Artificial Sequence
  Description of Artificial Sequence: Synthetic oligonucleotide
  Antisense strand to SEQ ID NO: 965354
augcuaauaaaugacugca

SEQ ID NO: 965356 - RNA, 19 nt, Artificial Sequence
  Description of Artificial Sequence: Synthetic oligonucleotide
  Sense strand starting at position 2741 of SEQ ID NO: 913934
uauucuccgugauuugcaa

SEQ ID NO: 965357 - RNA, 19 nt, Artificial Sequence
  Description of Artificial Sequence: Synthetic oligonucleotide
  Antisense strand to SEQ ID NO: 965356
uugcaaaucacggagaaua

SEQ ID NO: 965358 - RNA, 19 nt, Artificial Sequence
  Description of Artificial Sequence: Synthetic oligonucleotide
  Sense strand starting at position 2703 of SEQ ID NO: 913934
ugcuuacagccguauuuau

SEQ ID NO: 965359 - RNA, 19 nt, Artificial Sequence
  Description of Artificial Sequence: Synthetic oligonucleotide
  Antisense strand to SEQ ID NO: 965358
auaaauacggcuguaagca

SEQ ID NO: 965360 - RNA, 19 nt, Artificial Sequence
  Description of Artificial Sequence: Synthetic oligonucleotide
  Sense strand starting at position 462 of SEQ ID NO: 913934
cucauuggccgugaagaaa

SEQ ID NO: 965361 - RNA, 19 nt, Artificial Sequence
  Description of Artificial Sequence: Synthetic oligonucleotide
  Antisense strand to SEQ ID NO: 965360
uuucuucacggccaaugag

SEQ ID NO: 965362 - RNA, 19 nt, Artificial Sequence
  Description of Artificial Sequence: Synthetic oligonucleotide
  Sense strand starting at position 1996 of SEQ ID NO: 913934
uugguuaagugaccaaacu

SEQ ID NO: 965363 - RNA, 19 nt, Artificial Sequence
  Description of Artificial Sequence: Synthetic oligonucleotide
  Antisense strand to SEQ ID NO: 965362
aguuuggucacuuaaccaa

SEQ ID NO: 965364 - RNA, 19 nt, Artificial Sequence
  Description of Artificial Sequence: Synthetic oligonucleotide
  Sense strand starting at position 3259 of SEQ ID NO: 913934
agaaauguucccugacccu

SEQ ID NO: 965365 - RNA, 19 nt, Artificial Sequence
  Description of Artificial Sequence: Synthetic oligonucleotide
  Antisense strand to SEQ ID NO: 965364
agggucagggaacauuucu

SEQ ID NO: 965366 - RNA, 19 nt, Artificial Sequence
  Description of Artificial Sequence: Synthetic oligonucleotide
  Sense strand starting at position 287 of SEQ ID NO: 913934
caagcuuuagauugugaaa

SEQ ID NO: 965367 - RNA, 19 nt, Artificial Sequence
  Description of Artificial Sequence: Synthetic oligonucleotide
  Antisense strand to SEQ ID NO: 965366
uuucacaaucuaaagcuug

SEQ ID NO: 965368 - RNA, 19 nt, Artificial Sequence
  Description of Artificial Sequence: Synthetic oligonucleotide
  Sense strand starting at position 398 of SEQ ID NO: 913934
cucauugguccacauaguu

SEQ ID NO: 965369 - RNA, 19 nt, Artificial Sequence
  Description of Artificial Sequence: Synthetic oligonucleotide
  Antisense strand to SEQ ID NO: 965368
aacuauguggaccaaugag

SEQ ID NO: 965370 - RNA, 19 nt, Artificial Sequence
  Description of Artificial Sequence: Synthetic oligonucleotide
  Sense strand starting at position 3400 of SEQ ID NO: 913934
ggacaucacugaguuguua

SEQ ID NO: 965371 - RNA, 19 nt, Artificial Sequence
  Description of Artificial Sequence: Synthetic oligonucleotide
  Antisense strand to SEQ ID NO: 965370
uaacaacucagugaugucc

SEQ ID NO: 965372 - RNA, 19 nt, Artificial Sequence
  Description of Artificial Sequence: Synthetic oligonucleotide
  Sense strand starting at position 874 of SEQ ID NO: 913934
gaaucagucccgggaaccu

SEQ ID NO: 965373 - RNA, 19 nt, Artificial Sequence
  Description of Artificial Sequence: Synthetic oligonucleotide
  Antisense strand to SEQ ID NO: 965372
agguucccgggacugauuc

SEQ ID NO: 965374 - RNA, 19 nt, Artificial Sequence
  Description of Artificial Sequence: Synthetic oligonucleotide
  Sense strand starting at position 2874 of SEQ ID NO: 913934
agcagagccuuaccuagaa

SEQ ID NO: 965375 - RNA, 19 nt, Artificial Sequence
  Description of Artificial Sequence: Synthetic oligonucleotide
  Antisense strand to SEQ ID NO: 965374
uucuagguaaggcucugcu

SEQ ID NO: 965376 - RNA, 19 nt, Artificial Sequence
  Description of Artificial Sequence: Synthetic oligonucleotide
  Sense strand starting at position 2511 of SEQ ID NO: 913934
gugaauaccuucccaaagu

SEQ ID NO: 965377 - RNA, 19 nt, Artificial Sequence
  Description of Artificial Sequence: Synthetic oligonucleotide
  Antisense strand to SEQ ID NO: 965376
acuuugggaagguauucac

SEQ ID NO: 965378 - RNA, 19 nt, Artificial Sequence
  Description of Artificial Sequence: Synthetic oligonucleotide
  Sense strand starting at position 1911 of SEQ ID NO: 913934
caagauaccuuugcaaggu

SEQ ID NO: 965379 - RNA, 19 nt, Artificial Sequence
  Description of Artificial Sequence: Synthetic oligonucleotide
  Antisense strand to SEQ ID NO: 965378
accuugcaaagguaucuug

SEQ ID NO: 965380 - RNA, 19 nt, Artificial Sequence
  Description of Artificial Sequence: Synthetic oligonucleotide
  Sense strand starting at position 2425 of SEQ ID NO: 913934
cccagauaacguuaaugcu

SEQ ID NO: 965381 - RNA, 19 nt, Artificial Sequence
  Description of Artificial Sequence: Synthetic oligonucleotide
  Antisense strand to SEQ ID NO: 965380
agcauuaacguuaucuggg

SEQ ID NO: 965382 - RNA, 19 nt, Artificial Sequence
  Description of Artificial Sequence: Synthetic oligonucleotide
  Sense strand starting at position 3404 of SEQ ID NO: 913934
aucacugaguuguuagacu

SEQ ID NO: 965383 - RNA, 19 nt, Artificial Sequence
  Description of Artificial Sequence: Synthetic oligonucleotide
  Antisense strand to SEQ ID NO: 965382
agucuaacaacucagugau

SEQ ID NO: 965384 - RNA, 19 nt, Artificial Sequence
  Description of Artificial Sequence: Synthetic oligonucleotide
  Sense strand starting at position 324 of SEQ ID NO: 913934
uccgguguacauuacaauu

SEQ ID NO: 965385 - RNA, 19 nt, Artificial Sequence
  Description of Artificial Sequence: Synthetic oligonucleotide
  Antisense strand to SEQ ID NO: 965384
aauuguaauguacaccgga

SEQ ID NO: 965386 - RNA, 19 nt, Artificial Sequence
  Description of Artificial Sequence: Synthetic oligonucleotide
  Sense strand starting at position 1910 of SEQ ID NO: 913934
gcaagauaccuuugcaagg

SEQ ID NO: 965387 - RNA, 19 nt, Artificial Sequence
  Description of Artificial Sequence: Synthetic oligonucleotide
  Antisense strand to SEQ ID NO: 965386
ccuugcaaagguaucuugc

SEQ ID NO: 965388 - RNA, 19 nt, Artificial Sequence
  Description of Artificial Sequence: Synthetic oligonucleotide
  Sense strand starting at position 2432 of SEQ ID NO: 913934
aacguuaaugcucaaggua

SEQ ID NO: 965389 - RNA, 19 nt, Artificial Sequence
  Description of Artificial Sequence: Synthetic oligonucleotide
  Antisense strand to SEQ ID NO: 965388
uaccuugagcauuaacguu

SEQ ID NO: 965390 - RNA, 19 nt, Artificial Sequence
  Description of Artificial Sequence: Synthetic oligonucleotide
  Sense strand starting at position 2154 of SEQ ID NO: 913934
gaggaaaccuaggaauaca

SEQ ID NO: 965391 - RNA, 19 nt, Artificial Sequence
  Description of Artificial Sequence: Synthetic oligonucleotide
  Antisense strand to SEQ ID NO: 965390
uguauuccuagguuuccuc

SEQ ID NO: 965392 - RNA, 19 nt, Artificial Sequence
  Description of Artificial Sequence: Synthetic oligonucleotide
  Sense strand starting at position 3330 of SEQ ID NO: 913934
guuuaugacuccuuaucau

SEQ ID NO: 965393 - RNA, 19 nt, Artificial Sequence
  Description of Artificial Sequence: Synthetic oligonucleotide
  Antisense strand to SEQ ID NO: 965392
augauaaggagucauaaac

SEQ ID NO: 965394 - RNA, 19 nt, Artificial Sequence
  Description of Artificial Sequence: Synthetic oligonucleotide
  Sense strand starting at position 2205 of SEQ ID NO: 913934
aggauuaaucggugcugaa

SEQ ID NO: 965395 - RNA, 19 nt, Artificial Sequence
  Description of Artificial Sequence: Synthetic oligonucleotide
  Antisense strand to SEQ ID NO: 965394
uucagcaccgauuaauccu

SEQ ID NO: 965396 - RNA, 19 nt, Artificial Sequence
  Description of Artificial Sequence: Synthetic oligonucleotide
  Sense strand starting at position 3881 of SEQ ID NO: 913934
cugccaguauaagugaaau

SEQ ID NO: 965397 - RNA, 19 nt, Artificial Sequence
  Description of Artificial Sequence: Synthetic oligonucleotide
  Antisense strand to SEQ ID NO: 965396
auuucacuuauacuggcag

SEQ ID NO: 965398 - RNA, 19 nt, Artificial Sequence
  Description of Artificial Sequence: Synthetic oligonucleotide
  Sense strand starting at position 2644 of SEQ ID NO: 913934
uccuuauuacgcuauuaug

SEQ ID NO: 965399 - RNA, 19 nt, Artificial Sequence
  Description of Artificial Sequence: Synthetic oligonucleotide
  Antisense strand to SEQ ID NO: 965398
cauaauagcguaauaagga

SEQ ID NO: 965400 - RNA, 19 nt, Artificial Sequence
  Description of Artificial Sequence: Synthetic oligonucleotide
  Sense strand starting at position 2240 of SEQ ID NO: 913934
ggagcaauuccaugcuaua

SEQ ID NO: 965401 - RNA, 19 nt, Artificial Sequence
  Description of Artificial Sequence: Synthetic oligonucleotide
  Antisense strand to SEQ ID NO: 965400
uauagcauggaauugcucc

SEQ ID NO: 965402 - RNA, 19 nt, Artificial Sequence
  Description of Artificial Sequence: Synthetic oligonucleotide
  Sense strand starting at position 2435 of SEQ ID NO: 913934
guuaaugcucaagguaaca

SEQ ID NO: 965403 - RNA, 19 nt, Artificial Sequence
  Description of Artificial Sequence: Synthetic oligonucleotide
  Antisense strand to SEQ ID NO: 965402
uguuaccuugagcauuaac

SEQ ID NO: 965404 - RNA, 19 nt, Artificial Sequence
  Description of Artificial Sequence: Synthetic oligonucleotide
  Sense strand starting at position 3386 of SEQ ID NO: 913934
acuugagaauaauaggaca

SEQ ID NO: 965405 - RNA, 19 nt, Artificial Sequence
  Description of Artificial Sequence: Synthetic oligonucleotide
  Antisense strand to SEQ ID NO: 965404
uguccuauuauucucaagu

SEQ ID NO: 965406 - RNA, 19 nt, Artificial Sequence
  Description of Artificial Sequence: Synthetic oligonucleotide
  Sense strand starting at position 2907 of SEQ ID NO: 913935
uccugagccgugucuuacu

SEQ ID NO: 965407 - RNA, 19 nt, Artificial Sequence
  Description of Artificial Sequence: Synthetic oligonucleotide
  Antisense strand to SEQ ID NO: 965406
aguaagacacggcucagga

SEQ ID NO: 965408 - RNA, 19 nt, Artificial Sequence
  Description of Artificial Sequence: Synthetic oligonucleotide
  Sense strand starting at position 1592 of SEQ ID NO: 913935
ugaacucuggcggauuaag

SEQ ID NO: 965409 - RNA, 19 nt, Artificial Sequence
  Description of Artificial Sequence: Synthetic oligonucleotide
  Antisense strand to SEQ ID NO: 965408
cuuaauccgccagaguuca

SEQ ID NO: 965410 - RNA, 19 nt, Artificial Sequence
  Description of Artificial Sequence: Synthetic oligonucleotide
  Sense strand starting at position 2385 of SEQ ID NO: 913935
cagugucuccuccaaggga

SEQ ID NO: 965411 - RNA, 19 nt, Artificial Sequence
  Description of Artificial Sequence: Synthetic oligonucleotide
  Antisense strand to SEQ ID NO: 965410
ucccuuggaggagacacug

SEQ ID NO: 965412 - RNA, 19 nt, Artificial Sequence
  Description of Artificial Sequence: Synthetic oligonucleotide
  Sense strand starting at position 1266 of SEQ ID NO: 913935
ggaggucccuuuccuagaa

SEQ ID NO: 965413 - RNA, 19 nt, Artificial Sequence
  Description of Artificial Sequence: Synthetic oligonucleotide
  Antisense strand to SEQ ID NO: 965412
uucuaggaaagggaccucc

SEQ ID NO: 965414 - RNA, 19 nt, Artificial Sequence
  Description of Artificial Sequence: Synthetic oligonucleotide
  Sense strand starting at position 3976 of SEQ ID NO: 913935
gggacagccucugcaagau

SEQ ID NO: 965415 - RNA, 19 nt, Artificial Sequence
  Description of Artificial Sequence: Synthetic oligonucleotide
  Antisense strand to SEQ ID NO: 965414
aucuugcagaggcuguccc

SEQ ID NO: 965416 - RNA, 19 nt, Artificial Sequence
  Description of Artificial Sequence: Synthetic oligonucleotide
  Sense strand starting at position 1591 of SEQ ID NO: 913935
gugaacucuggcggauuaa

SEQ ID NO: 965417 - RNA, 19 nt, Artificial Sequence
  Description of Artificial Sequence: Synthetic oligonucleotide
  Antisense strand to SEQ ID NO: 965416
uuaauccgccagaguucac

SEQ ID NO: 965418 - RNA, 19 nt, Artificial Sequence
  Description of Artificial Sequence: Synthetic oligonucleotide
  Sense strand starting at position 2918 of SEQ ID NO: 913935
gucuuacuuuccuuugauu

SEQ ID NO: 965419 - RNA, 19 nt, Artificial Sequence
  Description of Artificial Sequence: Synthetic oligonucleotide
  Antisense strand to SEQ ID NO: 965418
aaucaaaggaaaguaagac

SEQ ID NO: 965420 - RNA, 19 nt, Artificial Sequence
  Description of Artificial Sequence: Synthetic oligonucleotide
  Sense strand starting at position 2917 of SEQ ID NO: 913935
ugucuuacuuuccuuugau

SEQ ID NO: 965421 - RNA, 19 nt, Artificial Sequence
  Description of Artificial Sequence: Synthetic oligonucleotide
  Antisense strand to SEQ ID NO: 965420
aucaaaggaaaguaagaca

SEQ ID NO: 965422 - RNA, 19 nt, Artificial Sequence
  Description of Artificial Sequence: Synthetic oligonucleotide
  Sense strand starting at position 3345 of SEQ ID NO: 913935
ugagcaggcuucucucuua

SEQ ID NO: 965423 - RNA, 19 nt, Artificial Sequence
  Description of Artificial Sequence: Synthetic oligonucleotide
  Antisense strand to SEQ ID NO: 965422
uaagagagaagccugcuca

SEQ ID NO: 965424 - RNA, 19 nt, Artificial Sequence
  Description of Artificial Sequence: Synthetic oligonucleotide
  Sense strand starting at position 2916 of SEQ ID NO: 913935
gugucuuacuuuccuuuga

SEQ ID NO: 965425 - RNA, 19 nt, Artificial Sequence
  Description of Artificial Sequence: Synthetic oligonucleotide
  Antisense strand to SEQ ID NO: 965424
ucaaaggaaaguaagacac

SEQ ID NO: 965426 - RNA, 19 nt, Artificial Sequence
  Description of Artificial Sequence: Synthetic oligonucleotide
  Sense strand starting at position 2381 of SEQ ID NO: 913935
gggccagugucuccuccaa

SEQ ID NO: 965427 - RNA, 19 nt, Artificial Sequence
  Description of Artificial Sequence: Synthetic oligonucleotide
  Antisense strand to SEQ ID NO: 965426
uuggaggagacacuggccc

SEQ ID NO: 965428 - RNA, 19 nt, Artificial Sequence
  Description of Artificial Sequence: Synthetic oligonucleotide
  Sense strand starting at position 2716 of SEQ ID NO: 913935
acgccuguguuucuggaga

SEQ ID NO: 965429 - RNA, 19 nt, Artificial Sequence
  Description of Artificial Sequence: Synthetic oligonucleotide
  Antisense strand to SEQ ID NO: 965428
ucuccagaaacacaggcgu

SEQ ID NO: 965430 - RNA, 19 nt, Artificial Sequence
  Description of Artificial Sequence: Synthetic oligonucleotide
  Sense strand starting at position 3583 of SEQ ID NO: 913935
aguggcuccgugugaaauc

SEQ ID NO: 965431 - RNA, 19 nt, Artificial Sequence
  Description of Artificial Sequence: Synthetic oligonucleotide
  Antisense strand to SEQ ID NO: 965430
gauuucacacggagccacu

SEQ ID NO: 965432 - RNA, 19 nt, Artificial Sequence
  Description of Artificial Sequence: Synthetic oligonucleotide
  Sense strand starting at position 3518 of SEQ ID NO: 913935
gguucugaauuccacagau

SEQ ID NO: 965433 - RNA, 19 nt, Artificial Sequence
  Description of Artificial Sequence: Synthetic oligonucleotide
  Antisense strand to SEQ ID NO: 965432
aucuguggaauucagaacc

SEQ ID NO: 965434 - RNA, 19 nt, Artificial Sequence
  Description of Artificial Sequence: Synthetic oligonucleotide
  Sense strand starting at position 3580 of SEQ ID NO: 913935
ccuaguggcuccgugugaa

SEQ ID NO: 965435 - RNA, 19 nt, Artificial Sequence
  Description of Artificial Sequence: Synthetic oligonucleotide
  Antisense strand to SEQ ID NO: 965434
uucacacggagccacuagg

SEQ ID NO: 965436 - RNA, 19 nt, Artificial Sequence
  Description of Artificial Sequence: Synthetic oligonucleotide
  Sense strand starting at position 2905 of SEQ ID NO: 913935
ccuccugagccgugucuua

SEQ ID NO: 965437 - RNA, 19 nt, Artificial Sequence
  Description of Artificial Sequence: Synthetic oligonucleotide
  Antisense strand to SEQ ID NO: 965436
uaagacacggcucaggagg

SEQ ID NO: 965438 - RNA, 19 nt, Artificial Sequence
  Description of Artificial Sequence: Synthetic oligonucleotide
  Sense strand starting at position 2629 of SEQ ID NO: 913935
aaaguacacucgcaaagua

SEQ ID NO: 965439 - RNA, 19 nt, Artificial Sequence
  Description of Artificial Sequence: Synthetic oligonucleotide
  Antisense strand to SEQ ID NO: 965438
uacuuugcgaguguacuuu

SEQ ID NO: 965440 - RNA, 19 nt, Artificial Sequence
  Description of Artificial Sequence: Synthetic oligonucleotide
  Sense strand starting at position 1590 of SEQ ID NO: 913935
ggugaacucuggcggauua

SEQ ID NO: 965441 - RNA, 19 nt, Artificial Sequence
  Description of Artificial Sequence: Synthetic oligonucleotide
  Antisense strand to SEQ ID NO: 965440
uaauccgccagaguucacc

SEQ ID NO: 965442 - RNA, 19 nt, Artificial Sequence
  Description of Artificial Sequence: Synthetic oligonucleotide
  Sense strand starting at position 2718 of SEQ ID NO: 913935
gccuguguuucuggagaau

SEQ ID NO: 965443 - RNA, 19 nt, Artificial Sequence
  Description of Artificial Sequence: Synthetic oligonucleotide
  Antisense strand to SEQ ID NO: 965442
auucuccagaaacacaggc

SEQ ID NO: 965444 - RNA, 19 nt, Artificial Sequence
  Description of Artificial Sequence: Synthetic oligonucleotide
  Sense strand starting at position 1588 of SEQ ID NO: 913935
gcggugaacucuggcggau

SEQ ID NO: 965445 - RNA, 19 nt, Artificial Sequence
  Description of Artificial Sequence: Synthetic oligonucleotide
  Antisense strand to SEQ ID NO: 965444
auccgccagaguucaccgc

SEQ ID NO: 965446 - RNA, 19 nt, Artificial Sequence
  Description of Artificial Sequence: Synthetic oligonucleotide
  Sense strand starting at position 130 of SEQ ID NO: 913936
uuucuaaugcuugacaaag

SEQ ID NO: 965447 - RNA, 19 nt, Artificial Sequence
  Description of Artificial Sequence: Synthetic oligonucleotide
  Antisense strand to SEQ ID NO: 965446
cuuugucaagcauuagaaa

SEQ ID NO: 965448 - RNA, 19 nt, Artificial Sequence
  Description of Artificial Sequence: Synthetic oligonucleotide
  Sense strand starting at position 3954 of SEQ ID NO: 913936
aggacaaauacguaagcua

SEQ ID NO: 965449 - RNA, 19 nt, Artificial Sequence
  Description of Artificial Sequence: Synthetic oligonucleotide
  Antisense strand to SEQ ID NO: 965448
uagcuuacguauuuguccu

SEQ ID NO: 965450 - RNA, 19 nt, Artificial Sequence
  Description of Artificial Sequence: Synthetic oligonucleotide
  Sense strand starting at position 1184 of SEQ ID NO: 913936
ggcuaaaucccgccagugu

SEQ ID NO: 965451 - RNA, 19 nt, Artificial Sequence
  Description of Artificial Sequence: Synthetic oligonucleotide
  Antisense strand to SEQ ID NO: 965450
acacuggcgggauuuagcc

SEQ ID NO: 965452 - RNA, 19 nt, Artificial Sequence
  Description of Artificial Sequence: Synthetic oligonucleotide
  Sense strand starting at position 37 of SEQ ID NO: 913936
ccgcaauugauuuguaaug

SEQ ID NO: 965453 - RNA, 19 nt, Artificial Sequence
  Description of Artificial Sequence: Synthetic oligonucleotide
  Antisense strand to SEQ ID NO: 965452
cauuacaaaucaauugcgg

SEQ ID NO: 965454 - RNA, 19 nt, Artificial Sequence
  Description of Artificial Sequence: Synthetic oligonucleotide
  Sense strand starting at position 776 of SEQ ID NO: 913936
caaacugcugaguaggauu

SEQ ID NO: 965455 - RNA, 19 nt, Artificial Sequence
  Description of Artificial Sequence: Synthetic oligonucleotide
  Antisense strand to SEQ ID NO: 965454
aauccuacucagcaguuug

SEQ ID NO: 965456 - RNA, 19 nt, Artificial Sequence
  Description of Artificial Sequence: Synthetic oligonucleotide
  Sense strand starting at position 743 of SEQ ID NO: 913936
agggugguggcugaagaua

SEQ ID NO: 965457 - RNA, 19 nt, Artificial Sequence
  Description of Artificial Sequence: Synthetic oligonucleotide
  Antisense strand to SEQ ID NO: 965456
uaucuucagccaccacccu

SEQ ID NO: 965458 - RNA, 19 nt, Artificial Sequence
  Description of Artificial Sequence: Synthetic oligonucleotide
  Sense strand starting at position 2522 of SEQ ID NO: 913936
aucaucacacauggugaua

SEQ ID NO: 965459 - RNA, 19 nt, Artificial Sequence
  Description of Artificial Sequence: Synthetic oligonucleotide
  Antisense strand to SEQ ID NO: 965458
uaucaccaugugugaugau

SEQ ID NO: 965460 - RNA, 19 nt, Artificial Sequence
  Description of Artificial Sequence: Synthetic oligonucleotide
  Sense strand starting at position 3190 of SEQ ID NO: 913936
acagacacuugaucugagu

SEQ ID NO: 965461 - RNA, 19 nt, Artificial Sequence
  Description of Artificial Sequence: Synthetic oligonucleotide
  Antisense strand to SEQ ID NO: 965460
acucagaucaagugucugu

SEQ ID NO: 965462 - RNA, 19 nt, Artificial Sequence
  Description of Artificial Sequence: Synthetic oligonucleotide
  Sense strand starting at position 1250 of SEQ ID NO: 913936
augaaaguccgucauuaaa

SEQ ID NO: 965463 - RNA, 19 nt, Artificial Sequence
  Description of Artificial Sequence: Synthetic oligonucleotide
  Antisense strand to SEQ ID NO: 965462
uuuaaugacggacuuucau

SEQ ID NO: 965464 - RNA, 19 nt, Artificial Sequence
  Description of Artificial Sequence: Synthetic oligonucleotide
  Sense strand starting at position 1141 of SEQ ID NO: 913936
uacugaacucgagaugcca

SEQ ID NO: 965465 - RNA, 19 nt, Artificial Sequence
  Description of Artificial Sequence: Synthetic oligonucleotide
  Antisense strand to SEQ ID NO: 965464
uggcaucucgaguucagua

SEQ ID NO: 965466 - RNA, 19 nt, Artificial Sequence
  Description of Artificial Sequence: Synthetic oligonucleotide
  Sense strand starting at position 3538 of SEQ ID NO: 913936
agguaaaguaaaugugaau

SEQ ID NO: 965467 - RNA, 19 nt, Artificial Sequence
  Description of Artificial Sequence: Synthetic oligonucleotide
  Antisense strand to SEQ ID NO: 965466
auucacauuuacuuuaccu

SEQ ID NO: 965468 - RNA, 19 nt, Artificial Sequence
  Description of Artificial Sequence: Synthetic oligonucleotide
  Sense strand starting at position 848 of SEQ ID NO: 913936
gccauccaacucuaagagu

SEQ ID NO: 965469 - RNA, 19 nt, Artificial Sequence
  Description of Artificial Sequence: Synthetic oligonucleotide
  Antisense strand to SEQ ID NO: 965468
acucuuagaguuggauggc

SEQ ID NO: 965470 - RNA, 19 nt, Artificial Sequence
  Description of Artificial Sequence: Synthetic oligonucleotide
  Sense strand starting at position 3097 of SEQ ID NO: 913936
ugugaaagaguuggaguaa

SEQ ID NO: 965471 - RNA, 19 nt, Artificial Sequence
  Description of Artificial Sequence: Synthetic oligonucleotide
  Antisense strand to SEQ ID NO: 965470
uuacuccaacucuuucaca

SEQ ID NO: 965472 - RNA, 19 nt, Artificial Sequence
  Description of Artificial Sequence: Synthetic oligonucleotide
  Sense strand starting at position 3875 of SEQ ID NO: 913936
auagcaauuugcgugauug

SEQ ID NO: 965473 - RNA, 19 nt, Artificial Sequence
  Description of Artificial Sequence: Synthetic oligonucleotide
  Antisense strand to SEQ ID NO: 965472
caaucacgcaaauugcuau

SEQ ID NO: 965474 - RNA, 19 nt, Artificial Sequence
  Description of Artificial Sequence: Synthetic oligonucleotide
  Sense strand starting at position 3928 of SEQ ID NO: 913936
agcugucuucuugaaacag

SEQ ID NO: 965475 - RNA, 19 nt, Artificial Sequence
  Description of Artificial Sequence: Synthetic oligonucleotide
  Antisense strand to SEQ ID NO: 965474
cuguuucaagaagacagcu

SEQ ID NO: 965476 - RNA, 19 nt, Artificial Sequence
  Description of Artificial Sequence: Synthetic oligonucleotide
  Sense strand starting at position 3007 of SEQ ID NO: 913936
gcuacaaacggauggauau

SEQ ID NO: 965477 - RNA, 19 nt, Artificial Sequence
  Description of Artificial Sequence: Synthetic oligonucleotide
  Antisense strand to SEQ ID NO: 965476
auauccauccguuuguagc

SEQ ID NO: 965478 - RNA, 19 nt, Artificial Sequence
  Description of Artificial Sequence: Synthetic oligonucleotide
  Sense strand starting at position 3378 of SEQ ID NO: 913936
ggcaaauacugaguuugag

SEQ ID NO: 965479 - RNA, 19 nt, Artificial Sequence
  Description of Artificial Sequence: Synthetic oligonucleotide
  Antisense strand to SEQ ID NO: 965478
cucaaacucaguauuugcc

SEQ ID NO: 965480 - RNA, 19 nt, Artificial Sequence
  Description of Artificial Sequence: Synthetic oligonucleotide
  Sense strand starting at position 3111 of SEQ ID NO: 913936
aguaauauucuauggaggu

SEQ ID NO: 965481 - RNA, 19 nt, Artificial Sequence
  Description of Artificial Sequence: Synthetic oligonucleotide
  Antisense strand to SEQ ID NO: 965480
accuccauagaauauuacu

SEQ ID NO: 965482 - RNA, 19 nt, Artificial Sequence
  Description of Artificial Sequence: Synthetic oligonucleotide
  Sense strand starting at position 3877 of SEQ ID NO: 913936
agcaauuugcgugauuguu

SEQ ID NO: 965483 - RNA, 19 nt, Artificial Sequence
  Description of Artificial Sequence: Synthetic oligonucleotide
  Antisense strand to SEQ ID NO: 965482
aacaaucacgcaaauugcu

SEQ ID NO: 965484 - RNA, 19 nt, Artificial Sequence
  Description of Artificial Sequence: Synthetic oligonucleotide
  Sense strand starting at position 2278 of SEQ ID NO: 913936
ccucauaugcaguaguaaa

SEQ ID NO: 965485 - RNA, 19 nt, Artificial Sequence
  Description of Artificial Sequence: Synthetic oligonucleotide
  Antisense strand to SEQ ID NO: 965484
uuuacuacugcauaugagg

SEQ ID NO: 965486 - RNA, 19 nt, Artificial Sequence
  Description of Artificial Sequence: Synthetic oligonucleotide
  Sense strand starting at position 1237 of SEQ ID NO: 913936
ugcaguuuccucuaugaaa

SEQ ID NO: 965487 - RNA, 19 nt, Artificial Sequence
  Description of Artificial Sequence: Synthetic oligonucleotide
  Antisense strand to SEQ ID NO: 965486
uuucauagaggaaacugca

SEQ ID NO: 965488 - RNA, 19 nt, Artificial Sequence
  Description of Artificial Sequence: Synthetic oligonucleotide
  Sense strand starting at position 3096 of SEQ ID NO: 913936
cugugaaagaguuggagua

SEQ ID NO: 965489 - RNA, 19 nt, Artificial Sequence
  Description of Artificial Sequence: Synthetic oligonucleotide
  Antisense strand to SEQ ID NO: 965488
uacuccaacucuuucacag

SEQ ID NO: 965490 - RNA, 19 nt, Artificial Sequence
  Description of Artificial Sequence: Synthetic oligonucleotide
  Sense strand starting at position 3879 of SEQ ID NO: 913936
caauuugcgugauuguuau

SEQ ID NO: 965491 - RNA, 19 nt, Artificial Sequence
  Description of Artificial Sequence: Synthetic oligonucleotide
  Antisense strand to SEQ ID NO: 965490
auaacaaucacgcaaauug

SEQ ID NO: 965492 - RNA, 19 nt, Artificial Sequence
  Description of Artificial Sequence: Synthetic oligonucleotide
  Sense strand starting at position 3381 of SEQ ID NO: 913936
aaauacugaguuugaguuu

SEQ ID NO: 965493 - RNA, 19 nt, Artificial Sequence
  Description of Artificial Sequence: Synthetic oligonucleotide
  Antisense strand to SEQ ID NO: 965492
aaacucaaacucaguauuu

SEQ ID NO: 965494 - RNA, 19 nt, Artificial Sequence
  Description of Artificial Sequence: Synthetic oligonucleotide
  Sense strand starting at position 3505 of SEQ ID NO: 913936
aucuuagacucugccagau

SEQ ID NO: 965495 - RNA, 19 nt, Artificial Sequence
  Description of Artificial Sequence: Synthetic oligonucleotide
  Antisense strand to SEQ ID NO: 965494
aucuggcagagucuaagau

SEQ ID NO: 965496 - RNA, 19 nt, Artificial Sequence
  Description of Artificial Sequence: Synthetic oligonucleotide
  Sense strand starting at position 3965 of SEQ ID NO: 913936
guaagcuacuuccuggaaa

SEQ ID NO: 965497 - RNA, 19 nt, Artificial Sequence
  Description of Artificial Sequence: Synthetic oligonucleotide
  Antisense strand to SEQ ID NO: 965496
uuuccaggaaguagcuuac

SEQ ID NO: 965498 - RNA, 19 nt, Artificial Sequence
  Description of Artificial Sequence: Synthetic oligonucleotide
  Sense strand starting at position 3629 of SEQ ID NO: 913936
gucagaucaccugguauca

SEQ ID NO: 965499 - RNA, 19 nt, Artificial Sequence
  Description of Artificial Sequence: Synthetic oligonucleotide
  Antisense strand to SEQ ID NO: 965498
ugauaccaggugaucugac

SEQ ID NO: 965500 - RNA, 19 nt, Artificial Sequence
  Description of Artificial Sequence: Synthetic oligonucleotide
  Sense strand starting at position 3642 of SEQ ID NO: 913936
guaucaggaguucgagacu

SEQ ID NO: 965501 - RNA, 19 nt, Artificial Sequence
  Description of Artificial Sequence: Synthetic oligonucleotide
  Antisense strand to SEQ ID NO: 965500
agucucgaacuccugauac

SEQ ID NO: 965502 - RNA, 19 nt, Artificial Sequence
  Description of Artificial Sequence: Synthetic oligonucleotide
  Sense strand starting at position 489 of SEQ ID NO: 913936
ucucuugcugcucaaauga

SEQ ID NO: 965503 - RNA, 19 nt, Artificial Sequence
  Description of Artificial Sequence: Synthetic oligonucleotide
  Antisense strand to SEQ ID NO: 965502
ucauuugagcagcaagaga

SEQ ID NO: 965504 - RNA, 19 nt, Artificial Sequence
  Description of Artificial Sequence: Synthetic oligonucleotide
  Sense strand starting at position 3876 of SEQ ID NO: 913936
uagcaauuugcgugauugu

SEQ ID NO: 965505 - RNA, 19 nt, Artificial Sequence
  Description of Artificial Sequence: Synthetic oligonucleotide
  Antisense strand to SEQ ID NO: 965504
acaaucacgcaaauugcua

SEQ ID NO: 965506 - RNA, 19 nt, Artificial Sequence
  Description of Artificial Sequence: Synthetic oligonucleotide
  Sense strand starting at position 1248 of SEQ ID NO: 913936
cuaugaaaguccgucauua

SEQ ID NO: 965507 - RNA, 19 nt, Artificial Sequence
  Description of Artificial Sequence: Synthetic oligonucleotide
  Antisense strand to SEQ ID NO: 965506
uaaugacggacuuucauag

SEQ ID NO: 965508 - RNA, 19 nt, Artificial Sequence
  Description of Artificial Sequence: Synthetic oligonucleotide
  Sense strand starting at position 3517 of SEQ ID NO: 913936
gccagaucuugcccuaaga

SEQ ID NO: 965509 - RNA, 19 nt, Artificial Sequence
  Description of Artificial Sequence: Synthetic oligonucleotide
  Antisense strand to SEQ ID NO: 965508
ucuuagggcaagaucuggc

SEQ ID NO: 965510 - RNA, 19 nt, Artificial Sequence
  Description of Artificial Sequence: Synthetic oligonucleotide
  Sense strand starting at position 2986 of SEQ ID NO: 913936
uuaacugacuccuugugua

SEQ ID NO: 965511 - RNA, 19 nt, Artificial Sequence
  Description of Artificial Sequence: Synthetic oligonucleotide
  Antisense strand to SEQ ID NO: 965510
uacacaaggagucaguuaa

SEQ ID NO: 965512 - RNA, 19 nt, Artificial Sequence
  Description of Artificial Sequence: Synthetic oligonucleotide
  Sense strand starting at position 3289 of SEQ ID NO: 913936
gucuguacagucuagaguu

SEQ ID NO: 965513 - RNA, 19 nt, Artificial Sequence
  Description of Artificial Sequence: Synthetic oligonucleotide
  Antisense strand to SEQ ID NO: 965512
aacucuagacuguacagac

SEQ ID NO: 965514 - RNA, 19 nt, Artificial Sequence
  Description of Artificial Sequence: Synthetic oligonucleotide
  Sense strand starting at position 616 of SEQ ID NO: 913936
auauuucgguaauacacau

SEQ ID NO: 965515 - RNA, 19 nt, Artificial Sequence
  Description of Artificial Sequence: Synthetic oligonucleotide
  Antisense strand to SEQ ID NO: 965514
auguguauuaccgaaauau

SEQ ID NO: 965516 - RNA, 19 nt, Artificial Sequence
  Description of Artificial Sequence: Synthetic oligonucleotide
  Sense strand starting at position 3396 of SEQ ID NO: 913936
guuucuguucugcauacaa

SEQ ID NO: 965517 - RNA, 19 nt, Artificial Sequence
  Description of Artificial Sequence: Synthetic oligonucleotide
  Antisense strand to SEQ ID NO: 965516
uuguaugcagaacagaaac

SEQ ID NO: 965518 - RNA, 19 nt, Artificial Sequence
  Description of Artificial Sequence: Synthetic oligonucleotide
  Sense strand starting at position 663 of SEQ ID NO: 913936
cuacuauguguccauugca

SEQ ID NO: 965519 - RNA, 19 nt, Artificial Sequence
  Description of Artificial Sequence: Synthetic oligonucleotide
  Antisense strand to SEQ ID NO: 965518
ugcaauggacacauaguag

SEQ ID NO: 965520 - RNA, 19 nt, Artificial Sequence
  Description of Artificial Sequence: Synthetic oligonucleotide
  Sense strand starting at position 3626 of SEQ ID NO: 913936
gcagucagaucaccuggua

SEQ ID NO: 965521 - RNA, 19 nt, Artificial Sequence
  Description of Artificial Sequence: Synthetic oligonucleotide
  Antisense strand to SEQ ID NO: 965520
uaccaggugaucugacugc

SEQ ID NO: 965522 - RNA, 19 nt, Artificial Sequence
  Description of Artificial Sequence: Synthetic oligonucleotide
  Sense strand starting at position 3157 of SEQ ID NO: 913936
aauuguauuucuggaagac

SEQ ID NO: 965523 - RNA, 19 nt, Artificial Sequence
  Description of Artificial Sequence: Synthetic oligonucleotide
  Antisense strand to SEQ ID NO: 965522
gucuuccagaaauacaauu

SEQ ID NO: 965524 - RNA, 19 nt, Artificial Sequence
  Description of Artificial Sequence: Synthetic oligonucleotide
  Sense strand starting at position 39 of SEQ ID NO: 913936
gcaauugauuuguaaugac

SEQ ID NO: 965525 - RNA, 19 nt, Artificial Sequence
  Description of Artificial Sequence: Synthetic oligonucleotide
  Antisense strand to SEQ ID NO: 965524
gucauuacaaaucaauugc

SEQ ID NO: 965526 - RNA, 19 nt, Artificial Sequence
  Description of Artificial Sequence: Synthetic oligonucleotide
  Sense strand starting at position 3503 of SEQ ID NO: 913937
ccagaaauagucuagguuu

SEQ ID NO: 965527 - RNA, 19 nt, Artificial Sequence
  Description of Artificial Sequence: Synthetic oligonucleotide
  Antisense strand to SEQ ID NO: 965526
aaaccuagacuauuucugg

SEQ ID NO: 965528 - RNA, 19 nt, Artificial Sequence
  Description of Artificial Sequence: Synthetic oligonucleotide
  Sense strand starting at position 557 of SEQ ID NO: 913937
gggugcuugggagaaacuu

SEQ ID NO: 965529 - RNA, 19 nt, Artificial Sequence
  Description of Artificial Sequence: Synthetic oligonucleotide
  Antisense strand to SEQ ID NO: 965528
aaguuucucccaagcaccc

SEQ ID NO: 965530 - RNA, 19 nt, Artificial Sequence
  Description of Artificial Sequence: Synthetic oligonucleotide
  Sense strand starting at position 3179 of SEQ ID NO: 913937
gcagaacuugagcacuuaa

SEQ ID NO: 965531 - RNA, 19 nt, Artificial Sequence
  Description of Artificial Sequence: Synthetic oligonucleotide
  Antisense strand to SEQ ID NO: 965530
uuaagugcucaaguucugc

SEQ ID NO: 965532 - RNA, 19 nt, Artificial Sequence
  Description of Artificial Sequence: Synthetic oligonucleotide
  Sense strand starting at position 16 of SEQ ID NO: 913937
uccagagugccugaacaau

SEQ ID NO: 965533 - RNA, 19 nt, Artificial Sequence
  Description of Artificial Sequence: Synthetic oligonucleotide
  Antisense strand to SEQ ID NO: 965532
auuguucaggcacucugga

SEQ ID NO: 965534 - RNA, 19 nt, Artificial Sequence
  Description of Artificial Sequence: Synthetic oligonucleotide
  Sense strand starting at position 3102 of SEQ ID NO: 913937
uuuccagacuaugugaaau

SEQ ID NO: 965535 - RNA, 19 nt, Artificial Sequence
  Description of Artificial Sequence: Synthetic oligonucleotide
  Antisense strand to SEQ ID NO: 965534
auuucacauagucuggaaa

SEQ ID NO: 965536 - RNA, 19 nt, Artificial Sequence
  Description of Artificial Sequence: Synthetic oligonucleotide
  Sense strand starting at position 3169 of SEQ ID NO: 913937
cuggguuggcgcagaacuu

SEQ ID NO: 965537 - RNA, 19 nt, Artificial Sequence
  Description of Artificial Sequence: Synthetic oligonucleotide
  Antisense strand to SEQ ID NO: 965536
aaguucugcgccaacccag

SEQ ID NO: 965538 - RNA, 19 nt, Artificial Sequence
  Description of Artificial Sequence: Synthetic oligonucleotide
  Sense strand starting at position 3603 of SEQ ID NO: 913937
guuugugacaacgaugaca

SEQ ID NO: 965539 - RNA, 19 nt, Artificial Sequence
  Description of Artificial Sequence: Synthetic oligonucleotide
  Antisense strand to SEQ ID NO: 965538
ugucaucguugucacaaac

SEQ ID NO: 965540 - RNA, 19 nt, Artificial Sequence
  Description of Artificial Sequence: Synthetic oligonucleotide
  Sense strand starting at position 132 of SEQ ID NO: 913937
ucagcuuugcaagauaaac

SEQ ID NO: 965541 - RNA, 19 nt, Artificial Sequence
  Description of Artificial Sequence: Synthetic oligonucleotide
  Antisense strand to SEQ ID NO: 965540
guuuaucuugcaaagcuga

SEQ ID NO: 965542 - RNA, 19 nt, Artificial Sequence
  Description of Artificial Sequence: Synthetic oligonucleotide
  Sense strand starting at position 849 of SEQ ID NO: 913937
gugggaucagcucaguaaa

SEQ ID NO: 965543 - RNA, 19 nt, Artificial Sequence
  Description of Artificial Sequence: Synthetic oligonucleotide
  Antisense strand to SEQ ID NO: 965542
uuuacugagcugaucccac

SEQ ID NO: 965544 - RNA, 19 nt, Artificial Sequence
  Description of Artificial Sequence: Synthetic oligonucleotide
  Sense strand starting at position 467 of SEQ ID NO: 913937
ggccacugucgggaacaaa

SEQ ID NO: 965545 - RNA, 19 nt, Artificial Sequence
  Description of Artificial Sequence: Synthetic oligonucleotide
  Antisense strand to SEQ ID NO: 965544
uuuguucccgacaguggcc

SEQ ID NO: 965546 - RNA, 19 nt, Artificial Sequence
  Description of Artificial Sequence: Synthetic oligonucleotide
  Sense strand starting at position 3101 of SEQ ID NO: 913937
cuuuccagacuaugugaaa

SEQ ID NO: 965547 - RNA, 19 nt, Artificial Sequence
  Description of Artificial Sequence: Synthetic oligonucleotide
  Antisense strand to SEQ ID NO: 965546
uuucacauagucuggaaag

SEQ ID NO: 965548 - RNA, 19 nt, Artificial Sequence
  Description of Artificial Sequence: Synthetic oligonucleotide
  Sense strand starting at position 3529 of SEQ ID NO: 913937
uccacucagccaugggaaa

SEQ ID NO: 965549 - RNA, 19 nt, Artificial Sequence
  Description of Artificial Sequence: Synthetic oligonucleotide
  Antisense strand to SEQ ID NO: 965548
uuucccauggcugagugga

SEQ ID NO: 965550 - RNA, 19 nt, Artificial Sequence
  Description of Artificial Sequence: Synthetic oligonucleotide
  Sense strand starting at position 356 of SEQ ID NO: 913937
cuuaauuucugagagaacu

SEQ ID NO: 965551 - RNA, 19 nt, Artificial Sequence
  Description of Artificial Sequence: Synthetic oligonucleotide
  Antisense strand to SEQ ID NO: 965550
aguucucucagaaauuaag

SEQ ID NO: 965552 - RNA, 19 nt, Artificial Sequence
  Description of Artificial Sequence: Synthetic oligonucleotide
  Sense strand starting at position 354 of SEQ ID NO: 913937
uucuuaauuucugagagaa

SEQ ID NO: 965553 - RNA, 19 nt, Artificial Sequence
  Description of Artificial Sequence: Synthetic oligonucleotide
  Antisense strand to SEQ ID NO: 965552
uucucucagaaauuaagaa

SEQ ID NO: 965554 - RNA, 19 nt, Artificial Sequence
  Description of Artificial Sequence: Synthetic oligonucleotide
  Sense strand starting at position 851 of SEQ ID NO: 913937
gggaucagcucaguaaaug

SEQ ID NO: 965555 - RNA, 19 nt, Artificial Sequence
  Description of Artificial Sequence: Synthetic oligonucleotide
  Antisense strand to SEQ ID NO: 965554
cauuuacugagcugauccc

SEQ ID NO: 965556 - RNA, 19 nt, Artificial Sequence
  Description of Artificial Sequence: Synthetic oligonucleotide
  Sense strand starting at position 3726 of SEQ ID NO: 913937
guauacuacuaguuuagaa

SEQ ID NO: 965557 - RNA, 19 nt, Artificial Sequence
  Description of Artificial Sequence: Synthetic oligonucleotide
  Antisense strand to SEQ ID NO: 965556
uucuaaacuaguaguauac

SEQ ID NO: 965558 - RNA, 19 nt, Artificial Sequence
  Description of Artificial Sequence: Synthetic oligonucleotide
  Sense strand starting at position 3733 of SEQ ID NO: 913937
acuaguuuagaauguauac

SEQ ID NO: 965559 - RNA, 19 nt, Artificial Sequence
  Description of Artificial Sequence: Synthetic oligonucleotide
  Antisense strand to SEQ ID NO: 965558
guauacauucuaaacuagu

SEQ ID NO: 965560 - RNA, 19 nt, Artificial Sequence
  Description of Artificial Sequence: Synthetic oligonucleotide
  Sense strand starting at position 3542 of SEQ ID NO: 913937
gggaaaggcuccuccuacu

SEQ ID NO: 965561 - RNA, 19 nt, Artificial Sequence
  Description of Artificial Sequence: Synthetic oligonucleotide
  Antisense strand to SEQ ID NO: 965560
aguaggaggagccuuuccc

SEQ ID NO: 965562 - RNA, 19 nt, Artificial Sequence
  Description of Artificial Sequence: Synthetic oligonucleotide
  Sense strand starting at position 654 of SEQ ID NO: 913937
agaggaaugcugugaagug

SEQ ID NO: 965563 - RNA, 19 nt, Artificial Sequence
  Description of Artificial Sequence: Synthetic oligonucleotide
  Antisense strand to SEQ ID NO: 965562
cacuucacagcauuccucu

SEQ ID NO: 965564 - RNA, 19 nt, Artificial Sequence
  Description of Artificial Sequence: Synthetic oligonucleotide
  Sense strand starting at position 1478 of SEQ ID NO: 913937
caggaagcgccauauugau

SEQ ID NO: 965565 - RNA, 19 nt, Artificial Sequence
  Description of Artificial Sequence: Synthetic oligonucleotide
  Antisense strand to SEQ ID NO: 965564
aucaauauggcgcuuccug

SEQ ID NO: 965566 - RNA, 19 nt, Artificial Sequence
  Description of Artificial Sequence: Synthetic oligonucleotide
  Sense strand starting at position 3595 of SEQ ID NO: 913937
guaauuaaguuugugacaa

SEQ ID NO: 965567 - RNA, 19 nt, Artificial Sequence
  Description of Artificial Sequence: Synthetic oligonucleotide
  Antisense strand to SEQ ID NO: 965566
uugucacaaacuuaauuac

SEQ ID NO: 965568 - RNA, 19 nt, Artificial Sequence
  Description of Artificial Sequence: Synthetic oligonucleotide
  Sense strand starting at position 3594 of SEQ ID NO: 913937
aguaauuaaguuugugaca

SEQ ID NO: 965569 - RNA, 19 nt, Artificial Sequence
  Description of Artificial Sequence: Synthetic oligonucleotide
  Antisense strand to SEQ ID NO: 965568
ugucacaaacuuaauuacu

SEQ ID NO: 965570 - RNA, 19 nt, Artificial Sequence
  Description of Artificial Sequence: Synthetic oligonucleotide
  Sense strand starting at position 3136 of SEQ ID NO: 913937
guuuccaagacacgugaaa

SEQ ID NO: 965571 - RNA, 19 nt, Artificial Sequence
  Description of Artificial Sequence: Synthetic oligonucleotide
  Antisense strand to SEQ ID NO: 965570
uuucacgugucuuggaaac

SEQ ID NO: 965572 - RNA, 19 nt, Artificial Sequence
  Description of Artificial Sequence: Synthetic oligonucleotide
  Sense strand starting at position 403 of SEQ ID NO: 913937
gcucaauagggcugaccaa

SEQ ID NO: 965573 - RNA, 19 nt, Artificial Sequence
  Description of Artificial Sequence: Synthetic oligonucleotide
  Antisense strand to SEQ ID NO: 965572
uuggucagcccuauugagc

SEQ ID NO: 965574 - RNA, 19 nt, Artificial Sequence
  Description of Artificial Sequence: Synthetic oligonucleotide
  Sense strand starting at position 2788 of SEQ ID NO: 913937
uuugaaguucugcagcaua

SEQ ID NO: 965575 - RNA, 19 nt, Artificial Sequence
  Description of Artificial Sequence: Synthetic oligonucleotide
  Antisense strand to SEQ ID NO: 965574
uaugcugcagaacuucaaa

SEQ ID NO: 965576 - RNA, 19 nt, Artificial Sequence
  Description of Artificial Sequence: Synthetic oligonucleotide
  Sense strand starting at position 3684 of SEQ ID NO: 913937
ugauaauuauagguguugu

SEQ ID NO: 965577 - RNA, 19 nt, Artificial Sequence
  Description of Artificial Sequence: Synthetic oligonucleotide
  Antisense strand to SEQ ID NO: 965576
acaacaccuauaauuauca

SEQ ID NO: 965578 - RNA, 19 nt, Artificial Sequence
  Description of Artificial Sequence: Synthetic oligonucleotide
  Sense strand starting at position 3132 of SEQ ID NO: 913937
aguuguuuccaagacacgu

SEQ ID NO: 965579 - RNA, 19 nt, Artificial Sequence
  Description of Artificial Sequence: Synthetic oligonucleotide
  Antisense strand to SEQ ID NO: 965578
acgugucuuggaaacaacu

SEQ ID NO: 965580 - RNA, 19 nt, Artificial Sequence
  Description of Artificial Sequence: Synthetic oligonucleotide
  Sense strand starting at position 2702 of SEQ ID NO: 913937
ccuugaaguuuccuguuga

SEQ ID NO: 965581 - RNA, 19 nt, Artificial Sequence
  Description of Artificial Sequence: Synthetic oligonucleotide
  Antisense strand to SEQ ID NO: 965580
ucaacaggaaacuucaagg

SEQ ID NO: 965582 - RNA, 19 nt, Artificial Sequence
  Description of Artificial Sequence: Synthetic oligonucleotide
  Sense strand starting at position 353 of SEQ ID NO: 913937
cuucuuaauuucugagaga

SEQ ID NO: 965583 - RNA, 19 nt, Artificial Sequence
  Description of Artificial Sequence: Synthetic oligonucleotide
  Antisense strand to SEQ ID NO: 965582
ucucucagaaauuaagaag

SEQ ID NO: 965584 - RNA, 19 nt, Artificial Sequence
  Description of Artificial Sequence: Synthetic oligonucleotide
  Sense strand starting at position 525 of SEQ ID NO: 913937
agaggacucuacuacaaag

SEQ ID NO: 965585 - RNA, 19 nt, Artificial Sequence
  Description of Artificial Sequence: Synthetic oligonucleotide
  Antisense strand to SEQ ID NO: 965584
cuuuguaguagaguccucu

SEQ ID NO: 965586 - RNA, 19 nt, Artificial Sequence
  Description of Artificial Sequence: Synthetic oligonucleotide
  Sense strand starting at position 3178 of SEQ ID NO: 913937
cgcagaacuugagcacuua

SEQ ID NO: 965587 - RNA, 19 nt, Artificial Sequence
  Description of Artificial Sequence: Synthetic oligonucleotide
  Antisense strand to SEQ ID NO: 965586
uaagugcucaaguucugcg

SEQ ID NO: 965588 - RNA, 19 nt, Artificial Sequence
  Description of Artificial Sequence: Synthetic oligonucleotide
  Sense strand starting at position 3866 of SEQ ID NO: 913937
ggcgugauuucggcucagu

SEQ ID NO: 965589 - RNA, 19 nt, Artificial Sequence
  Description of Artificial Sequence: Synthetic oligonucleotide
  Antisense strand to SEQ ID NO: 965588
acugagccgaaaucacgcc

SEQ ID NO: 965590 - RNA, 19 nt, Artificial Sequence
  Description of Artificial Sequence: Synthetic oligonucleotide
  Sense strand starting at position 128 of SEQ ID NO: 913937
uuugucagcuuugcaagau

SEQ ID NO: 965591 - RNA, 19 nt, Artificial Sequence
  Description of Artificial Sequence: Synthetic oligonucleotide
  Antisense strand to SEQ ID NO: 965590
aucuugcaaagcugacaaa

SEQ ID NO: 965592 - RNA, 19 nt, Artificial Sequence
  Description of Artificial Sequence: Synthetic oligonucleotide
  Sense strand starting at position 2787 of SEQ ID NO: 913937
cuuugaaguucugcagcau

SEQ ID NO: 965593 - RNA, 19 nt, Artificial Sequence
  Description of Artificial Sequence: Synthetic oligonucleotide
  Antisense strand to SEQ ID NO: 965592
augcugcagaacuucaaag

SEQ ID NO: 965594 - RNA, 19 nt, Artificial Sequence
  Description of Artificial Sequence: Synthetic oligonucleotide
  Sense strand starting at position 2764 of SEQ ID NO: 913937
ucgcaauucugauacauuu

SEQ ID NO: 965595 - RNA, 19 nt, Artificial Sequence
  Description of Artificial Sequence: Synthetic oligonucleotide
  Antisense strand to SEQ ID NO: 965594
aaauguaucagaauugcga

SEQ ID NO: 965596 - RNA, 19 nt, Artificial Sequence
  Description of Artificial Sequence: Synthetic oligonucleotide
  Sense strand starting at position 127 of SEQ ID NO: 913937
cuuugucagcuuugcaaga

SEQ ID NO: 965597 - RNA, 19 nt, Artificial Sequence
  Description of Artificial Sequence: Synthetic oligonucleotide
  Antisense strand to SEQ ID NO: 965596
ucuugcaaagcugacaaag

SEQ ID NO: 965598 - RNA, 19 nt, Artificial Sequence
  Description of Artificial Sequence: Synthetic oligonucleotide
  Sense strand starting at position 422 of SEQ ID NO: 913937
gccacuuuccaacgucauu

SEQ ID NO: 965599 - RNA, 19 nt, Artificial Sequence
  Description of Artificial Sequence: Synthetic oligonucleotide
  Antisense strand to SEQ ID NO: 965598
aaugacguuggaaaguggc

SEQ ID NO: 965600 - RNA, 19 nt, Artificial Sequence
  Description of Artificial Sequence: Synthetic oligonucleotide
  Sense strand starting at position 2606 of SEQ ID NO: 913937
ggcaguucugccugaaacg

SEQ ID NO: 965601 - RNA, 19 nt, Artificial Sequence
  Description of Artificial Sequence: Synthetic oligonucleotide
  Antisense strand to SEQ ID NO: 965600
cguuucaggcagaacugcc

SEQ ID NO: 965602 - RNA, 19 nt, Artificial Sequence
  Description of Artificial Sequence: Synthetic oligonucleotide
  Sense strand starting at position 3407 of SEQ ID NO: 913937
aaaucagugcagugguguu

SEQ ID NO: 965603 - RNA, 19 nt, Artificial Sequence
  Description of Artificial Sequence: Synthetic oligonucleotide
  Antisense strand to SEQ ID NO: 965602
aacaccacugcacugauuu

SEQ ID NO: 965604 - RNA, 19 nt, Artificial Sequence
  Description of Artificial Sequence: Synthetic oligonucleotide
  Sense strand starting at position 287 of SEQ ID NO: 913937
aggccaaauuuaugcuauu

SEQ ID NO: 965605 - RNA, 19 nt, Artificial Sequence
  Description of Artificial Sequence: Synthetic oligonucleotide
  Antisense strand to SEQ ID NO: 965604
aauagcauaaauuuggccu

SEQ ID NO: 965606 - RNA, 19 nt, Artificial Sequence
  Description of Artificial Sequence: Synthetic oligonucleotide
  Sense strand starting at position 2610 of SEQ ID NO: 913938
gugauugacccuuaagagu

SEQ ID NO: 965607 - RNA, 19 nt, Artificial Sequence
  Description of Artificial Sequence: Synthetic oligonucleotide
  Antisense strand to SEQ ID NO: 965606
acucuuaagggucaaucac

SEQ ID NO: 965608 - RNA, 19 nt, Artificial Sequence
  Description of Artificial Sequence: Synthetic oligonucleotide
  Sense strand starting at position 2746 of SEQ ID NO: 913938
uugcauguaagugagaaau

SEQ ID NO: 965609 - RNA, 19 nt, Artificial Sequence
  Description of Artificial Sequence: Synthetic oligonucleotide
  Antisense strand to SEQ ID NO: 965608
auuucucacuuacaugcaa

SEQ ID NO: 965610 - RNA, 19 nt, Artificial Sequence
  Description of Artificial Sequence: Synthetic oligonucleotide
  Sense strand starting at position 1401 of SEQ ID NO: 913938
ggaccucaagagugacgau

SEQ ID NO: 965611 - RNA, 19 nt, Artificial Sequence
  Description of Artificial Sequence: Synthetic oligonucleotide
  Antisense strand to SEQ ID NO: 965610
aucgucacucuugaggucc

SEQ ID NO: 965612 - RNA, 19 nt, Artificial Sequence
  Description of Artificial Sequence: Synthetic oligonucleotide
  Sense strand starting at position 1395 of SEQ ID NO: 913938
gcaaguggaccucaagagu

SEQ ID NO: 965613 - RNA, 19 nt, Artificial Sequence
  Description of Artificial Sequence: Synthetic oligonucleotide
  Antisense strand to SEQ ID NO: 965612
acucuugagguccacuugc

SEQ ID NO: 965614 - RNA, 19 nt, Artificial Sequence
  Description of Artificial Sequence: Synthetic oligonucleotide
  Sense strand starting at position 3884 of SEQ ID NO: 913938
gagucaugagauugugaug

SEQ ID NO: 965615 - RNA, 19 nt, Artificial Sequence
  Description of Artificial Sequence: Synthetic oligonucleotide
  Antisense strand to SEQ ID NO: 965614
caucacaaucucaugacuc

SEQ ID NO: 965616 - RNA, 19 nt, Artificial Sequence
  Description of Artificial Sequence: Synthetic oligonucleotide
  Sense strand starting at position 2635 of SEQ ID NO: 913938
cagcuuugggaguaaaugu

SEQ ID NO: 965617 - RNA, 19 nt, Artificial Sequence
  Description of Artificial Sequence: Synthetic oligonucleotide
  Antisense strand to SEQ ID NO: 965616
acauuuacucccaaagcug

SEQ ID NO: 965618 - RNA, 19 nt, Artificial Sequence
  Description of Artificial Sequence: Synthetic oligonucleotide
  Sense strand starting at position 2683 of SEQ ID NO: 913938
uuuaguacacagugacaua

SEQ ID NO: 965619 - RNA, 19 nt, Artificial Sequence
  Description of Artificial Sequence: Synthetic oligonucleotide
  Antisense strand to SEQ ID NO: 965618
uaugucacuguguacuaaa

SEQ ID NO: 965620 - RNA, 19 nt, Artificial Sequence
  Description of Artificial Sequence: Synthetic oligonucleotide
  Sense strand starting at position 2745 of SEQ ID NO: 913938
auugcauguaagugagaaa

SEQ ID NO: 965621 - RNA, 19 nt, Artificial Sequence
  Description of Artificial Sequence: Synthetic oligonucleotide
  Antisense strand to SEQ ID NO: 965620
uuucucacuuacaugcaau

SEQ ID NO: 965622 - RNA, 19 nt, Artificial Sequence
  Description of Artificial Sequence: Synthetic oligonucleotide
  Sense strand starting at position 2861 of SEQ ID NO: 913938
uaagaauuauaggaaagga

SEQ ID NO: 965623 - RNA, 19 nt, Artificial Sequence
  Description of Artificial Sequence: Synthetic oligonucleotide
  Antisense strand to SEQ ID NO: 965622
uccuuuccuauaauucuua

SEQ ID NO: 965624 - RNA, 19 nt, Artificial Sequence
  Description of Artificial Sequence: Synthetic oligonucleotide
  Sense strand starting at position 2744 of SEQ ID NO: 913938
uauugcauguaagugagaa

SEQ ID NO: 965625 - RNA, 19 nt, Artificial Sequence
  Description of Artificial Sequence: Synthetic oligonucleotide
  Antisense strand to SEQ ID NO: 965624
uucucacuuacaugcaaua

SEQ ID NO: 965626 - RNA, 19 nt, Artificial Sequence
  Description of Artificial Sequence: Synthetic oligonucleotide
  Sense strand starting at position 3362 of SEQ ID NO: 913938
cugggaaucuagguacgua

SEQ ID NO: 965627 - RNA, 19 nt, Artificial Sequence
  Description of Artificial Sequence: Synthetic oligonucleotide
  Antisense strand to SEQ ID NO: 965626
uacguaccuagauucccag

SEQ ID NO: 965628 - RNA, 19 nt, Artificial Sequence
  Description of Artificial Sequence: Synthetic oligonucleotide
  Sense strand starting at position 2719 of SEQ ID NO: 913938
gccguaagggcagaauauu

SEQ ID NO: 965629 - RNA, 19 nt, Artificial Sequence
  Description of Artificial Sequence: Synthetic oligonucleotide
  Antisense strand to SEQ ID NO: 965628
aauauucugcccuuacggc

SEQ ID NO: 965630 - RNA, 19 nt, Artificial Sequence
  Description of Artificial Sequence: Synthetic oligonucleotide
  Sense strand starting at position 2858 of SEQ ID NO: 913938
agguaagaauuauaggaaa

SEQ ID NO: 965631 - RNA, 19 nt, Artificial Sequence
  Description of Artificial Sequence: Synthetic oligonucleotide
  Antisense strand to SEQ ID NO: 965630
uuuccuauaauucuuaccu

SEQ ID NO: 965632 - RNA, 19 nt, Artificial Sequence
  Description of Artificial Sequence: Synthetic oligonucleotide
  Sense strand starting at position 2934 of SEQ ID NO: 913938
cggucuugugaauauguuu

SEQ ID NO: 965633 - RNA, 19 nt, Artificial Sequence
  Description of Artificial Sequence: Synthetic oligonucleotide
  Antisense strand to SEQ ID NO: 965632
aaacauauucacaagaccg

SEQ ID NO: 965634 - RNA, 19 nt, Artificial Sequence
  Description of Artificial Sequence: Synthetic oligonucleotide
  Sense strand starting at position 2357 of SEQ ID NO: 913938
uugcguuuacacuaaaguu

SEQ ID NO: 965635 - RNA, 19 nt, Artificial Sequence
  Description of Artificial Sequence: Synthetic oligonucleotide
  Antisense strand to SEQ ID NO: 965634
aacuuuaguguaaacgcaa

SEQ ID NO: 965636 - RNA, 19 nt, Artificial Sequence
  Description of Artificial Sequence: Synthetic oligonucleotide
  Sense strand starting at position 2739 of SEQ ID NO: 913938
aguaauauugcauguaagu

SEQ ID NO: 965637 - RNA, 19 nt, Artificial Sequence
  Description of Artificial Sequence: Synthetic oligonucleotide
  Antisense strand to SEQ ID NO: 965636
acuuacaugcaauauuacu

SEQ ID NO: 965638 - RNA, 19 nt, Artificial Sequence
  Description of Artificial Sequence: Synthetic oligonucleotide
  Sense strand starting at position 2606 of SEQ ID NO: 913938
ccgugugauugacccuuaa

SEQ ID NO: 965639 - RNA, 19 nt, Artificial Sequence
  Description of Artificial Sequence: Synthetic oligonucleotide
  Antisense strand to SEQ ID NO: 965638
uuaagggucaaucacacgg

SEQ ID NO: 965640 - RNA, 19 nt, Artificial Sequence
  Description of Artificial Sequence: Synthetic oligonucleotide
  Sense strand starting at position 2352 of SEQ ID NO: 913938
gguucuugcguuuacacua

SEQ ID NO: 965641 - RNA, 19 nt, Artificial Sequence
  Description of Artificial Sequence: Synthetic oligonucleotide
  Antisense strand to SEQ ID NO: 965640
uaguguaaacgcaagaacc

SEQ ID NO: 965642 - RNA, 19 nt, Artificial Sequence
  Description of Artificial Sequence: Synthetic oligonucleotide
  Sense strand starting at position 3851 of SEQ ID NO: 913938
uuuagugauaagugcugua

SEQ ID NO: 965643 - RNA, 19 nt, Artificial Sequence
  Description of Artificial Sequence: Synthetic oligonucleotide
  Antisense strand to SEQ ID NO: 965642
uacagcacuuaucacuaaa

SEQ ID NO: 965644 - RNA, 19 nt, Artificial Sequence
  Description of Artificial Sequence: Synthetic oligonucleotide
  Sense strand starting at position 3887 of SEQ ID NO: 913938
ucaugagauugugauggaa

SEQ ID NO: 965645 - RNA, 19 nt, Artificial Sequence
  Description of Artificial Sequence: Synthetic oligonucleotide
  Antisense strand to SEQ ID NO: 965644
uuccaucacaaucucauga

SEQ ID NO: 965646 - RNA, 19 nt, Artificial Sequence
  Description of Artificial Sequence: Synthetic oligonucleotide
  Sense strand starting at position 2349 of SEQ ID NO: 913938
acugguucuugcguuuaca

SEQ ID NO: 965647 - RNA, 19 nt, Artificial Sequence
  Description of Artificial Sequence: Synthetic oligonucleotide
  Antisense strand to SEQ ID NO: 965646
uguaaacgcaagaaccagu

SEQ ID NO: 965648 - RNA, 19 nt, Artificial Sequence
  Description of Artificial Sequence: Synthetic oligonucleotide
  Sense strand starting at position 2748 of SEQ ID NO: 913938
gcauguaagugagaaauaa

SEQ ID NO: 965649 - RNA, 19 nt, Artificial Sequence
  Description of Artificial Sequence: Synthetic oligonucleotide
  Antisense strand to SEQ ID NO: 965648
uuauuucucacuuacaugc

SEQ ID NO: 965650 - RNA, 19 nt, Artificial Sequence
  Description of Artificial Sequence: Synthetic oligonucleotide
  Sense strand starting at position 3878 of SEQ ID NO: 913938
aaagcagagucaugagauu

SEQ ID NO: 965651 - RNA, 19 nt, Artificial Sequence
  Description of Artificial Sequence: Synthetic oligonucleotide
  Antisense strand to SEQ ID NO: 965650
aaucucaugacucugcuuu

SEQ ID NO: 965652 - RNA, 19 nt, Artificial Sequence
  Description of Artificial Sequence: Synthetic oligonucleotide
  Sense strand starting at position 2737 of SEQ ID NO: 913938
ucaguaauauugcauguaa

SEQ ID NO: 965653 - RNA, 19 nt, Artificial Sequence
  Description of Artificial Sequence: Synthetic oligonucleotide
  Antisense strand to SEQ ID NO: 965652
uuacaugcaauauuacuga

SEQ ID NO: 965654 - RNA, 19 nt, Artificial Sequence
  Description of Artificial Sequence: Synthetic oligonucleotide
  Sense strand starting at position 3844 of SEQ ID NO: 913938
cauugccuuuagugauaag

SEQ ID NO: 965655 - RNA, 19 nt, Artificial Sequence
  Description of Artificial Sequence: Synthetic oligonucleotide
  Antisense strand to SEQ ID NO: 965654
cuuaucacuaaaggcaaug

SEQ ID NO: 965656 - RNA, 19 nt, Artificial Sequence
  Description of Artificial Sequence: Synthetic oligonucleotide
  Sense strand starting at position 2928 of SEQ ID NO: 913938
ucuccucggucuugugaau

SEQ ID NO: 965657 - RNA, 19 nt, Artificial Sequence
  Description of Artificial Sequence: Synthetic oligonucleotide
  Antisense strand to SEQ ID NO: 965656
auucacaagaccgaggaga

SEQ ID NO: 965658 - RNA, 19 nt, Artificial Sequence
  Description of Artificial Sequence: Synthetic oligonucleotide
  Sense strand starting at position 1632 of SEQ ID NO: 913938
gccucugccugcugggaaa

SEQ ID NO: 965659 - RNA, 19 nt, Artificial Sequence
  Description of Artificial Sequence: Synthetic oligonucleotide
  Antisense strand to SEQ ID NO: 965658
uuucccagcaggcagaggc

SEQ ID NO: 965660 - RNA, 19 nt, Artificial Sequence
  Description of Artificial Sequence: Synthetic oligonucleotide
  Sense strand starting at position 924 of SEQ ID NO: 913939
gacucuuaaguuugagaaa

SEQ ID NO: 965661 - RNA, 19 nt, Artificial Sequence
  Description of Artificial Sequence: Synthetic oligonucleotide
  Antisense strand to SEQ ID NO: 965660
uuucucaaacuuaagaguc

SEQ ID NO: 965662 - RNA, 19 nt, Artificial Sequence
  Description of Artificial Sequence: Synthetic oligonucleotide
  Sense strand starting at position 2211 of SEQ ID NO: 913939
auggaugacuugucagaca

SEQ ID NO: 965663 - RNA, 19 nt, Artificial Sequence
  Description of Artificial Sequence: Synthetic oligonucleotide
  Antisense strand to SEQ ID NO: 965662
ugucugacaagucauccau

SEQ ID NO: 965664 - RNA, 19 nt, Artificial Sequence
  Description of Artificial Sequence: Synthetic oligonucleotide
  Sense strand starting at position 699 of SEQ ID NO: 913939
ugggauucccaaugugaag

SEQ ID NO: 965665 - RNA, 19 nt, Artificial Sequence
  Description of Artificial Sequence: Synthetic oligonucleotide
  Antisense strand to SEQ ID NO: 965664
cuucacauugggaauccca

SEQ ID NO: 965666 - RNA, 19 nt, Artificial Sequence
  Description of Artificial Sequence: Synthetic oligonucleotide
  Sense strand starting at position 2452 of SEQ ID NO: 913939
gaaacucgccgauaagaua

SEQ ID NO: 965667 - RNA, 19 nt, Artificial Sequence
  Description of Artificial Sequence: Synthetic oligonucleotide
  Antisense strand to SEQ ID NO: 965666
uaucuuaucggcgaguuuc

SEQ ID NO: 965668 - RNA, 19 nt, Artificial Sequence
  Description of Artificial Sequence: Synthetic oligonucleotide
  Sense strand starting at position 1113 of SEQ ID NO: 913939
cguggaucccaugaccuaa

SEQ ID NO: 965669 - RNA, 19 nt, Artificial Sequence
  Description of Artificial Sequence: Synthetic oligonucleotide
  Antisense strand to SEQ ID NO: 965668
uuaggucaugggauccacg

SEQ ID NO: 965670 - RNA, 19 nt, Artificial Sequence
  Description of Artificial Sequence: Synthetic oligonucleotide
  Sense strand starting at position 264 of SEQ ID NO: 913939
agcuaaagacauggcauaa

SEQ ID NO: 965671 - RNA, 19 nt, Artificial Sequence
  Description of Artificial Sequence: Synthetic oligonucleotide
  Antisense strand to SEQ ID NO: 965670
uuaugccaugucuuuagcu

SEQ ID NO: 965672 - RNA, 19 nt, Artificial Sequence
  Description of Artificial Sequence: Synthetic oligonucleotide
  Sense strand starting at position 59 of SEQ ID NO: 913939
cuaaauauaugauuagcga

SEQ ID NO: 965673 - RNA, 19 nt, Artificial Sequence
  Description of Artificial Sequence: Synthetic oligonucleotide
  Antisense strand to SEQ ID NO: 965672
ucgcuaaucauauauuuag

SEQ ID NO: 965674 - RNA, 19 nt, Artificial Sequence
  Description of Artificial Sequence: Synthetic oligonucleotide
  Sense strand starting at position 2450 of SEQ ID NO: 913939
acgaaacucgccgauaaga

SEQ ID NO: 965675 - RNA, 19 nt, Artificial Sequence
  Description of Artificial Sequence: Synthetic oligonucleotide
  Antisense strand to SEQ ID NO: 965674
ucuuaucggcgaguuucgu

SEQ ID NO: 965676 - RNA, 19 nt, Artificial Sequence
  Description of Artificial Sequence: Synthetic oligonucleotide
  Sense strand starting at position 893 of SEQ ID NO: 913939
cugaauacucuuggagucu

SEQ ID NO: 965677 - RNA, 19 nt, Artificial Sequence
  Description of Artificial Sequence: Synthetic oligonucleotide
  Antisense strand to SEQ ID NO: 965676
agacuccaagaguauucag

SEQ ID NO: 965678 - RNA, 19 nt, Artificial Sequence
  Description of Artificial Sequence: Synthetic oligonucleotide
  Sense strand starting at position 133 of SEQ ID NO: 913939
ucuaaaguuuccuugugaa

SEQ ID NO: 965679 - RNA, 19 nt, Artificial Sequence
  Description of Artificial Sequence: Synthetic oligonucleotide
  Antisense strand to SEQ ID NO: 965678
uucacaaggaaacuuuaga

SEQ ID NO: 965680 - RNA, 19 nt, Artificial Sequence
  Description of Artificial Sequence: Synthetic oligonucleotide
  Sense strand starting at position 3456 of SEQ ID NO: 913939
gcccgaauccgagauuccu

SEQ ID NO: 965681 - RNA, 19 nt, Artificial Sequence
  Description of Artificial Sequence: Synthetic oligonucleotide
  Antisense strand to SEQ ID NO: 965680
aggaaucucggauucgggc

SEQ ID NO: 965682 - RNA, 19 nt, Artificial Sequence
  Description of Artificial Sequence: Synthetic oligonucleotide
  Sense strand starting at position 2448 of SEQ ID NO: 913939
aaacgaaacucgccgauaa

SEQ ID NO: 965683 - RNA, 19 nt, Artificial Sequence
  Description of Artificial Sequence: Synthetic oligonucleotide
  Antisense strand to SEQ ID NO: 965682
uuaucggcgaguuucguuu

SEQ ID NO: 965684 - RNA, 19 nt, Artificial Sequence
  Description of Artificial Sequence: Synthetic oligonucleotide
  Sense strand starting at position 2879 of SEQ ID NO: 913939
ccagaacgcuugguucaga

SEQ ID NO: 965685 - RNA, 19 nt, Artificial Sequence
  Description of Artificial Sequence: Synthetic oligonucleotide
  Antisense strand to SEQ ID NO: 965684
ucugaaccaagcguucugg

SEQ ID NO: 965686 - RNA, 19 nt, Artificial Sequence
  Description of Artificial Sequence: Synthetic oligonucleotide
  Sense strand starting at position 132 of SEQ ID NO: 913939
gucuaaaguuuccuuguga

SEQ ID NO: 965687 - RNA, 19 nt, Artificial Sequence
  Description of Artificial Sequence: Synthetic oligonucleotide
  Antisense strand to SEQ ID NO: 965686
ucacaaggaaacuuuagac

SEQ ID NO: 965688 - RNA, 19 nt, Artificial Sequence
  Description of Artificial Sequence: Synthetic oligonucleotide
  Sense strand starting at position 677 of SEQ ID NO: 913939
ugaccaucgugucuugaca

SEQ ID NO: 965689 - RNA, 19 nt, Artificial Sequence
  Description of Artificial Sequence: Synthetic oligonucleotide
  Antisense strand to SEQ ID NO: 965688
ugucaagacacgaugguca

SEQ ID NO: 965690 - RNA, 19 nt, Artificial Sequence
  Description of Artificial Sequence: Synthetic oligonucleotide
  Sense strand starting at position 3926 of SEQ ID NO: 913939
ccucuugaggccugcagau

SEQ ID NO: 965691 - RNA, 19 nt, Artificial Sequence
  Description of Artificial Sequence: Synthetic oligonucleotide
  Antisense strand to SEQ ID NO: 965690
aucugcaggccucaagagg

SEQ ID NO: 965692 - RNA, 19 nt, Artificial Sequence
  Description of Artificial Sequence: Synthetic oligonucleotide
  Sense strand starting at position 3787 of SEQ ID NO: 913939
gguaaagucugggaggaaa

SEQ ID NO: 965693 - RNA, 19 nt, Artificial Sequence
  Description of Artificial Sequence: Synthetic oligonucleotide
  Antisense strand to SEQ ID NO: 965692
uuuccucccagacuuuacc

SEQ ID NO: 965694 - RNA, 19 nt, Artificial Sequence
  Description of Artificial Sequence: Synthetic oligonucleotide
  Sense strand starting at position 2214 of SEQ ID NO: 913939
gaugacuugucagacaaag

SEQ ID NO: 965695 - RNA, 19 nt, Artificial Sequence
  Description of Artificial Sequence: Synthetic oligonucleotide
  Antisense strand to SEQ ID NO: 965694
cuuugucugacaagucauc

SEQ ID NO: 965696 - RNA, 19 nt, Artificial Sequence
  Description of Artificial Sequence: Synthetic oligonucleotide
  Sense strand starting at position 3402 of SEQ ID NO: 913939
cuucccugggucugcgaaa

SEQ ID NO: 965697 - RNA, 19 nt, Artificial Sequence
  Description of Artificial Sequence: Synthetic oligonucleotide
  Antisense strand to SEQ ID NO: 965696
uuucgcagacccagggaag

SEQ ID NO: 965698 - RNA, 19 nt, Artificial Sequence
  Description of Artificial Sequence: Synthetic oligonucleotide
  Sense strand starting at position 927 of SEQ ID NO: 913939
ucuuaaguuugagaaagau

SEQ ID NO: 965699 - RNA, 19 nt, Artificial Sequence
  Description of Artificial Sequence: Synthetic oligonucleotide
  Antisense strand to SEQ ID NO: 965698
aucuuucucaaacuuaaga

SEQ ID NO: 965700 - RNA, 19 nt, Artificial Sequence
  Description of Artificial Sequence: Synthetic oligonucleotide
  Sense strand starting at position 925 of SEQ ID NO: 913939
acucuuaaguuugagaaag

SEQ ID NO: 965701 - RNA, 19 nt, Artificial Sequence
  Description of Artificial Sequence: Synthetic oligonucleotide
  Antisense strand to SEQ ID NO: 965700
cuuucucaaacuuaagagu

SEQ ID NO: 965702 - RNA, 19 nt, Artificial Sequence
  Description of Artificial Sequence: Synthetic oligonucleotide
  Sense strand starting at position 97 of SEQ ID NO: 913939
ucggcucucuuguccuaaa

SEQ ID NO: 965703 - RNA, 19 nt, Artificial Sequence
  Description of Artificial Sequence: Synthetic oligonucleotide
  Antisense strand to SEQ ID NO: 965702
uuuaggacaagagagccga

SEQ ID NO: 965704 - RNA, 19 nt, Artificial Sequence
  Description of Artificial Sequence: Synthetic oligonucleotide
  Sense strand starting at position 3292 of SEQ ID NO: 913939
uacagaauauccgggagau

SEQ ID NO: 965705 - RNA, 19 nt, Artificial Sequence
  Description of Artificial Sequence: Synthetic oligonucleotide
  Antisense strand to SEQ ID NO: 965704
aucucccggauauucugua

SEQ ID NO: 965706 - RNA, 19 nt, Artificial Sequence
  Description of Artificial Sequence: Synthetic oligonucleotide
  Sense strand starting at position 2471 of SEQ ID NO: 913939
aacgcuagauaaggauaaa

SEQ ID NO: 965707 - RNA, 19 nt, Artificial Sequence
  Description of Artificial Sequence: Synthetic oligonucleotide
  Antisense strand to SEQ ID NO: 965706
uuuauccuuaucuagcguu

SEQ ID NO: 965708 - RNA, 19 nt, Artificial Sequence
  Description of Artificial Sequence: Synthetic oligonucleotide
  Sense strand starting at position 348 of SEQ ID NO: 913939
guaacaucaugucaacuuu

SEQ ID NO: 965709 - RNA, 19 nt, Artificial Sequence
  Description of Artificial Sequence: Synthetic oligonucleotide
  Antisense strand to SEQ ID NO: 965708
aaaguugacaugauguuac

SEQ ID NO: 965710 - RNA, 19 nt, Artificial Sequence
  Description of Artificial Sequence: Synthetic oligonucleotide
  Sense strand starting at position 345 of SEQ ID NO: 913939
ucuguaacaucaugucaac

SEQ ID NO: 965711 - RNA, 19 nt, Artificial Sequence
  Description of Artificial Sequence: Synthetic oligonucleotide
  Antisense strand to SEQ ID NO: 965710
guugacaugauguuacaga

SEQ ID NO: 965712 - RNA, 19 nt, Artificial Sequence
  Description of Artificial Sequence: Synthetic oligonucleotide
  Sense strand starting at position 2493 of SEQ ID NO: 913939
cggucagucuaaugaauau

SEQ ID NO: 965713 - RNA, 19 nt, Artificial Sequence
  Description of Artificial Sequence: Synthetic oligonucleotide
  Antisense strand to SEQ ID NO: 965712
auauucauuagacugaccg

SEQ ID NO: 965714 - RNA, 19 nt, Artificial Sequence
  Description of Artificial Sequence: Synthetic oligonucleotide
  Sense strand starting at position 892 of SEQ ID NO: 913939
gcugaauacucuuggaguc

SEQ ID NO: 965715 - RNA, 19 nt, Artificial Sequence
  Description of Artificial Sequence: Synthetic oligonucleotide
  Antisense strand to SEQ ID NO: 965714
gacuccaagaguauucagc

SEQ ID NO: 965716 - RNA, 19 nt, Artificial Sequence
  Description of Artificial Sequence: Synthetic oligonucleotide
  Sense strand starting at position 2884 of SEQ ID NO: 913939
acgcuugguucagaaucga

SEQ ID NO: 965717 - RNA, 19 nt, Artificial Sequence
  Description of Artificial Sequence: Synthetic oligonucleotide
  Antisense strand to SEQ ID NO: 965716
ucgauucugaaccaagcgu

SEQ ID NO: 965718 - RNA, 19 nt, Artificial Sequence
  Description of Artificial Sequence: Synthetic oligonucleotide
  Sense strand starting at position 870 of SEQ ID NO: 913939
gcccaauuguccugacacu

SEQ ID NO: 965719 - RNA, 19 nt, Artificial Sequence
  Description of Artificial Sequence: Synthetic oligonucleotide
  Antisense strand to SEQ ID NO: 965718
agugucaggacaauugggc

SEQ ID NO: 965720 - RNA, 19 nt, Artificial Sequence
  Description of Artificial Sequence: Synthetic oligonucleotide
  Sense strand starting at position 2730 of SEQ ID NO: 913939
gccuuucccuccggaggua

SEQ ID NO: 965721 - RNA, 19 nt, Artificial Sequence
  Description of Artificial Sequence: Synthetic oligonucleotide
  Antisense strand to SEQ ID NO: 965720
uaccuccggagggaaaggc

SEQ ID NO: 965722 - RNA, 19 nt, Artificial Sequence
  Description of Artificial Sequence: Synthetic oligonucleotide
  Sense strand starting at position 2785 of SEQ ID NO: 913940
aggagaaaggccugagagu

SEQ ID NO: 965723 - RNA, 19 nt, Artificial Sequence
  Description of Artificial Sequence: Synthetic oligonucleotide
  Antisense strand to SEQ ID NO: 965722
acucucaggccuuucuccu

SEQ ID NO: 965724 - RNA, 19 nt, Artificial Sequence
  Description of Artificial Sequence: Synthetic oligonucleotide
  Sense strand starting at position 3896 of SEQ ID NO: 913940
ugagguggauuauccugaa

SEQ ID NO: 965725 - RNA, 19 nt, Artificial Sequence
  Description of Artificial Sequence: Synthetic oligonucleotide
  Antisense strand to SEQ ID NO: 965724
uucaggauaauccaccuca

SEQ ID NO: 965726 - RNA, 19 nt, Artificial Sequence
  Description of Artificial Sequence: Synthetic oligonucleotide
  Sense strand starting at position 2630 of SEQ ID NO: 913940
aggaguauaguacacugua

SEQ ID NO: 965727 - RNA, 19 nt, Artificial Sequence
  Description of Artificial Sequence: Synthetic oligonucleotide
  Antisense strand to SEQ ID NO: 965726
uacaguguacuauacuccu

SEQ ID NO: 965728 - RNA, 19 nt, Artificial Sequence
  Description of Artificial Sequence: Synthetic oligonucleotide
  Sense strand starting at position 3143 of SEQ ID NO: 913940
uugguaaacugacugaacu

SEQ ID NO: 965729 - RNA, 19 nt, Artificial Sequence
  Description of Artificial Sequence: Synthetic oligonucleotide
  Antisense strand to SEQ ID NO: 965728
aguucagucaguuuaccaa

SEQ ID NO: 965730 - RNA, 19 nt, Artificial Sequence
  Description of Artificial Sequence: Synthetic oligonucleotide
  Sense strand starting at position 3940 of SEQ ID NO: 913940
uucugacagcuuuauuaga

SEQ ID NO: 965731 - RNA, 19 nt, Artificial Sequence
  Description of Artificial Sequence: Synthetic oligonucleotide
  Antisense strand to SEQ ID NO: 965730
ucuaauaaagcugucagaa

SEQ ID NO: 965732 - RNA, 19 nt, Artificial Sequence
  Description of Artificial Sequence: Synthetic oligonucleotide
  Sense strand starting at position 476 of SEQ ID NO: 913940
uaacgugguggacaugaau

SEQ ID NO: 965733 - RNA, 19 nt, Artificial Sequence
  Description of Artificial Sequence: Synthetic oligonucleotide
  Antisense strand to SEQ ID NO: 965732
auucauguccaccacguua

SEQ ID NO: 965734 - RNA, 19 nt, Artificial Sequence
  Description of Artificial Sequence: Synthetic oligonucleotide
  Sense strand starting at position 479 of SEQ ID NO: 913940
cgugguggacaugaauaca

SEQ ID NO: 965735 - RNA, 19 nt, Artificial Sequence
  Description of Artificial Sequence: Synthetic oligonucleotide
  Antisense strand to SEQ ID NO: 965734
uguauucauguccaccacg

SEQ ID NO: 965736 - RNA, 19 nt, Artificial Sequence
  Description of Artificial Sequence: Synthetic oligonucleotide
  Sense strand starting at position 3890 of SEQ ID NO: 913940
aaagguugagguggauuau

SEQ ID NO: 965737 - RNA, 19 nt, Artificial Sequence
  Description of Artificial Sequence: Synthetic oligonucleotide
  Antisense strand to SEQ ID NO: 965736
auaauccaccucaaccuuu

SEQ ID NO: 965738 - RNA, 19 nt, Artificial Sequence
  Description of Artificial Sequence: Synthetic oligonucleotide
  Sense strand starting at position 2319 of SEQ ID NO: 913940
cccagugaacuauaauugu

SEQ ID NO: 965739 - RNA, 19 nt, Artificial Sequence
  Description of Artificial Sequence: Synthetic oligonucleotide
  Antisense strand to SEQ ID NO: 965738
acaauuauaguucacuggg

SEQ ID NO: 965740 - RNA, 19 nt, Artificial Sequence
  Description of Artificial Sequence: Synthetic oligonucleotide
  Sense strand starting at position 3484 of SEQ ID NO: 913940
acgacuuugguauauaauu

SEQ ID NO: 965741 - RNA, 19 nt, Artificial Sequence
  Description of Artificial Sequence: Synthetic oligonucleotide
  Antisense strand to SEQ ID NO: 965740
aauuauauaccaaagucgu

SEQ ID NO: 965742 - RNA, 19 nt, Artificial Sequence
  Description of Artificial Sequence: Synthetic oligonucleotide
  Sense strand starting at position 268 of SEQ ID NO: 913940
uuaggaaccuuggugacau

SEQ ID NO: 965743 - RNA, 19 nt, Artificial Sequence
  Description of Artificial Sequence: Synthetic oligonucleotide
  Antisense strand to SEQ ID NO: 965742
augucaccaagguuccuaa

SEQ ID NO: 965744 - RNA, 19 nt, Artificial Sequence
  Description of Artificial Sequence: Synthetic oligonucleotide
  Sense strand starting at position 3849 of SEQ ID NO: 913940
cuuaaagcagaguagugau

SEQ ID NO: 965745 - RNA, 19 nt, Artificial Sequence
  Description of Artificial Sequence: Synthetic oligonucleotide
  Antisense strand to SEQ ID NO: 965744
aucacuacucugcuuuaag

SEQ ID NO: 965746 - RNA, 19 nt, Artificial Sequence
  Description of Artificial Sequence: Synthetic oligonucleotide
  Sense strand starting at position 3565 of SEQ ID NO: 913940
cguugugugaccgucacua

SEQ ID NO: 965747 - RNA, 19 nt, Artificial Sequence
  Description of Artificial Sequence: Synthetic oligonucleotide
  Antisense strand to SEQ ID NO: 965746
uagugacggucacacaacg

SEQ ID NO: 965748 - RNA, 19 nt, Artificial Sequence
  Description of Artificial Sequence: Synthetic oligonucleotide
  Sense strand starting at position 3863 of SEQ ID NO: 913940
gugauuagccaugacauug

SEQ ID NO: 965749 - RNA, 19 nt, Artificial Sequence
  Description of Artificial Sequence: Synthetic oligonucleotide
  Antisense strand to SEQ ID NO: 965748
caaugucauggcuaaucac

SEQ ID NO: 965750 - RNA, 19 nt, Artificial Sequence
  Description of Artificial Sequence: Synthetic oligonucleotide
  Sense strand starting at position 256 of SEQ ID NO: 913940
cauaaugugucauuaggaa

SEQ ID NO: 965751 - RNA, 19 nt, Artificial Sequence
  Description of Artificial Sequence: Synthetic oligonucleotide
  Antisense strand to SEQ ID NO: 965750
uuccuaaugacacauuaug

SEQ ID NO: 965752 - RNA, 19 nt, Artificial Sequence
  Description of Artificial Sequence: Synthetic oligonucleotide
  Sense strand starting at position 2639 of SEQ ID NO: 913940
guacacuguaaucguauuu

SEQ ID NO: 965753 - RNA, 19 nt, Artificial Sequence
  Description of Artificial Sequence: Synthetic oligonucleotide
  Antisense strand to SEQ ID NO: 965752
aaauacgauuacaguguac

SEQ ID NO: 965754 - RNA, 19 nt, Artificial Sequence
  Description of Artificial Sequence: Synthetic oligonucleotide
  Sense strand starting at position 3948 of SEQ ID NO: 913940
gcuuuauuagagcagauug

SEQ ID NO: 965755 - RNA, 19 nt, Artificial Sequence
  Description of Artificial Sequence: Synthetic oligonucleotide
  Antisense strand to SEQ ID NO: 965754
caaucugcucuaauaaagc

SEQ ID NO: 965756 - RNA, 19 nt, Artificial Sequence
  Description of Artificial Sequence: Synthetic oligonucleotide
  Sense strand starting at position 3856 of SEQ ID NO: 913940
cagaguagugauuagccau

SEQ ID NO: 965757 - RNA, 19 nt, Artificial Sequence
  Description of Artificial Sequence: Synthetic oligonucleotide
  Antisense strand to SEQ ID NO: 965756
auggcuaaucacuacucug

SEQ ID NO: 965758 - RNA, 19 nt, Artificial Sequence
  Description of Artificial Sequence: Synthetic oligonucleotide
  Sense strand starting at position 2283 of SEQ ID NO: 913940
augugaaaugggcauguuu

SEQ ID NO: 965759 - RNA, 19 nt, Artificial Sequence
  Description of Artificial Sequence: Synthetic oligonucleotide
  Antisense strand to SEQ ID NO: 965758
aaacaugcccauuucacau

SEQ ID NO: 965760 - RNA, 19 nt, Artificial Sequence
  Description of Artificial Sequence: Synthetic oligonucleotide
  Sense strand starting at position 1878 of SEQ ID NO: 913940
ugacuucugacgcagauuc

SEQ ID NO: 965761 - RNA, 19 nt, Artificial Sequence
  Description of Artificial Sequence: Synthetic oligonucleotide
  Antisense strand to SEQ ID NO: 965760
gaaucugcgucagaaguca

SEQ ID NO: 965762 - RNA, 19 nt, Artificial Sequence
  Description of Artificial Sequence: Synthetic oligonucleotide
  Sense strand starting at position 2544 of SEQ ID NO: 913940
gcauuaaggcucuagaagu

SEQ ID NO: 965763 - RNA, 19 nt, Artificial Sequence
  Description of Artificial Sequence: Synthetic oligonucleotide
  Antisense strand to SEQ ID NO: 965762
acuucuagagccuuaaugc

SEQ ID NO: 965764 - RNA, 19 nt, Artificial Sequence
  Description of Artificial Sequence: Synthetic oligonucleotide
  Sense strand starting at position 1492 of SEQ ID NO: 913940
gguggaauucaguggacga

SEQ ID NO: 965765 - RNA, 19 nt, Artificial Sequence
  Description of Artificial Sequence: Synthetic oligonucleotide
  Antisense strand to SEQ ID NO: 965764
ucguccacugaauuccacc

SEQ ID NO: 965766 - RNA, 19 nt, Artificial Sequence
  Description of Artificial Sequence: Synthetic oligonucleotide
  Sense strand starting at position 2988 of SEQ ID NO: 913940
cagacuguccuguaaaguu

SEQ ID NO: 965767 - RNA, 19 nt, Artificial Sequence
  Description of Artificial Sequence: Synthetic oligonucleotide
  Antisense strand to SEQ ID NO: 965766
aacuuuacaggacagucug

SEQ ID NO: 965768 - RNA, 19 nt, Artificial Sequence
  Description of Artificial Sequence: Synthetic oligonucleotide
  Sense strand starting at position 2956 of SEQ ID NO: 913940
guagguuugagugacccuu

SEQ ID NO: 965769 - RNA, 19 nt, Artificial Sequence
  Description of Artificial Sequence: Synthetic oligonucleotide
  Antisense strand to SEQ ID NO: 965768
aagggucacucaaaccuac

SEQ ID NO: 965770 - RNA, 19 nt, Artificial Sequence
  Description of Artificial Sequence: Synthetic oligonucleotide
  Sense strand starting at position 3570 of SEQ ID NO: 913940
ugugaccgucacuacaauu

SEQ ID NO: 965771 - RNA, 19 nt, Artificial Sequence
  Description of Artificial Sequence: Synthetic oligonucleotide
  Antisense strand to SEQ ID NO: 965770
aauuguagugacggucaca

SEQ ID NO: 965772 - RNA, 19 nt, Artificial Sequence
  Description of Artificial Sequence: Synthetic oligonucleotide
  Sense strand starting at position 901 of SEQ ID NO: 913940
augguucuaacguaagcaa

SEQ ID NO: 965773 - RNA, 19 nt, Artificial Sequence
  Description of Artificial Sequence: Synthetic oligonucleotide
  Antisense strand to SEQ ID NO: 965772
uugcuuacguuagaaccau

SEQ ID NO: 965774 - RNA, 19 nt, Artificial Sequence
  Description of Artificial Sequence: Synthetic oligonucleotide
  Sense strand starting at position 2898 of SEQ ID NO: 913940
cagugaugcuuucucaaga

SEQ ID NO: 965775 - RNA, 19 nt, Artificial Sequence
  Description of Artificial Sequence: Synthetic oligonucleotide
  Antisense strand to SEQ ID NO: 965774
ucuugagaaagcaucacug

SEQ ID NO: 965776 - RNA, 19 nt, Artificial Sequence
  Description of Artificial Sequence: Synthetic oligonucleotide
  Sense strand starting at position 2899 of SEQ ID NO: 913940
agugaugcuuucucaagau

SEQ ID NO: 965777 - RNA, 19 nt, Artificial Sequence
  Description of Artificial Sequence: Synthetic oligonucleotide
  Antisense strand to SEQ ID NO: 965776
aucuugagaaagcaucacu

SEQ ID NO: 965778 - RNA, 19 nt, Artificial Sequence
  Description of Artificial Sequence: Synthetic oligonucleotide
  Sense strand starting at position 2633 of SEQ ID NO: 913940
aguauaguacacuguaauc

SEQ ID NO: 965779 - RNA, 19 nt, Artificial Sequence
  Description of Artificial Sequence: Synthetic oligonucleotide
  Antisense strand to SEQ ID NO: 965778
gauuacaguguacuauacu

SEQ ID NO: 965780 - RNA, 19 nt, Artificial Sequence
  Description of Artificial Sequence: Synthetic oligonucleotide
  Sense strand starting at position 3479 of SEQ ID NO: 913940
cuuuaacgacuuugguaua

SEQ ID NO: 965781 - RNA, 19 nt, Artificial Sequence
  Description of Artificial Sequence: Synthetic oligonucleotide
  Antisense strand to SEQ ID NO: 965780
uauaccaaagucguuaaag

SEQ ID NO: 965782 - RNA, 19 nt, Artificial Sequence
  Description of Artificial Sequence: Synthetic oligonucleotide
  Sense strand starting at position 2285 of SEQ ID NO: 913940
gugaaaugggcauguuuca

SEQ ID NO: 965783 - RNA, 19 nt, Artificial Sequence
  Description of Artificial Sequence: Synthetic oligonucleotide
  Antisense strand to SEQ ID NO: 965782
ugaaacaugcccauuucac

SEQ ID NO: 965784 - RNA, 19 nt, Artificial Sequence
  Description of Artificial Sequence: Synthetic oligonucleotide
  Sense strand starting at position 904 of SEQ ID NO: 913940
guucuaacguaagcaagaa

SEQ ID NO: 965785 - RNA, 19 nt, Artificial Sequence
  Description of Artificial Sequence: Synthetic oligonucleotide
  Antisense strand to SEQ ID NO: 965784
uucuugcuuacguuagaac

SEQ ID NO: 965786 - RNA, 19 nt, Artificial Sequence
  Description of Artificial Sequence: Synthetic oligonucleotide
  Sense strand starting at position 2984 of SEQ ID NO: 913940
aguccagacuguccuguaa

SEQ ID NO: 965787 - RNA, 19 nt, Artificial Sequence
  Description of Artificial Sequence: Synthetic oligonucleotide
  Antisense strand to SEQ ID NO: 965786
uuacaggacagucuggacu

SEQ ID NO: 965788 - RNA, 19 nt, Artificial Sequence
  Description of Artificial Sequence: Synthetic oligonucleotide
  Sense strand starting at position 3358 of SEQ ID NO: 913940
ggcuaccauuuagaaaguu

SEQ ID NO: 965789 - RNA, 19 nt, Artificial Sequence
  Description of Artificial Sequence: Synthetic oligonucleotide
  Antisense strand to SEQ ID NO: 965788
aacuuucuaaaugguagcc

SEQ ID NO: 965790 - RNA, 19 nt, Artificial Sequence
  Description of Artificial Sequence: Synthetic oligonucleotide
  Sense strand starting at position 2473 of SEQ ID NO: 913940
guguauugaaauugagcuu

SEQ ID NO: 965791 - RNA, 19 nt, Artificial Sequence
  Description of Artificial Sequence: Synthetic oligonucleotide
  Antisense strand to SEQ ID NO: 965790
aagcucaauuucaauacac

SEQ ID NO: 965792 - RNA, 19 nt, Artificial Sequence
  Description of Artificial Sequence: Synthetic oligonucleotide
  Sense strand starting at position 2619 of SEQ ID NO: 913940
uucuuuaguguaggaguau

SEQ ID NO: 965793 - RNA, 19 nt, Artificial Sequence
  Description of Artificial Sequence: Synthetic oligonucleotide
  Antisense strand to SEQ ID NO: 965792
auacuccuacacuaaagaa

SEQ ID NO: 965794 - RNA, 19 nt, Artificial Sequence
  Description of Artificial Sequence: Synthetic oligonucleotide
  Sense strand starting at position 2720 of SEQ ID NO: 913940
gugugauucggaugagggu

SEQ ID NO: 965795 - RNA, 19 nt, Artificial Sequence
  Description of Artificial Sequence: Synthetic oligonucleotide
  Antisense strand to SEQ ID NO: 965794
acccucauccgaaucacac

SEQ ID NO: 965796 - RNA, 19 nt, Artificial Sequence
  Description of Artificial Sequence: Synthetic oligonucleotide
  Sense strand starting at position 2716 of SEQ ID NO: 913940
gguggugugauucggauga

SEQ ID NO: 965797 - RNA, 19 nt, Artificial Sequence
  Description of Artificial Sequence: Synthetic oligonucleotide
  Antisense strand to SEQ ID NO: 965796
ucauccgaaucacaccacc

SEQ ID NO: 965798 - RNA, 19 nt, Artificial Sequence
  Description of Artificial Sequence: Synthetic oligonucleotide
  Sense strand starting at position 1320 of SEQ ID NO: 913940
uggugguuucgagagcgga

SEQ ID NO: 965799 - RNA, 19 nt, Artificial Sequence
  Description of Artificial Sequence: Synthetic oligonucleotide
  Antisense strand to SEQ ID NO: 965798
uccgcucucgaaaccacca

SEQ ID NO: 965800 - RNA, 19 nt, Artificial Sequence
  Description of Artificial Sequence: Synthetic oligonucleotide
  Sense strand starting at position 2394 of SEQ ID NO: 913940
uggcguauauauguuagaa

SEQ ID NO: 965801 - RNA, 19 nt, Artificial Sequence
  Description of Artificial Sequence: Synthetic oligonucleotide
  Antisense strand to SEQ ID NO: 965800
uucuaacauauauacgcca

SEQ ID NO: 965802 - RNA, 19 nt, Artificial Sequence
  Description of Artificial Sequence: Synthetic oligonucleotide
  Sense strand starting at position 3596 of SEQ ID NO: 913941
uuacauuucucagucuguu

SEQ ID NO: 965803 - RNA, 19 nt, Artificial Sequence
  Description of Artificial Sequence: Synthetic oligonucleotide
  Antisense strand to SEQ ID NO: 965802
aacagacugagaaauguaa

SEQ ID NO: 965804 - RNA, 19 nt, Artificial Sequence
  Description of Artificial Sequence: Synthetic oligonucleotide
  Sense strand starting at position 2613 of SEQ ID NO: 913941
aggaaacugccauacuguu

SEQ ID NO: 965805 - RNA, 19 nt, Artificial Sequence
  Description of Artificial Sequence: Synthetic oligonucleotide
  Antisense strand to SEQ ID NO: 965804
aacaguauggcaguuuccu

SEQ ID NO: 965806 - RNA, 19 nt, Artificial Sequence
  Description of Artificial Sequence: Synthetic oligonucleotide
  Sense strand starting at position 3178 of SEQ ID NO: 913941
guuauagauccagaugcac

SEQ ID NO: 965807 - RNA, 19 nt, Artificial Sequence
  Description of Artificial Sequence: Synthetic oligonucleotide
  Antisense strand to SEQ ID NO: 965806
gugcaucuggaucuauaac

SEQ ID NO: 965808 - RNA, 19 nt, Artificial Sequence
  Description of Artificial Sequence: Synthetic oligonucleotide
  Sense strand starting at position 3974 of SEQ ID NO: 913941
ucuagaugauguccaggau

SEQ ID NO: 965809 - RNA, 19 nt, Artificial Sequence
  Description of Artificial Sequence: Synthetic oligonucleotide
  Antisense strand to SEQ ID NO: 965808
auccuggacaucaucuaga

SEQ ID NO: 965810 - RNA, 19 nt, Artificial Sequence
  Description of Artificial Sequence: Synthetic oligonucleotide
  Sense strand starting at position 3067 of SEQ ID NO: 913941
auagaaaucuuggccuaac

SEQ ID NO: 965811 - RNA, 19 nt, Artificial Sequence
  Description of Artificial Sequence: Synthetic oligonucleotide
  Antisense strand to SEQ ID NO: 965810
guuaggccaagauuucuau

SEQ ID NO: 965812 - RNA, 19 nt, Artificial Sequence
  Description of Artificial Sequence: Synthetic oligonucleotide
  Sense strand starting at position 3321 of SEQ ID NO: 913941
uuugucugucaugacagaa

SEQ ID NO: 965813 - RNA, 19 nt, Artificial Sequence
  Description of Artificial Sequence: Synthetic oligonucleotide
  Antisense strand to SEQ ID NO: 965812
uucugucaugacagacaaa

SEQ ID NO: 965814 - RNA, 19 nt, Artificial Sequence
  Description of Artificial Sequence: Synthetic oligonucleotide
  Sense strand starting at position 374 of SEQ ID NO: 913941
gugccaaugggacacuuua

SEQ ID NO: 965815 - RNA, 19 nt, Artificial Sequence
  Description of Artificial Sequence: Synthetic oligonucleotide
  Antisense strand to SEQ ID NO: 965814
uaaagugucccauuggcac

SEQ ID NO: 965816 - RNA, 19 nt, Artificial Sequence
  Description of Artificial Sequence: Synthetic oligonucleotide
  Sense strand starting at position 392 of SEQ ID NO: 913941
aggaaacuccacugcuaua

SEQ ID NO: 965817 - RNA, 19 nt, Artificial Sequence
  Description of Artificial Sequence: Synthetic oligonucleotide
  Antisense strand to SEQ ID NO: 965816
uauagcaguggaguuuccu

SEQ ID NO: 965818 - RNA, 19 nt, Artificial Sequence
  Description of Artificial Sequence: Synthetic oligonucleotide
  Sense strand starting at position 3736 of SEQ ID NO: 913941
uguucuaucagugauggac

SEQ ID NO: 965819 - RNA, 19 nt, Artificial Sequence
  Description of Artificial Sequence: Synthetic oligonucleotide
  Antisense strand to SEQ ID NO: 965818
guccaucacugauagaaca

SEQ ID NO: 965820 - RNA, 19 nt, Artificial Sequence
  Description of Artificial Sequence: Synthetic oligonucleotide
  Sense strand starting at position 3345 of SEQ ID NO: 913941
ccuugucuugauuauuaua

SEQ ID NO: 965821 - RNA, 19 nt, Artificial Sequence
  Description of Artificial Sequence: Synthetic oligonucleotide
  Antisense strand to SEQ ID NO: 965820
uauaauaaucaagacaagg

SEQ ID NO: 965822 - RNA, 19 nt, Artificial Sequence
  Description of Artificial Sequence: Synthetic oligonucleotide
  Sense strand starting at position 3283 of SEQ ID NO: 913941
guuuauuucugagcccuuu

SEQ ID NO: 965823 - RNA, 19 nt, Artificial Sequence
  Description of Artificial Sequence: Synthetic oligonucleotide
  Antisense strand to SEQ ID NO: 965822
aaagggcucagaaauaaac

SEQ ID NO: 965824 - RNA, 19 nt, Artificial Sequence
  Description of Artificial Sequence: Synthetic oligonucleotide
  Sense strand starting at position 2310 of SEQ ID NO: 913941
aguauauacuaggcaggau

SEQ ID NO: 965825 - RNA, 19 nt, Artificial Sequence
  Description of Artificial Sequence: Synthetic oligonucleotide
  Antisense strand to SEQ ID NO: 965824
auccugccuaguauauacu

SEQ ID NO: 965826 - RNA, 19 nt, Artificial Sequence
  Description of Artificial Sequence: Synthetic oligonucleotide
  Sense strand starting at position 2767 of SEQ ID NO: 913941
aguuuccuugauuaguaau

SEQ ID NO: 965827 - RNA, 19 nt, Artificial Sequence
  Description of Artificial Sequence: Synthetic oligonucleotide
  Antisense strand to SEQ ID NO: 965826
auuacuaaucaaggaaacu

SEQ ID NO: 965828 - RNA, 19 nt, Artificial Sequence
  Description of Artificial Sequence: Synthetic oligonucleotide
  Sense strand starting at position 2248 of SEQ ID NO: 913941
uguacuuuaggucacuaua

SEQ ID NO: 965829 - RNA, 19 nt, Artificial Sequence
  Description of Artificial Sequence: Synthetic oligonucleotide
  Antisense strand to SEQ ID NO: 965828
uauagugaccuaaaguaca

SEQ ID NO: 965830 - RNA, 19 nt, Artificial Sequence
  Description of Artificial Sequence: Synthetic oligonucleotide
  Sense strand starting at position 2137 of SEQ ID NO: 913941
gugagaccaucaccgagau

SEQ ID NO: 965831 - RNA, 19 nt, Artificial Sequence
  Description of Artificial Sequence: Synthetic oligonucleotide
  Antisense strand to SEQ ID NO: 965830
aucucggugauggucucac

SEQ ID NO: 965832 - RNA, 19 nt, Artificial Sequence
  Description of Artificial Sequence: Synthetic oligonucleotide
  Sense strand starting at position 599 of SEQ ID NO: 913941
ucggcucuggaugacuaua

SEQ ID NO: 965833 - RNA, 19 nt, Artificial Sequence
  Description of Artificial Sequence: Synthetic oligonucleotide
  Antisense strand to SEQ ID NO: 965832
uauagucauccagagccga

SEQ ID NO: 965834 - RNA, 19 nt, Artificial Sequence
  Description of Artificial Sequence: Synthetic oligonucleotide
  Sense strand starting at position 3535 of SEQ ID NO: 913941
ugugguguuguuucgucua

SEQ ID NO: 965835 - RNA, 19 nt, Artificial Sequence
  Description of Artificial Sequence: Synthetic oligonucleotide
  Antisense strand to SEQ ID NO: 965834
uagacgaaacaacaccaca

SEQ ID NO: 965836 - RNA, 19 nt, Artificial Sequence
  Description of Artificial Sequence: Synthetic oligonucleotide
  Sense strand starting at position 3342 of SEQ ID NO: 913941
cuaccuugucuugauuauu

SEQ ID NO: 965837 - RNA, 19 nt, Artificial Sequence
  Description of Artificial Sequence: Synthetic oligonucleotide
  Antisense strand to SEQ ID NO: 965836
aauaaucaagacaagguag

SEQ ID NO: 965838 - RNA, 19 nt, Artificial Sequence
  Description of Artificial Sequence: Synthetic oligonucleotide
  Sense strand starting at position 170 of SEQ ID NO: 913941
gcagaaauagagugcugaa

SEQ ID NO: 965839 - RNA, 19 nt, Artificial Sequence
  Description of Artificial Sequence: Synthetic oligonucleotide
  Antisense strand to SEQ ID NO: 965838
uucagcacucuauuucugc

SEQ ID NO: 965840 - RNA, 19 nt, Artificial Sequence
  Description of Artificial Sequence: Synthetic oligonucleotide
  Sense strand starting at position 2764 of SEQ ID NO: 913941
uugaguuuccuugauuagu

SEQ ID NO: 965841 - RNA, 19 nt, Artificial Sequence
  Description of Artificial Sequence: Synthetic oligonucleotide
  Antisense strand to SEQ ID NO: 965840
acuaaucaaggaaacucaa

SEQ ID NO: 965842 - RNA, 19 nt, Artificial Sequence
  Description of Artificial Sequence: Synthetic oligonucleotide
  Sense strand starting at position 2872 of SEQ ID NO: 913941
aagaaauuggguugucuuc

SEQ ID NO: 965843 - RNA, 19 nt, Artificial Sequence
  Description of Artificial Sequence: Synthetic oligonucleotide
  Antisense strand to SEQ ID NO: 965842
gaagacaacccaauuucuu

SEQ ID NO: 965844 - RNA, 19 nt, Artificial Sequence
  Description of Artificial Sequence: Synthetic oligonucleotide
  Sense strand starting at position 2567 of SEQ ID NO: 913941
aauggaaugccugggucau

SEQ ID NO: 965845 - RNA, 19 nt, Artificial Sequence
  Description of Artificial Sequence: Synthetic oligonucleotide
  Antisense strand to SEQ ID NO: 965844
augacccaggcauuccauu

SEQ ID NO: 965846 - RNA, 19 nt, Artificial Sequence
  Description of Artificial Sequence: Synthetic oligonucleotide
  Sense strand starting at position 2838 of SEQ ID NO: 913941
ugaauagcauguuugaauu

SEQ ID NO: 965847 - RNA, 19 nt, Artificial Sequence
  Description of Artificial Sequence: Synthetic oligonucleotide
  Antisense strand to SEQ ID NO: 965846
aauucaaacaugcuauuca

SEQ ID NO: 965848 - RNA, 19 nt, Artificial Sequence
  Description of Artificial Sequence: Synthetic oligonucleotide
  Sense strand starting at position 2766 of SEQ ID NO: 913941
gaguuuccuugauuaguaa

SEQ ID NO: 965849 - RNA, 19 nt, Artificial Sequence
  Description of Artificial Sequence: Synthetic oligonucleotide
  Antisense strand to SEQ ID NO: 965848
uuacuaaucaaggaaacuc

SEQ ID NO: 965850 - RNA, 19 nt, Artificial Sequence
  Description of Artificial Sequence: Synthetic oligonucleotide
  Sense strand starting at position 2246 of SEQ ID NO: 913941
gauguacuuuaggucacua

SEQ ID NO: 965851 - RNA, 19 nt, Artificial Sequence
  Description of Artificial Sequence: Synthetic oligonucleotide
  Antisense strand to SEQ ID NO: 965850
uagugaccuaaaguacauc

SEQ ID NO: 965852 - RNA, 19 nt, Artificial Sequence
  Description of Artificial Sequence: Synthetic oligonucleotide
  Sense strand starting at position 2835 of SEQ ID NO: 913941
uauugaauagcauguuuga

SEQ ID NO: 965853 - RNA, 19 nt, Artificial Sequence
  Description of Artificial Sequence: Synthetic oligonucleotide
  Antisense strand to SEQ ID NO: 965852
ucaaacaugcuauucaaua

SEQ ID NO: 965854 - RNA, 19 nt, Artificial Sequence
  Description of Artificial Sequence: Synthetic oligonucleotide
  Sense strand starting at position 3140 of SEQ ID NO: 913941
ugugauccacuuugaguaa

SEQ ID NO: 965855 - RNA, 19 nt, Artificial Sequence
  Description of Artificial Sequence: Synthetic oligonucleotide
  Antisense strand to SEQ ID NO: 965854
uuacucaaaguggaucaca

SEQ ID NO: 965856 - RNA, 19 nt, Artificial Sequence
  Description of Artificial Sequence: Synthetic oligonucleotide
  Sense strand starting at position 2502 of SEQ ID NO: 913941
gcgaauauggugcacaaau

SEQ ID NO: 965857 - RNA, 19 nt, Artificial Sequence
  Description of Artificial Sequence: Synthetic oligonucleotide
  Antisense strand to SEQ ID NO: 965856
auuugugcaccauauucgc

SEQ ID NO: 965858 - RNA, 19 nt, Artificial Sequence
  Description of Artificial Sequence: Synthetic oligonucleotide
  Sense strand starting at position 3339 of SEQ ID NO: 913941
acacuaccuugucuugauu

SEQ ID NO: 965859 - RNA, 19 nt, Artificial Sequence
  Description of Artificial Sequence: Synthetic oligonucleotide
  Antisense strand to SEQ ID NO: 965858
aaucaagacaagguagugu

SEQ ID NO: 965860 - RNA, 19 nt, Artificial Sequence
  Description of Artificial Sequence: Synthetic oligonucleotide
  Sense strand starting at position 3735 of SEQ ID NO: 913941
uuguucuaucagugaugga

SEQ ID NO: 965861 - RNA, 19 nt, Artificial Sequence
  Description of Artificial Sequence: Synthetic oligonucleotide
  Antisense strand to SEQ ID NO: 965860
uccaucacugauagaacaa

SEQ ID NO: 965862 - RNA, 19 nt, Artificial Sequence
  Description of Artificial Sequence: Synthetic oligonucleotide
  Sense strand starting at position 3715 of SEQ ID NO: 913941
gagaaucugccauggguuu

SEQ ID NO: 965863 - RNA, 19 nt, Artificial Sequence
  Description of Artificial Sequence: Synthetic oligonucleotide
  Antisense strand to SEQ ID NO: 965862
aaacccauggcagauucuc

SEQ ID NO: 965864 - RNA, 19 nt, Artificial Sequence
  Description of Artificial Sequence: Synthetic oligonucleotide
  Sense strand starting at position 2511 of SEQ ID NO: 913941
gugcacaaaucuucgaaag

SEQ ID NO: 965865 - RNA, 19 nt, Artificial Sequence
  Description of Artificial Sequence: Synthetic oligonucleotide
  Antisense strand to SEQ ID NO: 965864
cuuucgaagauuugugcac

SEQ ID NO: 965866 - RNA, 19 nt, Artificial Sequence
  Description of Artificial Sequence: Synthetic oligonucleotide
  Sense strand starting at position 1408 of SEQ ID NO: 913941
ggacgagauccguggacuc

SEQ ID NO: 965867 - RNA, 19 nt, Artificial Sequence
  Description of Artificial Sequence: Synthetic oligonucleotide
  Antisense strand to SEQ ID NO: 965866
gaguccacggaucucgucc

SEQ ID NO: 965868 - RNA, 19 nt, Artificial Sequence
  Description of Artificial Sequence: Synthetic oligonucleotide
  Sense strand starting at position 2874 of SEQ ID NO: 913941
gaaauuggguugucuucuu

SEQ ID NO: 965869 - RNA, 19 nt, Artificial Sequence
  Description of Artificial Sequence: Synthetic oligonucleotide
  Antisense strand to SEQ ID NO: 965868
aagaagacaacccaauuuc

SEQ ID NO: 965870 - RNA, 19 nt, Artificial Sequence
  Description of Artificial Sequence: Synthetic oligonucleotide
  Sense strand starting at position 3605 of SEQ ID NO: 913941
ucagucuguuucuuacaaa

SEQ ID NO: 965871 - RNA, 19 nt, Artificial Sequence
  Description of Artificial Sequence: Synthetic oligonucleotide
  Antisense strand to SEQ ID NO: 965870
uuuguaagaaacagacuga

SEQ ID NO: 965872 - RNA, 19 nt, Artificial Sequence
  Description of Artificial Sequence: Synthetic oligonucleotide
  Sense strand starting at position 2512 of SEQ ID NO: 913941
ugcacaaaucuucgaaagu

SEQ ID NO: 965873 - RNA, 19 nt, Artificial Sequence
  Description of Artificial Sequence: Synthetic oligonucleotide
  Antisense strand to SEQ ID NO: 965872
acuuucgaagauuugugca

SEQ ID NO: 965874 - RNA, 19 nt, Artificial Sequence
  Description of Artificial Sequence: Synthetic oligonucleotide
  Sense strand starting at position 2405 of SEQ ID NO: 913941
auaguauugcauuguacag

SEQ ID NO: 965875 - RNA, 19 nt, Artificial Sequence
  Description of Artificial Sequence: Synthetic oligonucleotide
  Antisense strand to SEQ ID NO: 965874
cuguacaaugcaauacuau

SEQ ID NO: 965876 - RNA, 19 nt, Artificial Sequence
  Description of Artificial Sequence: Synthetic oligonucleotide
  Sense strand starting at position 3604 of SEQ ID NO: 913941
cucagucuguuucuuacaa

SEQ ID NO: 965877 - RNA, 19 nt, Artificial Sequence
  Description of Artificial Sequence: Synthetic oligonucleotide
  Antisense strand to SEQ ID NO: 965876
uuguaagaaacagacugag

SEQ ID NO: 965878 - RNA, 19 nt, Artificial Sequence
  Description of Artificial Sequence: Synthetic oligonucleotide
  Sense strand starting at position 2685 of SEQ ID NO: 913941
aguucucuguccucaccaa

SEQ ID NO: 965879 - RNA, 19 nt, Artificial Sequence
  Description of Artificial Sequence: Synthetic oligonucleotide
  Antisense strand to SEQ ID NO: 965878
uuggugaggacagagaacu

SEQ ID NO: 965880 - RNA, 19 nt, Artificial Sequence
  Description of Artificial Sequence: Synthetic oligonucleotide
  Sense strand starting at position 3268 of SEQ ID NO: 913941
acuguauacauguggguuu

SEQ ID NO: 965881 - RNA, 19 nt, Artificial Sequence
  Description of Artificial Sequence: Synthetic oligonucleotide
  Antisense strand to SEQ ID NO: 965880
aaacccacauguauacagu

SEQ ID NO: 965882 - RNA, 19 nt, Artificial Sequence
  Description of Artificial Sequence: Synthetic oligonucleotide
  Sense strand starting at position 3145 of SEQ ID NO: 913942
aggaaacugccauacuguu

SEQ ID NO: 965883 - RNA, 19 nt, Artificial Sequence
  Description of Artificial Sequence: Synthetic oligonucleotide
  Antisense strand to SEQ ID NO: 965882
aacaguauggcaguuuccu

SEQ ID NO: 965884 - RNA, 19 nt, Artificial Sequence
  Description of Artificial Sequence: Synthetic oligonucleotide
  Sense strand starting at position 3710 of SEQ ID NO: 913942
guuauagauccagaugcac

SEQ ID NO: 965885 - RNA, 19 nt, Artificial Sequence
  Description of Artificial Sequence: Synthetic oligonucleotide
  Antisense strand to SEQ ID NO: 965884
gugcaucuggaucuauaac

SEQ ID NO: 965886 - RNA, 19 nt, Artificial Sequence
  Description of Artificial Sequence: Synthetic oligonucleotide
  Sense strand starting at position 3599 of SEQ ID NO: 913942
auagaaaucuuggccuaac

SEQ ID NO: 965887 - RNA, 19 nt, Artificial Sequence
  Description of Artificial Sequence: Synthetic oligonucleotide
  Antisense strand to SEQ ID NO: 965886
guuaggccaagauuucuau

SEQ ID NO: 965888 - RNA, 19 nt, Artificial Sequence
  Description of Artificial Sequence: Synthetic oligonucleotide
  Sense strand starting at position 3853 of SEQ ID NO: 913942
uuugucugucaugacagaa

SEQ ID NO: 965889 - RNA, 19 nt, Artificial Sequence
  Description of Artificial Sequence: Synthetic oligonucleotide
  Antisense strand to SEQ ID NO: 965888
uucugucaugacagacaaa

SEQ ID NO: 965890 - RNA, 19 nt, Artificial Sequence
  Description of Artificial Sequence: Synthetic oligonucleotide
  Sense strand starting at position 906 of SEQ ID NO: 913942
gugccaaugggacacuuua

SEQ ID NO: 965891 - RNA, 19 nt, Artificial Sequence
  Description of Artificial Sequence: Synthetic oligonucleotide
  Antisense strand to SEQ ID NO: 965890
uaaagugucccauuggcac

SEQ ID NO: 965892 - RNA, 19 nt, Artificial Sequence
  Description of Artificial Sequence: Synthetic oligonucleotide
  Sense strand starting at position 924 of SEQ ID NO: 913942
aggaaacuccacugcuaua

SEQ ID NO: 965893 - RNA, 19 nt, Artificial Sequence
  Description of Artificial Sequence: Synthetic oligonucleotide
  Antisense strand to SEQ ID NO: 965892
uauagcaguggaguuuccu

SEQ ID NO: 965894 - RNA, 19 nt, Artificial Sequence
  Description of Artificial Sequence: Synthetic oligonucleotide
  Sense strand starting at position 3877 of SEQ ID NO: 913942
ccuugucuugauuauuaua

SEQ ID NO: 965895 - RNA, 19 nt, Artificial Sequence
  Description of Artificial Sequence: Synthetic oligonucleotide
  Antisense strand to SEQ ID NO: 965894
uauaauaaucaagacaagg

SEQ ID NO: 965896 - RNA, 19 nt, Artificial Sequence
  Description of Artificial Sequence: Synthetic oligonucleotide
  Sense strand starting at position 3815 of SEQ ID NO: 913942
guuuauuucugagcccuuu

SEQ ID NO: 965897 - RNA, 19 nt, Artificial Sequence
  Description of Artificial Sequence: Synthetic oligonucleotide
  Antisense strand to SEQ ID NO: 965896
aaagggcucagaaauaaac

SEQ ID NO: 965898 - RNA, 19 nt, Artificial Sequence
  Description of Artificial Sequence: Synthetic oligonucleotide
  Sense strand starting at position 2842 of SEQ ID NO: 913942
aguauauacuaggcaggau

SEQ ID NO: 965899 - RNA, 19 nt, Artificial Sequence
  Description of Artificial Sequence: Synthetic oligonucleotide
  Antisense strand to SEQ ID NO: 965898
auccugccuaguauauacu

SEQ ID NO: 965900 - RNA, 19 nt, Artificial Sequence
  Description of Artificial Sequence: Synthetic oligonucleotide
  Sense strand starting at position 3299 of SEQ ID NO: 913942
aguuuccuugauuaguaau

SEQ ID NO: 965901 - RNA, 19 nt, Artificial Sequence
  Description of Artificial Sequence: Synthetic oligonucleotide
  Antisense strand to SEQ ID NO: 965900
auuacuaaucaaggaaacu

SEQ ID NO: 965902 - RNA, 19 nt, Artificial Sequence
  Description of Artificial Sequence: Synthetic oligonucleotide
  Sense strand starting at position 2780 of SEQ ID NO: 913942
uguacuuuaggucacuaua

SEQ ID NO: 965903 - RNA, 19 nt, Artificial Sequence
  Description of Artificial Sequence: Synthetic oligonucleotide
  Antisense strand to SEQ ID NO: 965902
uauagugaccuaaaguaca

SEQ ID NO: 965904 - RNA, 19 nt, Artificial Sequence
  Description of Artificial Sequence: Synthetic oligonucleotide
  Sense strand starting at position 2669 of SEQ ID NO: 913942
gugagaccaucaccgagau

SEQ ID NO: 965905 - RNA, 19 nt, Artificial Sequence
  Description of Artificial Sequence: Synthetic oligonucleotide
  Antisense strand to SEQ ID NO: 965904
aucucggugauggucucac

SEQ ID NO: 965906 - RNA, 19 nt, Artificial Sequence
  Description of Artificial Sequence: Synthetic oligonucleotide
  Sense strand starting at position 1131 of SEQ ID NO: 913942
ucggcucuggaugacuaua

SEQ ID NO: 965907 - RNA, 19 nt, Artificial Sequence
  Description of Artificial Sequence: Synthetic oligonucleotide
  Antisense strand to SEQ ID NO: 965906
uauagucauccagagccga

SEQ ID NO: 965908 - RNA, 19 nt, Artificial Sequence
  Description of Artificial Sequence: Synthetic oligonucleotide
  Sense strand starting at position 262 of SEQ ID NO: 913942
guugucugugugucagcau

SEQ ID NO: 965909 - RNA, 19 nt, Artificial Sequence
  Description of Artificial Sequence: Synthetic oligonucleotide
  Antisense strand to SEQ ID NO: 965908
augcugacacacagacaac

SEQ ID NO: 965910 - RNA, 19 nt, Artificial Sequence
  Description of Artificial Sequence: Synthetic oligonucleotide
  Sense strand starting at position 3874 of SEQ ID NO: 913942
cuaccuugucuugauuauu

SEQ ID NO: 965911 - RNA, 19 nt, Artificial Sequence
  Description of Artificial Sequence: Synthetic oligonucleotide
  Antisense strand to SEQ ID NO: 965910
aauaaucaagacaagguag

SEQ ID NO: 965912 - RNA, 19 nt, Artificial Sequence
  Description of Artificial Sequence: Synthetic oligonucleotide
  Sense strand starting at position 702 of SEQ ID NO: 913942
gcagaaauagagugcugaa

SEQ ID NO: 965913 - RNA, 19 nt, Artificial Sequence
  Description of Artificial Sequence: Synthetic oligonucleotide
  Antisense strand to SEQ ID NO: 965912
uucagcacucuauuucugc

SEQ ID NO: 965914 - RNA, 19 nt, Artificial Sequence
  Description of Artificial Sequence: Synthetic oligonucleotide
  Sense strand starting at position 3296 of SEQ ID NO: 913942
uugaguuuccuugauuagu

SEQ ID NO: 965915 - RNA, 19 nt, Artificial Sequence
  Description of Artificial Sequence: Synthetic oligonucleotide
  Antisense strand to SEQ ID NO: 965914
acuaaucaaggaaacucaa

SEQ ID NO: 965916 - RNA, 19 nt, Artificial Sequence
  Description of Artificial Sequence: Synthetic oligonucleotide
  Sense strand starting at position 3404 of SEQ ID NO: 913942
aagaaauuggguugucuuc

SEQ ID NO: 965917 - RNA, 19 nt, Artificial Sequence
  Description of Artificial Sequence: Synthetic oligonucleotide
  Antisense strand to SEQ ID NO: 965916
gaagacaacccaauuucuu

SEQ ID NO: 965918 - RNA, 19 nt, Artificial Sequence
  Description of Artificial Sequence: Synthetic oligonucleotide
  Sense strand starting at position 3099 of SEQ ID NO: 913942
aauggaaugccugggucau

SEQ ID NO: 965919 - RNA, 19 nt, Artificial Sequence
  Description of Artificial Sequence: Synthetic oligonucleotide
  Antisense strand to SEQ ID NO: 965918
augacccaggcauuccauu

SEQ ID NO: 965920 - RNA, 19 nt, Artificial Sequence
  Description of Artificial Sequence: Synthetic oligonucleotide
  Sense strand starting at position 3370 of SEQ ID NO: 913942
ugaauagcauguuugaauu

SEQ ID NO: 965921 - RNA, 19 nt, Artificial Sequence
  Description of Artificial Sequence: Synthetic oligonucleotide
  Antisense strand to SEQ ID NO: 965920
aauucaaacaugcuauuca

SEQ ID NO: 965922 - RNA, 19 nt, Artificial Sequence
  Description of Artificial Sequence: Synthetic oligonucleotide
  Sense strand starting at position 3298 of SEQ ID NO: 913942
gaguuuccuugauuaguaa

SEQ ID NO: 965923 - RNA, 19 nt, Artificial Sequence
  Description of Artificial Sequence: Synthetic oligonucleotide
  Antisense strand to SEQ ID NO: 965922
uuacuaaucaaggaaacuc

SEQ ID NO: 965924 - RNA, 19 nt, Artificial Sequence
  Description of Artificial Sequence: Synthetic oligonucleotide
  Sense strand starting at position 2778 of SEQ ID NO: 913942
gauguacuuuaggucacua

SEQ ID NO: 965925 - RNA, 19 nt, Artificial Sequence
  Description of Artificial Sequence: Synthetic oligonucleotide
  Antisense strand to SEQ ID NO: 965924
uagugaccuaaaguacauc

SEQ ID NO: 965926 - RNA, 19 nt, Artificial Sequence
  Description of Artificial Sequence: Synthetic oligonucleotide
  Sense strand starting at position 3367 of SEQ ID NO: 913942
uauugaauagcauguuuga

SEQ ID NO: 965927 - RNA, 19 nt, Artificial Sequence
  Description of Artificial Sequence: Synthetic oligonucleotide
  Antisense strand to SEQ ID NO: 965926
ucaaacaugcuauucaaua

SEQ ID NO: 965928 - RNA, 19 nt, Artificial Sequence
  Description of Artificial Sequence: Synthetic oligonucleotide
  Sense strand starting at position 3672 of SEQ ID NO: 913942
ugugauccacuuugaguaa

SEQ ID NO: 965929 - RNA, 19 nt, Artificial Sequence
  Description of Artificial Sequence: Synthetic oligonucleotide
  Antisense strand to SEQ ID NO: 965928
uuacucaaaguggaucaca

SEQ ID NO: 965930 - RNA, 19 nt, Artificial Sequence
  Description of Artificial Sequence: Synthetic oligonucleotide
  Sense strand starting at position 3034 of SEQ ID NO: 913942
gcgaauauggugcacaaau

SEQ ID NO: 965931 - RNA, 19 nt, Artificial Sequence
  Description of Artificial Sequence: Synthetic oligonucleotide
  Antisense strand to SEQ ID NO: 965930
auuugugcaccauauucgc

SEQ ID NO: 965932 - RNA, 19 nt, Artificial Sequence
  Description of Artificial Sequence: Synthetic oligonucleotide
  Sense strand starting at position 3871 of SEQ ID NO: 913942
acacuaccuugucuugauu

SEQ ID NO: 965933 - RNA, 19 nt, Artificial Sequence
  Description of Artificial Sequence: Synthetic oligonucleotide
  Antisense strand to SEQ ID NO: 965932
aaucaagacaagguagugu

SEQ ID NO: 965934 - RNA, 19 nt, Artificial Sequence
  Description of Artificial Sequence: Synthetic oligonucleotide
  Sense strand starting at position 369 of SEQ ID NO: 913942
cuaguagguccucagucau

SEQ ID NO: 965935 - RNA, 19 nt, Artificial Sequence
  Description of Artificial Sequence: Synthetic oligonucleotide
  Antisense strand to SEQ ID NO: 965934
augacugaggaccuacuag

SEQ ID NO: 965936 - RNA, 19 nt, Artificial Sequence
  Description of Artificial Sequence: Synthetic oligonucleotide
  Sense strand starting at position 3043 of SEQ ID NO: 913942
gugcacaaaucuucgaaag

SEQ ID NO: 965937 - RNA, 19 nt, Artificial Sequence
  Description of Artificial Sequence: Synthetic oligonucleotide
  Antisense strand to SEQ ID NO: 965936
cuuucgaagauuugugcac

SEQ ID NO: 965938 - RNA, 19 nt, Artificial Sequence
  Description of Artificial Sequence: Synthetic oligonucleotide
  Sense strand starting at position 1940 of SEQ ID NO: 913942
ggacgagauccguggacuc

SEQ ID NO: 965939 - RNA, 19 nt, Artificial Sequence
  Description of Artificial Sequence: Synthetic oligonucleotide
  Antisense strand to SEQ ID NO: 965938
gaguccacggaucucgucc

SEQ ID NO: 965940 - RNA, 19 nt, Artificial Sequence
  Description of Artificial Sequence: Synthetic oligonucleotide
  Sense strand starting at position 3406 of SEQ ID NO: 913942
gaaauuggguugucuucuu

SEQ ID NO: 965941 - RNA, 19 nt, Artificial Sequence
  Description of Artificial Sequence: Synthetic oligonucleotide
  Antisense strand to SEQ ID NO: 965940
aagaagacaacccaauuuc

SEQ ID NO: 965942 - RNA, 19 nt, Artificial Sequence
  Description of Artificial Sequence: Synthetic oligonucleotide
  Sense strand starting at position 3044 of SEQ ID NO: 913942
ugcacaaaucuucgaaagu

SEQ ID NO: 965943 - RNA, 19 nt, Artificial Sequence
  Description of Artificial Sequence: Synthetic oligonucleotide
  Antisense strand to SEQ ID NO: 965942
acuuucgaagauuugugca

SEQ ID NO: 965944 - RNA, 19 nt, Artificial Sequence
  Description of Artificial Sequence: Synthetic oligonucleotide
  Sense strand starting at position 2937 of SEQ ID NO: 913942
auaguauugcauuguacag

SEQ ID NO: 965945 - RNA, 19 nt, Artificial Sequence
  Description of Artificial Sequence: Synthetic oligonucleotide
  Antisense strand to SEQ ID NO: 965944
cuguacaaugcaauacuau

SEQ ID NO: 965946 - RNA, 19 nt, Artificial Sequence
  Description of Artificial Sequence: Synthetic oligonucleotide
  Sense strand starting at position 3217 of SEQ ID NO: 913942
aguucucuguccucaccaa

SEQ ID NO: 965947 - RNA, 19 nt, Artificial Sequence
  Description of Artificial Sequence: Synthetic oligonucleotide
  Antisense strand to SEQ ID NO: 965946
uuggugaggacagagaacu

SEQ ID NO: 965948 - RNA, 19 nt, Artificial Sequence
  Description of Artificial Sequence: Synthetic oligonucleotide
  Sense strand starting at position 3800 of SEQ ID NO: 913942
acuguauacauguggguuu

SEQ ID NO: 965949 - RNA, 19 nt, Artificial Sequence
  Description of Artificial Sequence: Synthetic oligonucleotide
  Antisense strand to SEQ ID NO: 965948
aaacccacauguauacagu

SEQ ID NO: 965950 - RNA, 19 nt, Artificial Sequence
  Description of Artificial Sequence: Synthetic oligonucleotide
  Sense strand starting at position 3665 of SEQ ID NO: 913942
uuuagucugugauccacuu

SEQ ID NO: 965951 - RNA, 19 nt, Artificial Sequence
  Description of Artificial Sequence: Synthetic oligonucleotide
  Antisense strand to SEQ ID NO: 965950
aaguggaucacagacuaaa

SEQ ID NO: 965952 - RNA, 19 nt, Artificial Sequence
  Description of Artificial Sequence: Synthetic oligonucleotide
  Sense strand starting at position 2888 of SEQ ID NO: 913942
ugccuauaucaaugguuuc

SEQ ID NO: 965953 - RNA, 19 nt, Artificial Sequence
  Description of Artificial Sequence: Synthetic oligonucleotide
  Antisense strand to SEQ ID NO: 965952
gaaaccauugauauaggca

SEQ ID NO: 965954 - RNA, 19 nt, Artificial Sequence
  Description of Artificial Sequence: Synthetic oligonucleotide
  Sense strand starting at position 2547 of SEQ ID NO: 913942
ggcccugggcgccagaaua

SEQ ID NO: 965955 - RNA, 19 nt, Artificial Sequence
  Description of Artificial Sequence: Synthetic oligonucleotide
  Antisense strand to SEQ ID NO: 965954
uauucuggcgcccagggcc

SEQ ID NO: 965956 - RNA, 19 nt, Artificial Sequence
  Description of Artificial Sequence: Synthetic oligonucleotide
  Sense strand starting at position 368 of SEQ ID NO: 913942
ucuaguagguccucaguca

SEQ ID NO: 965957 - RNA, 19 nt, Artificial Sequence
  Description of Artificial Sequence: Synthetic oligonucleotide
  Antisense strand to SEQ ID NO: 965956
ugacugaggaccuacuaga

SEQ ID NO: 965958 - RNA, 19 nt, Artificial Sequence
  Description of Artificial Sequence: Synthetic oligonucleotide
  Sense strand starting at position 3341 of SEQ ID NO: 913942
cuuauuugcuaaggauaag

SEQ ID NO: 965959 - RNA, 19 nt, Artificial Sequence
  Description of Artificial Sequence: Synthetic oligonucleotide
  Antisense strand to SEQ ID NO: 965958
cuuauccuuagcaaauaag

SEQ ID NO: 965960 - RNA, 19 nt, Artificial Sequence
  Description of Artificial Sequence: Synthetic oligonucleotide
  Sense strand starting at position 2635 of SEQ ID NO: 913942
cguguacaauuugauaaau

SEQ ID NO: 965961 - RNA, 19 nt, Artificial Sequence
  Description of Artificial Sequence: Synthetic oligonucleotide
  Antisense strand to SEQ ID NO: 965960
auuuaucaaauuguacacg

SEQ ID NO: 965962 - RNA, 19 nt, Artificial Sequence
  Description of Artificial Sequence: Synthetic oligonucleotide
  Sense strand starting at position 2950 of SEQ ID NO: 913943
cguauuuaugcacaagcau

SEQ ID NO: 965963 - RNA, 19 nt, Artificial Sequence
  Description of Artificial Sequence: Synthetic oligonucleotide
  Antisense strand to SEQ ID NO: 965962
augcuugugcauaaauacg

SEQ ID NO: 965964 - RNA, 19 nt, Artificial Sequence
  Description of Artificial Sequence: Synthetic oligonucleotide
  Sense strand starting at position 1005 of SEQ ID NO: 913943
ucuguauuagaaggauaca

SEQ ID NO: 965965 - RNA, 19 nt, Artificial Sequence
  Description of Artificial Sequence: Synthetic oligonucleotide
  Antisense strand to SEQ ID NO: 965964
uguauccuucuaauacaga

SEQ ID NO: 965966 - RNA, 19 nt, Artificial Sequence
  Description of Artificial Sequence: Synthetic oligonucleotide
  Sense strand starting at position 2177 of SEQ ID NO: 913943
uauuguacuguguucguca

SEQ ID NO: 965967 - RNA, 19 nt, Artificial Sequence
  Description of Artificial Sequence: Synthetic oligonucleotide
  Antisense strand to SEQ ID NO: 965966
ugacgaacacaguacaaua

SEQ ID NO: 965968 - RNA, 19 nt, Artificial Sequence
  Description of Artificial Sequence: Synthetic oligonucleotide
  Sense strand starting at position 2282 of SEQ ID NO: 913943
aacaaugucguugacaaga

SEQ ID NO: 965969 - RNA, 19 nt, Artificial Sequence
  Description of Artificial Sequence: Synthetic oligonucleotide
  Antisense strand to SEQ ID NO: 965968
ucuugucaacgacauuguu

SEQ ID NO: 965970 - RNA, 19 nt, Artificial Sequence
  Description of Artificial Sequence: Synthetic oligonucleotide
  Sense strand starting at position 3514 of SEQ ID NO: 913943
gccucauucgugguaaugu

SEQ ID NO: 965971 - RNA, 19 nt, Artificial Sequence
  Description of Artificial Sequence: Synthetic oligonucleotide
  Antisense strand to SEQ ID NO: 965970
acauuaccacgaaugaggc

SEQ ID NO: 965972 - RNA, 19 nt, Artificial Sequence
  Description of Artificial Sequence: Synthetic oligonucleotide
  Sense strand starting at position 2037 of SEQ ID NO: 913943
uugcuucucgcagcacaua

SEQ ID NO: 965973 - RNA, 19 nt, Artificial Sequence
  Description of Artificial Sequence: Synthetic oligonucleotide
  Antisense strand to SEQ ID NO: 965972
uaugugcugcgagaagcaa

SEQ ID NO: 965974 - RNA, 19 nt, Artificial Sequence
  Description of Artificial Sequence: Synthetic oligonucleotide
  Sense strand starting at position 1534 of SEQ ID NO: 913943
gacagagaucauuguacug

SEQ ID NO: 965975 - RNA, 19 nt, Artificial Sequence
  Description of Artificial Sequence: Synthetic oligonucleotide
  Antisense strand to SEQ ID NO: 965974
caguacaaugaucucuguc

SEQ ID NO: 965976 - RNA, 19 nt, Artificial Sequence
  Description of Artificial Sequence: Synthetic oligonucleotide
  Sense strand starting at position 229 of SEQ ID NO: 913943
agagaaguugcugacacuu

SEQ ID NO: 965977 - RNA, 19 nt, Artificial Sequence
  Description of Artificial Sequence: Synthetic oligonucleotide
  Antisense strand to SEQ ID NO: 965976
aagugucagcaacuucucu

SEQ ID NO: 965978 - RNA, 19 nt, Artificial Sequence
  Description of Artificial Sequence: Synthetic oligonucleotide
  Sense strand starting at position 3627 of SEQ ID NO: 913943
auugaacacuugucaauga

SEQ ID NO: 965979 - RNA, 19 nt, Artificial Sequence
  Description of Artificial Sequence: Synthetic oligonucleotide
  Antisense strand to SEQ ID NO: 965978
ucauugacaaguguucaau

SEQ ID NO: 965980 - RNA, 19 nt, Artificial Sequence
  Description of Artificial Sequence: Synthetic oligonucleotide
  Sense strand starting at position 2139 of SEQ ID NO: 913943
acaaauugauguccacuga

SEQ ID NO: 965981 - RNA, 19 nt, Artificial Sequence
  Description of Artificial Sequence: Synthetic oligonucleotide
  Antisense strand to SEQ ID NO: 965980
ucaguggacaucaauuugu

SEQ ID NO: 965982 - RNA, 19 nt, Artificial Sequence
  Description of Artificial Sequence: Synthetic oligonucleotide
  Sense strand starting at position 707 of SEQ ID NO: 913943
guauuugguuacuagauuu

SEQ ID NO: 965983 - RNA, 19 nt, Artificial Sequence
  Description of Artificial Sequence: Synthetic oligonucleotide
  Antisense strand to SEQ ID NO: 965982
aaaucuaguaaccaaauac

SEQ ID NO: 965984 - RNA, 19 nt, Artificial Sequence
  Description of Artificial Sequence: Synthetic oligonucleotide
  Sense strand starting at position 2780 of SEQ ID NO: 913943
gugauugugacagagcaga

SEQ ID NO: 965985 - RNA, 19 nt, Artificial Sequence
  Description of Artificial Sequence: Synthetic oligonucleotide
  Antisense strand to SEQ ID NO: 965984
ucugcucugucacaaucac

SEQ ID NO: 965986 - RNA, 19 nt, Artificial Sequence
  Description of Artificial Sequence: Synthetic oligonucleotide
  Sense strand starting at position 2867 of SEQ ID NO: 913943
cuuaaugaaccauguggau

SEQ ID NO: 965987 - RNA, 19 nt, Artificial Sequence
  Description of Artificial Sequence: Synthetic oligonucleotide
  Antisense strand to SEQ ID NO: 965986
auccacaugguucauuaag

SEQ ID NO: 965988 - RNA, 19 nt, Artificial Sequence
  Description of Artificial Sequence: Synthetic oligonucleotide
  Sense strand starting at position 3730 of SEQ ID NO: 913943
uuuacuucgggaugaauaa

SEQ ID NO: 965989 - RNA, 19 nt, Artificial Sequence
  Description of Artificial Sequence: Synthetic oligonucleotide
  Antisense strand to SEQ ID NO: 965988
uuauucaucccgaaguaaa

SEQ ID NO: 965990 - RNA, 19 nt, Artificial Sequence
  Description of Artificial Sequence: Synthetic oligonucleotide
  Sense strand starting at position 2188 of SEQ ID NO: 913943
guucgucagccugucugau

SEQ ID NO: 965991 - RNA, 19 nt, Artificial Sequence
  Description of Artificial Sequence: Synthetic oligonucleotide
  Antisense strand to SEQ ID NO: 965990
aucagacaggcugacgaac

SEQ ID NO: 965992 - RNA, 19 nt, Artificial Sequence
  Description of Artificial Sequence: Synthetic oligonucleotide
  Sense strand starting at position 2506 of SEQ ID NO: 913943
uauauaagguuaucacgaa

SEQ ID NO: 965993 - RNA, 19 nt, Artificial Sequence
  Description of Artificial Sequence: Synthetic oligonucleotide
  Antisense strand to SEQ ID NO: 965992
uucgugauaaccuuauaua

SEQ ID NO: 965994 - RNA, 19 nt, Artificial Sequence
  Description of Artificial Sequence: Synthetic oligonucleotide
  Sense strand starting at position 3219 of SEQ ID NO: 913943
accacagaucagugggagu

SEQ ID NO: 965995 - RNA, 19 nt, Artificial Sequence
  Description of Artificial Sequence: Synthetic oligonucleotide
  Antisense strand to SEQ ID NO: 965994
acucccacugaucuguggu

SEQ ID NO: 965996 - RNA, 19 nt, Artificial Sequence
  Description of Artificial Sequence: Synthetic oligonucleotide
  Sense strand starting at position 3221 of SEQ ID NO: 913943
cacagaucagugggaguca

SEQ ID NO: 965997 - RNA, 19 nt, Artificial Sequence
  Description of Artificial Sequence: Synthetic oligonucleotide
  Antisense strand to SEQ ID NO: 965996
ugacucccacugaucugug

SEQ ID NO: 965998 - RNA, 19 nt, Artificial Sequence
  Description of Artificial Sequence: Synthetic oligonucleotide
  Sense strand starting at position 2881 of SEQ ID NO: 913943
uggauuauuuacuaggaug

SEQ ID NO: 965999 - RNA, 19 nt, Artificial Sequence
  Description of Artificial Sequence: Synthetic oligonucleotide
  Antisense strand to SEQ ID NO: 965998
cauccuaguaaauaaucca

SEQ ID NO: 966000 - RNA, 19 nt, Artificial Sequence
  Description of Artificial Sequence: Synthetic oligonucleotide
  Sense strand starting at position 120 of SEQ ID NO: 913943
caaauauuaucagugggua

SEQ ID NO: 966001 - RNA, 19 nt, Artificial Sequence
  Description of Artificial Sequence: Synthetic oligonucleotide
  Antisense strand to SEQ ID NO: 966000
uacccacugauaauauuug

SEQ ID NO: 966002 - RNA, 19 nt, Artificial Sequence
  Description of Artificial Sequence: Synthetic oligonucleotide
  Sense strand starting at position 997 of SEQ ID NO: 913943
gcauuaauucuguauuaga

SEQ ID NO: 966003 - RNA, 19 nt, Artificial Sequence
  Description of Artificial Sequence: Synthetic oligonucleotide
  Antisense strand to SEQ ID NO: 966002
ucuaauacagaauuaaugc

SEQ ID NO: 966004 - RNA, 19 nt, Artificial Sequence
  Description of Artificial Sequence: Synthetic oligonucleotide
  Sense strand starting at position 121 of SEQ ID NO: 913943
aaauauuaucaguggguau

SEQ ID NO: 966005 - RNA, 19 nt, Artificial Sequence
  Description of Artificial Sequence: Synthetic oligonucleotide
  Antisense strand to SEQ ID NO: 966004
auacccacugauaauauuu

SEQ ID NO: 966006 - RNA, 19 nt, Artificial Sequence
  Description of Artificial Sequence: Synthetic oligonucleotide
  Sense strand starting at position 2666 of SEQ ID NO: 913943
aucuaucuugcauaguaca

SEQ ID NO: 966007 - RNA, 19 nt, Artificial Sequence
  Description of Artificial Sequence: Synthetic oligonucleotide
  Antisense strand to SEQ ID NO: 966006
uguacuaugcaagauagau

SEQ ID NO: 966008 - RNA, 19 nt, Artificial Sequence
  Description of Artificial Sequence: Synthetic oligonucleotide
  Sense strand starting at position 752 of SEQ ID NO: 913943
augaguaugacuuggaguu

SEQ ID NO: 966009 - RNA, 19 nt, Artificial Sequence
  Description of Artificial Sequence: Synthetic oligonucleotide
  Antisense strand to SEQ ID NO: 966008
aacuccaagucauacucau

SEQ ID NO: 966010 - RNA, 19 nt, Artificial Sequence
  Description of Artificial Sequence: Synthetic oligonucleotide
  Sense strand starting at position 753 of SEQ ID NO: 913943
ugaguaugacuuggaguua

SEQ ID NO: 966011 - RNA, 19 nt, Artificial Sequence
  Description of Artificial Sequence: Synthetic oligonucleotide
  Antisense strand to SEQ ID NO: 966010
uaacuccaagucauacuca

SEQ ID NO: 966012 - RNA, 19 nt, Artificial Sequence
  Description of Artificial Sequence: Synthetic oligonucleotide
  Sense strand starting at position 1649 of SEQ ID NO: 913943
ucaucuuuaguccauguaa

SEQ ID NO: 966013 - RNA, 19 nt, Artificial Sequence
  Description of Artificial Sequence: Synthetic oligonucleotide
  Antisense strand to SEQ ID NO: 966012
uuacauggacuaaagauga

SEQ ID NO: 966014 - RNA, 19 nt, Artificial Sequence
  Description of Artificial Sequence: Synthetic oligonucleotide
  Sense strand starting at position 826 of SEQ ID NO: 913943
gugcuacaaguccaucaaa

SEQ ID NO: 966015 - RNA, 19 nt, Artificial Sequence
  Description of Artificial Sequence: Synthetic oligonucleotide
  Antisense strand to SEQ ID NO: 966014
uuugauggacuuguagcac

SEQ ID NO: 966016 - RNA, 19 nt, Artificial Sequence
  Description of Artificial Sequence: Synthetic oligonucleotide
  Sense strand starting at position 2143 of SEQ ID NO: 913943
auugauguccacugaucau

SEQ ID NO: 966017 - RNA, 19 nt, Artificial Sequence
  Description of Artificial Sequence: Synthetic oligonucleotide
  Antisense strand to SEQ ID NO: 966016
augaucaguggacaucaau

SEQ ID NO: 966018 - RNA, 19 nt, Artificial Sequence
  Description of Artificial Sequence: Synthetic oligonucleotide
  Sense strand starting at position 1666 of SEQ ID NO: 913943
aagauuaugcagcaaguuu

SEQ ID NO: 966019 - RNA, 19 nt, Artificial Sequence
  Description of Artificial Sequence: Synthetic oligonucleotide
  Antisense strand to SEQ ID NO: 966018
aaacuugcugcauaaucuu

SEQ ID NO: 966020 - RNA, 19 nt, Artificial Sequence
  Description of Artificial Sequence: Synthetic oligonucleotide
  Sense strand starting at position 123 of SEQ ID NO: 913943
auauuaucaguggguauac

SEQ ID NO: 966021 - RNA, 19 nt, Artificial Sequence
  Description of Artificial Sequence: Synthetic oligonucleotide
  Antisense strand to SEQ ID NO: 966020
guauacccacugauaauau

SEQ ID NO: 966022 - RNA, 19 nt, Artificial Sequence
  Description of Artificial Sequence: Synthetic oligonucleotide
  Sense strand starting at position 741 of SEQ ID NO: 913943
ugugaaagcaaaugaguau

SEQ ID NO: 966023 - RNA, 19 nt, Artificial Sequence
  Description of Artificial Sequence: Synthetic oligonucleotide
  Antisense strand to SEQ ID NO: 966022
auacucauuugcuuucaca

SEQ ID NO: 966024 - RNA, 19 nt, Artificial Sequence
  Description of Artificial Sequence: Synthetic oligonucleotide
  Sense strand starting at position 3099 of SEQ ID NO: 913943
cauuaacacguguagaagu

SEQ ID NO: 966025 - RNA, 19 nt, Artificial Sequence
  Description of Artificial Sequence: Synthetic oligonucleotide
  Antisense strand to SEQ ID NO: 966024
acuucuacacguguuaaug

SEQ ID NO: 966026 - RNA, 19 nt, Artificial Sequence
  Description of Artificial Sequence: Synthetic oligonucleotide
  Sense strand starting at position 2280 of SEQ ID NO: 913943
auaacaaugucguugacaa

SEQ ID NO: 966027 - RNA, 19 nt, Artificial Sequence
  Description of Artificial Sequence: Synthetic oligonucleotide
  Antisense strand to SEQ ID NO: 966026
uugucaacgacauuguuau

SEQ ID NO: 966028 - RNA, 19 nt, Artificial Sequence
  Description of Artificial Sequence: Synthetic oligonucleotide
  Sense strand starting at position 1046 of SEQ ID NO: 913943
aaugguuaaugcuuccaga

SEQ ID NO: 966029 - RNA, 19 nt, Artificial Sequence
  Description of Artificial Sequence: Synthetic oligonucleotide
  Antisense strand to SEQ ID NO: 966028
ucuggaagcauuaaccauu

SEQ ID NO: 966030 - RNA, 19 nt, Artificial Sequence
  Description of Artificial Sequence: Synthetic oligonucleotide
  Sense strand starting at position 1651 of SEQ ID NO: 913943
aucuuuaguccauguaaga

SEQ ID NO: 966031 - RNA, 19 nt, Artificial Sequence
  Description of Artificial Sequence: Synthetic oligonucleotide
  Antisense strand to SEQ ID NO: 966030
ucuuacauggacuaaagau

SEQ ID NO: 966032 - RNA, 19 nt, Artificial Sequence
  Description of Artificial Sequence: Synthetic oligonucleotide
  Sense strand starting at position 2281 of SEQ ID NO: 913943
uaacaaugucguugacaag

SEQ ID NO: 966033 - RNA, 19 nt, Artificial Sequence
  Description of Artificial Sequence: Synthetic oligonucleotide
  Antisense strand to SEQ ID NO: 966032
cuugucaacgacauuguua

SEQ ID NO: 966034 - RNA, 19 nt, Artificial Sequence
  Description of Artificial Sequence: Synthetic oligonucleotide
  Sense strand starting at position 714 of SEQ ID NO: 913943
guuacuagauuugacaauu

SEQ ID NO: 966035 - RNA, 19 nt, Artificial Sequence
  Description of Artificial Sequence: Synthetic oligonucleotide
  Antisense strand to SEQ ID NO: 966034
aauugucaaaucuaguaac

SEQ ID NO: 966036 - RNA, 19 nt, Artificial Sequence
  Description of Artificial Sequence: Synthetic oligonucleotide
  Sense strand starting at position 996 of SEQ ID NO: 913943
agcauuaauucuguauuag

SEQ ID NO: 966037 - RNA, 19 nt, Artificial Sequence
  Description of Artificial Sequence: Synthetic oligonucleotide
  Antisense strand to SEQ ID NO: 966036
cuaauacagaauuaaugcu

SEQ ID NO: 966038 - RNA, 19 nt, Artificial Sequence
  Description of Artificial Sequence: Synthetic oligonucleotide
  Sense strand starting at position 1662 of SEQ ID NO: 913943
auguaagauuaugcagcaa

SEQ ID NO: 966039 - RNA, 19 nt, Artificial Sequence
  Description of Artificial Sequence: Synthetic oligonucleotide
  Antisense strand to SEQ ID NO: 966038
uugcugcauaaucuuacau

SEQ ID NO: 966040 - RNA, 19 nt, Artificial Sequence
  Description of Artificial Sequence: Synthetic oligonucleotide
  Sense strand starting at position 275 of SEQ ID NO: 913943
gucacuuaaugauuauguu

SEQ ID NO: 966041 - RNA, 19 nt, Artificial Sequence
  Description of Artificial Sequence: Synthetic oligonucleotide
  Antisense strand to SEQ ID NO: 966040
aacauaaucauuaagugac

SEQ ID NO: 966042 - RNA, 19 nt, Artificial Sequence
  Description of Artificial Sequence: Synthetic oligonucleotide
  Sense strand starting at position 373 of SEQ ID NO: 913944
guagauauauaaccuggau

SEQ ID NO: 966043 - RNA, 19 nt, Artificial Sequence
  Description of Artificial Sequence: Synthetic oligonucleotide
  Antisense strand to SEQ ID NO: 966042
auccagguuauauaucuac

SEQ ID NO: 966044 - RNA, 19 nt, Artificial Sequence
  Description of Artificial Sequence: Synthetic oligonucleotide
  Sense strand starting at position 1745 of SEQ ID NO: 913944
gguuguuuacaucauaaca

SEQ ID NO: 966045 - RNA, 19 nt, Artificial Sequence
  Description of Artificial Sequence: Synthetic oligonucleotide
  Antisense strand to SEQ ID NO: 966044
uguuaugauguaaacaacc

SEQ ID NO: 966046 - RNA, 19 nt, Artificial Sequence
  Description of Artificial Sequence: Synthetic oligonucleotide
  Sense strand starting at position 2922 of SEQ ID NO: 913944
auauguuagcaaugaagga

SEQ ID NO: 966047 - RNA, 19 nt, Artificial Sequence
  Description of Artificial Sequence: Synthetic oligonucleotide
  Antisense strand to SEQ ID NO: 966046
uccuucauugcuaacauau

SEQ ID NO: 966048 - RNA, 19 nt, Artificial Sequence
  Description of Artificial Sequence: Synthetic oligonucleotide
  Sense strand starting at position 2713 of SEQ ID NO: 913944
auaugcauuggaggauauu

SEQ ID NO: 966049 - RNA, 19 nt, Artificial Sequence
  Description of Artificial Sequence: Synthetic oligonucleotide
  Antisense strand to SEQ ID NO: 966048
aauauccuccaaugcauau

SEQ ID NO: 966050 - RNA, 19 nt, Artificial Sequence
  Description of Artificial Sequence: Synthetic oligonucleotide
  Sense strand starting at position 901 of SEQ ID NO: 913944
cccugugaccaagacaguu

SEQ ID NO: 966051 - RNA, 19 nt, Artificial Sequence
  Description of Artificial Sequence: Synthetic oligonucleotide
  Antisense strand to SEQ ID NO: 966050
aacugucuuggucacaggg

SEQ ID NO: 966052 - RNA, 19 nt, Artificial Sequence
  Description of Artificial Sequence: Synthetic oligonucleotide
  Sense strand starting at position 2943 of SEQ ID NO: 913944
gggucacaaacaugugaua

SEQ ID NO: 966053 - RNA, 19 nt, Artificial Sequence
  Description of Artificial Sequence: Synthetic oligonucleotide
  Antisense strand to SEQ ID NO: 966052
uaucacauguuugugaccc

SEQ ID NO: 966054 - RNA, 19 nt, Artificial Sequence
  Description of Artificial Sequence: Synthetic oligonucleotide
  Sense strand starting at position 2027 of SEQ ID NO: 913944
gugguaaagaagcauuacu

SEQ ID NO: 966055 - RNA, 19 nt, Artificial Sequence
  Description of Artificial Sequence: Synthetic oligonucleotide
  Antisense strand to SEQ ID NO: 966054
aguaaugcuucuuuaccac

SEQ ID NO: 966056 - RNA, 19 nt, Artificial Sequence
  Description of Artificial Sequence: Synthetic oligonucleotide
  Sense strand starting at position 3842 of SEQ ID NO: 913944
aggaaucauagcugggagu

SEQ ID NO: 966057 - RNA, 19 nt, Artificial Sequence
  Description of Artificial Sequence: Synthetic oligonucleotide
  Antisense strand to SEQ ID NO: 966056
acucccagcuaugauuccu

SEQ ID NO: 966058 - RNA, 19 nt, Artificial Sequence
  Description of Artificial Sequence: Synthetic oligonucleotide
  Sense strand starting at position 2271 of SEQ ID NO: 913944
agaugacucuaaguggcaa

SEQ ID NO: 966059 - RNA, 19 nt, Artificial Sequence
  Description of Artificial Sequence: Synthetic oligonucleotide
  Antisense strand to SEQ ID NO: 966058
uugccacuuagagucaucu

SEQ ID NO: 966060 - RNA, 19 nt, Artificial Sequence
  Description of Artificial Sequence: Synthetic oligonucleotide
  Sense strand starting at position 2625 of SEQ ID NO: 913944
aggauuacucuuuaugcuu

SEQ ID NO: 966061 - RNA, 19 nt, Artificial Sequence
  Description of Artificial Sequence: Synthetic oligonucleotide
  Antisense strand to SEQ ID NO: 966060
aagcauaaagaguaauccu

SEQ ID NO: 966062 - RNA, 19 nt, Artificial Sequence
  Description of Artificial Sequence: Synthetic oligonucleotide
  Sense strand starting at position 3918 of SEQ ID NO: 913944
cugagacguggugaauuca

SEQ ID NO: 966063 - RNA, 19 nt, Artificial Sequence
  Description of Artificial Sequence: Synthetic oligonucleotide
  Antisense strand to SEQ ID NO: 966062
ugaauucaccacgucucag

SEQ ID NO: 966064 - RNA, 19 nt, Artificial Sequence
  Description of Artificial Sequence: Synthetic oligonucleotide
  Sense strand starting at position 2495 of SEQ ID NO: 913944
cguauaguccuuuaaagaa

SEQ ID NO: 966065 - RNA, 19 nt, Artificial Sequence
  Description of Artificial Sequence: Synthetic oligonucleotide
  Antisense strand to SEQ ID NO: 966064
uucuuuaaaggacuauacg

SEQ ID NO: 966066 - RNA, 19 nt, Artificial Sequence
  Description of Artificial Sequence: Synthetic oligonucleotide
  Sense strand starting at position 767 of SEQ ID NO: 913944
ccucuauaaguugggauua

SEQ ID NO: 966067 - RNA, 19 nt, Artificial Sequence
  Description of Artificial Sequence: Synthetic oligonucleotide
  Antisense strand to SEQ ID NO: 966066
uaaucccaacuuauagagg

SEQ ID NO: 966068 - RNA, 19 nt, Artificial Sequence
  Description of Artificial Sequence: Synthetic oligonucleotide
  Sense strand starting at position 804 of SEQ ID NO: 913944
cagguuugccaugaaacuc

SEQ ID NO: 966069 - RNA, 19 nt, Artificial Sequence
  Description of Artificial Sequence: Synthetic oligonucleotide
  Antisense strand to SEQ ID NO: 966068
gaguuucauggcaaaccug

SEQ ID NO: 966070 - RNA, 19 nt, Artificial Sequence
  Description of Artificial Sequence: Synthetic oligonucleotide
  Sense strand starting at position 355 of SEQ ID NO: 913944
agaaacuggucauauuuag

SEQ ID NO: 966071 - RNA, 19 nt, Artificial Sequence
  Description of Artificial Sequence: Synthetic oligonucleotide
  Antisense strand to SEQ ID NO: 966070
cuaaauaugaccaguuucu

SEQ ID NO: 966072 - RNA, 19 nt, Artificial Sequence
  Description of Artificial Sequence: Synthetic oligonucleotide
  Sense strand starting at position 2085 of SEQ ID NO: 913944
ucuaguggacuuugagauc

SEQ ID NO: 966073 - RNA, 19 nt, Artificial Sequence
  Description of Artificial Sequence: Synthetic oligonucleotide
  Antisense strand to SEQ ID NO: 966072
gaucucaaaguccacuaga

SEQ ID NO: 966074 - RNA, 19 nt, Artificial Sequence
  Description of Artificial Sequence: Synthetic oligonucleotide
  Sense strand starting at position 525 of SEQ ID NO: 913944
guuaacucauugguaaaua

SEQ ID NO: 966075 - RNA, 19 nt, Artificial Sequence
  Description of Artificial Sequence: Synthetic oligonucleotide
  Antisense strand to SEQ ID NO: 966074
uauuuaccaaugaguuaac

SEQ ID NO: 966076 - RNA, 19 nt, Artificial Sequence
  Description of Artificial Sequence: Synthetic oligonucleotide
  Sense strand starting at position 2918 of SEQ ID NO: 913944
ugacauauguuagcaauga

SEQ ID NO: 966077 - RNA, 19 nt, Artificial Sequence
  Description of Artificial Sequence: Synthetic oligonucleotide
  Antisense strand to SEQ ID NO: 966076
ucauugcuaacauauguca

SEQ ID NO: 966078 - RNA, 19 nt, Artificial Sequence
  Description of Artificial Sequence: Synthetic oligonucleotide
  Sense strand starting at position 2142 of SEQ ID NO: 913944
auguguauucuagaagcca

SEQ ID NO: 966079 - RNA, 19 nt, Artificial Sequence
  Description of Artificial Sequence: Synthetic oligonucleotide
  Antisense strand to SEQ ID NO: 966078
uggcuucuagaauacacau

SEQ ID NO: 966080 - RNA, 19 nt, Artificial Sequence
  Description of Artificial Sequence: Synthetic oligonucleotide
  Sense strand starting at position 2870 of SEQ ID NO: 913944
guuaaucaguauuccugaa

SEQ ID NO: 966081 - RNA, 19 nt, Artificial Sequence
  Description of Artificial Sequence: Synthetic oligonucleotide
  Antisense strand to SEQ ID NO: 966080
uucaggaauacugauuaac

SEQ ID NO: 966082 - RNA, 19 nt, Artificial Sequence
  Description of Artificial Sequence: Synthetic oligonucleotide
  Sense strand starting at position 18 of SEQ ID NO: 913944
gugucuucucuuuacaaac

SEQ ID NO: 966083 - RNA, 19 nt, Artificial Sequence
  Description of Artificial Sequence: Synthetic oligonucleotide
  Antisense strand to SEQ ID NO: 966082
guuuguaaagagaagacac

SEQ ID NO: 966084 - RNA, 19 nt, Artificial Sequence
  Description of Artificial Sequence: Synthetic oligonucleotide
  Sense strand starting at position 523 of SEQ ID NO: 913944
cuguuaacucauugguaaa

SEQ ID NO: 966085 - RNA, 19 nt, Artificial Sequence
  Description of Artificial Sequence: Synthetic oligonucleotide
  Antisense strand to SEQ ID NO: 966084
uuuaccaaugaguuaacag

SEQ ID NO: 966086 - RNA, 19 nt, Artificial Sequence
  Description of Artificial Sequence: Synthetic oligonucleotide
  Sense strand starting at position 2759 of SEQ ID NO: 913944
aagacuugguauguuccua

SEQ ID NO: 966087 - RNA, 19 nt, Artificial Sequence
  Description of Artificial Sequence: Synthetic oligonucleotide
  Antisense strand to SEQ ID NO: 966086
uaggaacauaccaagucuu

SEQ ID NO: 966088 - RNA, 19 nt, Artificial Sequence
  Description of Artificial Sequence: Synthetic oligonucleotide
  Sense strand starting at position 803 of SEQ ID NO: 913944
acagguuugccaugaaacu

SEQ ID NO: 966089 - RNA, 19 nt, Artificial Sequence
  Description of Artificial Sequence: Synthetic oligonucleotide
  Antisense strand to SEQ ID NO: 966088
aguuucauggcaaaccugu

SEQ ID NO: 966090 - RNA, 19 nt, Artificial Sequence
  Description of Artificial Sequence: Synthetic oligonucleotide
  Sense strand starting at position 3914 of SEQ ID NO: 913944
gauccugagacguggugaa

SEQ ID NO: 966091 - RNA, 19 nt, Artificial Sequence
  Description of Artificial Sequence: Synthetic oligonucleotide
  Antisense strand to SEQ ID NO: 966090
uucaccacgucucaggauc

SEQ ID NO: 966092 - RNA, 19 nt, Artificial Sequence
  Description of Artificial Sequence: Synthetic oligonucleotide
  Sense strand starting at position 2843 of SEQ ID NO: 913944
ugugauuggugaccuauca

SEQ ID NO: 966093 - RNA, 19 nt, Artificial Sequence
  Description of Artificial Sequence: Synthetic oligonucleotide
  Antisense strand to SEQ ID NO: 966092
ugauaggucaccaaucaca

SEQ ID NO: 966094 - RNA, 19 nt, Artificial Sequence
  Description of Artificial Sequence: Synthetic oligonucleotide
  Sense strand starting at position 2249 of SEQ ID NO: 913944
guuaacuucuuacuaaagu

SEQ ID NO: 966095 - RNA, 19 nt, Artificial Sequence
  Description of Artificial Sequence: Synthetic oligonucleotide
  Antisense strand to SEQ ID NO: 966094
acuuuaguaagaaguuaac

SEQ ID NO: 966096 - RNA, 19 nt, Artificial Sequence
  Description of Artificial Sequence: Synthetic oligonucleotide
  Sense strand starting at position 3587 of SEQ ID NO: 913944
ugcagauuguaaguauuaa

SEQ ID NO: 966097 - RNA, 19 nt, Artificial Sequence
  Description of Artificial Sequence: Synthetic oligonucleotide
  Antisense strand to SEQ ID NO: 966096
uuaauacuuacaaucugca

SEQ ID NO: 966098 - RNA, 19 nt, Artificial Sequence
  Description of Artificial Sequence: Synthetic oligonucleotide
  Sense strand starting at position 2620 of SEQ ID NO: 913944
gcaguaggauuacucuuua

SEQ ID NO: 966099 - RNA, 19 nt, Artificial Sequence
  Description of Artificial Sequence: Synthetic oligonucleotide
  Antisense strand to SEQ ID NO: 966098
uaaagaguaauccuacugc

SEQ ID NO: 966100 - RNA, 19 nt, Artificial Sequence
  Description of Artificial Sequence: Synthetic oligonucleotide
  Sense strand starting at position 759 of SEQ ID NO: 913944
ggcuuccuccucuauaagu

SEQ ID NO: 966101 - RNA, 19 nt, Artificial Sequence
  Description of Artificial Sequence: Synthetic oligonucleotide
  Antisense strand to SEQ ID NO: 966100
acuuauagaggaggaagcc

SEQ ID NO: 966102 - RNA, 19 nt, Artificial Sequence
  Description of Artificial Sequence: Synthetic oligonucleotide
  Sense strand starting at position 602 of SEQ ID NO: 913944
gggaauaggcucuacgugu

SEQ ID NO: 966103 - RNA, 19 nt, Artificial Sequence
  Description of Artificial Sequence: Synthetic oligonucleotide
  Antisense strand to SEQ ID NO: 966102
acacguagagccuauuccc

SEQ ID NO: 966104 - RNA, 19 nt, Artificial Sequence
  Description of Artificial Sequence: Synthetic oligonucleotide
  Sense strand starting at position 642 of SEQ ID NO: 913944
aaccguauucgugcgugua

SEQ ID NO: 966105 - RNA, 19 nt, Artificial Sequence
  Description of Artificial Sequence: Synthetic oligonucleotide
  Antisense strand to SEQ ID NO: 966104
uacacgcacgaauacgguu

SEQ ID NO: 966106 - RNA, 19 nt, Artificial Sequence
  Description of Artificial Sequence: Synthetic oligonucleotide
  Sense strand starting at position 3659 of SEQ ID NO: 913944
accaguuacuuauccuagu

SEQ ID NO: 966107 - RNA, 19 nt, Artificial Sequence
  Description of Artificial Sequence: Synthetic oligonucleotide
  Antisense strand to SEQ ID NO: 966106
acuaggauaaguaacuggu

SEQ ID NO: 966108 - RNA, 19 nt, Artificial Sequence
  Description of Artificial Sequence: Synthetic oligonucleotide
  Sense strand starting at position 17 of SEQ ID NO: 913944
agugucuucucuuuacaaa

SEQ ID NO: 966109 - RNA, 19 nt, Artificial Sequence
  Description of Artificial Sequence: Synthetic oligonucleotide
  Antisense strand to SEQ ID NO: 966108
uuuguaaagagaagacacu

SEQ ID NO: 966110 - RNA, 19 nt, Artificial Sequence
  Description of Artificial Sequence: Synthetic oligonucleotide
  Sense strand starting at position 2836 of SEQ ID NO: 913944
gcuuaaaugugauugguga

SEQ ID NO: 966111 - RNA, 19 nt, Artificial Sequence
  Description of Artificial Sequence: Synthetic oligonucleotide
  Antisense strand to SEQ ID NO: 966110
ucaccaaucacauuuaagc

SEQ ID NO: 966112 - RNA, 19 nt, Artificial Sequence
  Description of Artificial Sequence: Synthetic oligonucleotide
  Sense strand starting at position 362 of SEQ ID NO: 913944
ggucauauuuaguagauau

SEQ ID NO: 966113 - RNA, 19 nt, Artificial Sequence
  Description of Artificial Sequence: Synthetic oligonucleotide
  Antisense strand to SEQ ID NO: 966112
auaucuacuaaauaugacc

SEQ ID NO: 966114 - RNA, 19 nt, Artificial Sequence
  Description of Artificial Sequence: Synthetic oligonucleotide
  Sense strand starting at position 320 of SEQ ID NO: 913944
cuuuaccuucuuuguuaga

SEQ ID NO: 966115 - RNA, 19 nt, Artificial Sequence
  Description of Artificial Sequence: Synthetic oligonucleotide
  Antisense strand to SEQ ID NO: 966114
ucuaacaaagaagguaaag

SEQ ID NO: 966116 - RNA, 19 nt, Artificial Sequence
  Description of Artificial Sequence: Synthetic oligonucleotide
  Sense strand starting at position 1 of SEQ ID NO: 913944
cuuaucaacgaaugucagu

SEQ ID NO: 966117 - RNA, 19 nt, Artificial Sequence
  Description of Artificial Sequence: Synthetic oligonucleotide
  Antisense strand to SEQ ID NO: 966116
acugacauucguugauaag

SEQ ID NO: 966118 - RNA, 19 nt, Artificial Sequence
  Description of Artificial Sequence: Synthetic oligonucleotide
  Sense strand starting at position 608 of SEQ ID NO: 913944
aggcucuacguguaaucau

SEQ ID NO: 966119 - RNA, 19 nt, Artificial Sequence
  Description of Artificial Sequence: Synthetic oligonucleotide
  Antisense strand to SEQ ID NO: 966118
augauuacacguagagccu

SEQ ID NO: 966120 - RNA, 19 nt, Artificial Sequence
  Description of Artificial Sequence: Synthetic oligonucleotide
  Sense strand starting at position 2493 of SEQ ID NO: 913944
uucguauaguccuuuaaag

SEQ ID NO: 966121 - RNA, 19 nt, Artificial Sequence
  Description of Artificial Sequence: Synthetic oligonucleotide
  Antisense strand to SEQ ID NO: 966120
cuuuaaaggacuauacgaa

SEQ ID NO: 966122 - RNA, 19 nt, Artificial Sequence
  Description of Artificial Sequence: Synthetic oligonucleotide
  Sense strand starting at position 3386 of SEQ ID NO: 913945
uuaaguaacccuugaggaa

SEQ ID NO: 966123 - RNA, 19 nt, Artificial Sequence
  Description of Artificial Sequence: Synthetic oligonucleotide
  Antisense strand to SEQ ID NO: 966122
uuccucaaggguuacuuaa

SEQ ID NO: 966124 - RNA, 19 nt, Artificial Sequence
  Description of Artificial Sequence: Synthetic oligonucleotide
  Sense strand starting at position 2627 of SEQ ID NO: 913945
acccgagagcucgcaguuu

SEQ ID NO: 966125 - RNA, 19 nt, Artificial Sequence
  Description of Artificial Sequence: Synthetic oligonucleotide
  Antisense strand to SEQ ID NO: 966124
aaacugcgagcucucgggu

SEQ ID NO: 966126 - RNA, 19 nt, Artificial Sequence
  Description of Artificial Sequence: Synthetic oligonucleotide
  Sense strand starting at position 215 of SEQ ID NO: 913945
agauaaugaaggcgaucaa

SEQ ID NO: 966127 - RNA, 19 nt, Artificial Sequence
  Description of Artificial Sequence: Synthetic oligonucleotide
  Antisense strand to SEQ ID NO: 966126
uugaucgccuucauuaucu

SEQ ID NO: 966128 - RNA, 19 nt, Artificial Sequence
  Description of Artificial Sequence: Synthetic oligonucleotide
  Sense strand starting at position 149 of SEQ ID NO: 913945
uagcgauuaagcgcaguga

SEQ ID NO: 966129 - RNA, 19 nt, Artificial Sequence
  Description of Artificial Sequence: Synthetic oligonucleotide
  Antisense strand to SEQ ID NO: 966128
ucacugcgcuuaaucgcua

SEQ ID NO: 966130 - RNA, 19 nt, Artificial Sequence
  Description of Artificial Sequence: Synthetic oligonucleotide
  Sense strand starting at position 312 of SEQ ID NO: 913945
gugggaaugagucaaguua

SEQ ID NO: 966131 - RNA, 19 nt, Artificial Sequence
  Description of Artificial Sequence: Synthetic oligonucleotide
  Antisense strand to SEQ ID NO: 966130
uaacuugacucauucccac

SEQ ID NO: 966132 - RNA, 19 nt, Artificial Sequence
  Description of Artificial Sequence: Synthetic oligonucleotide
  Sense strand starting at position 323 of SEQ ID NO: 913945
ucaaguuaaucuuugagag

SEQ ID NO: 966133 - RNA, 19 nt, Artificial Sequence
  Description of Artificial Sequence: Synthetic oligonucleotide
  Antisense strand to SEQ ID NO: 966132
cucucaaagauuaacuuga

SEQ ID NO: 966134 - RNA, 19 nt, Artificial Sequence
  Description of Artificial Sequence: Synthetic oligonucleotide
  Sense strand starting at position 3552 of SEQ ID NO: 913945
ggguuugucgcugucugau

SEQ ID NO: 966135 - RNA, 19 nt, Artificial Sequence
  Description of Artificial Sequence: Synthetic oligonucleotide
  Antisense strand to SEQ ID NO: 966134
aucagacagcgacaaaccc

SEQ ID NO: 966136 - RNA, 19 nt, Artificial Sequence
  Description of Artificial Sequence: Synthetic oligonucleotide
  Sense strand starting at position 301 of SEQ ID NO: 913945
acuaaugugaggugggaau

SEQ ID NO: 966137 - RNA, 19 nt, Artificial Sequence
  Description of Artificial Sequence: Synthetic oligonucleotide
  Antisense strand to SEQ ID NO: 966136
auucccaccucacauuagu

SEQ ID NO: 966138 - RNA, 19 nt, Artificial Sequence
  Description of Artificial Sequence: Synthetic oligonucleotide
  Sense strand starting at position 3421 of SEQ ID NO: 913945
agagauguuccuuaagcca

SEQ ID NO: 966139 - RNA, 19 nt, Artificial Sequence
  Description of Artificial Sequence: Synthetic oligonucleotide
  Antisense strand to SEQ ID NO: 966138
uggcuuaaggaacaucucu

SEQ ID NO: 966140 - RNA, 19 nt, Artificial Sequence
  Description of Artificial Sequence: Synthetic oligonucleotide
  Sense strand starting at position 2440 of SEQ ID NO: 913945
cgaccuuggcaaggagaaa

SEQ ID NO: 966141 - RNA, 19 nt, Artificial Sequence
  Description of Artificial Sequence: Synthetic oligonucleotide
  Antisense strand to SEQ ID NO: 966140
uuucuccuugccaaggucg

SEQ ID NO: 966142 - RNA, 19 nt, Artificial Sequence
  Description of Artificial Sequence: Synthetic oligonucleotide
  Sense strand starting at position 3241 of SEQ ID NO: 913945
agaggcucuccugauaggu

SEQ ID NO: 966143 - RNA, 19 nt, Artificial Sequence
  Description of Artificial Sequence: Synthetic oligonucleotide
  Antisense strand to SEQ ID NO: 966142
accuaucaggagagccucu

SEQ ID NO: 966144 - RNA, 19 nt, Artificial Sequence
  Description of Artificial Sequence: Synthetic oligonucleotide
  Sense strand starting at position 1541 of SEQ ID NO: 913945
cugcgucagcuucuucgaa

SEQ ID NO: 966145 - RNA, 19 nt, Artificial Sequence
  Description of Artificial Sequence: Synthetic oligonucleotide
  Antisense strand to SEQ ID NO: 966144
uucgaagaagcugacgcag

SEQ ID NO: 966146 - RNA, 19 nt, Artificial Sequence
  Description of Artificial Sequence: Synthetic oligonucleotide
  Sense strand starting at position 333 of SEQ ID NO: 913945
cuuugagagugaucacauu

SEQ ID NO: 966147 - RNA, 19 nt, Artificial Sequence
  Description of Artificial Sequence: Synthetic oligonucleotide
  Antisense strand to SEQ ID NO: 966146
aaugugaucacucucaaag

SEQ ID NO: 966148 - RNA, 19 nt, Artificial Sequence
  Description of Artificial Sequence: Synthetic oligonucleotide
  Sense strand starting at position 3106 of SEQ ID NO: 913945
aucuguggauuccuuaaag

SEQ ID NO: 966149 - RNA, 19 nt, Artificial Sequence
  Description of Artificial Sequence: Synthetic oligonucleotide
  Antisense strand to SEQ ID NO: 966148
cuuuaaggaauccacagau

SEQ ID NO: 966150 - RNA, 19 nt, Artificial Sequence
  Description of Artificial Sequence: Synthetic oligonucleotide
  Sense strand starting at position 3665 of SEQ ID NO: 913945
cuuugaacucugcaaguga

SEQ ID NO: 966151 - RNA, 19 nt, Artificial Sequence
  Description of Artificial Sequence: Synthetic oligonucleotide
  Antisense strand to SEQ ID NO: 966150
ucacuugcagaguucaaag

SEQ ID NO: 966152 - RNA, 19 nt, Artificial Sequence
  Description of Artificial Sequence: Synthetic oligonucleotide
  Sense strand starting at position 498 of SEQ ID NO: 913945
acgcaauuacuaggaggau

SEQ ID NO: 966153 - RNA, 19 nt, Artificial Sequence
  Description of Artificial Sequence: Synthetic oligonucleotide
  Antisense strand to SEQ ID NO: 966152
auccuccuaguaauugcgu

SEQ ID NO: 966154 - RNA, 19 nt, Artificial Sequence
  Description of Artificial Sequence: Synthetic oligonucleotide
  Sense strand starting at position 3679 of SEQ ID NO: 913945
agugaauccagcgaaagua

SEQ ID NO: 966155 - RNA, 19 nt, Artificial Sequence
  Description of Artificial Sequence: Synthetic oligonucleotide
  Antisense strand to SEQ ID NO: 966154
uacuuucgcuggauucacu

SEQ ID NO: 966156 - RNA, 19 nt, Artificial Sequence
  Description of Artificial Sequence: Synthetic oligonucleotide
  Sense strand starting at position 2791 of SEQ ID NO: 913945
uucucagaguccucaauag

SEQ ID NO: 966157 - RNA, 19 nt, Artificial Sequence
  Description of Artificial Sequence: Synthetic oligonucleotide
  Antisense strand to SEQ ID NO: 966156
cuauugaggacucugagaa

SEQ ID NO: 966158 - RNA, 19 nt, Artificial Sequence
  Description of Artificial Sequence: Synthetic oligonucleotide
  Sense strand starting at position 3238 of SEQ ID NO: 913945
ucaagaggcucuccugaua

SEQ ID NO: 966159 - RNA, 19 nt, Artificial Sequence
  Description of Artificial Sequence: Synthetic oligonucleotide
  Antisense strand to SEQ ID NO: 966158
uaucaggagagccucuuga

SEQ ID NO: 966160 - RNA, 19 nt, Artificial Sequence
  Description of Artificial Sequence: Synthetic oligonucleotide
  Sense strand starting at position 320 of SEQ ID NO: 913945
gagucaaguuaaucuuuga

SEQ ID NO: 966161 - RNA, 19 nt, Artificial Sequence
  Description of Artificial Sequence: Synthetic oligonucleotide
  Antisense strand to SEQ ID NO: 966160
ucaaagauuaacuugacuc

SEQ ID NO: 966162 - RNA, 19 nt, Artificial Sequence
  Description of Artificial Sequence: Synthetic oligonucleotide
  Sense strand starting at position 3874 of SEQ ID NO: 913945
gggcuuguccaauaggagu

SEQ ID NO: 966163 - RNA, 19 nt, Artificial Sequence
  Description of Artificial Sequence: Synthetic oligonucleotide
  Antisense strand to SEQ ID NO: 966162
acuccuauuggacaagccc

SEQ ID NO: 966164 - RNA, 19 nt, Artificial Sequence
  Description of Artificial Sequence: Synthetic oligonucleotide
  Sense strand starting at position 324 of SEQ ID NO: 913945
caaguuaaucuuugagagu

SEQ ID NO: 966165 - RNA, 19 nt, Artificial Sequence
  Description of Artificial Sequence: Synthetic oligonucleotide
  Antisense strand to SEQ ID NO: 966164
acucucaaagauuaacuug

SEQ ID NO: 966166 - RNA, 19 nt, Artificial Sequence
  Description of Artificial Sequence: Synthetic oligonucleotide
  Sense strand starting at position 151 of SEQ ID NO: 913945
gcgauuaagcgcagugaag

SEQ ID NO: 966167 - RNA, 19 nt, Artificial Sequence
  Description of Artificial Sequence: Synthetic oligonucleotide
  Antisense strand to SEQ ID NO: 966166
cuucacugcgcuuaaucgc

SEQ ID NO: 966168 - RNA, 19 nt, Artificial Sequence
  Description of Artificial Sequence: Synthetic oligonucleotide
  Sense strand starting at position 3753 of SEQ ID NO: 913945
guugaaagaacuggacguu

SEQ ID NO: 966169 - RNA, 19 nt, Artificial Sequence
  Description of Artificial Sequence: Synthetic oligonucleotide
  Antisense strand to SEQ ID NO: 966168
aacguccaguucuuucaac

SEQ ID NO: 966170 - RNA, 19 nt, Artificial Sequence
  Description of Artificial Sequence: Synthetic oligonucleotide
  Sense strand starting at position 631 of SEQ ID NO: 913945
uaacucuuucgagaacgca

SEQ ID NO: 966171 - RNA, 19 nt, Artificial Sequence
  Description of Artificial Sequence: Synthetic oligonucleotide
  Antisense strand to SEQ ID NO: 966170
ugcguucucgaaagaguua

SEQ ID NO: 966172 - RNA, 19 nt, Artificial Sequence
  Description of Artificial Sequence: Synthetic oligonucleotide
  Sense strand starting at position 596 of SEQ ID NO: 913945
uccucaaccgguuaaugua

SEQ ID NO: 966173 - RNA, 19 nt, Artificial Sequence
  Description of Artificial Sequence: Synthetic oligonucleotide
  Antisense strand to SEQ ID NO: 966172
uacauuaaccgguugagga

SEQ ID NO: 966174 - RNA, 19 nt, Artificial Sequence
  Description of Artificial Sequence: Synthetic oligonucleotide
  Sense strand starting at position 3251 of SEQ ID NO: 913945
cugauagguccgcaaaccu

SEQ ID NO: 966175 - RNA, 19 nt, Artificial Sequence
  Description of Artificial Sequence: Synthetic oligonucleotide
  Antisense strand to SEQ ID NO: 966174
agguuugcggaccuaucag

SEQ ID NO: 966176 - RNA, 19 nt, Artificial Sequence
  Description of Artificial Sequence: Synthetic oligonucleotide
  Sense strand starting at position 3137 of SEQ ID NO: 913945
uuaacagagcucuggugau

SEQ ID NO: 966177 - RNA, 19 nt, Artificial Sequence
  Description of Artificial Sequence: Synthetic oligonucleotide
  Antisense strand to SEQ ID NO: 966176
aucaccagagcucuguuaa

SEQ ID NO: 966178 - RNA, 19 nt, Artificial Sequence
  Description of Artificial Sequence: Synthetic oligonucleotide
  Sense strand starting at position 2478 of SEQ ID NO: 913945
gagacuucgaaucguacag

SEQ ID NO: 966179 - RNA, 19 nt, Artificial Sequence
  Description of Artificial Sequence: Synthetic oligonucleotide
  Antisense strand to SEQ ID NO: 966178
cuguacgauucgaagucuc

SEQ ID NO: 966180 - RNA, 19 nt, Artificial Sequence
  Description of Artificial Sequence: Synthetic oligonucleotide
  Sense strand starting at position 3733 of SEQ ID NO: 913945
gcagcaaauuaguuacaag

SEQ ID NO: 966181 - RNA, 19 nt, Artificial Sequence
  Description of Artificial Sequence: Synthetic oligonucleotide
  Antisense strand to SEQ ID NO: 966180
cuuguaacuaauuugcugc

SEQ ID NO: 966182 - RNA, 19 nt, Artificial Sequence
  Description of Artificial Sequence: Synthetic oligonucleotide
  Sense strand starting at position 3508 of SEQ ID NO: 913945
gcuaauuccuaggcuaaga

SEQ ID NO: 966183 - RNA, 19 nt, Artificial Sequence
  Description of Artificial Sequence: Synthetic oligonucleotide
  Antisense strand to SEQ ID NO: 966182
ucuuagccuaggaauuagc

SEQ ID NO: 966184 - RNA, 19 nt, Artificial Sequence
  Description of Artificial Sequence: Synthetic oligonucleotide
  Sense strand starting at position 3507 of SEQ ID NO: 913945
agcuaauuccuaggcuaag

SEQ ID NO: 966185 - RNA, 19 nt, Artificial Sequence
  Description of Artificial Sequence: Synthetic oligonucleotide
  Antisense strand to SEQ ID NO: 966184
cuuagccuaggaauuagcu

SEQ ID NO: 966186 - RNA, 19 nt, Artificial Sequence
  Description of Artificial Sequence: Synthetic oligonucleotide
  Sense strand starting at position 2961 of SEQ ID NO: 913945
ugucaaacuuuguuggacu

SEQ ID NO: 966187 - RNA, 19 nt, Artificial Sequence
  Description of Artificial Sequence: Synthetic oligonucleotide
  Antisense strand to SEQ ID NO: 966186
aguccaacaaaguuugaca

SEQ ID NO: 966188 - RNA, 19 nt, Artificial Sequence
  Description of Artificial Sequence: Synthetic oligonucleotide
  Sense strand starting at position 3098 of SEQ ID NO: 913945
ccucucugaucuguggauu

SEQ ID NO: 966189 - RNA, 19 nt, Artificial Sequence
  Description of Artificial Sequence: Synthetic oligonucleotide
  Antisense strand to SEQ ID NO: 966188
aauccacagaucagagagg

SEQ ID NO: 966190 - RNA, 19 nt, Artificial Sequence
  Description of Artificial Sequence: Synthetic oligonucleotide
  Sense strand starting at position 3678 of SEQ ID NO: 913945
aagugaauccagcgaaagu

SEQ ID NO: 966191 - RNA, 19 nt, Artificial Sequence
  Description of Artificial Sequence: Synthetic oligonucleotide
  Antisense strand to SEQ ID NO: 966190
acuuucgcuggauucacuu

SEQ ID NO: 966192 - RNA, 19 nt, Artificial Sequence
  Description of Artificial Sequence: Synthetic oligonucleotide
  Sense strand starting at position 2534 of SEQ ID NO: 913945
aagcgugcccuugaauaga

SEQ ID NO: 966193 - RNA, 19 nt, Artificial Sequence
  Description of Artificial Sequence: Synthetic oligonucleotide
  Antisense strand to SEQ ID NO: 966192
ucuauucaagggcacgcuu

SEQ ID NO: 966194 - RNA, 19 nt, Artificial Sequence
  Description of Artificial Sequence: Synthetic oligonucleotide
  Sense strand starting at position 153 of SEQ ID NO: 913945
gauuaagcgcagugaagaa

SEQ ID NO: 966195 - RNA, 19 nt, Artificial Sequence
  Description of Artificial Sequence: Synthetic oligonucleotide
  Antisense strand to SEQ ID NO: 966194
uucuucacugcgcuuaauc

SEQ ID NO: 966196 - RNA, 19 nt, Artificial Sequence
  Description of Artificial Sequence: Synthetic oligonucleotide
  Sense strand starting at position 296 of SEQ ID NO: 913945
gucuuacuaaugugaggug

SEQ ID NO: 966197 - RNA, 19 nt, Artificial Sequence
  Description of Artificial Sequence: Synthetic oligonucleotide
  Antisense strand to SEQ ID NO: 966196
caccucacauuaguaagac

SEQ ID NO: 966198 - RNA, 19 nt, Artificial Sequence
  Description of Artificial Sequence: Synthetic oligonucleotide
  Sense strand starting at position 2885 of SEQ ID NO: 913945
aaaugugucuguccuuuga

SEQ ID NO: 966199 - RNA, 19 nt, Artificial Sequence
  Description of Artificial Sequence: Synthetic oligonucleotide
  Antisense strand to SEQ ID NO: 966198
ucaaaggacagacacauuu

SEQ ID NO: 966200 - RNA, 19 nt, Artificial Sequence
  Description of Artificial Sequence: Synthetic oligonucleotide
  Sense strand starting at position 3249 of SEQ ID NO: 913945
uccugauagguccgcaaac

SEQ ID NO: 966201 - RNA, 19 nt, Artificial Sequence
  Description of Artificial Sequence: Synthetic oligonucleotide
  Antisense strand to SEQ ID NO: 966200
guuugcggaccuaucagga

SEQ ID NO: 966202 - RNA, 19 nt, Artificial Sequence
  Description of Artificial Sequence: Synthetic oligonucleotide
  Sense strand starting at position 824 of SEQ ID NO: 913946
guagauauauaaccuggau

SEQ ID NO: 966203 - RNA, 19 nt, Artificial Sequence
  Description of Artificial Sequence: Synthetic oligonucleotide
  Antisense strand to SEQ ID NO: 966202
auccagguuauauaucuac

SEQ ID NO: 966204 - RNA, 19 nt, Artificial Sequence
  Description of Artificial Sequence: Synthetic oligonucleotide
  Sense strand starting at position 16 of SEQ ID NO: 913946
uugggugaauaggugaaua

SEQ ID NO: 966205 - RNA, 19 nt, Artificial Sequence
  Description of Artificial Sequence: Synthetic oligonucleotide
  Antisense strand to SEQ ID NO: 966204
uauucaccuauucacccaa

SEQ ID NO: 966206 - RNA, 19 nt, Artificial Sequence
  Description of Artificial Sequence: Synthetic oligonucleotide
  Sense strand starting at position 2196 of SEQ ID NO: 913946
gguuguuuacaucauaaca

SEQ ID NO: 966207 - RNA, 19 nt, Artificial Sequence
  Description of Artificial Sequence: Synthetic oligonucleotide
  Antisense strand to SEQ ID NO: 966206
uguuaugauguaaacaacc

SEQ ID NO: 966208 - RNA, 19 nt, Artificial Sequence
  Description of Artificial Sequence: Synthetic oligonucleotide
  Sense strand starting at position 3373 of SEQ ID NO: 913946
auauguuagcaaugaagga

SEQ ID NO: 966209 - RNA, 19 nt, Artificial Sequence
  Description of Artificial Sequence: Synthetic oligonucleotide
  Antisense strand to SEQ ID NO: 966208
uccuucauugcuaacauau

SEQ ID NO: 966210 - RNA, 19 nt, Artificial Sequence
  Description of Artificial Sequence: Synthetic oligonucleotide
  Sense strand starting at position 3164 of SEQ ID NO: 913946
auaugcauuggaggauauu

SEQ ID NO: 966211 - RNA, 19 nt, Artificial Sequence
  Description of Artificial Sequence: Synthetic oligonucleotide
  Antisense strand to SEQ ID NO: 966210
aauauccuccaaugcauau

SEQ ID NO: 966212 - RNA, 19 nt, Artificial Sequence
  Description of Artificial Sequence: Synthetic oligonucleotide
  Sense strand starting at position 1352 of SEQ ID NO: 913946
cccugugaccaagacaguu

SEQ ID NO: 966213 - RNA, 19 nt, Artificial Sequence
  Description of Artificial Sequence: Synthetic oligonucleotide
  Antisense strand to SEQ ID NO: 966212
aacugucuuggucacaggg

SEQ ID NO: 966214 - RNA, 19 nt, Artificial Sequence
  Description of Artificial Sequence: Synthetic oligonucleotide
  Sense strand starting at position 3394 of SEQ ID NO: 913946
gggucacaaacaugugaua

SEQ ID NO: 966215 - RNA, 19 nt, Artificial Sequence
  Description of Artificial Sequence: Synthetic oligonucleotide
  Antisense strand to SEQ ID NO: 966214
uaucacauguuugugaccc

SEQ ID NO: 966216 - RNA, 19 nt, Artificial Sequence
  Description of Artificial Sequence: Synthetic oligonucleotide
  Sense strand starting at position 2478 of SEQ ID NO: 913946
gugguaaagaagcauuacu

SEQ ID NO: 966217 - RNA, 19 nt, Artificial Sequence
  Description of Artificial Sequence: Synthetic oligonucleotide
  Antisense strand to SEQ ID NO: 966216
aguaaugcuucuuuaccac

SEQ ID NO: 966218 - RNA, 19 nt, Artificial Sequence
  Description of Artificial Sequence: Synthetic oligonucleotide
  Sense strand starting at position 9 of SEQ ID NO: 913946
uucccaauugggugaauag

SEQ ID NO: 966219 - RNA, 19 nt, Artificial Sequence
  Description of Artificial Sequence: Synthetic oligonucleotide
  Antisense strand to SEQ ID NO: 966218
cuauucacccaauugggaa

SEQ ID NO: 966220 - RNA, 19 nt, Artificial Sequence
  Description of Artificial Sequence: Synthetic oligonucleotide
  Sense strand starting at position 2722 of SEQ ID NO: 913946
agaugacucuaaguggcaa

SEQ ID NO: 966221 - RNA, 19 nt, Artificial Sequence
  Description of Artificial Sequence: Synthetic oligonucleotide
  Antisense strand to SEQ ID NO: 966220
uugccacuuagagucaucu

SEQ ID NO: 966222 - RNA, 19 nt, Artificial Sequence
  Description of Artificial Sequence: Synthetic oligonucleotide
  Sense strand starting at position 3076 of SEQ ID NO: 913946
aggauuacucuuuaugcuu

SEQ ID NO: 966223 - RNA, 19 nt, Artificial Sequence
  Description of Artificial Sequence: Synthetic oligonucleotide
  Antisense strand to SEQ ID NO: 966222
aagcauaaagaguaauccu

SEQ ID NO: 966224 - RNA, 19 nt, Artificial Sequence
  Description of Artificial Sequence: Synthetic oligonucleotide
  Sense strand starting at position 2946 of SEQ ID NO: 913946
cguauaguccuuuaaagaa

SEQ ID NO: 966225 - RNA, 19 nt, Artificial Sequence
  Description of Artificial Sequence: Synthetic oligonucleotide
  Antisense strand to SEQ ID NO: 966224
uucuuuaaaggacuauacg

SEQ ID NO: 966226 - RNA, 19 nt, Artificial Sequence
  Description of Artificial Sequence: Synthetic oligonucleotide
  Sense strand starting at position 1218 of SEQ ID NO: 913946
ccucuauaaguugggauua

SEQ ID NO: 966227 - RNA, 19 nt, Artificial Sequence
  Description of Artificial Sequence: Synthetic oligonucleotide
  Antisense strand to SEQ ID NO: 966226
uaaucccaacuuauagagg

SEQ ID NO: 966228 - RNA, 19 nt, Artificial Sequence
  Description of Artificial Sequence: Synthetic oligonucleotide
  Sense strand starting at position 1255 of SEQ ID NO: 913946
cagguuugccaugaaacuc

SEQ ID NO: 966229 - RNA, 19 nt, Artificial Sequence
  Description of Artificial Sequence: Synthetic oligonucleotide
  Antisense strand to SEQ ID NO: 966228
gaguuucauggcaaaccug

SEQ ID NO: 966230 - RNA, 19 nt, Artificial Sequence
  Description of Artificial Sequence: Synthetic oligonucleotide
  Sense strand starting at position 806 of SEQ ID NO: 913946
agaaacuggucauauuuag

SEQ ID NO: 966231 - RNA, 19 nt, Artificial Sequence
  Description of Artificial Sequence: Synthetic oligonucleotide
  Antisense strand to SEQ ID NO: 966230
cuaaauaugaccaguuucu

SEQ ID NO: 966232 - RNA, 19 nt, Artificial Sequence
  Description of Artificial Sequence: Synthetic oligonucleotide
  Sense strand starting at position 2536 of SEQ ID NO: 913946
ucuaguggacuuugagauc

SEQ ID NO: 966233 - RNA, 19 nt, Artificial Sequence
  Description of Artificial Sequence: Synthetic oligonucleotide
  Antisense strand to SEQ ID NO: 966232
gaucucaaaguccacuaga

SEQ ID NO: 966234 - RNA, 19 nt, Artificial Sequence
  Description of Artificial Sequence: Synthetic oligonucleotide
  Sense strand starting at position 976 of SEQ ID NO: 913946
guuaacucauugguaaaua

SEQ ID NO: 966235 - RNA, 19 nt, Artificial Sequence
  Description of Artificial Sequence: Synthetic oligonucleotide
  Antisense strand to SEQ ID NO: 966234
uauuuaccaaugaguuaac

SEQ ID NO: 966236 - RNA, 19 nt, Artificial Sequence
  Description of Artificial Sequence: Synthetic oligonucleotide
  Sense strand starting at position 3369 of SEQ ID NO: 913946
ugacauauguuagcaauga

SEQ ID NO: 966237 - RNA, 19 nt, Artificial Sequence
  Description of Artificial Sequence: Synthetic oligonucleotide
  Antisense strand to SEQ ID NO: 966236
ucauugcuaacauauguca

SEQ ID NO: 966238 - RNA, 19 nt, Artificial Sequence
  Description of Artificial Sequence: Synthetic oligonucleotide
  Sense strand starting at position 161 of SEQ ID NO: 913946
guuugauaucuuuaccucu

SEQ ID NO: 966239 - RNA, 19 nt, Artificial Sequence
  Description of Artificial Sequence: Synthetic oligonucleotide
  Antisense strand to SEQ ID NO: 966238
agagguaaagauaucaaac

SEQ ID NO: 966240 - RNA, 19 nt, Artificial Sequence
  Description of Artificial Sequence: Synthetic oligonucleotide
  Sense strand starting at position 2593 of SEQ ID NO: 913946
auguguauucuagaagcca

SEQ ID NO: 966241 - RNA, 19 nt, Artificial Sequence
  Description of Artificial Sequence: Synthetic oligonucleotide
  Antisense strand to SEQ ID NO: 966240
uggcuucuagaauacacau

SEQ ID NO: 966242 - RNA, 19 nt, Artificial Sequence
  Description of Artificial Sequence: Synthetic oligonucleotide
  Sense strand starting at position 8 of SEQ ID NO: 913946
guucccaauugggugaaua

SEQ ID NO: 966243 - RNA, 19 nt, Artificial Sequence
  Description of Artificial Sequence: Synthetic oligonucleotide
  Antisense strand to SEQ ID NO: 966242
uauucacccaauugggaac

SEQ ID NO: 966244 - RNA, 19 nt, Artificial Sequence
  Description of Artificial Sequence: Synthetic oligonucleotide
  Sense strand starting at position 3321 of SEQ ID NO: 913946
guuaaucaguauuccugaa

SEQ ID NO: 966245 - RNA, 19 nt, Artificial Sequence
  Description of Artificial Sequence: Synthetic oligonucleotide
  Antisense strand to SEQ ID NO: 966244
uucaggaauacugauuaac

SEQ ID NO: 966246 - RNA, 19 nt, Artificial Sequence
  Description of Artificial Sequence: Synthetic oligonucleotide
  Sense strand starting at position 469 of SEQ ID NO: 913946
gugucuucucuuuacaaac

SEQ ID NO: 966247 - RNA, 19 nt, Artificial Sequence
  Description of Artificial Sequence: Synthetic oligonucleotide
  Antisense strand to SEQ ID NO: 966246
guuuguaaagagaagacac

SEQ ID NO: 966248 - RNA, 19 nt, Artificial Sequence
  Description of Artificial Sequence: Synthetic oligonucleotide
  Sense strand starting at position 974 of SEQ ID NO: 913946
cuguuaacucauugguaaa

SEQ ID NO: 966249 - RNA, 19 nt, Artificial Sequence
  Description of Artificial Sequence: Synthetic oligonucleotide
  Antisense strand to SEQ ID NO: 966248
uuuaccaaugaguuaacag

SEQ ID NO: 966250 - RNA, 19 nt, Artificial Sequence
  Description of Artificial Sequence: Synthetic oligonucleotide
  Sense strand starting at position 3210 of SEQ ID NO: 913946
aagacuugguauguuccua

SEQ ID NO: 966251 - RNA, 19 nt, Artificial Sequence
  Description of Artificial Sequence: Synthetic oligonucleotide
  Antisense strand to SEQ ID NO: 966250
uaggaacauaccaagucuu

SEQ ID NO: 966252 - RNA, 19 nt, Artificial Sequence
  Description of Artificial Sequence: Synthetic oligonucleotide
  Sense strand starting at position 1254 of SEQ ID NO: 913946
acagguuugccaugaaacu

SEQ ID NO: 966253 - RNA, 19 nt, Artificial Sequence
  Description of Artificial Sequence: Synthetic oligonucleotide
  Antisense strand to SEQ ID NO: 966252
aguuucauggcaaaccugu

SEQ ID NO: 966254 - RNA, 19 nt, Artificial Sequence
  Description of Artificial Sequence: Synthetic oligonucleotide
  Sense strand starting at position 3294 of SEQ ID NO: 913946
ugugauuggugaccuauca

SEQ ID NO: 966255 - RNA, 19 nt, Artificial Sequence
  Description of Artificial Sequence: Synthetic oligonucleotide
  Antisense strand to SEQ ID NO: 966254
ugauaggucaccaaucaca

SEQ ID NO: 966256 - RNA, 19 nt, Artificial Sequence
  Description of Artificial Sequence: Synthetic oligonucleotide
  Sense strand starting at position 2700 of SEQ ID NO: 913946
guuaacuucuuacuaaagu

SEQ ID NO: 966257 - RNA, 19 nt, Artificial Sequence
  Description of Artificial Sequence: Synthetic oligonucleotide
  Antisense strand to SEQ ID NO: 966256
acuuuaguaagaaguuaac

SEQ ID NO: 966258 - RNA, 19 nt, Artificial Sequence
  Description of Artificial Sequence: Synthetic oligonucleotide
  Sense strand starting at position 203 of SEQ ID NO: 913946
gcuugacugcucuauuagg

SEQ ID NO: 966259 - RNA, 19 nt, Artificial Sequence
  Description of Artificial Sequence: Synthetic oligonucleotide
  Antisense strand to SEQ ID NO: 966258
ccuaauagagcagucaagc

SEQ ID NO: 966260 - RNA, 19 nt, Artificial Sequence
  Description of Artificial Sequence: Synthetic oligonucleotide
  Sense strand starting at position 3071 of SEQ ID NO: 913946
gcaguaggauuacucuuua

SEQ ID NO: 966261 - RNA, 19 nt, Artificial Sequence
  Description of Artificial Sequence: Synthetic oligonucleotide
  Antisense strand to SEQ ID NO: 966260
uaaagaguaauccuacugc

SEQ ID NO: 966262 - RNA, 19 nt, Artificial Sequence
  Description of Artificial Sequence: Synthetic oligonucleotide
  Sense strand starting at position 444 of SEQ ID NO: 913946
ugggucuucuuaucaacga

SEQ ID NO: 966263 - RNA, 19 nt, Artificial Sequence
  Description of Artificial Sequence: Synthetic oligonucleotide
  Antisense strand to SEQ ID NO: 966262
ucguugauaagaagaccca

SEQ ID NO: 966264 - RNA, 19 nt, Artificial Sequence
  Description of Artificial Sequence: Synthetic oligonucleotide
  Sense strand starting at position 1210 of SEQ ID NO: 913946
ggcuuccuccucuauaagu

SEQ ID NO: 966265 - RNA, 19 nt, Artificial Sequence
  Description of Artificial Sequence: Synthetic oligonucleotide
  Antisense strand to SEQ ID NO: 966264
acuuauagaggaggaagcc

SEQ ID NO: 966266 - RNA, 19 nt, Artificial Sequence
  Description of Artificial Sequence: Synthetic oligonucleotide
  Sense strand starting at position 1053 of SEQ ID NO: 913946
gggaauaggcucuacgugu

SEQ ID NO: 966267 - RNA, 19 nt, Artificial Sequence
  Description of Artificial Sequence: Synthetic oligonucleotide
  Antisense strand to SEQ ID NO: 966266
acacguagagccuauuccc

SEQ ID NO: 966268 - RNA, 19 nt, Artificial Sequence
  Description of Artificial Sequence: Synthetic oligonucleotide
  Sense strand starting at position 1093 of SEQ ID NO: 913946
aaccguauucgugcgugua

SEQ ID NO: 966269 - RNA, 19 nt, Artificial Sequence
  Description of Artificial Sequence: Synthetic oligonucleotide
  Antisense strand to SEQ ID NO: 966268
uacacgcacgaauacgguu

SEQ ID NO: 966270 - RNA, 19 nt, Artificial Sequence
  Description of Artificial Sequence: Synthetic oligonucleotide
  Sense strand starting at position 468 of SEQ ID NO: 913946
agugucuucucuuuacaaa

SEQ ID NO: 966271 - RNA, 19 nt, Artificial Sequence
  Description of Artificial Sequence: Synthetic oligonucleotide
  Antisense strand to SEQ ID NO: 966270
uuuguaaagagaagacacu

SEQ ID NO: 966272 - RNA, 19 nt, Artificial Sequence
  Description of Artificial Sequence: Synthetic oligonucleotide
  Sense strand starting at position 3287 of SEQ ID NO: 913946
gcuuaaaugugauugguga

SEQ ID NO: 966273 - RNA, 19 nt, Artificial Sequence
  Description of Artificial Sequence: Synthetic oligonucleotide
  Antisense strand to SEQ ID NO: 966272
ucaccaaucacauuuaagc

SEQ ID NO: 966274 - RNA, 19 nt, Artificial Sequence
  Description of Artificial Sequence: Synthetic oligonucleotide
  Sense strand starting at position 813 of SEQ ID NO: 913946
ggucauauuuaguagauau

SEQ ID NO: 966275 - RNA, 19 nt, Artificial Sequence
  Description of Artificial Sequence: Synthetic oligonucleotide
  Antisense strand to SEQ ID NO: 966274
auaucuacuaaauaugacc

SEQ ID NO: 966276 - RNA, 19 nt, Artificial Sequence
  Description of Artificial Sequence: Synthetic oligonucleotide
  Sense strand starting at position 448 of SEQ ID NO: 913946
ucuucuuaucaacgaaugu

SEQ ID NO: 966277 - RNA, 19 nt, Artificial Sequence
  Description of Artificial Sequence: Synthetic oligonucleotide
  Antisense strand to SEQ ID NO: 966276
acauucguugauaagaaga

SEQ ID NO: 966278 - RNA, 19 nt, Artificial Sequence
  Description of Artificial Sequence: Synthetic oligonucleotide
  Sense strand starting at position 771 of SEQ ID NO: 913946
cuuuaccuucuuuguuaga

SEQ ID NO: 966279 - RNA, 19 nt, Artificial Sequence
  Description of Artificial Sequence: Synthetic oligonucleotide
  Antisense strand to SEQ ID NO: 966278
ucuaacaaagaagguaaag

SEQ ID NO: 966280 - RNA, 19 nt, Artificial Sequence
  Description of Artificial Sequence: Synthetic oligonucleotide
  Sense strand starting at position 452 of SEQ ID NO: 913946
cuuaucaacgaaugucagu

SEQ ID NO: 966281 - RNA, 19 nt, Artificial Sequence
  Description of Artificial Sequence: Synthetic oligonucleotide
  Antisense strand to SEQ ID NO: 966280
acugacauucguugauaag

SEQ ID NO: 966282 - RNA, 19 nt, Artificial Sequence
  Description of Artificial Sequence: Synthetic oligonucleotide
  Sense strand starting at position 248 of SEQ ID NO: 913947
augucauugcaacauggaa

SEQ ID NO: 966283 - RNA, 19 nt, Artificial Sequence
  Description of Artificial Sequence: Synthetic oligonucleotide
  Antisense strand to SEQ ID NO: 966282
uuccauguugcaaugacau

SEQ ID NO: 966284 - RNA, 19 nt, Artificial Sequence
  Description of Artificial Sequence: Synthetic oligonucleotide
  Sense strand starting at position 1317 of SEQ ID NO: 913947
gaacgaaugaguuggacuc

SEQ ID NO: 966285 - RNA, 19 nt, Artificial Sequence
  Description of Artificial Sequence: Synthetic oligonucleotide
  Antisense strand to SEQ ID NO: 966284
gaguccaacucauucguuc

SEQ ID NO: 966286 - RNA, 19 nt, Artificial Sequence
  Description of Artificial Sequence: Synthetic oligonucleotide
  Sense strand starting at position 2875 of SEQ ID NO: 913947
uuaagagagguuuggaguu

SEQ ID NO: 966287 - RNA, 19 nt, Artificial Sequence
  Description of Artificial Sequence: Synthetic oligonucleotide
  Antisense strand to SEQ ID NO: 966286
aacuccaaaccucucuuaa

SEQ ID NO: 966288 - RNA, 19 nt, Artificial Sequence
  Description of Artificial Sequence: Synthetic oligonucleotide
  Sense strand starting at position 2312 of SEQ ID NO: 913947
gcauuuccucuguggcaaa

SEQ ID NO: 966289 - RNA, 19 nt, Artificial Sequence
  Description of Artificial Sequence: Synthetic oligonucleotide
  Antisense strand to SEQ ID NO: 966288
uuugccacagaggaaaugc

SEQ ID NO: 966290 - RNA, 19 nt, Artificial Sequence
  Description of Artificial Sequence: Synthetic oligonucleotide
  Sense strand starting at position 3275 of SEQ ID NO: 913947
cgaugccugcaagaaagau

SEQ ID NO: 966291 - RNA, 19 nt, Artificial Sequence
  Description of Artificial Sequence: Synthetic oligonucleotide
  Antisense strand to SEQ ID NO: 966290
aucuuucuugcaggcaucg

SEQ ID NO: 966292 - RNA, 19 nt, Artificial Sequence
  Description of Artificial Sequence: Synthetic oligonucleotide
  Sense strand starting at position 2311 of SEQ ID NO: 913947
ugcauuuccucuguggcaa

SEQ ID NO: 966293 - RNA, 19 nt, Artificial Sequence
  Description of Artificial Sequence: Synthetic oligonucleotide
  Antisense strand to SEQ ID NO: 966292
uugccacagaggaaaugca

SEQ ID NO: 966294 - RNA, 19 nt, Artificial Sequence
  Description of Artificial Sequence: Synthetic oligonucleotide
  Sense strand starting at position 3272 of SEQ ID NO: 913947
ucacgaugccugcaagaaa

SEQ ID NO: 966295 - RNA, 19 nt, Artificial Sequence
  Description of Artificial Sequence: Synthetic oligonucleotide
  Antisense strand to SEQ ID NO: 966294
uuucuugcaggcaucguga

SEQ ID NO: 966296 - RNA, 19 nt, Artificial Sequence
  Description of Artificial Sequence: Synthetic oligonucleotide
  Sense strand starting at position 2310 of SEQ ID NO: 913947
augcauuuccucuguggca

SEQ ID NO: 966297 - RNA, 19 nt, Artificial Sequence
  Description of Artificial Sequence: Synthetic oligonucleotide
  Antisense strand to SEQ ID NO: 966296
ugccacagaggaaaugcau

SEQ ID NO: 966298 - RNA, 19 nt, Artificial Sequence
  Description of Artificial Sequence: Synthetic oligonucleotide
  Sense strand starting at position 3316 of SEQ ID NO: 913947
ucaaauaaugccuggcaaa

SEQ ID NO: 966299 - RNA, 19 nt, Artificial Sequence
  Description of Artificial Sequence: Synthetic oligonucleotide
  Antisense strand to SEQ ID NO: 966298
uuugccaggcauuauuuga

SEQ ID NO: 966300 - RNA, 19 nt, Artificial Sequence
  Description of Artificial Sequence: Synthetic oligonucleotide
  Sense strand starting at position 2366 of SEQ ID NO: 913947
uaaaguuccuguucugaag

SEQ ID NO: 966301 - RNA, 19 nt, Artificial Sequence
  Description of Artificial Sequence: Synthetic oligonucleotide
  Antisense strand to SEQ ID NO: 966300
cuucagaacaggaacuuua

SEQ ID NO: 966302 - RNA, 19 nt, Artificial Sequence
  Description of Artificial Sequence: Synthetic oligonucleotide
  Sense strand starting at position 1341 of SEQ ID NO: 913947
gccuaagugaccugcaaga

SEQ ID NO: 966303 - RNA, 19 nt, Artificial Sequence
  Description of Artificial Sequence: Synthetic oligonucleotide
  Antisense strand to SEQ ID NO: 966302
ucuugcaggucacuuaggc

SEQ ID NO: 966304 - RNA, 19 nt, Artificial Sequence
  Description of Artificial Sequence: Synthetic oligonucleotide
  Sense strand starting at position 2881 of SEQ ID NO: 913947
gagguuuggaguuggcuua

SEQ ID NO: 966305 - RNA, 19 nt, Artificial Sequence
  Description of Artificial Sequence: Synthetic oligonucleotide
  Antisense strand to SEQ ID NO: 966304
uaagccaacuccaaaccuc

SEQ ID NO: 966306 - RNA, 19 nt, Artificial Sequence
  Description of Artificial Sequence: Synthetic oligonucleotide
  Sense strand starting at position 2377 of SEQ ID NO: 913947
uucugaaguauguacguuu

SEQ ID NO: 966307 - RNA, 19 nt, Artificial Sequence
  Description of Artificial Sequence: Synthetic oligonucleotide
  Antisense strand to SEQ ID NO: 966306
aaacguacauacuucagaa

SEQ ID NO: 966308 - RNA, 19 nt, Artificial Sequence
  Description of Artificial Sequence: Synthetic oligonucleotide
  Sense strand starting at position 2380 of SEQ ID NO: 913947
ugaaguauguacguuuauu

SEQ ID NO: 966309 - RNA, 19 nt, Artificial Sequence
  Description of Artificial Sequence: Synthetic oligonucleotide
  Antisense strand to SEQ ID NO: 966308
aauaaacguacauacuuca

SEQ ID NO: 966310 - RNA, 19 nt, Artificial Sequence
  Description of Artificial Sequence: Synthetic oligonucleotide
  Sense strand starting at position 3284 of SEQ ID NO: 913947
caagaaagauucgggaagu

SEQ ID NO: 966311 - RNA, 19 nt, Artificial Sequence
  Description of Artificial Sequence: Synthetic oligonucleotide
  Antisense strand to SEQ ID NO: 966310
acuucccgaaucuuucuug

SEQ ID NO: 966312 - RNA, 19 nt, Artificial Sequence
  Description of Artificial Sequence: Synthetic oligonucleotide
  Sense strand starting at position 3285 of SEQ ID NO: 913947
aagaaagauucgggaaguc

SEQ ID NO: 966313 - RNA, 19 nt, Artificial Sequence
  Description of Artificial Sequence: Synthetic oligonucleotide
  Antisense strand to SEQ ID NO: 966312
gacuucccgaaucuuucuu

SEQ ID NO: 966314 - RNA, 19 nt, Artificial Sequence
  Description of Artificial Sequence: Synthetic oligonucleotide
  Sense strand starting at position 3251 of SEQ ID NO: 913947
cuaagauaaugccagcuaa

SEQ ID NO: 966315 - RNA, 19 nt, Artificial Sequence
  Description of Artificial Sequence: Synthetic oligonucleotide
  Antisense strand to SEQ ID NO: 966314
uuagcuggcauuaucuuag

SEQ ID NO: 966316 - RNA, 19 nt, Artificial Sequence
  Description of Artificial Sequence: Synthetic oligonucleotide
  Sense strand starting at position 2265 of SEQ ID NO: 913947
gacguugcaucacaaauaa

SEQ ID NO: 966317 - RNA, 19 nt, Artificial Sequence
  Description of Artificial Sequence: Synthetic oligonucleotide
  Antisense strand to SEQ ID NO: 966316
uuauuugugaugcaacguc

SEQ ID NO: 966318 - RNA, 19 nt, Artificial Sequence
  Description of Artificial Sequence: Synthetic oligonucleotide
  Sense strand starting at position 2407 of SEQ ID NO: 913947
ggaauuauauaguguauug

SEQ ID NO: 966319 - RNA, 19 nt, Artificial Sequence
  Description of Artificial Sequence: Synthetic oligonucleotide
  Antisense strand to SEQ ID NO: 966318
caauacacuauauaauucc

SEQ ID NO: 966320 - RNA, 19 nt, Artificial Sequence
  Description of Artificial Sequence: Synthetic oligonucleotide
  Sense strand starting at position 1926 of SEQ ID NO: 913947
ccuccauggucgggagaga

SEQ ID NO: 966321 - RNA, 19 nt, Artificial Sequence
  Description of Artificial Sequence: Synthetic oligonucleotide
  Antisense strand to SEQ ID NO: 966320
ucucucccgaccauggagg

SEQ ID NO: 966322 - RNA, 19 nt, Artificial Sequence
  Description of Artificial Sequence: Synthetic oligonucleotide
  Sense strand starting at position 1043 of SEQ ID NO: 913947
cauguaaucuuucggaagg

SEQ ID NO: 966323 - RNA, 19 nt, Artificial Sequence
  Description of Artificial Sequence: Synthetic oligonucleotide
  Antisense strand to SEQ ID NO: 966322
ccuuccgaaagauuacaug

SEQ ID NO: 966324 - RNA, 19 nt, Artificial Sequence
  Description of Artificial Sequence: Synthetic oligonucleotide
  Sense strand starting at position 2369 of SEQ ID NO: 913947
aguuccuguucugaaguau

SEQ ID NO: 966325 - RNA, 19 nt, Artificial Sequence
  Description of Artificial Sequence: Synthetic oligonucleotide
  Antisense strand to SEQ ID NO: 966324
auacuucagaacaggaacu

SEQ ID NO: 966326 - RNA, 19 nt, Artificial Sequence
  Description of Artificial Sequence: Synthetic oligonucleotide
  Sense strand starting at position 2368 of SEQ ID NO: 913947
aaguuccuguucugaagua

SEQ ID NO: 966327 - RNA, 19 nt, Artificial Sequence
  Description of Artificial Sequence: Synthetic oligonucleotide
  Antisense strand to SEQ ID NO: 966326
uacuucagaacaggaacuu

SEQ ID NO: 966328 - RNA, 19 nt, Artificial Sequence
  Description of Artificial Sequence: Synthetic oligonucleotide
  Sense strand starting at position 2363 of SEQ ID NO: 913947
guauaaaguuccuguucug

SEQ ID NO: 966329 - RNA, 19 nt, Artificial Sequence
  Description of Artificial Sequence: Synthetic oligonucleotide
  Antisense strand to SEQ ID NO: 966328
cagaacaggaacuuuauac

SEQ ID NO: 966330 - RNA, 19 nt, Artificial Sequence
  Description of Artificial Sequence: Synthetic oligonucleotide
  Sense strand starting at position 545 of SEQ ID NO: 913947
ccgcuuuggucaggcugaa

SEQ ID NO: 966331 - RNA, 19 nt, Artificial Sequence
  Description of Artificial Sequence: Synthetic oligonucleotide
  Antisense strand to SEQ ID NO: 966330
uucagccugaccaaagcgg

SEQ ID NO: 966332 - RNA, 19 nt, Artificial Sequence
  Description of Artificial Sequence: Synthetic oligonucleotide
  Sense strand starting at position 360 of SEQ ID NO: 913948
caacauagaugguuuagau

SEQ ID NO: 966333 - RNA, 19 nt, Artificial Sequence
  Description of Artificial Sequence: Synthetic oligonucleotide
  Antisense strand to SEQ ID NO: 966332
aucuaaaccaucuauguug

SEQ ID NO: 966334 - RNA, 19 nt, Artificial Sequence
  Description of Artificial Sequence: Synthetic oligonucleotide
  Sense strand starting at position 1373 of SEQ ID NO: 913948
guaaauucgguagaaggau

SEQ ID NO: 966335 - RNA, 19 nt, Artificial Sequence
  Description of Artificial Sequence: Synthetic oligonucleotide
  Antisense strand to SEQ ID NO: 966334
auccuucuaccgaauuuac

SEQ ID NO: 966336 - RNA, 19 nt, Artificial Sequence
  Description of Artificial Sequence: Synthetic oligonucleotide
  Sense strand starting at position 653 of SEQ ID NO: 913948
gggauaaggcaauguagga

SEQ ID NO: 966337 - RNA, 19 nt, Artificial Sequence
  Description of Artificial Sequence: Synthetic oligonucleotide
  Antisense strand to SEQ ID NO: 966336
uccuacauugccuuauccc

SEQ ID NO: 966338 - RNA, 19 nt, Artificial Sequence
  Description of Artificial Sequence: Synthetic oligonucleotide
  Sense strand starting at position 3589 of SEQ ID NO: 913948
agacuaacuugagugauug

SEQ ID NO: 966339 - RNA, 19 nt, Artificial Sequence
  Description of Artificial Sequence: Synthetic oligonucleotide
  Antisense strand to SEQ ID NO: 966338
caaucacucaaguuagucu

SEQ ID NO: 966340 - RNA, 19 nt, Artificial Sequence
  Description of Artificial Sequence: Synthetic oligonucleotide
  Sense strand starting at position 3709 of SEQ ID NO: 913948
ggaaauuuaaagcgcugua

SEQ ID NO: 966341 - RNA, 19 nt, Artificial Sequence
  Description of Artificial Sequence: Synthetic oligonucleotide
  Antisense strand to SEQ ID NO: 966340
uacagcgcuuuaaauuucc

SEQ ID NO: 966342 - RNA, 19 nt, Artificial Sequence
  Description of Artificial Sequence: Synthetic oligonucleotide
  Sense strand starting at position 1233 of SEQ ID NO: 913948
uguggaagaccuugaauua

SEQ ID NO: 966343 - RNA, 19 nt, Artificial Sequence
  Description of Artificial Sequence: Synthetic oligonucleotide
  Antisense strand to SEQ ID NO: 966342
uaauucaaggucuuccaca

SEQ ID NO: 966344 - RNA, 19 nt, Artificial Sequence
  Description of Artificial Sequence: Synthetic oligonucleotide
  Sense strand starting at position 3590 of SEQ ID NO: 913948
gacuaacuugagugauuga

SEQ ID NO: 966345 - RNA, 19 nt, Artificial Sequence
  Description of Artificial Sequence: Synthetic oligonucleotide
  Antisense strand to SEQ ID NO: 966344
ucaaucacucaaguuaguc

SEQ ID NO: 966346 - RNA, 19 nt, Artificial Sequence
  Description of Artificial Sequence: Synthetic oligonucleotide
  Sense strand starting at position 738 of SEQ ID NO: 913948
agaagcuugacagguagaa

SEQ ID NO: 966347 - RNA, 19 nt, Artificial Sequence
  Description of Artificial Sequence: Synthetic oligonucleotide
  Antisense strand to SEQ ID NO: 966346
uucuaccugucaagcuucu

SEQ ID NO: 966348 - RNA, 19 nt, Artificial Sequence
  Description of Artificial Sequence: Synthetic oligonucleotide
  Sense strand starting at position 3951 of SEQ ID NO: 913948
aguugauagcuacauuaua

SEQ ID NO: 966349 - RNA, 19 nt, Artificial Sequence
  Description of Artificial Sequence: Synthetic oligonucleotide
  Antisense strand to SEQ ID NO: 966348
uauaauguagcuaucaacu

SEQ ID NO: 966350 - RNA, 19 nt, Artificial Sequence
  Description of Artificial Sequence: Synthetic oligonucleotide
  Sense strand starting at position 2336 of SEQ ID NO: 913948
cuuagcuuuggaggagaga

SEQ ID NO: 966351 - RNA, 19 nt, Artificial Sequence
  Description of Artificial Sequence: Synthetic oligonucleotide
  Antisense strand to SEQ ID NO: 966350
ucucuccuccaaagcuaag

SEQ ID NO: 966352 - RNA, 19 nt, Artificial Sequence
  Description of Artificial Sequence: Synthetic oligonucleotide
  Sense strand starting at position 3025 of SEQ ID NO: 913948
acggaaggauuaguuacau

SEQ ID NO: 966353 - RNA, 19 nt, Artificial Sequence
  Description of Artificial Sequence: Synthetic oligonucleotide
  Antisense strand to SEQ ID NO: 966352
auguaacuaauccuuccgu

SEQ ID NO: 966354 - RNA, 19 nt, Artificial Sequence
  Description of Artificial Sequence: Synthetic oligonucleotide
  Sense strand starting at position 523 of SEQ ID NO: 913948
acuguagcucuacagauga

SEQ ID NO: 966355 - RNA, 19 nt, Artificial Sequence
  Description of Artificial Sequence: Synthetic oligonucleotide
  Antisense strand to SEQ ID NO: 966354
ucaucuguagagcuacagu

SEQ ID NO: 966356 - RNA, 19 nt, Artificial Sequence
  Description of Artificial Sequence: Synthetic oligonucleotide
  Sense strand starting at position 1330 of SEQ ID NO: 913948
caggcuauagauuggacau

SEQ ID NO: 966357 - RNA, 19 nt, Artificial Sequence
  Description of Artificial Sequence: Synthetic oligonucleotide
  Antisense strand to SEQ ID NO: 966356
auguccaaucuauagccug

SEQ ID NO: 966358 - RNA, 19 nt, Artificial Sequence
  Description of Artificial Sequence: Synthetic oligonucleotide
  Sense strand starting at position 1298 of SEQ ID NO: 913948
gcgagagaacaguaagcaa

SEQ ID NO: 966359 - RNA, 19 nt, Artificial Sequence
  Description of Artificial Sequence: Synthetic oligonucleotide
  Antisense strand to SEQ ID NO: 966358
uugcuuacuguucucucgc

SEQ ID NO: 966360 - RNA, 19 nt, Artificial Sequence
  Description of Artificial Sequence: Synthetic oligonucleotide
  Sense strand starting at position 3916 of SEQ ID NO: 913948
gaaguaugucuuuaguaag

SEQ ID NO: 966361 - RNA, 19 nt, Artificial Sequence
  Description of Artificial Sequence: Synthetic oligonucleotide
  Antisense strand to SEQ ID NO: 966360
cuuacuaaagacauacuuc

SEQ ID NO: 966362 - RNA, 19 nt, Artificial Sequence
  Description of Artificial Sequence: Synthetic oligonucleotide
  Sense strand starting at position 849 of SEQ ID NO: 913948
guugucucugaggaauuau

SEQ ID NO: 966363 - RNA, 19 nt, Artificial Sequence
  Description of Artificial Sequence: Synthetic oligonucleotide
  Antisense strand to SEQ ID NO: 966362
auaauuccucagagacaac

SEQ ID NO: 966364 - RNA, 19 nt, Artificial Sequence
  Description of Artificial Sequence: Synthetic oligonucleotide
  Sense strand starting at position 1246 of SEQ ID NO: 913948
gaauuagauauggguaguu

SEQ ID NO: 966365 - RNA, 19 nt, Artificial Sequence
  Description of Artificial Sequence: Synthetic oligonucleotide
  Antisense strand to SEQ ID NO: 966364
aacuacccauaucuaauuc

SEQ ID NO: 966366 - RNA, 19 nt, Artificial Sequence
  Description of Artificial Sequence: Synthetic oligonucleotide
  Sense strand starting at position 1370 of SEQ ID NO: 913948
caaguaaauucgguagaag

SEQ ID NO: 966367 - RNA, 19 nt, Artificial Sequence
  Description of Artificial Sequence: Synthetic oligonucleotide
  Antisense strand to SEQ ID NO: 966366
cuucuaccgaauuuacuug

SEQ ID NO: 966368 - RNA, 19 nt, Artificial Sequence
  Description of Artificial Sequence: Synthetic oligonucleotide
  Sense strand starting at position 3933 of SEQ ID NO: 913948
aguuuaguaaaguggaaca

SEQ ID NO: 966369 - RNA, 19 nt, Artificial Sequence
  Description of Artificial Sequence: Synthetic oligonucleotide
  Antisense strand to SEQ ID NO: 966368
uguuccacuuuacuaaacu

SEQ ID NO: 966370 - RNA, 19 nt, Artificial Sequence
  Description of Artificial Sequence: Synthetic oligonucleotide
  Sense strand starting at position 377 of SEQ ID NO: 913948
augucaggcccggaauaau

SEQ ID NO: 966371 - RNA, 19 nt, Artificial Sequence
  Description of Artificial Sequence: Synthetic oligonucleotide
  Antisense strand to SEQ ID NO: 966370
auuauuccgggccugacau

SEQ ID NO: 966372 - RNA, 19 nt, Artificial Sequence
  Description of Artificial Sequence: Synthetic oligonucleotide
  Sense strand starting at position 2200 of SEQ ID NO: 913948
guuacauucguugaaggac

SEQ ID NO: 966373 - RNA, 19 nt, Artificial Sequence
  Description of Artificial Sequence: Synthetic oligonucleotide
  Antisense strand to SEQ ID NO: 966372
guccuucaacgaauguaac

SEQ ID NO: 966374 - RNA, 19 nt, Artificial Sequence
  Description of Artificial Sequence: Synthetic oligonucleotide
  Sense strand starting at position 2190 of SEQ ID NO: 913948
ccgagaggugguuacauuc

SEQ ID NO: 966375 - RNA, 19 nt, Artificial Sequence
  Description of Artificial Sequence: Synthetic oligonucleotide
  Antisense strand to SEQ ID NO: 966374
gaauguaaccaccucucgg

SEQ ID NO: 966376 - RNA, 19 nt, Artificial Sequence
  Description of Artificial Sequence: Synthetic oligonucleotide
  Sense strand starting at position 3687 of SEQ ID NO: 913948
ccauauuguguguaaauua

SEQ ID NO: 966377 - RNA, 19 nt, Artificial Sequence
  Description of Artificial Sequence: Synthetic oligonucleotide
  Antisense strand to SEQ ID NO: 966376
uaauuuacacacaauaugg

SEQ ID NO: 966378 - RNA, 19 nt, Artificial Sequence
  Description of Artificial Sequence: Synthetic oligonucleotide
  Sense strand starting at position 3712 of SEQ ID NO: 913948
aauuuaaagcgcuguagua

SEQ ID NO: 966379 - RNA, 19 nt, Artificial Sequence
  Description of Artificial Sequence: Synthetic oligonucleotide
  Antisense strand to SEQ ID NO: 966378
uacuacagcgcuuuaaauu

SEQ ID NO: 966380 - RNA, 19 nt, Artificial Sequence
  Description of Artificial Sequence: Synthetic oligonucleotide
  Sense strand starting at position 2415 of SEQ ID NO: 913948
gugagaagccucgagguga

SEQ ID NO: 966381 - RNA, 19 nt, Artificial Sequence
  Description of Artificial Sequence: Synthetic oligonucleotide
  Antisense strand to SEQ ID NO: 966380
ucaccucgaggcuucucac

SEQ ID NO: 966382 - RNA, 19 nt, Artificial Sequence
  Description of Artificial Sequence: Synthetic oligonucleotide
  Sense strand starting at position 3734 of SEQ ID NO: 913948
uugggcauauccuccuaaa

SEQ ID NO: 966383 - RNA, 19 nt, Artificial Sequence
  Description of Artificial Sequence: Synthetic oligonucleotide
  Antisense strand to SEQ ID NO: 966382
uuuaggaggauaugcccaa

SEQ ID NO: 966384 - RNA, 19 nt, Artificial Sequence
  Description of Artificial Sequence: Synthetic oligonucleotide
  Sense strand starting at position 1356 of SEQ ID NO: 913948
gacaguauugaaggcaagu

SEQ ID NO: 966385 - RNA, 19 nt, Artificial Sequence
  Description of Artificial Sequence: Synthetic oligonucleotide
  Antisense strand to SEQ ID NO: 966384
acuugccuucaauacuguc

SEQ ID NO: 966386 - RNA, 19 nt, Artificial Sequence
  Description of Artificial Sequence: Synthetic oligonucleotide
  Sense strand starting at position 95 of SEQ ID NO: 913948
cagugagugucaccaaaca

SEQ ID NO: 966387 - RNA, 19 nt, Artificial Sequence
  Description of Artificial Sequence: Synthetic oligonucleotide
  Antisense strand to SEQ ID NO: 966386
uguuuggugacacucacug

SEQ ID NO: 966388 - RNA, 19 nt, Artificial Sequence
  Description of Artificial Sequence: Synthetic oligonucleotide
  Sense strand starting at position 2891 of SEQ ID NO: 913948
ucgugaucucaccauucca

SEQ ID NO: 966389 - RNA, 19 nt, Artificial Sequence
  Description of Artificial Sequence: Synthetic oligonucleotide
  Antisense strand to SEQ ID NO: 966388
uggaauggugagaucacga

SEQ ID NO: 966390 - RNA, 19 nt, Artificial Sequence
  Description of Artificial Sequence: Synthetic oligonucleotide
  Sense strand starting at position 3915 of SEQ ID NO: 913948
ggaaguaugucuuuaguaa

SEQ ID NO: 966391 - RNA, 19 nt, Artificial Sequence
  Description of Artificial Sequence: Synthetic oligonucleotide
  Antisense strand to SEQ ID NO: 966390
uuacuaaagacauacuucc

SEQ ID NO: 966392 - RNA, 19 nt, Artificial Sequence
  Description of Artificial Sequence: Synthetic oligonucleotide
  Sense strand starting at position 1877 of SEQ ID NO: 913948
accugacagccaugagguu

SEQ ID NO: 966393 - RNA, 19 nt, Artificial Sequence
  Description of Artificial Sequence: Synthetic oligonucleotide
  Antisense strand to SEQ ID NO: 966392
aaccucauggcugucaggu

SEQ ID NO: 966394 - RNA, 19 nt, Artificial Sequence
  Description of Artificial Sequence: Synthetic oligonucleotide
  Sense strand starting at position 3754 of SEQ ID NO: 913948
aguuuaguuagauguaaug

SEQ ID NO: 966395 - RNA, 19 nt, Artificial Sequence
  Description of Artificial Sequence: Synthetic oligonucleotide
  Antisense strand to SEQ ID NO: 966394
cauuacaucuaacuaaacu

SEQ ID NO: 966396 - RNA, 19 nt, Artificial Sequence
  Description of Artificial Sequence: Synthetic oligonucleotide
  Sense strand starting at position 3646 of SEQ ID NO: 913948
auuagucuucugugggaua

SEQ ID NO: 966397 - RNA, 19 nt, Artificial Sequence
  Description of Artificial Sequence: Synthetic oligonucleotide
  Antisense strand to SEQ ID NO: 966396
uaucccacagaagacuaau

SEQ ID NO: 966398 - RNA, 19 nt, Artificial Sequence
  Description of Artificial Sequence: Synthetic oligonucleotide
  Sense strand starting at position 375 of SEQ ID NO: 913948
agaugucaggcccggaaua

SEQ ID NO: 966399 - RNA, 19 nt, Artificial Sequence
  Description of Artificial Sequence: Synthetic oligonucleotide
  Antisense strand to SEQ ID NO: 966398
uauuccgggccugacaucu

SEQ ID NO: 966400 - RNA, 19 nt, Artificial Sequence
  Description of Artificial Sequence: Synthetic oligonucleotide
  Sense strand starting at position 376 of SEQ ID NO: 913948
gaugucaggcccggaauaa

SEQ ID NO: 966401 - RNA, 19 nt, Artificial Sequence
  Description of Artificial Sequence: Synthetic oligonucleotide
  Antisense strand to SEQ ID NO: 966400
uuauuccgggccugacauc

SEQ ID NO: 966402 - RNA, 19 nt, Artificial Sequence
  Description of Artificial Sequence: Synthetic oligonucleotide
  Sense strand starting at position 2785 of SEQ ID NO: 913948
aggccuuuccuaggaggua

SEQ ID NO: 966403 - RNA, 19 nt, Artificial Sequence
  Description of Artificial Sequence: Synthetic oligonucleotide
  Antisense strand to SEQ ID NO: 966402
uaccuccuaggaaaggccu

SEQ ID NO: 966404 - RNA, 19 nt, Artificial Sequence
  Description of Artificial Sequence: Synthetic oligonucleotide
  Sense strand starting at position 2332 of SEQ ID NO: 913948
aguucuuagcuuuggagga

SEQ ID NO: 966405 - RNA, 19 nt, Artificial Sequence
  Description of Artificial Sequence: Synthetic oligonucleotide
  Antisense strand to SEQ ID NO: 966404
uccuccaaagcuaagaacu

SEQ ID NO: 966406 - RNA, 19 nt, Artificial Sequence
  Description of Artificial Sequence: Synthetic oligonucleotide
  Sense strand starting at position 2965 of SEQ ID NO: 913948
aagagcuacuggucacuuu

SEQ ID NO: 966407 - RNA, 19 nt, Artificial Sequence
  Description of Artificial Sequence: Synthetic oligonucleotide
  Antisense strand to SEQ ID NO: 966406
aaagugaccaguagcucuu

SEQ ID NO: 966408 - RNA, 19 nt, Artificial Sequence
  Description of Artificial Sequence: Synthetic oligonucleotide
  Sense strand starting at position 2199 of SEQ ID NO: 913948
gguuacauucguugaagga

SEQ ID NO: 966409 - RNA, 19 nt, Artificial Sequence
  Description of Artificial Sequence: Synthetic oligonucleotide
  Antisense strand to SEQ ID NO: 966408
uccuucaacgaauguaacc

SEQ ID NO: 966410 - RNA, 19 nt, Artificial Sequence
  Description of Artificial Sequence: Synthetic oligonucleotide
  Sense strand starting at position 2883 of SEQ ID NO: 913948
uccuuaccucgugaucuca

SEQ ID NO: 966411 - RNA, 19 nt, Artificial Sequence
  Description of Artificial Sequence: Synthetic oligonucleotide
  Antisense strand to SEQ ID NO: 966410
ugagaucacgagguaagga

SEQ ID NO: 966412 - RNA, 19 nt, Artificial Sequence
  Description of Artificial Sequence: Synthetic oligonucleotide
  Sense strand starting at position 2557 of SEQ ID NO: 913949
uggcuacaauuucuguauu

SEQ ID NO: 966413 - RNA, 19 nt, Artificial Sequence
  Description of Artificial Sequence: Synthetic oligonucleotide
  Antisense strand to SEQ ID NO: 966412
aauacagaaauuguagcca

SEQ ID NO: 966414 - RNA, 19 nt, Artificial Sequence
  Description of Artificial Sequence: Synthetic oligonucleotide
  Sense strand starting at position 656 of SEQ ID NO: 913949
gccuauaaugaaggaauau

SEQ ID NO: 966415 - RNA, 19 nt, Artificial Sequence
  Description of Artificial Sequence: Synthetic oligonucleotide
  Antisense strand to SEQ ID NO: 966414
auauuccuucauuauaggc

SEQ ID NO: 966416 - RNA, 19 nt, Artificial Sequence
  Description of Artificial Sequence: Synthetic oligonucleotide
  Sense strand starting at position 2859 of SEQ ID NO: 913949
gggaaucaucucuaaugcu

SEQ ID NO: 966417 - RNA, 19 nt, Artificial Sequence
  Description of Artificial Sequence: Synthetic oligonucleotide
  Antisense strand to SEQ ID NO: 966416
agcauuagagaugauuccc

SEQ ID NO: 966418 - RNA, 19 nt, Artificial Sequence
  Description of Artificial Sequence: Synthetic oligonucleotide
  Sense strand starting at position 2406 of SEQ ID NO: 913949
cccucaaaccuuugagaug

SEQ ID NO: 966419 - RNA, 19 nt, Artificial Sequence
  Description of Artificial Sequence: Synthetic oligonucleotide
  Antisense strand to SEQ ID NO: 966418
caucucaaagguuugaggg

SEQ ID NO: 966420 - RNA, 19 nt, Artificial Sequence
  Description of Artificial Sequence: Synthetic oligonucleotide
  Sense strand starting at position 2008 of SEQ ID NO: 913949
gagugaaacguggaaaguu

SEQ ID NO: 966421 - RNA, 19 nt, Artificial Sequence
  Description of Artificial Sequence: Synthetic oligonucleotide
  Antisense strand to SEQ ID NO: 966420
aacuuuccacguuucacuc

SEQ ID NO: 966422 - RNA, 19 nt, Artificial Sequence
  Description of Artificial Sequence: Synthetic oligonucleotide
  Sense strand starting at position 2483 of SEQ ID NO: 913949
gcuaaucaugacuagccaa

SEQ ID NO: 966423 - RNA, 19 nt, Artificial Sequence
  Description of Artificial Sequence: Synthetic oligonucleotide
  Antisense strand to SEQ ID NO: 966422
uuggcuagucaugauuagc

SEQ ID NO: 966424 - RNA, 19 nt, Artificial Sequence
  Description of Artificial Sequence: Synthetic oligonucleotide
  Sense strand starting at position 1350 of SEQ ID NO: 913949
gcgaaucuuccucacagga

SEQ ID NO: 966425 - RNA, 19 nt, Artificial Sequence
  Description of Artificial Sequence: Synthetic oligonucleotide
  Antisense strand to SEQ ID NO: 966424
uccugugaggaagauucgc

SEQ ID NO: 966426 - RNA, 19 nt, Artificial Sequence
  Description of Artificial Sequence: Synthetic oligonucleotide
  Sense strand starting at position 3635 of SEQ ID NO: 913949
gggaaagaccugugucuua

SEQ ID NO: 966427 - RNA, 19 nt, Artificial Sequence
  Description of Artificial Sequence: Synthetic oligonucleotide
  Antisense strand to SEQ ID NO: 966426
uaagacacaggucuuuccc

SEQ ID NO: 966428 - RNA, 19 nt, Artificial Sequence
  Description of Artificial Sequence: Synthetic oligonucleotide
  Sense strand starting at position 3633 of SEQ ID NO: 913949
uagggaaagaccugugucu

SEQ ID NO: 966429 - RNA, 19 nt, Artificial Sequence
  Description of Artificial Sequence: Synthetic oligonucleotide
  Antisense strand to SEQ ID NO: 966428
agacacaggucuuucccua

SEQ ID NO: 966430 - RNA, 19 nt, Artificial Sequence
  Description of Artificial Sequence: Synthetic oligonucleotide
  Sense strand starting at position 2129 of SEQ ID NO: 913949
ggaugggagcguugggaaa

SEQ ID NO: 966431 - RNA, 19 nt, Artificial Sequence
  Description of Artificial Sequence: Synthetic oligonucleotide
  Antisense strand to SEQ ID NO: 966430
uuucccaacgcucccaucc

SEQ ID NO: 966432 - RNA, 19 nt, Artificial Sequence
  Description of Artificial Sequence: Synthetic oligonucleotide
  Sense strand starting at position 3192 of SEQ ID NO: 913949
cccuuuagcccaggagaau

SEQ ID NO: 966433 - RNA, 19 nt, Artificial Sequence
  Description of Artificial Sequence: Synthetic oligonucleotide
  Antisense strand to SEQ ID NO: 966432
auucuccugggcuaaaggg

SEQ ID NO: 966434 - RNA, 19 nt, Artificial Sequence
  Description of Artificial Sequence: Synthetic oligonucleotide
  Sense strand starting at position 3045 of SEQ ID NO: 913949
cugguaguucuuuauauau

SEQ ID NO: 966435 - RNA, 19 nt, Artificial Sequence
  Description of Artificial Sequence: Synthetic oligonucleotide
  Antisense strand to SEQ ID NO: 966434
auauauaaagaacuaccag

SEQ ID NO: 966436 - RNA, 19 nt, Artificial Sequence
  Description of Artificial Sequence: Synthetic oligonucleotide
  Sense strand starting at position 2007 of SEQ ID NO: 913949
ggagugaaacguggaaagu

SEQ ID NO: 966437 - RNA, 19 nt, Artificial Sequence
  Description of Artificial Sequence: Synthetic oligonucleotide
  Antisense strand to SEQ ID NO: 966436
acuuuccacguuucacucc

SEQ ID NO: 966438 - RNA, 19 nt, Artificial Sequence
  Description of Artificial Sequence: Synthetic oligonucleotide
  Sense strand starting at position 3620 of SEQ ID NO: 913949
cuguaaccuuguuuaggga

SEQ ID NO: 966439 - RNA, 19 nt, Artificial Sequence
  Description of Artificial Sequence: Synthetic oligonucleotide
  Antisense strand to SEQ ID NO: 966438
ucccuaaacaagguuacag

SEQ ID NO: 966440 - RNA, 19 nt, Artificial Sequence
  Description of Artificial Sequence: Synthetic oligonucleotide
  Sense strand starting at position 3601 of SEQ ID NO: 913949
agcccuucugcccauuaga

SEQ ID NO: 966441 - RNA, 19 nt, Artificial Sequence
  Description of Artificial Sequence: Synthetic oligonucleotide
  Antisense strand to SEQ ID NO: 966440
ucuaaugggcagaagggcu

SEQ ID NO: 966442 - RNA, 19 nt, Artificial Sequence
  Description of Artificial Sequence: Synthetic oligonucleotide
  Sense strand starting at position 903 of SEQ ID NO: 913949
gaaauugacgucugcagac

SEQ ID NO: 966443 - RNA, 19 nt, Artificial Sequence
  Description of Artificial Sequence: Synthetic oligonucleotide
  Antisense strand to SEQ ID NO: 966442
gucugcagacgucaauuuc

SEQ ID NO: 966444 - RNA, 19 nt, Artificial Sequence
  Description of Artificial Sequence: Synthetic oligonucleotide
  Sense strand starting at position 3044 of SEQ ID NO: 913949
ccugguaguucuuuauaua

SEQ ID NO: 966445 - RNA, 19 nt, Artificial Sequence
  Description of Artificial Sequence: Synthetic oligonucleotide
  Antisense strand to SEQ ID NO: 966444
uauauaaagaacuaccagg

SEQ ID NO: 966446 - RNA, 19 nt, Artificial Sequence
  Description of Artificial Sequence: Synthetic oligonucleotide
  Sense strand starting at position 11 of SEQ ID NO: 913949
agucauauuugacagcaac

SEQ ID NO: 966447 - RNA, 19 nt, Artificial Sequence
  Description of Artificial Sequence: Synthetic oligonucleotide
  Antisense strand to SEQ ID NO: 966446
guugcugucaaauaugacu

SEQ ID NO: 966448 - RNA, 19 nt, Artificial Sequence
  Description of Artificial Sequence: Synthetic oligonucleotide
  Sense strand starting at position 380 of SEQ ID NO: 913949
cucauaaauugcucuggca

SEQ ID NO: 966449 - RNA, 19 nt, Artificial Sequence
  Description of Artificial Sequence: Synthetic oligonucleotide
  Antisense strand to SEQ ID NO: 966448
ugccagagcaauuuaugag

SEQ ID NO: 966450 - RNA, 19 nt, Artificial Sequence
  Description of Artificial Sequence: Synthetic oligonucleotide
  Sense strand starting at position 2471 of SEQ ID NO: 913949
ugaaguuccuuugcuaauc

SEQ ID NO: 966451 - RNA, 19 nt, Artificial Sequence
  Description of Artificial Sequence: Synthetic oligonucleotide
  Antisense strand to SEQ ID NO: 966450
gauuagcaaaggaacuuca

SEQ ID NO: 966452 - RNA, 19 nt, Artificial Sequence
  Description of Artificial Sequence: Synthetic oligonucleotide
  Sense strand starting at position 2409 of SEQ ID NO: 913949
ucaaaccuuugagauggaa

SEQ ID NO: 966453 - RNA, 19 nt, Artificial Sequence
  Description of Artificial Sequence: Synthetic oligonucleotide
  Antisense strand to SEQ ID NO: 966452
uuccaucucaaagguuuga

SEQ ID NO: 966454 - RNA, 19 nt, Artificial Sequence
  Description of Artificial Sequence: Synthetic oligonucleotide
  Sense strand starting at position 2387 of SEQ ID NO: 913949
aaguuucucucagcgaauc

SEQ ID NO: 966455 - RNA, 19 nt, Artificial Sequence
  Description of Artificial Sequence: Synthetic oligonucleotide
  Antisense strand to SEQ ID NO: 966454
gauucgcugagagaaacuu

SEQ ID NO: 966456 - RNA, 19 nt, Artificial Sequence
  Description of Artificial Sequence: Synthetic oligonucleotide
  Sense strand starting at position 405 of SEQ ID NO: 913949
ggagucaagcuuuggccau

SEQ ID NO: 966457 - RNA, 19 nt, Artificial Sequence
  Description of Artificial Sequence: Synthetic oligonucleotide
  Antisense strand to SEQ ID NO: 966456
auggccaaagcuugacucc

SEQ ID NO: 966458 - RNA, 19 nt, Artificial Sequence
  Description of Artificial Sequence: Synthetic oligonucleotide
  Sense strand starting at position 2468 of SEQ ID NO: 913949
cuuugaaguuccuuugcua

SEQ ID NO: 966459 - RNA, 19 nt, Artificial Sequence
  Description of Artificial Sequence: Synthetic oligonucleotide
  Antisense strand to SEQ ID NO: 966458
uagcaaaggaacuucaaag

SEQ ID NO: 966460 - RNA, 19 nt, Artificial Sequence
  Description of Artificial Sequence: Synthetic oligonucleotide
  Sense strand starting at position 3971 of SEQ ID NO: 913949
cucaccugucauuguagua

SEQ ID NO: 966461 - RNA, 19 nt, Artificial Sequence
  Description of Artificial Sequence: Synthetic oligonucleotide
  Antisense strand to SEQ ID NO: 966460
uacuacaaugacaggugag

SEQ ID NO: 966462 - RNA, 19 nt, Artificial Sequence
  Description of Artificial Sequence: Synthetic oligonucleotide
  Sense strand starting at position 3646 of SEQ ID NO: 913949
gugucuuacucaucuguga

SEQ ID NO: 966463 - RNA, 19 nt, Artificial Sequence
  Description of Artificial Sequence: Synthetic oligonucleotide
  Antisense strand to SEQ ID NO: 966462
ucacagaugaguaagacac

SEQ ID NO: 966464 - RNA, 19 nt, Artificial Sequence
  Description of Artificial Sequence: Synthetic oligonucleotide
  Sense strand starting at position 2305 of SEQ ID NO: 913949
aagugaucagccuguccga

SEQ ID NO: 966465 - RNA, 19 nt, Artificial Sequence
  Description of Artificial Sequence: Synthetic oligonucleotide
  Antisense strand to SEQ ID NO: 966464
ucggacaggcugaucacuu

SEQ ID NO: 966466 - RNA, 19 nt, Artificial Sequence
  Description of Artificial Sequence: Synthetic oligonucleotide
  Sense strand starting at position 1736 of SEQ ID NO: 913949
gcagucuucccgagcgugu

SEQ ID NO: 966467 - RNA, 19 nt, Artificial Sequence
  Description of Artificial Sequence: Synthetic oligonucleotide
  Antisense strand to SEQ ID NO: 966466
acacgcucgggaagacugc

SEQ ID NO: 966468 - RNA, 19 nt, Artificial Sequence
  Description of Artificial Sequence: Synthetic oligonucleotide
  Sense strand starting at position 666 of SEQ ID NO: 913949
aaggaauauuaagggcaua

SEQ ID NO: 966469 - RNA, 19 nt, Artificial Sequence
  Description of Artificial Sequence: Synthetic oligonucleotide
  Antisense strand to SEQ ID NO: 966468
uaugcccuuaauauuccuu

SEQ ID NO: 966470 - RNA, 19 nt, Artificial Sequence
  Description of Artificial Sequence: Synthetic oligonucleotide
  Sense strand starting at position 43 of SEQ ID NO: 913949
gaguuuagauaagacaugu

SEQ ID NO: 966471 - RNA, 19 nt, Artificial Sequence
  Description of Artificial Sequence: Synthetic oligonucleotide
  Antisense strand to SEQ ID NO: 966470
acaugucuuaucuaaacuc

SEQ ID NO: 966472 - RNA, 19 nt, Artificial Sequence
  Description of Artificial Sequence: Synthetic oligonucleotide
  Sense strand starting at position 1348 of SEQ ID NO: 913949
gcgcgaaucuuccucacag

SEQ ID NO: 966473 - RNA, 19 nt, Artificial Sequence
  Description of Artificial Sequence: Synthetic oligonucleotide
  Antisense strand to SEQ ID NO: 966472
cugugaggaagauucgcgc

SEQ ID NO: 966474 - RNA, 19 nt, Artificial Sequence
  Description of Artificial Sequence: Synthetic oligonucleotide
  Sense strand starting at position 738 of SEQ ID NO: 913949
cguuaagaauaucaagauu

SEQ ID NO: 966475 - RNA, 19 nt, Artificial Sequence
  Description of Artificial Sequence: Synthetic oligonucleotide
  Antisense strand to SEQ ID NO: 966474
aaucuugauauucuuaacg

SEQ ID NO: 966476 - RNA, 19 nt, Artificial Sequence
  Description of Artificial Sequence: Synthetic oligonucleotide
  Sense strand starting at position 3624 of SEQ ID NO: 913949
aaccuuguuuagggaaaga

SEQ ID NO: 966477 - RNA, 19 nt, Artificial Sequence
  Description of Artificial Sequence: Synthetic oligonucleotide
  Antisense strand to SEQ ID NO: 966476
ucuuucccuaaacaagguu

SEQ ID NO: 966478 - RNA, 19 nt, Artificial Sequence
  Description of Artificial Sequence: Synthetic oligonucleotide
  Sense strand starting at position 383 of SEQ ID NO: 913949
auaaauugcucuggcauuu

SEQ ID NO: 966479 - RNA, 19 nt, Artificial Sequence
  Description of Artificial Sequence: Synthetic oligonucleotide
  Antisense strand to SEQ ID NO: 966478
aaaugccagagcaauuuau

SEQ ID NO: 966480 - RNA, 19 nt, Artificial Sequence
  Description of Artificial Sequence: Synthetic oligonucleotide
  Sense strand starting at position 3511 of SEQ ID NO: 913949
gccgcugauuccucacagu

SEQ ID NO: 966481 - RNA, 19 nt, Artificial Sequence
  Description of Artificial Sequence: Synthetic oligonucleotide
  Antisense strand to SEQ ID NO: 966480
acugugaggaaucagcggc

SEQ ID NO: 966482 - RNA, 19 nt, Artificial Sequence
  Description of Artificial Sequence: Synthetic oligonucleotide
  Sense strand starting at position 3551 of SEQ ID NO: 913949
gggcacugaucacauucua

SEQ ID NO: 966483 - RNA, 19 nt, Artificial Sequence
  Description of Artificial Sequence: Synthetic oligonucleotide
  Antisense strand to SEQ ID NO: 966482
uagaaugugaucagugccc

SEQ ID NO: 966484 - RNA, 19 nt, Artificial Sequence
  Description of Artificial Sequence: Synthetic oligonucleotide
  Sense strand starting at position 77 of SEQ ID NO: 913949
ucuuuaaaguaguaggauu

SEQ ID NO: 966485 - RNA, 19 nt, Artificial Sequence
  Description of Artificial Sequence: Synthetic oligonucleotide
  Antisense strand to SEQ ID NO: 966484
aauccuacuacuuuaaaga

SEQ ID NO: 966486 - RNA, 19 nt, Artificial Sequence
  Description of Artificial Sequence: Synthetic oligonucleotide
  Sense strand starting at position 818 of SEQ ID NO: 913949
aaucgcauuucugaucguu

SEQ ID NO: 966487 - RNA, 19 nt, Artificial Sequence
  Description of Artificial Sequence: Synthetic oligonucleotide
  Antisense strand to SEQ ID NO: 966486
aacgaucagaaaugcgauu

SEQ ID NO: 966488 - RNA, 19 nt, Artificial Sequence
  Description of Artificial Sequence: Synthetic oligonucleotide
  Sense strand starting at position 2594 of SEQ ID NO: 913949
cgcuguucucugugacuuu

SEQ ID NO: 966489 - RNA, 19 nt, Artificial Sequence
  Description of Artificial Sequence: Synthetic oligonucleotide
  Antisense strand to SEQ ID NO: 966488
aaagucacagagaacagcg

SEQ ID NO: 966490 - RNA, 19 nt, Artificial Sequence
  Description of Artificial Sequence: Synthetic oligonucleotide
  Sense strand starting at position 2374 of SEQ ID NO: 913949
aucccaugcuaagaaguuu

SEQ ID NO: 966491 - RNA, 19 nt, Artificial Sequence
  Description of Artificial Sequence: Synthetic oligonucleotide
  Antisense strand to SEQ ID NO: 966490
aaacuucuuagcaugggau

SEQ ID NO: 966492 - RNA, 19 nt, Artificial Sequence
  Description of Artificial Sequence: Synthetic oligonucleotide
  Sense strand starting at position 2852 of SEQ ID NO: 913950
gggcuacuggcauagaaag

SEQ ID NO: 966493 - RNA, 19 nt, Artificial Sequence
  Description of Artificial Sequence: Synthetic oligonucleotide
  Antisense strand to SEQ ID NO: 966492
cuuucuaugccaguagccc

SEQ ID NO: 966494 - RNA, 19 nt, Artificial Sequence
  Description of Artificial Sequence: Synthetic oligonucleotide
  Sense strand starting at position 3562 of SEQ ID NO: 913950
gagauucuuggugggaaac

SEQ ID NO: 966495 - RNA, 19 nt, Artificial Sequence
  Description of Artificial Sequence: Synthetic oligonucleotide
  Antisense strand to SEQ ID NO: 966494
guuucccaccaagaaucuc

SEQ ID NO: 966496 - RNA, 19 nt, Artificial Sequence
  Description of Artificial Sequence: Synthetic oligonucleotide
  Sense strand starting at position 3543 of SEQ ID NO: 913950
auucccugucaugaauuga

SEQ ID NO: 966497 - RNA, 19 nt, Artificial Sequence
  Description of Artificial Sequence: Synthetic oligonucleotide
  Antisense strand to SEQ ID NO: 966496
ucaauucaugacagggaau

SEQ ID NO: 966498 - RNA, 19 nt, Artificial Sequence
  Description of Artificial Sequence: Synthetic oligonucleotide
  Sense strand starting at position 2564 of SEQ ID NO: 913950
aggaguaaaccucaagcuu

SEQ ID NO: 966499 - RNA, 19 nt, Artificial Sequence
  Description of Artificial Sequence: Synthetic oligonucleotide
  Antisense strand to SEQ ID NO: 966498
aagcuugagguuuacuccu

SEQ ID NO: 966500 - RNA, 19 nt, Artificial Sequence
  Description of Artificial Sequence: Synthetic oligonucleotide
  Sense strand starting at position 2538 of SEQ ID NO: 913950
aaagcuugaccucagaagu

SEQ ID NO: 966501 - RNA, 19 nt, Artificial Sequence
  Description of Artificial Sequence: Synthetic oligonucleotide
  Antisense strand to SEQ ID NO: 966500
acuucugaggucaagcuuu

SEQ ID NO: 966502 - RNA, 19 nt, Artificial Sequence
  Description of Artificial Sequence: Synthetic oligonucleotide
  Sense strand starting at position 1102 of SEQ ID NO: 913950
cagguaggaucaccugaua

SEQ ID NO: 966503 - RNA, 19 nt, Artificial Sequence
  Description of Artificial Sequence: Synthetic oligonucleotide
  Antisense strand to SEQ ID NO: 966502
uaucaggugauccuaccug

SEQ ID NO: 966504 - RNA, 19 nt, Artificial Sequence
  Description of Artificial Sequence: Synthetic oligonucleotide
  Sense strand starting at position 160 of SEQ ID NO: 913950
agcuuaaacuuacugaaag

SEQ ID NO: 966505 - RNA, 19 nt, Artificial Sequence
  Description of Artificial Sequence: Synthetic oligonucleotide
  Antisense strand to SEQ ID NO: 966504
cuuucaguaaguuuaagcu

SEQ ID NO: 966506 - RNA, 19 nt, Artificial Sequence
  Description of Artificial Sequence: Synthetic oligonucleotide
  Sense strand starting at position 3547 of SEQ ID NO: 913950
ccugucaugaauugagaga

SEQ ID NO: 966507 - RNA, 19 nt, Artificial Sequence
  Description of Artificial Sequence: Synthetic oligonucleotide
  Antisense strand to SEQ ID NO: 966506
ucucucaauucaugacagg

SEQ ID NO: 966508 - RNA, 19 nt, Artificial Sequence
  Description of Artificial Sequence: Synthetic oligonucleotide
  Sense strand starting at position 2310 of SEQ ID NO: 913950
uuguaugauagcuauagga

SEQ ID NO: 966509 - RNA, 19 nt, Artificial Sequence
  Description of Artificial Sequence: Synthetic oligonucleotide
  Antisense strand to SEQ ID NO: 966508
uccuauagcuaucauacaa

SEQ ID NO: 966510 - RNA, 19 nt, Artificial Sequence
  Description of Artificial Sequence: Synthetic oligonucleotide
  Sense strand starting at position 715 of SEQ ID NO: 913950
ccacuuacuugauuggaau

SEQ ID NO: 966511 - RNA, 19 nt, Artificial Sequence
  Description of Artificial Sequence: Synthetic oligonucleotide
  Antisense strand to SEQ ID NO: 966510
auuccaaucaaguaagugg

SEQ ID NO: 966512 - RNA, 19 nt, Artificial Sequence
  Description of Artificial Sequence: Synthetic oligonucleotide
  Sense strand starting at position 872 of SEQ ID NO: 913950
uuggucgauagaugaaaga

SEQ ID NO: 966513 - RNA, 19 nt, Artificial Sequence
  Description of Artificial Sequence: Synthetic oligonucleotide
  Antisense strand to SEQ ID NO: 966512
ucuuucaucuaucgaccaa

SEQ ID NO: 966514 - RNA, 19 nt, Artificial Sequence
  Description of Artificial Sequence: Synthetic oligonucleotide
  Sense strand starting at position 740 of SEQ ID NO: 913950
uugaaagaucuggguuaug

SEQ ID NO: 966515 - RNA, 19 nt, Artificial Sequence
  Description of Artificial Sequence: Synthetic oligonucleotide
  Antisense strand to SEQ ID NO: 966514
cauaacccagaucuuucaa

SEQ ID NO: 966516 - RNA, 19 nt, Artificial Sequence
  Description of Artificial Sequence: Synthetic oligonucleotide
  Sense strand starting at position 2037 of SEQ ID NO: 913950
acucuugggaugugacaga

SEQ ID NO: 966517 - RNA, 19 nt, Artificial Sequence
  Description of Artificial Sequence: Synthetic oligonucleotide
  Antisense strand to SEQ ID NO: 966516
ucugucacaucccaagagu

SEQ ID NO: 966518 - RNA, 19 nt, Artificial Sequence
  Description of Artificial Sequence: Synthetic oligonucleotide
  Sense strand starting at position 3201 of SEQ ID NO: 913950
uuuaccucucuagauagua

SEQ ID NO: 966519 - RNA, 19 nt, Artificial Sequence
  Description of Artificial Sequence: Synthetic oligonucleotide
  Antisense strand to SEQ ID NO: 966518
uacuaucuagagagguaaa

SEQ ID NO: 966520 - RNA, 19 nt, Artificial Sequence
  Description of Artificial Sequence: Synthetic oligonucleotide
  Sense strand starting at position 3165 of SEQ ID NO: 913950
auagaaacccuaugaguuu

SEQ ID NO: 966521 - RNA, 19 nt, Artificial Sequence
  Description of Artificial Sequence: Synthetic oligonucleotide
  Antisense strand to SEQ ID NO: 966520
aaacucauaggguuucuau

SEQ ID NO: 966522 - RNA, 19 nt, Artificial Sequence
  Description of Artificial Sequence: Synthetic oligonucleotide
  Sense strand starting at position 667 of SEQ ID NO: 913950
cuuguauuugugcaguaug

SEQ ID NO: 966523 - RNA, 19 nt, Artificial Sequence
  Description of Artificial Sequence: Synthetic oligonucleotide
  Antisense strand to SEQ ID NO: 966522
cauacugcacaaauacaag

SEQ ID NO: 966524 - RNA, 19 nt, Artificial Sequence
  Description of Artificial Sequence: Synthetic oligonucleotide
  Sense strand starting at position 2346 of SEQ ID NO: 913950
cucggaagugcuuggauuu

SEQ ID NO: 966525 - RNA, 19 nt, Artificial Sequence
  Description of Artificial Sequence: Synthetic oligonucleotide
  Antisense strand to SEQ ID NO: 966524
aaauccaagcacuuccgag

SEQ ID NO: 966526 - RNA, 19 nt, Artificial Sequence
  Description of Artificial Sequence: Synthetic oligonucleotide
  Sense strand starting at position 863 of SEQ ID NO: 913950
uuugcacauuuggucgaua

SEQ ID NO: 966527 - RNA, 19 nt, Artificial Sequence
  Description of Artificial Sequence: Synthetic oligonucleotide
  Antisense strand to SEQ ID NO: 966526
uaucgaccaaaugugcaaa

SEQ ID NO: 966528 - RNA, 19 nt, Artificial Sequence
  Description of Artificial Sequence: Synthetic oligonucleotide
  Sense strand starting at position 2314 of SEQ ID NO: 913950
augauagcuauaggaagua

SEQ ID NO: 966529 - RNA, 19 nt, Artificial Sequence
  Description of Artificial Sequence: Synthetic oligonucleotide
  Antisense strand to SEQ ID NO: 966528
uacuuccuauagcuaucau

SEQ ID NO: 966530 - RNA, 19 nt, Artificial Sequence
  Description of Artificial Sequence: Synthetic oligonucleotide
  Sense strand starting at position 2750 of SEQ ID NO: 913950
uaguaauagccagagguca

SEQ ID NO: 966531 - RNA, 19 nt, Artificial Sequence
  Description of Artificial Sequence: Synthetic oligonucleotide
  Antisense strand to SEQ ID NO: 966530
ugaccucuggcuauuacua

SEQ ID NO: 966532 - RNA, 19 nt, Artificial Sequence
  Description of Artificial Sequence: Synthetic oligonucleotide
  Sense strand starting at position 738 of SEQ ID NO: 913950
ucuugaaagaucuggguua

SEQ ID NO: 966533 - RNA, 19 nt, Artificial Sequence
  Description of Artificial Sequence: Synthetic oligonucleotide
  Antisense strand to SEQ ID NO: 966532
uaacccagaucuuucaaga

SEQ ID NO: 966534 - RNA, 19 nt, Artificial Sequence
  Description of Artificial Sequence: Synthetic oligonucleotide
  Sense strand starting at position 2035 of SEQ ID NO: 913950
uaacucuugggaugugaca

SEQ ID NO: 966535 - RNA, 19 nt, Artificial Sequence
  Description of Artificial Sequence: Synthetic oligonucleotide
  Antisense strand to SEQ ID NO: 966534
ugucacaucccaagaguua

SEQ ID NO: 966536 - RNA, 19 nt, Artificial Sequence
  Description of Artificial Sequence: Synthetic oligonucleotide
  Sense strand starting at position 3521 of SEQ ID NO: 913950
gagagauccguugagguug

SEQ ID NO: 966537 - RNA, 19 nt, Artificial Sequence
  Description of Artificial Sequence: Synthetic oligonucleotide
  Antisense strand to SEQ ID NO: 966536
caaccucaacggaucucuc

SEQ ID NO: 966538 - RNA, 19 nt, Artificial Sequence
  Description of Artificial Sequence: Synthetic oligonucleotide
  Sense strand starting at position 931 of SEQ ID NO: 913950
uucgaaggacugugaauga

SEQ ID NO: 966539 - RNA, 19 nt, Artificial Sequence
  Description of Artificial Sequence: Synthetic oligonucleotide
  Antisense strand to SEQ ID NO: 966538
ucauucacaguccuucgaa

SEQ ID NO: 966540 - RNA, 19 nt, Artificial Sequence
  Description of Artificial Sequence: Synthetic oligonucleotide
  Sense strand starting at position 3480 of SEQ ID NO: 913950
gucagccugagagauagua

SEQ ID NO: 966541 - RNA, 19 nt, Artificial Sequence
  Description of Artificial Sequence: Synthetic oligonucleotide
  Antisense strand to SEQ ID NO: 966540
uacuaucucucaggcugac

SEQ ID NO: 966542 - RNA, 19 nt, Artificial Sequence
  Description of Artificial Sequence: Synthetic oligonucleotide
  Sense strand starting at position 2808 of SEQ ID NO: 913950
gaugauagauaucuugucu

SEQ ID NO: 966543 - RNA, 19 nt, Artificial Sequence
  Description of Artificial Sequence: Synthetic oligonucleotide
  Antisense strand to SEQ ID NO: 966542
agacaagauaucuaucauc

SEQ ID NO: 966544 - RNA, 19 nt, Artificial Sequence
  Description of Artificial Sequence: Synthetic oligonucleotide
  Sense strand starting at position 329 of SEQ ID NO: 913950
ggaggcauuuaggagauua

SEQ ID NO: 966545 - RNA, 19 nt, Artificial Sequence
  Description of Artificial Sequence: Synthetic oligonucleotide
  Antisense strand to SEQ ID NO: 966544
uaaucuccuaaaugccucc

SEQ ID NO: 966546 - RNA, 19 nt, Artificial Sequence
  Description of Artificial Sequence: Synthetic oligonucleotide
  Sense strand starting at position 3730 of SEQ ID NO: 913950
uccucuuugggugacuauu

SEQ ID NO: 966547 - RNA, 19 nt, Artificial Sequence
  Description of Artificial Sequence: Synthetic oligonucleotide
  Antisense strand to SEQ ID NO: 966546
aauagucacccaaagagga

SEQ ID NO: 966548 - RNA, 19 nt, Artificial Sequence
  Description of Artificial Sequence: Synthetic oligonucleotide
  Sense strand starting at position 3109 of SEQ ID NO: 913950
auguuacagugacucuaaa

SEQ ID NO: 966549 - RNA, 19 nt, Artificial Sequence
  Description of Artificial Sequence: Synthetic oligonucleotide
  Antisense strand to SEQ ID NO: 966548
uuuagagucacuguaacau

SEQ ID NO: 966550 - RNA, 19 nt, Artificial Sequence
  Description of Artificial Sequence: Synthetic oligonucleotide
  Sense strand starting at position 545 of SEQ ID NO: 913950
gaugaugggugauuagcau

SEQ ID NO: 966551 - RNA, 19 nt, Artificial Sequence
  Description of Artificial Sequence: Synthetic oligonucleotide
  Antisense strand to SEQ ID NO: 966550
augcuaaucacccaucauc

SEQ ID NO: 966552 - RNA, 19 nt, Artificial Sequence
  Description of Artificial Sequence: Synthetic oligonucleotide
  Sense strand starting at position 2720 of SEQ ID NO: 913950
uaaguaucuuaguuaggau

SEQ ID NO: 966553 - RNA, 19 nt, Artificial Sequence
  Description of Artificial Sequence: Synthetic oligonucleotide
  Antisense strand to SEQ ID NO: 966552
auccuaacuaagauacuua

SEQ ID NO: 966554 - RNA, 19 nt, Artificial Sequence
  Description of Artificial Sequence: Synthetic oligonucleotide
  Sense strand starting at position 2719 of SEQ ID NO: 913950
cuaaguaucuuaguuagga

SEQ ID NO: 966555 - RNA, 19 nt, Artificial Sequence
  Description of Artificial Sequence: Synthetic oligonucleotide
  Antisense strand to SEQ ID NO: 966554
uccuaacuaagauacuuag

SEQ ID NO: 966556 - RNA, 19 nt, Artificial Sequence
  Description of Artificial Sequence: Synthetic oligonucleotide
  Sense strand starting at position 70 of SEQ ID NO: 913950
guugguugucuagagaacu

SEQ ID NO: 966557 - RNA, 19 nt, Artificial Sequence
  Description of Artificial Sequence: Synthetic oligonucleotide
  Antisense strand to SEQ ID NO: 966556
aguucucuagacaaccaac

SEQ ID NO: 966558 - RNA, 19 nt, Artificial Sequence
  Description of Artificial Sequence: Synthetic oligonucleotide
  Sense strand starting at position 2193 of SEQ ID NO: 913950
ugaggugucuauuccagaa

SEQ ID NO: 966559 - RNA, 19 nt, Artificial Sequence
  Description of Artificial Sequence: Synthetic oligonucleotide
  Antisense strand to SEQ ID NO: 966558
uucuggaauagacaccuca

SEQ ID NO: 966560 - RNA, 19 nt, Artificial Sequence
  Description of Artificial Sequence: Synthetic oligonucleotide
  Sense strand starting at position 3914 of SEQ ID NO: 913950
cuacuucuccuguaaguau

SEQ ID NO: 966561 - RNA, 19 nt, Artificial Sequence
  Description of Artificial Sequence: Synthetic oligonucleotide
  Antisense strand to SEQ ID NO: 966560
auacuuacaggagaaguag

SEQ ID NO: 966562 - RNA, 19 nt, Artificial Sequence
  Description of Artificial Sequence: Synthetic oligonucleotide
  Sense strand starting at position 3476 of SEQ ID NO: 913950
cugugucagccugagagau

SEQ ID NO: 966563 - RNA, 19 nt, Artificial Sequence
  Description of Artificial Sequence: Synthetic oligonucleotide
  Antisense strand to SEQ ID NO: 966562
aucucucaggcugacacag

SEQ ID NO: 966564 - RNA, 19 nt, Artificial Sequence
  Description of Artificial Sequence: Synthetic oligonucleotide
  Sense strand starting at position 2135 of SEQ ID NO: 913950
cucauaagucccuagcgaa

SEQ ID NO: 966565 - RNA, 19 nt, Artificial Sequence
  Description of Artificial Sequence: Synthetic oligonucleotide
  Antisense strand to SEQ ID NO: 966564
uucgcuagggacuuaugag

SEQ ID NO: 966566 - RNA, 19 nt, Artificial Sequence
  Description of Artificial Sequence: Synthetic oligonucleotide
  Sense strand starting at position 666 of SEQ ID NO: 913950
ccuuguauuugugcaguau

SEQ ID NO: 966567 - RNA, 19 nt, Artificial Sequence
  Description of Artificial Sequence: Synthetic oligonucleotide
  Antisense strand to SEQ ID NO: 966566
auacugcacaaauacaagg

SEQ ID NO: 966568 - RNA, 19 nt, Artificial Sequence
  Description of Artificial Sequence: Synthetic oligonucleotide
  Sense strand starting at position 514 of SEQ ID NO: 913950
gcugguacccuugauuauu

SEQ ID NO: 966569 - RNA, 19 nt, Artificial Sequence
  Description of Artificial Sequence: Synthetic oligonucleotide
  Antisense strand to SEQ ID NO: 966568
aauaaucaaggguaccagc

SEQ ID NO: 966570 - RNA, 19 nt, Artificial Sequence
  Description of Artificial Sequence: Synthetic oligonucleotide
  Sense strand starting at position 3809 of SEQ ID NO: 913950
aguugagucaacugaguca

SEQ ID NO: 966571 - RNA, 19 nt, Artificial Sequence
  Description of Artificial Sequence: Synthetic oligonucleotide
  Antisense strand to SEQ ID NO: 966570
ugacucaguugacucaacu

SEQ ID NO: 966572 - RNA, 19 nt, Artificial Sequence
  Description of Artificial Sequence: Synthetic oligonucleotide
  Sense strand starting at position 27 of SEQ ID NO: 913951
cugacagguuaauuauaga

SEQ ID NO: 966573 - RNA, 19 nt, Artificial Sequence
  Description of Artificial Sequence: Synthetic oligonucleotide
  Antisense strand to SEQ ID NO: 966572
ucuauaauuaaccugucag

SEQ ID NO: 966574 - RNA, 19 nt, Artificial Sequence
  Description of Artificial Sequence: Synthetic oligonucleotide
  Sense strand starting at position 2489 of SEQ ID NO: 913951
ugcuaaugagaccaucacu

SEQ ID NO: 966575 - RNA, 19 nt, Artificial Sequence
  Description of Artificial Sequence: Synthetic oligonucleotide
  Antisense strand to SEQ ID NO: 966574
agugauggucucauuagca

SEQ ID NO: 966576 - RNA, 19 nt, Artificial Sequence
  Description of Artificial Sequence: Synthetic oligonucleotide
  Sense strand starting at position 1842 of SEQ ID NO: 913951
ggcggcugucggagaaaga

SEQ ID NO: 966577 - RNA, 19 nt, Artificial Sequence
  Description of Artificial Sequence: Synthetic oligonucleotide
  Antisense strand to SEQ ID NO: 966576
ucuuucuccgacagccgcc

SEQ ID NO: 966578 - RNA, 19 nt, Artificial Sequence
  Description of Artificial Sequence: Synthetic oligonucleotide
  Sense strand starting at position 127 of SEQ ID NO: 913951
uuaauaagccugcaaggau

SEQ ID NO: 966579 - RNA, 19 nt, Artificial Sequence
  Description of Artificial Sequence: Synthetic oligonucleotide
  Antisense strand to SEQ ID NO: 966578
auccuugcaggcuuauuaa

SEQ ID NO: 966580 - RNA, 19 nt, Artificial Sequence
  Description of Artificial Sequence: Synthetic oligonucleotide
  Sense strand starting at position 1528 of SEQ ID NO: 913951
cgcggagagcgcucaacua

SEQ ID NO: 966581 - RNA, 19 nt, Artificial Sequence
  Description of Artificial Sequence: Synthetic oligonucleotide
  Antisense strand to SEQ ID NO: 966580
uaguugagcgcucuccgcg

SEQ ID NO: 966582 - RNA, 19 nt, Artificial Sequence
  Description of Artificial Sequence: Synthetic oligonucleotide
  Sense strand starting at position 2570 of SEQ ID NO: 913951
agguucugaccucaacagu

SEQ ID NO: 966583 - RNA, 19 nt, Artificial Sequence
  Description of Artificial Sequence: Synthetic oligonucleotide
  Antisense strand to SEQ ID NO: 966582
acuguugaggucagaaccu

SEQ ID NO: 966584 - RNA, 19 nt, Artificial Sequence
  Description of Artificial Sequence: Synthetic oligonucleotide
  Sense strand starting at position 1106 of SEQ ID NO: 913951
uguguuuauuucccgaauc

SEQ ID NO: 966585 - RNA, 19 nt, Artificial Sequence
  Description of Artificial Sequence: Synthetic oligonucleotide
  Antisense strand to SEQ ID NO: 966584
gauucgggaaauaaacaca

SEQ ID NO: 966586 - RNA, 19 nt, Artificial Sequence
  Description of Artificial Sequence: Synthetic oligonucleotide
  Sense strand starting at position 1105 of SEQ ID NO: 913951
uuguguuuauuucccgaau

SEQ ID NO: 966587 - RNA, 19 nt, Artificial Sequence
  Description of Artificial Sequence: Synthetic oligonucleotide
  Antisense strand to SEQ ID NO: 966586
auucgggaaauaaacacaa

SEQ ID NO: 966588 - RNA, 19 nt, Artificial Sequence
  Description of Artificial Sequence: Synthetic oligonucleotide
  Sense strand starting at position 1291 of SEQ ID NO: 913951
cacugcgaucugggaagaa

SEQ ID NO: 966589 - RNA, 19 nt, Artificial Sequence
  Description of Artificial Sequence: Synthetic oligonucleotide
  Antisense strand to SEQ ID NO: 966588
uucuucccagaucgcagug

SEQ ID NO: 966590 - RNA, 19 nt, Artificial Sequence
  Description of Artificial Sequence: Synthetic oligonucleotide
  Sense strand starting at position 971 of SEQ ID NO: 913951
cuacucaugcccugagaaa

SEQ ID NO: 966591 - RNA, 19 nt, Artificial Sequence
  Description of Artificial Sequence: Synthetic oligonucleotide
  Antisense strand to SEQ ID NO: 966590
uuucucagggcaugaguag

SEQ ID NO: 966592 - RNA, 19 nt, Artificial Sequence
  Description of Artificial Sequence: Synthetic oligonucleotide
  Sense strand starting at position 269 of SEQ ID NO: 913951
aucagaggucucuguggga

SEQ ID NO: 966593 - RNA, 19 nt, Artificial Sequence
  Description of Artificial Sequence: Synthetic oligonucleotide
  Antisense strand to SEQ ID NO: 966592
ucccacagagaccucugau

SEQ ID NO: 966594 - RNA, 19 nt, Artificial Sequence
  Description of Artificial Sequence: Synthetic oligonucleotide
  Sense strand starting at position 775 of SEQ ID NO: 913951
uguguuuggccagauuaaa

SEQ ID NO: 966595 - RNA, 19 nt, Artificial Sequence
  Description of Artificial Sequence: Synthetic oligonucleotide
  Antisense strand to SEQ ID NO: 966594
uuuaaucuggccaaacaca

SEQ ID NO: 966596 - RNA, 19 nt, Artificial Sequence
  Description of Artificial Sequence: Synthetic oligonucleotide
  Sense strand starting at position 3318 of SEQ ID NO: 913951
gucaucucugagcaucauu

SEQ ID NO: 966597 - RNA, 19 nt, Artificial Sequence
  Description of Artificial Sequence: Synthetic oligonucleotide
  Antisense strand to SEQ ID NO: 966596
aaugaugcucagagaugac

SEQ ID NO: 966598 - RNA, 19 nt, Artificial Sequence
  Description of Artificial Sequence: Synthetic oligonucleotide
  Sense strand starting at position 3798 of SEQ ID NO: 913951
aaugccuauguuugggaau

SEQ ID NO: 966599 - RNA, 19 nt, Artificial Sequence
  Description of Artificial Sequence: Synthetic oligonucleotide
  Antisense strand to SEQ ID NO: 966598
auucccaaacauaggcauu

SEQ ID NO: 966600 - RNA, 19 nt, Artificial Sequence
  Description of Artificial Sequence: Synthetic oligonucleotide
  Sense strand starting at position 1103 of SEQ ID NO: 913951
uguuguguuuauuucccga

SEQ ID NO: 966601 - RNA, 19 nt, Artificial Sequence
  Description of Artificial Sequence: Synthetic oligonucleotide
  Antisense strand to SEQ ID NO: 966600
ucgggaaauaaacacaaca

SEQ ID NO: 966602 - RNA, 19 nt, Artificial Sequence
  Description of Artificial Sequence: Synthetic oligonucleotide
  Sense strand starting at position 763 of SEQ ID NO: 913951
gggacaucaaccuguguuu

SEQ ID NO: 966603 - RNA, 19 nt, Artificial Sequence
  Description of Artificial Sequence: Synthetic oligonucleotide
  Antisense strand to SEQ ID NO: 966602
aaacacagguugauguccc

SEQ ID NO: 966604 - RNA, 19 nt, Artificial Sequence
  Description of Artificial Sequence: Synthetic oligonucleotide
  Sense strand starting at position 3792 of SEQ ID NO: 913951
agcacaaaugccuauguuu

SEQ ID NO: 966605 - RNA, 19 nt, Artificial Sequence
  Description of Artificial Sequence: Synthetic oligonucleotide
  Antisense strand to SEQ ID NO: 966604
aaacauaggcauuugugcu

SEQ ID NO: 966606 - RNA, 19 nt, Artificial Sequence
  Description of Artificial Sequence: Synthetic oligonucleotide
  Sense strand starting at position 74 of SEQ ID NO: 913951
agguaagcgaguugaaaug

SEQ ID NO: 966607 - RNA, 19 nt, Artificial Sequence
  Description of Artificial Sequence: Synthetic oligonucleotide
  Antisense strand to SEQ ID NO: 966606
cauuucaacucgcuuaccu

SEQ ID NO: 966608 - RNA, 19 nt, Artificial Sequence
  Description of Artificial Sequence: Synthetic oligonucleotide
  Sense strand starting at position 2381 of SEQ ID NO: 913951
gagucugcucaguagguga

SEQ ID NO: 966609 - RNA, 19 nt, Artificial Sequence
  Description of Artificial Sequence: Synthetic oligonucleotide
  Antisense strand to SEQ ID NO: 966608
ucaccuacugagcagacuc

SEQ ID NO: 966610 - RNA, 19 nt, Artificial Sequence
  Description of Artificial Sequence: Synthetic oligonucleotide
  Sense strand starting at position 3314 of SEQ ID NO: 913951
ugaggucaucucugagcau

SEQ ID NO: 966611 - RNA, 19 nt, Artificial Sequence
  Description of Artificial Sequence: Synthetic oligonucleotide
  Antisense strand to SEQ ID NO: 966610
augcucagagaugaccuca

SEQ ID NO: 966612 - RNA, 19 nt, Artificial Sequence
  Description of Artificial Sequence: Synthetic oligonucleotide
  Sense strand starting at position 1663 of SEQ ID NO: 913951
ugcucuuacccgggaaaug

SEQ ID NO: 966613 - RNA, 19 nt, Artificial Sequence
  Description of Artificial Sequence: Synthetic oligonucleotide
  Antisense strand to SEQ ID NO: 966612
cauuucccggguaagagca

SEQ ID NO: 966614 - RNA, 19 nt, Artificial Sequence
  Description of Artificial Sequence: Synthetic oligonucleotide
  Sense strand starting at position 885 of SEQ ID NO: 913951
caacgugaguccuucuaaa

SEQ ID NO: 966615 - RNA, 19 nt, Artificial Sequence
  Description of Artificial Sequence: Synthetic oligonucleotide
  Antisense strand to SEQ ID NO: 966614
uuuagaaggacucacguug

SEQ ID NO: 966616 - RNA, 19 nt, Artificial Sequence
  Description of Artificial Sequence: Synthetic oligonucleotide
  Sense strand starting at position 3531 of SEQ ID NO: 913951
ggcacauaguacuuaaugu

SEQ ID NO: 966617 - RNA, 19 nt, Artificial Sequence
  Description of Artificial Sequence: Synthetic oligonucleotide
  Antisense strand to SEQ ID NO: 966616
acauuaaguacuaugugcc

SEQ ID NO: 966618 - RNA, 19 nt, Artificial Sequence
  Description of Artificial Sequence: Synthetic oligonucleotide
  Sense strand starting at position 3317 of SEQ ID NO: 913951
ggucaucucugagcaucau

SEQ ID NO: 966619 - RNA, 19 nt, Artificial Sequence
  Description of Artificial Sequence: Synthetic oligonucleotide
  Antisense strand to SEQ ID NO: 966618
augaugcucagagaugacc

SEQ ID NO: 966620 - RNA, 19 nt, Artificial Sequence
  Description of Artificial Sequence: Synthetic oligonucleotide
  Sense strand starting at position 2198 of SEQ ID NO: 913951
gcgccucgugcuuuguaaa

SEQ ID NO: 966621 - RNA, 19 nt, Artificial Sequence
  Description of Artificial Sequence: Synthetic oligonucleotide
  Antisense strand to SEQ ID NO: 966620
uuuacaaagcacgaggcgc

SEQ ID NO: 966622 - RNA, 19 nt, Artificial Sequence
  Description of Artificial Sequence: Synthetic oligonucleotide
  Sense strand starting at position 2377 of SEQ ID NO: 913951
aacugagucugcucaguag

SEQ ID NO: 966623 - RNA, 19 nt, Artificial Sequence
  Description of Artificial Sequence: Synthetic oligonucleotide
  Antisense strand to SEQ ID NO: 966622
cuacugagcagacucaguu

SEQ ID NO: 966624 - RNA, 19 nt, Artificial Sequence
  Description of Artificial Sequence: Synthetic oligonucleotide
  Sense strand starting at position 1662 of SEQ ID NO: 913951
cugcucuuacccgggaaau

SEQ ID NO: 966625 - RNA, 19 nt, Artificial Sequence
  Description of Artificial Sequence: Synthetic oligonucleotide
  Antisense strand to SEQ ID NO: 966624
auuucccggguaagagcag

SEQ ID NO: 966626 - RNA, 19 nt, Artificial Sequence
  Description of Artificial Sequence: Synthetic oligonucleotide
  Sense strand starting at position 2400 of SEQ ID NO: 913951
gaagacuugcccgacgcua

SEQ ID NO: 966627 - RNA, 19 nt, Artificial Sequence
  Description of Artificial Sequence: Synthetic oligonucleotide
  Antisense strand to SEQ ID NO: 966626
uagcgucgggcaagucuuc

SEQ ID NO: 966628 - RNA, 19 nt, Artificial Sequence
  Description of Artificial Sequence: Synthetic oligonucleotide
  Sense strand starting at position 3763 of SEQ ID NO: 913951
agauuaucuugcuugucca

SEQ ID NO: 966629 - RNA, 19 nt, Artificial Sequence
  Description of Artificial Sequence: Synthetic oligonucleotide
  Antisense strand to SEQ ID NO: 966628
uggacaagcaagauaaucu

SEQ ID NO: 966630 - RNA, 19 nt, Artificial Sequence
  Description of Artificial Sequence: Synthetic oligonucleotide
  Sense strand starting at position 572 of SEQ ID NO: 913951
uagaaagucugggagacaa

SEQ ID NO: 966631 - RNA, 19 nt, Artificial Sequence
  Description of Artificial Sequence: Synthetic oligonucleotide
  Antisense strand to SEQ ID NO: 966630
uugucucccagacuuucua

SEQ ID NO: 966632 - RNA, 19 nt, Artificial Sequence
  Description of Artificial Sequence: Synthetic oligonucleotide
  Sense strand starting at position 2314 of SEQ ID NO: 913951
uucgaacgaucucauuuga

SEQ ID NO: 966633 - RNA, 19 nt, Artificial Sequence
  Description of Artificial Sequence: Synthetic oligonucleotide
  Antisense strand to SEQ ID NO: 966632
ucaaaugagaucguucgaa

SEQ ID NO: 966634 - RNA, 19 nt, Artificial Sequence
  Description of Artificial Sequence: Synthetic oligonucleotide
  Sense strand starting at position 2309 of SEQ ID NO: 913951
gugcuuucgaacgaucuca

SEQ ID NO: 966635 - RNA, 19 nt, Artificial Sequence
  Description of Artificial Sequence: Synthetic oligonucleotide
  Antisense strand to SEQ ID NO: 966634
ugagaucguucgaaagcac

SEQ ID NO: 966636 - RNA, 19 nt, Artificial Sequence
  Description of Artificial Sequence: Synthetic oligonucleotide
  Sense strand starting at position 3811 of SEQ ID NO: 913951
gggaauaguuuguuugcuu

SEQ ID NO: 966637 - RNA, 19 nt, Artificial Sequence
  Description of Artificial Sequence: Synthetic oligonucleotide
  Antisense strand to SEQ ID NO: 966636
aagcaaacaaacuauuccc

SEQ ID NO: 966638 - RNA, 19 nt, Artificial Sequence
  Description of Artificial Sequence: Synthetic oligonucleotide
  Sense strand starting at position 1013 of SEQ ID NO: 913951
aagagauaaucugggaaug

SEQ ID NO: 966639 - RNA, 19 nt, Artificial Sequence
  Description of Artificial Sequence: Synthetic oligonucleotide
  Antisense strand to SEQ ID NO: 966638
cauucccagauuaucucuu

SEQ ID NO: 966640 - RNA, 19 nt, Artificial Sequence
  Description of Artificial Sequence: Synthetic oligonucleotide
  Sense strand starting at position 1084 of SEQ ID NO: 913951
ggguuuacuugaguuuguu

SEQ ID NO: 966641 - RNA, 19 nt, Artificial Sequence
  Description of Artificial Sequence: Synthetic oligonucleotide
  Antisense strand to SEQ ID NO: 966640
aacaaacucaaguaaaccc

SEQ ID NO: 966642 - RNA, 19 nt, Artificial Sequence
  Description of Artificial Sequence: Synthetic oligonucleotide
  Sense strand starting at position 209 of SEQ ID NO: 913951
guuccugcgcuugaggaau

SEQ ID NO: 966643 - RNA, 19 nt, Artificial Sequence
  Description of Artificial Sequence: Synthetic oligonucleotide
  Antisense strand to SEQ ID NO: 966642
auuccucaagcgcaggaac

SEQ ID NO: 966644 - RNA, 19 nt, Artificial Sequence
  Description of Artificial Sequence: Synthetic oligonucleotide
  Sense strand starting at position 3676 of SEQ ID NO: 913951
caaugaguuuguucccugu

SEQ ID NO: 966645 - RNA, 19 nt, Artificial Sequence
  Description of Artificial Sequence: Synthetic oligonucleotide
  Antisense strand to SEQ ID NO: 966644
acagggaacaaacucauug

SEQ ID NO: 966646 - RNA, 19 nt, Artificial Sequence
  Description of Artificial Sequence: Synthetic oligonucleotide
  Sense strand starting at position 772 of SEQ ID NO: 913951
accuguguuuggccagauu

SEQ ID NO: 966647 - RNA, 19 nt, Artificial Sequence
  Description of Artificial Sequence: Synthetic oligonucleotide
  Antisense strand to SEQ ID NO: 966646
aaucuggccaaacacaggu

SEQ ID NO: 966648 - RNA, 19 nt, Artificial Sequence
  Description of Artificial Sequence: Synthetic oligonucleotide
  Sense strand starting at position 1661 of SEQ ID NO: 913951
gcugcucuuacccgggaaa

SEQ ID NO: 966649 - RNA, 19 nt, Artificial Sequence
  Description of Artificial Sequence: Synthetic oligonucleotide
  Antisense strand to SEQ ID NO: 966648
uuucccggguaagagcagc

SEQ ID NO: 966650 - RNA, 19 nt, Artificial Sequence
  Description of Artificial Sequence: Synthetic oligonucleotide
  Sense strand starting at position 2555 of SEQ ID NO: 913951
gcuggaguucaugguaggu

SEQ ID NO: 966651 - RNA, 19 nt, Artificial Sequence
  Description of Artificial Sequence: Synthetic oligonucleotide
  Antisense strand to SEQ ID NO: 966650
accuaccaugaacuccagc

SEQ ID NO: 966652 - RNA, 19 nt, Artificial Sequence
  Description of Artificial Sequence: Synthetic oligonucleotide
  Sense strand starting at position 1182 of SEQ ID NO: 913952
cugagauucugacuuuaga

SEQ ID NO: 966653 - RNA, 19 nt, Artificial Sequence
  Description of Artificial Sequence: Synthetic oligonucleotide
  Antisense strand to SEQ ID NO: 966652
ucuaaagucagaaucucag

SEQ ID NO: 966654 - RNA, 19 nt, Artificial Sequence
  Description of Artificial Sequence: Synthetic oligonucleotide
  Sense strand starting at position 1358 of SEQ ID NO: 913952
cggacuauuccgaggccga

SEQ ID NO: 966655 - RNA, 19 nt, Artificial Sequence
  Description of Artificial Sequence: Synthetic oligonucleotide
  Antisense strand to SEQ ID NO: 966654
ucggccucggaauaguccg

SEQ ID NO: 966656 - RNA, 19 nt, Artificial Sequence
  Description of Artificial Sequence: Synthetic oligonucleotide
  Sense strand starting at position 3155 of SEQ ID NO: 913952
aaagcuuuaugaguaaaga

SEQ ID NO: 966657 - RNA, 19 nt, Artificial Sequence
  Description of Artificial Sequence: Synthetic oligonucleotide
  Antisense strand to SEQ ID NO: 966656
ucuuuacucauaaagcuuu

SEQ ID NO: 966658 - RNA, 19 nt, Artificial Sequence
  Description of Artificial Sequence: Synthetic oligonucleotide
  Sense strand starting at position 2981 of SEQ ID NO: 913952
uuguucuuggguuaaagaa

SEQ ID NO: 966659 - RNA, 19 nt, Artificial Sequence
  Description of Artificial Sequence: Synthetic oligonucleotide
  Antisense strand to SEQ ID NO: 966658
uucuuuaacccaagaacaa

SEQ ID NO: 966660 - RNA, 19 nt, Artificial Sequence
  Description of Artificial Sequence: Synthetic oligonucleotide
  Sense strand starting at position 3351 of SEQ ID NO: 913952
gaggaaauaccguaugguc

SEQ ID NO: 966661 - RNA, 19 nt, Artificial Sequence
  Description of Artificial Sequence: Synthetic oligonucleotide
  Antisense strand to SEQ ID NO: 966660
gaccauacgguauuuccuc

SEQ ID NO: 966662 - RNA, 19 nt, Artificial Sequence
  Description of Artificial Sequence: Synthetic oligonucleotide
  Sense strand starting at position 858 of SEQ ID NO: 913952
ucuacuuugguacaaagua

SEQ ID NO: 966663 - RNA, 19 nt, Artificial Sequence
  Description of Artificial Sequence: Synthetic oligonucleotide
  Antisense strand to SEQ ID NO: 966662
uacuuuguaccaaaguaga

SEQ ID NO: 966664 - RNA, 19 nt, Artificial Sequence
  Description of Artificial Sequence: Synthetic oligonucleotide
  Sense strand starting at position 1079 of SEQ ID NO: 913952
ggcucacaguguccauuua

SEQ ID NO: 966665 - RNA, 19 nt, Artificial Sequence
  Description of Artificial Sequence: Synthetic oligonucleotide
  Antisense strand to SEQ ID NO: 966664
uaaauggacacugugagcc

SEQ ID NO: 966666 - RNA, 19 nt, Artificial Sequence
  Description of Artificial Sequence: Synthetic oligonucleotide
  Sense strand starting at position 3194 of SEQ ID NO: 913952
cuuaucuugguuuagauua

SEQ ID NO: 966667 - RNA, 19 nt, Artificial Sequence
  Description of Artificial Sequence: Synthetic oligonucleotide
  Antisense strand to SEQ ID NO: 966666
uaaucuaaaccaagauaag

SEQ ID NO: 966668 - RNA, 19 nt, Artificial Sequence
  Description of Artificial Sequence: Synthetic oligonucleotide
  Sense strand starting at position 2799 of SEQ ID NO: 913952
guguuccgaacagaaauua

SEQ ID NO: 966669 - RNA, 19 nt, Artificial Sequence
  Description of Artificial Sequence: Synthetic oligonucleotide
  Antisense strand to SEQ ID NO: 966668
uaauuucuguucggaacac

SEQ ID NO: 966670 - RNA, 19 nt, Artificial Sequence
  Description of Artificial Sequence: Synthetic oligonucleotide
  Sense strand starting at position 2536 of SEQ ID NO: 913952
cgcaucuuccuagaaacaa

SEQ ID NO: 966671 - RNA, 19 nt, Artificial Sequence
  Description of Artificial Sequence: Synthetic oligonucleotide
  Antisense strand to SEQ ID NO: 966670
uuguuucuaggaagaugcg

SEQ ID NO: 966672 - RNA, 19 nt, Artificial Sequence
  Description of Artificial Sequence: Synthetic oligonucleotide
  Sense strand starting at position 3009 of SEQ ID NO: 913952
cucauagcuggguacauua

SEQ ID NO: 966673 - RNA, 19 nt, Artificial Sequence
  Description of Artificial Sequence: Synthetic oligonucleotide
  Antisense strand to SEQ ID NO: 966672
uaauguacccagcuaugag

SEQ ID NO: 966674 - RNA, 19 nt, Artificial Sequence
  Description of Artificial Sequence: Synthetic oligonucleotide
  Sense strand starting at position 3841 of SEQ ID NO: 913952
gcugaaguuccucaagacu

SEQ ID NO: 966675 - RNA, 19 nt, Artificial Sequence
  Description of Artificial Sequence: Synthetic oligonucleotide
  Antisense strand to SEQ ID NO: 966674
agucuugaggaacuucagc

SEQ ID NO: 966676 - RNA, 19 nt, Artificial Sequence
  Description of Artificial Sequence: Synthetic oligonucleotide
  Sense strand starting at position 1165 of SEQ ID NO: 913952
gaaagaaugggcuaucgcu

SEQ ID NO: 966677 - RNA, 19 nt, Artificial Sequence
  Description of Artificial Sequence: Synthetic oligonucleotide
  Antisense strand to SEQ ID NO: 966676
agcgauagcccauucuuuc

SEQ ID NO: 966678 - RNA, 19 nt, Artificial Sequence
  Description of Artificial Sequence: Synthetic oligonucleotide
  Sense strand starting at position 3277 of SEQ ID NO: 913952
uggguuguacuugauccua

SEQ ID NO: 966679 - RNA, 19 nt, Artificial Sequence
  Description of Artificial Sequence: Synthetic oligonucleotide
  Antisense strand to SEQ ID NO: 966678
uaggaucaaguacaaccca

SEQ ID NO: 966680 - RNA, 19 nt, Artificial Sequence
  Description of Artificial Sequence: Synthetic oligonucleotide
  Sense strand starting at position 988 of SEQ ID NO: 913952
aaguaacagugaguccaua

SEQ ID NO: 966681 - RNA, 19 nt, Artificial Sequence
  Description of Artificial Sequence: Synthetic oligonucleotide
  Antisense strand to SEQ ID NO: 966680
uauggacucacuguuacuu

SEQ ID NO: 966682 - RNA, 19 nt, Artificial Sequence
  Description of Artificial Sequence: Synthetic oligonucleotide
  Sense strand starting at position 3202 of SEQ ID NO: 913952
gguuuagauuagguuuaua

SEQ ID NO: 966683 - RNA, 19 nt, Artificial Sequence
  Description of Artificial Sequence: Synthetic oligonucleotide
  Antisense strand to SEQ ID NO: 966682
uauaaaccuaaucuaaacc

SEQ ID NO: 966684 - RNA, 19 nt, Artificial Sequence
  Description of Artificial Sequence: Synthetic oligonucleotide
  Sense strand starting at position 3402 of SEQ ID NO: 913952
ucaaguaugucacuacaca

SEQ ID NO: 966685 - RNA, 19 nt, Artificial Sequence
  Description of Artificial Sequence: Synthetic oligonucleotide
  Antisense strand to SEQ ID NO: 966684
uguguagugacauacuuga

SEQ ID NO: 966686 - RNA, 19 nt, Artificial Sequence
  Description of Artificial Sequence: Synthetic oligonucleotide
  Sense strand starting at position 3353 of SEQ ID NO: 913952
ggaaauaccguauggucaa

SEQ ID NO: 966687 - RNA, 19 nt, Artificial Sequence
  Description of Artificial Sequence: Synthetic oligonucleotide
  Antisense strand to SEQ ID NO: 966686
uugaccauacgguauuucc

SEQ ID NO: 966688 - RNA, 19 nt, Artificial Sequence
  Description of Artificial Sequence: Synthetic oligonucleotide
  Sense strand starting at position 3356 of SEQ ID NO: 913952
aauaccguauggucaaaua

SEQ ID NO: 966689 - RNA, 19 nt, Artificial Sequence
  Description of Artificial Sequence: Synthetic oligonucleotide
  Antisense strand to SEQ ID NO: 966688
uauuugaccauacgguauu

SEQ ID NO: 966690 - RNA, 19 nt, Artificial Sequence
  Description of Artificial Sequence: Synthetic oligonucleotide
  Sense strand starting at position 2578 of SEQ ID NO: 913952
gugaaauaguagcuaaauu

SEQ ID NO: 966691 - RNA, 19 nt, Artificial Sequence
  Description of Artificial Sequence: Synthetic oligonucleotide
  Antisense strand to SEQ ID NO: 966690
aauuuagcuacuauuucac

SEQ ID NO: 966692 - RNA, 19 nt, Artificial Sequence
  Description of Artificial Sequence: Synthetic oligonucleotide
  Sense strand starting at position 3150 of SEQ ID NO: 913952
uaugcaaagcuuuaugagu

SEQ ID NO: 966693 - RNA, 19 nt, Artificial Sequence
  Description of Artificial Sequence: Synthetic oligonucleotide
  Antisense strand to SEQ ID NO: 966692
acucauaaagcuuugcaua

SEQ ID NO: 966694 - RNA, 19 nt, Artificial Sequence
  Description of Artificial Sequence: Synthetic oligonucleotide
  Sense strand starting at position 855 of SEQ ID NO: 913952
gcaucuacuuugguacaaa

SEQ ID NO: 966695 - RNA, 19 nt, Artificial Sequence
  Description of Artificial Sequence: Synthetic oligonucleotide
  Antisense strand to SEQ ID NO: 966694
uuuguaccaaaguagaugc

SEQ ID NO: 966696 - RNA, 19 nt, Artificial Sequence
  Description of Artificial Sequence: Synthetic oligonucleotide
  Sense strand starting at position 2380 of SEQ ID NO: 913952
cguguuuaggcagaaacau

SEQ ID NO: 966697 - RNA, 19 nt, Artificial Sequence
  Description of Artificial Sequence: Synthetic oligonucleotide
  Antisense strand to SEQ ID NO: 966696
auguuucugccuaaacacg

SEQ ID NO: 966698 - RNA, 19 nt, Artificial Sequence
  Description of Artificial Sequence: Synthetic oligonucleotide
  Sense strand starting at position 2508 of SEQ ID NO: 913952
ucuguucuugaaggaaguu

SEQ ID NO: 966699 - RNA, 19 nt, Artificial Sequence
  Description of Artificial Sequence: Synthetic oligonucleotide
  Antisense strand to SEQ ID NO: 966698
aacuuccuucaagaacaga

SEQ ID NO: 966700 - RNA, 19 nt, Artificial Sequence
  Description of Artificial Sequence: Synthetic oligonucleotide
  Sense strand starting at position 3863 of SEQ ID NO: 913952
aacguuacuguauagcuaa

SEQ ID NO: 966701 - RNA, 19 nt, Artificial Sequence
  Description of Artificial Sequence: Synthetic oligonucleotide
  Antisense strand to SEQ ID NO: 966700
uuagcuauacaguaacguu

SEQ ID NO: 966702 - RNA, 19 nt, Artificial Sequence
  Description of Artificial Sequence: Synthetic oligonucleotide
  Sense strand starting at position 2627 of SEQ ID NO: 913952
cuccaaacgccuuauaggu

SEQ ID NO: 966703 - RNA, 19 nt, Artificial Sequence
  Description of Artificial Sequence: Synthetic oligonucleotide
  Antisense strand to SEQ ID NO: 966702
accuauaaggcguuuggag

SEQ ID NO: 966704 - RNA, 19 nt, Artificial Sequence
  Description of Artificial Sequence: Synthetic oligonucleotide
  Sense strand starting at position 495 of SEQ ID NO: 913952
ccacuuggucuccaaacgu

SEQ ID NO: 966705 - RNA, 19 nt, Artificial Sequence
  Description of Artificial Sequence: Synthetic oligonucleotide
  Antisense strand to SEQ ID NO: 966704
acguuuggagaccaagugg

SEQ ID NO: 966706 - RNA, 19 nt, Artificial Sequence
  Description of Artificial Sequence: Synthetic oligonucleotide
  Sense strand starting at position 3429 of SEQ ID NO: 913952
agaccauguucguuuagag

SEQ ID NO: 966707 - RNA, 19 nt, Artificial Sequence
  Description of Artificial Sequence: Synthetic oligonucleotide
  Antisense strand to SEQ ID NO: 966706
cucuaaacgaacauggucu

SEQ ID NO: 966708 - RNA, 19 nt, Artificial Sequence
  Description of Artificial Sequence: Synthetic oligonucleotide
  Sense strand starting at position 2979 of SEQ ID NO: 913952
ucuuguucuuggguuaaag

SEQ ID NO: 966709 - RNA, 19 nt, Artificial Sequence
  Description of Artificial Sequence: Synthetic oligonucleotide
  Antisense strand to SEQ ID NO: 966708
cuuuaacccaagaacaaga

SEQ ID NO: 966710 - RNA, 19 nt, Artificial Sequence
  Description of Artificial Sequence: Synthetic oligonucleotide
  Sense strand starting at position 3395 of SEQ ID NO: 913952
ccaguugucaaguauguca

SEQ ID NO: 966711 - RNA, 19 nt, Artificial Sequence
  Description of Artificial Sequence: Synthetic oligonucleotide
  Antisense strand to SEQ ID NO: 966710
ugacauacuugacaacugg

SEQ ID NO: 966712 - RNA, 19 nt, Artificial Sequence
  Description of Artificial Sequence: Synthetic oligonucleotide
  Sense strand starting at position 1406 of SEQ ID NO: 913952
ugagcacuuuggcucuaaa

SEQ ID NO: 966713 - RNA, 19 nt, Artificial Sequence
  Description of Artificial Sequence: Synthetic oligonucleotide
  Antisense strand to SEQ ID NO: 966712
uuuagagccaaagugcuca

SEQ ID NO: 966714 - RNA, 19 nt, Artificial Sequence
  Description of Artificial Sequence: Synthetic oligonucleotide
  Sense strand starting at position 3191 of SEQ ID NO: 913952
uagcuuaucuugguuuaga

SEQ ID NO: 966715 - RNA, 19 nt, Artificial Sequence
  Description of Artificial Sequence: Synthetic oligonucleotide
  Antisense strand to SEQ ID NO: 966714
ucuaaaccaagauaagcua

SEQ ID NO: 966716 - RNA, 19 nt, Artificial Sequence
  Description of Artificial Sequence: Synthetic oligonucleotide
  Sense strand starting at position 3008 of SEQ ID NO: 913952
ccucauagcuggguacauu

SEQ ID NO: 966717 - RNA, 19 nt, Artificial Sequence
  Description of Artificial Sequence: Synthetic oligonucleotide
  Antisense strand to SEQ ID NO: 966716
aauguacccagcuaugagg

SEQ ID NO: 966718 - RNA, 19 nt, Artificial Sequence
  Description of Artificial Sequence: Synthetic oligonucleotide
  Sense strand starting at position 3192 of SEQ ID NO: 913952
agcuuaucuugguuuagau

SEQ ID NO: 966719 - RNA, 19 nt, Artificial Sequence
  Description of Artificial Sequence: Synthetic oligonucleotide
  Antisense strand to SEQ ID NO: 966718
aucuaaaccaagauaagcu

SEQ ID NO: 966720 - RNA, 19 nt, Artificial Sequence
  Description of Artificial Sequence: Synthetic oligonucleotide
  Sense strand starting at position 2988 of SEQ ID NO: 913952
uggguuaaagaaugcggua

SEQ ID NO: 966721 - RNA, 19 nt, Artificial Sequence
  Description of Artificial Sequence: Synthetic oligonucleotide
  Antisense strand to SEQ ID NO: 966720
uaccgcauucuuuaaccca

SEQ ID NO: 966722 - RNA, 19 nt, Artificial Sequence
  Description of Artificial Sequence: Synthetic oligonucleotide
  Sense strand starting at position 3428 of SEQ ID NO: 913952
cagaccauguucguuuaga

SEQ ID NO: 966723 - RNA, 19 nt, Artificial Sequence
  Description of Artificial Sequence: Synthetic oligonucleotide
  Antisense strand to SEQ ID NO: 966722
ucuaaacgaacauggucug

SEQ ID NO: 966724 - RNA, 19 nt, Artificial Sequence
  Description of Artificial Sequence: Synthetic oligonucleotide
  Sense strand starting at position 2699 of SEQ ID NO: 913952
gggagauauuggagucugu

SEQ ID NO: 966725 - RNA, 19 nt, Artificial Sequence
  Description of Artificial Sequence: Synthetic oligonucleotide
  Antisense strand to SEQ ID NO: 966724
acagacuccaauaucuccc

SEQ ID NO: 966726 - RNA, 19 nt, Artificial Sequence
  Description of Artificial Sequence: Synthetic oligonucleotide
  Sense strand starting at position 2633 of SEQ ID NO: 913952
acgccuuauagguauaguu

SEQ ID NO: 966727 - RNA, 19 nt, Artificial Sequence
  Description of Artificial Sequence: Synthetic oligonucleotide
  Antisense strand to SEQ ID NO: 966726
aacuauaccuauaaggcgu

SEQ ID NO: 966728 - RNA, 19 nt, Artificial Sequence
  Description of Artificial Sequence: Synthetic oligonucleotide
  Sense strand starting at position 3866 of SEQ ID NO: 913952
guuacuguauagcuaaacu

SEQ ID NO: 966729 - RNA, 19 nt, Artificial Sequence
  Description of Artificial Sequence: Synthetic oligonucleotide
  Antisense strand to SEQ ID NO: 966728
aguuuagcuauacaguaac

SEQ ID NO: 966730 - RNA, 19 nt, Artificial Sequence
  Description of Artificial Sequence: Synthetic oligonucleotide
  Sense strand starting at position 2797 of SEQ ID NO: 913952
gcguguuccgaacagaaau

SEQ ID NO: 966731 - RNA, 19 nt, Artificial Sequence
  Description of Artificial Sequence: Synthetic oligonucleotide
  Antisense strand to SEQ ID NO: 966730
auuucuguucggaacacgc

SEQ ID NO: 966732 - RNA, 19 nt, Artificial Sequence
  Description of Artificial Sequence: Synthetic oligonucleotide
  Sense strand starting at position 1193 of SEQ ID NO: 913953
gcuugcgaugccucucaga

SEQ ID NO: 966733 - RNA, 19 nt, Artificial Sequence
  Description of Artificial Sequence: Synthetic oligonucleotide
  Antisense strand to SEQ ID NO: 966732
ucugagaggcaucgcaagc

SEQ ID NO: 966734 - RNA, 19 nt, Artificial Sequence
  Description of Artificial Sequence: Synthetic oligonucleotide
  Sense strand starting at position 3681 of SEQ ID NO: 913953
gcuggagaggauuagucau

SEQ ID NO: 966735 - RNA, 19 nt, Artificial Sequence
  Description of Artificial Sequence: Synthetic oligonucleotide
  Antisense strand to SEQ ID NO: 966734
augacuaauccucuccagc

SEQ ID NO: 966736 - RNA, 19 nt, Artificial Sequence
  Description of Artificial Sequence: Synthetic oligonucleotide
  Sense strand starting at position 149 of SEQ ID NO: 913953
uguagauuccuggaaggug

SEQ ID NO: 966737 - RNA, 19 nt, Artificial Sequence
  Description of Artificial Sequence: Synthetic oligonucleotide
  Antisense strand to SEQ ID NO: 966736
caccuuccaggaaucuaca

SEQ ID NO: 966738 - RNA, 19 nt, Artificial Sequence
  Description of Artificial Sequence: Synthetic oligonucleotide
  Sense strand starting at position 426 of SEQ ID NO: 913953
acacaauggacugguugau

SEQ ID NO: 966739 - RNA, 19 nt, Artificial Sequence
  Description of Artificial Sequence: Synthetic oligonucleotide
  Antisense strand to SEQ ID NO: 966738
aucaaccaguccauugugu

SEQ ID NO: 966740 - RNA, 19 nt, Artificial Sequence
  Description of Artificial Sequence: Synthetic oligonucleotide
  Sense strand starting at position 224 of SEQ ID NO: 913953
agaauugugcuccaugaag

SEQ ID NO: 966741 - RNA, 19 nt, Artificial Sequence
  Description of Artificial Sequence: Synthetic oligonucleotide
  Antisense strand to SEQ ID NO: 966740
cuucauggagcacaauucu

SEQ ID NO: 966742 - RNA, 19 nt, Artificial Sequence
  Description of Artificial Sequence: Synthetic oligonucleotide
  Sense strand starting at position 3912 of SEQ ID NO: 913953
ggacuugugcgugcccaca

SEQ ID NO: 966743 - RNA, 19 nt, Artificial Sequence
  Description of Artificial Sequence: Synthetic oligonucleotide
  Antisense strand to SEQ ID NO: 966742
ugugggcacgcacaagucc

SEQ ID NO: 966744 - RNA, 19 nt, Artificial Sequence
  Description of Artificial Sequence: Synthetic oligonucleotide
  Sense strand starting at position 2376 of SEQ ID NO: 913953
gggugaguugugaguaugu

SEQ ID NO: 966745 - RNA, 19 nt, Artificial Sequence
  Description of Artificial Sequence: Synthetic oligonucleotide
  Antisense strand to SEQ ID NO: 966744
acauacucacaacucaccc

SEQ ID NO: 966746 - RNA, 19 nt, Artificial Sequence
  Description of Artificial Sequence: Synthetic oligonucleotide
  Sense strand starting at position 1829 of SEQ ID NO: 913953
agagaagcucugggaccua

SEQ ID NO: 966747 - RNA, 19 nt, Artificial Sequence
  Description of Artificial Sequence: Synthetic oligonucleotide
  Antisense strand to SEQ ID NO: 966746
uaggucccagagcuucucu

SEQ ID NO: 966748 - RNA, 19 nt, Artificial Sequence
  Description of Artificial Sequence: Synthetic oligonucleotide
  Sense strand starting at position 1494 of SEQ ID NO: 913953
gagaguggaguugggauua

SEQ ID NO: 966749 - RNA, 19 nt, Artificial Sequence
  Description of Artificial Sequence: Synthetic oligonucleotide
  Antisense strand to SEQ ID NO: 966748
uaaucccaacuccacucuc

SEQ ID NO: 966750 - RNA, 19 nt, Artificial Sequence
  Description of Artificial Sequence: Synthetic oligonucleotide
  Sense strand starting at position 1528 of SEQ ID NO: 913953
cuuagagaggugugagaca

SEQ ID NO: 966751 - RNA, 19 nt, Artificial Sequence
  Description of Artificial Sequence: Synthetic oligonucleotide
  Antisense strand to SEQ ID NO: 966750
ugucucacaccucucuaag

SEQ ID NO: 966752 - RNA, 19 nt, Artificial Sequence
  Description of Artificial Sequence: Synthetic oligonucleotide
  Sense strand starting at position 3526 of SEQ ID NO: 913953
cacagugugcgccuguaaa

SEQ ID NO: 966753 - RNA, 19 nt, Artificial Sequence
  Description of Artificial Sequence: Synthetic oligonucleotide
  Antisense strand to SEQ ID NO: 966752
uuuacaggcgcacacugug

SEQ ID NO: 966754 - RNA, 19 nt, Artificial Sequence
  Description of Artificial Sequence: Synthetic oligonucleotide
  Sense strand starting at position 3070 of SEQ ID NO: 913953
ugggauuggcucugggaag

SEQ ID NO: 966755 - RNA, 19 nt, Artificial Sequence
  Description of Artificial Sequence: Synthetic oligonucleotide
  Antisense strand to SEQ ID NO: 966754
cuucccagagccaauccca

SEQ ID NO: 966756 - RNA, 19 nt, Artificial Sequence
  Description of Artificial Sequence: Synthetic oligonucleotide
  Sense strand starting at position 358 of SEQ ID NO: 913953
cacggaagcccugaauucu

SEQ ID NO: 966757 - RNA, 19 nt, Artificial Sequence
  Description of Artificial Sequence: Synthetic oligonucleotide
  Antisense strand to SEQ ID NO: 966756
agaauucagggcuuccgug

SEQ ID NO: 966758 - RNA, 19 nt, Artificial Sequence
  Description of Artificial Sequence: Synthetic oligonucleotide
  Sense strand starting at position 3692 of SEQ ID NO: 913953
uuagucauucuguaggauu

SEQ ID NO: 966759 - RNA, 19 nt, Artificial Sequence
  Description of Artificial Sequence: Synthetic oligonucleotide
  Antisense strand to SEQ ID NO: 966758
aauccuacagaaugacuaa

SEQ ID NO: 966760 - RNA, 19 nt, Artificial Sequence
  Description of Artificial Sequence: Synthetic oligonucleotide
  Sense strand starting at position 3687 of SEQ ID NO: 913953
gaggauuagucauucugua

SEQ ID NO: 966761 - RNA, 19 nt, Artificial Sequence
  Description of Artificial Sequence: Synthetic oligonucleotide
  Antisense strand to SEQ ID NO: 966760
uacagaaugacuaauccuc

SEQ ID NO: 966762 - RNA, 19 nt, Artificial Sequence
  Description of Artificial Sequence: Synthetic oligonucleotide
  Sense strand starting at position 1526 of SEQ ID NO: 913953
ggcuuagagaggugugaga

SEQ ID NO: 966763 - RNA, 19 nt, Artificial Sequence
  Description of Artificial Sequence: Synthetic oligonucleotide
  Antisense strand to SEQ ID NO: 966762
ucucacaccucucuaagcc

SEQ ID NO: 966764 - RNA, 19 nt, Artificial Sequence
  Description of Artificial Sequence: Synthetic oligonucleotide
  Sense strand starting at position 1396 of SEQ ID NO: 913953
ucucgcugacuuuauacaa

SEQ ID NO: 966765 - RNA, 19 nt, Artificial Sequence
  Description of Artificial Sequence: Synthetic oligonucleotide
  Antisense strand to SEQ ID NO: 966764
uuguauaaagucagcgaga

SEQ ID NO: 966766 - RNA, 19 nt, Artificial Sequence
  Description of Artificial Sequence: Synthetic oligonucleotide
  Sense strand starting at position 222 of SEQ ID NO: 913953
auagaauugugcuccauga

SEQ ID NO: 966767 - RNA, 19 nt, Artificial Sequence
  Description of Artificial Sequence: Synthetic oligonucleotide
  Antisense strand to SEQ ID NO: 966766
ucauggagcacaauucuau

SEQ ID NO: 966768 - RNA, 19 nt, Artificial Sequence
  Description of Artificial Sequence: Synthetic oligonucleotide
  Sense strand starting at position 3691 of SEQ ID NO: 913953
auuagucauucuguaggau

SEQ ID NO: 966769 - RNA, 19 nt, Artificial Sequence
  Description of Artificial Sequence: Synthetic oligonucleotide
  Antisense strand to SEQ ID NO: 966768
auccuacagaaugacuaau

SEQ ID NO: 966770 - RNA, 19 nt, Artificial Sequence
  Description of Artificial Sequence: Synthetic oligonucleotide
  Sense strand starting at position 1481 of SEQ ID NO: 913953
cucaguagagguugagagu

SEQ ID NO: 966771 - RNA, 19 nt, Artificial Sequence
  Description of Artificial Sequence: Synthetic oligonucleotide
  Antisense strand to SEQ ID NO: 966770
acucucaaccucuacugag

SEQ ID NO: 966772 - RNA, 19 nt, Artificial Sequence
  Description of Artificial Sequence: Synthetic oligonucleotide
  Sense strand starting at position 1391 of SEQ ID NO: 913953
uggacucucgcugacuuua

SEQ ID NO: 966773 - RNA, 19 nt, Artificial Sequence
  Description of Artificial Sequence: Synthetic oligonucleotide
  Antisense strand to SEQ ID NO: 966772
uaaagucagcgagagucca

SEQ ID NO: 966774 - RNA, 19 nt, Artificial Sequence
  Description of Artificial Sequence: Synthetic oligonucleotide
  Sense strand starting at position 3694 of SEQ ID NO: 913953
agucauucuguaggauucu

SEQ ID NO: 966775 - RNA, 19 nt, Artificial Sequence
  Description of Artificial Sequence: Synthetic oligonucleotide
  Antisense strand to SEQ ID NO: 966774
agaauccuacagaaugacu

SEQ ID NO: 966776 - RNA, 19 nt, Artificial Sequence
  Description of Artificial Sequence: Synthetic oligonucleotide
  Sense strand starting at position 3784 of SEQ ID NO: 913953
ugcucuuauccggaggcaa

SEQ ID NO: 966777 - RNA, 19 nt, Artificial Sequence
  Description of Artificial Sequence: Synthetic oligonucleotide
  Antisense strand to SEQ ID NO: 966776
uugccuccggauaagagca

SEQ ID NO: 966778 - RNA, 19 nt, Artificial Sequence
  Description of Artificial Sequence: Synthetic oligonucleotide
  Sense strand starting at position 3378 of SEQ ID NO: 913953
ggaggccugccuugaaacu

SEQ ID NO: 966779 - RNA, 19 nt, Artificial Sequence
  Description of Artificial Sequence: Synthetic oligonucleotide
  Antisense strand to SEQ ID NO: 966778
aguuucaaggcaggccucc

SEQ ID NO: 966780 - RNA, 19 nt, Artificial Sequence
  Description of Artificial Sequence: Synthetic oligonucleotide
  Sense strand starting at position 3703 of SEQ ID NO: 913953
guaggauucugcccaacuc

SEQ ID NO: 966781 - RNA, 19 nt, Artificial Sequence
  Description of Artificial Sequence: Synthetic oligonucleotide
  Antisense strand to SEQ ID NO: 966780
gaguugggcagaauccuac

SEQ ID NO: 966782 - RNA, 19 nt, Artificial Sequence
  Description of Artificial Sequence: Synthetic oligonucleotide
  Sense strand starting at position 1393 of SEQ ID NO: 913953
gacucucgcugacuuuaua

SEQ ID NO: 966783 - RNA, 19 nt, Artificial Sequence
  Description of Artificial Sequence: Synthetic oligonucleotide
  Antisense strand to SEQ ID NO: 966782
uauaaagucagcgagaguc

SEQ ID NO: 966784 - RNA, 19 nt, Artificial Sequence
  Description of Artificial Sequence: Synthetic oligonucleotide
  Sense strand starting at position 185 of SEQ ID NO: 913953
cucucuaggucccuuguaa

SEQ ID NO: 966785 - RNA, 19 nt, Artificial Sequence
  Description of Artificial Sequence: Synthetic oligonucleotide
  Antisense strand to SEQ ID NO: 966784
uuacaagggaccuagagag

SEQ ID NO: 966786 - RNA, 19 nt, Artificial Sequence
  Description of Artificial Sequence: Synthetic oligonucleotide
  Sense strand starting at position 410 of SEQ ID NO: 913953
cagcacagagcuugucaca

SEQ ID NO: 966787 - RNA, 19 nt, Artificial Sequence
  Description of Artificial Sequence: Synthetic oligonucleotide
  Antisense strand to SEQ ID NO: 966786
ugugacaagcucugugcug

SEQ ID NO: 966788 - RNA, 19 nt, Artificial Sequence
  Description of Artificial Sequence: Synthetic oligonucleotide
  Sense strand starting at position 3786 of SEQ ID NO: 913953
cucuuauccggaggcaagu

SEQ ID NO: 966789 - RNA, 19 nt, Artificial Sequence
  Description of Artificial Sequence: Synthetic oligonucleotide
  Antisense strand to SEQ ID NO: 966788
acuugccuccggauaagag

SEQ ID NO: 966790 - RNA, 19 nt, Artificial Sequence
  Description of Artificial Sequence: Synthetic oligonucleotide
  Sense strand starting at position 3 of SEQ ID NO: 913953
agcuguuagucaccucaca

SEQ ID NO: 966791 - RNA, 19 nt, Artificial Sequence
  Description of Artificial Sequence: Synthetic oligonucleotide
  Antisense strand to SEQ ID NO: 966790
ugugaggugacuaacagcu

SEQ ID NO: 966792 - RNA, 19 nt, Artificial Sequence
  Description of Artificial Sequence: Synthetic oligonucleotide
  Sense strand starting at position 2504 of SEQ ID NO: 913953
ccggaagaauccuaagaau

SEQ ID NO: 966793 - RNA, 19 nt, Artificial Sequence
  Description of Artificial Sequence: Synthetic oligonucleotide
  Antisense strand to SEQ ID NO: 966792
auucuuaggauucuuccgg

SEQ ID NO: 966794 - RNA, 19 nt, Artificial Sequence
  Description of Artificial Sequence: Synthetic oligonucleotide
  Sense strand starting at position 3871 of SEQ ID NO: 913953
ggucauucagugugaguug

SEQ ID NO: 966795 - RNA, 19 nt, Artificial Sequence
  Description of Artificial Sequence: Synthetic oligonucleotide
  Antisense strand to SEQ ID NO: 966794
caacucacacugaaugacc

SEQ ID NO: 966796 - RNA, 19 nt, Artificial Sequence
  Description of Artificial Sequence: Synthetic oligonucleotide
  Sense strand starting at position 3607 of SEQ ID NO: 913953
gcaugauagugucuuugug

SEQ ID NO: 966797 - RNA, 19 nt, Artificial Sequence
  Description of Artificial Sequence: Synthetic oligonucleotide
  Antisense strand to SEQ ID NO: 966796
cacaaagacacuaucaugc

SEQ ID NO: 966798 - RNA, 19 nt, Artificial Sequence
  Description of Artificial Sequence: Synthetic oligonucleotide
  Sense strand starting at position 3936 of SEQ ID NO: 913953
acacauggcugacaucaga

SEQ ID NO: 966799 - RNA, 19 nt, Artificial Sequence
  Description of Artificial Sequence: Synthetic oligonucleotide
  Antisense strand to SEQ ID NO: 966798
ucugaugucagccaugugu

SEQ ID NO: 966800 - RNA, 19 nt, Artificial Sequence
  Description of Artificial Sequence: Synthetic oligonucleotide
  Sense strand starting at position 3487 of SEQ ID NO: 913953
ggcuguguguagucacaca

SEQ ID NO: 966801 - RNA, 19 nt, Artificial Sequence
  Description of Artificial Sequence: Synthetic oligonucleotide
  Antisense strand to SEQ ID NO: 966800
ugugugacuacacacagcc

SEQ ID NO: 966802 - RNA, 19 nt, Artificial Sequence
  Description of Artificial Sequence: Synthetic oligonucleotide
  Sense strand starting at position 2061 of SEQ ID NO: 913953
ggccgccagucauucuauu

SEQ ID NO: 966803 - RNA, 19 nt, Artificial Sequence
  Description of Artificial Sequence: Synthetic oligonucleotide
  Antisense strand to SEQ ID NO: 966802
aauagaaugacuggcggcc

SEQ ID NO: 966804 - RNA, 19 nt, Artificial Sequence
  Description of Artificial Sequence: Synthetic oligonucleotide
  Sense strand starting at position 415 of SEQ ID NO: 913953
cagagcuugucacacaaug

SEQ ID NO: 966805 - RNA, 19 nt, Artificial Sequence
  Description of Artificial Sequence: Synthetic oligonucleotide
  Antisense strand to SEQ ID NO: 966804
cauugugugacaagcucug

SEQ ID NO: 966806 - RNA, 19 nt, Artificial Sequence
  Description of Artificial Sequence: Synthetic oligonucleotide
  Sense strand starting at position 1097 of SEQ ID NO: 913953
gaaggaaucugcuagcucu

SEQ ID NO: 966807 - RNA, 19 nt, Artificial Sequence
  Description of Artificial Sequence: Synthetic oligonucleotide
  Antisense strand to SEQ ID NO: 966806
agagcuagcagauuccuuc

SEQ ID NO: 966808 - RNA, 19 nt, Artificial Sequence
  Description of Artificial Sequence: Synthetic oligonucleotide
  Sense strand starting at position 3700 of SEQ ID NO: 913953
ucuguaggauucugcccaa

SEQ ID NO: 966809 - RNA, 19 nt, Artificial Sequence
  Description of Artificial Sequence: Synthetic oligonucleotide
  Antisense strand to SEQ ID NO: 966808
uugggcagaauccuacaga

SEQ ID NO: 966810 - RNA, 19 nt, Artificial Sequence
  Description of Artificial Sequence: Synthetic oligonucleotide
  Sense strand starting at position 219 of SEQ ID NO: 913953
gguauagaauugugcucca

SEQ ID NO: 966811 - RNA, 19 nt, Artificial Sequence
  Description of Artificial Sequence: Synthetic oligonucleotide
  Antisense strand to SEQ ID NO: 966810
uggagcacaauucuauacc

SEQ ID NO: 966812 - RNA, 19 nt, Artificial Sequence
  Description of Artificial Sequence: Synthetic oligonucleotide
  Sense strand starting at position 3077 of SEQ ID NO: 913954
agaguagcaccuuaaccaa

SEQ ID NO: 966813 - RNA, 19 nt, Artificial Sequence
  Description of Artificial Sequence: Synthetic oligonucleotide
  Antisense strand to SEQ ID NO: 966812
uugguuaaggugcuacucu

SEQ ID NO: 966814 - RNA, 19 nt, Artificial Sequence
  Description of Artificial Sequence: Synthetic oligonucleotide
  Sense strand starting at position 3711 of SEQ ID NO: 913954
gaaucaugcccagauacga

SEQ ID NO: 966815 - RNA, 19 nt, Artificial Sequence
  Description of Artificial Sequence: Synthetic oligonucleotide
  Antisense strand to SEQ ID NO: 966814
ucguaucugggcaugauuc

SEQ ID NO: 966816 - RNA, 19 nt, Artificial Sequence
  Description of Artificial Sequence: Synthetic oligonucleotide
  Sense strand starting at position 1319 of SEQ ID NO: 913954
ccggauggucuugaugaag

SEQ ID NO: 966817 - RNA, 19 nt, Artificial Sequence
  Description of Artificial Sequence: Synthetic oligonucleotide
  Antisense strand to SEQ ID NO: 966816
cuucaucaagaccauccgg

SEQ ID NO: 966818 - RNA, 19 nt, Artificial Sequence
  Description of Artificial Sequence: Synthetic oligonucleotide
  Sense strand starting at position 501 of SEQ ID NO: 913954
uacuguguccaggaacaau

SEQ ID NO: 966819 - RNA, 19 nt, Artificial Sequence
  Description of Artificial Sequence: Synthetic oligonucleotide
  Antisense strand to SEQ ID NO: 966818
auuguuccuggacacagua

SEQ ID NO: 966820 - RNA, 19 nt, Artificial Sequence
  Description of Artificial Sequence: Synthetic oligonucleotide
  Sense strand starting at position 3210 of SEQ ID NO: 913954
gcaggagucagauauccca

SEQ ID NO: 966821 - RNA, 19 nt, Artificial Sequence
  Description of Artificial Sequence: Synthetic oligonucleotide
  Antisense strand to SEQ ID NO: 966820
ugggauaucugacuccugc

SEQ ID NO: 966822 - RNA, 19 nt, Artificial Sequence
  Description of Artificial Sequence: Synthetic oligonucleotide
  Sense strand starting at position 496 of SEQ ID NO: 913954
gcguguacuguguccagga

SEQ ID NO: 966823 - RNA, 19 nt, Artificial Sequence
  Description of Artificial Sequence: Synthetic oligonucleotide
  Antisense strand to SEQ ID NO: 966822
uccuggacacaguacacgc

SEQ ID NO: 966824 - RNA, 19 nt, Artificial Sequence
  Description of Artificial Sequence: Synthetic oligonucleotide
  Sense strand starting at position 3206 of SEQ ID NO: 913954
uccugcaggagucagauau

SEQ ID NO: 966825 - RNA, 19 nt, Artificial Sequence
  Description of Artificial Sequence: Synthetic oligonucleotide
  Antisense strand to SEQ ID NO: 966824
auaucugacuccugcagga

SEQ ID NO: 966826 - RNA, 19 nt, Artificial Sequence
  Description of Artificial Sequence: Synthetic oligonucleotide
  Sense strand starting at position 421 of SEQ ID NO: 913954
gugucaaaccaucaaagca

SEQ ID NO: 966827 - RNA, 19 nt, Artificial Sequence
  Description of Artificial Sequence: Synthetic oligonucleotide
  Antisense strand to SEQ ID NO: 966826
ugcuuugaugguuugacac

SEQ ID NO: 966828 - RNA, 19 nt, Artificial Sequence
  Description of Artificial Sequence: Synthetic oligonucleotide
  Sense strand starting at position 936 of SEQ ID NO: 913954
uuguaauucgguagggugu

SEQ ID NO: 966829 - RNA, 19 nt, Artificial Sequence
  Description of Artificial Sequence: Synthetic oligonucleotide
  Antisense strand to SEQ ID NO: 966828
acacccuaccgaauuacaa

SEQ ID NO: 966830 - RNA, 19 nt, Artificial Sequence
  Description of Artificial Sequence: Synthetic oligonucleotide
  Sense strand starting at position 3152 of SEQ ID NO: 913954
cuacuuagugguuacauca

SEQ ID NO: 966831 - RNA, 19 nt, Artificial Sequence
  Description of Artificial Sequence: Synthetic oligonucleotide
  Antisense strand to SEQ ID NO: 966830
ugauguaaccacuaaguag

SEQ ID NO: 966832 - RNA, 19 nt, Artificial Sequence
  Description of Artificial Sequence: Synthetic oligonucleotide
  Sense strand starting at position 3609 of SEQ ID NO: 913954
agccaaggauucucuuaac

SEQ ID NO: 966833 - RNA, 19 nt, Artificial Sequence
  Description of Artificial Sequence: Synthetic oligonucleotide
  Antisense strand to SEQ ID NO: 966832
guuaagagaauccuuggcu

SEQ ID NO: 966834 - RNA, 19 nt, Artificial Sequence
  Description of Artificial Sequence: Synthetic oligonucleotide
  Sense strand starting at position 3618 of SEQ ID NO: 913954
uucucuuaacuguagguga

SEQ ID NO: 966835 - RNA, 19 nt, Artificial Sequence
  Description of Artificial Sequence: Synthetic oligonucleotide
  Antisense strand to SEQ ID NO: 966834
ucaccuacaguuaagagaa

SEQ ID NO: 966836 - RNA, 19 nt, Artificial Sequence
  Description of Artificial Sequence: Synthetic oligonucleotide
  Sense strand starting at position 2916 of SEQ ID NO: 913954
uggagccugguuuaucuaa

SEQ ID NO: 966837 - RNA, 19 nt, Artificial Sequence
  Description of Artificial Sequence: Synthetic oligonucleotide
  Antisense strand to SEQ ID NO: 966836
uuagauaaaccaggcucca

SEQ ID NO: 966838 - RNA, 19 nt, Artificial Sequence
  Description of Artificial Sequence: Synthetic oligonucleotide
  Sense strand starting at position 2758 of SEQ ID NO: 913954
uugccaagugauuggaaga

SEQ ID NO: 966839 - RNA, 19 nt, Artificial Sequence
  Description of Artificial Sequence: Synthetic oligonucleotide
  Antisense strand to SEQ ID NO: 966838
ucuuccaaucacuuggcaa

SEQ ID NO: 966840 - RNA, 19 nt, Artificial Sequence
  Description of Artificial Sequence: Synthetic oligonucleotide
  Sense strand starting at position 2759 of SEQ ID NO: 913954
ugccaagugauuggaagau

SEQ ID NO: 966841 - RNA, 19 nt, Artificial Sequence
  Description of Artificial Sequence: Synthetic oligonucleotide
  Antisense strand to SEQ ID NO: 966840
aucuuccaaucacuuggca

SEQ ID NO: 966842 - RNA, 19 nt, Artificial Sequence
  Description of Artificial Sequence: Synthetic oligonucleotide
  Sense strand starting at position 385 of SEQ ID NO: 913954
auuccuuugcaagaguuac

SEQ ID NO: 966843 - RNA, 19 nt, Artificial Sequence
  Description of Artificial Sequence: Synthetic oligonucleotide
  Antisense strand to SEQ ID NO: 966842
guaacucuugcaaaggaau

SEQ ID NO: 966844 - RNA, 19 nt, Artificial Sequence
  Description of Artificial Sequence: Synthetic oligonucleotide
  Sense strand starting at position 3708 of SEQ ID NO: 913954
accgaaucaugcccagaua

SEQ ID NO: 966845 - RNA, 19 nt, Artificial Sequence
  Description of Artificial Sequence: Synthetic oligonucleotide
  Antisense strand to SEQ ID NO: 966844
uaucugggcaugauucggu

SEQ ID NO: 966846 - RNA, 19 nt, Artificial Sequence
  Description of Artificial Sequence: Synthetic oligonucleotide
  Sense strand starting at position 25 of SEQ ID NO: 913954
ccaucugcuguggaaagua

SEQ ID NO: 966847 - RNA, 19 nt, Artificial Sequence
  Description of Artificial Sequence: Synthetic oligonucleotide
  Antisense strand to SEQ ID NO: 966846
uacuuuccacagcagaugg

SEQ ID NO: 966848 - RNA, 19 nt, Artificial Sequence
  Description of Artificial Sequence: Synthetic oligonucleotide
  Sense strand starting at position 951 of SEQ ID NO: 913954
gugugcuugcgcuugauga

SEQ ID NO: 966849 - RNA, 19 nt, Artificial Sequence
  Description of Artificial Sequence: Synthetic oligonucleotide
  Antisense strand to SEQ ID NO: 966848
ucaucaagcgcaagcacac

SEQ ID NO: 966850 - RNA, 19 nt, Artificial Sequence
  Description of Artificial Sequence: Synthetic oligonucleotide
  Sense strand starting at position 3695 of SEQ ID NO: 913954
cuuaucaugccuuaccgaa

SEQ ID NO: 966851 - RNA, 19 nt, Artificial Sequence
  Description of Artificial Sequence: Synthetic oligonucleotide
  Antisense strand to SEQ ID NO: 966850
uucgguaaggcaugauaag

SEQ ID NO: 966852 - RNA, 19 nt, Artificial Sequence
  Description of Artificial Sequence: Synthetic oligonucleotide
  Sense strand starting at position 381 of SEQ ID NO: 913954
aaguauuccuuugcaagag

SEQ ID NO: 966853 - RNA, 19 nt, Artificial Sequence
  Description of Artificial Sequence: Synthetic oligonucleotide
  Antisense strand to SEQ ID NO: 966852
cucuugcaaaggaauacuu

SEQ ID NO: 966854 - RNA, 19 nt, Artificial Sequence
  Description of Artificial Sequence: Synthetic oligonucleotide
  Sense strand starting at position 961 of SEQ ID NO: 913954
gcuugaugaucuucuugag

SEQ ID NO: 966855 - RNA, 19 nt, Artificial Sequence
  Description of Artificial Sequence: Synthetic oligonucleotide
  Antisense strand to SEQ ID NO: 966854
cucaagaagaucaucaagc

SEQ ID NO: 966856 - RNA, 19 nt, Artificial Sequence
  Description of Artificial Sequence: Synthetic oligonucleotide
  Sense strand starting at position 2681 of SEQ ID NO: 913954
cgagguggaucuucgaaau

SEQ ID NO: 966857 - RNA, 19 nt, Artificial Sequence
  Description of Artificial Sequence: Synthetic oligonucleotide
  Antisense strand to SEQ ID NO: 966856
auuucgaagauccaccucg

SEQ ID NO: 966858 - RNA, 19 nt, Artificial Sequence
  Description of Artificial Sequence: Synthetic oligonucleotide
  Sense strand starting at position 2918 of SEQ ID NO: 913954
gagccugguuuaucuaaca

SEQ ID NO: 966859 - RNA, 19 nt, Artificial Sequence
  Description of Artificial Sequence: Synthetic oligonucleotide
  Antisense strand to SEQ ID NO: 966858
uguuagauaaaccaggcuc

SEQ ID NO: 966860 - RNA, 19 nt, Artificial Sequence
  Description of Artificial Sequence: Synthetic oligonucleotide
  Sense strand starting at position 2692 of SEQ ID NO: 913954
uucgaaauuucagggagga

SEQ ID NO: 966861 - RNA, 19 nt, Artificial Sequence
  Description of Artificial Sequence: Synthetic oligonucleotide
  Antisense strand to SEQ ID NO: 966860
uccucccugaaauuucgaa

SEQ ID NO: 966862 - RNA, 19 nt, Artificial Sequence
  Description of Artificial Sequence: Synthetic oligonucleotide
  Sense strand starting at position 3147 of SEQ ID NO: 913954
ucugacuacuuagugguua

SEQ ID NO: 966863 - RNA, 19 nt, Artificial Sequence
  Description of Artificial Sequence: Synthetic oligonucleotide
  Antisense strand to SEQ ID NO: 966862
uaaccacuaaguagucaga

SEQ ID NO: 966864 - RNA, 19 nt, Artificial Sequence
  Description of Artificial Sequence: Synthetic oligonucleotide
  Sense strand starting at position 3620 of SEQ ID NO: 913954
cucuuaacuguaggugauu

SEQ ID NO: 966865 - RNA, 19 nt, Artificial Sequence
  Description of Artificial Sequence: Synthetic oligonucleotide
  Antisense strand to SEQ ID NO: 966864
aaucaccuacaguuaagag

SEQ ID NO: 966866 - RNA, 19 nt, Artificial Sequence
  Description of Artificial Sequence: Synthetic oligonucleotide
  Sense strand starting at position 3241 of SEQ ID NO: 913954
cgauucuggcuguaccuaa

SEQ ID NO: 966867 - RNA, 19 nt, Artificial Sequence
  Description of Artificial Sequence: Synthetic oligonucleotide
  Antisense strand to SEQ ID NO: 966866
uuagguacagccagaaucg

SEQ ID NO: 966868 - RNA, 19 nt, Artificial Sequence
  Description of Artificial Sequence: Synthetic oligonucleotide
  Sense strand starting at position 410 of SEQ ID NO: 913954
ugccuugaaaggugucaaa

SEQ ID NO: 966869 - RNA, 19 nt, Artificial Sequence
  Description of Artificial Sequence: Synthetic oligonucleotide
  Antisense strand to SEQ ID NO: 966868
uuugacaccuuucaaggca

SEQ ID NO: 966870 - RNA, 19 nt, Artificial Sequence
  Description of Artificial Sequence: Synthetic oligonucleotide
  Sense strand starting at position 3761 of SEQ ID NO: 913954
uaagauaggugucugcuga

SEQ ID NO: 966871 - RNA, 19 nt, Artificial Sequence
  Description of Artificial Sequence: Synthetic oligonucleotide
  Antisense strand to SEQ ID NO: 966870
ucagcagacaccuaucuua

SEQ ID NO: 966872 - RNA, 19 nt, Artificial Sequence
  Description of Artificial Sequence: Synthetic oligonucleotide
  Sense strand starting at position 3810 of SEQ ID NO: 913954
uucggagaucuuggcaacu

SEQ ID NO: 966873 - RNA, 19 nt, Artificial Sequence
  Description of Artificial Sequence: Synthetic oligonucleotide
  Antisense strand to SEQ ID NO: 966872
aguugccaagaucuccgaa

SEQ ID NO: 966874 - RNA, 19 nt, Artificial Sequence
  Description of Artificial Sequence: Synthetic oligonucleotide
  Sense strand starting at position 1495 of SEQ ID NO: 913954
ggaugguggcguugaggaa

SEQ ID NO: 966875 - RNA, 19 nt, Artificial Sequence
  Description of Artificial Sequence: Synthetic oligonucleotide
  Antisense strand to SEQ ID NO: 966874
uuccucaacgccaccaucc

SEQ ID NO: 966876 - RNA, 19 nt, Artificial Sequence
  Description of Artificial Sequence: Synthetic oligonucleotide
  Sense strand starting at position 2911 of SEQ ID NO: 913954
cagaguggagccugguuua

SEQ ID NO: 966877 - RNA, 19 nt, Artificial Sequence
  Description of Artificial Sequence: Synthetic oligonucleotide
  Antisense strand to SEQ ID NO: 966876
uaaaccaggcuccacucug

SEQ ID NO: 966878 - RNA, 19 nt, Artificial Sequence
  Description of Artificial Sequence: Synthetic oligonucleotide
  Sense strand starting at position 3199 of SEQ ID NO: 913954
guuccaguccugcaggagu

SEQ ID NO: 966879 - RNA, 19 nt, Artificial Sequence
  Description of Artificial Sequence: Synthetic oligonucleotide
  Antisense strand to SEQ ID NO: 966878
acuccugcaggacuggaac

SEQ ID NO: 966880 - RNA, 19 nt, Artificial Sequence
  Description of Artificial Sequence: Synthetic oligonucleotide
  Sense strand starting at position 930 of SEQ ID NO: 913954
cugaucuuguaauucggua

SEQ ID NO: 966881 - RNA, 19 nt, Artificial Sequence
  Description of Artificial Sequence: Synthetic oligonucleotide
  Antisense strand to SEQ ID NO: 966880
uaccgaauuacaagaucag

SEQ ID NO: 966882 - RNA, 19 nt, Artificial Sequence
  Description of Artificial Sequence: Synthetic oligonucleotide
  Sense strand starting at position 2741 of SEQ ID NO: 913954
ugcauagugaaacgaguuu

SEQ ID NO: 966883 - RNA, 19 nt, Artificial Sequence
  Description of Artificial Sequence: Synthetic oligonucleotide
  Antisense strand to SEQ ID NO: 966882
aaacucguuucacuaugca

SEQ ID NO: 966884 - RNA, 19 nt, Artificial Sequence
  Description of Artificial Sequence: Synthetic oligonucleotide
  Sense strand starting at position 3870 of SEQ ID NO: 913954
ggcugcucucugggaucua

SEQ ID NO: 966885 - RNA, 19 nt, Artificial Sequence
  Description of Artificial Sequence: Synthetic oligonucleotide
  Antisense strand to SEQ ID NO: 966884
uagaucccagagagcagcc

SEQ ID NO: 966886 - RNA, 19 nt, Artificial Sequence
  Description of Artificial Sequence: Synthetic oligonucleotide
  Sense strand starting at position 973 of SEQ ID NO: 913954
ucuugagcugguugacgau

SEQ ID NO: 966887 - RNA, 19 nt, Artificial Sequence
  Description of Artificial Sequence: Synthetic oligonucleotide
  Antisense strand to SEQ ID NO: 966886
aucgucaaccagcucaaga

SEQ ID NO: 966888 - RNA, 19 nt, Artificial Sequence
  Description of Artificial Sequence: Synthetic oligonucleotide
  Sense strand starting at position 1054 of SEQ ID NO: 913954
gcgggucuuccacgaagga
